United States Patent Application Publication US 2025/0333767 A1 - sequence listing, part 4

SEQ ID NO: 26881 - protein, 978 aa, synthetic construct
  REGION 1..978: note = engineered CasX variant
QEIKRINKIRRRLVKDSNTKKAGKTGPMKTLLVRVMTPDLRERLENLRKKPENIPQPISNTSRANLNKLLTDYTEMKKAILHVYWEEFQKDPVGLMSRVAQPASKKIDQNKLKPEMDEKGNLTTAGFACSQCGQPLFVYKLEQVSEKGKAYTNYFGRCNVAEHEKLILLAQLKPEKDSDEAVTYSLGKFGQRALDFYSIHVTKESTHPVKPLAQIAGNRYASGPVGKALSDACMGTIASFLSKYQDIIIEHQKVVKGNQKRLESLRELAGKENLEYPSVTLPPQPHTKEGVDAYNEVIARVRMWVNLNLWQKLKLSRDDAKPLLRLKGFPSFPLVERQANEVDWWDMVCNVKKLINEKKEDGKVFWQNLAGYKRQEALRPYLSSEEDRKKGKKFARYQLGDLLLHLEKKHGEDWGKVYDEAWERIDKKVEGLSKHIKLEEERRSEDAQSKAALTDWLRAKASFVIEGLKEADKDEFCRCELKLQKWYGDLRGKPFAIEAENSILDISGFSKQYNCAFIWQKDGVKKLNLYLIINYFKGGKLRFKKIKPEAFEANRFYTVINKKSGEIVPMEVNFNFDDPNLIILPLAFGKRQGREFIWNDLLSLETGSLKLANGRVIEKTLYNRRTRQDEPALFVALTFERREVLDSSNIKPMNLIGVDRGENIPAVIALTDPEGCPLSRFEDSLGNPTHILRIGESYKEKQRIIQAKKEVEQRRAGGYSRKYASKAKNLADDMVRNTARDLLYYAVTQDAMLIFENLSRGFGRQGKRTFMAERQYTRMEDWLTAKLAYEGLPSKTYLSKTLAQYTSKTCSNCGFTITSADYDRVLEKLKKTATGWMTTINGKELKVEGQITYYNRYKRQNVVKDLSVELDRLSEESVNNDISSWTKGRSGEALSLLKKRFSHRPVQEKFVCLNCGFETHADEQAALNIARSWLFLRSQEYKKYQTNKTTGNTDKRAFVETWQSFYRKKLKEVWKPAV

SEQ ID NO: 26882 - protein, 978 aa, synthetic construct
  REGION 1..978: note = engineered CasX variant
QEIKRINKIRRRLVKDSNTKKAGKTGPMKTLLVRVMTPDLRERLENLRKKPENIPQPISNTSRANLNKLLTDYTEMKKAILHVYWEEFQKDPVGLMSRVAQPASKKIDQNKLKPEMDEKGNLTTAGFACSQCGQPLFVYKLEQVSEKGKAYTNYFGRCNVAEHEKLILLAQLKPEKDSDEAVTYSLGKFGQRALDFYSIHVTKESTHPVKPLAQIAGNRYASGPVGKALSDACMGTIASFLSKYQDIIIEHQKVVKGNQKRLESLRELAGKENLEYPSVTLPPQPHTKEGVDAYNEVIARVRMWVNLNLWQKLKLSRDDAKPLLRLKGFPSFPLVERQANEVDWWDMVCNVKKLINEKKEDGKVFWQNLAGYKRQEALRPYLSSEEDRKKGKKFARYQLGDLLLHLEKKHGEDWGKVYDEAWERIDKKVEGLSKHIKLEEERRSEDAQSKAALTDWLRAKASFVIEGLKEADKDEFCRCELKLQKWYGDLRGKPFAIEAENSILDISGFSKQYNCAFIWQKDGVKKLNLYLIINYFKGGKLRFKKIKPEAFEANRFYTVINKKSGEIVPMEVNFNFDDPNLIILPLAFGKRQGREFIWNDLLSLETGSLKLANGRVIEKTLYNRRTRQDEPALFVALTFERREVLDSSNIKPMNLIGVDRGENIPAVIALTDPEGCPLSRFEDSLGNPTHILRIGASYKEKQRTIQAKKEVEQRRAGGYSRKYASKAKNLADDMVRNTARDLLYYAVTQDAMLIFENLSRGFGRQGKRTFMAERQYTRMEDWLTAKLAYEGLPSKTYLSKTLAQYTSKTCSNCGFTITSADYDRVLEKLKKTATGWMTTINGKELKVEGQITYYNRYKRQNVVKDLSVELDRLSEESVNNDISSWTKGRSGEALSLLKKRFSHRPVQEKFVCLNCGFETHADEQAALNIARSWLFLRSQEYKKYQTNKTTGNTDKRAFVETWQSFYRKKLKEVWKPAV

SEQ ID NO: 26883 - protein, 978 aa, synthetic construct
  REGION 1..978: note = engineered CasX variant
QEIKRINKIRRRLVKDSNTKKAGKTGPMKTLLVRVMTPDLRERLENLRKKPENIPQPISNTSRANLNKLLTDYTEMKKAILHVYWEEFQKDPVGLMSRVAQPASKKIDQNKLKPEMDEKGNLTTAGFACSQCGQPLFVYKLEQVSEKGKAYTNYFGRCNVAEHEKLILLAQLKPEKDSDEAVTYSLGKFGQRALDFYSIHVTKESTHPVKPLAQIAGNRYASGPVGKALSDACMGTIASFLSKYQDIIIEHQKVVKGNQKRLESLRELAGKENLEYPSVTLPPQPHTKEGVDAYNEVIARVRMWVNLNLWQKLKLSRDDAKPLLRLKGFPSFPLVERQANEVDWWDMVCNVKKLINEKKEDGKVFWQNLAGYKRQEALRPYLSSEEDRKKGKKFARYQLGDLLLHLEKKHGEDWGKVYDEAWERIDKKVEGLSKHIKLEEERRSEDAQSKAALTDWLRAKASFVIEGLKEADKDEFCRCELKLQKWYGDLRGKPFAIEAENSILDISGFSKQYNCAFIWQKDGVKKLNLYLIINYFKGGKLRFKKIKPEAFEANRFYTVINKKSGEIVPMEVNFNFDDPNLIILPLAFGKRQGREFIWNDLLSLETGSLKLANGRVIEKTLYNRRTRQDEPALFVALTFERREVLDSSNIKPMNLIGVDRGENIPAVIALTDPEGCPLSRFDDSLGNPTHILRIGESYKEKQRTIQAKKEVEQSRAGGYSRKYASKAKNLADDMVRNTARDLLYYAVTQDAMLIFENLSRGFGRQGKRTFMAERQYTRMEDWLTAKLAYEGLPSKTYLSKTLAQYTSKTCSNCGFTITSADYDRVLEKLKKTATGWMTTINGKELKVEGQITYYNRYKRQNVVKDLSVELDRLSEESVNNDISSWTKGRSGEALSLLKKRFSHRPVQEKFVCLNCGFETHADEQAALNIARSWLFLRSQEYKKYQTNKTTGNTDKRAFVETWQSFYRKKLKEVWKPAV

SEQ ID NO: 26884 - protein, 978 aa, synthetic construct
  REGION 1..978: note = engineered CasX variant
QEIKRINKIRRRLVKDSNTKKAGKTGPMKTLLVRVMTPDLRERLENLRKKPENIPQPISNTSRANLNKLLTDYTEMKKAILHVYWEEFQKDPVGLMSRVAQPASKKIDQNKLKPEMDEKGNLTTAGFACSQCGQPLFVYKLEQVSEKGKAYTNYFGRCNVAEHEKLILLAQLKPEKDSDEAVTYSLGKFGQRALDFYSIHVTKESTHPVKPLAQIAGNRYASGPVGKALSDACMGTIASFLSKYQDIIIEHQKVVKGNQKRLESLRELAGKENLEYPSVTLPPQPHTKEGVDAYNEVIARVRMWVNLNLWQKLKLSRDDAKPLLRLKGFPSFPLVERQANEVDWWDMVCNVKKLINEKKEDGKVFWQNLAGYKRQEALRPYLSSEEDRKKGKKFARYQLGDLLLHLEKKHGEDWGKVYDEAWERIDKKVEGLSKHIKLEEERRSEDAQSKAALTDWLRAKASFVIEGLKEADKDEFCRCELKLQKWYGDLRGKPFAIEAENSILDISGFSKQYNCAFIWQKDGVKKLNLYLIINYFKGGKLRFKKIKPEAFEANRFYTVINKKSGEIVPMEVNFNFDDPNLIILPLAFGKRQGREFIWNDLLSLETGSLKLANGRVIEKTLYNRRTRQDEPALFVALTFERREVLDSSNIKPMNLIGVDRGENIPAVIALTDPEGCPLSRFCDSNGNPTHILRIGESYKEKQRTIQAKKEVEQRRAGGYSRKYASKAKNLADDMVRNTARDLLYYAVTQDAMLIFENLSRGFGRQGKRTFMAERQYTRMEDWLTAKLAYEGLPSKTYLSKTLAQYTSKTCSNCGFTITSADYDRVLEKLKKTATGWMTTINGKELKVEGQITYYNRYKRQNVVKDLSVELDRLSEESVNNDISSWTKGRSGEALSLLKKRFSHRPVQEKFVCLNCGFETHADEQAALNIARSWLFLRSQEYKKYQTNKTTGNTDKRAFVETWQSFYRKKLKEVWKPAV

SEQ ID NO: 26885 - protein, 978 aa, synthetic construct
  REGION 1..978: note = engineered CasX variant
QEIKRINKIRRRLVKDSNTKKAGKTGPMKTLLVRVMTPDLRERLENLRKKPENIPQPISNTSRANLNKLLTDYTEMKKAILHVYWEEFQKDPVGLMSRVAQPASKKIDQNKLKPEMDEKGNLTTAGFACSQCGQPLFVYKLEQVSEKGKAYTNYFGRCNVAEHEKLILLAQLKPEKDSDEAVTYSLGKFGQRALDFYSIHVTKESTHPVKPLAQIAGNRYASGPVGKALSDACMGTIASFLSKYQDIIIEHQKVVKGNQKRLESLRELAGKENLEYPSVTLPPQPHTKEGVDAYNEVIARVRMWVNLNLWQKLKLSRDDAKPLLRLKGFPSFPLVERQANEVDWWDMVCNVKKLINEKKEDGKVFWQNLAGYKRQEALRPYLSSEEDRKKGKKFARYQLGDLLLHLEKKHGEDWGKVYDEAWERIDKKVEGLSKHIKLEEERRSEDAQSKAALTDWLRAKASFVIEGLKEADKDEFCRCELKLQKWYGDLRGKPFAIEAENSILDISGFSKQYNCAFIWQKDGVKKLNLYLIINYFKGGKLRFKKIKPEAFEANRFYTVINKKSGEIVPMEVNFNFDDPNLIILPLAFGKRQGREFIWNDLLSLETGSLKLANGRVIEKTLYNRRTRQDEPALFVALTFERREVLDSSNIKPMNLIGVDRGENIPAVIALTDPEGCPLSRFCDSLGNPTHILRIGNSYKEKQRTIQAKKEVEQRRAGGYSRKYASKAKNLADDMVRNTARDLLYYAVTQDAMLIFENLSRGFGRQGKRTFMAERQYTRMEDWLTAKLAYEGLPSKTYLSKTLAQYTSKTCSNCGFTITSADYDRVLEKLKKTATGWMTTINGKELKVEGQITYYNRYKRQNVVKDLSVELDRLSEESVNNDISSWTKGRSGEALSLLKKRFSHRPVQEKFVCLNCGFETHADEQAALNIARSWLFLRSQEYKKYQTNKTTGNTDKRAFVETWQSFYRKKLKEVWKPAV

SEQ ID NO: 26886 - protein, 978 aa, synthetic construct
  REGION 1..978: note = engineered CasX variant
QEIKRINKIRRRLVKDSNTKKAGKTGPMKTLLVRVMTPDLRERLENLRKKPENIPQPISNTSRANLNKLLTDYTEMKKAILHVYWEEFQKDPVGLMSRVAQPASKKIDQNKLKPEMDEKGNLTTAGFACSQCGQPLFVYKLEQVSEKGKAYTNYFGRCNVAEHEKLILLAQLKPEKDSDEAVTYSLGKFGQRALDFYSIHVTKESTHPVKPLAQIAGNRYASGPVGKALSDACMGTIASFLSKYQDIIIEHQKVVKGNQKRLESLRELAGKENLEYPSVTLPPQPHTKEGVDAYNEVIARVRMWVNLNLWQKLKLSRDDAKPLLRLKGFPSFPLVERQANEVDWWDMVCNVKKLINEKKEDGKVFWQNLAGYKRQEALRPYLSSEEDRKKGKKFARYQLGDLLLHLEKKHGEDWGKVYDEAWERIDKKVEGLSKHIKLEEERRSEDAQSKAALTDWLRAKASFVIEGLKEADKDEFCRCELKLQKWYGDLRGKPFAIEAENSILDISGFSKQYNCAFIWQKDGVKKLNLYLIINYFKGGKLRFKKIKPEAFEANRFYTVINKKSGEIVPMEVNFNFDDPNLIILPLAFGKRQGREFIWNDLLSLETGSLKLANGRVIEKTLYNRRTRQDEPALFVALTFERREVLDSSNIKPMNLIGVDRGENIPAVIALTDPEGCPLSRFCDSLGNPTHILRIGESYKHKQRTIQAKKEVEQRRAGGYSRKYASKAKNLADDMVRNTARDLLYYAVTQDAMLIFENLSRGFGRQGKRTFMAERQYTRMEDWLTAKLAYEGLPSKTYLSKTLAQYTSKTCSNCGFTITSADYDRVLEKLKKTATGWMTTINGKELKVEGQITYYNRYKRQNVVKDLSVELDRLSEESVNNDISSWTKGRSGEALSLLKKRFSHRPVQEKFVCLNCGFETHADEQAALNIARSWLFLRSQEYKKYQTNKTTGNTDKRAFVETWQSFYRKKLKEVWKPAV

SEQ ID NO: 26887 - protein, 978 aa, synthetic construct
  REGION 1..978: note = engineered CasX variant
QEIKRINKIRRRLVKDSNTKKAGKTGPMKTLLVRVMTPDLRERLENLRKKPENIPQPISNTSRANLNKLLTDYTEMKKAILHVYWEEFQKDPVGLMSRVAQPASKKIDQNKLKPEMDEKGNLTTAGFACSQCGQPLFVYKLEQVSEKGKAYTNYFGRCNVAEHEKLILLAQLKPEKDSDEAVTYSLGKFGQRALDFYSIHVTKESTHPVKPLAQIAGNRYASGPVGKALSDACMGTIASFLSKYQDIIIEHQKVVKGNQKRLESLRELAGKENLEYPSVTLPPQPHTKEGVDAYNEVIARVRMWVNLNLWQKLKLSRDDAKPLLRLKGFPSFPLVERQANEVDWWDMVCNVKKLINEKKEDGKVFWQNLAGYKRQEALRPYLSSEEDRKKGKKFARYQLGDLLLHLEKKHGEDWGKVYDEAWERIDKKVEGLSKHIKLEEERRSEDAQSKAALTDWLRAKASFVIEGLKEADKDEFCRCELKLQKWYGDLRGKPFAIEAENSILDISGFSKQYNCAFIWQKDGVKKLNLYLIINYFKGGKLRFKKIKPEAFEANRFYTVINKKSGEIVPMEVNFNFDDPNLIILPLAFGKRQGREFIWNDLLSLETGSLKLANGRVIEKTLYNRRTRQDEPALFVALTFERREVLDSSNIKPMNLIGVDRGENIPAVIALTDPEGCPLSRFCDSLGNPTHILRIGESYKHKQRCIQAKKEVEQRRAGGYSRKYASKAKNLADDMVRNTARDLLYYAVTQDAMLIFENLSRGFGRQGKRTFMAERQYTRMEDWLTAKLAYEGLPSKTYLSKTLAQYTSKTCSNCGFTITSADYDRVLEKLKKTATGWMTTINGKELKVEGQITYYNRYKRQNVVKDLSVELDRLSEESVNNDISSWTKGRSGEALSLLKKRFSHRPVQEKFVCLNCGFETHADEQAALNIARSWLFLRSQEYKKYQTNKTTGNTDKRAFVETWQSFYRKKLKEVWKPAV

SEQ ID NO: 26888 - protein, 978 aa, synthetic construct
  REGION 1..978: note = engineered CasX variant
QEIKRINKIRRRLVKDSNTKKAGKTGPMKTLLVRVMTPDLRERLENLRKKPENIPQPISNTSRANLNKLLTDYTEMKKAILHVYWEEFQKDPVGLMSRVAQPASKKIDQNKLKPEMDEKGNLTTAGFACSQCGQPLFVYKLEQVSEKGKAYTNYFGRCNVAEHEKLILLAQLKPEKDSDEAVTYSLGKFGQRALDFYSIHVTKESTHPVKPLAQIAGNRYASGPVGKALSDACMGTIASFLSKYQDIIIEHQKVVKGNQKRLESLRELAGKENLEYPSVTLPPQPHTKEGVDAYNEVIARVRMWVNLNLWQKLKLSRDDAKPLLRLKGFPSFPLVERQANEVDWWDMVCNVKKLINEKKEDGKVFWQNLAGYKRQEALRPYLSSEEDRKKGKKFARYQLGDLLLHLEKKHGEDWGKVYDEAWERIDKKVEGLSKHIKLEEERRSEDAQSKAALTDWLRAKASFVIEGLKEADKDEFCRCELKLQKWYGDLRGKPFAIEAENSILDISGFSKQYNCAFIWQKDGVKKLNLYLIINYFKGGKLRFKKIKPEAFEANRFYTVINKKSGEIVPMEVNFNFDDPNLIILPLAFGKRQGREFIWNDLLSLETGSLKLANGRVIEKTLYNRRTRQDEPALFVALTFERREVLDSSNIKPMNLIGVDRGENIPAVIALTDPEGCPLSRFCDSLGNPTHILRIGESYKEKQRTIQQKKEVEQRRAGGYSRKYASKAKNLADDMVRNTARDLLYYAVTQDAMLIFENLSRGFGRQGKRTFMAERQYTRMEDWLTAKLAYEGLPSKTYLSKTLAQYTSKTCSNCGFTITSADYDRVLEKLKKTATGWMTTINGKELKVEGQITYYNRYKRQNVVKDLSVELDRLSEESVNNDISSWTKGRSGEALSLLKKRFSHRPVQEKFVCLNCGFETHADEQAALNIARSWLFLRSQEYKKYQTNKTTGNTDKRAFVETWQSFYRKKLKEVWKPAV

SEQ ID NO: 26889 - protein, 978 aa, synthetic construct
  REGION 1..978: note = engineered CasX variant
QEIKRINKIRRRLVKDSNTKKAGKTGPMKTLLVRVMTPDLRERLENLRKKPENIPQPISNTSRANLNKLLTDYTEMKKAILHVYWEEFQKDPVGLMSRVAQPASKKIDQNKLKPEMDEKGNLTTAGFACSQCGQPLFVYKLEQVSEKGKAYTNYFGRCNVAEHEKLILLAQLKPEKDSDEAVTYSLGKFGQRALDFYSIHVTKESTHPVKPLAQIAGNRYASGPVGKALSDACMGTIASFLSKYQDIIIEHQKVVKGNQKRLESLRELAGKENLEYPSVTLPPQPHTKEGVDAYNEVIARVRMWVNLNLWQKLKLSRDDAKPLLRLKGFPSFPLVERQANEVDWWDMVCNVKKLINEKKEDGKVFWQNLAGYKRQEALRPYLSSEEDRKKGKKFARYQLGDLLLHLEKKHGEDWGKVYDEAWERIDKKVEGLSKHIKLEEERRSEDAQSKAALTDWLRAKASFVIEGLKEADKDEFCRCELKLQKWYGDLRGKPFAIEAENSILDISGFSKQYNCAFIWQKDGVKKLNLYLIINYFKGGKLRFKKIKPEAFEANRFYTVINKKSGEIVPMEVNFNFDDPNLIILPLAFGKRQGREFIWNDLLSLETGSLKLANGRVIEKTLYNRRTRQDEPALFVALTFERREVLDSSNIKPMNLIGVDRGENIPAVIALTDPEGCPLSRFCDSLGNPTHILRIGESYKEKQRTIQAKKSVEQRRAGGYSRKYASKAKNLADDMVRNTARDLLYYAVTQDAMLIFENLSRGFGRQGKRTFMAERQYTRMEDWLTAKLAYEGLPSKTYLSKTLAQYTSKTCSNCGFTITSADYDRVLEKLKKTATGWMTTINGKELKVEGQITYYNRYKRQNVVKDLSVELDRLSEESVNNDISSWTKGRSGEALSLLKKRFSHRPVQEKFVCLNCGFETHADEQAALNIARSWLFLRSQEYKKYQTNKTTGNTDKRAFVETWQSFYRKKLKEVWKPAV

SEQ ID NO: 26890 - protein, 978 aa, synthetic construct
  REGION 1..978: note = engineered CasX variant
QEIKRINKIRRRLVKDSNTKKAGKTGPMKTLLVRVMTPDLRERLENLRKKPENIPQPISNTSRANLNKLLTDYTEMKKAILHVYWEEFQKDPVGLMSRVAQPASKKIDQNKLKPEMDEKGNLTTAGFACSQCGQPLFVYKLEQVSEKGKAYTNYFGRCNVAEHEKLILLAQLKPEKDSDEAVTYSLGKFGQRALDFYSIHVTKESTHPVKPLAQIAGNRYASGPVGKALSDACMGTIASFLSKYQDIIIEHQKVVKGNQKRLESLRELAGKENLEYPSVTLPPQPHTKEGVDAYNEVIARVRMWVNLNLWQKLKLSRDDAKPLLRLKGFPSFPLVERQANEVDWWDMVCNVKKLINEKKEDGKVFWQNLAGYKRQEALRPYLSSEEDRKKGKKFARYQLGDLLLHLEKKHGEDWGKVYDEAWERIDKKVEGLSKHIKLEEERRSEDAQSKAALTDWLRAKASFVIEGLKEADKDEFCRCELKLQKWYGDLRGKPFAIEAENSILDISGFSKQYNCAFIWQKDGVKKLNLYLIINYFKGGKLRFKKIKPEAFEANRFYTVINKKSGEIVPMEVNFNFDDPNLIILPLAFGKRQGREFIWNDLLSLETGSLKLANGRVIEKTLYNRRTRQDEPALFVALTFERREVLDSSNIKPMNLIGVDRGENIPAVIALTDPEGCPLSRFCDSLGNPTHILRIGESYKEKQRTIQAKKEVEQRRAGGYSRKYASKAKNLADDMVRNTARDLLYYAVTQDAMLIFENLSRGFGRQGKRTFMAERQYTRMEDWLTAKLAYEGLPSKTYLSKTLAQYTSKTCSNCGFTITSADYDRVLEKLKKTATGWMTTINGKELKVEGQITYYNRYKRQNVVKDLSVELDRLSEESVNNDISSWTKGRSGEALSLLKKRFSHRPVQEKFVCLNCGFETHADEQAALNIARSWLFLRSQEYKKYQTNKTTGNTDKRAFVETWQSFYRKKLKEVWKPAV

SEQ ID NO: 26891 - protein, 978 aa, synthetic construct
  REGION 1..978: note = engineered CasX variant
QEIKRINKIRRRLVKDSNTKKAGKTGPMKTLLVRVMTPDLRERLENLRKKPENIPQPISNTSRANLNKLLTDYTEMKKAILHVYWEEFQKDPVGLMSRVAQPASKKIDQNKLKPEMDEKGNLTTAGFACSQCGQPLFVYKLEQVSEKGKAYTNYFGRCNVAEHEKLILLAQLKPEKDSDEAVTYSLGKFGQRALDFYSIHVTKESTHPVKPLAQIAGNRYASGPVGKALSDACMGTIASFLSKYQDIIIEHQKVVKGNQKRLESLRELAGKENLEYPSVTLPPQPHTKEGVDAYNEVIARVRMWVNLNLWQKLKLSRDDAKPLLRLKGFPSFPLVERQANEVDWWDMVCNVKKLINEKKEDGKVFWQNLAGYKRQEALRPYLSSEEDRKKGKKFARYQLGDLLLHLEKKHGEDWGKVYDEAWERIDKKVEGLSKHIKLEEERRSEDAQSKAALTDWLRAKASFVIEGLKEADKDEFCRCELKLQKWYGDLRGKPFAIEAENSILDISGFSKQYNCAFIWQKDGVKKLNLYLIINYFKGGKLRFKKIKPEAFEANRFYTVINKKSGEIVPMEVNFNFDDPNLIILPLAFGKRQGREFIWNDLLSLETGSLKLANGRVIEKTLYNRRTRQDEPALFVALTFERREVLDSSNIKPMNLIGVDRGENIPAVIALTDPEGCPLSRFCDSLGNPTHILRIGESYKEKQRQIQAKKEVEQRRAGGYSRKYASKAKNLADDMVRNTARDLLYYAVTQDAMLIFENLSRGFGRQGKRTFMAERQYTRMEDWLTAKLAYEGLPSKTYLSKTLAQYTSKTCSNCGFTITSADYDRVLEKLKKTATGWMTTINGKELKVEGQITYYNRYKRQNVVKDLSVELDRLSEESVNNDISSWTKGRSGEALSLLKKRFSHRPVQEKFVCLNCGFETHADEQAALNIARSWLFLRSQEYKKYQTNKTTGNTDKRAFVETWQSFYRKKLKEVWKPAV

SEQ ID NO: 26892 - protein, 978 aa, synthetic construct
  REGION 1..978: note = engineered CasX variant
QEIKRINKIRRRLVKDSNTKKAGKTGPMKTLLVRVMTPDLRERLENLRKKPENIPQPISNTSRANLNKLLTDYTEMKKAILHVYWEEFQKDPVGLMSRVAQPASKKIDQNKLKPEMDEKGNLTTAGFACSQCGQPLFVYKLEQVSEKGKAYTNYFGRCNVAEHEKLILLAQLKPEKDSDEAVTYSLGKFGQRALDFYSIHVTKESTHPVKPLAQIAGNRYASGPVGKALSDACMGTIASFLSKYQDIIIEHQKVVKGNQKRLESLRELAGKENLEYPSVTLPPQPHTKEGVDAYNEVIARVRMWVNLNLWQKLKLSRDDAKPLLRLKGFPSFPLVERQANEVDWWDMVCNVKKLINEKKEDGKVFWQNLAGYKRQEALRPYLSSEEDRKKGKKFARYQLGDLLLHLEKKHGEDWGKVYDEAWERIDKKVEGLSKHIKLEEERRSEDAQSKAALTDWLRAKASFVIEGLKEADKDEFCRCELKLQKWYGDLRGKPFAIEAENSILDISGFSKQYNCAFIWQKDGVKKLNLYLIINYFKGGKLRFKKIKPEAFEANRFYTVINKKSGEIVPMEVNFNFDDPNLIILPLAFGKRQGREFIWNDLLSLETGSLKLANGRVIEKTLYNRRTRQDEPALFVALTFERREVLDSSNIKPMNLIGVDRGENIPAVIALTDPEGCPLSRFCDSLGNPTHILRIGESYKEKQRCIQAKKEVEQRRAGGYSRKYASKAKNLADDMVRNTARDLLYYAVTQDAMLIFENLSRGFGRQGKRTFMAERQYTRMEDWLTAKLAYEGLPSKTYLSKTLAQYTSKTCSNCGFTITSADYDRVLEKLKKTATGWMTTINGKELKVEGQITYYNRYKRQNVVKDLSVELDRLSEESVNNDISSWTKGRSGEALSLLKKRFSHRPVQEKFVCLNCGFETHADEQAALNIARSWLFLRSQEYKKYQTNKTTGNTDKRAFVETWQSFYRKKLKEVWKPAV

SEQ ID NO: 26893 - protein, 978 aa, synthetic construct
  REGION 1..978: note = engineered CasX variant
QEIKRINKIRRRLVKDSNTKKAGKTGPMKTLLVRVMTPDLRERLENLRKKPENIPQPISNTSRANLNKLLTDYTEMKKAILHVYWEEFQKDPVGLMSRVAQPASKKIDQNKLKPEMDEKGNLTTAGFACSQCGQPLFVYKLEQVSEKGKAYTNYFGRCNVAEHEKLILLAQLKPEKDSDEAVTYSLGKFGQRALDFYSIHVTKESTHPVKPLAQIAGNRYASGPVGKALSDACMGTIASFLSKYQDIIIEHQKVVKGNQKRLESLRELAGKENLEYPSVTLPPQPHTKEGVDAYNEVIARVRMWVNLNLWQKLKLSRDDAKPLLRLKGFPSFPLVERQANEVDWWDMVCNVKKLINEKKEDGKVFWQNLAGYKRQEALRPYLSSEEDRKKGKKFARYQLGDLLLHLEKKHGEDWGKVYDEAWERIDKKVEGLSKHIKLEEERRSEDAQSKAALTDWLRAKASFVIEGLKEADKDEFCRCELKLQKWYGDLRGKPFAIEAENSILDISGFSKQYNCAFIWQKDGVKKLNLYLIINYFKGGKLRFKKIKPEAFEANRFYTVINKKSGEIVPMEVNFNFDDPNLIILPLAFGKRQGREFIWNDLLSLETGSLKLANGRVIEKTLYNRRTRQDEPALFVALTFERREVLDSSNIKPMNLIGVDRGENIPAVIALTDPEGCPLSRFCDSIGNPTHILRIGESYKEKQRTIQAKKEVEQRRAGGYSRKYASKAKNLADDMVRNTARDLLYYAVTQDAMLIFENLSRGFGRQGKRTFMAERQYTRMEDWLTAKLAYEGLPSKTYLSKTLAQYTSKTCSNCGFTITSADYDRVLEKLKKTATGWMTTINGKELKVEGQITYYNRYKRQNVVKDLSVELDRLSEESVNNDISSWTKGRSGEALSLLKKRFSHRPVQEKFVCLNCGFETHADEQAALNIARSWLFLRSQEYKKYQTNKTTGNTDKRAFVETWQSFYRKKLKEVWKPAV

SEQ ID NO: 26894 - protein, 978 aa, synthetic construct
  REGION 1..978: note = engineered CasX variant
QEIKRINKIRRRLVKDSNTKKAGKTGPMKTLLVRVMTPDLRERLENLRKKPENIPQPISNTSRANLNKLLTDYTEMKKAILHVYWEEFQKDPVGLMSRVAQPASKKIDQNKLKPEMDEKGNLTTAGFACSQCGQPLFVYKLEQVSEKGKAYTNYFGRCNVAEHEKLILLAQLKPEKDSDEAVTYSLGKFGQRALDFYSIHVTKESTHPVKPLAQIAGNRYASGPVGKALSDACMGTIASFLSKYQDIIIEHQKVVKGNQKRLESLRELAGKENLEYPSVTLPPQPHTKEGVDAYNEVIARVRMWVNLNLWQKLKLSRDDAKPLLRLKGFPSFPLVERQANEVDWWDMVCNVKKLINEKKEDGKVFWQNLAGYKRQEALRPYLSSEEDRKKGKKFARYQLGDLLLHLEKKHGEDWGKVYDEAWERIDKKVEGLSKHIKLEEERRSEDAQSKAALTDWLRAKASFVIEGLKEADKDEFCRCELKLQKWYGDLRGKPFAIEAENSILDISGFSKQYNCAFIWQKDGVKKLNLYLIINYFKGGKLRFKKIKPEAFEANRFYTVINKKSGEIVPMEVNFNFDDPNLIILPLAFGKRQGREFIWNDLLSLETGSLKLANGRVIEKTLYNRRTRQDEPALFVALTFERREVLDSSNIKPMNLIGVDRGENIPAVIALTDPEGCPLSRFCDSHGNPTHILRIGESYKEKQRTIQAKKEVEQRRAGGYSRKYASKAKNLADDMVRNTARDLLYYAVTQDAMLIFENLSRGFGRQGKRTFMAERQYTRMEDWLTAKLAYEGLPSKTYLSKTLAQYTSKTCSNCGFTITSADYDRVLEKLKKTATGWMTTINGKELKVEGQITYYNRYKRQNVVKDLSVELDRLSEESVNNDISSWTKGRSGEALSLLKKRFSHRPVQEKFVCLNCGFETHADEQAALNIARSWLFLRSQEYKKYQTNKTTGNTDKRAFVETWQSFYRKKLKEVWKPAV

SEQ ID NO: 26895 - protein, 978 aa, synthetic construct
  REGION 1..978: note = engineered CasX variant
QEIKRINKIRRRLVKDSNTKKAGKTGPMKTLLVRVMTPDLRERLENLRKKPENIPQPISNTSRANLNKLLTDYTEMKKAILHVYWEEFQKDPVGLMSRVAQPASKKIDQNKLKPEMDEKGNLTTAGFACSQCGQPLFVYKLEQVSEKGKAYTNYFGRCNVAEHEKLILLAQLKPEKDSDEAVTYSLGKFGQRALDFYSIHVTKESTHPVKPLAQIAGNRYASGPVGKALSDACMGTIASFLSKYQDIIIEHQKVVKGNQKRLESLRELAGKENLEYPSVTLPPQPHTKEGVDAYNEVIARVRMWVNLNLWQKLKLSRDDAKPLLRLKGFPSFPLVERQANEVDWWDMVCNVKKLINEKKEDGKVFWQNLAGYKRQEALRPYLSSEEDRKKGKKFARYQLGDLLLHLEKKHGEDWGKVYDEAWERIDKKVEGLSKHIKLEEERRSEDAQSKAALTDWLRAKASFVIEGLKEADKDEFCRCELKLQKWYGDLRGKPFAIEAENSILDISGFSKQYNCAFIWQKDGVKKLNLYLIINYFKGGKLRFKKIKPEAFEANRFYTVINKKSGEIVPMEVNFNFDDPNLIILPLAFGKRQGREFIWNDLLSLETGSLKLANGRVIEKTLYNRRTRQDEPALFVALTFERREVLDSSNIKPMNLIGVDRGENIPAVIALTDPEGCPLSRFCDSHGNPTHILRIGESYKEKQQTIQAKKEVEQRRAGGYSRKYASKAKNLADDMVRNTARDLLYYAVTQDAMLIFENLSRGFGRQGKRTFMAERQYTRMEDWLTAKLAYEGLPSKTYLSKTLAQYTSKTCSNCGFTITSADYDRVLEKLKKTATGWMTTINGKELKVEGQITYYNRYKRQNVVKDLSVELDRLSEESVNNDISSWTKGRSGEALSLLKKRFSHRPVQEKFVCLNCGFETHADEQAALNIARSWLFLRSQEYKKYQTNKTTGNTDKRAFVETWQSFYRKKLKEVWKPAV

SEQ ID NO: 26896 - protein, 978 aa, synthetic construct
  REGION 1..978: note = engineered CasX variant
QEIKRINKIRRRLVKDSNTKKAGKTGPMKTLLVRVMTPDLRERLENLRKKPENIPQPISNTSRANLNKLLTDYTEMKKAILHVYWEEFQKDPVGLMSRVAQPASKKIDQNKLKPEMDEKGNLTTAGFACSQCGQPLFVYKLEQVSEKGKAYTNYFGRCNVAEHEKLILLAQLKPEKDSDEAVTYSLGKFGQRALDFYSIHVTKESTHPVKPLAQIAGNRYASGPVGKALSDACMGTIASFLSKYQDIIIEHQKVVKGNQKRLESLRELAGKENLEYPSVTLPPQPHTKEGVDAYNEVIARVRMWVNLNLWQKLKLSRDDAKPLLRLKGFPSFPLVERQANEVDWWDMVCNVKKLINEKKEDGKVFWQNLAGYKRQEALRPYLSSEEDRKKGKKFARYQLGDLLLHLEKKHGEDWGKVYDEAWERIDKKVEGLSKHIKLEEERRSEDAQSKAALTDWLRAKASFVIEGLKEADKDEFCRCELKLQKWYGDLRGKPFAIEAENSILDISGFSKQYNCAFIWQKDGVKKLNLYLIINYFKGGKLRFKKIKPEAFEANRFYTVINKKSGEIVPMEVNFNFDDPNLIILPLAFGKRQGREFIWNDLLSLETGSLKLANGRVIEKTLYNRRTRQDEPALFVALTFERREVLDSSNIKPMNLIGVDRGENIPAVIALTDPEGCPLSRFCDSGGNPTHILRIGESYKEKQRTIQAKKEVEQRRAGGYSRKYASKAKNLADDMVRNTARDLLYYAVTQDAMLIFENLSRGFGRQGKRTFMAERQYTRMEDWLTAKLAYEGLPSKTYLSKTLAQYTSKTCSNCGFTITSADYDRVLEKLKKTATGWMTTINGKELKVEGQITYYNRYKRQNVVKDLSVELDRLSEESVNNDISSWTKGRSGEALSLLKKRFSHRPVQEKFVCLNCGFETHADEQAALNIARSWLFLRSQEYKKYQTNKTTGNTDKRAFVETWQSFYRKKLKEVWKPAV

SEQ ID NO: 26897 - protein, 978 aa, synthetic construct
  REGION 1..978: note = engineered CasX variant
QEIKRINKIRRRLVKDSNTKKAGKTGPMKTLLVRVMTPDLRERLENLRKKPENIPQPISNTSRANLNKLLTDYTEMKKAILHVYWEEFQKDPVGLMSRVAQPASKKIDQNKLKPEMDEKGNLTTAGFACSQCGQPLFVYKLEQVSEKGKAYTNYFGRCNVAEHEKLILLAQLKPEKDSDEAVTYSLGKFGQRALDFYSIHVTKESTHPVKPLAQIAGNRYASGPVGKALSDACMGTIASFLSKYQDIIIEHQKVVKGNQKRLESLRELAGKENLEYPSVTLPPQPHTKEGVDAYNEVIARVRMWVNLNLWQKLKLSRDDAKPLLRLKGFPSFPLVERQANEVDWWDMVCNVKKLINEKKEDGKVFWQNLAGYKRQEALRPYLSSEEDRKKGKKFARYQLGDLLLHLEKKHGEDWGKVYDEAWERIDKKVEGLSKHIKLEEERRSEDAQSKAALTDWLRAKASFVIEGLKEADKDEFCRCELKLQKWYGDLRGKPFAIEAENSILDISGFSKQYNCAFIWQKDGVKKLNLYLIINYFKGGKLRFKKIKPEAFEANRFYTVINKKSGEIVPMEVNFNFDDPNLIILPLAFGKRQGREFIWNDLLSLETGSLKLANGRVIEKTLYNRRTRQDEPALFVALTFERREVLDSSNIKPMNLIGVDRGENIPAVIALTDPEGCPLSRFADSLGNPTHIVRIGESYKEKQRTIQAKKEVEQRRAGGYSRKYASKAKNLADDMVRNTARDLLYYAVTQDAMLIFENLSRGFGRQGKRTFMAERQYTRMEDWLTAKLAYEGLPSKTYLSKTLAQYTSKTCSNCGFTITSADYDRVLEKLKKTATGWMTTINGKELKVEGQITYYNRYKRQNVVKDLSVELDRLSEESVNNDISSWTKGRSGEALSLLKKRFSHRPVQEKFVCLNCGFETHADEQAALNIARSWLFLRSQEYKKYQTNKTTGNTDKRAFVETWQSFYRKKLKEVWKPAV

SEQ ID NO: 26898 - protein, 978 aa, synthetic construct
  REGION 1..978: note = engineered CasX variant
QEIKRINKIRRRLVKDSNTKKAGKTGPMKTLLVRVMTPDLRERLENLRKKPENIPQPISNTSRANLNKLLTDYTEMKKAILHVYWEEFQKDPVGLMSRVAQPASKKIDQNKLKPEMDEKGNLTTAGFACSQCGQPLFVYKLEQVSEKGKAYTNYFGRCNVAEHEKLILLAQLKPEKDSDEAVTYSLGKFGQRALDFYSIHVTKESTHPVKPLAQIAGNRYASGPVGKALSDACMGTIASFLSKYQDIIIEHQKVVKGNQKRLESLRELAGKENLEYPSVTLPPQPHTKEGVDAYNEVIARVRMWVNLNLWQKLKLSRDDAKPLLRLKGFPSFPLVERQANEVDWWDMVCNVKKLINEKKEDGKVFWQNLAGYKRQEALRPYLSSEEDRKKGKKFARYQLGDLLLHLEKKHGEDWGKVYDEAWERIDKKVEGLSKHIKLEEERRSEDAQSKAALTDWLRAKASFVIEGLKEADKDEFCRCELKLQKWYGDLRGKPFAIEAENSILDISGFSKQYNCAFIWQKDGVKKLNLYLIINYFKGGKLRFKKIKPEAFEANRFYTVINKKSGEIVPMEVNFNFDDPNLIILPLAFGKRQGREFIWNDLLSLETGSLKLANGRVIEKTLYNRRTRQDEPALFVALTFERREVLDSSNIKPMNLIGVDRGENIPAVIALTDPEGCPLSRFADSLGNPTHIVRIGESYKEKQRTIQAFKEVEQRRAGGYSRKYASKAKNLADDMVRNTARDLLYYAVTQDAMLIFENLSRGFGRQGKRTFMAERQYTRMEDWLTAKLAYEGLPSKTYLSKTLAQYTSKTCSNCGFTITSADYDRVLEKLKKTATGWMTTINGKELKVEGQITYYNRYKRQNVVKDLSVELDRLSEESVNNDISSWTKGRSGEALSLLKKRFSHRPVQEKFVCLNCGFETHADEQAALNIARSWLFLRSQEYKKYQTNKTTGNTDKRAFVETWQSFYRKKLKEVWKPAV

SEQ ID NO: 26899 - protein, 978 aa, synthetic construct
  REGION 1..978: note = engineered CasX variant
QEIKRINKIRRRLVKDSNTKKAGKTGPMKTLLVRVMTPDLRERLENLRKKPENIPQPISNTSRANLNKLLTDYTEMKKAILHVYWEEFQKDPVGLMSRVAQPASKKIDQNKLKPEMDEKGNLTTAGFACSQCGQPLFVYKLEQVSEKGKAYTNYFGRCNVAEHEKLILLAQLKPEKDSDEAVTYSLGKFGQRALDFYSIHVTKESTHPVKPLAQIAGNRYASGPVGKALSDACMGTIASFLSKYQDIIIEHQKVVKGNQKRLESLRELAGKENLEYPSVTLPPQPHTKEGVDAYNEVIARVRMWVNLNLWQKLKLSRDDAKPLLRLKGFPSFPLVERQANEVDWWDMVCNVKKLINEKKEDGKVFWQNLAGYKRQEALRPYLSSEEDRKKGKKFARYQLGDLLLHLEKKHGEDWGKVYDEAWERIDKKVEGLSKHIKLEEERRSEDAQSKAALTDWLRAKASFVIEGLKEADKDEFCRCELKLQKWYGDLRGKPFAIEAENSILDISGFSKQYNCAFIWQKDGVKKLNLYLIINYFKGGKLRFKKIKPEAFEANRFYTVINKKSGEIVPMEVNFNFDDPNLIILPLAFGKRQGREFIWNDLLSLETGSLKLANGRVIEKTLYNRRTRQDEPALFVALTFERREVLDSSNIKPMNLIGVDRGENIPAVIALTDPEGCPLSRFADSLGNPTHILRIGESYKEKQRTIQAKKEVEQRRAGGYSRKYASKAKNLADDMVRNTARDLLYYAVTQDAMLIFENLSRGFGRQGKRTFMAERQYTRMEDWLTAKLAYEGLPSKTYLSKTLAQYTSKTCSNCGFTITSADYDRVLEKLKKTATGWMTTINGKELKVEGQITYYNRYKRQNVVKDLSVELDRLSEESVNNDISSWTKGRSGEALSLLKKRFSHRPVQEKFVCLNCGFETHADEQAALNIARSWLFLRSQEYKKYQTNKTTGNTDKRAFVETWQSFYRKKLKEVWKPAV

SEQ ID NO: 26900 - protein, 978 aa, synthetic construct
  REGION 1..978: note = engineered CasX variant
QEIKRINKIRRRLVKDSNTKKAGKTGPMKTLLVRVMTPDLRERLENLRKKPENIPQPISNTSRANLNKLLTDYTEMKKAILHVYWEEFQKDPVGLMSRVAQPASKKIDQNKLKPEMDEKGNLTTAGFACSQCGQPLFVYKLEQVSEKGKAYTNYFGRCNVAEHEKLILLAQLKPEKDSDEAVTYSLGKFGQRALDFYSIHVTKESTHPVKPLAQIAGNRYASGPVGKALSDACMGTIASFLSKYQDIIIEHQKVVKGNQKRLESLRELAGKENLEYPSVTLPPQPHTKEGVDAYNEVIARVRMWVNLNLWQKLKLSRDDAKPLLRLKGFPSFPLVERQANEVDWWDMVCNVKKLINEKKEDGKVFWQNLAGYKRQEALRPYLSSEEDRKKGKKFARYQLGDLLLHLEKKHGEDWGKVYDEAWERIDKKVEGLSKHIKLEEERRSEDAQSKAALTDWLRAKASFVIEGLKEADKDEFCRCELKLQKWYGDLRGKPFAIEAENSILDISGFSKQYNCAFIWQKDGVKKLNLYLIINYFKGGKLRFKKIKPEAFEANRFYTVINKKSGEIVPMEVNFNFDDPNLIILPLAFGKRQGREFIWNDLLSLETGSLKLANGRVIEKTLYNRRTRQDEPALFVALTFERREVLDSSNIKPMNLIGVDRGENIPAVIALTDPEGCPLSRFADSLGNPTHILRIGESYKEKQRTIQAKKEVEGRRAGGYSRKYASKAKNLADDMVRNTARDLLYYAVTQDAMLIFENLSRGFGRQGKRTFMAERQYTRMEDWLTAKLAYEGLPSKTYLSKTLAQYTSKTCSNCGFTITSADYDRVLEKLKKTATGWMTTINGKELKVEGQITYYNRYKRQNVVKDLSVELDRLSEESVNNDISSWTKGRSGEALSLLKKRFSHRPVQEKFVCLNCGFETHADEQAALNIARSWLFLRSQEYKKYQTNKTTGNTDKRAFVETWQSFYRKKLKEVWKPAV

SEQ ID NO: 26901 - protein, 978 aa, synthetic construct
  REGION 1..978: note = engineered CasX variant
QEIKRINKIRRRLVKDSNTKKAGKTGPMKTLLVRVMTPDLRERLENLRKKPENIPQPISNTSRANLNKLLTDYTEMKKAILHVYWEEFQKDPVGLMSRVAQPASKKIDQNKLKPEMDEKGNLTTAGFACSQCGQPLFVYKLEQVSEKGKAYTNYFGRCNVAEHEKLILLAQLKPEKDSDEAVTYSLGKFGQRALDFYSIHVTKESTHPVKPLAQIAGNRYASGPVGKALSDACMGTIASFLSKYQDIIIEHQKVVKGNQKRLESLRELAGKENLEYPSVTLPPQPHTKEGVDAYNEVIARVRMWVNLNLWQKLKLSRDDAKPLLRLKGFPSFPLVERQANEVDWWDMVCNVKKLINEKKEDGKVFWQNLAGYKRQEALRPYLSSEEDRKKGKKFARYQLGDLLLHLEKKHGEDWGKVYDEAWERIDKKVEGLSKHIKLEEERRSEDAQSKAALTDWLRAKASFVIEGLKEADKDEFCRCELKLQKWYGDLRGKPFAIEAENSILDISGFSKQYNCAFIWQKDGVKKLNLYLIINYFKGGKLRFKKIKPEAFEANRFYTVINKKSGEIVPMEVNFNFDDPNLIILPLAFGKRQGREFIWNDLLSLETGSLKLANGRVIEKTLYNRRTRQDEPALFVALTFERREVLDSSNIKPMNLIGVDRGENIPAVIALTDPEGCPLSRFADSLGNPTHILRIGESYKEKQRTIQAFKEVEQRRAGGYSRKYASKAKNLADDMVRNTARDLLYYAVTQDAMLIFENLSRGFGRQGKRTFMAERQYTRMEDWLTAKLAYEGLPSKTYLSKTLAQYTSKTCSNCGFTITSADYDRVLEKLKKTATGWMTTINGKELKVEGQITYYNRYKRQNVVKDLSVELDRLSEESVNNDISSWTKGRSGEALSLLKKRFSHRPVQEKFVCLNCGFETHADEQAALNIARSWLFLRSQEYKKYQTNKTTGNTDKRAFVETWQSFYRKKLKEVWKPAV

SEQ ID NO: 26902 - protein, 978 aa, synthetic construct
  REGION 1..978: note = engineered CasX variant
QEIKRINKIRRRLVKDSNTKKAGKTGPMKTLLVRVMTPDLRERLENLRKKPENIPQPISNTSRANLNKLLTDYTEMKKAILHVYWEEFQKDPVGLMSRVAQPASKKIDQNKLKPEMDEKGNLTTAGFACSQCGQPLFVYKLEQVSEKGKAYTNYFGRCNVAEHEKLILLAQLKPEKDSDEAVTYSLGKFGQRALDFYSIHVTKESTHPVKPLAQIAGNRYASGPVGKALSDACMGTIASFLSKYQDIIIEHQKVVKGNQKRLESLRELAGKENLEYPSVTLPPQPHTKEGVDAYNEVIARVRMWVNLNLWQKLKLSRDDAKPLLRLKGFPSFPLVERQANEVDWWDMVCNVKKLINEKKEDGKVFWQNLAGYKRQEALRPYLSSEEDRKKGKKFARYQLGDLLLHLEKKHGEDWGKVYDEAWERIDKKVEGLSKHIKLEEERRSEDAQSKAALTDWLRAKASFVIEGLKEADKDEFCRCELKLQKWYGDLRGKPFAIEAENSILDISGFSKQYNCAFIWQKDGVKKLNLYLIINYFKGGKLRFKKIKPEAFEANRFYTVINKKSGEIVPMEVNFNFDDPNLIILPLAFGKRQGREFIWNDLLSLETGSLKLANGRVIEKTLYNRRTRQDEPALFVALTFERREVLDSSNIKPMNLIGVDRGENIPAVIALTDPEGCPLSRFADSHGNPTHILRIGESYKEKQRTIQAKKEVEQRRAGGYSRKYASKAKNLADDMVRNTARDLLYYAVTQDAMLIFENLSRGFGRQGKRTFMAERQYTRMEDWLTAKLAYEGLPSKTYLSKTLAQYTSKTCSNCGFTITSADYDRVLEKLKKTATGWMTTINGKELKVEGQITYYNRYKRQNVVKDLSVELDRLSEESVNNDISSWTKGRSGEALSLLKKRFSHRPVQEKFVCLNCGFETHADEQAALNIARSWLFLRSQEYKKYQTNKTTGNTDKRAFVETWQSFYRKKLKEVWKPAV

SEQ ID NO: 26903 - protein, 978 aa, synthetic construct
  REGION 1..978: note = engineered CasX variant
QEIKRINKIRRRLVKDSNTKKAGKTGPMKTLLVRVMTPDLRERLENLRKKPENIPQPISNTSRANLNKLLTDYTEMKKAILHVYWEEFQKDPVGLMSRVAQPASKKIDQNKLKPEMDEKGNLTTAGFACSQCGQPLFVYKLEQVSEKGKAYTNYFGRCNVAEHEKLILLAQLKPEKDSDEAVTYSLGKFGQRALDFYSIHVTKESTHPVKPLAQIAGNRYASGPVGKALSDACMGTIASFLSKYQDIIIEHQKVVKGNQKRLESLRELAGKENLEYPSVTLPPQPHTKEGVDAYNEVIARVRMWVNLNLWQKLKLSRDDAKPLLRLKGFPSFPLVERQANEVDWWDMVCNVKKLINEKKEDGKVFWQNLAGYKRQEALRPYLSSEEDRKKGKKFARYQLGDLLLHLEKKHGEDWGKVYDEAWERIDKKVEGLSKHIKLEEERRSEDAQSKAALTDWLRAKASFVIEGLKEADKDEFCRCELKLQKWYGDLRGKPFAIEAENSILDISGFSKQYNCAFIWQKDGVKKLNLYLIINYFKGGKLRFKKIKPEAFEANRFYTVINKKSGEIVPMEVNFNFDDPNLIILPLAFGKRQGREFIWNDLLSLETGSLKLANGRVIEKTLYNRRTRQDEPALFVALTFERREVLDSSNIKPMNLIGVDRGENIPAVIALTDPEGCPLSRFADSGGNPTHILRIGESYKEKQRTIQAKKEVEQRRAGGYSRKYASKAKNLADDMVRNTARDLLYYAVTQDAMLIFENLSRGFGRQGKRTFMAERQYTRMEDWLTAKLAYEGLPSKTYLSKTLAQYTSKTCSNCGFTITSADYDRVLEKLKKTATGWMTTINGKELKVEGQITYYNRYKRQNVVKDLSVELDRLSEESVNNDISSWTKGRSGEALSLLKKRFSHRPVQEKFVCLNCGFETHADEQAALNIARSWLFLRSQEYKKYQTNKTTGNTDKRAFVETWQSFYRKKLKEVWKPAV

SEQ ID NO: 26904 - protein, 978 aa, synthetic construct
  REGION 1..978: note = engineered CasX variant
QEIKRINKIRRRLVKDSNTKKAGKTGPMKTLLVRVMTPDLRERLENLRKKPENIPQPISNTSRANLNKLLTDYTEMKKAILHVYWEEFQKDPVGLMSRVAQPASKKIDQNKLKPEMDEKGNLTTAGFACSQCGQPLFVYKLEQVSEKGKAYTNYFGRCNVAEHEKLILLAQLKPEKDSDEAVTYSLGKFGQRALDFYSIHVTKESTHPVKPLAQIAGNRYASGPVGKALSDACMGTIASFLSKYQDIIIEHQKVVKGNQKRLESLRELAGKENLEYPSVTLPPQPHTKEGVDAYNEVIARVRMWVNLNLWQKLKLSRDDAKPLLRLKGFPSFPLVERQANEVDWWDMVCNVKKLINEKKEDGKVFWQNLAGYKRQEALRPYLSSEEDRKKGKKFARYQLGDLLLHLEKKHGEDWGKVYDEAWERIDKKVEGLSKHIKLEEERRSEDAQSKAALTDWLRAKASFVIEGLKEADKDEFCRCELKLQKWYGDLRGKPFAIEAENSILDISGFSKQYNCAFIWQKDGVKKLNLYLIINYFKGGKLRFKKIKPEAFEANRFYTVINKKSGEIVPMEVNFNFDDPNLIILPLAFGKRQGREFIWNDLLSLETGSLKLANGRVIEKTLYNRRTRQDEPALFVALTFERREVLDSSNIKPMNLIGVDRGENIPAVIALTDPEGCPLSQFKDSYGNPTHILRIGESYKEKQRTIQAKKEVEQRRAGGYSRKYASKAKNLADDMVRNTARDLLYYAVTQDAMLIFENLSRGFGRQGKRTFMAERQYTRMEDWLTAKLAYEGLPSKTYLSKTLAQYTSKTCSNCGFTITSADYDRVLEKLKKTATGWMTTINGKELKVEGQITYYNRYKRQNVVKDLSVELDRLSEESVNNDISSWTKGRSGEALSLLKKRFSHRPVQEKFVCLNCGFETHADEQAALNIARSWLFLRSQEYKKYQTNKTTGNTDKRAFVETWQSFYRKKLKEVWKPAV

SEQ ID NO: 26905 - protein, 978 aa, synthetic construct
  REGION 1..978: note = engineered CasX variant
QEIKRINKIRRRLVKDSNTKKAGKTGPMKTLLVRVMTPDLRERLENLRKKPENIPQPISNTSRANLNKLLTDYTEMKKAILHVYWEEFQKDPVGLMSRVAQPASKKIDQNKLKPEMDEKGNLTTAGFACSQCGQPLFVYKLEQVSEKGKAYTNYFGRCNVAEHEKLILLAQLKPEKDSDEAVTYSLGKFGQRALDFYSIHVTKESTHPVKPLAQIAGNRYASGPVGKALSDACMGTIASFLSKYQDIIIEHQKVVKGNQKRLESLRELAGKENLEYPSVTLPPQPHTKEGVDAYNEVIARVRMWVNLNLWQKLKLSRDDAKPLLRLKGFPSFPLVERQANEVDWWDMVCNVKKLINEKKEDGKVFWQNLAGYKRQEALRPYLSSEEDRKKGKKFARYQLGDLLLHLEKKHGEDWGKVYDEAWERIDKKVEGLSKHIKLEEERRSEDAQSKAALTDWLRAKASFVIEGLKEADKDEFCRCELKLQKWYGDLRGKPFAIEAENSILDISGFSKQYNCAFIWQKDGVKKLNLYLIINYFKGGKLRFKKIKPEAFEANRFYTVINKKSGEIVPMEVNFNFDDPNLIILPLAFGKRQGREFIWNDLLSLETGSLKLANGRVIEKTLYNRRTRQDEPALFVALTFERREVLDSSNIKPMNLIGVDRGENIPAVIALTDPEGCPLSQFKDSTGNPTHILRIGESYKYKQRTIQAKKEVEQRRAGGYSRKYASKAKNLADDMVRNTARDLLYYAVTQDAMLIFENLSRGFGRQGKRTFMAERQYTRMEDWLTAKLAYEGLPSKTYLSKTLAQYTSKTCSNCGFTITSADYDRVLEKLKKTATGWMTTINGKELKVEGQITYYNRYKRQNVVKDLSVELDRLSEESVNNDISSWTKGRSGEALSLLKKRFSHRPVQEKFVCLNCGFETHADEQAALNIARSWLFLRSQEYKKYQTNKTTGNTDKRAFVETWQSFYRKKLKEVWKPAV

SEQ ID NO: 26906 - protein, 978 aa, synthetic construct
  REGION 1..978: note = engineered CasX variant
QEIKRINKIRRRLVKDSNTKKAGKTGPMKTLLVRVMTPDLRERLENLRKKPENIPQPISNTSRANLNKLLTDYTEMKKAILHVYWEEFQKDPVGLMSRVAQPASKKIDQNKLKPEMDEKGNLTTAGFACSQCGQPLFVYKLEQVSEKGKAYTNYFGRCNVAEHEKLILLAQLKPEKDSDEAVTYSLGKFGQRALDFYSIHVTKESTHPVKPLAQIAGNRYASGPVGKALSDACMGTIASFLSKYQDIIIEHQKVVKGNQKRLESLRELAGKENLEYPSVTLPPQPHTKEGVDAYNEVIARVRMWVNLNLWQKLKLSRDDAKPLLRLKGFPSFPLVERQANEVDWWDMVCNVKKLINEKKEDGKVFWQNLAGYKRQEALRPYLSSEEDRKKGKKFARYQLGDLLLHLEKKHGEDWGKVYDEAWERIDKKVEGLSKHIKLEEERRSEDAQSKAALTDWLRAKASFVIEGLKEADKDEFCRCELKLQKWYGDLRGKPFAIEAENSILDISGFSKQYNCAFIWQKDGVKKLNLYLIINYFKGGKLRFKKIKPEAFEANRFYTVINKKSGEIVPMEVNFNFDDPNLIILPLAFGKRQGREFIWNDLLSLETGSLKLANGRVIEKTLYNRRTRQDEPALFVALTFERREVLDSSNIKPMNLIGVDRGENIPAVIALTDPEGCPLSQFKDSTGNPTHILRIGESYKEKQRTIQAKKEVEQRRAGGYSRKYASKAKNLADDMVRNTARDLLYYAVTQDAMLIFENLSRGFGRQGKRTFMAERQYTRMEDWLTAKLAYEGLPSKTYLSKTLAQYTSKTCSNCGFTITSADYDRVLEKLKKTATGWMTTINGKELKVEGQITYYNRYKRQNVVKDLSVELDRLSEESVNNDISSWTKGRSGEALSLLKKRFSHRPVQEKFVCLNCGFETHADEQAALNIARSWLFLRSQEYKKYQTNKTTGNTDKRAFVETWQSFYRKKLKEVWKPAV

SEQ ID NO: 26907 - protein, 978 aa, synthetic construct
  REGION 1..978: note = engineered CasX variant
QEIKRINKIRRRLVKDSNTKKAGKTGPMKTLLVRVMTPDLRERLENLRKKPENIPQPISNTSRANLNKLLTDYTEMKKAILHVYWEEFQKDPVGLMSRVAQPASKKIDQNKLKPEMDEKGNLTTAGFACSQCGQPLFVYKLEQVSEKGKAYTNYFGRCNVAEHEKLILLAQLKPEKDSDEAVTYSLGKFGQRALDFYSIHVTKESTHPVKPLAQIAGNRYASGPVGKALSDACMGTIASFLSKYQDIIIEHQKVVKGNQKRLESLRELAGKENLEYPSVTLPPQPHTKEGVDAYNEVIARVRMWVNLNLWQKLKLSRDDAKPLLRLKGFPSFPLVERQANEVDWWDMVCNVKKLINEKKEDGKVFWQNLAGYKRQEALRPYLSSEEDRKKGKKFARYQLGDLLLHLEKKHGEDWGKVYDEAWERIDKKVEGLSKHIKLEEERRSEDAQSKAALTDWLRAKASFVIEGLKEADKDEFCRCELKLQKWYGDLRGKPFAIEAENSILDISGFSKQYNCAFIWQKDGVKKLNLYLIINYFKGGKLRFKKIKPEAFEANRFYTVINKKSGEIVPMEVNFNFDDPNLIILPLAFGKRQGREFIWNDLLSLETGSLKLANGRVIEKTLYNRRTRQDEPALFVALTFERREVLDSSNIKPMNLIGVDRGENIPAVIALTDPEGCPLSQFKDSLGNPTHILRIGESYKYKQRTIQAKKEVEQRRAGGYSRKYASKAKNLADDMVRNTARDLLYYAVTQDAMLIFENLSRGFGRQGKRTFMAERQYTRMEDWLTAKLAYEGLPSKTYLSKTLAQYTSKTCSNCGFTITSADYDRVLEKLKKTATGWMTTINGKELKVEGQITYYNRYKRQNVVKDLSVELDRLSEESVNNDISSWTKGRSGEALSLLKKRFSHRPVQEKFVCLNCGFETHADEQAALNIARSWLFLRSQEYKKYQTNKTTGNTDKRAFVETWQSFYRKKLKEVWKPAV

SEQ ID NO: 26908 - protein, 978 aa, synthetic construct
  REGION 1..978: note = engineered CasX variant
QEIKRINKIRRRLVKDSNTKKAGKTGPMKTLLVRVMTPDLRERLENLRKKPENIPQPISNTSRANLNKLLTDYTEMKKAILHVYWEEFQKDPVGLMSRVAQPASKKIDQNKLKPEMDEKGNLTTAGFACSQCGQPLFVYKLEQVSEKGKAYTNYFGRCNVAEHEKLILLAQLKPEKDSDEAVTYSLGKFGQRALDFYSIHVTKESTHPVKPLAQIAGNRYASGPVGKALSDACMGTIASFLSKYQDIIIEHQKVVKGNQKRLESLRELAGKENLEYPSVTLPPQPHTKEGVDAYNEVIARVRMWVNLNLWQKLKLSRDDAKPLLRLKGFPSFPLVERQANEVDWWDMVCNVKKLINEKKEDGKVFWQNLAGYKRQEALRPYLSSEEDRKKGKKFARYQLGDLLLHLEKKHGEDWGKVYDEAWERIDKKVEGLSKHIKLEEERRSEDAQSKAALTDWLRAKASFVIEGLKEADKDEFCRCELKLQKWYGDLRGKPFAIEAENSILDISGFSKQYNCAFIWQKDGVKKLNLYLIINYFKGGKLRFKKIKPEAFEANRFYTVINKKSGEIVPMEVNFNFDDPNLIILPLAFGKRQGREFIWNDLLSLETGSLKLANGRVIEKTLYNRRTRQDEPALFVALTFERREVLDSSNIKPMNLIGVDRGENIPAVIALTDPEGCPLSQFKDSLGNPTHILRIGESYKEKQRTIQAKKEVEQRRAGGYSRKYASKAKNLADDMVRNTARDLLYYAVTQDAMLIFENLSRGFGRQGKRTFMAERQYTRMEDWLTAKLAYEGLPSKTYLSKTLAQYTSKTCSNCGFTITSADYDRVLEKLKKTATGWMTTINGKELKVEGQITYYNRYKRQNVVKDLSVELDRLSEESVNNDISSWTKGRSGEALSLLKKRFSHRPVQEKFVCLNCGFETHADEQAALNIARSWLFLRSQEYKKYQTNKTTGNTDKRAFVETWQSFYRKKLKEVWKPAV

SEQ ID NO: 26909 - protein, 978 aa, synthetic construct
  REGION 1..978: note = engineered CasX variant
QEIKRINKIRRRLVKDSNTKKAGKTGPMKTLLVRVMTPDLRERLENLRKKPENIPQPISNTSRANLNKLLTDYTEMKKAILHVYWEEFQKDPVGLMSRVAQPASKKIDQNKLKPEMDEKGNLTTAGFACSQCGQPLFVYKLEQVSEKGKAYTNYFGRCNVAEHEKLILLAQLKPEKDSDEAVTYSLGKFGQRALDFYSIHVTKESTHPVKPLAQIAGNRYASGPVGKALSDACMGTIASFLSKYQDIIIEHQKVVKGNQKRLESLRELAGKENLEYPSVTLPPQPHTKEGVDAYNEVIARVRMWVNLNLWQKLKLSRDDAKPLLRLKGFPSFPLVERQANEVDWWDMVCNVKKLINEKKEDGKVFWQNLAGYKRQEALRPYLSSEEDRKKGKKFARYQLGDLLLHLEKKHGEDWGKVYDEAWERIDKKVEGLSKHIKLEEERRSEDAQSKAALTDWLRAKASFVIEGLKEADKDEFCRCELKLQKWYGDLRGKPFAIEAENSILDISGFSKQYNCAFIWQKDGVKKLNLYLIINYFKGGKLRFKKIKPEAFEANRFYTVINKKSGEIVPMEVNFNFDDPNLIILPLAFGKRQGREFIWNDLLSLETGSLKLANGRVIEKTLYNRRTRQDEPALFVALTFERREVLDSSNIKPMNLIGVDRGENIPAVIALTDPEGCPLSQFKDSLGNPTHILRIGESYKEKQRTIFAKKEVEQRRAGGYSRKYASKAKNLADDMVRNTARDLLYYAVTQDAMLIFENLSRGFGRQGKRTFMAERQYTRMEDWLTAKLAYEGLPSKTYLSKTLAQYTSKTCSNCGFTITSADYDRVLEKLKKTATGWMTTINGKELKVEGQITYYNRYKRQNVVKDLSVELDRLSEESVNNDISSWTKGRSGEALSLLKKRFSHRPVQEKFVCLNCGFETHADEQAALNIARSWLFLRSQEYKKYQTNKTTGNTDKRAFVETWQSFYRKKLKEVWKPAV

SEQ ID NO: 26910 - protein, 978 aa, synthetic construct
  REGION 1..978: note = engineered CasX variant
QEIKRINKIRRRLVKDSNTKKAGKTGPMKTLLVRVMTPDLRERLENLRKKPENIPQPISNTSRANLNKLLTDYTEMKKAILHVYWEEFQKDPVGLMSRVAQPASKKIDQNKLKPEMDEKGNLTTAGFACSQCGQPLFVYKLEQVSEKGKAYTNYFGRCNVAEHEKLILLAQLKPEKDSDEAVTYSLGKFGQRALDFYSIHVTKESTHPVKPLAQIAGNRYASGPVGKALSDACMGTIASFLSKYQDIIIEHQKVVKGNQKRLESLRELAGKENLEYPSVTLPPQPHTKEGVDAYNEVIARVRMWVNLNLWQKLKLSRDDAKPLLRLKGFPSFPLVERQANEVDWWDMVCNVKKLINEKKEDGKVFWQNLAGYKRQEALRPYLSSEEDRKKGKKFARYQLGDLLLHLEKKHGEDWGKVYDEAWERIDKKVEGLSKHIKLEEERRSEDAQSKAALTDWLRAKASFVIEGLKEADKDEFCRCELKLQKWYGDLRGKPFAIEAENSILDISGFSKQYNCAFIWQKDGVKKLNLYLIINYFKGGKLRFKKIKPEAFEANRFYTVINKKSGEIVPMEVNFNFDDPNLIILPLAFGKRQGREFIWNDLLSLETGSLKLANGRVIEKTLYNRRTRQDEPALFVALTFERREVLDSSNIKPMNLIGVDRGENIPAVIALTDPEGCPLSQFKDSLGNPTHILRIGESYKEKQRQIQAKKEVEQRRAGGYSRKYASKAKNLADDMVRNTARDLLYYAVTQDAMLIFENLSRGFGRQGKRTFMAERQYTRMEDWLTAKLAYEGLPSKTYLSKTLAQYTSKTCSNCGFTITSADYDRVLEKLKKTATGWMTTINGKELKVEGQITYYNRYKRQNVVKDLSVELDRLSEESVNNDISSWTKGRSGEALSLLKKRFSHRPVQEKFVCLNCGFETHADEQAALNIARSWLFLRSQEYKKYQTNKTTGNTDKRAFVETWQSFYRKKLKEVWKPAV

SEQ ID NO: 26911 - protein, 978 aa, synthetic construct
  REGION 1..978: note = engineered CasX variant
QEIKRINKIRRRLVKDSNTKKAGKTGPMKTLLVRVMTPDLRERLENLRKKPENIPQPISNTSRANLNKLLTDYTEMKKAILHVYWEEFQKDPVGLMSRVAQPASKKIDQNKLKPEMDEKGNLTTAGFACSQCGQPLFVYKLEQVSEKGKAYTNYFGRCNVAEHEKLILLAQLKPEKDSDEAVTYSLGKFGQRALDFYSIHVTKESTHPVKPLAQIAGNRYASGPVGKALSDACMGTIASFLSKYQDIIIEHQKVVKGNQKRLESLRELAGKENLEYPSVTLPPQPHTKEGVDAYNEVIARVRMWVNLNLWQKLKLSRDDAKPLLRLKGFPSFPLVERQANEVDWWDMVCNVKKLINEKKEDGKVFWQNLAGYKRQEALRPYLSSEEDRKKGKKFARYQLGDLLLHLEKKHGEDWGKVYDEAWERIDKKVEGLSKHIKLEEERRSEDAQSKAALTDWLRAKASFVIEGLKEADKDEFCRCELKLQKWYGDLRGKPFAIEAENSILDISGFSKQYNCAFIWQKDGVKKLNLYLIINYFKGGKLRFKKIKPEAFEANRFYTVINKKSGEIVPMEVNFNFDDPNLIILPLAFGKRQGREFIWNDLLSLETGSLKLANGRVIEKTLYNRRTRQDEPALFVALTFERREVLDSSNIKPMNLIGVDRGENIPAVIALTDPEGCPLSQFCDSLGNPTHILRIGESYKEKQRTIQAKKEVEQRRAGGYSRKYASKAKNLADDMVRNTARDLLYYAVTQDAMLIFENLSRGFGRQGKRTFMAERQYTRMEDWLTAKLAYEGLPSKTYLSKTLAQYTSKTCSNCGFTITSADYDRVLEKLKKTATGWMTTINGKELKVEGQITYYNRYKRQNVVKDLSVELDRLSEESVNNDISSWTKGRSGEALSLLKKRFSHRPVQEKFVCLNCGFETHADEQAALNIARSWLFLRSQEYKKYQTNKTTGNTDKRAFVETWQSFYRKKLKEVWKPAV

SEQ ID NO: 26912 - protein, 978 aa, synthetic construct
  REGION 1..978: note = engineered CasX variant
QEIKRINKIRRRLVKDSNTKKAGKTGPMKTLLVRVMTPDLRERLENLRKKPENIPQPISNTSRANLNKLLTDYTEMKKAILHVYWEEFQKDPVGLMSRVAQPASKKIDQNKLKPEMDEKGNLTTAGFACSQCGQPLFVYKLEQVSEKGKAYTNYFGRCNVAEHEKLILLAQLKPEKDSDEAVTYSLGKFGQRALDFYSIHVTKESTHPVKPLAQIAGNRYASGPVGKALSDACMGTIASFLSKYQDIIIEHQKVVKGNQKRLESLRELAGKENLEYPSVTLPPQPHTKEGVDAYNEVIARVRMWVNLNLWQKLKLSRDDAKPLLRLKGFPSFPLVERQANEVDWWDMVCNVKKLINEKKEDGKVFWQNLAGYKRQEALRPYLSSEEDRKKGKKFARYQLGDLLLHLEKKHGEDWGKVYDEAWERIDKKVEGLSKHIKLEEERRSEDAQSKAALTDWLRAKASFVIEGLKEADKDEFCRCELKLQKWYGDLRGKPFAIEAENSILDISGFSKQYNCAFIWQKDGVKKLNLYLIINYFKGGKLRFKKIKPEAFEANRFYTVINKKSGEIVPMEVNFNFDDPNLIILPLAFGKRQGREFIWNDLLSLETGSLKLANGRVIEKTLYNRRTRQDEPALFVALTFERREVLDSSNIKPMNLIGVDRGENIPAVIALTDPEGCPLSPFKDSLGNPTHILRIGESYKEKQRTIQAKKEVEQRRAGGYSRKYASKAKNLADDMVRNTARDLLYYAVTQDAMLIFENLSRGFGRQGKRTFMAERQYTRMEDWLTAKLAYEGLPSKTYLSKTLAQYTSKTCSNCGFTITSADYDRVLEKLKKTATGWMTTINGKELKVEGQITYYNRYKRQNVVKDLSVELDRLSEESVNNDISSWTKGRSGEALSLLKKRFSHRPVQEKFVCLNCGFETHADEQAALNIARSWLFLRSQEYKKYQTNKTTGNTDKRAFVETWQSFYRKKLKEVWKPAV

SEQ ID NO: 26913 - protein, 978 aa, synthetic construct
  REGION 1..978: note = engineered CasX variant
QEIKRINKIRRRLVKDSNTKKAGKTGPMKTLLVRVMTPDLRERLENLRKKPENIPQPISNTSRANLNKLLTDYTEMKKAILHVYWEEFQKDPVGLMSRVAQPASKKIDQNKLKPEMDEKGNLTTAGFACSQCGQPLFVYKLEQVSEKGKAYTNYFGRCNVAEHEKLILLAQLKPEKDSDEAVTYSLGKFGQRALDFYSIHVTKESTHPVKPLAQIAGNRYASGPVGKALSDACMGTIASFLSKYQDIIIEHQKVVKGNQKRLESLRELAGKENLEYPSVTLPPQPHTKEGVDAYNEVIARVRMWVNLNLWQKLKLSRDDAKPLLRLKGFPSFPLVERQANEVDWWDMVCNVKKLINEKKEDGKVFWQNLAGYKRQEALRPYLSSEEDRKKGKKFARYQLGDLLLHLEKKHGEDWGKVYDEAWERIDKKVEGLSKHIKLEEERRSEDAQSKAALTDWLRAKASFVIEGLKEADKDEFCRCELKLQKWYGDLRGKPFAIEAENSILDISGFSKQYNCAFIWQKDGVKKLNLYLIINYFKGGKLRFKKIKPEAFEANRFYTVINKKSGEIVPMEVNFNFDDPNLIILPLAFGKRQGREFIWNDLLSLETGSLKLANGRVIEKTLYNRRTRQDEPALFVALTFERREVLDSSNIKPMNLIGVDRGENIPAVIALTDPEGCPLSNFKDSYGNPTHILRIGESYKEKQRTIQAKKEVEQRRAGGYSRKYASKAKNLADDMVRNTARDLLYYAVTQDAMLIFENLSRGFGRQGKRTFMAERQYTRMEDWLTAKLAYEGLPSKTYLSKTLAQYTSKTCSNCGFTITSADYDRVLEKLKKTATGWMTTINGKELKVEGQITYYNRYKRQNVVKDLSVELDRLSEESVNNDISSWTKGRSGEALSLLKKRFSHRPVQEKFVCLNCGFETHADEQAALNIARSWLFLRSQEYKKYQTNKTTGNTDKRAFVETWQSFYRKKLKEVWKPAV

SEQ ID NO: 26914 - protein, 978 aa, synthetic construct
  REGION 1..978: note = engineered CasX variant
QEIKRINKIRRRLVKDSNTKKAGKTGPMKTLLVRVMTPDLRERLENLRKKPENIPQPISNTSRANLNKLLTDYTEMKKAILHVYWEEFQKDPVGLMSRVAQPASKKIDQNKLKPEMDEKGNLTTAGFACSQCGQPLFVYKLEQVSEKGKAYTNYFGRCNVAEHEKLILLAQLKPEKDSDEAVTYSLGKFGQRALDFYSIHVTKESTHPVKPLAQIAGNRYASGPVGKALSDACMGTIASFLSKYQDIIIEHQKVVKGNQKRLESLRELAGKENLEYPSVTLPPQPHTKEGVDAYNEVIARVRMWVNLNLWQKLKLSRDDAKPLLRLKGFPSFPLVERQANEVDWWDMVCNVKKLINEKKEDGKVFWQNLAGYKRQEALRPYLSSEEDRKKGKKFARYQLGDLLLHLEKKHGEDWGKVYDEAWERIDKKVEGLSKHIKLEEERRSEDAQSKAALTDWLRAKASFVIEGLKEADKDEFCRCELKLQKWYGDLRGKPFAIEAENSILDISGFSKQYNCAFIWQKDGVKKLNLYLIINYFKGGKLRFKKIKPEAFEANRFYTVINKKSGEIVPMEVNFNFDDPNLIILPLAFGKRQGREFIWNDLLSLETGSLKLANGRVIEKTLYNRRTRQDEPALFVALTFERREVLDSSNIKPMNLIGVDRGENIPAVIALTDPEGCPLSNFKDSMGNPTHILRIGESYKEKQRTIQAKKEVEQRRAGGYSRKYASKAKNLADDMVRNTARDLLYYAVTQDAMLIFENLSRGFGRQGKRTFMAERQYTRMEDWLTAKLAYEGLPSKTYLSKTLAQYTSKTCSNCGFTITSADYDRVLEKLKKTATGWMTTINGKELKVEGQITYYNRYKRQNVVKDLSVELDRLSEESVNNDISSWTKGRSGEALSLLKKRFSHRPVQEKFVCLNCGFETHADEQAALNIARSWLFLRSQEYKKYQTNKTTGNTDKRAFVETWQSFYRKKLKEVWKPAV

SEQ ID NO: 26915 - protein, 978 aa, synthetic construct
  REGION 1..978: note = engineered CasX variant
QEIKRINKIRRRLVKDSNTKKAGKTGPMKTLLVRVMTPDLRERLENLRKKPENIPQPISNTSRANLNKLLTDYTEMKKAILHVYWEEFQKDPVGLMSRVAQPASKKIDQNKLKPEMDEKGNLTTAGFACSQCGQPLFVYKLEQVSEKGKAYTNYFGRCNVAEHEKLILLAQLKPEKDSDEAVTYSLGKFGQRALDFYSIHVTKESTHPVKPLAQIAGNRYASGPVGKALSDACMGTIASFLSKYQDIIIEHQKVVKGNQKRLESLRELAGKENLEYPSVTLPPQPHTKEGVDAYNEVIARVRMWVNLNLWQKLKLSRDDAKPLLRLKGFPSFPLVERQANEVDWWDMVCNVKKLINEKKEDGKVFWQNLAGYKRQEALRPYLSSEEDRKKGKKFARYQLGDLLLHLEKKHGEDWGKVYDEAWERIDKKVEGLSKHIKLEEERRSEDAQSKAALTDWLRAKASFVIEGLKEADKDEFCRCELKLQKWYGDLRGKPFAIEAENSILDISGFSKQYNCAFIWQKDGVKKLNLYLIINYFKGGKLRFKKIKPEAFEANRFYTVINKKSGEIVPMEVNFNFDDPNLIILPLAFGKRQGREFIWNDLLSLETGSLKLANGRVIEKTLYNRRTRQDEPALFVALTFERREVLDSSNIKPMNLIGVDRGENIPAVIALTDPEGCPLSNFKDSLGNYTHILRIGESYKMKQRTIQAKKEVEQRRAGGYSRKYASKAKNLADDMVRNTARDLLYYAVTQDAMLIFENLSRGFGRQGKRTFMAERQYTRMEDWLTAKLAYEGLPSKTYLSKTLAQYTSKTCSNCGFTITSADYDRVLEKLKKTATGWMTTINGKELKVEGQITYYNRYKRQNVVKDLSVELDRLSEESVNNDISSWTKGRSGEALSLLKKRFSHRPVQEKFVCLNCGFETHADEQAALNIARSWLFLRSQEYKKYQTNKTTGNTDKRAFVETWQSFYRKKLKEVWKPAV

SEQ ID NO: 26916 - protein, 978 aa, synthetic construct
  REGION 1..978: note = engineered CasX variant
QEIKRINKIRRRLVKDSNTKKAGKTGPMKTLLVRVMTPDLRERLENLRKKPENIPQPISNTSRANLNKLLTDYTEMKKAILHVYWEEFQKDPVGLMSRVAQPASKKIDQNKLKPEMDEKGNLTTAGFACSQCGQPLFVYKLEQVSEKGKAYTNYFGRCNVAEHEKLILLAQLKPEKDSDEAVTYSLGKFGQRALDFYSIHVTKESTHPVKPLAQIAGNRYASGPVGKALSDACMGTIASFLSKYQDIIIEHQKVVKGNQKRLESLRELAGKENLEYPSVTLPPQPHTKEGVDAYNEVIARVRMWVNLNLWQKLKLSRDDAKPLLRLKGFPSFPLVERQANEVDWWDMVCNVKKLINEKKEDGKVFWQNLAGYKRQEALRPYLSSEEDRKKGKKFARYQLGDLLLHLEKKHGEDWGKVYDEAWERIDKKVEGLSKHIKLEEERRSEDAQSKAALTDWLRAKASFVIEGLKEADKDEFCRCELKLQKWYGDLRGKPFAIEAENSILDISGFSKQYNCAFIWQKDGVKKLNLYLIINYFKGGKLRFKKIKPEAFEANRFYTVINKKSGEIVPMEVNFNFDDPNLIILPLAFGKRQGREFIWNDLLSLETGSLKLANGRVIEKTLYNRRTRQDEPALFVALTFERREVLDSSNIKPMNLIGVDRGENIPAVIALTDPEGCPLSNFKDSLGNYTHILRIGESYKEKQRTIQAKKEVEQRRAGGYSRKYASKAKNLADDMVRNTARDLLYYAVTQDAMLIFENLSRGFGRQGKRTFMAERQYTRMEDWLTAKLAYEGLPSKTYLSKTLAQYTSKTCSNCGFTITSADYDRVLEKLKKTATGWMTTINGKELKVEGQITYYNRYKRQNVVKDLSVELDRLSEESVNNDISSWTKGRSGEALSLLKKRFSHRPVQEKFVCLNCGFETHADEQAALNIARSWLFLRSQEYKKYQTNKTTGNTDKRAFVETWQSFYRKKLKEVWKPAV

SEQ ID NO: 26917 - protein, 978 aa, synthetic construct
  REGION 1..978: note = engineered CasX variant
QEIKRINKIRRRLVKDSNTKKAGKTGPMKTLLVRVMTPDLRERLENLRKKPENIPQPISNTSRANLNKLLTDYTEMKKAILHVYWEEFQKDPVGLMSRVAQPASKKIDQNKLKPEMDEKGNLTTAGFACSQCGQPLFVYKLEQVSEKGKAYTNYFGRCNVAEHEKLILLAQLKPEKDSDEAVTYSLGKFGQRALDFYSIHVTKESTHPVKPLAQIAGNRYASGPVGKALSDACMGTIASFLSKYQDIIIEHQKVVKGNQKRLESLRELAGKENLEYPSVTLPPQPHTKEGVDAYNEVIARVRMWVNLNLWQKLKLSRDDAKPLLRLKGFPSFPLVERQANEVDWWDMVCNVKKLINEKKEDGKVFWQNLAGYKRQEALRPYLSSEEDRKKGKKFARYQLGDLLLHLEKKHGEDWGKVYDEAWERIDKKVEGLSKHIKLEEERRSEDAQSKAALTDWLRAKASFVIEGLKEADKDEFCRCELKLQKWYGDLRGKPFAIEAENSILDISGFSKQYNCAFIWQKDGVKKLNLYLIINYFKGGKLRFKKIKPEAFEANRFYTVINKKSGEIVPMEVNFNFDDPNLIILPLAFGKRQGREFIWNDLLSLETGSLKLANGRVIEKTLYNRRTRQDEPALFVALTFERREVLDSSNIKPMNLIGVDRGENIPAVIALTDPEGCPLSNFKDSLGNPTHILRIGESYKMKQRTIQAKKEVEQRRAGGYSRKYASKAKNLADDMVRNTARDLLYYAVTQDAMLIFENLSRGFGRQGKRTFMAERQYTRMEDWLTAKLAYEGLPSKTYLSKTLAQYTSKTCSNCGFTITSADYDRVLEKLKKTATGWMTTINGKELKVEGQITYYNRYKRQNVVKDLSVELDRLSEESVNNDISSWTKGRSGEALSLLKKRFSHRPVQEKFVCLNCGFETHADEQAALNIARSWLFLRSQEYKKYQTNKTTGNTDKRAFVETWQSFYRKKLKEVWKPAV

SEQ ID NO: 26918 - protein, 978 aa, synthetic construct
  REGION 1..978: note = engineered CasX variant
QEIKRINKIRRRLVKDSNTKKAGKTGPMKTLLVRVMTPDLRERLENLRKKPENIPQPISNTSRANLNKLLTDYTEMKKAILHVYWEEFQKDPVGLMSRVAQPASKKIDQNKLKPEMDEKGNLTTAGFACSQCGQPLFVYKLEQVSEKGKAYTNYFGRCNVAEHEKLILLAQLKPEKDSDEAVTYSLGKFGQRALDFYSIHVTKESTHPVKPLAQIAGNRYASGPVGKALSDACMGTIASFLSKYQDIIIEHQKVVKGNQKRLESLRELAGKENLEYPSVTLPPQPHTKEGVDAYNEVIARVRMWVNLNLWQKLKLSRDDAKPLLRLKGFPSFPLVERQANEVDWWDMVCNVKKLINEKKEDGKVFWQNLAGYKRQEALRPYLSSEEDRKKGKKFARYQLGDLLLHLEKKHGEDWGKVYDEAWERIDKKVEGLSKHIKLEEERRSEDAQSKAALTDWLRAKASFVIEGLKEADKDEFCRCELKLQKWYGDLRGKPFAIEAENSILDISGFSKQYNCAFIWQKDGVKKLNLYLIINYFKGGKLRFKKIKPEAFEANRFYTVINKKSGEIVPMEVNFNFDDPNLIILPLAFGKRQGREFIWNDLLSLETGSLKLANGRVIEKTLYNRRTRQDEPALFVALTFERREVLDSSNIKPMNLIGVDRGENIPAVIALTDPEGCPLSNFKDSLGNPTHILRIGESYKEKQRTISAKKEVEQRRAGGYSRKYASKAKNLADDMVRNTARDLLYYAVTQDAMLIFENLSRGFGRQGKRTFMAERQYTRMEDWLTAKLAYEGLPSKTYLSKTLAQYTSKTCSNCGFTITSADYDRVLEKLKKTATGWMTTINGKELKVEGQITYYNRYKRQNVVKDLSVELDRLSEESVNNDISSWTKGRSGEALSLLKKRFSHRPVQEKFVCLNCGFETHADEQAALNIARSWLFLRSQEYKKYQTNKTTGNTDKRAFVETWQSFYRKKLKEVWKPAV

SEQ ID NO: 26919 - protein, 978 aa, synthetic construct
  REGION 1..978: note = engineered CasX variant
QEIKRINKIRRRLVKDSNTKKAGKTGPMKTLLVRVMTPDLRERLENLRKKPENIPQPISNTSRANLNKLLTDYTEMKKAILHVYWEEFQKDPVGLMSRVAQPASKKIDQNKLKPEMDEKGNLTTAGFACSQCGQPLFVYKLEQVSEKGKAYTNYFGRCNVAEHEKLILLAQLKPEKDSDEAVTYSLGKFGQRALDFYSIHVTKESTHPVKPLAQIAGNRYASGPVGKALSDACMGTIASFLSKYQDIIIEHQKVVKGNQKRLESLRELAGKENLEYPSVTLPPQPHTKEGVDAYNEVIARVRMWVNLNLWQKLKLSRDDAKPLLRLKGFPSFPLVERQANEVDWWDMVCNVKKLINEKKEDGKVFWQNLAGYKRQEALRPYLSSEEDRKKGKKFARYQLGDLLLHLEKKHGEDWGKVYDEAWERIDKKVEGLSKHIKLEEERRSEDAQSKAALTDWLRAKASFVIEGLKEADKDEFCRCELKLQKWYGDLRGKPFAIEAENSILDISGFSKQYNCAFIWQKDGVKKLNLYLIINYFKGGKLRFKKIKPEAFEANRFYTVINKKSGEIVPMEVNFNFDDPNLIILPLAFGKRQGREFIWNDLLSLETGSLKLANGRVIEKTLYNRRTRQDEPALFVALTFERREVLDSSNIKPMNLIGVDRGENIPAVIALTDPEGCPLSNFKDSLGNPTHILRIGESYKEKQRTIQAKKVVEQRRTGGYSRKYASKAKNLADDMVRNTARDLLYYAVTQDAMLIFENLSRGFGRQGKRTFMAERQYTRMEDWLTAKLAYEGLPSKTYLSKTLAQYTSKTCSNCGFTITSADYDRVLEKLKKTATGWMTTINGKELKVEGQITYYNRYKRQNVVKDLSVELDRLSEESVNNDISSWTKGRSGEALSLLKKRFSHRPVQEKFVCLNCGFETHADEQAALNIARSWLFLRSQEYKKYQTNKTTGNTDKRAFVETWQSFYRKKLKEVWKPAV

SEQ ID NO: 26920 - protein, 978 aa, synthetic construct
  REGION 1..978: note = engineered CasX variant
QEIKRINKIRRRLVKDSNTKKAGKTGPMKTLLVRVMTPDLRERLENLRKKPENIPQPISNTSRANLNKLLTDYTEMKKAILHVYWEEFQKDPVGLMSRVAQPASKKIDQNKLKPEMDEKGNLTTAGFACSQCGQPLFVYKLEQVSEKGKAYTNYFGRCNVAEHEKLILLAQLKPEKDSDEAVTYSLGKFGQRALDFYSIHVTKESTHPVKPLAQIAGNRYASGPVGKALSDACMGTIASFLSKYQDIIIEHQKVVKGNQKRLESLRELAGKENLEYPSVTLPPQPHTKEGVDAYNEVIARVRMWVNLNLWQKLKLSRDDAKPLLRLKGFPSFPLVERQANEVDWWDMVCNVKKLINEKKEDGKVFWQNLAGYKRQEALRPYLSSEEDRKKGKKFARYQLGDLLLHLEKKHGEDWGKVYDEAWERIDKKVEGLSKHIKLEEERRSEDAQSKAALTDWLRAKASFVIEGLKEADKDEFCRCELKLQKWYGDLRGKPFAIEAENSILDISGFSKQYNCAFIWQKDGVKKLNLYLIINYFKGGKLRFKKIKPEAFEANRFYTVINKKSGEIVPMEVNFNFDDPNLIILPLAFGKRQGREFIWNDLLSLETGSLKLANGRVIEKTLYNRRTRQDEPALFVALTFERREVLDSSNIKPMNLIGVDRGENIPAVIALTDPEGCPLSNFKDSLGNPTHILRIGESYKEKQRTIQAKKVVEQRRAGGYSRKYASKAKNLADDMVRNTARDLLYYAVTQDAMLIFENLSRGFGRQGKRTFMAERQYTRMEDWLTAKLAYEGLPSKTYLSKTLAQYTSKTCSNCGFTITSADYDRVLEKLKKTATGWMTTINGKELKVEGQITYYNRYKRQNVVKDLSVELDRLSEESVNNDISSWTKGRSGEALSLLKKRFSHRPVQEKFVCLNCGFETHADEQAALNIARSWLFLRSQEYKKYQTNKTTGNTDKRAFVETWQSFYRKKLKEVWKPAV

SEQ ID NO: 26921 - protein, 978 aa, synthetic construct
  REGION 1..978: note = engineered CasX variant
QEIKRINKIRRRLVKDSNTKKAGKTGPMKTLLVRVMTPDLRERLENLRKKPENIPQPISNTSRANLNKLLTDYTEMKKAILHVYWEEFQKDPVGLMSRVAQPASKKIDQNKLKPEMDEKGNLTTAGFACSQCGQPLFVYKLEQVSEKGKAYTNYFGRCNVAEHEKLILLAQLKPEKDSDEAVTYSLGKFGQRALDFYSIHVTKESTHPVKPLAQIAGNRYASGPVGKALSDACMGTIASFLSKYQDIIIEHQKVVKGNQKRLESLRELAGKENLEYPSVTLPPQPHTKEGVDAYNEVIARVRMWVNLNLWQKLKLSRDDAKPLLRLKGFPSFPLVERQANEVDWWDMVCNVKKLINEKKEDGKVFWQNLAGYKRQEALRPYLSSEEDRKKGKKFARYQLGDLLLHLEKKHGEDWGKVYDEAWERIDKKVEGLSKHIKLEEERRSEDAQSKAALTDWLRAKASFVIEGLKEADKDEFCRCELKLQKWYGDLRGKPFAIEAENSILDISGFSKQYNCAFIWQKDGVKKLNLYLIINYFKGGKLRFKKIKPEAFEANRFYTVINKKSGEIVPMEVNFNFDDPNLIILPLAFGKRQGREFIWNDLLSLETGSLKLANGRVIEKTLYNRRTRQDEPALFVALTFERREVLDSSNIKPMNLIGVDRGENIPAVIALTDPEGCPLSNFKDSLGNPTHILRIGESYKEKQRTIQAKKEVEQRRTGGYSRKYASKAKNLADDMVRNTARDLLYYAVTQDAMLIFENLSRGFGRQGKRTFMAERQYTRMEDWLTAKLAYEGLPSKTYLSKTLAQYTSKTCSNCGFTITSADYDRVLEKLKKTATGWMTTINGKELKVEGQITYYNRYKRQNVVKDLSVELDRLSEESVNNDISSWTKGRSGEALSLLKKRFSHRPVQEKFVCLNCGFETHADEQAALNIARSWLFLRSQEYKKYQTNKTTGNTDKRAFVETWQSFYRKKLKEVWKPAV

SEQ ID NO: 26922 - protein, 978 aa, synthetic construct
  REGION 1..978: note = engineered CasX variant
QEIKRINKIRRRLVKDSNTKKAGKTGPMKTLLVRVMTPDLRERLENLRKKPENIPQPISNTSRANLNKLLTDYTEMKKAILHVYWEEFQKDPVGLMSRVAQPASKKIDQNKLKPEMDEKGNLTTAGFACSQCGQPLFVYKLEQVSEKGKAYTNYFGRCNVAEHEKLILLAQLKPEKDSDEAVTYSLGKFGQRALDFYSIHVTKESTHPVKPLAQIAGNRYASGPVGKALSDACMGTIASFLSKYQDIIIEHQKVVKGNQKRLESLRELAGKENLEYPSVTLPPQPHTKEGVDAYNEVIARVRMWVNLNLWQKLKLSRDDAKPLLRLKGFPSFPLVERQANEVDWWDMVCNVKKLINEKKEDGKVFWQNLAGYKRQEALRPYLSSEEDRKKGKKFARYQLGDLLLHLEKKHGEDWGKVYDEAWERIDKKVEGLSKHIKLEEERRSEDAQSKAALTDWLRAKASFVIEGLKEADKDEFCRCELKLQKWYGDLRGKPFAIEAENSILDISGFSKQYNCAFIWQKDGVKKLNLYLIINYFKGGKLRFKKIKPEAFEANRFYTVINKKSGEIVPMEVNFNFDDPNLIILPLAFGKRQGREFIWNDLLSLETGSLKLANGRVIEKTLYNRRTRQDEPALFVALTFERREVLDSSNIKPMNLIGVDRGENIPAVIALTDPEGCPLSNFKDSLGNPTHILRIGESYKEKQRTIQAKKEVEQRRAGGYSRKYASKAKNLADDMVRNTARDLLYYAVTQDAMLIFENLSRGFGRQGKRTFMAERQYTRMEDWLTAKLAYEGLPSKTYLSKTLAQYTSKTCSNCGFTITSADYDRVLEKLKKTATGWMTTINGKELKVEGQITYYNRYKRQNVVKDLSVELDRLSEESVNNDISSWTKGRSGEALSLLKKRFSHRPVQEKFVCLNCGFETHADEQAALNIARSWLFLRSQEYKKYQTNKTTGNTDKRAFVETWQSFYRKKLKEVWKPAV

SEQ ID NO: 26923 - protein, 978 aa, synthetic construct
  REGION 1..978: note = engineered CasX variant
QEIKRINKIRRRLVKDSNTKKAGKTGPMKTLLVRVMTPDLRERLENLRKKPENIPQPISNTSRANLNKLLTDYTEMKKAILHVYWEEFQKDPVGLMSRVAQPASKKIDQNKLKPEMDEKGNLTTAGFACSQCGQPLFVYKLEQVSEKGKAYTNYFGRCNVAEHEKLILLAQLKPEKDSDEAVTYSLGKFGQRALDFYSIHVTKESTHPVKPLAQIAGNRYASGPVGKALSDACMGTIASFLSKYQDIIIEHQKVVKGNQKRLESLRELAGKENLEYPSVTLPPQPHTKEGVDAYNEVIARVRMWVNLNLWQKLKLSRDDAKPLLRLKGFPSFPLVERQANEVDWWDMVCNVKKLINEKKEDGKVFWQNLAGYKRQEALRPYLSSEEDRKKGKKFARYQLGDLLLHLEKKHGEDWGKVYDEAWERIDKKVEGLSKHIKLEEERRSEDAQSKAALTDWLRAKASFVIEGLKEADKDEFCRCELKLQKWYGDLRGKPFAIEAENSILDISGFSKQYNCAFIWQKDGVKKLNLYLIINYFKGGKLRFKKIKPEAFEANRFYTVINKKSGEIVPMEVNFNFDDPNLIILPLAFGKRQGREFIWNDLLSLETGSLKLANGRVIEKTLYNRRTRQDEPALFVALTFERREVLDSSNIKPMNLIGVDRGENIPAVIALTDPEGCPLSMFKDSNGNPTHILRIGESYKEKQRTIQAKKEVEQRRAGGYSRKYASKAKNLADDMVRNTARDLLYYAVTQDAMLIFENLSRGFGRQGKRTFMAERQYTRMEDWLTAKLAYEGLPSKTYLSKTLAQYTSKTCSNCGFTITSADYDRVLEKLKKTATGWMTTINGKELKVEGQITYYNRYKRQNVVKDLSVELDRLSEESVNNDISSWTKGRSGEALSLLKKRFSHRPVQEKFVCLNCGFETHADEQAALNIARSWLFLRSQEYKKYQTNKTTGNTDKRAFVETWQSFYRKKLKEVWKPAV

SEQ ID NO: 26924 - protein, 978 aa, synthetic construct
  REGION 1..978: note = engineered CasX variant
QEIKRINKIRRRLVKDSNTKKAGKTGPMKTLLVRVMTPDLRERLENLRKKPENIPQPISNTSRANLNKLLTDYTEMKKAILHVYWEEFQKDPVGLMSRVAQPASKKIDQNKLKPEMDEKGNLTTAGFACSQCGQPLFVYKLEQVSEKGKAYTNYFGRCNVAEHEKLILLAQLKPEKDSDEAVTYSLGKFGQRALDFYSIHVTKESTHPVKPLAQIAGNRYASGPVGKALSDACMGTIASFLSKYQDIIIEHQKVVKGNQKRLESLRELAGKENLEYPSVTLPPQPHTKEGVDAYNEVIARVRMWVNLNLWQKLKLSRDDAKPLLRLKGFPSFPLVERQANEVDWWDMVCNVKKLINEKKEDGKVFWQNLAGYKRQEALRPYLSSEEDRKKGKKFARYQLGDLLLHLEKKHGEDWGKVYDEAWERIDKKVEGLSKHIKLEEERRSEDAQSKAALTDWLRAKASFVIEGLKEADKDEFCRCELKLQKWYGDLRGKPFAIEAENSILDISGFSKQYNCAFIWQKDGVKKLNLYLIINYFKGGKLRFKKIKPEAFEANRFYTVINKKSGEIVPMEVNFNFDDPNLIILPLAFGKRQGREFIWNDLLSLETGSLKLANGRVIEKTLYNRRTRQDEPALFVALTFERREVLDSSNIKPMNLIGVDRGENIPAVIALTDPEGCPLSMFKDSLGNPTHILRIGESYKEVQRTIQAKKEVEQRRAGGYSRKYASKAKNLADDMVRNTARDLLYYAVTQDAMLIFENLSRGFGRQGKRTFMAERQYTRMEDWLTAKLAYEGLPSKTYLSKTLAQYTSKTCSNCGFTITSADYDRVLEKLKKTATGWMTTINGKELKVEGQITYYNRYKRQNVVKDLSVELDRLSEESVNNDISSWTKGRSGEALSLLKKRFSHRPVQEKFVCLNCGFETHADEQAALNIARSWLFLRSQEYKKYQTNKTTGNTDKRAFVETWQSFYRKKLKEVWKPAV

SEQ ID NO: 26925 - protein, 978 aa, synthetic construct
  REGION 1..978: note = engineered CasX variant
QEIKRINKIRRRLVKDSNTKKAGKTGPMKTLLVRVMTPDLRERLENLRKKPENIPQPISNTSRANLNKLLTDYTEMKKAILHVYWEEFQKDPVGLMSRVAQPASKKIDQNKLKPEMDEKGNLTTAGFACSQCGQPLFVYKLEQVSEKGKAYTNYFGRCNVAEHEKLILLAQLKPEKDSDEAVTYSLGKFGQRALDFYSIHVTKESTHPVKPLAQIAGNRYASGPVGKALSDACMGTIASFLSKYQDIIIEHQKVVKGNQKRLESLRELAGKENLEYPSVTLPPQPHTKEGVDAYNEVIARVRMWVNLNLWQKLKLSRDDAKPLLRLKGFPSFPLVERQANEVDWWDMVCNVKKLINEKKEDGKVFWQNLAGYKRQEALRPYLSSEEDRKKGKKFARYQLGDLLLHLEKKHGEDWGKVYDEAWERIDKKVEGLSKHIKLEEERRSEDAQSKAALTDWLRAKASFVIEGLKEADKDEFCRCELKLQKWYGDLRGKPFAIEAENSILDISGFSKQYNCAFIWQKDGVKKLNLYLIINYFKGGKLRFKKIKPEAFEANRFYTVINKKSGEIVPMEVNFNFDDPNLIILPLAFGKRQGREFIWNDLLSLETGSLKLANGRVIEKTLYNRRTRQDEPALFVALTFERREVLDSSNIKPMNLIGVDRGENIPAVIALTDPEGCPLSMFKDSLGNPTHILRIGESYKEKQRTITAKKEVEQRRAGGYSRKYASKAKNLADDMVRNTARDLLYYAVTQDAMLIFENLSRGFGRQGKRTFMAERQYTRMEDWLTAKLAYEGLPSKTYLSKTLAQYTSKTCSNCGFTITSADYDRVLEKLKKTATGWMTTINGKELKVEGQITYYNRYKRQNVVKDLSVELDRLSEESVNNDISSWTKGRSGEALSLLKKRFSHRPVQEKFVCLNCGFETHADEQAALNIARSWLFLRSQEYKKYQTNKTTGNTDKRAFVETWQSFYRKKLKEVWKPAV

SEQ ID NO: 26926 - protein, 978 aa, synthetic construct
  REGION 1..978: note = engineered CasX variant
QEIKRINKIRRRLVKDSNTKKAGKTGPMKTLLVRVMTPDLRERLENLRKKPENIPQPISNTSRANLNKLLTDYTEMKKAILHVYWEEFQKDPVGLMSRVAQPASKKIDQNKLKPEMDEKGNLTTAGFACSQCGQPLFVYKLEQVSEKGKAYTNYFGRCNVAEHEKLILLAQLKPEKDSDEAVTYSLGKFGQRALDFYSIHVTKESTHPVKPLAQIAGNRYASGPVGKALSDACMGTIASFLSKYQDIIIEHQKVVKGNQKRLESLRELAGKENLEYPSVTLPPQPHTKEGVDAYNEVIARVRMWVNLNLWQKLKLSRDDAKPLLRLKGFPSFPLVERQANEVDWWDMVCNVKKLINEKKEDGKVFWQNLAGYKRQEALRPYLSSEEDRKKGKKFARYQLGDLLLHLEKKHGEDWGKVYDEAWERIDKKVEGLSKHIKLEEERRSEDAQSKAALTDWLRAKASFVIEGLKEADKDEFCRCELKLQKWYGDLRGKPFAIEAENSILDISGFSKQYNCAFIWQKDGVKKLNLYLIINYFKGGKLRFKKIKPEAFEANRFYTVINKKSGEIVPMEVNFNFDDPNLIILPLAFGKRQGREFIWNDLLSLETGSLKLANGRVIEKTLYNRRTRQDEPALFVALTFERREVLDSSNIKPMNLIGVDRGENIPAVIALTDPEGCPLSMFKDSLGNPTHILRIGESYKEKQRTIQAKKEVEQRRAGGYSRKYASKAKNLADDMVRNTARDLLYYAVTQDAMLIFENLSRGFGRQGKRTFMAERQYTRMEDWLTAKLAYEGLPSKTYLSKTLAQYTSKTCSNCGFTITSADYDRVLEKLKKTATGWMTTINGKELKVEGQITYYNRYKRQNVVKDLSVELDRLSEESVNNDISSWTKGRSGEALSLLKKRFSHRPVQEKFVCLNCGFETHADEQAALNIARSWLFLRSQEYKKYQTNKTTGNTDKRAFVETWQSFYRKKLKEVWKPAV

SEQ ID NO: 26927 - protein, 978 aa, synthetic construct
  REGION 1..978: note = engineered CasX variant
QEIKRINKIRRRLVKDSNTKKAGKTGPMKTLLVRVMTPDLRERLENLRKKPENIPQPISNTSRANLNKLLTDYTEMKKAILHVYWEEFQKDPVGLMSRVAQPASKKIDQNKLKPEMDEKGNLTTAGFACSQCGQPLFVYKLEQVSEKGKAYTNYFGRCNVAEHEKLILLAQLKPEKDSDEAVTYSLGKFGQRALDFYSIHVTKESTHPVKPLAQIAGNRYASGPVGKALSDACMGTIASFLSKYQDIIIEHQKVVKGNQKRLESLRELAGKENLEYPSVTLPPQPHTKEGVDAYNEVIARVRMWVNLNLWQKLKLSRDDAKPLLRLKGFPSFPLVERQANEVDWWDMVCNVKKLINEKKEDGKVFWQNLAGYKRQEALRPYLSSEEDRKKGKKFARYQLGDLLLHLEKKHGEDWGKVYDEAWERIDKKVEGLSKHIKLEEERRSEDAQSKAALTDWLRAKASFVIEGLKEADKDEFCRCELKLQKWYGDLRGKPFAIEAENSILDISGFSKQYNCAFIWQKDGVKKLNLYLIINYFKGGKLRFKKIKPEAFEANRFYTVINKKSGEIVPMEVNFNFDDPNLIILPLAFGKRQGREFIWNDLLSLETGSLKLANGRVIEKTLYNRRTRQDEPALFVALTFERREVLDSSNIKPMNLIGVDRGENIPAVIALTDPEGCPLSMFKDSLGNPTHILRIGESYKEKQRTIQAIKEVEQRRAGGYSRKYASKAKNLADDMVRNTARDLLYYAVTQDAMLIFENLSRGFGRQGKRTFMAERQYTRMEDWLTAKLAYEGLPSKTYLSKTLAQYTSKTCSNCGFTITSADYDRVLEKLKKTATGWMTTINGKELKVEGQITYYNRYKRQNVVKDLSVELDRLSEESVNNDISSWTKGRSGEALSLLKKRFSHRPVQEKFVCLNCGFETHADEQAALNIARSWLFLRSQEYKKYQTNKTTGNTDKRAFVETWQSFYRKKLKEVWKPAV

SEQ ID NO: 26928 - protein, 978 aa, synthetic construct
  REGION 1..978: note = engineered CasX variant
QEIKRINKIRRRLVKDSNTKKAGKTGPMKTLLVRVMTPDLRERLENLRKKPENIPQPISNTSRANLNKLLTDYTEMKKAILHVYWEEFQKDPVGLMSRVAQPASKKIDQNKLKPEMDEKGNLTTAGFACSQCGQPLFVYKLEQVSEKGKAYTNYFGRCNVAEHEKLILLAQLKPEKDSDEAVTYSLGKFGQRALDFYSIHVTKESTHPVKPLAQIAGNRYASGPVGKALSDACMGTIASFLSKYQDIIIEHQKVVKGNQKRLESLRELAGKENLEYPSVTLPPQPHTKEGVDAYNEVIARVRMWVNLNLWQKLKLSRDDAKPLLRLKGFPSFPLVERQANEVDWWDMVCNVKKLINEKKEDGKVFWQNLAGYKRQEALRPYLSSEEDRKKGKKFARYQLGDLLLHLEKKHGEDWGKVYDEAWERIDKKVEGLSKHIKLEEERRSEDAQSKAALTDWLRAKASFVIEGLKEADKDEFCRCELKLQKWYGDLRGKPFAIEAENSILDISGFSKQYNCAFIWQKDGVKKLNLYLIINYFKGGKLRFKKIKPEAFEANRFYTVINKKSGEIVPMEVNFNFDDPNLIILPLAFGKRQGREFIWNDLLSLETGSLKLANGRVIEKTLYNRRTRQDEPALFVALTFERREVLDSSNIKPMNLIGVDRGENIPAVIALTDPEGCPLSMFKDSLGNPTHILRIGESYKEKQRTFQAKKEVEQRRAGGYSRKYASKAKNLADDMVRNTARDLLYYAVTQDAMLIFENLSRGFGRQGKRTFMAERQYTRMEDWLTAKLAYEGLPSKTYLSKTLAQYTSKTCSNCGFTITSADYDRVLEKLKKTATGWMTTINGKELKVEGQITYYNRYKRQNVVKDLSVELDRLSEESVNNDISSWTKGRSGEALSLLKKRFSHRPVQEKFVCLNCGFETHADEQAALNIARSWLFLRSQEYKKYQTNKTTGNTDKRAFVETWQSFYRKKLKEVWKPAV

SEQ ID NO: 26929 - protein, 978 aa, synthetic construct
  REGION 1..978: note = engineered CasX variant
QEIKRINKIRRRLVKDSNTKKAGKTGPMKTLLVRVMTPDLRERLENLRKKPENIPQPISNTSRANLNKLLTDYTEMKKAILHVYWEEFQKDPVGLMSRVAQPASKKIDQNKLKPEMDEKGNLTTAGFACSQCGQPLFVYKLEQVSEKGKAYTNYFGRCNVAEHEKLILLAQLKPEKDSDEAVTYSLGKFGQRALDFYSIHVTKESTHPVKPLAQIAGNRYASGPVGKALSDACMGTIASFLSKYQDIIIEHQKVVKGNQKRLESLRELAGKENLEYPSVTLPPQPHTKEGVDAYNEVIARVRMWVNLNLWQKLKLSRDDAKPLLRLKGFPSFPLVERQANEVDWWDMVCNVKKLINEKKEDGKVFWQNLAGYKRQEALRPYLSSEEDRKKGKKFARYQLGDLLLHLEKKHGEDWGKVYDEAWERIDKKVEGLSKHIKLEEERRSEDAQSKAALTDWLRAKASFVIEGLKEADKDEFCRCELKLQKWYGDLRGKPFAIEAENSILDISGFSKQYNCAFIWQKDGVKKLNLYLIINYFKGGKLRFKKIKPEAFEANRFYTVINKKSGEIVPMEVNFNFDDPNLIILPLAFGKRQGREFIWNDLLSLETGSLKLANGRVIEKTLYNRRTRQDEPALFVALTFERREVLDSSNIKPMNLIGVDRGENIPAVIALTDPEGCPLSMFKDSLGNPTHILRIGEIYKEKQRTIQAKKEVEQRRAGGYSRKYASKAKNLADDMVRNTARDLLYYAVTQDAMLIFENLSRGFGRQGKRTFMAERQYTRMEDWLTAKLAYEGLPSKTYLSKTLAQYTSKTCSNCGFTITSADYDRVLEKLKKTATGWMTTINGKELKVEGQITYYNRYKRQNVVKDLSVELDRLSEESVNNDISSWTKGRSGEALSLLKKRFSHRPVQEKFVCLNCGFETHADEQAALNIARSWLFLRSQEYKKYQTNKTTGNTDKRAFVETWQSFYRKKLKEVWKPAV

SEQ ID NO: 26930 - protein, 978 aa, synthetic construct
  REGION 1..978: note = engineered CasX variant
QEIKRINKIRRRLVKDSNTKKAGKTGPMKTLLVRVMTPDLRERLENLRKKPENIPQPISNTSRANLNKLLTDYTEMKKAILHVYWEEFQKDPVGLMSRVAQPASKKIDQNKLKPEMDEKGNLTTAGFACSQCGQPLFVYKLEQVSEKGKAYTNYFGRCNVAEHEKLILLAQLKPEKDSDEAVTYSLGKFGQRALDFYSIHVTKESTHPVKPLAQIAGNRYASGPVGKALSDACMGTIASFLSKYQDIIIEHQKVVKGNQKRLESLRELAGKENLEYPSVTLPPQPHTKEGVDAYNEVIARVRMWVNLNLWQKLKLSRDDAKPLLRLKGFPSFPLVERQANEVDWWDMVCNVKKLINEKKEDGKVFWQNLAGYKRQEALRPYLSSEEDRKKGKKFARYQLGDLLLHLEKKHGEDWGKVYDEAWERIDKKVEGLSKHIKLEEERRSEDAQSKAALTDWLRAKASFVIEGLKEADKDEFCRCELKLQKWYGDLRGKPFAIEAENSILDISGFSKQYNCAFIWQKDGVKKLNLYLIINYFKGGKLRFKKIKPEAFEANRFYTVINKKSGEIVPMEVNFNFDDPNLIILPLAFGKRQGREFIWNDLLSLETGSLKLANGRVIEKTLYNRRTRQDEPALFVALTFERREVLDSSNIKPMNLIGVDRGENIPAVIALTDPEGCPLSMFKDSLGNPTFILRIGESYKEVQRTIQAKKEVEQRRAGGYSRKYASKAKNLADDMVRNTARDLLYYAVTQDAMLIFENLSRGFGRQGKRTFMAERQYTRMEDWLTAKLAYEGLPSKTYLSKTLAQYTSKTCSNCGFTITSADYDRVLEKLKKTATGWMTTINGKELKVEGQITYYNRYKRQNVVKDLSVELDRLSEESVNNDISSWTKGRSGEALSLLKKRFSHRPVQEKFVCLNCGFETHADEQAALNIARSWLFLRSQEYKKYQTNKTTGNTDKRAFVETWQSFYRKKLKEVWKPAV

SEQ ID NO: 26931 - protein, 978 aa, synthetic construct
  REGION 1..978: note = engineered CasX variant
QEIKRINKIRRRLVKDSNTKKAGKTGPMKTLLVRVMTPDLRERLENLRKKPENIPQPISNTSRANLNKLLTDYTEMKKAILHVYWEEFQKDPVGLMSRVAQPASKKIDQNKLKPEMDEKGNLTTAGFACSQCGQPLFVYKLEQVSEKGKAYTNYFGRCNVAEHEKLILLAQLKPEKDSDEAVTYSLGKFGQRALDFYSIHVTKESTHPVKPLAQIAGNRYASGPVGKALSDACMGTIASFLSKYQDIIIEHQKVVKGNQKRLESLRELAGKENLEYPSVTLPPQPHTKEGVDAYNEVIARVRMWVNLNLWQKLKLSRDDAKPLLRLKGFPSFPLVERQANEVDWWDMVCNVKKLINEKKEDGKVFWQNLAGYKRQEALRPYLSSEEDRKKGKKFARYQLGDLLLHLEKKHGEDWGKVYDEAWERIDKKVEGLSKHIKLEEERRSEDAQSKAALTDWLRAKASFVIEGLKEADKDEFCRCELKLQKWYGDLRGKPFAIEAENSILDISGFSKQYNCAFIWQKDGVKKLNLYLIINYFKGGKLRFKKIKPEAFEANRFYTVINKKSGEIVPMEVNFNFDDPNLIILPLAFGKRQGREFIWNDLLSLETGSLKLANGRVIEKTLYNRRTRQDEPALFVALTFERREVLDSSNIKPMNLIGVDRGENIPAVIALTDPEGCPLSMFKDSLGNKTHILRIGESYKEKQRTIQAKKEVEQRRAGGYSRKYASKAKNLADDMVRNTARDLLYYAVTQDAMLIFENLSRGFGRQGKRTFMAERQYTRMEDWLTAKLAYEGLPSKTYLSKTLAQYTSKTCSNCGFTITSADYDRVLEKLKKTATGWMTTINGKELKVEGQITYYNRYKRQNVVKDLSVELDRLSEESVNNDISSWTKGRSGEALSLLKKRFSHRPVQEKFVCLNCGFETHADEQAALNIARSWLFLRSQEYKKYQTNKTTGNTDKRAFVETWQSFYRKKLKEVWKPAV

SEQ ID NO: 26932 - protein, 978 aa, synthetic construct
  REGION 1..978: note = engineered CasX variant
QEIKRINKIRRRLVKDSNTKKAGKTGPMKTLLVRVMTPDLRERLENLRKKPENIPQPISNTSRANLNKLLTDYTEMKKAILHVYWEEFQKDPVGLMSRVAQPASKKIDQNKLKPEMDEKGNLTTAGFACSQCGQPLFVYKLEQVSEKGKAYTNYFGRCNVAEHEKLILLAQLKPEKDSDEAVTYSLGKFGQRALDFYSIHVTKESTHPVKPLAQIAGNRYASGPVGKALSDACMGTIASFLSKYQDIIIEHQKVVKGNQKRLESLRELAGKENLEYPSVTLPPQPHTKEGVDAYNEVIARVRMWVNLNLWQKLKLSRDDAKPLLRLKGFPSFPLVERQANEVDWWDMVCNVKKLINEKKEDGKVFWQNLAGYKRQEALRPYLSSEEDRKKGKKFARYQLGDLLLHLEKKHGEDWGKVYDEAWERIDKKVEGLSKHIKLEEERRSEDAQSKAALTDWLRAKASFVIEGLKEADKDEFCRCELKLQKWYGDLRGKPFAIEAENSILDISGFSKQYNCAFIWQKDGVKKLNLYLIINYFKGGKLRFKKIKPEAFEANRFYTVINKKSGEIVPMEVNFNFDDPNLIILPLAFGKRQGREFIWNDLLSLETGSLKLANGRVIEKTLYNRRTRQDEPALFVALTFERREVLDSSNIKPMNLIGVDRGENIPAVIALTDPEGCPLSMFKDSLGNKTHILRIGEIYKEKQRTIQAKKEVEQRRAGGYSRKYASKAKNLADDMVRNTARDLLYYAVTQDAMLIFENLSRGFGRQGKRTFMAERQYTRMEDWLTAKLAYEGLPSKTYLSKTLAQYTSKTCSNCGFTITSADYDRVLEKLKKTATGWMTTINGKELKVEGQITYYNRYKRQNVVKDLSVELDRLSEESVNNDISSWTKGRSGEALSLLKKRFSHRPVQEKFVCLNCGFETHADEQAALNIARSWLFLRSQEYKKYQTNKTTGNTDKRAFVETWQSFYRKKLKEVWKPAV

SEQ ID NO: 26933 - protein, 978 aa, synthetic construct
  REGION 1..978: note = engineered CasX variant
QEIKRINKIRRRLVKDSNTKKAGKTGPMKTLLVRVMTPDLRERLENLRKKPENIPQPISNTSRANLNKLLTDYTEMKKAILHVYWEEFQKDPVGLMSRVAQPASKKIDQNKLKPEMDEKGNLTTAGFACSQCGQPLFVYKLEQVSEKGKAYTNYFGRCNVAEHEKLILLAQLKPEKDSDEAVTYSLGKFGQRALDFYSIHVTKESTHPVKPLAQIAGNRYASGPVGKALSDACMGTIASFLSKYQDIIIEHQKVVKGNQKRLESLRELAGKENLEYPSVTLPPQPHTKEGVDAYNEVIARVRMWVNLNLWQKLKLSRDDAKPLLRLKGFPSFPLVERQANEVDWWDMVCNVKKLINEKKEDGKVFWQNLAGYKRQEALRPYLSSEEDRKKGKKFARYQLGDLLLHLEKKHGEDWGKVYDEAWERIDKKVEGLSKHIKLEEERRSEDAQSKAALTDWLRAKASFVIEGLKEADKDEFCRCELKLQKWYGDLRGKPFAIEAENSILDISGFSKQYNCAFIWQKDGVKKLNLYLIINYFKGGKLRFKKIKPEAFEANRFYTVINKKSGEIVPMEVNFNFDDPNLIILPLAFGKRQGREFIWNDLLSLETGSLKLANGRVIEKTLYNRRTRQDEPALFVALTFERREVLDSSNIKPMNLIGVDRGENIPAVIALTDPEGCPLSMFKDSDGNPTHILRIGESYKEKQRTIQAKKEVEQRRAGGYSRKYASKAKNLADDMVRNTARDLLYYAVTQDAMLIFENLSRGFGRQGKRTFMAERQYTRMEDWLTAKLAYEGLPSKTYLSKTLAQYTSKTCSNCGFTITSADYDRVLEKLKKTATGWMTTINGKELKVEGQITYYNRYKRQNVVKDLSVELDRLSEESVNNDISSWTKGRSGEALSLLKKRFSHRPVQEKFVCLNCGFETHADEQAALNIARSWLFLRSQEYKKYQTNKTTGNTDKRAFVETWQSFYRKKLKEVWKPAV

SEQ ID NO: 26934 - protein, 978 aa, synthetic construct
  REGION 1..978: note = engineered CasX variant
QEIKRINKIRRRLVKDSNTKKAGKTGPMKTLLVRVMTPDLRERLENLRKKPENIPQPISNTSRANLNKLLTDYTEMKKAILHVYWEEFQKDPVGLMSRVAQPASKKIDQNKLKPEMDEKGNLTTAGFACSQCGQPLFVYKLEQVSEKGKAYTNYFGRCNVAEHEKLILLAQLKPEKDSDEAVTYSLGKFGQRALDFYSIHVTKESTHPVKPLAQIAGNRYASGPVGKALSDACMGTIASFLSKYQDIIIEHQKVVKGNQKRLESLRELAGKENLEYPSVTLPPQPHTKEGVDAYNEVIARVRMWVNLNLWQKLKLSRDDAKPLLRLKGFPSFPLVERQANEVDWWDMVCNVKKLINEKKEDGKVFWQNLAGYKRQEALRPYLSSEEDRKKGKKFARYQLGDLLLHLEKKHGEDWGKVYDEAWERIDKKVEGLSKHIKLEEERRSEDAQSKAALTDWLRAKASFVIEGLKEADKDEFCRCELKLQKWYGDLRGKPFAIEAENSILDISGFSKQYNCAFIWQKDGVKKLNLYLIINYFKGGKLRFKKIKPEAFEANRFYTVINKKSGEIVPMEVNFNFDDPNLIILPLAFGKRQGREFIWNDLLSLETGSLKLANGRVIEKTLYNRRTRQDEPALFVALTFERREVLDSSNIKPMNLIGVDRGENIPAVIALTDPEGCPLSLFNDSLGNPTHILRIGESYKEKQRTIQAKKEVEQRRAGGYSRKYASKAKNLADDMVRNTARDLLYYAVTQDAMLIFENLSRGFGRQGKRTFMAERQYTRMEDWLTAKLAYEGLPSKTYLSKTLAQYTSKTCSNCGFTITSADYDRVLEKLKKTATGWMTTINGKELKVEGQITYYNRYKRQNVVKDLSVELDRLSEESVNNDISSWTKGRSGEALSLLKKRFSHRPVQEKFVCLNCGFETHADEQAALNIARSWLFLRSQEYKKYQTNKTTGNTDKRAFVETWQSFYRKKLKEVWKPAV

SEQ ID NO: 26935 - protein, 978 aa, synthetic construct
  REGION 1..978: note = engineered CasX variant
QEIKRINKIRRRLVKDSNTKKAGKTGPMKTLLVRVMTPDLRERLENLRKKPENIPQPISNTSRANLNKLLTDYTEMKKAILHVYWEEFQKDPVGLMSRVAQPASKKIDQNKLKPEMDEKGNLTTAGFACSQCGQPLFVYKLEQVSEKGKAYTNYFGRCNVAEHEKLILLAQLKPEKDSDEAVTYSLGKFGQRALDFYSIHVTKESTHPVKPLAQIAGNRYASGPVGKALSDACMGTIASFLSKYQDIIIEHQKVVKGNQKRLESLRELAGKENLEYPSVTLPPQPHTKEGVDAYNEVIARVRMWVNLNLWQKLKLSRDDAKPLLRLKGFPSFPLVERQANEVDWWDMVCNVKKLINEKKEDGKVFWQNLAGYKRQEALRPYLSSEEDRKKGKKFARYQLGDLLLHLEKKHGEDWGKVYDEAWERIDKKVEGLSKHIKLEEERRSEDAQSKAALTDWLRAKASFVIEGLKEADKDEFCRCELKLQKWYGDLRGKPFAIEAENSILDISGFSKQYNCAFIWQKDGVKKLNLYLIINYFKGGKLRFKKIKPEAFEANRFYTVINKKSGEIVPMEVNFNFDDPNLIILPLAFGKRQGREFIWNDLLSLETGSLKLANGRVIEKTLYNRRTRQDEPALFVALTFERREVLDSSNIKPMNLIGVDRGENIPAVIALTDPEGCPLSLFKDSLGNPTHILRIGESYKSKQRTIQAKKEVEQRRAGGYSRKYASKAKNLADDMVRNTARDLLYYAVTQDAMLIFENLSRGFGRQGKRTFMAERQYTRMEDWLTAKLAYEGLPSKTYLSKTLAQYTSKTCSNCGFTITSADYDRVLEKLKKTATGWMTTINGKELKVEGQITYYNRYKRQNVVKDLSVELDRLSEESVNNDISSWTKGRSGEALSLLKKRFSHRPVQEKFVCLNCGFETHADEQAALNIARSWLFLRSQEYKKYQTNKTTGNTDKRAFVETWQSFYRKKLKEVWKPAV

SEQ ID NO: 26936 - protein, 978 aa, synthetic construct
  REGION 1..978: note = engineered CasX variant
QEIKRINKIRRRLVKDSNTKKAGKTGPMKTLLVRVMTPDLRERLENLRKKPENIPQPISNTSRANLNKLLTDYTEMKKAILHVYWEEFQKDPVGLMSRVAQPASKKIDQNKLKPEMDEKGNLTTAGFACSQCGQPLFVYKLEQVSEKGKAYTNYFGRCNVAEHEKLILLAQLKPEKDSDEAVTYSLGKFGQRALDFYSIHVTKESTHPVKPLAQIAGNRYASGPVGKALSDACMGTIASFLSKYQDIIIEHQKVVKGNQKRLESLRELAGKENLEYPSVTLPPQPHTKEGVDAYNEVIARVRMWVNLNLWQKLKLSRDDAKPLLRLKGFPSFPLVERQANEVDWWDMVCNVKKLINEKKEDGKVFWQNLAGYKRQEALRPYLSSEEDRKKGKKFARYQLGDLLLHLEKKHGEDWGKVYDEAWERIDKKVEGLSKHIKLEEERRSEDAQSKAALTDWLRAKASFVIEGLKEADKDEFCRCELKLQKWYGDLRGKPFAIEAENSILDISGFSKQYNCAFIWQKDGVKKLNLYLIINYFKGGKLRFKKIKPEAFEANRFYTVINKKSGEIVPMEVNFNFDDPNLIILPLAFGKRQGREFIWNDLLSLETGSLKLANGRVIEKTLYNRRTRQDEPALFVALTFERREVLDSSNIKPMNLIGVDRGENIPAVIALTDPEGCPLSLFKDSLGNPTHILRIGESYKRKQRTIQAKKEVEQRRAGGYSRKYASKAKNLADDMVRNTARDLLYYAVTQDAMLIFENLSRGFGRQGKRTFMAERQYTRMEDWLTAKLAYEGLPSKTYLSKTLAQYTSKTCSNCGFTITSADYDRVLEKLKKTATGWMTTINGKELKVEGQITYYNRYKRQNVVKDLSVELDRLSEESVNNDISSWTKGRSGEALSLLKKRFSHRPVQEKFVCLNCGFETHADEQAALNIARSWLFLRSQEYKKYQTNKTTGNTDKRAFVETWQSFYRKKLKEVWKPAV

SEQ ID NO: 26937 - protein, 978 aa, synthetic construct
  REGION 1..978: note = engineered CasX variant
QEIKRINKIRRRLVKDSNTKKAGKTGPMKTLLVRVMTPDLRERLENLRKKPENIPQPISNTSRANLNKLLTDYTEMKKAILHVYWEEFQKDPVGLMSRVAQPASKKIDQNKLKPEMDEKGNLTTAGFACSQCGQPLFVYKLEQVSEKGKAYTNYFGRCNVAEHEKLILLAQLKPEKDSDEAVTYSLGKFGQRALDFYSIHVTKESTHPVKPLAQIAGNRYASGPVGKALSDACMGTIASFLSKYQDIIIEHQKVVKGNQKRLESLRELAGKENLEYPSVTLPPQPHTKEGVDAYNEVIARVRMWVNLNLWQKLKLSRDDAKPLLRLKGFPSFPLVERQANEVDWWDMVCNVKKLINEKKEDGKVFWQNLAGYKRQEALRPYLSSEEDRKKGKKFARYQLGDLLLHLEKKHGEDWGKVYDEAWERIDKKVEGLSKHIKLEEERRSEDAQSKAALTDWLRAKASFVIEGLKEADKDEFCRCELKLQKWYGDLRGKPFAIEAENSILDISGFSKQYNCAFIWQKDGVKKLNLYLIINYFKGGKLRFKKIKPEAFEANRFYTVINKKSGEIVPMEVNFNFDDPNLIILPLAFGKRQGREFIWNDLLSLETGSLKLANGRVIEKTLYNRRTRQDEPALFVALTFERREVLDSSNIKPMNLIGVDRGENIPAVIALTDPEGCPLSLFKDSLGNPTHILRIGESYKENQRTIQAKKEVEQRRAGGYSRKYASKAKNLADDMVRNTARDLLYYAVTQDAMLIFENLSRGFGRQGKRTFMAERQYTRMEDWLTAKLAYEGLPSKTYLSKTLAQYTSKTCSNCGFTITSADYDRVLEKLKKTATGWMTTINGKELKVEGQITYYNRYKRQNVVKDLSVELDRLSEESVNNDISSWTKGRSGEALSLLKKRFSHRPVQEKFVCLNCGFETHADEQAALNIARSWLFLRSQEYKKYQTNKTTGNTDKRAFVETWQSFYRKKLKEVWKPAV

SEQ ID NO: 26938 - protein, 978 aa, synthetic construct
  REGION 1..978: note = engineered CasX variant
QEIKRINKIRRRLVKDSNTKKAGKTGPMKTLLVRVMTPDLRERLENLRKKPENIPQPISNTSRANLNKLLTDYTEMKKAILHVYWEEFQKDPVGLMSRVAQPASKKIDQNKLKPEMDEKGNLTTAGFACSQCGQPLFVYKLEQVSEKGKAYTNYFGRCNVAEHEKLILLAQLKPEKDSDEAVTYSLGKFGQRALDFYSIHVTKESTHPVKPLAQIAGNRYASGPVGKALSDACMGTIASFLSKYQDIIIEHQKVVKGNQKRLESLRELAGKENLEYPSVTLPPQPHTKEGVDAYNEVIARVRMWVNLNLWQKLKLSRDDAKPLLRLKGFPSFPLVERQANEVDWWDMVCNVKKLINEKKEDGKVFWQNLAGYKRQEALRPYLSSEEDRKKGKKFARYQLGDLLLHLEKKHGEDWGKVYDEAWERIDKKVEGLSKHIKLEEERRSEDAQSKAALTDWLRAKASFVIEGLKEADKDEFCRCELKLQKWYGDLRGKPFAIEAENSILDISGFSKQYNCAFIWQKDGVKKLNLYLIINYFKGGKLRFKKIKPEAFEANRFYTVINKKSGEIVPMEVNFNFDDPNLIILPLAFGKRQGREFIWNDLLSLETGSLKLANGRVIEKTLYNRRTRQDEPALFVALTFERREVLDSSNIKPMNLIGVDRGENIPAVIALTDPEGCPLSLFKDSLGNPTHILRIGESYKENQQTIQAKKEVEQRRAGGYSRKYASKAKNLADDMVRNTARDLLYYAVTQDAMLIFENLSRGFGRQGKRTFMAERQYTRMEDWLTAKLAYEGLPSKTYLSKTLAQYTSKTCSNCGFTITSADYDRVLEKLKKTATGWMTTINGKELKVEGQITYYNRYKRQNVVKDLSVELDRLSEESVNNDISSWTKGRSGEALSLLKKRFSHRPVQEKFVCLNCGFETHADEQAALNIARSWLFLRSQEYKKYQTNKTTGNTDKRAFVETWQSFYRKKLKEVWKPAV

SEQ ID NO: 26939 - protein, 978 aa, synthetic construct
  REGION 1..978: note = engineered CasX variant
QEIKRINKIRRRLVKDSNTKKAGKTGPMKTLLVRVMTPDLRERLENLRKKPENIPQPISNTSRANLNKLLTDYTEMKKAILHVYWEEFQKDPVGLMSRVAQPASKKIDQNKLKPEMDEKGNLTTAGFACSQCGQPLFVYKLEQVSEKGKAYTNYFGRCNVAEHEKLILLAQLKPEKDSDEAVTYSLGKFGQRALDFYSIHVTKESTHPVKPLAQIAGNRYASGPVGKALSDACMGTIASFLSKYQDIIIEHQKVVKGNQKRLESLRELAGKENLEYPSVTLPPQPHTKEGVDAYNEVIARVRMWVNLNLWQKLKLSRDDAKPLLRLKGFPSFPLVERQANEVDWWDMVCNVKKLINEKKEDGKVFWQNLAGYKRQEALRPYLSSEEDRKKGKKFARYQLGDLLLHLEKKHGEDWGKVYDEAWERIDKKVEGLSKHIKLEEERRSEDAQSKAALTDWLRAKASFVIEGLKEADKDEFCRCELKLQKWYGDLRGKPFAIEAENSILDISGFSKQYNCAFIWQKDGVKKLNLYLIINYFKGGKLRFKKIKPEAFEANRFYTVINKKSGEIVPMEVNFNFDDPNLIILPLAFGKRQGREFIWNDLLSLETGSLKLANGRVIEKTLYNRRTRQDEPALFVALTFERREVLDSSNIKPMNLIGVDRGENIPAVIALTDPEGCPLSLFKDSLGNPTHILRIGESYKEKQRTIQASKQVEQRRAGGYSRKYASKAKNLADDMVRNTARDLLYYAVTQDAMLIFENLSRGFGRQGKRTFMAERQYTRMEDWLTAKLAYEGLPSKTYLSKTLAQYTSKTCSNCGFTITSADYDRVLEKLKKTATGWMTTINGKELKVEGQITYYNRYKRQNVVKDLSVELDRLSEESVNNDISSWTKGRSGEALSLLKKRFSHRPVQEKFVCLNCGFETHADEQAALNIARSWLFLRSQEYKKYQTNKTTGNTDKRAFVETWQSFYRKKLKEVWKPAV

SEQ ID NO: 26940 - protein, 978 aa, synthetic construct
  REGION 1..978: note = engineered CasX variant
QEIKRINKIRRRLVKDSNTKKAGKTGPMKTLLVRVMTPDLRERLENLRKKPENIPQPISNTSRANLNKLLTDYTEMKKAILHVYWEEFQKDPVGLMSRVAQPASKKIDQNKLKPEMDEKGNLTTAGFACSQCGQPLFVYKLEQVSEKGKAYTNYFGRCNVAEHEKLILLAQLKPEKDSDEAVTYSLGKFGQRALDFYSIHVTKESTHPVKPLAQIAGNRYASGPVGKALSDACMGTIASFLSKYQDIIIEHQKVVKGNQKRLESLRELAGKENLEYPSVTLPPQPHTKEGVDAYNEVIARVRMWVNLNLWQKLKLSRDDAKPLLRLKGFPSFPLVERQANEVDWWDMVCNVKKLINEKKEDGKVFWQNLAGYKRQEALRPYLSSEEDRKKGKKFARYQLGDLLLHLEKKHGEDWGKVYDEAWERIDKKVEGLSKHIKLEEERRSEDAQSKAALTDWLRAKASFVIEGLKEADKDEFCRCELKLQKWYGDLRGKPFAIEAENSILDISGFSKQYNCAFIWQKDGVKKLNLYLIINYFKGGKLRFKKIKPEAFEANRFYTVINKKSGEIVPMEVNFNFDDPNLIILPLAFGKRQGREFIWNDLLSLETGSLKLANGRVIEKTLYNRRTRQDEPALFVALTFERREVLDSSNIKPMNLIGVDRGENIPAVIALTDPEGCPLSLFKDSLGNPTHILRIGESYKEKQRTIQASKEVEQRRAGGYSRKYASKAKNLADDMVRNTARDLLYYAVTQDAMLIFENLSRGFGRQGKRTFMAERQYTRMEDWLTAKLAYEGLPSKTYLSKTLAQYTSKTCSNCGFTITSADYDRVLEKLKKTATGWMTTINGKELKVEGQITYYNRYKRQNVVKDLSVELDRLSEESVNNDISSWTKGRSGEALSLLKKRFSHRPVQEKFVCLNCGFETHADEQAALNIARSWLFLRSQEYKKYQTNKTTGNTDKRAFVETWQSFYRKKLKEVWKPAV

SEQ ID NO: 26941 - protein, 978 aa, synthetic construct
  REGION 1..978: note = engineered CasX variant
QEIKRINKIRRRLVKDSNTKKAGKTGPMKTLLVRVMTPDLRERLENLRKKPENIPQPISNTSRANLNKLLTDYTEMKKAILHVYWEEFQKDPVGLMSRVAQPASKKIDQNKLKPEMDEKGNLTTAGFACSQCGQPLFVYKLEQVSEKGKAYTNYFGRCNVAEHEKLILLAQLKPEKDSDEAVTYSLGKFGQRALDFYSIHVTKESTHPVKPLAQIAGNRYASGPVGKALSDACMGTIASFLSKYQDIIIEHQKVVKGNQKRLESLRELAGKENLEYPSVTLPPQPHTKEGVDAYNEVIARVRMWVNLNLWQKLKLSRDDAKPLLRLKGFPSFPLVERQANEVDWWDMVCNVKKLINEKKEDGKVFWQNLAGYKRQEALRPYLSSEEDRKKGKKFARYQLGDLLLHLEKKHGEDWGKVYDEAWERIDKKVEGLSKHIKLEEERRSEDAQSKAALTDWLRAKASFVIEGLKEADKDEFCRCELKLQKWYGDLRGKPFAIEAENSILDISGFSKQYNCAFIWQKDGVKKLNLYLIINYFKGGKLRFKKIKPEAFEANRFYTVINKKSGEIVPMEVNFNFDDPNLIILPLAFGKRQGREFIWNDLLSLETGSLKLANGRVIEKTLYNRRTRQDEPALFVALTFERREVLDSSNIKPMNLIGVDRGENIPAVIALTDPEGCPLSLFKDSLGNPTHILRIGESYKEKQRTIQAKKQVEQRRAGGYSRKYASKAKNLADDMVRNTARDLLYYAVTQDAMLIFENLSRGFGRQGKRTFMAERQYTRMEDWLTAKLAYEGLPSKTYLSKTLAQYTSKTCSNCGFTITSADYDRVLEKLKKTATGWMTTINGKELKVEGQITYYNRYKRQNVVKDLSVELDRLSEESVNNDISSWTKGRSGEALSLLKKRFSHRPVQEKFVCLNCGFETHADEQAALNIARSWLFLRSQEYKKYQTNKTTGNTDKRAFVETWQSFYRKKLKEVWKPAV

SEQ ID NO: 26942 - protein, 978 aa, synthetic construct
  REGION 1..978: note = engineered CasX variant
QEIKRINKIRRRLVKDSNTKKAGKTGPMKTLLVRVMTPDLRERLENLRKKPENIPQPISNTSRANLNKLLTDYTEMKKAILHVYWEEFQKDPVGLMSRVAQPASKKIDQNKLKPEMDEKGNLTTAGFACSQCGQPLFVYKLEQVSEKGKAYTNYFGRCNVAEHEKLILLAQLKPEKDSDEAVTYSLGKFGQRALDFYSIHVTKESTHPVKPLAQIAGNRYASGPVGKALSDACMGTIASFLSKYQDIIIEHQKVVKGNQKRLESLRELAGKENLEYPSVTLPPQPHTKEGVDAYNEVIARVRMWVNLNLWQKLKLSRDDAKPLLRLKGFPSFPLVERQANEVDWWDMVCNVKKLINEKKEDGKVFWQNLAGYKRQEALRPYLSSEEDRKKGKKFARYQLGDLLLHLEKKHGEDWGKVYDEAWERIDKKVEGLSKHIKLEEERRSEDAQSKAALTDWLRAKASFVIEGLKEADKDEFCRCELKLQKWYGDLRGKPFAIEAENSILDISGFSKQYNCAFIWQKDGVKKLNLYLIINYFKGGKLRFKKIKPEAFEANRFYTVINKKSGEIVPMEVNFNFDDPNLIILPLAFGKRQGREFIWNDLLSLETGSLKLANGRVIEKTLYNRRTRQDEPALFVALTFERREVLDSSNIKPMNLIGVDRGENIPAVIALTDPEGCPLSLFKDSLGNPTHILRIGESYKEKQRTIQAKKEVEQRRAGGYSRKYASKAKNLADDMVRNTARDLLYYAVTQDAMLIFENLSRGFGRQGKRTFMAERQYTRMEDWLTAKLAYEGLPSKTYLSKTLAQYTSKTCSNCGFTITSADYDRVLEKLKKTATGWMTTINGKELKVEGQITYYNRYKRQNVVKDLSVELDRLSEESVNNDISSWTKGRSGEALSLLKKRFSHRPVQEKFVCLNCGFETHADEQAALNIARSWLFLRSQEYKKYQTNKTTGNTDKRAFVETWQSFYRKKLKEVWKPAV

SEQ ID NO: 26943 - protein, 978 aa, synthetic construct
  REGION 1..978: note = engineered CasX variant
QEIKRINKIRRRLVKDSNTKKAGKTGPMKTLLVRVMTPDLRERLENLRKKPENIPQPISNTSRANLNKLLTDYTEMKKAILHVYWEEFQKDPVGLMSRVAQPASKKIDQNKLKPEMDEKGNLTTAGFACSQCGQPLFVYKLEQVSEKGKAYTNYFGRCNVAEHEKLILLAQLKPEKDSDEAVTYSLGKFGQRALDFYSIHVTKESTHPVKPLAQIAGNRYASGPVGKALSDACMGTIASFLSKYQDIIIEHQKVVKGNQKRLESLRELAGKENLEYPSVTLPPQPHTKEGVDAYNEVIARVRMWVNLNLWQKLKLSRDDAKPLLRLKGFPSFPLVERQANEVDWWDMVCNVKKLINEKKEDGKVFWQNLAGYKRQEALRPYLSSEEDRKKGKKFARYQLGDLLLHLEKKHGEDWGKVYDEAWERIDKKVEGLSKHIKLEEERRSEDAQSKAALTDWLRAKASFVIEGLKEADKDEFCRCELKLQKWYGDLRGKPFAIEAENSILDISGFSKQYNCAFIWQKDGVKKLNLYLIINYFKGGKLRFKKIKPEAFEANRFYTVINKKSGEIVPMEVNFNFDDPNLIILPLAFGKRQGREFIWNDLLSLETGSLKLANGRVIEKTLYNRRTRQDEPALFVALTFERREVLDSSNIKPMNLIGVDRGENIPAVIALTDPEGCPLSLFKDSLGNPTHILRIGESYKEKQQTIQAKKEVEQRRAGGYSRKYASKAKNLADDMVRNTARDLLYYAVTQDAMLIFENLSRGFGRQGKRTFMAERQYTRMEDWLTAKLAYEGLPSKTYLSKTLAQYTSKTCSNCGFTITSADYDRVLEKLKKTATGWMTTINGKELKVEGQITYYNRYKRQNVVKDLSVELDRLSEESVNNDISSWTKGRSGEALSLLKKRFSHRPVQEKFVCLNCGFETHADEQAALNIARSWLFLRSQEYKKYQTNKTTGNTDKRAFVETWQSFYRKKLKEVWKPAV

SEQ ID NO: 26944 - protein, 978 aa, synthetic construct
  REGION 1..978: note = engineered CasX variant
QEIKRINKIRRRLVKDSNTKKAGKTGPMKTLLVRVMTPDLRERLENLRKKPENIPQPISNTSRANLNKLLTDYTEMKKAILHVYWEEFQKDPVGLMSRVAQPASKKIDQNKLKPEMDEKGNLTTAGFACSQCGQPLFVYKLEQVSEKGKAYTNYFGRCNVAEHEKLILLAQLKPEKDSDEAVTYSLGKFGQRALDFYSIHVTKESTHPVKPLAQIAGNRYASGPVGKALSDACMGTIASFLSKYQDIIIEHQKVVKGNQKRLESLRELAGKENLEYPSVTLPPQPHTKEGVDAYNEVIARVRMWVNLNLWQKLKLSRDDAKPLLRLKGFPSFPLVERQANEVDWWDMVCNVKKLINEKKEDGKVFWQNLAGYKRQEALRPYLSSEEDRKKGKKFARYQLGDLLLHLEKKHGEDWGKVYDEAWERIDKKVEGLSKHIKLEEERRSEDAQSKAALTDWLRAKASFVIEGLKEADKDEFCRCELKLQKWYGDLRGKPFAIEAENSILDISGFSKQYNCAFIWQKDGVKKLNLYLIINYFKGGKLRFKKIKPEAFEANRFYTVINKKSGEIVPMEVNFNFDDPNLIILPLAFGKRQGREFIWNDLLSLETGSLKLANGRVIEKTLYNRRTRQDEPALFVALTFERREVLDSSNIKPMNLIGVDRGENIPAVIALTDPEGCPLSLFKDSLGNKTHILRIGESYKEKQRTIQAKKEVEQRRAGGYSRKYASKAKNLADDMVRNTARDLLYYAVTQDAMLIFENLSRGFGRQGKRTFMAERQYTRMEDWLTAKLAYEGLPSKTYLSKTLAQYTSKTCSNCGFTITSADYDRVLEKLKKTATGWMTTINGKELKVEGQITYYNRYKRQNVVKDLSVELDRLSEESVNNDISSWTKGRSGEALSLLKKRFSHRPVQEKFVCLNCGFETHADEQAALNIARSWLFLRSQEYKKYQTNKTTGNTDKRAFVETWQSFYRKKLKEVWKPAV

SEQ ID NO: 26945 - protein, 978 aa, synthetic construct
  REGION 1..978: note = engineered CasX variant
QEIKRINKIRRRLVKDSNTKKAGKTGPMKTLLVRVMTPDLRERLENLRKKPENIPQPISNTSRANLNKLLTDYTEMKKAILHVYWEEFQKDPVGLMSRVAQPASKKIDQNKLKPEMDEKGNLTTAGFACSQCGQPLFVYKLEQVSEKGKAYTNYFGRCNVAEHEKLILLAQLKPEKDSDEAVTYSLGKFGQRALDFYSIHVTKESTHPVKPLAQIAGNRYASGPVGKALSDACMGTIASFLSKYQDIIIEHQKVVKGNQKRLESLRELAGKENLEYPSVTLPPQPHTKEGVDAYNEVIARVRMWVNLNLWQKLKLSRDDAKPLLRLKGFPSFPLVERQANEVDWWDMVCNVKKLINEKKEDGKVFWQNLAGYKRQEALRPYLSSEEDRKKGKKFARYQLGDLLLHLEKKHGEDWGKVYDEAWERIDKKVEGLSKHIKLEEERRSEDAQSKAALTDWLRAKASFVIEGLKEADKDEFCRCELKLQKWYGDLRGKPFAIEAENSILDISGFSKQYNCAFIWQKDGVKKLNLYLIINYFKGGKLRFKKIKPEAFEANRFYTVINKKSGEIVPMEVNFNFDDPNLIILPLAFGKRQGREFIWNDLLSLETGSLKLANGRVIEKTLYNRRTRQDEPALFVALTFERREVLDSSNIKPMNLIGVDRGENIPAVIALTDPEGCPLSLFKDSIGNPTHILRIGESYKEKQRTIQAKKEVEQRRAGGYSRKYASKAKNLADDMVRNTARDLLYYAVTQDAMLIFENLSRGFGRQGKRTFMAERQYTRMEDWLTAKLAYEGLPSKTYLSKTLAQYTSKTCSNCGFTITSADYDRVLEKLKKTATGWMTTINGKELKVEGQITYYNRYKRQNVVKDLSVELDRLSEESVNNDISSWTKGRSGEALSLLKKRFSHRPVQEKFVCLNCGFETHADEQAALNIARSWLFLRSQEYKKYQTNKTTGNTDKRAFVETWQSFYRKKLKEVWKPAV

SEQ ID NO: 26946 - protein, 978 aa, synthetic construct
  REGION 1..978: note = engineered CasX variant
QEIKRINKIRRRLVKDSNTKKAGKTGPMKTLLVRVMTPDLRERLENLRKKPENIPQPISNTSRANLNKLLTDYTEMKKAILHVYWEEFQKDPVGLMSRVAQPASKKIDQNKLKPEMDEKGNLTTAGFACSQCGQPLFVYKLEQVSEKGKAYTNYFGRCNVAEHEKLILLAQLKPEKDSDEAVTYSLGKFGQRALDFYSIHVTKESTHPVKPLAQIAGNRYASGPVGKALSDACMGTIASFLSKYQDIIIEHQKVVKGNQKRLESLRELAGKENLEYPSVTLPPQPHTKEGVDAYNEVIARVRMWVNLNLWQKLKLSRDDAKPLLRLKGFPSFPLVERQANEVDWWDMVCNVKKLINEKKEDGKVFWQNLAGYKRQEALRPYLSSEEDRKKGKKFARYQLGDLLLHLEKKHGEDWGKVYDEAWERIDKKVEGLSKHIKLEEERRSEDAQSKAALTDWLRAKASFVIEGLKEADKDEFCRCELKLQKWYGDLRGKPFAIEAENSILDISGFSKQYNCAFIWQKDGVKKLNLYLIINYFKGGKLRFKKIKPEAFEANRFYTVINKKSGEIVPMEVNFNFDDPNLIILPLAFGKRQGREFIWNDLLSLETGSLKLANGRVIEKTLYNRRTRQDEPALFVALTFERREVLDSSNIKPMNLIGVDRGENIPAVIALTDPEGCPLSLFKDSGGNPTHILRIGESYKRKQRTIQAKKEVEQRRAGGYSRKYASKAKNLADDMVRNTARDLLYYAVTQDAMLIFENLSRGFGRQGKRTFMAERQYTRMEDWLTAKLAYEGLPSKTYLSKTLAQYTSKTCSNCGFTITSADYDRVLEKLKKTATGWMTTINGKELKVEGQITYYNRYKRQNVVKDLSVELDRLSEESVNNDISSWTKGRSGEALSLLKKRFSHRPVQEKFVCLNCGFETHADEQAALNIARSWLFLRSQEYKKYQTNKTTGNTDKRAFVETWQSFYRKKLKEVWKPAV

SEQ ID NO: 26947 - protein, 978 aa, synthetic construct
  REGION 1..978: note = engineered CasX variant
QEIKRINKIRRRLVKDSNTKKAGKTGPMKTLLVRVMTPDLRERLENLRKKPENIPQPISNTSRANLNKLLTDYTEMKKAILHVYWEEFQKDPVGLMSRVAQPASKKIDQNKLKPEMDEKGNLTTAGFACSQCGQPLFVYKLEQVSEKGKAYTNYFGRCNVAEHEKLILLAQLKPEKDSDEAVTYSLGKFGQRALDFYSIHVTKESTHPVKPLAQIAGNRYASGPVGKALSDACMGTIASFLSKYQDIIIEHQKVVKGNQKRLESLRELAGKENLEYPSVTLPPQPHTKEGVDAYNEVIARVRMWVNLNLWQKLKLSRDDAKPLLRLKGFPSFPLVERQANEVDWWDMVCNVKKLINEKKEDGKVFWQNLAGYKRQEALRPYLSSEEDRKKGKKFARYQLGDLLLHLEKKHGEDWGKVYDEAWERIDKKVEGLSKHIKLEEERRSEDAQSKAALTDWLRAKASFVIEGLKEADKDEFCRCELKLQKWYGDLRGKPFAIEAENSILDISGFSKQYNCAFIWQKDGVKKLNLYLIINYFKGGKLRFKKIKPEAFEANRFYTVINKKSGEIVPMEVNFNFDDPNLIILPLAFGKRQGREFIWNDLLSLETGSLKLANGRVIEKTLYNRRTRQDEPALFVALTFERREVLDSSNIKPMNLIGVDRGENIPAVIALTDPEGCPLSLFKDSGGNPTHILRIGESYKEKQRTIQAKKEVEQRRAGGYSRKYASKAKNLADDMVRNTARDLLYYAVTQDAMLIFENLSRGFGRQGKRTFMAERQYTRMEDWLTAKLAYEGLPSKTYLSKTLAQYTSKTCSNCGFTITSADYDRVLEKLKKTATGWMTTINGKELKVEGQITYYNRYKRQNVVKDLSVELDRLSEESVNNDISSWTKGRSGEALSLLKKRFSHRPVQEKFVCLNCGFETHADEQAALNIARSWLFLRSQEYKKYQTNKTTGNTDKRAFVETWQSFYRKKLKEVWKPAV

SEQ ID NO: 26948 - protein, 978 aa, synthetic construct
  REGION 1..978: note = engineered CasX variant
QEIKRINKIRRRLVKDSNTKKAGKTGPMKTLLVRVMTPDLRERLENLRKKPENIPQPISNTSRANLNKLLTDYTEMKKAILHVYWEEFQKDPVGLMSRVAQPASKKIDQNKLKPEMDEKGNLTTAGFACSQCGQPLFVYKLEQVSEKGKAYTNYFGRCNVAEHEKLILLAQLKPEKDSDEAVTYSLGKFGQRALDFYSIHVTKESTHPVKPLAQIAGNRYASGPVGKALSDACMGTIASFLSKYQDIIIEHQKVVKGNQKRLESLRELAGKENLEYPSVTLPPQPHTKEGVDAYNEVIARVRMWVNLNLWQKLKLSRDDAKPLLRLKGFPSFPLVERQANEVDWWDMVCNVKKLINEKKEDGKVFWQNLAGYKRQEALRPYLSSEEDRKKGKKFARYQLGDLLLHLEKKHGEDWGKVYDEAWERIDKKVEGLSKHIKLEEERRSEDAQSKAALTDWLRAKASFVIEGLKEADKDEFCRCELKLQKWYGDLRGKPFAIEAENSILDISGFSKQYNCAFIWQKDGVKKLNLYLIINYFKGGKLRFKKIKPEAFEANRFYTVINKKSGEIVPMEVNFNFDDPNLIILPLAFGKRQGREFIWNDLLSLETGSLKLANGRVIEKTLYNRRTRQDEPALFVALTFERREVLDSSNIKPMNLIGVDRGENIPAVIALTDPEGCPLSLFCDSLGNPTHILRIGESYKEKQRTIQAKKEVEQRRAGGYSRKYASKAKNLADDMVRNTARDLLYYAVTQDAMLIFENLSRGFGRQGKRTFMAERQYTRMEDWLTAKLAYEGLPSKTYLSKTLAQYTSKTCSNCGFTITSADYDRVLEKLKKTATGWMTTINGKELKVEGQITYYNRYKRQNVVKDLSVELDRLSEESVNNDISSWTKGRSGEALSLLKKRFSHRPVQEKFVCLNCGFETHADEQAALNIARSWLFLRSQEYKKYQTNKTTGNTDKRAFVETWQSFYRKKLKEVWKPAV

SEQ ID NO: 26949 - protein, 978 aa, synthetic construct
  REGION 1..978: note = engineered CasX variant
QEIKRINKIRRRLVKDSNTKKAGKTGPMKTLLVRVMTPDLRERLENLRKKPENIPQPISNTSRANLNKLLTDYTEMKKAILHVYWEEFQKDPVGLMSRVAQPASKKIDQNKLKPEMDEKGNLTTAGFACSQCGQPLFVYKLEQVSEKGKAYTNYFGRCNVAEHEKLILLAQLKPEKDSDEAVTYSLGKFGQRALDFYSIHVTKESTHPVKPLAQIAGNRYASGPVGKALSDACMGTIASFLSKYQDIIIEHQKVVKGNQKRLESLRELAGKENLEYPSVTLPPQPHTKEGVDAYNEVIARVRMWVNLNLWQKLKLSRDDAKPLLRLKGFPSFPLVERQANEVDWWDMVCNVKKLINEKKEDGKVFWQNLAGYKRQEALRPYLSSEEDRKKGKKFARYQLGDLLLHLEKKHGEDWGKVYDEAWERIDKKVEGLSKHIKLEEERRSEDAQSKAALTDWLRAKASFVIEGLKEADKDEFCRCELKLQKWYGDLRGKPFAIEAENSILDISGFSKQYNCAFIWQKDGVKKLNLYLIINYFKGGKLRFKKIKPEAFEANRFYTVINKKSGEIVPMEVNFNFDDPNLIILPLAFGKRQGREFIWNDLLSLETGSLKLANGRVIEKTLYNRRTRQDEPALFVALTFERREVLDSSNIKPMNLIGVDRGENIPAVIALTDPEGCPLSLFCDSIGNPTHILRIGESYKEKQRTIQAKKEVEQRRAGGYSRKYASKAKNLADDMVRNTARDLLYYAVTQDAMLIFENLSRGFGRQGKRTFMAERQYTRMEDWLTAKLAYEGLPSKTYLSKTLAQYTSKTCSNCGFTITSADYDRVLEKLKKTATGWMTTINGKELKVEGQITYYNRYKRQNVVKDLSVELDRLSEESVNNDISSWTKGRSGEALSLLKKRFSHRPVQEKFVCLNCGFETHADEQAALNIARSWLFLRSQEYKKYQTNKTTGNTDKRAFVETWQSFYRKKLKEVWKPAV

SEQ ID NO: 26950 - protein, 978 aa, synthetic construct
  REGION 1..978: note = engineered CasX variant
QEIKRINKIRRRLVKDSNTKKAGKTGPMKTLLVRVMTPDLRERLENLRKKPENIPQPISNTSRANLNKLLTDYTEMKKAILHVYWEEFQKDPVGLMSRVAQPASKKIDQNKLKPEMDEKGNLTTAGFACSQCGQPLFVYKLEQVSEKGKAYTNYFGRCNVAEHEKLILLAQLKPEKDSDEAVTYSLGKFGQRALDFYSIHVTKESTHPVKPLAQIAGNRYASGPVGKALSDACMGTIASFLSKYQDIIIEHQKVVKGNQKRLESLRELAGKENLEYPSVTLPPQPHTKEGVDAYNEVIARVRMWVNLNLWQKLKLSRDDAKPLLRLKGFPSFPLVERQANEVDWWDMVCNVKKLINEKKEDGKVFWQNLAGYKRQEALRPYLSSEEDRKKGKKFARYQLGDLLLHLEKKHGEDWGKVYDEAWERIDKKVEGLSKHIKLEEERRSEDAQSKAALTDWLRAKASFVIEGLKEADKDEFCRCELKLQKWYGDLRGKPFAIEAENSILDISGFSKQYNCAFIWQKDGVKKLNLYLIINYFKGGKLRFKKIKPEAFEANRFYTVINKKSGEIVPMEVNFNFDDPNLIILPLAFGKRQGREFIWNDLLSLETGSLKLANGRVIEKTLYNRRTRQDEPALFVALTFERREVLDSSNIKPMNLIGVDRGENIPAVIALTDPEGCPLSKFSDSLGNSTHILRIGESYKEKQRTIQAKKEVEQRRAGGYSRKYASKAKNLADDMVRNTARDLLYYAVTQDAMLIFENLSRGFGRQGKRTFMAERQYTRMEDWLTAKLAYEGLPSKTYLSKTLAQYTSKTCSNCGFTITSADYDRVLEKLKKTATGWMTTINGKELKVEGQITYYNRYKRQNVVKDLSVELDRLSEESVNNDISSWTKGRSGEALSLLKKRFSHRPVQEKFVCLNCGFETHADEQAALNIARSWLFLRSQEYKKYQTNKTTGNTDKRAFVETWQSFYRKKLKEVWKPAV

SEQ ID NO: 26951 - protein, 978 aa, synthetic construct
  REGION 1..978: note = engineered CasX variant
QEIKRINKIRRRLVKDSNTKKAGKTGPMKTLLVRVMTPDLRERLENLRKKPENIPQPISNTSRANLNKLLTDYTEMKKAILHVYWEEFQKDPVGLMSRVAQPASKKIDQNKLKPEMDEKGNLTTAGFACSQCGQPLFVYKLEQVSEKGKAYTNYFGRCNVAEHEKLILLAQLKPEKDSDEAVTYSLGKFGQRALDFYSIHVTKESTHPVKPLAQIAGNRYASGPVGKALSDACMGTIASFLSKYQDIIIEHQKVVKGNQKRLESLRELAGKENLEYPSVTLPPQPHTKEGVDAYNEVIARVRMWVNLNLWQKLKLSRDDAKPLLRLKGFPSFPLVERQANEVDWWDMVCNVKKLINEKKEDGKVFWQNLAGYKRQEALRPYLSSEEDRKKGKKFARYQLGDLLLHLEKKHGEDWGKVYDEAWERIDKKVEGLSKHIKLEEERRSEDAQSKAALTDWLRAKASFVIEGLKEADKDEFCRCELKLQKWYGDLRGKPFAIEAENSILDISGFSKQYNCAFIWQKDGVKKLNLYLIINYFKGGKLRFKKIKPEAFEANRFYTVINKKSGEIVPMEVNFNFDDPNLIILPLAFGKRQGREFIWNDLLSLETGSLKLANGRVIEKTLYNRRTRQDEPALFVALTFERREVLDSSNIKPMNLIGVDRGENIPAVIALTDPEGCPLSKFSDSLGNPTHILRIGESYKEKQRTIQAKKEVEQRRAGGYSRKYASKAKNLADDMVRNTARDLLYYAVTQDAMLIFENLSRGFGRQGKRTFMAERQYTRMEDWLTAKLAYEGLPSKTYLSKTLAQYTSKTCSNCGFTITSADYDRVLEKLKKTATGWMTTINGKELKVEGQITYYNRYKRQNVVKDLSVELDRLSEESVNNDISSWTKGRSGEALSLLKKRFSHRPVQEKFVCLNCGFETHADEQAALNIARSWLFLRSQEYKKYQTNKTTGNTDKRAFVETWQSFYRKKLKEVWKPAV

SEQ ID NO: 26952 - protein, 978 aa, synthetic construct
  REGION 1..978: note = engineered CasX variant
QEIKRINKIRRRLVKDSNTKKAGKTGPMKTLLVRVMTPDLRERLENLRKKPENIPQPISNTSRANLNKLLTDYTEMKKAILHVYWEEFQKDPVGLMSRVAQPASKKIDQNKLKPEMDEKGNLTTAGFACSQCGQPLFVYKLEQVSEKGKAYTNYFGRCNVAEHEKLILLAQLKPEKDSDEAVTYSLGKFGQRALDFYSIHVTKESTHPVKPLAQIAGNRYASGPVGKALSDACMGTIASFLSKYQDIIIEHQKVVKGNQKRLESLRELAGKENLEYPSVTLPPQPHTKEGVDAYNEVIARVRMWVNLNLWQKLKLSRDDAKPLLRLKGFPSFPLVERQANEVDWWDMVCNVKKLINEKKEDGKVFWQNLAGYKRQEALRPYLSSEEDRKKGKKFARYQLGDLLLHLEKKHGEDWGKVYDEAWERIDKKVEGLSKHIKLEEERRSEDAQSKAALTDWLRAKASFVIEGLKEADKDEFCRCELKLQKWYGDLRGKPFAIEAENSILDISGFSKQYNCAFIWQKDGVKKLNLYLIINYFKGGKLRFKKIKPEAFEANRFYTVINKKSGEIVPMEVNFNFDDPNLIILPLAFGKRQGREFIWNDLLSLETGSLKLANGRVIEKTLYNRRTRQDEPALFVALTFERREVLDSSNIKPMNLIGVDRGENIPAVIALTDPEGCPLSKFKDSQGNPTHILRIGESYKEKQRTIQQKKEVEQRRAGGYSRKYASKAKNLADDMVRNTARDLLYYAVTQDAMLIFENLSRGFGRQGKRTFMAERQYTRMEDWLTAKLAYEGLPSKTYLSKTLAQYTSKTCSNCGFTITSADYDRVLEKLKKTATGWMTTINGKELKVEGQITYYNRYKRQNVVKDLSVELDRLSEESVNNDISSWTKGRSGEALSLLKKRFSHRPVQEKFVCLNCGFETHADEQAALNIARSWLFLRSQEYKKYQTNKTTGNTDKRAFVETWQSFYRKKLKEVWKPAV

SEQ ID NO: 26953 - protein, 978 aa, synthetic construct
  REGION 1..978: note = engineered CasX variant
QEIKRINKIRRRLVKDSNTKKAGKTGPMKTLLVRVMTPDLRERLENLRKKPENIPQPISNTSRANLNKLLTDYTEMKKAILHVYWEEFQKDPVGLMSRVAQPASKKIDQNKLKPEMDEKGNLTTAGFACSQCGQPLFVYKLEQVSEKGKAYTNYFGRCNVAEHEKLILLAQLKPEKDSDEAVTYSLGKFGQRALDFYSIHVTKESTHPVKPLAQIAGNRYASGPVGKALSDACMGTIASFLSKYQDIIIEHQKVVKGNQKRLESLRELAGKENLEYPSVTLPPQPHTKEGVDAYNEVIARVRMWVNLNLWQKLKLSRDDAKPLLRLKGFPSFPLVERQANEVDWWDMVCNVKKLINEKKEDGKVFWQNLAGYKRQEALRPYLSSEEDRKKGKKFARYQLGDLLLHLEKKHGEDWGKVYDEAWERIDKKVEGLSKHIKLEEERRSEDAQSKAALTDWLRAKASFVIEGLKEADKDEFCRCELKLQKWYGDLRGKPFAIEAENSILDISGFSKQYNCAFIWQKDGVKKLNLYLIINYFKGGKLRFKKIKPEAFEANRFYTVINKKSGEIVPMEVNFNFDDPNLIILPLAFGKRQGREFIWNDLLSLETGSLKLANGRVIEKTLYNRRTRQDEPALFVALTFERREVLDSSNIKPMNLIGVDRGENIPAVIALTDPEGCPLSKFKDSQGNPTHILRIGESYKEKQRTIQAKKEVEQRRAGGYSRKYASKAKNLADDMVRNTARDLLYYAVTQDAMLIFENLSRGFGRQGKRTFMAERQYTRMEDWLTAKLAYEGLPSKTYLSKTLAQYTSKTCSNCGFTITSADYDRVLEKLKKTATGWMTTINGKELKVEGQITYYNRYKRQNVVKDLSVELDRLSEESVNNDISSWTKGRSGEALSLLKKRFSHRPVQEKFVCLNCGFETHADEQAALNIARSWLFLRSQEYKKYQTNKTTGNTDKRAFVETWQSFYRKKLKEVWKPAV

SEQ ID NO: 26954 - protein, 978 aa, synthetic construct
  REGION 1..978: note = engineered CasX variant
QEIKRINKIRRRLVKDSNTKKAGKTGPMKTLLVRVMTPDLRERLENLRKKPENIPQPISNTSRANLNKLLTDYTEMKKAILHVYWEEFQKDPVGLMSRVAQPASKKIDQNKLKPEMDEKGNLTTAGFACSQCGQPLFVYKLEQVSEKGKAYTNYFGRCNVAEHEKLILLAQLKPEKDSDEAVTYSLGKFGQRALDFYSIHVTKESTHPVKPLAQIAGNRYASGPVGKALSDACMGTIASFLSKYQDIIIEHQKVVKGNQKRLESLRELAGKENLEYPSVTLPPQPHTKEGVDAYNEVIARVRMWVNLNLWQKLKLSRDDAKPLLRLKGFPSFPLVERQANEVDWWDMVCNVKKLINEKKEDGKVFWQNLAGYKRQEALRPYLSSEEDRKKGKKFARYQLGDLLLHLEKKHGEDWGKVYDEAWERIDKKVEGLSKHIKLEEERRSEDAQSKAALTDWLRAKASFVIEGLKEADKDEFCRCELKLQKWYGDLRGKPFAIEAENSILDISGFSKQYNCAFIWQKDGVKKLNLYLIINYFKGGKLRFKKIKPEAFEANRFYTVINKKSGEIVPMEVNFNFDDPNLIILPLAFGKRQGREFIWNDLLSLETGSLKLANGRVIEKTLYNRRTRQDEPALFVALTFERREVLDSSNIKPMNLIGVDRGENIPAVIALTDPEGCPLSKFKDSQGNPTHILRIGESYKEKQRTIQAFKEVEQRRAGGYSRKYASKAKNLADDMVRNTARDLLYYAVTQDAMLIFENLSRGFGRQGKRTFMAERQYTRMEDWLTAKLAYEGLPSKTYLSKTLAQYTSKTCSNCGFTITSADYDRVLEKLKKTATGWMTTINGKELKVEGQITYYNRYKRQNVVKDLSVELDRLSEESVNNDISSWTKGRSGEALSLLKKRFSHRPVQEKFVCLNCGFETHADEQAALNIARSWLFLRSQEYKKYQTNKTTGNTDKRAFVETWQSFYRKKLKEVWKPAV

SEQ ID NO: 26955 - protein, 978 aa, synthetic construct
  REGION 1..978: note = engineered CasX variant
QEIKRINKIRRRLVKDSNTKKAGKTGPMKTLLVRVMTPDLRERLENLRKKPENIPQPISNTSRANLNKLLTDYTEMKKAILHVYWEEFQKDPVGLMSRVAQPASKKIDQNKLKPEMDEKGNLTTAGFACSQCGQPLFVYKLEQVSEKGKAYTNYFGRCNVAEHEKLILLAQLKPEKDSDEAVTYSLGKFGQRALDFYSIHVTKESTHPVKPLAQIAGNRYASGPVGKALSDACMGTIASFLSKYQDIIIEHQKVVKGNQKRLESLRELAGKENLEYPSVTLPPQPHTKEGVDAYNEVIARVRMWVNLNLWQKLKLSRDDAKPLLRLKGFPSFPLVERQANEVDWWDMVCNVKKLINEKKEDGKVFWQNLAGYKRQEALRPYLSSEEDRKKGKKFARYQLGDLLLHLEKKHGEDWGKVYDEAWERIDKKVEGLSKHIKLEEERRSEDAQSKAALTDWLRAKASFVIEGLKEADKDEFCRCELKLQKWYGDLRGKPFAIEAENSILDISGFSKQYNCAFIWQKDGVKKLNLYLIINYFKGGKLRFKKIKPEAFEANRFYTVINKKSGEIVPMEVNFNFDDPNLIILPLAFGKRQGREFIWNDLLSLETGSLKLANGRVIEKTLYNRRTRQDEPALFVALTFERREVLDSSNIKPMNLIGVDRGENIPAVIALTDPEGCPLSKFKDSLGNSTHILRIGESYKEKQRTIQAKKEVEQRRAGGYSRKYASKAKNLADDMVRNTARDLLYYAVTQDAMLIFENLSRGFGRQGKRTFMAERQYTRMEDWLTAKLAYEGLPSKTYLSKTLAQYTSKTCSNCGFTITSADYDRVLEKLKKTATGWMTTINGKELKVEGQITYYNRYKRQNVVKDLSVELDRLSEESVNNDISSWTKGRSGEALSLLKKRFSHRPVQEKFVCLNCGFETHADEQAALNIARSWLFLRSQEYKKYQTNKTTGNTDKRAFVETWQSFYRKKLKEVWKPAV

SEQ ID NO: 26956 - protein, 978 aa, synthetic construct
  REGION 1..978: note = engineered CasX variant
QEIKRINKIRRRLVKDSNTKKAGKTGPMKTLLVRVMTPDLRERLENLRKKPENIPQPISNTSRANLNKLLTDYTEMKKAILHVYWEEFQKDPVGLMSRVAQPASKKIDQNKLKPEMDEKGNLTTAGFACSQCGQPLFVYKLEQVSEKGKAYTNYFGRCNVAEHEKLILLAQLKPEKDSDEAVTYSLGKFGQRALDFYSIHVTKESTHPVKPLAQIAGNRYASGPVGKALSDACMGTIASFLSKYQDIIIEHQKVVKGNQKRLESLRELAGKENLEYPSVTLPPQPHTKEGVDAYNEVIARVRMWVNLNLWQKLKLSRDDAKPLLRLKGFPSFPLVERQANEVDWWDMVCNVKKLINEKKEDGKVFWQNLAGYKRQEALRPYLSSEEDRKKGKKFARYQLGDLLLHLEKKHGEDWGKVYDEAWERIDKKVEGLSKHIKLEEERRSEDAQSKAALTDWLRAKASFVIEGLKEADKDEFCRCELKLQKWYGDLRGKPFAIEAENSILDISGFSKQYNCAFIWQKDGVKKLNLYLIINYFKGGKLRFKKIKPEAFEANRFYTVINKKSGEIVPMEVNFNFDDPNLIILPLAFGKRQGREFIWNDLLSLETGSLKLANGRVIEKTLYNRRTRQDEPALFVALTFERREVLDSSNIKPMNLIGVDRGENIPAVIALTDPEGCPLSKFKDSLGNPTHILRIGESYKEKQRTIQQKKEVEQRRAGGYSRKYASKAKNLADDMVRNTARDLLYYAVTQDAMLIFENLSRGFGRQGKRTFMAERQYTRMEDWLTAKLAYEGLPSKTYLSKTLAQYTSKTCSNCGFTITSADYDRVLEKLKKTATGWMTTINGKELKVEGQITYYNRYKRQNVVKDLSVELDRLSEESVNNDISSWTKGRSGEALSLLKKRFSHRPVQEKFVCLNCGFETHADEQAALNIARSWLFLRSQEYKKYQTNKTTGNTDKRAFVETWQSFYRKKLKEVWKPAV

SEQ ID NO: 26957 - protein, 978 aa, synthetic construct
  REGION 1..978: note = engineered CasX variant
QEIKRINKIRRRLVKDSNTKKAGKTGPMKTLLVRVMTPDLRERLENLRKKPENIPQPISNTSRANLNKLLTDYTEMKKAILHVYWEEFQKDPVGLMSRVAQPASKKIDQNKLKPEMDEKGNLTTAGFACSQCGQPLFVYKLEQVSEKGKAYTNYFGRCNVAEHEKLILLAQLKPEKDSDEAVTYSLGKFGQRALDFYSIHVTKESTHPVKPLAQIAGNRYASGPVGKALSDACMGTIASFLSKYQDIIIEHQKVVKGNQKRLESLRELAGKENLEYPSVTLPPQPHTKEGVDAYNEVIARVRMWVNLNLWQKLKLSRDDAKPLLRLKGFPSFPLVERQANEVDWWDMVCNVKKLINEKKEDGKVFWQNLAGYKRQEALRPYLSSEEDRKKGKKFARYQLGDLLLHLEKKHGEDWGKVYDEAWERIDKKVEGLSKHIKLEEERRSEDAQSKAALTDWLRAKASFVIEGLKEADKDEFCRCELKLQKWYGDLRGKPFAIEAENSILDISGFSKQYNCAFIWQKDGVKKLNLYLIINYFKGGKLRFKKIKPEAFEANRFYTVINKKSGEIVPMEVNFNFDDPNLIILPLAFGKRQGREFIWNDLLSLETGSLKLANGRVIEKTLYNRRTRQDEPALFVALTFERREVLDSSNIKPMNLIGVDRGENIPAVIALTDPEGCPLSKFKDSLGNPTHILRIGESYKEKQRTIQQFKEVEQRRAGGYSRKYASKAKNLADDMVRNTARDLLYYAVTQDAMLIFENLSRGFGRQGKRTFMAERQYTRMEDWLTAKLAYEGLPSKTYLSKTLAQYTSKTCSNCGFTITSADYDRVLEKLKKTATGWMTTINGKELKVEGQITYYNRYKRQNVVKDLSVELDRLSEESVNNDISSWTKGRSGEALSLLKKRFSHRPVQEKFVCLNCGFETHADEQAALNIARSWLFLRSQEYKKYQTNKTTGNTDKRAFVETWQSFYRKKLKEVWKPAV

SEQ ID NO: 26958 - protein, 978 aa, synthetic construct
  REGION 1..978: note = engineered CasX variant
QEIKRINKIRRRLVKDSNTKKAGKTGPMKTLLVRVMTPDLRERLENLRKKPENIPQPISNTSRANLNKLLTDYTEMKKAILHVYWEEFQKDPVGLMSRVAQPASKKIDQNKLKPEMDEKGNLTTAGFACSQCGQPLFVYKLEQVSEKGKAYTNYFGRCNVAEHEKLILLAQLKPEKDSDEAVTYSLGKFGQRALDFYSIHVTKESTHPVKPLAQIAGNRYASGPVGKALSDACMGTIASFLSKYQDIIIEHQKVVKGNQKRLESLRELAGKENLEYPSVTLPPQPHTKEGVDAYNEVIARVRMWVNLNLWQKLKLSRDDAKPLLRLKGFPSFPLVERQANEVDWWDMVCNVKKLINEKKEDGKVFWQNLAGYKRQEALRPYLSSEEDRKKGKKFARYQLGDLLLHLEKKHGEDWGKVYDEAWERIDKKVEGLSKHIKLEEERRSEDAQSKAALTDWLRAKASFVIEGLKEADKDEFCRCELKLQKWYGDLRGKPFAIEAENSILDISGFSKQYNCAFIWQKDGVKKLNLYLIINYFKGGKLRFKKIKPEAFEANRFYTVINKKSGEIVPMEVNFNFDDPNLIILPLAFGKRQGREFIWNDLLSLETGSLKLANGRVIEKTLYNRRTRQDEPALFVALTFERREVLDSSNIKPMNLIGVDRGENIPAVIALTDPEGCPLSKFKDSLGNPTHILRIGESYKEKQRTIQAKKEVEQRRAGGYSRKYASKAKNLADDMVRNTARDLLYYAVTQDAMLIFENLSRGFGRQGKRTFMAERQYTRMEDWLTAKLAYEGLPSKTYLSKTLAQYTSKTCSNCGFTITSADYDRVLEKLKKTATGWMTTINGKELKVEGQITYYNRYKRQNVVKDLSVELDRLSEESVNNDISSWTKGRSGEALSLLKKRFSHRPVQEKFVCLNCGFETHADEQAALNIARSWLFLRSQEYKKYQTNKTTGNTDKRAFVETWQSFYRKKLKEVWKPAV

SEQ ID NO: 26959 - protein, 978 aa, synthetic construct
  REGION 1..978: note = engineered CasX variant
QEIKRINKIRRRLVKDSNTKKAGKTGPMKTLLVRVMTPDLRERLENLRKKPENIPQPISNTSRANLNKLLTDYTEMKKAILHVYWEEFQKDPVGLMSRVAQPASKKIDQNKLKPEMDEKGNLTTAGFACSQCGQPLFVYKLEQVSEKGKAYTNYFGRCNVAEHEKLILLAQLKPEKDSDEAVTYSLGKFGQRALDFYSIHVTKESTHPVKPLAQIAGNRYASGPVGKALSDACMGTIASFLSKYQDIIIEHQKVVKGNQKRLESLRELAGKENLEYPSVTLPPQPHTKEGVDAYNEVIARVRMWVNLNLWQKLKLSRDDAKPLLRLKGFPSFPLVERQANEVDWWDMVCNVKKLINEKKEDGKVFWQNLAGYKRQEALRPYLSSEEDRKKGKKFARYQLGDLLLHLEKKHGEDWGKVYDEAWERIDKKVEGLSKHIKLEEERRSEDAQSKAALTDWLRAKASFVIEGLKEADKDEFCRCELKLQKWYGDLRGKPFAIEAENSILDISGFSKQYNCAFIWQKDGVKKLNLYLIINYFKGGKLRFKKIKPEAFEANRFYTVINKKSGEIVPMEVNFNFDDPNLIILPLAFGKRQGREFIWNDLLSLETGSLKLANGRVIEKTLYNRRTRQDEPALFVALTFERREVLDSSNIKPMNLIGVDRGENIPAVIALTDPEGCPLSKFKDSLGNPTHILRIGESYKEKQRTIQAFKEVEQRRAGGYSRKYASKAKNLADDMVRNTARDLLYYAVTQDAMLIFENLSRGFGRQGKRTFMAERQYTRMEDWLTAKLAYEGLPSKTYLSKTLAQYTSKTCSNCGFTITSADYDRVLEKLKKTATGWMTTINGKELKVEGQITYYNRYKRQNVVKDLSVELDRLSEESVNNDISSWTKGRSGEALSLLKKRFSHRPVQEKFVCLNCGFETHADEQAALNIARSWLFLRSQEYKKYQTNKTTGNTDKRAFVETWQSFYRKKLKEVWKPAV

SEQ ID NO: 26960 - protein, 978 aa, synthetic construct
  REGION 1..978: note = engineered CasX variant
QEIKRINKIRRRLVKDSNTKKAGKTGPMKTLLVRVMTPDLRERLENLRKKPENIPQPISNTSRANLNKLLTDYTEMKKAILHVYWEEFQKDPVGLMSRVAQPASKKIDQNKLKPEMDEKGNLTTAGFACSQCGQPLFVYKLEQVSEKGKAYTNYFGRCNVAEHEKLILLAQLKPEKDSDEAVTYSLGKFGQRALDFYSIHVTKESTHPVKPLAQIAGNRYASGPVGKALSDACMGTIASFLSKYQDIIIEHQKVVKGNQKRLESLRELAGKENLEYPSVTLPPQPHTKEGVDAYNEVIARVRMWVNLNLWQKLKLSRDDAKPLLRLKGFPSFPLVERQANEVDWWDMVCNVKKLINEKKEDGKVFWQNLAGYKRQEALRPYLSSEEDRKKGKKFARYQLGDLLLHLEKKHGEDWGKVYDEAWERIDKKVEGLSKHIKLEEERRSEDAQSKAALTDWLRAKASFVIEGLKEADKDEFCRCELKLQKWYGDLRGKPFAIEAENSILDISGFSKQYNCAFIWQKDGVKKLNLYLIINYFKGGKLRFKKIKPEAFEANRFYTVINKKSGEIVPMEVNFNFDDPNLIILPLAFGKRQGREFIWNDLLSLETGSLKLANGRVIEKTLYNRRTRQDEPALFVALTFERREVLDSSNIKPMNLIGVDRGENIPAVIALTDPEGCPLSKFKDKLGNPTHILRIGESYKEKQRTIQAKKEVEQRRAGGYSRKYASKAKNLADDMVRNTARDLLYYAVTQDAMLIFENLSRGFGRQGKRTFMAERQYTRMEDWLTAKLAYEGLPSKTYLSKTLAQYTSKTCSNCGFTITSADYDRVLEKLKKTATGWMTTINGKELKVEGQITYYNRYKRQNVVKDLSVELDRLSEESVNNDISSWTKGRSGEALSLLKKRFSHRPVQEKFVCLNCGFETHADEQAALNIARSWLFLRSQEYKKYQTNKTTGNTDKRAFVETWQSFYRKKLKEVWKPAV

SEQ ID NO: 26961 - protein, 978 aa, synthetic construct
  REGION 1..978: note = engineered CasX variant
QEIKRINKIRRRLVKDSNTKKAGKTGPMKTLLVRVMTPDLRERLENLRKKPENIPQPISNTSRANLNKLLTDYTEMKKAILHVYWEEFQKDPVGLMSRVAQPASKKIDQNKLKPEMDEKGNLTTAGFACSQCGQPLFVYKLEQVSEKGKAYTNYFGRCNVAEHEKLILLAQLKPEKDSDEAVTYSLGKFGQRALDFYSIHVTKESTHPVKPLAQIAGNRYASGPVGKALSDACMGTIASFLSKYQDIIIEHQKVVKGNQKRLESLRELAGKENLEYPSVTLPPQPHTKEGVDAYNEVIARVRMWVNLNLWQKLKLSRDDAKPLLRLKGFPSFPLVERQANEVDWWDMVCNVKKLINEKKEDGKVFWQNLAGYKRQEALRPYLSSEEDRKKGKKFARYQLGDLLLHLEKKHGEDWGKVYDEAWERIDKKVEGLSKHIKLEEERRSEDAQSKAALTDWLRAKASFVIEGLKEADKDEFCRCELKLQKWYGDLRGKPFAIEAENSILDISGFSKQYNCAFIWQKDGVKKLNLYLIINYFKGGKLRFKKIKPEAFEANRFYTVINKKSGEIVPMEVNFNFDDPNLIILPLAFGKRQGREFIWNDLLSLETGSLKLANGRVIEKTLYNRRTRQDEPALFVALTFERREVLDSSNIKPMNLIGVDRGENIPAVIALTDPEGCPLSKFKDKLGNPTHILRIGESYKEKQRTIQAFKEVEQRRAGGYSRKYASKAKNLADDMVRNTARDLLYYAVTQDAMLIFENLSRGFGRQGKRTFMAERQYTRMEDWLTAKLAYEGLPSKTYLSKTLAQYTSKTCSNCGFTITSADYDRVLEKLKKTATGWMTTINGKELKVEGQITYYNRYKRQNVVKDLSVELDRLSEESVNNDISSWTKGRSGEALSLLKKRFSHRPVQEKFVCLNCGFETHADEQAALNIARSWLFLRSQEYKKYQTNKTTGNTDKRAFVETWQSFYRKKLKEVWKPAV

SEQ ID NO: 26962 - protein, 978 aa, synthetic construct
  REGION 1..978: note = engineered CasX variant
QEIKRINKIRRRLVKDSNTKKAGKTGPMKTLLVRVMTPDLRERLENLRKKPENIPQPISNTSRANLNKLLTDYTEMKKAILHVYWEEFQKDPVGLMSRVAQPASKKIDQNKLKPEMDEKGNLTTAGFACSQCGQPLFVYKLEQVSEKGKAYTNYFGRCNVAEHEKLILLAQLKPEKDSDEAVTYSLGKFGQRALDFYSIHVTKESTHPVKPLAQIAGNRYASGPVGKALSDACMGTIASFLSKYQDIIIEHQKVVKGNQKRLESLRELAGKENLEYPSVTLPPQPHTKEGVDAYNEVIARVRMWVNLNLWQKLKLSRDDAKPLLRLKGFPSFPLVERQANEVDWWDMVCNVKKLINEKKEDGKVFWQNLAGYKRQEALRPYLSSEEDRKKGKKFARYQLGDLLLHLEKKHGEDWGKVYDEAWERIDKKVEGLSKHIKLEEERRSEDAQSKAALTDWLRAKASFVIEGLKEADKDEFCRCELKLQKWYGDLRGKPFAIEAENSILDISGFSKQYNCAFIWQKDGVKKLNLYLIINYFKGGKLRFKKIKPEAFEANRFYTVINKKSGEIVPMEVNFNFDDPNLIILPLAFGKRQGREFIWNDLLSLETGSLKLANGRVIEKTLYNRRTRQDEPALFVALTFERREVLDSSNIKPMNLIGVDRGENIPAVIALTDPEGCPLSKFKDHLGNPTHILRIGESYKEKQRTIQAKKEVEQRRAGGYSRKYASKAKNLADDMVRNTARDLLYYAVTQDAMLIFENLSRGFGRQGKRTFMAERQYTRMEDWLTAKLAYEGLPSKTYLSKTLAQYTSKTCSNCGFTITSADYDRVLEKLKKTATGWMTTINGKELKVEGQITYYNRYKRQNVVKDLSVELDRLSEESVNNDISSWTKGRSGEALSLLKKRFSHRPVQEKFVCLNCGFETHADEQAALNIARSWLFLRSQEYKKYQTNKTTGNTDKRAFVETWQSFYRKKLKEVWKPAV

SEQ ID NO: 26963 - protein, 978 aa, synthetic construct
  REGION 1..978: note = engineered CasX variant
QEIKRINKIRRRLVKDSNTKKAGKTGPMKTLLVRVMTPDLRERLENLRKKPENIPQPISNTSRANLNKLLTDYTEMKKAILHVYWEEFQKDPVGLMSRVAQPASKKIDQNKLKPEMDEKGNLTTAGFACSQCGQPLFVYKLEQVSEKGKAYTNYFGRCNVAEHEKLILLAQLKPEKDSDEAVTYSLGKFGQRALDFYSIHVTKESTHPVKPLAQIAGNRYASGPVGKALSDACMGTIASFLSKYQDIIIEHQKVVKGNQKRLESLRELAGKENLEYPSVTLPPQPHTKEGVDAYNEVIARVRMWVNLNLWQKLKLSRDDAKPLLRLKGFPSFPLVERQANEVDWWDMVCNVKKLINEKKEDGKVFWQNLAGYKRQEALRPYLSSEEDRKKGKKFARYQLGDLLLHLEKKHGEDWGKVYDEAWERIDKKVEGLSKHIKLEEERRSEDAQSKAALTDWLRAKASFVIEGLKEADKDEFCRCELKLQKWYGDLRGKPFAIEAENSILDISGFSKQYNCAFIWQKDGVKKLNLYLIINYFKGGKLRFKKIKPEAFEANRFYTVINKKSGEIVPMEVNFNFDDPNLIILPLAFGKRQGREFIWNDLLSLETGSLKLANGRVIEKTLYNRRTRQDEPALFVALTFERREVLDSSNIKPMNLIGVDRGENIPAVIALTDPEGCPLSIFKDSWGNPTHILRIGESYKEKQRTIQAKKEVEQRRAGGYSRKYASKAKNLADDMVRNTARDLLYYAVTQDAMLIFENLSRGFGRQGKRTFMAERQYTRMEDWLTAKLAYEGLPSKTYLSKTLAQYTSKTCSNCGFTITSADYDRVLEKLKKTATGWMTTINGKELKVEGQITYYNRYKRQNVVKDLSVELDRLSEESVNNDISSWTKGRSGEALSLLKKRFSHRPVQEKFVCLNCGFETHADEQAALNIARSWLFLRSQEYKKYQTNKTTGNTDKRAFVETWQSFYRKKLKEVWKPAV

SEQ ID NO: 26964 - protein, 978 aa, synthetic construct
  REGION 1..978: note = engineered CasX variant
QEIKRINKIRRRLVKDSNTKKAGKTGPMKTLLVRVMTPDLRERLENLRKKPENIPQPISNTSRANLNKLLTDYTEMKKAILHVYWEEFQKDPVGLMSRVAQPASKKIDQNKLKPEMDEKGNLTTAGFACSQCGQPLFVYKLEQVSEKGKAYTNYFGRCNVAEHEKLILLAQLKPEKDSDEAVTYSLGKFGQRALDFYSIHVTKESTHPVKPLAQIAGNRYASGPVGKALSDACMGTIASFLSKYQDIIIEHQKVVKGNQKRLESLRELAGKENLEYPSVTLPPQPHTKEGVDAYNEVIARVRMWVNLNLWQKLKLSRDDAKPLLRLKGFPSFPLVERQANEVDWWDMVCNVKKLINEKKEDGKVFWQNLAGYKRQEALRPYLSSEEDRKKGKKFARYQLGDLLLHLEKKHGEDWGKVYDEAWERIDKKVEGLSKHIKLEEERRSEDAQSKAALTDWLRAKASFVIEGLKEADKDEFCRCELKLQKWYGDLRGKPFAIEAENSILDISGFSKQYNCAFIWQKDGVKKLNLYLIINYFKGGKLRFKKIKPEAFEANRFYTVINKKSGEIVPMEVNFNFDDPNLIILPLAFGKRQGREFIWNDLLSLETGSLKLANGRVIEKTLYNRRTRQDEPALFVALTFERREVLDSSNIKPMNLIGVDRGENIPAVIALTDPEGCPLSIFKDSLGNPTHILRIHESYKEKQRTIQAKKEVEQRRAGGYSRKYASKAKNLADDMVRNTARDLLYYAVTQDAMLIFENLSRGFGRQGKRTFMAERQYTRMEDWLTAKLAYEGLPSKTYLSKTLAQYTSKTCSNCGFTITSADYDRVLEKLKKTATGWMTTINGKELKVEGQITYYNRYKRQNVVKDLSVELDRLSEESVNNDISSWTKGRSGEALSLLKKRFSHRPVQEKFVCLNCGFETHADEQAALNIARSWLFLRSQEYKKYQTNKTTGNTDKRAFVETWQSFYRKKLKEVWKPAV

SEQ ID NO: 26965 - protein, 978 aa, synthetic construct
  REGION 1..978: note = engineered CasX variant
QEIKRINKIRRRLVKDSNTKKAGKTGPMKTLLVRVMTPDLRERLENLRKKPENIPQPISNTSRANLNKLLTDYTEMKKAILHVYWEEFQKDPVGLMSRVAQPASKKIDQNKLKPEMDEKGNLTTAGFACSQCGQPLFVYKLEQVSEKGKAYTNYFGRCNVAEHEKLILLAQLKPEKDSDEAVTYSLGKFGQRALDFYSIHVTKESTHPVKPLAQIAGNRYASGPVGKALSDACMGTIASFLSKYQDIIIEHQKVVKGNQKRLESLRELAGKENLEYPSVTLPPQPHTKEGVDAYNEVIARVRMWVNLNLWQKLKLSRDDAKPLLRLKGFPSFPLVERQANEVDWWDMVCNVKKLINEKKEDGKVFWQNLAGYKRQEALRPYLSSEEDRKKGKKFARYQLGDLLLHLEKKHGEDWGKVYDEAWERIDKKVEGLSKHIKLEEERRSEDAQSKAALTDWLRAKASFVIEGLKEADKDEFCRCELKLQKWYGDLRGKPFAIEAENSILDISGFSKQYNCAFIWQKDGVKKLNLYLIINYFKGGKLRFKKIKPEAFEANRFYTVINKKSGEIVPMEVNFNFDDPNLIILPLAFGKRQGREFIWNDLLSLETGSLKLANGRVIEKTLYNRRTRQDEPALFVALTFERREVLDSSNIKPMNLIGVDRGENIPAVIALTDPEGCPLSIFKDSLGNPTHILRIHESFKEKQRTIQAKKEVEQRRAGGYSRKYASKAKNLADDMVRNTARDLLYYAVTQDAMLIFENLSRGFGRQGKRTFMAERQYTRMEDWLTAKLAYEGLPSKTYLSKTLAQYTSKTCSNCGFTITSADYDRVLEKLKKTATGWMTTINGKELKVEGQITYYNRYKRQNVVKDLSVELDRLSEESVNNDISSWTKGRSGEALSLLKKRFSHRPVQEKFVCLNCGFETHADEQAALNIARSWLFLRSQEYKKYQTNKTTGNTDKRAFVETWQSFYRKKLKEVWKPAV

SEQ ID NO: 26966 - protein, 978 aa, synthetic construct
  REGION 1..978: note = engineered CasX variant
QEIKRINKIRRRLVKDSNTKKAGKTGPMKTLLVRVMTPDLRERLENLRKKPENIPQPISNTSRANLNKLLTDYTEMKKAILHVYWEEFQKDPVGLMSRVAQPASKKIDQNKLKPEMDEKGNLTTAGFACSQCGQPLFVYKLEQVSEKGKAYTNYFGRCNVAEHEKLILLAQLKPEKDSDEAVTYSLGKFGQRALDFYSIHVTKESTHPVKPLAQIAGNRYASGPVGKALSDACMGTIASFLSKYQDIIIEHQKVVKGNQKRLESLRELAGKENLEYPSVTLPPQPHTKEGVDAYNEVIARVRMWVNLNLWQKLKLSRDDAKPLLRLKGFPSFPLVERQANEVDWWDMVCNVKKLINEKKEDGKVFWQNLAGYKRQEALRPYLSSEEDRKKGKKFARYQLGDLLLHLEKKHGEDWGKVYDEAWERIDKKVEGLSKHIKLEEERRSEDAQSKAALTDWLRAKASFVIEGLKEADKDEFCRCELKLQKWYGDLRGKPFAIEAENSILDISGFSKQYNCAFIWQKDGVKKLNLYLIINYFKGGKLRFKKIKPEAFEANRFYTVINKKSGEIVPMEVNFNFDDPNLIILPLAFGKRQGREFIWNDLLSLETGSLKLANGRVIEKTLYNRRTRQDEPALFVALTFERREVLDSSNIKPMNLIGVDRGENIPAVIALTDPEGCPLSIFKDSLGNPTHILRIGTSYKEKQRTIQAKKEVEQRRAGGYSRKYASKAKNLADDMVRNTARDLLYYAVTQDAMLIFENLSRGFGRQGKRTFMAERQYTRMEDWLTAKLAYEGLPSKTYLSKTLAQYTSKTCSNCGFTITSADYDRVLEKLKKTATGWMTTINGKELKVEGQITYYNRYKRQNVVKDLSVELDRLSEESVNNDISSWTKGRSGEALSLLKKRFSHRPVQEKFVCLNCGFETHADEQAALNIARSWLFLRSQEYKKYQTNKTTGNTDKRAFVETWQSFYRKKLKEVWKPAV

SEQ ID NO: 26967 - protein, 978 aa, synthetic construct
  REGION 1..978: note = engineered CasX variant
QEIKRINKIRRRLVKDSNTKKAGKTGPMKTLLVRVMTPDLRERLENLRKKPENIPQPISNTSRANLNKLLTDYTEMKKAILHVYWEEFQKDPVGLMSRVAQPASKKIDQNKLKPEMDEKGNLTTAGFACSQCGQPLFVYKLEQVSEKGKAYTNYFGRCNVAEHEKLILLAQLKPEKDSDEAVTYSLGKFGQRALDFYSIHVTKESTHPVKPLAQIAGNRYASGPVGKALSDACMGTIASFLSKYQDIIIEHQKVVKGNQKRLESLRELAGKENLEYPSVTLPPQPHTKEGVDAYNEVIARVRMWVNLNLWQKLKLSRDDAKPLLRLKGFPSFPLVERQANEVDWWDMVCNVKKLINEKKEDGKVFWQNLAGYKRQEALRPYLSSEEDRKKGKKFARYQLGDLLLHLEKKHGEDWGKVYDEAWERIDKKVEGLSKHIKLEEERRSEDAQSKAALTDWLRAKASFVIEGLKEADKDEFCRCELKLQKWYGDLRGKPFAIEAENSILDISGFSKQYNCAFIWQKDGVKKLNLYLIINYFKGGKLRFKKIKPEAFEANRFYTVINKKSGEIVPMEVNFNFDDPNLIILPLAFGKRQGREFIWNDLLSLETGSLKLANGRVIEKTLYNRRTRQDEPALFVALTFERREVLDSSNIKPMNLIGVDRGENIPAVIALTDPEGCPLSIFKDSLGNPTHILRIGESYKEKQRTIQAKKEVEQRRAGGYSRKYASKAKNLADDMVRNTARDLLYYAVTQDAMLIFENLSRGFGRQGKRTFMAERQYTRMEDWLTAKLAYEGLPSKTYLSKTLAQYTSKTCSNCGFTITSADYDRVLEKLKKTATGWMTTINGKELKVEGQITYYNRYKRQNVVKDLSVELDRLSEESVNNDISSWTKGRSGEALSLLKKRFSHRPVQEKFVCLNCGFETHADEQAALNIARSWLFLRSQEYKKYQTNKTTGNTDKRAFVETWQSFYRKKLKEVWKPAV

SEQ ID NO: 26968 - protein, 978 aa, synthetic construct
  REGION 1..978: note = engineered CasX variant
QEIKRINKIRRRLVKDSNTKKAGKTGPMKTLLVRVMTPDLRERLENLRKKPENIPQPISNTSRANLNKLLTDYTEMKKAILHVYWEEFQKDPVGLMSRVAQPASKKIDQNKLKPEMDEKGNLTTAGFACSQCGQPLFVYKLEQVSEKGKAYTNYFGRCNVAEHEKLILLAQLKPEKDSDEAVTYSLGKFGQRALDFYSIHVTKESTHPVKPLAQIAGNRYASGPVGKALSDACMGTIASFLSKYQDIIIEHQKVVKGNQKRLESLRELAGKENLEYPSVTLPPQPHTKEGVDAYNEVIARVRMWVNLNLWQKLKLSRDDAKPLLRLKGFPSFPLVERQANEVDWWDMVCNVKKLINEKKEDGKVFWQNLAGYKRQEALRPYLSSEEDRKKGKKFARYQLGDLLLHLEKKHGEDWGKVYDEAWERIDKKVEGLSKHIKLEEERRSEDAQSKAALTDWLRAKASFVIEGLKEADKDEFCRCELKLQKWYGDLRGKPFAIEAENSILDISGFSKQYNCAFIWQKDGVKKLNLYLIINYFKGGKLRFKKIKPEAFEANRFYTVINKKSGEIVPMEVNFNFDDPNLIILPLAFGKRQGREFIWNDLLSLETGSLKLANGRVIEKTLYNRRTRQDEPALFVALTFERREVLDSSNIKPMNLIGVDRGENIPAVIALTDPEGCPLSIFKDSLGNPTHILRIGESYKEKQRTIQACKEVEQRRAGGYSRKYASKAKNLADDMVRNTARDLLYYAVTQDAMLIFENLSRGFGRQGKRTFMAERQYTRMEDWLTAKLAYEGLPSKTYLSKTLAQYTSKTCSNCGFTITSADYDRVLEKLKKTATGWMTTINGKELKVEGQITYYNRYKRQNVVKDLSVELDRLSEESVNNDISSWTKGRSGEALSLLKKRFSHRPVQEKFVCLNCGFETHADEQAALNIARSWLFLRSQEYKKYQTNKTTGNTDKRAFVETWQSFYRKKLKEVWKPAV

SEQ ID NO: 26969 - protein, 978 aa, synthetic construct
  REGION 1..978: note = engineered CasX variant
QEIKRINKIRRRLVKDSNTKKAGKTGPMKTLLVRVMTPDLRERLENLRKKPENIPQPISNTSRANLNKLLTDYTEMKKAILHVYWEEFQKDPVGLMSRVAQPASKKIDQNKLKPEMDEKGNLTTAGFACSQCGQPLFVYKLEQVSEKGKAYTNYFGRCNVAEHEKLILLAQLKPEKDSDEAVTYSLGKFGQRALDFYSIHVTKESTHPVKPLAQIAGNRYASGPVGKALSDACMGTIASFLSKYQDIIIEHQKVVKGNQKRLESLRELAGKENLEYPSVTLPPQPHTKEGVDAYNEVIARVRMWVNLNLWQKLKLSRDDAKPLLRLKGFPSFPLVERQANEVDWWDMVCNVKKLINEKKEDGKVFWQNLAGYKRQEALRPYLSSEEDRKKGKKFARYQLGDLLLHLEKKHGEDWGKVYDEAWERIDKKVEGLSKHIKLEEERRSEDAQSKAALTDWLRAKASFVIEGLKEADKDEFCRCELKLQKWYGDLRGKPFAIEAENSILDISGFSKQYNCAFIWQKDGVKKLNLYLIINYFKGGKLRFKKIKPEAFEANRFYTVINKKSGEIVPMEVNFNFDDPNLIILPLAFGKRQGREFIWNDLLSLETGSLKLANGRVIEKTLYNRRTRQDEPALFVALTFERREVLDSSNIKPMNLIGVDRGENIPAVIALTDPEGCPLSIFKDSLGNPTHILRIGESYKEKMRTIQAKKEVEQRRAGGYSRKYASKAKNLADDMVRNTARDLLYYAVTQDAMLIFENLSRGFGRQGKRTFMAERQYTRMEDWLTAKLAYEGLPSKTYLSKTLAQYTSKTCSNCGFTITSADYDRVLEKLKKTATGWMTTINGKELKVEGQITYYNRYKRQNVVKDLSVELDRLSEESVNNDISSWTKGRSGEALSLLKKRFSHRPVQEKFVCLNCGFETHADEQAALNIARSWLFLRSQEYKKYQTNKTTGNTDKRAFVETWQSFYRKKLKEVWKPAV

SEQ ID NO: 26970 - protein, 978 aa, synthetic construct
  REGION 1..978: note = engineered CasX variant
QEIKRINKIRRRLVKDSNTKKAGKTGPMKTLLVRVMTPDLRERLENLRKKPENIPQPISNTSRANLNKLLTDYTEMKKAILHVYWEEFQKDPVGLMSRVAQPASKKIDQNKLKPEMDEKGNLTTAGFACSQCGQPLFVYKLEQVSEKGKAYTNYFGRCNVAEHEKLILLAQLKPEKDSDEAVTYSLGKFGQRALDFYSIHVTKESTHPVKPLAQIAGNRYASGPVGKALSDACMGTIASFLSKYQDIIIEHQKVVKGNQKRLESLRELAGKENLEYPSVTLPPQPHTKEGVDAYNEVIARVRMWVNLNLWQKLKLSRDDAKPLLRLKGFPSFPLVERQANEVDWWDMVCNVKKLINEKKEDGKVFWQNLAGYKRQEALRPYLSSEEDRKKGKKFARYQLGDLLLHLEKKHGEDWGKVYDEAWERIDKKVEGLSKHIKLEEERRSEDAQSKAALTDWLRAKASFVIEGLKEADKDEFCRCELKLQKWYGDLRGKPFAIEAENSILDISGFSKQYNCAFIWQKDGVKKLNLYLIINYFKGGKLRFKKIKPEAFEANRFYTVINKKSGEIVPMEVNFNFDDPNLIILPLAFGKRQGREFIWNDLLSLETGSLKLANGRVIEKTLYNRRTRQDEPALFVALTFERREVLDSSNIKPMNLIGVDRGENIPAVIALTDPEGCPLSIFKDSLGNPTHILRIGESFKEKQRTIQAKKEVEQRRAGGYSRKYASKAKNLADDMVRNTARDLLYYAVTQDAMLIFENLSRGFGRQGKRTFMAERQYTRMEDWLTAKLAYEGLPSKTYLSKTLAQYTSKTCSNCGFTITSADYDRVLEKLKKTATGWMTTINGKELKVEGQITYYNRYKRQNVVKDLSVELDRLSEESVNNDISSWTKGRSGEALSLLKKRFSHRPVQEKFVCLNCGFETHADEQAALNIARSWLFLRSQEYKKYQTNKTTGNTDKRAFVETWQSFYRKKLKEVWKPAV

SEQ ID NO: 26971 - protein, 978 aa, synthetic construct
  REGION 1..978: note = engineered CasX variant
QEIKRINKIRRRLVKDSNTKKAGKTGPMKTLLVRVMTPDLRERLENLRKKPENIPQPISNTSRANLNKLLTDYTEMKKAILHVYWEEFQKDPVGLMSRVAQPASKKIDQNKLKPEMDEKGNLTTAGFACSQCGQPLFVYKLEQVSEKGKAYTNYFGRCNVAEHEKLILLAQLKPEKDSDEAVTYSLGKFGQRALDFYSIHVTKESTHPVKPLAQIAGNRYASGPVGKALSDACMGTIASFLSKYQDIIIEHQKVVKGNQKRLESLRELAGKENLEYPSVTLPPQPHTKEGVDAYNEVIARVRMWVNLNLWQKLKLSRDDAKPLLRLKGFPSFPLVERQANEVDWWDMVCNVKKLINEKKEDGKVFWQNLAGYKRQEALRPYLSSEEDRKKGKKFARYQLGDLLLHLEKKHGEDWGKVYDEAWERIDKKVEGLSKHIKLEEERRSEDAQSKAALTDWLRAKASFVIEGLKEADKDEFCRCELKLQKWYGDLRGKPFAIEAENSILDISGFSKQYNCAFIWQKDGVKKLNLYLIINYFKGGKLRFKKIKPEAFEANRFYTVINKKSGEIVPMEVNFNFDDPNLIILPLAFGKRQGREFIWNDLLSLETGSLKLANGRVIEKTLYNRRTRQDEPALFVALTFERREVLDSSNIKPMNLIGVDRGENIPAVIALTDPEGCPLSIFKDSLGNPTHILRIGECYKEKQRTIQAKKEVEQRRAGGYSRKYASKAKNLADDMVRNTARDLLYYAVTQDAMLIFENLSRGFGRQGKRTFMAERQYTRMEDWLTAKLAYEGLPSKTYLSKTLAQYTSKTCSNCGFTITSADYDRVLEKLKKTATGWMTTINGKELKVEGQITYYNRYKRQNVVKDLSVELDRLSEESVNNDISSWTKGRSGEALSLLKKRFSHRPVQEKFVCLNCGFETHADEQAALNIARSWLFLRSQEYKKYQTNKTTGNTDKRAFVETWQSFYRKKLKEVWKPAV

SEQ ID NO: 26972 - protein, 978 aa, synthetic construct
  REGION 1..978: note = engineered CasX variant
QEIKRINKIRRRLVKDSNTKKAGKTGPMKTLLVRVMTPDLRERLENLRKKPENIPQPISNTSRANLNKLLTDYTEMKKAILHVYWEEFQKDPVGLMSRVAQPASKKIDQNKLKPEMDEKGNLTTAGFACSQCGQPLFVYKLEQVSEKGKAYTNYFGRCNVAEHEKLILLAQLKPEKDSDEAVTYSLGKFGQRALDFYSIHVTKESTHPVKPLAQIAGNRYASGPVGKALSDACMGTIASFLSKYQDIIIEHQKVVKGNQKRLESLRELAGKENLEYPSVTLPPQPHTKEGVDAYNEVIARVRMWVNLNLWQKLKLSRDDAKPLLRLKGFPSFPLVERQANEVDWWDMVCNVKKLINEKKEDGKVFWQNLAGYKRQEALRPYLSSEEDRKKGKKFARYQLGDLLLHLEKKHGEDWGKVYDEAWERIDKKVEGLSKHIKLEEERRSEDAQSKAALTDWLRAKASFVIEGLKEADKDEFCRCELKLQKWYGDLRGKPFAIEAENSILDISGFSKQYNCAFIWQKDGVKKLNLYLIINYFKGGKLRFKKIKPEAFEANRFYTVINKKSGEIVPMEVNFNFDDPNLIILPLAFGKRQGREFIWNDLLSLETGSLKLANGRVIEKTLYNRRTRQDEPALFVALTFERREVLDSSNIKPMNLIGVDRGENIPAVIALTDPEGCPLSIFKDSLGNPTHILRIGECYKEKQRTIQACKEVEQRRAGGYSRKYASKAKNLADDMVRNTARDLLYYAVTQDAMLIFENLSRGFGRQGKRTFMAERQYTRMEDWLTAKLAYEGLPSKTYLSKTLAQYTSKTCSNCGFTITSADYDRVLEKLKKTATGWMTTINGKELKVEGQITYYNRYKRQNVVKDLSVELDRLSEESVNNDISSWTKGRSGEALSLLKKRFSHRPVQEKFVCLNCGFETHADEQAALNIARSWLFLRSQEYKKYQTNKTTGNTDKRAFVETWQSFYRKKLKEVWKPAV

SEQ ID NO: 26973 - protein, 978 aa, synthetic construct
  REGION 1..978: note = engineered CasX variant
QEIKRINKIRRRLVKDSNTKKAGKTGPMKTLLVRVMTPDLRERLENLRKKPENIPQPISNTSRANLNKLLTDYTEMKKAILHVYWEEFQKDPVGLMSRVAQPASKKIDQNKLKPEMDEKGNLTTAGFACSQCGQPLFVYKLEQVSEKGKAYTNYFGRCNVAEHEKLILLAQLKPEKDSDEAVTYSLGKFGQRALDFYSIHVTKESTHPVKPLAQIAGNRYASGPVGKALSDACMGTIASFLSKYQDIIIEHQKVVKGNQKRLESLRELAGKENLEYPSVTLPPQPHTKEGVDAYNEVIARVRMWVNLNLWQKLKLSRDDAKPLLRLKGFPSFPLVERQANEVDWWDMVCNVKKLINEKKEDGKVFWQNLAGYKRQEALRPYLSSEEDRKKGKKFARYQLGDLLLHLEKKHGEDWGKVYDEAWERIDKKVEGLSKHIKLEEERRSEDAQSKAALTDWLRAKASFVIEGLKEADKDEFCRCELKLQKWYGDLRGKPFAIEAENSILDISGFSKQYNCAFIWQKDGVKKLNLYLIINYFKGGKLRFKKIKPEAFEANRFYTVINKKSGEIVPMEVNFNFDDPNLIILPLAFGKRQGREFIWNDLLSLETGSLKLANGRVIEKTLYNRRTRQDEPALFVALTFERREVLDSSNIKPMNLIGVDRGENIPAVIALTDPEGCPLSIFKDSLGEPTHILRIGESYKEKQRTIQAKKEVEQRRAGGYSRKYASKAKNLADDMVRNTARDLLYYAVTQDAMLIFENLSRGFGRQGKRTFMAERQYTRMEDWLTAKLAYEGLPSKTYLSKTLAQYTSKTCSNCGFTITSADYDRVLEKLKKTATGWMTTINGKELKVEGQITYYNRYKRQNVVKDLSVELDRLSEESVNNDISSWTKGRSGEALSLLKKRFSHRPVQEKFVCLNCGFETHADEQAALNIARSWLFLRSQEYKKYQTNKTTGNTDKRAFVETWQSFYRKKLKEVWKPAV

SEQ ID NO: 26974 - protein, 978 aa, synthetic construct
  REGION 1..978: note = engineered CasX variant
QEIKRINKIRRRLVKDSNTKKAGKTGPMKTLLVRVMTPDLRERLENLRKKPENIPQPISNTSRANLNKLLTDYTEMKKAILHVYWEEFQKDPVGLMSRVAQPASKKIDQNKLKPEMDEKGNLTTAGFACSQCGQPLFVYKLEQVSEKGKAYTNYFGRCNVAEHEKLILLAQLKPEKDSDEAVTYSLGKFGQRALDFYSIHVTKESTHPVKPLAQIAGNRYASGPVGKALSDACMGTIASFLSKYQDIIIEHQKVVKGNQKRLESLRELAGKENLEYPSVTLPPQPHTKEGVDAYNEVIARVRMWVNLNLWQKLKLSRDDAKPLLRLKGFPSFPLVERQANEVDWWDMVCNVKKLINEKKEDGKVFWQNLAGYKRQEALRPYLSSEEDRKKGKKFARYQLGDLLLHLEKKHGEDWGKVYDEAWERIDKKVEGLSKHIKLEEERRSEDAQSKAALTDWLRAKASFVIEGLKEADKDEFCRCELKLQKWYGDLRGKPFAIEAENSILDISGFSKQYNCAFIWQKDGVKKLNLYLIINYFKGGKLRFKKIKPEAFEANRFYTVINKKSGEIVPMEVNFNFDDPNLIILPLAFGKRQGREFIWNDLLSLETGSLKLANGRVIEKTLYNRRTRQDEPALFVALTFERREVLDSSNIKPMNLIGVDRGENIPAVIALTDPEGCPLSIFKDSEGNPTHILRIGTSYKEKQRTIQAKKEVEQRRAGGYSRKYASKAKNLADDMVRNTARDLLYYAVTQDAMLIFENLSRGFGRQGKRTFMAERQYTRMEDWLTAKLAYEGLPSKTYLSKTLAQYTSKTCSNCGFTITSADYDRVLEKLKKTATGWMTTINGKELKVEGQITYYNRYKRQNVVKDLSVELDRLSEESVNNDISSWTKGRSGEALSLLKKRFSHRPVQEKFVCLNCGFETHADEQAALNIARSWLFLRSQEYKKYQTNKTTGNTDKRAFVETWQSFYRKKLKEVWKPAV

SEQ ID NO: 26975 - protein, 978 aa, synthetic construct
  REGION 1..978: note = engineered CasX variant
QEIKRINKIRRRLVKDSNTKKAGKTGPMKTLLVRVMTPDLRERLENLRKKPENIPQPISNTSRANLNKLLTDYTEMKKAILHVYWEEFQKDPVGLMSRVAQPASKKIDQNKLKPEMDEKGNLTTAGFACSQCGQPLFVYKLEQVSEKGKAYTNYFGRCNVAEHEKLILLAQLKPEKDSDEAVTYSLGKFGQRALDFYSIHVTKESTHPVKPLAQIAGNRYASGPVGKALSDACMGTIASFLSKYQDIIIEHQKVVKGNQKRLESLRELAGKENLEYPSVTLPPQPHTKEGVDAYNEVIARVRMWVNLNLWQKLKLSRDDAKPLLRLKGFPSFPLVERQANEVDWWDMVCNVKKLINEKKEDGKVFWQNLAGYKRQEALRPYLSSEEDRKKGKKFARYQLGDLLLHLEKKHGEDWGKVYDEAWERIDKKVEGLSKHIKLEEERRSEDAQSKAALTDWLRAKASFVIEGLKEADKDEFCRCELKLQKWYGDLRGKPFAIEAENSILDISGFSKQYNCAFIWQKDGVKKLNLYLIINYFKGGKLRFKKIKPEAFEANRFYTVINKKSGEIVPMEVNFNFDDPNLIILPLAFGKRQGREFIWNDLLSLETGSLKLANGRVIEKTLYNRRTRQDEPALFVALTFERREVLDSSNIKPMNLIGVDRGENIPAVIALTDPEGCPLSIFKDSEGNPTHILRIGESYKEKQRTIQAKKEVEQRRAGGYSRKYASKAKNLADDMVRNTARDLLYYAVTQDAMLIFENLSRGFGRQGKRTFMAERQYTRMEDWLTAKLAYEGLPSKTYLSKTLAQYTSKTCSNCGFTITSADYDRVLEKLKKTATGWMTTINGKELKVEGQITYYNRYKRQNVVKDLSVELDRLSEESVNNDISSWTKGRSGEALSLLKKRFSHRPVQEKFVCLNCGFETHADEQAALNIARSWLFLRSQEYKKYQTNKTTGNTDKRAFVETWQSFYRKKLKEVWKPAV

SEQ ID NO: 26976 - protein, 978 aa, synthetic construct
  REGION 1..978: note = engineered CasX variant
QEIKRINKIRRRLVKDSNTKKAGKTGPMKTLLVRVMTPDLRERLENLRKKPENIPQPISNTSRANLNKLLTDYTEMKKAILHVYWEEFQKDPVGLMSRVAQPASKKIDQNKLKPEMDEKGNLTTAGFACSQCGQPLFVYKLEQVSEKGKAYTNYFGRCNVAEHEKLILLAQLKPEKDSDEAVTYSLGKFGQRALDFYSIHVTKESTHPVKPLAQIAGNRYASGPVGKALSDACMGTIASFLSKYQDIIIEHQKVVKGNQKRLESLRELAGKENLEYPSVTLPPQPHTKEGVDAYNEVIARVRMWVNLNLWQKLKLSRDDAKPLLRLKGFPSFPLVERQANEVDWWDMVCNVKKLINEKKEDGKVFWQNLAGYKRQEALRPYLSSEEDRKKGKKFARYQLGDLLLHLEKKHGEDWGKVYDEAWERIDKKVEGLSKHIKLEEERRSEDAQSKAALTDWLRAKASFVIEGLKEADKDEFCRCELKLQKWYGDLRGKPFAIEAENSILDISGFSKQYNCAFIWQKDGVKKLNLYLIINYFKGGKLRFKKIKPEAFEANRFYTVINKKSGEIVPMEVNFNFDDPNLIILPLAFGKRQGREFIWNDLLSLETGSLKLANGRVIEKTLYNRRTRQDEPALFVALTFERREVLDSSNIKPMNLIGVDRGENIPAVIALTDPEGCPLSHFKDSLGNPTHILRIGESYKEKQRTIQAKKEVEQRRAGGYSRKYASKAKNLADDMVRNTARDLLYYAVTQDAMLIFENLSRGFGRQGKRTFMAERQYTRMEDWLTAKLAYEGLPSKTYLSKTLAQYTSKTCSNCGFTITSADYDRVLEKLKKTATGWMTTINGKELKVEGQITYYNRYKRQNVVKDLSVELDRLSEESVNNDISSWTKGRSGEALSLLKKRFSHRPVQEKFVCLNCGFETHADEQAALNIARSWLFLRSQEYKKYQTNKTTGNTDKRAFVETWQSFYRKKLKEVWKPAV

SEQ ID NO: 26977 - protein, 978 aa, synthetic construct
  REGION 1..978: note = engineered CasX variant
QEIKRINKIRRRLVKDSNTKKAGKTGPMKTLLVRVMTPDLRERLENLRKKPENIPQPISNTSRANLNKLLTDYTEMKKAILHVYWEEFQKDPVGLMSRVAQPASKKIDQNKLKPEMDEKGNLTTAGFACSQCGQPLFVYKLEQVSEKGKAYTNYFGRCNVAEHEKLILLAQLKPEKDSDEAVTYSLGKFGQRALDFYSIHVTKESTHPVKPLAQIAGNRYASGPVGKALSDACMGTIASFLSKYQDIIIEHQKVVKGNQKRLESLRELAGKENLEYPSVTLPPQPHTKEGVDAYNEVIARVRMWVNLNLWQKLKLSRDDAKPLLRLKGFPSFPLVERQANEVDWWDMVCNVKKLINEKKEDGKVFWQNLAGYKRQEALRPYLSSEEDRKKGKKFARYQLGDLLLHLEKKHGEDWGKVYDEAWERIDKKVEGLSKHIKLEEERRSEDAQSKAALTDWLRAKASFVIEGLKEADKDEFCRCELKLQKWYGDLRGKPFAIEAENSILDISGFSKQYNCAFIWQKDGVKKLNLYLIINYFKGGKLRFKKIKPEAFEANRFYTVINKKSGEIVPMEVNFNFDDPNLIILPLAFGKRQGREFIWNDLLSLETGSLKLANGRVIEKTLYNRRTRQDEPALFVALTFERREVLDSSNIKPMNLIGVDRGENIPAVIALTDPEGCPLSHFKDSLGNPTHILRIGESYKEKQRTFQAKKEVEQRRAGGYSRKYASKAKNLADDMVRNTARDLLYYAVTQDAMLIFENLSRGFGRQGKRTFMAERQYTRMEDWLTAKLAYEGLPSKTYLSKTLAQYTSKTCSNCGFTITSADYDRVLEKLKKTATGWMTTINGKELKVEGQITYYNRYKRQNVVKDLSVELDRLSEESVNNDISSWTKGRSGEALSLLKKRFSHRPVQEKFVCLNCGFETHADEQAALNIARSWLFLRSQEYKKYQTNKTTGNTDKRAFVETWQSFYRKKLKEVWKPAV

SEQ ID NO: 26978 - protein, 978 aa, synthetic construct
  REGION 1..978: note = engineered CasX variant
QEIKRINKIRRRLVKDSNTKKAGKTGPMKTLLVRVMTPDLRERLENLRKKPENIPQPISNTSRANLNKLLTDYTEMKKAILHVYWEEFQKDPVGLMSRVAQPASKKIDQNKLKPEMDEKGNLTTAGFACSQCGQPLFVYKLEQVSEKGKAYTNYFGRCNVAEHEKLILLAQLKPEKDSDEAVTYSLGKFGQRALDFYSIHVTKESTHPVKPLAQIAGNRYASGPVGKALSDACMGTIASFLSKYQDIIIEHQKVVKGNQKRLESLRELAGKENLEYPSVTLPPQPHTKEGVDAYNEVIARVRMWVNLNLWQKLKLSRDDAKPLLRLKGFPSFPLVERQANEVDWWDMVCNVKKLINEKKEDGKVFWQNLAGYKRQEALRPYLSSEEDRKKGKKFARYQLGDLLLHLEKKHGEDWGKVYDEAWERIDKKVEGLSKHIKLEEERRSEDAQSKAALTDWLRAKASFVIEGLKEADKDEFCRCELKLQKWYGDLRGKPFAIEAENSILDISGFSKQYNCAFIWQKDGVKKLNLYLIINYFKGGKLRFKKIKPEAFEANRFYTVINKKSGEIVPMEVNFNFDDPNLIILPLAFGKRQGREFIWNDLLSLETGSLKLANGRVIEKTLYNRRTRQDEPALFVALTFERREVLDSSNIKPMNLIGVDRGENIPAVIALTDPEGCPLSHFKDSLGNPTHILRIGESYKEKQRFIQAKKEVEQRRAGGYSRKYASKAKNLADDMVRNTARDLLYYAVTQDAMLIFENLSRGFGRQGKRTFMAERQYTRMEDWLTAKLAYEGLPSKTYLSKTLAQYTSKTCSNCGFTITSADYDRVLEKLKKTATGWMTTINGKELKVEGQITYYNRYKRQNVVKDLSVELDRLSEESVNNDISSWTKGRSGEALSLLKKRFSHRPVQEKFVCLNCGFETHADEQAALNIARSWLFLRSQEYKKYQTNKTTGNTDKRAFVETWQSFYRKKLKEVWKPAV

SEQ ID NO: 26979 - protein, 978 aa, synthetic construct
  REGION 1..978: note = engineered CasX variant
QEIKRINKIRRRLVKDSNTKKAGKTGPMKTLLVRVMTPDLRERLENLRKKPENIPQPISNTSRANLNKLLTDYTEMKKAILHVYWEEFQKDPVGLMSRVAQPASKKIDQNKLKPEMDEKGNLTTAGFACSQCGQPLFVYKLEQVSEKGKAYTNYFGRCNVAEHEKLILLAQLKPEKDSDEAVTYSLGKFGQRALDFYSIHVTKESTHPVKPLAQIAGNRYASGPVGKALSDACMGTIASFLSKYQDIIIEHQKVVKGNQKRLESLRELAGKENLEYPSVTLPPQPHTKEGVDAYNEVIARVRMWVNLNLWQKLKLSRDDAKPLLRLKGFPSFPLVERQANEVDWWDMVCNVKKLINEKKEDGKVFWQNLAGYKRQEALRPYLSSEEDRKKGKKFARYQLGDLLLHLEKKHGEDWGKVYDEAWERIDKKVEGLSKHIKLEEERRSEDAQSKAALTDWLRAKASFVIEGLKEADKDEFCRCELKLQKWYGDLRGKPFAIEAENSILDISGFSKQYNCAFIWQKDGVKKLNLYLIINYFKGGKLRFKKIKPEAFEANRFYTVINKKSGEIVPMEVNFNFDDPNLIILPLAFGKRQGREFIWNDLLSLETGSLKLANGRVIEKTLYNRRTRQDEPALFVALTFERREVLDSSNIKPMNLIGVDRGENIPAVIALTDPEGCPLSGFSDSLGNPTHILRIGESYKEKQRTIQAKKEVEQRRAGGYSRKYASKAKNLADDMVRNTARDLLYYAVTQDAMLIFENLSRGFGRQGKRTFMAERQYTRMEDWLTAKLAYEGLPSKTYLSKTLAQYTSKTCSNCGFTITSADYDRVLEKLKKTATGWMTTINGKELKVEGQITYYNRYKRQNVVKDLSVELDRLSEESVNNDISSWTKGRSGEALSLLKKRFSHRPVQEKFVCLNCGFETHADEQAALNIARSWLFLRSQEYKKYQTNKTTGNTDKRAFVETWQSFYRKKLKEVWKPAV

SEQ ID NO: 26980 - protein, 978 aa, synthetic construct
  REGION 1..978: note = engineered CasX variant
QEIKRINKIRRRLVKDSNTKKAGKTGPMKTLLVRVMTPDLRERLENLRKKPENIPQPISNTSRANLNKLLTDYTEMKKAILHVYWEEFQKDPVGLMSRVAQPASKKIDQNKLKPEMDEKGNLTTAGFACSQCGQPLFVYKLEQVSEKGKAYTNYFGRCNVAEHEKLILLAQLKPEKDSDEAVTYSLGKFGQRALDFYSIHVTKESTHPVKPLAQIAGNRYASGPVGKALSDACMGTIASFLSKYQDIIIEHQKVVKGNQKRLESLRELAGKENLEYPSVTLPPQPHTKEGVDAYNEVIARVRMWVNLNLWQKLKLSRDDAKPLLRLKGFPSFPLVERQANEVDWWDMVCNVKKLINEKKEDGKVFWQNLAGYKRQEALRPYLSSEEDRKKGKKFARYQLGDLLLHLEKKHGEDWGKVYDEAWERIDKKVEGLSKHIKLEEERRSEDAQSKAALTDWLRAKASFVIEGLKEADKDEFCRCELKLQKWYGDLRGKPFAIEAENSILDISGFSKQYNCAFIWQKDGVKKLNLYLIINYFKGGKLRFKKIKPEAFEANRFYTVINKKSGEIVPMEVNFNFDDPNLIILPLAFGKRQGREFIWNDLLSLETGSLKLANGRVIEKTLYNRRTRQDEPALFVALTFERREVLDSSNIKPMNLIGVDRGENIPAVIALTDPEGCPLSGFSDSLGNPTHICRIGESYKEKQRTIQAKKEVEQRRAGGYSRKYASKAKNLADDMVRNTARDLLYYAVTQDAMLIFENLSRGFGRQGKRTFMAERQYTRMEDWLTAKLAYEGLPSKTYLSKTLAQYTSKTCSNCGFTITSADYDRVLEKLKKTATGWMTTINGKELKVEGQITYYNRYKRQNVVKDLSVELDRLSEESVNNDISSWTKGRSGEALSLLKKRFSHRPVQEKFVCLNCGFETHADEQAALNIARSWLFLRSQEYKKYQTNKTTGNTDKRAFVETWQSFYRKKLKEVWKPAV

SEQ ID NO: 26981 - protein, 978 aa, synthetic construct
  REGION 1..978: note = engineered CasX variant
QEIKRINKIRRRLVKDSNTKKAGKTGPMKTLLVRVMTPDLRERLENLRKKPENIPQPISNTSRANLNKLLTDYTEMKKAILHVYWEEFQKDPVGLMSRVAQPASKKIDQNKLKPEMDEKGNLTTAGFACSQCGQPLFVYKLEQVSEKGKAYTNYFGRCNVAEHEKLILLAQLKPEKDSDEAVTYSLGKFGQRALDFYSIHVTKESTHPVKPLAQIAGNRYASGPVGKALSDACMGTIASFLSKYQDIIIEHQKVVKGNQKRLESLRELAGKENLEYPSVTLPPQPHTKEGVDAYNEVIARVRMWVNLNLWQKLKLSRDDAKPLLRLKGFPSFPLVERQANEVDWWDMVCNVKKLINEKKEDGKVFWQNLAGYKRQEALRPYLSSEEDRKKGKKFARYQLGDLLLHLEKKHGEDWGKVYDEAWERIDKKVEGLSKHIKLEEERRSEDAQSKAALTDWLRAKASFVIEGLKEADKDEFCRCELKLQKWYGDLRGKPFAIEAENSILDISGFSKQYNCAFIWQKDGVKKLNLYLIINYFKGGKLRFKKIKPEAFEANRFYTVINKKSGEIVPMEVNFNFDDPNLIILPLAFGKRQGREFIWNDLLSLETGSLKLANGRVIEKTLYNRRTRQDEPALFVALTFERREVLDSSNIKPMNLIGVDRGENIPAVIALTDPEGCPLSGFKDTLGNYTHILRIGESYKEKQRTIQAKKEVEQRRAGGYSRKYASKAKNLADDMVRNTARDLLYYAVTQDAMLIFENLSRGFGRQGKRTFMAERQYTRMEDWLTAKLAYEGLPSKTYLSKTLAQYTSKTCSNCGFTITSADYDRVLEKLKKTATGWMTTINGKELKVEGQITYYNRYKRQNVVKDLSVELDRLSEESVNNDISSWTKGRSGEALSLLKKRFSHRPVQEKFVCLNCGFETHADEQAALNIARSWLFLRSQEYKKYQTNKTTGNTDKRAFVETWQSFYRKKLKEVWKPAV

SEQ ID NO: 26982 - protein, 978 aa, synthetic construct
  REGION 1..978: note = engineered CasX variant
QEIKRINKIRRRLVKDSNTKKAGKTGPMKTLLVRVMTPDLRERLENLRKKPENIPQPISNTSRANLNKLLTDYTEMKKAILHVYWEEFQKDPVGLMSRVAQPASKKIDQNKLKPEMDEKGNLTTAGFACSQCGQPLFVYKLEQVSEKGKAYTNYFGRCNVAEHEKLILLAQLKPEKDSDEAVTYSLGKFGQRALDFYSIHVTKESTHPVKPLAQIAGNRYASGPVGKALSDACMGTIASFLSKYQDIIIEHQKVVKGNQKRLESLRELAGKENLEYPSVTLPPQPHTKEGVDAYNEVIARVRMWVNLNLWQKLKLSRDDAKPLLRLKGFPSFPLVERQANEVDWWDMVCNVKKLINEKKEDGKVFWQNLAGYKRQEALRPYLSSEEDRKKGKKFARYQLGDLLLHLEKKHGEDWGKVYDEAWERIDKKVEGLSKHIKLEEERRSEDAQSKAALTDWLRAKASFVIEGLKEADKDEFCRCELKLQKWYGDLRGKPFAIEAENSILDISGFSKQYNCAFIWQKDGVKKLNLYLIINYFKGGKLRFKKIKPEAFEANRFYTVINKKSGEIVPMEVNFNFDDPNLIILPLAFGKRQGREFIWNDLLSLETGSLKLANGRVIEKTLYNRRTRQDEPALFVALTFERREVLDSSNIKPMNLIGVDRGENIPAVIALTDPEGCPLSGFKDTLGNPTHILRIGESYKEKQRTIQAKKEVEQRRAGGYSRKYASKAKNLADDMVRNTARDLLYYAVTQDAMLIFENLSRGFGRQGKRTFMAERQYTRMEDWLTAKLAYEGLPSKTYLSKTLAQYTSKTCSNCGFTITSADYDRVLEKLKKTATGWMTTINGKELKVEGQITYYNRYKRQNVVKDLSVELDRLSEESVNNDISSWTKGRSGEALSLLKKRFSHRPVQEKFVCLNCGFETHADEQAALNIARSWLFLRSQEYKKYQTNKTTGNTDKRAFVETWQSFYRKKLKEVWKPAV

SEQ ID NO: 26983 - protein, 978 aa, synthetic construct
  REGION 1..978: note = engineered CasX variant
QEIKRINKIRRRLVKDSNTKKAGKTGPMKTLLVRVMTPDLRERLENLRKKPENIPQPISNTSRANLNKLLTDYTEMKKAILHVYWEEFQKDPVGLMSRVAQPASKKIDQNKLKPEMDEKGNLTTAGFACSQCGQPLFVYKLEQVSEKGKAYTNYFGRCNVAEHEKLILLAQLKPEKDSDEAVTYSLGKFGQRALDFYSIHVTKESTHPVKPLAQIAGNRYASGPVGKALSDACMGTIASFLSKYQDIIIEHQKVVKGNQKRLESLRELAGKENLEYPSVTLPPQPHTKEGVDAYNEVIARVRMWVNLNLWQKLKLSRDDAKPLLRLKGFPSFPLVERQANEVDWWDMVCNVKKLINEKKEDGKVFWQNLAGYKRQEALRPYLSSEEDRKKGKKFARYQLGDLLLHLEKKHGEDWGKVYDEAWERIDKKVEGLSKHIKLEEERRSEDAQSKAALTDWLRAKASFVIEGLKEADKDEFCRCELKLQKWYGDLRGKPFAIEAENSILDISGFSKQYNCAFIWQKDGVKKLNLYLIINYFKGGKLRFKKIKPEAFEANRFYTVINKKSGEIVPMEVNFNFDDPNLIILPLAFGKRQGREFIWNDLLSLETGSLKLANGRVIEKTLYNRRTRQDEPALFVALTFERREVLDSSNIKPMNLIGVDRGENIPAVIALTDPEGCPLSGFKDSRGNPTHILRIGESYKEKQRTLQAKKEVEQRRAGGYSRKYASKAKNLADDMVRNTARDLLYYAVTQDAMLIFENLSRGFGRQGKRTFMAERQYTRMEDWLTAKLAYEGLPSKTYLSKTLAQYTSKTCSNCGFTITSADYDRVLEKLKKTATGWMTTINGKELKVEGQITYYNRYKRQNVVKDLSVELDRLSEESVNNDISSWTKGRSGEALSLLKKRFSHRPVQEKFVCLNCGFETHADEQAALNIARSWLFLRSQEYKKYQTNKTTGNTDKRAFVETWQSFYRKKLKEVWKPAV

SEQ ID NO: 26984 - protein, 978 aa, synthetic construct
  REGION 1..978: note = engineered CasX variant
QEIKRINKIRRRLVKDSNTKKAGKTGPMKTLLVRVMTPDLRERLENLRKKPENIPQPISNTSRANLNKLLTDYTEMKKAILHVYWEEFQKDPVGLMSRVAQPASKKIDQNKLKPEMDEKGNLTTAGFACSQCGQPLFVYKLEQVSEKGKAYTNYFGRCNVAEHEKLILLAQLKPEKDSDEAVTYSLGKFGQRALDFYSIHVTKESTHPVKPLAQIAGNRYASGPVGKALSDACMGTIASFLSKYQDIIIEHQKVVKGNQKRLESLRELAGKENLEYPSVTLPPQPHTKEGVDAYNEVIARVRMWVNLNLWQKLKLSRDDAKPLLRLKGFPSFPLVERQANEVDWWDMVCNVKKLINEKKEDGKVFWQNLAGYKRQEALRPYLSSEEDRKKGKKFARYQLGDLLLHLEKKHGEDWGKVYDEAWERIDKKVEGLSKHIKLEEERRSEDAQSKAALTDWLRAKASFVIEGLKEADKDEFCRCELKLQKWYGDLRGKPFAIEAENSILDISGFSKQYNCAFIWQKDGVKKLNLYLIINYFKGGKLRFKKIKPEAFEANRFYTVINKKSGEIVPMEVNFNFDDPNLIILPLAFGKRQGREFIWNDLLSLETGSLKLANGRVIEKTLYNRRTRQDEPALFVALTFERREVLDSSNIKPMNLIGVDRGENIPAVIALTDPEGCPLSGFKDSRGNPTHILRIGESYKEKQRTIQAKKEVEQRRAGGYSRKYASKAKNLADDMVRNTARDLLYYAVTQDAMLIFENLSRGFGRQGKRTFMAERQYTRMEDWLTAKLAYEGLPSKTYLSKTLAQYTSKTCSNCGFTITSADYDRVLEKLKKTATGWMTTINGKELKVEGQITYYNRYKRQNVVKDLSVELDRLSEESVNNDISSWTKGRSGEALSLLKKRFSHRPVQEKFVCLNCGFETHADEQAALNIARSWLFLRSQEYKKYQTNKTTGNTDKRAFVETWQSFYRKKLKEVWKPAV

SEQ ID NO: 26985 - protein, 978 aa, synthetic construct
  REGION 1..978: note = engineered CasX variant
QEIKRINKIRRRLVKDSNTKKAGKTGPMKTLLVRVMTPDLRERLENLRKKPENIPQPISNTSRANLNKLLTDYTEMKKAILHVYWEEFQKDPVGLMSRVAQPASKKIDQNKLKPEMDEKGNLTTAGFACSQCGQPLFVYKLEQVSEKGKAYTNYFGRCNVAEHEKLILLAQLKPEKDSDEAVTYSLGKFGQRALDFYSIHVTKESTHPVKPLAQIAGNRYASGPVGKALSDACMGTIASFLSKYQDIIIEHQKVVKGNQKRLESLRELAGKENLEYPSVTLPPQPHTKEGVDAYNEVIARVRMWVNLNLWQKLKLSRDDAKPLLRLKGFPSFPLVERQANEVDWWDMVCNVKKLINEKKEDGKVFWQNLAGYKRQEALRPYLSSEEDRKKGKKFARYQLGDLLLHLEKKHGEDWGKVYDEAWERIDKKVEGLSKHIKLEEERRSEDAQSKAALTDWLRAKASFVIEGLKEADKDEFCRCELKLQKWYGDLRGKPFAIEAENSILDISGFSKQYNCAFIWQKDGVKKLNLYLIINYFKGGKLRFKKIKPEAFEANRFYTVINKKSGEIVPMEVNFNFDDPNLIILPLAFGKRQGREFIWNDLLSLETGSLKLANGRVIEKTLYNRRTRQDEPALFVALTFERREVLDSSNIKPMNLIGVDRGENIPAVIALTDPEGCPLSGFKDSLGNYTHILRIGESYKEKQRTIQAKKEVEQRRAGGYSRKYASKAKNLADDMVRNTARDLLYYAVTQDAMLIFENLSRGFGRQGKRTFMAERQYTRMEDWLTAKLAYEGLPSKTYLSKTLAQYTSKTCSNCGFTITSADYDRVLEKLKKTATGWMTTINGKELKVEGQITYYNRYKRQNVVKDLSVELDRLSEESVNNDISSWTKGRSGEALSLLKKRFSHRPVQEKFVCLNCGFETHADEQAALNIARSWLFLRSQEYKKYQTNKTTGNTDKRAFVETWQSFYRKKLKEVWKPAV

SEQ ID NO: 26986 - protein, 978 aa, synthetic construct
  REGION 1..978: note = engineered CasX variant
QEIKRINKIRRRLVKDSNTKKAGKTGPMKTLLVRVMTPDLRERLENLRKKPENIPQPISNTSRANLNKLLTDYTEMKKAILHVYWEEFQKDPVGLMSRVAQPASKKIDQNKLKPEMDEKGNLTTAGFACSQCGQPLFVYKLEQVSEKGKAYTNYFGRCNVAEHEKLILLAQLKPEKDSDEAVTYSLGKFGQRALDFYSIHVTKESTHPVKPLAQIAGNRYASGPVGKALSDACMGTIASFLSKYQDIIIEHQKVVKGNQKRLESLRELAGKENLEYPSVTLPPQPHTKEGVDAYNEVIARVRMWVNLNLWQKLKLSRDDAKPLLRLKGFPSFPLVERQANEVDWWDMVCNVKKLINEKKEDGKVFWQNLAGYKRQEALRPYLSSEEDRKKGKKFARYQLGDLLLHLEKKHGEDWGKVYDEAWERIDKKVEGLSKHIKLEEERRSEDAQSKAALTDWLRAKASFVIEGLKEADKDEFCRCELKLQKWYGDLRGKPFAIEAENSILDISGFSKQYNCAFIWQKDGVKKLNLYLIINYFKGGKLRFKKIKPEAFEANRFYTVINKKSGEIVPMEVNFNFDDPNLIILPLAFGKRQGREFIWNDLLSLETGSLKLANGRVIEKTLYNRRTRQDEPALFVALTFERREVLDSSNIKPMNLIGVDRGENIPAVIALTDPEGCPLSGFKDSLGNPTHYLRIGNSYKEKQRTIQAKKEVEQRRAGGYSRKYASKAKNLADDMVRNTARDLLYYAVTQDAMLIFENLSRGFGRQGKRTFMAERQYTRMEDWLTAKLAYEGLPSKTYLSKTLAQYTSKTCSNCGFTITSADYDRVLEKLKKTATGWMTTINGKELKVEGQITYYNRYKRQNVVKDLSVELDRLSEESVNNDISSWTKGRSGEALSLLKKRFSHRPVQEKFVCLNCGFETHADEQAALNIARSWLFLRSQEYKKYQTNKTTGNTDKRAFVETWQSFYRKKLKEVWKPAV

SEQ ID NO: 26987 - protein, 978 aa, synthetic construct
  REGION 1..978: note = engineered CasX variant
QEIKRINKIRRRLVKDSNTKKAGKTGPMKTLLVRVMTPDLRERLENLRKKPENIPQPISNTSRANLNKLLTDYTEMKKAILHVYWEEFQKDPVGLMSRVAQPASKKIDQNKLKPEMDEKGNLTTAGFACSQCGQPLFVYKLEQVSEKGKAYTNYFGRCNVAEHEKLILLAQLKPEKDSDEAVTYSLGKFGQRALDFYSIHVTKESTHPVKPLAQIAGNRYASGPVGKALSDACMGTIASFLSKYQDIIIEHQKVVKGNQKRLESLRELAGKENLEYPSVTLPPQPHTKEGVDAYNEVIARVRMWVNLNLWQKLKLSRDDAKPLLRLKGFPSFPLVERQANEVDWWDMVCNVKKLINEKKEDGKVFWQNLAGYKRQEALRPYLSSEEDRKKGKKFARYQLGDLLLHLEKKHGEDWGKVYDEAWERIDKKVEGLSKHIKLEEERRSEDAQSKAALTDWLRAKASFVIEGLKEADKDEFCRCELKLQKWYGDLRGKPFAIEAENSILDISGFSKQYNCAFIWQKDGVKKLNLYLIINYFKGGKLRFKKIKPEAFEANRFYTVINKKSGEIVPMEVNFNFDDPNLIILPLAFGKRQGREFIWNDLLSLETGSLKLANGRVIEKTLYNRRTRQDEPALFVALTFERREVLDSSNIKPMNLIGVDRGENIPAVIALTDPEGCPLSGFKDSLGNPTHILRIGNSYKEKQRTIQAKKEVEQRRAGGYSRKYASKAKNLADDMVRNTARDLLYYAVTQDAMLIFENLSRGFGRQGKRTFMAERQYTRMEDWLTAKLAYEGLPSKTYLSKTLAQYTSKTCSNCGFTITSADYDRVLEKLKKTATGWMTTINGKELKVEGQITYYNRYKRQNVVKDLSVELDRLSEESVNNDISSWTKGRSGEALSLLKKRFSHRPVQEKFVCLNCGFETHADEQAALNIARSWLFLRSQEYKKYQTNKTTGNTDKRAFVETWQSFYRKKLKEVWKPAV

SEQ ID NO: 26988 - protein, 978 aa, synthetic construct
  REGION 1..978: note = engineered CasX variant
QEIKRINKIRRRLVKDSNTKKAGKTGPMKTLLVRVMTPDLRERLENLRKKPENIPQPISNTSRANLNKLLTDYTEMKKAILHVYWEEFQKDPVGLMSRVAQPASKKIDQNKLKPEMDEKGNLTTAGFACSQCGQPLFVYKLEQVSEKGKAYTNYFGRCNVAEHEKLILLAQLKPEKDSDEAVTYSLGKFGQRALDFYSIHVTKESTHPVKPLAQIAGNRYASGPVGKALSDACMGTIASFLSKYQDIIIEHQKVVKGNQKRLESLRELAGKENLEYPSVTLPPQPHTKEGVDAYNEVIARVRMWVNLNLWQKLKLSRDDAKPLLRLKGFPSFPLVERQANEVDWWDMVCNVKKLINEKKEDGKVFWQNLAGYKRQEALRPYLSSEEDRKKGKKFARYQLGDLLLHLEKKHGEDWGKVYDEAWERIDKKVEGLSKHIKLEEERRSEDAQSKAALTDWLRAKASFVIEGLKEADKDEFCRCELKLQKWYGDLRGKPFAIEAENSILDISGFSKQYNCAFIWQKDGVKKLNLYLIINYFKGGKLRFKKIKPEAFEANRFYTVINKKSGEIVPMEVNFNFDDPNLIILPLAFGKRQGREFIWNDLLSLETGSLKLANGRVIEKTLYNRRTRQDEPALFVALTFERREVLDSSNIKPMNLIGVDRGENIPAVIALTDPEGCPLSGFKDSLGNPTHILRIGESYKMKQRTIQAKQEVEQRRAGGYSRKYASKAKNLADDMVRNTARDLLYYAVTQDAMLIFENLSRGFGRQGKRTFMAERQYTRMEDWLTAKLAYEGLPSKTYLSKTLAQYTSKTCSNCGFTITSADYDRVLEKLKKTATGWMTTINGKELKVEGQITYYNRYKRQNVVKDLSVELDRLSEESVNNDISSWTKGRSGEALSLLKKRFSHRPVQEKFVCLNCGFETHADEQAALNIARSWLFLRSQEYKKYQTNKTTGNTDKRAFVETWQSFYRKKLKEVWKPAV

SEQ ID NO: 26989 - protein, 978 aa, synthetic construct
  REGION 1..978: note = engineered CasX variant
QEIKRINKIRRRLVKDSNTKKAGKTGPMKTLLVRVMTPDLRERLENLRKKPENIPQPISNTSRANLNKLLTDYTEMKKAILHVYWEEFQKDPVGLMSRVAQPASKKIDQNKLKPEMDEKGNLTTAGFACSQCGQPLFVYKLEQVSEKGKAYTNYFGRCNVAEHEKLILLAQLKPEKDSDEAVTYSLGKFGQRALDFYSIHVTKESTHPVKPLAQIAGNRYASGPVGKALSDACMGTIASFLSKYQDIIIEHQKVVKGNQKRLESLRELAGKENLEYPSVTLPPQPHTKEGVDAYNEVIARVRMWVNLNLWQKLKLSRDDAKPLLRLKGFPSFPLVERQANEVDWWDMVCNVKKLINEKKEDGKVFWQNLAGYKRQEALRPYLSSEEDRKKGKKFARYQLGDLLLHLEKKHGEDWGKVYDEAWERIDKKVEGLSKHIKLEEERRSEDAQSKAALTDWLRAKASFVIEGLKEADKDEFCRCELKLQKWYGDLRGKPFAIEAENSILDISGFSKQYNCAFIWQKDGVKKLNLYLIINYFKGGKLRFKKIKPEAFEANRFYTVINKKSGEIVPMEVNFNFDDPNLIILPLAFGKRQGREFIWNDLLSLETGSLKLANGRVIEKTLYNRRTRQDEPALFVALTFERREVLDSSNIKPMNLIGVDRGENIPAVIALTDPEGCPLSGFKDSLGNPTHILRIGESYKEKQRTLQAKKEVEQRRAGGYSRKYASKAKNLADDMVRNTARDLLYYAVTQDAMLIFENLSRGFGRQGKRTFMAERQYTRMEDWLTAKLAYEGLPSKTYLSKTLAQYTSKTCSNCGFTITSADYDRVLEKLKKTATGWMTTINGKELKVEGQITYYNRYKRQNVVKDLSVELDRLSEESVNNDISSWTKGRSGEALSLLKKRFSHRPVQEKFVCLNCGFETHADEQAALNIARSWLFLRSQEYKKYQTNKTTGNTDKRAFVETWQSFYRKKLKEVWKPAV

SEQ ID NO: 26990 - protein, 978 aa, synthetic construct
  REGION 1..978: note = engineered CasX variant
QEIKRINKIRRRLVKDSNTKKAGKTGPMKTLLVRVMTPDLRERLENLRKKPENIPQPISNTSRANLNKLLTDYTEMKKAILHVYWEEFQKDPVGLMSRVAQPASKKIDQNKLKPEMDEKGNLTTAGFACSQCGQPLFVYKLEQVSEKGKAYTNYFGRCNVAEHEKLILLAQLKPEKDSDEAVTYSLGKFGQRALDFYSIHVTKESTHPVKPLAQIAGNRYASGPVGKALSDACMGTIASFLSKYQDIIIEHQKVVKGNQKRLESLRELAGKENLEYPSVTLPPQPHTKEGVDAYNEVIARVRMWVNLNLWQKLKLSRDDAKPLLRLKGFPSFPLVERQANEVDWWDMVCNVKKLINEKKEDGKVFWQNLAGYKRQEALRPYLSSEEDRKKGKKFARYQLGDLLLHLEKKHGEDWGKVYDEAWERIDKKVEGLSKHIKLEEERRSEDAQSKAALTDWLRAKASFVIEGLKEADKDEFCRCELKLQKWYGDLRGKPFAIEAENSILDISGFSKQYNCAFIWQKDGVKKLNLYLIINYFKGGKLRFKKIKPEAFEANRFYTVINKKSGEIVPMEVNFNFDDPNLIILPLAFGKRQGREFIWNDLLSLETGSLKLANGRVIEKTLYNRRTRQDEPALFVALTFERREVLDSSNIKPMNLIGVDRGENIPAVIALTDPEGCPLSGFKDSLGNPTHILRIGESYKEKQRTIQAKQEVEQRRAGGYSRKYASKAKNLADDMVRNTARDLLYYAVTQDAMLIFENLSRGFGRQGKRTFMAERQYTRMEDWLTAKLAYEGLPSKTYLSKTLAQYTSKTCSNCGFTITSADYDRVLEKLKKTATGWMTTINGKELKVEGQITYYNRYKRQNVVKDLSVELDRLSEESVNNDISSWTKGRSGEALSLLKKRFSHRPVQEKFVCLNCGFETHADEQAALNIARSWLFLRSQEYKKYQTNKTTGNTDKRAFVETWQSFYRKKLKEVWKPAV

SEQ ID NO: 26991 - protein, 978 aa, synthetic construct
  REGION 1..978: note = engineered CasX variant
QEIKRINKIRRRLVKDSNTKKAGKTGPMKTLLVRVMTPDLRERLENLRKKPENIPQPISNTSRANLNKLLTDYTEMKKAILHVYWEEFQKDPVGLMSRVAQPASKKIDQNKLKPEMDEKGNLTTAGFACSQCGQPLFVYKLEQVSEKGKAYTNYFGRCNVAEHEKLILLAQLKPEKDSDEAVTYSLGKFGQRALDFYSIHVTKESTHPVKPLAQIAGNRYASGPVGKALSDACMGTIASFLSKYQDIIIEHQKVVKGNQKRLESLRELAGKENLEYPSVTLPPQPHTKEGVDAYNEVIARVRMWVNLNLWQKLKLSRDDAKPLLRLKGFPSFPLVERQANEVDWWDMVCNVKKLINEKKEDGKVFWQNLAGYKRQEALRPYLSSEEDRKKGKKFARYQLGDLLLHLEKKHGEDWGKVYDEAWERIDKKVEGLSKHIKLEEERRSEDAQSKAALTDWLRAKASFVIEGLKEADKDEFCRCELKLQKWYGDLRGKPFAIEAENSILDISGFSKQYNCAFIWQKDGVKKLNLYLIINYFKGGKLRFKKIKPEAFEANRFYTVINKKSGEIVPMEVNFNFDDPNLIILPLAFGKRQGREFIWNDLLSLETGSLKLANGRVIEKTLYNRRTRQDEPALFVALTFERREVLDSSNIKPMNLIGVDRGENIPAVIALTDPEGCPLSGFKDSLGNPTHILRIGESYKEKQRTIQAKKEVEQRRAGGYSRKYASKAKNLADDMVRNTARDLLYYAVTQDAMLIFENLSRGFGRQGKRTFMAERQYTRMEDWLTAKLAYEGLPSKTYLSKTLAQYTSKTCSNCGFTITSADYDRVLEKLKKTATGWMTTINGKELKVEGQITYYNRYKRQNVVKDLSVELDRLSEESVNNDISSWTKGRSGEALSLLKKRFSHRPVQEKFVCLNCGFETHADEQAALNIARSWLFLRSQEYKKYQTNKTTGNTDKRAFVETWQSFYRKKLKEVWKPAV

SEQ ID NO: 26992 - protein, 978 aa, synthetic construct
  REGION 1..978: note = engineered CasX variant
QEIKRINKIRRRLVKDSNTKKAGKTGPMKTLLVRVMTPDLRERLENLRKKPENIPQPISNTSRANLNKLLTDYTEMKKAILHVYWEEFQKDPVGLMSRVAQPASKKIDQNKLKPEMDEKGNLTTAGFACSQCGQPLFVYKLEQVSEKGKAYTNYFGRCNVAEHEKLILLAQLKPEKDSDEAVTYSLGKFGQRALDFYSIHVTKESTHPVKPLAQIAGNRYASGPVGKALSDACMGTIASFLSKYQDIIIEHQKVVKGNQKRLESLRELAGKENLEYPSVTLPPQPHTKEGVDAYNEVIARVRMWVNLNLWQKLKLSRDDAKPLLRLKGFPSFPLVERQANEVDWWDMVCNVKKLINEKKEDGKVFWQNLAGYKRQEALRPYLSSEEDRKKGKKFARYQLGDLLLHLEKKHGEDWGKVYDEAWERIDKKVEGLSKHIKLEEERRSEDAQSKAALTDWLRAKASFVIEGLKEADKDEFCRCELKLQKWYGDLRGKPFAIEAENSILDISGFSKQYNCAFIWQKDGVKKLNLYLIINYFKGGKLRFKKIKPEAFEANRFYTVINKKSGEIVPMEVNFNFDDPNLIILPLAFGKRQGREFIWNDLLSLETGSLKLANGRVIEKTLYNRRTRQDEPALFVALTFERREVLDSSNIKPMNLIGVDRGENIPAVIALTDPEGCPLSGFKDSLGNPTHILRIGESYKEKQRTIQAKKEVEQRRAFGYSRKYASKAKNLADDMVRNTARDLLYYAVTQDAMLIFENLSRGFGRQGKRTFMAERQYTRMEDWLTAKLAYEGLPSKTYLSKTLAQYTSKTCSNCGFTITSADYDRVLEKLKKTATGWMTTINGKELKVEGQITYYNRYKRQNVVKDLSVELDRLSEESVNNDISSWTKGRSGEALSLLKKRFSHRPVQEKFVCLNCGFETHADEQAALNIARSWLFLRSQEYKKYQTNKTTGNTDKRAFVETWQSFYRKKLKEVWKPAV

SEQ ID NO: 26993 - protein, 978 aa, synthetic construct
  REGION 1..978: note = engineered CasX variant
QEIKRINKIRRRLVKDSNTKKAGKTGPMKTLLVRVMTPDLRERLENLRKKPENIPQPISNTSRANLNKLLTDYTEMKKAILHVYWEEFQKDPVGLMSRVAQPASKKIDQNKLKPEMDEKGNLTTAGFACSQCGQPLFVYKLEQVSEKGKAYTNYFGRCNVAEHEKLILLAQLKPEKDSDEAVTYSLGKFGQRALDFYSIHVTKESTHPVKPLAQIAGNRYASGPVGKALSDACMGTIASFLSKYQDIIIEHQKVVKGNQKRLESLRELAGKENLEYPSVTLPPQPHTKEGVDAYNEVIARVRMWVNLNLWQKLKLSRDDAKPLLRLKGFPSFPLVERQANEVDWWDMVCNVKKLINEKKEDGKVFWQNLAGYKRQEALRPYLSSEEDRKKGKKFARYQLGDLLLHLEKKHGEDWGKVYDEAWERIDKKVEGLSKHIKLEEERRSEDAQSKAALTDWLRAKASFVIEGLKEADKDEFCRCELKLQKWYGDLRGKPFAIEAENSILDISGFSKQYNCAFIWQKDGVKKLNLYLIINYFKGGKLRFKKIKPEAFEANRFYTVINKKSGEIVPMEVNFNFDDPNLIILPLAFGKRQGREFIWNDLLSLETGSLKLANGRVIEKTLYNRRTRQDEPALFVALTFERREVLDSSNIKPMNLIGVDRGENIPAVIALTDPEGCPLSGFKDSLGNPTHICRIGESYKEKQRTIQAKKEVEQRRAGGYSRKYASKAKNLADDMVRNTARDLLYYAVTQDAMLIFENLSRGFGRQGKRTFMAERQYTRMEDWLTAKLAYEGLPSKTYLSKTLAQYTSKTCSNCGFTITSADYDRVLEKLKKTATGWMTTINGKELKVEGQITYYNRYKRQNVVKDLSVELDRLSEESVNNDISSWTKGRSGEALSLLKKRFSHRPVQEKFVCLNCGFETHADEQAALNIARSWLFLRSQEYKKYQTNKTTGNTDKRAFVETWQSFYRKKLKEVWKPAV

SEQ ID NO: 26994 - protein, 978 aa, synthetic construct
  REGION 1..978: note = engineered CasX variant
QEIKRINKIRRRLVKDSNTKKAGKTGPMKTLLVRVMTPDLRERLENLRKKPENIPQPISNTSRANLNKLLTDYTEMKKAILHVYWEEFQKDPVGLMSRVAQPASKKIDQNKLKPEMDEKGNLTTAGFACSQCGQPLFVYKLEQVSEKGKAYTNYFGRCNVAEHEKLILLAQLKPEKDSDEAVTYSLGKFGQRALDFYSIHVTKESTHPVKPLAQIAGNRYASGPVGKALSDACMGTIASFLSKYQDIIIEHQKVVKGNQKRLESLRELAGKENLEYPSVTLPPQPHTKEGVDAYNEVIARVRMWVNLNLWQKLKLSRDDAKPLLRLKGFPSFPLVERQANEVDWWDMVCNVKKLINEKKEDGKVFWQNLAGYKRQEALRPYLSSEEDRKKGKKFARYQLGDLLLHLEKKHGEDWGKVYDEAWERIDKKVEGLSKHIKLEEERRSEDAQSKAALTDWLRAKASFVIEGLKEADKDEFCRCELKLQKWYGDLRGKPFAIEAENSILDISGFSKQYNCAFIWQKDGVKKLNLYLIINYFKGGKLRFKKIKPEAFEANRFYTVINKKSGEIVPMEVNFNFDDPNLIILPLAFGKRQGREFIWNDLLSLETGSLKLANGRVIEKTLYNRRTRQDEPALFVALTFERREVLDSSNIKPMNLIGVDRGENIPAVIALTDPEGCPLSGFADSLGNPTHILRIGESYKEKQRTIQAKKEVEQRRAGGYSRKYASKAKNLADDMVRNTARDLLYYAVTQDAMLIFENLSRGFGRQGKRTFMAERQYTRMEDWLTAKLAYEGLPSKTYLSKTLAQYTSKTCSNCGFTITSADYDRVLEKLKKTATGWMTTINGKELKVEGQITYYNRYKRQNVVKDLSVELDRLSEESVNNDISSWTKGRSGEALSLLKKRFSHRPVQEKFVCLNCGFETHADEQAALNIARSWLFLRSQEYKKYQTNKTTGNTDKRAFVETWQSFYRKKLKEVWKPAV

SEQ ID NO: 26995 - protein, 978 aa, synthetic construct
  REGION 1..978: note = engineered CasX variant
QEIKRINKIRRRLVKDSNTKKAGKTGPMKTLLVRVMTPDLRERLENLRKKPENIPQPISNTSRANLNKLLTDYTEMKKAILHVYWEEFQKDPVGLMSRVAQPASKKIDQNKLKPEMDEKGNLTTAGFACSQCGQPLFVYKLEQVSEKGKAYTNYFGRCNVAEHEKLILLAQLKPEKDSDEAVTYSLGKFGQRALDFYSIHVTKESTHPVKPLAQIAGNRYASGPVGKALSDACMGTIASFLSKYQDIIIEHQKVVKGNQKRLESLRELAGKENLEYPSVTLPPQPHTKEGVDAYNEVIARVRMWVNLNLWQKLKLSRDDAKPLLRLKGFPSFPLVERQANEVDWWDMVCNVKKLINEKKEDGKVFWQNLAGYKRQEALRPYLSSEEDRKKGKKFARYQLGDLLLHLEKKHGEDWGKVYDEAWERIDKKVEGLSKHIKLEEERRSEDAQSKAALTDWLRAKASFVIEGLKEADKDEFCRCELKLQKWYGDLRGKPFAIEAENSILDISGFSKQYNCAFIWQKDGVKKLNLYLIINYFKGGKLRFKKIKPEAFEANRFYTVINKKSGEIVPMEVNFNFDDPNLIILPLAFGKRQGREFIWNDLLSLETGSLKLANGRVIEKTLYNRRTRQDEPALFVALTFERREVLDSSNIKPMNLIGVDRGENIPAVIALTDPEGCPLSFFKDSWGNPTHILRIGESYKEKQRTIQAKKEVEQRRAGGYSRKYASKAKNLADDMVRNTARDLLYYAVTQDAMLIFENLSRGFGRQGKRTFMAERQYTRMEDWLTAKLAYEGLPSKTYLSKTLAQYTSKTCSNCGFTITSADYDRVLEKLKKTATGWMTTINGKELKVEGQITYYNRYKRQNVVKDLSVELDRLSEESVNNDISSWTKGRSGEALSLLKKRFSHRPVQEKFVCLNCGFETHADEQAALNIARSWLFLRSQEYKKYQTNKTTGNTDKRAFVETWQSFYRKKLKEVWKPAV

SEQ ID NO: 26996 - protein, 978 aa, synthetic construct
  REGION 1..978: note = engineered CasX variant
QEIKRINKIRRRLVKDSNTKKAGKTGPMKTLLVRVMTPDLRERLENLRKKPENIPQPISNTSRANLNKLLTDYTEMKKAILHVYWEEFQKDPVGLMSRVAQPASKKIDQNKLKPEMDEKGNLTTAGFACSQCGQPLFVYKLEQVSEKGKAYTNYFGRCNVAEHEKLILLAQLKPEKDSDEAVTYSLGKFGQRALDFYSIHVTKESTHPVKPLAQIAGNRYASGPVGKALSDACMGTIASFLSKYQDIIIEHQKVVKGNQKRLESLRELAGKENLEYPSVTLPPQPHTKEGVDAYNEVIARVRMWVNLNLWQKLKLSRDDAKPLLRLKGFPSFPLVERQANEVDWWDMVCNVKKLINEKKEDGKVFWQNLAGYKRQEALRPYLSSEEDRKKGKKFARYQLGDLLLHLEKKHGEDWGKVYDEAWERIDKKVEGLSKHIKLEEERRSEDAQSKAALTDWLRAKASFVIEGLKEADKDEFCRCELKLQKWYGDLRGKPFAIEAENSILDISGFSKQYNCAFIWQKDGVKKLNLYLIINYFKGGKLRFKKIKPEAFEANRFYTVINKKSGEIVPMEVNFNFDDPNLIILPLAFGKRQGREFIWNDLLSLETGSLKLANGRVIEKTLYNRRTRQDEPALFVALTFERREVLDSSNIKPMNLIGVDRGENIPAVIALTDPEGCPLSFFKDSLGNPTHILRIGESYKHKQRTIQAKKEVEQRRAGGYSRKYASKAKNLADDMVRNTARDLLYYAVTQDAMLIFENLSRGFGRQGKRTFMAERQYTRMEDWLTAKLAYEGLPSKTYLSKTLAQYTSKTCSNCGFTITSADYDRVLEKLKKTATGWMTTINGKELKVEGQITYYNRYKRQNVVKDLSVELDRLSEESVNNDISSWTKGRSGEALSLLKKRFSHRPVQEKFVCLNCGFETHADEQAALNIARSWLFLRSQEYKKYQTNKTTGNTDKRAFVETWQSFYRKKLKEVWKPAV

SEQ ID NO: 26997 - protein, 978 aa, synthetic construct
  REGION 1..978: note = engineered CasX variant
QEIKRINKIRRRLVKDSNTKKAGKTGPMKTLLVRVMTPDLRERLENLRKKPENIPQPISNTSRANLNKLLTDYTEMKKAILHVYWEEFQKDPVGLMSRVAQPASKKIDQNKLKPEMDEKGNLTTAGFACSQCGQPLFVYKLEQVSEKGKAYTNYFGRCNVAEHEKLILLAQLKPEKDSDEAVTYSLGKFGQRALDFYSIHVTKESTHPVKPLAQIAGNRYASGPVGKALSDACMGTIASFLSKYQDIIIEHQKVVKGNQKRLESLRELAGKENLEYPSVTLPPQPHTKEGVDAYNEVIARVRMWVNLNLWQKLKLSRDDAKPLLRLKGFPSFPLVERQANEVDWWDMVCNVKKLINEKKEDGKVFWQNLAGYKRQEALRPYLSSEEDRKKGKKFARYQLGDLLLHLEKKHGEDWGKVYDEAWERIDKKVEGLSKHIKLEEERRSEDAQSKAALTDWLRAKASFVIEGLKEADKDEFCRCELKLQKWYGDLRGKPFAIEAENSILDISGFSKQYNCAFIWQKDGVKKLNLYLIINYFKGGKLRFKKIKPEAFEANRFYTVINKKSGEIVPMEVNFNFDDPNLIILPLAFGKRQGREFIWNDLLSLETGSLKLANGRVIEKTLYNRRTRQDEPALFVALTFERREVLDSSNIKPMNLIGVDRGENIPAVIALTDPEGCPLSFFKDSLGNPTHILRIGESYKHCQRTIQAKKEVEQRRAGGYSRKYASKAKNLADDMVRNTARDLLYYAVTQDAMLIFENLSRGFGRQGKRTFMAERQYTRMEDWLTAKLAYEGLPSKTYLSKTLAQYTSKTCSNCGFTITSADYDRVLEKLKKTATGWMTTINGKELKVEGQITYYNRYKRQNVVKDLSVELDRLSEESVNNDISSWTKGRSGEALSLLKKRFSHRPVQEKFVCLNCGFETHADEQAALNIARSWLFLRSQEYKKYQTNKTTGNTDKRAFVETWQSFYRKKLKEVWKPAV

SEQ ID NO: 26998 - protein, 978 aa, synthetic construct
  REGION 1..978: note = engineered CasX variant
QEIKRINKIRRRLVKDSNTKKAGKTGPMKTLLVRVMTPDLRERLENLRKKPENIPQPISNTSRANLNKLLTDYTEMKKAILHVYWEEFQKDPVGLMSRVAQPASKKIDQNKLKPEMDEKGNLTTAGFACSQCGQPLFVYKLEQVSEKGKAYTNYFGRCNVAEHEKLILLAQLKPEKDSDEAVTYSLGKFGQRALDFYSIHVTKESTHPVKPLAQIAGNRYASGPVGKALSDACMGTIASFLSKYQDIIIEHQKVVKGNQKRLESLRELAGKENLEYPSVTLPPQPHTKEGVDAYNEVIARVRMWVNLNLWQKLKLSRDDAKPLLRLKGFPSFPLVERQANEVDWWDMVCNVKKLINEKKEDGKVFWQNLAGYKRQEALRPYLSSEEDRKKGKKFARYQLGDLLLHLEKKHGEDWGKVYDEAWERIDKKVEGLSKHIKLEEERRSEDAQSKAALTDWLRAKASFVIEGLKEADKDEFCRCELKLQKWYGDLRGKPFAIEAENSILDISGFSKQYNCAFIWQKDGVKKLNLYLIINYFKGGKLRFKKIKPEAFEANRFYTVINKKSGEIVPMEVNFNFDDPNLIILPLAFGKRQGREFIWNDLLSLETGSLKLANGRVIEKTLYNRRTRQDEPALFVALTFERREVLDSSNIKPMNLIGVDRGENIPAVIALTDPEGCPLSFFKDSLGNPTHILRIGESYKEKQRTIQAKKEVSQRRAGGYSRKYASKAKNLADDMVRNTARDLLYYAVTQDAMLIFENLSRGFGRQGKRTFMAERQYTRMEDWLTAKLAYEGLPSKTYLSKTLAQYTSKTCSNCGFTITSADYDRVLEKLKKTATGWMTTINGKELKVEGQITYYNRYKRQNVVKDLSVELDRLSEESVNNDISSWTKGRSGEALSLLKKRFSHRPVQEKFVCLNCGFETHADEQAALNIARSWLFLRSQEYKKYQTNKTTGNTDKRAFVETWQSFYRKKLKEVWKPAV

SEQ ID NO: 26999 - protein, 978 aa, synthetic construct
  REGION 1..978: note = engineered CasX variant
QEIKRINKIRRRLVKDSNTKKAGKTGPMKTLLVRVMTPDLRERLENLRKKPENIPQPISNTSRANLNKLLTDYTEMKKAILHVYWEEFQKDPVGLMSRVAQPASKKIDQNKLKPEMDEKGNLTTAGFACSQCGQPLFVYKLEQVSEKGKAYTNYFGRCNVAEHEKLILLAQLKPEKDSDEAVTYSLGKFGQRALDFYSIHVTKESTHPVKPLAQIAGNRYASGPVGKALSDACMGTIASFLSKYQDIIIEHQKVVKGNQKRLESLRELAGKENLEYPSVTLPPQPHTKEGVDAYNEVIARVRMWVNLNLWQKLKLSRDDAKPLLRLKGFPSFPLVERQANEVDWWDMVCNVKKLINEKKEDGKVFWQNLAGYKRQEALRPYLSSEEDRKKGKKFARYQLGDLLLHLEKKHGEDWGKVYDEAWERIDKKVEGLSKHIKLEEERRSEDAQSKAALTDWLRAKASFVIEGLKEADKDEFCRCELKLQKWYGDLRGKPFAIEAENSILDISGFSKQYNCAFIWQKDGVKKLNLYLIINYFKGGKLRFKKIKPEAFEANRFYTVINKKSGEIVPMEVNFNFDDPNLIILPLAFGKRQGREFIWNDLLSLETGSLKLANGRVIEKTLYNRRTRQDEPALFVALTFERREVLDSSNIKPMNLIGVDRGENIPAVIALTDPEGCPLSFFKDSLGNPTHILRIGESYKEKQRTIQAKKEVEQRRAGGYSRKYASKAKNLADDMVRNTARDLLYYAVTQDAMLIFENLSRGFGRQGKRTFMAERQYTRMEDWLTAKLAYEGLPSKTYLSKTLAQYTSKTCSNCGFTITSADYDRVLEKLKKTATGWMTTINGKELKVEGQITYYNRYKRQNVVKDLSVELDRLSEESVNNDISSWTKGRSGEALSLLKKRFSHRPVQEKFVCLNCGFETHADEQAALNIARSWLFLRSQEYKKYQTNKTTGNTDKRAFVETWQSFYRKKLKEVWKPAV

SEQ ID NO: 27000 - protein, 978 aa, synthetic construct
  REGION 1..978: note = engineered CasX variant
QEIKRINKIRRRLVKDSNTKKAGKTGPMKTLLVRVMTPDLRERLENLRKKPENIPQPISNTSRANLNKLLTDYTEMKKAILHVYWEEFQKDPVGLMSRVAQPASKKIDQNKLKPEMDEKGNLTTAGFACSQCGQPLFVYKLEQVSEKGKAYTNYFGRCNVAEHEKLILLAQLKPEKDSDEAVTYSLGKFGQRALDFYSIHVTKESTHPVKPLAQIAGNRYASGPVGKALSDACMGTIASFLSKYQDIIIEHQKVVKGNQKRLESLRELAGKENLEYPSVTLPPQPHTKEGVDAYNEVIARVRMWVNLNLWQKLKLSRDDAKPLLRLKGFPSFPLVERQANEVDWWDMVCNVKKLINEKKEDGKVFWQNLAGYKRQEALRPYLSSEEDRKKGKKFARYQLGDLLLHLEKKHGEDWGKVYDEAWERIDKKVEGLSKHIKLEEERRSEDAQSKAALTDWLRAKASFVIEGLKEADKDEFCRCELKLQKWYGDLRGKPFAIEAENSILDISGFSKQYNCAFIWQKDGVKKLNLYLIINYFKGGKLRFKKIKPEAFEANRFYTVINKKSGEIVPMEVNFNFDDPNLIILPLAFGKRQGREFIWNDLLSLETGSLKLANGRVIEKTLYNRRTRQDEPALFVALTFERREVLDSSNIKPMNLIGVDRGENIPAVIALTDPEGCPLSFFKDSLGNPTHILRIGESYKEKQRTIQAAKEVEQRRAGGYSRKYASKAKNLADDMVRNTARDLLYYAVTQDAMLIFENLSRGFGRQGKRTFMAERQYTRMEDWLTAKLAYEGLPSKTYLSKTLAQYTSKTCSNCGFTITSADYDRVLEKLKKTATGWMTTINGKELKVEGQITYYNRYKRQNVVKDLSVELDRLSEESVNNDISSWTKGRSGEALSLLKKRFSHRPVQEKFVCLNCGFETHADEQAALNIARSWLFLRSQEYKKYQTNKTTGNTDKRAFVETWQSFYRKKLKEVWKPAV

SEQ ID NO: 27001 - protein, 978 aa, synthetic construct
  REGION 1..978: note = engineered CasX variant
QEIKRINKIRRRLVKDSNTKKAGKTGPMKTLLVRVMTPDLRERLENLRKKPENIPQPISNTSRANLNKLLTDYTEMKKAILHVYWEEFQKDPVGLMSRVAQPASKKIDQNKLKPEMDEKGNLTTAGFACSQCGQPLFVYKLEQVSEKGKAYTNYFGRCNVAEHEKLILLAQLKPEKDSDEAVTYSLGKFGQRALDFYSIHVTKESTHPVKPLAQIAGNRYASGPVGKALSDACMGTIASFLSKYQDIIIEHQKVVKGNQKRLESLRELAGKENLEYPSVTLPPQPHTKEGVDAYNEVIARVRMWVNLNLWQKLKLSRDDAKPLLRLKGFPSFPLVERQANEVDWWDMVCNVKKLINEKKEDGKVFWQNLAGYKRQEALRPYLSSEEDRKKGKKFARYQLGDLLLHLEKKHGEDWGKVYDEAWERIDKKVEGLSKHIKLEEERRSEDAQSKAALTDWLRAKASFVIEGLKEADKDEFCRCELKLQKWYGDLRGKPFAIEAENSILDISGFSKQYNCAFIWQKDGVKKLNLYLIINYFKGGKLRFKKIKPEAFEANRFYTVINKKSGEIVPMEVNFNFDDPNLIILPLAFGKRQGREFIWNDLLSLETGSLKLANGRVIEKTLYNRRTRQDEPALFVALTFERREVLDSSNIKPMNLIGVDRGENIPAVIALTDPEGCPLSFFKDSLGNPTHILRIGESYKEKQRCIQAKKEVEQRRAGGYSRKYASKAKNLADDMVRNTARDLLYYAVTQDAMLIFENLSRGFGRQGKRTFMAERQYTRMEDWLTAKLAYEGLPSKTYLSKTLAQYTSKTCSNCGFTITSADYDRVLEKLKKTATGWMTTINGKELKVEGQITYYNRYKRQNVVKDLSVELDRLSEESVNNDISSWTKGRSGEALSLLKKRFSHRPVQEKFVCLNCGFETHADEQAALNIARSWLFLRSQEYKKYQTNKTTGNTDKRAFVETWQSFYRKKLKEVWKPAV

SEQ ID NO: 27002 - protein, 978 aa, synthetic construct
  REGION 1..978: note = engineered CasX variant
QEIKRINKIRRRLVKDSNTKKAGKTGPMKTLLVRVMTPDLRERLENLRKKPENIPQPISNTSRANLNKLLTDYTEMKKAILHVYWEEFQKDPVGLMSRVAQPASKKIDQNKLKPEMDEKGNLTTAGFACSQCGQPLFVYKLEQVSEKGKAYTNYFGRCNVAEHEKLILLAQLKPEKDSDEAVTYSLGKFGQRALDFYSIHVTKESTHPVKPLAQIAGNRYASGPVGKALSDACMGTIASFLSKYQDIIIEHQKVVKGNQKRLESLRELAGKENLEYPSVTLPPQPHTKEGVDAYNEVIARVRMWVNLNLWQKLKLSRDDAKPLLRLKGFPSFPLVERQANEVDWWDMVCNVKKLINEKKEDGKVFWQNLAGYKRQEALRPYLSSEEDRKKGKKFARYQLGDLLLHLEKKHGEDWGKVYDEAWERIDKKVEGLSKHIKLEEERRSEDAQSKAALTDWLRAKASFVIEGLKEADKDEFCRCELKLQKWYGDLRGKPFAIEAENSILDISGFSKQYNCAFIWQKDGVKKLNLYLIINYFKGGKLRFKKIKPEAFEANRFYTVINKKSGEIVPMEVNFNFDDPNLIILPLAFGKRQGREFIWNDLLSLETGSLKLANGRVIEKTLYNRRTRQDEPALFVALTFERREVLDSSNIKPMNLIGVDRGENIPAVIALTDPEGCPLSFFKDSLGNPTHILRIGESYKECQRTIQAKKEVEQRRAGGYSRKYASKAKNLADDMVRNTARDLLYYAVTQDAMLIFENLSRGFGRQGKRTFMAERQYTRMEDWLTAKLAYEGLPSKTYLSKTLAQYTSKTCSNCGFTITSADYDRVLEKLKKTATGWMTTINGKELKVEGQITYYNRYKRQNVVKDLSVELDRLSEESVNNDISSWTKGRSGEALSLLKKRFSHRPVQEKFVCLNCGFETHADEQAALNIARSWLFLRSQEYKKYQTNKTTGNTDKRAFVETWQSFYRKKLKEVWKPAV

SEQ ID NO: 27003 - protein, 978 aa, synthetic construct
  REGION 1..978: note = engineered CasX variant
QEIKRINKIRRRLVKDSNTKKAGKTGPMKTLLVRVMTPDLRERLENLRKKPENIPQPISNTSRANLNKLLTDYTEMKKAILHVYWEEFQKDPVGLMSRVAQPASKKIDQNKLKPEMDEKGNLTTAGFACSQCGQPLFVYKLEQVSEKGKAYTNYFGRCNVAEHEKLILLAQLKPEKDSDEAVTYSLGKFGQRALDFYSIHVTKESTHPVKPLAQIAGNRYASGPVGKALSDACMGTIASFLSKYQDIIIEHQKVVKGNQKRLESLRELAGKENLEYPSVTLPPQPHTKEGVDAYNEVIARVRMWVNLNLWQKLKLSRDDAKPLLRLKGFPSFPLVERQANEVDWWDMVCNVKKLINEKKEDGKVFWQNLAGYKRQEALRPYLSSEEDRKKGKKFARYQLGDLLLHLEKKHGEDWGKVYDEAWERIDKKVEGLSKHIKLEEERRSEDAQSKAALTDWLRAKASFVIEGLKEADKDEFCRCELKLQKWYGDLRGKPFAIEAENSILDISGFSKQYNCAFIWQKDGVKKLNLYLIINYFKGGKLRFKKIKPEAFEANRFYTVINKKSGEIVPMEVNFNFDDPNLIILPLAFGKRQGREFIWNDLLSLETGSLKLANGRVIEKTLYNRRTRQDEPALFVALTFERREVLDSSNIKPMNLIGVDRGENIPAVIALTDPEGCPLSEFTDSLGNPTHILRIGESYKEKQRTIQAKKEVEQRRAGGYSRKYASKAKNLADDMVRNTARDLLYYAVTQDAMLIFENLSRGFGRQGKRTFMAERQYTRMEDWLTAKLAYEGLPSKTYLSKTLAQYTSKTCSNCGFTITSADYDRVLEKLKKTATGWMTTINGKELKVEGQITYYNRYKRQNVVKDLSVELDRLSEESVNNDISSWTKGRSGEALSLLKKRFSHRPVQEKFVCLNCGFETHADEQAALNIARSWLFLRSQEYKKYQTNKTTGNTDKRAFVETWQSFYRKKLKEVWKPAV

SEQ ID NO: 27004 - protein, 978 aa, synthetic construct
  REGION 1..978: note = engineered CasX variant
QEIKRINKIRRRLVKDSNTKKAGKTGPMKTLLVRVMTPDLRERLENLRKKPENIPQPISNTSRANLNKLLTDYTEMKKAILHVYWEEFQKDPVGLMSRVAQPASKKIDQNKLKPEMDEKGNLTTAGFACSQCGQPLFVYKLEQVSEKGKAYTNYFGRCNVAEHEKLILLAQLKPEKDSDEAVTYSLGKFGQRALDFYSIHVTKESTHPVKPLAQIAGNRYASGPVGKALSDACMGTIASFLSKYQDIIIEHQKVVKGNQKRLESLRELAGKENLEYPSVTLPPQPHTKEGVDAYNEVIARVRMWVNLNLWQKLKLSRDDAKPLLRLKGFPSFPLVERQANEVDWWDMVCNVKKLINEKKEDGKVFWQNLAGYKRQEALRPYLSSEEDRKKGKKFARYQLGDLLLHLEKKHGEDWGKVYDEAWERIDKKVEGLSKHIKLEEERRSEDAQSKAALTDWLRAKASFVIEGLKEADKDEFCRCELKLQKWYGDLRGKPFAIEAENSILDISGFSKQYNCAFIWQKDGVKKLNLYLIINYFKGGKLRFKKIKPEAFEANRFYTVINKKSGEIVPMEVNFNFDDPNLIILPLAFGKRQGREFIWNDLLSLETGSLKLANGRVIEKTLYNRRTRQDEPALFVALTFERREVLDSSNIKPMNLIGVDRGENIPAVIALTDPEGCPLSEFKDSLGNPTHILRIGESYKEKQRTVQAYKEVEQRRAGGYSRKYASKAKNLADDMVRNTARDLLYYAVTQDAMLIFENLSRGFGRQGKRTFMAERQYTRMEDWLTAKLAYEGLPSKTYLSKTLAQYTSKTCSNCGFTITSADYDRVLEKLKKTATGWMTTINGKELKVEGQITYYNRYKRQNVVKDLSVELDRLSEESVNNDISSWTKGRSGEALSLLKKRFSHRPVQEKFVCLNCGFETHADEQAALNIARSWLFLRSQEYKKYQTNKTTGNTDKRAFVETWQSFYRKKLKEVWKPAV

SEQ ID NO: 27005 - protein, 978 aa, synthetic construct
  REGION 1..978: note = engineered CasX variant
QEIKRINKIRRRLVKDSNTKKAGKTGPMKTLLVRVMTPDLRERLENLRKKPENIPQPISNTSRANLNKLLTDYTEMKKAILHVYWEEFQKDPVGLMSRVAQPASKKIDQNKLKPEMDEKGNLTTAGFACSQCGQPLFVYKLEQVSEKGKAYTNYFGRCNVAEHEKLILLAQLKPEKDSDEAVTYSLGKFGQRALDFYSIHVTKESTHPVKPLAQIAGNRYASGPVGKALSDACMGTIASFLSKYQDIIIEHQKVVKGNQKRLESLRELAGKENLEYPSVTLPPQPHTKEGVDAYNEVIARVRMWVNLNLWQKLKLSRDDAKPLLRLKGFPSFPLVERQANEVDWWDMVCNVKKLINEKKEDGKVFWQNLAGYKRQEALRPYLSSEEDRKKGKKFARYQLGDLLLHLEKKHGEDWGKVYDEAWERIDKKVEGLSKHIKLEEERRSEDAQSKAALTDWLRAKASFVIEGLKEADKDEFCRCELKLQKWYGDLRGKPFAIEAENSILDISGFSKQYNCAFIWQKDGVKKLNLYLIINYFKGGKLRFKKIKPEAFEANRFYTVINKKSGEIVPMEVNFNFDDPNLIILPLAFGKRQGREFIWNDLLSLETGSLKLANGRVIEKTLYNRRTRQDEPALFVALTFERREVLDSSNIKPMNLIGVDRGENIPAVIALTDPEGCPLSEFKDSLGNPTHILRIGESYKEKQRTVQAKKEVEQRRAGGYSRKYASKAKNLADDMVRNTARDLLYYAVTQDAMLIFENLSRGFGRQGKRTFMAERQYTRMEDWLTAKLAYEGLPSKTYLSKTLAQYTSKTCSNCGFTITSADYDRVLEKLKKTATGWMTTINGKELKVEGQITYYNRYKRQNVVKDLSVELDRLSEESVNNDISSWTKGRSGEALSLLKKRFSHRPVQEKFVCLNCGFETHADEQAALNIARSWLFLRSQEYKKYQTNKTTGNTDKRAFVETWQSFYRKKLKEVWKPAV

SEQ ID NO: 27006 - protein, 978 aa, synthetic construct
  REGION 1..978: note = engineered CasX variant
QEIKRINKIRRRLVKDSNTKKAGKTGPMKTLLVRVMTPDLRERLENLRKKPENIPQPISNTSRANLNKLLTDYTEMKKAILHVYWEEFQKDPVGLMSRVAQPASKKIDQNKLKPEMDEKGNLTTAGFACSQCGQPLFVYKLEQVSEKGKAYTNYFGRCNVAEHEKLILLAQLKPEKDSDEAVTYSLGKFGQRALDFYSIHVTKESTHPVKPLAQIAGNRYASGPVGKALSDACMGTIASFLSKYQDIIIEHQKVVKGNQKRLESLRELAGKENLEYPSVTLPPQPHTKEGVDAYNEVIARVRMWVNLNLWQKLKLSRDDAKPLLRLKGFPSFPLVERQANEVDWWDMVCNVKKLINEKKEDGKVFWQNLAGYKRQEALRPYLSSEEDRKKGKKFARYQLGDLLLHLEKKHGEDWGKVYDEAWERIDKKVEGLSKHIKLEEERRSEDAQSKAALTDWLRAKASFVIEGLKEADKDEFCRCELKLQKWYGDLRGKPFAIEAENSILDISGFSKQYNCAFIWQKDGVKKLNLYLIINYFKGGKLRFKKIKPEAFEANRFYTVINKKSGEIVPMEVNFNFDDPNLIILPLAFGKRQGREFIWNDLLSLETGSLKLANGRVIEKTLYNRRTRQDEPALFVALTFERREVLDSSNIKPMNLIGVDRGENIPAVIALTDPEGCPLSEFKDSLGNPTHILRIGESYKEKQRTIQAYKEVEQRRAGGYSRKYASKAKNLADDMVRNTARDLLYYAVTQDAMLIFENLSRGFGRQGKRTFMAERQYTRMEDWLTAKLAYEGLPSKTYLSKTLAQYTSKTCSNCGFTITSADYDRVLEKLKKTATGWMTTINGKELKVEGQITYYNRYKRQNVVKDLSVELDRLSEESVNNDISSWTKGRSGEALSLLKKRFSHRPVQEKFVCLNCGFETHADEQAALNIARSWLFLRSQEYKKYQTNKTTGNTDKRAFVETWQSFYRKKLKEVWKPAV

SEQ ID NO: 27007 - protein, 978 aa, synthetic construct
  REGION 1..978: note = engineered CasX variant
QEIKRINKIRRRLVKDSNTKKAGKTGPMKTLLVRVMTPDLRERLENLRKKPENIPQPISNTSRANLNKLLTDYTEMKKAILHVYWEEFQKDPVGLMSRVAQPASKKIDQNKLKPEMDEKGNLTTAGFACSQCGQPLFVYKLEQVSEKGKAYTNYFGRCNVAEHEKLILLAQLKPEKDSDEAVTYSLGKFGQRALDFYSIHVTKESTHPVKPLAQIAGNRYASGPVGKALSDACMGTIASFLSKYQDIIIEHQKVVKGNQKRLESLRELAGKENLEYPSVTLPPQPHTKEGVDAYNEVIARVRMWVNLNLWQKLKLSRDDAKPLLRLKGFPSFPLVERQANEVDWWDMVCNVKKLINEKKEDGKVFWQNLAGYKRQEALRPYLSSEEDRKKGKKFARYQLGDLLLHLEKKHGEDWGKVYDEAWERIDKKVEGLSKHIKLEEERRSEDAQSKAALTDWLRAKASFVIEGLKEADKDEFCRCELKLQKWYGDLRGKPFAIEAENSILDISGFSKQYNCAFIWQKDGVKKLNLYLIINYFKGGKLRFKKIKPEAFEANRFYTVINKKSGEIVPMEVNFNFDDPNLIILPLAFGKRQGREFIWNDLLSLETGSLKLANGRVIEKTLYNRRTRQDEPALFVALTFERREVLDSSNIKPMNLIGVDRGENIPAVIALTDPEGCPLSEFKDSLGNPTHILRIGESYKEKQRTIQAKKEVEQRRAGYYSRKYASKAKNLADDMVRNTARDLLYYAVTQDAMLIFENLSRGFGRQGKRTFMAERQYTRMEDWLTAKLAYEGLPSKTYLSKTLAQYTSKTCSNCGFTITSADYDRVLEKLKKTATGWMTTINGKELKVEGQITYYNRYKRQNVVKDLSVELDRLSEESVNNDISSWTKGRSGEALSLLKKRFSHRPVQEKFVCLNCGFETHADEQAALNIARSWLFLRSQEYKKYQTNKTTGNTDKRAFVETWQSFYRKKLKEVWKPAV

SEQ ID NO: 27008 - protein, 978 aa, synthetic construct
  REGION 1..978: note = engineered CasX variant
QEIKRINKIRRRLVKDSNTKKAGKTGPMKTLLVRVMTPDLRERLENLRKKPENIPQPISNTSRANLNKLLTDYTEMKKAILHVYWEEFQKDPVGLMSRVAQPASKKIDQNKLKPEMDEKGNLTTAGFACSQCGQPLFVYKLEQVSEKGKAYTNYFGRCNVAEHEKLILLAQLKPEKDSDEAVTYSLGKFGQRALDFYSIHVTKESTHPVKPLAQIAGNRYASGPVGKALSDACMGTIASFLSKYQDIIIEHQKVVKGNQKRLESLRELAGKENLEYPSVTLPPQPHTKEGVDAYNEVIARVRMWVNLNLWQKLKLSRDDAKPLLRLKGFPSFPLVERQANEVDWWDMVCNVKKLINEKKEDGKVFWQNLAGYKRQEALRPYLSSEEDRKKGKKFARYQLGDLLLHLEKKHGEDWGKVYDEAWERIDKKVEGLSKHIKLEEERRSEDAQSKAALTDWLRAKASFVIEGLKEADKDEFCRCELKLQKWYGDLRGKPFAIEAENSILDISGFSKQYNCAFIWQKDGVKKLNLYLIINYFKGGKLRFKKIKPEAFEANRFYTVINKKSGEIVPMEVNFNFDDPNLIILPLAFGKRQGREFIWNDLLSLETGSLKLANGRVIEKTLYNRRTRQDEPALFVALTFERREVLDSSNIKPMNLIGVDRGENIPAVIALTDPEGCPLSEFKDSLGNPTHILRIGESYKEKQRTIQAKKEVEQRRAGGYSRKYASKAKNLADDMVRNTARDLLYYAVTQDAMLIFENLSRGFGRQGKRTFMAERQYTRMEDWLTAKLAYEGLPSKTYLSKTLAQYTSKTCSNCGFTITSADYDRVLEKLKKTATGWMTTINGKELKVEGQITYYNRYKRQNVVKDLSVELDRLSEESVNNDISSWTKGRSGEALSLLKKRFSHRPVQEKFVCLNCGFETHADEQAALNIARSWLFLRSQEYKKYQTNKTTGNTDKRAFVETWQSFYRKKLKEVWKPAV

SEQ ID NO: 27009 - protein, 978 aa, synthetic construct
  REGION 1..978: note = engineered CasX variant
QEIKRINKIRRRLVKDSNTKKAGKTGPMKTLLVRVMTPDLRERLENLRKKPENIPQPISNTSRANLNKLLTDYTEMKKAILHVYWEEFQKDPVGLMSRVAQPASKKIDQNKLKPEMDEKGNLTTAGFACSQCGQPLFVYKLEQVSEKGKAYTNYFGRCNVAEHEKLILLAQLKPEKDSDEAVTYSLGKFGQRALDFYSIHVTKESTHPVKPLAQIAGNRYASGPVGKALSDACMGTIASFLSKYQDIIIEHQKVVKGNQKRLESLRELAGKENLEYPSVTLPPQPHTKEGVDAYNEVIARVRMWVNLNLWQKLKLSRDDAKPLLRLKGFPSFPLVERQANEVDWWDMVCNVKKLINEKKEDGKVFWQNLAGYKRQEALRPYLSSEEDRKKGKKFARYQLGDLLLHLEKKHGEDWGKVYDEAWERIDKKVEGLSKHIKLEEERRSEDAQSKAALTDWLRAKASFVIEGLKEADKDEFCRCELKLQKWYGDLRGKPFAIEAENSILDISGFSKQYNCAFIWQKDGVKKLNLYLIINYFKGGKLRFKKIKPEAFEANRFYTVINKKSGEIVPMEVNFNFDDPNLIILPLAFGKRQGREFIWNDLLSLETGSLKLANGRVIEKTLYNRRTRQDEPALFVALTFERREVLDSSNIKPMNLIGVDRGENIPAVIALTDPEGCPLSEFKDSAGNPTHILRIGESYKEKQRTIQAKKEVEQRRAGGYSRKYASKAKNLADDMVRNTARDLLYYAVTQDAMLIFENLSRGFGRQGKRTFMAERQYTRMEDWLTAKLAYEGLPSKTYLSKTLAQYTSKTCSNCGFTITSADYDRVLEKLKKTATGWMTTINGKELKVEGQITYYNRYKRQNVVKDLSVELDRLSEESVNNDISSWTKGRSGEALSLLKKRFSHRPVQEKFVCLNCGFETHADEQAALNIARSWLFLRSQEYKKYQTNKTTGNTDKRAFVETWQSFYRKKLKEVWKPAV

SEQ ID NO: 27010 - protein, 978 aa, synthetic construct
  REGION 1..978: note = engineered CasX variant
QEIKRINKIRRRLVKDSNTKKAGKTGPMKTLLVRVMTPDLRERLENLRKKPENIPQPISNTSRANLNKLLTDYTEMKKAILHVYWEEFQKDPVGLMSRVAQPASKKIDQNKLKPEMDEKGNLTTAGFACSQCGQPLFVYKLEQVSEKGKAYTNYFGRCNVAEHEKLILLAQLKPEKDSDEAVTYSLGKFGQRALDFYSIHVTKESTHPVKPLAQIAGNRYASGPVGKALSDACMGTIASFLSKYQDIIIEHQKVVKGNQKRLESLRELAGKENLEYPSVTLPPQPHTKEGVDAYNEVIARVRMWVNLNLWQKLKLSRDDAKPLLRLKGFPSFPLVERQANEVDWWDMVCNVKKLINEKKEDGKVFWQNLAGYKRQEALRPYLSSEEDRKKGKKFARYQLGDLLLHLEKKHGEDWGKVYDEAWERIDKKVEGLSKHIKLEEERRSEDAQSKAALTDWLRAKASFVIEGLKEADKDEFCRCELKLQKWYGDLRGKPFAIEAENSILDISGFSKQYNCAFIWQKDGVKKLNLYLIINYFKGGKLRFKKIKPEAFEANRFYTVINKKSGEIVPMEVNFNFDDPNLIILPLAFGKRQGREFIWNDLLSLETGSLKLANGRVIEKTLYNRRTRQDEPALFVALTFERREVLDSSNIKPMNLIGVDRGENIPAVIALTDPEGCPLSDFKDSLGNPTHILRIGESYKEKQRTIQAKKEVEQRRAGGYSRKYASKAKNLADDMVRNTARDLLYYAVTQDAMLIFENLSRGFGRQGKRTFMAERQYTRMEDWLTAKLAYEGLPSKTYLSKTLAQYTSKTCSNCGFTITSADYDRVLEKLKKTATGWMTTINGKELKVEGQITYYNRYKRQNVVKDLSVELDRLSEESVNNDISSWTKGRSGEALSLLKKRFSHRPVQEKFVCLNCGFETHADEQAALNIARSWLFLRSQEYKKYQTNKTTGNTDKRAFVETWQSFYRKKLKEVWKPAV

SEQ ID NO: 27011 - protein, 978 aa, synthetic construct
  REGION 1..978: note = engineered CasX variant
QEIKRINKIRRRLVKDSNTKKAGKTGPMKTLLVRVMTPDLRERLENLRKKPENIPQPISNTSRANLNKLLTDYTEMKKAILHVYWEEFQKDPVGLMSRVAQPASKKIDQNKLKPEMDEKGNLTTAGFACSQCGQPLFVYKLEQVSEKGKAYTNYFGRCNVAEHEKLILLAQLKPEKDSDEAVTYSLGKFGQRALDFYSIHVTKESTHPVKPLAQIAGNRYASGPVGKALSDACMGTIASFLSKYQDIIIEHQKVVKGNQKRLESLRELAGKENLEYPSVTLPPQPHTKEGVDAYNEVIARVRMWVNLNLWQKLKLSRDDAKPLLRLKGFPSFPLVERQANEVDWWDMVCNVKKLINEKKEDGKVFWQNLAGYKRQEALRPYLSSEEDRKKGKKFARYQLGDLLLHLEKKHGEDWGKVYDEAWERIDKKVEGLSKHIKLEEERRSEDAQSKAALTDWLRAKASFVIEGLKEADKDEFCRCELKLQKWYGDLRGKPFAIEAENSILDISGFSKQYNCAFIWQKDGVKKLNLYLIINYFKGGKLRFKKIKPEAFEANRFYTVINKKSGEIVPMEVNFNFDDPNLIILPLAFGKRQGREFIWNDLLSLETGSLKLANGRVIEKTLYNRRTRQDEPALFVALTFERREVLDSSNIKPMNLIGVDRGENIPAVIALTDPEGCPLSCFKDSVGNPTHILRIGESYKEKQRTIQAKKEVEQRRAGGYSRKYASKAKNLADDMVRNTARDLLYYAVTQDAMLIFENLSRGFGRQGKRTFMAERQYTRMEDWLTAKLAYEGLPSKTYLSKTLAQYTSKTCSNCGFTITSADYDRVLEKLKKTATGWMTTINGKELKVEGQITYYNRYKRQNVVKDLSVELDRLSEESVNNDISSWTKGRSGEALSLLKKRFSHRPVQEKFVCLNCGFETHADEQAALNIARSWLFLRSQEYKKYQTNKTTGNTDKRAFVETWQSFYRKKLKEVWKPAV

SEQ ID NO: 27012 - protein, 978 aa, synthetic construct
  REGION 1..978: note = engineered CasX variant
QEIKRINKIRRRLVKDSNTKKAGKTGPMKTLLVRVMTPDLRERLENLRKKPENIPQPISNTSRANLNKLLTDYTEMKKAILHVYWEEFQKDPVGLMSRVAQPASKKIDQNKLKPEMDEKGNLTTAGFACSQCGQPLFVYKLEQVSEKGKAYTNYFGRCNVAEHEKLILLAQLKPEKDSDEAVTYSLGKFGQRALDFYSIHVTKESTHPVKPLAQIAGNRYASGPVGKALSDACMGTIASFLSKYQDIIIEHQKVVKGNQKRLESLRELAGKENLEYPSVTLPPQPHTKEGVDAYNEVIARVRMWVNLNLWQKLKLSRDDAKPLLRLKGFPSFPLVERQANEVDWWDMVCNVKKLINEKKEDGKVFWQNLAGYKRQEALRPYLSSEEDRKKGKKFARYQLGDLLLHLEKKHGEDWGKVYDEAWERIDKKVEGLSKHIKLEEERRSEDAQSKAALTDWLRAKASFVIEGLKEADKDEFCRCELKLQKWYGDLRGKPFAIEAENSILDISGFSKQYNCAFIWQKDGVKKLNLYLIINYFKGGKLRFKKIKPEAFEANRFYTVINKKSGEIVPMEVNFNFDDPNLIILPLAFGKRQGREFIWNDLLSLETGSLKLANGRVIEKTLYNRRTRQDEPALFVALTFERREVLDSSNIKPMNLIGVDRGENIPAVIALTDPEGCPLSCFKDSQGNPTHILRIGESYKEKQRTIQAKKEVEQRRAGGYSRKYASKAKNLADDMVRNTARDLLYYAVTQDAMLIFENLSRGFGRQGKRTFMAERQYTRMEDWLTAKLAYEGLPSKTYLSKTLAQYTSKTCSNCGFTITSADYDRVLEKLKKTATGWMTTINGKELKVEGQITYYNRYKRQNVVKDLSVELDRLSEESVNNDISSWTKGRSGEALSLLKKRFSHRPVQEKFVCLNCGFETHADEQAALNIARSWLFLRSQEYKKYQTNKTTGNTDKRAFVETWQSFYRKKLKEVWKPAV

SEQ ID NO: 27013 - protein, 978 aa, synthetic construct
  REGION 1..978: note = engineered CasX variant
QEIKRINKIRRRLVKDSNTKKAGKTGPMKTLLVRVMTPDLRERLENLRKKPENIPQPISNTSRANLNKLLTDYTEMKKAILHVYWEEFQKDPVGLMSRVAQPASKKIDQNKLKPEMDEKGNLTTAGFACSQCGQPLFVYKLEQVSEKGKAYTNYFGRCNVAEHEKLILLAQLKPEKDSDEAVTYSLGKFGQRALDFYSIHVTKESTHPVKPLAQIAGNRYASGPVGKALSDACMGTIASFLSKYQDIIIEHQKVVKGNQKRLESLRELAGKENLEYPSVTLPPQPHTKEGVDAYNEVIARVRMWVNLNLWQKLKLSRDDAKPLLRLKGFPSFPLVERQANEVDWWDMVCNVKKLINEKKEDGKVFWQNLAGYKRQEALRPYLSSEEDRKKGKKFARYQLGDLLLHLEKKHGEDWGKVYDEAWERIDKKVEGLSKHIKLEEERRSEDAQSKAALTDWLRAKASFVIEGLKEADKDEFCRCELKLQKWYGDLRGKPFAIEAENSILDISGFSKQYNCAFIWQKDGVKKLNLYLIINYFKGGKLRFKKIKPEAFEANRFYTVINKKSGEIVPMEVNFNFDDPNLIILPLAFGKRQGREFIWNDLLSLETGSLKLANGRVIEKTLYNRRTRQDEPALFVALTFERREVLDSSNIKPMNLIGVDRGENIPAVIALTDPEGCPLSCFKDSQGNPTHILRIGESYKEKQRTIQAFKEVEQRRAGGYSRKYASKAKNLADDMVRNTARDLLYYAVTQDAMLIFENLSRGFGRQGKRTFMAERQYTRMEDWLTAKLAYEGLPSKTYLSKTLAQYTSKTCSNCGFTITSADYDRVLEKLKKTATGWMTTINGKELKVEGQITYYNRYKRQNVVKDLSVELDRLSEESVNNDISSWTKGRSGEALSLLKKRFSHRPVQEKFVCLNCGFETHADEQAALNIARSWLFLRSQEYKKYQTNKTTGNTDKRAFVETWQSFYRKKLKEVWKPAV

SEQ ID NO: 27014 - protein, 978 aa, synthetic construct
  REGION 1..978: note = engineered CasX variant
QEIKRINKIRRRLVKDSNTKKAGKTGPMKTLLVRVMTPDLRERLENLRKKPENIPQPISNTSRANLNKLLTDYTEMKKAILHVYWEEFQKDPVGLMSRVAQPASKKIDQNKLKPEMDEKGNLTTAGFACSQCGQPLFVYKLEQVSEKGKAYTNYFGRCNVAEHEKLILLAQLKPEKDSDEAVTYSLGKFGQRALDFYSIHVTKESTHPVKPLAQIAGNRYASGPVGKALSDACMGTIASFLSKYQDIIIEHQKVVKGNQKRLESLRELAGKENLEYPSVTLPPQPHTKEGVDAYNEVIARVRMWVNLNLWQKLKLSRDDAKPLLRLKGFPSFPLVERQANEVDWWDMVCNVKKLINEKKEDGKVFWQNLAGYKRQEALRPYLSSEEDRKKGKKFARYQLGDLLLHLEKKHGEDWGKVYDEAWERIDKKVEGLSKHIKLEEERRSEDAQSKAALTDWLRAKASFVIEGLKEADKDEFCRCELKLQKWYGDLRGKPFAIEAENSILDISGFSKQYNCAFIWQKDGVKKLNLYLIINYFKGGKLRFKKIKPEAFEANRFYTVINKKSGEIVPMEVNFNFDDPNLIILPLAFGKRQGREFIWNDLLSLETGSLKLANGRVIEKTLYNRRTRQDEPALFVALTFERREVLDSSNIKPMNLIGVDRGENIPAVIALTDPEGCPLSCFKDSLGNPTYILRIGESYKEKQRTIQAKKEVEQRRAGGYSRKYASKAKNLADDMVRNTARDLLYYAVTQDAMLIFENLSRGFGRQGKRTFMAERQYTRMEDWLTAKLAYEGLPSKTYLSKTLAQYTSKTCSNCGFTITSADYDRVLEKLKKTATGWMTTINGKELKVEGQITYYNRYKRQNVVKDLSVELDRLSEESVNNDISSWTKGRSGEALSLLKKRFSHRPVQEKFVCLNCGFETHADEQAALNIARSWLFLRSQEYKKYQTNKTTGNTDKRAFVETWQSFYRKKLKEVWKPAV

SEQ ID NO: 27015 - protein, 978 aa, synthetic construct
  REGION 1..978: note = engineered CasX variant
QEIKRINKIRRRLVKDSNTKKAGKTGPMKTLLVRVMTPDLRERLENLRKKPENIPQPISNTSRANLNKLLTDYTEMKKAILHVYWEEFQKDPVGLMSRVAQPASKKIDQNKLKPEMDEKGNLTTAGFACSQCGQPLFVYKLEQVSEKGKAYTNYFGRCNVAEHEKLILLAQLKPEKDSDEAVTYSLGKFGQRALDFYSIHVTKESTHPVKPLAQIAGNRYASGPVGKALSDACMGTIASFLSKYQDIIIEHQKVVKGNQKRLESLRELAGKENLEYPSVTLPPQPHTKEGVDAYNEVIARVRMWVNLNLWQKLKLSRDDAKPLLRLKGFPSFPLVERQANEVDWWDMVCNVKKLINEKKEDGKVFWQNLAGYKRQEALRPYLSSEEDRKKGKKFARYQLGDLLLHLEKKHGEDWGKVYDEAWERIDKKVEGLSKHIKLEEERRSEDAQSKAALTDWLRAKASFVIEGLKEADKDEFCRCELKLQKWYGDLRGKPFAIEAENSILDISGFSKQYNCAFIWQKDGVKKLNLYLIINYFKGGKLRFKKIKPEAFEANRFYTVINKKSGEIVPMEVNFNFDDPNLIILPLAFGKRQGREFIWNDLLSLETGSLKLANGRVIEKTLYNRRTRQDEPALFVALTFERREVLDSSNIKPMNLIGVDRGENIPAVIALTDPEGCPLSCFKDSLGNPTHILRIGESYKYKQRTIQAKKEVEQRRAGGYSRKYASKAKNLADDMVRNTARDLLYYAVTQDAMLIFENLSRGFGRQGKRTFMAERQYTRMEDWLTAKLAYEGLPSKTYLSKTLAQYTSKTCSNCGFTITSADYDRVLEKLKKTATGWMTTINGKELKVEGQITYYNRYKRQNVVKDLSVELDRLSEESVNNDISSWTKGRSGEALSLLKKRFSHRPVQEKFVCLNCGFETHADEQAALNIARSWLFLRSQEYKKYQTNKTTGNTDKRAFVETWQSFYRKKLKEVWKPAV

SEQ ID NO: 27016 - protein, 978 aa, synthetic construct
  REGION 1..978: note = engineered CasX variant
QEIKRINKIRRRLVKDSNTKKAGKTGPMKTLLVRVMTPDLRERLENLRKKPENIPQPISNTSRANLNKLLTDYTEMKKAILHVYWEEFQKDPVGLMSRVAQPASKKIDQNKLKPEMDEKGNLTTAGFACSQCGQPLFVYKLEQVSEKGKAYTNYFGRCNVAEHEKLILLAQLKPEKDSDEAVTYSLGKFGQRALDFYSIHVTKESTHPVKPLAQIAGNRYASGPVGKALSDACMGTIASFLSKYQDIIIEHQKVVKGNQKRLESLRELAGKENLEYPSVTLPPQPHTKEGVDAYNEVIARVRMWVNLNLWQKLKLSRDDAKPLLRLKGFPSFPLVERQANEVDWWDMVCNVKKLINEKKEDGKVFWQNLAGYKRQEALRPYLSSEEDRKKGKKFARYQLGDLLLHLEKKHGEDWGKVYDEAWERIDKKVEGLSKHIKLEEERRSEDAQSKAALTDWLRAKASFVIEGLKEADKDEFCRCELKLQKWYGDLRGKPFAIEAENSILDISGFSKQYNCAFIWQKDGVKKLNLYLIINYFKGGKLRFKKIKPEAFEANRFYTVINKKSGEIVPMEVNFNFDDPNLIILPLAFGKRQGREFIWNDLLSLETGSLKLANGRVIEKTLYNRRTRQDEPALFVALTFERREVLDSSNIKPMNLIGVDRGENIPAVIALTDPEGCPLSCFKDSLGNPTHILRIGESYKNKQRTIQAKKEVEQRRAGGYSRKYASKAKNLADDMVRNTARDLLYYAVTQDAMLIFENLSRGFGRQGKRTFMAERQYTRMEDWLTAKLAYEGLPSKTYLSKTLAQYTSKTCSNCGFTITSADYDRVLEKLKKTATGWMTTINGKELKVEGQITYYNRYKRQNVVKDLSVELDRLSEESVNNDISSWTKGRSGEALSLLKKRFSHRPVQEKFVCLNCGFETHADEQAALNIARSWLFLRSQEYKKYQTNKTTGNTDKRAFVETWQSFYRKKLKEVWKPAV

SEQ ID NO: 27017 - protein, 978 aa, synthetic construct
  REGION 1..978: note = engineered CasX variant
QEIKRINKIRRRLVKDSNTKKAGKTGPMKTLLVRVMTPDLRERLENLRKKPENIPQPISNTSRANLNKLLTDYTEMKKAILHVYWEEFQKDPVGLMSRVAQPASKKIDQNKLKPEMDEKGNLTTAGFACSQCGQPLFVYKLEQVSEKGKAYTNYFGRCNVAEHEKLILLAQLKPEKDSDEAVTYSLGKFGQRALDFYSIHVTKESTHPVKPLAQIAGNRYASGPVGKALSDACMGTIASFLSKYQDIIIEHQKVVKGNQKRLESLRELAGKENLEYPSVTLPPQPHTKEGVDAYNEVIARVRMWVNLNLWQKLKLSRDDAKPLLRLKGFPSFPLVERQANEVDWWDMVCNVKKLINEKKEDGKVFWQNLAGYKRQEALRPYLSSEEDRKKGKKFARYQLGDLLLHLEKKHGEDWGKVYDEAWERIDKKVEGLSKHIKLEEERRSEDAQSKAALTDWLRAKASFVIEGLKEADKDEFCRCELKLQKWYGDLRGKPFAIEAENSILDISGFSKQYNCAFIWQKDGVKKLNLYLIINYFKGGKLRFKKIKPEAFEANRFYTVINKKSGEIVPMEVNFNFDDPNLIILPLAFGKRQGREFIWNDLLSLETGSLKLANGRVIEKTLYNRRTRQDEPALFVALTFERREVLDSSNIKPMNLIGVDRGENIPAVIALTDPEGCPLSCFKDSLGNPTHILRIGESYKHKQRTIQAKKEVEQRRAGGYSRKYASKAKNLADDMVRNTARDLLYYAVTQDAMLIFENLSRGFGRQGKRTFMAERQYTRMEDWLTAKLAYEGLPSKTYLSKTLAQYTSKTCSNCGFTITSADYDRVLEKLKKTATGWMTTINGKELKVEGQITYYNRYKRQNVVKDLSVELDRLSEESVNNDISSWTKGRSGEALSLLKKRFSHRPVQEKFVCLNCGFETHADEQAALNIARSWLFLRSQEYKKYQTNKTTGNTDKRAFVETWQSFYRKKLKEVWKPAV

SEQ ID NO: 27018 - protein, 978 aa, synthetic construct
  REGION 1..978: note = engineered CasX variant
QEIKRINKIRRRLVKDSNTKKAGKTGPMKTLLVRVMTPDLRERLENLRKKPENIPQPISNTSRANLNKLLTDYTEMKKAILHVYWEEFQKDPVGLMSRVAQPASKKIDQNKLKPEMDEKGNLTTAGFACSQCGQPLFVYKLEQVSEKGKAYTNYFGRCNVAEHEKLILLAQLKPEKDSDEAVTYSLGKFGQRALDFYSIHVTKESTHPVKPLAQIAGNRYASGPVGKALSDACMGTIASFLSKYQDIIIEHQKVVKGNQKRLESLRELAGKENLEYPSVTLPPQPHTKEGVDAYNEVIARVRMWVNLNLWQKLKLSRDDAKPLLRLKGFPSFPLVERQANEVDWWDMVCNVKKLINEKKEDGKVFWQNLAGYKRQEALRPYLSSEEDRKKGKKFARYQLGDLLLHLEKKHGEDWGKVYDEAWERIDKKVEGLSKHIKLEEERRSEDAQSKAALTDWLRAKASFVIEGLKEADKDEFCRCELKLQKWYGDLRGKPFAIEAENSILDISGFSKQYNCAFIWQKDGVKKLNLYLIINYFKGGKLRFKKIKPEAFEANRFYTVINKKSGEIVPMEVNFNFDDPNLIILPLAFGKRQGREFIWNDLLSLETGSLKLANGRVIEKTLYNRRTRQDEPALFVALTFERREVLDSSNIKPMNLIGVDRGENIPAVIALTDPEGCPLSCFKDSLGNPTHILRIGESYKEKQRTYQAKKEVEQRRAGGYSRKYASKAKNLADDMVRNTARDLLYYAVTQDAMLIFENLSRGFGRQGKRTFMAERQYTRMEDWLTAKLAYEGLPSKTYLSKTLAQYTSKTCSNCGFTITSADYDRVLEKLKKTATGWMTTINGKELKVEGQITYYNRYKRQNVVKDLSVELDRLSEESVNNDISSWTKGRSGEALSLLKKRFSHRPVQEKFVCLNCGFETHADEQAALNIARSWLFLRSQEYKKYQTNKTTGNTDKRAFVETWQSFYRKKLKEVWKPAV

SEQ ID NO: 27019 - protein, 978 aa, synthetic construct
  REGION 1..978: note = engineered CasX variant
QEIKRINKIRRRLVKDSNTKKAGKTGPMKTLLVRVMTPDLRERLENLRKKPENIPQPISNTSRANLNKLLTDYTEMKKAILHVYWEEFQKDPVGLMSRVAQPASKKIDQNKLKPEMDEKGNLTTAGFACSQCGQPLFVYKLEQVSEKGKAYTNYFGRCNVAEHEKLILLAQLKPEKDSDEAVTYSLGKFGQRALDFYSIHVTKESTHPVKPLAQIAGNRYASGPVGKALSDACMGTIASFLSKYQDIIIEHQKVVKGNQKRLESLRELAGKENLEYPSVTLPPQPHTKEGVDAYNEVIARVRMWVNLNLWQKLKLSRDDAKPLLRLKGFPSFPLVERQANEVDWWDMVCNVKKLINEKKEDGKVFWQNLAGYKRQEALRPYLSSEEDRKKGKKFARYQLGDLLLHLEKKHGEDWGKVYDEAWERIDKKVEGLSKHIKLEEERRSEDAQSKAALTDWLRAKASFVIEGLKEADKDEFCRCELKLQKWYGDLRGKPFAIEAENSILDISGFSKQYNCAFIWQKDGVKKLNLYLIINYFKGGKLRFKKIKPEAFEANRFYTVINKKSGEIVPMEVNFNFDDPNLIILPLAFGKRQGREFIWNDLLSLETGSLKLANGRVIEKTLYNRRTRQDEPALFVALTFERREVLDSSNIKPMNLIGVDRGENIPAVIALTDPEGCPLSCFKDSLGNPTHILRIGESYKEKQRTIQAKKEVEQRRLGGYSRKYASKAKNLADDMVRNTARDLLYYAVTQDAMLIFENLSRGFGRQGKRTFMAERQYTRMEDWLTAKLAYEGLPSKTYLSKTLAQYTSKTCSNCGFTITSADYDRVLEKLKKTATGWMTTINGKELKVEGQITYYNRYKRQNVVKDLSVELDRLSEESVNNDISSWTKGRSGEALSLLKKRFSHRPVQEKFVCLNCGFETHADEQAALNIARSWLFLRSQEYKKYQTNKTTGNTDKRAFVETWQSFYRKKLKEVWKPAV

SEQ ID NO: 27020 - protein, 978 aa, synthetic construct
  REGION 1..978: note = engineered CasX variant
QEIKRINKIRRRLVKDSNTKKAGKTGPMKTLLVRVMTPDLRERLENLRKKPENIPQPISNTSRANLNKLLTDYTEMKKAILHVYWEEFQKDPVGLMSRVAQPASKKIDQNKLKPEMDEKGNLTTAGFACSQCGQPLFVYKLEQVSEKGKAYTNYFGRCNVAEHEKLILLAQLKPEKDSDEAVTYSLGKFGQRALDFYSIHVTKESTHPVKPLAQIAGNRYASGPVGKALSDACMGTIASFLSKYQDIIIEHQKVVKGNQKRLESLRELAGKENLEYPSVTLPPQPHTKEGVDAYNEVIARVRMWVNLNLWQKLKLSRDDAKPLLRLKGFPSFPLVERQANEVDWWDMVCNVKKLINEKKEDGKVFWQNLAGYKRQEALRPYLSSEEDRKKGKKFARYQLGDLLLHLEKKHGEDWGKVYDEAWERIDKKVEGLSKHIKLEEERRSEDAQSKAALTDWLRAKASFVIEGLKEADKDEFCRCELKLQKWYGDLRGKPFAIEAENSILDISGFSKQYNCAFIWQKDGVKKLNLYLIINYFKGGKLRFKKIKPEAFEANRFYTVINKKSGEIVPMEVNFNFDDPNLIILPLAFGKRQGREFIWNDLLSLETGSLKLANGRVIEKTLYNRRTRQDEPALFVALTFERREVLDSSNIKPMNLIGVDRGENIPAVIALTDPEGCPLSCFKDSLGNPTHILRIGESYKEKQRTIQAKKEVEQRRAGGYSRKYASKAKNLADDMVRNTARDLLYYAVTQDAMLIFENLSRGFGRQGKRTFMAERQYTRMEDWLTAKLAYEGLPSKTYLSKTLAQYTSKTCSNCGFTITSADYDRVLEKLKKTATGWMTTINGKELKVEGQITYYNRYKRQNVVKDLSVELDRLSEESVNNDISSWTKGRSGEALSLLKKRFSHRPVQEKFVCLNCGFETHADEQAALNIARSWLFLRSQEYKKYQTNKTTGNTDKRAFVETWQSFYRKKLKEVWKPAV

SEQ ID NO: 27021 - protein, 978 aa, synthetic construct
  REGION 1..978: note = engineered CasX variant
QEIKRINKIRRRLVKDSNTKKAGKTGPMKTLLVRVMTPDLRERLENLRKKPENIPQPISNTSRANLNKLLTDYTEMKKAILHVYWEEFQKDPVGLMSRVAQPASKKIDQNKLKPEMDEKGNLTTAGFACSQCGQPLFVYKLEQVSEKGKAYTNYFGRCNVAEHEKLILLAQLKPEKDSDEAVTYSLGKFGQRALDFYSIHVTKESTHPVKPLAQIAGNRYASGPVGKALSDACMGTIASFLSKYQDIIIEHQKVVKGNQKRLESLRELAGKENLEYPSVTLPPQPHTKEGVDAYNEVIARVRMWVNLNLWQKLKLSRDDAKPLLRLKGFPSFPLVERQANEVDWWDMVCNVKKLINEKKEDGKVFWQNLAGYKRQEALRPYLSSEEDRKKGKKFARYQLGDLLLHLEKKHGEDWGKVYDEAWERIDKKVEGLSKHIKLEEERRSEDAQSKAALTDWLRAKASFVIEGLKEADKDEFCRCELKLQKWYGDLRGKPFAIEAENSILDISGFSKQYNCAFIWQKDGVKKLNLYLIINYFKGGKLRFKKIKPEAFEANRFYTVINKKSGEIVPMEVNFNFDDPNLIILPLAFGKRQGREFIWNDLLSLETGSLKLANGRVIEKTLYNRRTRQDEPALFVALTFERREVLDSSNIKPMNLIGVDRGENIPAVIALTDPEGCPLSCFKDSLGNPTHILRIGESYKEKQRTIQAKKEVEQRRAFGYSRKYASKAKNLADDMVRNTARDLLYYAVTQDAMLIFENLSRGFGRQGKRTFMAERQYTRMEDWLTAKLAYEGLPSKTYLSKTLAQYTSKTCSNCGFTITSADYDRVLEKLKKTATGWMTTINGKELKVEGQITYYNRYKRQNVVKDLSVELDRLSEESVNNDISSWTKGRSGEALSLLKKRFSHRPVQEKFVCLNCGFETHADEQAALNIARSWLFLRSQEYKKYQTNKTTGNTDKRAFVETWQSFYRKKLKEVWKPAV

SEQ ID NO: 27022 - protein, 978 aa, synthetic construct
  REGION 1..978: note = engineered CasX variant
QEIKRINKIRRRLVKDSNTKKAGKTGPMKTLLVRVMTPDLRERLENLRKKPENIPQPISNTSRANLNKLLTDYTEMKKAILHVYWEEFQKDPVGLMSRVAQPASKKIDQNKLKPEMDEKGNLTTAGFACSQCGQPLFVYKLEQVSEKGKAYTNYFGRCNVAEHEKLILLAQLKPEKDSDEAVTYSLGKFGQRALDFYSIHVTKESTHPVKPLAQIAGNRYASGPVGKALSDACMGTIASFLSKYQDIIIEHQKVVKGNQKRLESLRELAGKENLEYPSVTLPPQPHTKEGVDAYNEVIARVRMWVNLNLWQKLKLSRDDAKPLLRLKGFPSFPLVERQANEVDWWDMVCNVKKLINEKKEDGKVFWQNLAGYKRQEALRPYLSSEEDRKKGKKFARYQLGDLLLHLEKKHGEDWGKVYDEAWERIDKKVEGLSKHIKLEEERRSEDAQSKAALTDWLRAKASFVIEGLKEADKDEFCRCELKLQKWYGDLRGKPFAIEAENSILDISGFSKQYNCAFIWQKDGVKKLNLYLIINYFKGGKLRFKKIKPEAFEANRFYTVINKKSGEIVPMEVNFNFDDPNLIILPLAFGKRQGREFIWNDLLSLETGSLKLANGRVIEKTLYNRRTRQDEPALFVALTFERREVLDSSNIKPMNLIGVDRGENIPAVIALTDPEGCPLSCFKDSLGNPTHILRIGESYKEKQRTIQAFKEVEQRRAGGYSRKYASKAKNLADDMVRNTARDLLYYAVTQDAMLIFENLSRGFGRQGKRTFMAERQYTRMEDWLTAKLAYEGLPSKTYLSKTLAQYTSKTCSNCGFTITSADYDRVLEKLKKTATGWMTTINGKELKVEGQITYYNRYKRQNVVKDLSVELDRLSEESVNNDISSWTKGRSGEALSLLKKRFSHRPVQEKFVCLNCGFETHADEQAALNIARSWLFLRSQEYKKYQTNKTTGNTDKRAFVETWQSFYRKKLKEVWKPAV

SEQ ID NO: 27023 - protein, 978 aa, synthetic construct
  REGION 1..978: note = engineered CasX variant
QEIKRINKIRRRLVKDSNTKKAGKTGPMKTLLVRVMTPDLRERLENLRKKPENIPQPISNTSRANLNKLLTDYTEMKKAILHVYWEEFQKDPVGLMSRVAQPASKKIDQNKLKPEMDEKGNLTTAGFACSQCGQPLFVYKLEQVSEKGKAYTNYFGRCNVAEHEKLILLAQLKPEKDSDEAVTYSLGKFGQRALDFYSIHVTKESTHPVKPLAQIAGNRYASGPVGKALSDACMGTIASFLSKYQDIIIEHQKVVKGNQKRLESLRELAGKENLEYPSVTLPPQPHTKEGVDAYNEVIARVRMWVNLNLWQKLKLSRDDAKPLLRLKGFPSFPLVERQANEVDWWDMVCNVKKLINEKKEDGKVFWQNLAGYKRQEALRPYLSSEEDRKKGKKFARYQLGDLLLHLEKKHGEDWGKVYDEAWERIDKKVEGLSKHIKLEEERRSEDAQSKAALTDWLRAKASFVIEGLKEADKDEFCRCELKLQKWYGDLRGKPFAIEAENSILDISGFSKQYNCAFIWQKDGVKKLNLYLIINYFKGGKLRFKKIKPEAFEANRFYTVINKKSGEIVPMEVNFNFDDPNLIILPLAFGKRQGREFIWNDLLSLETGSLKLANGRVIEKTLYNRRTRQDEPALFVALTFERREVLDSSNIKPMNLIGVDRGENIPAVIALTDPEGCPLSCFKDSLGNPTHILRIGESYKEKQRQIQAKKEVEQRRAGGYSRKYASKAKNLADDMVRNTARDLLYYAVTQDAMLIFENLSRGFGRQGKRTFMAERQYTRMEDWLTAKLAYEGLPSKTYLSKTLAQYTSKTCSNCGFTITSADYDRVLEKLKKTATGWMTTINGKELKVEGQITYYNRYKRQNVVKDLSVELDRLSEESVNNDISSWTKGRSGEALSLLKKRFSHRPVQEKFVCLNCGFETHADEQAALNIARSWLFLRSQEYKKYQTNKTTGNTDKRAFVETWQSFYRKKLKEVWKPAV

SEQ ID NO: 27024 - protein, 978 aa, synthetic construct
  REGION 1..978: note = engineered CasX variant
QEIKRINKIRRRLVKDSNTKKAGKTGPMKTLLVRVMTPDLRERLENLRKKPENIPQPISNTSRANLNKLLTDYTEMKKAILHVYWEEFQKDPVGLMSRVAQPASKKIDQNKLKPEMDEKGNLTTAGFACSQCGQPLFVYKLEQVSEKGKAYTNYFGRCNVAEHEKLILLAQLKPEKDSDEAVTYSLGKFGQRALDFYSIHVTKESTHPVKPLAQIAGNRYASGPVGKALSDACMGTIASFLSKYQDIIIEHQKVVKGNQKRLESLRELAGKENLEYPSVTLPPQPHTKEGVDAYNEVIARVRMWVNLNLWQKLKLSRDDAKPLLRLKGFPSFPLVERQANEVDWWDMVCNVKKLINEKKEDGKVFWQNLAGYKRQEALRPYLSSEEDRKKGKKFARYQLGDLLLHLEKKHGEDWGKVYDEAWERIDKKVEGLSKHIKLEEERRSEDAQSKAALTDWLRAKASFVIEGLKEADKDEFCRCELKLQKWYGDLRGKPFAIEAENSILDISGFSKQYNCAFIWQKDGVKKLNLYLIINYFKGGKLRFKKIKPEAFEANRFYTVINKKSGEIVPMEVNFNFDDPNLIILPLAFGKRQGREFIWNDLLSLETGSLKLANGRVIEKTLYNRRTRQDEPALFVALTFERREVLDSSNIKPMNLIGVDRGENIPAVIALTDPEGCPLSCFKDSLGNPTHILRFGESYKEKQRTIQAKKEVEQRRAGGYSRKYASKAKNLADDMVRNTARDLLYYAVTQDAMLIFENLSRGFGRQGKRTFMAERQYTRMEDWLTAKLAYEGLPSKTYLSKTLAQYTSKTCSNCGFTITSADYDRVLEKLKKTATGWMTTINGKELKVEGQITYYNRYKRQNVVKDLSVELDRLSEESVNNDISSWTKGRSGEALSLLKKRFSHRPVQEKFVCLNCGFETHADEQAALNIARSWLFLRSQEYKKYQTNKTTGNTDKRAFVETWQSFYRKKLKEVWKPAV

SEQ ID NO: 27025 - protein, 978 aa, synthetic construct
  REGION 1..978: note = engineered CasX variant
QEIKRINKIRRRLVKDSNTKKAGKTGPMKTLLVRVMTPDLRERLENLRKKPENIPQPISNTSRANLNKLLTDYTEMKKAILHVYWEEFQKDPVGLMSRVAQPASKKIDQNKLKPEMDEKGNLTTAGFACSQCGQPLFVYKLEQVSEKGKAYTNYFGRCNVAEHEKLILLAQLKPEKDSDEAVTYSLGKFGQRALDFYSIHVTKESTHPVKPLAQIAGNRYASGPVGKALSDACMGTIASFLSKYQDIIIEHQKVVKGNQKRLESLRELAGKENLEYPSVTLPPQPHTKEGVDAYNEVIARVRMWVNLNLWQKLKLSRDDAKPLLRLKGFPSFPLVERQANEVDWWDMVCNVKKLINEKKEDGKVFWQNLAGYKRQEALRPYLSSEEDRKKGKKFARYQLGDLLLHLEKKHGEDWGKVYDEAWERIDKKVEGLSKHIKLEEERRSEDAQSKAALTDWLRAKASFVIEGLKEADKDEFCRCELKLQKWYGDLRGKPFAIEAENSILDISGFSKQYNCAFIWQKDGVKKLNLYLIINYFKGGKLRFKKIKPEAFEANRFYTVINKKSGEIVPMEVNFNFDDPNLIILPLAFGKRQGREFIWNDLLSLETGSLKLANGRVIEKTLYNRRTRQDEPALFVALTFERREVLDSSNIKPMNLIGVDRGENIPAVIALTDPEGCPLSCFKDSLGNPTHILRFGESYKEKQRTIQAKKEVEQRRAFGYSRKYASKAKNLADDMVRNTARDLLYYAVTQDAMLIFENLSRGFGRQGKRTFMAERQYTRMEDWLTAKLAYEGLPSKTYLSKTLAQYTSKTCSNCGFTITSADYDRVLEKLKKTATGWMTTINGKELKVEGQITYYNRYKRQNVVKDLSVELDRLSEESVNNDISSWTKGRSGEALSLLKKRFSHRPVQEKFVCLNCGFETHADEQAALNIARSWLFLRSQEYKKYQTNKTTGNTDKRAFVETWQSFYRKKLKEVWKPAV

SEQ ID NO: 27026 - protein, 978 aa, synthetic construct
  REGION 1..978: note = engineered CasX variant
QEIKRINKIRRRLVKDSNTKKAGKTGPMKTLLVRVMTPDLRERLENLRKKPENIPQPISNTSRANLNKLLTDYTEMKKAILHVYWEEFQKDPVGLMSRVAQPASKKIDQNKLKPEMDEKGNLTTAGFACSQCGQPLFVYKLEQVSEKGKAYTNYFGRCNVAEHEKLILLAQLKPEKDSDEAVTYSLGKFGQRALDFYSIHVTKESTHPVKPLAQIAGNRYASGPVGKALSDACMGTIASFLSKYQDIIIEHQKVVKGNQKRLESLRELAGKENLEYPSVTLPPQPHTKEGVDAYNEVIARVRMWVNLNLWQKLKLSRDDAKPLLRLKGFPSFPLVERQANEVDWWDMVCNVKKLINEKKEDGKVFWQNLAGYKRQEALRPYLSSEEDRKKGKKFARYQLGDLLLHLEKKHGEDWGKVYDEAWERIDKKVEGLSKHIKLEEERRSEDAQSKAALTDWLRAKASFVIEGLKEADKDEFCRCELKLQKWYGDLRGKPFAIEAENSILDISGFSKQYNCAFIWQKDGVKKLNLYLIINYFKGGKLRFKKIKPEAFEANRFYTVINKKSGEIVPMEVNFNFDDPNLIILPLAFGKRQGREFIWNDLLSLETGSLKLANGRVIEKTLYNRRTRQDEPALFVALTFERREVLDSSNIKPMNLIGVDRGENIPAVIALTDPEGCPLSCFKDSLGNCTHILRIGESYKEKQRTIQAKKEVEQRRAGGYSRKYASKAKNLADDMVRNTARDLLYYAVTQDAMLIFENLSRGFGRQGKRTFMAERQYTRMEDWLTAKLAYEGLPSKTYLSKTLAQYTSKTCSNCGFTITSADYDRVLEKLKKTATGWMTTINGKELKVEGQITYYNRYKRQNVVKDLSVELDRLSEESVNNDISSWTKGRSGEALSLLKKRFSHRPVQEKFVCLNCGFETHADEQAALNIARSWLFLRSQEYKKYQTNKTTGNTDKRAFVETWQSFYRKKLKEVWKPAV

SEQ ID NO: 27027 - protein, 978 aa, synthetic construct
  REGION 1..978: note = engineered CasX variant
QEIKRINKIRRRLVKDSNTKKAGKTGPMKTLLVRVMTPDLRERLENLRKKPENIPQPISNTSRANLNKLLTDYTEMKKAILHVYWEEFQKDPVGLMSRVAQPASKKIDQNKLKPEMDEKGNLTTAGFACSQCGQPLFVYKLEQVSEKGKAYTNYFGRCNVAEHEKLILLAQLKPEKDSDEAVTYSLGKFGQRALDFYSIHVTKESTHPVKPLAQIAGNRYASGPVGKALSDACMGTIASFLSKYQDIIIEHQKVVKGNQKRLESLRELAGKENLEYPSVTLPPQPHTKEGVDAYNEVIARVRMWVNLNLWQKLKLSRDDAKPLLRLKGFPSFPLVERQANEVDWWDMVCNVKKLINEKKEDGKVFWQNLAGYKRQEALRPYLSSEEDRKKGKKFARYQLGDLLLHLEKKHGEDWGKVYDEAWERIDKKVEGLSKHIKLEEERRSEDAQSKAALTDWLRAKASFVIEGLKEADKDEFCRCELKLQKWYGDLRGKPFAIEAENSILDISGFSKQYNCAFIWQKDGVKKLNLYLIINYFKGGKLRFKKIKPEAFEANRFYTVINKKSGEIVPMEVNFNFDDPNLIILPLAFGKRQGREFIWNDLLSLETGSLKLANGRVIEKTLYNRRTRQDEPALFVALTFERREVLDSSNIKPMNLIGVDRGENIPAVIALTDPEGCPLSCFKDSDGNPTHILRIGESYKEKQRTIQAKKEVEQRRAGGYSRKYASKAKNLADDMVRNTARDLLYYAVTQDAMLIFENLSRGFGRQGKRTFMAERQYTRMEDWLTAKLAYEGLPSKTYLSKTLAQYTSKTCSNCGFTITSADYDRVLEKLKKTATGWMTTINGKELKVEGQITYYNRYKRQNVVKDLSVELDRLSEESVNNDISSWTKGRSGEALSLLKKRFSHRPVQEKFVCLNCGFETHADEQAALNIARSWLFLRSQEYKKYQTNKTTGNTDKRAFVETWQSFYRKKLKEVWKPAV

SEQ ID NO: 27028 - protein, 978 aa, synthetic construct
  REGION 1..978: note = engineered CasX variant
QEIKRINKIRRRLVKDSNTKKAGKTGPMKTLLVRVMTPDLRERLENLRKKPENIPQPISNTSRANLNKLLTDYTEMKKAILHVYWEEFQKDPVGLMSRVAQPASKKIDQNKLKPEMDEKGNLTTAGFACSQCGQPLFVYKLEQVSEKGKAYTNYFGRCNVAEHEKLILLAQLKPEKDSDEAVTYSLGKFGQRALDFYSIHVTKESTHPVKPLAQIAGNRYASGPVGKALSDACMGTIASFLSKYQDIIIEHQKVVKGNQKRLESLRELAGKENLEYPSVTLPPQPHTKEGVDAYNEVIARVRMWVNLNLWQKLKLSRDDAKPLLRLKGFPSFPLVERQANEVDWWDMVCNVKKLINEKKEDGKVFWQNLAGYKRQEALRPYLSSEEDRKKGKKFARYQLGDLLLHLEKKHGEDWGKVYDEAWERIDKKVEGLSKHIKLEEERRSEDAQSKAALTDWLRAKASFVIEGLKEADKDEFCRCELKLQKWYGDLRGKPFAIEAENSILDISGFSKQYNCAFIWQKDGVKKLNLYLIINYFKGGKLRFKKIKPEAFEANRFYTVINKKSGEIVPMEVNFNFDDPNLIILPLAFGKRQGREFIWNDLLSLETGSLKLANGRVIEKTLYNRRTRQDEPALFVALTFERREVLDSSNIKPMNLIGVDRGENIPAVIALTDPEGCPLSCFKDHLGNPTHILRIGESYKEKQRTIQAKKEVEQRRLGGYSRKYASKAKNLADDMVRNTARDLLYYAVTQDAMLIFENLSRGFGRQGKRTFMAERQYTRMEDWLTAKLAYEGLPSKTYLSKTLAQYTSKTCSNCGFTITSADYDRVLEKLKKTATGWMTTINGKELKVEGQITYYNRYKRQNVVKDLSVELDRLSEESVNNDISSWTKGRSGEALSLLKKRFSHRPVQEKFVCLNCGFETHADEQAALNIARSWLFLRSQEYKKYQTNKTTGNTDKRAFVETWQSFYRKKLKEVWKPAV

SEQ ID NO: 27029 - protein, 978 aa, synthetic construct
  REGION 1..978: note = engineered CasX variant
QEIKRINKIRRRLVKDSNTKKAGKTGPMKTLLVRVMTPDLRERLENLRKKPENIPQPISNTSRANLNKLLTDYTEMKKAILHVYWEEFQKDPVGLMSRVAQPASKKIDQNKLKPEMDEKGNLTTAGFACSQCGQPLFVYKLEQVSEKGKAYTNYFGRCNVAEHEKLILLAQLKPEKDSDEAVTYSLGKFGQRALDFYSIHVTKESTHPVKPLAQIAGNRYASGPVGKALSDACMGTIASFLSKYQDIIIEHQKVVKGNQKRLESLRELAGKENLEYPSVTLPPQPHTKEGVDAYNEVIARVRMWVNLNLWQKLKLSRDDAKPLLRLKGFPSFPLVERQANEVDWWDMVCNVKKLINEKKEDGKVFWQNLAGYKRQEALRPYLSSEEDRKKGKKFARYQLGDLLLHLEKKHGEDWGKVYDEAWERIDKKVEGLSKHIKLEEERRSEDAQSKAALTDWLRAKASFVIEGLKEADKDEFCRCELKLQKWYGDLRGKPFAIEAENSILDISGFSKQYNCAFIWQKDGVKKLNLYLIINYFKGGKLRFKKIKPEAFEANRFYTVINKKSGEIVPMEVNFNFDDPNLIILPLAFGKRQGREFIWNDLLSLETGSLKLANGRVIEKTLYNRRTRQDEPALFVALTFERREVLDSSNIKPMNLIGVDRGENIPAVIALTDPEGCPLSCFKDHLGNPTHILRIGESYKEKQRTIQAKKEVEQRRAGGYSRKYASKAKNLADDMVRNTARDLLYYAVTQDAMLIFENLSRGFGRQGKRTFMAERQYTRMEDWLTAKLAYEGLPSKTYLSKTLAQYTSKTCSNCGFTITSADYDRVLEKLKKTATGWMTTINGKELKVEGQITYYNRYKRQNVVKDLSVELDRLSEESVNNDISSWTKGRSGEALSLLKKRFSHRPVQEKFVCLNCGFETHADEQAALNIARSWLFLRSQEYKKYQTNKTTGNTDKRAFVETWQSFYRKKLKEVWKPAV

SEQ ID NO: 27030 - protein, 978 aa, synthetic construct
  REGION 1..978: note = engineered CasX variant
QEIKRINKIRRRLVKDSNTKKAGKTGPMKTLLVRVMTPDLRERLENLRKKPENIPQPISNTSRANLNKLLTDYTEMKKAILHVYWEEFQKDPVGLMSRVAQPASKKIDQNKLKPEMDEKGNLTTAGFACSQCGQPLFVYKLEQVSEKGKAYTNYFGRCNVAEHEKLILLAQLKPEKDSDEAVTYSLGKFGQRALDFYSIHVTKESTHPVKPLAQIAGNRYASGPVGKALSDACMGTIASFLSKYQDIIIEHQKVVKGNQKRLESLRELAGKENLEYPSVTLPPQPHTKEGVDAYNEVIARVRMWVNLNLWQKLKLSRDDAKPLLRLKGFPSFPLVERQANEVDWWDMVCNVKKLINEKKEDGKVFWQNLAGYKRQEALRPYLSSEEDRKKGKKFARYQLGDLLLHLEKKHGEDWGKVYDEAWERIDKKVEGLSKHIKLEEERRSEDAQSKAALTDWLRAKASFVIEGLKEADKDEFCRCELKLQKWYGDLRGKPFAIEAENSILDISGFSKQYNCAFIWQKDGVKKLNLYLIINYFKGGKLRFKKIKPEAFEANRFYTVINKKSGEIVPMEVNFNFDDPNLIILPLAFGKRQGREFIWNDLLSLETGSLKLANGRVIEKTLYNRRTRQDEPALFVALTFERREVLDSSNIKPMNLIGVDRGENIPAVIALTDPEGCPLSAFVDSLGNPTHILRIGESYKEKQRTIQAKKEVEQRRAGGYSRKYASKAKNLADDMVRNTARDLLYYAVTQDAMLIFENLSRGFGRQGKRTFMAERQYTRMEDWLTAKLAYEGLPSKTYLSKTLAQYTSKTCSNCGFTITSADYDRVLEKLKKTATGWMTTINGKELKVEGQITYYNRYKRQNVVKDLSVELDRLSEESVNNDISSWTKGRSGEALSLLKKRFSHRPVQEKFVCLNCGFETHADEQAALNIARSWLFLRSQEYKKYQTNKTTGNTDKRAFVETWQSFYRKKLKEVWKPAV

SEQ ID NO: 27031 - protein, 978 aa, synthetic construct
  REGION 1..978: note = engineered CasX variant
QEIKRINKIRRRLVKDSNTKKAGKTGPMKTLLVRVMTPDLRERLENLRKKPENIPQPISNTSRANLNKLLTDYTEMKKAILHVYWEEFQKDPVGLMSRVAQPASKKIDQNKLKPEMDEKGNLTTAGFACSQCGQPLFVYKLEQVSEKGKAYTNYFGRCNVAEHEKLILLAQLKPEKDSDEAVTYSLGKFGQRALDFYSIHVTKESTHPVKPLAQIAGNRYASGPVGKALSDACMGTIASFLSKYQDIIIEHQKVVKGNQKRLESLRELAGKENLEYPSVTLPPQPHTKEGVDAYNEVIARVRMWVNLNLWQKLKLSRDDAKPLLRLKGFPSFPLVERQANEVDWWDMVCNVKKLINEKKEDGKVFWQNLAGYKRQEALRPYLSSEEDRKKGKKFARYQLGDLLLHLEKKHGEDWGKVYDEAWERIDKKVEGLSKHIKLEEERRSEDAQSKAALTDWLRAKASFVIEGLKEADKDEFCRCELKLQKWYGDLRGKPFAIEAENSILDISGFSKQYNCAFIWQKDGVKKLNLYLIINYFKGGKLRFKKIKPEAFEANRFYTVINKKSGEIVPMEVNFNFDDPNLIILPLAFGKRQGREFIWNDLLSLETGSLKLANGRVIEKTLYNRRTRQDEPALFVALTFERREVLDSSNIKPMNLIGVDRGENIPAVIALTDPEGCPLSAFKDSQGNPTHILRIGESYKEKQRTIQAKKEVEQRRAGGYSRKYASKAKNLADDMVRNTARDLLYYAVTQDAMLIFENLSRGFGRQGKRTFMAERQYTRMEDWLTAKLAYEGLPSKTYLSKTLAQYTSKTCSNCGFTITSADYDRVLEKLKKTATGWMTTINGKELKVEGQITYYNRYKRQNVVKDLSVELDRLSEESVNNDISSWTKGRSGEALSLLKKRFSHRPVQEKFVCLNCGFETHADEQAALNIARSWLFLRSQEYKKYQTNKTTGNTDKRAFVETWQSFYRKKLKEVWKPAV

SEQ ID NO: 27032 - protein, 978 aa, synthetic construct
  REGION 1..978: note = engineered CasX variant
QEIKRINKIRRRLVKDSNTKKAGKTGPMKTLLVRVMTPDLRERLENLRKKPENIPQPISNTSRANLNKLLTDYTEMKKAILHVYWEEFQKDPVGLMSRVAQPASKKIDQNKLKPEMDEKGNLTTAGFACSQCGQPLFVYKLEQVSEKGKAYTNYFGRCNVAEHEKLILLAQLKPEKDSDEAVTYSLGKFGQRALDFYSIHVTKESTHPVKPLAQIAGNRYASGPVGKALSDACMGTIASFLSKYQDIIIEHQKVVKGNQKRLESLRELAGKENLEYPSVTLPPQPHTKEGVDAYNEVIARVRMWVNLNLWQKLKLSRDDAKPLLRLKGFPSFPLVERQANEVDWWDMVCNVKKLINEKKEDGKVFWQNLAGYKRQEALRPYLSSEEDRKKGKKFARYQLGDLLLHLEKKHGEDWGKVYDEAWERIDKKVEGLSKHIKLEEERRSEDAQSKAALTDWLRAKASFVIEGLKEADKDEFCRCELKLQKWYGDLRGKPFAIEAENSILDISGFSKQYNCAFIWQKDGVKKLNLYLIINYFKGGKLRFKKIKPEAFEANRFYTVINKKSGEIVPMEVNFNFDDPNLIILPLAFGKRQGREFIWNDLLSLETGSLKLANGRVIEKTLYNRRTRQDEPALFVALTFERREVLDSSNIKPMNLIGVDRGENIPAVIALTDPEGCPLSAFKDSLGNYTHVLRIGESYKEKQRTIQAKKEVEQRRAGGYSRKYASKAKNLADDMVRNTARDLLYYAVTQDAMLIFENLSRGFGRQGKRTFMAERQYTRMEDWLTAKLAYEGLPSKTYLSKTLAQYTSKTCSNCGFTITSADYDRVLEKLKKTATGWMTTINGKELKVEGQITYYNRYKRQNVVKDLSVELDRLSEESVNNDISSWTKGRSGEALSLLKKRFSHRPVQEKFVCLNCGFETHADEQAALNIARSWLFLRSQEYKKYQTNKTTGNTDKRAFVETWQSFYRKKLKEVWKPAV

SEQ ID NO: 27033 - protein, 978 aa, synthetic construct
  REGION 1..978: note = engineered CasX variant
QEIKRINKIRRRLVKDSNTKKAGKTGPMKTLLVRVMTPDLRERLENLRKKPENIPQPISNTSRANLNKLLTDYTEMKKAILHVYWEEFQKDPVGLMSRVAQPASKKIDQNKLKPEMDEKGNLTTAGFACSQCGQPLFVYKLEQVSEKGKAYTNYFGRCNVAEHEKLILLAQLKPEKDSDEAVTYSLGKFGQRALDFYSIHVTKESTHPVKPLAQIAGNRYASGPVGKALSDACMGTIASFLSKYQDIIIEHQKVVKGNQKRLESLRELAGKENLEYPSVTLPPQPHTKEGVDAYNEVIARVRMWVNLNLWQKLKLSRDDAKPLLRLKGFPSFPLVERQANEVDWWDMVCNVKKLINEKKEDGKVFWQNLAGYKRQEALRPYLSSEEDRKKGKKFARYQLGDLLLHLEKKHGEDWGKVYDEAWERIDKKVEGLSKHIKLEEERRSEDAQSKAALTDWLRAKASFVIEGLKEADKDEFCRCELKLQKWYGDLRGKPFAIEAENSILDISGFSKQYNCAFIWQKDGVKKLNLYLIINYFKGGKLRFKKIKPEAFEANRFYTVINKKSGEIVPMEVNFNFDDPNLIILPLAFGKRQGREFIWNDLLSLETGSLKLANGRVIEKTLYNRRTRQDEPALFVALTFERREVLDSSNIKPMNLIGVDRGENIPAVIALTDPEGCPLSAFKDSLGNYTHILRIGESYKEKQRTIQAKKEVEQRRAGGYSRKYASKAKNLADDMVRNTARDLLYYAVTQDAMLIFENLSRGFGRQGKRTFMAERQYTRMEDWLTAKLAYEGLPSKTYLSKTLAQYTSKTCSNCGFTITSADYDRVLEKLKKTATGWMTTINGKELKVEGQITYYNRYKRQNVVKDLSVELDRLSEESVNNDISSWTKGRSGEALSLLKKRFSHRPVQEKFVCLNCGFETHADEQAALNIARSWLFLRSQEYKKYQTNKTTGNTDKRAFVETWQSFYRKKLKEVWKPAV

SEQ ID NO: 27034 - protein, 978 aa, synthetic construct
  REGION 1..978: note = engineered CasX variant
QEIKRINKIRRRLVKDSNTKKAGKTGPMKTLLVRVMTPDLRERLENLRKKPENIPQPISNTSRANLNKLLTDYTEMKKAILHVYWEEFQKDPVGLMSRVAQPASKKIDQNKLKPEMDEKGNLTTAGFACSQCGQPLFVYKLEQVSEKGKAYTNYFGRCNVAEHEKLILLAQLKPEKDSDEAVTYSLGKFGQRALDFYSIHVTKESTHPVKPLAQIAGNRYASGPVGKALSDACMGTIASFLSKYQDIIIEHQKVVKGNQKRLESLRELAGKENLEYPSVTLPPQPHTKEGVDAYNEVIARVRMWVNLNLWQKLKLSRDDAKPLLRLKGFPSFPLVERQANEVDWWDMVCNVKKLINEKKEDGKVFWQNLAGYKRQEALRPYLSSEEDRKKGKKFARYQLGDLLLHLEKKHGEDWGKVYDEAWERIDKKVEGLSKHIKLEEERRSEDAQSKAALTDWLRAKASFVIEGLKEADKDEFCRCELKLQKWYGDLRGKPFAIEAENSILDISGFSKQYNCAFIWQKDGVKKLNLYLIINYFKGGKLRFKKIKPEAFEANRFYTVINKKSGEIVPMEVNFNFDDPNLIILPLAFGKRQGREFIWNDLLSLETGSLKLANGRVIEKTLYNRRTRQDEPALFVALTFERREVLDSSNIKPMNLIGVDRGENIPAVIALTDPEGCPLSAFKDSLGNPTHVLRIGESYKEKQRTIQAKKEVEQRRAGGYSRKYASKAKNLADDMVRNTARDLLYYAVTQDAMLIFENLSRGFGRQGKRTFMAERQYTRMEDWLTAKLAYEGLPSKTYLSKTLAQYTSKTCSNCGFTITSADYDRVLEKLKKTATGWMTTINGKELKVEGQITYYNRYKRQNVVKDLSVELDRLSEESVNNDISSWTKGRSGEALSLLKKRFSHRPVQEKFVCLNCGFETHADEQAALNIARSWLFLRSQEYKKYQTNKTTGNTDKRAFVETWQSFYRKKLKEVWKPAV

SEQ ID NO: 27035 - protein, 978 aa, synthetic construct
  REGION 1..978: note = engineered CasX variant
QEIKRINKIRRRLVKDSNTKKAGKTGPMKTLLVRVMTPDLRERLENLRKKPENIPQPISNTSRANLNKLLTDYTEMKKAILHVYWEEFQKDPVGLMSRVAQPASKKIDQNKLKPEMDEKGNLTTAGFACSQCGQPLFVYKLEQVSEKGKAYTNYFGRCNVAEHEKLILLAQLKPEKDSDEAVTYSLGKFGQRALDFYSIHVTKESTHPVKPLAQIAGNRYASGPVGKALSDACMGTIASFLSKYQDIIIEHQKVVKGNQKRLESLRELAGKENLEYPSVTLPPQPHTKEGVDAYNEVIARVRMWVNLNLWQKLKLSRDDAKPLLRLKGFPSFPLVERQANEVDWWDMVCNVKKLINEKKEDGKVFWQNLAGYKRQEALRPYLSSEEDRKKGKKFARYQLGDLLLHLEKKHGEDWGKVYDEAWERIDKKVEGLSKHIKLEEERRSEDAQSKAALTDWLRAKASFVIEGLKEADKDEFCRCELKLQKWYGDLRGKPFAIEAENSILDISGFSKQYNCAFIWQKDGVKKLNLYLIINYFKGGKLRFKKIKPEAFEANRFYTVINKKSGEIVPMEVNFNFDDPNLIILPLAFGKRQGREFIWNDLLSLETGSLKLANGRVIEKTLYNRRTRQDEPALFVALTFERREVLDSSNIKPMNLIGVDRGENIPAVIALTDPEGCPLSAFKDSLGNPTHILRIGESYKQKQRTIQAKKEVEQRRAGGYSRKYASKAKNLADDMVRNTARDLLYYAVTQDAMLIFENLSRGFGRQGKRTFMAERQYTRMEDWLTAKLAYEGLPSKTYLSKTLAQYTSKTCSNCGFTITSADYDRVLEKLKKTATGWMTTINGKELKVEGQITYYNRYKRQNVVKDLSVELDRLSEESVNNDISSWTKGRSGEALSLLKKRFSHRPVQEKFVCLNCGFETHADEQAALNIARSWLFLRSQEYKKYQTNKTTGNTDKRAFVETWQSFYRKKLKEVWKPAV

SEQ ID NO: 27036 - protein, 978 aa, synthetic construct
  REGION 1..978: note = engineered CasX variant
QEIKRINKIRRRLVKDSNTKKAGKTGPMKTLLVRVMTPDLRERLENLRKKPENIPQPISNTSRANLNKLLTDYTEMKKAILHVYWEEFQKDPVGLMSRVAQPASKKIDQNKLKPEMDEKGNLTTAGFACSQCGQPLFVYKLEQVSEKGKAYTNYFGRCNVAEHEKLILLAQLKPEKDSDEAVTYSLGKFGQRALDFYSIHVTKESTHPVKPLAQIAGNRYASGPVGKALSDACMGTIASFLSKYQDIIIEHQKVVKGNQKRLESLRELAGKENLEYPSVTLPPQPHTKEGVDAYNEVIARVRMWVNLNLWQKLKLSRDDAKPLLRLKGFPSFPLVERQANEVDWWDMVCNVKKLINEKKEDGKVFWQNLAGYKRQEALRPYLSSEEDRKKGKKFARYQLGDLLLHLEKKHGEDWGKVYDEAWERIDKKVEGLSKHIKLEEERRSEDAQSKAALTDWLRAKASFVIEGLKEADKDEFCRCELKLQKWYGDLRGKPFAIEAENSILDISGFSKQYNCAFIWQKDGVKKLNLYLIINYFKGGKLRFKKIKPEAFEANRFYTVINKKSGEIVPMEVNFNFDDPNLIILPLAFGKRQGREFIWNDLLSLETGSLKLANGRVIEKTLYNRRTRQDEPALFVALTFERREVLDSSNIKPMNLIGVDRGENIPAVIALTDPEGCPLSAFKDSLGNPTHILRIGESYKNKQRTIQAKKEVEQRRAGGYSRKYASKAKNLADDMVRNTARDLLYYAVTQDAMLIFENLSRGFGRQGKRTFMAERQYTRMEDWLTAKLAYEGLPSKTYLSKTLAQYTSKTCSNCGFTITSADYDRVLEKLKKTATGWMTTINGKELKVEGQITYYNRYKRQNVVKDLSVELDRLSEESVNNDISSWTKGRSGEALSLLKKRFSHRPVQEKFVCLNCGFETHADEQAALNIARSWLFLRSQEYKKYQTNKTTGNTDKRAFVETWQSFYRKKLKEVWKPAV

SEQ ID NO: 27037 - protein, 978 aa, synthetic construct
  REGION 1..978: note = engineered CasX variant
QEIKRINKIRRRLVKDSNTKKAGKTGPMKTLLVRVMTPDLRERLENLRKKPENIPQPISNTSRANLNKLLTDYTEMKKAILHVYWEEFQKDPVGLMSRVAQPASKKIDQNKLKPEMDEKGNLTTAGFACSQCGQPLFVYKLEQVSEKGKAYTNYFGRCNVAEHEKLILLAQLKPEKDSDEAVTYSLGKFGQRALDFYSIHVTKESTHPVKPLAQIAGNRYASGPVGKALSDACMGTIASFLSKYQDIIIEHQKVVKGNQKRLESLRELAGKENLEYPSVTLPPQPHTKEGVDAYNEVIARVRMWVNLNLWQKLKLSRDDAKPLLRLKGFPSFPLVERQANEVDWWDMVCNVKKLINEKKEDGKVFWQNLAGYKRQEALRPYLSSEEDRKKGKKFARYQLGDLLLHLEKKHGEDWGKVYDEAWERIDKKVEGLSKHIKLEEERRSEDAQSKAALTDWLRAKASFVIEGLKEADKDEFCRCELKLQKWYGDLRGKPFAIEAENSILDISGFSKQYNCAFIWQKDGVKKLNLYLIINYFKGGKLRFKKIKPEAFEANRFYTVINKKSGEIVPMEVNFNFDDPNLIILPLAFGKRQGREFIWNDLLSLETGSLKLANGRVIEKTLYNRRTRQDEPALFVALTFERREVLDSSNIKPMNLIGVDRGENIPAVIALTDPEGCPLSAFKDSLGNPTHILRIGESYKNKQRTIQACKEVEQRRAGGYSRKYASKAKNLADDMVRNTARDLLYYAVTQDAMLIFENLSRGFGRQGKRTFMAERQYTRMEDWLTAKLAYEGLPSKTYLSKTLAQYTSKTCSNCGFTITSADYDRVLEKLKKTATGWMTTINGKELKVEGQITYYNRYKRQNVVKDLSVELDRLSEESVNNDISSWTKGRSGEALSLLKKRFSHRPVQEKFVCLNCGFETHADEQAALNIARSWLFLRSQEYKKYQTNKTTGNTDKRAFVETWQSFYRKKLKEVWKPAV

SEQ ID NO: 27038 - protein, 978 aa, synthetic construct
  REGION 1..978: note = engineered CasX variant
QEIKRINKIRRRLVKDSNTKKAGKTGPMKTLLVRVMTPDLRERLENLRKKPENIPQPISNTSRANLNKLLTDYTEMKKAILHVYWEEFQKDPVGLMSRVAQPASKKIDQNKLKPEMDEKGNLTTAGFACSQCGQPLFVYKLEQVSEKGKAYTNYFGRCNVAEHEKLILLAQLKPEKDSDEAVTYSLGKFGQRALDFYSIHVTKESTHPVKPLAQIAGNRYASGPVGKALSDACMGTIASFLSKYQDIIIEHQKVVKGNQKRLESLRELAGKENLEYPSVTLPPQPHTKEGVDAYNEVIARVRMWVNLNLWQKLKLSRDDAKPLLRLKGFPSFPLVERQANEVDWWDMVCNVKKLINEKKEDGKVFWQNLAGYKRQEALRPYLSSEEDRKKGKKFARYQLGDLLLHLEKKHGEDWGKVYDEAWERIDKKVEGLSKHIKLEEERRSEDAQSKAALTDWLRAKASFVIEGLKEADKDEFCRCELKLQKWYGDLRGKPFAIEAENSILDISGFSKQYNCAFIWQKDGVKKLNLYLIINYFKGGKLRFKKIKPEAFEANRFYTVINKKSGEIVPMEVNFNFDDPNLIILPLAFGKRQGREFIWNDLLSLETGSLKLANGRVIEKTLYNRRTRQDEPALFVALTFERREVLDSSNIKPMNLIGVDRGENIPAVIALTDPEGCPLSAFKDSLGNPTHILRIGESYKEKQRTIQQKKEVEQRRAGGYSRKYASKAKNLADDMVRNTARDLLYYAVTQDAMLIFENLSRGFGRQGKRTFMAERQYTRMEDWLTAKLAYEGLPSKTYLSKTLAQYTSKTCSNCGFTITSADYDRVLEKLKKTATGWMTTINGKELKVEGQITYYNRYKRQNVVKDLSVELDRLSEESVNNDISSWTKGRSGEALSLLKKRFSHRPVQEKFVCLNCGFETHADEQAALNIARSWLFLRSQEYKKYQTNKTTGNTDKRAFVETWQSFYRKKLKEVWKPAV

SEQ ID NO: 27039 - protein, 978 aa, synthetic construct
  REGION 1..978: note = engineered CasX variant
QEIKRINKIRRRLVKDSNTKKAGKTGPMKTLLVRVMTPDLRERLENLRKKPENIPQPISNTSRANLNKLLTDYTEMKKAILHVYWEEFQKDPVGLMSRVAQPASKKIDQNKLKPEMDEKGNLTTAGFACSQCGQPLFVYKLEQVSEKGKAYTNYFGRCNVAEHEKLILLAQLKPEKDSDEAVTYSLGKFGQRALDFYSIHVTKESTHPVKPLAQIAGNRYASGPVGKALSDACMGTIASFLSKYQDIIIEHQKVVKGNQKRLESLRELAGKENLEYPSVTLPPQPHTKEGVDAYNEVIARVRMWVNLNLWQKLKLSRDDAKPLLRLKGFPSFPLVERQANEVDWWDMVCNVKKLINEKKEDGKVFWQNLAGYKRQEALRPYLSSEEDRKKGKKFARYQLGDLLLHLEKKHGEDWGKVYDEAWERIDKKVEGLSKHIKLEEERRSEDAQSKAALTDWLRAKASFVIEGLKEADKDEFCRCELKLQKWYGDLRGKPFAIEAENSILDISGFSKQYNCAFIWQKDGVKKLNLYLIINYFKGGKLRFKKIKPEAFEANRFYTVINKKSGEIVPMEVNFNFDDPNLIILPLAFGKRQGREFIWNDLLSLETGSLKLANGRVIEKTLYNRRTRQDEPALFVALTFERREVLDSSNIKPMNLIGVDRGENIPAVIALTDPEGCPLSAFKDSLGNPTHILRIGESYKEKQRTIQAKKEVEQRRAGGYSRKYASKAKNLADDMVRNTARDLLYYAVTQDAMLIFENLSRGFGRQGKRTFMAERQYTRMEDWLTAKLAYEGLPSKTYLSKTLAQYTSKTCSNCGFTITSADYDRVLEKLKKTATGWMTTINGKELKVEGQITYYNRYKRQNVVKDLSVELDRLSEESVNNDISSWTKGRSGEALSLLKKRFSHRPVQEKFVCLNCGFETHADEQAALNIARSWLFLRSQEYKKYQTNKTTGNTDKRAFVETWQSFYRKKLKEVWKPAV

SEQ ID NO: 27040 - protein, 978 aa, synthetic construct
  REGION 1..978: note = engineered CasX variant
QEIKRINKIRRRLVKDSNTKKAGKTGPMKTLLVRVMTPDLRERLENLRKKPENIPQPISNTSRANLNKLLTDYTEMKKAILHVYWEEFQKDPVGLMSRVAQPASKKIDQNKLKPEMDEKGNLTTAGFACSQCGQPLFVYKLEQVSEKGKAYTNYFGRCNVAEHEKLILLAQLKPEKDSDEAVTYSLGKFGQRALDFYSIHVTKESTHPVKPLAQIAGNRYASGPVGKALSDACMGTIASFLSKYQDIIIEHQKVVKGNQKRLESLRELAGKENLEYPSVTLPPQPHTKEGVDAYNEVIARVRMWVNLNLWQKLKLSRDDAKPLLRLKGFPSFPLVERQANEVDWWDMVCNVKKLINEKKEDGKVFWQNLAGYKRQEALRPYLSSEEDRKKGKKFARYQLGDLLLHLEKKHGEDWGKVYDEAWERIDKKVEGLSKHIKLEEERRSEDAQSKAALTDWLRAKASFVIEGLKEADKDEFCRCELKLQKWYGDLRGKPFAIEAENSILDISGFSKQYNCAFIWQKDGVKKLNLYLIINYFKGGKLRFKKIKPEAFEANRFYTVINKKSGEIVPMEVNFNFDDPNLIILPLAFGKRQGREFIWNDLLSLETGSLKLANGRVIEKTLYNRRTRQDEPALFVALTFERREVLDSSNIKPMNLIGVDRGENIPAVIALTDPEGCPLSAFKDSLGNPTHILRIGESYKEKQRTIQAKKEVEQRKAGGYSRKYASKAKNLADDMVRNTARDLLYYAVTQDAMLIFENLSRGFGRQGKRTFMAERQYTRMEDWLTAKLAYEGLPSKTYLSKTLAQYTSKTCSNCGFTITSADYDRVLEKLKKTATGWMTTINGKELKVEGQITYYNRYKRQNVVKDLSVELDRLSEESVNNDISSWTKGRSGEALSLLKKRFSHRPVQEKFVCLNCGFETHADEQAALNIARSWLFLRSQEYKKYQTNKTTGNTDKRAFVETWQSFYRKKLKEVWKPAV

SEQ ID NO: 27041 - protein, 978 aa, synthetic construct
  REGION 1..978: note = engineered CasX variant
QEIKRINKIRRRLVKDSNTKKAGKTGPMKTLLVRVMTPDLRERLENLRKKPENIPQPISNTSRANLNKLLTDYTEMKKAILHVYWEEFQKDPVGLMSRVAQPASKKIDQNKLKPEMDEKGNLTTAGFACSQCGQPLFVYKLEQVSEKGKAYTNYFGRCNVAEHEKLILLAQLKPEKDSDEAVTYSLGKFGQRALDFYSIHVTKESTHPVKPLAQIAGNRYASGPVGKALSDACMGTIASFLSKYQDIIIEHQKVVKGNQKRLESLRELAGKENLEYPSVTLPPQPHTKEGVDAYNEVIARVRMWVNLNLWQKLKLSRDDAKPLLRLKGFPSFPLVERQANEVDWWDMVCNVKKLINEKKEDGKVFWQNLAGYKRQEALRPYLSSEEDRKKGKKFARYQLGDLLLHLEKKHGEDWGKVYDEAWERIDKKVEGLSKHIKLEEERRSEDAQSKAALTDWLRAKASFVIEGLKEADKDEFCRCELKLQKWYGDLRGKPFAIEAENSILDISGFSKQYNCAFIWQKDGVKKLNLYLIINYFKGGKLRFKKIKPEAFEANRFYTVINKKSGEIVPMEVNFNFDDPNLIILPLAFGKRQGREFIWNDLLSLETGSLKLANGRVIEKTLYNRRTRQDEPALFVALTFERREVLDSSNIKPMNLIGVDRGENIPAVIALTDPEGCPLSAFKDSLGNPTHILRIGESYKEKQRTIQACKEVEQRRAGGYSRKYASKAKNLADDMVRNTARDLLYYAVTQDAMLIFENLSRGFGRQGKRTFMAERQYTRMEDWLTAKLAYEGLPSKTYLSKTLAQYTSKTCSNCGFTITSADYDRVLEKLKKTATGWMTTINGKELKVEGQITYYNRYKRQNVVKDLSVELDRLSEESVNNDISSWTKGRSGEALSLLKKRFSHRPVQEKFVCLNCGFETHADEQAALNIARSWLFLRSQEYKKYQTNKTTGNTDKRAFVETWQSFYRKKLKEVWKPAV

SEQ ID NO: 27042 - protein, 978 aa, synthetic construct
  REGION 1..978: note = engineered CasX variant
QEIKRINKIRRRLVKDSNTKKAGKTGPMKTLLVRVMTPDLRERLENLRKKPENIPQPISNTSRANLNKLLTDYTEMKKAILHVYWEEFQKDPVGLMSRVAQPASKKIDQNKLKPEMDEKGNLTTAGFACSQCGQPLFVYKLEQVSEKGKAYTNYFGRCNVAEHEKLILLAQLKPEKDSDEAVTYSLGKFGQRALDFYSIHVTKESTHPVKPLAQIAGNRYASGPVGKALSDACMGTIASFLSKYQDIIIEHQKVVKGNQKRLESLRELAGKENLEYPSVTLPPQPHTKEGVDAYNEVIARVRMWVNLNLWQKLKLSRDDAKPLLRLKGFPSFPLVERQANEVDWWDMVCNVKKLINEKKEDGKVFWQNLAGYKRQEALRPYLSSEEDRKKGKKFARYQLGDLLLHLEKKHGEDWGKVYDEAWERIDKKVEGLSKHIKLEEERRSEDAQSKAALTDWLRAKASFVIEGLKEADKDEFCRCELKLQKWYGDLRGKPFAIEAENSILDISGFSKQYNCAFIWQKDGVKKLNLYLIINYFKGGKLRFKKIKPEAFEANRFYTVINKKSGEIVPMEVNFNFDDPNLIILPLAFGKRQGREFIWNDLLSLETGSLKLANGRVIEKTLYNRRTRQDEPALFVALTFERREVLDSSNIKPMNLIGVDRGENIPAVIALTDPEGCPLSAFKDSLGNPTHILRIGESYKEKQRTIQAAKEVEQRRAGGYSRKYASKAKNLADDMVRNTARDLLYYAVTQDAMLIFENLSRGFGRQGKRTFMAERQYTRMEDWLTAKLAYEGLPSKTYLSKTLAQYTSKTCSNCGFTITSADYDRVLEKLKKTATGWMTTINGKELKVEGQITYYNRYKRQNVVKDLSVELDRLSEESVNNDISSWTKGRSGEALSLLKKRFSHRPVQEKFVCLNCGFETHADEQAALNIARSWLFLRSQEYKKYQTNKTTGNTDKRAFVETWQSFYRKKLKEVWKPAV

SEQ ID NO: 27043 - protein, 978 aa, synthetic construct
  REGION 1..978: note = engineered CasX variant
QEIKRINKIRRRLVKDSNTKKAGKTGPMKTLLVRVMTPDLRERLENLRKKPENIPQPISNTSRANLNKLLTDYTEMKKAILHVYWEEFQKDPVGLMSRVAQPASKKIDQNKLKPEMDEKGNLTTAGFACSQCGQPLFVYKLEQVSEKGKAYTNYFGRCNVAEHEKLILLAQLKPEKDSDEAVTYSLGKFGQRALDFYSIHVTKESTHPVKPLAQIAGNRYASGPVGKALSDACMGTIASFLSKYQDIIIEHQKVVKGNQKRLESLRELAGKENLEYPSVTLPPQPHTKEGVDAYNEVIARVRMWVNLNLWQKLKLSRDDAKPLLRLKGFPSFPLVERQANEVDWWDMVCNVKKLINEKKEDGKVFWQNLAGYKRQEALRPYLSSEEDRKKGKKFARYQLGDLLLHLEKKHGEDWGKVYDEAWERIDKKVEGLSKHIKLEEERRSEDAQSKAALTDWLRAKASFVIEGLKEADKDEFCRCELKLQKWYGDLRGKPFAIEAENSILDISGFSKQYNCAFIWQKDGVKKLNLYLIINYFKGGKLRFKKIKPEAFEANRFYTVINKKSGEIVPMEVNFNFDDPNLIILPLAFGKRQGREFIWNDLLSLETGSLKLANGRVIEKTLYNRRTRQDEPALFVALTFERREVLDSSNIKPMNLIGVDRGENIPAVIALTDPEGCPLSAFKDSLGNPTHILRIGESYKAKQRTIQAKKEVEQRRAGGYSRKYASKAKNLADDMVRNTARDLLYYAVTQDAMLIFENLSRGFGRQGKRTFMAERQYTRMEDWLTAKLAYEGLPSKTYLSKTLAQYTSKTCSNCGFTITSADYDRVLEKLKKTATGWMTTINGKELKVEGQITYYNRYKRQNVVKDLSVELDRLSEESVNNDISSWTKGRSGEALSLLKKRFSHRPVQEKFVCLNCGFETHADEQAALNIARSWLFLRSQEYKKYQTNKTTGNTDKRAFVETWQSFYRKKLKEVWKPAV

SEQ ID NO: 27044 - protein, 978 aa, synthetic construct
  REGION 1..978: note = engineered CasX variant
QEIKRINKIRRRLVKDSNTKKAGKTGPMKTLLVRVMTPDLRERLENLRKKPENIPQPISNTSRANLNKLLTDYTEMKKAILHVYWEEFQKDPVGLMSRVAQPASKKIDQNKLKPEMDEKGNLTTAGFACSQCGQPLFVYKLEQVSEKGKAYTNYFGRCNVAEHEKLILLAQLKPEKDSDEAVTYSLGKFGQRALDFYSIHVTKESTHPVKPLAQIAGNRYASGPVGKALSDACMGTIASFLSKYQDIIIEHQKVVKGNQKRLESLRELAGKENLEYPSVTLPPQPHTKEGVDAYNEVIARVRMWVNLNLWQKLKLSRDDAKPLLRLKGFPSFPLVERQANEVDWWDMVCNVKKLINEKKEDGKVFWQNLAGYKRQEALRPYLSSEEDRKKGKKFARYQLGDLLLHLEKKHGEDWGKVYDEAWERIDKKVEGLSKHIKLEEERRSEDAQSKAALTDWLRAKASFVIEGLKEADKDEFCRCELKLQKWYGDLRGKPFAIEAENSILDISGFSKQYNCAFIWQKDGVKKLNLYLIINYFKGGKLRFKKIKPEAFEANRFYTVINKKSGEIVPMEVNFNFDDPNLIILPLAFGKRQGREFIWNDLLSLETGSLKLANGRVIEKTLYNRRTRQDEPALFVALTFERREVLDSSNIKPMNLIGVDRGENIPAVIALTDPEGCPLSAFKDSLGNPTHILRIGESYKAKQRTIQAKKEVEQRKAGGYSRKYASKAKNLADDMVRNTARDLLYYAVTQDAMLIFENLSRGFGRQGKRTFMAERQYTRMEDWLTAKLAYEGLPSKTYLSKTLAQYTSKTCSNCGFTITSADYDRVLEKLKKTATGWMTTINGKELKVEGQITYYNRYKRQNVVKDLSVELDRLSEESVNNDISSWTKGRSGEALSLLKKRFSHRPVQEKFVCLNCGFETHADEQAALNIARSWLFLRSQEYKKYQTNKTTGNTDKRAFVETWQSFYRKKLKEVWKPAV

SEQ ID NO: 27045 - protein, 978 aa, synthetic construct
  REGION 1..978: note = engineered CasX variant
QEIKRINKIRRRLVKDSNTKKAGKTGPMKTLLVRVMTPDLRERLENLRKKPENIPQPISNTSRANLNKLLTDYTEMKKAILHVYWEEFQKDPVGLMSRVAQPASKKIDQNKLKPEMDEKGNLTTAGFACSQCGQPLFVYKLEQVSEKGKAYTNYFGRCNVAEHEKLILLAQLKPEKDSDEAVTYSLGKFGQRALDFYSIHVTKESTHPVKPLAQIAGNRYASGPVGKALSDACMGTIASFLSKYQDIIIEHQKVVKGNQKRLESLRELAGKENLEYPSVTLPPQPHTKEGVDAYNEVIARVRMWVNLNLWQKLKLSRDDAKPLLRLKGFPSFPLVERQANEVDWWDMVCNVKKLINEKKEDGKVFWQNLAGYKRQEALRPYLSSEEDRKKGKKFARYQLGDLLLHLEKKHGEDWGKVYDEAWERIDKKVEGLSKHIKLEEERRSEDAQSKAALTDWLRAKASFVIEGLKEADKDEFCRCELKLQKWYGDLRGKPFAIEAENSILDISGFSKQYNCAFIWQKDGVKKLNLYLIINYFKGGKLRFKKIKPEAFEANRFYTVINKKSGEIVPMEVNFNFDDPNLIILPLAFGKRQGREFIWNDLLSLETGSLKLANGRVIEKTLYNRRTRQDEPALFVALTFERREVLDSSNIKPMNLIGVDRGENIPAVIALTDPEGCPLSAFKDSLGNPTHILRIGEPYKEKQRTIQQKKEVEQRRAGGYSRKYASKAKNLADDMVRNTARDLLYYAVTQDAMLIFENLSRGFGRQGKRTFMAERQYTRMEDWLTAKLAYEGLPSKTYLSKTLAQYTSKTCSNCGFTITSADYDRVLEKLKKTATGWMTTINGKELKVEGQITYYNRYKRQNVVKDLSVELDRLSEESVNNDISSWTKGRSGEALSLLKKRFSHRPVQEKFVCLNCGFETHADEQAALNIARSWLFLRSQEYKKYQTNKTTGNTDKRAFVETWQSFYRKKLKEVWKPAV

SEQ ID NO: 27046 - protein, 978 aa, synthetic construct
  REGION 1..978: note = engineered CasX variant
QEIKRINKIRRRLVKDSNTKKAGKTGPMKTLLVRVMTPDLRERLENLRKKPENIPQPISNTSRANLNKLLTDYTEMKKAILHVYWEEFQKDPVGLMSRVAQPASKKIDQNKLKPEMDEKGNLTTAGFACSQCGQPLFVYKLEQVSEKGKAYTNYFGRCNVAEHEKLILLAQLKPEKDSDEAVTYSLGKFGQRALDFYSIHVTKESTHPVKPLAQIAGNRYASGPVGKALSDACMGTIASFLSKYQDIIIEHQKVVKGNQKRLESLRELAGKENLEYPSVTLPPQPHTKEGVDAYNEVIARVRMWVNLNLWQKLKLSRDDAKPLLRLKGFPSFPLVERQANEVDWWDMVCNVKKLINEKKEDGKVFWQNLAGYKRQEALRPYLSSEEDRKKGKKFARYQLGDLLLHLEKKHGEDWGKVYDEAWERIDKKVEGLSKHIKLEEERRSEDAQSKAALTDWLRAKASFVIEGLKEADKDEFCRCELKLQKWYGDLRGKPFAIEAENSILDISGFSKQYNCAFIWQKDGVKKLNLYLIINYFKGGKLRFKKIKPEAFEANRFYTVINKKSGEIVPMEVNFNFDDPNLIILPLAFGKRQGREFIWNDLLSLETGSLKLANGRVIEKTLYNRRTRQDEPALFVALTFERREVLDSSNIKPMNLIGVDRGENIPAVIALTDPEGCPLSAFKDSLGNPTHILRIGEPYKEKQRTIQAKKEVEQRRAGGYSRKYASKAKNLADDMVRNTARDLLYYAVTQDAMLIFENLSRGFGRQGKRTFMAERQYTRMEDWLTAKLAYEGLPSKTYLSKTLAQYTSKTCSNCGFTITSADYDRVLEKLKKTATGWMTTINGKELKVEGQITYYNRYKRQNVVKDLSVELDRLSEESVNNDISSWTKGRSGEALSLLKKRFSHRPVQEKFVCLNCGFETHADEQAALNIARSWLFLRSQEYKKYQTNKTTGNTDKRAFVETWQSFYRKKLKEVWKPAV

SEQ ID NO: 27047 - protein, 978 aa, synthetic construct
  REGION 1..978: note = engineered CasX variant
QEIKRINKIRRRLVKDSNTKKAGKTGPMKTLLVRVMTPDLRERLENLRKKPENIPQPISNTSRANLNKLLTDYTEMKKAILHVYWEEFQKDPVGLMSRVAQPASKKIDQNKLKPEMDEKGNLTTAGFACSQCGQPLFVYKLEQVSEKGKAYTNYFGRCNVAEHEKLILLAQLKPEKDSDEAVTYSLGKFGQRALDFYSIHVTKESTHPVKPLAQIAGNRYASGPVGKALSDACMGTIASFLSKYQDIIIEHQKVVKGNQKRLESLRELAGKENLEYPSVTLPPQPHTKEGVDAYNEVIARVRMWVNLNLWQKLKLSRDDAKPLLRLKGFPSFPLVERQANEVDWWDMVCNVKKLINEKKEDGKVFWQNLAGYKRQEALRPYLSSEEDRKKGKKFARYQLGDLLLHLEKKHGEDWGKVYDEAWERIDKKVEGLSKHIKLEEERRSEDAQSKAALTDWLRAKASFVIEGLKEADKDEFCRCELKLQKWYGDLRGKPFAIEAENSILDISGFSKQYNCAFIWQKDGVKKLNLYLIINYFKGGKLRFKKIKPEAFEANRFYTVINKKSGEIVPMEVNFNFDDPNLIILPLAFGKRQGREFIWNDLLSLETGSLKLANGRVIEKTLYNRRTRQDEPALFVALTFERREVLDSSNIKPMNLIGVDRGENIPAVIALTDPEGCPLSAFKDSLGNPTHILRIGECYKEKQRTIQAKKEVEQRRAGGYSRKYASKAKNLADDMVRNTARDLLYYAVTQDAMLIFENLSRGFGRQGKRTFMAERQYTRMEDWLTAKLAYEGLPSKTYLSKTLAQYTSKTCSNCGFTITSADYDRVLEKLKKTATGWMTTINGKELKVEGQITYYNRYKRQNVVKDLSVELDRLSEESVNNDISSWTKGRSGEALSLLKKRFSHRPVQEKFVCLNCGFETHADEQAALNIARSWLFLRSQEYKKYQTNKTTGNTDKRAFVETWQSFYRKKLKEVWKPAV

SEQ ID NO: 27048 - protein, 978 aa, synthetic construct
  REGION 1..978: note = engineered CasX variant
QEIKRINKIRRRLVKDSNTKKAGKTGPMKTLLVRVMTPDLRERLENLRKKPENIPQPISNTSRANLNKLLTDYTEMKKAILHVYWEEFQKDPVGLMSRVAQPASKKIDQNKLKPEMDEKGNLTTAGFACSQCGQPLFVYKLEQVSEKGKAYTNYFGRCNVAEHEKLILLAQLKPEKDSDEAVTYSLGKFGQRALDFYSIHVTKESTHPVKPLAQIAGNRYASGPVGKALSDACMGTIASFLSKYQDIIIEHQKVVKGNQKRLESLRELAGKENLEYPSVTLPPQPHTKEGVDAYNEVIARVRMWVNLNLWQKLKLSRDDAKPLLRLKGFPSFPLVERQANEVDWWDMVCNVKKLINEKKEDGKVFWQNLAGYKRQEALRPYLSSEEDRKKGKKFARYQLGDLLLHLEKKHGEDWGKVYDEAWERIDKKVEGLSKHIKLEEERRSEDAQSKAALTDWLRAKASFVIEGLKEADKDEFCRCELKLQKWYGDLRGKPFAIEAENSILDISGFSKQYNCAFIWQKDGVKKLNLYLIINYFKGGKLRFKKIKPEAFEANRFYTVINKKSGEIVPMEVNFNFDDPNLIILPLAFGKRQGREFIWNDLLSLETGSLKLANGRVIEKTLYNRRTRQDEPALFVALTFERREVLDSSNIKPMNLIGVDRGENIPAVIALTDPEGCPLSAFKDSDGNPTHILRIGESYKQKQRTIQAKKEVEQRRAGGYSRKYASKAKNLADDMVRNTARDLLYYAVTQDAMLIFENLSRGFGRQGKRTFMAERQYTRMEDWLTAKLAYEGLPSKTYLSKTLAQYTSKTCSNCGFTITSADYDRVLEKLKKTATGWMTTINGKELKVEGQITYYNRYKRQNVVKDLSVELDRLSEESVNNDISSWTKGRSGEALSLLKKRFSHRPVQEKFVCLNCGFETHADEQAALNIARSWLFLRSQEYKKYQTNKTTGNTDKRAFVETWQSFYRKKLKEVWKPAV

SEQ ID NO: 27049 - protein, 978 aa, synthetic construct
  REGION 1..978: note = engineered CasX variant
QEIKRINKIRRRLVKDSNTKKAGKTGPMKTLLVRVMTPDLRERLENLRKKPENIPQPISNTSRANLNKLLTDYTEMKKAILHVYWEEFQKDPVGLMSRVAQPASKKIDQNKLKPEMDEKGNLTTAGFACSQCGQPLFVYKLEQVSEKGKAYTNYFGRCNVAEHEKLILLAQLKPEKDSDEAVTYSLGKFGQRALDFYSIHVTKESTHPVKPLAQIAGNRYASGPVGKALSDACMGTIASFLSKYQDIIIEHQKVVKGNQKRLESLRELAGKENLEYPSVTLPPQPHTKEGVDAYNEVIARVRMWVNLNLWQKLKLSRDDAKPLLRLKGFPSFPLVERQANEVDWWDMVCNVKKLINEKKEDGKVFWQNLAGYKRQEALRPYLSSEEDRKKGKKFARYQLGDLLLHLEKKHGEDWGKVYDEAWERIDKKVEGLSKHIKLEEERRSEDAQSKAALTDWLRAKASFVIEGLKEADKDEFCRCELKLQKWYGDLRGKPFAIEAENSILDISGFSKQYNCAFIWQKDGVKKLNLYLIINYFKGGKLRFKKIKPEAFEANRFYTVINKKSGEIVPMEVNFNFDDPNLIILPLAFGKRQGREFIWNDLLSLETGSLKLANGRVIEKTLYNRRTRQDEPALFVALTFERREVLDSSNIKPMNLIGVDRGENIPAVIALTDPEGCPLSAFKDSDGNPTHILRIGESYKEKQRTIQAKKEVEQRRAGGYSRKYASKAKNLADDMVRNTARDLLYYAVTQDAMLIFENLSRGFGRQGKRTFMAERQYTRMEDWLTAKLAYEGLPSKTYLSKTLAQYTSKTCSNCGFTITSADYDRVLEKLKKTATGWMTTINGKELKVEGQITYYNRYKRQNVVKDLSVELDRLSEESVNNDISSWTKGRSGEALSLLKKRFSHRPVQEKFVCLNCGFETHADEQAALNIARSWLFLRSQEYKKYQTNKTTGNTDKRAFVETWQSFYRKKLKEVWKPAV

SEQ ID NO: 27050 - protein, 978 aa, synthetic construct
  REGION 1..978: note = engineered CasX variant
QEIKRINKIRRRLVKDSNTKKAGKTGPMKTLLVRVMTPDLRERLENLRKKPENIPQPISNTSRANLNKLLTDYTEMKKAILHVYWEEFQKDPVGLMSRVAQPASKKIDQNKLKPEMDEKGNLTTAGFACSQCGQPLFVYKLEQVSEKGKAYTNYFGRCNVAEHEKLILLAQLKPEKDSDEAVTYSLGKFGQRALDFYSIHVTKESTHPVKPLAQIAGNRYASGPVGKALSDACMGTIASFLSKYQDIIIEHQKVVKGNQKRLESLRELAGKENLEYPSVTLPPQPHTKEGVDAYNEVIARVRMWVNLNLWQKLKLSRDDAKPLLRLKGFPSFPLVERQANEVDWWDMVCNVKKLINEKKEDGKVFWQNLAGYKRQEALRPYLSSEEDRKKGKKFARYQLGDLLLHLEKKHGEDWGKVYDEAWERIDKKVEGLSKHIKLEEERRSEDAQSKAALTDWLRAKASFVIEGLKEADKDEFCRCELKLQKWYGDLRGKPFAIEAENSILDISGFSKQYNCAFIWQKDGVKKLNLYLIINYFKGGKLRFKKIKPEAFEANRFYTVINKKSGEIVPMEVNFNFDDPNLIILPLAFGKRQGREFIWNDLLSLETGSLKLANGRVIEKTLYNRRTRQDEPALFVALTFERREVLDSSNIKPMNLIGVDRGENIPAVIALTDPEGCPLSAFKDNQGNPTHILRIGESYKEKQRTIQAKKEVEQRRAGGYSRKYASKAKNLADDMVRNTARDLLYYAVTQDAMLIFENLSRGFGRQGKRTFMAERQYTRMEDWLTAKLAYEGLPSKTYLSKTLAQYTSKTCSNCGFTITSADYDRVLEKLKKTATGWMTTINGKELKVEGQITYYNRYKRQNVVKDLSVELDRLSEESVNNDISSWTKGRSGEALSLLKKRFSHRPVQEKFVCLNCGFETHADEQAALNIARSWLFLRSQEYKKYQTNKTTGNTDKRAFVETWQSFYRKKLKEVWKPAV

SEQ ID NO: 27051 - protein, 978 aa, synthetic construct
  REGION 1..978: note = engineered CasX variant
QEIKRINKIRRRLVKDSNTKKAGKTGPMKTLLVRVMTPDLRERLENLRKKPENIPQPISNTSRANLNKLLTDYTEMKKAILHVYWEEFQKDPVGLMSRVAQPASKKIDQNKLKPEMDEKGNLTTAGFACSQCGQPLFVYKLEQVSEKGKAYTNYFGRCNVAEHEKLILLAQLKPEKDSDEAVTYSLGKFGQRALDFYSIHVTKESTHPVKPLAQIAGNRYASGPVGKALSDACMGTIASFLSKYQDIIIEHQKVVKGNQKRLESLRELAGKENLEYPSVTLPPQPHTKEGVDAYNEVIARVRMWVNLNLWQKLKLSRDDAKPLLRLKGFPSFPLVERQANEVDWWDMVCNVKKLINEKKEDGKVFWQNLAGYKRQEALRPYLSSEEDRKKGKKFARYQLGDLLLHLEKKHGEDWGKVYDEAWERIDKKVEGLSKHIKLEEERRSEDAQSKAALTDWLRAKASFVIEGLKEADKDEFCRCELKLQKWYGDLRGKPFAIEAENSILDISGFSKQYNCAFIWQKDGVKKLNLYLIINYFKGGKLRFKKIKPEAFEANRFYTVINKKSGEIVPMEVNFNFDDPNLIILPLAFGKRQGREFIWNDLLSLETGSLKLANGRVIEKTLYNRRTRQDEPALFVALTFERREVLDSSNIKPMNLIGVDRGENIPAVIALTDPEGCPLSAFKDNLGNPTHILRIGESYKEKQRTIQAKKEVEQRRAGGYSRKYASKAKNLADDMVRNTARDLLYYAVTQDAMLIFENLSRGFGRQGKRTFMAERQYTRMEDWLTAKLAYEGLPSKTYLSKTLAQYTSKTCSNCGFTITSADYDRVLEKLKKTATGWMTTINGKELKVEGQITYYNRYKRQNVVKDLSVELDRLSEESVNNDISSWTKGRSGEALSLLKKRFSHRPVQEKFVCLNCGFETHADEQAALNIARSWLFLRSQEYKKYQTNKTTGNTDKRAFVETWQSFYRKKLKEVWKPAV

SEQ ID NO: 27052 - protein, 978 aa, synthetic construct
  REGION 1..978: note = engineered CasX variant
QEIKRINKIRRRLVKDSNTKKAGKTGPMKTLLVRVMTPDLRERLENLRKKPENIPQPISNTSRANLNKLLTDYTEMKKAILHVYWEEFQKDPVGLMSRVAQPASKKIDQNKLKPEMDEKGNLTTAGFACSQCGQPLFVYKLEQVSEKGKAYTNYFGRCNVAEHEKLILLAQLKPEKDSDEAVTYSLGKFGQRALDFYSIHVTKESTHPVKPLAQIAGNRYASGPVGKALSDACMGTIASFLSKYQDIIIEHQKVVKGNQKRLESLRELAGKENLEYPSVTLPPQPHTKEGVDAYNEVIARVRMWVNLNLWQKLKLSRDDAKPLLRLKGFPSFPLVERQANEVDWWDMVCNVKKLINEKKEDGKVFWQNLAGYKRQEALRPYLSSEEDRKKGKKFARYQLGDLLLHLEKKHGEDWGKVYDEAWERIDKKVEGLSKHIKLEEERRSEDAQSKAALTDWLRAKASFVIEGLKEADKDEFCRCELKLQKWYGDLRGKPFAIEAENSILDISGFSKQYNCAFIWQKDGVKKLNLYLIINYFKGGKLRFKKIKPEAFEANRFYTVINKKSGEIVPMEVNFNFDDPNLIILPLAFGKRQGREFIWNDLLSLETGSLKLANGRVIEKTLYNRRTRQDEPALFVALTFERREVLDSSNIKPMNLIGVDRGENIPAVIALTDPEGCPLSAFKDKLGNPTHILRIGESYKEKQRTIQQKKEVEQRRAGGYSRKYASKAKNLADDMVRNTARDLLYYAVTQDAMLIFENLSRGFGRQGKRTFMAERQYTRMEDWLTAKLAYEGLPSKTYLSKTLAQYTSKTCSNCGFTITSADYDRVLEKLKKTATGWMTTINGKELKVEGQITYYNRYKRQNVVKDLSVELDRLSEESVNNDISSWTKGRSGEALSLLKKRFSHRPVQEKFVCLNCGFETHADEQAALNIARSWLFLRSQEYKKYQTNKTTGNTDKRAFVETWQSFYRKKLKEVWKPAV

SEQ ID NO: 27053 - protein, 978 aa, synthetic construct
  REGION 1..978: note = engineered CasX variant
QEIKRINKIRRRLVKDSNTKKAGKTGPMKTLLVRVMTPDLRERLENLRKKPENIPQPISNTSRANLNKLLTDYTEMKKAILHVYWEEFQKDPVGLMSRVAQPASKKIDQNKLKPEMDEKGNLTTAGFACSQCGQPLFVYKLEQVSEKGKAYTNYFGRCNVAEHEKLILLAQLKPEKDSDEAVTYSLGKFGQRALDFYSIHVTKESTHPVKPLAQIAGNRYASGPVGKALSDACMGTIASFLSKYQDIIIEHQKVVKGNQKRLESLRELAGKENLEYPSVTLPPQPHTKEGVDAYNEVIARVRMWVNLNLWQKLKLSRDDAKPLLRLKGFPSFPLVERQANEVDWWDMVCNVKKLINEKKEDGKVFWQNLAGYKRQEALRPYLSSEEDRKKGKKFARYQLGDLLLHLEKKHGEDWGKVYDEAWERIDKKVEGLSKHIKLEEERRSEDAQSKAALTDWLRAKASFVIEGLKEADKDEFCRCELKLQKWYGDLRGKPFAIEAENSILDISGFSKQYNCAFIWQKDGVKKLNLYLIINYFKGGKLRFKKIKPEAFEANRFYTVINKKSGEIVPMEVNFNFDDPNLIILPLAFGKRQGREFIWNDLLSLETGSLKLANGRVIEKTLYNRRTRQDEPALFVALTFERREVLDSSNIKPMNLIGVDRGENIPAVIALTDPEGCPLSAFKDKLGNPTHILRIGESYKEKQRTIQAKKEVEQRRAGGYSRKYASKAKNLADDMVRNTARDLLYYAVTQDAMLIFENLSRGFGRQGKRTFMAERQYTRMEDWLTAKLAYEGLPSKTYLSKTLAQYTSKTCSNCGFTITSADYDRVLEKLKKTATGWMTTINGKELKVEGQITYYNRYKRQNVVKDLSVELDRLSEESVNNDISSWTKGRSGEALSLLKKRFSHRPVQEKFVCLNCGFETHADEQAALNIARSWLFLRSQEYKKYQTNKTTGNTDKRAFVETWQSFYRKKLKEVWKPAV

SEQ ID NO: 27054 - protein, 978 aa, synthetic construct
  REGION 1..978: note = engineered CasX variant
QEIKRINKIRRRLVKDSNTKKAGKTGPMKTLLVRVMTPDLRERLENLRKKPENIPQPISNTSRANLNKLLTDYTEMKKAILHVYWEEFQKDPVGLMSRVAQPASKKIDQNKLKPEMDEKGNLTTAGFACSQCGQPLFVYKLEQVSEKGKAYTNYFGRCNVAEHEKLILLAQLKPEKDSDEAVTYSLGKFGQRALDFYSIHVTKESTHPVKPLAQIAGNRYASGPVGKALSDACMGTIASFLSKYQDIIIEHQKVVKGNQKRLESLRELAGKENLEYPSVTLPPQPHTKEGVDAYNEVIARVRMWVNLNLWQKLKLSRDDAKPLLRLKGFPSFPLVERQANEVDWWDMVCNVKKLINEKKEDGKVFWQNLAGYKRQEALRPYLSSEEDRKKGKKFARYQLGDLLLHLEKKHGEDWGKVYDEAWERIDKKVEGLSKHIKLEEERRSEDAQSKAALTDWLRAKASFVIEGLKEADKDEFCRCELKLQKWYGDLRGKPFAIEAENSILDISGFSKQYNCAFIWQKDGVKKLNLYLIINYFKGGKLRFKKIKPEAFEANRFYTVINKKSGEIVPMEVNFNFDDPNLIILPLAFGKRQGREFIWNDLLSLETGSLKLANGRVIEKTLYNRRTRQDEPALFVALTFERREVLDSSNIKPMNLIGVDRGENIPAVIALTDPEGCPLSAFKDKLGNPTHILRIGEPYKEKQRTIQAKKEVEQRRAGGYSRKYASKAKNLADDMVRNTARDLLYYAVTQDAMLIFENLSRGFGRQGKRTFMAERQYTRMEDWLTAKLAYEGLPSKTYLSKTLAQYTSKTCSNCGFTITSADYDRVLEKLKKTATGWMTTINGKELKVEGQITYYNRYKRQNVVKDLSVELDRLSEESVNNDISSWTKGRSGEALSLLKKRFSHRPVQEKFVCLNCGFETHADEQAALNIARSWLFLRSQEYKKYQTNKTTGNTDKRAFVETWQSFYRKKLKEVWKPAV

SEQ ID NO: 27055 - protein, 978 aa, synthetic construct
  REGION 1..978: note = engineered CasX variant
QEIKRINKIRRRLVKDSNTKKAGKTGPMKTLLVRVMTPDLRERLENLRKKPENIPQPISNTSRANLNKLLTDYTEMKKAILHVYWEEFQKDPVGLMSRVAQPASKKIDQNKLKPEMDEKGNLTTAGFACSQCGQPLFVYKLEQVSEKGKAYTNYFGRCNVAEHEKLILLAQLKPEKDSDEAVTYSLGKFGQRALDFYSIHVTKESTHPVKPLAQIAGNRYASGPVGKALSDACMGTIASFLSKYQDIIIEHQKVVKGNQKRLESLRELAGKENLEYPSVTLPPQPHTKEGVDAYNEVIARVRMWVNLNLWQKLKLSRDDAKPLLRLKGFPSFPLVERQANEVDWWDMVCNVKKLINEKKEDGKVFWQNLAGYKRQEALRPYLSSEEDRKKGKKFARYQLGDLLLHLEKKHGEDWGKVYDEAWERIDKKVEGLSKHIKLEEERRSEDAQSKAALTDWLRAKASFVIEGLKEADKDEFCRCELKLQKWYGDLRGKPFAIEAENSILDISGFSKQYNCAFIWQKDGVKKLNLYLIINYFKGGKLRFKKIKPEAFEANRFYTVINKKSGEIVPMEVNFNFDDPNLIILPLAFGKRQGREFIWNDLLSLETGSLKLANGRVIEKTLYNRRTRQDEPALFVALTFERREVLDSSNIKPMNLIGVDRGENIPAVIALTDPEGCPLRRFKDSLGNPTHILRIGESYKEKQRTIQAKKEVEQRRAGGYSRKYASKAKNLADDMVRNTARDLLYYAVTQDAMLIFENLSRGFGRQGKRTFMAERQYTRMEDWLTAKLAYEGLPSKTYLSKTLAQYTSKTCSNCGFTITSADYDRVLEKLKKTATGWMTTINGKELKVEGQITYYNRYKRQNVVKDLSVELDRLSEESVNNDISSWTKGRSGEALSLLKKRFSHRPVQEKFVCLNCGFETHADEQAALNIARSWLFLRSQEYKKYQTNKTTGNTDKRAFVETWQSFYRKKLKEVWKPAV

SEQ ID NO: 27056 - protein, 978 aa, synthetic construct
  REGION 1..978: note = engineered CasX variant
QEIKRINKIRRRLVKDSNTKKAGKTGPMKTLLVRVMTPDLRERLENLRKKPENIPQPISNTSRANLNKLLTDYTEMKKAILHVYWEEFQKDPVGLMSRVAQPASKKIDQNKLKPEMDEKGNLTTAGFACSQCGQPLFVYKLEQVSEKGKAYTNYFGRCNVAEHEKLILLAQLKPEKDSDEAVTYSLGKFGQRALDFYSIHVTKESTHPVKPLAQIAGNRYASGPVGKALSDACMGTIASFLSKYQDIIIEHQKVVKGNQKRLESLRELAGKENLEYPSVTLPPQPHTKEGVDAYNEVIARVRMWVNLNLWQKLKLSRDDAKPLLRLKGFPSFPLVERQANEVDWWDMVCNVKKLINEKKEDGKVFWQNLAGYKRQEALRPYLSSEEDRKKGKKFARYQLGDLLLHLEKKHGEDWGKVYDEAWERIDKKVEGLSKHIKLEEERRSEDAQSKAALTDWLRAKASFVIEGLKEADKDEFCRCELKLQKWYGDLRGKPFAIEAENSILDISGFSKQYNCAFIWQKDGVKKLNLYLIINYFKGGKLRFKKIKPEAFEANRFYTVINKKSGEIVPMEVNFNFDDPNLIILPLAFGKRQGREFIWNDLLSLETGSLKLANGRVIEKTLYNRRTRQDEPALFVALTFERREVLDSSNIKPMNLIGVDRGENIPAVIALTDPEGCPLRRFKDSLGNPTHILRIGENYKEKQRTIQAKKEVEQRRAGGYSRKYASKAKNLADDMVRNTARDLLYYAVTQDAMLIFENLSRGFGRQGKRTFMAERQYTRMEDWLTAKLAYEGLPSKTYLSKTLAQYTSKTCSNCGFTITSADYDRVLEKLKKTATGWMTTINGKELKVEGQITYYNRYKRQNVVKDLSVELDRLSEESVNNDISSWTKGRSGEALSLLKKRFSHRPVQEKFVCLNCGFETHADEQAALNIARSWLFLRSQEYKKYQTNKTTGNTDKRAFVETWQSFYRKKLKEVWKPAV

SEQ ID NO: 27057 - protein, 978 aa, synthetic construct
  REGION 1..978: note = engineered CasX variant
QEIKRINKIRRRLVKDSNTKKAGKTGPMKTLLVRVMTPDLRERLENLRKKPENIPQPISNTSRANLNKLLTDYTEMKKAILHVYWEEFQKDPVGLMSRVAQPASKKIDQNKLKPEMDEKGNLTTAGFACSQCGQPLFVYKLEQVSEKGKAYTNYFGRCNVAEHEKLILLAQLKPEKDSDEAVTYSLGKFGQRALDFYSIHVTKESTHPVKPLAQIAGNRYASGPVGKALSDACMGTIASFLSKYQDIIIEHQKVVKGNQKRLESLRELAGKENLEYPSVTLPPQPHTKEGVDAYNEVIARVRMWVNLNLWQKLKLSRDDAKPLLRLKGFPSFPLVERQANEVDWWDMVCNVKKLINEKKEDGKVFWQNLAGYKRQEALRPYLSSEEDRKKGKKFARYQLGDLLLHLEKKHGEDWGKVYDEAWERIDKKVEGLSKHIKLEEERRSEDAQSKAALTDWLRAKASFVIEGLKEADKDEFCRCELKLQKWYGDLRGKPFAIEAENSILDISGFSKQYNCAFIWQKDGVKKLNLYLIINYFKGGKLRFKKIKPEAFEANRFYTVINKKSGEIVPMEVNFNFDDPNLIILPLAFGKRQGREFIWNDLLSLETGSLKLANGRVIEKTLYNRRTRQDEPALFVALTFERREVLDSSNIKPMNLIGVDRGENIPAVIALTDPEGCPLRRFKDSHGNPTHILRIGESYKEKQRTIQAKKEVEQRRAGGYSRKYASKAKNLADDMVRNTARDLLYYAVTQDAMLIFENLSRGFGRQGKRTFMAERQYTRMEDWLTAKLAYEGLPSKTYLSKTLAQYTSKTCSNCGFTITSADYDRVLEKLKKTATGWMTTINGKELKVEGQITYYNRYKRQNVVKDLSVELDRLSEESVNNDISSWTKGRSGEALSLLKKRFSHRPVQEKFVCLNCGFETHADEQAALNIARSWLFLRSQEYKKYQTNKTTGNTDKRAFVETWQSFYRKKLKEVWKPAV

SEQ ID NO: 27058 - protein, 978 aa, synthetic construct
  REGION 1..978: note = engineered CasX variant
QEIKRINKIRRRLVKDSNTKKAGKTGPMKTLLVRVMTPDLRERLENLRKKPENIPQPISNTSRANLNKLLTDYTEMKKAILHVYWEEFQKDPVGLMSRVAQPASKKIDQNKLKPEMDEKGNLTTAGFACSQCGQPLFVYKLEQVSEKGKAYTNYFGRCNVAEHEKLILLAQLKPEKDSDEAVTYSLGKFGQRALDFYSIHVTKESTHPVKPLAQIAGNRYASGPVGKALSDACMGTIASFLSKYQDIIIEHQKVVKGNQKRLESLRELAGKENLEYPSVTLPPQPHTKEGVDAYNEVIARVRMWVNLNLWQKLKLSRDDAKPLLRLKGFPSFPLVERQANEVDWWDMVCNVKKLINEKKEDGKVFWQNLAGYKRQEALRPYLSSEEDRKKGKKFARYQLGDLLLHLEKKHGEDWGKVYDEAWERIDKKVEGLSKHIKLEEERRSEDAQSKAALTDWLRAKASFVIEGLKEADKDEFCRCELKLQKWYGDLRGKPFAIEAENSILDISGFSKQYNCAFIWQKDGVKKLNLYLIINYFKGGKLRFKKIKPEAFEANRFYTVINKKSGEIVPMEVNFNFDDPNLIILPLAFGKRQGREFIWNDLLSLETGSLKLANGRVIEKTLYNRRTRQDEPALFVALTFERREVLDSSNIKPMNLIGVDRGENIPAVIALTDPEGCPLRRFKDSHGNPTHILRIGENYKEKQRTIQAKKEVEQRRAGGYSRKYASKAKNLADDMVRNTARDLLYYAVTQDAMLIFENLSRGFGRQGKRTFMAERQYTRMEDWLTAKLAYEGLPSKTYLSKTLAQYTSKTCSNCGFTITSADYDRVLEKLKKTATGWMTTINGKELKVEGQITYYNRYKRQNVVKDLSVELDRLSEESVNNDISSWTKGRSGEALSLLKKRFSHRPVQEKFVCLNCGFETHADEQAALNIARSWLFLRSQEYKKYQTNKTTGNTDKRAFVETWQSFYRKKLKEVWKPAV

SEQ ID NO: 27059 - protein, 978 aa, synthetic construct
  REGION 1..978: note = engineered CasX variant
QEIKRINKIRRRLVKDSNTKKAGKTGPMKTLLVRVMTPDLRERLENLRKKPENIPQPISNTSRANLNKLLTDYTEMKKAILHVYWEEFQKDPVGLMSRVAQPASKKIDQNKLKPEMDEKGNLTTAGFACSQCGQPLFVYKLEQVSEKGKAYTNYFGRCNVAEHEKLILLAQLKPEKDSDEAVTYSLGKFGQRALDFYSIHVTKESTHPVKPLAQIAGNRYASGPVGKALSDACMGTIASFLSKYQDIIIEHQKVVKGNQKRLESLRELAGKENLEYPSVTLPPQPHTKEGVDAYNEVIARVRMWVNLNLWQKLKLSRDDAKPLLRLKGFPSFPLVERQANEVDWWDMVCNVKKLINEKKEDGKVFWQNLAGYKRQEALRPYLSSEEDRKKGKKFARYQLGDLLLHLEKKHGEDWGKVYDEAWERIDKKVEGLSKHIKLEEERRSEDAQSKAALTDWLRAKASFVIEGLKEADKDEFCRCELKLQKWYGDLRGKPFAIEAENSILDISGFSKQYNCAFIWQKDGVKKLNLYLIINYFKGGKLRFKKIKPEAFEANRFYTVINKKSGEIVPMEVNFNFDDPNLIILPLAFGKRQGREFIWNDLLSLETGSLKLANGRVIEKTLYNRRTRQDEPALFVALTFERREVLDSSNIKPMNLIGVDRGENIPAVIALTDPEGCPLRNFKDSLGNPTHILRIGESYKEKQRTIQAKKEVEQRRAGGYSRKYASKAKNLADDMVRNTARDLLYYAVTQDAMLIFENLSRGFGRQGKRTFMAERQYTRMEDWLTAKLAYEGLPSKTYLSKTLAQYTSKTCSNCGFTITSADYDRVLEKLKKTATGWMTTINGKELKVEGQITYYNRYKRQNVVKDLSVELDRLSEESVNNDISSWTKGRSGEALSLLKKRFSHRPVQEKFVCLNCGFETHADEQAALNIARSWLFLRSQEYKKYQTNKTTGNTDKRAFVETWQSFYRKKLKEVWKPAV

SEQ ID NO: 27060 - protein, 978 aa, synthetic construct
  REGION 1..978: note = engineered CasX variant
QEIKRINKIRRRLVKDSNTKKAGKTGPMKTLLVRVMTPDLRERLENLRKKPENIPQPISNTSRANLNKLLTDYTEMKKAILHVYWEEFQKDPVGLMSRVAQPASKKIDQNKLKPEMDEKGNLTTAGFACSQCGQPLFVYKLEQVSEKGKAYTNYFGRCNVAEHEKLILLAQLKPEKDSDEAVTYSLGKFGQRALDFYSIHVTKESTHPVKPLAQIAGNRYASGPVGKALSDACMGTIASFLSKYQDIIIEHQKVVKGNQKRLESLRELAGKENLEYPSVTLPPQPHTKEGVDAYNEVIARVRMWVNLNLWQKLKLSRDDAKPLLRLKGFPSFPLVERQANEVDWWDMVCNVKKLINEKKEDGKVFWQNLAGYKRQEALRPYLSSEEDRKKGKKFARYQLGDLLLHLEKKHGEDWGKVYDEAWERIDKKVEGLSKHIKLEEERRSEDAQSKAALTDWLRAKASFVIEGLKEADKDEFCRCELKLQKWYGDLRGKPFAIEAENSILDISGFSKQYNCAFIWQKDGVKKLNLYLIINYFKGGKLRFKKIKPEAFEANRFYTVINKKSGEIVPMEVNFNFDDPNLIILPLAFGKRQGREFIWNDLLSLETGSLKLANGRVIEKTLYNRRTRQDEPALFVALTFERREVLDSSNIKPMNLIGVDRGENIPAVIALTDPEGCPLPWFKDSLGNPTHILRIGESYKEKQRTIQAKKEVEQRRAGGYSRKYASKAKNLADDMVRNTARDLLYYAVTQDAMLIFENLSRGFGRQGKRTFMAERQYTRMEDWLTAKLAYEGLPSKTYLSKTLAQYTSKTCSNCGFTITSADYDRVLEKLKKTATGWMTTINGKELKVEGQITYYNRYKRQNVVKDLSVELDRLSEESVNNDISSWTKGRSGEALSLLKKRFSHRPVQEKFVCLNCGFETHADEQAALNIARSWLFLRSQEYKKYQTNKTTGNTDKRAFVETWQSFYRKKLKEVWKPAV

SEQ ID NO: 27061 - protein, 978 aa, synthetic construct
  REGION 1..978: note = engineered CasX variant
QEIKRINKIRRRLVKDSNTKKAGKTGPMKTLLVRVMTPDLRERLENLRKKPENIPQPISNTSRANLNKLLTDYTEMKKAILHVYWEEFQKDPVGLMSRVAQPASKKIDQNKLKPEMDEKGNLTTAGFACSQCGQPLFVYKLEQVSEKGKAYTNYFGRCNVAEHEKLILLAQLKPEKDSDEAVTYSLGKFGQRALDFYSIHVTKESTHPVKPLAQIAGNRYASGPVGKALSDACMGTIASFLSKYQDIIIEHQKVVKGNQKRLESLRELAGKENLEYPSVTLPPQPHTKEGVDAYNEVIARVRMWVNLNLWQKLKLSRDDAKPLLRLKGFPSFPLVERQANEVDWWDMVCNVKKLINEKKEDGKVFWQNLAGYKRQEALRPYLSSEEDRKKGKKFARYQLGDLLLHLEKKHGEDWGKVYDEAWERIDKKVEGLSKHIKLEEERRSEDAQSKAALTDWLRAKASFVIEGLKEADKDEFCRCELKLQKWYGDLRGKPFAIEAENSILDISGFSKQYNCAFIWQKDGVKKLNLYLIINYFKGGKLRFKKIKPEAFEANRFYTVINKKSGEIVPMEVNFNFDDPNLIILPLAFGKRQGREFIWNDLLSLETGSLKLANGRVIEKTLYNRRTRQDEPALFVALTFERREVLDSSNIKPMNLIGVDRGENIPAVIALTDPEGCPLPWFKDSEGNPTHILRIGESYKEKQRTIQAKKEVEQRRAGGYSRKYASKAKNLADDMVRNTARDLLYYAVTQDAMLIFENLSRGFGRQGKRTFMAERQYTRMEDWLTAKLAYEGLPSKTYLSKTLAQYTSKTCSNCGFTITSADYDRVLEKLKKTATGWMTTINGKELKVEGQITYYNRYKRQNVVKDLSVELDRLSEESVNNDISSWTKGRSGEALSLLKKRFSHRPVQEKFVCLNCGFETHADEQAALNIARSWLFLRSQEYKKYQTNKTTGNTDKRAFVETWQSFYRKKLKEVWKPAV

SEQ ID NO: 27062 - protein, 978 aa, synthetic construct
  REGION 1..978: note = engineered CasX variant
QEIKRINKIRRRLVKDSNTKKAGKTGPMKTLLVRVMTPDLRERLENLRKKPENIPQPISNTSRANLNKLLTDYTEMKKAILHVYWEEFQKDPVGLMSRVAQPASKKIDQNKLKPEMDEKGNLTTAGFACSQCGQPLFVYKLEQVSEKGKAYTNYFGRCNVAEHEKLILLAQLKPEKDSDEAVTYSLGKFGQRALDFYSIHVTKESTHPVKPLAQIAGNRYASGPVGKALSDACMGTIASFLSKYQDIIIEHQKVVKGNQKRLESLRELAGKENLEYPSVTLPPQPHTKEGVDAYNEVIARVRMWVNLNLWQKLKLSRDDAKPLLRLKGFPSFPLVERQANEVDWWDMVCNVKKLINEKKEDGKVFWQNLAGYKRQEALRPYLSSEEDRKKGKKFARYQLGDLLLHLEKKHGEDWGKVYDEAWERIDKKVEGLSKHIKLEEERRSEDAQSKAALTDWLRAKASFVIEGLKEADKDEFCRCELKLQKWYGDLRGKPFAIEAENSILDISGFSKQYNCAFIWQKDGVKKLNLYLIINYFKGGKLRFKKIKPEAFEANRFYTVINKKSGEIVPMEVNFNFDDPNLIILPLAFGKRQGREFIWNDLLSLETGSLKLANGRVIEKTLYNRRTRQDEPALFVALTFERREVLDSSNIKPMNLIGVDRGENIPAVIALTDPEGCPLPRFKDSLGNPTHILRIGESYKEKQRTIQAKKEVEQRRAGGYSRKYASKAKNLADDMVRNTARDLLYYAVTQDAMLIFENLSRGFGRQGKRTFMAERQYTRMEDWLTAKLAYEGLPSKTYLSKTLAQYTSKTCSNCGFTITSADYDRVLEKLKKTATGWMTTINGKELKVEGQITYYNRYKRQNVVKDLSVELDRLSEESVNNDISSWTKGRSGEALSLLKKRFSHRPVQEKFVCLNCGFETHADEQAALNIARSWLFLRSQEYKKYQTNKTTGNTDKRAFVETWQSFYRKKLKEVWKPAV

SEQ ID NO: 27063 - protein, 978 aa, synthetic construct
  REGION 1..978: note = engineered CasX variant
QEIKRINKIRRRLVKDSNTKKAGKTGPMKTLLVRVMTPDLRERLENLRKKPENIPQPISNTSRANLNKLLTDYTEMKKAILHVYWEEFQKDPVGLMSRVAQPASKKIDQNKLKPEMDEKGNLTTAGFACSQCGQPLFVYKLEQVSEKGKAYTNYFGRCNVAEHEKLILLAQLKPEKDSDEAVTYSLGKFGQRALDFYSIHVTKESTHPVKPLAQIAGNRYASGPVGKALSDACMGTIASFLSKYQDIIIEHQKVVKGNQKRLESLRELAGKENLEYPSVTLPPQPHTKEGVDAYNEVIARVRMWVNLNLWQKLKLSRDDAKPLLRLKGFPSFPLVERQANEVDWWDMVCNVKKLINEKKEDGKVFWQNLAGYKRQEALRPYLSSEEDRKKGKKFARYQLGDLLLHLEKKHGEDWGKVYDEAWERIDKKVEGLSKHIKLEEERRSEDAQSKAALTDWLRAKASFVIEGLKEADKDEFCRCELKLQKWYGDLRGKPFAIEAENSILDISGFSKQYNCAFIWQKDGVKKLNLYLIINYFKGGKLRFKKIKPEAFEANRFYTVINKKSGEIVPMEVNFNFDDPNLIILPLAFGKRQGREFIWNDLLSLETGSLKLANGRVIEKTLYNRRTRQDEPALFVALTFERREVLDSSNIKPMNLIGVDRGENIPAVIALTDPEGCPLPRFKDSLGNPTHILRIGESYKEKQRTIQAKKEVEQRAAGGYSRKYASKAKNLADDMVRNTARDLLYYAVTQDAMLIFENLSRGFGRQGKRTFMAERQYTRMEDWLTAKLAYEGLPSKTYLSKTLAQYTSKTCSNCGFTITSADYDRVLEKLKKTATGWMTTINGKELKVEGQITYYNRYKRQNVVKDLSVELDRLSEESVNNDISSWTKGRSGEALSLLKKRFSHRPVQEKFVCLNCGFETHADEQAALNIARSWLFLRSQEYKKYQTNKTTGNTDKRAFVETWQSFYRKKLKEVWKPAV

SEQ ID NO: 27064 - protein, 978 aa, synthetic construct
  REGION 1..978: note = engineered CasX variant
QEIKRINKIRRRLVKDSNTKKAGKTGPMKTLLVRVMTPDLRERLENLRKKPENIPQPISNTSRANLNKLLTDYTEMKKAILHVYWEEFQKDPVGLMSRVAQPASKKIDQNKLKPEMDEKGNLTTAGFACSQCGQPLFVYKLEQVSEKGKAYTNYFGRCNVAEHEKLILLAQLKPEKDSDEAVTYSLGKFGQRALDFYSIHVTKESTHPVKPLAQIAGNRYASGPVGKALSDACMGTIASFLSKYQDIIIEHQKVVKGNQKRLESLRELAGKENLEYPSVTLPPQPHTKEGVDAYNEVIARVRMWVNLNLWQKLKLSRDDAKPLLRLKGFPSFPLVERQANEVDWWDMVCNVKKLINEKKEDGKVFWQNLAGYKRQEALRPYLSSEEDRKKGKKFARYQLGDLLLHLEKKHGEDWGKVYDEAWERIDKKVEGLSKHIKLEEERRSEDAQSKAALTDWLRAKASFVIEGLKEADKDEFCRCELKLQKWYGDLRGKPFAIEAENSILDISGFSKQYNCAFIWQKDGVKKLNLYLIINYFKGGKLRFKKIKPEAFEANRFYTVINKKSGEIVPMEVNFNFDDPNLIILPLAFGKRQGREFIWNDLLSLETGSLKLANGRVIEKTLYNRRTRQDEPALFVALTFERREVLDSSNIKPMNLIGVDRGENIPAVIALTDPEGCPLPRFKDSLGNPTHILRIGESYKEKQQTIQAKKEVEQRRAGGYSRKYASKAKNLADDMVRNTARDLLYYAVTQDAMLIFENLSRGFGRQGKRTFMAERQYTRMEDWLTAKLAYEGLPSKTYLSKTLAQYTSKTCSNCGFTITSADYDRVLEKLKKTATGWMTTINGKELKVEGQITYYNRYKRQNVVKDLSVELDRLSEESVNNDISSWTKGRSGEALSLLKKRFSHRPVQEKFVCLNCGFETHADEQAALNIARSWLFLRSQEYKKYQTNKTTGNTDKRAFVETWQSFYRKKLKEVWKPAV

SEQ ID NO: 27065 - protein, 978 aa, synthetic construct
  REGION 1..978: note = engineered CasX variant
QEIKRINKIRRRLVKDSNTKKAGKTGPMKTLLVRVMTPDLRERLENLRKKPENIPQPISNTSRANLNKLLTDYTEMKKAILHVYWEEFQKDPVGLMSRVAQPASKKIDQNKLKPEMDEKGNLTTAGFACSQCGQPLFVYKLEQVSEKGKAYTNYFGRCNVAEHEKLILLAQLKPEKDSDEAVTYSLGKFGQRALDFYSIHVTKESTHPVKPLAQIAGNRYASGPVGKALSDACMGTIASFLSKYQDIIIEHQKVVKGNQKRLESLRELAGKENLEYPSVTLPPQPHTKEGVDAYNEVIARVRMWVNLNLWQKLKLSRDDAKPLLRLKGFPSFPLVERQANEVDWWDMVCNVKKLINEKKEDGKVFWQNLAGYKRQEALRPYLSSEEDRKKGKKFARYQLGDLLLHLEKKHGEDWGKVYDEAWERIDKKVEGLSKHIKLEEERRSEDAQSKAALTDWLRAKASFVIEGLKEADKDEFCRCELKLQKWYGDLRGKPFAIEAENSILDISGFSKQYNCAFIWQKDGVKKLNLYLIINYFKGGKLRFKKIKPEAFEANRFYTVINKKSGEIVPMEVNFNFDDPNLIILPLAFGKRQGREFIWNDLLSLETGSLKLANGRVIEKTLYNRRTRQDEPALFVALTFERREVLDSSNIKPMNLIGVDRGENIPAVIALTDPEGCPLPRFKDSEGNPTHILRIGESYKEKQRTIQAKKEVEQRRAGGYSRKYASKAKNLADDMVRNTARDLLYYAVTQDAMLIFENLSRGFGRQGKRTFMAERQYTRMEDWLTAKLAYEGLPSKTYLSKTLAQYTSKTCSNCGFTITSADYDRVLEKLKKTATGWMTTINGKELKVEGQITYYNRYKRQNVVKDLSVELDRLSEESVNNDISSWTKGRSGEALSLLKKRFSHRPVQEKFVCLNCGFETHADEQAALNIARSWLFLRSQEYKKYQTNKTTGNTDKRAFVETWQSFYRKKLKEVWKPAV

SEQ ID NO: 27066 - protein, 978 aa, synthetic construct
  REGION 1..978: note = engineered CasX variant
QEIKRINKIRRRLVKDSNTKKAGKTGPMKTLLVRVMTPDLRERLENLRKKPENIPQPISNTSRANLNKLLTDYTEMKKAILHVYWEEFQKDPVGLMSRVAQPASKKIDQNKLKPEMDEKGNLTTAGFACSQCGQPLFVYKLEQVSEKGKAYTNYFGRCNVAEHEKLILLAQLKPEKDSDEAVTYSLGKFGQRALDFYSIHVTKESTHPVKPLAQIAGNRYASGPVGKALSDACMGTIASFLSKYQDIIIEHQKVVKGNQKRLESLRELAGKENLEYPSVTLPPQPHTKEGVDAYNEVIARVRMWVNLNLWQKLKLSRDDAKPLLRLKGFPSFPLVERQANEVDWWDMVCNVKKLINEKKEDGKVFWQNLAGYKRQEALRPYLSSEEDRKKGKKFARYQLGDLLLHLEKKHGEDWGKVYDEAWERIDKKVEGLSKHIKLEEERRSEDAQSKAALTDWLRAKASFVIEGLKEADKDEFCRCELKLQKWYGDLRGKPFAIEAENSILDISGFSKQYNCAFIWQKDGVKKLNLYLIINYFKGGKLRFKKIKPEAFEANRFYTVINKKSGEIVPMEVNFNFDDPNLIILPLAFGKRQGREFIWNDLLSLETGSLKLANGRVIEKTLYNRRTRQDEPALFVALTFERREVLDSSNIKPMNLIGVDRGENIPAVIALTDPEGCPLNRFKDSLGNPTHILRIHESYKEKQRTIQAKKEVEQRRAGGYSRKYASKAKNLADDMVRNTARDLLYYAVTQDAMLIFENLSRGFGRQGKRTFMAERQYTRMEDWLTAKLAYEGLPSKTYLSKTLAQYTSKTCSNCGFTITSADYDRVLEKLKKTATGWMTTINGKELKVEGQITYYNRYKRQNVVKDLSVELDRLSEESVNNDISSWTKGRSGEALSLLKKRFSHRPVQEKFVCLNCGFETHADEQAALNIARSWLFLRSQEYKKYQTNKTTGNTDKRAFVETWQSFYRKKLKEVWKPAV

SEQ ID NO: 27067 - protein, 978 aa, synthetic construct
  REGION 1..978: note = engineered CasX variant
QEIKRINKIRRRLVKDSNTKKAGKTGPMKTLLVRVMTPDLRERLENLRKKPENIPQPISNTSRANLNKLLTDYTEMKKAILHVYWEEFQKDPVGLMSRVAQPASKKIDQNKLKPEMDEKGNLTTAGFACSQCGQPLFVYKLEQVSEKGKAYTNYFGRCNVAEHEKLILLAQLKPEKDSDEAVTYSLGKFGQRALDFYSIHVTKESTHPVKPLAQIAGNRYASGPVGKALSDACMGTIASFLSKYQDIIIEHQKVVKGNQKRLESLRELAGKENLEYPSVTLPPQPHTKEGVDAYNEVIARVRMWVNLNLWQKLKLSRDDAKPLLRLKGFPSFPLVERQANEVDWWDMVCNVKKLINEKKEDGKVFWQNLAGYKRQEALRPYLSSEEDRKKGKKFARYQLGDLLLHLEKKHGEDWGKVYDEAWERIDKKVEGLSKHIKLEEERRSEDAQSKAALTDWLRAKASFVIEGLKEADKDEFCRCELKLQKWYGDLRGKPFAIEAENSILDISGFSKQYNCAFIWQKDGVKKLNLYLIINYFKGGKLRFKKIKPEAFEANRFYTVINKKSGEIVPMEVNFNFDDPNLIILPLAFGKRQGREFIWNDLLSLETGSLKLANGRVIEKTLYNRRTRQDEPALFVALTFERREVLDSSNIKPMNLIGVDRGENIPAVIALTDPEGCPLNRFKDSLGNPTHILRIGYSYKEKQRTIQAKKEVEQRRAGGYSRKYASKAKNLADDMVRNTARDLLYYAVTQDAMLIFENLSRGFGRQGKRTFMAERQYTRMEDWLTAKLAYEGLPSKTYLSKTLAQYTSKTCSNCGFTITSADYDRVLEKLKKTATGWMTTINGKELKVEGQITYYNRYKRQNVVKDLSVELDRLSEESVNNDISSWTKGRSGEALSLLKKRFSHRPVQEKFVCLNCGFETHADEQAALNIARSWLFLRSQEYKKYQTNKTTGNTDKRAFVETWQSFYRKKLKEVWKPAV

SEQ ID NO: 27068 - protein, 978 aa, synthetic construct
  REGION 1..978: note = engineered CasX variant
QEIKRINKIRRRLVKDSNTKKAGKTGPMKTLLVRVMTPDLRERLENLRKKPENIPQPISNTSRANLNKLLTDYTEMKKAILHVYWEEFQKDPVGLMSRVAQPASKKIDQNKLKPEMDEKGNLTTAGFACSQCGQPLFVYKLEQVSEKGKAYTNYFGRCNVAEHEKLILLAQLKPEKDSDEAVTYSLGKFGQRALDFYSIHVTKESTHPVKPLAQIAGNRYASGPVGKALSDACMGTIASFLSKYQDIIIEHQKVVKGNQKRLESLRELAGKENLEYPSVTLPPQPHTKEGVDAYNEVIARVRMWVNLNLWQKLKLSRDDAKPLLRLKGFPSFPLVERQANEVDWWDMVCNVKKLINEKKEDGKVFWQNLAGYKRQEALRPYLSSEEDRKKGKKFARYQLGDLLLHLEKKHGEDWGKVYDEAWERIDKKVEGLSKHIKLEEERRSEDAQSKAALTDWLRAKASFVIEGLKEADKDEFCRCELKLQKWYGDLRGKPFAIEAENSILDISGFSKQYNCAFIWQKDGVKKLNLYLIINYFKGGKLRFKKIKPEAFEANRFYTVINKKSGEIVPMEVNFNFDDPNLIILPLAFGKRQGREFIWNDLLSLETGSLKLANGRVIEKTLYNRRTRQDEPALFVALTFERREVLDSSNIKPMNLIGVDRGENIPAVIALTDPEGCPLNRFKDSLGNPTHILRIGYSYKEKQRTIQAKKELEQRRAGGYSRKYASKAKNLADDMVRNTARDLLYYAVTQDAMLIFENLSRGFGRQGKRTFMAERQYTRMEDWLTAKLAYEGLPSKTYLSKTLAQYTSKTCSNCGFTITSADYDRVLEKLKKTATGWMTTINGKELKVEGQITYYNRYKRQNVVKDLSVELDRLSEESVNNDISSWTKGRSGEALSLLKKRFSHRPVQEKFVCLNCGFETHADEQAALNIARSWLFLRSQEYKKYQTNKTTGNTDKRAFVETWQSFYRKKLKEVWKPAV

SEQ ID NO: 27069 - protein, 978 aa, synthetic construct
  REGION 1..978: note = engineered CasX variant
QEIKRINKIRRRLVKDSNTKKAGKTGPMKTLLVRVMTPDLRERLENLRKKPENIPQPISNTSRANLNKLLTDYTEMKKAILHVYWEEFQKDPVGLMSRVAQPASKKIDQNKLKPEMDEKGNLTTAGFACSQCGQPLFVYKLEQVSEKGKAYTNYFGRCNVAEHEKLILLAQLKPEKDSDEAVTYSLGKFGQRALDFYSIHVTKESTHPVKPLAQIAGNRYASGPVGKALSDACMGTIASFLSKYQDIIIEHQKVVKGNQKRLESLRELAGKENLEYPSVTLPPQPHTKEGVDAYNEVIARVRMWVNLNLWQKLKLSRDDAKPLLRLKGFPSFPLVERQANEVDWWDMVCNVKKLINEKKEDGKVFWQNLAGYKRQEALRPYLSSEEDRKKGKKFARYQLGDLLLHLEKKHGEDWGKVYDEAWERIDKKVEGLSKHIKLEEERRSEDAQSKAALTDWLRAKASFVIEGLKEADKDEFCRCELKLQKWYGDLRGKPFAIEAENSILDISGFSKQYNCAFIWQKDGVKKLNLYLIINYFKGGKLRFKKIKPEAFEANRFYTVINKKSGEIVPMEVNFNFDDPNLIILPLAFGKRQGREFIWNDLLSLETGSLKLANGRVIEKTLYNRRTRQDEPALFVALTFERREVLDSSNIKPMNLIGVDRGENIPAVIALTDPEGCPLNRFKDSLGNPTHILRIGESYKEKQRTIQAKKEVEQRRAGGYSRKYASKAKNLADDMVRNTARDLLYYAVTQDAMLIFENLSRGFGRQGKRTFMAERQYTRMEDWLTAKLAYEGLPSKTYLSKTLAQYTSKTCSNCGFTITSADYDRVLEKLKKTATGWMTTINGKELKVEGQITYYNRYKRQNVVKDLSVELDRLSEESVNNDISSWTKGRSGEALSLLKKRFSHRPVQEKFVCLNCGFETHADEQAALNIARSWLFLRSQEYKKYQTNKTTGNTDKRAFVETWQSFYRKKLKEVWKPAV

SEQ ID NO: 27070 - protein, 978 aa, synthetic construct
  REGION 1..978: note = engineered CasX variant
QEIKRINKIRRRLVKDSNTKKAGKTGPMKTLLVRVMTPDLRERLENLRKKPENIPQPISNTSRANLNKLLTDYTEMKKAILHVYWEEFQKDPVGLMSRVAQPASKKIDQNKLKPEMDEKGNLTTAGFACSQCGQPLFVYKLEQVSEKGKAYTNYFGRCNVAEHEKLILLAQLKPEKDSDEAVTYSLGKFGQRALDFYSIHVTKESTHPVKPLAQIAGNRYASGPVGKALSDACMGTIASFLSKYQDIIIEHQKVVKGNQKRLESLRELAGKENLEYPSVTLPPQPHTKEGVDAYNEVIARVRMWVNLNLWQKLKLSRDDAKPLLRLKGFPSFPLVERQANEVDWWDMVCNVKKLINEKKEDGKVFWQNLAGYKRQEALRPYLSSEEDRKKGKKFARYQLGDLLLHLEKKHGEDWGKVYDEAWERIDKKVEGLSKHIKLEEERRSEDAQSKAALTDWLRAKASFVIEGLKEADKDEFCRCELKLQKWYGDLRGKPFAIEAENSILDISGFSKQYNCAFIWQKDGVKKLNLYLIINYFKGGKLRFKKIKPEAFEANRFYTVINKKSGEIVPMEVNFNFDDPNLIILPLAFGKRQGREFIWNDLLSLETGSLKLANGRVIEKTLYNRRTRQDEPALFVALTFERREVLDSSNIKPMNLIGVDRGENIPAVIALTDPEGCPLNRFKDSLGNPTHILRIGESYKEKQRTIQAKKELEQRRAGGYSRKYASKAKNLADDMVRNTARDLLYYAVTQDAMLIFENLSRGFGRQGKRTFMAERQYTRMEDWLTAKLAYEGLPSKTYLSKTLAQYTSKTCSNCGFTITSADYDRVLEKLKKTATGWMTTINGKELKVEGQITYYNRYKRQNVVKDLSVELDRLSEESVNNDISSWTKGRSGEALSLLKKRFSHRPVQEKFVCLNCGFETHADEQAALNIARSWLFLRSQEYKKYQTNKTTGNTDKRAFVETWQSFYRKKLKEVWKPAV

SEQ ID NO: 27071 - protein, 978 aa, synthetic construct
  REGION 1..978: note = engineered CasX variant
QEIKRINKIRRRLVKDSNTKKAGKTGPMKTLLVRVMTPDLRERLENLRKKPENIPQPISNTSRANLNKLLTDYTEMKKAILHVYWEEFQKDPVGLMSRVAQPASKKIDQNKLKPEMDEKGNLTTAGFACSQCGQPLFVYKLEQVSEKGKAYTNYFGRCNVAEHEKLILLAQLKPEKDSDEAVTYSLGKFGQRALDFYSIHVTKESTHPVKPLAQIAGNRYASGPVGKALSDACMGTIASFLSKYQDIIIEHQKVVKGNQKRLESLRELAGKENLEYPSVTLPPQPHTKEGVDAYNEVIARVRMWVNLNLWQKLKLSRDDAKPLLRLKGFPSFPLVERQANEVDWWDMVCNVKKLINEKKEDGKVFWQNLAGYKRQEALRPYLSSEEDRKKGKKFARYQLGDLLLHLEKKHGEDWGKVYDEAWERIDKKVEGLSKHIKLEEERRSEDAQSKAALTDWLRAKASFVIEGLKEADKDEFCRCELKLQKWYGDLRGKPFAIEAENSILDISGFSKQYNCAFIWQKDGVKKLNLYLIINYFKGGKLRFKKIKPEAFEANRFYTVINKKSGEIVPMEVNFNFDDPNLIILPLAFGKRQGREFIWNDLLSLETGSLKLANGRVIEKTLYNRRTRQDEPALFVALTFERREVLDSSNIKPMNLIGVDRGENIPAVIALTDPEGCPLNRFKDSLGNHTHILRIGESYKEKQRTIQAKKEVEQRRAGGYSRKYASKAKNLADDMVRNTARDLLYYAVTQDAMLIFENLSRGFGRQGKRTFMAERQYTRMEDWLTAKLAYEGLPSKTYLSKTLAQYTSKTCSNCGFTITSADYDRVLEKLKKTATGWMTTINGKELKVEGQITYYNRYKRQNVVKDLSVELDRLSEESVNNDISSWTKGRSGEALSLLKKRFSHRPVQEKFVCLNCGFETHADEQAALNIARSWLFLRSQEYKKYQTNKTTGNTDKRAFVETWQSFYRKKLKEVWKPAV

SEQ ID NO: 27072 - protein, 978 aa, synthetic construct
  REGION 1..978: note = engineered CasX variant
QEIKRINKIRRRLVKDSNTKKAGKTGPMKTLLVRVMTPDLRERLENLRKKPENIPQPISNTSRANLNKLLTDYTEMKKAILHVYWEEFQKDPVGLMSRVAQPASKKIDQNKLKPEMDEKGNLTTAGFACSQCGQPLFVYKLEQVSEKGKAYTNYFGRCNVAEHEKLILLAQLKPEKDSDEAVTYSLGKFGQRALDFYSIHVTKESTHPVKPLAQIAGNRYASGPVGKALSDACMGTIASFLSKYQDIIIEHQKVVKGNQKRLESLRELAGKENLEYPSVTLPPQPHTKEGVDAYNEVIARVRMWVNLNLWQKLKLSRDDAKPLLRLKGFPSFPLVERQANEVDWWDMVCNVKKLINEKKEDGKVFWQNLAGYKRQEALRPYLSSEEDRKKGKKFARYQLGDLLLHLEKKHGEDWGKVYDEAWERIDKKVEGLSKHIKLEEERRSEDAQSKAALTDWLRAKASFVIEGLKEADKDEFCRCELKLQKWYGDLRGKPFAIEAENSILDISGFSKQYNCAFIWQKDGVKKLNLYLIINYFKGGKLRFKKIKPEAFEANRFYTVINKKSGEIVPMEVNFNFDDPNLIILPLAFGKRQGREFIWNDLLSLETGSLKLANGRVIEKTLYNRRTRQDEPALFVALTFERREVLDSSNIKPMNLIGVDRGENIPAVIALTDPEGCPLMRFKDSQGNPTHILRIGESYKEKQRTIQAKKEVEQRRAGGYSRKYASKAKNLADDMVRNTARDLLYYAVTQDAMLIFENLSRGFGRQGKRTFMAERQYTRMEDWLTAKLAYEGLPSKTYLSKTLAQYTSKTCSNCGFTITSADYDRVLEKLKKTATGWMTTINGKELKVEGQITYYNRYKRQNVVKDLSVELDRLSEESVNNDISSWTKGRSGEALSLLKKRFSHRPVQEKFVCLNCGFETHADEQAALNIARSWLFLRSQEYKKYQTNKTTGNTDKRAFVETWQSFYRKKLKEVWKPAV

SEQ ID NO: 27073 - protein, 978 aa, synthetic construct
  REGION 1..978: note = engineered CasX variant
QEIKRINKIRRRLVKDSNTKKAGKTGPMKTLLVRVMTPDLRERLENLRKKPENIPQPISNTSRANLNKLLTDYTEMKKAILHVYWEEFQKDPVGLMSRVAQPASKKIDQNKLKPEMDEKGNLTTAGFACSQCGQPLFVYKLEQVSEKGKAYTNYFGRCNVAEHEKLILLAQLKPEKDSDEAVTYSLGKFGQRALDFYSIHVTKESTHPVKPLAQIAGNRYASGPVGKALSDACMGTIASFLSKYQDIIIEHQKVVKGNQKRLESLRELAGKENLEYPSVTLPPQPHTKEGVDAYNEVIARVRMWVNLNLWQKLKLSRDDAKPLLRLKGFPSFPLVERQANEVDWWDMVCNVKKLINEKKEDGKVFWQNLAGYKRQEALRPYLSSEEDRKKGKKFARYQLGDLLLHLEKKHGEDWGKVYDEAWERIDKKVEGLSKHIKLEEERRSEDAQSKAALTDWLRAKASFVIEGLKEADKDEFCRCELKLQKWYGDLRGKPFAIEAENSILDISGFSKQYNCAFIWQKDGVKKLNLYLIINYFKGGKLRFKKIKPEAFEANRFYTVINKKSGEIVPMEVNFNFDDPNLIILPLAFGKRQGREFIWNDLLSLETGSLKLANGRVIEKTLYNRRTRQDEPALFVALTFERREVLDSSNIKPMNLIGVDRGENIPAVIALTDPEGCPLMRFKDSLGNPTHILRIGESYKEKQRTIQAKKEVEQRRAGGYSRKYASKAKNLADDMVRNTARDLLYYAVTQDAMLIFENLSRGFGRQGKRTFMAERQYTRMEDWLTAKLAYEGLPSKTYLSKTLAQYTSKTCSNCGFTITSADYDRVLEKLKKTATGWMTTINGKELKVEGQITYYNRYKRQNVVKDLSVELDRLSEESVNNDISSWTKGRSGEALSLLKKRFSHRPVQEKFVCLNCGFETHADEQAALNIARSWLFLRSQEYKKYQTNKTTGNTDKRAFVETWQSFYRKKLKEVWKPAV

SEQ ID NO: 27074 - protein, 978 aa, synthetic construct
  REGION 1..978: note = engineered CasX variant
QEIKRINKIRRRLVKDSNTKKAGKTGPMKTLLVRVMTPDLRERLENLRKKPENIPQPISNTSRANLNKLLTDYTEMKKAILHVYWEEFQKDPVGLMSRVAQPASKKIDQNKLKPEMDEKGNLTTAGFACSQCGQPLFVYKLEQVSEKGKAYTNYFGRCNVAEHEKLILLAQLKPEKDSDEAVTYSLGKFGQRALDFYSIHVTKESTHPVKPLAQIAGNRYASGPVGKALSDACMGTIASFLSKYQDIIIEHQKVVKGNQKRLESLRELAGKENLEYPSVTLPPQPHTKEGVDAYNEVIARVRMWVNLNLWQKLKLSRDDAKPLLRLKGFPSFPLVERQANEVDWWDMVCNVKKLINEKKEDGKVFWQNLAGYKRQEALRPYLSSEEDRKKGKKFARYQLGDLLLHLEKKHGEDWGKVYDEAWERIDKKVEGLSKHIKLEEERRSEDAQSKAALTDWLRAKASFVIEGLKEADKDEFCRCELKLQKWYGDLRGKPFAIEAENSILDISGFSKQYNCAFIWQKDGVKKLNLYLIINYFKGGKLRFKKIKPEAFEANRFYTVINKKSGEIVPMEVNFNFDDPNLIILPLAFGKRQGREFIWNDLLSLETGSLKLANGRVIEKTLYNRRTRQDEPALFVALTFERREVLDSSNIKPMNLIGVDRGENIPAVIALTDPEGCPLMRFKDQQGNPTHILRIGESYKEKQRTIQAKKEVEQRRAGGYSRKYASKAKNLADDMVRNTARDLLYYAVTQDAMLIFENLSRGFGRQGKRTFMAERQYTRMEDWLTAKLAYEGLPSKTYLSKTLAQYTSKTCSNCGFTITSADYDRVLEKLKKTATGWMTTINGKELKVEGQITYYNRYKRQNVVKDLSVELDRLSEESVNNDISSWTKGRSGEALSLLKKRFSHRPVQEKFVCLNCGFETHADEQAALNIARSWLFLRSQEYKKYQTNKTTGNTDKRAFVETWQSFYRKKLKEVWKPAV

SEQ ID NO: 27075 - protein, 978 aa, synthetic construct
  REGION 1..978: note = engineered CasX variant
QEIKRINKIRRRLVKDSNTKKAGKTGPMKTLLVRVMTPDLRERLENLRKKPENIPQPISNTSRANLNKLLTDYTEMKKAILHVYWEEFQKDPVGLMSRVAQPASKKIDQNKLKPEMDEKGNLTTAGFACSQCGQPLFVYKLEQVSEKGKAYTNYFGRCNVAEHEKLILLAQLKPEKDSDEAVTYSLGKFGQRALDFYSIHVTKESTHPVKPLAQIAGNRYASGPVGKALSDACMGTIASFLSKYQDIIIEHQKVVKGNQKRLESLRELAGKENLEYPSVTLPPQPHTKEGVDAYNEVIARVRMWVNLNLWQKLKLSRDDAKPLLRLKGFPSFPLVERQANEVDWWDMVCNVKKLINEKKEDGKVFWQNLAGYKRQEALRPYLSSEEDRKKGKKFARYQLGDLLLHLEKKHGEDWGKVYDEAWERIDKKVEGLSKHIKLEEERRSEDAQSKAALTDWLRAKASFVIEGLKEADKDEFCRCELKLQKWYGDLRGKPFAIEAENSILDISGFSKQYNCAFIWQKDGVKKLNLYLIINYFKGGKLRFKKIKPEAFEANRFYTVINKKSGEIVPMEVNFNFDDPNLIILPLAFGKRQGREFIWNDLLSLETGSLKLANGRVIEKTLYNRRTRQDEPALFVALTFERREVLDSSNIKPMNLIGVDRGENIPAVIALTDPEGCPLMRFKDQLGNPTHILRIGESYKEKQRTIQAKKEVEQRRAGGYSRKYASKAKNLADDMVRNTARDLLYYAVTQDAMLIFENLSRGFGRQGKRTFMAERQYTRMEDWLTAKLAYEGLPSKTYLSKTLAQYTSKTCSNCGFTITSADYDRVLEKLKKTATGWMTTINGKELKVEGQITYYNRYKRQNVVKDLSVELDRLSEESVNNDISSWTKGRSGEALSLLKKRFSHRPVQEKFVCLNCGFETHADEQAALNIARSWLFLRSQEYKKYQTNKTTGNTDKRAFVETWQSFYRKKLKEVWKPAV

SEQ ID NO: 27076 - protein, 978 aa, synthetic construct
  REGION 1..978: note = engineered CasX variant
QEIKRINKIRRRLVKDSNTKKAGKTGPMKTLLVRVMTPDLRERLENLRKKPENIPQPISNTSRANLNKLLTDYTEMKKAILHVYWEEFQKDPVGLMSRVAQPASKKIDQNKLKPEMDEKGNLTTAGFACSQCGQPLFVYKLEQVSEKGKAYTNYFGRCNVAEHEKLILLAQLKPEKDSDEAVTYSLGKFGQRALDFYSIHVTKESTHPVKPLAQIAGNRYASGPVGKALSDACMGTIASFLSKYQDIIIEHQKVVKGNQKRLESLRELAGKENLEYPSVTLPPQPHTKEGVDAYNEVIARVRMWVNLNLWQKLKLSRDDAKPLLRLKGFPSFPLVERQANEVDWWDMVCNVKKLINEKKEDGKVFWQNLAGYKRQEALRPYLSSEEDRKKGKKFARYQLGDLLLHLEKKHGEDWGKVYDEAWERIDKKVEGLSKHIKLEEERRSEDAQSKAALTDWLRAKASFVIEGLKEADKDEFCRCELKLQKWYGDLRGKPFAIEAENSILDISGFSKQYNCAFIWQKDGVKKLNLYLIINYFKGGKLRFKKIKPEAFEANRFYTVINKKSGEIVPMEVNFNFDDPNLIILPLAFGKRQGREFIWNDLLSLETGSLKLANGRVIEKTLYNRRTRQDEPALFVALTFERREVLDSSNIKPMNLIGVDRGENIPAVIALTDPEGCPLLRFKDSLGNPTHILRIGESYKEKQRTIQAKKEVEQRRAGGYSRKYASKAKNLADDMVRNTARDLLYYAVTQDAMLIFENLSRGFGRQGKRTFMAERQYTRMEDWLTAKLAYEGLPSKTYLSKTLAQYTSKTCSNCGFTITSADYDRVLEKLKKTATGWMTTINGKELKVEGQITYYNRYKRQNVVKDLSVELDRLSEESVNNDISSWTKGRSGEALSLLKKRFSHRPVQEKFVCLNCGFETHADEQAALNIARSWLFLRSQEYKKYQTNKTTGNTDKRAFVETWQSFYRKKLKEVWKPAV

SEQ ID NO: 27077 - protein, 978 aa, synthetic construct
  REGION 1..978: note = engineered CasX variant
QEIKRINKIRRRLVKDSNTKKAGKTGPMKTLLVRVMTPDLRERLENLRKKPENIPQPISNTSRANLNKLLTDYTEMKKAILHVYWEEFQKDPVGLMSRVAQPASKKIDQNKLKPEMDEKGNLTTAGFACSQCGQPLFVYKLEQVSEKGKAYTNYFGRCNVAEHEKLILLAQLKPEKDSDEAVTYSLGKFGQRALDFYSIHVTKESTHPVKPLAQIAGNRYASGPVGKALSDACMGTIASFLSKYQDIIIEHQKVVKGNQKRLESLRELAGKENLEYPSVTLPPQPHTKEGVDAYNEVIARVRMWVNLNLWQKLKLSRDDAKPLLRLKGFPSFPLVERQANEVDWWDMVCNVKKLINEKKEDGKVFWQNLAGYKRQEALRPYLSSEEDRKKGKKFARYQLGDLLLHLEKKHGEDWGKVYDEAWERIDKKVEGLSKHIKLEEERRSEDAQSKAALTDWLRAKASFVIEGLKEADKDEFCRCELKLQKWYGDLRGKPFAIEAENSILDISGFSKQYNCAFIWQKDGVKKLNLYLIINYFKGGKLRFKKIKPEAFEANRFYTVINKKSGEIVPMEVNFNFDDPNLIILPLAFGKRQGREFIWNDLLSLETGSLKLANGRVIEKTLYNRRTRQDEPALFVALTFERREVLDSSNIKPMNLIGVDRGENIPAVIALTDPEGCPLLRFKDSLGNPTHILRIGESYKEDQRTIQAKKEVEQRRAGGYSRKYASKAKNLADDMVRNTARDLLYYAVTQDAMLIFENLSRGFGRQGKRTFMAERQYTRMEDWLTAKLAYEGLPSKTYLSKTLAQYTSKTCSNCGFTITSADYDRVLEKLKKTATGWMTTINGKELKVEGQITYYNRYKRQNVVKDLSVELDRLSEESVNNDISSWTKGRSGEALSLLKKRFSHRPVQEKFVCLNCGFETHADEQAALNIARSWLFLRSQEYKKYQTNKTTGNTDKRAFVETWQSFYRKKLKEVWKPAV

SEQ ID NO: 27078 - protein, 978 aa, synthetic construct
  REGION 1..978: note = engineered CasX variant
QEIKRINKIRRRLVKDSNTKKAGKTGPMKTLLVRVMTPDLRERLENLRKKPENIPQPISNTSRANLNKLLTDYTEMKKAILHVYWEEFQKDPVGLMSRVAQPASKKIDQNKLKPEMDEKGNLTTAGFACSQCGQPLFVYKLEQVSEKGKAYTNYFGRCNVAEHEKLILLAQLKPEKDSDEAVTYSLGKFGQRALDFYSIHVTKESTHPVKPLAQIAGNRYASGPVGKALSDACMGTIASFLSKYQDIIIEHQKVVKGNQKRLESLRELAGKENLEYPSVTLPPQPHTKEGVDAYNEVIARVRMWVNLNLWQKLKLSRDDAKPLLRLKGFPSFPLVERQANEVDWWDMVCNVKKLINEKKEDGKVFWQNLAGYKRQEALRPYLSSEEDRKKGKKFARYQLGDLLLHLEKKHGEDWGKVYDEAWERIDKKVEGLSKHIKLEEERRSEDAQSKAALTDWLRAKASFVIEGLKEADKDEFCRCELKLQKWYGDLRGKPFAIEAENSILDISGFSKQYNCAFIWQKDGVKKLNLYLIINYFKGGKLRFKKIKPEAFEANRFYTVINKKSGEIVPMEVNFNFDDPNLIILPLAFGKRQGREFIWNDLLSLETGSLKLANGRVIEKTLYNRRTRQDEPALFVALTFERREVLDSSNIKPMNLIGVDRGENIPAVIALTDPEGCPLLRFKDSLGNPTHILRIGEHYKEKQRTIQAKKEVEQRRAGGYSRKYASKAKNLADDMVRNTARDLLYYAVTQDAMLIFENLSRGFGRQGKRTFMAERQYTRMEDWLTAKLAYEGLPSKTYLSKTLAQYTSKTCSNCGFTITSADYDRVLEKLKKTATGWMTTINGKELKVEGQITYYNRYKRQNVVKDLSVELDRLSEESVNNDISSWTKGRSGEALSLLKKRFSHRPVQEKFVCLNCGFETHADEQAALNIARSWLFLRSQEYKKYQTNKTTGNTDKRAFVETWQSFYRKKLKEVWKPAV

SEQ ID NO: 27079 - protein, 978 aa, synthetic construct
  REGION 1..978: note = engineered CasX variant
QEIKRINKIRRRLVKDSNTKKAGKTGPMKTLLVRVMTPDLRERLENLRKKPENIPQPISNTSRANLNKLLTDYTEMKKAILHVYWEEFQKDPVGLMSRVAQPASKKIDQNKLKPEMDEKGNLTTAGFACSQCGQPLFVYKLEQVSEKGKAYTNYFGRCNVAEHEKLILLAQLKPEKDSDEAVTYSLGKFGQRALDFYSIHVTKESTHPVKPLAQIAGNRYASGPVGKALSDACMGTIASFLSKYQDIIIEHQKVVKGNQKRLESLRELAGKENLEYPSVTLPPQPHTKEGVDAYNEVIARVRMWVNLNLWQKLKLSRDDAKPLLRLKGFPSFPLVERQANEVDWWDMVCNVKKLINEKKEDGKVFWQNLAGYKRQEALRPYLSSEEDRKKGKKFARYQLGDLLLHLEKKHGEDWGKVYDEAWERIDKKVEGLSKHIKLEEERRSEDAQSKAALTDWLRAKASFVIEGLKEADKDEFCRCELKLQKWYGDLRGKPFAIEAENSILDISGFSKQYNCAFIWQKDGVKKLNLYLIINYFKGGKLRFKKIKPEAFEANRFYTVINKKSGEIVPMEVNFNFDDPNLIILPLAFGKRQGREFIWNDLLSLETGSLKLANGRVIEKTLYNRRTRQDEPALFVALTFERREVLDSSNIKPMNLIGVDRGENIPAVIALTDPEGCPLKRFKDSRGNPTHILRIGESYKEKQRTIQAKKEVEQRRAGGYSRKYASKAKNLADDMVRNTARDLLYYAVTQDAMLIFENLSRGFGRQGKRTFMAERQYTRMEDWLTAKLAYEGLPSKTYLSKTLAQYTSKTCSNCGFTITSADYDRVLEKLKKTATGWMTTINGKELKVEGQITYYNRYKRQNVVKDLSVELDRLSEESVNNDISSWTKGRSGEALSLLKKRFSHRPVQEKFVCLNCGFETHADEQAALNIARSWLFLRSQEYKKYQTNKTTGNTDKRAFVETWQSFYRKKLKEVWKPAV

SEQ ID NO: 27080 - protein, 978 aa, synthetic construct
  REGION 1..978: note = engineered CasX variant
QEIKRINKIRRRLVKDSNTKKAGKTGPMKTLLVRVMTPDLRERLENLRKKPENIPQPISNTSRANLNKLLTDYTEMKKAILHVYWEEFQKDPVGLMSRVAQPASKKIDQNKLKPEMDEKGNLTTAGFACSQCGQPLFVYKLEQVSEKGKAYTNYFGRCNVAEHEKLILLAQLKPEKDSDEAVTYSLGKFGQRALDFYSIHVTKESTHPVKPLAQIAGNRYASGPVGKALSDACMGTIASFLSKYQDIIIEHQKVVKGNQKRLESLRELAGKENLEYPSVTLPPQPHTKEGVDAYNEVIARVRMWVNLNLWQKLKLSRDDAKPLLRLKGFPSFPLVERQANEVDWWDMVCNVKKLINEKKEDGKVFWQNLAGYKRQEALRPYLSSEEDRKKGKKFARYQLGDLLLHLEKKHGEDWGKVYDEAWERIDKKVEGLSKHIKLEEERRSEDAQSKAALTDWLRAKASFVIEGLKEADKDEFCRCELKLQKWYGDLRGKPFAIEAENSILDISGFSKQYNCAFIWQKDGVKKLNLYLIINYFKGGKLRFKKIKPEAFEANRFYTVINKKSGEIVPMEVNFNFDDPNLIILPLAFGKRQGREFIWNDLLSLETGSLKLANGRVIEKTLYNRRTRQDEPALFVALTFERREVLDSSNIKPMNLIGVDRGENIPAVIALTDPEGCPLKRFKDSLGNPTHILTINESYKEKQRTIQAKKEVEQRRAGGYSRKYASKAKNLADDMVRNTARDLLYYAVTQDAMLIFENLSRGFGRQGKRTFMAERQYTRMEDWLTAKLAYEGLPSKTYLSKTLAQYTSKTCSNCGFTITSADYDRVLEKLKKTATGWMTTINGKELKVEGQITYYNRYKRQNVVKDLSVELDRLSEESVNNDISSWTKGRSGEALSLLKKRFSHRPVQEKFVCLNCGFETHADEQAALNIARSWLFLRSQEYKKYQTNKTTGNTDKRAFVETWQSFYRKKLKEVWKPAV

SEQ ID NO: 27081 - protein, 978 aa, synthetic construct
  REGION 1..978: note = engineered CasX variant
QEIKRINKIRRRLVKDSNTKKAGKTGPMKTLLVRVMTPDLRERLENLRKKPENIPQPISNTSRANLNKLLTDYTEMKKAILHVYWEEFQKDPVGLMSRVAQPASKKIDQNKLKPEMDEKGNLTTAGFACSQCGQPLFVYKLEQVSEKGKAYTNYFGRCNVAEHEKLILLAQLKPEKDSDEAVTYSLGKFGQRALDFYSIHVTKESTHPVKPLAQIAGNRYASGPVGKALSDACMGTIASFLSKYQDIIIEHQKVVKGNQKRLESLRELAGKENLEYPSVTLPPQPHTKEGVDAYNEVIARVRMWVNLNLWQKLKLSRDDAKPLLRLKGFPSFPLVERQANEVDWWDMVCNVKKLINEKKEDGKVFWQNLAGYKRQEALRPYLSSEEDRKKGKKFARYQLGDLLLHLEKKHGEDWGKVYDEAWERIDKKVEGLSKHIKLEEERRSEDAQSKAALTDWLRAKASFVIEGLKEADKDEFCRCELKLQKWYGDLRGKPFAIEAENSILDISGFSKQYNCAFIWQKDGVKKLNLYLIINYFKGGKLRFKKIKPEAFEANRFYTVINKKSGEIVPMEVNFNFDDPNLIILPLAFGKRQGREFIWNDLLSLETGSLKLANGRVIEKTLYNRRTRQDEPALFVALTFERREVLDSSNIKPMNLIGVDRGENIPAVIALTDPEGCPLKRFKDSLGNPTHILTIGESYKEKQRTIQAKKEVEQRRAGGYSRKYASKAKNLADDMVRNTARDLLYYAVTQDAMLIFENLSRGFGRQGKRTFMAERQYTRMEDWLTAKLAYEGLPSKTYLSKTLAQYTSKTCSNCGFTITSADYDRVLEKLKKTATGWMTTINGKELKVEGQITYYNRYKRQNVVKDLSVELDRLSEESVNNDISSWTKGRSGEALSLLKKRFSHRPVQEKFVCLNCGFETHADEQAALNIARSWLFLRSQEYKKYQTNKTTGNTDKRAFVETWQSFYRKKLKEVWKPAV

SEQ ID NO: 27082 - protein, 978 aa, synthetic construct
  REGION 1..978: note = engineered CasX variant
QEIKRINKIRRRLVKDSNTKKAGKTGPMKTLLVRVMTPDLRERLENLRKKPENIPQPISNTSRANLNKLLTDYTEMKKAILHVYWEEFQKDPVGLMSRVAQPASKKIDQNKLKPEMDEKGNLTTAGFACSQCGQPLFVYKLEQVSEKGKAYTNYFGRCNVAEHEKLILLAQLKPEKDSDEAVTYSLGKFGQRALDFYSIHVTKESTHPVKPLAQIAGNRYASGPVGKALSDACMGTIASFLSKYQDIIIEHQKVVKGNQKRLESLRELAGKENLEYPSVTLPPQPHTKEGVDAYNEVIARVRMWVNLNLWQKLKLSRDDAKPLLRLKGFPSFPLVERQANEVDWWDMVCNVKKLINEKKEDGKVFWQNLAGYKRQEALRPYLSSEEDRKKGKKFARYQLGDLLLHLEKKHGEDWGKVYDEAWERIDKKVEGLSKHIKLEEERRSEDAQSKAALTDWLRAKASFVIEGLKEADKDEFCRCELKLQKWYGDLRGKPFAIEAENSILDISGFSKQYNCAFIWQKDGVKKLNLYLIINYFKGGKLRFKKIKPEAFEANRFYTVINKKSGEIVPMEVNFNFDDPNLIILPLAFGKRQGREFIWNDLLSLETGSLKLANGRVIEKTLYNRRTRQDEPALFVALTFERREVLDSSNIKPMNLIGVDRGENIPAVIALTDPEGCPLKRFKDSLGNPTHILRINESYKEKQRTIQAKKEVEQRRAGGYSRKYASKAKNLADDMVRNTARDLLYYAVTQDAMLIFENLSRGFGRQGKRTFMAERQYTRMEDWLTAKLAYEGLPSKTYLSKTLAQYTSKTCSNCGFTITSADYDRVLEKLKKTATGWMTTINGKELKVEGQITYYNRYKRQNVVKDLSVELDRLSEESVNNDISSWTKGRSGEALSLLKKRFSHRPVQEKFVCLNCGFETHADEQAALNIARSWLFLRSQEYKKYQTNKTTGNTDKRAFVETWQSFYRKKLKEVWKPAV

SEQ ID NO: 27083 - protein, 978 aa, synthetic construct
  REGION 1..978: note = engineered CasX variant
QEIKRINKIRRRLVKDSNTKKAGKTGPMKTLLVRVMTPDLRERLENLRKKPENIPQPISNTSRANLNKLLTDYTEMKKAILHVYWEEFQKDPVGLMSRVAQPASKKIDQNKLKPEMDEKGNLTTAGFACSQCGQPLFVYKLEQVSEKGKAYTNYFGRCNVAEHEKLILLAQLKPEKDSDEAVTYSLGKFGQRALDFYSIHVTKESTHPVKPLAQIAGNRYASGPVGKALSDACMGTIASFLSKYQDIIIEHQKVVKGNQKRLESLRELAGKENLEYPSVTLPPQPHTKEGVDAYNEVIARVRMWVNLNLWQKLKLSRDDAKPLLRLKGFPSFPLVERQANEVDWWDMVCNVKKLINEKKEDGKVFWQNLAGYKRQEALRPYLSSEEDRKKGKKFARYQLGDLLLHLEKKHGEDWGKVYDEAWERIDKKVEGLSKHIKLEEERRSEDAQSKAALTDWLRAKASFVIEGLKEADKDEFCRCELKLQKWYGDLRGKPFAIEAENSILDISGFSKQYNCAFIWQKDGVKKLNLYLIINYFKGGKLRFKKIKPEAFEANRFYTVINKKSGEIVPMEVNFNFDDPNLIILPLAFGKRQGREFIWNDLLSLETGSLKLANGRVIEKTLYNRRTRQDEPALFVALTFERREVLDSSNIKPMNLIGVDRGENIPAVIALTDPEGCPLKRFKDSLGNPTHILRIGESYKEKQRTIQAKKEVEQRRAGGYSRKYASKAKNLADDMVRNTARDLLYYAVTQDAMLIFENLSRGFGRQGKRTFMAERQYTRMEDWLTAKLAYEGLPSKTYLSKTLAQYTSKTCSNCGFTITSADYDRVLEKLKKTATGWMTTINGKELKVEGQITYYNRYKRQNVVKDLSVELDRLSEESVNNDISSWTKGRSGEALSLLKKRFSHRPVQEKFVCLNCGFETHADEQAALNIARSWLFLRSQEYKKYQTNKTTGNTDKRAFVETWQSFYRKKLKEVWKPAV

SEQ ID NO: 27084 - protein, 978 aa, synthetic construct
  REGION 1..978: note = engineered CasX variant
QEIKRINKIRRRLVKDSNTKKAGKTGPMKTLLVRVMTPDLRERLENLRKKPENIPQPISNTSRANLNKLLTDYTEMKKAILHVYWEEFQKDPVGLMSRVAQPASKKIDQNKLKPEMDEKGNLTTAGFACSQCGQPLFVYKLEQVSEKGKAYTNYFGRCNVAEHEKLILLAQLKPEKDSDEAVTYSLGKFGQRALDFYSIHVTKESTHPVKPLAQIAGNRYASGPVGKALSDACMGTIASFLSKYQDIIIEHQKVVKGNQKRLESLRELAGKENLEYPSVTLPPQPHTKEGVDAYNEVIARVRMWVNLNLWQKLKLSRDDAKPLLRLKGFPSFPLVERQANEVDWWDMVCNVKKLINEKKEDGKVFWQNLAGYKRQEALRPYLSSEEDRKKGKKFARYQLGDLLLHLEKKHGEDWGKVYDEAWERIDKKVEGLSKHIKLEEERRSEDAQSKAALTDWLRAKASFVIEGLKEADKDEFCRCELKLQKWYGDLRGKPFAIEAENSILDISGFSKQYNCAFIWQKDGVKKLNLYLIINYFKGGKLRFKKIKPEAFEANRFYTVINKKSGEIVPMEVNFNFDDPNLIILPLAFGKRQGREFIWNDLLSLETGSLKLANGRVIEKTLYNRRTRQDEPALFVALTFERREVLDSSNIKPMNLIGVDRGENIPAVIALTDPEGCPLKRFKDSLGNPTHILRIGEKYKEKQRTIQAKKEVEQRRAGGYSRKYASKAKNLADDMVRNTARDLLYYAVTQDAMLIFENLSRGFGRQGKRTFMAERQYTRMEDWLTAKLAYEGLPSKTYLSKTLAQYTSKTCSNCGFTITSADYDRVLEKLKKTATGWMTTINGKELKVEGQITYYNRYKRQNVVKDLSVELDRLSEESVNNDISSWTKGRSGEALSLLKKRFSHRPVQEKFVCLNCGFETHADEQAALNIARSWLFLRSQEYKKYQTNKTTGNTDKRAFVETWQSFYRKKLKEVWKPAV

SEQ ID NO: 27085 - protein, 978 aa, synthetic construct
  REGION 1..978: note = engineered CasX variant
QEIKRINKIRRRLVKDSNTKKAGKTGPMKTLLVRVMTPDLRERLENLRKKPENIPQPISNTSRANLNKLLTDYTEMKKAILHVYWEEFQKDPVGLMSRVAQPASKKIDQNKLKPEMDEKGNLTTAGFACSQCGQPLFVYKLEQVSEKGKAYTNYFGRCNVAEHEKLILLAQLKPEKDSDEAVTYSLGKFGQRALDFYSIHVTKESTHPVKPLAQIAGNRYASGPVGKALSDACMGTIASFLSKYQDIIIEHQKVVKGNQKRLESLRELAGKENLEYPSVTLPPQPHTKEGVDAYNEVIARVRMWVNLNLWQKLKLSRDDAKPLLRLKGFPSFPLVERQANEVDWWDMVCNVKKLINEKKEDGKVFWQNLAGYKRQEALRPYLSSEEDRKKGKKFARYQLGDLLLHLEKKHGEDWGKVYDEAWERIDKKVEGLSKHIKLEEERRSEDAQSKAALTDWLRAKASFVIEGLKEADKDEFCRCELKLQKWYGDLRGKPFAIEAENSILDISGFSKQYNCAFIWQKDGVKKLNLYLIINYFKGGKLRFKKIKPEAFEANRFYTVINKKSGEIVPMEVNFNFDDPNLIILPLAFGKRQGREFIWNDLLSLETGSLKLANGRVIEKTLYNRRTRQDEPALFVALTFERREVLDSSNIKPMNLIGVDRGENIPAVIALTDPEGCPLKRFKDSLGNPTHILRIGDSYKEKQRTIQAKKEVEQRRAGGYSRKYASKAKNLADDMVRNTARDLLYYAVTQDAMLIFENLSRGFGRQGKRTFMAERQYTRMEDWLTAKLAYEGLPSKTYLSKTLAQYTSKTCSNCGFTITSADYDRVLEKLKKTATGWMTTINGKELKVEGQITYYNRYKRQNVVKDLSVELDRLSEESVNNDISSWTKGRSGEALSLLKKRFSHRPVQEKFVCLNCGFETHADEQAALNIARSWLFLRSQEYKKYQTNKTTGNTDKRAFVETWQSFYRKKLKEVWKPAV

SEQ ID NO: 27086 - protein, 978 aa, synthetic construct
  REGION 1..978: note = engineered CasX variant
QEIKRINKIRRRLVKDSNTKKAGKTGPMKTLLVRVMTPDLRERLENLRKKPENIPQPISNTSRANLNKLLTDYTEMKKAILHVYWEEFQKDPVGLMSRVAQPASKKIDQNKLKPEMDEKGNLTTAGFACSQCGQPLFVYKLEQVSEKGKAYTNYFGRCNVAEHEKLILLAQLKPEKDSDEAVTYSLGKFGQRALDFYSIHVTKESTHPVKPLAQIAGNRYASGPVGKALSDACMGTIASFLSKYQDIIIEHQKVVKGNQKRLESLRELAGKENLEYPSVTLPPQPHTKEGVDAYNEVIARVRMWVNLNLWQKLKLSRDDAKPLLRLKGFPSFPLVERQANEVDWWDMVCNVKKLINEKKEDGKVFWQNLAGYKRQEALRPYLSSEEDRKKGKKFARYQLGDLLLHLEKKHGEDWGKVYDEAWERIDKKVEGLSKHIKLEEERRSEDAQSKAALTDWLRAKASFVIEGLKEADKDEFCRCELKLQKWYGDLRGKPFAIEAENSILDISGFSKQYNCAFIWQKDGVKKLNLYLIINYFKGGKLRFKKIKPEAFEANRFYTVINKKSGEIVPMEVNFNFDDPNLIILPLAFGKRQGREFIWNDLLSLETGSLKLANGRVIEKTLYNRRTRQDEPALFVALTFERREVLDSSNIKPMNLIGVDRGENIPAVIALTDPEGCPLKRFKDSLGNPTHILRIGDKYKEKQRTIQAKKEVEQRRAGGYSRKYASKAKNLADDMVRNTARDLLYYAVTQDAMLIFENLSRGFGRQGKRTFMAERQYTRMEDWLTAKLAYEGLPSKTYLSKTLAQYTSKTCSNCGFTITSADYDRVLEKLKKTATGWMTTINGKELKVEGQITYYNRYKRQNVVKDLSVELDRLSEESVNNDISSWTKGRSGEALSLLKKRFSHRPVQEKFVCLNCGFETHADEQAALNIARSWLFLRSQEYKKYQTNKTTGNTDKRAFVETWQSFYRKKLKEVWKPAV

SEQ ID NO: 27087 - protein, 978 aa, synthetic construct
  REGION 1..978: note = engineered CasX variant
QEIKRINKIRRRLVKDSNTKKAGKTGPMKTLLVRVMTPDLRERLENLRKKPENIPQPISNTSRANLNKLLTDYTEMKKAILHVYWEEFQKDPVGLMSRVAQPASKKIDQNKLKPEMDEKGNLTTAGFACSQCGQPLFVYKLEQVSEKGKAYTNYFGRCNVAEHEKLILLAQLKPEKDSDEAVTYSLGKFGQRALDFYSIHVTKESTHPVKPLAQIAGNRYASGPVGKALSDACMGTIASFLSKYQDIIIEHQKVVKGNQKRLESLRELAGKENLEYPSVTLPPQPHTKEGVDAYNEVIARVRMWVNLNLWQKLKLSRDDAKPLLRLKGFPSFPLVERQANEVDWWDMVCNVKKLINEKKEDGKVFWQNLAGYKRQEALRPYLSSEEDRKKGKKFARYQLGDLLLHLEKKHGEDWGKVYDEAWERIDKKVEGLSKHIKLEEERRSEDAQSKAALTDWLRAKASFVIEGLKEADKDEFCRCELKLQKWYGDLRGKPFAIEAENSILDISGFSKQYNCAFIWQKDGVKKLNLYLIINYFKGGKLRFKKIKPEAFEANRFYTVINKKSGEIVPMEVNFNFDDPNLIILPLAFGKRQGREFIWNDLLSLETGSLKLANGRVIEKTLYNRRTRQDEPALFVALTFERREVLDSSNIKPMNLIGVDRGENIPAVIALTDPEGCPLKRFKDNLGNPTHILRIGESYKEKQRTIQAKKEVEQRRAGGYSRKYASKAKNLADDMVRNTARDLLYYAVTQDAMLIFENLSRGFGRQGKRTFMAERQYTRMEDWLTAKLAYEGLPSKTYLSKTLAQYTSKTCSNCGFTITSADYDRVLEKLKKTATGWMTTINGKELKVEGQITYYNRYKRQNVVKDLSVELDRLSEESVNNDISSWTKGRSGEALSLLKKRFSHRPVQEKFVCLNCGFETHADEQAALNIARSWLFLRSQEYKKYQTNKTTGNTDKRAFVETWQSFYRKKLKEVWKPAV

SEQ ID NO: 27088 - protein, 978 aa, synthetic construct
  REGION 1..978: note = engineered CasX variant
QEIKRINKIRRRLVKDSNTKKAGKTGPMKTLLVRVMTPDLRERLENLRKKPENIPQPISNTSRANLNKLLTDYTEMKKAILHVYWEEFQKDPVGLMSRVAQPASKKIDQNKLKPEMDEKGNLTTAGFACSQCGQPLFVYKLEQVSEKGKAYTNYFGRCNVAEHEKLILLAQLKPEKDSDEAVTYSLGKFGQRALDFYSIHVTKESTHPVKPLAQIAGNRYASGPVGKALSDACMGTIASFLSKYQDIIIEHQKVVKGNQKRLESLRELAGKENLEYPSVTLPPQPHTKEGVDAYNEVIARVRMWVNLNLWQKLKLSRDDAKPLLRLKGFPSFPLVERQANEVDWWDMVCNVKKLINEKKEDGKVFWQNLAGYKRQEALRPYLSSEEDRKKGKKFARYQLGDLLLHLEKKHGEDWGKVYDEAWERIDKKVEGLSKHIKLEEERRSEDAQSKAALTDWLRAKASFVIEGLKEADKDEFCRCELKLQKWYGDLRGKPFAIEAENSILDISGFSKQYNCAFIWQKDGVKKLNLYLIINYFKGGKLRFKKIKPEAFEANRFYTVINKKSGEIVPMEVNFNFDDPNLIILPLAFGKRQGREFIWNDLLSLETGSLKLANGRVIEKTLYNRRTRQDEPALFVALTFERREVLDSSNIKPMNLIGVDRGENIPAVIALTDPEGCPLKRFKDMLGNPTHILRIGESYKEKQRTIQAKKEVEQRRAGGYSRKYASKAKNLADDMVRNTARDLLYYAVTQDAMLIFENLSRGFGRQGKRTFMAERQYTRMEDWLTAKLAYEGLPSKTYLSKTLAQYTSKTCSNCGFTITSADYDRVLEKLKKTATGWMTTINGKELKVEGQITYYNRYKRQNVVKDLSVELDRLSEESVNNDISSWTKGRSGEALSLLKKRFSHRPVQEKFVCLNCGFETHADEQAALNIARSWLFLRSQEYKKYQTNKTTGNTDKRAFVETWQSFYRKKLKEVWKPAV

SEQ ID NO: 27089 - protein, 978 aa, synthetic construct
  REGION 1..978: note = engineered CasX variant
QEIKRINKIRRRLVKDSNTKKAGKTGPMKTLLVRVMTPDLRERLENLRKKPENIPQPISNTSRANLNKLLTDYTEMKKAILHVYWEEFQKDPVGLMSRVAQPASKKIDQNKLKPEMDEKGNLTTAGFACSQCGQPLFVYKLEQVSEKGKAYTNYFGRCNVAEHEKLILLAQLKPEKDSDEAVTYSLGKFGQRALDFYSIHVTKESTHPVKPLAQIAGNRYASGPVGKALSDACMGTIASFLSKYQDIIIEHQKVVKGNQKRLESLRELAGKENLEYPSVTLPPQPHTKEGVDAYNEVIARVRMWVNLNLWQKLKLSRDDAKPLLRLKGFPSFPLVERQANEVDWWDMVCNVKKLINEKKEDGKVFWQNLAGYKRQEALRPYLSSEEDRKKGKKFARYQLGDLLLHLEKKHGEDWGKVYDEAWERIDKKVEGLSKHIKLEEERRSEDAQSKAALTDWLRAKASFVIEGLKEADKDEFCRCELKLQKWYGDLRGKPFAIEAENSILDISGFSKQYNCAFIWQKDGVKKLNLYLIINYFKGGKLRFKKIKPEAFEANRFYTVINKKSGEIVPMEVNFNFDDPNLIILPLAFGKRQGREFIWNDLLSLETGSLKLANGRVIEKTLYNRRTRQDEPALFVALTFERREVLDSSNIKPMNLIGVDRGENIPAVIALTDPEGCPLIRFKDSLGNPTHILRIGESYKIKQRTIQAKKEVEQRRAGGYSRKYASKAKNLADDMVRNTARDLLYYAVTQDAMLIFENLSRGFGRQGKRTFMAERQYTRMEDWLTAKLAYEGLPSKTYLSKTLAQYTSKTCSNCGFTITSADYDRVLEKLKKTATGWMTTINGKELKVEGQITYYNRYKRQNVVKDLSVELDRLSEESVNNDISSWTKGRSGEALSLLKKRFSHRPVQEKFVCLNCGFETHADEQAALNIARSWLFLRSQEYKKYQTNKTTGNTDKRAFVETWQSFYRKKLKEVWKPAV

SEQ ID NO: 27090 - protein, 978 aa, synthetic construct
  REGION 1..978: note = engineered CasX variant
QEIKRINKIRRRLVKDSNTKKAGKTGPMKTLLVRVMTPDLRERLENLRKKPENIPQPISNTSRANLNKLLTDYTEMKKAILHVYWEEFQKDPVGLMSRVAQPASKKIDQNKLKPEMDEKGNLTTAGFACSQCGQPLFVYKLEQVSEKGKAYTNYFGRCNVAEHEKLILLAQLKPEKDSDEAVTYSLGKFGQRALDFYSIHVTKESTHPVKPLAQIAGNRYASGPVGKALSDACMGTIASFLSKYQDIIIEHQKVVKGNQKRLESLRELAGKENLEYPSVTLPPQPHTKEGVDAYNEVIARVRMWVNLNLWQKLKLSRDDAKPLLRLKGFPSFPLVERQANEVDWWDMVCNVKKLINEKKEDGKVFWQNLAGYKRQEALRPYLSSEEDRKKGKKFARYQLGDLLLHLEKKHGEDWGKVYDEAWERIDKKVEGLSKHIKLEEERRSEDAQSKAALTDWLRAKASFVIEGLKEADKDEFCRCELKLQKWYGDLRGKPFAIEAENSILDISGFSKQYNCAFIWQKDGVKKLNLYLIINYFKGGKLRFKKIKPEAFEANRFYTVINKKSGEIVPMEVNFNFDDPNLIILPLAFGKRQGREFIWNDLLSLETGSLKLANGRVIEKTLYNRRTRQDEPALFVALTFERREVLDSSNIKPMNLIGVDRGENIPAVIALTDPEGCPLIRFKDSLGNPTHILRIGESYKEKQRTIQAKKEVEQRRAGGYSRKYASKAKNLADDMVRNTARDLLYYAVTQDAMLIFENLSRGFGRQGKRTFMAERQYTRMEDWLTAKLAYEGLPSKTYLSKTLAQYTSKTCSNCGFTITSADYDRVLEKLKKTATGWMTTINGKELKVEGQITYYNRYKRQNVVKDLSVELDRLSEESVNNDISSWTKGRSGEALSLLKKRFSHRPVQEKFVCLNCGFETHADEQAALNIARSWLFLRSQEYKKYQTNKTTGNTDKRAFVETWQSFYRKKLKEVWKPAV

SEQ ID NO: 27091 - protein, 978 aa, synthetic construct
  REGION 1..978: note = engineered CasX variant
QEIKRINKIRRRLVKDSNTKKAGKTGPMKTLLVRVMTPDLRERLENLRKKPENIPQPISNTSRANLNKLLTDYTEMKKAILHVYWEEFQKDPVGLMSRVAQPASKKIDQNKLKPEMDEKGNLTTAGFACSQCGQPLFVYKLEQVSEKGKAYTNYFGRCNVAEHEKLILLAQLKPEKDSDEAVTYSLGKFGQRALDFYSIHVTKESTHPVKPLAQIAGNRYASGPVGKALSDACMGTIASFLSKYQDIIIEHQKVVKGNQKRLESLRELAGKENLEYPSVTLPPQPHTKEGVDAYNEVIARVRMWVNLNLWQKLKLSRDDAKPLLRLKGFPSFPLVERQANEVDWWDMVCNVKKLINEKKEDGKVFWQNLAGYKRQEALRPYLSSEEDRKKGKKFARYQLGDLLLHLEKKHGEDWGKVYDEAWERIDKKVEGLSKHIKLEEERRSEDAQSKAALTDWLRAKASFVIEGLKEADKDEFCRCELKLQKWYGDLRGKPFAIEAENSILDISGFSKQYNCAFIWQKDGVKKLNLYLIINYFKGGKLRFKKIKPEAFEANRFYTVINKKSGEIVPMEVNFNFDDPNLIILPLAFGKRQGREFIWNDLLSLETGSLKLANGRVIEKTLYNRRTRQDEPALFVALTFERREVLDSSNIKPMNLIGVDRGENIPAVIALTDPEGCPLIRFKDSLGNPTFILRIGESYKEKQRTIQAKKEVEQRRAGGYSRKYASKAKNLADDMVRNTARDLLYYAVTQDAMLIFENLSRGFGRQGKRTFMAERQYTRMEDWLTAKLAYEGLPSKTYLSKTLAQYTSKTCSNCGFTITSADYDRVLEKLKKTATGWMTTINGKELKVEGQITYYNRYKRQNVVKDLSVELDRLSEESVNNDISSWTKGRSGEALSLLKKRFSHRPVQEKFVCLNCGFETHADEQAALNIARSWLFLRSQEYKKYQTNKTTGNTDKRAFVETWQSFYRKKLKEVWKPAV

SEQ ID NO: 27092 - protein, 978 aa, synthetic construct
  REGION 1..978: note = engineered CasX variant
QEIKRINKIRRRLVKDSNTKKAGKTGPMKTLLVRVMTPDLRERLENLRKKPENIPQPISNTSRANLNKLLTDYTEMKKAILHVYWEEFQKDPVGLMSRVAQPASKKIDQNKLKPEMDEKGNLTTAGFACSQCGQPLFVYKLEQVSEKGKAYTNYFGRCNVAEHEKLILLAQLKPEKDSDEAVTYSLGKFGQRALDFYSIHVTKESTHPVKPLAQIAGNRYASGPVGKALSDACMGTIASFLSKYQDIIIEHQKVVKGNQKRLESLRELAGKENLEYPSVTLPPQPHTKEGVDAYNEVIARVRMWVNLNLWQKLKLSRDDAKPLLRLKGFPSFPLVERQANEVDWWDMVCNVKKLINEKKEDGKVFWQNLAGYKRQEALRPYLSSEEDRKKGKKFARYQLGDLLLHLEKKHGEDWGKVYDEAWERIDKKVEGLSKHIKLEEERRSEDAQSKAALTDWLRAKASFVIEGLKEADKDEFCRCELKLQKWYGDLRGKPFAIEAENSILDISGFSKQYNCAFIWQKDGVKKLNLYLIINYFKGGKLRFKKIKPEAFEANRFYTVINKKSGEIVPMEVNFNFDDPNLIILPLAFGKRQGREFIWNDLLSLETGSLKLANGRVIEKTLYNRRTRQDEPALFVALTFERREVLDSSNIKPMNLIGVDRGENIPAVIALTDPEGCPLHRFKDSLGNPTHILRIGETYKEKQRTIQAKKEVEQRRAGGYSRKYASKAKNLADDMVRNTARDLLYYAVTQDAMLIFENLSRGFGRQGKRTFMAERQYTRMEDWLTAKLAYEGLPSKTYLSKTLAQYTSKTCSNCGFTITSADYDRVLEKLKKTATGWMTTINGKELKVEGQITYYNRYKRQNVVKDLSVELDRLSEESVNNDISSWTKGRSGEALSLLKKRFSHRPVQEKFVCLNCGFETHADEQAALNIARSWLFLRSQEYKKYQTNKTTGNTDKRAFVETWQSFYRKKLKEVWKPAV

SEQ ID NO: 27093 - protein, 978 aa, synthetic construct
  REGION 1..978: note = engineered CasX variant
QEIKRINKIRRRLVKDSNTKKAGKTGPMKTLLVRVMTPDLRERLENLRKKPENIPQPISNTSRANLNKLLTDYTEMKKAILHVYWEEFQKDPVGLMSRVAQPASKKIDQNKLKPEMDEKGNLTTAGFACSQCGQPLFVYKLEQVSEKGKAYTNYFGRCNVAEHEKLILLAQLKPEKDSDEAVTYSLGKFGQRALDFYSIHVTKESTHPVKPLAQIAGNRYASGPVGKALSDACMGTIASFLSKYQDIIIEHQKVVKGNQKRLESLRELAGKENLEYPSVTLPPQPHTKEGVDAYNEVIARVRMWVNLNLWQKLKLSRDDAKPLLRLKGFPSFPLVERQANEVDWWDMVCNVKKLINEKKEDGKVFWQNLAGYKRQEALRPYLSSEEDRKKGKKFARYQLGDLLLHLEKKHGEDWGKVYDEAWERIDKKVEGLSKHIKLEEERRSEDAQSKAALTDWLRAKASFVIEGLKEADKDEFCRCELKLQKWYGDLRGKPFAIEAENSILDISGFSKQYNCAFIWQKDGVKKLNLYLIINYFKGGKLRFKKIKPEAFEANRFYTVINKKSGEIVPMEVNFNFDDPNLIILPLAFGKRQGREFIWNDLLSLETGSLKLANGRVIEKTLYNRRTRQDEPALFVALTFERREVLDSSNIKPMNLIGVDRGENIPAVIALTDPEGCPLHRFKDSLGNPTHILRIGETYKEKQRSIQAKKEVEQRRAGGYSRKYASKAKNLADDMVRNTARDLLYYAVTQDAMLIFENLSRGFGRQGKRTFMAERQYTRMEDWLTAKLAYEGLPSKTYLSKTLAQYTSKTCSNCGFTITSADYDRVLEKLKKTATGWMTTINGKELKVEGQITYYNRYKRQNVVKDLSVELDRLSEESVNNDISSWTKGRSGEALSLLKKRFSHRPVQEKFVCLNCGFETHADEQAALNIARSWLFLRSQEYKKYQTNKTTGNTDKRAFVETWQSFYRKKLKEVWKPAV

SEQ ID NO: 27094 - protein, 978 aa, synthetic construct
  REGION 1..978: note = engineered CasX variant
QEIKRINKIRRRLVKDSNTKKAGKTGPMKTLLVRVMTPDLRERLENLRKKPENIPQPISNTSRANLNKLLTDYTEMKKAILHVYWEEFQKDPVGLMSRVAQPASKKIDQNKLKPEMDEKGNLTTAGFACSQCGQPLFVYKLEQVSEKGKAYTNYFGRCNVAEHEKLILLAQLKPEKDSDEAVTYSLGKFGQRALDFYSIHVTKESTHPVKPLAQIAGNRYASGPVGKALSDACMGTIASFLSKYQDIIIEHQKVVKGNQKRLESLRELAGKENLEYPSVTLPPQPHTKEGVDAYNEVIARVRMWVNLNLWQKLKLSRDDAKPLLRLKGFPSFPLVERQANEVDWWDMVCNVKKLINEKKEDGKVFWQNLAGYKRQEALRPYLSSEEDRKKGKKFARYQLGDLLLHLEKKHGEDWGKVYDEAWERIDKKVEGLSKHIKLEEERRSEDAQSKAALTDWLRAKASFVIEGLKEADKDEFCRCELKLQKWYGDLRGKPFAIEAENSILDISGFSKQYNCAFIWQKDGVKKLNLYLIINYFKGGKLRFKKIKPEAFEANRFYTVINKKSGEIVPMEVNFNFDDPNLIILPLAFGKRQGREFIWNDLLSLETGSLKLANGRVIEKTLYNRRTRQDEPALFVALTFERREVLDSSNIKPMNLIGVDRGENIPAVIALTDPEGCPLHRFKDSLGNPTHILRIGESYKEKQRTIQAKKEVEQRRTGGYSRKYASKAKNLADDMVRNTARDLLYYAVTQDAMLIFENLSRGFGRQGKRTFMAERQYTRMEDWLTAKLAYEGLPSKTYLSKTLAQYTSKTCSNCGFTITSADYDRVLEKLKKTATGWMTTINGKELKVEGQITYYNRYKRQNVVKDLSVELDRLSEESVNNDISSWTKGRSGEALSLLKKRFSHRPVQEKFVCLNCGFETHADEQAALNIARSWLFLRSQEYKKYQTNKTTGNTDKRAFVETWQSFYRKKLKEVWKPAV

SEQ ID NO: 27095 - protein, 978 aa, synthetic construct
  REGION 1..978: note = engineered CasX variant
QEIKRINKIRRRLVKDSNTKKAGKTGPMKTLLVRVMTPDLRERLENLRKKPENIPQPISNTSRANLNKLLTDYTEMKKAILHVYWEEFQKDPVGLMSRVAQPASKKIDQNKLKPEMDEKGNLTTAGFACSQCGQPLFVYKLEQVSEKGKAYTNYFGRCNVAEHEKLILLAQLKPEKDSDEAVTYSLGKFGQRALDFYSIHVTKESTHPVKPLAQIAGNRYASGPVGKALSDACMGTIASFLSKYQDIIIEHQKVVKGNQKRLESLRELAGKENLEYPSVTLPPQPHTKEGVDAYNEVIARVRMWVNLNLWQKLKLSRDDAKPLLRLKGFPSFPLVERQANEVDWWDMVCNVKKLINEKKEDGKVFWQNLAGYKRQEALRPYLSSEEDRKKGKKFARYQLGDLLLHLEKKHGEDWGKVYDEAWERIDKKVEGLSKHIKLEEERRSEDAQSKAALTDWLRAKASFVIEGLKEADKDEFCRCELKLQKWYGDLRGKPFAIEAENSILDISGFSKQYNCAFIWQKDGVKKLNLYLIINYFKGGKLRFKKIKPEAFEANRFYTVINKKSGEIVPMEVNFNFDDPNLIILPLAFGKRQGREFIWNDLLSLETGSLKLANGRVIEKTLYNRRTRQDEPALFVALTFERREVLDSSNIKPMNLIGVDRGENIPAVIALTDPEGCPLHRFKDSLGNPTHILRIGESYKEKQRTIQAKKEVEQRRAGGYSRKYASKAKNLADDMVRNTARDLLYYAVTQDAMLIFENLSRGFGRQGKRTFMAERQYTRMEDWLTAKLAYEGLPSKTYLSKTLAQYTSKTCSNCGFTITSADYDRVLEKLKKTATGWMTTINGKELKVEGQITYYNRYKRQNVVKDLSVELDRLSEESVNNDISSWTKGRSGEALSLLKKRFSHRPVQEKFVCLNCGFETHADEQAALNIARSWLFLRSQEYKKYQTNKTTGNTDKRAFVETWQSFYRKKLKEVWKPAV

SEQ ID NO: 27096 - protein, 978 aa, synthetic construct
  REGION 1..978: note = engineered CasX variant
QEIKRINKIRRRLVKDSNTKKAGKTGPMKTLLVRVMTPDLRERLENLRKKPENIPQPISNTSRANLNKLLTDYTEMKKAILHVYWEEFQKDPVGLMSRVAQPASKKIDQNKLKPEMDEKGNLTTAGFACSQCGQPLFVYKLEQVSEKGKAYTNYFGRCNVAEHEKLILLAQLKPEKDSDEAVTYSLGKFGQRALDFYSIHVTKESTHPVKPLAQIAGNRYASGPVGKALSDACMGTIASFLSKYQDIIIEHQKVVKGNQKRLESLRELAGKENLEYPSVTLPPQPHTKEGVDAYNEVIARVRMWVNLNLWQKLKLSRDDAKPLLRLKGFPSFPLVERQANEVDWWDMVCNVKKLINEKKEDGKVFWQNLAGYKRQEALRPYLSSEEDRKKGKKFARYQLGDLLLHLEKKHGEDWGKVYDEAWERIDKKVEGLSKHIKLEEERRSEDAQSKAALTDWLRAKASFVIEGLKEADKDEFCRCELKLQKWYGDLRGKPFAIEAENSILDISGFSKQYNCAFIWQKDGVKKLNLYLIINYFKGGKLRFKKIKPEAFEANRFYTVINKKSGEIVPMEVNFNFDDPNLIILPLAFGKRQGREFIWNDLLSLETGSLKLANGRVIEKTLYNRRTRQDEPALFVALTFERREVLDSSNIKPMNLIGVDRGENIPAVIALTDPEGCPLHRFKDSLGNPTHILRIGESYKEKQRTIQAKKEQEQRRAGGYSRKYASKAKNLADDMVRNTARDLLYYAVTQDAMLIFENLSRGFGRQGKRTFMAERQYTRMEDWLTAKLAYEGLPSKTYLSKTLAQYTSKTCSNCGFTITSADYDRVLEKLKKTATGWMTTINGKELKVEGQITYYNRYKRQNVVKDLSVELDRLSEESVNNDISSWTKGRSGEALSLLKKRFSHRPVQEKFVCLNCGFETHADEQAALNIARSWLFLRSQEYKKYQTNKTTGNTDKRAFVETWQSFYRKKLKEVWKPAV

SEQ ID NO: 27097 - protein, 978 aa, synthetic construct
  REGION 1..978: note = engineered CasX variant
QEIKRINKIRRRLVKDSNTKKAGKTGPMKTLLVRVMTPDLRERLENLRKKPENIPQPISNTSRANLNKLLTDYTEMKKAILHVYWEEFQKDPVGLMSRVAQPASKKIDQNKLKPEMDEKGNLTTAGFACSQCGQPLFVYKLEQVSEKGKAYTNYFGRCNVAEHEKLILLAQLKPEKDSDEAVTYSLGKFGQRALDFYSIHVTKESTHPVKPLAQIAGNRYASGPVGKALSDACMGTIASFLSKYQDIIIEHQKVVKGNQKRLESLRELAGKENLEYPSVTLPPQPHTKEGVDAYNEVIARVRMWVNLNLWQKLKLSRDDAKPLLRLKGFPSFPLVERQANEVDWWDMVCNVKKLINEKKEDGKVFWQNLAGYKRQEALRPYLSSEEDRKKGKKFARYQLGDLLLHLEKKHGEDWGKVYDEAWERIDKKVEGLSKHIKLEEERRSEDAQSKAALTDWLRAKASFVIEGLKEADKDEFCRCELKLQKWYGDLRGKPFAIEAENSILDISGFSKQYNCAFIWQKDGVKKLNLYLIINYFKGGKLRFKKIKPEAFEANRFYTVINKKSGEIVPMEVNFNFDDPNLIILPLAFGKRQGREFIWNDLLSLETGSLKLANGRVIEKTLYNRRTRQDEPALFVALTFERREVLDSSNIKPMNLIGVDRGENIPAVIALTDPEGCPLHRFKDSLGNPTHILRIGESYKEKQRTIQAFKEVEQRRAGGYSRKYASKAKNLADDMVRNTARDLLYYAVTQDAMLIFENLSRGFGRQGKRTFMAERQYTRMEDWLTAKLAYEGLPSKTYLSKTLAQYTSKTCSNCGFTITSADYDRVLEKLKKTATGWMTTINGKELKVEGQITYYNRYKRQNVVKDLSVELDRLSEESVNNDISSWTKGRSGEALSLLKKRFSHRPVQEKFVCLNCGFETHADEQAALNIARSWLFLRSQEYKKYQTNKTTGNTDKRAFVETWQSFYRKKLKEVWKPAV

SEQ ID NO: 27098 - protein, 978 aa, synthetic construct
  REGION 1..978: note = engineered CasX variant
QEIKRINKIRRRLVKDSNTKKAGKTGPMKTLLVRVMTPDLRERLENLRKKPENIPQPISNTSRANLNKLLTDYTEMKKAILHVYWEEFQKDPVGLMSRVAQPASKKIDQNKLKPEMDEKGNLTTAGFACSQCGQPLFVYKLEQVSEKGKAYTNYFGRCNVAEHEKLILLAQLKPEKDSDEAVTYSLGKFGQRALDFYSIHVTKESTHPVKPLAQIAGNRYASGPVGKALSDACMGTIASFLSKYQDIIIEHQKVVKGNQKRLESLRELAGKENLEYPSVTLPPQPHTKEGVDAYNEVIARVRMWVNLNLWQKLKLSRDDAKPLLRLKGFPSFPLVERQANEVDWWDMVCNVKKLINEKKEDGKVFWQNLAGYKRQEALRPYLSSEEDRKKGKKFARYQLGDLLLHLEKKHGEDWGKVYDEAWERIDKKVEGLSKHIKLEEERRSEDAQSKAALTDWLRAKASFVIEGLKEADKDEFCRCELKLQKWYGDLRGKPFAIEAENSILDISGFSKQYNCAFIWQKDGVKKLNLYLIINYFKGGKLRFKKIKPEAFEANRFYTVINKKSGEIVPMEVNFNFDDPNLIILPLAFGKRQGREFIWNDLLSLETGSLKLANGRVIEKTLYNRRTRQDEPALFVALTFERREVLDSSNIKPMNLIGVDRGENIPAVIALTDPEGCPLHRFKDSLGNPTHILRIGESYKEKQRSIQAKKEVEQRRAGGYSRKYASKAKNLADDMVRNTARDLLYYAVTQDAMLIFENLSRGFGRQGKRTFMAERQYTRMEDWLTAKLAYEGLPSKTYLSKTLAQYTSKTCSNCGFTITSADYDRVLEKLKKTATGWMTTINGKELKVEGQITYYNRYKRQNVVKDLSVELDRLSEESVNNDISSWTKGRSGEALSLLKKRFSHRPVQEKFVCLNCGFETHADEQAALNIARSWLFLRSQEYKKYQTNKTTGNTDKRAFVETWQSFYRKKLKEVWKPAV

SEQ ID NO: 27099 - protein, 978 aa, synthetic construct
  REGION 1..978: note = engineered CasX variant
QEIKRINKIRRRLVKDSNTKKAGKTGPMKTLLVRVMTPDLRERLENLRKKPENIPQPISNTSRANLNKLLTDYTEMKKAILHVYWEEFQKDPVGLMSRVAQPASKKIDQNKLKPEMDEKGNLTTAGFACSQCGQPLFVYKLEQVSEKGKAYTNYFGRCNVAEHEKLILLAQLKPEKDSDEAVTYSLGKFGQRALDFYSIHVTKESTHPVKPLAQIAGNRYASGPVGKALSDACMGTIASFLSKYQDIIIEHQKVVKGNQKRLESLRELAGKENLEYPSVTLPPQPHTKEGVDAYNEVIARVRMWVNLNLWQKLKLSRDDAKPLLRLKGFPSFPLVERQANEVDWWDMVCNVKKLINEKKEDGKVFWQNLAGYKRQEALRPYLSSEEDRKKGKKFARYQLGDLLLHLEKKHGEDWGKVYDEAWERIDKKVEGLSKHIKLEEERRSEDAQSKAALTDWLRAKASFVIEGLKEADKDEFCRCELKLQKWYGDLRGKPFAIEAENSILDISGFSKQYNCAFIWQKDGVKKLNLYLIINYFKGGKLRFKKIKPEAFEANRFYTVINKKSGEIVPMEVNFNFDDPNLIILPLAFGKRQGREFIWNDLLSLETGSLKLANGRVIEKTLYNRRTRQDEPALFVALTFERREVLDSSNIKPMNLIGVDRGENIPAVIALTDPEGCPLHRFKDSGGNPTHILRIGESYKEKQRTIQAKKEVEQRRTGGYSRKYASKAKNLADDMVRNTARDLLYYAVTQDAMLIFENLSRGFGRQGKRTFMAERQYTRMEDWLTAKLAYEGLPSKTYLSKTLAQYTSKTCSNCGFTITSADYDRVLEKLKKTATGWMTTINGKELKVEGQITYYNRYKRQNVVKDLSVELDRLSEESVNNDISSWTKGRSGEALSLLKKRFSHRPVQEKFVCLNCGFETHADEQAALNIARSWLFLRSQEYKKYQTNKTTGNTDKRAFVETWQSFYRKKLKEVWKPAV

SEQ ID NO: 27100 - protein, 978 aa, synthetic construct
  REGION 1..978: note = engineered CasX variant
QEIKRINKIRRRLVKDSNTKKAGKTGPMKTLLVRVMTPDLRERLENLRKKPENIPQPISNTSRANLNKLLTDYTEMKKAILHVYWEEFQKDPVGLMSRVAQPASKKIDQNKLKPEMDEKGNLTTAGFACSQCGQPLFVYKLEQVSEKGKAYTNYFGRCNVAEHEKLILLAQLKPEKDSDEAVTYSLGKFGQRALDFYSIHVTKESTHPVKPLAQIAGNRYASGPVGKALSDACMGTIASFLSKYQDIIIEHQKVVKGNQKRLESLRELAGKENLEYPSVTLPPQPHTKEGVDAYNEVIARVRMWVNLNLWQKLKLSRDDAKPLLRLKGFPSFPLVERQANEVDWWDMVCNVKKLINEKKEDGKVFWQNLAGYKRQEALRPYLSSEEDRKKGKKFARYQLGDLLLHLEKKHGEDWGKVYDEAWERIDKKVEGLSKHIKLEEERRSEDAQSKAALTDWLRAKASFVIEGLKEADKDEFCRCELKLQKWYGDLRGKPFAIEAENSILDISGFSKQYNCAFIWQKDGVKKLNLYLIINYFKGGKLRFKKIKPEAFEANRFYTVINKKSGEIVPMEVNFNFDDPNLIILPLAFGKRQGREFIWNDLLSLETGSLKLANGRVIEKTLYNRRTRQDEPALFVALTFERREVLDSSNIKPMNLIGVDRGENIPAVIALTDPEGCPLHRFKDSGGNPTHILRIGESYKEKQRTIQAKKEVEQRRAGGYSRKYASKAKNLADDMVRNTARDLLYYAVTQDAMLIFENLSRGFGRQGKRTFMAERQYTRMEDWLTAKLAYEGLPSKTYLSKTLAQYTSKTCSNCGFTITSADYDRVLEKLKKTATGWMTTINGKELKVEGQITYYNRYKRQNVVKDLSVELDRLSEESVNNDISSWTKGRSGEALSLLKKRFSHRPVQEKFVCLNCGFETHADEQAALNIARSWLFLRSQEYKKYQTNKTTGNTDKRAFVETWQSFYRKKLKEVWKPAV

SEQ ID NO: 27101 - protein, 978 aa, synthetic construct
  REGION 1..978: note = engineered CasX variant
QEIKRINKIRRRLVKDSNTKKAGKTGPMKTLLVRVMTPDLRERLENLRKKPENIPQPISNTSRANLNKLLTDYTEMKKAILHVYWEEFQKDPVGLMSRVAQPASKKIDQNKLKPEMDEKGNLTTAGFACSQCGQPLFVYKLEQVSEKGKAYTNYFGRCNVAEHEKLILLAQLKPEKDSDEAVTYSLGKFGQRALDFYSIHVTKESTHPVKPLAQIAGNRYASGPVGKALSDACMGTIASFLSKYQDIIIEHQKVVKGNQKRLESLRELAGKENLEYPSVTLPPQPHTKEGVDAYNEVIARVRMWVNLNLWQKLKLSRDDAKPLLRLKGFPSFPLVERQANEVDWWDMVCNVKKLINEKKEDGKVFWQNLAGYKRQEALRPYLSSEEDRKKGKKFARYQLGDLLLHLEKKHGEDWGKVYDEAWERIDKKVEGLSKHIKLEEERRSEDAQSKAALTDWLRAKASFVIEGLKEADKDEFCRCELKLQKWYGDLRGKPFAIEAENSILDISGFSKQYNCAFIWQKDGVKKLNLYLIINYFKGGKLRFKKIKPEAFEANRFYTVINKKSGEIVPMEVNFNFDDPNLIILPLAFGKRQGREFIWNDLLSLETGSLKLANGRVIEKTLYNRRTRQDEPALFVALTFERREVLDSSNIKPMNLIGVDRGENIPAVIALTDPEGCPLGRFKDSQGNPTHILRIGESYKEKQRTIQAKKEVEQRRAGGYSRKYASKAKNLADDMVRNTARDLLYYAVTQDAMLIFENLSRGFGRQGKRTFMAERQYTRMEDWLTAKLAYEGLPSKTYLSKTLAQYTSKTCSNCGFTITSADYDRVLEKLKKTATGWMTTINGKELKVEGQITYYNRYKRQNVVKDLSVELDRLSEESVNNDISSWTKGRSGEALSLLKKRFSHRPVQEKFVCLNCGFETHADEQAALNIARSWLFLRSQEYKKYQTNKTTGNTDKRAFVETWQSFYRKKLKEVWKPAV

SEQ ID NO: 27102 - protein, 978 aa, synthetic construct
  REGION 1..978: note = engineered CasX variant
QEIKRINKIRRRLVKDSNTKKAGKTGPMKTLLVRVMTPDLRERLENLRKKPENIPQPISNTSRANLNKLLTDYTEMKKAILHVYWEEFQKDPVGLMSRVAQPASKKIDQNKLKPEMDEKGNLTTAGFACSQCGQPLFVYKLEQVSEKGKAYTNYFGRCNVAEHEKLILLAQLKPEKDSDEAVTYSLGKFGQRALDFYSIHVTKESTHPVKPLAQIAGNRYASGPVGKALSDACMGTIASFLSKYQDIIIEHQKVVKGNQKRLESLRELAGKENLEYPSVTLPPQPHTKEGVDAYNEVIARVRMWVNLNLWQKLKLSRDDAKPLLRLKGFPSFPLVERQANEVDWWDMVCNVKKLINEKKEDGKVFWQNLAGYKRQEALRPYLSSEEDRKKGKKFARYQLGDLLLHLEKKHGEDWGKVYDEAWERIDKKVEGLSKHIKLEEERRSEDAQSKAALTDWLRAKASFVIEGLKEADKDEFCRCELKLQKWYGDLRGKPFAIEAENSILDISGFSKQYNCAFIWQKDGVKKLNLYLIINYFKGGKLRFKKIKPEAFEANRFYTVINKKSGEIVPMEVNFNFDDPNLIILPLAFGKRQGREFIWNDLLSLETGSLKLANGRVIEKTLYNRRTRQDEPALFVALTFERREVLDSSNIKPMNLIGVDRGENIPAVIALTDPEGCPLGRFKDSLGNPTHILRIGESYKEKQRTIQAKKEVEQRRAGGYSRKYASKAKNLADDMVRNTARDLLYYAVTQDAMLIFENLSRGFGRQGKRTFMAERQYTRMEDWLTAKLAYEGLPSKTYLSKTLAQYTSKTCSNCGFTITSADYDRVLEKLKKTATGWMTTINGKELKVEGQITYYNRYKRQNVVKDLSVELDRLSEESVNNDISSWTKGRSGEALSLLKKRFSHRPVQEKFVCLNCGFETHADEQAALNIARSWLFLRSQEYKKYQTNKTTGNTDKRAFVETWQSFYRKKLKEVWKPAV

SEQ ID NO: 27103 - protein, 978 aa, synthetic construct
  REGION 1..978: note = engineered CasX variant
QEIKRINKIRRRLVKDSNTKKAGKTGPMKTLLVRVMTPDLRERLENLRKKPENIPQPISNTSRANLNKLLTDYTEMKKAILHVYWEEFQKDPVGLMSRVAQPASKKIDQNKLKPEMDEKGNLTTAGFACSQCGQPLFVYKLEQVSEKGKAYTNYFGRCNVAEHEKLILLAQLKPEKDSDEAVTYSLGKFGQRALDFYSIHVTKESTHPVKPLAQIAGNRYASGPVGKALSDACMGTIASFLSKYQDIIIEHQKVVKGNQKRLESLRELAGKENLEYPSVTLPPQPHTKEGVDAYNEVIARVRMWVNLNLWQKLKLSRDDAKPLLRLKGFPSFPLVERQANEVDWWDMVCNVKKLINEKKEDGKVFWQNLAGYKRQEALRPYLSSEEDRKKGKKFARYQLGDLLLHLEKKHGEDWGKVYDEAWERIDKKVEGLSKHIKLEEERRSEDAQSKAALTDWLRAKASFVIEGLKEADKDEFCRCELKLQKWYGDLRGKPFAIEAENSILDISGFSKQYNCAFIWQKDGVKKLNLYLIINYFKGGKLRFKKIKPEAFEANRFYTVINKKSGEIVPMEVNFNFDDPNLIILPLAFGKRQGREFIWNDLLSLETGSLKLANGRVIEKTLYNRRTRQDEPALFVALTFERREVLDSSNIKPMNLIGVDRGENIPAVIALTDPEGCPLGRFKDSEGNPTHILRIGESYKEKQRTIQAKKEVEQRRAGGYSRKYASKAKNLADDMVRNTARDLLYYAVTQDAMLIFENLSRGFGRQGKRTFMAERQYTRMEDWLTAKLAYEGLPSKTYLSKTLAQYTSKTCSNCGFTITSADYDRVLEKLKKTATGWMTTINGKELKVEGQITYYNRYKRQNVVKDLSVELDRLSEESVNNDISSWTKGRSGEALSLLKKRFSHRPVQEKFVCLNCGFETHADEQAALNIARSWLFLRSQEYKKYQTNKTTGNTDKRAFVETWQSFYRKKLKEVWKPAV

SEQ ID NO: 27104 - protein, 978 aa, synthetic construct
  REGION 1..978: note = engineered CasX variant
QEIKRINKIRRRLVKDSNTKKAGKTGPMKTLLVRVMTPDLRERLENLRKKPENIPQPISNTSRANLNKLLTDYTEMKKAILHVYWEEFQKDPVGLMSRVAQPASKKIDQNKLKPEMDEKGNLTTAGFACSQCGQPLFVYKLEQVSEKGKAYTNYFGRCNVAEHEKLILLAQLKPEKDSDEAVTYSLGKFGQRALDFYSIHVTKESTHPVKPLAQIAGNRYASGPVGKALSDACMGTIASFLSKYQDIIIEHQKVVKGNQKRLESLRELAGKENLEYPSVTLPPQPHTKEGVDAYNEVIARVRMWVNLNLWQKLKLSRDDAKPLLRLKGFPSFPLVERQANEVDWWDMVCNVKKLINEKKEDGKVFWQNLAGYKRQEALRPYLSSEEDRKKGKKFARYQLGDLLLHLEKKHGEDWGKVYDEAWERIDKKVEGLSKHIKLEEERRSEDAQSKAALTDWLRAKASFVIEGLKEADKDEFCRCELKLQKWYGDLRGKPFAIEAENSILDISGFSKQYNCAFIWQKDGVKKLNLYLIINYFKGGKLRFKKIKPEAFEANRFYTVINKKSGEIVPMEVNFNFDDPNLIILPLAFGKRQGREFIWNDLLSLETGSLKLANGRVIEKTLYNRRTRQDEPALFVALTFERREVLDSSNIKPMNLIGVDRGENIPAVIALTDPEGCPLGRFKDHQGNPTHILRIGESYKEKQRTIQAKKEVEQRRAGGYSRKYASKAKNLADDMVRNTARDLLYYAVTQDAMLIFENLSRGFGRQGKRTFMAERQYTRMEDWLTAKLAYEGLPSKTYLSKTLAQYTSKTCSNCGFTITSADYDRVLEKLKKTATGWMTTINGKELKVEGQITYYNRYKRQNVVKDLSVELDRLSEESVNNDISSWTKGRSGEALSLLKKRFSHRPVQEKFVCLNCGFETHADEQAALNIARSWLFLRSQEYKKYQTNKTTGNTDKRAFVETWQSFYRKKLKEVWKPAV

SEQ ID NO: 27105 - protein, 978 aa, synthetic construct
  REGION 1..978: note = engineered CasX variant
QEIKRINKIRRRLVKDSNTKKAGKTGPMKTLLVRVMTPDLRERLENLRKKPENIPQPISNTSRANLNKLLTDYTEMKKAILHVYWEEFQKDPVGLMSRVAQPASKKIDQNKLKPEMDEKGNLTTAGFACSQCGQPLFVYKLEQVSEKGKAYTNYFGRCNVAEHEKLILLAQLKPEKDSDEAVTYSLGKFGQRALDFYSIHVTKESTHPVKPLAQIAGNRYASGPVGKALSDACMGTIASFLSKYQDIIIEHQKVVKGNQKRLESLRELAGKENLEYPSVTLPPQPHTKEGVDAYNEVIARVRMWVNLNLWQKLKLSRDDAKPLLRLKGFPSFPLVERQANEVDWWDMVCNVKKLINEKKEDGKVFWQNLAGYKRQEALRPYLSSEEDRKKGKKFARYQLGDLLLHLEKKHGEDWGKVYDEAWERIDKKVEGLSKHIKLEEERRSEDAQSKAALTDWLRAKASFVIEGLKEADKDEFCRCELKLQKWYGDLRGKPFAIEAENSILDISGFSKQYNCAFIWQKDGVKKLNLYLIINYFKGGKLRFKKIKPEAFEANRFYTVINKKSGEIVPMEVNFNFDDPNLIILPLAFGKRQGREFIWNDLLSLETGSLKLANGRVIEKTLYNRRTRQDEPALFVALTFERREVLDSSNIKPMNLIGVDRGENIPAVIALTDPEGCPLGRFKDHLGNPTHILRIGESYKEKQRTIQAKKEVEQRRAGGYSRKYASKAKNLADDMVRNTARDLLYYAVTQDAMLIFENLSRGFGRQGKRTFMAERQYTRMEDWLTAKLAYEGLPSKTYLSKTLAQYTSKTCSNCGFTITSADYDRVLEKLKKTATGWMTTINGKELKVEGQITYYNRYKRQNVVKDLSVELDRLSEESVNNDISSWTKGRSGEALSLLKKRFSHRPVQEKFVCLNCGFETHADEQAALNIARSWLFLRSQEYKKYQTNKTTGNTDKRAFVETWQSFYRKKLKEVWKPAV

SEQ ID NO: 27106 - protein, 978 aa, synthetic construct
  REGION 1..978: note = engineered CasX variant
QEIKRINKIRRRLVKDSNTKKAGKTGPMKTLLVRVMTPDLRERLENLRKKPENIPQPISNTSRANLNKLLTDYTEMKKAILHVYWEEFQKDPVGLMSRVAQPASKKIDQNKLKPEMDEKGNLTTAGFACSQCGQPLFVYKLEQVSEKGKAYTNYFGRCNVAEHEKLILLAQLKPEKDSDEAVTYSLGKFGQRALDFYSIHVTKESTHPVKPLAQIAGNRYASGPVGKALSDACMGTIASFLSKYQDIIIEHQKVVKGNQKRLESLRELAGKENLEYPSVTLPPQPHTKEGVDAYNEVIARVRMWVNLNLWQKLKLSRDDAKPLLRLKGFPSFPLVERQANEVDWWDMVCNVKKLINEKKEDGKVFWQNLAGYKRQEALRPYLSSEEDRKKGKKFARYQLGDLLLHLEKKHGEDWGKVYDEAWERIDKKVEGLSKHIKLEEERRSEDAQSKAALTDWLRAKASFVIEGLKEADKDEFCRCELKLQKWYGDLRGKPFAIEAENSILDISGFSKQYNCAFIWQKDGVKKLNLYLIINYFKGGKLRFKKIKPEAFEANRFYTVINKKSGEIVPMEVNFNFDDPNLIILPLAFGKRQGREFIWNDLLSLETGSLKLANGRVIEKTLYNRRTRQDEPALFVALTFERREVLDSSNIKPMNLIGVDRGENIPAVIALTDPEGCPLFRFKDSSGNPTHILRIGESYKEKQRTIQAKKEVEQRRAGGYSRKYASKAKNLADDMVRNTARDLLYYAVTQDAMLIFENLSRGFGRQGKRTFMAERQYTRMEDWLTAKLAYEGLPSKTYLSKTLAQYTSKTCSNCGFTITSADYDRVLEKLKKTATGWMTTINGKELKVEGQITYYNRYKRQNVVKDLSVELDRLSEESVNNDISSWTKGRSGEALSLLKKRFSHRPVQEKFVCLNCGFETHADEQAALNIARSWLFLRSQEYKKYQTNKTTGNTDKRAFVETWQSFYRKKLKEVWKPAV

SEQ ID NO: 27107 - protein, 978 aa, synthetic construct
  REGION 1..978: note = engineered CasX variant
QEIKRINKIRRRLVKDSNTKKAGKTGPMKTLLVRVMTPDLRERLENLRKKPENIPQPISNTSRANLNKLLTDYTEMKKAILHVYWEEFQKDPVGLMSRVAQPASKKIDQNKLKPEMDEKGNLTTAGFACSQCGQPLFVYKLEQVSEKGKAYTNYFGRCNVAEHEKLILLAQLKPEKDSDEAVTYSLGKFGQRALDFYSIHVTKESTHPVKPLAQIAGNRYASGPVGKALSDACMGTIASFLSKYQDIIIEHQKVVKGNQKRLESLRELAGKENLEYPSVTLPPQPHTKEGVDAYNEVIARVRMWVNLNLWQKLKLSRDDAKPLLRLKGFPSFPLVERQANEVDWWDMVCNVKKLINEKKEDGKVFWQNLAGYKRQEALRPYLSSEEDRKKGKKFARYQLGDLLLHLEKKHGEDWGKVYDEAWERIDKKVEGLSKHIKLEEERRSEDAQSKAALTDWLRAKASFVIEGLKEADKDEFCRCELKLQKWYGDLRGKPFAIEAENSILDISGFSKQYNCAFIWQKDGVKKLNLYLIINYFKGGKLRFKKIKPEAFEANRFYTVINKKSGEIVPMEVNFNFDDPNLIILPLAFGKRQGREFIWNDLLSLETGSLKLANGRVIEKTLYNRRTRQDEPALFVALTFERREVLDSSNIKPMNLIGVDRGENIPAVIALTDPEGCPLFRFKDSLGNPTHILRIGESYKEKQRTIQAYKEVEQRRAGGYSRKYASKAKNLADDMVRNTARDLLYYAVTQDAMLIFENLSRGFGRQGKRTFMAERQYTRMEDWLTAKLAYEGLPSKTYLSKTLAQYTSKTCSNCGFTITSADYDRVLEKLKKTATGWMTTINGKELKVEGQITYYNRYKRQNVVKDLSVELDRLSEESVNNDISSWTKGRSGEALSLLKKRFSHRPVQEKFVCLNCGFETHADEQAALNIARSWLFLRSQEYKKYQTNKTTGNTDKRAFVETWQSFYRKKLKEVWKPAV

SEQ ID NO: 27108 - protein, 978 aa, synthetic construct
  REGION 1..978: note = engineered CasX variant
QEIKRINKIRRRLVKDSNTKKAGKTGPMKTLLVRVMTPDLRERLENLRKKPENIPQPISNTSRANLNKLLTDYTEMKKAILHVYWEEFQKDPVGLMSRVAQPASKKIDQNKLKPEMDEKGNLTTAGFACSQCGQPLFVYKLEQVSEKGKAYTNYFGRCNVAEHEKLILLAQLKPEKDSDEAVTYSLGKFGQRALDFYSIHVTKESTHPVKPLAQIAGNRYASGPVGKALSDACMGTIASFLSKYQDIIIEHQKVVKGNQKRLESLRELAGKENLEYPSVTLPPQPHTKEGVDAYNEVIARVRMWVNLNLWQKLKLSRDDAKPLLRLKGFPSFPLVERQANEVDWWDMVCNVKKLINEKKEDGKVFWQNLAGYKRQEALRPYLSSEEDRKKGKKFARYQLGDLLLHLEKKHGEDWGKVYDEAWERIDKKVEGLSKHIKLEEERRSEDAQSKAALTDWLRAKASFVIEGLKEADKDEFCRCELKLQKWYGDLRGKPFAIEAENSILDISGFSKQYNCAFIWQKDGVKKLNLYLIINYFKGGKLRFKKIKPEAFEANRFYTVINKKSGEIVPMEVNFNFDDPNLIILPLAFGKRQGREFIWNDLLSLETGSLKLANGRVIEKTLYNRRTRQDEPALFVALTFERREVLDSSNIKPMNLIGVDRGENIPAVIALTDPEGCPLFRFKDSLGNPTHILRIGESYKEKQRTIQAKKEVEQRRAGGYSRKYASKAKNLADDMVRNTARDLLYYAVTQDAMLIFENLSRGFGRQGKRTFMAERQYTRMEDWLTAKLAYEGLPSKTYLSKTLAQYTSKTCSNCGFTITSADYDRVLEKLKKTATGWMTTINGKELKVEGQITYYNRYKRQNVVKDLSVELDRLSEESVNNDISSWTKGRSGEALSLLKKRFSHRPVQEKFVCLNCGFETHADEQAALNIARSWLFLRSQEYKKYQTNKTTGNTDKRAFVETWQSFYRKKLKEVWKPAV

SEQ ID NO: 27109 - protein, 978 aa, synthetic construct
  REGION 1..978: note = engineered CasX variant
QEIKRINKIRRRLVKDSNTKKAGKTGPMKTLLVRVMTPDLRERLENLRKKPENIPQPISNTSRANLNKLLTDYTEMKKAILHVYWEEFQKDPVGLMSRVAQPASKKIDQNKLKPEMDEKGNLTTAGFACSQCGQPLFVYKLEQVSEKGKAYTNYFGRCNVAEHEKLILLAQLKPEKDSDEAVTYSLGKFGQRALDFYSIHVTKESTHPVKPLAQIAGNRYASGPVGKALSDACMGTIASFLSKYQDIIIEHQKVVKGNQKRLESLRELAGKENLEYPSVTLPPQPHTKEGVDAYNEVIARVRMWVNLNLWQKLKLSRDDAKPLLRLKGFPSFPLVERQANEVDWWDMVCNVKKLINEKKEDGKVFWQNLAGYKRQEALRPYLSSEEDRKKGKKFARYQLGDLLLHLEKKHGEDWGKVYDEAWERIDKKVEGLSKHIKLEEERRSEDAQSKAALTDWLRAKASFVIEGLKEADKDEFCRCELKLQKWYGDLRGKPFAIEAENSILDISGFSKQYNCAFIWQKDGVKKLNLYLIINYFKGGKLRFKKIKPEAFEANRFYTVINKKSGEIVPMEVNFNFDDPNLIILPLAFGKRQGREFIWNDLLSLETGSLKLANGRVIEKTLYNRRTRQDEPALFVALTFERREVLDSSNIKPMNLIGVDRGENIPAVIALTDPEGCPLERFPDSLGNPTHILRIGESYKGKQRTIQAKKEVEQRRAGGYSRKYASKAKNLADDMVRNTARDLLYYAVTQDAMLIFENLSRGFGRQGKRTFMAERQYTRMEDWLTAKLAYEGLPSKTYLSKTLAQYTSKTCSNCGFTITSADYDRVLEKLKKTATGWMTTINGKELKVEGQITYYNRYKRQNVVKDLSVELDRLSEESVNNDISSWTKGRSGEALSLLKKRFSHRPVQEKFVCLNCGFETHADEQAALNIARSWLFLRSQEYKKYQTNKTTGNTDKRAFVETWQSFYRKKLKEVWKPAV

SEQ ID NO: 27110 - protein, 978 aa, synthetic construct
  REGION 1..978: note = engineered CasX variant
QEIKRINKIRRRLVKDSNTKKAGKTGPMKTLLVRVMTPDLRERLENLRKKPENIPQPISNTSRANLNKLLTDYTEMKKAILHVYWEEFQKDPVGLMSRVAQPASKKIDQNKLKPEMDEKGNLTTAGFACSQCGQPLFVYKLEQVSEKGKAYTNYFGRCNVAEHEKLILLAQLKPEKDSDEAVTYSLGKFGQRALDFYSIHVTKESTHPVKPLAQIAGNRYASGPVGKALSDACMGTIASFLSKYQDIIIEHQKVVKGNQKRLESLRELAGKENLEYPSVTLPPQPHTKEGVDAYNEVIARVRMWVNLNLWQKLKLSRDDAKPLLRLKGFPSFPLVERQANEVDWWDMVCNVKKLINEKKEDGKVFWQNLAGYKRQEALRPYLSSEEDRKKGKKFARYQLGDLLLHLEKKHGEDWGKVYDEAWERIDKKVEGLSKHIKLEEERRSEDAQSKAALTDWLRAKASFVIEGLKEADKDEFCRCELKLQKWYGDLRGKPFAIEAENSILDISGFSKQYNCAFIWQKDGVKKLNLYLIINYFKGGKLRFKKIKPEAFEANRFYTVINKKSGEIVPMEVNFNFDDPNLIILPLAFGKRQGREFIWNDLLSLETGSLKLANGRVIEKTLYNRRTRQDEPALFVALTFERREVLDSSNIKPMNLIGVDRGENIPAVIALTDPEGCPLERFKDSLGRPTHILRIGESYKEKQRTIQAKKEVEQRRAGGYSRKYASKAKNLADDMVRNTARDLLYYAVTQDAMLIFENLSRGFGRQGKRTFMAERQYTRMEDWLTAKLAYEGLPSKTYLSKTLAQYTSKTCSNCGFTITSADYDRVLEKLKKTATGWMTTINGKELKVEGQITYYNRYKRQNVVKDLSVELDRLSEESVNNDISSWTKGRSGEALSLLKKRFSHRPVQEKFVCLNCGFETHADEQAALNIARSWLFLRSQEYKKYQTNKTTGNTDKRAFVETWQSFYRKKLKEVWKPAV

SEQ ID NO: 27111 - protein, 978 aa, synthetic construct
  REGION 1..978: note = engineered CasX variant
QEIKRINKIRRRLVKDSNTKKAGKTGPMKTLLVRVMTPDLRERLENLRKKPENIPQPISNTSRANLNKLLTDYTEMKKAILHVYWEEFQKDPVGLMSRVAQPASKKIDQNKLKPEMDEKGNLTTAGFACSQCGQPLFVYKLEQVSEKGKAYTNYFGRCNVAEHEKLILLAQLKPEKDSDEAVTYSLGKFGQRALDFYSIHVTKESTHPVKPLAQIAGNRYASGPVGKALSDACMGTIASFLSKYQDIIIEHQKVVKGNQKRLESLRELAGKENLEYPSVTLPPQPHTKEGVDAYNEVIARVRMWVNLNLWQKLKLSRDDAKPLLRLKGFPSFPLVERQANEVDWWDMVCNVKKLINEKKEDGKVFWQNLAGYKRQEALRPYLSSEEDRKKGKKFARYQLGDLLLHLEKKHGEDWGKVYDEAWERIDKKVEGLSKHIKLEEERRSEDAQSKAALTDWLRAKASFVIEGLKEADKDEFCRCELKLQKWYGDLRGKPFAIEAENSILDISGFSKQYNCAFIWQKDGVKKLNLYLIINYFKGGKLRFKKIKPEAFEANRFYTVINKKSGEIVPMEVNFNFDDPNLIILPLAFGKRQGREFIWNDLLSLETGSLKLANGRVIEKTLYNRRTRQDEPALFVALTFERREVLDSSNIKPMNLIGVDRGENIPAVIALTDPEGCPLERFKDSLGNPTHILRIGESYKSKQRTIQAKKEVEQRRAGGYSRKYASKAKNLADDMVRNTARDLLYYAVTQDAMLIFENLSRGFGRQGKRTFMAERQYTRMEDWLTAKLAYEGLPSKTYLSKTLAQYTSKTCSNCGFTITSADYDRVLEKLKKTATGWMTTINGKELKVEGQITYYNRYKRQNVVKDLSVELDRLSEESVNNDISSWTKGRSGEALSLLKKRFSHRPVQEKFVCLNCGFETHADEQAALNIARSWLFLRSQEYKKYQTNKTTGNTDKRAFVETWQSFYRKKLKEVWKPAV

SEQ ID NO: 27112 - protein, 978 aa, synthetic construct
  REGION 1..978: note = engineered CasX variant
QEIKRINKIRRRLVKDSNTKKAGKTGPMKTLLVRVMTPDLRERLENLRKKPENIPQPISNTSRANLNKLLTDYTEMKKAILHVYWEEFQKDPVGLMSRVAQPASKKIDQNKLKPEMDEKGNLTTAGFACSQCGQPLFVYKLEQVSEKGKAYTNYFGRCNVAEHEKLILLAQLKPEKDSDEAVTYSLGKFGQRALDFYSIHVTKESTHPVKPLAQIAGNRYASGPVGKALSDACMGTIASFLSKYQDIIIEHQKVVKGNQKRLESLRELAGKENLEYPSVTLPPQPHTKEGVDAYNEVIARVRMWVNLNLWQKLKLSRDDAKPLLRLKGFPSFPLVERQANEVDWWDMVCNVKKLINEKKEDGKVFWQNLAGYKRQEALRPYLSSEEDRKKGKKFARYQLGDLLLHLEKKHGEDWGKVYDEAWERIDKKVEGLSKHIKLEEERRSEDAQSKAALTDWLRAKASFVIEGLKEADKDEFCRCELKLQKWYGDLRGKPFAIEAENSILDISGFSKQYNCAFIWQKDGVKKLNLYLIINYFKGGKLRFKKIKPEAFEANRFYTVINKKSGEIVPMEVNFNFDDPNLIILPLAFGKRQGREFIWNDLLSLETGSLKLANGRVIEKTLYNRRTRQDEPALFVALTFERREVLDSSNIKPMNLIGVDRGENIPAVIALTDPEGCPLERFKDSLGNPTHILRIGESYKSKQRTIQAIKEVEQRRAGGYSRKYASKAKNLADDMVRNTARDLLYYAVTQDAMLIFENLSRGFGRQGKRTFMAERQYTRMEDWLTAKLAYEGLPSKTYLSKTLAQYTSKTCSNCGFTITSADYDRVLEKLKKTATGWMTTINGKELKVEGQITYYNRYKRQNVVKDLSVELDRLSEESVNNDISSWTKGRSGEALSLLKKRFSHRPVQEKFVCLNCGFETHADEQAALNIARSWLFLRSQEYKKYQTNKTTGNTDKRAFVETWQSFYRKKLKEVWKPAV

SEQ ID NO: 27113 - protein, 978 aa, synthetic construct
  REGION 1..978: note = engineered CasX variant
QEIKRINKIRRRLVKDSNTKKAGKTGPMKTLLVRVMTPDLRERLENLRKKPENIPQPISNTSRANLNKLLTDYTEMKKAILHVYWEEFQKDPVGLMSRVAQPASKKIDQNKLKPEMDEKGNLTTAGFACSQCGQPLFVYKLEQVSEKGKAYTNYFGRCNVAEHEKLILLAQLKPEKDSDEAVTYSLGKFGQRALDFYSIHVTKESTHPVKPLAQIAGNRYASGPVGKALSDACMGTIASFLSKYQDIIIEHQKVVKGNQKRLESLRELAGKENLEYPSVTLPPQPHTKEGVDAYNEVIARVRMWVNLNLWQKLKLSRDDAKPLLRLKGFPSFPLVERQANEVDWWDMVCNVKKLINEKKEDGKVFWQNLAGYKRQEALRPYLSSEEDRKKGKKFARYQLGDLLLHLEKKHGEDWGKVYDEAWERIDKKVEGLSKHIKLEEERRSEDAQSKAALTDWLRAKASFVIEGLKEADKDEFCRCELKLQKWYGDLRGKPFAIEAENSILDISGFSKQYNCAFIWQKDGVKKLNLYLIINYFKGGKLRFKKIKPEAFEANRFYTVINKKSGEIVPMEVNFNFDDPNLIILPLAFGKRQGREFIWNDLLSLETGSLKLANGRVIEKTLYNRRTRQDEPALFVALTFERREVLDSSNIKPMNLIGVDRGENIPAVIALTDPEGCPLERFKDSLGNPTHILRIGESYKGKQRTIQAKKEVEQRRAGGYSRKYASKAKNLADDMVRNTARDLLYYAVTQDAMLIFENLSRGFGRQGKRTFMAERQYTRMEDWLTAKLAYEGLPSKTYLSKTLAQYTSKTCSNCGFTITSADYDRVLEKLKKTATGWMTTINGKELKVEGQITYYNRYKRQNVVKDLSVELDRLSEESVNNDISSWTKGRSGEALSLLKKRFSHRPVQEKFVCLNCGFETHADEQAALNIARSWLFLRSQEYKKYQTNKTTGNTDKRAFVETWQSFYRKKLKEVWKPAV

SEQ ID NO: 27114 - protein, 978 aa, synthetic construct
  REGION 1..978: note = engineered CasX variant
QEIKRINKIRRRLVKDSNTKKAGKTGPMKTLLVRVMTPDLRERLENLRKKPENIPQPISNTSRANLNKLLTDYTEMKKAILHVYWEEFQKDPVGLMSRVAQPASKKIDQNKLKPEMDEKGNLTTAGFACSQCGQPLFVYKLEQVSEKGKAYTNYFGRCNVAEHEKLILLAQLKPEKDSDEAVTYSLGKFGQRALDFYSIHVTKESTHPVKPLAQIAGNRYASGPVGKALSDACMGTIASFLSKYQDIIIEHQKVVKGNQKRLESLRELAGKENLEYPSVTLPPQPHTKEGVDAYNEVIARVRMWVNLNLWQKLKLSRDDAKPLLRLKGFPSFPLVERQANEVDWWDMVCNVKKLINEKKEDGKVFWQNLAGYKRQEALRPYLSSEEDRKKGKKFARYQLGDLLLHLEKKHGEDWGKVYDEAWERIDKKVEGLSKHIKLEEERRSEDAQSKAALTDWLRAKASFVIEGLKEADKDEFCRCELKLQKWYGDLRGKPFAIEAENSILDISGFSKQYNCAFIWQKDGVKKLNLYLIINYFKGGKLRFKKIKPEAFEANRFYTVINKKSGEIVPMEVNFNFDDPNLIILPLAFGKRQGREFIWNDLLSLETGSLKLANGRVIEKTLYNRRTRQDEPALFVALTFERREVLDSSNIKPMNLIGVDRGENIPAVIALTDPEGCPLERFKDSLGNPTHILRIGESYKEKQRTIQEKKEVEQRRAGGYSRKYASKAKNLADDMVRNTARDLLYYAVTQDAMLIFENLSRGFGRQGKRTFMAERQYTRMEDWLTAKLAYEGLPSKTYLSKTLAQYTSKTCSNCGFTITSADYDRVLEKLKKTATGWMTTINGKELKVEGQITYYNRYKRQNVVKDLSVELDRLSEESVNNDISSWTKGRSGEALSLLKKRFSHRPVQEKFVCLNCGFETHADEQAALNIARSWLFLRSQEYKKYQTNKTTGNTDKRAFVETWQSFYRKKLKEVWKPAV

SEQ ID NO: 27115 - protein, 978 aa, synthetic construct
  REGION 1..978: note = engineered CasX variant
QEIKRINKIRRRLVKDSNTKKAGKTGPMKTLLVRVMTPDLRERLENLRKKPENIPQPISNTSRANLNKLLTDYTEMKKAILHVYWEEFQKDPVGLMSRVAQPASKKIDQNKLKPEMDEKGNLTTAGFACSQCGQPLFVYKLEQVSEKGKAYTNYFGRCNVAEHEKLILLAQLKPEKDSDEAVTYSLGKFGQRALDFYSIHVTKESTHPVKPLAQIAGNRYASGPVGKALSDACMGTIASFLSKYQDIIIEHQKVVKGNQKRLESLRELAGKENLEYPSVTLPPQPHTKEGVDAYNEVIARVRMWVNLNLWQKLKLSRDDAKPLLRLKGFPSFPLVERQANEVDWWDMVCNVKKLINEKKEDGKVFWQNLAGYKRQEALRPYLSSEEDRKKGKKFARYQLGDLLLHLEKKHGEDWGKVYDEAWERIDKKVEGLSKHIKLEEERRSEDAQSKAALTDWLRAKASFVIEGLKEADKDEFCRCELKLQKWYGDLRGKPFAIEAENSILDISGFSKQYNCAFIWQKDGVKKLNLYLIINYFKGGKLRFKKIKPEAFEANRFYTVINKKSGEIVPMEVNFNFDDPNLIILPLAFGKRQGREFIWNDLLSLETGSLKLANGRVIEKTLYNRRTRQDEPALFVALTFERREVLDSSNIKPMNLIGVDRGENIPAVIALTDPEGCPLERFKDSLGNPTHILRIGESYKEKQRTIQAKKEVEQRRLGGYSRKYASKAKNLADDMVRNTARDLLYYAVTQDAMLIFENLSRGFGRQGKRTFMAERQYTRMEDWLTAKLAYEGLPSKTYLSKTLAQYTSKTCSNCGFTITSADYDRVLEKLKKTATGWMTTINGKELKVEGQITYYNRYKRQNVVKDLSVELDRLSEESVNNDISSWTKGRSGEALSLLKKRFSHRPVQEKFVCLNCGFETHADEQAALNIARSWLFLRSQEYKKYQTNKTTGNTDKRAFVETWQSFYRKKLKEVWKPAV

SEQ ID NO: 27116 - protein, 978 aa, synthetic construct
  REGION 1..978: note = engineered CasX variant
QEIKRINKIRRRLVKDSNTKKAGKTGPMKTLLVRVMTPDLRERLENLRKKPENIPQPISNTSRANLNKLLTDYTEMKKAILHVYWEEFQKDPVGLMSRVAQPASKKIDQNKLKPEMDEKGNLTTAGFACSQCGQPLFVYKLEQVSEKGKAYTNYFGRCNVAEHEKLILLAQLKPEKDSDEAVTYSLGKFGQRALDFYSIHVTKESTHPVKPLAQIAGNRYASGPVGKALSDACMGTIASFLSKYQDIIIEHQKVVKGNQKRLESLRELAGKENLEYPSVTLPPQPHTKEGVDAYNEVIARVRMWVNLNLWQKLKLSRDDAKPLLRLKGFPSFPLVERQANEVDWWDMVCNVKKLINEKKEDGKVFWQNLAGYKRQEALRPYLSSEEDRKKGKKFARYQLGDLLLHLEKKHGEDWGKVYDEAWERIDKKVEGLSKHIKLEEERRSEDAQSKAALTDWLRAKASFVIEGLKEADKDEFCRCELKLQKWYGDLRGKPFAIEAENSILDISGFSKQYNCAFIWQKDGVKKLNLYLIINYFKGGKLRFKKIKPEAFEANRFYTVINKKSGEIVPMEVNFNFDDPNLIILPLAFGKRQGREFIWNDLLSLETGSLKLANGRVIEKTLYNRRTRQDEPALFVALTFERREVLDSSNIKPMNLIGVDRGENIPAVIALTDPEGCPLERFKDSLGNPTHILRIGESYKEKQRTIQAKKEVEQRRLFGYSRKYASKAKNLADDMVRNTARDLLYYAVTQDAMLIFENLSRGFGRQGKRTFMAERQYTRMEDWLTAKLAYEGLPSKTYLSKTLAQYTSKTCSNCGFTITSADYDRVLEKLKKTATGWMTTINGKELKVEGQITYYNRYKRQNVVKDLSVELDRLSEESVNNDISSWTKGRSGEALSLLKKRFSHRPVQEKFVCLNCGFETHADEQAALNIARSWLFLRSQEYKKYQTNKTTGNTDKRAFVETWQSFYRKKLKEVWKPAV

SEQ ID NO: 27117 - protein, 978 aa, synthetic construct
  REGION 1..978: note = engineered CasX variant
QEIKRINKIRRRLVKDSNTKKAGKTGPMKTLLVRVMTPDLRERLENLRKKPENIPQPISNTSRANLNKLLTDYTEMKKAILHVYWEEFQKDPVGLMSRVAQPASKKIDQNKLKPEMDEKGNLTTAGFACSQCGQPLFVYKLEQVSEKGKAYTNYFGRCNVAEHEKLILLAQLKPEKDSDEAVTYSLGKFGQRALDFYSIHVTKESTHPVKPLAQIAGNRYASGPVGKALSDACMGTIASFLSKYQDIIIEHQKVVKGNQKRLESLRELAGKENLEYPSVTLPPQPHTKEGVDAYNEVIARVRMWVNLNLWQKLKLSRDDAKPLLRLKGFPSFPLVERQANEVDWWDMVCNVKKLINEKKEDGKVFWQNLAGYKRQEALRPYLSSEEDRKKGKKFARYQLGDLLLHLEKKHGEDWGKVYDEAWERIDKKVEGLSKHIKLEEERRSEDAQSKAALTDWLRAKASFVIEGLKEADKDEFCRCELKLQKWYGDLRGKPFAIEAENSILDISGFSKQYNCAFIWQKDGVKKLNLYLIINYFKGGKLRFKKIKPEAFEANRFYTVINKKSGEIVPMEVNFNFDDPNLIILPLAFGKRQGREFIWNDLLSLETGSLKLANGRVIEKTLYNRRTRQDEPALFVALTFERREVLDSSNIKPMNLIGVDRGENIPAVIALTDPEGCPLERFKDSLGNPTHILRIGESYKEKQRTIQAKKEVEQRRAGGYSRKYASKAKNLADDMVRNTARDLLYYAVTQDAMLIFENLSRGFGRQGKRTFMAERQYTRMEDWLTAKLAYEGLPSKTYLSKTLAQYTSKTCSNCGFTITSADYDRVLEKLKKTATGWMTTINGKELKVEGQITYYNRYKRQNVVKDLSVELDRLSEESVNNDISSWTKGRSGEALSLLKKRFSHRPVQEKFVCLNCGFETHADEQAALNIARSWLFLRSQEYKKYQTNKTTGNTDKRAFVETWQSFYRKKLKEVWKPAV

SEQ ID NO: 27118 - protein, 978 aa, synthetic construct
  REGION 1..978: note = engineered CasX variant
QEIKRINKIRRRLVKDSNTKKAGKTGPMKTLLVRVMTPDLRERLENLRKKPENIPQPISNTSRANLNKLLTDYTEMKKAILHVYWEEFQKDPVGLMSRVAQPASKKIDQNKLKPEMDEKGNLTTAGFACSQCGQPLFVYKLEQVSEKGKAYTNYFGRCNVAEHEKLILLAQLKPEKDSDEAVTYSLGKFGQRALDFYSIHVTKESTHPVKPLAQIAGNRYASGPVGKALSDACMGTIASFLSKYQDIIIEHQKVVKGNQKRLESLRELAGKENLEYPSVTLPPQPHTKEGVDAYNEVIARVRMWVNLNLWQKLKLSRDDAKPLLRLKGFPSFPLVERQANEVDWWDMVCNVKKLINEKKEDGKVFWQNLAGYKRQEALRPYLSSEEDRKKGKKFARYQLGDLLLHLEKKHGEDWGKVYDEAWERIDKKVEGLSKHIKLEEERRSEDAQSKAALTDWLRAKASFVIEGLKEADKDEFCRCELKLQKWYGDLRGKPFAIEAENSILDISGFSKQYNCAFIWQKDGVKKLNLYLIINYFKGGKLRFKKIKPEAFEANRFYTVINKKSGEIVPMEVNFNFDDPNLIILPLAFGKRQGREFIWNDLLSLETGSLKLANGRVIEKTLYNRRTRQDEPALFVALTFERREVLDSSNIKPMNLIGVDRGENIPAVIALTDPEGCPLERFKDSLGNPTHILRIGESYKEKQRTIQAKKEVEQRRAFGYSRKYASKAKNLADDMVRNTARDLLYYAVTQDAMLIFENLSRGFGRQGKRTFMAERQYTRMEDWLTAKLAYEGLPSKTYLSKTLAQYTSKTCSNCGFTITSADYDRVLEKLKKTATGWMTTINGKELKVEGQITYYNRYKRQNVVKDLSVELDRLSEESVNNDISSWTKGRSGEALSLLKKRFSHRPVQEKFVCLNCGFETHADEQAALNIARSWLFLRSQEYKKYQTNKTTGNTDKRAFVETWQSFYRKKLKEVWKPAV

SEQ ID NO: 27119 - protein, 978 aa, synthetic construct
  REGION 1..978: note = engineered CasX variant
QEIKRINKIRRRLVKDSNTKKAGKTGPMKTLLVRVMTPDLRERLENLRKKPENIPQPISNTSRANLNKLLTDYTEMKKAILHVYWEEFQKDPVGLMSRVAQPASKKIDQNKLKPEMDEKGNLTTAGFACSQCGQPLFVYKLEQVSEKGKAYTNYFGRCNVAEHEKLILLAQLKPEKDSDEAVTYSLGKFGQRALDFYSIHVTKESTHPVKPLAQIAGNRYASGPVGKALSDACMGTIASFLSKYQDIIIEHQKVVKGNQKRLESLRELAGKENLEYPSVTLPPQPHTKEGVDAYNEVIARVRMWVNLNLWQKLKLSRDDAKPLLRLKGFPSFPLVERQANEVDWWDMVCNVKKLINEKKEDGKVFWQNLAGYKRQEALRPYLSSEEDRKKGKKFARYQLGDLLLHLEKKHGEDWGKVYDEAWERIDKKVEGLSKHIKLEEERRSEDAQSKAALTDWLRAKASFVIEGLKEADKDEFCRCELKLQKWYGDLRGKPFAIEAENSILDISGFSKQYNCAFIWQKDGVKKLNLYLIINYFKGGKLRFKKIKPEAFEANRFYTVINKKSGEIVPMEVNFNFDDPNLIILPLAFGKRQGREFIWNDLLSLETGSLKLANGRVIEKTLYNRRTRQDEPALFVALTFERREVLDSSNIKPMNLIGVDRGENIPAVIALTDPEGCPLERFKDSLGNPTHILRIGESYKEKQRTIQAKKEFEQRRAGGYSRKYASKAKNLADDMVRNTARDLLYYAVTQDAMLIFENLSRGFGRQGKRTFMAERQYTRMEDWLTAKLAYEGLPSKTYLSKTLAQYTSKTCSNCGFTITSADYDRVLEKLKKTATGWMTTINGKELKVEGQITYYNRYKRQNVVKDLSVELDRLSEESVNNDISSWTKGRSGEALSLLKKRFSHRPVQEKFVCLNCGFETHADEQAALNIARSWLFLRSQEYKKYQTNKTTGNTDKRAFVETWQSFYRKKLKEVWKPAV

SEQ ID NO: 27120 - protein, 978 aa, synthetic construct
  REGION 1..978: note = engineered CasX variant
QEIKRINKIRRRLVKDSNTKKAGKTGPMKTLLVRVMTPDLRERLENLRKKPENIPQPISNTSRANLNKLLTDYTEMKKAILHVYWEEFQKDPVGLMSRVAQPASKKIDQNKLKPEMDEKGNLTTAGFACSQCGQPLFVYKLEQVSEKGKAYTNYFGRCNVAEHEKLILLAQLKPEKDSDEAVTYSLGKFGQRALDFYSIHVTKESTHPVKPLAQIAGNRYASGPVGKALSDACMGTIASFLSKYQDIIIEHQKVVKGNQKRLESLRELAGKENLEYPSVTLPPQPHTKEGVDAYNEVIARVRMWVNLNLWQKLKLSRDDAKPLLRLKGFPSFPLVERQANEVDWWDMVCNVKKLINEKKEDGKVFWQNLAGYKRQEALRPYLSSEEDRKKGKKFARYQLGDLLLHLEKKHGEDWGKVYDEAWERIDKKVEGLSKHIKLEEERRSEDAQSKAALTDWLRAKASFVIEGLKEADKDEFCRCELKLQKWYGDLRGKPFAIEAENSILDISGFSKQYNCAFIWQKDGVKKLNLYLIINYFKGGKLRFKKIKPEAFEANRFYTVINKKSGEIVPMEVNFNFDDPNLIILPLAFGKRQGREFIWNDLLSLETGSLKLANGRVIEKTLYNRRTRQDEPALFVALTFERREVLDSSNIKPMNLIGVDRGENIPAVIALTDPEGCPLERFKDSLGNPTHILRIGESYKEKQRTIQAIKEVEQRRAGGYSRKYASKAKNLADDMVRNTARDLLYYAVTQDAMLIFENLSRGFGRQGKRTFMAERQYTRMEDWLTAKLAYEGLPSKTYLSKTLAQYTSKTCSNCGFTITSADYDRVLEKLKKTATGWMTTINGKELKVEGQITYYNRYKRQNVVKDLSVELDRLSEESVNNDISSWTKGRSGEALSLLKKRFSHRPVQEKFVCLNCGFETHADEQAALNIARSWLFLRSQEYKKYQTNKTTGNTDKRAFVETWQSFYRKKLKEVWKPAV

SEQ ID NO: 27121 - protein, 978 aa, synthetic construct
  REGION 1..978: note = engineered CasX variant
QEIKRINKIRRRLVKDSNTKKAGKTGPMKTLLVRVMTPDLRERLENLRKKPENIPQPISNTSRANLNKLLTDYTEMKKAILHVYWEEFQKDPVGLMSRVAQPASKKIDQNKLKPEMDEKGNLTTAGFACSQCGQPLFVYKLEQVSEKGKAYTNYFGRCNVAEHEKLILLAQLKPEKDSDEAVTYSLGKFGQRALDFYSIHVTKESTHPVKPLAQIAGNRYASGPVGKALSDACMGTIASFLSKYQDIIIEHQKVVKGNQKRLESLRELAGKENLEYPSVTLPPQPHTKEGVDAYNEVIARVRMWVNLNLWQKLKLSRDDAKPLLRLKGFPSFPLVERQANEVDWWDMVCNVKKLINEKKEDGKVFWQNLAGYKRQEALRPYLSSEEDRKKGKKFARYQLGDLLLHLEKKHGEDWGKVYDEAWERIDKKVEGLSKHIKLEEERRSEDAQSKAALTDWLRAKASFVIEGLKEADKDEFCRCELKLQKWYGDLRGKPFAIEAENSILDISGFSKQYNCAFIWQKDGVKKLNLYLIINYFKGGKLRFKKIKPEAFEANRFYTVINKKSGEIVPMEVNFNFDDPNLIILPLAFGKRQGREFIWNDLLSLETGSLKLANGRVIEKTLYNRRTRQDEPALFVALTFERREVLDSSNIKPMNLIGVDRGENIPAVIALTDPEGCPLERFKDSLGNPTHILRIGECYKEKQRTIQAKKEVEQRRLGGYSRKYASKAKNLADDMVRNTARDLLYYAVTQDAMLIFENLSRGFGRQGKRTFMAERQYTRMEDWLTAKLAYEGLPSKTYLSKTLAQYTSKTCSNCGFTITSADYDRVLEKLKKTATGWMTTINGKELKVEGQITYYNRYKRQNVVKDLSVELDRLSEESVNNDISSWTKGRSGEALSLLKKRFSHRPVQEKFVCLNCGFETHADEQAALNIARSWLFLRSQEYKKYQTNKTTGNTDKRAFVETWQSFYRKKLKEVWKPAV

SEQ ID NO: 27122 - protein, 978 aa, synthetic construct
  REGION 1..978: note = engineered CasX variant
QEIKRINKIRRRLVKDSNTKKAGKTGPMKTLLVRVMTPDLRERLENLRKKPENIPQPISNTSRANLNKLLTDYTEMKKAILHVYWEEFQKDPVGLMSRVAQPASKKIDQNKLKPEMDEKGNLTTAGFACSQCGQPLFVYKLEQVSEKGKAYTNYFGRCNVAEHEKLILLAQLKPEKDSDEAVTYSLGKFGQRALDFYSIHVTKESTHPVKPLAQIAGNRYASGPVGKALSDACMGTIASFLSKYQDIIIEHQKVVKGNQKRLESLRELAGKENLEYPSVTLPPQPHTKEGVDAYNEVIARVRMWVNLNLWQKLKLSRDDAKPLLRLKGFPSFPLVERQANEVDWWDMVCNVKKLINEKKEDGKVFWQNLAGYKRQEALRPYLSSEEDRKKGKKFARYQLGDLLLHLEKKHGEDWGKVYDEAWERIDKKVEGLSKHIKLEEERRSEDAQSKAALTDWLRAKASFVIEGLKEADKDEFCRCELKLQKWYGDLRGKPFAIEAENSILDISGFSKQYNCAFIWQKDGVKKLNLYLIINYFKGGKLRFKKIKPEAFEANRFYTVINKKSGEIVPMEVNFNFDDPNLIILPLAFGKRQGREFIWNDLLSLETGSLKLANGRVIEKTLYNRRTRQDEPALFVALTFERREVLDSSNIKPMNLIGVDRGENIPAVIALTDPEGCPLERFKDSLGNPTHILRIGECYKEKQRTIQAKKEVEQRRAGGYSRKYASKAKNLADDMVRNTARDLLYYAVTQDAMLIFENLSRGFGRQGKRTFMAERQYTRMEDWLTAKLAYEGLPSKTYLSKTLAQYTSKTCSNCGFTITSADYDRVLEKLKKTATGWMTTINGKELKVEGQITYYNRYKRQNVVKDLSVELDRLSEESVNNDISSWTKGRSGEALSLLKKRFSHRPVQEKFVCLNCGFETHADEQAALNIARSWLFLRSQEYKKYQTNKTTGNTDKRAFVETWQSFYRKKLKEVWKPAV

SEQ ID NO: 27123 - protein, 978 aa, synthetic construct
  REGION 1..978: note = engineered CasX variant
QEIKRINKIRRRLVKDSNTKKAGKTGPMKTLLVRVMTPDLRERLENLRKKPENIPQPISNTSRANLNKLLTDYTEMKKAILHVYWEEFQKDPVGLMSRVAQPASKKIDQNKLKPEMDEKGNLTTAGFACSQCGQPLFVYKLEQVSEKGKAYTNYFGRCNVAEHEKLILLAQLKPEKDSDEAVTYSLGKFGQRALDFYSIHVTKESTHPVKPLAQIAGNRYASGPVGKALSDACMGTIASFLSKYQDIIIEHQKVVKGNQKRLESLRELAGKENLEYPSVTLPPQPHTKEGVDAYNEVIARVRMWVNLNLWQKLKLSRDDAKPLLRLKGFPSFPLVERQANEVDWWDMVCNVKKLINEKKEDGKVFWQNLAGYKRQEALRPYLSSEEDRKKGKKFARYQLGDLLLHLEKKHGEDWGKVYDEAWERIDKKVEGLSKHIKLEEERRSEDAQSKAALTDWLRAKASFVIEGLKEADKDEFCRCELKLQKWYGDLRGKPFAIEAENSILDISGFSKQYNCAFIWQKDGVKKLNLYLIINYFKGGKLRFKKIKPEAFEANRFYTVINKKSGEIVPMEVNFNFDDPNLIILPLAFGKRQGREFIWNDLLSLETGSLKLANGRVIEKTLYNRRTRQDEPALFVALTFERREVLDSSNIKPMNLIGVDRGENIPAVIALTDPEGCPLERFKDSLGNPTHILRIGECYKEKQRTIQAKKEVEQRRAFGYSRKYASKAKNLADDMVRNTARDLLYYAVTQDAMLIFENLSRGFGRQGKRTFMAERQYTRMEDWLTAKLAYEGLPSKTYLSKTLAQYTSKTCSNCGFTITSADYDRVLEKLKKTATGWMTTINGKELKVEGQITYYNRYKRQNVVKDLSVELDRLSEESVNNDISSWTKGRSGEALSLLKKRFSHRPVQEKFVCLNCGFETHADEQAALNIARSWLFLRSQEYKKYQTNKTTGNTDKRAFVETWQSFYRKKLKEVWKPAV

SEQ ID NO: 27124 - protein, 978 aa, synthetic construct
  REGION 1..978: note = engineered CasX variant
QEIKRINKIRRRLVKDSNTKKAGKTGPMKTLLVRVMTPDLRERLENLRKKPENIPQPISNTSRANLNKLLTDYTEMKKAILHVYWEEFQKDPVGLMSRVAQPASKKIDQNKLKPEMDEKGNLTTAGFACSQCGQPLFVYKLEQVSEKGKAYTNYFGRCNVAEHEKLILLAQLKPEKDSDEAVTYSLGKFGQRALDFYSIHVTKESTHPVKPLAQIAGNRYASGPVGKALSDACMGTIASFLSKYQDIIIEHQKVVKGNQKRLESLRELAGKENLEYPSVTLPPQPHTKEGVDAYNEVIARVRMWVNLNLWQKLKLSRDDAKPLLRLKGFPSFPLVERQANEVDWWDMVCNVKKLINEKKEDGKVFWQNLAGYKRQEALRPYLSSEEDRKKGKKFARYQLGDLLLHLEKKHGEDWGKVYDEAWERIDKKVEGLSKHIKLEEERRSEDAQSKAALTDWLRAKASFVIEGLKEADKDEFCRCELKLQKWYGDLRGKPFAIEAENSILDISGFSKQYNCAFIWQKDGVKKLNLYLIINYFKGGKLRFKKIKPEAFEANRFYTVINKKSGEIVPMEVNFNFDDPNLIILPLAFGKRQGREFIWNDLLSLETGSLKLANGRVIEKTLYNRRTRQDEPALFVALTFERREVLDSSNIKPMNLIGVDRGENIPAVIALTDPEGCPLERFKDSLGNPTHILRIGCSYKEKQRTIQAKKEVEQRRAGGYSRKYASKAKNLADDMVRNTARDLLYYAVTQDAMLIFENLSRGFGRQGKRTFMAERQYTRMEDWLTAKLAYEGLPSKTYLSKTLAQYTSKTCSNCGFTITSADYDRVLEKLKKTATGWMTTINGKELKVEGQITYYNRYKRQNVVKDLSVELDRLSEESVNNDISSWTKGRSGEALSLLKKRFSHRPVQEKFVCLNCGFETHADEQAALNIARSWLFLRSQEYKKYQTNKTTGNTDKRAFVETWQSFYRKKLKEVWKPAV

SEQ ID NO: 27125 - protein, 978 aa, synthetic construct
  REGION 1..978: note = engineered CasX variant
QEIKRINKIRRRLVKDSNTKKAGKTGPMKTLLVRVMTPDLRERLENLRKKPENIPQPISNTSRANLNKLLTDYTEMKKAILHVYWEEFQKDPVGLMSRVAQPASKKIDQNKLKPEMDEKGNLTTAGFACSQCGQPLFVYKLEQVSEKGKAYTNYFGRCNVAEHEKLILLAQLKPEKDSDEAVTYSLGKFGQRALDFYSIHVTKESTHPVKPLAQIAGNRYASGPVGKALSDACMGTIASFLSKYQDIIIEHQKVVKGNQKRLESLRELAGKENLEYPSVTLPPQPHTKEGVDAYNEVIARVRMWVNLNLWQKLKLSRDDAKPLLRLKGFPSFPLVERQANEVDWWDMVCNVKKLINEKKEDGKVFWQNLAGYKRQEALRPYLSSEEDRKKGKKFARYQLGDLLLHLEKKHGEDWGKVYDEAWERIDKKVEGLSKHIKLEEERRSEDAQSKAALTDWLRAKASFVIEGLKEADKDEFCRCELKLQKWYGDLRGKPFAIEAENSILDISGFSKQYNCAFIWQKDGVKKLNLYLIINYFKGGKLRFKKIKPEAFEANRFYTVINKKSGEIVPMEVNFNFDDPNLIILPLAFGKRQGREFIWNDLLSLETGSLKLANGRVIEKTLYNRRTRQDEPALFVALTFERREVLDSSNIKPMNLIGVDRGENIPAVIALTDPEGCPLERFKDSLGNPTHILRFGESYKEKQRTIQAKKEVEQRRAGGYSRKYASKAKNLADDMVRNTARDLLYYAVTQDAMLIFENLSRGFGRQGKRTFMAERQYTRMEDWLTAKLAYEGLPSKTYLSKTLAQYTSKTCSNCGFTITSADYDRVLEKLKKTATGWMTTINGKELKVEGQITYYNRYKRQNVVKDLSVELDRLSEESVNNDISSWTKGRSGEALSLLKKRFSHRPVQEKFVCLNCGFETHADEQAALNIARSWLFLRSQEYKKYQTNKTTGNTDKRAFVETWQSFYRKKLKEVWKPAV

SEQ ID NO: 27126 - protein, 978 aa, synthetic construct
  REGION 1..978: note = engineered CasX variant
QEIKRINKIRRRLVKDSNTKKAGKTGPMKTLLVRVMTPDLRERLENLRKKPENIPQPISNTSRANLNKLLTDYTEMKKAILHVYWEEFQKDPVGLMSRVAQPASKKIDQNKLKPEMDEKGNLTTAGFACSQCGQPLFVYKLEQVSEKGKAYTNYFGRCNVAEHEKLILLAQLKPEKDSDEAVTYSLGKFGQRALDFYSIHVTKESTHPVKPLAQIAGNRYASGPVGKALSDACMGTIASFLSKYQDIIIEHQKVVKGNQKRLESLRELAGKENLEYPSVTLPPQPHTKEGVDAYNEVIARVRMWVNLNLWQKLKLSRDDAKPLLRLKGFPSFPLVERQANEVDWWDMVCNVKKLINEKKEDGKVFWQNLAGYKRQEALRPYLSSEEDRKKGKKFARYQLGDLLLHLEKKHGEDWGKVYDEAWERIDKKVEGLSKHIKLEEERRSEDAQSKAALTDWLRAKASFVIEGLKEADKDEFCRCELKLQKWYGDLRGKPFAIEAENSILDISGFSKQYNCAFIWQKDGVKKLNLYLIINYFKGGKLRFKKIKPEAFEANRFYTVINKKSGEIVPMEVNFNFDDPNLIILPLAFGKRQGREFIWNDLLSLETGSLKLANGRVIEKTLYNRRTRQDEPALFVALTFERREVLDSSNIKPMNLIGVDRGENIPAVIALTDPEGCPLERFKDSLGNPTHILRFGESYKEKQRTIQAKKEVEQRRAFGYSRKYASKAKNLADDMVRNTARDLLYYAVTQDAMLIFENLSRGFGRQGKRTFMAERQYTRMEDWLTAKLAYEGLPSKTYLSKTLAQYTSKTCSNCGFTITSADYDRVLEKLKKTATGWMTTINGKELKVEGQITYYNRYKRQNVVKDLSVELDRLSEESVNNDISSWTKGRSGEALSLLKKRFSHRPVQEKFVCLNCGFETHADEQAALNIARSWLFLRSQEYKKYQTNKTTGNTDKRAFVETWQSFYRKKLKEVWKPAV

SEQ ID NO: 27127 - protein, 978 aa, synthetic construct
  REGION 1..978: note = engineered CasX variant
QEIKRINKIRRRLVKDSNTKKAGKTGPMKTLLVRVMTPDLRERLENLRKKPENIPQPISNTSRANLNKLLTDYTEMKKAILHVYWEEFQKDPVGLMSRVAQPASKKIDQNKLKPEMDEKGNLTTAGFACSQCGQPLFVYKLEQVSEKGKAYTNYFGRCNVAEHEKLILLAQLKPEKDSDEAVTYSLGKFGQRALDFYSIHVTKESTHPVKPLAQIAGNRYASGPVGKALSDACMGTIASFLSKYQDIIIEHQKVVKGNQKRLESLRELAGKENLEYPSVTLPPQPHTKEGVDAYNEVIARVRMWVNLNLWQKLKLSRDDAKPLLRLKGFPSFPLVERQANEVDWWDMVCNVKKLINEKKEDGKVFWQNLAGYKRQEALRPYLSSEEDRKKGKKFARYQLGDLLLHLEKKHGEDWGKVYDEAWERIDKKVEGLSKHIKLEEERRSEDAQSKAALTDWLRAKASFVIEGLKEADKDEFCRCELKLQKWYGDLRGKPFAIEAENSILDISGFSKQYNCAFIWQKDGVKKLNLYLIINYFKGGKLRFKKIKPEAFEANRFYTVINKKSGEIVPMEVNFNFDDPNLIILPLAFGKRQGREFIWNDLLSLETGSLKLANGRVIEKTLYNRRTRQDEPALFVALTFERREVLDSSNIKPMNLIGVDRGENIPAVIALTDPEGCPLERFKDSLGNPTHIIRIGESYKEKQRTIQAKKEVEQRRAGGYSRKYASKAKNLADDMVRNTARDLLYYAVTQDAMLIFENLSRGFGRQGKRTFMAERQYTRMEDWLTAKLAYEGLPSKTYLSKTLAQYTSKTCSNCGFTITSADYDRVLEKLKKTATGWMTTINGKELKVEGQITYYNRYKRQNVVKDLSVELDRLSEESVNNDISSWTKGRSGEALSLLKKRFSHRPVQEKFVCLNCGFETHADEQAALNIARSWLFLRSQEYKKYQTNKTTGNTDKRAFVETWQSFYRKKLKEVWKPAV

SEQ ID NO: 27128 - protein, 978 aa, synthetic construct
  REGION 1..978: note = engineered CasX variant
QEIKRINKIRRRLVKDSNTKKAGKTGPMKTLLVRVMTPDLRERLENLRKKPENIPQPISNTSRANLNKLLTDYTEMKKAILHVYWEEFQKDPVGLMSRVAQPASKKIDQNKLKPEMDEKGNLTTAGFACSQCGQPLFVYKLEQVSEKGKAYTNYFGRCNVAEHEKLILLAQLKPEKDSDEAVTYSLGKFGQRALDFYSIHVTKESTHPVKPLAQIAGNRYASGPVGKALSDACMGTIASFLSKYQDIIIEHQKVVKGNQKRLESLRELAGKENLEYPSVTLPPQPHTKEGVDAYNEVIARVRMWVNLNLWQKLKLSRDDAKPLLRLKGFPSFPLVERQANEVDWWDMVCNVKKLINEKKEDGKVFWQNLAGYKRQEALRPYLSSEEDRKKGKKFARYQLGDLLLHLEKKHGEDWGKVYDEAWERIDKKVEGLSKHIKLEEERRSEDAQSKAALTDWLRAKASFVIEGLKEADKDEFCRCELKLQKWYGDLRGKPFAIEAENSILDISGFSKQYNCAFIWQKDGVKKLNLYLIINYFKGGKLRFKKIKPEAFEANRFYTVINKKSGEIVPMEVNFNFDDPNLIILPLAFGKRQGREFIWNDLLSLETGSLKLANGRVIEKTLYNRRTRQDEPALFVALTFERREVLDSSNIKPMNLIGVDRGENIPAVIALTDPEGCPLERFKDSAGNPTHILRIGESYKEKQRTIQAKKEVEQRRLGGYSRKYASKAKNLADDMVRNTARDLLYYAVTQDAMLIFENLSRGFGRQGKRTFMAERQYTRMEDWLTAKLAYEGLPSKTYLSKTLAQYTSKTCSNCGFTITSADYDRVLEKLKKTATGWMTTINGKELKVEGQITYYNRYKRQNVVKDLSVELDRLSEESVNNDISSWTKGRSGEALSLLKKRFSHRPVQEKFVCLNCGFETHADEQAALNIARSWLFLRSQEYKKYQTNKTTGNTDKRAFVETWQSFYRKKLKEVWKPAV

SEQ ID NO: 27129 - protein, 978 aa, synthetic construct
  REGION 1..978: note = engineered CasX variant
QEIKRINKIRRRLVKDSNTKKAGKTGPMKTLLVRVMTPDLRERLENLRKKPENIPQPISNTSRANLNKLLTDYTEMKKAILHVYWEEFQKDPVGLMSRVAQPASKKIDQNKLKPEMDEKGNLTTAGFACSQCGQPLFVYKLEQVSEKGKAYTNYFGRCNVAEHEKLILLAQLKPEKDSDEAVTYSLGKFGQRALDFYSIHVTKESTHPVKPLAQIAGNRYASGPVGKALSDACMGTIASFLSKYQDIIIEHQKVVKGNQKRLESLRELAGKENLEYPSVTLPPQPHTKEGVDAYNEVIARVRMWVNLNLWQKLKLSRDDAKPLLRLKGFPSFPLVERQANEVDWWDMVCNVKKLINEKKEDGKVFWQNLAGYKRQEALRPYLSSEEDRKKGKKFARYQLGDLLLHLEKKHGEDWGKVYDEAWERIDKKVEGLSKHIKLEEERRSEDAQSKAALTDWLRAKASFVIEGLKEADKDEFCRCELKLQKWYGDLRGKPFAIEAENSILDISGFSKQYNCAFIWQKDGVKKLNLYLIINYFKGGKLRFKKIKPEAFEANRFYTVINKKSGEIVPMEVNFNFDDPNLIILPLAFGKRQGREFIWNDLLSLETGSLKLANGRVIEKTLYNRRTRQDEPALFVALTFERREVLDSSNIKPMNLIGVDRGENIPAVIALTDPEGCPLERFKDSAGNPTHILRIGESYKEKQRTIQAKKEVEQRRAGGYSRKYASKAKNLADDMVRNTARDLLYYAVTQDAMLIFENLSRGFGRQGKRTFMAERQYTRMEDWLTAKLAYEGLPSKTYLSKTLAQYTSKTCSNCGFTITSADYDRVLEKLKKTATGWMTTINGKELKVEGQITYYNRYKRQNVVKDLSVELDRLSEESVNNDISSWTKGRSGEALSLLKKRFSHRPVQEKFVCLNCGFETHADEQAALNIARSWLFLRSQEYKKYQTNKTTGNTDKRAFVETWQSFYRKKLKEVWKPAV

SEQ ID NO: 27130 - protein, 978 aa, synthetic construct
  REGION 1..978: note = engineered CasX variant
QEIKRINKIRRRLVKDSNTKKAGKTGPMKTLLVRVMTPDLRERLENLRKKPENIPQPISNTSRANLNKLLTDYTEMKKAILHVYWEEFQKDPVGLMSRVAQPASKKIDQNKLKPEMDEKGNLTTAGFACSQCGQPLFVYKLEQVSEKGKAYTNYFGRCNVAEHEKLILLAQLKPEKDSDEAVTYSLGKFGQRALDFYSIHVTKESTHPVKPLAQIAGNRYASGPVGKALSDACMGTIASFLSKYQDIIIEHQKVVKGNQKRLESLRELAGKENLEYPSVTLPPQPHTKEGVDAYNEVIARVRMWVNLNLWQKLKLSRDDAKPLLRLKGFPSFPLVERQANEVDWWDMVCNVKKLINEKKEDGKVFWQNLAGYKRQEALRPYLSSEEDRKKGKKFARYQLGDLLLHLEKKHGEDWGKVYDEAWERIDKKVEGLSKHIKLEEERRSEDAQSKAALTDWLRAKASFVIEGLKEADKDEFCRCELKLQKWYGDLRGKPFAIEAENSILDISGFSKQYNCAFIWQKDGVKKLNLYLIINYFKGGKLRFKKIKPEAFEANRFYTVINKKSGEIVPMEVNFNFDDPNLIILPLAFGKRQGREFIWNDLLSLETGSLKLANGRVIEKTLYNRRTRQDEPALFVALTFERREVLDSSNIKPMNLIGVDRGENIPAVIALTDPEGCPLERFKDSAGNPTHILRIGESYKEKQRTIQAKKEVEQRRAFGYSRKYASKAKNLADDMVRNTARDLLYYAVTQDAMLIFENLSRGFGRQGKRTFMAERQYTRMEDWLTAKLAYEGLPSKTYLSKTLAQYTSKTCSNCGFTITSADYDRVLEKLKKTATGWMTTINGKELKVEGQITYYNRYKRQNVVKDLSVELDRLSEESVNNDISSWTKGRSGEALSLLKKRFSHRPVQEKFVCLNCGFETHADEQAALNIARSWLFLRSQEYKKYQTNKTTGNTDKRAFVETWQSFYRKKLKEVWKPAV

SEQ ID NO: 27131 - protein, 978 aa, synthetic construct
  REGION 1..978: note = engineered CasX variant
QEIKRINKIRRRLVKDSNTKKAGKTGPMKTLLVRVMTPDLRERLENLRKKPENIPQPISNTSRANLNKLLTDYTEMKKAILHVYWEEFQKDPVGLMSRVAQPASKKIDQNKLKPEMDEKGNLTTAGFACSQCGQPLFVYKLEQVSEKGKAYTNYFGRCNVAEHEKLILLAQLKPEKDSDEAVTYSLGKFGQRALDFYSIHVTKESTHPVKPLAQIAGNRYASGPVGKALSDACMGTIASFLSKYQDIIIEHQKVVKGNQKRLESLRELAGKENLEYPSVTLPPQPHTKEGVDAYNEVIARVRMWVNLNLWQKLKLSRDDAKPLLRLKGFPSFPLVERQANEVDWWDMVCNVKKLINEKKEDGKVFWQNLAGYKRQEALRPYLSSEEDRKKGKKFARYQLGDLLLHLEKKHGEDWGKVYDEAWERIDKKVEGLSKHIKLEEERRSEDAQSKAALTDWLRAKASFVIEGLKEADKDEFCRCELKLQKWYGDLRGKPFAIEAENSILDISGFSKQYNCAFIWQKDGVKKLNLYLIINYFKGGKLRFKKIKPEAFEANRFYTVINKKSGEIVPMEVNFNFDDPNLIILPLAFGKRQGREFIWNDLLSLETGSLKLANGRVIEKTLYNRRTRQDEPALFVALTFERREVLDSSNIKPMNLIGVDRGENIPAVIALTDPEGCPLERFKDSAGNPTHILRIGECYKEKQRTIQAKKEVEQRRAGGYSRKYASKAKNLADDMVRNTARDLLYYAVTQDAMLIFENLSRGFGRQGKRTFMAERQYTRMEDWLTAKLAYEGLPSKTYLSKTLAQYTSKTCSNCGFTITSADYDRVLEKLKKTATGWMTTINGKELKVEGQITYYNRYKRQNVVKDLSVELDRLSEESVNNDISSWTKGRSGEALSLLKKRFSHRPVQEKFVCLNCGFETHADEQAALNIARSWLFLRSQEYKKYQTNKTTGNTDKRAFVETWQSFYRKKLKEVWKPAV

SEQ ID NO: 27132 - protein, 978 aa, synthetic construct
  REGION 1..978: note = engineered CasX variant
QEIKRINKIRRRLVKDSNTKKAGKTGPMKTLLVRVMTPDLRERLENLRKKPENIPQPISNTSRANLNKLLTDYTEMKKAILHVYWEEFQKDPVGLMSRVAQPASKKIDQNKLKPEMDEKGNLTTAGFACSQCGQPLFVYKLEQVSEKGKAYTNYFGRCNVAEHEKLILLAQLKPEKDSDEAVTYSLGKFGQRALDFYSIHVTKESTHPVKPLAQIAGNRYASGPVGKALSDACMGTIASFLSKYQDIIIEHQKVVKGNQKRLESLRELAGKENLEYPSVTLPPQPHTKEGVDAYNEVIARVRMWVNLNLWQKLKLSRDDAKPLLRLKGFPSFPLVERQANEVDWWDMVCNVKKLINEKKEDGKVFWQNLAGYKRQEALRPYLSSEEDRKKGKKFARYQLGDLLLHLEKKHGEDWGKVYDEAWERIDKKVEGLSKHIKLEEERRSEDAQSKAALTDWLRAKASFVIEGLKEADKDEFCRCELKLQKWYGDLRGKPFAIEAENSILDISGFSKQYNCAFIWQKDGVKKLNLYLIINYFKGGKLRFKKIKPEAFEANRFYTVINKKSGEIVPMEVNFNFDDPNLIILPLAFGKRQGREFIWNDLLSLETGSLKLANGRVIEKTLYNRRTRQDEPALFVALTFERREVLDSSNIKPMNLIGVDRGENIPAVIALTDPEGCPLERFKDHLGNPTHILRIGESYKEKQRTIQAKKEVEQRRLGGYSRKYASKAKNLADDMVRNTARDLLYYAVTQDAMLIFENLSRGFGRQGKRTFMAERQYTRMEDWLTAKLAYEGLPSKTYLSKTLAQYTSKTCSNCGFTITSADYDRVLEKLKKTATGWMTTINGKELKVEGQITYYNRYKRQNVVKDLSVELDRLSEESVNNDISSWTKGRSGEALSLLKKRFSHRPVQEKFVCLNCGFETHADEQAALNIARSWLFLRSQEYKKYQTNKTTGNTDKRAFVETWQSFYRKKLKEVWKPAV

SEQ ID NO: 27133 - protein, 978 aa, synthetic construct
  REGION 1..978: note = engineered CasX variant
QEIKRINKIRRRLVKDSNTKKAGKTGPMKTLLVRVMTPDLRERLENLRKKPENIPQPISNTSRANLNKLLTDYTEMKKAILHVYWEEFQKDPVGLMSRVAQPASKKIDQNKLKPEMDEKGNLTTAGFACSQCGQPLFVYKLEQVSEKGKAYTNYFGRCNVAEHEKLILLAQLKPEKDSDEAVTYSLGKFGQRALDFYSIHVTKESTHPVKPLAQIAGNRYASGPVGKALSDACMGTIASFLSKYQDIIIEHQKVVKGNQKRLESLRELAGKENLEYPSVTLPPQPHTKEGVDAYNEVIARVRMWVNLNLWQKLKLSRDDAKPLLRLKGFPSFPLVERQANEVDWWDMVCNVKKLINEKKEDGKVFWQNLAGYKRQEALRPYLSSEEDRKKGKKFARYQLGDLLLHLEKKHGEDWGKVYDEAWERIDKKVEGLSKHIKLEEERRSEDAQSKAALTDWLRAKASFVIEGLKEADKDEFCRCELKLQKWYGDLRGKPFAIEAENSILDISGFSKQYNCAFIWQKDGVKKLNLYLIINYFKGGKLRFKKIKPEAFEANRFYTVINKKSGEIVPMEVNFNFDDPNLIILPLAFGKRQGREFIWNDLLSLETGSLKLANGRVIEKTLYNRRTRQDEPALFVALTFERREVLDSSNIKPMNLIGVDRGENIPAVIALTDPEGCPLERFKDHLGNPTHILRIGESYKEKQRTIQAKKEVEQRRAGGYSRKYASKAKNLADDMVRNTARDLLYYAVTQDAMLIFENLSRGFGRQGKRTFMAERQYTRMEDWLTAKLAYEGLPSKTYLSKTLAQYTSKTCSNCGFTITSADYDRVLEKLKKTATGWMTTINGKELKVEGQITYYNRYKRQNVVKDLSVELDRLSEESVNNDISSWTKGRSGEALSLLKKRFSHRPVQEKFVCLNCGFETHADEQAALNIARSWLFLRSQEYKKYQTNKTTGNTDKRAFVETWQSFYRKKLKEVWKPAV

SEQ ID NO: 27134 - protein, 978 aa, synthetic construct
  REGION 1..978: note = engineered CasX variant
QEIKRINKIRRRLVKDSNTKKAGKTGPMKTLLVRVMTPDLRERLENLRKKPENIPQPISNTSRANLNKLLTDYTEMKKAILHVYWEEFQKDPVGLMSRVAQPASKKIDQNKLKPEMDEKGNLTTAGFACSQCGQPLFVYKLEQVSEKGKAYTNYFGRCNVAEHEKLILLAQLKPEKDSDEAVTYSLGKFGQRALDFYSIHVTKESTHPVKPLAQIAGNRYASGPVGKALSDACMGTIASFLSKYQDIIIEHQKVVKGNQKRLESLRELAGKENLEYPSVTLPPQPHTKEGVDAYNEVIARVRMWVNLNLWQKLKLSRDDAKPLLRLKGFPSFPLVERQANEVDWWDMVCNVKKLINEKKEDGKVFWQNLAGYKRQEALRPYLSSEEDRKKGKKFARYQLGDLLLHLEKKHGEDWGKVYDEAWERIDKKVEGLSKHIKLEEERRSEDAQSKAALTDWLRAKASFVIEGLKEADKDEFCRCELKLQKWYGDLRGKPFAIEAENSILDISGFSKQYNCAFIWQKDGVKKLNLYLIINYFKGGKLRFKKIKPEAFEANRFYTVINKKSGEIVPMEVNFNFDDPNLIILPLAFGKRQGREFIWNDLLSLETGSLKLANGRVIEKTLYNRRTRQDEPALFVALTFERREVLDSSNIKPMNLIGVDRGENIPAVIALTDPEGCPLERFKDHLGNPTHILRIGESYKEKQRTIQAKKEVEQRRAFGYSRKYASKAKNLADDMVRNTARDLLYYAVTQDAMLIFENLSRGFGRQGKRTFMAERQYTRMEDWLTAKLAYEGLPSKTYLSKTLAQYTSKTCSNCGFTITSADYDRVLEKLKKTATGWMTTINGKELKVEGQITYYNRYKRQNVVKDLSVELDRLSEESVNNDISSWTKGRSGEALSLLKKRFSHRPVQEKFVCLNCGFETHADEQAALNIARSWLFLRSQEYKKYQTNKTTGNTDKRAFVETWQSFYRKKLKEVWKPAV

SEQ ID NO: 27135 - protein, 978 aa, synthetic construct
  REGION 1..978: note = engineered CasX variant
QEIKRINKIRRRLVKDSNTKKAGKTGPMKTLLVRVMTPDLRERLENLRKKPENIPQPISNTSRANLNKLLTDYTEMKKAILHVYWEEFQKDPVGLMSRVAQPASKKIDQNKLKPEMDEKGNLTTAGFACSQCGQPLFVYKLEQVSEKGKAYTNYFGRCNVAEHEKLILLAQLKPEKDSDEAVTYSLGKFGQRALDFYSIHVTKESTHPVKPLAQIAGNRYASGPVGKALSDACMGTIASFLSKYQDIIIEHQKVVKGNQKRLESLRELAGKENLEYPSVTLPPQPHTKEGVDAYNEVIARVRMWVNLNLWQKLKLSRDDAKPLLRLKGFPSFPLVERQANEVDWWDMVCNVKKLINEKKEDGKVFWQNLAGYKRQEALRPYLSSEEDRKKGKKFARYQLGDLLLHLEKKHGEDWGKVYDEAWERIDKKVEGLSKHIKLEEERRSEDAQSKAALTDWLRAKASFVIEGLKEADKDEFCRCELKLQKWYGDLRGKPFAIEAENSILDISGFSKQYNCAFIWQKDGVKKLNLYLIINYFKGGKLRFKKIKPEAFEANRFYTVINKKSGEIVPMEVNFNFDDPNLIILPLAFGKRQGREFIWNDLLSLETGSLKLANGRVIEKTLYNRRTRQDEPALFVALTFERREVLDSSNIKPMNLIGVDRGENIPAVIALTDPEGCPLERFKDHLGNPTHILRIGECYKEKQRTIQAKKEVEQRRAGGYSRKYASKAKNLADDMVRNTARDLLYYAVTQDAMLIFENLSRGFGRQGKRTFMAERQYTRMEDWLTAKLAYEGLPSKTYLSKTLAQYTSKTCSNCGFTITSADYDRVLEKLKKTATGWMTTINGKELKVEGQITYYNRYKRQNVVKDLSVELDRLSEESVNNDISSWTKGRSGEALSLLKKRFSHRPVQEKFVCLNCGFETHADEQAALNIARSWLFLRSQEYKKYQTNKTTGNTDKRAFVETWQSFYRKKLKEVWKPAV

SEQ ID NO: 27136 - protein, 978 aa, synthetic construct
  REGION 1..978: note = engineered CasX variant
QEIKRINKIRRRLVKDSNTKKAGKTGPMKTLLVRVMTPDLRERLENLRKKPENIPQPISNTSRANLNKLLTDYTEMKKAILHVYWEEFQKDPVGLMSRVAQPASKKIDQNKLKPEMDEKGNLTTAGFACSQCGQPLFVYKLEQVSEKGKAYTNYFGRCNVAEHEKLILLAQLKPEKDSDEAVTYSLGKFGQRALDFYSIHVTKESTHPVKPLAQIAGNRYASGPVGKALSDACMGTIASFLSKYQDIIIEHQKVVKGNQKRLESLRELAGKENLEYPSVTLPPQPHTKEGVDAYNEVIARVRMWVNLNLWQKLKLSRDDAKPLLRLKGFPSFPLVERQANEVDWWDMVCNVKKLINEKKEDGKVFWQNLAGYKRQEALRPYLSSEEDRKKGKKFARYQLGDLLLHLEKKHGEDWGKVYDEAWERIDKKVEGLSKHIKLEEERRSEDAQSKAALTDWLRAKASFVIEGLKEADKDEFCRCELKLQKWYGDLRGKPFAIEAENSILDISGFSKQYNCAFIWQKDGVKKLNLYLIINYFKGGKLRFKKIKPEAFEANRFYTVINKKSGEIVPMEVNFNFDDPNLIILPLAFGKRQGREFIWNDLLSLETGSLKLANGRVIEKTLYNRRTRQDEPALFVALTFERREVLDSSNIKPMNLIGVDRGENIPAVIALTDPEGCPLERFKDHAGNPTHILRIGESYKEKQRTIQAKKEVEQRRAGGYSRKYASKAKNLADDMVRNTARDLLYYAVTQDAMLIFENLSRGFGRQGKRTFMAERQYTRMEDWLTAKLAYEGLPSKTYLSKTLAQYTSKTCSNCGFTITSADYDRVLEKLKKTATGWMTTINGKELKVEGQITYYNRYKRQNVVKDLSVELDRLSEESVNNDISSWTKGRSGEALSLLKKRFSHRPVQEKFVCLNCGFETHADEQAALNIARSWLFLRSQEYKKYQTNKTTGNTDKRAFVETWQSFYRKKLKEVWKPAV

SEQ ID NO: 27137 - protein, 978 aa, synthetic construct
  REGION 1..978: note = engineered CasX variant
QEIKRINKIRRRLVKDSNTKKAGKTGPMKTLLVRVMTPDLRERLENLRKKPENIPQPISNTSRANLNKLLTDYTEMKKAILHVYWEEFQKDPVGLMSRVAQPASKKIDQNKLKPEMDEKGNLTTAGFACSQCGQPLFVYKLEQVSEKGKAYTNYFGRCNVAEHEKLILLAQLKPEKDSDEAVTYSLGKFGQRALDFYSIHVTKESTHPVKPLAQIAGNRYASGPVGKALSDACMGTIASFLSKYQDIIIEHQKVVKGNQKRLESLRELAGKENLEYPSVTLPPQPHTKEGVDAYNEVIARVRMWVNLNLWQKLKLSRDDAKPLLRLKGFPSFPLVERQANEVDWWDMVCNVKKLINEKKEDGKVFWQNLAGYKRQEALRPYLSSEEDRKKGKKFARYQLGDLLLHLEKKHGEDWGKVYDEAWERIDKKVEGLSKHIKLEEERRSEDAQSKAALTDWLRAKASFVIEGLKEADKDEFCRCELKLQKWYGDLRGKPFAIEAENSILDISGFSKQYNCAFIWQKDGVKKLNLYLIINYFKGGKLRFKKIKPEAFEANRFYTVINKKSGEIVPMEVNFNFDDPNLIILPLAFGKRQGREFIWNDLLSLETGSLKLANGRVIEKTLYNRRTRQDEPALFVALTFERREVLDSSNIKPMNLIGVDRGENIPAVIALTDPEGCPLERFKDGLGNPTHILRIGESYKEKQRTIQAKKEVEQRRAGGYSRKYASKAKNLADDMVRNTARDLLYYAVTQDAMLIFENLSRGFGRQGKRTFMAERQYTRMEDWLTAKLAYEGLPSKTYLSKTLAQYTSKTCSNCGFTITSADYDRVLEKLKKTATGWMTTINGKELKVEGQITYYNRYKRQNVVKDLSVELDRLSEESVNNDISSWTKGRSGEALSLLKKRFSHRPVQEKFVCLNCGFETHADEQAALNIARSWLFLRSQEYKKYQTNKTTGNTDKRAFVETWQSFYRKKLKEVWKPAV

SEQ ID NO: 27138 - protein, 978 aa, synthetic construct
  REGION 1..978: note = engineered CasX variant
QEIKRINKIRRRLVKDSNTKKAGKTGPMKTLLVRVMTPDLRERLENLRKKPENIPQPISNTSRANLNKLLTDYTEMKKAILHVYWEEFQKDPVGLMSRVAQPASKKIDQNKLKPEMDEKGNLTTAGFACSQCGQPLFVYKLEQVSEKGKAYTNYFGRCNVAEHEKLILLAQLKPEKDSDEAVTYSLGKFGQRALDFYSIHVTKESTHPVKPLAQIAGNRYASGPVGKALSDACMGTIASFLSKYQDIIIEHQKVVKGNQKRLESLRELAGKENLEYPSVTLPPQPHTKEGVDAYNEVIARVRMWVNLNLWQKLKLSRDDAKPLLRLKGFPSFPLVERQANEVDWWDMVCNVKKLINEKKEDGKVFWQNLAGYKRQEALRPYLSSEEDRKKGKKFARYQLGDLLLHLEKKHGEDWGKVYDEAWERIDKKVEGLSKHIKLEEERRSEDAQSKAALTDWLRAKASFVIEGLKEADKDEFCRCELKLQKWYGDLRGKPFAIEAENSILDISGFSKQYNCAFIWQKDGVKKLNLYLIINYFKGGKLRFKKIKPEAFEANRFYTVINKKSGEIVPMEVNFNFDDPNLIILPLAFGKRQGREFIWNDLLSLETGSLKLANGRVIEKTLYNRRTRQDEPALFVALTFERREVLDSSNIKPMNLIGVDRGENIPAVIALTDPEGCPLERFKDGLGNPTHIIRIGESYKEKQRTIQAKKEVEQRRAGGYSRKYASKAKNLADDMVRNTARDLLYYAVTQDAMLIFENLSRGFGRQGKRTFMAERQYTRMEDWLTAKLAYEGLPSKTYLSKTLAQYTSKTCSNCGFTITSADYDRVLEKLKKTATGWMTTINGKELKVEGQITYYNRYKRQNVVKDLSVELDRLSEESVNNDISSWTKGRSGEALSLLKKRFSHRPVQEKFVCLNCGFETHADEQAALNIARSWLFLRSQEYKKYQTNKTTGNTDKRAFVETWQSFYRKKLKEVWKPAV

SEQ ID NO: 27139 - protein, 978 aa, synthetic construct
  REGION 1..978: note = engineered CasX variant
QEIKRINKIRRRLVKDSNTKKAGKTGPMKTLLVRVMTPDLRERLENLRKKPENIPQPISNTSRANLNKLLTDYTEMKKAILHVYWEEFQKDPVGLMSRVAQPASKKIDQNKLKPEMDEKGNLTTAGFACSQCGQPLFVYKLEQVSEKGKAYTNYFGRCNVAEHEKLILLAQLKPEKDSDEAVTYSLGKFGQRALDFYSIHVTKESTHPVKPLAQIAGNRYASGPVGKALSDACMGTIASFLSKYQDIIIEHQKVVKGNQKRLESLRELAGKENLEYPSVTLPPQPHTKEGVDAYNEVIARVRMWVNLNLWQKLKLSRDDAKPLLRLKGFPSFPLVERQANEVDWWDMVCNVKKLINEKKEDGKVFWQNLAGYKRQEALRPYLSSEEDRKKGKKFARYQLGDLLLHLEKKHGEDWGKVYDEAWERIDKKVEGLSKHIKLEEERRSEDAQSKAALTDWLRAKASFVIEGLKEADKDEFCRCELKLQKWYGDLRGKPFAIEAENSILDISGFSKQYNCAFIWQKDGVKKLNLYLIINYFKGGKLRFKKIKPEAFEANRFYTVINKKSGEIVPMEVNFNFDDPNLIILPLAFGKRQGREFIWNDLLSLETGSLKLANGRVIEKTLYNRRTRQDEPALFVALTFERREVLDSSNIKPMNLIGVDRGENIPAVIALTDPEGCPLECFKDSLGNPTHILRIGESYKEKQRTIQAKKEVEQRRLGGYSRKYASKAKNLADDMVRNTARDLLYYAVTQDAMLIFENLSRGFGRQGKRTFMAERQYTRMEDWLTAKLAYEGLPSKTYLSKTLAQYTSKTCSNCGFTITSADYDRVLEKLKKTATGWMTTINGKELKVEGQITYYNRYKRQNVVKDLSVELDRLSEESVNNDISSWTKGRSGEALSLLKKRFSHRPVQEKFVCLNCGFETHADEQAALNIARSWLFLRSQEYKKYQTNKTTGNTDKRAFVETWQSFYRKKLKEVWKPAV

SEQ ID NO: 27140 - protein, 978 aa, synthetic construct
  REGION 1..978: note = engineered CasX variant
QEIKRINKIRRRLVKDSNTKKAGKTGPMKTLLVRVMTPDLRERLENLRKKPENIPQPISNTSRANLNKLLTDYTEMKKAILHVYWEEFQKDPVGLMSRVAQPASKKIDQNKLKPEMDEKGNLTTAGFACSQCGQPLFVYKLEQVSEKGKAYTNYFGRCNVAEHEKLILLAQLKPEKDSDEAVTYSLGKFGQRALDFYSIHVTKESTHPVKPLAQIAGNRYASGPVGKALSDACMGTIASFLSKYQDIIIEHQKVVKGNQKRLESLRELAGKENLEYPSVTLPPQPHTKEGVDAYNEVIARVRMWVNLNLWQKLKLSRDDAKPLLRLKGFPSFPLVERQANEVDWWDMVCNVKKLINEKKEDGKVFWQNLAGYKRQEALRPYLSSEEDRKKGKKFARYQLGDLLLHLEKKHGEDWGKVYDEAWERIDKKVEGLSKHIKLEEERRSEDAQSKAALTDWLRAKASFVIEGLKEADKDEFCRCELKLQKWYGDLRGKPFAIEAENSILDISGFSKQYNCAFIWQKDGVKKLNLYLIINYFKGGKLRFKKIKPEAFEANRFYTVINKKSGEIVPMEVNFNFDDPNLIILPLAFGKRQGREFIWNDLLSLETGSLKLANGRVIEKTLYNRRTRQDEPALFVALTFERREVLDSSNIKPMNLIGVDRGENIPAVIALTDPEGCPLECFKDSLGNPTHILRIGESYKEKQRTIQAKKEVEQRRAGGYSRKYASKAKNLADDMVRNTARDLLYYAVTQDAMLIFENLSRGFGRQGKRTFMAERQYTRMEDWLTAKLAYEGLPSKTYLSKTLAQYTSKTCSNCGFTITSADYDRVLEKLKKTATGWMTTINGKELKVEGQITYYNRYKRQNVVKDLSVELDRLSEESVNNDISSWTKGRSGEALSLLKKRFSHRPVQEKFVCLNCGFETHADEQAALNIARSWLFLRSQEYKKYQTNKTTGNTDKRAFVETWQSFYRKKLKEVWKPAV

SEQ ID NO: 27141 - protein, 978 aa, synthetic construct
  REGION 1..978: note = engineered CasX variant
QEIKRINKIRRRLVKDSNTKKAGKTGPMKTLLVRVMTPDLRERLENLRKKPENIPQPISNTSRANLNKLLTDYTEMKKAILHVYWEEFQKDPVGLMSRVAQPASKKIDQNKLKPEMDEKGNLTTAGFACSQCGQPLFVYKLEQVSEKGKAYTNYFGRCNVAEHEKLILLAQLKPEKDSDEAVTYSLGKFGQRALDFYSIHVTKESTHPVKPLAQIAGNRYASGPVGKALSDACMGTIASFLSKYQDIIIEHQKVVKGNQKRLESLRELAGKENLEYPSVTLPPQPHTKEGVDAYNEVIARVRMWVNLNLWQKLKLSRDDAKPLLRLKGFPSFPLVERQANEVDWWDMVCNVKKLINEKKEDGKVFWQNLAGYKRQEALRPYLSSEEDRKKGKKFARYQLGDLLLHLEKKHGEDWGKVYDEAWERIDKKVEGLSKHIKLEEERRSEDAQSKAALTDWLRAKASFVIEGLKEADKDEFCRCELKLQKWYGDLRGKPFAIEAENSILDISGFSKQYNCAFIWQKDGVKKLNLYLIINYFKGGKLRFKKIKPEAFEANRFYTVINKKSGEIVPMEVNFNFDDPNLIILPLAFGKRQGREFIWNDLLSLETGSLKLANGRVIEKTLYNRRTRQDEPALFVALTFERREVLDSSNIKPMNLIGVDRGENIPAVIALTDPEGCPLDRFRDSLGNPTHILRIGESYKEKQRTIQAKKEVEQRRAGGYSRKYASKAKNLADDMVRNTARDLLYYAVTQDAMLIFENLSRGFGRQGKRTFMAERQYTRMEDWLTAKLAYEGLPSKTYLSKTLAQYTSKTCSNCGFTITSADYDRVLEKLKKTATGWMTTINGKELKVEGQITYYNRYKRQNVVKDLSVELDRLSEESVNNDISSWTKGRSGEALSLLKKRFSHRPVQEKFVCLNCGFETHADEQAALNIARSWLFLRSQEYKKYQTNKTTGNTDKRAFVETWQSFYRKKLKEVWKPAV

SEQ ID NO: 27142 - protein, 978 aa, synthetic construct
  REGION 1..978: note = engineered CasX variant
QEIKRINKIRRRLVKDSNTKKAGKTGPMKTLLVRVMTPDLRERLENLRKKPENIPQPISNTSRANLNKLLTDYTEMKKAILHVYWEEFQKDPVGLMSRVAQPASKKIDQNKLKPEMDEKGNLTTAGFACSQCGQPLFVYKLEQVSEKGKAYTNYFGRCNVAEHEKLILLAQLKPEKDSDEAVTYSLGKFGQRALDFYSIHVTKESTHPVKPLAQIAGNRYASGPVGKALSDACMGTIASFLSKYQDIIIEHQKVVKGNQKRLESLRELAGKENLEYPSVTLPPQPHTKEGVDAYNEVIARVRMWVNLNLWQKLKLSRDDAKPLLRLKGFPSFPLVERQANEVDWWDMVCNVKKLINEKKEDGKVFWQNLAGYKRQEALRPYLSSEEDRKKGKKFARYQLGDLLLHLEKKHGEDWGKVYDEAWERIDKKVEGLSKHIKLEEERRSEDAQSKAALTDWLRAKASFVIEGLKEADKDEFCRCELKLQKWYGDLRGKPFAIEAENSILDISGFSKQYNCAFIWQKDGVKKLNLYLIINYFKGGKLRFKKIKPEAFEANRFYTVINKKSGEIVPMEVNFNFDDPNLIILPLAFGKRQGREFIWNDLLSLETGSLKLANGRVIEKTLYNRRTRQDEPALFVALTFERREVLDSSNIKPMNLIGVDRGENIPAVIALTDPEGCPLDRFKDSLGNPTHILRIGESYKEKQRTIQAKKEVEQRRAGGYSRKYASKAKNLADDMVRNTARDLLYYAVTQDAMLIFENLSRGFGRQGKRTFMAERQYTRMEDWLTAKLAYEGLPSKTYLSKTLAQYTSKTCSNCGFTITSADYDRVLEKLKKTATGWMTTINGKELKVEGQITYYNRYKRQNVVKDLSVELDRLSEESVNNDISSWTKGRSGEALSLLKKRFSHRPVQEKFVCLNCGFETHADEQAALNIARSWLFLRSQEYKKYQTNKTTGNTDKRAFVETWQSFYRKKLKEVWKPAV

SEQ ID NO: 27143 - protein, 978 aa, synthetic construct
  REGION 1..978: note = engineered CasX variant
QEIKRINKIRRRLVKDSNTKKAGKTGPMKTLLVRVMTPDLRERLENLRKKPENIPQPISNTSRANLNKLLTDYTEMKKAILHVYWEEFQKDPVGLMSRVAQPASKKIDQNKLKPEMDEKGNLTTAGFACSQCGQPLFVYKLEQVSEKGKAYTNYFGRCNVAEHEKLILLAQLKPEKDSDEAVTYSLGKFGQRALDFYSIHVTKESTHPVKPLAQIAGNRYASGPVGKALSDACMGTIASFLSKYQDIIIEHQKVVKGNQKRLESLRELAGKENLEYPSVTLPPQPHTKEGVDAYNEVIARVRMWVNLNLWQKLKLSRDDAKPLLRLKGFPSFPLVERQANEVDWWDMVCNVKKLINEKKEDGKVFWQNLAGYKRQEALRPYLSSEEDRKKGKKFARYQLGDLLLHLEKKHGEDWGKVYDEAWERIDKKVEGLSKHIKLEEERRSEDAQSKAALTDWLRAKASFVIEGLKEADKDEFCRCELKLQKWYGDLRGKPFAIEAENSILDISGFSKQYNCAFIWQKDGVKKLNLYLIINYFKGGKLRFKKIKPEAFEANRFYTVINKKSGEIVPMEVNFNFDDPNLIILPLAFGKRQGREFIWNDLLSLETGSLKLANGRVIEKTLYNRRTRQDEPALFVALTFERREVLDSSNIKPMNLIGVDRGENIPAVIALTDPEGCPLDRFKDSLGNPTHILRIGESYKEKQRTIMAKKEVEQRRAGGYSRKYASKAKNLADDMVRNTARDLLYYAVTQDAMLIFENLSRGFGRQGKRTFMAERQYTRMEDWLTAKLAYEGLPSKTYLSKTLAQYTSKTCSNCGFTITSADYDRVLEKLKKTATGWMTTINGKELKVEGQITYYNRYKRQNVVKDLSVELDRLSEESVNNDISSWTKGRSGEALSLLKKRFSHRPVQEKFVCLNCGFETHADEQAALNIARSWLFLRSQEYKKYQTNKTTGNTDKRAFVETWQSFYRKKLKEVWKPAV

SEQ ID NO: 27144 - protein, 978 aa, synthetic construct
  REGION 1..978: note = engineered CasX variant
QEIKRINKIRRRLVKDSNTKKAGKTGPMKTLLVRVMTPDLRERLENLRKKPENIPQPISNTSRANLNKLLTDYTEMKKAILHVYWEEFQKDPVGLMSRVAQPASKKIDQNKLKPEMDEKGNLTTAGFACSQCGQPLFVYKLEQVSEKGKAYTNYFGRCNVAEHEKLILLAQLKPEKDSDEAVTYSLGKFGQRALDFYSIHVTKESTHPVKPLAQIAGNRYASGPVGKALSDACMGTIASFLSKYQDIIIEHQKVVKGNQKRLESLRELAGKENLEYPSVTLPPQPHTKEGVDAYNEVIARVRMWVNLNLWQKLKLSRDDAKPLLRLKGFPSFPLVERQANEVDWWDMVCNVKKLINEKKEDGKVFWQNLAGYKRQEALRPYLSSEEDRKKGKKFARYQLGDLLLHLEKKHGEDWGKVYDEAWERIDKKVEGLSKHIKLEEERRSEDAQSKAALTDWLRAKASFVIEGLKEADKDEFCRCELKLQKWYGDLRGKPFAIEAENSILDISGFSKQYNCAFIWQKDGVKKLNLYLIINYFKGGKLRFKKIKPEAFEANRFYTVINKKSGEIVPMEVNFNFDDPNLIILPLAFGKRQGREFIWNDLLSLETGSLKLANGRVIEKTLYNRRTRQDEPALFVALTFERREVLDSSNIKPMNLIGVDRGENIPAVIALTDPEGCPLDRFKDSLGNPTHILRIGEHYKEKQRTIQAKKEVEQRRAGGYSRKYASKAKNLADDMVRNTARDLLYYAVTQDAMLIFENLSRGFGRQGKRTFMAERQYTRMEDWLTAKLAYEGLPSKTYLSKTLAQYTSKTCSNCGFTITSADYDRVLEKLKKTATGWMTTINGKELKVEGQITYYNRYKRQNVVKDLSVELDRLSEESVNNDISSWTKGRSGEALSLLKKRFSHRPVQEKFVCLNCGFETHADEQAALNIARSWLFLRSQEYKKYQTNKTTGNTDKRAFVETWQSFYRKKLKEVWKPAV

SEQ ID NO: 27145 - protein, 978 aa, synthetic construct
  REGION 1..978: note = engineered CasX variant
QEIKRINKIRRRLVKDSNTKKAGKTGPMKTLLVRVMTPDLRERLENLRKKPENIPQPISNTSRANLNKLLTDYTEMKKAILHVYWEEFQKDPVGLMSRVAQPASKKIDQNKLKPEMDEKGNLTTAGFACSQCGQPLFVYKLEQVSEKGKAYTNYFGRCNVAEHEKLILLAQLKPEKDSDEAVTYSLGKFGQRALDFYSIHVTKESTHPVKPLAQIAGNRYASGPVGKALSDACMGTIASFLSKYQDIIIEHQKVVKGNQKRLESLRELAGKENLEYPSVTLPPQPHTKEGVDAYNEVIARVRMWVNLNLWQKLKLSRDDAKPLLRLKGFPSFPLVERQANEVDWWDMVCNVKKLINEKKEDGKVFWQNLAGYKRQEALRPYLSSEEDRKKGKKFARYQLGDLLLHLEKKHGEDWGKVYDEAWERIDKKVEGLSKHIKLEEERRSEDAQSKAALTDWLRAKASFVIEGLKEADKDEFCRCELKLQKWYGDLRGKPFAIEAENSILDISGFSKQYNCAFIWQKDGVKKLNLYLIINYFKGGKLRFKKIKPEAFEANRFYTVINKKSGEIVPMEVNFNFDDPNLIILPLAFGKRQGREFIWNDLLSLETGSLKLANGRVIEKTLYNRRTRQDEPALFVALTFERREVLDSSNIKPMNLIGVDRGENIPAVIALTDPEGCPLCRFKDSLGNPTHILRIGESYKEKQRTIQAKKEVEQRRAGGYSRKYASKAKNLADDMVRNTARDLLYYAVTQDAMLIFENLSRGFGRQGKRTFMAERQYTRMEDWLTAKLAYEGLPSKTYLSKTLAQYTSKTCSNCGFTITSADYDRVLEKLKKTATGWMTTINGKELKVEGQITYYNRYKRQNVVKDLSVELDRLSEESVNNDISSWTKGRSGEALSLLKKRFSHRPVQEKFVCLNCGFETHADEQAALNIARSWLFLRSQEYKKYQTNKTTGNTDKRAFVETWQSFYRKKLKEVWKPAV

SEQ ID NO: 27146 - protein, 978 aa, synthetic construct
  REGION 1..978: note = engineered CasX variant
QEIKRINKIRRRLVKDSNTKKAGKTGPMKTLLVRVMTPDLRERLENLRKKPENIPQPISNTSRANLNKLLTDYTEMKKAILHVYWEEFQKDPVGLMSRVAQPASKKIDQNKLKPEMDEKGNLTTAGFACSQCGQPLFVYKLEQVSEKGKAYTNYFGRCNVAEHEKLILLAQLKPEKDSDEAVTYSLGKFGQRALDFYSIHVTKESTHPVKPLAQIAGNRYASGPVGKALSDACMGTIASFLSKYQDIIIEHQKVVKGNQKRLESLRELAGKENLEYPSVTLPPQPHTKEGVDAYNEVIARVRMWVNLNLWQKLKLSRDDAKPLLRLKGFPSFPLVERQANEVDWWDMVCNVKKLINEKKEDGKVFWQNLAGYKRQEALRPYLSSEEDRKKGKKFARYQLGDLLLHLEKKHGEDWGKVYDEAWERIDKKVEGLSKHIKLEEERRSEDAQSKAALTDWLRAKASFVIEGLKEADKDEFCRCELKLQKWYGDLRGKPFAIEAENSILDISGFSKQYNCAFIWQKDGVKKLNLYLIINYFKGGKLRFKKIKPEAFEANRFYTVINKKSGEIVPMEVNFNFDDPNLIILPLAFGKRQGREFIWNDLLSLETGSLKLANGRVIEKTLYNRRTRQDEPALFVALTFERREVLDSSNIKPMNLIGVDRGENIPAVIALTDPEGCPLARFKDSSGNPTHILRIGESYKEKQRTIQAKKEVEQRRAGGYSRKYASKAKNLADDMVRNTARDLLYYAVTQDAMLIFENLSRGFGRQGKRTFMAERQYTRMEDWLTAKLAYEGLPSKTYLSKTLAQYTSKTCSNCGFTITSADYDRVLEKLKKTATGWMTTINGKELKVEGQITYYNRYKRQNVVKDLSVELDRLSEESVNNDISSWTKGRSGEALSLLKKRFSHRPVQEKFVCLNCGFETHADEQAALNIARSWLFLRSQEYKKYQTNKTTGNTDKRAFVETWQSFYRKKLKEVWKPAV

SEQ ID NO: 27147 - protein, 978 aa, synthetic construct
  REGION 1..978: note = engineered CasX variant
QEIKRINKIRRRLVKDSNTKKAGKTGPMKTLLVRVMTPDLRERLENLRKKPENIPQPISNTSRANLNKLLTDYTEMKKAILHVYWEEFQKDPVGLMSRVAQPASKKIDQNKLKPEMDEKGNLTTAGFACSQCGQPLFVYKLEQVSEKGKAYTNYFGRCNVAEHEKLILLAQLKPEKDSDEAVTYSLGKFGQRALDFYSIHVTKESTHPVKPLAQIAGNRYASGPVGKALSDACMGTIASFLSKYQDIIIEHQKVVKGNQKRLESLRELAGKENLEYPSVTLPPQPHTKEGVDAYNEVIARVRMWVNLNLWQKLKLSRDDAKPLLRLKGFPSFPLVERQANEVDWWDMVCNVKKLINEKKEDGKVFWQNLAGYKRQEALRPYLSSEEDRKKGKKFARYQLGDLLLHLEKKHGEDWGKVYDEAWERIDKKVEGLSKHIKLEEERRSEDAQSKAALTDWLRAKASFVIEGLKEADKDEFCRCELKLQKWYGDLRGKPFAIEAENSILDISGFSKQYNCAFIWQKDGVKKLNLYLIINYFKGGKLRFKKIKPEAFEANRFYTVINKKSGEIVPMEVNFNFDDPNLIILPLAFGKRQGREFIWNDLLSLETGSLKLANGRVIEKTLYNRRTRQDEPALFVALTFERREVLDSSNIKPMNLIGVDRGENIPAVIALTDPEGCPLARFKDSLGNPTHILRIGESYKEKQRTIQAKKEVEQRRAGGYSRKYASKAKNLADDMVRNTARDLLYYAVTQDAMLIFENLSRGFGRQGKRTFMAERQYTRMEDWLTAKLAYEGLPSKTYLSKTLAQYTSKTCSNCGFTITSADYDRVLEKLKKTATGWMTTINGKELKVEGQITYYNRYKRQNVVKDLSVELDRLSEESVNNDISSWTKGRSGEALSLLKKRFSHRPVQEKFVCLNCGFETHADEQAALNIARSWLFLRSQEYKKYQTNKTTGNTDKRAFVETWQSFYRKKLKEVWKPAV

SEQ ID NO: 27148 - protein, 978 aa, synthetic construct
  REGION 1..978: note = engineered CasX variant
QEIKRINKIRRRLVKDSNTKKAGKTGPMKTLLVRVMTPDLRERLENLRKKPENIPQPISNTSRANLNKLLTDYTEMKKAILHVYWEEFQKDPVGLMSRVAQPASKKIDQNKLKPEMDEKGNLTTAGFACSQCGQPLFVYKLEQVSEKGKAYTNYFGRCNVAEHEKLILLAQLKPEKDSDEAVTYSLGKFGQRALDFYSIHVTKESTHPVKPLAQIAGNRYASGPVGKALSDACMGTIASFLSKYQDIIIEHQKVVKGNQKRLESLRELAGKENLEYPSVTLPPQPHTKEGVDAYNEVIARVRMWVNLNLWQKLKLSRDDAKPLLRLKGFPSFPLVERQANEVDWWDMVCNVKKLINEKKEDGKVFWQNLAGYKRQEALRPYLSSEEDRKKGKKFARYQLGDLLLHLEKKHGEDWGKVYDEAWERIDKKVEGLSKHIKLEEERRSEDAQSKAALTDWLRAKASFVIEGLKEADKDEFCRCELKLQKWYGDLRGKPFAIEAENSILDISGFSKQYNCAFIWQKDGVKKLNLYLIINYFKGGKLRFKKIKPEAFEANRFYTVINKKSGEIVPMEVNFNFDDPNLIILPLAFGKRQGREFIWNDLLSLETGSLKLANGRVIEKTLYNRRTRQDEPALFVALTFERREVLDSSNIKPMNLIGVDRGENIPAVIALTDPEGCPLARFKDSCGNPTHILRIGESYKEKQRTIQAKKEVEQRRAGGYSRKYASKAKNLADDMVRNTARDLLYYAVTQDAMLIFENLSRGFGRQGKRTFMAERQYTRMEDWLTAKLAYEGLPSKTYLSKTLAQYTSKTCSNCGFTITSADYDRVLEKLKKTATGWMTTINGKELKVEGQITYYNRYKRQNVVKDLSVELDRLSEESVNNDISSWTKGRSGEALSLLKKRFSHRPVQEKFVCLNCGFETHADEQAALNIARSWLFLRSQEYKKYQTNKTTGNTDKRAFVETWQSFYRKKLKEVWKPAV

SEQ ID NO: 27149 - protein, 978 aa, synthetic construct
  REGION 1..978: note = engineered CasX variant
QEIKRINKIRRRLVKDSNTKKAGKTGPMKTLLVRVMTPDLRERLENLRKKPENIPQPISNTSRANLNKLLTDYTEMKKAILHVYWEEFQKDPVGLMSRVAQPASKKIDQNKLKPEMDEKGNLTTAGFACSQCGQPLFVYKLEQVSEKGKAYTNYFGRCNVAEHEKLILLAQLKPEKDSDEAVTYSLGKFGQRALDFYSIHVTKESTHPVKPLAQIAGNRYASGPVGKALSDACMGTIASFLSKYQDIIIEHQKVVKGNQKRLESLRELAGKENLEYPSVTLPPQPHTKEGVDAYNEVIARVRMWVNLNLWQKLKLSRDDAKPLLRLKGFPSFPLVERQANEVDWWDMVCNVKKLINEKKEDGKVFWQNLAGYKRQEALRPYLSSEEDRKKGKKFARYQLGDLLLHLEKKHGEDWGKVYDEAWERIDKKVEGLSKHIKLEEERRSEDAQSKAALTDWLRAKASFVIEGLKEADKDEFCRCELKLQKWYGDLRGKPFAIEAENSILDISGFSKQYNCAFIWQKDGVKKLNLYLIINYFKGGKLRFKKIKPEAFEANRFYTVINKKSGEIVPMEVNFNFDDPNLIILPLAFGKRQGREFIWNDLLSLETGSLKLANGRVIEKTLYNRRTRQDEPALFVALTFERREVLDSSNIKPMNLIGVDRGENIPAVIALTDPEGCPLARFHDSLGNPTHILRIGESYKEKQRTIQAKKEVEQRRAGGYSRKYASKAKNLADDMVRNTARDLLYYAVTQDAMLIFENLSRGFGRQGKRTFMAERQYTRMEDWLTAKLAYEGLPSKTYLSKTLAQYTSKTCSNCGFTITSADYDRVLEKLKKTATGWMTTINGKELKVEGQITYYNRYKRQNVVKDLSVELDRLSEESVNNDISSWTKGRSGEALSLLKKRFSHRPVQEKFVCLNCGFETHADEQAALNIARSWLFLRSQEYKKYQTNKTTGNTDKRAFVETWQSFYRKKLKEVWKPAV

SEQ ID NO: 27150 - protein, 978 aa, synthetic construct
  REGION 1..978: note = engineered CasX variant
QEIKRINKIRRRLVKDSNTKKAGKTGPMKTLLVRVMTPDLRERLENLRKKPENIPQPISNTSRANLNKLLTDYTEMKKAILHVYWEEFQKDPVGLMSRVAQPASKKIDQNKLKPEMDEKGNLTTAGFACSQCGQPLFVYKLEQVSEKGKAYTNYFGRCNVAEHEKLILLAQLKPEKDSDEAVTYSLGKFGQRALDFYSIHVTKESTHPVKPLAQIAGNRYASGPVGKALSDACMGTIASFLSKYQDIIIEHQKVVKGNQKRLESLRELAGKENLEYPSVTLPPQPHTKEGVDAYNEVIARVRMWVNLNLWQKLKLSRDDAKPLLRLKGFPSFPLVERQANEVDWWDMVCNVKKLINEKKEDGKVFWQNLAGYKRQEALRPYLSSEEDRKKGKKFARYQLGDLLLHLEKKHGEDWGKVYDEAWERIDKKVEGLSKHIKLEEERRSEDAQSKAALTDWLRAKASFVIEGLKEADKDEFCRCELKLQKWYGDLRGKPFAIEAENSILDISGFSKQYNCAFIWQKDGVKKLNLYLIINYFKGGKLRFKKIKPEAFEANRFYTVINKKSGEIVPMEVNFNFDDPNLIILPLAFGKRQGREFIWNDLLSLETGSLKLANGRVIEKTLYNRRTRQDEPALFVALTFERREVLDSSNIKPMNLIGVDRGENIPAVIALTDPEGCPLARFHDSCGNPTHILRIGESYKEKQRTIQAKKEVEQRRAGGYSRKYASKAKNLADDMVRNTARDLLYYAVTQDAMLIFENLSRGFGRQGKRTFMAERQYTRMEDWLTAKLAYEGLPSKTYLSKTLAQYTSKTCSNCGFTITSADYDRVLEKLKKTATGWMTTINGKELKVEGQITYYNRYKRQNVVKDLSVELDRLSEESVNNDISSWTKGRSGEALSLLKKRFSHRPVQEKFVCLNCGFETHADEQAALNIARSWLFLRSQEYKKYQTNKTTGNTDKRAFVETWQSFYRKKLKEVWKPAV

SEQ ID NO: 27151 - protein, 978 aa, synthetic construct
  REGION 1..978: note = engineered CasX variant
QEIKRINKIRRRLVKDSNTKKAGKTGPMKTLLVRVMTPDLRERLENLRKKPENIPQPISNTSRANLNKLLTDYTEMKKAILHVYWEEFQKDPVGLMSRVAQPASKKIDQNKLKPEMDEKGNLTTAGFACSQCGQPLFVYKLEQVSEKGKAYTNYFGRCNVAEHEKLILLAQLKPEKDSDEAVTYSLGKFGQRALDFYSIHVTKESTHPVKPLAQIAGNRYASGPVGKALSDACMGTIASFLSKYQDIIIEHQKVVKGNQKRLESLRELAGKENLEYPSVTLPPQPHTKEGVDAYNEVIARVRMWVNLNLWQKLKLSRDDAKPLLRLKGFPSFPLVERQANEVDWWDMVCNVKKLINEKKEDGKVFWQNLAGYKRQEALRPYLSSEEDRKKGKKFARYQLGDLLLHLEKKHGEDWGKVYDEAWERIDKKVEGLSKHIKLEEERRSEDAQSKAALTDWLRAKASFVIEGLKEADKDEFCRCELKLQKWYGDLRGKPFAIEAENSILDISGFSKQYNCAFIWQKDGVKKLNLYLIINYFKGGKLRFKKIKPEAFEANRFYTVINKKSGEIVPMEVNFNFDDPNLIILPLAFGKRQGREFIWNDLLSLETGSLKLANGRVIEKTLYNRRTRQDEPALFVALTFERREVLDSSNIKPMNLIGVDRGENIPAVIALTDPEGCPKSRFKDSLGNPTHILRIGESYKEKQRTIQAKKETEQRRAGGYSRKYASKAKNLADDMVRNTARDLLYYAVTQDAMLIFENLSRGFGRQGKRTFMAERQYTRMEDWLTAKLAYEGLPSKTYLSKTLAQYTSKTCSNCGFTITSADYDRVLEKLKKTATGWMTTINGKELKVEGQITYYNRYKRQNVVKDLSVELDRLSEESVNNDISSWTKGRSGEALSLLKKRFSHRPVQEKFVCLNCGFETHADEQAALNIARSWLFLRSQEYKKYQTNKTTGNTDKRAFVETWQSFYRKKLKEVWKPAV

SEQ ID NO: 27152 - protein, 978 aa, synthetic construct
  REGION 1..978: note = engineered CasX variant
QEIKRINKIRRRLVKDSNTKKAGKTGPMKTLLVRVMTPDLRERLENLRKKPENIPQPISNTSRANLNKLLTDYTEMKKAILHVYWEEFQKDPVGLMSRVAQPASKKIDQNKLKPEMDEKGNLTTAGFACSQCGQPLFVYKLEQVSEKGKAYTNYFGRCNVAEHEKLILLAQLKPEKDSDEAVTYSLGKFGQRALDFYSIHVTKESTHPVKPLAQIAGNRYASGPVGKALSDACMGTIASFLSKYQDIIIEHQKVVKGNQKRLESLRELAGKENLEYPSVTLPPQPHTKEGVDAYNEVIARVRMWVNLNLWQKLKLSRDDAKPLLRLKGFPSFPLVERQANEVDWWDMVCNVKKLINEKKEDGKVFWQNLAGYKRQEALRPYLSSEEDRKKGKKFARYQLGDLLLHLEKKHGEDWGKVYDEAWERIDKKVEGLSKHIKLEEERRSEDAQSKAALTDWLRAKASFVIEGLKEADKDEFCRCELKLQKWYGDLRGKPFAIEAENSILDISGFSKQYNCAFIWQKDGVKKLNLYLIINYFKGGKLRFKKIKPEAFEANRFYTVINKKSGEIVPMEVNFNFDDPNLIILPLAFGKRQGREFIWNDLLSLETGSLKLANGRVIEKTLYNRRTRQDEPALFVALTFERREVLDSSNIKPMNLIGVDRGENIPAVIALTDPEGCPISYFKDSLGNPTHILRIGESYKEKQRTIQAKKEVEQRRAGGYSRKYASKAKNLADDMVRNTARDLLYYAVTQDAMLIFENLSRGFGRQGKRTFMAERQYTRMEDWLTAKLAYEGLPSKTYLSKTLAQYTSKTCSNCGFTITSADYDRVLEKLKKTATGWMTTINGKELKVEGQITYYNRYKRQNVVKDLSVELDRLSEESVNNDISSWTKGRSGEALSLLKKRFSHRPVQEKFVCLNCGFETHADEQAALNIARSWLFLRSQEYKKYQTNKTTGNTDKRAFVETWQSFYRKKLKEVWKPAV

SEQ ID NO: 27153 - protein, 978 aa, synthetic construct
  REGION 1..978: note = engineered CasX variant
QEIKRINKIRRRLVKDSNTKKAGKTGPMKTLLVRVMTPDLRERLENLRKKPENIPQPISNTSRANLNKLLTDYTEMKKAILHVYWEEFQKDPVGLMSRVAQPASKKIDQNKLKPEMDEKGNLTTAGFACSQCGQPLFVYKLEQVSEKGKAYTNYFGRCNVAEHEKLILLAQLKPEKDSDEAVTYSLGKFGQRALDFYSIHVTKESTHPVKPLAQIAGNRYASGPVGKALSDACMGTIASFLSKYQDIIIEHQKVVKGNQKRLESLRELAGKENLEYPSVTLPPQPHTKEGVDAYNEVIARVRMWVNLNLWQKLKLSRDDAKPLLRLKGFPSFPLVERQANEVDWWDMVCNVKKLINEKKEDGKVFWQNLAGYKRQEALRPYLSSEEDRKKGKKFARYQLGDLLLHLEKKHGEDWGKVYDEAWERIDKKVEGLSKHIKLEEERRSEDAQSKAALTDWLRAKASFVIEGLKEADKDEFCRCELKLQKWYGDLRGKPFAIEAENSILDISGFSKQYNCAFIWQKDGVKKLNLYLIINYFKGGKLRFKKIKPEAFEANRFYTVINKKSGEIVPMEVNFNFDDPNLIILPLAFGKRQGREFIWNDLLSLETGSLKLANGRVIEKTLYNRRTRQDEPALFVALTFERREVLDSSNIKPMNLIGVDRGENIPAVIALTDPEGCPISRYKDSLGNPTHILRIGESYKEKQRTIQAKKEVEQRRMGGYSRKYASKAKNLADDMVRNTARDLLYYAVTQDAMLIFENLSRGFGRQGKRTFMAERQYTRMEDWLTAKLAYEGLPSKTYLSKTLAQYTSKTCSNCGFTITSADYDRVLEKLKKTATGWMTTINGKELKVEGQITYYNRYKRQNVVKDLSVELDRLSEESVNNDISSWTKGRSGEALSLLKKRFSHRPVQEKFVCLNCGFETHADEQAALNIARSWLFLRSQEYKKYQTNKTTGNTDKRAFVETWQSFYRKKLKEVWKPAV

SEQ ID NO: 27154 - protein, 978 aa, synthetic construct
  REGION 1..978: note = engineered CasX variant
QEIKRINKIRRRLVKDSNTKKAGKTGPMKTLLVRVMTPDLRERLENLRKKPENIPQPISNTSRANLNKLLTDYTEMKKAILHVYWEEFQKDPVGLMSRVAQPASKKIDQNKLKPEMDEKGNLTTAGFACSQCGQPLFVYKLEQVSEKGKAYTNYFGRCNVAEHEKLILLAQLKPEKDSDEAVTYSLGKFGQRALDFYSIHVTKESTHPVKPLAQIAGNRYASGPVGKALSDACMGTIASFLSKYQDIIIEHQKVVKGNQKRLESLRELAGKENLEYPSVTLPPQPHTKEGVDAYNEVIARVRMWVNLNLWQKLKLSRDDAKPLLRLKGFPSFPLVERQANEVDWWDMVCNVKKLINEKKEDGKVFWQNLAGYKRQEALRPYLSSEEDRKKGKKFARYQLGDLLLHLEKKHGEDWGKVYDEAWERIDKKVEGLSKHIKLEEERRSEDAQSKAALTDWLRAKASFVIEGLKEADKDEFCRCELKLQKWYGDLRGKPFAIEAENSILDISGFSKQYNCAFIWQKDGVKKLNLYLIINYFKGGKLRFKKIKPEAFEANRFYTVINKKSGEIVPMEVNFNFDDPNLIILPLAFGKRQGREFIWNDLLSLETGSLKLANGRVIEKTLYNRRTRQDEPALFVALTFERREVLDSSNIKPMNLIGVDRGENIPAVIALTDPEGCPISRYKDSLGNPTHILRIGESYKEKQRTIQAKKEVEQRRAGGYSRKYASKAKNLADDMVRNTARDLLYYAVTQDAMLIFENLSRGFGRQGKRTFMAERQYTRMEDWLTAKLAYEGLPSKTYLSKTLAQYTSKTCSNCGFTITSADYDRVLEKLKKTATGWMTTINGKELKVEGQITYYNRYKRQNVVKDLSVELDRLSEESVNNDISSWTKGRSGEALSLLKKRFSHRPVQEKFVCLNCGFETHADEQAALNIARSWLFLRSQEYKKYQTNKTTGNTDKRAFVETWQSFYRKKLKEVWKPAV

SEQ ID NO: 27155 - protein, 978 aa, synthetic construct
  REGION 1..978: note = engineered CasX variant
QEIKRINKIRRRLVKDSNTKKAGKTGPMKTLLVRVMTPDLRERLENLRKKPENIPQPISNTSRANLNKLLTDYTEMKKAILHVYWEEFQKDPVGLMSRVAQPASKKIDQNKLKPEMDEKGNLTTAGFACSQCGQPLFVYKLEQVSEKGKAYTNYFGRCNVAEHEKLILLAQLKPEKDSDEAVTYSLGKFGQRALDFYSIHVTKESTHPVKPLAQIAGNRYASGPVGKALSDACMGTIASFLSKYQDIIIEHQKVVKGNQKRLESLRELAGKENLEYPSVTLPPQPHTKEGVDAYNEVIARVRMWVNLNLWQKLKLSRDDAKPLLRLKGFPSFPLVERQANEVDWWDMVCNVKKLINEKKEDGKVFWQNLAGYKRQEALRPYLSSEEDRKKGKKFARYQLGDLLLHLEKKHGEDWGKVYDEAWERIDKKVEGLSKHIKLEEERRSEDAQSKAALTDWLRAKASFVIEGLKEADKDEFCRCELKLQKWYGDLRGKPFAIEAENSILDISGFSKQYNCAFIWQKDGVKKLNLYLIINYFKGGKLRFKKIKPEAFEANRFYTVINKKSGEIVPMEVNFNFDDPNLIILPLAFGKRQGREFIWNDLLSLETGSLKLANGRVIEKTLYNRRTRQDEPALFVALTFERREVLDSSNIKPMNLIGVDRGENIPAVIALTDPEGCPISRFKDSMGNPTHILRIRESYKEKQRTIQAKKEVEQRRAGGYSRKYASKAKNLADDMVRNTARDLLYYAVTQDAMLIFENLSRGFGRQGKRTFMAERQYTRMEDWLTAKLAYEGLPSKTYLSKTLAQYTSKTCSNCGFTITSADYDRVLEKLKKTATGWMTTINGKELKVEGQITYYNRYKRQNVVKDLSVELDRLSEESVNNDISSWTKGRSGEALSLLKKRFSHRPVQEKFVCLNCGFETHADEQAALNIARSWLFLRSQEYKKYQTNKTTGNTDKRAFVETWQSFYRKKLKEVWKPAV

SEQ ID NO: 27156 - protein, 978 aa, synthetic construct
  REGION 1..978: note = engineered CasX variant
QEIKRINKIRRRLVKDSNTKKAGKTGPMKTLLVRVMTPDLRERLENLRKKPENIPQPISNTSRANLNKLLTDYTEMKKAILHVYWEEFQKDPVGLMSRVAQPASKKIDQNKLKPEMDEKGNLTTAGFACSQCGQPLFVYKLEQVSEKGKAYTNYFGRCNVAEHEKLILLAQLKPEKDSDEAVTYSLGKFGQRALDFYSIHVTKESTHPVKPLAQIAGNRYASGPVGKALSDACMGTIASFLSKYQDIIIEHQKVVKGNQKRLESLRELAGKENLEYPSVTLPPQPHTKEGVDAYNEVIARVRMWVNLNLWQKLKLSRDDAKPLLRLKGFPSFPLVERQANEVDWWDMVCNVKKLINEKKEDGKVFWQNLAGYKRQEALRPYLSSEEDRKKGKKFARYQLGDLLLHLEKKHGEDWGKVYDEAWERIDKKVEGLSKHIKLEEERRSEDAQSKAALTDWLRAKASFVIEGLKEADKDEFCRCELKLQKWYGDLRGKPFAIEAENSILDISGFSKQYNCAFIWQKDGVKKLNLYLIINYFKGGKLRFKKIKPEAFEANRFYTVINKKSGEIVPMEVNFNFDDPNLIILPLAFGKRQGREFIWNDLLSLETGSLKLANGRVIEKTLYNRRTRQDEPALFVALTFERREVLDSSNIKPMNLIGVDRGENIPAVIALTDPEGCPISRFKDSMGNPTHILRIGESYKEKQRTIQAKKEVEQRRAGGYSRKYASKAKNLADDMVRNTARDLLYYAVTQDAMLIFENLSRGFGRQGKRTFMAERQYTRMEDWLTAKLAYEGLPSKTYLSKTLAQYTSKTCSNCGFTITSADYDRVLEKLKKTATGWMTTINGKELKVEGQITYYNRYKRQNVVKDLSVELDRLSEESVNNDISSWTKGRSGEALSLLKKRFSHRPVQEKFVCLNCGFETHADEQAALNIARSWLFLRSQEYKKYQTNKTTGNTDKRAFVETWQSFYRKKLKEVWKPAV

SEQ ID NO: 27157 - protein, 978 aa, synthetic construct
  REGION 1..978: note = engineered CasX variant
QEIKRINKIRRRLVKDSNTKKAGKTGPMKTLLVRVMTPDLRERLENLRKKPENIPQPISNTSRANLNKLLTDYTEMKKAILHVYWEEFQKDPVGLMSRVAQPASKKIDQNKLKPEMDEKGNLTTAGFACSQCGQPLFVYKLEQVSEKGKAYTNYFGRCNVAEHEKLILLAQLKPEKDSDEAVTYSLGKFGQRALDFYSIHVTKESTHPVKPLAQIAGNRYASGPVGKALSDACMGTIASFLSKYQDIIIEHQKVVKGNQKRLESLRELAGKENLEYPSVTLPPQPHTKEGVDAYNEVIARVRMWVNLNLWQKLKLSRDDAKPLLRLKGFPSFPLVERQANEVDWWDMVCNVKKLINEKKEDGKVFWQNLAGYKRQEALRPYLSSEEDRKKGKKFARYQLGDLLLHLEKKHGEDWGKVYDEAWERIDKKVEGLSKHIKLEEERRSEDAQSKAALTDWLRAKASFVIEGLKEADKDEFCRCELKLQKWYGDLRGKPFAIEAENSILDISGFSKQYNCAFIWQKDGVKKLNLYLIINYFKGGKLRFKKIKPEAFEANRFYTVINKKSGEIVPMEVNFNFDDPNLIILPLAFGKRQGREFIWNDLLSLETGSLKLANGRVIEKTLYNRRTRQDEPALFVALTFERREVLDSSNIKPMNLIGVDRGENIPAVIALTDPEGCPISRFKDSMGNPTHILRIGESYKEKQRTIFAKKEVEQRRAGGYSRKYASKAKNLADDMVRNTARDLLYYAVTQDAMLIFENLSRGFGRQGKRTFMAERQYTRMEDWLTAKLAYEGLPSKTYLSKTLAQYTSKTCSNCGFTITSADYDRVLEKLKKTATGWMTTINGKELKVEGQITYYNRYKRQNVVKDLSVELDRLSEESVNNDISSWTKGRSGEALSLLKKRFSHRPVQEKFVCLNCGFETHADEQAALNIARSWLFLRSQEYKKYQTNKTTGNTDKRAFVETWQSFYRKKLKEVWKPAV

SEQ ID NO: 27158 - protein, 978 aa, synthetic construct
  REGION 1..978: note = engineered CasX variant
QEIKRINKIRRRLVKDSNTKKAGKTGPMKTLLVRVMTPDLRERLENLRKKPENIPQPISNTSRANLNKLLTDYTEMKKAILHVYWEEFQKDPVGLMSRVAQPASKKIDQNKLKPEMDEKGNLTTAGFACSQCGQPLFVYKLEQVSEKGKAYTNYFGRCNVAEHEKLILLAQLKPEKDSDEAVTYSLGKFGQRALDFYSIHVTKESTHPVKPLAQIAGNRYASGPVGKALSDACMGTIASFLSKYQDIIIEHQKVVKGNQKRLESLRELAGKENLEYPSVTLPPQPHTKEGVDAYNEVIARVRMWVNLNLWQKLKLSRDDAKPLLRLKGFPSFPLVERQANEVDWWDMVCNVKKLINEKKEDGKVFWQNLAGYKRQEALRPYLSSEEDRKKGKKFARYQLGDLLLHLEKKHGEDWGKVYDEAWERIDKKVEGLSKHIKLEEERRSEDAQSKAALTDWLRAKASFVIEGLKEADKDEFCRCELKLQKWYGDLRGKPFAIEAENSILDISGFSKQYNCAFIWQKDGVKKLNLYLIINYFKGGKLRFKKIKPEAFEANRFYTVINKKSGEIVPMEVNFNFDDPNLIILPLAFGKRQGREFIWNDLLSLETGSLKLANGRVIEKTLYNRRTRQDEPALFVALTFERREVLDSSNIKPMNLIGVDRGENIPAVIALTDPEGCPISRFKDSLGNPTHILRIRESYKEKQRTIQAKKEVEQRRAGGYSRKYASKAKNLADDMVRNTARDLLYYAVTQDAMLIFENLSRGFGRQGKRTFMAERQYTRMEDWLTAKLAYEGLPSKTYLSKTLAQYTSKTCSNCGFTITSADYDRVLEKLKKTATGWMTTINGKELKVEGQITYYNRYKRQNVVKDLSVELDRLSEESVNNDISSWTKGRSGEALSLLKKRFSHRPVQEKFVCLNCGFETHADEQAALNIARSWLFLRSQEYKKYQTNKTTGNTDKRAFVETWQSFYRKKLKEVWKPAV

SEQ ID NO: 27159 - protein, 978 aa, synthetic construct
  REGION 1..978: note = engineered CasX variant
QEIKRINKIRRRLVKDSNTKKAGKTGPMKTLLVRVMTPDLRERLENLRKKPENIPQPISNTSRANLNKLLTDYTEMKKAILHVYWEEFQKDPVGLMSRVAQPASKKIDQNKLKPEMDEKGNLTTAGFACSQCGQPLFVYKLEQVSEKGKAYTNYFGRCNVAEHEKLILLAQLKPEKDSDEAVTYSLGKFGQRALDFYSIHVTKESTHPVKPLAQIAGNRYASGPVGKALSDACMGTIASFLSKYQDIIIEHQKVVKGNQKRLESLRELAGKENLEYPSVTLPPQPHTKEGVDAYNEVIARVRMWVNLNLWQKLKLSRDDAKPLLRLKGFPSFPLVERQANEVDWWDMVCNVKKLINEKKEDGKVFWQNLAGYKRQEALRPYLSSEEDRKKGKKFARYQLGDLLLHLEKKHGEDWGKVYDEAWERIDKKVEGLSKHIKLEEERRSEDAQSKAALTDWLRAKASFVIEGLKEADKDEFCRCELKLQKWYGDLRGKPFAIEAENSILDISGFSKQYNCAFIWQKDGVKKLNLYLIINYFKGGKLRFKKIKPEAFEANRFYTVINKKSGEIVPMEVNFNFDDPNLIILPLAFGKRQGREFIWNDLLSLETGSLKLANGRVIEKTLYNRRTRQDEPALFVALTFERREVLDSSNIKPMNLIGVDRGENIPAVIALTDPEGCPISRFKDSLGNPTHILRIGESYKEKQRTIQAKKEVEQRRMGGYSRKYASKAKNLADDMVRNTARDLLYYAVTQDAMLIFENLSRGFGRQGKRTFMAERQYTRMEDWLTAKLAYEGLPSKTYLSKTLAQYTSKTCSNCGFTITSADYDRVLEKLKKTATGWMTTINGKELKVEGQITYYNRYKRQNVVKDLSVELDRLSEESVNNDISSWTKGRSGEALSLLKKRFSHRPVQEKFVCLNCGFETHADEQAALNIARSWLFLRSQEYKKYQTNKTTGNTDKRAFVETWQSFYRKKLKEVWKPAV

SEQ ID NO: 27160 - protein, 978 aa, synthetic construct
  REGION 1..978: note = engineered CasX variant
QEIKRINKIRRRLVKDSNTKKAGKTGPMKTLLVRVMTPDLRERLENLRKKPENIPQPISNTSRANLNKLLTDYTEMKKAILHVYWEEFQKDPVGLMSRVAQPASKKIDQNKLKPEMDEKGNLTTAGFACSQCGQPLFVYKLEQVSEKGKAYTNYFGRCNVAEHEKLILLAQLKPEKDSDEAVTYSLGKFGQRALDFYSIHVTKESTHPVKPLAQIAGNRYASGPVGKALSDACMGTIASFLSKYQDIIIEHQKVVKGNQKRLESLRELAGKENLEYPSVTLPPQPHTKEGVDAYNEVIARVRMWVNLNLWQKLKLSRDDAKPLLRLKGFPSFPLVERQANEVDWWDMVCNVKKLINEKKEDGKVFWQNLAGYKRQEALRPYLSSEEDRKKGKKFARYQLGDLLLHLEKKHGEDWGKVYDEAWERIDKKVEGLSKHIKLEEERRSEDAQSKAALTDWLRAKASFVIEGLKEADKDEFCRCELKLQKWYGDLRGKPFAIEAENSILDISGFSKQYNCAFIWQKDGVKKLNLYLIINYFKGGKLRFKKIKPEAFEANRFYTVINKKSGEIVPMEVNFNFDDPNLIILPLAFGKRQGREFIWNDLLSLETGSLKLANGRVIEKTLYNRRTRQDEPALFVALTFERREVLDSSNIKPMNLIGVDRGENIPAVIALTDPEGCPISRFKDSLGNPTHILRIGESYKEKQRTIQAKKEVEQRRAGGYSRKYASKAKNLADDMVRNTARDLLYYAVTQDAMLIFENLSRGFGRQGKRTFMAERQYTRMEDWLTAKLAYEGLPSKTYLSKTLAQYTSKTCSNCGFTITSADYDRVLEKLKKTATGWMTTINGKELKVEGQITYYNRYKRQNVVKDLSVELDRLSEESVNNDISSWTKGRSGEALSLLKKRFSHRPVQEKFVCLNCGFETHADEQAALNIARSWLFLRSQEYKKYQTNKTTGNTDKRAFVETWQSFYRKKLKEVWKPAV

SEQ ID NO: 27161 - protein, 978 aa, synthetic construct
  REGION 1..978: note = engineered CasX variant
QEIKRINKIRRRLVKDSNTKKAGKTGPMKTLLVRVMTPDLRERLENLRKKPENIPQPISNTSRANLNKLLTDYTEMKKAILHVYWEEFQKDPVGLMSRVAQPASKKIDQNKLKPEMDEKGNLTTAGFACSQCGQPLFVYKLEQVSEKGKAYTNYFGRCNVAEHEKLILLAQLKPEKDSDEAVTYSLGKFGQRALDFYSIHVTKESTHPVKPLAQIAGNRYASGPVGKALSDACMGTIASFLSKYQDIIIEHQKVVKGNQKRLESLRELAGKENLEYPSVTLPPQPHTKEGVDAYNEVIARVRMWVNLNLWQKLKLSRDDAKPLLRLKGFPSFPLVERQANEVDWWDMVCNVKKLINEKKEDGKVFWQNLAGYKRQEALRPYLSSEEDRKKGKKFARYQLGDLLLHLEKKHGEDWGKVYDEAWERIDKKVEGLSKHIKLEEERRSEDAQSKAALTDWLRAKASFVIEGLKEADKDEFCRCELKLQKWYGDLRGKPFAIEAENSILDISGFSKQYNCAFIWQKDGVKKLNLYLIINYFKGGKLRFKKIKPEAFEANRFYTVINKKSGEIVPMEVNFNFDDPNLIILPLAFGKRQGREFIWNDLLSLETGSLKLANGRVIEKTLYNRRTRQDEPALFVALTFERREVLDSSNIKPMNLIGVDRGENIPAVIALTDPEGCPISRFKDSLGNPTHILRIGESYKEKQRTIFAKKEVEQRRAGGYSRKYASKAKNLADDMVRNTARDLLYYAVTQDAMLIFENLSRGFGRQGKRTFMAERQYTRMEDWLTAKLAYEGLPSKTYLSKTLAQYTSKTCSNCGFTITSADYDRVLEKLKKTATGWMTTINGKELKVEGQITYYNRYKRQNVVKDLSVELDRLSEESVNNDISSWTKGRSGEALSLLKKRFSHRPVQEKFVCLNCGFETHADEQAALNIARSWLFLRSQEYKKYQTNKTTGNTDKRAFVETWQSFYRKKLKEVWKPAV

SEQ ID NO: 27162 - protein, 978 aa, synthetic construct
  REGION 1..978: note = engineered CasX variant
QEIKRINKIRRRLVKDSNTKKAGKTGPMKTLLVRVMTPDLRERLENLRKKPENIPQPISNTSRANLNKLLTDYTEMKKAILHVYWEEFQKDPVGLMSRVAQPASKKIDQNKLKPEMDEKGNLTTAGFACSQCGQPLFVYKLEQVSEKGKAYTNYFGRCNVAEHEKLILLAQLKPEKDSDEAVTYSLGKFGQRALDFYSIHVTKESTHPVKPLAQIAGNRYASGPVGKALSDACMGTIASFLSKYQDIIIEHQKVVKGNQKRLESLRELAGKENLEYPSVTLPPQPHTKEGVDAYNEVIARVRMWVNLNLWQKLKLSRDDAKPLLRLKGFPSFPLVERQANEVDWWDMVCNVKKLINEKKEDGKVFWQNLAGYKRQEALRPYLSSEEDRKKGKKFARYQLGDLLLHLEKKHGEDWGKVYDEAWERIDKKVEGLSKHIKLEEERRSEDAQSKAALTDWLRAKASFVIEGLKEADKDEFCRCELKLQKWYGDLRGKPFAIEAENSILDISGFSKQYNCAFIWQKDGVKKLNLYLIINYFKGGKLRFKKIKPEAFEANRFYTVINKKSGEIVPMEVNFNFDDPNLIILPLAFGKRQGREFIWNDLLSLETGSLKLANGRVIEKTLYNRRTRQDEPALFVALTFERREVLDSSNIKPMNLIGVDRGENIPAVIALTDPEGCPISRFKDSLGNKTHILRIGESYKEKQRTIQAKKEVEQRRAGGYSRKYASKAKNLADDMVRNTARDLLYYAVTQDAMLIFENLSRGFGRQGKRTFMAERQYTRMEDWLTAKLAYEGLPSKTYLSKTLAQYTSKTCSNCGFTITSADYDRVLEKLKKTATGWMTTINGKELKVEGQITYYNRYKRQNVVKDLSVELDRLSEESVNNDISSWTKGRSGEALSLLKKRFSHRPVQEKFVCLNCGFETHADEQAALNIARSWLFLRSQEYKKYQTNKTTGNTDKRAFVETWQSFYRKKLKEVWKPAV

SEQ ID NO: 27163 - protein, 978 aa, synthetic construct
  REGION 1..978: note = engineered CasX variant
QEIKRINKIRRRLVKDSNTKKAGKTGPMKTLLVRVMTPDLRERLENLRKKPENIPQPISNTSRANLNKLLTDYTEMKKAILHVYWEEFQKDPVGLMSRVAQPASKKIDQNKLKPEMDEKGNLTTAGFACSQCGQPLFVYKLEQVSEKGKAYTNYFGRCNVAEHEKLILLAQLKPEKDSDEAVTYSLGKFGQRALDFYSIHVTKESTHPVKPLAQIAGNRYASGPVGKALSDACMGTIASFLSKYQDIIIEHQKVVKGNQKRLESLRELAGKENLEYPSVTLPPQPHTKEGVDAYNEVIARVRMWVNLNLWQKLKLSRDDAKPLLRLKGFPSFPLVERQANEVDWWDMVCNVKKLINEKKEDGKVFWQNLAGYKRQEALRPYLSSEEDRKKGKKFARYQLGDLLLHLEKKHGEDWGKVYDEAWERIDKKVEGLSKHIKLEEERRSEDAQSKAALTDWLRAKASFVIEGLKEADKDEFCRCELKLQKWYGDLRGKPFAIEAENSILDISGFSKQYNCAFIWQKDGVKKLNLYLIINYFKGGKLRFKKIKPEAFEANRFYTVINKKSGEIVPMEVNFNFDDPNLIILPLAFGKRQGREFIWNDLLSLETGSLKLANGRVIEKTLYNRRTRQDEPALFVALTFERREVLDSSNIKPMNLIGVDRGENIPAVIALTDPEGCPISNFKDSLGNPTHILRIGESYKEKQRTIQAKKEVEQRRAGGYSRKYASKAKNLADDMVRNTARDLLYYAVTQDAMLIFENLSRGFGRQGKRTFMAERQYTRMEDWLTAKLAYEGLPSKTYLSKTLAQYTSKTCSNCGFTITSADYDRVLEKLKKTATGWMTTINGKELKVEGQITYYNRYKRQNVVKDLSVELDRLSEESVNNDISSWTKGRSGEALSLLKKRFSHRPVQEKFVCLNCGFETHADEQAALNIARSWLFLRSQEYKKYQTNKTTGNTDKRAFVETWQSFYRKKLKEVWKPAV

SEQ ID NO: 27164 - protein, 978 aa, synthetic construct
  REGION 1..978: note = engineered CasX variant
QEIKRINKIRRRLVKDSNTKKAGKTGPMKTLLVRVMTPDLRERLENLRKKPENIPQPISNTSRANLNKLLTDYTEMKKAILHVYWEEFQKDPVGLMSRVAQPASKKIDQNKLKPEMDEKGNLTTAGFACSQCGQPLFVYKLEQVSEKGKAYTNYFGRCNVAEHEKLILLAQLKPEKDSDEAVTYSLGKFGQRALDFYSIHVTKESTHPVKPLAQIAGNRYASGPVGKALSDACMGTIASFLSKYQDIIIEHQKVVKGNQKRLESLRELAGKENLEYPSVTLPPQPHTKEGVDAYNEVIARVRMWVNLNLWQKLKLSRDDAKPLLRLKGFPSFPLVERQANEVDWWDMVCNVKKLINEKKEDGKVFWQNLAGYKRQEALRPYLSSEEDRKKGKKFARYQLGDLLLHLEKKHGEDWGKVYDEAWERIDKKVEGLSKHIKLEEERRSEDAQSKAALTDWLRAKASFVIEGLKEADKDEFCRCELKLQKWYGDLRGKPFAIEAENSILDISGFSKQYNCAFIWQKDGVKKLNLYLIINYFKGGKLRFKKIKPEAFEANRFYTVINKKSGEIVPMEVNFNFDDPNLIILPLAFGKRQGREFIWNDLLSLETGSLKLANGRVIEKTLYNRRTRQDEPALFVALTFERREVLDSSNIKPMNLIGVDRGENIPAVIALTDPEGCPFSRFTDSLGNPTHILRIGESYKEKQRTIQANKEVEQRRAGGYSRKYASKAKNLADDMVRNTARDLLYYAVTQDAMLIFENLSRGFGRQGKRTFMAERQYTRMEDWLTAKLAYEGLPSKTYLSKTLAQYTSKTCSNCGFTITSADYDRVLEKLKKTATGWMTTINGKELKVEGQITYYNRYKRQNVVKDLSVELDRLSEESVNNDISSWTKGRSGEALSLLKKRFSHRPVQEKFVCLNCGFETHADEQAALNIARSWLFLRSQEYKKYQTNKTTGNTDKRAFVETWQSFYRKKLKEVWKPAV

SEQ ID NO: 27165 - protein, 978 aa, synthetic construct
  REGION 1..978: note = engineered CasX variant
QEIKRINKIRRRLVKDSNTKKAGKTGPMKTLLVRVMTPDLRERLENLRKKPENIPQPISNTSRANLNKLLTDYTEMKKAILHVYWEEFQKDPVGLMSRVAQPASKKIDQNKLKPEMDEKGNLTTAGFACSQCGQPLFVYKLEQVSEKGKAYTNYFGRCNVAEHEKLILLAQLKPEKDSDEAVTYSLGKFGQRALDFYSIHVTKESTHPVKPLAQIAGNRYASGPVGKALSDACMGTIASFLSKYQDIIIEHQKVVKGNQKRLESLRELAGKENLEYPSVTLPPQPHTKEGVDAYNEVIARVRMWVNLNLWQKLKLSRDDAKPLLRLKGFPSFPLVERQANEVDWWDMVCNVKKLINEKKEDGKVFWQNLAGYKRQEALRPYLSSEEDRKKGKKFARYQLGDLLLHLEKKHGEDWGKVYDEAWERIDKKVEGLSKHIKLEEERRSEDAQSKAALTDWLRAKASFVIEGLKEADKDEFCRCELKLQKWYGDLRGKPFAIEAENSILDISGFSKQYNCAFIWQKDGVKKLNLYLIINYFKGGKLRFKKIKPEAFEANRFYTVINKKSGEIVPMEVNFNFDDPNLIILPLAFGKRQGREFIWNDLLSLETGSLKLANGRVIEKTLYNRRTRQDEPALFVALTFERREVLDSSNIKPMNLIGVDRGENIPAVIALTDPEGCPFSRFKDSLGNPTHILRIGESYKEKQRTIQANKEVEQRRAGGYSRKYASKAKNLADDMVRNTARDLLYYAVTQDAMLIFENLSRGFGRQGKRTFMAERQYTRMEDWLTAKLAYEGLPSKTYLSKTLAQYTSKTCSNCGFTITSADYDRVLEKLKKTATGWMTTINGKELKVEGQITYYNRYKRQNVVKDLSVELDRLSEESVNNDISSWTKGRSGEALSLLKKRFSHRPVQEKFVCLNCGFETHADEQAALNIARSWLFLRSQEYKKYQTNKTTGNTDKRAFVETWQSFYRKKLKEVWKPAV

SEQ ID NO: 27166 - protein, 978 aa, synthetic construct
  REGION 1..978: note = engineered CasX variant
QEIKRINKIRRRLVKDSNTKKAGKTGPMKTLLVRVMTPDLRERLENLRKKPENIPQPISNTSRANLNKLLTDYTEMKKAILHVYWEEFQKDPVGLMSRVAQPASKKIDQNKLKPEMDEKGNLTTAGFACSQCGQPLFVYKLEQVSEKGKAYTNYFGRCNVAEHEKLILLAQLKPEKDSDEAVTYSLGKFGQRALDFYSIHVTKESTHPVKPLAQIAGNRYASGPVGKALSDACMGTIASFLSKYQDIIIEHQKVVKGNQKRLESLRELAGKENLEYPSVTLPPQPHTKEGVDAYNEVIARVRMWVNLNLWQKLKLSRDDAKPLLRLKGFPSFPLVERQANEVDWWDMVCNVKKLINEKKEDGKVFWQNLAGYKRQEALRPYLSSEEDRKKGKKFARYQLGDLLLHLEKKHGEDWGKVYDEAWERIDKKVEGLSKHIKLEEERRSEDAQSKAALTDWLRAKASFVIEGLKEADKDEFCRCELKLQKWYGDLRGKPFAIEAENSILDISGFSKQYNCAFIWQKDGVKKLNLYLIINYFKGGKLRFKKIKPEAFEANRFYTVINKKSGEIVPMEVNFNFDDPNLIILPLAFGKRQGREFIWNDLLSLETGSLKLANGRVIEKTLYNRRTRQDEPALFVALTFERREVLDSSNIKPMNLIGVDRGENIPAVIALTDPEGCPESRFKDSNGNPTHILRIGESYKEKQRTIQAKKEVEQRRAGGYSRKYASKAKNLADDMVRNTARDLLYYAVTQDAMLIFENLSRGFGRQGKRTFMAERQYTRMEDWLTAKLAYEGLPSKTYLSKTLAQYTSKTCSNCGFTITSADYDRVLEKLKKTATGWMTTINGKELKVEGQITYYNRYKRQNVVKDLSVELDRLSEESVNNDISSWTKGRSGEALSLLKKRFSHRPVQEKFVCLNCGFETHADEQAALNIARSWLFLRSQEYKKYQTNKTTGNTDKRAFVETWQSFYRKKLKEVWKPAV

SEQ ID NO: 27167 - protein, 978 aa, synthetic construct
  REGION 1..978: note = engineered CasX variant
QEIKRINKIRRRLVKDSNTKKAGKTGPMKTLLVRVMTPDLRERLENLRKKPENIPQPISNTSRANLNKLLTDYTEMKKAILHVYWEEFQKDPVGLMSRVAQPASKKIDQNKLKPEMDEKGNLTTAGFACSQCGQPLFVYKLEQVSEKGKAYTNYFGRCNVAEHEKLILLAQLKPEKDSDEAVTYSLGKFGQRALDFYSIHVTKESTHPVKPLAQIAGNRYASGPVGKALSDACMGTIASFLSKYQDIIIEHQKVVKGNQKRLESLRELAGKENLEYPSVTLPPQPHTKEGVDAYNEVIARVRMWVNLNLWQKLKLSRDDAKPLLRLKGFPSFPLVERQANEVDWWDMVCNVKKLINEKKEDGKVFWQNLAGYKRQEALRPYLSSEEDRKKGKKFARYQLGDLLLHLEKKHGEDWGKVYDEAWERIDKKVEGLSKHIKLEEERRSEDAQSKAALTDWLRAKASFVIEGLKEADKDEFCRCELKLQKWYGDLRGKPFAIEAENSILDISGFSKQYNCAFIWQKDGVKKLNLYLIINYFKGGKLRFKKIKPEAFEANRFYTVINKKSGEIVPMEVNFNFDDPNLIILPLAFGKRQGREFIWNDLLSLETGSLKLANGRVIEKTLYNRRTRQDEPALFVALTFERREVLDSSNIKPMNLIGVDRGENIPAVIALTDPEGCPESRFKDSLGNPTHILRIGESYKHKTRTIQAKKEVEQRRAGGYSRKYASKAKNLADDMVRNTARDLLYYAVTQDAMLIFENLSRGFGRQGKRTFMAERQYTRMEDWLTAKLAYEGLPSKTYLSKTLAQYTSKTCSNCGFTITSADYDRVLEKLKKTATGWMTTINGKELKVEGQITYYNRYKRQNVVKDLSVELDRLSEESVNNDISSWTKGRSGEALSLLKKRFSHRPVQEKFVCLNCGFETHADEQAALNIARSWLFLRSQEYKKYQTNKTTGNTDKRAFVETWQSFYRKKLKEVWKPAV

SEQ ID NO: 27168 - protein, 978 aa, synthetic construct
  REGION 1..978: note = engineered CasX variant
QEIKRINKIRRRLVKDSNTKKAGKTGPMKTLLVRVMTPDLRERLENLRKKPENIPQPISNTSRANLNKLLTDYTEMKKAILHVYWEEFQKDPVGLMSRVAQPASKKIDQNKLKPEMDEKGNLTTAGFACSQCGQPLFVYKLEQVSEKGKAYTNYFGRCNVAEHEKLILLAQLKPEKDSDEAVTYSLGKFGQRALDFYSIHVTKESTHPVKPLAQIAGNRYASGPVGKALSDACMGTIASFLSKYQDIIIEHQKVVKGNQKRLESLRELAGKENLEYPSVTLPPQPHTKEGVDAYNEVIARVRMWVNLNLWQKLKLSRDDAKPLLRLKGFPSFPLVERQANEVDWWDMVCNVKKLINEKKEDGKVFWQNLAGYKRQEALRPYLSSEEDRKKGKKFARYQLGDLLLHLEKKHGEDWGKVYDEAWERIDKKVEGLSKHIKLEEERRSEDAQSKAALTDWLRAKASFVIEGLKEADKDEFCRCELKLQKWYGDLRGKPFAIEAENSILDISGFSKQYNCAFIWQKDGVKKLNLYLIINYFKGGKLRFKKIKPEAFEANRFYTVINKKSGEIVPMEVNFNFDDPNLIILPLAFGKRQGREFIWNDLLSLETGSLKLANGRVIEKTLYNRRTRQDEPALFVALTFERREVLDSSNIKPMNLIGVDRGENIPAVIALTDPEGCPEARFKDSSGNPTHILRIGESYKEKQRTIQAKKEVEQRRAGGYSRKYASKAKNLADDMVRNTARDLLYYAVTQDAMLIFENLSRGFGRQGKRTFMAERQYTRMEDWLTAKLAYEGLPSKTYLSKTLAQYTSKTCSNCGFTITSADYDRVLEKLKKTATGWMTTINGKELKVEGQITYYNRYKRQNVVKDLSVELDRLSEESVNNDISSWTKGRSGEALSLLKKRFSHRPVQEKFVCLNCGFETHADEQAALNIARSWLFLRSQEYKKYQTNKTTGNTDKRAFVETWQSFYRKKLKEVWKPAV

SEQ ID NO: 27169 - protein, 978 aa, synthetic construct
  REGION 1..978: note = engineered CasX variant
QEIKRINKIRRRLVKDSNTKKAGKTGPMKTLLVRVMTPDLRERLENLRKKPENIPQPISNTSRANLNKLLTDYTEMKKAILHVYWEEFQKDPVGLMSRVAQPASKKIDQNKLKPEMDEKGNLTTAGFACSQCGQPLFVYKLEQVSEKGKAYTNYFGRCNVAEHEKLILLAQLKPEKDSDEAVTYSLGKFGQRALDFYSIHVTKESTHPVKPLAQIAGNRYASGPVGKALSDACMGTIASFLSKYQDIIIEHQKVVKGNQKRLESLRELAGKENLEYPSVTLPPQPHTKEGVDAYNEVIARVRMWVNLNLWQKLKLSRDDAKPLLRLKGFPSFPLVERQANEVDWWDMVCNVKKLINEKKEDGKVFWQNLAGYKRQEALRPYLSSEEDRKKGKKFARYQLGDLLLHLEKKHGEDWGKVYDEAWERIDKKVEGLSKHIKLEEERRSEDAQSKAALTDWLRAKASFVIEGLKEADKDEFCRCELKLQKWYGDLRGKPFAIEAENSILDISGFSKQYNCAFIWQKDGVKKLNLYLIINYFKGGKLRFKKIKPEAFEANRFYTVINKKSGEIVPMEVNFNFDDPNLIILPLAFGKRQGREFIWNDLLSLETGSLKLANGRVIEKTLYNRRTRQDEPALFVALTFERREVLDSSNIKPMNLIGVDRGENIPAVIALTDPEGCPEARFKDSLGNPTHILRIGESYKEKQRTIQAKKEVEQRRAGGYSRKYASKAKNLADDMVRNTARDLLYYAVTQDAMLIFENLSRGFGRQGKRTFMAERQYTRMEDWLTAKLAYEGLPSKTYLSKTLAQYTSKTCSNCGFTITSADYDRVLEKLKKTATGWMTTINGKELKVEGQITYYNRYKRQNVVKDLSVELDRLSEESVNNDISSWTKGRSGEALSLLKKRFSHRPVQEKFVCLNCGFETHADEQAALNIARSWLFLRSQEYKKYQTNKTTGNTDKRAFVETWQSFYRKKLKEVWKPAV

SEQ ID NO: 27170 - protein, 978 aa, synthetic construct
  REGION 1..978: note = engineered CasX variant
QEIKRINKIRRRLVKDSNTKKAGKTGPMKTLLVRVMTPDLRERLENLRKKPENIPQPISNTSRANLNKLLTDYTEMKKAILHVYWEEFQKDPVGLMSRVAQPASKKIDQNKLKPEMDEKGNLTTAGFACSQCGQPLFVYKLEQVSEKGKAYTNYFGRCNVAEHEKLILLAQLKPEKDSDEAVTYSLGKFGQRALDFYSIHVTKESTHPVKPLAQIAGNRYASGPVGKALSDACMGTIASFLSKYQDIIIEHQKVVKGNQKRLESLRELAGKENLEYPSVTLPPQPHTKEGVDAYNEVIARVRMWVNLNLWQKLKLSRDDAKPLLRLKGFPSFPLVERQANEVDWWDMVCNVKKLINEKKEDGKVFWQNLAGYKRQEALRPYLSSEEDRKKGKKFARYQLGDLLLHLEKKHGEDWGKVYDEAWERIDKKVEGLSKHIKLEEERRSEDAQSKAALTDWLRAKASFVIEGLKEADKDEFCRCELKLQKWYGDLRGKPFAIEAENSILDISGFSKQYNCAFIWQKDGVKKLNLYLIINYFKGGKLRFKKIKPEAFEANRFYTVINKKSGEIVPMEVNFNFDDPNLIILPLAFGKRQGREFIWNDLLSLETGSLKLANGRVIEKTLYNRRTRQDEPALFVALTFERREVLDSSNIKPMNLIGVDRGENIPAVIALTDPEGCPDSRFKDSLGNPTHILRIGESYKEQQRTIQAKKEVEQRRAGGYSRKYASKAKNLADDMVRNTARDLLYYAVTQDAMLIFENLSRGFGRQGKRTFMAERQYTRMEDWLTAKLAYEGLPSKTYLSKTLAQYTSKTCSNCGFTITSADYDRVLEKLKKTATGWMTTINGKELKVEGQITYYNRYKRQNVVKDLSVELDRLSEESVNNDISSWTKGRSGEALSLLKKRFSHRPVQEKFVCLNCGFETHADEQAALNIARSWLFLRSQEYKKYQTNKTTGNTDKRAFVETWQSFYRKKLKEVWKPAV

SEQ ID NO: 27171 - protein, 978 aa, synthetic construct
  REGION 1..978: note = engineered CasX variant
QEIKRINKIRRRLVKDSNTKKAGKTGPMKTLLVRVMTPDLRERLENLRKKPENIPQPISNTSRANLNKLLTDYTEMKKAILHVYWEEFQKDPVGLMSRVAQPASKKIDQNKLKPEMDEKGNLTTAGFACSQCGQPLFVYKLEQVSEKGKAYTNYFGRCNVAEHEKLILLAQLKPEKDSDEAVTYSLGKFGQRALDFYSIHVTKESTHPVKPLAQIAGNRYASGPVGKALSDACMGTIASFLSKYQDIIIEHQKVVKGNQKRLESLRELAGKENLEYPSVTLPPQPHTKEGVDAYNEVIARVRMWVNLNLWQKLKLSRDDAKPLLRLKGFPSFPLVERQANEVDWWDMVCNVKKLINEKKEDGKVFWQNLAGYKRQEALRPYLSSEEDRKKGKKFARYQLGDLLLHLEKKHGEDWGKVYDEAWERIDKKVEGLSKHIKLEEERRSEDAQSKAALTDWLRAKASFVIEGLKEADKDEFCRCELKLQKWYGDLRGKPFAIEAENSILDISGFSKQYNCAFIWQKDGVKKLNLYLIINYFKGGKLRFKKIKPEAFEANRFYTVINKKSGEIVPMEVNFNFDDPNLIILPLAFGKRQGREFIWNDLLSLETGSLKLANGRVIEKTLYNRRTRQDEPALFVALTFERREVLDSSNIKPMNLIGVDRGENIPAVIALTDPEGCPDSRFKDSLGNPTHILRIGESYKEKQRTIQAKKTVEQRRAGGYSRKYASKAKNLADDMVRNTARDLLYYAVTQDAMLIFENLSRGFGRQGKRTFMAERQYTRMEDWLTAKLAYEGLPSKTYLSKTLAQYTSKTCSNCGFTITSADYDRVLEKLKKTATGWMTTINGKELKVEGQITYYNRYKRQNVVKDLSVELDRLSEESVNNDISSWTKGRSGEALSLLKKRFSHRPVQEKFVCLNCGFETHADEQAALNIARSWLFLRSQEYKKYQTNKTTGNTDKRAFVETWQSFYRKKLKEVWKPAV

SEQ ID NO: 27172 - protein, 978 aa, synthetic construct
  REGION 1..978: note = engineered CasX variant
QEIKRINKIRRRLVKDSNTKKAGKTGPMKTLLVRVMTPDLRERLENLRKKPENIPQPISNTSRANLNKLLTDYTEMKKAILHVYWEEFQKDPVGLMSRVAQPASKKIDQNKLKPEMDEKGNLTTAGFACSQCGQPLFVYKLEQVSEKGKAYTNYFGRCNVAEHEKLILLAQLKPEKDSDEAVTYSLGKFGQRALDFYSIHVTKESTHPVKPLAQIAGNRYASGPVGKALSDACMGTIASFLSKYQDIIIEHQKVVKGNQKRLESLRELAGKENLEYPSVTLPPQPHTKEGVDAYNEVIARVRMWVNLNLWQKLKLSRDDAKPLLRLKGFPSFPLVERQANEVDWWDMVCNVKKLINEKKEDGKVFWQNLAGYKRQEALRPYLSSEEDRKKGKKFARYQLGDLLLHLEKKHGEDWGKVYDEAWERIDKKVEGLSKHIKLEEERRSEDAQSKAALTDWLRAKASFVIEGLKEADKDEFCRCELKLQKWYGDLRGKPFAIEAENSILDISGFSKQYNCAFIWQKDGVKKLNLYLIINYFKGGKLRFKKIKPEAFEANRFYTVINKKSGEIVPMEVNFNFDDPNLIILPLAFGKRQGREFIWNDLLSLETGSLKLANGRVIEKTLYNRRTRQDEPALFVALTFERREVLDSSNIKPMNLIGVDRGENIPAVIALTDPEGCPCSRFKDSLGNPTHILRIGESYKEKQRTIQAKKEVEQRRAGGYSRKYASKAKNLADDMVRNTARDLLYYAVTQDAMLIFENLSRGFGRQGKRTFMAERQYTRMEDWLTAKLAYEGLPSKTYLSKTLAQYTSKTCSNCGFTITSADYDRVLEKLKKTATGWMTTINGKELKVEGQITYYNRYKRQNVVKDLSVELDRLSEESVNNDISSWTKGRSGEALSLLKKRFSHRPVQEKFVCLNCGFETHADEQAALNIARSWLFLRSQEYKKYQTNKTTGNTDKRAFVETWQSFYRKKLKEVWKPAV

SEQ ID NO: 27173 - protein, 978 aa, synthetic construct
  REGION 1..978: note = engineered CasX variant
QEIKRINKIRRRLVKDSNTKKAGKTGPMKTLLVRVMTPDLRERLENLRKKPENIPQPISNTSRANLNKLLTDYTEMKKAILHVYWEEFQKDPVGLMSRVAQPASKKIDQNKLKPEMDEKGNLTTAGFACSQCGQPLFVYKLEQVSEKGKAYTNYFGRCNVAEHEKLILLAQLKPEKDSDEAVTYSLGKFGQRALDFYSIHVTKESTHPVKPLAQIAGNRYASGPVGKALSDACMGTIASFLSKYQDIIIEHQKVVKGNQKRLESLRELAGKENLEYPSVTLPPQPHTKEGVDAYNEVIARVRMWVNLNLWQKLKLSRDDAKPLLRLKGFPSFPLVERQANEVDWWDMVCNVKKLINEKKEDGKVFWQNLAGYKRQEALRPYLSSEEDRKKGKKFARYQLGDLLLHLEKKHGEDWGKVYDEAWERIDKKVEGLSKHIKLEEERRSEDAQSKAALTDWLRAKASFVIEGLKEADKDEFCRCELKLQKWYGDLRGKPFAIEAENSILDISGFSKQYNCAFIWQKDGVKKLNLYLIINYFKGGKLRFKKIKPEAFEANRFYTVINKKSGEIVPMEVNFNFDDPNLIILPLAFGKRQGREFIWNDLLSLETGSLKLANGRVIEKTLYNRRTRQDEPALFVALTFERREVLDSSNIKPMNLIGVDRGENIPAVIALTDPEGCPCSRFKDSLGNPTHILRIGEHYKEKQRTIQAKKEVEQRRAGGYSRKYASKAKNLADDMVRNTARDLLYYAVTQDAMLIFENLSRGFGRQGKRTFMAERQYTRMEDWLTAKLAYEGLPSKTYLSKTLAQYTSKTCSNCGFTITSADYDRVLEKLKKTATGWMTTINGKELKVEGQITYYNRYKRQNVVKDLSVELDRLSEESVNNDISSWTKGRSGEALSLLKKRFSHRPVQEKFVCLNCGFETHADEQAALNIARSWLFLRSQEYKKYQTNKTTGNTDKRAFVETWQSFYRKKLKEVWKPAV

SEQ ID NO: 27174 - protein, 978 aa, synthetic construct
  REGION 1..978: note = engineered CasX variant
QEIKRINKIRRRLVKDSNTKKAGKTGPMKTLLVRVMTPDLRERLENLRKKPENIPQPISNTSRANLNKLLTDYTEMKKAILHVYWEEFQKDPVGLMSRVAQPASKKIDQNKLKPEMDEKGNLTTAGFACSQCGQPLFVYKLEQVSEKGKAYTNYFGRCNVAEHEKLILLAQLKPEKDSDEAVTYSLGKFGQRALDFYSIHVTKESTHPVKPLAQIAGNRYASGPVGKALSDACMGTIASFLSKYQDIIIEHQKVVKGNQKRLESLRELAGKENLEYPSVTLPPQPHTKEGVDAYNEVIARVRMWVNLNLWQKLKLSRDDAKPLLRLKGFPSFPLVERQANEVDWWDMVCNVKKLINEKKEDGKVFWQNLAGYKRQEALRPYLSSEEDRKKGKKFARYQLGDLLLHLEKKHGEDWGKVYDEAWERIDKKVEGLSKHIKLEEERRSEDAQSKAALTDWLRAKASFVIEGLKEADKDEFCRCELKLQKWYGDLRGKPFAIEAENSILDISGFSKQYNCAFIWQKDGVKKLNLYLIINYFKGGKLRFKKIKPEAFEANRFYTVINKKSGEIVPMEVNFNFDDPNLIILPLAFGKRQGREFIWNDLLSLETGSLKLANGRVIEKTLYNRRTRQDEPALFVALTFERREVLDSSNIKPMNLIGVDRGENIPAVIALTDPEGCPCDRFKDSLGNPTHILRIGESYKEKQRTIQAKKEVEQRRAGGYSRKYASKAKNLADDMVRNTARDLLYYAVTQDAMLIFENLSRGFGRQGKRTFMAERQYTRMEDWLTAKLAYEGLPSKTYLSKTLAQYTSKTCSNCGFTITSADYDRVLEKLKKTATGWMTTINGKELKVEGQITYYNRYKRQNVVKDLSVELDRLSEESVNNDISSWTKGRSGEALSLLKKRFSHRPVQEKFVCLNCGFETHADEQAALNIARSWLFLRSQEYKKYQTNKTTGNTDKRAFVETWQSFYRKKLKEVWKPAV

SEQ ID NO: 27175 - protein, 978 aa, synthetic construct
  REGION 1..978: note = engineered CasX variant
QEIKRINKIRRRLVKDSNTKKAGKTGPMKTLLVRVMTPDLRERLENLRKKPENIPQPISNTSRANLNKLLTDYTEMKKAILHVYWEEFQKDPVGLMSRVAQPASKKIDQNKLKPEMDEKGNLTTAGFACSQCGQPLFVYKLEQVSEKGKAYTNYFGRCNVAEHEKLILLAQLKPEKDSDEAVTYSLGKFGQRALDFYSIHVTKESTHPVKPLAQIAGNRYASGPVGKALSDACMGTIASFLSKYQDIIIEHQKVVKGNQKRLESLRELAGKENLEYPSVTLPPQPHTKEGVDAYNEVIARVRMWVNLNLWQKLKLSRDDAKPLLRLKGFPSFPLVERQANEVDWWDMVCNVKKLINEKKEDGKVFWQNLAGYKRQEALRPYLSSEEDRKKGKKFARYQLGDLLLHLEKKHGEDWGKVYDEAWERIDKKVEGLSKHIKLEEERRSEDAQSKAALTDWLRAKASFVIEGLKEADKDEFCRCELKLQKWYGDLRGKPFAIEAENSILDISGFSKQYNCAFIWQKDGVKKLNLYLIINYFKGGKLRFKKIKPEAFEANRFYTVINKKSGEIVPMEVNFNFDDPNLIILPLAFGKRQGREFIWNDLLSLETGSLKLANGRVIEKTLYNRRTRQDEPALFVALTFERREVLDSSNIKPMNLIGVDRGENIPAVIALTDPEGCPCDRFKDSLGNPTHILRIGEHYKEKQRTIQAKKEVEQRRAGGYSRKYASKAKNLADDMVRNTARDLLYYAVTQDAMLIFENLSRGFGRQGKRTFMAERQYTRMEDWLTAKLAYEGLPSKTYLSKTLAQYTSKTCSNCGFTITSADYDRVLEKLKKTATGWMTTINGKELKVEGQITYYNRYKRQNVVKDLSVELDRLSEESVNNDISSWTKGRSGEALSLLKKRFSHRPVQEKFVCLNCGFETHADEQAALNIARSWLFLRSQEYKKYQTNKTTGNTDKRAFVETWQSFYRKKLKEVWKPAV

SEQ ID NO: 27176 - protein, 978 aa, synthetic construct
  REGION 1..978: note = engineered CasX variant
QEIKRINKIRRRLVKDSNTKKAGKTGPMKTLLVRVMTPDLRERLENLRKKPENIPQPISNTSRANLNKLLTDYTEMKKAILHVYWEEFQKDPVGLMSRVAQPASKKIDQNKLKPEMDEKGNLTTAGFACSQCGQPLFVYKLEQVSEKGKAYTNYFGRCNVAEHEKLILLAQLKPEKDSDEAVTYSLGKFGQRALDFYSIHVTKESTHPVKPLAQIAGNRYASGPVGKALSDACMGTIASFLSKYQDIIIEHQKVVKGNQKRLESLRELAGKENLEYPSVTLPPQPHTKEGVDAYNEVIARVRMWVNLNLWQKLKLSRDDAKPLLRLKGFPSFPLVERQANEVDWWDMVCNVKKLINEKKEDGKVFWQNLAGYKRQEALRPYLSSEEDRKKGKKFARYQLGDLLLHLEKKHGEDWGKVYDEAWERIDKKVEGLSKHIKLEEERRSEDAQSKAALTDWLRAKASFVIEGLKEADKDEFCRCELKLQKWYGDLRGKPFAIEAENSILDISGFSKQYNCAFIWQKDGVKKLNLYLIINYFKGGKLRFKKIKPEAFEANRFYTVINKKSGEIVPMEVNFNFDDPNLIILPLAFGKRQGREFIWNDLLSLETGSLKLANGRVIEKTLYNRRTRQDEPALFVALTFERREVLDSSNIKPMNLIGVDRGENIPAVIALTDPEGCMLSRFKDSLGNPTHILRIGESYKEKQRTIQAKKEVEQRRAGGYSRKYASKAKNLADDMVRNTARDLLYYAVTQDAMLIFENLSRGFGRQGKRTFMAERQYTRMEDWLTAKLAYEGLPSKTYLSKTLAQYTSKTCSNCGFTITSADYDRVLEKLKKTATGWMTTINGKELKVEGQITYYNRYKRQNVVKDLSVELDRLSEESVNNDISSWTKGRSGEALSLLKKRFSHRPVQEKFVCLNCGFETHADEQAALNIARSWLFLRSQEYKKYQTNKTTGNTDKRAFVETWQSFYRKKLKEVWKPAV

SEQ ID NO: 27177 - protein, 978 aa, synthetic construct
  REGION 1..978: note = engineered CasX variant
QEIKRINKIRRRLVKDSNTKKAGKTGPMKTLLVRVMTPDLRERLENLRKKPENIPQPISNTSRANLNKLLTDYTEMKKAILHVYWEEFQKDPVGLMSRVAQPASKKIDQNKLKPEMDEKGNLTTAGFACSQCGQPLFVYKLEQVSEKGKAYTNYFGRCNVAEHEKLILLAQLKPEKDSDEAVTYSLGKFGQRALDFYSIHVTKESTHPVKPLAQIAGNRYASGPVGKALSDACMGTIASFLSKYQDIIIEHQKVVKGNQKRLESLRELAGKENLEYPSVTLPPQPHTKEGVDAYNEVIARVRMWVNLNLWQKLKLSRDDAKPLLRLKGFPSFPLVERQANEVDWWDMVCNVKKLINEKKEDGKVFWQNLAGYKRQEALRPYLSSEEDRKKGKKFARYQLGDLLLHLEKKHGEDWGKVYDEAWERIDKKVEGLSKHIKLEEERRSEDAQSKAALTDWLRAKASFVIEGLKEADKDEFCRCELKLQKWYGDLRGKPFAIEAENSILDISGFSKQYNCAFIWQKDGVKKLNLYLIINYFKGGKLRFKKIKPEAFEANRFYTVINKKSGEIVPMEVNFNFDDPNLIILPLAFGKRQGREFIWNDLLSLETGSLKLANGRVIEKTLYNRRTRQDEPALFVALTFERREVLDSSNIKPMNLIGVDRGENIPAVIALTDPEGCLLSRFKDSEGNPTHILRIGESYKEKQRTIQAKKEVEQRRAGGYSRKYASKAKNLADDMVRNTARDLLYYAVTQDAMLIFENLSRGFGRQGKRTFMAERQYTRMEDWLTAKLAYEGLPSKTYLSKTLAQYTSKTCSNCGFTITSADYDRVLEKLKKTATGWMTTINGKELKVEGQITYYNRYKRQNVVKDLSVELDRLSEESVNNDISSWTKGRSGEALSLLKKRFSHRPVQEKFVCLNCGFETHADEQAALNIARSWLFLRSQEYKKYQTNKTTGNTDKRAFVETWQSFYRKKLKEVWKPAV

SEQ ID NO: 27178 - protein, 978 aa, synthetic construct
  REGION 1..978: note = engineered CasX variant
QEIKRINKIRRRLVKDSNTKKAGKTGPMKTLLVRVMTPDLRERLENLRKKPENIPQPISNTSRANLNKLLTDYTEMKKAILHVYWEEFQKDPVGLMSRVAQPASKKIDQNKLKPEMDEKGNLTTAGFACSQCGQPLFVYKLEQVSEKGKAYTNYFGRCNVAEHEKLILLAQLKPEKDSDEAVTYSLGKFGQRALDFYSIHVTKESTHPVKPLAQIAGNRYASGPVGKALSDACMGTIASFLSKYQDIIIEHQKVVKGNQKRLESLRELAGKENLEYPSVTLPPQPHTKEGVDAYNEVIARVRMWVNLNLWQKLKLSRDDAKPLLRLKGFPSFPLVERQANEVDWWDMVCNVKKLINEKKEDGKVFWQNLAGYKRQEALRPYLSSEEDRKKGKKFARYQLGDLLLHLEKKHGEDWGKVYDEAWERIDKKVEGLSKHIKLEEERRSEDAQSKAALTDWLRAKASFVIEGLKEADKDEFCRCELKLQKWYGDLRGKPFAIEAENSILDISGFSKQYNCAFIWQKDGVKKLNLYLIINYFKGGKLRFKKIKPEAFEANRFYTVINKKSGEIVPMEVNFNFDDPNLIILPLAFGKRQGREFIWNDLLSLETGSLKLANGRVIEKTLYNRRTRQDEPALFVALTFERREVLDSSNIKPMNLIGVDRGENIPAVIALTDPEGCKLSRFKDSLGNPTHILRIGESYKEKQRTIQAKKEWEQRRAGGYSRKYASKAKNLADDMVRNTARDLLYYAVTQDAMLIFENLSRGFGRQGKRTFMAERQYTRMEDWLTAKLAYEGLPSKTYLSKTLAQYTSKTCSNCGFTITSADYDRVLEKLKKTATGWMTTINGKELKVEGQITYYNRYKRQNVVKDLSVELDRLSEESVNNDISSWTKGRSGEALSLLKKRFSHRPVQEKFVCLNCGFETHADEQAALNIARSWLFLRSQEYKKYQTNKTTGNTDKRAFVETWQSFYRKKLKEVWKPAV

SEQ ID NO: 27179 - protein, 978 aa, synthetic construct
  REGION 1..978: note = engineered CasX variant
QEIKRINKIRRRLVKDSNTKKAGKTGPMKTLLVRVMTPDLRERLENLRKKPENIPQPISNTSRANLNKLLTDYTEMKKAILHVYWEEFQKDPVGLMSRVAQPASKKIDQNKLKPEMDEKGNLTTAGFACSQCGQPLFVYKLEQVSEKGKAYTNYFGRCNVAEHEKLILLAQLKPEKDSDEAVTYSLGKFGQRALDFYSIHVTKESTHPVKPLAQIAGNRYASGPVGKALSDACMGTIASFLSKYQDIIIEHQKVVKGNQKRLESLRELAGKENLEYPSVTLPPQPHTKEGVDAYNEVIARVRMWVNLNLWQKLKLSRDDAKPLLRLKGFPSFPLVERQANEVDWWDMVCNVKKLINEKKEDGKVFWQNLAGYKRQEALRPYLSSEEDRKKGKKFARYQLGDLLLHLEKKHGEDWGKVYDEAWERIDKKVEGLSKHIKLEEERRSEDAQSKAALTDWLRAKASFVIEGLKEADKDEFCRCELKLQKWYGDLRGKPFAIEAENSILDISGFSKQYNCAFIWQKDGVKKLNLYLIINYFKGGKLRFKKIKPEAFEANRFYTVINKKSGEIVPMEVNFNFDDPNLIILPLAFGKRQGREFIWNDLLSLETGSLKLANGRVIEKTLYNRRTRQDEPALFVALTFERREVLDSSNIKPMNLIGVDRGENIPAVIALTDPEGCKLSRFKDSLGNPTHILRIGESYKEKQRTIQAKKEVEQRRAGGYSRKYASKAKNLADDMVRNTARDLLYYAVTQDAMLIFENLSRGFGRQGKRTFMAERQYTRMEDWLTAKLAYEGLPSKTYLSKTLAQYTSKTCSNCGFTITSADYDRVLEKLKKTATGWMTTINGKELKVEGQITYYNRYKRQNVVKDLSVELDRLSEESVNNDISSWTKGRSGEALSLLKKRFSHRPVQEKFVCLNCGFETHADEQAALNIARSWLFLRSQEYKKYQTNKTTGNTDKRAFVETWQSFYRKKLKEVWKPAV

SEQ ID NO: 27180 - protein, 978 aa, synthetic construct
  REGION 1..978: note = engineered CasX variant
QEIKRINKIRRRLVKDSNTKKAGKTGPMKTLLVRVMTPDLRERLENLRKKPENIPQPISNTSRANLNKLLTDYTEMKKAILHVYWEEFQKDPVGLMSRVAQPASKKIDQNKLKPEMDEKGNLTTAGFACSQCGQPLFVYKLEQVSEKGKAYTNYFGRCNVAEHEKLILLAQLKPEKDSDEAVTYSLGKFGQRALDFYSIHVTKESTHPVKPLAQIAGNRYASGPVGKALSDACMGTIASFLSKYQDIIIEHQKVVKGNQKRLESLRELAGKENLEYPSVTLPPQPHTKEGVDAYNEVIARVRMWVNLNLWQKLKLSRDDAKPLLRLKGFPSFPLVERQANEVDWWDMVCNVKKLINEKKEDGKVFWQNLAGYKRQEALRPYLSSEEDRKKGKKFARYQLGDLLLHLEKKHGEDWGKVYDEAWERIDKKVEGLSKHIKLEEERRSEDAQSKAALTDWLRAKASFVIEGLKEADKDEFCRCELKLQKWYGDLRGKPFAIEAENSILDISGFSKQYNCAFIWQKDGVKKLNLYLIINYFKGGKLRFKKIKPEAFEANRFYTVINKKSGEIVPMEVNFNFDDPNLIILPLAFGKRQGREFIWNDLLSLETGSLKLANGRVIEKTLYNRRTRQDEPALFVALTFERREVLDSSNIKPMNLIGVDRGENIPAVIALTDPEGCKLSRFKDHLGNPTHILRIGESYKEKQRTIQAKKEWEQRRAGGYSRKYASKAKNLADDMVRNTARDLLYYAVTQDAMLIFENLSRGFGRQGKRTFMAERQYTRMEDWLTAKLAYEGLPSKTYLSKTLAQYTSKTCSNCGFTITSADYDRVLEKLKKTATGWMTTINGKELKVEGQITYYNRYKRQNVVKDLSVELDRLSEESVNNDISSWTKGRSGEALSLLKKRFSHRPVQEKFVCLNCGFETHADEQAALNIARSWLFLRSQEYKKYQTNKTTGNTDKRAFVETWQSFYRKKLKEVWKPAV

SEQ ID NO: 27181 - protein, 978 aa, synthetic construct
  REGION 1..978: note = engineered CasX variant
QEIKRINKIRRRLVKDSNTKKAGKTGPMKTLLVRVMTPDLRERLENLRKKPENIPQPISNTSRANLNKLLTDYTEMKKAILHVYWEEFQKDPVGLMSRVAQPASKKIDQNKLKPEMDEKGNLTTAGFACSQCGQPLFVYKLEQVSEKGKAYTNYFGRCNVAEHEKLILLAQLKPEKDSDEAVTYSLGKFGQRALDFYSIHVTKESTHPVKPLAQIAGNRYASGPVGKALSDACMGTIASFLSKYQDIIIEHQKVVKGNQKRLESLRELAGKENLEYPSVTLPPQPHTKEGVDAYNEVIARVRMWVNLNLWQKLKLSRDDAKPLLRLKGFPSFPLVERQANEVDWWDMVCNVKKLINEKKEDGKVFWQNLAGYKRQEALRPYLSSEEDRKKGKKFARYQLGDLLLHLEKKHGEDWGKVYDEAWERIDKKVEGLSKHIKLEEERRSEDAQSKAALTDWLRAKASFVIEGLKEADKDEFCRCELKLQKWYGDLRGKPFAIEAENSILDISGFSKQYNCAFIWQKDGVKKLNLYLIINYFKGGKLRFKKIKPEAFEANRFYTVINKKSGEIVPMEVNFNFDDPNLIILPLAFGKRQGREFIWNDLLSLETGSLKLANGRVIEKTLYNRRTRQDEPALFVALTFERREVLDSSNIKPMNLIGVDRGENIPAVIALTDPEGCKLSRFKDHLGNPTHILRIGESYKEKQRTIQAKKEVEQRRAGGYSRKYASKAKNLADDMVRNTARDLLYYAVTQDAMLIFENLSRGFGRQGKRTFMAERQYTRMEDWLTAKLAYEGLPSKTYLSKTLAQYTSKTCSNCGFTITSADYDRVLEKLKKTATGWMTTINGKELKVEGQITYYNRYKRQNVVKDLSVELDRLSEESVNNDISSWTKGRSGEALSLLKKRFSHRPVQEKFVCLNCGFETHADEQAALNIARSWLFLRSQEYKKYQTNKTTGNTDKRAFVETWQSFYRKKLKEVWKPAV

SEQ ID NO: 27182 - protein, 978 aa, synthetic construct
  REGION 1..978: note = engineered CasX variant
QEIKRINKIRRRLVKDSNTKKAGKTGPMKTLLVRVMTPDLRERLENLRKKPENIPQPISNTSRANLNKLLTDYTEMKKAILHVYWEEFQKDPVGLMSRVAQPASKKIDQNKLKPEMDEKGNLTTAGFACSQCGQPLFVYKLEQVSEKGKAYTNYFGRCNVAEHEKLILLAQLKPEKDSDEAVTYSLGKFGQRALDFYSIHVTKESTHPVKPLAQIAGNRYASGPVGKALSDACMGTIASFLSKYQDIIIEHQKVVKGNQKRLESLRELAGKENLEYPSVTLPPQPHTKEGVDAYNEVIARVRMWVNLNLWQKLKLSRDDAKPLLRLKGFPSFPLVERQANEVDWWDMVCNVKKLINEKKEDGKVFWQNLAGYKRQEALRPYLSSEEDRKKGKKFARYQLGDLLLHLEKKHGEDWGKVYDEAWERIDKKVEGLSKHIKLEEERRSEDAQSKAALTDWLRAKASFVIEGLKEADKDEFCRCELKLQKWYGDLRGKPFAIEAENSILDISGFSKQYNCAFIWQKDGVKKLNLYLIINYFKGGKLRFKKIKPEAFEANRFYTVINKKSGEIVPMEVNFNFDDPNLIILPLAFGKRQGREFIWNDLLSLETGSLKLANGRVIEKTLYNRRTRQDEPALFVALTFERREVLDSSNIKPMNLIGVDRGENIPAVIALTDPEGCILSRFKDSLGNPTHILRIGESYKEKQRTIQAKKEVEQRRAGGYSRKYASKAKNLADDMVRNTARDLLYYAVTQDAMLIFENLSRGFGRQGKRTFMAERQYTRMEDWLTAKLAYEGLPSKTYLSKTLAQYTSKTCSNCGFTITSADYDRVLEKLKKTATGWMTTINGKELKVEGQITYYNRYKRQNVVKDLSVELDRLSEESVNNDISSWTKGRSGEALSLLKKRFSHRPVQEKFVCLNCGFETHADEQAALNIARSWLFLRSQEYKKYQTNKTTGNTDKRAFVETWQSFYRKKLKEVWKPAV

SEQ ID NO: 27183 - protein, 978 aa, synthetic construct
  REGION 1..978: note = engineered CasX variant
QEIKRINKIRRRLVKDSNTKKAGKTGPMKTLLVRVMTPDLRERLENLRKKPENIPQPISNTSRANLNKLLTDYTEMKKAILHVYWEEFQKDPVGLMSRVAQPASKKIDQNKLKPEMDEKGNLTTAGFACSQCGQPLFVYKLEQVSEKGKAYTNYFGRCNVAEHEKLILLAQLKPEKDSDEAVTYSLGKFGQRALDFYSIHVTKESTHPVKPLAQIAGNRYASGPVGKALSDACMGTIASFLSKYQDIIIEHQKVVKGNQKRLESLRELAGKENLEYPSVTLPPQPHTKEGVDAYNEVIARVRMWVNLNLWQKLKLSRDDAKPLLRLKGFPSFPLVERQANEVDWWDMVCNVKKLINEKKEDGKVFWQNLAGYKRQEALRPYLSSEEDRKKGKKFARYQLGDLLLHLEKKHGEDWGKVYDEAWERIDKKVEGLSKHIKLEEERRSEDAQSKAALTDWLRAKASFVIEGLKEADKDEFCRCELKLQKWYGDLRGKPFAIEAENSILDISGFSKQYNCAFIWQKDGVKKLNLYLIINYFKGGKLRFKKIKPEAFEANRFYTVINKKSGEIVPMEVNFNFDDPNLIILPLAFGKRQGREFIWNDLLSLETGSLKLANGRVIEKTLYNRRTRQDEPALFVALTFERREVLDSSNIKPMNLIGVDRGENIPAVIALTDPEGCILSRFKDSLGNPTHILRIGESYKEKQRTILAKKEVEQRRAGGYSRKYASKAKNLADDMVRNTARDLLYYAVTQDAMLIFENLSRGFGRQGKRTFMAERQYTRMEDWLTAKLAYEGLPSKTYLSKTLAQYTSKTCSNCGFTITSADYDRVLEKLKKTATGWMTTINGKELKVEGQITYYNRYKRQNVVKDLSVELDRLSEESVNNDISSWTKGRSGEALSLLKKRFSHRPVQEKFVCLNCGFETHADEQAALNIARSWLFLRSQEYKKYQTNKTTGNTDKRAFVETWQSFYRKKLKEVWKPAV

SEQ ID NO: 27184 - protein, 978 aa, synthetic construct
  REGION 1..978: note = engineered CasX variant
QEIKRINKIRRRLVKDSNTKKAGKTGPMKTLLVRVMTPDLRERLENLRKKPENIPQPISNTSRANLNKLLTDYTEMKKAILHVYWEEFQKDPVGLMSRVAQPASKKIDQNKLKPEMDEKGNLTTAGFACSQCGQPLFVYKLEQVSEKGKAYTNYFGRCNVAEHEKLILLAQLKPEKDSDEAVTYSLGKFGQRALDFYSIHVTKESTHPVKPLAQIAGNRYASGPVGKALSDACMGTIASFLSKYQDIIIEHQKVVKGNQKRLESLRELAGKENLEYPSVTLPPQPHTKEGVDAYNEVIARVRMWVNLNLWQKLKLSRDDAKPLLRLKGFPSFPLVERQANEVDWWDMVCNVKKLINEKKEDGKVFWQNLAGYKRQEALRPYLSSEEDRKKGKKFARYQLGDLLLHLEKKHGEDWGKVYDEAWERIDKKVEGLSKHIKLEEERRSEDAQSKAALTDWLRAKASFVIEGLKEADKDEFCRCELKLQKWYGDLRGKPFAIEAENSILDISGFSKQYNCAFIWQKDGVKKLNLYLIINYFKGGKLRFKKIKPEAFEANRFYTVINKKSGEIVPMEVNFNFDDPNLIILPLAFGKRQGREFIWNDLLSLETGSLKLANGRVIEKTLYNRRTRQDEPALFVALTFERREVLDSSNIKPMNLIGVDRGENIPAVIALTDPEGCILSRFKDSLGAPTHILRIGESYKEKQRTIQAKKEVEQRRAGGYSRKYASKAKNLADDMVRNTARDLLYYAVTQDAMLIFENLSRGFGRQGKRTFMAERQYTRMEDWLTAKLAYEGLPSKTYLSKTLAQYTSKTCSNCGFTITSADYDRVLEKLKKTATGWMTTINGKELKVEGQITYYNRYKRQNVVKDLSVELDRLSEESVNNDISSWTKGRSGEALSLLKKRFSHRPVQEKFVCLNCGFETHADEQAALNIARSWLFLRSQEYKKYQTNKTTGNTDKRAFVETWQSFYRKKLKEVWKPAV

SEQ ID NO: 27185 - protein, 978 aa, synthetic construct
  REGION 1..978: note = engineered CasX variant
QEIKRINKIRRRLVKDSNTKKAGKTGPMKTLLVRVMTPDLRERLENLRKKPENIPQPISNTSRANLNKLLTDYTEMKKAILHVYWEEFQKDPVGLMSRVAQPASKKIDQNKLKPEMDEKGNLTTAGFACSQCGQPLFVYKLEQVSEKGKAYTNYFGRCNVAEHEKLILLAQLKPEKDSDEAVTYSLGKFGQRALDFYSIHVTKESTHPVKPLAQIAGNRYASGPVGKALSDACMGTIASFLSKYQDIIIEHQKVVKGNQKRLESLRELAGKENLEYPSVTLPPQPHTKEGVDAYNEVIARVRMWVNLNLWQKLKLSRDDAKPLLRLKGFPSFPLVERQANEVDWWDMVCNVKKLINEKKEDGKVFWQNLAGYKRQEALRPYLSSEEDRKKGKKFARYQLGDLLLHLEKKHGEDWGKVYDEAWERIDKKVEGLSKHIKLEEERRSEDAQSKAALTDWLRAKASFVIEGLKEADKDEFCRCELKLQKWYGDLRGKPFAIEAENSILDISGFSKQYNCAFIWQKDGVKKLNLYLIINYFKGGKLRFKKIKPEAFEANRFYTVINKKSGEIVPMEVNFNFDDPNLIILPLAFGKRQGREFIWNDLLSLETGSLKLANGRVIEKTLYNRRTRQDEPALFVALTFERREVLDSSNIKPMNLIGVDRGENIPAVIALTDPEGCELSRFKDSLGNPTHILRIGESYKEKQRTIQAKKSVEQRRAGGYSRKYASKAKNLADDMVRNTARDLLYYAVTQDAMLIFENLSRGFGRQGKRTFMAERQYTRMEDWLTAKLAYEGLPSKTYLSKTLAQYTSKTCSNCGFTITSADYDRVLEKLKKTATGWMTTINGKELKVEGQITYYNRYKRQNVVKDLSVELDRLSEESVNNDISSWTKGRSGEALSLLKKRFSHRPVQEKFVCLNCGFETHADEQAALNIARSWLFLRSQEYKKYQTNKTTGNTDKRAFVETWQSFYRKKLKEVWKPAV

SEQ ID NO: 27186 - protein, 978 aa, synthetic construct
  REGION 1..978: note = engineered CasX variant
QEIKRINKIRRRLVKDSNTKKAGKTGPMKTLLVRVMTPDLRERLENLRKKPENIPQPISNTSRANLNKLLTDYTEMKKAILHVYWEEFQKDPVGLMSRVAQPASKKIDQNKLKPEMDEKGNLTTAGFACSQCGQPLFVYKLEQVSEKGKAYTNYFGRCNVAEHEKLILLAQLKPEKDSDEAVTYSLGKFGQRALDFYSIHVTKESTHPVKPLAQIAGNRYASGPVGKALSDACMGTIASFLSKYQDIIIEHQKVVKGNQKRLESLRELAGKENLEYPSVTLPPQPHTKEGVDAYNEVIARVRMWVNLNLWQKLKLSRDDAKPLLRLKGFPSFPLVERQANEVDWWDMVCNVKKLINEKKEDGKVFWQNLAGYKRQEALRPYLSSEEDRKKGKKFARYQLGDLLLHLEKKHGEDWGKVYDEAWERIDKKVEGLSKHIKLEEERRSEDAQSKAALTDWLRAKASFVIEGLKEADKDEFCRCELKLQKWYGDLRGKPFAIEAENSILDISGFSKQYNCAFIWQKDGVKKLNLYLIINYFKGGKLRFKKIKPEAFEANRFYTVINKKSGEIVPMEVNFNFDDPNLIILPLAFGKRQGREFIWNDLLSLETGSLKLANGRVIEKTLYNRRTRQDEPALFVALTFERREVLDSSNIKPMNLIGVDRGENIPAVIALTDPEGCELSRFKDSLGNPTHILRIGESYKEKQRTIQAKKEVEQRRAGGYSRKYASKAKNLADDMVRNTARDLLYYAVTQDAMLIFENLSRGFGRQGKRTFMAERQYTRMEDWLTAKLAYEGLPSKTYLSKTLAQYTSKTCSNCGFTITSADYDRVLEKLKKTATGWMTTINGKELKVEGQITYYNRYKRQNVVKDLSVELDRLSEESVNNDISSWTKGRSGEALSLLKKRFSHRPVQEKFVCLNCGFETHADEQAALNIARSWLFLRSQEYKKYQTNKTTGNTDKRAFVETWQSFYRKKLKEVWKPAV

SEQ ID NO: 27187 - protein, 978 aa, synthetic construct
  REGION 1..978: note = engineered CasX variant
QEIKRINKIRRRLVKDSNTKKAGKTGPMKTLLVRVMTPDLRERLENLRKKPENIPQPISNTSRANLNKLLTDYTEMKKAILHVYWEEFQKDPVGLMSRVAQPASKKIDQNKLKPEMDEKGNLTTAGFACSQCGQPLFVYKLEQVSEKGKAYTNYFGRCNVAEHEKLILLAQLKPEKDSDEAVTYSLGKFGQRALDFYSIHVTKESTHPVKPLAQIAGNRYASGPVGKALSDACMGTIASFLSKYQDIIIEHQKVVKGNQKRLESLRELAGKENLEYPSVTLPPQPHTKEGVDAYNEVIARVRMWVNLNLWQKLKLSRDDAKPLLRLKGFPSFPLVERQANEVDWWDMVCNVKKLINEKKEDGKVFWQNLAGYKRQEALRPYLSSEEDRKKGKKFARYQLGDLLLHLEKKHGEDWGKVYDEAWERIDKKVEGLSKHIKLEEERRSEDAQSKAALTDWLRAKASFVIEGLKEADKDEFCRCELKLQKWYGDLRGKPFAIEAENSILDISGFSKQYNCAFIWQKDGVKKLNLYLIINYFKGGKLRFKKIKPEAFEANRFYTVINKKSGEIVPMEVNFNFDDPNLIILPLAFGKRQGREFIWNDLLSLETGSLKLANGRVIEKTLYNRRTRQDEPALFVALTFERREVLDSSNIKPMNLIGVDRGENIPAVIALTDPEGCCLSRFSDSLGNPTHILRIGESYKEKQRTIQAKKEVEQRRAGGYSRKYASKAKNLADDMVRNTARDLLYYAVTQDAMLIFENLSRGFGRQGKRTFMAERQYTRMEDWLTAKLAYEGLPSKTYLSKTLAQYTSKTCSNCGFTITSADYDRVLEKLKKTATGWMTTINGKELKVEGQITYYNRYKRQNVVKDLSVELDRLSEESVNNDISSWTKGRSGEALSLLKKRFSHRPVQEKFVCLNCGFETHADEQAALNIARSWLFLRSQEYKKYQTNKTTGNTDKRAFVETWQSFYRKKLKEVWKPAV

SEQ ID NO: 27188 - protein, 978 aa, synthetic construct
  REGION 1..978: note = engineered CasX variant
QEIKRINKIRRRLVKDSNTKKAGKTGPMKTLLVRVMTPDLRERLENLRKKPENIPQPISNTSRANLNKLLTDYTEMKKAILHVYWEEFQKDPVGLMSRVAQPASKKIDQNKLKPEMDEKGNLTTAGFACSQCGQPLFVYKLEQVSEKGKAYTNYFGRCNVAEHEKLILLAQLKPEKDSDEAVTYSLGKFGQRALDFYSIHVTKESTHPVKPLAQIAGNRYASGPVGKALSDACMGTIASFLSKYQDIIIEHQKVVKGNQKRLESLRELAGKENLEYPSVTLPPQPHTKEGVDAYNEVIARVRMWVNLNLWQKLKLSRDDAKPLLRLKGFPSFPLVERQANEVDWWDMVCNVKKLINEKKEDGKVFWQNLAGYKRQEALRPYLSSEEDRKKGKKFARYQLGDLLLHLEKKHGEDWGKVYDEAWERIDKKVEGLSKHIKLEEERRSEDAQSKAALTDWLRAKASFVIEGLKEADKDEFCRCELKLQKWYGDLRGKPFAIEAENSILDISGFSKQYNCAFIWQKDGVKKLNLYLIINYFKGGKLRFKKIKPEAFEANRFYTVINKKSGEIVPMEVNFNFDDPNLIILPLAFGKRQGREFIWNDLLSLETGSLKLANGRVIEKTLYNRRTRQDEPALFVALTFERREVLDSSNIKPMNLIGVDRGENIPAVIALTDPEGCCLSRFKDSLGNPTHILRIGESYKEKQRTIQAKKEVEQRRAGGYSRKYASKAKNLADDMVRNTARDLLYYAVTQDAMLIFENLSRGFGRQGKRTFMAERQYTRMEDWLTAKLAYEGLPSKTYLSKTLAQYTSKTCSNCGFTITSADYDRVLEKLKKTATGWMTTINGKELKVEGQITYYNRYKRQNVVKDLSVELDRLSEESVNNDISSWTKGRSGEALSLLKKRFSHRPVQEKFVCLNCGFETHADEQAALNIARSWLFLRSQEYKKYQTNKTTGNTDKRAFVETWQSFYRKKLKEVWKPAV

SEQ ID NO: 27189 - protein, 978 aa, synthetic construct
  REGION 1..978: note = engineered CasX variant
QEIKRINKIRRRLVKDSNTKKAGKTGPMKTLLVRVMTPDLRERLENLRKKPENIPQPISNTSRANLNKLLTDYTEMKKAILHVYWEEFQKDPVGLMSRVAQPASKKIDQNKLKPEMDEKGNLTTAGFACSQCGQPLFVYKLEQVSEKGKAYTNYFGRCNVAEHEKLILLAQLKPEKDSDEAVTYSLGKFGQRALDFYSIHVTKESTHPVKPLAQIAGNRYASGPVGKALSDACMGTIASFLSKYQDIIIEHQKVVKGNQKRLESLRELAGKENLEYPSVTLPPQPHTKEGVDAYNEVIARVRMWVNLNLWQKLKLSRDDAKPLLRLKGFPSFPLVERQANEVDWWDMVCNVKKLINEKKEDGKVFWQNLAGYKRQEALRPYLSSEEDRKKGKKFARYQLGDLLLHLEKKHGEDWGKVYDEAWERIDKKVEGLSKHIKLEEERRSEDAQSKAALTDWLRAKASFVIEGLKEADKDEFCRCELKLQKWYGDLRGKPFAIEAENSILDISGFSKQYNCAFIWQKDGVKKLNLYLIINYFKGGKLRFKKIKPEAFEANRFYTVINKKSGEIVPMEVNFNFDDPNLIILPLAFGKRQGREFIWNDLLSLETGSLKLANGRVIEKTLYNRRTRQDEPALFVALTFERREVLDSSNIKPMNLIGVDRGENIPAVIALTDPEGCCLSRFKDSLGNPTHILRIGESYKEKQRTIQAKKEVEQRRAFGYSRKYASKAKNLADDMVRNTARDLLYYAVTQDAMLIFENLSRGFGRQGKRTFMAERQYTRMEDWLTAKLAYEGLPSKTYLSKTLAQYTSKTCSNCGFTITSADYDRVLEKLKKTATGWMTTINGKELKVEGQITYYNRYKRQNVVKDLSVELDRLSEESVNNDISSWTKGRSGEALSLLKKRFSHRPVQEKFVCLNCGFETHADEQAALNIARSWLFLRSQEYKKYQTNKTTGNTDKRAFVETWQSFYRKKLKEVWKPAV

SEQ ID NO: 27190 - protein, 978 aa, synthetic construct
  REGION 1..978: note = engineered CasX variant
QEIKRINKIRRRLVKDSNTKKAGKTGPMKTLLVRVMTPDLRERLENLRKKPENIPQPISNTSRANLNKLLTDYTEMKKAILHVYWEEFQKDPVGLMSRVAQPASKKIDQNKLKPEMDEKGNLTTAGFACSQCGQPLFVYKLEQVSEKGKAYTNYFGRCNVAEHEKLILLAQLKPEKDSDEAVTYSLGKFGQRALDFYSIHVTKESTHPVKPLAQIAGNRYASGPVGKALSDACMGTIASFLSKYQDIIIEHQKVVKGNQKRLESLRELAGKENLEYPSVTLPPQPHTKEGVDAYNEVIARVRMWVNLNLWQKLKLSRDDAKPLLRLKGFPSFPLVERQANEVDWWDMVCNVKKLINEKKEDGKVFWQNLAGYKRQEALRPYLSSEEDRKKGKKFARYQLGDLLLHLEKKHGEDWGKVYDEAWERIDKKVEGLSKHIKLEEERRSEDAQSKAALTDWLRAKASFVIEGLKEADKDEFCRCELKLQKWYGDLRGKPFAIEAENSILDISGFSKQYNCAFIWQKDGVKKLNLYLIINYFKGGKLRFKKIKPEAFEANRFYTVINKKSGEIVPMEVNFNFDDPNLIILPLAFGKRQGREFIWNDLLSLETGSLKLANGRVIEKTLYNRRTRQDEPALFVALTFERREVLDSSNIKPMNLIGVDRGENIPAVIALTDPEGCCLSRFKDSLGNPTHILRIGESYKEKQRTIQAKKEVEARRAGGYSRKYASKAKNLADDMVRNTARDLLYYAVTQDAMLIFENLSRGFGRQGKRTFMAERQYTRMEDWLTAKLAYEGLPSKTYLSKTLAQYTSKTCSNCGFTITSADYDRVLEKLKKTATGWMTTINGKELKVEGQITYYNRYKRQNVVKDLSVELDRLSEESVNNDISSWTKGRSGEALSLLKKRFSHRPVQEKFVCLNCGFETHADEQAALNIARSWLFLRSQEYKKYQTNKTTGNTDKRAFVETWQSFYRKKLKEVWKPAV

SEQ ID NO: 27191 - protein, 978 aa, synthetic construct
  REGION 1..978: note = engineered CasX variant
QEIKRINKIRRRLVKDSNTKKAGKTGPMKTLLVRVMTPDLRERLENLRKKPENIPQPISNTSRANLNKLLTDYTEMKKAILHVYWEEFQKDPVGLMSRVAQPASKKIDQNKLKPEMDEKGNLTTAGFACSQCGQPLFVYKLEQVSEKGKAYTNYFGRCNVAEHEKLILLAQLKPEKDSDEAVTYSLGKFGQRALDFYSIHVTKESTHPVKPLAQIAGNRYASGPVGKALSDACMGTIASFLSKYQDIIIEHQKVVKGNQKRLESLRELAGKENLEYPSVTLPPQPHTKEGVDAYNEVIARVRMWVNLNLWQKLKLSRDDAKPLLRLKGFPSFPLVERQANEVDWWDMVCNVKKLINEKKEDGKVFWQNLAGYKRQEALRPYLSSEEDRKKGKKFARYQLGDLLLHLEKKHGEDWGKVYDEAWERIDKKVEGLSKHIKLEEERRSEDAQSKAALTDWLRAKASFVIEGLKEADKDEFCRCELKLQKWYGDLRGKPFAIEAENSILDISGFSKQYNCAFIWQKDGVKKLNLYLIINYFKGGKLRFKKIKPEAFEANRFYTVINKKSGEIVPMEVNFNFDDPNLIILPLAFGKRQGREFIWNDLLSLETGSLKLANGRVIEKTLYNRRTRQDEPALFVALTFERREVLDSSNIKPMNLIGVDRGENIPAVIALTDPEGCCLSRFKDSLGNPTHILRIGESYKEKQRIIQAKKEVEQRRAGGYSRKYASKAKNLADDMVRNTARDLLYYAVTQDAMLIFENLSRGFGRQGKRTFMAERQYTRMEDWLTAKLAYEGLPSKTYLSKTLAQYTSKTCSNCGFTITSADYDRVLEKLKKTATGWMTTINGKELKVEGQITYYNRYKRQNVVKDLSVELDRLSEESVNNDISSWTKGRSGEALSLLKKRFSHRPVQEKFVCLNCGFETHADEQAALNIARSWLFLRSQEYKKYQTNKTTGNTDKRAFVETWQSFYRKKLKEVWKPAV

SEQ ID NO: 27192 - protein, 978 aa, synthetic construct
  REGION 1..978: note = engineered CasX variant
QEIKRINKIRRRLVKDSNTKKAGKTGPMKTLLVRVMTPDLRERLENLRKKPENIPQPISNTSRANLNKLLTDYTEMKKAILHVYWEEFQKDPVGLMSRVAQPASKKIDQNKLKPEMDEKGNLTTAGFACSQCGQPLFVYKLEQVSEKGKAYTNYFGRCNVAEHEKLILLAQLKPEKDSDEAVTYSLGKFGQRALDFYSIHVTKESTHPVKPLAQIAGNRYASGPVGKALSDACMGTIASFLSKYQDIIIEHQKVVKGNQKRLESLRELAGKENLEYPSVTLPPQPHTKEGVDAYNEVIARVRMWVNLNLWQKLKLSRDDAKPLLRLKGFPSFPLVERQANEVDWWDMVCNVKKLINEKKEDGKVFWQNLAGYKRQEALRPYLSSEEDRKKGKKFARYQLGDLLLHLEKKHGEDWGKVYDEAWERIDKKVEGLSKHIKLEEERRSEDAQSKAALTDWLRAKASFVIEGLKEADKDEFCRCELKLQKWYGDLRGKPFAIEAENSILDISGFSKQYNCAFIWQKDGVKKLNLYLIINYFKGGKLRFKKIKPEAFEANRFYTVINKKSGEIVPMEVNFNFDDPNLIILPLAFGKRQGREFIWNDLLSLETGSLKLANGRVIEKTLYNRRTRQDEPALFVALTFERREVLDSSNIKPMNLIGVDRGENIPAVIALTDPEGCCLSRFKDSLGNPTHILRIGESYKEKQRIIQAKKEVEQRRAFGYSRKYASKAKNLADDMVRNTARDLLYYAVTQDAMLIFENLSRGFGRQGKRTFMAERQYTRMEDWLTAKLAYEGLPSKTYLSKTLAQYTSKTCSNCGFTITSADYDRVLEKLKKTATGWMTTINGKELKVEGQITYYNRYKRQNVVKDLSVELDRLSEESVNNDISSWTKGRSGEALSLLKKRFSHRPVQEKFVCLNCGFETHADEQAALNIARSWLFLRSQEYKKYQTNKTTGNTDKRAFVETWQSFYRKKLKEVWKPAV

SEQ ID NO: 27193 - protein, 978 aa, synthetic construct
  REGION 1..978: note = engineered CasX variant
QEIKRINKIRRRLVKDSNTKKAGKTGPMKTLLVRVMTPDLRERLENLRKKPENIPQPISNTSRANLNKLLTDYTEMKKAILHVYWEEFQKDPVGLMSRVAQPASKKIDQNKLKPEMDEKGNLTTAGFACSQCGQPLFVYKLEQVSEKGKAYTNYFGRCNVAEHEKLILLAQLKPEKDSDEAVTYSLGKFGQRALDFYSIHVTKESTHPVKPLAQIAGNRYASGPVGKALSDACMGTIASFLSKYQDIIIEHQKVVKGNQKRLESLRELAGKENLEYPSVTLPPQPHTKEGVDAYNEVIARVRMWVNLNLWQKLKLSRDDAKPLLRLKGFPSFPLVERQANEVDWWDMVCNVKKLINEKKEDGKVFWQNLAGYKRQEALRPYLSSEEDRKKGKKFARYQLGDLLLHLEKKHGEDWGKVYDEAWERIDKKVEGLSKHIKLEEERRSEDAQSKAALTDWLRAKASFVIEGLKEADKDEFCRCELKLQKWYGDLRGKPFAIEAENSILDISGFSKQYNCAFIWQKDGVKKLNLYLIINYFKGGKLRFKKIKPEAFEANRFYTVINKKSGEIVPMEVNFNFDDPNLIILPLAFGKRQGREFIWNDLLSLETGSLKLANGRVIEKTLYNRRTRQDEPALFVALTFERREVLDSSNIKPMNLIGVDRGENIPAVIALTDPEGCALSRFKDSNGNTTHILRIGESYKEKQRTIQAKKEVEQRRAGGYSRKYASKAKNLADDMVRNTARDLLYYAVTQDAMLIFENLSRGFGRQGKRTFMAERQYTRMEDWLTAKLAYEGLPSKTYLSKTLAQYTSKTCSNCGFTITSADYDRVLEKLKKTATGWMTTINGKELKVEGQITYYNRYKRQNVVKDLSVELDRLSEESVNNDISSWTKGRSGEALSLLKKRFSHRPVQEKFVCLNCGFETHADEQAALNIARSWLFLRSQEYKKYQTNKTTGNTDKRAFVETWQSFYRKKLKEVWKPAV

SEQ ID NO: 27194 - protein, 978 aa, synthetic construct
  REGION 1..978: note = engineered CasX variant
QEIKRINKIRRRLVKDSNTKKAGKTGPMKTLLVRVMTPDLRERLENLRKKPENIPQPISNTSRANLNKLLTDYTEMKKAILHVYWEEFQKDPVGLMSRVAQPASKKIDQNKLKPEMDEKGNLTTAGFACSQCGQPLFVYKLEQVSEKGKAYTNYFGRCNVAEHEKLILLAQLKPEKDSDEAVTYSLGKFGQRALDFYSIHVTKESTHPVKPLAQIAGNRYASGPVGKALSDACMGTIASFLSKYQDIIIEHQKVVKGNQKRLESLRELAGKENLEYPSVTLPPQPHTKEGVDAYNEVIARVRMWVNLNLWQKLKLSRDDAKPLLRLKGFPSFPLVERQANEVDWWDMVCNVKKLINEKKEDGKVFWQNLAGYKRQEALRPYLSSEEDRKKGKKFARYQLGDLLLHLEKKHGEDWGKVYDEAWERIDKKVEGLSKHIKLEEERRSEDAQSKAALTDWLRAKASFVIEGLKEADKDEFCRCELKLQKWYGDLRGKPFAIEAENSILDISGFSKQYNCAFIWQKDGVKKLNLYLIINYFKGGKLRFKKIKPEAFEANRFYTVINKKSGEIVPMEVNFNFDDPNLIILPLAFGKRQGREFIWNDLLSLETGSLKLANGRVIEKTLYNRRTRQDEPALFVALTFERREVLDSSNIKPMNLIGVDRGENIPAVIALTDPEGCALSRFKDSNGNPTHILRIGESYKEKQRTIQAKKEVEQRRAGGYSRKYASKAKNLADDMVRNTARDLLYYAVTQDAMLIFENLSRGFGRQGKRTFMAERQYTRMEDWLTAKLAYEGLPSKTYLSKTLAQYTSKTCSNCGFTITSADYDRVLEKLKKTATGWMTTINGKELKVEGQITYYNRYKRQNVVKDLSVELDRLSEESVNNDISSWTKGRSGEALSLLKKRFSHRPVQEKFVCLNCGFETHADEQAALNIARSWLFLRSQEYKKYQTNKTTGNTDKRAFVETWQSFYRKKLKEVWKPAV

SEQ ID NO: 27195 - protein, 978 aa, synthetic construct
  REGION 1..978: note = engineered CasX variant
QEIKRINKIRRRLVKDSNTKKAGKTGPMKTLLVRVMTPDLRERLENLRKKPENIPQPISNTSRANLNKLLTDYTEMKKAILHVYWEEFQKDPVGLMSRVAQPASKKIDQNKLKPEMDEKGNLTTAGFACSQCGQPLFVYKLEQVSEKGKAYTNYFGRCNVAEHEKLILLAQLKPEKDSDEAVTYSLGKFGQRALDFYSIHVTKESTHPVKPLAQIAGNRYASGPVGKALSDACMGTIASFLSKYQDIIIEHQKVVKGNQKRLESLRELAGKENLEYPSVTLPPQPHTKEGVDAYNEVIARVRMWVNLNLWQKLKLSRDDAKPLLRLKGFPSFPLVERQANEVDWWDMVCNVKKLINEKKEDGKVFWQNLAGYKRQEALRPYLSSEEDRKKGKKFARYQLGDLLLHLEKKHGEDWGKVYDEAWERIDKKVEGLSKHIKLEEERRSEDAQSKAALTDWLRAKASFVIEGLKEADKDEFCRCELKLQKWYGDLRGKPFAIEAENSILDISGFSKQYNCAFIWQKDGVKKLNLYLIINYFKGGKLRFKKIKPEAFEANRFYTVINKKSGEIVPMEVNFNFDDPNLIILPLAFGKRQGREFIWNDLLSLETGSLKLANGRVIEKTLYNRRTRQDEPALFVALTFERREVLDSSNIKPMNLIGVDRGENIPAVIALTDPEGCALSRFKDSLGNPTHILRITESYKNKQRTIQAKKEVEQRRAGGYSRKYASKAKNLADDMVRNTARDLLYYAVTQDAMLIFENLSRGFGRQGKRTFMAERQYTRMEDWLTAKLAYEGLPSKTYLSKTLAQYTSKTCSNCGFTITSADYDRVLEKLKKTATGWMTTINGKELKVEGQITYYNRYKRQNVVKDLSVELDRLSEESVNNDISSWTKGRSGEALSLLKKRFSHRPVQEKFVCLNCGFETHADEQAALNIARSWLFLRSQEYKKYQTNKTTGNTDKRAFVETWQSFYRKKLKEVWKPAV

SEQ ID NO: 27196 - protein, 978 aa, synthetic construct
  REGION 1..978: note = engineered CasX variant
QEIKRINKIRRRLVKDSNTKKAGKTGPMKTLLVRVMTPDLRERLENLRKKPENIPQPISNTSRANLNKLLTDYTEMKKAILHVYWEEFQKDPVGLMSRVAQPASKKIDQNKLKPEMDEKGNLTTAGFACSQCGQPLFVYKLEQVSEKGKAYTNYFGRCNVAEHEKLILLAQLKPEKDSDEAVTYSLGKFGQRALDFYSIHVTKESTHPVKPLAQIAGNRYASGPVGKALSDACMGTIASFLSKYQDIIIEHQKVVKGNQKRLESLRELAGKENLEYPSVTLPPQPHTKEGVDAYNEVIARVRMWVNLNLWQKLKLSRDDAKPLLRLKGFPSFPLVERQANEVDWWDMVCNVKKLINEKKEDGKVFWQNLAGYKRQEALRPYLSSEEDRKKGKKFARYQLGDLLLHLEKKHGEDWGKVYDEAWERIDKKVEGLSKHIKLEEERRSEDAQSKAALTDWLRAKASFVIEGLKEADKDEFCRCELKLQKWYGDLRGKPFAIEAENSILDISGFSKQYNCAFIWQKDGVKKLNLYLIINYFKGGKLRFKKIKPEAFEANRFYTVINKKSGEIVPMEVNFNFDDPNLIILPLAFGKRQGREFIWNDLLSLETGSLKLANGRVIEKTLYNRRTRQDEPALFVALTFERREVLDSSNIKPMNLIGVDRGENIPAVIALTDPEGCALSRFKDSLGNPTHILRITESYKEKQRTIQAKKEVEQRRAGGYSRKYASKAKNLADDMVRNTARDLLYYAVTQDAMLIFENLSRGFGRQGKRTFMAERQYTRMEDWLTAKLAYEGLPSKTYLSKTLAQYTSKTCSNCGFTITSADYDRVLEKLKKTATGWMTTINGKELKVEGQITYYNRYKRQNVVKDLSVELDRLSEESVNNDISSWTKGRSGEALSLLKKRFSHRPVQEKFVCLNCGFETHADEQAALNIARSWLFLRSQEYKKYQTNKTTGNTDKRAFVETWQSFYRKKLKEVWKPAV

SEQ ID NO: 27197 - protein, 978 aa, synthetic construct
  REGION 1..978: note = engineered CasX variant
QEIKRINKIRRRLVKDSNTKKAGKTGPMKTLLVRVMTPDLRERLENLRKKPENIPQPISNTSRANLNKLLTDYTEMKKAILHVYWEEFQKDPVGLMSRVAQPASKKIDQNKLKPEMDEKGNLTTAGFACSQCGQPLFVYKLEQVSEKGKAYTNYFGRCNVAEHEKLILLAQLKPEKDSDEAVTYSLGKFGQRALDFYSIHVTKESTHPVKPLAQIAGNRYASGPVGKALSDACMGTIASFLSKYQDIIIEHQKVVKGNQKRLESLRELAGKENLEYPSVTLPPQPHTKEGVDAYNEVIARVRMWVNLNLWQKLKLSRDDAKPLLRLKGFPSFPLVERQANEVDWWDMVCNVKKLINEKKEDGKVFWQNLAGYKRQEALRPYLSSEEDRKKGKKFARYQLGDLLLHLEKKHGEDWGKVYDEAWERIDKKVEGLSKHIKLEEERRSEDAQSKAALTDWLRAKASFVIEGLKEADKDEFCRCELKLQKWYGDLRGKPFAIEAENSILDISGFSKQYNCAFIWQKDGVKKLNLYLIINYFKGGKLRFKKIKPEAFEANRFYTVINKKSGEIVPMEVNFNFDDPNLIILPLAFGKRQGREFIWNDLLSLETGSLKLANGRVIEKTLYNRRTRQDEPALFVALTFERREVLDSSNIKPMNLIGVDRGENIPAVIALTDPEGCALSRFKDSLGNPTHILRIGESYKNKQRTIQAKKEVEQRRAGGYSRKYASKAKNLADDMVRNTARDLLYYAVTQDAMLIFENLSRGFGRQGKRTFMAERQYTRMEDWLTAKLAYEGLPSKTYLSKTLAQYTSKTCSNCGFTITSADYDRVLEKLKKTATGWMTTINGKELKVEGQITYYNRYKRQNVVKDLSVELDRLSEESVNNDISSWTKGRSGEALSLLKKRFSHRPVQEKFVCLNCGFETHADEQAALNIARSWLFLRSQEYKKYQTNKTTGNTDKRAFVETWQSFYRKKLKEVWKPAV

SEQ ID NO: 27198 - protein, 978 aa, synthetic construct
  REGION 1..978: note = engineered CasX variant
QEIKRINKIRRRLVKDSNTKKAGKTGPMKTLLVRVMTPDLRERLENLRKKPENIPQPISNTSRANLNKLLTDYTEMKKAILHVYWEEFQKDPVGLMSRVAQPASKKIDQNKLKPEMDEKGNLTTAGFACSQCGQPLFVYKLEQVSEKGKAYTNYFGRCNVAEHEKLILLAQLKPEKDSDEAVTYSLGKFGQRALDFYSIHVTKESTHPVKPLAQIAGNRYASGPVGKALSDACMGTIASFLSKYQDIIIEHQKVVKGNQKRLESLRELAGKENLEYPSVTLPPQPHTKEGVDAYNEVIARVRMWVNLNLWQKLKLSRDDAKPLLRLKGFPSFPLVERQANEVDWWDMVCNVKKLINEKKEDGKVFWQNLAGYKRQEALRPYLSSEEDRKKGKKFARYQLGDLLLHLEKKHGEDWGKVYDEAWERIDKKVEGLSKHIKLEEERRSEDAQSKAALTDWLRAKASFVIEGLKEADKDEFCRCELKLQKWYGDLRGKPFAIEAENSILDISGFSKQYNCAFIWQKDGVKKLNLYLIINYFKGGKLRFKKIKPEAFEANRFYTVINKKSGEIVPMEVNFNFDDPNLIILPLAFGKRQGREFIWNDLLSLETGSLKLANGRVIEKTLYNRRTRQDEPALFVALTFERREVLDSSNIKPMNLIGVDRGENIPAVIALTDPEGCALSRFKDSLGNPTHILRIGESYKEKQRTIQAKKEVYQRRAGGYSRKYASKAKNLADDMVRNTARDLLYYAVTQDAMLIFENLSRGFGRQGKRTFMAERQYTRMEDWLTAKLAYEGLPSKTYLSKTLAQYTSKTCSNCGFTITSADYDRVLEKLKKTATGWMTTINGKELKVEGQITYYNRYKRQNVVKDLSVELDRLSEESVNNDISSWTKGRSGEALSLLKKRFSHRPVQEKFVCLNCGFETHADEQAALNIARSWLFLRSQEYKKYQTNKTTGNTDKRAFVETWQSFYRKKLKEVWKPAV

SEQ ID NO: 27199 - protein, 978 aa, synthetic construct
  REGION 1..978: note = engineered CasX variant
QEIKRINKIRRRLVKDSNTKKAGKTGPMKTLLVRVMTPDLRERLENLRKKPENIPQPISNTSRANLNKLLTDYTEMKKAILHVYWEEFQKDPVGLMSRVAQPASKKIDQNKLKPEMDEKGNLTTAGFACSQCGQPLFVYKLEQVSEKGKAYTNYFGRCNVAEHEKLILLAQLKPEKDSDEAVTYSLGKFGQRALDFYSIHVTKESTHPVKPLAQIAGNRYASGPVGKALSDACMGTIASFLSKYQDIIIEHQKVVKGNQKRLESLRELAGKENLEYPSVTLPPQPHTKEGVDAYNEVIARVRMWVNLNLWQKLKLSRDDAKPLLRLKGFPSFPLVERQANEVDWWDMVCNVKKLINEKKEDGKVFWQNLAGYKRQEALRPYLSSEEDRKKGKKFARYQLGDLLLHLEKKHGEDWGKVYDEAWERIDKKVEGLSKHIKLEEERRSEDAQSKAALTDWLRAKASFVIEGLKEADKDEFCRCELKLQKWYGDLRGKPFAIEAENSILDISGFSKQYNCAFIWQKDGVKKLNLYLIINYFKGGKLRFKKIKPEAFEANRFYTVINKKSGEIVPMEVNFNFDDPNLIILPLAFGKRQGREFIWNDLLSLETGSLKLANGRVIEKTLYNRRTRQDEPALFVALTFERREVLDSSNIKPMNLIGVDRGENIPAVIALTDPEGCALSRFKDSLGNPTHILRIGESYKEKQRTIQAKKEVEQRRAGGYSRKYASKAKNLADDMVRNTARDLLYYAVTQDAMLIFENLSRGFGRQGKRTFMAERQYTRMEDWLTAKLAYEGLPSKTYLSKTLAQYTSKTCSNCGFTITSADYDRVLEKLKKTATGWMTTINGKELKVEGQITYYNRYKRQNVVKDLSVELDRLSEESVNNDISSWTKGRSGEALSLLKKRFSHRPVQEKFVCLNCGFETHADEQAALNIARSWLFLRSQEYKKYQTNKTTGNTDKRAFVETWQSFYRKKLKEVWKPAV

SEQ ID NO: 27200 - protein, 978 aa, synthetic construct
  REGION 1..978: note = engineered CasX variant
QEIKRINKIRRRLVKDSNTKKAGKTGPMKTLLVRVMTPDLRERLENLRKKPENIPQPISNTSRANLNKLLTDYTEMKKAILHVYWEEFQKDPVGLMSRVAQPASKKIDQNKLKPEMDEKGNLTTAGFACSQCGQPLFVYKLEQVSEKGKAYTNYFGRCNVAEHEKLILLAQLKPEKDSDEAVTYSLGKFGQRALDFYSIHVTKESTHPVKPLAQIAGNRYASGPVGKALSDACMGTIASFLSKYQDIIIEHQKVVKGNQKRLESLRELAGKENLEYPSVTLPPQPHTKEGVDAYNEVIARVRMWVNLNLWQKLKLSRDDAKPLLRLKGFPSFPLVERQANEVDWWDMVCNVKKLINEKKEDGKVFWQNLAGYKRQEALRPYLSSEEDRKKGKKFARYQLGDLLLHLEKKHGEDWGKVYDEAWERIDKKVEGLSKHIKLEEERRSEDAQSKAALTDWLRAKASFVIEGLKEADKDEFCRCELKLQKWYGDLRGKPFAIEAENSILDISGFSKQYNCAFIWQKDGVKKLNLYLIINYFKGGKLRFKKIKPEAFEANRFYTVINKKSGEIVPMEVNFNFDDPNLIILPLAFGKRQGREFIWNDLLSLETGSLKLANGRVIEKTLYNRRTRQDEPALFVALTFERREVLDSSNIKPMNLIGVDRGENIPAVIALTDPEGAPLSRFKDSLGNPTHILRIGESYKEKQTTIQAKKEVEQRRAGGYSRKYASKAKNLADDMVRNTARDLLYYAVTQDAMLIFENLSRGFGRQGKRTFMAERQYTRMEDWLTAKLAYEGLPSKTYLSKTLAQYTSKTCSNCGFTITSADYDRVLEKLKKTATGWMTTINGKELKVEGQITYYNRYKRQNVVKDLSVELDRLSEESVNNDISSWTKGRSGEALSLLKKRFSHRPVQEKFVCLNCGFETHADEQAALNIARSWLFLRSQEYKKYQTNKTTGNTDKRAFVETWQSFYRKKLKEVWKPAV

SEQ ID NO: 27201 - protein, 978 aa, synthetic construct
  REGION 1..978: note = engineered CasX variant
QEIKRINKIRRRLVKDSNTKKAGKTGPMKTLLVRVMTPDLRERLENLRKKPENIPQPISNTSRANLNKLLTDYTEMKKAILHVYWEEFQKDPVGLMSRVAQPASKKIDQNKLKPEMDEKGNLTTAGFACSQCGQPLFVYKLEQVSEKGKAYTNYFGRCNVAEHEKLILLAQLKPEKDSDEAVTYSLGKFGQRALDFYSIHVTKESTHPVKPLAQIAGNRYASGPVGKALSDACMGTIASFLSKYQDIIIEHQKVVKGNQKRLESLRELAGKENLEYPSVTLPPQPHTKEGVDAYNEVIARVRMWVNLNLWQKLKLSRDDAKPLLRLKGFPSFPLVERQANEVDWWDMVCNVKKLINEKKEDGKVFWQNLAGYKRQEALRPYLSSEEDRKKGKKFARYQLGDLLLHLEKKHGEDWGKVYDEAWERIDKKVEGLSKHIKLEEERRSEDAQSKAALTDWLRAKASFVIEGLKEADKDEFCRCELKLQKWYGDLRGKPFAIEAENSILDISGFSKQYNCAFIWQKDGVKKLNLYLIINYFKGGKLRFKKIKPEAFEANRFYTVINKKSGEIVPMEVNFNFDDPNLIILPLAFGKRQGREFIWNDLLSLETGSLKLANGRVIEKTLYNRRTRQDEPALFVALTFERREVLDSSNIKPMNLIGVDRGENIPAVIALTDPEGAPLSRFKDSLGNPTHILRIGESYKEKQRTIQAKKEVEQRRAGGYSRKYASKAKNLADDMVRNTARDLLYYAVTQDAMLIFENLSRGFGRQGKRTFMAERQYTRMEDWLTAKLAYEGLPSKTYLSKTLAQYTSKTCSNCGFTITSADYDRVLEKLKKTATGWMTTINGKELKVEGQITYYNRYKRQNVVKDLSVELDRLSEESVNNDISSWTKGRSGEALSLLKKRFSHRPVQEKFVCLNCGFETHADEQAALNIARSWLFLRSQEYKKYQTNKTTGNTDKRAFVETWQSFYRKKLKEVWKPAV

SEQ ID NO: 27202 - protein, 978 aa, synthetic construct
  REGION 1..978: note = engineered CasX variant
QEIKRINKIRRRLVKDSNTKKAGKTGPMKTLLVRVMTPDLRERLENLRKKPENIPQPISNTSRANLNKLLTDYTEMKKAILHVYWEEFQKDPVGLMSRVAQPASKKIDQNKLKPEMDEKGNLTTAGFACSQCGQPLFVYKLEQVSEKGKAYTNYFGRCNVAEHEKLILLAQLKPEKDSDEAVTYSLGKFGQRALDFYSIHVTKESTHPVKPLAQIAGNRYASGPVGKALSDACMGTIASFLSKYQDIIIEHQKVVKGNQKRLESLRELAGKENLEYPSVTLPPQPHTKEGVDAYNEVIARVRMWVNLNLWQKLKLSRDDAKPLLRLKGFPSFPLVERQANEVDWWDMVCNVKKLINEKKEDGKVFWQNLAGYKRQEALRPYLSSEEDRKKGKKFARYQLGDLLLHLEKKHGEDWGKVYDEAWERIDKKVEGLSKHIKLEEERRSEDAQSKAALTDWLRAKASFVIEGLKEADKDEFCRCELKLQKWYGDLRGKPFAIEAENSILDISGFSKQYNCAFIWQKDGVKKLNLYLIINYFKGGKLRFKKIKPEAFEANRFYTVINKKSGEIVPMEVNFNFDDPNLIILPLAFGKRQGREFIWNDLLSLETGSLKLANGRVIEKTLYNRRTRQDEPALFVALTFERREVLDSSNIKPMNLIGVDRGENIPAVIALTDPEGAPLSRFKDSLGNPTHILRIGESYKEKQRTIQAKKEVEQARAGGYSRKYASKAKNLADDMVRNTARDLLYYAVTQDAMLIFENLSRGFGRQGKRTFMAERQYTRMEDWLTAKLAYEGLPSKTYLSKTLAQYTSKTCSNCGFTITSADYDRVLEKLKKTATGWMTTINGKELKVEGQITYYNRYKRQNVVKDLSVELDRLSEESVNNDISSWTKGRSGEALSLLKKRFSHRPVQEKFVCLNCGFETHADEQAALNIARSWLFLRSQEYKKYQTNKTTGNTDKRAFVETWQSFYRKKLKEVWKPAV

SEQ ID NO: 27203 - protein, 978 aa, synthetic construct
  REGION 1..978: note = engineered CasX variant
QEIKRINKIRRRLVKDSNTKKAGKTGPMKTLLVRVMTPDLRERLENLRKKPENIPQPISNTSRANLNKLLTDYTEMKKAILHVYWEEFQKDPVGLMSRVAQPASKKIDQNKLKPEMDEKGNLTTAGFACSQCGQPLFVYKLEQVSEKGKAYTNYFGRCNVAEHEKLILLAQLKPEKDSDEAVTYSLGKFGQRALDFYSIHVTKESTHPVKPLAQIAGNRYASGPVGKALSDACMGTIASFLSKYQDIIIEHQKVVKGNQKRLESLRELAGKENLEYPSVTLPPQPHTKEGVDAYNEVIARVRMWVNLNLWQKLKLSRDDAKPLLRLKGFPSFPLVERQANEVDWWDMVCNVKKLINEKKEDGKVFWQNLAGYKRQEALRPYLSSEEDRKKGKKFARYQLGDLLLHLEKKHGEDWGKVYDEAWERIDKKVEGLSKHIKLEEERRSEDAQSKAALTDWLRAKASFVIEGLKEADKDEFCRCELKLQKWYGDLRGKPFAIEAENSILDISGFSKQYNCAFIWQKDGVKKLNLYLIINYFKGGKLRFKKIKPEAFEANRFYTVINKKSGEIVPMEVNFNFDDPNLIILPLAFGKRQGREFIWNDLLSLETGSLKLANGRVIEKTLYNRRTRQDEPALFVALTFERREVLDSSNIKPMNLIGVDRGENIPAVIALTDPEGAPLSRFKDSLGNPTHILRIGESYKEKQRTIQAKKEQEQRRAGGYSRKYASKAKNLADDMVRNTARDLLYYAVTQDAMLIFENLSRGFGRQGKRTFMAERQYTRMEDWLTAKLAYEGLPSKTYLSKTLAQYTSKTCSNCGFTITSADYDRVLEKLKKTATGWMTTINGKELKVEGQITYYNRYKRQNVVKDLSVELDRLSEESVNNDISSWTKGRSGEALSLLKKRFSHRPVQEKFVCLNCGFETHADEQAALNIARSWLFLRSQEYKKYQTNKTTGNTDKRAFVETWQSFYRKKLKEVWKPAV

SEQ ID NO: 27204 - protein, 978 aa, synthetic construct
  REGION 1..978: note = engineered CasX variant
QEIKRINKIRRRLVKDSNTKKAGKTGPMKTLLVRVMTPDLRERLENLRKKPENIPQPISNTSRANLNKLLTDYTEMKKAILHVYWEEFQKDPVGLMSRVAQPASKKIDQNKLKPEMDEKGNLTTAGFACSQCGQPLFVYKLEQVSEKGKAYTNYFGRCNVAEHEKLILLAQLKPEKDSDEAVTYSLGKFGQRALDFYSIHVTKESTHPVKPLAQIAGNRYASGPVGKALSDACMGTIASFLSKYQDIIIEHQKVVKGNQKRLESLRELAGKENLEYPSVTLPPQPHTKEGVDAYNEVIARVRMWVNLNLWQKLKLSRDDAKPLLRLKGFPSFPLVERQANEVDWWDMVCNVKKLINEKKEDGKVFWQNLAGYKRQEALRPYLSSEEDRKKGKKFARYQLGDLLLHLEKKHGEDWGKVYDEAWERIDKKVEGLSKHIKLEEERRSEDAQSKAALTDWLRAKASFVIEGLKEADKDEFCRCELKLQKWYGDLRGKPFAIEAENSILDISGFSKQYNCAFIWQKDGVKKLNLYLIINYFKGGKLRFKKIKPEAFEANRFYTVINKKSGEIVPMEVNFNFDDPNLIILPLAFGKRQGREFIWNDLLSLETGSLKLANGRVIEKTLYNRRTRQDEPALFVALTFERREVLDSSNIKPMNLIGVDRGENIPAVIALTDPEGAPLSRFKDSLGNPTHILRIGESYKEKQRNIQAKKEVEQRRAGGYSRKYASKAKNLADDMVRNTARDLLYYAVTQDAMLIFENLSRGFGRQGKRTFMAERQYTRMEDWLTAKLAYEGLPSKTYLSKTLAQYTSKTCSNCGFTITSADYDRVLEKLKKTATGWMTTINGKELKVEGQITYYNRYKRQNVVKDLSVELDRLSEESVNNDISSWTKGRSGEALSLLKKRFSHRPVQEKFVCLNCGFETHADEQAALNIARSWLFLRSQEYKKYQTNKTTGNTDKRAFVETWQSFYRKKLKEVWKPAV

SEQ ID NO: 27205 - protein, 978 aa, synthetic construct
  REGION 1..978: note = engineered CasX variant
QEIKRINKIRRRLVKDSNTKKAGKTGPMKTLLVRVMTPDLRERLENLRKKPENIPQPISNTSRANLNKLLTDYTEMKKAILHVYWEEFQKDPVGLMSRVAQPASKKIDQNKLKPEMDEKGNLTTAGFACSQCGQPLFVYKLEQVSEKGKAYTNYFGRCNVAEHEKLILLAQLKPEKDSDEAVTYSLGKFGQRALDFYSIHVTKESTHPVKPLAQIAGNRYASGPVGKALSDACMGTIASFLSKYQDIIIEHQKVVKGNQKRLESLRELAGKENLEYPSVTLPPQPHTKEGVDAYNEVIARVRMWVNLNLWQKLKLSRDDAKPLLRLKGFPSFPLVERQANEVDWWDMVCNVKKLINEKKEDGKVFWQNLAGYKRQEALRPYLSSEEDRKKGKKFARYQLGDLLLHLEKKHGEDWGKVYDEAWERIDKKVEGLSKHIKLEEERRSEDAQSKAALTDWLRAKASFVIEGLKEADKDEFCRCELKLQKWYGDLRGKPFAIEAENSILDISGFSKQYNCAFIWQKDGVKKLNLYLIINYFKGGKLRFKKIKPEAFEANRFYTVINKKSGEIVPMEVNFNFDDPNLIILPLAFGKRQGREFIWNDLLSLETGSLKLANGRVIEKTLYNRRTRQDEPALFVALTFERREVLDSSNIKPMNLIGVDRGENIPAVIALTDPEGAPLSRFKDSLGNPTHILRIGESYKEKQRNIQAKKEVEQARAGGYSRKYASKAKNLADDMVRNTARDLLYYAVTQDAMLIFENLSRGFGRQGKRTFMAERQYTRMEDWLTAKLAYEGLPSKTYLSKTLAQYTSKTCSNCGFTITSADYDRVLEKLKKTATGWMTTINGKELKVEGQITYYNRYKRQNVVKDLSVELDRLSEESVNNDISSWTKGRSGEALSLLKKRFSHRPVQEKFVCLNCGFETHADEQAALNIARSWLFLRSQEYKKYQTNKTTGNTDKRAFVETWQSFYRKKLKEVWKPAV

SEQ ID NO: 27206 - protein, 978 aa, synthetic construct
  REGION 1..978: note = engineered CasX variant
QEIKRINKIRRRLVKDSNTKKAGKTGPMKTLLVRVMTPDLRERLENLRKKPENIPQPISNTSRANLNKLLTDYTEMKKAILHVYWEEFQKDPVGLMSRVAQPASKKIDQNKLKPEMDEKGNLTTAGFACSQCGQPLFVYKLEQVSEKGKAYTNYFGRCNVAEHEKLILLAQLKPEKDSDEAVTYSLGKFGQRALDFYSIHVTKESTHPVKPLAQIAGNRYASGPVGKALSDACMGTIASFLSKYQDIIIEHQKVVKGNQKRLESLRELAGKENLEYPSVTLPPQPHTKEGVDAYNEVIARVRMWVNLNLWQKLKLSRDDAKPLLRLKGFPSFPLVERQANEVDWWDMVCNVKKLINEKKEDGKVFWQNLAGYKRQEALRPYLSSEEDRKKGKKFARYQLGDLLLHLEKKHGEDWGKVYDEAWERIDKKVEGLSKHIKLEEERRSEDAQSKAALTDWLRAKASFVIEGLKEADKDEFCRCELKLQKWYGDLRGKPFAIEAENSILDISGFSKQYNCAFIWQKDGVKKLNLYLIINYFKGGKLRFKKIKPEAFEANRFYTVINKKSGEIVPMEVNFNFDDPNLIILPLAFGKRQGREFIWNDLLSLETGSLKLANGRVIEKTLYNRRTRQDEPALFVALTFERREVLDSSNIKPMNLIGVDRGENIPAVIALTDPDGCPLSRFKDSLGNPTHILRIGESYKEKQRTIQAKKEVEQRRAGGYSRKYASKAKNLADDMVRNTARDLLYYAVTQDAMLIFENLSRGFGRQGKRTFMAERQYTRMEDWLTAKLAYEGLPSKTYLSKTLAQYTSKTCSNCGFTITSADYDRVLEKLKKTATGWMTTINGKELKVEGQITYYNRYKRQNVVKDLSVELDRLSEESVNNDISSWTKGRSGEALSLLKKRFSHRPVQEKFVCLNCGFETHADEQAALNIARSWLFLRSQEYKKYQTNKTTGNTDKRAFVETWQSFYRKKLKEVWKPAV

SEQ ID NO: 27207 - protein, 978 aa, synthetic construct
  REGION 1..978: note = engineered CasX variant
QEIKRINKIRRRLVKDSNTKKAGKTGPMKTLLVRVMTPDLRERLENLRKKPENIPQPISNTSRANLNKLLTDYTEMKKAILHVYWEEFQKDPVGLMSRVAQPASKKIDQNKLKPEMDEKGNLTTAGFACSQCGQPLFVYKLEQVSEKGKAYTNYFGRCNVAEHEKLILLAQLKPEKDSDEAVTYSLGKFGQRALDFYSIHVTKESTHPVKPLAQIAGNRYASGPVGKALSDACMGTIASFLSKYQDIIIEHQKVVKGNQKRLESLRELAGKENLEYPSVTLPPQPHTKEGVDAYNEVIARVRMWVNLNLWQKLKLSRDDAKPLLRLKGFPSFPLVERQANEVDWWDMVCNVKKLINEKKEDGKVFWQNLAGYKRQEALRPYLSSEEDRKKGKKFARYQLGDLLLHLEKKHGEDWGKVYDEAWERIDKKVEGLSKHIKLEEERRSEDAQSKAALTDWLRAKASFVIEGLKEADKDEFCRCELKLQKWYGDLRGKPFAIEAENSILDISGFSKQYNCAFIWQKDGVKKLNLYLIINYFKGGKLRFKKIKPEAFEANRFYTVINKKSGEIVPMEVNFNFDDPNLIILPLAFGKRQGREFIWNDLLSLETGSLKLANGRVIEKTLYNRRTRQDEPALFVALTFERREVLDSSNIKPMNLIGVDRGENIPAVIALTDPDGCPLSRFKDSLGNPTHILRIGESYKEKQRTFQAKKEVEQRRAGGYSRKYASKAKNLADDMVRNTARDLLYYAVTQDAMLIFENLSRGFGRQGKRTFMAERQYTRMEDWLTAKLAYEGLPSKTYLSKTLAQYTSKTCSNCGFTITSADYDRVLEKLKKTATGWMTTINGKELKVEGQITYYNRYKRQNVVKDLSVELDRLSEESVNNDISSWTKGRSGEALSLLKKRFSHRPVQEKFVCLNCGFETHADEQAALNIARSWLFLRSQEYKKYQTNKTTGNTDKRAFVETWQSFYRKKLKEVWKPAV

SEQ ID NO: 27208 - protein, 978 aa, synthetic construct
  REGION 1..978: note = engineered CasX variant
QEIKRINKIRRRLVKDSNTKKAGKTGPMKTLLVRVMTPDLRERLENLRKKPENIPQPISNTSRANLNKLLTDYTEMKKAILHVYWEEFQKDPVGLMSRVAQPASKKIDQNKLKPEMDEKGNLTTAGFACSQCGQPLFVYKLEQVSEKGKAYTNYFGRCNVAEHEKLILLAQLKPEKDSDEAVTYSLGKFGQRALDFYSIHVTKESTHPVKPLAQIAGNRYASGPVGKALSDACMGTIASFLSKYQDIIIEHQKVVKGNQKRLESLRELAGKENLEYPSVTLPPQPHTKEGVDAYNEVIARVRMWVNLNLWQKLKLSRDDAKPLLRLKGFPSFPLVERQANEVDWWDMVCNVKKLINEKKEDGKVFWQNLAGYKRQEALRPYLSSEEDRKKGKKFARYQLGDLLLHLEKKHGEDWGKVYDEAWERIDKKVEGLSKHIKLEEERRSEDAQSKAALTDWLRAKASFVIEGLKEADKDEFCRCELKLQKWYGDLRGKPFAIEAENSILDISGFSKQYNCAFIWQKDGVKKLNLYLIINYFKGGKLRFKKIKPEAFEANRFYTVINKKSGEIVPMEVNFNFDDPNLIILPLAFGKRQGREFIWNDLLSLETGSLKLANGRVIEKTLYNRRTRQDEPALFVALTFERREVLDSSNIKPMNLIGVDRGENIPAVIALTDPDGCPLSRFKDSGGNPTHILRIGESYKEKQRTIQAKKEVEQRRAGGYSRKYASKAKNLADDMVRNTARDLLYYAVTQDAMLIFENLSRGFGRQGKRTFMAERQYTRMEDWLTAKLAYEGLPSKTYLSKTLAQYTSKTCSNCGFTITSADYDRVLEKLKKTATGWMTTINGKELKVEGQITYYNRYKRQNVVKDLSVELDRLSEESVNNDISSWTKGRSGEALSLLKKRFSHRPVQEKFVCLNCGFETHADEQAALNIARSWLFLRSQEYKKYQTNKTTGNTDKRAFVETWQSFYRKKLKEVWKPAV

SEQ ID NO: 27209 - protein, 978 aa, synthetic construct
  REGION 1..978: note = engineered CasX variant
QEIKRINKIRRRLVKDSNTKKAGKTGPMKTLLVRVMTPDLRERLENLRKKPENIPQPISNTSRANLNKLLTDYTEMKKAILHVYWEEFQKDPVGLMSRVAQPASKKIDQNKLKPEMDEKGNLTTAGFACSQCGQPLFVYKLEQVSEKGKAYTNYFGRCNVAEHEKLILLAQLKPEKDSDEAVTYSLGKFGQRALDFYSIHVTKESTHPVKPLAQIAGNRYASGPVGKALSDACMGTIASFLSKYQDIIIEHQKVVKGNQKRLESLRELAGKENLEYPSVTLPPQPHTKEGVDAYNEVIARVRMWVNLNLWQKLKLSRDDAKPLLRLKGFPSFPLVERQANEVDWWDMVCNVKKLINEKKEDGKVFWQNLAGYKRQEALRPYLSSEEDRKKGKKFARYQLGDLLLHLEKKHGEDWGKVYDEAWERIDKKVEGLSKHIKLEEERRSEDAQSKAALTDWLRAKASFVIEGLKEADKDEFCRCELKLQKWYGDLRGKPFAIEAENSILDISGFSKQYNCAFIWQKDGVKKLNLYLIINYFKGGKLRFKKIKPEAFEANRFYTVINKKSGEIVPMEVNFNFDDPNLIILPLAFGKRQGREFIWNDLLSLETGSLKLANGRVIEKTLYNRRTRQDEPALFVALTFERREVLDSSNIKPMNLIGVDRGENIPAVIALTDPDGCPLSRFKDSEGNPTHILRIGESYKEKQRTIQAKKEVEQRRAGGYSRKYASKAKNLADDMVRNTARDLLYYAVTQDAMLIFENLSRGFGRQGKRTFMAERQYTRMEDWLTAKLAYEGLPSKTYLSKTLAQYTSKTCSNCGFTITSADYDRVLEKLKKTATGWMTTINGKELKVEGQITYYNRYKRQNVVKDLSVELDRLSEESVNNDISSWTKGRSGEALSLLKKRFSHRPVQEKFVCLNCGFETHADEQAALNIARSWLFLRSQEYKKYQTNKTTGNTDKRAFVETWQSFYRKKLKEVWKPAV

SEQ ID NO: 27210 - protein, 978 aa, synthetic construct
  REGION 1..978: note = engineered CasX variant
QEIKRINKIRRRLVKDSNTKKAGKTGPMKTLLVRVMTPDLRERLENLRKKPENIPQPISNTSRANLNKLLTDYTEMKKAILHVYWEEFQKDPVGLMSRVAQPASKKIDQNKLKPEMDEKGNLTTAGFACSQCGQPLFVYKLEQVSEKGKAYTNYFGRCNVAEHEKLILLAQLKPEKDSDEAVTYSLGKFGQRALDFYSIHVTKESTHPVKPLAQIAGNRYASGPVGKALSDACMGTIASFLSKYQDIIIEHQKVVKGNQKRLESLRELAGKENLEYPSVTLPPQPHTKEGVDAYNEVIARVRMWVNLNLWQKLKLSRDDAKPLLRLKGFPSFPLVERQANEVDWWDMVCNVKKLINEKKEDGKVFWQNLAGYKRQEALRPYLSSEEDRKKGKKFARYQLGDLLLHLEKKHGEDWGKVYDEAWERIDKKVEGLSKHIKLEEERRSEDAQSKAALTDWLRAKASFVIEGLKEADKDEFCRCELKLQKWYGDLRGKPFAIEAENSILDISGFSKQYNCAFIWQKDGVKKLNLYLIINYFKGGKLRFKKIKPEAFEANRFYTVINKKSGEIVPMEVNFNFDDPNLIILPLAFGKRQGREFIWNDLLSLETGSLKLANGRVIEKTLYNRRTRQDEPALFVALTFERREVLDSSNIKPMNLIGVDRGENIPAVIALTDPCGCPLSRFKDSNGNPTHILRIGESYKEKQRTIQAKKEVEQRRAGGYSRKYASKAKNLADDMVRNTARDLLYYAVTQDAMLIFENLSRGFGRQGKRTFMAERQYTRMEDWLTAKLAYEGLPSKTYLSKTLAQYTSKTCSNCGFTITSADYDRVLEKLKKTATGWMTTINGKELKVEGQITYYNRYKRQNVVKDLSVELDRLSEESVNNDISSWTKGRSGEALSLLKKRFSHRPVQEKFVCLNCGFETHADEQAALNIARSWLFLRSQEYKKYQTNKTTGNTDKRAFVETWQSFYRKKLKEVWKPAV

SEQ ID NO: 27211 - protein, 978 aa, synthetic construct
  REGION 1..978: note = engineered CasX variant
QEIKRINKIRRRLVKDSNTKKAGKTGPMKTLLVRVMTPDLRERLENLRKKPENIPQPISNTSRANLNKLLTDYTEMKKAILHVYWEEFQKDPVGLMSRVAQPASKKIDQNKLKPEMDEKGNLTTAGFACSQCGQPLFVYKLEQVSEKGKAYTNYFGRCNVAEHEKLILLAQLKPEKDSDEAVTYSLGKFGQRALDFYSIHVTKESTHPVKPLAQIAGNRYASGPVGKALSDACMGTIASFLSKYQDIIIEHQKVVKGNQKRLESLRELAGKENLEYPSVTLPPQPHTKEGVDAYNEVIARVRMWVNLNLWQKLKLSRDDAKPLLRLKGFPSFPLVERQANEVDWWDMVCNVKKLINEKKEDGKVFWQNLAGYKRQEALRPYLSSEEDRKKGKKFARYQLGDLLLHLEKKHGEDWGKVYDEAWERIDKKVEGLSKHIKLEEERRSEDAQSKAALTDWLRAKASFVIEGLKEADKDEFCRCELKLQKWYGDLRGKPFAIEAENSILDISGFSKQYNCAFIWQKDGVKKLNLYLIINYFKGGKLRFKKIKPEAFEANRFYTVINKKSGEIVPMEVNFNFDDPNLIILPLAFGKRQGREFIWNDLLSLETGSLKLANGRVIEKTLYNRRTRQDEPALFVALTFERREVLDSSNIKPMNLIGVDRGENIPAVIALTDPCGCPLSRFKDSLGNSTHILRIGESYKEKQRTIQAKKEVEQRRAGGYSRKYASKAKNLADDMVRNTARDLLYYAVTQDAMLIFENLSRGFGRQGKRTFMAERQYTRMEDWLTAKLAYEGLPSKTYLSKTLAQYTSKTCSNCGFTITSADYDRVLEKLKKTATGWMTTINGKELKVEGQITYYNRYKRQNVVKDLSVELDRLSEESVNNDISSWTKGRSGEALSLLKKRFSHRPVQEKFVCLNCGFETHADEQAALNIARSWLFLRSQEYKKYQTNKTTGNTDKRAFVETWQSFYRKKLKEVWKPAV

SEQ ID NO: 27212 - protein, 978 aa, synthetic construct
  REGION 1..978: note = engineered CasX variant
QEIKRINKIRRRLVKDSNTKKAGKTGPMKTLLVRVMTPDLRERLENLRKKPENIPQPISNTSRANLNKLLTDYTEMKKAILHVYWEEFQKDPVGLMSRVAQPASKKIDQNKLKPEMDEKGNLTTAGFACSQCGQPLFVYKLEQVSEKGKAYTNYFGRCNVAEHEKLILLAQLKPEKDSDEAVTYSLGKFGQRALDFYSIHVTKESTHPVKPLAQIAGNRYASGPVGKALSDACMGTIASFLSKYQDIIIEHQKVVKGNQKRLESLRELAGKENLEYPSVTLPPQPHTKEGVDAYNEVIARVRMWVNLNLWQKLKLSRDDAKPLLRLKGFPSFPLVERQANEVDWWDMVCNVKKLINEKKEDGKVFWQNLAGYKRQEALRPYLSSEEDRKKGKKFARYQLGDLLLHLEKKHGEDWGKVYDEAWERIDKKVEGLSKHIKLEEERRSEDAQSKAALTDWLRAKASFVIEGLKEADKDEFCRCELKLQKWYGDLRGKPFAIEAENSILDISGFSKQYNCAFIWQKDGVKKLNLYLIINYFKGGKLRFKKIKPEAFEANRFYTVINKKSGEIVPMEVNFNFDDPNLIILPLAFGKRQGREFIWNDLLSLETGSLKLANGRVIEKTLYNRRTRQDEPALFVALTFERREVLDSSNIKPMNLIGVDRGENIPAVIALTDPCGCPLSRFKDSLGNSTHILRIGDSYKEKQRTIQAKKEVEQRRAGGYSRKYASKAKNLADDMVRNTARDLLYYAVTQDAMLIFENLSRGFGRQGKRTFMAERQYTRMEDWLTAKLAYEGLPSKTYLSKTLAQYTSKTCSNCGFTITSADYDRVLEKLKKTATGWMTTINGKELKVEGQITYYNRYKRQNVVKDLSVELDRLSEESVNNDISSWTKGRSGEALSLLKKRFSHRPVQEKFVCLNCGFETHADEQAALNIARSWLFLRSQEYKKYQTNKTTGNTDKRAFVETWQSFYRKKLKEVWKPAV

SEQ ID NO: 27213 - protein, 978 aa, synthetic construct
  REGION 1..978: note = engineered CasX variant
QEIKRINKIRRRLVKDSNTKKAGKTGPMKTLLVRVMTPDLRERLENLRKKPENIPQPISNTSRANLNKLLTDYTEMKKAILHVYWEEFQKDPVGLMSRVAQPASKKIDQNKLKPEMDEKGNLTTAGFACSQCGQPLFVYKLEQVSEKGKAYTNYFGRCNVAEHEKLILLAQLKPEKDSDEAVTYSLGKFGQRALDFYSIHVTKESTHPVKPLAQIAGNRYASGPVGKALSDACMGTIASFLSKYQDIIIEHQKVVKGNQKRLESLRELAGKENLEYPSVTLPPQPHTKEGVDAYNEVIARVRMWVNLNLWQKLKLSRDDAKPLLRLKGFPSFPLVERQANEVDWWDMVCNVKKLINEKKEDGKVFWQNLAGYKRQEALRPYLSSEEDRKKGKKFARYQLGDLLLHLEKKHGEDWGKVYDEAWERIDKKVEGLSKHIKLEEERRSEDAQSKAALTDWLRAKASFVIEGLKEADKDEFCRCELKLQKWYGDLRGKPFAIEAENSILDISGFSKQYNCAFIWQKDGVKKLNLYLIINYFKGGKLRFKKIKPEAFEANRFYTVINKKSGEIVPMEVNFNFDDPNLIILPLAFGKRQGREFIWNDLLSLETGSLKLANGRVIEKTLYNRRTRQDEPALFVALTFERREVLDSSNIKPMNLIGVDRGENIPAVIALTDPCGCPLSRFKDSLGNPTHILRIGESYKEKQRTIQAKKEVNQRRAGGYSRKYASKAKNLADDMVRNTARDLLYYAVTQDAMLIFENLSRGFGRQGKRTFMAERQYTRMEDWLTAKLAYEGLPSKTYLSKTLAQYTSKTCSNCGFTITSADYDRVLEKLKKTATGWMTTINGKELKVEGQITYYNRYKRQNVVKDLSVELDRLSEESVNNDISSWTKGRSGEALSLLKKRFSHRPVQEKFVCLNCGFETHADEQAALNIARSWLFLRSQEYKKYQTNKTTGNTDKRAFVETWQSFYRKKLKEVWKPAV

SEQ ID NO: 27214 - protein, 978 aa, synthetic construct
  REGION 1..978: note = engineered CasX variant
QEIKRINKIRRRLVKDSNTKKAGKTGPMKTLLVRVMTPDLRERLENLRKKPENIPQPISNTSRANLNKLLTDYTEMKKAILHVYWEEFQKDPVGLMSRVAQPASKKIDQNKLKPEMDEKGNLTTAGFACSQCGQPLFVYKLEQVSEKGKAYTNYFGRCNVAEHEKLILLAQLKPEKDSDEAVTYSLGKFGQRALDFYSIHVTKESTHPVKPLAQIAGNRYASGPVGKALSDACMGTIASFLSKYQDIIIEHQKVVKGNQKRLESLRELAGKENLEYPSVTLPPQPHTKEGVDAYNEVIARVRMWVNLNLWQKLKLSRDDAKPLLRLKGFPSFPLVERQANEVDWWDMVCNVKKLINEKKEDGKVFWQNLAGYKRQEALRPYLSSEEDRKKGKKFARYQLGDLLLHLEKKHGEDWGKVYDEAWERIDKKVEGLSKHIKLEEERRSEDAQSKAALTDWLRAKASFVIEGLKEADKDEFCRCELKLQKWYGDLRGKPFAIEAENSILDISGFSKQYNCAFIWQKDGVKKLNLYLIINYFKGGKLRFKKIKPEAFEANRFYTVINKKSGEIVPMEVNFNFDDPNLIILPLAFGKRQGREFIWNDLLSLETGSLKLANGRVIEKTLYNRRTRQDEPALFVALTFERREVLDSSNIKPMNLIGVDRGENIPAVIALTDPCGCPLSRFKDSLGNPTHILRIGESYKEKQRTIQAKKEVEQRRAGGYSRKYASKAKNLADDMVRNTARDLLYYAVTQDAMLIFENLSRGFGRQGKRTFMAERQYTRMEDWLTAKLAYEGLPSKTYLSKTLAQYTSKTCSNCGFTITSADYDRVLEKLKKTATGWMTTINGKELKVEGQITYYNRYKRQNVVKDLSVELDRLSEESVNNDISSWTKGRSGEALSLLKKRFSHRPVQEKFVCLNCGFETHADEQAALNIARSWLFLRSQEYKKYQTNKTTGNTDKRAFVETWQSFYRKKLKEVWKPAV

SEQ ID NO: 27215 - protein, 978 aa, synthetic construct
  REGION 1..978: note = engineered CasX variant
QEIKRINKIRRRLVKDSNTKKAGKTGPMKTLLVRVMTPDLRERLENLRKKPENIPQPISNTSRANLNKLLTDYTEMKKAILHVYWEEFQKDPVGLMSRVAQPASKKIDQNKLKPEMDEKGNLTTAGFACSQCGQPLFVYKLEQVSEKGKAYTNYFGRCNVAEHEKLILLAQLKPEKDSDEAVTYSLGKFGQRALDFYSIHVTKESTHPVKPLAQIAGNRYASGPVGKALSDACMGTIASFLSKYQDIIIEHQKVVKGNQKRLESLRELAGKENLEYPSVTLPPQPHTKEGVDAYNEVIARVRMWVNLNLWQKLKLSRDDAKPLLRLKGFPSFPLVERQANEVDWWDMVCNVKKLINEKKEDGKVFWQNLAGYKRQEALRPYLSSEEDRKKGKKFARYQLGDLLLHLEKKHGEDWGKVYDEAWERIDKKVEGLSKHIKLEEERRSEDAQSKAALTDWLRAKASFVIEGLKEADKDEFCRCELKLQKWYGDLRGKPFAIEAENSILDISGFSKQYNCAFIWQKDGVKKLNLYLIINYFKGGKLRFKKIKPEAFEANRFYTVINKKSGEIVPMEVNFNFDDPNLIILPLAFGKRQGREFIWNDLLSLETGSLKLANGRVIEKTLYNRRTRQDEPALFVALTFERREVLDSSNIKPMNLIGVDRGENIPAVIALTDPCGCPLSRFKDSLGNPTHILRIGDSYKEKQRTIQAKKEVEQRRAGGYSRKYASKAKNLADDMVRNTARDLLYYAVTQDAMLIFENLSRGFGRQGKRTFMAERQYTRMEDWLTAKLAYEGLPSKTYLSKTLAQYTSKTCSNCGFTITSADYDRVLEKLKKTATGWMTTINGKELKVEGQITYYNRYKRQNVVKDLSVELDRLSEESVNNDISSWTKGRSGEALSLLKKRFSHRPVQEKFVCLNCGFETHADEQAALNIARSWLFLRSQEYKKYQTNKTTGNTDKRAFVETWQSFYRKKLKEVWKPAV

SEQ ID NO: 27216 - protein, 978 aa, synthetic construct
  REGION 1..978: note = engineered CasX variant
QEIKRINKIRRRLVKDSNTKKAGKTGPMKTLLVRVMTPDLRERLENLRKKPENIPQPISNTSRANLNKLLTDYTEMKKAILHVYWEEFQKDPVGLMSRVAQPASKKIDQNKLKPEMDEKGNLTTAGFACSQCGQPLFVYKLEQVSEKGKAYTNYFGRCNVAEHEKLILLAQLKPEKDSDEAVTYSLGKFGQRALDFYSIHVTKESTHPVKPLAQIAGNRYASGPVGKALSDACMGTIASFLSKYQDIIIEHQKVVKGNQKRLESLRELAGKENLEYPSVTLPPQPHTKEGVDAYNEVIARVRMWVNLNLWQKLKLSRDDAKPLLRLKGFPSFPLVERQANEVDWWDMVCNVKKLINEKKEDGKVFWQNLAGYKRQEALRPYLSSEEDRKKGKKFARYQLGDLLLHLEKKHGEDWGKVYDEAWERIDKKVEGLSKHIKLEEERRSEDAQSKAALTDWLRAKASFVIEGLKEADKDEFCRCELKLQKWYGDLRGKPFAIEAENSILDISGFSKQYNCAFIWQKDGVKKLNLYLIINYFKGGKLRFKKIKPEAFEANRFYTVINKKSGEIVPMEVNFNFDDPNLIILPLAFGKRQGREFIWNDLLSLETGSLKLANGRVIEKTLYNRRTRQDEPALFVALTFERREVLDSSNIKPMNLIGVDRGENIPAVIALTDPAGCPLSRWKDSLGNPTHILRIGESYKERQRTIQAKKEVEQRRAGGYSRKYASKAKNLADDMVRNTARDLLYYAVTQDAMLIFENLSRGFGRQGKRTFMAERQYTRMEDWLTAKLAYEGLPSKTYLSKTLAQYTSKTCSNCGFTITSADYDRVLEKLKKTATGWMTTINGKELKVEGQITYYNRYKRQNVVKDLSVELDRLSEESVNNDISSWTKGRSGEALSLLKKRFSHRPVQEKFVCLNCGFETHADEQAALNIARSWLFLRSQEYKKYQTNKTTGNTDKRAFVETWQSFYRKKLKEVWKPAV

SEQ ID NO: 27217 - protein, 978 aa, synthetic construct
  REGION 1..978: note = engineered CasX variant
QEIKRINKIRRRLVKDSNTKKAGKTGPMKTLLVRVMTPDLRERLENLRKKPENIPQPISNTSRANLNKLLTDYTEMKKAILHVYWEEFQKDPVGLMSRVAQPASKKIDQNKLKPEMDEKGNLTTAGFACSQCGQPLFVYKLEQVSEKGKAYTNYFGRCNVAEHEKLILLAQLKPEKDSDEAVTYSLGKFGQRALDFYSIHVTKESTHPVKPLAQIAGNRYASGPVGKALSDACMGTIASFLSKYQDIIIEHQKVVKGNQKRLESLRELAGKENLEYPSVTLPPQPHTKEGVDAYNEVIARVRMWVNLNLWQKLKLSRDDAKPLLRLKGFPSFPLVERQANEVDWWDMVCNVKKLINEKKEDGKVFWQNLAGYKRQEALRPYLSSEEDRKKGKKFARYQLGDLLLHLEKKHGEDWGKVYDEAWERIDKKVEGLSKHIKLEEERRSEDAQSKAALTDWLRAKASFVIEGLKEADKDEFCRCELKLQKWYGDLRGKPFAIEAENSILDISGFSKQYNCAFIWQKDGVKKLNLYLIINYFKGGKLRFKKIKPEAFEANRFYTVINKKSGEIVPMEVNFNFDDPNLIILPLAFGKRQGREFIWNDLLSLETGSLKLANGRVIEKTLYNRRTRQDEPALFVALTFERREVLDSSNIKPMNLIGVDRGENIPAVIALTDPAGCPLSRFKDSNGNPTHILRIGESYKEKQRTIQAKKEVEQRRAGGYSRKYASKAKNLADDMVRNTARDLLYYAVTQDAMLIFENLSRGFGRQGKRTFMAERQYTRMEDWLTAKLAYEGLPSKTYLSKTLAQYTSKTCSNCGFTITSADYDRVLEKLKKTATGWMTTINGKELKVEGQITYYNRYKRQNVVKDLSVELDRLSEESVNNDISSWTKGRSGEALSLLKKRFSHRPVQEKFVCLNCGFETHADEQAALNIARSWLFLRSQEYKKYQTNKTTGNTDKRAFVETWQSFYRKKLKEVWKPAV

SEQ ID NO: 27218 - protein, 978 aa, synthetic construct
  REGION 1..978: note = engineered CasX variant
QEIKRINKIRRRLVKDSNTKKAGKTGPMKTLLVRVMTPDLRERLENLRKKPENIPQPISNTSRANLNKLLTDYTEMKKAILHVYWEEFQKDPVGLMSRVAQPASKKIDQNKLKPEMDEKGNLTTAGFACSQCGQPLFVYKLEQVSEKGKAYTNYFGRCNVAEHEKLILLAQLKPEKDSDEAVTYSLGKFGQRALDFYSIHVTKESTHPVKPLAQIAGNRYASGPVGKALSDACMGTIASFLSKYQDIIIEHQKVVKGNQKRLESLRELAGKENLEYPSVTLPPQPHTKEGVDAYNEVIARVRMWVNLNLWQKLKLSRDDAKPLLRLKGFPSFPLVERQANEVDWWDMVCNVKKLINEKKEDGKVFWQNLAGYKRQEALRPYLSSEEDRKKGKKFARYQLGDLLLHLEKKHGEDWGKVYDEAWERIDKKVEGLSKHIKLEEERRSEDAQSKAALTDWLRAKASFVIEGLKEADKDEFCRCELKLQKWYGDLRGKPFAIEAENSILDISGFSKQYNCAFIWQKDGVKKLNLYLIINYFKGGKLRFKKIKPEAFEANRFYTVINKKSGEIVPMEVNFNFDDPNLIILPLAFGKRQGREFIWNDLLSLETGSLKLANGRVIEKTLYNRRTRQDEPALFVALTFERREVLDSSNIKPMNLIGVDRGENIPAVIALTDPAGCPLSRFKDSLGNPTHILRIGESYKERQRTIQAKKEVEQRRAGGYSRKYASKAKNLADDMVRNTARDLLYYAVTQDAMLIFENLSRGFGRQGKRTFMAERQYTRMEDWLTAKLAYEGLPSKTYLSKTLAQYTSKTCSNCGFTITSADYDRVLEKLKKTATGWMTTINGKELKVEGQITYYNRYKRQNVVKDLSVELDRLSEESVNNDISSWTKGRSGEALSLLKKRFSHRPVQEKFVCLNCGFETHADEQAALNIARSWLFLRSQEYKKYQTNKTTGNTDKRAFVETWQSFYRKKLKEVWKPAV

SEQ ID NO: 27219 - protein, 978 aa, synthetic construct
  REGION 1..978: note = engineered CasX variant
QEIKRINKIRRRLVKDSNTKKAGKTGPMKTLLVRVMTPDLRERLENLRKKPENIPQPISNTSRANLNKLLTDYTEMKKAILHVYWEEFQKDPVGLMSRVAQPASKKIDQNKLKPEMDEKGNLTTAGFACSQCGQPLFVYKLEQVSEKGKAYTNYFGRCNVAEHEKLILLAQLKPEKDSDEAVTYSLGKFGQRALDFYSIHVTKESTHPVKPLAQIAGNRYASGPVGKALSDACMGTIASFLSKYQDIIIEHQKVVKGNQKRLESLRELAGKENLEYPSVTLPPQPHTKEGVDAYNEVIARVRMWVNLNLWQKLKLSRDDAKPLLRLKGFPSFPLVERQANEVDWWDMVCNVKKLINEKKEDGKVFWQNLAGYKRQEALRPYLSSEEDRKKGKKFARYQLGDLLLHLEKKHGEDWGKVYDEAWERIDKKVEGLSKHIKLEEERRSEDAQSKAALTDWLRAKASFVIEGLKEADKDEFCRCELKLQKWYGDLRGKPFAIEAENSILDISGFSKQYNCAFIWQKDGVKKLNLYLIINYFKGGKLRFKKIKPEAFEANRFYTVINKKSGEIVPMEVNFNFDDPNLIILPLAFGKRQGREFIWNDLLSLETGSLKLANGRVIEKTLYNRRTRQDEPALFVALTFERREVLDSSNIKPMNLIGVDRGENIPAVIALTDPAGCPLSRFKDSLGNPTHILRIGESYKEKQRTIQAKMEVEQRRAGGYSRKYASKAKNLADDMVRNTARDLLYYAVTQDAMLIFENLSRGFGRQGKRTFMAERQYTRMEDWLTAKLAYEGLPSKTYLSKTLAQYTSKTCSNCGFTITSADYDRVLEKLKKTATGWMTTINGKELKVEGQITYYNRYKRQNVVKDLSVELDRLSEESVNNDISSWTKGRSGEALSLLKKRFSHRPVQEKFVCLNCGFETHADEQAALNIARSWLFLRSQEYKKYQTNKTTGNTDKRAFVETWQSFYRKKLKEVWKPAV

SEQ ID NO: 27220 - protein, 978 aa, synthetic construct
  REGION 1..978: note = engineered CasX variant
QEIKRINKIRRRLVKDSNTKKAGKTGPMKTLLVRVMTPDLRERLENLRKKPENIPQPISNTSRANLNKLLTDYTEMKKAILHVYWEEFQKDPVGLMSRVAQPASKKIDQNKLKPEMDEKGNLTTAGFACSQCGQPLFVYKLEQVSEKGKAYTNYFGRCNVAEHEKLILLAQLKPEKDSDEAVTYSLGKFGQRALDFYSIHVTKESTHPVKPLAQIAGNRYASGPVGKALSDACMGTIASFLSKYQDIIIEHQKVVKGNQKRLESLRELAGKENLEYPSVTLPPQPHTKEGVDAYNEVIARVRMWVNLNLWQKLKLSRDDAKPLLRLKGFPSFPLVERQANEVDWWDMVCNVKKLINEKKEDGKVFWQNLAGYKRQEALRPYLSSEEDRKKGKKFARYQLGDLLLHLEKKHGEDWGKVYDEAWERIDKKVEGLSKHIKLEEERRSEDAQSKAALTDWLRAKASFVIEGLKEADKDEFCRCELKLQKWYGDLRGKPFAIEAENSILDISGFSKQYNCAFIWQKDGVKKLNLYLIINYFKGGKLRFKKIKPEAFEANRFYTVINKKSGEIVPMEVNFNFDDPNLIILPLAFGKRQGREFIWNDLLSLETGSLKLANGRVIEKTLYNRRTRQDEPALFVALTFERREVLDSSNIKPMNLIGVDRGENIPAVIALTDPAGCPLSRFKDSLGNPTHILRIGESYKEKQRTIQAKKTVEQRRAGGYSRKYASKAKNLADDMVRNTARDLLYYAVTQDAMLIFENLSRGFGRQGKRTFMAERQYTRMEDWLTAKLAYEGLPSKTYLSKTLAQYTSKTCSNCGFTITSADYDRVLEKLKKTATGWMTTINGKELKVEGQITYYNRYKRQNVVKDLSVELDRLSEESVNNDISSWTKGRSGEALSLLKKRFSHRPVQEKFVCLNCGFETHADEQAALNIARSWLFLRSQEYKKYQTNKTTGNTDKRAFVETWQSFYRKKLKEVWKPAV

SEQ ID NO: 27221 - protein, 978 aa, synthetic construct
  REGION 1..978: note = engineered CasX variant
QEIKRINKIRRRLVKDSNTKKAGKTGPMKTLLVRVMTPDLRERLENLRKKPENIPQPISNTSRANLNKLLTDYTEMKKAILHVYWEEFQKDPVGLMSRVAQPASKKIDQNKLKPEMDEKGNLTTAGFACSQCGQPLFVYKLEQVSEKGKAYTNYFGRCNVAEHEKLILLAQLKPEKDSDEAVTYSLGKFGQRALDFYSIHVTKESTHPVKPLAQIAGNRYASGPVGKALSDACMGTIASFLSKYQDIIIEHQKVVKGNQKRLESLRELAGKENLEYPSVTLPPQPHTKEGVDAYNEVIARVRMWVNLNLWQKLKLSRDDAKPLLRLKGFPSFPLVERQANEVDWWDMVCNVKKLINEKKEDGKVFWQNLAGYKRQEALRPYLSSEEDRKKGKKFARYQLGDLLLHLEKKHGEDWGKVYDEAWERIDKKVEGLSKHIKLEEERRSEDAQSKAALTDWLRAKASFVIEGLKEADKDEFCRCELKLQKWYGDLRGKPFAIEAENSILDISGFSKQYNCAFIWQKDGVKKLNLYLIINYFKGGKLRFKKIKPEAFEANRFYTVINKKSGEIVPMEVNFNFDDPNLIILPLAFGKRQGREFIWNDLLSLETGSLKLANGRVIEKTLYNRRTRQDEPALFVALTFERREVLDSSNIKPMNLIGVDRGENIPAVIALTDPAGCPLSRFKDSLGNPTHILRIGESYKEKQRTIQAKKEVEQRRAGGYSRKYASKAKNLADDMVRNTARDLLYYAVTQDAMLIFENLSRGFGRQGKRTFMAERQYTRMEDWLTAKLAYEGLPSKTYLSKTLAQYTSKTCSNCGFTITSADYDRVLEKLKKTATGWMTTINGKELKVEGQITYYNRYKRQNVVKDLSVELDRLSEESVNNDISSWTKGRSGEALSLLKKRFSHRPVQEKFVCLNCGFETHADEQAALNIARSWLFLRSQEYKKYQTNKTTGNTDKRAFVETWQSFYRKKLKEVWKPAV

SEQ ID NO: 27222 - protein, 978 aa, synthetic construct
  REGION 1..978: note = engineered CasX variant
QEIKRINKIRRRLVKDSNTKKAGKTGPMKTLLVRVMTPDLRERLENLRKKPENIPQPISNTSRANLNKLLTDYTEMKKAILHVYWEEFQKDPVGLMSRVAQPASKKIDQNKLKPEMDEKGNLTTAGFACSQCGQPLFVYKLEQVSEKGKAYTNYFGRCNVAEHEKLILLAQLKPEKDSDEAVTYSLGKFGQRALDFYSIHVTKESTHPVKPLAQIAGNRYASGPVGKALSDACMGTIASFLSKYQDIIIEHQKVVKGNQKRLESLRELAGKENLEYPSVTLPPQPHTKEGVDAYNEVIARVRMWVNLNLWQKLKLSRDDAKPLLRLKGFPSFPLVERQANEVDWWDMVCNVKKLINEKKEDGKVFWQNLAGYKRQEALRPYLSSEEDRKKGKKFARYQLGDLLLHLEKKHGEDWGKVYDEAWERIDKKVEGLSKHIKLEEERRSEDAQSKAALTDWLRAKASFVIEGLKEADKDEFCRCELKLQKWYGDLRGKPFAIEAENSILDISGFSKQYNCAFIWQKDGVKKLNLYLIINYFKGGKLRFKKIKPEAFEANRFYTVINKKSGEIVPMEVNFNFDDPNLIILPLAFGKRQGREFIWNDLLSLETGSLKLANGRVIEKTLYNRRTRQDEPALFVALTFERREVLDSSNIKPMNLIGVDRGENIPAVIALTDPAGCPLSRFKDSEGNPTHILRIGESYKEKQRTIQAKKTVEQRRAGGYSRKYASKAKNLADDMVRNTARDLLYYAVTQDAMLIFENLSRGFGRQGKRTFMAERQYTRMEDWLTAKLAYEGLPSKTYLSKTLAQYTSKTCSNCGFTITSADYDRVLEKLKKTATGWMTTINGKELKVEGQITYYNRYKRQNVVKDLSVELDRLSEESVNNDISSWTKGRSGEALSLLKKRFSHRPVQEKFVCLNCGFETHADEQAALNIARSWLFLRSQEYKKYQTNKTTGNTDKRAFVETWQSFYRKKLKEVWKPAV

SEQ ID NO: 27223 - protein, 978 aa, synthetic construct
  REGION 1..978: note = engineered CasX variant
QEIKRINKIRRRLVKDSNTKKAGKTGPMKTLLVRVMTPDLRERLENLRKKPENIPQPISNTSRANLNKLLTDYTEMKKAILHVYWEEFQKDPVGLMSRVAQPASKKIDQNKLKPEMDEKGNLTTAGFACSQCGQPLFVYKLEQVSEKGKAYTNYFGRCNVAEHEKLILLAQLKPEKDSDEAVTYSLGKFGQRALDFYSIHVTKESTHPVKPLAQIAGNRYASGPVGKALSDACMGTIASFLSKYQDIIIEHQKVVKGNQKRLESLRELAGKENLEYPSVTLPPQPHTKEGVDAYNEVIARVRMWVNLNLWQKLKLSRDDAKPLLRLKGFPSFPLVERQANEVDWWDMVCNVKKLINEKKEDGKVFWQNLAGYKRQEALRPYLSSEEDRKKGKKFARYQLGDLLLHLEKKHGEDWGKVYDEAWERIDKKVEGLSKHIKLEEERRSEDAQSKAALTDWLRAKASFVIEGLKEADKDEFCRCELKLQKWYGDLRGKPFAIEAENSILDISGFSKQYNCAFIWQKDGVKKLNLYLIINYFKGGKLRFKKIKPEAFEANRFYTVINKKSGEIVPMEVNFNFDDPNLIILPLAFGKRQGREFIWNDLLSLETGSLKLANGRVIEKTLYNRRTRQDEPALFVALTFERREVLDSSNIKPMNLIGVDRGENIPAVIALTDPAGCPLSRFKDSEGNPTHILRIGESYKEKQRTIQAKKEVEQRRAGGYSRKYASKAKNLADDMVRNTARDLLYYAVTQDAMLIFENLSRGFGRQGKRTFMAERQYTRMEDWLTAKLAYEGLPSKTYLSKTLAQYTSKTCSNCGFTITSADYDRVLEKLKKTATGWMTTINGKELKVEGQITYYNRYKRQNVVKDLSVELDRLSEESVNNDISSWTKGRSGEALSLLKKRFSHRPVQEKFVCLNCGFETHADEQAALNIARSWLFLRSQEYKKYQTNKTTGNTDKRAFVETWQSFYRKKLKEVWKPAV

SEQ ID NO: 27224 - protein, 978 aa, synthetic construct
  REGION 1..978: note = engineered CasX variant
QEIKRINKIRRRLVKDSNTKKAGKTGPMKTLLVRVMTPDLRERLENLRKKPENIPQPISNTSRANLNKLLTDYTEMKKAILHVYWEEFQKDPVGLMSRVAQPASKKIDQNKLKPEMDEKGNLTTAGFACSQCGQPLFVYKLEQVSEKGKAYTNYFGRCNVAEHEKLILLAQLKPEKDSDEAVTYSLGKFGQRALDFYSIHVTKESTHPVKPLAQIAGNRYASGPVGKALSDACMGTIASFLSKYQDIIIEHQKVVKGNQKRLESLRELAGKENLEYPSVTLPPQPHTKEGVDAYNEVIARVRMWVNLNLWQKLKLSRDDAKPLLRLKGFPSFPLVERQANEVDWWDMVCNVKKLINEKKEDGKVFWQNLAGYKRQEALRPYLSSEEDRKKGKKFARYQLGDLLLHLEKKHGEDWGKVYDEAWERIDKKVEGLSKHIKLEEERRSEDAQSKAALTDWLRAKASFVIEGLKEADKDEFCRCELKLQKWYGDLRGKPFAIEAENSILDISGFSKQYNCAFIWQKDGVKKLNLYLIINYFKGGKLRFKKIKPEAFEANRFYTVINKKSGEIVPMEVNFNFDDPNLIILPLAFGKRQGREFIWNDLLSLETGSLKLANGRVIEKTLYNRRTRQDEPALFVALTFERREVLDSSNIKPMNLIGVDRGENIPAVIALTDNEGCPLSRFKDSYGNPTHILRIGESYKEKQRTIQAKKEVEQRRAGGYSRKYASKAKNLADDMVRNTARDLLYYAVTQDAMLIFENLSRGFGRQGKRTFMAERQYTRMEDWLTAKLAYEGLPSKTYLSKTLAQYTSKTCSNCGFTITSADYDRVLEKLKKTATGWMTTINGKELKVEGQITYYNRYKRQNVVKDLSVELDRLSEESVNNDISSWTKGRSGEALSLLKKRFSHRPVQEKFVCLNCGFETHADEQAALNIARSWLFLRSQEYKKYQTNKTTGNTDKRAFVETWQSFYRKKLKEVWKPAV

SEQ ID NO: 27225 - protein, 978 aa, synthetic construct
  REGION 1..978: note = engineered CasX variant
QEIKRINKIRRRLVKDSNTKKAGKTGPMKTLLVRVMTPDLRERLENLRKKPENIPQPISNTSRANLNKLLTDYTEMKKAILHVYWEEFQKDPVGLMSRVAQPASKKIDQNKLKPEMDEKGNLTTAGFACSQCGQPLFVYKLEQVSEKGKAYTNYFGRCNVAEHEKLILLAQLKPEKDSDEAVTYSLGKFGQRALDFYSIHVTKESTHPVKPLAQIAGNRYASGPVGKALSDACMGTIASFLSKYQDIIIEHQKVVKGNQKRLESLRELAGKENLEYPSVTLPPQPHTKEGVDAYNEVIARVRMWVNLNLWQKLKLSRDDAKPLLRLKGFPSFPLVERQANEVDWWDMVCNVKKLINEKKEDGKVFWQNLAGYKRQEALRPYLSSEEDRKKGKKFARYQLGDLLLHLEKKHGEDWGKVYDEAWERIDKKVEGLSKHIKLEEERRSEDAQSKAALTDWLRAKASFVIEGLKEADKDEFCRCELKLQKWYGDLRGKPFAIEAENSILDISGFSKQYNCAFIWQKDGVKKLNLYLIINYFKGGKLRFKKIKPEAFEANRFYTVINKKSGEIVPMEVNFNFDDPNLIILPLAFGKRQGREFIWNDLLSLETGSLKLANGRVIEKTLYNRRTRQDEPALFVALTFERREVLDSSNIKPMNLIGVDRGENIPAVIALTDNEGCPLSRFKDSYGNPTHILRIGESMKEKQRTIQAKKEVEQRRAGGYSRKYASKAKNLADDMVRNTARDLLYYAVTQDAMLIFENLSRGFGRQGKRTFMAERQYTRMEDWLTAKLAYEGLPSKTYLSKTLAQYTSKTCSNCGFTITSADYDRVLEKLKKTATGWMTTINGKELKVEGQITYYNRYKRQNVVKDLSVELDRLSEESVNNDISSWTKGRSGEALSLLKKRFSHRPVQEKFVCLNCGFETHADEQAALNIARSWLFLRSQEYKKYQTNKTTGNTDKRAFVETWQSFYRKKLKEVWKPAV

SEQ ID NO: 27226 - protein, 978 aa, synthetic construct
  REGION 1..978: note = engineered CasX variant
QEIKRINKIRRRLVKDSNTKKAGKTGPMKTLLVRVMTPDLRERLENLRKKPENIPQPISNTSRANLNKLLTDYTEMKKAILHVYWEEFQKDPVGLMSRVAQPASKKIDQNKLKPEMDEKGNLTTAGFACSQCGQPLFVYKLEQVSEKGKAYTNYFGRCNVAEHEKLILLAQLKPEKDSDEAVTYSLGKFGQRALDFYSIHVTKESTHPVKPLAQIAGNRYASGPVGKALSDACMGTIASFLSKYQDIIIEHQKVVKGNQKRLESLRELAGKENLEYPSVTLPPQPHTKEGVDAYNEVIARVRMWVNLNLWQKLKLSRDDAKPLLRLKGFPSFPLVERQANEVDWWDMVCNVKKLINEKKEDGKVFWQNLAGYKRQEALRPYLSSEEDRKKGKKFARYQLGDLLLHLEKKHGEDWGKVYDEAWERIDKKVEGLSKHIKLEEERRSEDAQSKAALTDWLRAKASFVIEGLKEADKDEFCRCELKLQKWYGDLRGKPFAIEAENSILDISGFSKQYNCAFIWQKDGVKKLNLYLIINYFKGGKLRFKKIKPEAFEANRFYTVINKKSGEIVPMEVNFNFDDPNLIILPLAFGKRQGREFIWNDLLSLETGSLKLANGRVIEKTLYNRRTRQDEPALFVALTFERREVLDSSNIKPMNLIGVDRGENIPAVIALTDNEGCPLSRFKDSLGNPTHILRIGESYKHKQRTIQAYKEVEQRRAGGYSRKYASKAKNLADDMVRNTARDLLYYAVTQDAMLIFENLSRGFGRQGKRTFMAERQYTRMEDWLTAKLAYEGLPSKTYLSKTLAQYTSKTCSNCGFTITSADYDRVLEKLKKTATGWMTTINGKELKVEGQITYYNRYKRQNVVKDLSVELDRLSEESVNNDISSWTKGRSGEALSLLKKRFSHRPVQEKFVCLNCGFETHADEQAALNIARSWLFLRSQEYKKYQTNKTTGNTDKRAFVETWQSFYRKKLKEVWKPAV

SEQ ID NO: 27227 - protein, 978 aa, synthetic construct
  REGION 1..978: note = engineered CasX variant
QEIKRINKIRRRLVKDSNTKKAGKTGPMKTLLVRVMTPDLRERLENLRKKPENIPQPISNTSRANLNKLLTDYTEMKKAILHVYWEEFQKDPVGLMSRVAQPASKKIDQNKLKPEMDEKGNLTTAGFACSQCGQPLFVYKLEQVSEKGKAYTNYFGRCNVAEHEKLILLAQLKPEKDSDEAVTYSLGKFGQRALDFYSIHVTKESTHPVKPLAQIAGNRYASGPVGKALSDACMGTIASFLSKYQDIIIEHQKVVKGNQKRLESLRELAGKENLEYPSVTLPPQPHTKEGVDAYNEVIARVRMWVNLNLWQKLKLSRDDAKPLLRLKGFPSFPLVERQANEVDWWDMVCNVKKLINEKKEDGKVFWQNLAGYKRQEALRPYLSSEEDRKKGKKFARYQLGDLLLHLEKKHGEDWGKVYDEAWERIDKKVEGLSKHIKLEEERRSEDAQSKAALTDWLRAKASFVIEGLKEADKDEFCRCELKLQKWYGDLRGKPFAIEAENSILDISGFSKQYNCAFIWQKDGVKKLNLYLIINYFKGGKLRFKKIKPEAFEANRFYTVINKKSGEIVPMEVNFNFDDPNLIILPLAFGKRQGREFIWNDLLSLETGSLKLANGRVIEKTLYNRRTRQDEPALFVALTFERREVLDSSNIKPMNLIGVDRGENIPAVIALTDNEGCPLSRFKDSLGNPTHILRIGESYKHKQRTIQAKKEVEQRRAGGYSRKYASKAKNLADDMVRNTARDLLYYAVTQDAMLIFENLSRGFGRQGKRTFMAERQYTRMEDWLTAKLAYEGLPSKTYLSKTLAQYTSKTCSNCGFTITSADYDRVLEKLKKTATGWMTTINGKELKVEGQITYYNRYKRQNVVKDLSVELDRLSEESVNNDISSWTKGRSGEALSLLKKRFSHRPVQEKFVCLNCGFETHADEQAALNIARSWLFLRSQEYKKYQTNKTTGNTDKRAFVETWQSFYRKKLKEVWKPAV

SEQ ID NO: 27228 - protein, 978 aa, synthetic construct
  REGION 1..978: note = engineered CasX variant
QEIKRINKIRRRLVKDSNTKKAGKTGPMKTLLVRVMTPDLRERLENLRKKPENIPQPISNTSRANLNKLLTDYTEMKKAILHVYWEEFQKDPVGLMSRVAQPASKKIDQNKLKPEMDEKGNLTTAGFACSQCGQPLFVYKLEQVSEKGKAYTNYFGRCNVAEHEKLILLAQLKPEKDSDEAVTYSLGKFGQRALDFYSIHVTKESTHPVKPLAQIAGNRYASGPVGKALSDACMGTIASFLSKYQDIIIEHQKVVKGNQKRLESLRELAGKENLEYPSVTLPPQPHTKEGVDAYNEVIARVRMWVNLNLWQKLKLSRDDAKPLLRLKGFPSFPLVERQANEVDWWDMVCNVKKLINEKKEDGKVFWQNLAGYKRQEALRPYLSSEEDRKKGKKFARYQLGDLLLHLEKKHGEDWGKVYDEAWERIDKKVEGLSKHIKLEEERRSEDAQSKAALTDWLRAKASFVIEGLKEADKDEFCRCELKLQKWYGDLRGKPFAIEAENSILDISGFSKQYNCAFIWQKDGVKKLNLYLIINYFKGGKLRFKKIKPEAFEANRFYTVINKKSGEIVPMEVNFNFDDPNLIILPLAFGKRQGREFIWNDLLSLETGSLKLANGRVIEKTLYNRRTRQDEPALFVALTFERREVLDSSNIKPMNLIGVDRGENIPAVIALTDNEGCPLSRFKDSLGNPTHILRIGESYKEKQRTIQAYKEVEQRRAGGYSRKYASKAKNLADDMVRNTARDLLYYAVTQDAMLIFENLSRGFGRQGKRTFMAERQYTRMEDWLTAKLAYEGLPSKTYLSKTLAQYTSKTCSNCGFTITSADYDRVLEKLKKTATGWMTTINGKELKVEGQITYYNRYKRQNVVKDLSVELDRLSEESVNNDISSWTKGRSGEALSLLKKRFSHRPVQEKFVCLNCGFETHADEQAALNIARSWLFLRSQEYKKYQTNKTTGNTDKRAFVETWQSFYRKKLKEVWKPAV

SEQ ID NO: 27229 - protein, 978 aa, synthetic construct
  REGION 1..978: note = engineered CasX variant
QEIKRINKIRRRLVKDSNTKKAGKTGPMKTLLVRVMTPDLRERLENLRKKPENIPQPISNTSRANLNKLLTDYTEMKKAILHVYWEEFQKDPVGLMSRVAQPASKKIDQNKLKPEMDEKGNLTTAGFACSQCGQPLFVYKLEQVSEKGKAYTNYFGRCNVAEHEKLILLAQLKPEKDSDEAVTYSLGKFGQRALDFYSIHVTKESTHPVKPLAQIAGNRYASGPVGKALSDACMGTIASFLSKYQDIIIEHQKVVKGNQKRLESLRELAGKENLEYPSVTLPPQPHTKEGVDAYNEVIARVRMWVNLNLWQKLKLSRDDAKPLLRLKGFPSFPLVERQANEVDWWDMVCNVKKLINEKKEDGKVFWQNLAGYKRQEALRPYLSSEEDRKKGKKFARYQLGDLLLHLEKKHGEDWGKVYDEAWERIDKKVEGLSKHIKLEEERRSEDAQSKAALTDWLRAKASFVIEGLKEADKDEFCRCELKLQKWYGDLRGKPFAIEAENSILDISGFSKQYNCAFIWQKDGVKKLNLYLIINYFKGGKLRFKKIKPEAFEANRFYTVINKKSGEIVPMEVNFNFDDPNLIILPLAFGKRQGREFIWNDLLSLETGSLKLANGRVIEKTLYNRRTRQDEPALFVALTFERREVLDSSNIKPMNLIGVDRGENIPAVIALTDNEGCPLSRFKDSLGNPTHILRIGESYKEKQRTIQAKKEVEQRRAGGYSRKYASKAKNLADDMVRNTARDLLYYAVTQDAMLIFENLSRGFGRQGKRTFMAERQYTRMEDWLTAKLAYEGLPSKTYLSKTLAQYTSKTCSNCGFTITSADYDRVLEKLKKTATGWMTTINGKELKVEGQITYYNRYKRQNVVKDLSVELDRLSEESVNNDISSWTKGRSGEALSLLKKRFSHRPVQEKFVCLNCGFETHADEQAALNIARSWLFLRSQEYKKYQTNKTTGNTDKRAFVETWQSFYRKKLKEVWKPAV

SEQ ID NO: 27230 - protein, 978 aa, synthetic construct
  REGION 1..978: note = engineered CasX variant
QEIKRINKIRRRLVKDSNTKKAGKTGPMKTLLVRVMTPDLRERLENLRKKPENIPQPISNTSRANLNKLLTDYTEMKKAILHVYWEEFQKDPVGLMSRVAQPASKKIDQNKLKPEMDEKGNLTTAGFACSQCGQPLFVYKLEQVSEKGKAYTNYFGRCNVAEHEKLILLAQLKPEKDSDEAVTYSLGKFGQRALDFYSIHVTKESTHPVKPLAQIAGNRYASGPVGKALSDACMGTIASFLSKYQDIIIEHQKVVKGNQKRLESLRELAGKENLEYPSVTLPPQPHTKEGVDAYNEVIARVRMWVNLNLWQKLKLSRDDAKPLLRLKGFPSFPLVERQANEVDWWDMVCNVKKLINEKKEDGKVFWQNLAGYKRQEALRPYLSSEEDRKKGKKFARYQLGDLLLHLEKKHGEDWGKVYDEAWERIDKKVEGLSKHIKLEEERRSEDAQSKAALTDWLRAKASFVIEGLKEADKDEFCRCELKLQKWYGDLRGKPFAIEAENSILDISGFSKQYNCAFIWQKDGVKKLNLYLIINYFKGGKLRFKKIKPEAFEANRFYTVINKKSGEIVPMEVNFNFDDPNLIILPLAFGKRQGREFIWNDLLSLETGSLKLANGRVIEKTLYNRRTRQDEPALFVALTFERREVLDSSNIKPMNLIGVDRGENIPAVIALTDNEGCPLSRFKDSLGNPTHILRIGESMKEKQRTIQAKKEVEQRRAGGYSRKYASKAKNLADDMVRNTARDLLYYAVTQDAMLIFENLSRGFGRQGKRTFMAERQYTRMEDWLTAKLAYEGLPSKTYLSKTLAQYTSKTCSNCGFTITSADYDRVLEKLKKTATGWMTTINGKELKVEGQITYYNRYKRQNVVKDLSVELDRLSEESVNNDISSWTKGRSGEALSLLKKRFSHRPVQEKFVCLNCGFETHADEQAALNIARSWLFLRSQEYKKYQTNKTTGNTDKRAFVETWQSFYRKKLKEVWKPAV

SEQ ID NO: 27231 - protein, 978 aa, synthetic construct
  REGION 1..978: note = engineered CasX variant
QEIKRINKIRRRLVKDSNTKKAGKTGPMKTLLVRVMTPDLRERLENLRKKPENIPQPISNTSRANLNKLLTDYTEMKKAILHVYWEEFQKDPVGLMSRVAQPASKKIDQNKLKPEMDEKGNLTTAGFACSQCGQPLFVYKLEQVSEKGKAYTNYFGRCNVAEHEKLILLAQLKPEKDSDEAVTYSLGKFGQRALDFYSIHVTKESTHPVKPLAQIAGNRYASGPVGKALSDACMGTIASFLSKYQDIIIEHQKVVKGNQKRLESLRELAGKENLEYPSVTLPPQPHTKEGVDAYNEVIARVRMWVNLNLWQKLKLSRDDAKPLLRLKGFPSFPLVERQANEVDWWDMVCNVKKLINEKKEDGKVFWQNLAGYKRQEALRPYLSSEEDRKKGKKFARYQLGDLLLHLEKKHGEDWGKVYDEAWERIDKKVEGLSKHIKLEEERRSEDAQSKAALTDWLRAKASFVIEGLKEADKDEFCRCELKLQKWYGDLRGKPFAIEAENSILDISGFSKQYNCAFIWQKDGVKKLNLYLIINYFKGGKLRFKKIKPEAFEANRFYTVINKKSGEIVPMEVNFNFDDPNLIILPLAFGKRQGREFIWNDLLSLETGSLKLANGRVIEKTLYNRRTRQDEPALFVALTFERREVLDSSNIKPMNLIGVDRGENIPAVIALTDMEGCPLSRFKDSLGNYTHILRIGESYKEKQRTIQAKKEVEQRRAGGYSRKYASKAKNLADDMVRNTARDLLYYAVTQDAMLIFENLSRGFGRQGKRTFMAERQYTRMEDWLTAKLAYEGLPSKTYLSKTLAQYTSKTCSNCGFTITSADYDRVLEKLKKTATGWMTTINGKELKVEGQITYYNRYKRQNVVKDLSVELDRLSEESVNNDISSWTKGRSGEALSLLKKRFSHRPVQEKFVCLNCGFETHADEQAALNIARSWLFLRSQEYKKYQTNKTTGNTDKRAFVETWQSFYRKKLKEVWKPAV

SEQ ID NO: 27232 - protein, 978 aa, synthetic construct
  REGION 1..978: note = engineered CasX variant
QEIKRINKIRRRLVKDSNTKKAGKTGPMKTLLVRVMTPDLRERLENLRKKPENIPQPISNTSRANLNKLLTDYTEMKKAILHVYWEEFQKDPVGLMSRVAQPASKKIDQNKLKPEMDEKGNLTTAGFACSQCGQPLFVYKLEQVSEKGKAYTNYFGRCNVAEHEKLILLAQLKPEKDSDEAVTYSLGKFGQRALDFYSIHVTKESTHPVKPLAQIAGNRYASGPVGKALSDACMGTIASFLSKYQDIIIEHQKVVKGNQKRLESLRELAGKENLEYPSVTLPPQPHTKEGVDAYNEVIARVRMWVNLNLWQKLKLSRDDAKPLLRLKGFPSFPLVERQANEVDWWDMVCNVKKLINEKKEDGKVFWQNLAGYKRQEALRPYLSSEEDRKKGKKFARYQLGDLLLHLEKKHGEDWGKVYDEAWERIDKKVEGLSKHIKLEEERRSEDAQSKAALTDWLRAKASFVIEGLKEADKDEFCRCELKLQKWYGDLRGKPFAIEAENSILDISGFSKQYNCAFIWQKDGVKKLNLYLIINYFKGGKLRFKKIKPEAFEANRFYTVINKKSGEIVPMEVNFNFDDPNLIILPLAFGKRQGREFIWNDLLSLETGSLKLANGRVIEKTLYNRRTRQDEPALFVALTFERREVLDSSNIKPMNLIGVDRGENIPAVIALTDMEGCPLSRFKDSLGNPTHILRIGESYKEKQRTIQAKQEVEQRRAGGYSRKYASKAKNLADDMVRNTARDLLYYAVTQDAMLIFENLSRGFGRQGKRTFMAERQYTRMEDWLTAKLAYEGLPSKTYLSKTLAQYTSKTCSNCGFTITSADYDRVLEKLKKTATGWMTTINGKELKVEGQITYYNRYKRQNVVKDLSVELDRLSEESVNNDISSWTKGRSGEALSLLKKRFSHRPVQEKFVCLNCGFETHADEQAALNIARSWLFLRSQEYKKYQTNKTTGNTDKRAFVETWQSFYRKKLKEVWKPAV

SEQ ID NO: 27233 - protein, 978 aa, synthetic construct
  REGION 1..978: note = engineered CasX variant
QEIKRINKIRRRLVKDSNTKKAGKTGPMKTLLVRVMTPDLRERLENLRKKPENIPQPISNTSRANLNKLLTDYTEMKKAILHVYWEEFQKDPVGLMSRVAQPASKKIDQNKLKPEMDEKGNLTTAGFACSQCGQPLFVYKLEQVSEKGKAYTNYFGRCNVAEHEKLILLAQLKPEKDSDEAVTYSLGKFGQRALDFYSIHVTKESTHPVKPLAQIAGNRYASGPVGKALSDACMGTIASFLSKYQDIIIEHQKVVKGNQKRLESLRELAGKENLEYPSVTLPPQPHTKEGVDAYNEVIARVRMWVNLNLWQKLKLSRDDAKPLLRLKGFPSFPLVERQANEVDWWDMVCNVKKLINEKKEDGKVFWQNLAGYKRQEALRPYLSSEEDRKKGKKFARYQLGDLLLHLEKKHGEDWGKVYDEAWERIDKKVEGLSKHIKLEEERRSEDAQSKAALTDWLRAKASFVIEGLKEADKDEFCRCELKLQKWYGDLRGKPFAIEAENSILDISGFSKQYNCAFIWQKDGVKKLNLYLIINYFKGGKLRFKKIKPEAFEANRFYTVINKKSGEIVPMEVNFNFDDPNLIILPLAFGKRQGREFIWNDLLSLETGSLKLANGRVIEKTLYNRRTRQDEPALFVALTFERREVLDSSNIKPMNLIGVDRGENIPAVIALTDMEGCPLSRFKDSLGNPTHILRIGESYKEKQRTIQAKKEVEQRRAGGYSRKYASKAKNLADDMVRNTARDLLYYAVTQDAMLIFENLSRGFGRQGKRTFMAERQYTRMEDWLTAKLAYEGLPSKTYLSKTLAQYTSKTCSNCGFTITSADYDRVLEKLKKTATGWMTTINGKELKVEGQITYYNRYKRQNVVKDLSVELDRLSEESVNNDISSWTKGRSGEALSLLKKRFSHRPVQEKFVCLNCGFETHADEQAALNIARSWLFLRSQEYKKYQTNKTTGNTDKRAFVETWQSFYRKKLKEVWKPAV

SEQ ID NO: 27234 - protein, 978 aa, synthetic construct
  REGION 1..978: note = engineered CasX variant
QEIKRINKIRRRLVKDSNTKKAGKTGPMKTLLVRVMTPDLRERLENLRKKPENIPQPISNTSRANLNKLLTDYTEMKKAILHVYWEEFQKDPVGLMSRVAQPASKKIDQNKLKPEMDEKGNLTTAGFACSQCGQPLFVYKLEQVSEKGKAYTNYFGRCNVAEHEKLILLAQLKPEKDSDEAVTYSLGKFGQRALDFYSIHVTKESTHPVKPLAQIAGNRYASGPVGKALSDACMGTIASFLSKYQDIIIEHQKVVKGNQKRLESLRELAGKENLEYPSVTLPPQPHTKEGVDAYNEVIARVRMWVNLNLWQKLKLSRDDAKPLLRLKGFPSFPLVERQANEVDWWDMVCNVKKLINEKKEDGKVFWQNLAGYKRQEALRPYLSSEEDRKKGKKFARYQLGDLLLHLEKKHGEDWGKVYDEAWERIDKKVEGLSKHIKLEEERRSEDAQSKAALTDWLRAKASFVIEGLKEADKDEFCRCELKLQKWYGDLRGKPFAIEAENSILDISGFSKQYNCAFIWQKDGVKKLNLYLIINYFKGGKLRFKKIKPEAFEANRFYTVINKKSGEIVPMEVNFNFDDPNLIILPLAFGKRQGREFIWNDLLSLETGSLKLANGRVIEKTLYNRRTRQDEPALFVALTFERREVLDSSNIKPMNLIGVDRGENIPAVIALTDMEGCPLSRFKDSLGNPTHILRIGESYKEKQRTIQAKKEVEQRRAFGYSRKYASKAKNLADDMVRNTARDLLYYAVTQDAMLIFENLSRGFGRQGKRTFMAERQYTRMEDWLTAKLAYEGLPSKTYLSKTLAQYTSKTCSNCGFTITSADYDRVLEKLKKTATGWMTTINGKELKVEGQITYYNRYKRQNVVKDLSVELDRLSEESVNNDISSWTKGRSGEALSLLKKRFSHRPVQEKFVCLNCGFETHADEQAALNIARSWLFLRSQEYKKYQTNKTTGNTDKRAFVETWQSFYRKKLKEVWKPAV

SEQ ID NO: 27235 - protein, 978 aa, synthetic construct
  REGION 1..978: note = engineered CasX variant
QEIKRINKIRRRLVKDSNTKKAGKTGPMKTLLVRVMTPDLRERLENLRKKPENIPQPISNTSRANLNKLLTDYTEMKKAILHVYWEEFQKDPVGLMSRVAQPASKKIDQNKLKPEMDEKGNLTTAGFACSQCGQPLFVYKLEQVSEKGKAYTNYFGRCNVAEHEKLILLAQLKPEKDSDEAVTYSLGKFGQRALDFYSIHVTKESTHPVKPLAQIAGNRYASGPVGKALSDACMGTIASFLSKYQDIIIEHQKVVKGNQKRLESLRELAGKENLEYPSVTLPPQPHTKEGVDAYNEVIARVRMWVNLNLWQKLKLSRDDAKPLLRLKGFPSFPLVERQANEVDWWDMVCNVKKLINEKKEDGKVFWQNLAGYKRQEALRPYLSSEEDRKKGKKFARYQLGDLLLHLEKKHGEDWGKVYDEAWERIDKKVEGLSKHIKLEEERRSEDAQSKAALTDWLRAKASFVIEGLKEADKDEFCRCELKLQKWYGDLRGKPFAIEAENSILDISGFSKQYNCAFIWQKDGVKKLNLYLIINYFKGGKLRFKKIKPEAFEANRFYTVINKKSGEIVPMEVNFNFDDPNLIILPLAFGKRQGREFIWNDLLSLETGSLKLANGRVIEKTLYNRRTRQDEPALFVALTFERREVLDSSNIKPMNLIGVDRGENIPAVIALTDMEGCPLSRFKDCLGNPTHILRIGESYKEKQRTIQAKKEVEQRRAGGYSRKYASKAKNLADDMVRNTARDLLYYAVTQDAMLIFENLSRGFGRQGKRTFMAERQYTRMEDWLTAKLAYEGLPSKTYLSKTLAQYTSKTCSNCGFTITSADYDRVLEKLKKTATGWMTTINGKELKVEGQITYYNRYKRQNVVKDLSVELDRLSEESVNNDISSWTKGRSGEALSLLKKRFSHRPVQEKFVCLNCGFETHADEQAALNIARSWLFLRSQEYKKYQTNKTTGNTDKRAFVETWQSFYRKKLKEVWKPAV

SEQ ID NO: 27236 - protein, 978 aa, synthetic construct
  REGION 1..978: note = engineered CasX variant
QEIKRINKIRRRLVKDSNTKKAGKTGPMKTLLVRVMTPDLRERLENLRKKPENIPQPISNTSRANLNKLLTDYTEMKKAILHVYWEEFQKDPVGLMSRVAQPASKKIDQNKLKPEMDEKGNLTTAGFACSQCGQPLFVYKLEQVSEKGKAYTNYFGRCNVAEHEKLILLAQLKPEKDSDEAVTYSLGKFGQRALDFYSIHVTKESTHPVKPLAQIAGNRYASGPVGKALSDACMGTIASFLSKYQDIIIEHQKVVKGNQKRLESLRELAGKENLEYPSVTLPPQPHTKEGVDAYNEVIARVRMWVNLNLWQKLKLSRDDAKPLLRLKGFPSFPLVERQANEVDWWDMVCNVKKLINEKKEDGKVFWQNLAGYKRQEALRPYLSSEEDRKKGKKFARYQLGDLLLHLEKKHGEDWGKVYDEAWERIDKKVEGLSKHIKLEEERRSEDAQSKAALTDWLRAKASFVIEGLKEADKDEFCRCELKLQKWYGDLRGKPFAIEAENSILDISGFSKQYNCAFIWQKDGVKKLNLYLIINYFKGGKLRFKKIKPEAFEANRFYTVINKKSGEIVPMEVNFNFDDPNLIILPLAFGKRQGREFIWNDLLSLETGSLKLANGRVIEKTLYNRRTRQDEPALFVALTFERREVLDSSNIKPMNLIGVDRGENIPAVIALTDLEGCPLSRFKDSLGNPTHILRIGESYKEKQRTIQAKKEVEQRRAGGYSRKYASKAKNLADDMVRNTARDLLYYAVTQDAMLIFENLSRGFGRQGKRTFMAERQYTRMEDWLTAKLAYEGLPSKTYLSKTLAQYTSKTCSNCGFTITSADYDRVLEKLKKTATGWMTTINGKELKVEGQITYYNRYKRQNVVKDLSVELDRLSEESVNNDISSWTKGRSGEALSLLKKRFSHRPVQEKFVCLNCGFETHADEQAALNIARSWLFLRSQEYKKYQTNKTTGNTDKRAFVETWQSFYRKKLKEVWKPAV

SEQ ID NO: 27237 - protein, 978 aa, synthetic construct
  REGION 1..978: note = engineered CasX variant
QEIKRINKIRRRLVKDSNTKKAGKTGPMKTLLVRVMTPDLRERLENLRKKPENIPQPISNTSRANLNKLLTDYTEMKKAILHVYWEEFQKDPVGLMSRVAQPASKKIDQNKLKPEMDEKGNLTTAGFACSQCGQPLFVYKLEQVSEKGKAYTNYFGRCNVAEHEKLILLAQLKPEKDSDEAVTYSLGKFGQRALDFYSIHVTKESTHPVKPLAQIAGNRYASGPVGKALSDACMGTIASFLSKYQDIIIEHQKVVKGNQKRLESLRELAGKENLEYPSVTLPPQPHTKEGVDAYNEVIARVRMWVNLNLWQKLKLSRDDAKPLLRLKGFPSFPLVERQANEVDWWDMVCNVKKLINEKKEDGKVFWQNLAGYKRQEALRPYLSSEEDRKKGKKFARYQLGDLLLHLEKKHGEDWGKVYDEAWERIDKKVEGLSKHIKLEEERRSEDAQSKAALTDWLRAKASFVIEGLKEADKDEFCRCELKLQKWYGDLRGKPFAIEAENSILDISGFSKQYNCAFIWQKDGVKKLNLYLIINYFKGGKLRFKKIKPEAFEANRFYTVINKKSGEIVPMEVNFNFDDPNLIILPLAFGKRQGREFIWNDLLSLETGSLKLANGRVIEKTLYNRRTRQDEPALFVALTFERREVLDSSNIKPMNLIGVDRGENIPAVIALTDLEGCPLSRFKDSLGNPTHILRIGESYKEKQRTIQAFKEVEQRRAGGYSRKYASKAKNLADDMVRNTARDLLYYAVTQDAMLIFENLSRGFGRQGKRTFMAERQYTRMEDWLTAKLAYEGLPSKTYLSKTLAQYTSKTCSNCGFTITSADYDRVLEKLKKTATGWMTTINGKELKVEGQITYYNRYKRQNVVKDLSVELDRLSEESVNNDISSWTKGRSGEALSLLKKRFSHRPVQEKFVCLNCGFETHADEQAALNIARSWLFLRSQEYKKYQTNKTTGNTDKRAFVETWQSFYRKKLKEVWKPAV

SEQ ID NO: 27238 - protein, 978 aa, synthetic construct
  REGION 1..978: note = engineered CasX variant
QEIKRINKIRRRLVKDSNTKKAGKTGPMKTLLVRVMTPDLRERLENLRKKPENIPQPISNTSRANLNKLLTDYTEMKKAILHVYWEEFQKDPVGLMSRVAQPASKKIDQNKLKPEMDEKGNLTTAGFACSQCGQPLFVYKLEQVSEKGKAYTNYFGRCNVAEHEKLILLAQLKPEKDSDEAVTYSLGKFGQRALDFYSIHVTKESTHPVKPLAQIAGNRYASGPVGKALSDACMGTIASFLSKYQDIIIEHQKVVKGNQKRLESLRELAGKENLEYPSVTLPPQPHTKEGVDAYNEVIARVRMWVNLNLWQKLKLSRDDAKPLLRLKGFPSFPLVERQANEVDWWDMVCNVKKLINEKKEDGKVFWQNLAGYKRQEALRPYLSSEEDRKKGKKFARYQLGDLLLHLEKKHGEDWGKVYDEAWERIDKKVEGLSKHIKLEEERRSEDAQSKAALTDWLRAKASFVIEGLKEADKDEFCRCELKLQKWYGDLRGKPFAIEAENSILDISGFSKQYNCAFIWQKDGVKKLNLYLIINYFKGGKLRFKKIKPEAFEANRFYTVINKKSGEIVPMEVNFNFDDPNLIILPLAFGKRQGREFIWNDLLSLETGSLKLANGRVIEKTLYNRRTRQDEPALFVALTFERREVLDSSNIKPMNLIGVDRGENIPAVIALTDKEGCPLSRFKDSLGNPTHILRIGESYKEVQRTIQAKKEVEQRRAGGYSRKYASKAKNLADDMVRNTARDLLYYAVTQDAMLIFENLSRGFGRQGKRTFMAERQYTRMEDWLTAKLAYEGLPSKTYLSKTLAQYTSKTCSNCGFTITSADYDRVLEKLKKTATGWMTTINGKELKVEGQITYYNRYKRQNVVKDLSVELDRLSEESVNNDISSWTKGRSGEALSLLKKRFSHRPVQEKFVCLNCGFETHADEQAALNIARSWLFLRSQEYKKYQTNKTTGNTDKRAFVETWQSFYRKKLKEVWKPAV

SEQ ID NO: 27239 - protein, 978 aa, synthetic construct
  REGION 1..978: note = engineered CasX variant
QEIKRINKIRRRLVKDSNTKKAGKTGPMKTLLVRVMTPDLRERLENLRKKPENIPQPISNTSRANLNKLLTDYTEMKKAILHVYWEEFQKDPVGLMSRVAQPASKKIDQNKLKPEMDEKGNLTTAGFACSQCGQPLFVYKLEQVSEKGKAYTNYFGRCNVAEHEKLILLAQLKPEKDSDEAVTYSLGKFGQRALDFYSIHVTKESTHPVKPLAQIAGNRYASGPVGKALSDACMGTIASFLSKYQDIIIEHQKVVKGNQKRLESLRELAGKENLEYPSVTLPPQPHTKEGVDAYNEVIARVRMWVNLNLWQKLKLSRDDAKPLLRLKGFPSFPLVERQANEVDWWDMVCNVKKLINEKKEDGKVFWQNLAGYKRQEALRPYLSSEEDRKKGKKFARYQLGDLLLHLEKKHGEDWGKVYDEAWERIDKKVEGLSKHIKLEEERRSEDAQSKAALTDWLRAKASFVIEGLKEADKDEFCRCELKLQKWYGDLRGKPFAIEAENSILDISGFSKQYNCAFIWQKDGVKKLNLYLIINYFKGGKLRFKKIKPEAFEANRFYTVINKKSGEIVPMEVNFNFDDPNLIILPLAFGKRQGREFIWNDLLSLETGSLKLANGRVIEKTLYNRRTRQDEPALFVALTFERREVLDSSNIKPMNLIGVDRGENIPAVIALTDKEGCPLSRFKDSLGNPTHILRIGESYKEKQRTIQAKKEVEQRRATGYSRKYASKAKNLADDMVRNTARDLLYYAVTQDAMLIFENLSRGFGRQGKRTFMAERQYTRMEDWLTAKLAYEGLPSKTYLSKTLAQYTSKTCSNCGFTITSADYDRVLEKLKKTATGWMTTINGKELKVEGQITYYNRYKRQNVVKDLSVELDRLSEESVNNDISSWTKGRSGEALSLLKKRFSHRPVQEKFVCLNCGFETHADEQAALNIARSWLFLRSQEYKKYQTNKTTGNTDKRAFVETWQSFYRKKLKEVWKPAV

SEQ ID NO: 27240 - protein, 978 aa, synthetic construct
  REGION 1..978: note = engineered CasX variant
QEIKRINKIRRRLVKDSNTKKAGKTGPMKTLLVRVMTPDLRERLENLRKKPENIPQPISNTSRANLNKLLTDYTEMKKAILHVYWEEFQKDPVGLMSRVAQPASKKIDQNKLKPEMDEKGNLTTAGFACSQCGQPLFVYKLEQVSEKGKAYTNYFGRCNVAEHEKLILLAQLKPEKDSDEAVTYSLGKFGQRALDFYSIHVTKESTHPVKPLAQIAGNRYASGPVGKALSDACMGTIASFLSKYQDIIIEHQKVVKGNQKRLESLRELAGKENLEYPSVTLPPQPHTKEGVDAYNEVIARVRMWVNLNLWQKLKLSRDDAKPLLRLKGFPSFPLVERQANEVDWWDMVCNVKKLINEKKEDGKVFWQNLAGYKRQEALRPYLSSEEDRKKGKKFARYQLGDLLLHLEKKHGEDWGKVYDEAWERIDKKVEGLSKHIKLEEERRSEDAQSKAALTDWLRAKASFVIEGLKEADKDEFCRCELKLQKWYGDLRGKPFAIEAENSILDISGFSKQYNCAFIWQKDGVKKLNLYLIINYFKGGKLRFKKIKPEAFEANRFYTVINKKSGEIVPMEVNFNFDDPNLIILPLAFGKRQGREFIWNDLLSLETGSLKLANGRVIEKTLYNRRTRQDEPALFVALTFERREVLDSSNIKPMNLIGVDRGENIPAVIALTDKEGCPLSRFKDSLGNPTHILRIGESYKEKQRTIQAKKEVEQRRAGGYSRKYASKAKNLADDMVRNTARDLLYYAVTQDAMLIFENLSRGFGRQGKRTFMAERQYTRMEDWLTAKLAYEGLPSKTYLSKTLAQYTSKTCSNCGFTITSADYDRVLEKLKKTATGWMTTINGKELKVEGQITYYNRYKRQNVVKDLSVELDRLSEESVNNDISSWTKGRSGEALSLLKKRFSHRPVQEKFVCLNCGFETHADEQAALNIARSWLFLRSQEYKKYQTNKTTGNTDKRAFVETWQSFYRKKLKEVWKPAV

SEQ ID NO: 27241 - protein, 978 aa, synthetic construct
  REGION 1..978: note = engineered CasX variant
QEIKRINKIRRRLVKDSNTKKAGKTGPMKTLLVRVMTPDLRERLENLRKKPENIPQPISNTSRANLNKLLTDYTEMKKAILHVYWEEFQKDPVGLMSRVAQPASKKIDQNKLKPEMDEKGNLTTAGFACSQCGQPLFVYKLEQVSEKGKAYTNYFGRCNVAEHEKLILLAQLKPEKDSDEAVTYSLGKFGQRALDFYSIHVTKESTHPVKPLAQIAGNRYASGPVGKALSDACMGTIASFLSKYQDIIIEHQKVVKGNQKRLESLRELAGKENLEYPSVTLPPQPHTKEGVDAYNEVIARVRMWVNLNLWQKLKLSRDDAKPLLRLKGFPSFPLVERQANEVDWWDMVCNVKKLINEKKEDGKVFWQNLAGYKRQEALRPYLSSEEDRKKGKKFARYQLGDLLLHLEKKHGEDWGKVYDEAWERIDKKVEGLSKHIKLEEERRSEDAQSKAALTDWLRAKASFVIEGLKEADKDEFCRCELKLQKWYGDLRGKPFAIEAENSILDISGFSKQYNCAFIWQKDGVKKLNLYLIINYFKGGKLRFKKIKPEAFEANRFYTVINKKSGEIVPMEVNFNFDDPNLIILPLAFGKRQGREFIWNDLLSLETGSLKLANGRVIEKTLYNRRTRQDEPALFVALTFERREVLDSSNIKPMNLIGVDRGENIPAVIALTDKEGCPLSRFKDSLGNPTHILRIGESYKEKQRCIQAKKEVEQRRAGGYSRKYASKAKNLADDMVRNTARDLLYYAVTQDAMLIFENLSRGFGRQGKRTFMAERQYTRMEDWLTAKLAYEGLPSKTYLSKTLAQYTSKTCSNCGFTITSADYDRVLEKLKKTATGWMTTINGKELKVEGQITYYNRYKRQNVVKDLSVELDRLSEESVNNDISSWTKGRSGEALSLLKKRFSHRPVQEKFVCLNCGFETHADEQAALNIARSWLFLRSQEYKKYQTNKTTGNTDKRAFVETWQSFYRKKLKEVWKPAV

SEQ ID NO: 27242 - protein, 978 aa, synthetic construct
  REGION 1..978: note = engineered CasX variant
QEIKRINKIRRRLVKDSNTKKAGKTGPMKTLLVRVMTPDLRERLENLRKKPENIPQPISNTSRANLNKLLTDYTEMKKAILHVYWEEFQKDPVGLMSRVAQPASKKIDQNKLKPEMDEKGNLTTAGFACSQCGQPLFVYKLEQVSEKGKAYTNYFGRCNVAEHEKLILLAQLKPEKDSDEAVTYSLGKFGQRALDFYSIHVTKESTHPVKPLAQIAGNRYASGPVGKALSDACMGTIASFLSKYQDIIIEHQKVVKGNQKRLESLRELAGKENLEYPSVTLPPQPHTKEGVDAYNEVIARVRMWVNLNLWQKLKLSRDDAKPLLRLKGFPSFPLVERQANEVDWWDMVCNVKKLINEKKEDGKVFWQNLAGYKRQEALRPYLSSEEDRKKGKKFARYQLGDLLLHLEKKHGEDWGKVYDEAWERIDKKVEGLSKHIKLEEERRSEDAQSKAALTDWLRAKASFVIEGLKEADKDEFCRCELKLQKWYGDLRGKPFAIEAENSILDISGFSKQYNCAFIWQKDGVKKLNLYLIINYFKGGKLRFKKIKPEAFEANRFYTVINKKSGEIVPMEVNFNFDDPNLIILPLAFGKRQGREFIWNDLLSLETGSLKLANGRVIEKTLYNRRTRQDEPALFVALTFERREVLDSSNIKPMNLIGVDRGENIPAVIALTDKEGCPLSRFKDSLGNPTHILRIGESVKEKQRTIQAKKEVEQRRAGGYSRKYASKAKNLADDMVRNTARDLLYYAVTQDAMLIFENLSRGFGRQGKRTFMAERQYTRMEDWLTAKLAYEGLPSKTYLSKTLAQYTSKTCSNCGFTITSADYDRVLEKLKKTATGWMTTINGKELKVEGQITYYNRYKRQNVVKDLSVELDRLSEESVNNDISSWTKGRSGEALSLLKKRFSHRPVQEKFVCLNCGFETHADEQAALNIARSWLFLRSQEYKKYQTNKTTGNTDKRAFVETWQSFYRKKLKEVWKPAV

SEQ ID NO: 27243 - protein, 978 aa, synthetic construct
  REGION 1..978: note = engineered CasX variant
QEIKRINKIRRRLVKDSNTKKAGKTGPMKTLLVRVMTPDLRERLENLRKKPENIPQPISNTSRANLNKLLTDYTEMKKAILHVYWEEFQKDPVGLMSRVAQPASKKIDQNKLKPEMDEKGNLTTAGFACSQCGQPLFVYKLEQVSEKGKAYTNYFGRCNVAEHEKLILLAQLKPEKDSDEAVTYSLGKFGQRALDFYSIHVTKESTHPVKPLAQIAGNRYASGPVGKALSDACMGTIASFLSKYQDIIIEHQKVVKGNQKRLESLRELAGKENLEYPSVTLPPQPHTKEGVDAYNEVIARVRMWVNLNLWQKLKLSRDDAKPLLRLKGFPSFPLVERQANEVDWWDMVCNVKKLINEKKEDGKVFWQNLAGYKRQEALRPYLSSEEDRKKGKKFARYQLGDLLLHLEKKHGEDWGKVYDEAWERIDKKVEGLSKHIKLEEERRSEDAQSKAALTDWLRAKASFVIEGLKEADKDEFCRCELKLQKWYGDLRGKPFAIEAENSILDISGFSKQYNCAFIWQKDGVKKLNLYLIINYFKGGKLRFKKIKPEAFEANRFYTVINKKSGEIVPMEVNFNFDDPNLIILPLAFGKRQGREFIWNDLLSLETGSLKLANGRVIEKTLYNRRTRQDEPALFVALTFERREVLDSSNIKPMNLIGVDRGENIPAVIALTDKEGCPLSRFKDSLGNPTHILRIGDSYKEKQRTIQAKKEVEQRRAGGYSRKYASKAKNLADDMVRNTARDLLYYAVTQDAMLIFENLSRGFGRQGKRTFMAERQYTRMEDWLTAKLAYEGLPSKTYLSKTLAQYTSKTCSNCGFTITSADYDRVLEKLKKTATGWMTTINGKELKVEGQITYYNRYKRQNVVKDLSVELDRLSEESVNNDISSWTKGRSGEALSLLKKRFSHRPVQEKFVCLNCGFETHADEQAALNIARSWLFLRSQEYKKYQTNKTTGNTDKRAFVETWQSFYRKKLKEVWKPAV

SEQ ID NO: 27244 - protein, 978 aa, synthetic construct
  REGION 1..978: note = engineered CasX variant
QEIKRINKIRRRLVKDSNTKKAGKTGPMKTLLVRVMTPDLRERLENLRKKPENIPQPISNTSRANLNKLLTDYTEMKKAILHVYWEEFQKDPVGLMSRVAQPASKKIDQNKLKPEMDEKGNLTTAGFACSQCGQPLFVYKLEQVSEKGKAYTNYFGRCNVAEHEKLILLAQLKPEKDSDEAVTYSLGKFGQRALDFYSIHVTKESTHPVKPLAQIAGNRYASGPVGKALSDACMGTIASFLSKYQDIIIEHQKVVKGNQKRLESLRELAGKENLEYPSVTLPPQPHTKEGVDAYNEVIARVRMWVNLNLWQKLKLSRDDAKPLLRLKGFPSFPLVERQANEVDWWDMVCNVKKLINEKKEDGKVFWQNLAGYKRQEALRPYLSSEEDRKKGKKFARYQLGDLLLHLEKKHGEDWGKVYDEAWERIDKKVEGLSKHIKLEEERRSEDAQSKAALTDWLRAKASFVIEGLKEADKDEFCRCELKLQKWYGDLRGKPFAIEAENSILDISGFSKQYNCAFIWQKDGVKKLNLYLIINYFKGGKLRFKKIKPEAFEANRFYTVINKKSGEIVPMEVNFNFDDPNLIILPLAFGKRQGREFIWNDLLSLETGSLKLANGRVIEKTLYNRRTRQDEPALFVALTFERREVLDSSNIKPMNLIGVDRGENIPAVIALTDHEGCPLSRFKDSLGNPTHILRIGESYKEQQRTIQAKKEVEQRRAGGYSRKYASKAKNLADDMVRNTARDLLYYAVTQDAMLIFENLSRGFGRQGKRTFMAERQYTRMEDWLTAKLAYEGLPSKTYLSKTLAQYTSKTCSNCGFTITSADYDRVLEKLKKTATGWMTTINGKELKVEGQITYYNRYKRQNVVKDLSVELDRLSEESVNNDISSWTKGRSGEALSLLKKRFSHRPVQEKFVCLNCGFETHADEQAALNIARSWLFLRSQEYKKYQTNKTTGNTDKRAFVETWQSFYRKKLKEVWKPAV

SEQ ID NO: 27245 - protein, 978 aa, synthetic construct
  REGION 1..978: note = engineered CasX variant
QEIKRINKIRRRLVKDSNTKKAGKTGPMKTLLVRVMTPDLRERLENLRKKPENIPQPISNTSRANLNKLLTDYTEMKKAILHVYWEEFQKDPVGLMSRVAQPASKKIDQNKLKPEMDEKGNLTTAGFACSQCGQPLFVYKLEQVSEKGKAYTNYFGRCNVAEHEKLILLAQLKPEKDSDEAVTYSLGKFGQRALDFYSIHVTKESTHPVKPLAQIAGNRYASGPVGKALSDACMGTIASFLSKYQDIIIEHQKVVKGNQKRLESLRELAGKENLEYPSVTLPPQPHTKEGVDAYNEVIARVRMWVNLNLWQKLKLSRDDAKPLLRLKGFPSFPLVERQANEVDWWDMVCNVKKLINEKKEDGKVFWQNLAGYKRQEALRPYLSSEEDRKKGKKFARYQLGDLLLHLEKKHGEDWGKVYDEAWERIDKKVEGLSKHIKLEEERRSEDAQSKAALTDWLRAKASFVIEGLKEADKDEFCRCELKLQKWYGDLRGKPFAIEAENSILDISGFSKQYNCAFIWQKDGVKKLNLYLIINYFKGGKLRFKKIKPEAFEANRFYTVINKKSGEIVPMEVNFNFDDPNLIILPLAFGKRQGREFIWNDLLSLETGSLKLANGRVIEKTLYNRRTRQDEPALFVALTFERREVLDSSNIKPMNLIGVDRGENIPAVIALTDHEGCPLSRFKDSLGNPTHILRIGESYKEQQRTFQAKKEVEQRRAGGYSRKYASKAKNLADDMVRNTARDLLYYAVTQDAMLIFENLSRGFGRQGKRTFMAERQYTRMEDWLTAKLAYEGLPSKTYLSKTLAQYTSKTCSNCGFTITSADYDRVLEKLKKTATGWMTTINGKELKVEGQITYYNRYKRQNVVKDLSVELDRLSEESVNNDISSWTKGRSGEALSLLKKRFSHRPVQEKFVCLNCGFETHADEQAALNIARSWLFLRSQEYKKYQTNKTTGNTDKRAFVETWQSFYRKKLKEVWKPAV

SEQ ID NO: 27246 - protein, 978 aa, synthetic construct
  REGION 1..978: note = engineered CasX variant
QEIKRINKIRRRLVKDSNTKKAGKTGPMKTLLVRVMTPDLRERLENLRKKPENIPQPISNTSRANLNKLLTDYTEMKKAILHVYWEEFQKDPVGLMSRVAQPASKKIDQNKLKPEMDEKGNLTTAGFACSQCGQPLFVYKLEQVSEKGKAYTNYFGRCNVAEHEKLILLAQLKPEKDSDEAVTYSLGKFGQRALDFYSIHVTKESTHPVKPLAQIAGNRYASGPVGKALSDACMGTIASFLSKYQDIIIEHQKVVKGNQKRLESLRELAGKENLEYPSVTLPPQPHTKEGVDAYNEVIARVRMWVNLNLWQKLKLSRDDAKPLLRLKGFPSFPLVERQANEVDWWDMVCNVKKLINEKKEDGKVFWQNLAGYKRQEALRPYLSSEEDRKKGKKFARYQLGDLLLHLEKKHGEDWGKVYDEAWERIDKKVEGLSKHIKLEEERRSEDAQSKAALTDWLRAKASFVIEGLKEADKDEFCRCELKLQKWYGDLRGKPFAIEAENSILDISGFSKQYNCAFIWQKDGVKKLNLYLIINYFKGGKLRFKKIKPEAFEANRFYTVINKKSGEIVPMEVNFNFDDPNLIILPLAFGKRQGREFIWNDLLSLETGSLKLANGRVIEKTLYNRRTRQDEPALFVALTFERREVLDSSNIKPMNLIGVDRGENIPAVIALTDHEGCPLSRFKDSLGNPTHILRIGESYKEKQRTIQAKKEVEQRRAGGYSRKYASKAKNLADDMVRNTARDLLYYAVTQDAMLIFENLSRGFGRQGKRTFMAERQYTRMEDWLTAKLAYEGLPSKTYLSKTLAQYTSKTCSNCGFTITSADYDRVLEKLKKTATGWMTTINGKELKVEGQITYYNRYKRQNVVKDLSVELDRLSEESVNNDISSWTKGRSGEALSLLKKRFSHRPVQEKFVCLNCGFETHADEQAALNIARSWLFLRSQEYKKYQTNKTTGNTDKRAFVETWQSFYRKKLKEVWKPAV

SEQ ID NO: 27247 - protein, 978 aa, synthetic construct
  REGION 1..978: note = engineered CasX variant
QEIKRINKIRRRLVKDSNTKKAGKTGPMKTLLVRVMTPDLRERLENLRKKPENIPQPISNTSRANLNKLLTDYTEMKKAILHVYWEEFQKDPVGLMSRVAQPASKKIDQNKLKPEMDEKGNLTTAGFACSQCGQPLFVYKLEQVSEKGKAYTNYFGRCNVAEHEKLILLAQLKPEKDSDEAVTYSLGKFGQRALDFYSIHVTKESTHPVKPLAQIAGNRYASGPVGKALSDACMGTIASFLSKYQDIIIEHQKVVKGNQKRLESLRELAGKENLEYPSVTLPPQPHTKEGVDAYNEVIARVRMWVNLNLWQKLKLSRDDAKPLLRLKGFPSFPLVERQANEVDWWDMVCNVKKLINEKKEDGKVFWQNLAGYKRQEALRPYLSSEEDRKKGKKFARYQLGDLLLHLEKKHGEDWGKVYDEAWERIDKKVEGLSKHIKLEEERRSEDAQSKAALTDWLRAKASFVIEGLKEADKDEFCRCELKLQKWYGDLRGKPFAIEAENSILDISGFSKQYNCAFIWQKDGVKKLNLYLIINYFKGGKLRFKKIKPEAFEANRFYTVINKKSGEIVPMEVNFNFDDPNLIILPLAFGKRQGREFIWNDLLSLETGSLKLANGRVIEKTLYNRRTRQDEPALFVALTFERREVLDSSNIKPMNLIGVDRGENIPAVIALTDHEGCPLSRFKDSLGNPTHILRIGESYKEKQRTFQAKKEVEQRRAGGYSRKYASKAKNLADDMVRNTARDLLYYAVTQDAMLIFENLSRGFGRQGKRTFMAERQYTRMEDWLTAKLAYEGLPSKTYLSKTLAQYTSKTCSNCGFTITSADYDRVLEKLKKTATGWMTTINGKELKVEGQITYYNRYKRQNVVKDLSVELDRLSEESVNNDISSWTKGRSGEALSLLKKRFSHRPVQEKFVCLNCGFETHADEQAALNIARSWLFLRSQEYKKYQTNKTTGNTDKRAFVETWQSFYRKKLKEVWKPAV

SEQ ID NO: 27248 - protein, 978 aa, synthetic construct
  REGION 1..978: note = engineered CasX variant
QEIKRINKIRRRLVKDSNTKKAGKTGPMKTLLVRVMTPDLRERLENLRKKPENIPQPISNTSRANLNKLLTDYTEMKKAILHVYWEEFQKDPVGLMSRVAQPASKKIDQNKLKPEMDEKGNLTTAGFACSQCGQPLFVYKLEQVSEKGKAYTNYFGRCNVAEHEKLILLAQLKPEKDSDEAVTYSLGKFGQRALDFYSIHVTKESTHPVKPLAQIAGNRYASGPVGKALSDACMGTIASFLSKYQDIIIEHQKVVKGNQKRLESLRELAGKENLEYPSVTLPPQPHTKEGVDAYNEVIARVRMWVNLNLWQKLKLSRDDAKPLLRLKGFPSFPLVERQANEVDWWDMVCNVKKLINEKKEDGKVFWQNLAGYKRQEALRPYLSSEEDRKKGKKFARYQLGDLLLHLEKKHGEDWGKVYDEAWERIDKKVEGLSKHIKLEEERRSEDAQSKAALTDWLRAKASFVIEGLKEADKDEFCRCELKLQKWYGDLRGKPFAIEAENSILDISGFSKQYNCAFIWQKDGVKKLNLYLIINYFKGGKLRFKKIKPEAFEANRFYTVINKKSGEIVPMEVNFNFDDPNLIILPLAFGKRQGREFIWNDLLSLETGSLKLANGRVIEKTLYNRRTRQDEPALFVALTFERREVLDSSNIKPMNLIGVDRGENIPAVIALTDGEGCPLSRFKDSLGNPTHILRIGESYKHKQRTIQAKKEVEQRRAGGYSRKYASKAKNLADDMVRNTARDLLYYAVTQDAMLIFENLSRGFGRQGKRTFMAERQYTRMEDWLTAKLAYEGLPSKTYLSKTLAQYTSKTCSNCGFTITSADYDRVLEKLKKTATGWMTTINGKELKVEGQITYYNRYKRQNVVKDLSVELDRLSEESVNNDISSWTKGRSGEALSLLKKRFSHRPVQEKFVCLNCGFETHADEQAALNIARSWLFLRSQEYKKYQTNKTTGNTDKRAFVETWQSFYRKKLKEVWKPAV

SEQ ID NO: 27249 - protein, 978 aa, synthetic construct
  REGION 1..978: note = engineered CasX variant
QEIKRINKIRRRLVKDSNTKKAGKTGPMKTLLVRVMTPDLRERLENLRKKPENIPQPISNTSRANLNKLLTDYTEMKKAILHVYWEEFQKDPVGLMSRVAQPASKKIDQNKLKPEMDEKGNLTTAGFACSQCGQPLFVYKLEQVSEKGKAYTNYFGRCNVAEHEKLILLAQLKPEKDSDEAVTYSLGKFGQRALDFYSIHVTKESTHPVKPLAQIAGNRYASGPVGKALSDACMGTIASFLSKYQDIIIEHQKVVKGNQKRLESLRELAGKENLEYPSVTLPPQPHTKEGVDAYNEVIARVRMWVNLNLWQKLKLSRDDAKPLLRLKGFPSFPLVERQANEVDWWDMVCNVKKLINEKKEDGKVFWQNLAGYKRQEALRPYLSSEEDRKKGKKFARYQLGDLLLHLEKKHGEDWGKVYDEAWERIDKKVEGLSKHIKLEEERRSEDAQSKAALTDWLRAKASFVIEGLKEADKDEFCRCELKLQKWYGDLRGKPFAIEAENSILDISGFSKQYNCAFIWQKDGVKKLNLYLIINYFKGGKLRFKKIKPEAFEANRFYTVINKKSGEIVPMEVNFNFDDPNLIILPLAFGKRQGREFIWNDLLSLETGSLKLANGRVIEKTLYNRRTRQDEPALFVALTFERREVLDSSNIKPMNLIGVDRGENIPAVIALTDGEGCPLSRFKDSLGNPTHILRIGESYKEKQRTIQAKKEVEQRRAGGYSRKYASKAKNLADDMVRNTARDLLYYAVTQDAMLIFENLSRGFGRQGKRTFMAERQYTRMEDWLTAKLAYEGLPSKTYLSKTLAQYTSKTCSNCGFTITSADYDRVLEKLKKTATGWMTTINGKELKVEGQITYYNRYKRQNVVKDLSVELDRLSEESVNNDISSWTKGRSGEALSLLKKRFSHRPVQEKFVCLNCGFETHADEQAALNIARSWLFLRSQEYKKYQTNKTTGNTDKRAFVETWQSFYRKKLKEVWKPAV

SEQ ID NO: 27250 - protein, 978 aa, synthetic construct
  REGION 1..978: note = engineered CasX variant
QEIKRINKIRRRLVKDSNTKKAGKTGPMKTLLVRVMTPDLRERLENLRKKPENIPQPISNTSRANLNKLLTDYTEMKKAILHVYWEEFQKDPVGLMSRVAQPASKKIDQNKLKPEMDEKGNLTTAGFACSQCGQPLFVYKLEQVSEKGKAYTNYFGRCNVAEHEKLILLAQLKPEKDSDEAVTYSLGKFGQRALDFYSIHVTKESTHPVKPLAQIAGNRYASGPVGKALSDACMGTIASFLSKYQDIIIEHQKVVKGNQKRLESLRELAGKENLEYPSVTLPPQPHTKEGVDAYNEVIARVRMWVNLNLWQKLKLSRDDAKPLLRLKGFPSFPLVERQANEVDWWDMVCNVKKLINEKKEDGKVFWQNLAGYKRQEALRPYLSSEEDRKKGKKFARYQLGDLLLHLEKKHGEDWGKVYDEAWERIDKKVEGLSKHIKLEEERRSEDAQSKAALTDWLRAKASFVIEGLKEADKDEFCRCELKLQKWYGDLRGKPFAIEAENSILDISGFSKQYNCAFIWQKDGVKKLNLYLIINYFKGGKLRFKKIKPEAFEANRFYTVINKKSGEIVPMEVNFNFDDPNLIILPLAFGKRQGREFIWNDLLSLETGSLKLANGRVIEKTLYNRRTRQDEPALFVALTFERREVLDSSNIKPMNLIGVDRGENIPAVIALTDGEGCPLSRFKDSLGNPTHILRIGESYKEKQRTIQAKKEVEQRRAFGYSRKYASKAKNLADDMVRNTARDLLYYAVTQDAMLIFENLSRGFGRQGKRTFMAERQYTRMEDWLTAKLAYEGLPSKTYLSKTLAQYTSKTCSNCGFTITSADYDRVLEKLKKTATGWMTTINGKELKVEGQITYYNRYKRQNVVKDLSVELDRLSEESVNNDISSWTKGRSGEALSLLKKRFSHRPVQEKFVCLNCGFETHADEQAALNIARSWLFLRSQEYKKYQTNKTTGNTDKRAFVETWQSFYRKKLKEVWKPAV

SEQ ID NO: 27251 - protein, 978 aa, synthetic construct
  REGION 1..978: note = engineered CasX variant
QEIKRINKIRRRLVKDSNTKKAGKTGPMKTLLVRVMTPDLRERLENLRKKPENIPQPISNTSRANLNKLLTDYTEMKKAILHVYWEEFQKDPVGLMSRVAQPASKKIDQNKLKPEMDEKGNLTTAGFACSQCGQPLFVYKLEQVSEKGKAYTNYFGRCNVAEHEKLILLAQLKPEKDSDEAVTYSLGKFGQRALDFYSIHVTKESTHPVKPLAQIAGNRYASGPVGKALSDACMGTIASFLSKYQDIIIEHQKVVKGNQKRLESLRELAGKENLEYPSVTLPPQPHTKEGVDAYNEVIARVRMWVNLNLWQKLKLSRDDAKPLLRLKGFPSFPLVERQANEVDWWDMVCNVKKLINEKKEDGKVFWQNLAGYKRQEALRPYLSSEEDRKKGKKFARYQLGDLLLHLEKKHGEDWGKVYDEAWERIDKKVEGLSKHIKLEEERRSEDAQSKAALTDWLRAKASFVIEGLKEADKDEFCRCELKLQKWYGDLRGKPFAIEAENSILDISGFSKQYNCAFIWQKDGVKKLNLYLIINYFKGGKLRFKKIKPEAFEANRFYTVINKKSGEIVPMEVNFNFDDPNLIILPLAFGKRQGREFIWNDLLSLETGSLKLANGRVIEKTLYNRRTRQDEPALFVALTFERREVLDSSNIKPMNLIGVDRGENIPAVIALTDGEGCPLSRFKDSLGNPTHCLRIGESYKEKQRTIQAKKEVEQRRAGGYSRKYASKAKNLADDMVRNTARDLLYYAVTQDAMLIFENLSRGFGRQGKRTFMAERQYTRMEDWLTAKLAYEGLPSKTYLSKTLAQYTSKTCSNCGFTITSADYDRVLEKLKKTATGWMTTINGKELKVEGQITYYNRYKRQNVVKDLSVELDRLSEESVNNDISSWTKGRSGEALSLLKKRFSHRPVQEKFVCLNCGFETHADEQAALNIARSWLFLRSQEYKKYQTNKTTGNTDKRAFVETWQSFYRKKLKEVWKPAV

SEQ ID NO: 27252 - protein, 978 aa, synthetic construct
  REGION 1..978: note = engineered CasX variant
QEIKRINKIRRRLVKDSNTKKAGKTGPMKTLLVRVMTPDLRERLENLRKKPENIPQPISNTSRANLNKLLTDYTEMKKAILHVYWEEFQKDPVGLMSRVAQPASKKIDQNKLKPEMDEKGNLTTAGFACSQCGQPLFVYKLEQVSEKGKAYTNYFGRCNVAEHEKLILLAQLKPEKDSDEAVTYSLGKFGQRALDFYSIHVTKESTHPVKPLAQIAGNRYASGPVGKALSDACMGTIASFLSKYQDIIIEHQKVVKGNQKRLESLRELAGKENLEYPSVTLPPQPHTKEGVDAYNEVIARVRMWVNLNLWQKLKLSRDDAKPLLRLKGFPSFPLVERQANEVDWWDMVCNVKKLINEKKEDGKVFWQNLAGYKRQEALRPYLSSEEDRKKGKKFARYQLGDLLLHLEKKHGEDWGKVYDEAWERIDKKVEGLSKHIKLEEERRSEDAQSKAALTDWLRAKASFVIEGLKEADKDEFCRCELKLQKWYGDLRGKPFAIEAENSILDISGFSKQYNCAFIWQKDGVKKLNLYLIINYFKGGKLRFKKIKPEAFEANRFYTVINKKSGEIVPMEVNFNFDDPNLIILPLAFGKRQGREFIWNDLLSLETGSLKLANGRVIEKTLYNRRTRQDEPALFVALTFERREVLDSSNIKPMNLIGVDRGENIPAVIALTDGEGCPLSRFCDSLGNPTHILRIGESYKHKQRTIQAKKEVEQRRAGGYSRKYASKAKNLADDMVRNTARDLLYYAVTQDAMLIFENLSRGFGRQGKRTFMAERQYTRMEDWLTAKLAYEGLPSKTYLSKTLAQYTSKTCSNCGFTITSADYDRVLEKLKKTATGWMTTINGKELKVEGQITYYNRYKRQNVVKDLSVELDRLSEESVNNDISSWTKGRSGEALSLLKKRFSHRPVQEKFVCLNCGFETHADEQAALNIARSWLFLRSQEYKKYQTNKTTGNTDKRAFVETWQSFYRKKLKEVWKPAV

SEQ ID NO: 27253 - protein, 978 aa, synthetic construct
  REGION 1..978: note = engineered CasX variant
QEIKRINKIRRRLVKDSNTKKAGKTGPMKTLLVRVMTPDLRERLENLRKKPENIPQPISNTSRANLNKLLTDYTEMKKAILHVYWEEFQKDPVGLMSRVAQPASKKIDQNKLKPEMDEKGNLTTAGFACSQCGQPLFVYKLEQVSEKGKAYTNYFGRCNVAEHEKLILLAQLKPEKDSDEAVTYSLGKFGQRALDFYSIHVTKESTHPVKPLAQIAGNRYASGPVGKALSDACMGTIASFLSKYQDIIIEHQKVVKGNQKRLESLRELAGKENLEYPSVTLPPQPHTKEGVDAYNEVIARVRMWVNLNLWQKLKLSRDDAKPLLRLKGFPSFPLVERQANEVDWWDMVCNVKKLINEKKEDGKVFWQNLAGYKRQEALRPYLSSEEDRKKGKKFARYQLGDLLLHLEKKHGEDWGKVYDEAWERIDKKVEGLSKHIKLEEERRSEDAQSKAALTDWLRAKASFVIEGLKEADKDEFCRCELKLQKWYGDLRGKPFAIEAENSILDISGFSKQYNCAFIWQKDGVKKLNLYLIINYFKGGKLRFKKIKPEAFEANRFYTVINKKSGEIVPMEVNFNFDDPNLIILPLAFGKRQGREFIWNDLLSLETGSLKLANGRVIEKTLYNRRTRQDEPALFVALTFERREVLDSSNIKPMNLIGVDRGENIPAVIALTDGEGCPLSRFCDSLGNPTHILRIGESYKEKQRTIQAKKEVEQRRAGGYSRKYASKAKNLADDMVRNTARDLLYYAVTQDAMLIFENLSRGFGRQGKRTFMAERQYTRMEDWLTAKLAYEGLPSKTYLSKTLAQYTSKTCSNCGFTITSADYDRVLEKLKKTATGWMTTINGKELKVEGQITYYNRYKRQNVVKDLSVELDRLSEESVNNDISSWTKGRSGEALSLLKKRFSHRPVQEKFVCLNCGFETHADEQAALNIARSWLFLRSQEYKKYQTNKTTGNTDKRAFVETWQSFYRKKLKEVWKPAV

SEQ ID NO: 27254 - protein, 978 aa, synthetic construct
  REGION 1..978: note = engineered CasX variant
QEIKRINKIRRRLVKDSNTKKAGKTGPMKTLLVRVMTPDLRERLENLRKKPENIPQPISNTSRANLNKLLTDYTEMKKAILHVYWEEFQKDPVGLMSRVAQPASKKIDQNKLKPEMDEKGNLTTAGFACSQCGQPLFVYKLEQVSEKGKAYTNYFGRCNVAEHEKLILLAQLKPEKDSDEAVTYSLGKFGQRALDFYSIHVTKESTHPVKPLAQIAGNRYASGPVGKALSDACMGTIASFLSKYQDIIIEHQKVVKGNQKRLESLRELAGKENLEYPSVTLPPQPHTKEGVDAYNEVIARVRMWVNLNLWQKLKLSRDDAKPLLRLKGFPSFPLVERQANEVDWWDMVCNVKKLINEKKEDGKVFWQNLAGYKRQEALRPYLSSEEDRKKGKKFARYQLGDLLLHLEKKHGEDWGKVYDEAWERIDKKVEGLSKHIKLEEERRSEDAQSKAALTDWLRAKASFVIEGLKEADKDEFCRCELKLQKWYGDLRGKPFAIEAENSILDISGFSKQYNCAFIWQKDGVKKLNLYLIINYFKGGKLRFKKIKPEAFEANRFYTVINKKSGEIVPMEVNFNFDDPNLIILPLAFGKRQGREFIWNDLLSLETGSLKLANGRVIEKTLYNRRTRQDEPALFVALTFERREVLDSSNIKPMNLIGVDRGENIPAVIALTDFEGCPLTRFKDSLGNPTHILRIGESYKEKQRTIQAKKEVEQRRAGGYSRKYASKAKNLADDMVRNTARDLLYYAVTQDAMLIFENLSRGFGRQGKRTFMAERQYTRMEDWLTAKLAYEGLPSKTYLSKTLAQYTSKTCSNCGFTITSADYDRVLEKLKKTATGWMTTINGKELKVEGQITYYNRYKRQNVVKDLSVELDRLSEESVNNDISSWTKGRSGEALSLLKKRFSHRPVQEKFVCLNCGFETHADEQAALNIARSWLFLRSQEYKKYQTNKTTGNTDKRAFVETWQSFYRKKLKEVWKPAV

SEQ ID NO: 27255 - protein, 978 aa, synthetic construct
  REGION 1..978: note = engineered CasX variant
QEIKRINKIRRRLVKDSNTKKAGKTGPMKTLLVRVMTPDLRERLENLRKKPENIPQPISNTSRANLNKLLTDYTEMKKAILHVYWEEFQKDPVGLMSRVAQPASKKIDQNKLKPEMDEKGNLTTAGFACSQCGQPLFVYKLEQVSEKGKAYTNYFGRCNVAEHEKLILLAQLKPEKDSDEAVTYSLGKFGQRALDFYSIHVTKESTHPVKPLAQIAGNRYASGPVGKALSDACMGTIASFLSKYQDIIIEHQKVVKGNQKRLESLRELAGKENLEYPSVTLPPQPHTKEGVDAYNEVIARVRMWVNLNLWQKLKLSRDDAKPLLRLKGFPSFPLVERQANEVDWWDMVCNVKKLINEKKEDGKVFWQNLAGYKRQEALRPYLSSEEDRKKGKKFARYQLGDLLLHLEKKHGEDWGKVYDEAWERIDKKVEGLSKHIKLEEERRSEDAQSKAALTDWLRAKASFVIEGLKEADKDEFCRCELKLQKWYGDLRGKPFAIEAENSILDISGFSKQYNCAFIWQKDGVKKLNLYLIINYFKGGKLRFKKIKPEAFEANRFYTVINKKSGEIVPMEVNFNFDDPNLIILPLAFGKRQGREFIWNDLLSLETGSLKLANGRVIEKTLYNRRTRQDEPALFVALTFERREVLDSSNIKPMNLIGVDRGENIPAVIALTDFEGCPLTRFKDSLGNPTHILRIGESYKEKQRTIQAKKEEEQRRAGGYSRKYASKAKNLADDMVRNTARDLLYYAVTQDAMLIFENLSRGFGRQGKRTFMAERQYTRMEDWLTAKLAYEGLPSKTYLSKTLAQYTSKTCSNCGFTITSADYDRVLEKLKKTATGWMTTINGKELKVEGQITYYNRYKRQNVVKDLSVELDRLSEESVNNDISSWTKGRSGEALSLLKKRFSHRPVQEKFVCLNCGFETHADEQAALNIARSWLFLRSQEYKKYQTNKTTGNTDKRAFVETWQSFYRKKLKEVWKPAV

SEQ ID NO: 27256 - protein, 978 aa, synthetic construct
  REGION 1..978: note = engineered CasX variant
QEIKRINKIRRRLVKDSNTKKAGKTGPMKTLLVRVMTPDLRERLENLRKKPENIPQPISNTSRANLNKLLTDYTEMKKAILHVYWEEFQKDPVGLMSRVAQPASKKIDQNKLKPEMDEKGNLTTAGFACSQCGQPLFVYKLEQVSEKGKAYTNYFGRCNVAEHEKLILLAQLKPEKDSDEAVTYSLGKFGQRALDFYSIHVTKESTHPVKPLAQIAGNRYASGPVGKALSDACMGTIASFLSKYQDIIIEHQKVVKGNQKRLESLRELAGKENLEYPSVTLPPQPHTKEGVDAYNEVIARVRMWVNLNLWQKLKLSRDDAKPLLRLKGFPSFPLVERQANEVDWWDMVCNVKKLINEKKEDGKVFWQNLAGYKRQEALRPYLSSEEDRKKGKKFARYQLGDLLLHLEKKHGEDWGKVYDEAWERIDKKVEGLSKHIKLEEERRSEDAQSKAALTDWLRAKASFVIEGLKEADKDEFCRCELKLQKWYGDLRGKPFAIEAENSILDISGFSKQYNCAFIWQKDGVKKLNLYLIINYFKGGKLRFKKIKPEAFEANRFYTVINKKSGEIVPMEVNFNFDDPNLIILPLAFGKRQGREFIWNDLLSLETGSLKLANGRVIEKTLYNRRTRQDEPALFVALTFERREVLDSSNIKPMNLIGVDRGENIPAVIALTDFEGCPLSRFKDSLGNPTHILRIGESYKEKQRTIQAKKEVEQRRAGGYSRKYASKAKNLADDMVRNTARDLLYYAVTQDAMLIFENLSRGFGRQGKRTFMAERQYTRMEDWLTAKLAYEGLPSKTYLSKTLAQYTSKTCSNCGFTITSADYDRVLEKLKKTATGWMTTINGKELKVEGQITYYNRYKRQNVVKDLSVELDRLSEESVNNDISSWTKGRSGEALSLLKKRFSHRPVQEKFVCLNCGFETHADEQAALNIARSWLFLRSQEYKKYQTNKTTGNTDKRAFVETWQSFYRKKLKEVWKPAV

SEQ ID NO: 27257 - protein, 978 aa, synthetic construct
  REGION 1..978: note = engineered CasX variant
QEIKRINKIRRRLVKDSNTKKAGKTGPMKTLLVRVMTPDLRERLENLRKKPENIPQPISNTSRANLNKLLTDYTEMKKAILHVYWEEFQKDPVGLMSRVAQPASKKIDQNKLKPEMDEKGNLTTAGFACSQCGQPLFVYKLEQVSEKGKAYTNYFGRCNVAEHEKLILLAQLKPEKDSDEAVTYSLGKFGQRALDFYSIHVTKESTHPVKPLAQIAGNRYASGPVGKALSDACMGTIASFLSKYQDIIIEHQKVVKGNQKRLESLRELAGKENLEYPSVTLPPQPHTKEGVDAYNEVIARVRMWVNLNLWQKLKLSRDDAKPLLRLKGFPSFPLVERQANEVDWWDMVCNVKKLINEKKEDGKVFWQNLAGYKRQEALRPYLSSEEDRKKGKKFARYQLGDLLLHLEKKHGEDWGKVYDEAWERIDKKVEGLSKHIKLEEERRSEDAQSKAALTDWLRAKASFVIEGLKEADKDEFCRCELKLQKWYGDLRGKPFAIEAENSILDISGFSKQYNCAFIWQKDGVKKLNLYLIINYFKGGKLRFKKIKPEAFEANRFYTVINKKSGEIVPMEVNFNFDDPNLIILPLAFGKRQGREFIWNDLLSLETGSLKLANGRVIEKTLYNRRTRQDEPALFVALTFERREVLDSSNIKPMNLIGVDRGENIPAVIALTDFEGCPLSRFKDSLGNPTHILRIGESYKEKQRTIQAKKEKEQRRAGGYSRKYASKAKNLADDMVRNTARDLLYYAVTQDAMLIFENLSRGFGRQGKRTFMAERQYTRMEDWLTAKLAYEGLPSKTYLSKTLAQYTSKTCSNCGFTITSADYDRVLEKLKKTATGWMTTINGKELKVEGQITYYNRYKRQNVVKDLSVELDRLSEESVNNDISSWTKGRSGEALSLLKKRFSHRPVQEKFVCLNCGFETHADEQAALNIARSWLFLRSQEYKKYQTNKTTGNTDKRAFVETWQSFYRKKLKEVWKPAV

SEQ ID NO: 27258 - protein, 978 aa, synthetic construct
  REGION 1..978: note = engineered CasX variant
QEIKRINKIRRRLVKDSNTKKAGKTGPMKTLLVRVMTPDLRERLENLRKKPENIPQPISNTSRANLNKLLTDYTEMKKAILHVYWEEFQKDPVGLMSRVAQPASKKIDQNKLKPEMDEKGNLTTAGFACSQCGQPLFVYKLEQVSEKGKAYTNYFGRCNVAEHEKLILLAQLKPEKDSDEAVTYSLGKFGQRALDFYSIHVTKESTHPVKPLAQIAGNRYASGPVGKALSDACMGTIASFLSKYQDIIIEHQKVVKGNQKRLESLRELAGKENLEYPSVTLPPQPHTKEGVDAYNEVIARVRMWVNLNLWQKLKLSRDDAKPLLRLKGFPSFPLVERQANEVDWWDMVCNVKKLINEKKEDGKVFWQNLAGYKRQEALRPYLSSEEDRKKGKKFARYQLGDLLLHLEKKHGEDWGKVYDEAWERIDKKVEGLSKHIKLEEERRSEDAQSKAALTDWLRAKASFVIEGLKEADKDEFCRCELKLQKWYGDLRGKPFAIEAENSILDISGFSKQYNCAFIWQKDGVKKLNLYLIINYFKGGKLRFKKIKPEAFEANRFYTVINKKSGEIVPMEVNFNFDDPNLIILPLAFGKRQGREFIWNDLLSLETGSLKLANGRVIEKTLYNRRTRQDEPALFVALTFERREVLDSSNIKPMNLIGVDRGENIPAVIALTDFEGCPLSRFKDSLGNPTHILRIGESYKEKQRTIQAKKEEEQRRAGGYSRKYASKAKNLADDMVRNTARDLLYYAVTQDAMLIFENLSRGFGRQGKRTFMAERQYTRMEDWLTAKLAYEGLPSKTYLSKTLAQYTSKTCSNCGFTITSADYDRVLEKLKKTATGWMTTINGKELKVEGQITYYNRYKRQNVVKDLSVELDRLSEESVNNDISSWTKGRSGEALSLLKKRFSHRPVQEKFVCLNCGFETHADEQAALNIARSWLFLRSQEYKKYQTNKTTGNTDKRAFVETWQSFYRKKLKEVWKPAV

SEQ ID NO: 27259 - protein, 978 aa, synthetic construct
  REGION 1..978: note = engineered CasX variant
QEIKRINKIRRRLVKDSNTKKAGKTGPMKTLLVRVMTPDLRERLENLRKKPENIPQPISNTSRANLNKLLTDYTEMKKAILHVYWEEFQKDPVGLMSRVAQPASKKIDQNKLKPEMDEKGNLTTAGFACSQCGQPLFVYKLEQVSEKGKAYTNYFGRCNVAEHEKLILLAQLKPEKDSDEAVTYSLGKFGQRALDFYSIHVTKESTHPVKPLAQIAGNRYASGPVGKALSDACMGTIASFLSKYQDIIIEHQKVVKGNQKRLESLRELAGKENLEYPSVTLPPQPHTKEGVDAYNEVIARVRMWVNLNLWQKLKLSRDDAKPLLRLKGFPSFPLVERQANEVDWWDMVCNVKKLINEKKEDGKVFWQNLAGYKRQEALRPYLSSEEDRKKGKKFARYQLGDLLLHLEKKHGEDWGKVYDEAWERIDKKVEGLSKHIKLEEERRSEDAQSKAALTDWLRAKASFVIEGLKEADKDEFCRCELKLQKWYGDLRGKPFAIEAENSILDISGFSKQYNCAFIWQKDGVKKLNLYLIINYFKGGKLRFKKIKPEAFEANRFYTVINKKSGEIVPMEVNFNFDDPNLIILPLAFGKRQGREFIWNDLLSLETGSLKLANGRVIEKTLYNRRTRQDEPALFVALTFERREVLDSSNIKPMNLIGVDRGENIPAVIALTDEEGCPLSRFKDSLGNPTHILRIGESYKEKQRTIQAKKEVEQRRAGGYSRKYASKAKNLADDMVRNTARDLLYYAVTQDAMLIFENLSRGFGRQGKRTFMAERQYTRMEDWLTAKLAYEGLPSKTYLSKTLAQYTSKTCSNCGFTITSADYDRVLEKLKKTATGWMTTINGKELKVEGQITYYNRYKRQNVVKDLSVELDRLSEESVNNDISSWTKGRSGEALSLLKKRFSHRPVQEKFVCLNCGFETHADEQAALNIARSWLFLRSQEYKKYQTNKTTGNTDKRAFVETWQSFYRKKLKEVWKPAV

SEQ ID NO: 27260 - protein, 978 aa, synthetic construct
  REGION 1..978: note = engineered CasX variant
QEIKRINKIRRRLVKDSNTKKAGKTGPMKTLLVRVMTPDLRERLENLRKKPENIPQPISNTSRANLNKLLTDYTEMKKAILHVYWEEFQKDPVGLMSRVAQPASKKIDQNKLKPEMDEKGNLTTAGFACSQCGQPLFVYKLEQVSEKGKAYTNYFGRCNVAEHEKLILLAQLKPEKDSDEAVTYSLGKFGQRALDFYSIHVTKESTHPVKPLAQIAGNRYASGPVGKALSDACMGTIASFLSKYQDIIIEHQKVVKGNQKRLESLRELAGKENLEYPSVTLPPQPHTKEGVDAYNEVIARVRMWVNLNLWQKLKLSRDDAKPLLRLKGFPSFPLVERQANEVDWWDMVCNVKKLINEKKEDGKVFWQNLAGYKRQEALRPYLSSEEDRKKGKKFARYQLGDLLLHLEKKHGEDWGKVYDEAWERIDKKVEGLSKHIKLEEERRSEDAQSKAALTDWLRAKASFVIEGLKEADKDEFCRCELKLQKWYGDLRGKPFAIEAENSILDISGFSKQYNCAFIWQKDGVKKLNLYLIINYFKGGKLRFKKIKPEAFEANRFYTVINKKSGEIVPMEVNFNFDDPNLIILPLAFGKRQGREFIWNDLLSLETGSLKLANGRVIEKTLYNRRTRQDEPALFVALTFERREVLDSSNIKPMNLIGVDRGENIPAVIALTDDEGCPLSRFKDSLGNPTHILRIGESYKEKQRTIQAKKEVEQRRSGGYSRKYASKAKNLADDMVRNTARDLLYYAVTQDAMLIFENLSRGFGRQGKRTFMAERQYTRMEDWLTAKLAYEGLPSKTYLSKTLAQYTSKTCSNCGFTITSADYDRVLEKLKKTATGWMTTINGKELKVEGQITYYNRYKRQNVVKDLSVELDRLSEESVNNDISSWTKGRSGEALSLLKKRFSHRPVQEKFVCLNCGFETHADEQAALNIARSWLFLRSQEYKKYQTNKTTGNTDKRAFVETWQSFYRKKLKEVWKPAV

SEQ ID NO: 27261 - protein, 978 aa, synthetic construct
  REGION 1..978: note = engineered CasX variant
QEIKRINKIRRRLVKDSNTKKAGKTGPMKTLLVRVMTPDLRERLENLRKKPENIPQPISNTSRANLNKLLTDYTEMKKAILHVYWEEFQKDPVGLMSRVAQPASKKIDQNKLKPEMDEKGNLTTAGFACSQCGQPLFVYKLEQVSEKGKAYTNYFGRCNVAEHEKLILLAQLKPEKDSDEAVTYSLGKFGQRALDFYSIHVTKESTHPVKPLAQIAGNRYASGPVGKALSDACMGTIASFLSKYQDIIIEHQKVVKGNQKRLESLRELAGKENLEYPSVTLPPQPHTKEGVDAYNEVIARVRMWVNLNLWQKLKLSRDDAKPLLRLKGFPSFPLVERQANEVDWWDMVCNVKKLINEKKEDGKVFWQNLAGYKRQEALRPYLSSEEDRKKGKKFARYQLGDLLLHLEKKHGEDWGKVYDEAWERIDKKVEGLSKHIKLEEERRSEDAQSKAALTDWLRAKASFVIEGLKEADKDEFCRCELKLQKWYGDLRGKPFAIEAENSILDISGFSKQYNCAFIWQKDGVKKLNLYLIINYFKGGKLRFKKIKPEAFEANRFYTVINKKSGEIVPMEVNFNFDDPNLIILPLAFGKRQGREFIWNDLLSLETGSLKLANGRVIEKTLYNRRTRQDEPALFVALTFERREVLDSSNIKPMNLIGVDRGENIPAVIALTDDEGCPLSRFKDSLGNPTHILRIGESYKEKQRTIQAKKEVEQRRAGGYSRKYASKAKNLADDMVRNTARDLLYYAVTQDAMLIFENLSRGFGRQGKRTFMAERQYTRMEDWLTAKLAYEGLPSKTYLSKTLAQYTSKTCSNCGFTITSADYDRVLEKLKKTATGWMTTINGKELKVEGQITYYNRYKRQNVVKDLSVELDRLSEESVNNDISSWTKGRSGEALSLLKKRFSHRPVQEKFVCLNCGFETHADEQAALNIARSWLFLRSQEYKKYQTNKTTGNTDKRAFVETWQSFYRKKLKEVWKPAV

SEQ ID NO: 27262 - protein, 978 aa, synthetic construct
  REGION 1..978: note = engineered CasX variant
QEIKRINKIRRRLVKDSNTKKAGKTGPMKTLLVRVMTPDLRERLENLRKKPENIPQPISNTSRANLNKLLTDYTEMKKAILHVYWEEFQKDPVGLMSRVAQPASKKIDQNKLKPEMDEKGNLTTAGFACSQCGQPLFVYKLEQVSEKGKAYTNYFGRCNVAEHEKLILLAQLKPEKDSDEAVTYSLGKFGQRALDFYSIHVTKESTHPVKPLAQIAGNRYASGPVGKALSDACMGTIASFLSKYQDIIIEHQKVVKGNQKRLESLRELAGKENLEYPSVTLPPQPHTKEGVDAYNEVIARVRMWVNLNLWQKLKLSRDDAKPLLRLKGFPSFPLVERQANEVDWWDMVCNVKKLINEKKEDGKVFWQNLAGYKRQEALRPYLSSEEDRKKGKKFARYQLGDLLLHLEKKHGEDWGKVYDEAWERIDKKVEGLSKHIKLEEERRSEDAQSKAALTDWLRAKASFVIEGLKEADKDEFCRCELKLQKWYGDLRGKPFAIEAENSILDISGFSKQYNCAFIWQKDGVKKLNLYLIINYFKGGKLRFKKIKPEAFEANRFYTVINKKSGEIVPMEVNFNFDDPNLIILPLAFGKRQGREFIWNDLLSLETGSLKLANGRVIEKTLYNRRTRQDEPALFVALTFERREVLDSSNIKPMNLIGVDRGENIPAVIALTDDEGCPLSRFKDSLGNPTHILRIGESYKEKQRTIQAKKEVEQHRSGGYSRKYASKAKNLADDMVRNTARDLLYYAVTQDAMLIFENLSRGFGRQGKRTFMAERQYTRMEDWLTAKLAYEGLPSKTYLSKTLAQYTSKTCSNCGFTITSADYDRVLEKLKKTATGWMTTINGKELKVEGQITYYNRYKRQNVVKDLSVELDRLSEESVNNDISSWTKGRSGEALSLLKKRFSHRPVQEKFVCLNCGFETHADEQAALNIARSWLFLRSQEYKKYQTNKTTGNTDKRAFVETWQSFYRKKLKEVWKPAV

SEQ ID NO: 27263 - protein, 978 aa, synthetic construct
  REGION 1..978: note = engineered CasX variant
QEIKRINKIRRRLVKDSNTKKAGKTGPMKTLLVRVMTPDLRERLENLRKKPENIPQPISNTSRANLNKLLTDYTEMKKAILHVYWEEFQKDPVGLMSRVAQPASKKIDQNKLKPEMDEKGNLTTAGFACSQCGQPLFVYKLEQVSEKGKAYTNYFGRCNVAEHEKLILLAQLKPEKDSDEAVTYSLGKFGQRALDFYSIHVTKESTHPVKPLAQIAGNRYASGPVGKALSDACMGTIASFLSKYQDIIIEHQKVVKGNQKRLESLRELAGKENLEYPSVTLPPQPHTKEGVDAYNEVIARVRMWVNLNLWQKLKLSRDDAKPLLRLKGFPSFPLVERQANEVDWWDMVCNVKKLINEKKEDGKVFWQNLAGYKRQEALRPYLSSEEDRKKGKKFARYQLGDLLLHLEKKHGEDWGKVYDEAWERIDKKVEGLSKHIKLEEERRSEDAQSKAALTDWLRAKASFVIEGLKEADKDEFCRCELKLQKWYGDLRGKPFAIEAENSILDISGFSKQYNCAFIWQKDGVKKLNLYLIINYFKGGKLRFKKIKPEAFEANRFYTVINKKSGEIVPMEVNFNFDDPNLIILPLAFGKRQGREFIWNDLLSLETGSLKLANGRVIEKTLYNRRTRQDEPALFVALTFERREVLDSSNIKPMNLIGVDRGENIPAVIALTDDEGCPLSRFKDSLGNPTHILRIGESYKEKQRTIQAKKEVEQHRAGGYSRKYASKAKNLADDMVRNTARDLLYYAVTQDAMLIFENLSRGFGRQGKRTFMAERQYTRMEDWLTAKLAYEGLPSKTYLSKTLAQYTSKTCSNCGFTITSADYDRVLEKLKKTATGWMTTINGKELKVEGQITYYNRYKRQNVVKDLSVELDRLSEESVNNDISSWTKGRSGEALSLLKKRFSHRPVQEKFVCLNCGFETHADEQAALNIARSWLFLRSQEYKKYQTNKTTGNTDKRAFVETWQSFYRKKLKEVWKPAV

SEQ ID NO: 27264 - protein, 978 aa, synthetic construct
  REGION 1..978: note = engineered CasX variant
QEIKRINKIRRRLVKDSNTKKAGKTGPMKTLLVRVMTPDLRERLENLRKKPENIPQPISNTSRANLNKLLTDYTEMKKAILHVYWEEFQKDPVGLMSRVAQPASKKIDQNKLKPEMDEKGNLTTAGFACSQCGQPLFVYKLEQVSEKGKAYTNYFGRCNVAEHEKLILLAQLKPEKDSDEAVTYSLGKFGQRALDFYSIHVTKESTHPVKPLAQIAGNRYASGPVGKALSDACMGTIASFLSKYQDIIIEHQKVVKGNQKRLESLRELAGKENLEYPSVTLPPQPHTKEGVDAYNEVIARVRMWVNLNLWQKLKLSRDDAKPLLRLKGFPSFPLVERQANEVDWWDMVCNVKKLINEKKEDGKVFWQNLAGYKRQEALRPYLSSEEDRKKGKKFARYQLGDLLLHLEKKHGEDWGKVYDEAWERIDKKVEGLSKHIKLEEERRSEDAQSKAALTDWLRAKASFVIEGLKEADKDEFCRCELKLQKWYGDLRGKPFAIEAENSILDISGFSKQYNCAFIWQKDGVKKLNLYLIINYFKGGKLRFKKIKPEAFEANRFYTVINKKSGEIVPMEVNFNFDDPNLIILPLAFGKRQGREFIWNDLLSLETGSLKLANGRVIEKTLYNRRTRQDEPALFVALTFERREVLDSSNIKPMNLIGVDRGENIPAVIALTDDEGCPLSRFKDSLGNPTHILRIGESYKEKQRNIQAKKEVEQRRAGGYSRKYASKAKNLADDMVRNTARDLLYYAVTQDAMLIFENLSRGFGRQGKRTFMAERQYTRMEDWLTAKLAYEGLPSKTYLSKTLAQYTSKTCSNCGFTITSADYDRVLEKLKKTATGWMTTINGKELKVEGQITYYNRYKRQNVVKDLSVELDRLSEESVNNDISSWTKGRSGEALSLLKKRFSHRPVQEKFVCLNCGFETHADEQAALNIARSWLFLRSQEYKKYQTNKTTGNTDKRAFVETWQSFYRKKLKEVWKPAV

SEQ ID NO: 27265 - protein, 978 aa, synthetic construct
  REGION 1..978: note = engineered CasX variant
QEIKRINKIRRRLVKDSNTKKAGKTGPMKTLLVRVMTPDLRERLENLRKKPENIPQPISNTSRANLNKLLTDYTEMKKAILHVYWEEFQKDPVGLMSRVAQPASKKIDQNKLKPEMDEKGNLTTAGFACSQCGQPLFVYKLEQVSEKGKAYTNYFGRCNVAEHEKLILLAQLKPEKDSDEAVTYSLGKFGQRALDFYSIHVTKESTHPVKPLAQIAGNRYASGPVGKALSDACMGTIASFLSKYQDIIIEHQKVVKGNQKRLESLRELAGKENLEYPSVTLPPQPHTKEGVDAYNEVIARVRMWVNLNLWQKLKLSRDDAKPLLRLKGFPSFPLVERQANEVDWWDMVCNVKKLINEKKEDGKVFWQNLAGYKRQEALRPYLSSEEDRKKGKKFARYQLGDLLLHLEKKHGEDWGKVYDEAWERIDKKVEGLSKHIKLEEERRSEDAQSKAALTDWLRAKASFVIEGLKEADKDEFCRCELKLQKWYGDLRGKPFAIEAENSILDISGFSKQYNCAFIWQKDGVKKLNLYLIINYFKGGKLRFKKIKPEAFEANRFYTVINKKSGEIVPMEVNFNFDDPNLIILPLAFGKRQGREFIWNDLLSLETGSLKLANGRVIEKTLYNRRTRQDEPALFVALTFERREVLDSSNIKPMNLIGVDRGENIPAVIALTDCEGCPLSRFKDSLGNPTHILRIGESYKENQRTIQAKKEVEQRRAGGYSRKYASKAKNLADDMVRNTARDLLYYAVTQDAMLIFENLSRGFGRQGKRTFMAERQYTRMEDWLTAKLAYEGLPSKTYLSKTLAQYTSKTCSNCGFTITSADYDRVLEKLKKTATGWMTTINGKELKVEGQITYYNRYKRQNVVKDLSVELDRLSEESVNNDISSWTKGRSGEALSLLKKRFSHRPVQEKFVCLNCGFETHADEQAALNIARSWLFLRSQEYKKYQTNKTTGNTDKRAFVETWQSFYRKKLKEVWKPAV

SEQ ID NO: 27266 - protein, 978 aa, synthetic construct
  REGION 1..978: note = engineered CasX variant
QEIKRINKIRRRLVKDSNTKKAGKTGPMKTLLVRVMTPDLRERLENLRKKPENIPQPISNTSRANLNKLLTDYTEMKKAILHVYWEEFQKDPVGLMSRVAQPASKKIDQNKLKPEMDEKGNLTTAGFACSQCGQPLFVYKLEQVSEKGKAYTNYFGRCNVAEHEKLILLAQLKPEKDSDEAVTYSLGKFGQRALDFYSIHVTKESTHPVKPLAQIAGNRYASGPVGKALSDACMGTIASFLSKYQDIIIEHQKVVKGNQKRLESLRELAGKENLEYPSVTLPPQPHTKEGVDAYNEVIARVRMWVNLNLWQKLKLSRDDAKPLLRLKGFPSFPLVERQANEVDWWDMVCNVKKLINEKKEDGKVFWQNLAGYKRQEALRPYLSSEEDRKKGKKFARYQLGDLLLHLEKKHGEDWGKVYDEAWERIDKKVEGLSKHIKLEEERRSEDAQSKAALTDWLRAKASFVIEGLKEADKDEFCRCELKLQKWYGDLRGKPFAIEAENSILDISGFSKQYNCAFIWQKDGVKKLNLYLIINYFKGGKLRFKKIKPEAFEANRFYTVINKKSGEIVPMEVNFNFDDPNLIILPLAFGKRQGREFIWNDLLSLETGSLKLANGRVIEKTLYNRRTRQDEPALFVALTFERREVLDSSNIKPMNLIGVDRGENIPAVIALTDCEGCPLSRFKDSLGNPTHILRIGESYKEKQRTIQAKKEVEQRRAGGYSRKYASKAKNLADDMVRNTARDLLYYAVTQDAMLIFENLSRGFGRQGKRTFMAERQYTRMEDWLTAKLAYEGLPSKTYLSKTLAQYTSKTCSNCGFTITSADYDRVLEKLKKTATGWMTTINGKELKVEGQITYYNRYKRQNVVKDLSVELDRLSEESVNNDISSWTKGRSGEALSLLKKRFSHRPVQEKFVCLNCGFETHADEQAALNIARSWLFLRSQEYKKYQTNKTTGNTDKRAFVETWQSFYRKKLKEVWKPAV

SEQ ID NO: 27267 - protein, 978 aa, synthetic construct
  REGION 1..978: note = engineered CasX variant
QEIKRINKIRRRLVKDSNTKKAGKTGPMKTLLVRVMTPDLRERLENLRKKPENIPQPISNTSRANLNKLLTDYTEMKKAILHVYWEEFQKDPVGLMSRVAQPASKKIDQNKLKPEMDEKGNLTTAGFACSQCGQPLFVYKLEQVSEKGKAYTNYFGRCNVAEHEKLILLAQLKPEKDSDEAVTYSLGKFGQRALDFYSIHVTKESTHPVKPLAQIAGNRYASGPVGKALSDACMGTIASFLSKYQDIIIEHQKVVKGNQKRLESLRELAGKENLEYPSVTLPPQPHTKEGVDAYNEVIARVRMWVNLNLWQKLKLSRDDAKPLLRLKGFPSFPLVERQANEVDWWDMVCNVKKLINEKKEDGKVFWQNLAGYKRQEALRPYLSSEEDRKKGKKFARYQLGDLLLHLEKKHGEDWGKVYDEAWERIDKKVEGLSKHIKLEEERRSEDAQSKAALTDWLRAKASFVIEGLKEADKDEFCRCELKLQKWYGDLRGKPFAIEAENSILDISGFSKQYNCAFIWQKDGVKKLNLYLIINYFKGGKLRFKKIKPEAFEANRFYTVINKKSGEIVPMEVNFNFDDPNLIILPLAFGKRQGREFIWNDLLSLETGSLKLANGRVIEKTLYNRRTRQDEPALFVALTFERREVLDSSNIKPMNLIGVDRGENIPAVIALTCPEGCPLSRFKDSLGNPTHILRIGESYKEKQRTIQAKKMVEQRRAGGYSRKYASKAKNLADDMVRNTARDLLYYAVTQDAMLIFENLSRGFGRQGKRTFMAERQYTRMEDWLTAKLAYEGLPSKTYLSKTLAQYTSKTCSNCGFTITSADYDRVLEKLKKTATGWMTTINGKELKVEGQITYYNRYKRQNVVKDLSVELDRLSEESVNNDISSWTKGRSGEALSLLKKRFSHRPVQEKFVCLNCGFETHADEQAALNIARSWLFLRSQEYKKYQTNKTTGNTDKRAFVETWQSFYRKKLKEVWKPAV

SEQ ID NO: 27268 - protein, 978 aa, synthetic construct
  REGION 1..978: note = engineered CasX variant
QEIKRINKIRRRLVKDSNTKKAGKTGPMKTLLVRVMTPDLRERLENLRKKPENIPQPISNTSRANLNKLLTDYTEMKKAILHVYWEEFQKDPVGLMSRVAQPASKKIDQNKLKPEMDEKGNLTTAGFACSQCGQPLFVYKLEQVSEKGKAYTNYFGRCNVAEHEKLILLAQLKPEKDSDEAVTYSLGKFGQRALDFYSIHVTKESTHPVKPLAQIAGNRYASGPVGKALSDACMGTIASFLSKYQDIIIEHQKVVKGNQKRLESLRELAGKENLEYPSVTLPPQPHTKEGVDAYNEVIARVRMWVNLNLWQKLKLSRDDAKPLLRLKGFPSFPLVERQANEVDWWDMVCNVKKLINEKKEDGKVFWQNLAGYKRQEALRPYLSSEEDRKKGKKFARYQLGDLLLHLEKKHGEDWGKVYDEAWERIDKKVEGLSKHIKLEEERRSEDAQSKAALTDWLRAKASFVIEGLKEADKDEFCRCELKLQKWYGDLRGKPFAIEAENSILDISGFSKQYNCAFIWQKDGVKKLNLYLIINYFKGGKLRFKKIKPEAFEANRFYTVINKKSGEIVPMEVNFNFDDPNLIILPLAFGKRQGREFIWNDLLSLETGSLKLANGRVIEKTLYNRRTRQDEPALFVALTFERREVLDSSNIKPMNLIGVDRGENIPAVIALTCPEGCPLSRFKDSLGNPTHILRIGESYKEKQRTIQAKKEVEQRRAGGYSRKYASKAKNLADDMVRNTARDLLYYAVTQDAMLIFENLSRGFGRQGKRTFMAERQYTRMEDWLTAKLAYEGLPSKTYLSKTLAQYTSKTCSNCGFTITSADYDRVLEKLKKTATGWMTTINGKELKVEGQITYYNRYKRQNVVKDLSVELDRLSEESVNNDISSWTKGRSGEALSLLKKRFSHRPVQEKFVCLNCGFETHADEQAALNIARSWLFLRSQEYKKYQTNKTTGNTDKRAFVETWQSFYRKKLKEVWKPAV

SEQ ID NO: 27269 - protein, 978 aa, synthetic construct
  REGION 1..978: note = engineered CasX variant
QEIKRINKIRRRLVKDSNTKKAGKTGPMKTLLVRVMTPDLRERLENLRKKPENIPQPISNTSRANLNKLLTDYTEMKKAILHVYWEEFQKDPVGLMSRVAQPASKKIDQNKLKPEMDEKGNLTTAGFACSQCGQPLFVYKLEQVSEKGKAYTNYFGRCNVAEHEKLILLAQLKPEKDSDEAVTYSLGKFGQRALDFYSIHVTKESTHPVKPLAQIAGNRYASGPVGKALSDACMGTIASFLSKYQDIIIEHQKVVKGNQKRLESLRELAGKENLEYPSVTLPPQPHTKEGVDAYNEVIARVRMWVNLNLWQKLKLSRDDAKPLLRLKGFPSFPLVERQANEVDWWDMVCNVKKLINEKKEDGKVFWQNLAGYKRQEALRPYLSSEEDRKKGKKFARYQLGDLLLHLEKKHGEDWGKVYDEAWERIDKKVEGLSKHIKLEEERRSEDAQSKAALTDWLRAKASFVIEGLKEADKDEFCRCELKLQKWYGDLRGKPFAIEAENSILDISGFSKQYNCAFIWQKDGVKKLNLYLIINYFKGGKLRFKKIKPEAFEANRFYTVINKKSGEIVPMEVNFNFDDPNLIILPLAFGKRQGREFIWNDLLSLETGSLKLANGRVIEKTLYNRRTRQDEPALFVALTFERREVLDSSNIKPMNLIGVDRGENIPAVIALTCPEGCPLSRFKDSLGNPTHILRIGESYKEKQRTIQAKKEVEMRRAGGYSRKYASKAKNLADDMVRNTARDLLYYAVTQDAMLIFENLSRGFGRQGKRTFMAERQYTRMEDWLTAKLAYEGLPSKTYLSKTLAQYTSKTCSNCGFTITSADYDRVLEKLKKTATGWMTTINGKELKVEGQITYYNRYKRQNVVKDLSVELDRLSEESVNNDISSWTKGRSGEALSLLKKRFSHRPVQEKFVCLNCGFETHADEQAALNIARSWLFLRSQEYKKYQTNKTTGNTDKRAFVETWQSFYRKKLKEVWKPAV

SEQ ID NO: 27270 - protein, 978 aa, synthetic construct
  REGION 1..978: note = engineered CasX variant
QEIKRINKIRRRLVKDSNTKKAGKTGPMKTLLVRVMTPDLRERLENLRKKPENIPQPISNTSRANLNKLLTDYTEMKKAILHVYWEEFQKDPVGLMSRVAQPASKKIDQNKLKPEMDEKGNLTTAGFACSQCGQPLFVYKLEQVSEKGKAYTNYFGRCNVAEHEKLILLAQLKPEKDSDEAVTYSLGKFGQRALDFYSIHVTKESTHPVKPLAQIAGNRYASGPVGKALSDACMGTIASFLSKYQDIIIEHQKVVKGNQKRLESLRELAGKENLEYPSVTLPPQPHTKEGVDAYNEVIARVRMWVNLNLWQKLKLSRDDAKPLLRLKGFPSFPLVERQANEVDWWDMVCNVKKLINEKKEDGKVFWQNLAGYKRQEALRPYLSSEEDRKKGKKFARYQLGDLLLHLEKKHGEDWGKVYDEAWERIDKKVEGLSKHIKLEEERRSEDAQSKAALTDWLRAKASFVIEGLKEADKDEFCRCELKLQKWYGDLRGKPFAIEAENSILDISGFSKQYNCAFIWQKDGVKKLNLYLIINYFKGGKLRFKKIKPEAFEANRFYTVINKKSGEIVPMEVNFNFDDPNLIILPLAFGKRQGREFIWNDLLSLETGSLKLANGRVIEKTLYNRRTRQDEPALFVALTFERREVLDSSNIKPMNLIGVDRGENIPAVIALMDPEGCPLSRFKDSLGNPTHILRINESYKEKQRTIQAKKEVEQRRAGGYSRKYASKAKNLADDMVRNTARDLLYYAVTQDAMLIFENLSRGFGRQGKRTFMAERQYTRMEDWLTAKLAYEGLPSKTYLSKTLAQYTSKTCSNCGFTITSADYDRVLEKLKKTATGWMTTINGKELKVEGQITYYNRYKRQNVVKDLSVELDRLSEESVNNDISSWTKGRSGEALSLLKKRFSHRPVQEKFVCLNCGFETHADEQAALNIARSWLFLRSQEYKKYQTNKTTGNTDKRAFVETWQSFYRKKLKEVWKPAV

SEQ ID NO: 27271 - protein, 978 aa, synthetic construct
  REGION 1..978: note = engineered CasX variant
QEIKRINKIRRRLVKDSNTKKAGKTGPMKTLLVRVMTPDLRERLENLRKKPENIPQPISNTSRANLNKLLTDYTEMKKAILHVYWEEFQKDPVGLMSRVAQPASKKIDQNKLKPEMDEKGNLTTAGFACSQCGQPLFVYKLEQVSEKGKAYTNYFGRCNVAEHEKLILLAQLKPEKDSDEAVTYSLGKFGQRALDFYSIHVTKESTHPVKPLAQIAGNRYASGPVGKALSDACMGTIASFLSKYQDIIIEHQKVVKGNQKRLESLRELAGKENLEYPSVTLPPQPHTKEGVDAYNEVIARVRMWVNLNLWQKLKLSRDDAKPLLRLKGFPSFPLVERQANEVDWWDMVCNVKKLINEKKEDGKVFWQNLAGYKRQEALRPYLSSEEDRKKGKKFARYQLGDLLLHLEKKHGEDWGKVYDEAWERIDKKVEGLSKHIKLEEERRSEDAQSKAALTDWLRAKASFVIEGLKEADKDEFCRCELKLQKWYGDLRGKPFAIEAENSILDISGFSKQYNCAFIWQKDGVKKLNLYLIINYFKGGKLRFKKIKPEAFEANRFYTVINKKSGEIVPMEVNFNFDDPNLIILPLAFGKRQGREFIWNDLLSLETGSLKLANGRVIEKTLYNRRTRQDEPALFVALTFERREVLDSSNIKPMNLIGVDRGENIPAVIALMDPEGCPLSRFKDSLGNPTHILRIGESYKEKQRTIQAKKEVEQRRAGGYSRKYASKAKNLADDMVRNTARDLLYYAVTQDAMLIFENLSRGFGRQGKRTFMAERQYTRMEDWLTAKLAYEGLPSKTYLSKTLAQYTSKTCSNCGFTITSADYDRVLEKLKKTATGWMTTINGKELKVEGQITYYNRYKRQNVVKDLSVELDRLSEESVNNDISSWTKGRSGEALSLLKKRFSHRPVQEKFVCLNCGFETHADEQAALNIARSWLFLRSQEYKKYQTNKTTGNTDKRAFVETWQSFYRKKLKEVWKPAV

SEQ ID NO: 27272 - protein, 978 aa, synthetic construct
  REGION 1..978: note = engineered CasX variant
QEIKRINKIRRRLVKDSNTKKAGKTGPMKTLLVRVMTPDLRERLENLRKKPENIPQPISNTSRANLNKLLTDYTEMKKAILHVYWEEFQKDPVGLMSRVAQPASKKIDQNKLKPEMDEKGNLTTAGFACSQCGQPLFVYKLEQVSEKGKAYTNYFGRCNVAEHEKLILLAQLKPEKDSDEAVTYSLGKFGQRALDFYSIHVTKESTHPVKPLAQIAGNRYASGPVGKALSDACMGTIASFLSKYQDIIIEHQKVVKGNQKRLESLRELAGKENLEYPSVTLPPQPHTKEGVDAYNEVIARVRMWVNLNLWQKLKLSRDDAKPLLRLKGFPSFPLVERQANEVDWWDMVCNVKKLINEKKEDGKVFWQNLAGYKRQEALRPYLSSEEDRKKGKKFARYQLGDLLLHLEKKHGEDWGKVYDEAWERIDKKVEGLSKHIKLEEERRSEDAQSKAALTDWLRAKASFVIEGLKEADKDEFCRCELKLQKWYGDLRGKPFAIEAENSILDISGFSKQYNCAFIWQKDGVKKLNLYLIINYFKGGKLRFKKIKPEAFEANRFYTVINKKSGEIVPMEVNFNFDDPNLIILPLAFGKRQGREFIWNDLLSLETGSLKLANGRVIEKTLYNRRTRQDEPALFVALTFERREVLDSSNIKPMNLIGVDRGENIPAVIALMDPEGCPLSRFKDSLGNPTHILRIGESYKAKQRTIQAKKEVEQRRAGGYSRKYASKAKNLADDMVRNTARDLLYYAVTQDAMLIFENLSRGFGRQGKRTFMAERQYTRMEDWLTAKLAYEGLPSKTYLSKTLAQYTSKTCSNCGFTITSADYDRVLEKLKKTATGWMTTINGKELKVEGQITYYNRYKRQNVVKDLSVELDRLSEESVNNDISSWTKGRSGEALSLLKKRFSHRPVQEKFVCLNCGFETHADEQAALNIARSWLFLRSQEYKKYQTNKTTGNTDKRAFVETWQSFYRKKLKEVWKPAV

SEQ ID NO: 27273 - protein, 978 aa, synthetic construct
  REGION 1..978: note = engineered CasX variant
QEIKRINKIRRRLVKDSNTKKAGKTGPMKTLLVRVMTPDLRERLENLRKKPENIPQPISNTSRANLNKLLTDYTEMKKAILHVYWEEFQKDPVGLMSRVAQPASKKIDQNKLKPEMDEKGNLTTAGFACSQCGQPLFVYKLEQVSEKGKAYTNYFGRCNVAEHEKLILLAQLKPEKDSDEAVTYSLGKFGQRALDFYSIHVTKESTHPVKPLAQIAGNRYASGPVGKALSDACMGTIASFLSKYQDIIIEHQKVVKGNQKRLESLRELAGKENLEYPSVTLPPQPHTKEGVDAYNEVIARVRMWVNLNLWQKLKLSRDDAKPLLRLKGFPSFPLVERQANEVDWWDMVCNVKKLINEKKEDGKVFWQNLAGYKRQEALRPYLSSEEDRKKGKKFARYQLGDLLLHLEKKHGEDWGKVYDEAWERIDKKVEGLSKHIKLEEERRSEDAQSKAALTDWLRAKASFVIEGLKEADKDEFCRCELKLQKWYGDLRGKPFAIEAENSILDISGFSKQYNCAFIWQKDGVKKLNLYLIINYFKGGKLRFKKIKPEAFEANRFYTVINKKSGEIVPMEVNFNFDDPNLIILPLAFGKRQGREFIWNDLLSLETGSLKLANGRVIEKTLYNRRTRQDEPALFVALTFERREVLDSSNIKPMNLIGVDRGENIPAVIALMDPEGCPLSRFKDSLGNPTHILRIGENYKEKQRTIQAKKEVEQRRAGGYSRKYASKAKNLADDMVRNTARDLLYYAVTQDAMLIFENLSRGFGRQGKRTFMAERQYTRMEDWLTAKLAYEGLPSKTYLSKTLAQYTSKTCSNCGFTITSADYDRVLEKLKKTATGWMTTINGKELKVEGQITYYNRYKRQNVVKDLSVELDRLSEESVNNDISSWTKGRSGEALSLLKKRFSHRPVQEKFVCLNCGFETHADEQAALNIARSWLFLRSQEYKKYQTNKTTGNTDKRAFVETWQSFYRKKLKEVWKPAV

SEQ ID NO: 27274 - protein, 978 aa, synthetic construct
  REGION 1..978: note = engineered CasX variant
QEIKRINKIRRRLVKDSNTKKAGKTGPMKTLLVRVMTPDLRERLENLRKKPENIPQPISNTSRANLNKLLTDYTEMKKAILHVYWEEFQKDPVGLMSRVAQPASKKIDQNKLKPEMDEKGNLTTAGFACSQCGQPLFVYKLEQVSEKGKAYTNYFGRCNVAEHEKLILLAQLKPEKDSDEAVTYSLGKFGQRALDFYSIHVTKESTHPVKPLAQIAGNRYASGPVGKALSDACMGTIASFLSKYQDIIIEHQKVVKGNQKRLESLRELAGKENLEYPSVTLPPQPHTKEGVDAYNEVIARVRMWVNLNLWQKLKLSRDDAKPLLRLKGFPSFPLVERQANEVDWWDMVCNVKKLINEKKEDGKVFWQNLAGYKRQEALRPYLSSEEDRKKGKKFARYQLGDLLLHLEKKHGEDWGKVYDEAWERIDKKVEGLSKHIKLEEERRSEDAQSKAALTDWLRAKASFVIEGLKEADKDEFCRCELKLQKWYGDLRGKPFAIEAENSILDISGFSKQYNCAFIWQKDGVKKLNLYLIINYFKGGKLRFKKIKPEAFEANRFYTVINKKSGEIVPMEVNFNFDDPNLIILPLAFGKRQGREFIWNDLLSLETGSLKLANGRVIEKTLYNRRTRQDEPALFVALTFERREVLDSSNIKPMNLIGVDRGENIPAVIALLDPEGCPLSRFKDSLGNPTHILRIGESYKEKQRTTQAKKEVEQRRAGGYSRKYASKAKNLADDMVRNTARDLLYYAVTQDAMLIFENLSRGFGRQGKRTFMAERQYTRMEDWLTAKLAYEGLPSKTYLSKTLAQYTSKTCSNCGFTITSADYDRVLEKLKKTATGWMTTINGKELKVEGQITYYNRYKRQNVVKDLSVELDRLSEESVNNDISSWTKGRSGEALSLLKKRFSHRPVQEKFVCLNCGFETHADEQAALNIARSWLFLRSQEYKKYQTNKTTGNTDKRAFVETWQSFYRKKLKEVWKPAV

SEQ ID NO: 27275 - protein, 978 aa, synthetic construct
  REGION 1..978: note = engineered CasX variant
QEIKRINKIRRRLVKDSNTKKAGKTGPMKTLLVRVMTPDLRERLENLRKKPENIPQPISNTSRANLNKLLTDYTEMKKAILHVYWEEFQKDPVGLMSRVAQPASKKIDQNKLKPEMDEKGNLTTAGFACSQCGQPLFVYKLEQVSEKGKAYTNYFGRCNVAEHEKLILLAQLKPEKDSDEAVTYSLGKFGQRALDFYSIHVTKESTHPVKPLAQIAGNRYASGPVGKALSDACMGTIASFLSKYQDIIIEHQKVVKGNQKRLESLRELAGKENLEYPSVTLPPQPHTKEGVDAYNEVIARVRMWVNLNLWQKLKLSRDDAKPLLRLKGFPSFPLVERQANEVDWWDMVCNVKKLINEKKEDGKVFWQNLAGYKRQEALRPYLSSEEDRKKGKKFARYQLGDLLLHLEKKHGEDWGKVYDEAWERIDKKVEGLSKHIKLEEERRSEDAQSKAALTDWLRAKASFVIEGLKEADKDEFCRCELKLQKWYGDLRGKPFAIEAENSILDISGFSKQYNCAFIWQKDGVKKLNLYLIINYFKGGKLRFKKIKPEAFEANRFYTVINKKSGEIVPMEVNFNFDDPNLIILPLAFGKRQGREFIWNDLLSLETGSLKLANGRVIEKTLYNRRTRQDEPALFVALTFERREVLDSSNIKPMNLIGVDRGENIPAVIALLDPEGCPLSRFKDSLGNPTHILRIGESYKEKQRTIQAKKEVEQRRAGGYSRKYASKAKNLADDMVRNTARDLLYYAVTQDAMLIFENLSRGFGRQGKRTFMAERQYTRMEDWLTAKLAYEGLPSKTYLSKTLAQYTSKTCSNCGFTITSADYDRVLEKLKKTATGWMTTINGKELKVEGQITYYNRYKRQNVVKDLSVELDRLSEESVNNDISSWTKGRSGEALSLLKKRFSHRPVQEKFVCLNCGFETHADEQAALNIARSWLFLRSQEYKKYQTNKTTGNTDKRAFVETWQSFYRKKLKEVWKPAV

SEQ ID NO: 27276 - protein, 978 aa, synthetic construct
  REGION 1..978: note = engineered CasX variant
QEIKRINKIRRRLVKDSNTKKAGKTGPMKTLLVRVMTPDLRERLENLRKKPENIPQPISNTSRANLNKLLTDYTEMKKAILHVYWEEFQKDPVGLMSRVAQPASKKIDQNKLKPEMDEKGNLTTAGFACSQCGQPLFVYKLEQVSEKGKAYTNYFGRCNVAEHEKLILLAQLKPEKDSDEAVTYSLGKFGQRALDFYSIHVTKESTHPVKPLAQIAGNRYASGPVGKALSDACMGTIASFLSKYQDIIIEHQKVVKGNQKRLESLRELAGKENLEYPSVTLPPQPHTKEGVDAYNEVIARVRMWVNLNLWQKLKLSRDDAKPLLRLKGFPSFPLVERQANEVDWWDMVCNVKKLINEKKEDGKVFWQNLAGYKRQEALRPYLSSEEDRKKGKKFARYQLGDLLLHLEKKHGEDWGKVYDEAWERIDKKVEGLSKHIKLEEERRSEDAQSKAALTDWLRAKASFVIEGLKEADKDEFCRCELKLQKWYGDLRGKPFAIEAENSILDISGFSKQYNCAFIWQKDGVKKLNLYLIINYFKGGKLRFKKIKPEAFEANRFYTVINKKSGEIVPMEVNFNFDDPNLIILPLAFGKRQGREFIWNDLLSLETGSLKLANGRVIEKTLYNRRTRQDEPALFVALTFERREVLDSSNIKPMNLIGVDRGENIPAVIALIDYEGCPLSRFKDSLGNPTHILRIGESYKEKQRTIQAKKEVEQRRAAGYSRKYASKAKNLADDMVRNTARDLLYYAVTQDAMLIFENLSRGFGRQGKRTFMAERQYTRMEDWLTAKLAYEGLPSKTYLSKTLAQYTSKTCSNCGFTITSADYDRVLEKLKKTATGWMTTINGKELKVEGQITYYNRYKRQNVVKDLSVELDRLSEESVNNDISSWTKGRSGEALSLLKKRFSHRPVQEKFVCLNCGFETHADEQAALNIARSWLFLRSQEYKKYQTNKTTGNTDKRAFVETWQSFYRKKLKEVWKPAV

SEQ ID NO: 27277 - protein, 978 aa, synthetic construct
  REGION 1..978: note = engineered CasX variant
QEIKRINKIRRRLVKDSNTKKAGKTGPMKTLLVRVMTPDLRERLENLRKKPENIPQPISNTSRANLNKLLTDYTEMKKAILHVYWEEFQKDPVGLMSRVAQPASKKIDQNKLKPEMDEKGNLTTAGFACSQCGQPLFVYKLEQVSEKGKAYTNYFGRCNVAEHEKLILLAQLKPEKDSDEAVTYSLGKFGQRALDFYSIHVTKESTHPVKPLAQIAGNRYASGPVGKALSDACMGTIASFLSKYQDIIIEHQKVVKGNQKRLESLRELAGKENLEYPSVTLPPQPHTKEGVDAYNEVIARVRMWVNLNLWQKLKLSRDDAKPLLRLKGFPSFPLVERQANEVDWWDMVCNVKKLINEKKEDGKVFWQNLAGYKRQEALRPYLSSEEDRKKGKKFARYQLGDLLLHLEKKHGEDWGKVYDEAWERIDKKVEGLSKHIKLEEERRSEDAQSKAALTDWLRAKASFVIEGLKEADKDEFCRCELKLQKWYGDLRGKPFAIEAENSILDISGFSKQYNCAFIWQKDGVKKLNLYLIINYFKGGKLRFKKIKPEAFEANRFYTVINKKSGEIVPMEVNFNFDDPNLIILPLAFGKRQGREFIWNDLLSLETGSLKLANGRVIEKTLYNRRTRQDEPALFVALTFERREVLDSSNIKPMNLIGVDRGENIPAVIALIDPEGCPLSRFKDSLGNPTHILRIGESYKEKQRTIQAKKEVEQRRAGGYSRKYASKAKNLADDMVRNTARDLLYYAVTQDAMLIFENLSRGFGRQGKRTFMAERQYTRMEDWLTAKLAYEGLPSKTYLSKTLAQYTSKTCSNCGFTITSADYDRVLEKLKKTATGWMTTINGKELKVEGQITYYNRYKRQNVVKDLSVELDRLSEESVNNDISSWTKGRSGEALSLLKKRFSHRPVQEKFVCLNCGFETHADEQAALNIARSWLFLRSQEYKKYQTNKTTGNTDKRAFVETWQSFYRKKLKEVWKPAV

SEQ ID NO: 27278 - protein, 978 aa, synthetic construct
  REGION 1..978: note = engineered CasX variant
QEIKRINKIRRRLVKDSNTKKAGKTGPMKTLLVRVMTPDLRERLENLRKKPENIPQPISNTSRANLNKLLTDYTEMKKAILHVYWEEFQKDPVGLMSRVAQPASKKIDQNKLKPEMDEKGNLTTAGFACSQCGQPLFVYKLEQVSEKGKAYTNYFGRCNVAEHEKLILLAQLKPEKDSDEAVTYSLGKFGQRALDFYSIHVTKESTHPVKPLAQIAGNRYASGPVGKALSDACMGTIASFLSKYQDIIIEHQKVVKGNQKRLESLRELAGKENLEYPSVTLPPQPHTKEGVDAYNEVIARVRMWVNLNLWQKLKLSRDDAKPLLRLKGFPSFPLVERQANEVDWWDMVCNVKKLINEKKEDGKVFWQNLAGYKRQEALRPYLSSEEDRKKGKKFARYQLGDLLLHLEKKHGEDWGKVYDEAWERIDKKVEGLSKHIKLEEERRSEDAQSKAALTDWLRAKASFVIEGLKEADKDEFCRCELKLQKWYGDLRGKPFAIEAENSILDISGFSKQYNCAFIWQKDGVKKLNLYLIINYFKGGKLRFKKIKPEAFEANRFYTVINKKSGEIVPMEVNFNFDDPNLIILPLAFGKRQGREFIWNDLLSLETGSLKLANGRVIEKTLYNRRTRQDEPALFVALTFERREVLDSSNIKPMNLIGVDRGENIPAVIALIDPEGCPLSRFKDSLGNPTHILRIGESYKEKQRTIQAKKEVEQRRAAGYSRKYASKAKNLADDMVRNTARDLLYYAVTQDAMLIFENLSRGFGRQGKRTFMAERQYTRMEDWLTAKLAYEGLPSKTYLSKTLAQYTSKTCSNCGFTITSADYDRVLEKLKKTATGWMTTINGKELKVEGQITYYNRYKRQNVVKDLSVELDRLSEESVNNDISSWTKGRSGEALSLLKKRFSHRPVQEKFVCLNCGFETHADEQAALNIARSWLFLRSQEYKKYQTNKTTGNTDKRAFVETWQSFYRKKLKEVWKPAV

SEQ ID NO: 27279 - protein, 978 aa, synthetic construct
  REGION 1..978: note = engineered CasX variant
QEIKRINKIRRRLVKDSNTKKAGKTGPMKTLLVRVMTPDLRERLENLRKKPENIPQPISNTSRANLNKLLTDYTEMKKAILHVYWEEFQKDPVGLMSRVAQPASKKIDQNKLKPEMDEKGNLTTAGFACSQCGQPLFVYKLEQVSEKGKAYTNYFGRCNVAEHEKLILLAQLKPEKDSDEAVTYSLGKFGQRALDFYSIHVTKESTHPVKPLAQIAGNRYASGPVGKALSDACMGTIASFLSKYQDIIIEHQKVVKGNQKRLESLRELAGKENLEYPSVTLPPQPHTKEGVDAYNEVIARVRMWVNLNLWQKLKLSRDDAKPLLRLKGFPSFPLVERQANEVDWWDMVCNVKKLINEKKEDGKVFWQNLAGYKRQEALRPYLSSEEDRKKGKKFARYQLGDLLLHLEKKHGEDWGKVYDEAWERIDKKVEGLSKHIKLEEERRSEDAQSKAALTDWLRAKASFVIEGLKEADKDEFCRCELKLQKWYGDLRGKPFAIEAENSILDISGFSKQYNCAFIWQKDGVKKLNLYLIINYFKGGKLRFKKIKPEAFEANRFYTVINKKSGEIVPMEVNFNFDDPNLIILPLAFGKRQGREFIWNDLLSLETGSLKLANGRVIEKTLYNRRTRQDEPALFVALTFERREVLDSSNIKPMNLIGVDRGENIPAVIAITDPEGRPLSRFKDSLGNPTHILRIGESYKEKQRTIQAKKEVEQRRAGGYSRKYASKAKNLADDMVRNTARDLLYYAVTQDAMLIFENLSRGFGRQGKRTFMAERQYTRMEDWLTAKLAYEGLPSKTYLSKTLAQYTSKTCSNCGFTITSADYDRVLEKLKKTATGWMTTINGKELKVEGQITYYNRYKRQNVVKDLSVELDRLSEESVNNDISSWTKGRSGEALSLLKKRFSHRPVQEKFVCLNCGFETHADEQAALNIARSWLFLRSQEYKKYQTNKTTGNTDKRAFVETWQSFYRKKLKEVWKPAV

SEQ ID NO: 27280 - protein, 978 aa, synthetic construct
  REGION 1..978: note = engineered CasX variant
QEIKRINKIRRRLVKDSNTKKAGKTGPMKTLLVRVMTPDLRERLENLRKKPENIPQPISNTSRANLNKLLTDYTEMKKAILHVYWEEFQKDPVGLMSRVAQPASKKIDQNKLKPEMDEKGNLTTAGFACSQCGQPLFVYKLEQVSEKGKAYTNYFGRCNVAEHEKLILLAQLKPEKDSDEAVTYSLGKFGQRALDFYSIHVTKESTHPVKPLAQIAGNRYASGPVGKALSDACMGTIASFLSKYQDIIIEHQKVVKGNQKRLESLRELAGKENLEYPSVTLPPQPHTKEGVDAYNEVIARVRMWVNLNLWQKLKLSRDDAKPLLRLKGFPSFPLVERQANEVDWWDMVCNVKKLINEKKEDGKVFWQNLAGYKRQEALRPYLSSEEDRKKGKKFARYQLGDLLLHLEKKHGEDWGKVYDEAWERIDKKVEGLSKHIKLEEERRSEDAQSKAALTDWLRAKASFVIEGLKEADKDEFCRCELKLQKWYGDLRGKPFAIEAENSILDISGFSKQYNCAFIWQKDGVKKLNLYLIINYFKGGKLRFKKIKPEAFEANRFYTVINKKSGEIVPMEVNFNFDDPNLIILPLAFGKRQGREFIWNDLLSLETGSLKLANGRVIEKTLYNRRTRQDEPALFVALTFERREVLDSSNIKPMNLIGVDRGENIPAVIAITDPEGCPLSRFKDSLGNPTHILRIGESYKENQRTIQAKKEVEQRRAGGYSRKYASKAKNLADDMVRNTARDLLYYAVTQDAMLIFENLSRGFGRQGKRTFMAERQYTRMEDWLTAKLAYEGLPSKTYLSKTLAQYTSKTCSNCGFTITSADYDRVLEKLKKTATGWMTTINGKELKVEGQITYYNRYKRQNVVKDLSVELDRLSEESVNNDISSWTKGRSGEALSLLKKRFSHRPVQEKFVCLNCGFETHADEQAALNIARSWLFLRSQEYKKYQTNKTTGNTDKRAFVETWQSFYRKKLKEVWKPAV

SEQ ID NO: 27281 - protein, 978 aa, synthetic construct
  REGION 1..978: note = engineered CasX variant
QEIKRINKIRRRLVKDSNTKKAGKTGPMKTLLVRVMTPDLRERLENLRKKPENIPQPISNTSRANLNKLLTDYTEMKKAILHVYWEEFQKDPVGLMSRVAQPASKKIDQNKLKPEMDEKGNLTTAGFACSQCGQPLFVYKLEQVSEKGKAYTNYFGRCNVAEHEKLILLAQLKPEKDSDEAVTYSLGKFGQRALDFYSIHVTKESTHPVKPLAQIAGNRYASGPVGKALSDACMGTIASFLSKYQDIIIEHQKVVKGNQKRLESLRELAGKENLEYPSVTLPPQPHTKEGVDAYNEVIARVRMWVNLNLWQKLKLSRDDAKPLLRLKGFPSFPLVERQANEVDWWDMVCNVKKLINEKKEDGKVFWQNLAGYKRQEALRPYLSSEEDRKKGKKFARYQLGDLLLHLEKKHGEDWGKVYDEAWERIDKKVEGLSKHIKLEEERRSEDAQSKAALTDWLRAKASFVIEGLKEADKDEFCRCELKLQKWYGDLRGKPFAIEAENSILDISGFSKQYNCAFIWQKDGVKKLNLYLIINYFKGGKLRFKKIKPEAFEANRFYTVINKKSGEIVPMEVNFNFDDPNLIILPLAFGKRQGREFIWNDLLSLETGSLKLANGRVIEKTLYNRRTRQDEPALFVALTFERREVLDSSNIKPMNLIGVDRGENIPAVIAITDPEGCPLSRFKDSLGNPTHILRIGESYKEKQRTIQAKKEVEQRRAGGYSRKYASKAKNLADDMVRNTARDLLYYAVTQDAMLIFENLSRGFGRQGKRTFMAERQYTRMEDWLTAKLAYEGLPSKTYLSKTLAQYTSKTCSNCGFTITSADYDRVLEKLKKTATGWMTTINGKELKVEGQITYYNRYKRQNVVKDLSVELDRLSEESVNNDISSWTKGRSGEALSLLKKRFSHRPVQEKFVCLNCGFETHADEQAALNIARSWLFLRSQEYKKYQTNKTTGNTDKRAFVETWQSFYRKKLKEVWKPAV

SEQ ID NO: 27282 - protein, 978 aa, synthetic construct
  REGION 1..978: note = engineered CasX variant
QEIKRINKIRRRLVKDSNTKKAGKTGPMKTLLVRVMTPDLRERLENLRKKPENIPQPISNTSRANLNKLLTDYTEMKKAILHVYWEEFQKDPVGLMSRVAQPASKKIDQNKLKPEMDEKGNLTTAGFACSQCGQPLFVYKLEQVSEKGKAYTNYFGRCNVAEHEKLILLAQLKPEKDSDEAVTYSLGKFGQRALDFYSIHVTKESTHPVKPLAQIAGNRYASGPVGKALSDACMGTIASFLSKYQDIIIEHQKVVKGNQKRLESLRELAGKENLEYPSVTLPPQPHTKEGVDAYNEVIARVRMWVNLNLWQKLKLSRDDAKPLLRLKGFPSFPLVERQANEVDWWDMVCNVKKLINEKKEDGKVFWQNLAGYKRQEALRPYLSSEEDRKKGKKFARYQLGDLLLHLEKKHGEDWGKVYDEAWERIDKKVEGLSKHIKLEEERRSEDAQSKAALTDWLRAKASFVIEGLKEADKDEFCRCELKLQKWYGDLRGKPFAIEAENSILDISGFSKQYNCAFIWQKDGVKKLNLYLIINYFKGGKLRFKKIKPEAFEANRFYTVINKKSGEIVPMEVNFNFDDPNLIILPLAFGKRQGREFIWNDLLSLETGSLKLANGRVIEKTLYNRRTRQDEPALFVALTFERREVLDSSNIKPMNLIGVDRGENIPAVIAFTDPEGCPLSRFKDSQGNPTHILRIGESYKEKQRTIQAKKEVEQRRAGGYSRKYASKAKNLADDMVRNTARDLLYYAVTQDAMLIFENLSRGFGRQGKRTFMAERQYTRMEDWLTAKLAYEGLPSKTYLSKTLAQYTSKTCSNCGFTITSADYDRVLEKLKKTATGWMTTINGKELKVEGQITYYNRYKRQNVVKDLSVELDRLSEESVNNDISSWTKGRSGEALSLLKKRFSHRPVQEKFVCLNCGFETHADEQAALNIARSWLFLRSQEYKKYQTNKTTGNTDKRAFVETWQSFYRKKLKEVWKPAV

SEQ ID NO: 27283 - protein, 978 aa, synthetic construct
  REGION 1..978: note = engineered CasX variant
QEIKRINKIRRRLVKDSNTKKAGKTGPMKTLLVRVMTPDLRERLENLRKKPENIPQPISNTSRANLNKLLTDYTEMKKAILHVYWEEFQKDPVGLMSRVAQPASKKIDQNKLKPEMDEKGNLTTAGFACSQCGQPLFVYKLEQVSEKGKAYTNYFGRCNVAEHEKLILLAQLKPEKDSDEAVTYSLGKFGQRALDFYSIHVTKESTHPVKPLAQIAGNRYASGPVGKALSDACMGTIASFLSKYQDIIIEHQKVVKGNQKRLESLRELAGKENLEYPSVTLPPQPHTKEGVDAYNEVIARVRMWVNLNLWQKLKLSRDDAKPLLRLKGFPSFPLVERQANEVDWWDMVCNVKKLINEKKEDGKVFWQNLAGYKRQEALRPYLSSEEDRKKGKKFARYQLGDLLLHLEKKHGEDWGKVYDEAWERIDKKVEGLSKHIKLEEERRSEDAQSKAALTDWLRAKASFVIEGLKEADKDEFCRCELKLQKWYGDLRGKPFAIEAENSILDISGFSKQYNCAFIWQKDGVKKLNLYLIINYFKGGKLRFKKIKPEAFEANRFYTVINKKSGEIVPMEVNFNFDDPNLIILPLAFGKRQGREFIWNDLLSLETGSLKLANGRVIEKTLYNRRTRQDEPALFVALTFERREVLDSSNIKPMNLIGVDRGENIPAVIAFTDPEGCPLSRFKDSQGNPTHILRIGESYKEKQRTIQAFKEVEQRRAGGYSRKYASKAKNLADDMVRNTARDLLYYAVTQDAMLIFENLSRGFGRQGKRTFMAERQYTRMEDWLTAKLAYEGLPSKTYLSKTLAQYTSKTCSNCGFTITSADYDRVLEKLKKTATGWMTTINGKELKVEGQITYYNRYKRQNVVKDLSVELDRLSEESVNNDISSWTKGRSGEALSLLKKRFSHRPVQEKFVCLNCGFETHADEQAALNIARSWLFLRSQEYKKYQTNKTTGNTDKRAFVETWQSFYRKKLKEVWKPAV

SEQ ID NO: 27284 - protein, 978 aa, synthetic construct
  REGION 1..978: note = engineered CasX variant
QEIKRINKIRRRLVKDSNTKKAGKTGPMKTLLVRVMTPDLRERLENLRKKPENIPQPISNTSRANLNKLLTDYTEMKKAILHVYWEEFQKDPVGLMSRVAQPASKKIDQNKLKPEMDEKGNLTTAGFACSQCGQPLFVYKLEQVSEKGKAYTNYFGRCNVAEHEKLILLAQLKPEKDSDEAVTYSLGKFGQRALDFYSIHVTKESTHPVKPLAQIAGNRYASGPVGKALSDACMGTIASFLSKYQDIIIEHQKVVKGNQKRLESLRELAGKENLEYPSVTLPPQPHTKEGVDAYNEVIARVRMWVNLNLWQKLKLSRDDAKPLLRLKGFPSFPLVERQANEVDWWDMVCNVKKLINEKKEDGKVFWQNLAGYKRQEALRPYLSSEEDRKKGKKFARYQLGDLLLHLEKKHGEDWGKVYDEAWERIDKKVEGLSKHIKLEEERRSEDAQSKAALTDWLRAKASFVIEGLKEADKDEFCRCELKLQKWYGDLRGKPFAIEAENSILDISGFSKQYNCAFIWQKDGVKKLNLYLIINYFKGGKLRFKKIKPEAFEANRFYTVINKKSGEIVPMEVNFNFDDPNLIILPLAFGKRQGREFIWNDLLSLETGSLKLANGRVIEKTLYNRRTRQDEPALFVALTFERREVLDSSNIKPMNLIGVDRGENIPAVIAFTDPEGCPLSRFKDSLGNPTHILRIGSSYKEKQRTIQAKKEVEQRRAGGYSRKYASKAKNLADDMVRNTARDLLYYAVTQDAMLIFENLSRGFGRQGKRTFMAERQYTRMEDWLTAKLAYEGLPSKTYLSKTLAQYTSKTCSNCGFTITSADYDRVLEKLKKTATGWMTTINGKELKVEGQITYYNRYKRQNVVKDLSVELDRLSEESVNNDISSWTKGRSGEALSLLKKRFSHRPVQEKFVCLNCGFETHADEQAALNIARSWLFLRSQEYKKYQTNKTTGNTDKRAFVETWQSFYRKKLKEVWKPAV

SEQ ID NO: 27285 - protein, 978 aa, synthetic construct
  REGION 1..978: note = engineered CasX variant
QEIKRINKIRRRLVKDSNTKKAGKTGPMKTLLVRVMTPDLRERLENLRKKPENIPQPISNTSRANLNKLLTDYTEMKKAILHVYWEEFQKDPVGLMSRVAQPASKKIDQNKLKPEMDEKGNLTTAGFACSQCGQPLFVYKLEQVSEKGKAYTNYFGRCNVAEHEKLILLAQLKPEKDSDEAVTYSLGKFGQRALDFYSIHVTKESTHPVKPLAQIAGNRYASGPVGKALSDACMGTIASFLSKYQDIIIEHQKVVKGNQKRLESLRELAGKENLEYPSVTLPPQPHTKEGVDAYNEVIARVRMWVNLNLWQKLKLSRDDAKPLLRLKGFPSFPLVERQANEVDWWDMVCNVKKLINEKKEDGKVFWQNLAGYKRQEALRPYLSSEEDRKKGKKFARYQLGDLLLHLEKKHGEDWGKVYDEAWERIDKKVEGLSKHIKLEEERRSEDAQSKAALTDWLRAKASFVIEGLKEADKDEFCRCELKLQKWYGDLRGKPFAIEAENSILDISGFSKQYNCAFIWQKDGVKKLNLYLIINYFKGGKLRFKKIKPEAFEANRFYTVINKKSGEIVPMEVNFNFDDPNLIILPLAFGKRQGREFIWNDLLSLETGSLKLANGRVIEKTLYNRRTRQDEPALFVALTFERREVLDSSNIKPMNLIGVDRGENIPAVIAFTDPEGCPLSRFKDSLGNPTHILRIGESYKEKQRTIQQKKEVEQRRAGGYSRKYASKAKNLADDMVRNTARDLLYYAVTQDAMLIFENLSRGFGRQGKRTFMAERQYTRMEDWLTAKLAYEGLPSKTYLSKTLAQYTSKTCSNCGFTITSADYDRVLEKLKKTATGWMTTINGKELKVEGQITYYNRYKRQNVVKDLSVELDRLSEESVNNDISSWTKGRSGEALSLLKKRFSHRPVQEKFVCLNCGFETHADEQAALNIARSWLFLRSQEYKKYQTNKTTGNTDKRAFVETWQSFYRKKLKEVWKPAV

SEQ ID NO: 27286 - protein, 978 aa, synthetic construct
  REGION 1..978: note = engineered CasX variant
QEIKRINKIRRRLVKDSNTKKAGKTGPMKTLLVRVMTPDLRERLENLRKKPENIPQPISNTSRANLNKLLTDYTEMKKAILHVYWEEFQKDPVGLMSRVAQPASKKIDQNKLKPEMDEKGNLTTAGFACSQCGQPLFVYKLEQVSEKGKAYTNYFGRCNVAEHEKLILLAQLKPEKDSDEAVTYSLGKFGQRALDFYSIHVTKESTHPVKPLAQIAGNRYASGPVGKALSDACMGTIASFLSKYQDIIIEHQKVVKGNQKRLESLRELAGKENLEYPSVTLPPQPHTKEGVDAYNEVIARVRMWVNLNLWQKLKLSRDDAKPLLRLKGFPSFPLVERQANEVDWWDMVCNVKKLINEKKEDGKVFWQNLAGYKRQEALRPYLSSEEDRKKGKKFARYQLGDLLLHLEKKHGEDWGKVYDEAWERIDKKVEGLSKHIKLEEERRSEDAQSKAALTDWLRAKASFVIEGLKEADKDEFCRCELKLQKWYGDLRGKPFAIEAENSILDISGFSKQYNCAFIWQKDGVKKLNLYLIINYFKGGKLRFKKIKPEAFEANRFYTVINKKSGEIVPMEVNFNFDDPNLIILPLAFGKRQGREFIWNDLLSLETGSLKLANGRVIEKTLYNRRTRQDEPALFVALTFERREVLDSSNIKPMNLIGVDRGENIPAVIAFTDPEGCPLSRFKDSLGNPTHILRIGESYKEKQRTIQQFKEVEQRRAGGYSRKYASKAKNLADDMVRNTARDLLYYAVTQDAMLIFENLSRGFGRQGKRTFMAERQYTRMEDWLTAKLAYEGLPSKTYLSKTLAQYTSKTCSNCGFTITSADYDRVLEKLKKTATGWMTTINGKELKVEGQITYYNRYKRQNVVKDLSVELDRLSEESVNNDISSWTKGRSGEALSLLKKRFSHRPVQEKFVCLNCGFETHADEQAALNIARSWLFLRSQEYKKYQTNKTTGNTDKRAFVETWQSFYRKKLKEVWKPAV

SEQ ID NO: 27287 - protein, 978 aa, synthetic construct
  REGION 1..978: note = engineered CasX variant
QEIKRINKIRRRLVKDSNTKKAGKTGPMKTLLVRVMTPDLRERLENLRKKPENIPQPISNTSRANLNKLLTDYTEMKKAILHVYWEEFQKDPVGLMSRVAQPASKKIDQNKLKPEMDEKGNLTTAGFACSQCGQPLFVYKLEQVSEKGKAYTNYFGRCNVAEHEKLILLAQLKPEKDSDEAVTYSLGKFGQRALDFYSIHVTKESTHPVKPLAQIAGNRYASGPVGKALSDACMGTIASFLSKYQDIIIEHQKVVKGNQKRLESLRELAGKENLEYPSVTLPPQPHTKEGVDAYNEVIARVRMWVNLNLWQKLKLSRDDAKPLLRLKGFPSFPLVERQANEVDWWDMVCNVKKLINEKKEDGKVFWQNLAGYKRQEALRPYLSSEEDRKKGKKFARYQLGDLLLHLEKKHGEDWGKVYDEAWERIDKKVEGLSKHIKLEEERRSEDAQSKAALTDWLRAKASFVIEGLKEADKDEFCRCELKLQKWYGDLRGKPFAIEAENSILDISGFSKQYNCAFIWQKDGVKKLNLYLIINYFKGGKLRFKKIKPEAFEANRFYTVINKKSGEIVPMEVNFNFDDPNLIILPLAFGKRQGREFIWNDLLSLETGSLKLANGRVIEKTLYNRRTRQDEPALFVALTFERREVLDSSNIKPMNLIGVDRGENIPAVIAFTDPEGCPLSRFKDSLGNPTHILRIGESYKEKQRTIQAKKEVEQRRAGGYSRKYASKAKNLADDMVRNTARDLLYYAVTQDAMLIFENLSRGFGRQGKRTFMAERQYTRMEDWLTAKLAYEGLPSKTYLSKTLAQYTSKTCSNCGFTITSADYDRVLEKLKKTATGWMTTINGKELKVEGQITYYNRYKRQNVVKDLSVELDRLSEESVNNDISSWTKGRSGEALSLLKKRFSHRPVQEKFVCLNCGFETHADEQAALNIARSWLFLRSQEYKKYQTNKTTGNTDKRAFVETWQSFYRKKLKEVWKPAV

SEQ ID NO: 27288 - protein, 978 aa, synthetic construct
  REGION 1..978: note = engineered CasX variant
QEIKRINKIRRRLVKDSNTKKAGKTGPMKTLLVRVMTPDLRERLENLRKKPENIPQPISNTSRANLNKLLTDYTEMKKAILHVYWEEFQKDPVGLMSRVAQPASKKIDQNKLKPEMDEKGNLTTAGFACSQCGQPLFVYKLEQVSEKGKAYTNYFGRCNVAEHEKLILLAQLKPEKDSDEAVTYSLGKFGQRALDFYSIHVTKESTHPVKPLAQIAGNRYASGPVGKALSDACMGTIASFLSKYQDIIIEHQKVVKGNQKRLESLRELAGKENLEYPSVTLPPQPHTKEGVDAYNEVIARVRMWVNLNLWQKLKLSRDDAKPLLRLKGFPSFPLVERQANEVDWWDMVCNVKKLINEKKEDGKVFWQNLAGYKRQEALRPYLSSEEDRKKGKKFARYQLGDLLLHLEKKHGEDWGKVYDEAWERIDKKVEGLSKHIKLEEERRSEDAQSKAALTDWLRAKASFVIEGLKEADKDEFCRCELKLQKWYGDLRGKPFAIEAENSILDISGFSKQYNCAFIWQKDGVKKLNLYLIINYFKGGKLRFKKIKPEAFEANRFYTVINKKSGEIVPMEVNFNFDDPNLIILPLAFGKRQGREFIWNDLLSLETGSLKLANGRVIEKTLYNRRTRQDEPALFVALTFERREVLDSSNIKPMNLIGVDRGENIPAVIAFTDPEGCPLSRFKDSLGNPTHILRIGESYKEKQRTIQAFKEVEQRRAGGYSRKYASKAKNLADDMVRNTARDLLYYAVTQDAMLIFENLSRGFGRQGKRTFMAERQYTRMEDWLTAKLAYEGLPSKTYLSKTLAQYTSKTCSNCGFTITSADYDRVLEKLKKTATGWMTTINGKELKVEGQITYYNRYKRQNVVKDLSVELDRLSEESVNNDISSWTKGRSGEALSLLKKRFSHRPVQEKFVCLNCGFETHADEQAALNIARSWLFLRSQEYKKYQTNKTTGNTDKRAFVETWQSFYRKKLKEVWKPAV

SEQ ID NO: 27289 - protein, 978 aa, synthetic construct
  REGION 1..978: note = engineered CasX variant
QEIKRINKIRRRLVKDSNTKKAGKTGPMKTLLVRVMTPDLRERLENLRKKPENIPQPISNTSRANLNKLLTDYTEMKKAILHVYWEEFQKDPVGLMSRVAQPASKKIDQNKLKPEMDEKGNLTTAGFACSQCGQPLFVYKLEQVSEKGKAYTNYFGRCNVAEHEKLILLAQLKPEKDSDEAVTYSLGKFGQRALDFYSIHVTKESTHPVKPLAQIAGNRYASGPVGKALSDACMGTIASFLSKYQDIIIEHQKVVKGNQKRLESLRELAGKENLEYPSVTLPPQPHTKEGVDAYNEVIARVRMWVNLNLWQKLKLSRDDAKPLLRLKGFPSFPLVERQANEVDWWDMVCNVKKLINEKKEDGKVFWQNLAGYKRQEALRPYLSSEEDRKKGKKFARYQLGDLLLHLEKKHGEDWGKVYDEAWERIDKKVEGLSKHIKLEEERRSEDAQSKAALTDWLRAKASFVIEGLKEADKDEFCRCELKLQKWYGDLRGKPFAIEAENSILDISGFSKQYNCAFIWQKDGVKKLNLYLIINYFKGGKLRFKKIKPEAFEANRFYTVINKKSGEIVPMEVNFNFDDPNLIILPLAFGKRQGREFIWNDLLSLETGSLKLANGRVIEKTLYNRRTRQDEPALFVALTFERREVLDSSNIKPMNLIGVDRGENIPAVIAFTDPEGCPLSRFKDKLGNPTHILRIGESYKEKQRTIQAKKEVEQRRAGGYSRKYASKAKNLADDMVRNTARDLLYYAVTQDAMLIFENLSRGFGRQGKRTFMAERQYTRMEDWLTAKLAYEGLPSKTYLSKTLAQYTSKTCSNCGFTITSADYDRVLEKLKKTATGWMTTINGKELKVEGQITYYNRYKRQNVVKDLSVELDRLSEESVNNDISSWTKGRSGEALSLLKKRFSHRPVQEKFVCLNCGFETHADEQAALNIARSWLFLRSQEYKKYQTNKTTGNTDKRAFVETWQSFYRKKLKEVWKPAV

SEQ ID NO: 27290 - protein, 978 aa, synthetic construct
  REGION 1..978: note = engineered CasX variant
QEIKRINKIRRRLVKDSNTKKAGKTGPMKTLLVRVMTPDLRERLENLRKKPENIPQPISNTSRANLNKLLTDYTEMKKAILHVYWEEFQKDPVGLMSRVAQPASKKIDQNKLKPEMDEKGNLTTAGFACSQCGQPLFVYKLEQVSEKGKAYTNYFGRCNVAEHEKLILLAQLKPEKDSDEAVTYSLGKFGQRALDFYSIHVTKESTHPVKPLAQIAGNRYASGPVGKALSDACMGTIASFLSKYQDIIIEHQKVVKGNQKRLESLRELAGKENLEYPSVTLPPQPHTKEGVDAYNEVIARVRMWVNLNLWQKLKLSRDDAKPLLRLKGFPSFPLVERQANEVDWWDMVCNVKKLINEKKEDGKVFWQNLAGYKRQEALRPYLSSEEDRKKGKKFARYQLGDLLLHLEKKHGEDWGKVYDEAWERIDKKVEGLSKHIKLEEERRSEDAQSKAALTDWLRAKASFVIEGLKEADKDEFCRCELKLQKWYGDLRGKPFAIEAENSILDISGFSKQYNCAFIWQKDGVKKLNLYLIINYFKGGKLRFKKIKPEAFEANRFYTVINKKSGEIVPMEVNFNFDDPNLIILPLAFGKRQGREFIWNDLLSLETGSLKLANGRVIEKTLYNRRTRQDEPALFVALTFERREVLDSSNIKPMNLIGVDRGENIPAVIAFTDPEGCPLSRFKDKLGNPTHILRIGESYKEKQRTIQAFKEVEQRRAGGYSRKYASKAKNLADDMVRNTARDLLYYAVTQDAMLIFENLSRGFGRQGKRTFMAERQYTRMEDWLTAKLAYEGLPSKTYLSKTLAQYTSKTCSNCGFTITSADYDRVLEKLKKTATGWMTTINGKELKVEGQITYYNRYKRQNVVKDLSVELDRLSEESVNNDISSWTKGRSGEALSLLKKRFSHRPVQEKFVCLNCGFETHADEQAALNIARSWLFLRSQEYKKYQTNKTTGNTDKRAFVETWQSFYRKKLKEVWKPAV

SEQ ID NO: 27291 - protein, 978 aa, synthetic construct
  REGION 1..978: note = engineered CasX variant
QEIKRINKIRRRLVKDSNTKKAGKTGPMKTLLVRVMTPDLRERLENLRKKPENIPQPISNTSRANLNKLLTDYTEMKKAILHVYWEEFQKDPVGLMSRVAQPASKKIDQNKLKPEMDEKGNLTTAGFACSQCGQPLFVYKLEQVSEKGKAYTNYFGRCNVAEHEKLILLAQLKPEKDSDEAVTYSLGKFGQRALDFYSIHVTKESTHPVKPLAQIAGNRYASGPVGKALSDACMGTIASFLSKYQDIIIEHQKVVKGNQKRLESLRELAGKENLEYPSVTLPPQPHTKEGVDAYNEVIARVRMWVNLNLWQKLKLSRDDAKPLLRLKGFPSFPLVERQANEVDWWDMVCNVKKLINEKKEDGKVFWQNLAGYKRQEALRPYLSSEEDRKKGKKFARYQLGDLLLHLEKKHGEDWGKVYDEAWERIDKKVEGLSKHIKLEEERRSEDAQSKAALTDWLRAKASFVIEGLKEADKDEFCRCELKLQKWYGDLRGKPFAIEAENSILDISGFSKQYNCAFIWQKDGVKKLNLYLIINYFKGGKLRFKKIKPEAFEANRFYTVINKKSGEIVPMEVNFNFDDPNLIILPLAFGKRQGREFIWNDLLSLETGSLKLANGRVIEKTLYNRRTRQDEPALFVALTFERREVLDSSNIKPMNLIGVDRGENIPAVIAFTDPEGCPLSKFKDSQGNPTHILRIGESYKEKQRTIQAKKEVEQRRAGGYSRKYASKAKNLADDMVRNTARDLLYYAVTQDAMLIFENLSRGFGRQGKRTFMAERQYTRMEDWLTAKLAYEGLPSKTYLSKTLAQYTSKTCSNCGFTITSADYDRVLEKLKKTATGWMTTINGKELKVEGQITYYNRYKRQNVVKDLSVELDRLSEESVNNDISSWTKGRSGEALSLLKKRFSHRPVQEKFVCLNCGFETHADEQAALNIARSWLFLRSQEYKKYQTNKTTGNTDKRAFVETWQSFYRKKLKEVWKPAV

SEQ ID NO: 27292 - protein, 978 aa, synthetic construct
  REGION 1..978: note = engineered CasX variant
QEIKRINKIRRRLVKDSNTKKAGKTGPMKTLLVRVMTPDLRERLENLRKKPENIPQPISNTSRANLNKLLTDYTEMKKAILHVYWEEFQKDPVGLMSRVAQPASKKIDQNKLKPEMDEKGNLTTAGFACSQCGQPLFVYKLEQVSEKGKAYTNYFGRCNVAEHEKLILLAQLKPEKDSDEAVTYSLGKFGQRALDFYSIHVTKESTHPVKPLAQIAGNRYASGPVGKALSDACMGTIASFLSKYQDIIIEHQKVVKGNQKRLESLRELAGKENLEYPSVTLPPQPHTKEGVDAYNEVIARVRMWVNLNLWQKLKLSRDDAKPLLRLKGFPSFPLVERQANEVDWWDMVCNVKKLINEKKEDGKVFWQNLAGYKRQEALRPYLSSEEDRKKGKKFARYQLGDLLLHLEKKHGEDWGKVYDEAWERIDKKVEGLSKHIKLEEERRSEDAQSKAALTDWLRAKASFVIEGLKEADKDEFCRCELKLQKWYGDLRGKPFAIEAENSILDISGFSKQYNCAFIWQKDGVKKLNLYLIINYFKGGKLRFKKIKPEAFEANRFYTVINKKSGEIVPMEVNFNFDDPNLIILPLAFGKRQGREFIWNDLLSLETGSLKLANGRVIEKTLYNRRTRQDEPALFVALTFERREVLDSSNIKPMNLIGVDRGENIPAVIAFTDPEGCPLSKFKDSLGNPTHILRIGESYKEKQRTIQQKKEVEQRRAGGYSRKYASKAKNLADDMVRNTARDLLYYAVTQDAMLIFENLSRGFGRQGKRTFMAERQYTRMEDWLTAKLAYEGLPSKTYLSKTLAQYTSKTCSNCGFTITSADYDRVLEKLKKTATGWMTTINGKELKVEGQITYYNRYKRQNVVKDLSVELDRLSEESVNNDISSWTKGRSGEALSLLKKRFSHRPVQEKFVCLNCGFETHADEQAALNIARSWLFLRSQEYKKYQTNKTTGNTDKRAFVETWQSFYRKKLKEVWKPAV

SEQ ID NO: 27293 - protein, 978 aa, synthetic construct
  REGION 1..978: note = engineered CasX variant
QEIKRINKIRRRLVKDSNTKKAGKTGPMKTLLVRVMTPDLRERLENLRKKPENIPQPISNTSRANLNKLLTDYTEMKKAILHVYWEEFQKDPVGLMSRVAQPASKKIDQNKLKPEMDEKGNLTTAGFACSQCGQPLFVYKLEQVSEKGKAYTNYFGRCNVAEHEKLILLAQLKPEKDSDEAVTYSLGKFGQRALDFYSIHVTKESTHPVKPLAQIAGNRYASGPVGKALSDACMGTIASFLSKYQDIIIEHQKVVKGNQKRLESLRELAGKENLEYPSVTLPPQPHTKEGVDAYNEVIARVRMWVNLNLWQKLKLSRDDAKPLLRLKGFPSFPLVERQANEVDWWDMVCNVKKLINEKKEDGKVFWQNLAGYKRQEALRPYLSSEEDRKKGKKFARYQLGDLLLHLEKKHGEDWGKVYDEAWERIDKKVEGLSKHIKLEEERRSEDAQSKAALTDWLRAKASFVIEGLKEADKDEFCRCELKLQKWYGDLRGKPFAIEAENSILDISGFSKQYNCAFIWQKDGVKKLNLYLIINYFKGGKLRFKKIKPEAFEANRFYTVINKKSGEIVPMEVNFNFDDPNLIILPLAFGKRQGREFIWNDLLSLETGSLKLANGRVIEKTLYNRRTRQDEPALFVALTFERREVLDSSNIKPMNLIGVDRGENIPAVIAFTDPEGCPLSKFKDSLGNPTHILRIGESYKEKQRTIQAKKEVEQRRAGGYSRKYASKAKNLADDMVRNTARDLLYYAVTQDAMLIFENLSRGFGRQGKRTFMAERQYTRMEDWLTAKLAYEGLPSKTYLSKTLAQYTSKTCSNCGFTITSADYDRVLEKLKKTATGWMTTINGKELKVEGQITYYNRYKRQNVVKDLSVELDRLSEESVNNDISSWTKGRSGEALSLLKKRFSHRPVQEKFVCLNCGFETHADEQAALNIARSWLFLRSQEYKKYQTNKTTGNTDKRAFVETWQSFYRKKLKEVWKPAV

SEQ ID NO: 27294 - protein, 978 aa, synthetic construct
  REGION 1..978: note = engineered CasX variant
QEIKRINKIRRRLVKDSNTKKAGKTGPMKTLLVRVMTPDLRERLENLRKKPENIPQPISNTSRANLNKLLTDYTEMKKAILHVYWEEFQKDPVGLMSRVAQPASKKIDQNKLKPEMDEKGNLTTAGFACSQCGQPLFVYKLEQVSEKGKAYTNYFGRCNVAEHEKLILLAQLKPEKDSDEAVTYSLGKFGQRALDFYSIHVTKESTHPVKPLAQIAGNRYASGPVGKALSDACMGTIASFLSKYQDIIIEHQKVVKGNQKRLESLRELAGKENLEYPSVTLPPQPHTKEGVDAYNEVIARVRMWVNLNLWQKLKLSRDDAKPLLRLKGFPSFPLVERQANEVDWWDMVCNVKKLINEKKEDGKVFWQNLAGYKRQEALRPYLSSEEDRKKGKKFARYQLGDLLLHLEKKHGEDWGKVYDEAWERIDKKVEGLSKHIKLEEERRSEDAQSKAALTDWLRAKASFVIEGLKEADKDEFCRCELKLQKWYGDLRGKPFAIEAENSILDISGFSKQYNCAFIWQKDGVKKLNLYLIINYFKGGKLRFKKIKPEAFEANRFYTVINKKSGEIVPMEVNFNFDDPNLIILPLAFGKRQGREFIWNDLLSLETGSLKLANGRVIEKTLYNRRTRQDEPALFVALTFERREVLDSSNIKPMNLIGVDRGENIPAVIAFTDPEGCPLSKFKDSLGNPTHILRIGESYKEKQRTIQAFKEVEQRRAGGYSRKYASKAKNLADDMVRNTARDLLYYAVTQDAMLIFENLSRGFGRQGKRTFMAERQYTRMEDWLTAKLAYEGLPSKTYLSKTLAQYTSKTCSNCGFTITSADYDRVLEKLKKTATGWMTTINGKELKVEGQITYYNRYKRQNVVKDLSVELDRLSEESVNNDISSWTKGRSGEALSLLKKRFSHRPVQEKFVCLNCGFETHADEQAALNIARSWLFLRSQEYKKYQTNKTTGNTDKRAFVETWQSFYRKKLKEVWKPAV

SEQ ID NO: 27295 - protein, 978 aa, synthetic construct
  REGION 1..978: note = engineered CasX variant
QEIKRINKIRRRLVKDSNTKKAGKTGPMKTLLVRVMTPDLRERLENLRKKPENIPQPISNTSRANLNKLLTDYTEMKKAILHVYWEEFQKDPVGLMSRVAQPASKKIDQNKLKPEMDEKGNLTTAGFACSQCGQPLFVYKLEQVSEKGKAYTNYFGRCNVAEHEKLILLAQLKPEKDSDEAVTYSLGKFGQRALDFYSIHVTKESTHPVKPLAQIAGNRYASGPVGKALSDACMGTIASFLSKYQDIIIEHQKVVKGNQKRLESLRELAGKENLEYPSVTLPPQPHTKEGVDAYNEVIARVRMWVNLNLWQKLKLSRDDAKPLLRLKGFPSFPLVERQANEVDWWDMVCNVKKLINEKKEDGKVFWQNLAGYKRQEALRPYLSSEEDRKKGKKFARYQLGDLLLHLEKKHGEDWGKVYDEAWERIDKKVEGLSKHIKLEEERRSEDAQSKAALTDWLRAKASFVIEGLKEADKDEFCRCELKLQKWYGDLRGKPFAIEAENSILDISGFSKQYNCAFIWQKDGVKKLNLYLIINYFKGGKLRFKKIKPEAFEANRFYTVINKKSGEIVPMEVNFNFDDPNLIILPLAFGKRQGREFIWNDLLSLETGSLKLANGRVIEKTLYNRRTRQDEPALFVALTFERREVLDSSNIKPMNLIGVDRGENIPAVIAFTDPEGCPLSKFKDKLGNPTHILRIGESYKEKQRTIQAKKEVEQRRAGGYSRKYASKAKNLADDMVRNTARDLLYYAVTQDAMLIFENLSRGFGRQGKRTFMAERQYTRMEDWLTAKLAYEGLPSKTYLSKTLAQYTSKTCSNCGFTITSADYDRVLEKLKKTATGWMTTINGKELKVEGQITYYNRYKRQNVVKDLSVELDRLSEESVNNDISSWTKGRSGEALSLLKKRFSHRPVQEKFVCLNCGFETHADEQAALNIARSWLFLRSQEYKKYQTNKTTGNTDKRAFVETWQSFYRKKLKEVWKPAV

SEQ ID NO: 27296 - protein, 978 aa, synthetic construct
  REGION 1..978: note = engineered CasX variant
QEIKRINKIRRRLVKDSNTKKAGKTGPMKTLLVRVMTPDLRERLENLRKKPENIPQPISNTSRANLNKLLTDYTEMKKAILHVYWEEFQKDPVGLMSRVAQPASKKIDQNKLKPEMDEKGNLTTAGFACSQCGQPLFVYKLEQVSEKGKAYTNYFGRCNVAEHEKLILLAQLKPEKDSDEAVTYSLGKFGQRALDFYSIHVTKESTHPVKPLAQIAGNRYASGPVGKALSDACMGTIASFLSKYQDIIIEHQKVVKGNQKRLESLRELAGKENLEYPSVTLPPQPHTKEGVDAYNEVIARVRMWVNLNLWQKLKLSRDDAKPLLRLKGFPSFPLVERQANEVDWWDMVCNVKKLINEKKEDGKVFWQNLAGYKRQEALRPYLSSEEDRKKGKKFARYQLGDLLLHLEKKHGEDWGKVYDEAWERIDKKVEGLSKHIKLEEERRSEDAQSKAALTDWLRAKASFVIEGLKEADKDEFCRCELKLQKWYGDLRGKPFAIEAENSILDISGFSKQYNCAFIWQKDGVKKLNLYLIINYFKGGKLRFKKIKPEAFEANRFYTVINKKSGEIVPMEVNFNFDDPNLIILPLAFGKRQGREFIWNDLLSLETGSLKLANGRVIEKTLYNRRTRQDEPALFVALTFERREVLDSSNIKPMNLIGVDRGENIPAVIAFTDPEGCPLSAFKDSLGNPTHILRIGESYKEKQRTIQQKKEVEQRRAGGYSRKYASKAKNLADDMVRNTARDLLYYAVTQDAMLIFENLSRGFGRQGKRTFMAERQYTRMEDWLTAKLAYEGLPSKTYLSKTLAQYTSKTCSNCGFTITSADYDRVLEKLKKTATGWMTTINGKELKVEGQITYYNRYKRQNVVKDLSVELDRLSEESVNNDISSWTKGRSGEALSLLKKRFSHRPVQEKFVCLNCGFETHADEQAALNIARSWLFLRSQEYKKYQTNKTTGNTDKRAFVETWQSFYRKKLKEVWKPAV

SEQ ID NO: 27297 - protein, 978 aa, synthetic construct
  REGION 1..978: note = engineered CasX variant
QEIKRINKIRRRLVKDSNTKKAGKTGPMKTLLVRVMTPDLRERLENLRKKPENIPQPISNTSRANLNKLLTDYTEMKKAILHVYWEEFQKDPVGLMSRVAQPASKKIDQNKLKPEMDEKGNLTTAGFACSQCGQPLFVYKLEQVSEKGKAYTNYFGRCNVAEHEKLILLAQLKPEKDSDEAVTYSLGKFGQRALDFYSIHVTKESTHPVKPLAQIAGNRYASGPVGKALSDACMGTIASFLSKYQDIIIEHQKVVKGNQKRLESLRELAGKENLEYPSVTLPPQPHTKEGVDAYNEVIARVRMWVNLNLWQKLKLSRDDAKPLLRLKGFPSFPLVERQANEVDWWDMVCNVKKLINEKKEDGKVFWQNLAGYKRQEALRPYLSSEEDRKKGKKFARYQLGDLLLHLEKKHGEDWGKVYDEAWERIDKKVEGLSKHIKLEEERRSEDAQSKAALTDWLRAKASFVIEGLKEADKDEFCRCELKLQKWYGDLRGKPFAIEAENSILDISGFSKQYNCAFIWQKDGVKKLNLYLIINYFKGGKLRFKKIKPEAFEANRFYTVINKKSGEIVPMEVNFNFDDPNLIILPLAFGKRQGREFIWNDLLSLETGSLKLANGRVIEKTLYNRRTRQDEPALFVALTFERREVLDSSNIKPMNLIGVDRGENIPAVIAFTDPEGCPLSAFKDSLGNPTHILRIGESYKEKQRTIQAKKEVEQRRAGGYSRKYASKAKNLADDMVRNTARDLLYYAVTQDAMLIFENLSRGFGRQGKRTFMAERQYTRMEDWLTAKLAYEGLPSKTYLSKTLAQYTSKTCSNCGFTITSADYDRVLEKLKKTATGWMTTINGKELKVEGQITYYNRYKRQNVVKDLSVELDRLSEESVNNDISSWTKGRSGEALSLLKKRFSHRPVQEKFVCLNCGFETHADEQAALNIARSWLFLRSQEYKKYQTNKTTGNTDKRAFVETWQSFYRKKLKEVWKPAV

SEQ ID NO: 27298 - protein, 978 aa, synthetic construct
  REGION 1..978: note = engineered CasX variant
QEIKRINKIRRRLVKDSNTKKAGKTGPMKTLLVRVMTPDLRERLENLRKKPENIPQPISNTSRANLNKLLTDYTEMKKAILHVYWEEFQKDPVGLMSRVAQPASKKIDQNKLKPEMDEKGNLTTAGFACSQCGQPLFVYKLEQVSEKGKAYTNYFGRCNVAEHEKLILLAQLKPEKDSDEAVTYSLGKFGQRALDFYSIHVTKESTHPVKPLAQIAGNRYASGPVGKALSDACMGTIASFLSKYQDIIIEHQKVVKGNQKRLESLRELAGKENLEYPSVTLPPQPHTKEGVDAYNEVIARVRMWVNLNLWQKLKLSRDDAKPLLRLKGFPSFPLVERQANEVDWWDMVCNVKKLINEKKEDGKVFWQNLAGYKRQEALRPYLSSEEDRKKGKKFARYQLGDLLLHLEKKHGEDWGKVYDEAWERIDKKVEGLSKHIKLEEERRSEDAQSKAALTDWLRAKASFVIEGLKEADKDEFCRCELKLQKWYGDLRGKPFAIEAENSILDISGFSKQYNCAFIWQKDGVKKLNLYLIINYFKGGKLRFKKIKPEAFEANRFYTVINKKSGEIVPMEVNFNFDDPNLIILPLAFGKRQGREFIWNDLLSLETGSLKLANGRVIEKTLYNRRTRQDEPALFVALTFERREVLDSSNIKPMNLIGVDRGENIPAVIAFTDPEGCPLSAFKDKLGNPTHILRIGESYKEKQRTIQAKKEVEQRRAGGYSRKYASKAKNLADDMVRNTARDLLYYAVTQDAMLIFENLSRGFGRQGKRTFMAERQYTRMEDWLTAKLAYEGLPSKTYLSKTLAQYTSKTCSNCGFTITSADYDRVLEKLKKTATGWMTTINGKELKVEGQITYYNRYKRQNVVKDLSVELDRLSEESVNNDISSWTKGRSGEALSLLKKRFSHRPVQEKFVCLNCGFETHADEQAALNIARSWLFLRSQEYKKYQTNKTTGNTDKRAFVETWQSFYRKKLKEVWKPAV

SEQ ID NO: 27299 - protein, 978 aa, synthetic construct
  REGION 1..978: note = engineered CasX variant
QEIKRINKIRRRLVKDSNTKKAGKTGPMKTLLVRVMTPDLRERLENLRKKPENIPQPISNTSRANLNKLLTDYTEMKKAILHVYWEEFQKDPVGLMSRVAQPASKKIDQNKLKPEMDEKGNLTTAGFACSQCGQPLFVYKLEQVSEKGKAYTNYFGRCNVAEHEKLILLAQLKPEKDSDEAVTYSLGKFGQRALDFYSIHVTKESTHPVKPLAQIAGNRYASGPVGKALSDACMGTIASFLSKYQDIIIEHQKVVKGNQKRLESLRELAGKENLEYPSVTLPPQPHTKEGVDAYNEVIARVRMWVNLNLWQKLKLSRDDAKPLLRLKGFPSFPLVERQANEVDWWDMVCNVKKLINEKKEDGKVFWQNLAGYKRQEALRPYLSSEEDRKKGKKFARYQLGDLLLHLEKKHGEDWGKVYDEAWERIDKKVEGLSKHIKLEEERRSEDAQSKAALTDWLRAKASFVIEGLKEADKDEFCRCELKLQKWYGDLRGKPFAIEAENSILDISGFSKQYNCAFIWQKDGVKKLNLYLIINYFKGGKLRFKKIKPEAFEANRFYTVINKKSGEIVPMEVNFNFDDPNLIILPLAFGKRQGREFIWNDLLSLETGSLKLANGRVIEKTLYNRRTRQDEPALFVALTFERREVLDSSNIKPMNLIGVDRGENIPAVIACTDPEGCPLSRFKDSLGNPTHILRIGESYKEKQRTIQAKKEVEQRRAGGYSRKYASKAKNLADDMVRNTARDLLYYAVTQDAMLIFENLSRGFGRQGKRTFMAERQYTRMEDWLTAKLAYEGLPSKTYLSKTLAQYTSKTCSNCGFTITSADYDRVLEKLKKTATGWMTTINGKELKVEGQITYYNRYKRQNVVKDLSVELDRLSEESVNNDISSWTKGRSGEALSLLKKRFSHRPVQEKFVCLNCGFETHADEQAALNIARSWLFLRSQEYKKYQTNKTTGNTDKRAFVETWQSFYRKKLKEVWKPAV

SEQ ID NO: 27300 - protein, 978 aa, synthetic construct
  REGION 1..978: note = engineered CasX variant
QEIKRINKIRRRLVKDSNTKKAGKTGPMKTLLVRVMTPDLRERLENLRKKPENIPQPISNTSRANLNKLLTDYTEMKKAILHVYWEEFQKDPVGLMSRVAQPASKKIDQNKLKPEMDEKGNLTTAGFACSQCGQPLFVYKLEQVSEKGKAYTNYFGRCNVAEHEKLILLAQLKPEKDSDEAVTYSLGKFGQRALDFYSIHVTKESTHPVKPLAQIAGNRYASGPVGKALSDACMGTIASFLSKYQDIIIEHQKVVKGNQKRLESLRELAGKENLEYPSVTLPPQPHTKEGVDAYNEVIARVRMWVNLNLWQKLKLSRDDAKPLLRLKGFPSFPLVERQANEVDWWDMVCNVKKLINEKKEDGKVFWQNLAGYKRQEALRPYLSSEEDRKKGKKFARYQLGDLLLHLEKKHGEDWGKVYDEAWERIDKKVEGLSKHIKLEEERRSEDAQSKAALTDWLRAKASFVIEGLKEADKDEFCRCELKLQKWYGDLRGKPFAIEAENSILDISGFSKQYNCAFIWQKDGVKKLNLYLIINYFKGGKLRFKKIKPEAFEANRFYTVINKKSGEIVPMEVNFNFDDPNLIILPLAFGKRQGREFIWNDLLSLETGSLKLANGRVIEKTLYNRRTRQDEPALFVALTFERREVLDSSNIKPMNLIGVDRGENIPAVIACTDPEGCPLSRFKDSLGNPTHILRIGESYKEKQRTIQAKKEPEQRRAGGYSRKYASKAKNLADDMVRNTARDLLYYAVTQDAMLIFENLSRGFGRQGKRTFMAERQYTRMEDWLTAKLAYEGLPSKTYLSKTLAQYTSKTCSNCGFTITSADYDRVLEKLKKTATGWMTTINGKELKVEGQITYYNRYKRQNVVKDLSVELDRLSEESVNNDISSWTKGRSGEALSLLKKRFSHRPVQEKFVCLNCGFETHADEQAALNIARSWLFLRSQEYKKYQTNKTTGNTDKRAFVETWQSFYRKKLKEVWKPAV

SEQ ID NO: 27301 - protein, 978 aa, synthetic construct
  REGION 1..978: note = engineered CasX variant
QEIKRINKIRRRLVKDSNTKKAGKTGPMKTLLVRVMTPDLRERLENLRKKPENIPQPISNTSRANLNKLLTDYTEMKKAILHVYWEEFQKDPVGLMSRVAQPASKKIDQNKLKPEMDEKGNLTTAGFACSQCGQPLFVYKLEQVSEKGKAYTNYFGRCNVAEHEKLILLAQLKPEKDSDEAVTYSLGKFGQRALDFYSIHVTKESTHPVKPLAQIAGNRYASGPVGKALSDACMGTIASFLSKYQDIIIEHQKVVKGNQKRLESLRELAGKENLEYPSVTLPPQPHTKEGVDAYNEVIARVRMWVNLNLWQKLKLSRDDAKPLLRLKGFPSFPLVERQANEVDWWDMVCNVKKLINEKKEDGKVFWQNLAGYKRQEALRPYLSSEEDRKKGKKFARYQLGDLLLHLEKKHGEDWGKVYDEAWERIDKKVEGLSKHIKLEEERRSEDAQSKAALTDWLRAKASFVIEGLKEADKDEFCRCELKLQKWYGDLRGKPFAIEAENSILDISGFSKQYNCAFIWQKDGVKKLNLYLIINYFKGGKLRFKKIKPEAFEANRFYTVINKKSGEIVPMEVNFNFDDPNLIILPLAFGKRQGREFIWNDLLSLETGSLKLANGRVIEKTLYNRRTRQDEPALFVALTFERREVLDSSNIKPMNLIGVDRGENIPAVIACTDPEGCPLSRFKDSLGNPTHILRIGESYKEKHRTIQAKKEVEQRRAGGYSRKYASKAKNLADDMVRNTARDLLYYAVTQDAMLIFENLSRGFGRQGKRTFMAERQYTRMEDWLTAKLAYEGLPSKTYLSKTLAQYTSKTCSNCGFTITSADYDRVLEKLKKTATGWMTTINGKELKVEGQITYYNRYKRQNVVKDLSVELDRLSEESVNNDISSWTKGRSGEALSLLKKRFSHRPVQEKFVCLNCGFETHADEQAALNIARSWLFLRSQEYKKYQTNKTTGNTDKRAFVETWQSFYRKKLKEVWKPAV

SEQ ID NO: 27302 - protein, 978 aa, synthetic construct
  REGION 1..978: note = engineered CasX variant
QEIKRINKIRRRLVKDSNTKKAGKTGPMKTLLVRVMTPDLRERLENLRKKPENIPQPISNTSRANLNKLLTDYTEMKKAILHVYWEEFQKDPVGLMSRVAQPASKKIDQNKLKPEMDEKGNLTTAGFACSQCGQPLFVYKLEQVSEKGKAYTNYFGRCNVAEHEKLILLAQLKPEKDSDEAVTYSLGKFGQRALDFYSIHVTKESTHPVKPLAQIAGNRYASGPVGKALSDACMGTIASFLSKYQDIIIEHQKVVKGNQKRLESLRELAGKENLEYPSVTLPPQPHTKEGVDAYNEVIARVRMWVNLNLWQKLKLSRDDAKPLLRLKGFPSFPLVERQANEVDWWDMVCNVKKLINEKKEDGKVFWQNLAGYKRQEALRPYLSSEEDRKKGKKFARYQLGDLLLHLEKKHGEDWGKVYDEAWERIDKKVEGLSKHIKLEEERRSEDAQSKAALTDWLRAKASFVIEGLKEADKDEFCRCELKLQKWYGDLRGKPFAIEAENSILDISGFSKQYNCAFIWQKDGVKKLNLYLIINYFKGGKLRFKKIKPEAFEANRFYTVINKKSGEIVPMEVNFNFDDPNLIILPLAFGKRQGREFIWNDLLSLETGSLKLANGRVIEKTLYNRRTRQDEPALFVALTFERREVLDSSNIKPMNLIGVDRGENIPAVIACTDPEGCPLSRFKDSLGNPTHILRIGESYKEKHRTIQAKKEPEQRRAGGYSRKYASKAKNLADDMVRNTARDLLYYAVTQDAMLIFENLSRGFGRQGKRTFMAERQYTRMEDWLTAKLAYEGLPSKTYLSKTLAQYTSKTCSNCGFTITSADYDRVLEKLKKTATGWMTTINGKELKVEGQITYYNRYKRQNVVKDLSVELDRLSEESVNNDISSWTKGRSGEALSLLKKRFSHRPVQEKFVCLNCGFETHADEQAALNIARSWLFLRSQEYKKYQTNKTTGNTDKRAFVETWQSFYRKKLKEVWKPAV

SEQ ID NO: 27303 - protein, 978 aa, synthetic construct
  REGION 1..978: note = engineered CasX variant
QEIKRINKIRRRLVKDSNTKKAGKTGPMKTLLVRVMTPDLRERLENLRKKPENIPQPISNTSRANLNKLLTDYTEMKKAILHVYWEEFQKDPVGLMSRVAQPASKKIDQNKLKPEMDEKGNLTTAGFACSQCGQPLFVYKLEQVSEKGKAYTNYFGRCNVAEHEKLILLAQLKPEKDSDEAVTYSLGKFGQRALDFYSIHVTKESTHPVKPLAQIAGNRYASGPVGKALSDACMGTIASFLSKYQDIIIEHQKVVKGNQKRLESLRELAGKENLEYPSVTLPPQPHTKEGVDAYNEVIARVRMWVNLNLWQKLKLSRDDAKPLLRLKGFPSFPLVERQANEVDWWDMVCNVKKLINEKKEDGKVFWQNLAGYKRQEALRPYLSSEEDRKKGKKFARYQLGDLLLHLEKKHGEDWGKVYDEAWERIDKKVEGLSKHIKLEEERRSEDAQSKAALTDWLRAKASFVIEGLKEADKDEFCRCELKLQKWYGDLRGKPFAIEAENSILDISGFSKQYNCAFIWQKDGVKKLNLYLIINYFKGGKLRFKKIKPEAFEANRFYTVINKKSGEIVPMEVNFNFDDPNLIILPLAFGKRQGREFIWNDLLSLETGSLKLANGRVIEKTLYNRRTRQDEPALFVALTFERREVLDSSNIKPMNLIGVDRGENIPAVFCLTDPEGCPLSRFKDSLGNPTHILRIGESYKEKQRTIQAKKEVEQRRAGGYSRKYASKAKNLADDMVRNTARDLLYYAVTQDAMLIFENLSRGFGRQGKRTFMAERQYTRMEDWLTAKLAYEGLPSKTYLSKTLAQYTSKTCSNCGFTITSADYDRVLEKLKKTATGWMTTINGKELKVEGQITYYNRYKRQNVVKDLSVELDRLSEESVNNDISSWTKGRSGEALSLLKKRFSHRPVQEKFVCLNCGFETHADEQAALNIARSWLFLRSQEYKKYQTNKTTGNTDKRAFVETWQSFYRKKLKEVWKPAV

SEQ ID NO: 27304 - protein, 978 aa, synthetic construct
  REGION 1..978: note = engineered CasX variant
QEIKRINKIRRRLVKDSNTKKAGKTGPMKTLLVRVMTPDLRERLENLRKKPENIPQPISNTSRANLNKLLTDYTEMKKAILHVYWEEFQKDPVGLMSRVAQPASKKIDQNKLKPEMDEKGNLTTAGFACSQCGQPLFVYKLEQVSEKGKAYTNYFGRCNVAEHEKLILLAQLKPEKDSDEAVTYSLGKFGQRALDFYSIHVTKESTHPVKPLAQIAGNRYASGPVGKALSDACMGTIASFLSKYQDIIIEHQKVVKGNQKRLESLRELAGKENLEYPSVTLPPQPHTKEGVDAYNEVIARVRMWVNLNLWQKLKLSRDDAKPLLRLKGFPSFPLVERQANEVDWWDMVCNVKKLINEKKEDGKVFWQNLAGYKRQEALRPYLSSEEDRKKGKKFARYQLGDLLLHLEKKHGEDWGKVYDEAWERIDKKVEGLSKHIKLEEERRSEDAQSKAALTDWLRAKASFVIEGLKEADKDEFCRCELKLQKWYGDLRGKPFAIEAENSILDISGFSKQYNCAFIWQKDGVKKLNLYLIINYFKGGKLRFKKIKPEAFEANRFYTVINKKSGEIVPMEVNFNFDDPNLIILPLAFGKRQGREFIWNDLLSLETGSLKLANGRVIEKTLYNRRTRQDEPALFVALTFERREVLDSSNIKPMNLIGVDRGENIPAVFAMTDPEGCPLSRFKDSLGNPTHILRIGESYKEKQRTIQAKKEVEQRRAGGYSRKYASKAKNLADDMVRNTARDLLYYAVTQDAMLIFENLSRGFGRQGKRTFMAERQYTRMEDWLTAKLAYEGLPSKTYLSKTLAQYTSKTCSNCGFTITSADYDRVLEKLKKTATGWMTTINGKELKVEGQITYYNRYKRQNVVKDLSVELDRLSEESVNNDISSWTKGRSGEALSLLKKRFSHRPVQEKFVCLNCGFETHADEQAALNIARSWLFLRSQEYKKYQTNKTTGNTDKRAFVETWQSFYRKKLKEVWKPAV

SEQ ID NO: 27305 - protein, 978 aa, synthetic construct
  REGION 1..978: note = engineered CasX variant
QEIKRINKIRRRLVKDSNTKKAGKTGPMKTLLVRVMTPDLRERLENLRKKPENIPQPISNTSRANLNKLLTDYTEMKKAILHVYWEEFQKDPVGLMSRVAQPASKKIDQNKLKPEMDEKGNLTTAGFACSQCGQPLFVYKLEQVSEKGKAYTNYFGRCNVAEHEKLILLAQLKPEKDSDEAVTYSLGKFGQRALDFYSIHVTKESTHPVKPLAQIAGNRYASGPVGKALSDACMGTIASFLSKYQDIIIEHQKVVKGNQKRLESLRELAGKENLEYPSVTLPPQPHTKEGVDAYNEVIARVRMWVNLNLWQKLKLSRDDAKPLLRLKGFPSFPLVERQANEVDWWDMVCNVKKLINEKKEDGKVFWQNLAGYKRQEALRPYLSSEEDRKKGKKFARYQLGDLLLHLEKKHGEDWGKVYDEAWERIDKKVEGLSKHIKLEEERRSEDAQSKAALTDWLRAKASFVIEGLKEADKDEFCRCELKLQKWYGDLRGKPFAIEAENSILDISGFSKQYNCAFIWQKDGVKKLNLYLIINYFKGGKLRFKKIKPEAFEANRFYTVINKKSGEIVPMEVNFNFDDPNLIILPLAFGKRQGREFIWNDLLSLETGSLKLANGRVIEKTLYNRRTRQDEPALFVALTFERREVLDSSNIKPMNLIGVDRGENIPAVFAMTDPEGCPLSRFKDSLGNPTHILRIGESYKEKQRTIQAKKEVECRRAGGYSRKYASKAKNLADDMVRNTARDLLYYAVTQDAMLIFENLSRGFGRQGKRTFMAERQYTRMEDWLTAKLAYEGLPSKTYLSKTLAQYTSKTCSNCGFTITSADYDRVLEKLKKTATGWMTTINGKELKVEGQITYYNRYKRQNVVKDLSVELDRLSEESVNNDISSWTKGRSGEALSLLKKRFSHRPVQEKFVCLNCGFETHADEQAALNIARSWLFLRSQEYKKYQTNKTTGNTDKRAFVETWQSFYRKKLKEVWKPAV

SEQ ID NO: 27306 - protein, 978 aa, synthetic construct
  REGION 1..978: note = engineered CasX variant
QEIKRINKIRRRLVKDSNTKKAGKTGPMKTLLVRVMTPDLRERLENLRKKPENIPQPISNTSRANLNKLLTDYTEMKKAILHVYWEEFQKDPVGLMSRVAQPASKKIDQNKLKPEMDEKGNLTTAGFACSQCGQPLFVYKLEQVSEKGKAYTNYFGRCNVAEHEKLILLAQLKPEKDSDEAVTYSLGKFGQRALDFYSIHVTKESTHPVKPLAQIAGNRYASGPVGKALSDACMGTIASFLSKYQDIIIEHQKVVKGNQKRLESLRELAGKENLEYPSVTLPPQPHTKEGVDAYNEVIARVRMWVNLNLWQKLKLSRDDAKPLLRLKGFPSFPLVERQANEVDWWDMVCNVKKLINEKKEDGKVFWQNLAGYKRQEALRPYLSSEEDRKKGKKFARYQLGDLLLHLEKKHGEDWGKVYDEAWERIDKKVEGLSKHIKLEEERRSEDAQSKAALTDWLRAKASFVIEGLKEADKDEFCRCELKLQKWYGDLRGKPFAIEAENSILDISGFSKQYNCAFIWQKDGVKKLNLYLIINYFKGGKLRFKKIKPEAFEANRFYTVINKKSGEIVPMEVNFNFDDPNLIILPLAFGKRQGREFIWNDLLSLETGSLKLANGRVIEKTLYNRRTRQDEPALFVALTFERREVLDSSNIKPMNLIGVDRGENIPAVFALTDPEGTPLSRFKDSLGNPTHILRIGESYKEKQRTIQAKKEVEQRRAGGYSRKYASKAKNLADDMVRNTARDLLYYAVTQDAMLIFENLSRGFGRQGKRTFMAERQYTRMEDWLTAKLAYEGLPSKTYLSKTLAQYTSKTCSNCGFTITSADYDRVLEKLKKTATGWMTTINGKELKVEGQITYYNRYKRQNVVKDLSVELDRLSEESVNNDISSWTKGRSGEALSLLKKRFSHRPVQEKFVCLNCGFETHADEQAALNIARSWLFLRSQEYKKYQTNKTTGNTDKRAFVETWQSFYRKKLKEVWKPAV

SEQ ID NO: 27307 - protein, 978 aa, synthetic construct
  REGION 1..978: note = engineered CasX variant
QEIKRINKIRRRLVKDSNTKKAGKTGPMKTLLVRVMTPDLRERLENLRKKPENIPQPISNTSRANLNKLLTDYTEMKKAILHVYWEEFQKDPVGLMSRVAQPASKKIDQNKLKPEMDEKGNLTTAGFACSQCGQPLFVYKLEQVSEKGKAYTNYFGRCNVAEHEKLILLAQLKPEKDSDEAVTYSLGKFGQRALDFYSIHVTKESTHPVKPLAQIAGNRYASGPVGKALSDACMGTIASFLSKYQDIIIEHQKVVKGNQKRLESLRELAGKENLEYPSVTLPPQPHTKEGVDAYNEVIARVRMWVNLNLWQKLKLSRDDAKPLLRLKGFPSFPLVERQANEVDWWDMVCNVKKLINEKKEDGKVFWQNLAGYKRQEALRPYLSSEEDRKKGKKFARYQLGDLLLHLEKKHGEDWGKVYDEAWERIDKKVEGLSKHIKLEEERRSEDAQSKAALTDWLRAKASFVIEGLKEADKDEFCRCELKLQKWYGDLRGKPFAIEAENSILDISGFSKQYNCAFIWQKDGVKKLNLYLIINYFKGGKLRFKKIKPEAFEANRFYTVINKKSGEIVPMEVNFNFDDPNLIILPLAFGKRQGREFIWNDLLSLETGSLKLANGRVIEKTLYNRRTRQDEPALFVALTFERREVLDSSNIKPMNLIGVDRGENIPAVFALTDPEGTPLSRFKDSAGNPTHILRIGESYKEKQRTIQAKKEVEQRRAGGYSRKYASKAKNLADDMVRNTARDLLYYAVTQDAMLIFENLSRGFGRQGKRTFMAERQYTRMEDWLTAKLAYEGLPSKTYLSKTLAQYTSKTCSNCGFTITSADYDRVLEKLKKTATGWMTTINGKELKVEGQITYYNRYKRQNVVKDLSVELDRLSEESVNNDISSWTKGRSGEALSLLKKRFSHRPVQEKFVCLNCGFETHADEQAALNIARSWLFLRSQEYKKYQTNKTTGNTDKRAFVETWQSFYRKKLKEVWKPAV

SEQ ID NO: 27308 - protein, 978 aa, synthetic construct
  REGION 1..978: note = engineered CasX variant
QEIKRINKIRRRLVKDSNTKKAGKTGPMKTLLVRVMTPDLRERLENLRKKPENIPQPISNTSRANLNKLLTDYTEMKKAILHVYWEEFQKDPVGLMSRVAQPASKKIDQNKLKPEMDEKGNLTTAGFACSQCGQPLFVYKLEQVSEKGKAYTNYFGRCNVAEHEKLILLAQLKPEKDSDEAVTYSLGKFGQRALDFYSIHVTKESTHPVKPLAQIAGNRYASGPVGKALSDACMGTIASFLSKYQDIIIEHQKVVKGNQKRLESLRELAGKENLEYPSVTLPPQPHTKEGVDAYNEVIARVRMWVNLNLWQKLKLSRDDAKPLLRLKGFPSFPLVERQANEVDWWDMVCNVKKLINEKKEDGKVFWQNLAGYKRQEALRPYLSSEEDRKKGKKFARYQLGDLLLHLEKKHGEDWGKVYDEAWERIDKKVEGLSKHIKLEEERRSEDAQSKAALTDWLRAKASFVIEGLKEADKDEFCRCELKLQKWYGDLRGKPFAIEAENSILDISGFSKQYNCAFIWQKDGVKKLNLYLIINYFKGGKLRFKKIKPEAFEANRFYTVINKKSGEIVPMEVNFNFDDPNLIILPLAFGKRQGREFIWNDLLSLETGSLKLANGRVIEKTLYNRRTRQDEPALFVALTFERREVLDSSNIKPMNLIGVDRGENIPAVFALTDPEGCPLSRFTDSLGNPTHILRIGESYKEKQRTIQAKKEVEQRRAGGYSRKYASKAKNLADDMVRNTARDLLYYAVTQDAMLIFENLSRGFGRQGKRTFMAERQYTRMEDWLTAKLAYEGLPSKTYLSKTLAQYTSKTCSNCGFTITSADYDRVLEKLKKTATGWMTTINGKELKVEGQITYYNRYKRQNVVKDLSVELDRLSEESVNNDISSWTKGRSGEALSLLKKRFSHRPVQEKFVCLNCGFETHADEQAALNIARSWLFLRSQEYKKYQTNKTTGNTDKRAFVETWQSFYRKKLKEVWKPAV

SEQ ID NO: 27309 - protein, 978 aa, synthetic construct
  REGION 1..978: note = engineered CasX variant
QEIKRINKIRRRLVKDSNTKKAGKTGPMKTLLVRVMTPDLRERLENLRKKPENIPQPISNTSRANLNKLLTDYTEMKKAILHVYWEEFQKDPVGLMSRVAQPASKKIDQNKLKPEMDEKGNLTTAGFACSQCGQPLFVYKLEQVSEKGKAYTNYFGRCNVAEHEKLILLAQLKPEKDSDEAVTYSLGKFGQRALDFYSIHVTKESTHPVKPLAQIAGNRYASGPVGKALSDACMGTIASFLSKYQDIIIEHQKVVKGNQKRLESLRELAGKENLEYPSVTLPPQPHTKEGVDAYNEVIARVRMWVNLNLWQKLKLSRDDAKPLLRLKGFPSFPLVERQANEVDWWDMVCNVKKLINEKKEDGKVFWQNLAGYKRQEALRPYLSSEEDRKKGKKFARYQLGDLLLHLEKKHGEDWGKVYDEAWERIDKKVEGLSKHIKLEEERRSEDAQSKAALTDWLRAKASFVIEGLKEADKDEFCRCELKLQKWYGDLRGKPFAIEAENSILDISGFSKQYNCAFIWQKDGVKKLNLYLIINYFKGGKLRFKKIKPEAFEANRFYTVINKKSGEIVPMEVNFNFDDPNLIILPLAFGKRQGREFIWNDLLSLETGSLKLANGRVIEKTLYNRRTRQDEPALFVALTFERREVLDSSNIKPMNLIGVDRGENIPAVFALTDPEGCPLSRFKDSSGNPTHILRIGESYKEKQRTIQAKKEVEQRRAGGYSRKYASKAKNLADDMVRNTARDLLYYAVTQDAMLIFENLSRGFGRQGKRTFMAERQYTRMEDWLTAKLAYEGLPSKTYLSKTLAQYTSKTCSNCGFTITSADYDRVLEKLKKTATGWMTTINGKELKVEGQITYYNRYKRQNVVKDLSVELDRLSEESVNNDISSWTKGRSGEALSLLKKRFSHRPVQEKFVCLNCGFETHADEQAALNIARSWLFLRSQEYKKYQTNKTTGNTDKRAFVETWQSFYRKKLKEVWKPAV

SEQ ID NO: 27310 - protein, 978 aa, synthetic construct
  REGION 1..978: note = engineered CasX variant
QEIKRINKIRRRLVKDSNTKKAGKTGPMKTLLVRVMTPDLRERLENLRKKPENIPQPISNTSRANLNKLLTDYTEMKKAILHVYWEEFQKDPVGLMSRVAQPASKKIDQNKLKPEMDEKGNLTTAGFACSQCGQPLFVYKLEQVSEKGKAYTNYFGRCNVAEHEKLILLAQLKPEKDSDEAVTYSLGKFGQRALDFYSIHVTKESTHPVKPLAQIAGNRYASGPVGKALSDACMGTIASFLSKYQDIIIEHQKVVKGNQKRLESLRELAGKENLEYPSVTLPPQPHTKEGVDAYNEVIARVRMWVNLNLWQKLKLSRDDAKPLLRLKGFPSFPLVERQANEVDWWDMVCNVKKLINEKKEDGKVFWQNLAGYKRQEALRPYLSSEEDRKKGKKFARYQLGDLLLHLEKKHGEDWGKVYDEAWERIDKKVEGLSKHIKLEEERRSEDAQSKAALTDWLRAKASFVIEGLKEADKDEFCRCELKLQKWYGDLRGKPFAIEAENSILDISGFSKQYNCAFIWQKDGVKKLNLYLIINYFKGGKLRFKKIKPEAFEANRFYTVINKKSGEIVPMEVNFNFDDPNLIILPLAFGKRQGREFIWNDLLSLETGSLKLANGRVIEKTLYNRRTRQDEPALFVALTFERREVLDSSNIKPMNLIGVDRGENIPAVFALTDPEGCPLSRFKDSLGNPTHIMRIGESYKEKQRTIQAKKEVEQRRAGGYSRKYASKAKNLADDMVRNTARDLLYYAVTQDAMLIFENLSRGFGRQGKRTFMAERQYTRMEDWLTAKLAYEGLPSKTYLSKTLAQYTSKTCSNCGFTITSADYDRVLEKLKKTATGWMTTINGKELKVEGQITYYNRYKRQNVVKDLSVELDRLSEESVNNDISSWTKGRSGEALSLLKKRFSHRPVQEKFVCLNCGFETHADEQAALNIARSWLFLRSQEYKKYQTNKTTGNTDKRAFVETWQSFYRKKLKEVWKPAV

SEQ ID NO: 27311 - protein, 978 aa, synthetic construct
  REGION 1..978: note = engineered CasX variant
QEIKRINKIRRRLVKDSNTKKAGKTGPMKTLLVRVMTPDLRERLENLRKKPENIPQPISNTSRANLNKLLTDYTEMKKAILHVYWEEFQKDPVGLMSRVAQPASKKIDQNKLKPEMDEKGNLTTAGFACSQCGQPLFVYKLEQVSEKGKAYTNYFGRCNVAEHEKLILLAQLKPEKDSDEAVTYSLGKFGQRALDFYSIHVTKESTHPVKPLAQIAGNRYASGPVGKALSDACMGTIASFLSKYQDIIIEHQKVVKGNQKRLESLRELAGKENLEYPSVTLPPQPHTKEGVDAYNEVIARVRMWVNLNLWQKLKLSRDDAKPLLRLKGFPSFPLVERQANEVDWWDMVCNVKKLINEKKEDGKVFWQNLAGYKRQEALRPYLSSEEDRKKGKKFARYQLGDLLLHLEKKHGEDWGKVYDEAWERIDKKVEGLSKHIKLEEERRSEDAQSKAALTDWLRAKASFVIEGLKEADKDEFCRCELKLQKWYGDLRGKPFAIEAENSILDISGFSKQYNCAFIWQKDGVKKLNLYLIINYFKGGKLRFKKIKPEAFEANRFYTVINKKSGEIVPMEVNFNFDDPNLIILPLAFGKRQGREFIWNDLLSLETGSLKLANGRVIEKTLYNRRTRQDEPALFVALTFERREVLDSSNIKPMNLIGVDRGENIPAVFALTDPEGCPLSRFKDSLGNPTHILRMGESYKQKQRTIQAKKEVEQRRAGGYSRKYASKAKNLADDMVRNTARDLLYYAVTQDAMLIFENLSRGFGRQGKRTFMAERQYTRMEDWLTAKLAYEGLPSKTYLSKTLAQYTSKTCSNCGFTITSADYDRVLEKLKKTATGWMTTINGKELKVEGQITYYNRYKRQNVVKDLSVELDRLSEESVNNDISSWTKGRSGEALSLLKKRFSHRPVQEKFVCLNCGFETHADEQAALNIARSWLFLRSQEYKKYQTNKTTGNTDKRAFVETWQSFYRKKLKEVWKPAV

SEQ ID NO: 27312 - protein, 978 aa, synthetic construct
  REGION 1..978: note = engineered CasX variant
QEIKRINKIRRRLVKDSNTKKAGKTGPMKTLLVRVMTPDLRERLENLRKKPENIPQPISNTSRANLNKLLTDYTEMKKAILHVYWEEFQKDPVGLMSRVAQPASKKIDQNKLKPEMDEKGNLTTAGFACSQCGQPLFVYKLEQVSEKGKAYTNYFGRCNVAEHEKLILLAQLKPEKDSDEAVTYSLGKFGQRALDFYSIHVTKESTHPVKPLAQIAGNRYASGPVGKALSDACMGTIASFLSKYQDIIIEHQKVVKGNQKRLESLRELAGKENLEYPSVTLPPQPHTKEGVDAYNEVIARVRMWVNLNLWQKLKLSRDDAKPLLRLKGFPSFPLVERQANEVDWWDMVCNVKKLINEKKEDGKVFWQNLAGYKRQEALRPYLSSEEDRKKGKKFARYQLGDLLLHLEKKHGEDWGKVYDEAWERIDKKVEGLSKHIKLEEERRSEDAQSKAALTDWLRAKASFVIEGLKEADKDEFCRCELKLQKWYGDLRGKPFAIEAENSILDISGFSKQYNCAFIWQKDGVKKLNLYLIINYFKGGKLRFKKIKPEAFEANRFYTVINKKSGEIVPMEVNFNFDDPNLIILPLAFGKRQGREFIWNDLLSLETGSLKLANGRVIEKTLYNRRTRQDEPALFVALTFERREVLDSSNIKPMNLIGVDRGENIPAVFALTDPEGCPLSRFKDSLGNPTHILRMGESYKEKQRTIQAKKEVEQRRAGGYSRKYASKAKNLADDMVRNTARDLLYYAVTQDAMLIFENLSRGFGRQGKRTFMAERQYTRMEDWLTAKLAYEGLPSKTYLSKTLAQYTSKTCSNCGFTITSADYDRVLEKLKKTATGWMTTINGKELKVEGQITYYNRYKRQNVVKDLSVELDRLSEESVNNDISSWTKGRSGEALSLLKKRFSHRPVQEKFVCLNCGFETHADEQAALNIARSWLFLRSQEYKKYQTNKTTGNTDKRAFVETWQSFYRKKLKEVWKPAV

SEQ ID NO: 27313 - protein, 978 aa, synthetic construct
  REGION 1..978: note = engineered CasX variant
QEIKRINKIRRRLVKDSNTKKAGKTGPMKTLLVRVMTPDLRERLENLRKKPENIPQPISNTSRANLNKLLTDYTEMKKAILHVYWEEFQKDPVGLMSRVAQPASKKIDQNKLKPEMDEKGNLTTAGFACSQCGQPLFVYKLEQVSEKGKAYTNYFGRCNVAEHEKLILLAQLKPEKDSDEAVTYSLGKFGQRALDFYSIHVTKESTHPVKPLAQIAGNRYASGPVGKALSDACMGTIASFLSKYQDIIIEHQKVVKGNQKRLESLRELAGKENLEYPSVTLPPQPHTKEGVDAYNEVIARVRMWVNLNLWQKLKLSRDDAKPLLRLKGFPSFPLVERQANEVDWWDMVCNVKKLINEKKEDGKVFWQNLAGYKRQEALRPYLSSEEDRKKGKKFARYQLGDLLLHLEKKHGEDWGKVYDEAWERIDKKVEGLSKHIKLEEERRSEDAQSKAALTDWLRAKASFVIEGLKEADKDEFCRCELKLQKWYGDLRGKPFAIEAENSILDISGFSKQYNCAFIWQKDGVKKLNLYLIINYFKGGKLRFKKIKPEAFEANRFYTVINKKSGEIVPMEVNFNFDDPNLIILPLAFGKRQGREFIWNDLLSLETGSLKLANGRVIEKTLYNRRTRQDEPALFVALTFERREVLDSSNIKPMNLIGVDRGENIPAVFALTDPEGCPLSRFKDSLGNPTHILRIGESYKQKQRTIQAKKEVEQRRAGGYSRKYASKAKNLADDMVRNTARDLLYYAVTQDAMLIFENLSRGFGRQGKRTFMAERQYTRMEDWLTAKLAYEGLPSKTYLSKTLAQYTSKTCSNCGFTITSADYDRVLEKLKKTATGWMTTINGKELKVEGQITYYNRYKRQNVVKDLSVELDRLSEESVNNDISSWTKGRSGEALSLLKKRFSHRPVQEKFVCLNCGFETHADEQAALNIARSWLFLRSQEYKKYQTNKTTGNTDKRAFVETWQSFYRKKLKEVWKPAV

SEQ ID NO: 27314 - protein, 978 aa, synthetic construct
  REGION 1..978: note = engineered CasX variant
QEIKRINKIRRRLVKDSNTKKAGKTGPMKTLLVRVMTPDLRERLENLRKKPENIPQPISNTSRANLNKLLTDYTEMKKAILHVYWEEFQKDPVGLMSRVAQPASKKIDQNKLKPEMDEKGNLTTAGFACSQCGQPLFVYKLEQVSEKGKAYTNYFGRCNVAEHEKLILLAQLKPEKDSDEAVTYSLGKFGQRALDFYSIHVTKESTHPVKPLAQIAGNRYASGPVGKALSDACMGTIASFLSKYQDIIIEHQKVVKGNQKRLESLRELAGKENLEYPSVTLPPQPHTKEGVDAYNEVIARVRMWVNLNLWQKLKLSRDDAKPLLRLKGFPSFPLVERQANEVDWWDMVCNVKKLINEKKEDGKVFWQNLAGYKRQEALRPYLSSEEDRKKGKKFARYQLGDLLLHLEKKHGEDWGKVYDEAWERIDKKVEGLSKHIKLEEERRSEDAQSKAALTDWLRAKASFVIEGLKEADKDEFCRCELKLQKWYGDLRGKPFAIEAENSILDISGFSKQYNCAFIWQKDGVKKLNLYLIINYFKGGKLRFKKIKPEAFEANRFYTVINKKSGEIVPMEVNFNFDDPNLIILPLAFGKRQGREFIWNDLLSLETGSLKLANGRVIEKTLYNRRTRQDEPALFVALTFERREVLDSSNIKPMNLIGVDRGENIPAVFALTDPEGCPLSRFKDSLGNPTHILRIGESYKENQRTIQAKKEVEQRRAGGYSRKYASKAKNLADDMVRNTARDLLYYAVTQDAMLIFENLSRGFGRQGKRTFMAERQYTRMEDWLTAKLAYEGLPSKTYLSKTLAQYTSKTCSNCGFTITSADYDRVLEKLKKTATGWMTTINGKELKVEGQITYYNRYKRQNVVKDLSVELDRLSEESVNNDISSWTKGRSGEALSLLKKRFSHRPVQEKFVCLNCGFETHADEQAALNIARSWLFLRSQEYKKYQTNKTTGNTDKRAFVETWQSFYRKKLKEVWKPAV

SEQ ID NO: 27315 - protein, 978 aa, synthetic construct
  REGION 1..978: note = engineered CasX variant
QEIKRINKIRRRLVKDSNTKKAGKTGPMKTLLVRVMTPDLRERLENLRKKPENIPQPISNTSRANLNKLLTDYTEMKKAILHVYWEEFQKDPVGLMSRVAQPASKKIDQNKLKPEMDEKGNLTTAGFACSQCGQPLFVYKLEQVSEKGKAYTNYFGRCNVAEHEKLILLAQLKPEKDSDEAVTYSLGKFGQRALDFYSIHVTKESTHPVKPLAQIAGNRYASGPVGKALSDACMGTIASFLSKYQDIIIEHQKVVKGNQKRLESLRELAGKENLEYPSVTLPPQPHTKEGVDAYNEVIARVRMWVNLNLWQKLKLSRDDAKPLLRLKGFPSFPLVERQANEVDWWDMVCNVKKLINEKKEDGKVFWQNLAGYKRQEALRPYLSSEEDRKKGKKFARYQLGDLLLHLEKKHGEDWGKVYDEAWERIDKKVEGLSKHIKLEEERRSEDAQSKAALTDWLRAKASFVIEGLKEADKDEFCRCELKLQKWYGDLRGKPFAIEAENSILDISGFSKQYNCAFIWQKDGVKKLNLYLIINYFKGGKLRFKKIKPEAFEANRFYTVINKKSGEIVPMEVNFNFDDPNLIILPLAFGKRQGREFIWNDLLSLETGSLKLANGRVIEKTLYNRRTRQDEPALFVALTFERREVLDSSNIKPMNLIGVDRGENIPAVFALTDPEGCPLSRFKDSLGNPTHILRIGESYKEKQRTIQAKKTVEQRRAGGYSRKYASKAKNLADDMVRNTARDLLYYAVTQDAMLIFENLSRGFGRQGKRTFMAERQYTRMEDWLTAKLAYEGLPSKTYLSKTLAQYTSKTCSNCGFTITSADYDRVLEKLKKTATGWMTTINGKELKVEGQITYYNRYKRQNVVKDLSVELDRLSEESVNNDISSWTKGRSGEALSLLKKRFSHRPVQEKFVCLNCGFETHADEQAALNIARSWLFLRSQEYKKYQTNKTTGNTDKRAFVETWQSFYRKKLKEVWKPAV

SEQ ID NO: 27316 - protein, 978 aa, synthetic construct
  REGION 1..978: note = engineered CasX variant
QEIKRINKIRRRLVKDSNTKKAGKTGPMKTLLVRVMTPDLRERLENLRKKPENIPQPISNTSRANLNKLLTDYTEMKKAILHVYWEEFQKDPVGLMSRVAQPASKKIDQNKLKPEMDEKGNLTTAGFACSQCGQPLFVYKLEQVSEKGKAYTNYFGRCNVAEHEKLILLAQLKPEKDSDEAVTYSLGKFGQRALDFYSIHVTKESTHPVKPLAQIAGNRYASGPVGKALSDACMGTIASFLSKYQDIIIEHQKVVKGNQKRLESLRELAGKENLEYPSVTLPPQPHTKEGVDAYNEVIARVRMWVNLNLWQKLKLSRDDAKPLLRLKGFPSFPLVERQANEVDWWDMVCNVKKLINEKKEDGKVFWQNLAGYKRQEALRPYLSSEEDRKKGKKFARYQLGDLLLHLEKKHGEDWGKVYDEAWERIDKKVEGLSKHIKLEEERRSEDAQSKAALTDWLRAKASFVIEGLKEADKDEFCRCELKLQKWYGDLRGKPFAIEAENSILDISGFSKQYNCAFIWQKDGVKKLNLYLIINYFKGGKLRFKKIKPEAFEANRFYTVINKKSGEIVPMEVNFNFDDPNLIILPLAFGKRQGREFIWNDLLSLETGSLKLANGRVIEKTLYNRRTRQDEPALFVALTFERREVLDSSNIKPMNLIGVDRGENIPAVFALTDPEGCPLSRFKDSLGNPTHILRIGESYKEKQRTIQAKKEVEQRRAGGYSRKYASKAKNLADDMVRNTARDLLYYAVTQDAMLIFENLSRGFGRQGKRTFMAERQYTRMEDWLTAKLAYEGLPSKTYLSKTLAQYTSKTCSNCGFTITSADYDRVLEKLKKTATGWMTTINGKELKVEGQITYYNRYKRQNVVKDLSVELDRLSEESVNNDISSWTKGRSGEALSLLKKRFSHRPVQEKFVCLNCGFETHADEQAALNIARSWLFLRSQEYKKYQTNKTTGNTDKRAFVETWQSFYRKKLKEVWKPAV

SEQ ID NO: 27317 - protein, 978 aa, synthetic construct
  REGION 1..978: note = engineered CasX variant
QEIKRINKIRRRLVKDSNTKKAGKTGPMKTLLVRVMTPDLRERLENLRKKPENIPQPISNTSRANLNKLLTDYTEMKKAILHVYWEEFQKDPVGLMSRVAQPASKKIDQNKLKPEMDEKGNLTTAGFACSQCGQPLFVYKLEQVSEKGKAYTNYFGRCNVAEHEKLILLAQLKPEKDSDEAVTYSLGKFGQRALDFYSIHVTKESTHPVKPLAQIAGNRYASGPVGKALSDACMGTIASFLSKYQDIIIEHQKVVKGNQKRLESLRELAGKENLEYPSVTLPPQPHTKEGVDAYNEVIARVRMWVNLNLWQKLKLSRDDAKPLLRLKGFPSFPLVERQANEVDWWDMVCNVKKLINEKKEDGKVFWQNLAGYKRQEALRPYLSSEEDRKKGKKFARYQLGDLLLHLEKKHGEDWGKVYDEAWERIDKKVEGLSKHIKLEEERRSEDAQSKAALTDWLRAKASFVIEGLKEADKDEFCRCELKLQKWYGDLRGKPFAIEAENSILDISGFSKQYNCAFIWQKDGVKKLNLYLIINYFKGGKLRFKKIKPEAFEANRFYTVINKKSGEIVPMEVNFNFDDPNLIILPLAFGKRQGREFIWNDLLSLETGSLKLANGRVIEKTLYNRRTRQDEPALFVALTFERREVLDSSNIKPMNLIGVDRGENIPAVFALTDPEGCPLSRFKDSLGNPTHILRIGESYKEKQRTIQAKKEVECRRAGGYSRKYASKAKNLADDMVRNTARDLLYYAVTQDAMLIFENLSRGFGRQGKRTFMAERQYTRMEDWLTAKLAYEGLPSKTYLSKTLAQYTSKTCSNCGFTITSADYDRVLEKLKKTATGWMTTINGKELKVEGQITYYNRYKRQNVVKDLSVELDRLSEESVNNDISSWTKGRSGEALSLLKKRFSHRPVQEKFVCLNCGFETHADEQAALNIARSWLFLRSQEYKKYQTNKTTGNTDKRAFVETWQSFYRKKLKEVWKPAV

SEQ ID NO: 27318 - protein, 978 aa, synthetic construct
  REGION 1..978: note = engineered CasX variant
QEIKRINKIRRRLVKDSNTKKAGKTGPMKTLLVRVMTPDLRERLENLRKKPENIPQPISNTSRANLNKLLTDYTEMKKAILHVYWEEFQKDPVGLMSRVAQPASKKIDQNKLKPEMDEKGNLTTAGFACSQCGQPLFVYKLEQVSEKGKAYTNYFGRCNVAEHEKLILLAQLKPEKDSDEAVTYSLGKFGQRALDFYSIHVTKESTHPVKPLAQIAGNRYASGPVGKALSDACMGTIASFLSKYQDIIIEHQKVVKGNQKRLESLRELAGKENLEYPSVTLPPQPHTKEGVDAYNEVIARVRMWVNLNLWQKLKLSRDDAKPLLRLKGFPSFPLVERQANEVDWWDMVCNVKKLINEKKEDGKVFWQNLAGYKRQEALRPYLSSEEDRKKGKKFARYQLGDLLLHLEKKHGEDWGKVYDEAWERIDKKVEGLSKHIKLEEERRSEDAQSKAALTDWLRAKASFVIEGLKEADKDEFCRCELKLQKWYGDLRGKPFAIEAENSILDISGFSKQYNCAFIWQKDGVKKLNLYLIINYFKGGKLRFKKIKPEAFEANRFYTVINKKSGEIVPMEVNFNFDDPNLIILPLAFGKRQGREFIWNDLLSLETGSLKLANGRVIEKTLYNRRTRQDEPALFVALTFERREVLDSSNIKPMNLIGVDRGENIPAVFALTDPEGCPLSRFKDSGGNPTHILRIGESYKEKQRTIQAKKEVEQRRAGGYSRKYASKAKNLADDMVRNTARDLLYYAVTQDAMLIFENLSRGFGRQGKRTFMAERQYTRMEDWLTAKLAYEGLPSKTYLSKTLAQYTSKTCSNCGFTITSADYDRVLEKLKKTATGWMTTINGKELKVEGQITYYNRYKRQNVVKDLSVELDRLSEESVNNDISSWTKGRSGEALSLLKKRFSHRPVQEKFVCLNCGFETHADEQAALNIARSWLFLRSQEYKKYQTNKTTGNTDKRAFVETWQSFYRKKLKEVWKPAV

SEQ ID NO: 27319 - protein, 978 aa, synthetic construct
  REGION 1..978: note = engineered CasX variant
QEIKRINKIRRRLVKDSNTKKAGKTGPMKTLLVRVMTPDLRERLENLRKKPENIPQPISNTSRANLNKLLTDYTEMKKAILHVYWEEFQKDPVGLMSRVAQPASKKIDQNKLKPEMDEKGNLTTAGFACSQCGQPLFVYKLEQVSEKGKAYTNYFGRCNVAEHEKLILLAQLKPEKDSDEAVTYSLGKFGQRALDFYSIHVTKESTHPVKPLAQIAGNRYASGPVGKALSDACMGTIASFLSKYQDIIIEHQKVVKGNQKRLESLRELAGKENLEYPSVTLPPQPHTKEGVDAYNEVIARVRMWVNLNLWQKLKLSRDDAKPLLRLKGFPSFPLVERQANEVDWWDMVCNVKKLINEKKEDGKVFWQNLAGYKRQEALRPYLSSEEDRKKGKKFARYQLGDLLLHLEKKHGEDWGKVYDEAWERIDKKVEGLSKHIKLEEERRSEDAQSKAALTDWLRAKASFVIEGLKEADKDEFCRCELKLQKWYGDLRGKPFAIEAENSILDISGFSKQYNCAFIWQKDGVKKLNLYLIINYFKGGKLRFKKIKPEAFEANRFYTVINKKSGEIVPMEVNFNFDDPNLIILPLAFGKRQGREFIWNDLLSLETGSLKLANGRVIEKTLYNRRTRQDEPALFVALTFERREVLDSSNIKPMNLIGVDRGENIPAVFALTDPEGCPLSRFKDSAGNPTHILRIGESYKEKQRTIQAKKEVEQRRAGGYSRKYASKAKNLADDMVRNTARDLLYYAVTQDAMLIFENLSRGFGRQGKRTFMAERQYTRMEDWLTAKLAYEGLPSKTYLSKTLAQYTSKTCSNCGFTITSADYDRVLEKLKKTATGWMTTINGKELKVEGQITYYNRYKRQNVVKDLSVELDRLSEESVNNDISSWTKGRSGEALSLLKKRFSHRPVQEKFVCLNCGFETHADEQAALNIARSWLFLRSQEYKKYQTNKTTGNTDKRAFVETWQSFYRKKLKEVWKPAV

SEQ ID NO: 27320 - protein, 978 aa, synthetic construct
  REGION 1..978: note = engineered CasX variant
QEIKRINKIRRRLVKDSNTKKAGKTGPMKTLLVRVMTPDLRERLENLRKKPENIPQPISNTSRANLNKLLTDYTEMKKAILHVYWEEFQKDPVGLMSRVAQPASKKIDQNKLKPEMDEKGNLTTAGFACSQCGQPLFVYKLEQVSEKGKAYTNYFGRCNVAEHEKLILLAQLKPEKDSDEAVTYSLGKFGQRALDFYSIHVTKESTHPVKPLAQIAGNRYASGPVGKALSDACMGTIASFLSKYQDIIIEHQKVVKGNQKRLESLRELAGKENLEYPSVTLPPQPHTKEGVDAYNEVIARVRMWVNLNLWQKLKLSRDDAKPLLRLKGFPSFPLVERQANEVDWWDMVCNVKKLINEKKEDGKVFWQNLAGYKRQEALRPYLSSEEDRKKGKKFARYQLGDLLLHLEKKHGEDWGKVYDEAWERIDKKVEGLSKHIKLEEERRSEDAQSKAALTDWLRAKASFVIEGLKEADKDEFCRCELKLQKWYGDLRGKPFAIEAENSILDISGFSKQYNCAFIWQKDGVKKLNLYLIINYFKGGKLRFKKIKPEAFEANRFYTVINKKSGEIVPMEVNFNFDDPNLIILPLAFGKRQGREFIWNDLLSLETGSLKLANGRVIEKTLYNRRTRQDEPALFVALTFERREVLDSSNIKPMNLIGVDRGENIPAVFALTDPEGCPLSEFKDSLGNPTHILRIGESYKEKQRTIQAKKEVEQRRAGGYSRKYASKAKNLADDMVRNTARDLLYYAVTQDAMLIFENLSRGFGRQGKRTFMAERQYTRMEDWLTAKLAYEGLPSKTYLSKTLAQYTSKTCSNCGFTITSADYDRVLEKLKKTATGWMTTINGKELKVEGQITYYNRYKRQNVVKDLSVELDRLSEESVNNDISSWTKGRSGEALSLLKKRFSHRPVQEKFVCLNCGFETHADEQAALNIARSWLFLRSQEYKKYQTNKTTGNTDKRAFVETWQSFYRKKLKEVWKPAV

SEQ ID NO: 27321 - protein, 978 aa, synthetic construct
  REGION 1..978: note = engineered CasX variant
QEIKRINKIRRRLVKDSNTKKAGKTGPMKTLLVRVMTPDLRERLENLRKKPENIPQPISNTSRANLNKLLTDYTEMKKAILHVYWEEFQKDPVGLMSRVAQPASKKIDQNKLKPEMDEKGNLTTAGFACSQCGQPLFVYKLEQVSEKGKAYTNYFGRCNVAEHEKLILLAQLKPEKDSDEAVTYSLGKFGQRALDFYSIHVTKESTHPVKPLAQIAGNRYASGPVGKALSDACMGTIASFLSKYQDIIIEHQKVVKGNQKRLESLRELAGKENLEYPSVTLPPQPHTKEGVDAYNEVIARVRMWVNLNLWQKLKLSRDDAKPLLRLKGFPSFPLVERQANEVDWWDMVCNVKKLINEKKEDGKVFWQNLAGYKRQEALRPYLSSEEDRKKGKKFARYQLGDLLLHLEKKHGEDWGKVYDEAWERIDKKVEGLSKHIKLEEERRSEDAQSKAALTDWLRAKASFVIEGLKEADKDEFCRCELKLQKWYGDLRGKPFAIEAENSILDISGFSKQYNCAFIWQKDGVKKLNLYLIINYFKGGKLRFKKIKPEAFEANRFYTVINKKSGEIVPMEVNFNFDDPNLIILPLAFGKRQGREFIWNDLLSLETGSLKLANGRVIEKTLYNRRTRQDEPALFVALTFERREVLDSSNIKPMNLIGVDRGENIPAVFALTDPDGCPLSRFKDSLGNPTHILRIGESYKEKQRTIQAKKEVEQRRAGGYSRKYASKAKNLADDMVRNTARDLLYYAVTQDAMLIFENLSRGFGRQGKRTFMAERQYTRMEDWLTAKLAYEGLPSKTYLSKTLAQYTSKTCSNCGFTITSADYDRVLEKLKKTATGWMTTINGKELKVEGQITYYNRYKRQNVVKDLSVELDRLSEESVNNDISSWTKGRSGEALSLLKKRFSHRPVQEKFVCLNCGFETHADEQAALNIARSWLFLRSQEYKKYQTNKTTGNTDKRAFVETWQSFYRKKLKEVWKPAV

SEQ ID NO: 27322 - protein, 978 aa, synthetic construct
  REGION 1..978: note = engineered CasX variant
QEIKRINKIRRRLVKDSNTKKAGKTGPMKTLLVRVMTPDLRERLENLRKKPENIPQPISNTSRANLNKLLTDYTEMKKAILHVYWEEFQKDPVGLMSRVAQPASKKIDQNKLKPEMDEKGNLTTAGFACSQCGQPLFVYKLEQVSEKGKAYTNYFGRCNVAEHEKLILLAQLKPEKDSDEAVTYSLGKFGQRALDFYSIHVTKESTHPVKPLAQIAGNRYASGPVGKALSDACMGTIASFLSKYQDIIIEHQKVVKGNQKRLESLRELAGKENLEYPSVTLPPQPHTKEGVDAYNEVIARVRMWVNLNLWQKLKLSRDDAKPLLRLKGFPSFPLVERQANEVDWWDMVCNVKKLINEKKEDGKVFWQNLAGYKRQEALRPYLSSEEDRKKGKKFARYQLGDLLLHLEKKHGEDWGKVYDEAWERIDKKVEGLSKHIKLEEERRSEDAQSKAALTDWLRAKASFVIEGLKEADKDEFCRCELKLQKWYGDLRGKPFAIEAENSILDISGFSKQYNCAFIWQKDGVKKLNLYLIINYFKGGKLRFKKIKPEAFEANRFYTVINKKSGEIVPMEVNFNFDDPNLIILPLAFGKRQGREFIWNDLLSLETGSLKLANGRVIEKTLYNRRTRQDEPALFVALTFERREVLDSSNIKPMNLIGVDRGENIPAVFALTDPDGCPLSRFKDSGGNPTHILRIGESYKEKQRTIQAKKEVEQRRAGGYSRKYASKAKNLADDMVRNTARDLLYYAVTQDAMLIFENLSRGFGRQGKRTFMAERQYTRMEDWLTAKLAYEGLPSKTYLSKTLAQYTSKTCSNCGFTITSADYDRVLEKLKKTATGWMTTINGKELKVEGQITYYNRYKRQNVVKDLSVELDRLSEESVNNDISSWTKGRSGEALSLLKKRFSHRPVQEKFVCLNCGFETHADEQAALNIARSWLFLRSQEYKKYQTNKTTGNTDKRAFVETWQSFYRKKLKEVWKPAV

SEQ ID NO: 27323 - protein, 978 aa, synthetic construct
  REGION 1..978: note = engineered CasX variant
QEIKRINKIRRRLVKDSNTKKAGKTGPMKTLLVRVMTPDLRERLENLRKKPENIPQPISNTSRANLNKLLTDYTEMKKAILHVYWEEFQKDPVGLMSRVAQPASKKIDQNKLKPEMDEKGNLTTAGFACSQCGQPLFVYKLEQVSEKGKAYTNYFGRCNVAEHEKLILLAQLKPEKDSDEAVTYSLGKFGQRALDFYSIHVTKESTHPVKPLAQIAGNRYASGPVGKALSDACMGTIASFLSKYQDIIIEHQKVVKGNQKRLESLRELAGKENLEYPSVTLPPQPHTKEGVDAYNEVIARVRMWVNLNLWQKLKLSRDDAKPLLRLKGFPSFPLVERQANEVDWWDMVCNVKKLINEKKEDGKVFWQNLAGYKRQEALRPYLSSEEDRKKGKKFARYQLGDLLLHLEKKHGEDWGKVYDEAWERIDKKVEGLSKHIKLEEERRSEDAQSKAALTDWLRAKASFVIEGLKEADKDEFCRCELKLQKWYGDLRGKPFAIEAENSILDISGFSKQYNCAFIWQKDGVKKLNLYLIINYFKGGKLRFKKIKPEAFEANRFYTVINKKSGEIVPMEVNFNFDDPNLIILPLAFGKRQGREFIWNDLLSLETGSLKLANGRVIEKTLYNRRTRQDEPALFVALTFERREVLDSSNIKPMNLIGVDRGENIPAVFALTDCEGCPLSRFKDSLGNPTHILRIGESYKENQRTIQAKKEVEQRRAGGYSRKYASKAKNLADDMVRNTARDLLYYAVTQDAMLIFENLSRGFGRQGKRTFMAERQYTRMEDWLTAKLAYEGLPSKTYLSKTLAQYTSKTCSNCGFTITSADYDRVLEKLKKTATGWMTTINGKELKVEGQITYYNRYKRQNVVKDLSVELDRLSEESVNNDISSWTKGRSGEALSLLKKRFSHRPVQEKFVCLNCGFETHADEQAALNIARSWLFLRSQEYKKYQTNKTTGNTDKRAFVETWQSFYRKKLKEVWKPAV

SEQ ID NO: 27324 - protein, 978 aa, synthetic construct
  REGION 1..978: note = engineered CasX variant
QEIKRINKIRRRLVKDSNTKKAGKTGPMKTLLVRVMTPDLRERLENLRKKPENIPQPISNTSRANLNKLLTDYTEMKKAILHVYWEEFQKDPVGLMSRVAQPASKKIDQNKLKPEMDEKGNLTTAGFACSQCGQPLFVYKLEQVSEKGKAYTNYFGRCNVAEHEKLILLAQLKPEKDSDEAVTYSLGKFGQRALDFYSIHVTKESTHPVKPLAQIAGNRYASGPVGKALSDACMGTIASFLSKYQDIIIEHQKVVKGNQKRLESLRELAGKENLEYPSVTLPPQPHTKEGVDAYNEVIARVRMWVNLNLWQKLKLSRDDAKPLLRLKGFPSFPLVERQANEVDWWDMVCNVKKLINEKKEDGKVFWQNLAGYKRQEALRPYLSSEEDRKKGKKFARYQLGDLLLHLEKKHGEDWGKVYDEAWERIDKKVEGLSKHIKLEEERRSEDAQSKAALTDWLRAKASFVIEGLKEADKDEFCRCELKLQKWYGDLRGKPFAIEAENSILDISGFSKQYNCAFIWQKDGVKKLNLYLIINYFKGGKLRFKKIKPEAFEANRFYTVINKKSGEIVPMEVNFNFDDPNLIILPLAFGKRQGREFIWNDLLSLETGSLKLANGRVIEKTLYNRRTRQDEPALFVALTFERREVLDSSNIKPMNLIGVDRGENIPAVFALTDCEGCPLSRFKDSLGNPTHILRIGESYKEKQRTIQAKKEVEQRRAGGYSRKYASKAKNLADDMVRNTARDLLYYAVTQDAMLIFENLSRGFGRQGKRTFMAERQYTRMEDWLTAKLAYEGLPSKTYLSKTLAQYTSKTCSNCGFTITSADYDRVLEKLKKTATGWMTTINGKELKVEGQITYYNRYKRQNVVKDLSVELDRLSEESVNNDISSWTKGRSGEALSLLKKRFSHRPVQEKFVCLNCGFETHADEQAALNIARSWLFLRSQEYKKYQTNKTTGNTDKRAFVETWQSFYRKKLKEVWKPAV

SEQ ID NO: 27325 - protein, 978 aa, synthetic construct
  REGION 1..978: note = engineered CasX variant
QEIKRINKIRRRLVKDSNTKKAGKTGPMKTLLVRVMTPDLRERLENLRKKPENIPQPISNTSRANLNKLLTDYTEMKKAILHVYWEEFQKDPVGLMSRVAQPASKKIDQNKLKPEMDEKGNLTTAGFACSQCGQPLFVYKLEQVSEKGKAYTNYFGRCNVAEHEKLILLAQLKPEKDSDEAVTYSLGKFGQRALDFYSIHVTKESTHPVKPLAQIAGNRYASGPVGKALSDACMGTIASFLSKYQDIIIEHQKVVKGNQKRLESLRELAGKENLEYPSVTLPPQPHTKEGVDAYNEVIARVRMWVNLNLWQKLKLSRDDAKPLLRLKGFPSFPLVERQANEVDWWDMVCNVKKLINEKKEDGKVFWQNLAGYKRQEALRPYLSSEEDRKKGKKFARYQLGDLLLHLEKKHGEDWGKVYDEAWERIDKKVEGLSKHIKLEEERRSEDAQSKAALTDWLRAKASFVIEGLKEADKDEFCRCELKLQKWYGDLRGKPFAIEAENSILDISGFSKQYNCAFIWQKDGVKKLNLYLIINYFKGGKLRFKKIKPEAFEANRFYTVINKKSGEIVPMEVNFNFDDPNLIILPLAFGKRQGREFIWNDLLSLETGSLKLANGRVIEKTLYNRRTRQDEPALFVALTFERREVLDSSNIKPMNLIGVDRGENIPAVCALTDPEGCPLTRFKDSLGNPTHILRIGESYKEKQRTIQAYKEVEQRRAGGYSRKYASKAKNLADDMVRNTARDLLYYAVTQDAMLIFENLSRGFGRQGKRTFMAERQYTRMEDWLTAKLAYEGLPSKTYLSKTLAQYTSKTCSNCGFTITSADYDRVLEKLKKTATGWMTTINGKELKVEGQITYYNRYKRQNVVKDLSVELDRLSEESVNNDISSWTKGRSGEALSLLKKRFSHRPVQEKFVCLNCGFETHADEQAALNIARSWLFLRSQEYKKYQTNKTTGNTDKRAFVETWQSFYRKKLKEVWKPAV

SEQ ID NO: 27326 - protein, 978 aa, synthetic construct
  REGION 1..978: note = engineered CasX variant
QEIKRINKIRRRLVKDSNTKKAGKTGPMKTLLVRVMTPDLRERLENLRKKPENIPQPISNTSRANLNKLLTDYTEMKKAILHVYWEEFQKDPVGLMSRVAQPASKKIDQNKLKPEMDEKGNLTTAGFACSQCGQPLFVYKLEQVSEKGKAYTNYFGRCNVAEHEKLILLAQLKPEKDSDEAVTYSLGKFGQRALDFYSIHVTKESTHPVKPLAQIAGNRYASGPVGKALSDACMGTIASFLSKYQDIIIEHQKVVKGNQKRLESLRELAGKENLEYPSVTLPPQPHTKEGVDAYNEVIARVRMWVNLNLWQKLKLSRDDAKPLLRLKGFPSFPLVERQANEVDWWDMVCNVKKLINEKKEDGKVFWQNLAGYKRQEALRPYLSSEEDRKKGKKFARYQLGDLLLHLEKKHGEDWGKVYDEAWERIDKKVEGLSKHIKLEEERRSEDAQSKAALTDWLRAKASFVIEGLKEADKDEFCRCELKLQKWYGDLRGKPFAIEAENSILDISGFSKQYNCAFIWQKDGVKKLNLYLIINYFKGGKLRFKKIKPEAFEANRFYTVINKKSGEIVPMEVNFNFDDPNLIILPLAFGKRQGREFIWNDLLSLETGSLKLANGRVIEKTLYNRRTRQDEPALFVALTFERREVLDSSNIKPMNLIGVDRGENIPAVCALTDPEGCPLTRFKDSLGNPTHILRIGESYKEKQRTIQAKKEVEQRRAGGYSRKYASKAKNLADDMVRNTARDLLYYAVTQDAMLIFENLSRGFGRQGKRTFMAERQYTRMEDWLTAKLAYEGLPSKTYLSKTLAQYTSKTCSNCGFTITSADYDRVLEKLKKTATGWMTTINGKELKVEGQITYYNRYKRQNVVKDLSVELDRLSEESVNNDISSWTKGRSGEALSLLKKRFSHRPVQEKFVCLNCGFETHADEQAALNIARSWLFLRSQEYKKYQTNKTTGNTDKRAFVETWQSFYRKKLKEVWKPAV

SEQ ID NO: 27327 - protein, 978 aa, synthetic construct
  REGION 1..978: note = engineered CasX variant
QEIKRINKIRRRLVKDSNTKKAGKTGPMKTLLVRVMTPDLRERLENLRKKPENIPQPISNTSRANLNKLLTDYTEMKKAILHVYWEEFQKDPVGLMSRVAQPASKKIDQNKLKPEMDEKGNLTTAGFACSQCGQPLFVYKLEQVSEKGKAYTNYFGRCNVAEHEKLILLAQLKPEKDSDEAVTYSLGKFGQRALDFYSIHVTKESTHPVKPLAQIAGNRYASGPVGKALSDACMGTIASFLSKYQDIIIEHQKVVKGNQKRLESLRELAGKENLEYPSVTLPPQPHTKEGVDAYNEVIARVRMWVNLNLWQKLKLSRDDAKPLLRLKGFPSFPLVERQANEVDWWDMVCNVKKLINEKKEDGKVFWQNLAGYKRQEALRPYLSSEEDRKKGKKFARYQLGDLLLHLEKKHGEDWGKVYDEAWERIDKKVEGLSKHIKLEEERRSEDAQSKAALTDWLRAKASFVIEGLKEADKDEFCRCELKLQKWYGDLRGKPFAIEAENSILDISGFSKQYNCAFIWQKDGVKKLNLYLIINYFKGGKLRFKKIKPEAFEANRFYTVINKKSGEIVPMEVNFNFDDPNLIILPLAFGKRQGREFIWNDLLSLETGSLKLANGRVIEKTLYNRRTRQDEPALFVALTFERREVLDSSNIKPMNLIGVDRGENIPAVCALTDPEGCPLSRFKDSLGNPTHILRIGESYKEKQRTIQAYKEVEQRRAGGYSRKYASKAKNLADDMVRNTARDLLYYAVTQDAMLIFENLSRGFGRQGKRTFMAERQYTRMEDWLTAKLAYEGLPSKTYLSKTLAQYTSKTCSNCGFTITSADYDRVLEKLKKTATGWMTTINGKELKVEGQITYYNRYKRQNVVKDLSVELDRLSEESVNNDISSWTKGRSGEALSLLKKRFSHRPVQEKFVCLNCGFETHADEQAALNIARSWLFLRSQEYKKYQTNKTTGNTDKRAFVETWQSFYRKKLKEVWKPAV

SEQ ID NO: 27328 - protein, 978 aa, synthetic construct
  REGION 1..978: note = engineered CasX variant
QEIKRINKIRRRLVKDSNTKKAGKTGPMKTLLVRVMTPDLRERLENLRKKPENIPQPISNTSRANLNKLLTDYTEMKKAILHVYWEEFQKDPVGLMSRVAQPASKKIDQNKLKPEMDEKGNLTTAGFACSQCGQPLFVYKLEQVSEKGKAYTNYFGRCNVAEHEKLILLAQLKPEKDSDEAVTYSLGKFGQRALDFYSIHVTKESTHPVKPLAQIAGNRYASGPVGKALSDACMGTIASFLSKYQDIIIEHQKVVKGNQKRLESLRELAGKENLEYPSVTLPPQPHTKEGVDAYNEVIARVRMWVNLNLWQKLKLSRDDAKPLLRLKGFPSFPLVERQANEVDWWDMVCNVKKLINEKKEDGKVFWQNLAGYKRQEALRPYLSSEEDRKKGKKFARYQLGDLLLHLEKKHGEDWGKVYDEAWERIDKKVEGLSKHIKLEEERRSEDAQSKAALTDWLRAKASFVIEGLKEADKDEFCRCELKLQKWYGDLRGKPFAIEAENSILDISGFSKQYNCAFIWQKDGVKKLNLYLIINYFKGGKLRFKKIKPEAFEANRFYTVINKKSGEIVPMEVNFNFDDPNLIILPLAFGKRQGREFIWNDLLSLETGSLKLANGRVIEKTLYNRRTRQDEPALFVALTFERREVLDSSNIKPMNLIGVDRGENIPAVCALTDPEGCPLSRFKDSLGNPTHILRIGESYKEKQRTIQAKKEVEQRRAGGYSRKYASKAKNLADDMVRNTARDLLYYAVTQDAMLIFENLSRGFGRQGKRTFMAERQYTRMEDWLTAKLAYEGLPSKTYLSKTLAQYTSKTCSNCGFTITSADYDRVLEKLKKTATGWMTTINGKELKVEGQITYYNRYKRQNVVKDLSVELDRLSEESVNNDISSWTKGRSGEALSLLKKRFSHRPVQEKFVCLNCGFETHADEQAALNIARSWLFLRSQEYKKYQTNKTTGNTDKRAFVETWQSFYRKKLKEVWKPAV

SEQ ID NO: 27329 - protein, 978 aa, synthetic construct
  REGION 1..978: note = engineered CasX variant
QEIKRINKIRRRLVKDSNTKKAGKTGPMKTLLVRVMTPDLRERLENLRKKPENIPQPISNTSRANLNKLLTDYTEMKKAILHVYWEEFQKDPVGLMSRVAQPASKKIDQNKLKPEMDEKGNLTTAGFACSQCGQPLFVYKLEQVSEKGKAYTNYFGRCNVAEHEKLILLAQLKPEKDSDEAVTYSLGKFGQRALDFYSIHVTKESTHPVKPLAQIAGNRYASGPVGKALSDACMGTIASFLSKYQDIIIEHQKVVKGNQKRLESLRELAGKENLEYPSVTLPPQPHTKEGVDAYNEVIARVRMWVNLNLWQKLKLSRDDAKPLLRLKGFPSFPLVERQANEVDWWDMVCNVKKLINEKKEDGKVFWQNLAGYKRQEALRPYLSSEEDRKKGKKFARYQLGDLLLHLEKKHGEDWGKVYDEAWERIDKKVEGLSKHIKLEEERRSEDAQSKAALTDWLRAKASFVIEGLKEADKDEFCRCELKLQKWYGDLRGKPFAIEAENSILDISGFSKQYNCAFIWQKDGVKKLNLYLIINYFKGGKLRFKKIKPEAFEANRFYTVINKKSGEIVPMEVNFNFDDPNLIILPLAFGKRQGREFIWNDLLSLETGSLKLANGRVIEKTLYNRRTRQDEPALFVALTFERREVLDSSNIKPMNLIGVDRGENIPAVCALTDPEGCPLSRFKDSLGNPTHILRIGESYKEKQRTIQAAKEVEQRRAGGYSRKYASKAKNLADDMVRNTARDLLYYAVTQDAMLIFENLSRGFGRQGKRTFMAERQYTRMEDWLTAKLAYEGLPSKTYLSKTLAQYTSKTCSNCGFTITSADYDRVLEKLKKTATGWMTTINGKELKVEGQITYYNRYKRQNVVKDLSVELDRLSEESVNNDISSWTKGRSGEALSLLKKRFSHRPVQEKFVCLNCGFETHADEQAALNIARSWLFLRSQEYKKYQTNKTTGNTDKRAFVETWQSFYRKKLKEVWKPAV

SEQ ID NO: 27330 - protein, 978 aa, synthetic construct
  REGION 1..978: note = engineered CasX variant
QEIKRINKIRRRLVKDSNTKKAGKTGPMKTLLVRVMTPDLRERLENLRKKPENIPQPISNTSRANLNKLLTDYTEMKKAILHVYWEEFQKDPVGLMSRVAQPASKKIDQNKLKPEMDEKGNLTTAGFACSQCGQPLFVYKLEQVSEKGKAYTNYFGRCNVAEHEKLILLAQLKPEKDSDEAVTYSLGKFGQRALDFYSIHVTKESTHPVKPLAQIAGNRYASGPVGKALSDACMGTIASFLSKYQDIIIEHQKVVKGNQKRLESLRELAGKENLEYPSVTLPPQPHTKEGVDAYNEVIARVRMWVNLNLWQKLKLSRDDAKPLLRLKGFPSFPLVERQANEVDWWDMVCNVKKLINEKKEDGKVFWQNLAGYKRQEALRPYLSSEEDRKKGKKFARYQLGDLLLHLEKKHGEDWGKVYDEAWERIDKKVEGLSKHIKLEEERRSEDAQSKAALTDWLRAKASFVIEGLKEADKDEFCRCELKLQKWYGDLRGKPFAIEAENSILDISGFSKQYNCAFIWQKDGVKKLNLYLIINYFKGGKLRFKKIKPEAFEANRFYTVINKKSGEIVPMEVNFNFDDPNLIILPLAFGKRQGREFIWNDLLSLETGSLKLANGRVIEKTLYNRRTRQDEPALFVALTFERREVLDSSNIKPMNLIGVDRGENIPAVCALTDPEGCPLSAFKDSLGNPTHILRIGESYKEKQRTIQAKKEVEQRRAGGYSRKYASKAKNLADDMVRNTARDLLYYAVTQDAMLIFENLSRGFGRQGKRTFMAERQYTRMEDWLTAKLAYEGLPSKTYLSKTLAQYTSKTCSNCGFTITSADYDRVLEKLKKTATGWMTTINGKELKVEGQITYYNRYKRQNVVKDLSVELDRLSEESVNNDISSWTKGRSGEALSLLKKRFSHRPVQEKFVCLNCGFETHADEQAALNIARSWLFLRSQEYKKYQTNKTTGNTDKRAFVETWQSFYRKKLKEVWKPAV

SEQ ID NO: 27331 - protein, 978 aa, synthetic construct
  REGION 1..978: note = engineered CasX variant
QEIKRINKIRRRLVKDSNTKKAGKTGPMKTLLVRVMTPDLRERLENLRKKPENIPQPISNTSRANLNKLLTDYTEMKKAILHVYWEEFQKDPVGLMSRVAQPASKKIDQNKLKPEMDEKGNLTTAGFACSQCGQPLFVYKLEQVSEKGKAYTNYFGRCNVAEHEKLILLAQLKPEKDSDEAVTYSLGKFGQRALDFYSIHVTKESTHPVKPLAQIAGNRYASGPVGKALSDACMGTIASFLSKYQDIIIEHQKVVKGNQKRLESLRELAGKENLEYPSVTLPPQPHTKEGVDAYNEVIARVRMWVNLNLWQKLKLSRDDAKPLLRLKGFPSFPLVERQANEVDWWDMVCNVKKLINEKKEDGKVFWQNLAGYKRQEALRPYLSSEEDRKKGKKFARYQLGDLLLHLEKKHGEDWGKVYDEAWERIDKKVEGLSKHIKLEEERRSEDAQSKAALTDWLRAKASFVIEGLKEADKDEFCRCELKLQKWYGDLRGKPFAIEAENSILDISGFSKQYNCAFIWQKDGVKKLNLYLIINYFKGGKLRFKKIKPEAFEANRFYTVINKKSGEIVPMEVNFNFDDPNLIILPLAFGKRQGREFIWNDLLSLETGSLKLANGRVIEKTLYNRRTRQDEPALFVALTFERREVLDSSNIKPMNLIGVDRGENIPAVCALTDPEGCPLSAFKDSLGNPTHILRIGESYKEKQRTIQAAKEVEQRRAGGYSRKYASKAKNLADDMVRNTARDLLYYAVTQDAMLIFENLSRGFGRQGKRTFMAERQYTRMEDWLTAKLAYEGLPSKTYLSKTLAQYTSKTCSNCGFTITSADYDRVLEKLKKTATGWMTTINGKELKVEGQITYYNRYKRQNVVKDLSVELDRLSEESVNNDISSWTKGRSGEALSLLKKRFSHRPVQEKFVCLNCGFETHADEQAALNIARSWLFLRSQEYKKYQTNKTTGNTDKRAFVETWQSFYRKKLKEVWKPAV

SEQ ID NO: 27332 - protein, 978 aa, synthetic construct
  REGION 1..978: note = engineered CasX variant
QEIKRINKIRRRLVKDSNTKKAGKTGPMKTLLVRVMTPDLRERLENLRKKPENIPQPISNTSRANLNKLLTDYTEMKKAILHVYWEEFQKDPVGLMSRVAQPASKKIDQNKLKPEMDEKGNLTTAGFACSQCGQPLFVYKLEQVSEKGKAYTNYFGRCNVAEHEKLILLAQLKPEKDSDEAVTYSLGKFGQRALDFYSIHVTKESTHPVKPLAQIAGNRYASGPVGKALSDACMGTIASFLSKYQDIIIEHQKVVKGNQKRLESLRELAGKENLEYPSVTLPPQPHTKEGVDAYNEVIARVRMWVNLNLWQKLKLSRDDAKPLLRLKGFPSFPLVERQANEVDWWDMVCNVKKLINEKKEDGKVFWQNLAGYKRQEALRPYLSSEEDRKKGKKFARYQLGDLLLHLEKKHGEDWGKVYDEAWERIDKKVEGLSKHIKLEEERRSEDAQSKAALTDWLRAKASFVIEGLKEADKDEFCRCELKLQKWYGDLRGKPFAIEAENSILDISGFSKQYNCAFIWQKDGVKKLNLYLIINYFKGGKLRFKKIKPEAFEANRFYTVINKKSGEIVPMEVNFNFDDPNLIILPLAFGKRQGREFIWNDLLSLETGSLKLANGRVIEKTLYNRRTRQDEPALFVALTFERREVLDSSNIKPMNLIGVDRGENIPAVAALTDPEGCPLSRFKDSLGNPTHILRIGESYKNKQRTIQAKKEVEQRRAGGYSRKYASKAKNLADDMVRNTARDLLYYAVTQDAMLIFENLSRGFGRQGKRTFMAERQYTRMEDWLTAKLAYEGLPSKTYLSKTLAQYTSKTCSNCGFTITSADYDRVLEKLKKTATGWMTTINGKELKVEGQITYYNRYKRQNVVKDLSVELDRLSEESVNNDISSWTKGRSGEALSLLKKRFSHRPVQEKFVCLNCGFETHADEQAALNIARSWLFLRSQEYKKYQTNKTTGNTDKRAFVETWQSFYRKKLKEVWKPAV

SEQ ID NO: 27333 - protein, 978 aa, synthetic construct
  REGION 1..978: note = engineered CasX variant
QEIKRINKIRRRLVKDSNTKKAGKTGPMKTLLVRVMTPDLRERLENLRKKPENIPQPISNTSRANLNKLLTDYTEMKKAILHVYWEEFQKDPVGLMSRVAQPASKKIDQNKLKPEMDEKGNLTTAGFACSQCGQPLFVYKLEQVSEKGKAYTNYFGRCNVAEHEKLILLAQLKPEKDSDEAVTYSLGKFGQRALDFYSIHVTKESTHPVKPLAQIAGNRYASGPVGKALSDACMGTIASFLSKYQDIIIEHQKVVKGNQKRLESLRELAGKENLEYPSVTLPPQPHTKEGVDAYNEVIARVRMWVNLNLWQKLKLSRDDAKPLLRLKGFPSFPLVERQANEVDWWDMVCNVKKLINEKKEDGKVFWQNLAGYKRQEALRPYLSSEEDRKKGKKFARYQLGDLLLHLEKKHGEDWGKVYDEAWERIDKKVEGLSKHIKLEEERRSEDAQSKAALTDWLRAKASFVIEGLKEADKDEFCRCELKLQKWYGDLRGKPFAIEAENSILDISGFSKQYNCAFIWQKDGVKKLNLYLIINYFKGGKLRFKKIKPEAFEANRFYTVINKKSGEIVPMEVNFNFDDPNLIILPLAFGKRQGREFIWNDLLSLETGSLKLANGRVIEKTLYNRRTRQDEPALFVALTFERREVLDSSNIKPMNLIGVDRGENIPAVAALTDPEGCPLSRFKDSAGNPTHILRIGESYKEKQRTIQAKKEVEQRRAGGYSRKYASKAKNLADDMVRNTARDLLYYAVTQDAMLIFENLSRGFGRQGKRTFMAERQYTRMEDWLTAKLAYEGLPSKTYLSKTLAQYTSKTCSNCGFTITSADYDRVLEKLKKTATGWMTTINGKELKVEGQITYYNRYKRQNVVKDLSVELDRLSEESVNNDISSWTKGRSGEALSLLKKRFSHRPVQEKFVCLNCGFETHADEQAALNIARSWLFLRSQEYKKYQTNKTTGNTDKRAFVETWQSFYRKKLKEVWKPAV

SEQ ID NO: 27334 - protein, 978 aa, synthetic construct
  REGION 1..978: note = engineered CasX variant
QEIKRINKIRRRLVKDSNTKKAGKTGPMKTLLVRVMTPDLRERLENLRKKPENIPQPISNTSRANLNKLLTDYTEMKKAILHVYWEEFQKDPVGLMSRVAQPASKKIDQNKLKPEMDEKGNLTTAGFACSQCGQPLFVYKLEQVSEKGKAYTNYFGRCNVAEHEKLILLAQLKPEKDSDEAVTYSLGKFGQRALDFYSIHVTKESTHPVKPLAQIAGNRYASGPVGKALSDACMGTIASFLSKYQDIIIEHQKVVKGNQKRLESLRELAGKENLEYPSVTLPPQPHTKEGVDAYNEVIARVRMWVNLNLWQKLKLSRDDAKPLLRLKGFPSFPLVERQANEVDWWDMVCNVKKLINEKKEDGKVFWQNLAGYKRQEALRPYLSSEEDRKKGKKFARYQLGDLLLHLEKKHGEDWGKVYDEAWERIDKKVEGLSKHIKLEEERRSEDAQSKAALTDWLRAKASFVIEGLKEADKDEFCRCELKLQKWYGDLRGKPFAIEAENSILDISGFSKQYNCAFIWQKDGVKKLNLYLIINYFKGGKLRFKKIKPEAFEANRFYTVINKKSGEIVPMEVNFNFDDPNLIILPLAFGKRQGREFIWNDLLSLETGSLKLANGRVIEKTLYNRRTRQDEPALFVALTFERREVLDSSNIKPMNLIGVDRGENIPATIALTDPEGCPLSRFKDSLGNPTHILRIGESYKEKQRTIQAKKEVEQRRAGGYSRKYASKAKNLADDMVRNTARDLLYYAVTQDAMLIFENLSRGFGRQGKRTFMAERQYTRMEDWLTAKLAYEGLPSKTYLSKTLAQYTSKTCSNCGFTITSADYDRVLEKLKKTATGWMTTINGKELKVEGQITYYNRYKRQNVVKDLSVELDRLSEESVNNDISSWTKGRSGEALSLLKKRFSHRPVQEKFVCLNCGFETHADEQAALNIARSWLFLRSQEYKKYQTNKTTGNTDKRAFVETWQSFYRKKLKEVWKPAV

SEQ ID NO: 27335 - protein, 978 aa, synthetic construct
  REGION 1..978: note = engineered CasX variant
QEIKRINKIRRRLVKDSNTKKAGKTGPMKTLLVRVMTPDLRERLENLRKKPENIPQPISNTSRANLNKLLTDYTEMKKAILHVYWEEFQKDPVGLMSRVAQPASKKIDQNKLKPEMDEKGNLTTAGFACSQCGQPLFVYKLEQVSEKGKAYTNYFGRCNVAEHEKLILLAQLKPEKDSDEAVTYSLGKFGQRALDFYSIHVTKESTHPVKPLAQIAGNRYASGPVGKALSDACMGTIASFLSKYQDIIIEHQKVVKGNQKRLESLRELAGKENLEYPSVTLPPQPHTKEGVDAYNEVIARVRMWVNLNLWQKLKLSRDDAKPLLRLKGFPSFPLVERQANEVDWWDMVCNVKKLINEKKEDGKVFWQNLAGYKRQEALRPYLSSEEDRKKGKKFARYQLGDLLLHLEKKHGEDWGKVYDEAWERIDKKVEGLSKHIKLEEERRSEDAQSKAALTDWLRAKASFVIEGLKEADKDEFCRCELKLQKWYGDLRGKPFAIEAENSILDISGFSKQYNCAFIWQKDGVKKLNLYLIINYFKGGKLRFKKIKPEAFEANRFYTVINKKSGEIVPMEVNFNFDDPNLIILPLAFGKRQGREFIWNDLLSLETGSLKLANGRVIEKTLYNRRTRQDEPALFVALTFERREVLDSSNIKPMNLIGVDRGENIPASIALTDPEGCPLSMFKDSDGNPTHILRIGESYKEKQRTIQAKKEVEQRRAGGYSRKYASKAKNLADDMVRNTARDLLYYAVTQDAMLIFENLSRGFGRQGKRTFMAERQYTRMEDWLTAKLAYEGLPSKTYLSKTLAQYTSKTCSNCGFTITSADYDRVLEKLKKTATGWMTTINGKELKVEGQITYYNRYKRQNVVKDLSVELDRLSEESVNNDISSWTKGRSGEALSLLKKRFSHRPVQEKFVCLNCGFETHADEQAALNIARSWLFLRSQEYKKYQTNKTTGNTDKRAFVETWQSFYRKKLKEVWKPAV

SEQ ID NO: 27336 - protein, 978 aa, synthetic construct
  REGION 1..978: note = engineered CasX variant
QEIKRINKIRRRLVKDSNTKKAGKTGPMKTLLVRVMTPDLRERLENLRKKPENIPQPISNTSRANLNKLLTDYTEMKKAILHVYWEEFQKDPVGLMSRVAQPASKKIDQNKLKPEMDEKGNLTTAGFACSQCGQPLFVYKLEQVSEKGKAYTNYFGRCNVAEHEKLILLAQLKPEKDSDEAVTYSLGKFGQRALDFYSIHVTKESTHPVKPLAQIAGNRYASGPVGKALSDACMGTIASFLSKYQDIIIEHQKVVKGNQKRLESLRELAGKENLEYPSVTLPPQPHTKEGVDAYNEVIARVRMWVNLNLWQKLKLSRDDAKPLLRLKGFPSFPLVERQANEVDWWDMVCNVKKLINEKKEDGKVFWQNLAGYKRQEALRPYLSSEEDRKKGKKFARYQLGDLLLHLEKKHGEDWGKVYDEAWERIDKKVEGLSKHIKLEEERRSEDAQSKAALTDWLRAKASFVIEGLKEADKDEFCRCELKLQKWYGDLRGKPFAIEAENSILDISGFSKQYNCAFIWQKDGVKKLNLYLIINYFKGGKLRFKKIKPEAFEANRFYTVINKKSGEIVPMEVNFNFDDPNLIILPLAFGKRQGREFIWNDLLSLETGSLKLANGRVIEKTLYNRRTRQDEPALFVALTFERREVLDSSNIKPMNLIGVDRGENIPAMIALTDPEGKPLSRFKDSLGNPTHILRIGESYKEKQRTIQAKKEVEQRRAGGYSRKYASKAKNLADDMVRNTARDLLYYAVTQDAMLIFENLSRGFGRQGKRTFMAERQYTRMEDWLTAKLAYEGLPSKTYLSKTLAQYTSKTCSNCGFTITSADYDRVLEKLKKTATGWMTTINGKELKVEGQITYYNRYKRQNVVKDLSVELDRLSEESVNNDISSWTKGRSGEALSLLKKRFSHRPVQEKFVCLNCGFETHADEQAALNIARSWLFLRSQEYKKYQTNKTTGNTDKRAFVETWQSFYRKKLKEVWKPAV

SEQ ID NO: 27337 - protein, 978 aa, synthetic construct
  REGION 1..978: note = engineered CasX variant
QEIKRINKIRRRLVKDSNTKKAGKTGPMKTLLVRVMTPDLRERLENLRKKPENIPQPISNTSRANLNKLLTDYTEMKKAILHVYWEEFQKDPVGLMSRVAQPASKKIDQNKLKPEMDEKGNLTTAGFACSQCGQPLFVYKLEQVSEKGKAYTNYFGRCNVAEHEKLILLAQLKPEKDSDEAVTYSLGKFGQRALDFYSIHVTKESTHPVKPLAQIAGNRYASGPVGKALSDACMGTIASFLSKYQDIIIEHQKVVKGNQKRLESLRELAGKENLEYPSVTLPPQPHTKEGVDAYNEVIARVRMWVNLNLWQKLKLSRDDAKPLLRLKGFPSFPLVERQANEVDWWDMVCNVKKLINEKKEDGKVFWQNLAGYKRQEALRPYLSSEEDRKKGKKFARYQLGDLLLHLEKKHGEDWGKVYDEAWERIDKKVEGLSKHIKLEEERRSEDAQSKAALTDWLRAKASFVIEGLKEADKDEFCRCELKLQKWYGDLRGKPFAIEAENSILDISGFSKQYNCAFIWQKDGVKKLNLYLIINYFKGGKLRFKKIKPEAFEANRFYTVINKKSGEIVPMEVNFNFDDPNLIILPLAFGKRQGREFIWNDLLSLETGSLKLANGRVIEKTLYNRRTRQDEPALFVALTFERREVLDSSNIKPMNLIGVDRGENIPAMIALTDPEGCPLSRFKDSLGNPTHILRIGESYKEKQRTIQAKKEVEQRRAGGYSRKYASKAKNLADDMVRNTARDLLYYAVTQDAMLIFENLSRGFGRQGKRTFMAERQYTRMEDWLTAKLAYEGLPSKTYLSKTLAQYTSKTCSNCGFTITSADYDRVLEKLKKTATGWMTTINGKELKVEGQITYYNRYKRQNVVKDLSVELDRLSEESVNNDISSWTKGRSGEALSLLKKRFSHRPVQEKFVCLNCGFETHADEQAALNIARSWLFLRSQEYKKYQTNKTTGNTDKRAFVETWQSFYRKKLKEVWKPAV

SEQ ID NO: 27338 - protein, 978 aa, synthetic construct
  REGION 1..978: note = engineered CasX variant
QEIKRINKIRRRLVKDSNTKKAGKTGPMKTLLVRVMTPDLRERLENLRKKPENIPQPISNTSRANLNKLLTDYTEMKKAILHVYWEEFQKDPVGLMSRVAQPASKKIDQNKLKPEMDEKGNLTTAGFACSQCGQPLFVYKLEQVSEKGKAYTNYFGRCNVAEHEKLILLAQLKPEKDSDEAVTYSLGKFGQRALDFYSIHVTKESTHPVKPLAQIAGNRYASGPVGKALSDACMGTIASFLSKYQDIIIEHQKVVKGNQKRLESLRELAGKENLEYPSVTLPPQPHTKEGVDAYNEVIARVRMWVNLNLWQKLKLSRDDAKPLLRLKGFPSFPLVERQANEVDWWDMVCNVKKLINEKKEDGKVFWQNLAGYKRQEALRPYLSSEEDRKKGKKFARYQLGDLLLHLEKKHGEDWGKVYDEAWERIDKKVEGLSKHIKLEEERRSEDAQSKAALTDWLRAKASFVIEGLKEADKDEFCRCELKLQKWYGDLRGKPFAIEAENSILDISGFSKQYNCAFIWQKDGVKKLNLYLIINYFKGGKLRFKKIKPEAFEANRFYTVINKKSGEIVPMEVNFNFDDPNLIILPLAFGKRQGREFIWNDLLSLETGSLKLANGRVIEKTLYNRRTRQDEPALFVALTFERREVLDSSNIKPMNLIGVDRGENIPACIALTDPEGCPLSYFKDSLGNPTHILRIGESYKEKQRTIQAKKEVEQRRAGGYSRKYASKAKNLADDMVRNTARDLLYYAVTQDAMLIFENLSRGFGRQGKRTFMAERQYTRMEDWLTAKLAYEGLPSKTYLSKTLAQYTSKTCSNCGFTITSADYDRVLEKLKKTATGWMTTINGKELKVEGQITYYNRYKRQNVVKDLSVELDRLSEESVNNDISSWTKGRSGEALSLLKKRFSHRPVQEKFVCLNCGFETHADEQAALNIARSWLFLRSQEYKKYQTNKTTGNTDKRAFVETWQSFYRKKLKEVWKPAV

SEQ ID NO: 27339 - protein, 978 aa, synthetic construct
  REGION 1..978: note = engineered CasX variant
QEIKRINKIRRRLVKDSNTKKAGKTGPMKTLLVRVMTPDLRERLENLRKKPENIPQPISNTSRANLNKLLTDYTEMKKAILHVYWEEFQKDPVGLMSRVAQPASKKIDQNKLKPEMDEKGNLTTAGFACSQCGQPLFVYKLEQVSEKGKAYTNYFGRCNVAEHEKLILLAQLKPEKDSDEAVTYSLGKFGQRALDFYSIHVTKESTHPVKPLAQIAGNRYASGPVGKALSDACMGTIASFLSKYQDIIIEHQKVVKGNQKRLESLRELAGKENLEYPSVTLPPQPHTKEGVDAYNEVIARVRMWVNLNLWQKLKLSRDDAKPLLRLKGFPSFPLVERQANEVDWWDMVCNVKKLINEKKEDGKVFWQNLAGYKRQEALRPYLSSEEDRKKGKKFARYQLGDLLLHLEKKHGEDWGKVYDEAWERIDKKVEGLSKHIKLEEERRSEDAQSKAALTDWLRAKASFVIEGLKEADKDEFCRCELKLQKWYGDLRGKPFAIEAENSILDISGFSKQYNCAFIWQKDGVKKLNLYLIINYFKGGKLRFKKIKPEAFEANRFYTVINKKSGEIVPMEVNFNFDDPNLIILPLAFGKRQGREFIWNDLLSLETGSLKLANGRVIEKTLYNRRTRQDEPALFVALTFERREVLDSSNIKPMNLIGVDRGENIPACIALTDPEGCPLSRFKDSMGNPTHILRIGESYKEKQRTIQAKKEVEQRRAGGYSRKYASKAKNLADDMVRNTARDLLYYAVTQDAMLIFENLSRGFGRQGKRTFMAERQYTRMEDWLTAKLAYEGLPSKTYLSKTLAQYTSKTCSNCGFTITSADYDRVLEKLKKTATGWMTTINGKELKVEGQITYYNRYKRQNVVKDLSVELDRLSEESVNNDISSWTKGRSGEALSLLKKRFSHRPVQEKFVCLNCGFETHADEQAALNIARSWLFLRSQEYKKYQTNKTTGNTDKRAFVETWQSFYRKKLKEVWKPAV

SEQ ID NO: 27340 - protein, 978 aa, synthetic construct
  REGION 1..978: note = engineered CasX variant
QEIKRINKIRRRLVKDSNTKKAGKTGPMKTLLVRVMTPDLRERLENLRKKPENIPQPISNTSRANLNKLLTDYTEMKKAILHVYWEEFQKDPVGLMSRVAQPASKKIDQNKLKPEMDEKGNLTTAGFACSQCGQPLFVYKLEQVSEKGKAYTNYFGRCNVAEHEKLILLAQLKPEKDSDEAVTYSLGKFGQRALDFYSIHVTKESTHPVKPLAQIAGNRYASGPVGKALSDACMGTIASFLSKYQDIIIEHQKVVKGNQKRLESLRELAGKENLEYPSVTLPPQPHTKEGVDAYNEVIARVRMWVNLNLWQKLKLSRDDAKPLLRLKGFPSFPLVERQANEVDWWDMVCNVKKLINEKKEDGKVFWQNLAGYKRQEALRPYLSSEEDRKKGKKFARYQLGDLLLHLEKKHGEDWGKVYDEAWERIDKKVEGLSKHIKLEEERRSEDAQSKAALTDWLRAKASFVIEGLKEADKDEFCRCELKLQKWYGDLRGKPFAIEAENSILDISGFSKQYNCAFIWQKDGVKKLNLYLIINYFKGGKLRFKKIKPEAFEANRFYTVINKKSGEIVPMEVNFNFDDPNLIILPLAFGKRQGREFIWNDLLSLETGSLKLANGRVIEKTLYNRRTRQDEPALFVALTFERREVLDSSNIKPMNLIGVDRGENIPACIALTDPEGCPLSRFKDSLGNPTHILRIRESYKEKQRTIQAKKEVEQRRAGGYSRKYASKAKNLADDMVRNTARDLLYYAVTQDAMLIFENLSRGFGRQGKRTFMAERQYTRMEDWLTAKLAYEGLPSKTYLSKTLAQYTSKTCSNCGFTITSADYDRVLEKLKKTATGWMTTINGKELKVEGQITYYNRYKRQNVVKDLSVELDRLSEESVNNDISSWTKGRSGEALSLLKKRFSHRPVQEKFVCLNCGFETHADEQAALNIARSWLFLRSQEYKKYQTNKTTGNTDKRAFVETWQSFYRKKLKEVWKPAV

SEQ ID NO: 27341 - protein, 978 aa, synthetic construct
  REGION 1..978: note = engineered CasX variant
QEIKRINKIRRRLVKDSNTKKAGKTGPMKTLLVRVMTPDLRERLENLRKKPENIPQPISNTSRANLNKLLTDYTEMKKAILHVYWEEFQKDPVGLMSRVAQPASKKIDQNKLKPEMDEKGNLTTAGFACSQCGQPLFVYKLEQVSEKGKAYTNYFGRCNVAEHEKLILLAQLKPEKDSDEAVTYSLGKFGQRALDFYSIHVTKESTHPVKPLAQIAGNRYASGPVGKALSDACMGTIASFLSKYQDIIIEHQKVVKGNQKRLESLRELAGKENLEYPSVTLPPQPHTKEGVDAYNEVIARVRMWVNLNLWQKLKLSRDDAKPLLRLKGFPSFPLVERQANEVDWWDMVCNVKKLINEKKEDGKVFWQNLAGYKRQEALRPYLSSEEDRKKGKKFARYQLGDLLLHLEKKHGEDWGKVYDEAWERIDKKVEGLSKHIKLEEERRSEDAQSKAALTDWLRAKASFVIEGLKEADKDEFCRCELKLQKWYGDLRGKPFAIEAENSILDISGFSKQYNCAFIWQKDGVKKLNLYLIINYFKGGKLRFKKIKPEAFEANRFYTVINKKSGEIVPMEVNFNFDDPNLIILPLAFGKRQGREFIWNDLLSLETGSLKLANGRVIEKTLYNRRTRQDEPALFVALTFERREVLDSSNIKPMNLIGVDRGENIPACIALTDPEGCPLSRFKDSLGNPTHILRIGESYKEKQRTIQAKKEVEQRRAGGYSRKYASKAKNLADDMVRNTARDLLYYAVTQDAMLIFENLSRGFGRQGKRTFMAERQYTRMEDWLTAKLAYEGLPSKTYLSKTLAQYTSKTCSNCGFTITSADYDRVLEKLKKTATGWMTTINGKELKVEGQITYYNRYKRQNVVKDLSVELDRLSEESVNNDISSWTKGRSGEALSLLKKRFSHRPVQEKFVCLNCGFETHADEQAALNIARSWLFLRSQEYKKYQTNKTTGNTDKRAFVETWQSFYRKKLKEVWKPAV

SEQ ID NO: 27342 - protein, 978 aa, synthetic construct
  REGION 1..978: note = engineered CasX variant
QEIKRINKIRRRLVKDSNTKKAGKTGPMKTLLVRVMTPDLRERLENLRKKPENIPQPISNTSRANLNKLLTDYTEMKKAILHVYWEEFQKDPVGLMSRVAQPASKKIDQNKLKPEMDEKGNLTTAGFACSQCGQPLFVYKLEQVSEKGKAYTNYFGRCNVAEHEKLILLAQLKPEKDSDEAVTYSLGKFGQRALDFYSIHVTKESTHPVKPLAQIAGNRYASGPVGKALSDACMGTIASFLSKYQDIIIEHQKVVKGNQKRLESLRELAGKENLEYPSVTLPPQPHTKEGVDAYNEVIARVRMWVNLNLWQKLKLSRDDAKPLLRLKGFPSFPLVERQANEVDWWDMVCNVKKLINEKKEDGKVFWQNLAGYKRQEALRPYLSSEEDRKKGKKFARYQLGDLLLHLEKKHGEDWGKVYDEAWERIDKKVEGLSKHIKLEEERRSEDAQSKAALTDWLRAKASFVIEGLKEADKDEFCRCELKLQKWYGDLRGKPFAIEAENSILDISGFSKQYNCAFIWQKDGVKKLNLYLIINYFKGGKLRFKKIKPEAFEANRFYTVINKKSGEIVPMEVNFNFDDPNLIILPLAFGKRQGREFIWNDLLSLETGSLKLANGRVIEKTLYNRRTRQDEPALFVALTFERREVLDSSNIKPMNLIGVDRGENIPACIALTDPEGCPLSRFKDSLGNPTHILRIGESYKEKQRTIFAKKEVEQRRAGGYSRKYASKAKNLADDMVRNTARDLLYYAVTQDAMLIFENLSRGFGRQGKRTFMAERQYTRMEDWLTAKLAYEGLPSKTYLSKTLAQYTSKTCSNCGFTITSADYDRVLEKLKKTATGWMTTINGKELKVEGQITYYNRYKRQNVVKDLSVELDRLSEESVNNDISSWTKGRSGEALSLLKKRFSHRPVQEKFVCLNCGFETHADEQAALNIARSWLFLRSQEYKKYQTNKTTGNTDKRAFVETWQSFYRKKLKEVWKPAV

SEQ ID NO: 27343 - protein, 978 aa, synthetic construct
  REGION 1..978: note = engineered CasX variant
QEIKRINKIRRRLVKDSNTKKAGKTGPMKTLLVRVMTPDLRERLENLRKKPENIPQPISNTSRANLNKLLTDYTEMKKAILHVYWEEFQKDPVGLMSRVAQPASKKIDQNKLKPEMDEKGNLTTAGFACSQCGQPLFVYKLEQVSEKGKAYTNYFGRCNVAEHEKLILLAQLKPEKDSDEAVTYSLGKFGQRALDFYSIHVTKESTHPVKPLAQIAGNRYASGPVGKALSDACMGTIASFLSKYQDIIIEHQKVVKGNQKRLESLRELAGKENLEYPSVTLPPQPHTKEGVDAYNEVIARVRMWVNLNLWQKLKLSRDDAKPLLRLKGFPSFPLVERQANEVDWWDMVCNVKKLINEKKEDGKVFWQNLAGYKRQEALRPYLSSEEDRKKGKKFARYQLGDLLLHLEKKHGEDWGKVYDEAWERIDKKVEGLSKHIKLEEERRSEDAQSKAALTDWLRAKASFVIEGLKEADKDEFCRCELKLQKWYGDLRGKPFAIEAENSILDISGFSKQYNCAFIWQKDGVKKLNLYLIINYFKGGKLRFKKIKPEAFEANRFYTVINKKSGEIVPMEVNFNFDDPNLIILPLAFGKRQGREFIWNDLLSLETGSLKLANGRVIEKTLYNRRTRQDEPALFVALTFERREVLDSSNIKPMNLIGVDRGENIPACIALTDPEGCPLSRFKDSLGNPTHCLRIGESYKEKQRTIQAKKEVEQRRAGGYSRKYASKAKNLADDMVRNTARDLLYYAVTQDAMLIFENLSRGFGRQGKRTFMAERQYTRMEDWLTAKLAYEGLPSKTYLSKTLAQYTSKTCSNCGFTITSADYDRVLEKLKKTATGWMTTINGKELKVEGQITYYNRYKRQNVVKDLSVELDRLSEESVNNDISSWTKGRSGEALSLLKKRFSHRPVQEKFVCLNCGFETHADEQAALNIARSWLFLRSQEYKKYQTNKTTGNTDKRAFVETWQSFYRKKLKEVWKPAV

SEQ ID NO: 27344 - protein, 978 aa, synthetic construct
  REGION 1..978: note = engineered CasX variant
QEIKRINKIRRRLVKDSNTKKAGKTGPMKTLLVRVMTPDLRERLENLRKKPENIPQPISNTSRANLNKLLTDYTEMKKAILHVYWEEFQKDPVGLMSRVAQPASKKIDQNKLKPEMDEKGNLTTAGFACSQCGQPLFVYKLEQVSEKGKAYTNYFGRCNVAEHEKLILLAQLKPEKDSDEAVTYSLGKFGQRALDFYSIHVTKESTHPVKPLAQIAGNRYASGPVGKALSDACMGTIASFLSKYQDIIIEHQKVVKGNQKRLESLRELAGKENLEYPSVTLPPQPHTKEGVDAYNEVIARVRMWVNLNLWQKLKLSRDDAKPLLRLKGFPSFPLVERQANEVDWWDMVCNVKKLINEKKEDGKVFWQNLAGYKRQEALRPYLSSEEDRKKGKKFARYQLGDLLLHLEKKHGEDWGKVYDEAWERIDKKVEGLSKHIKLEEERRSEDAQSKAALTDWLRAKASFVIEGLKEADKDEFCRCELKLQKWYGDLRGKPFAIEAENSILDISGFSKQYNCAFIWQKDGVKKLNLYLIINYFKGGKLRFKKIKPEAFEANRFYTVINKKSGEIVPMEVNFNFDDPNLIILPLAFGKRQGREFIWNDLLSLETGSLKLANGRVIEKTLYNRRTRQDEPALFVALTFERREVLDSSNIKPMNLIGVDRGENIPACIALTDPEGCPLSRFKDSLGNKTHILRIGESYKEKQRTIQAKKEVEQRRAGGYSRKYASKAKNLADDMVRNTARDLLYYAVTQDAMLIFENLSRGFGRQGKRTFMAERQYTRMEDWLTAKLAYEGLPSKTYLSKTLAQYTSKTCSNCGFTITSADYDRVLEKLKKTATGWMTTINGKELKVEGQITYYNRYKRQNVVKDLSVELDRLSEESVNNDISSWTKGRSGEALSLLKKRFSHRPVQEKFVCLNCGFETHADEQAALNIARSWLFLRSQEYKKYQTNKTTGNTDKRAFVETWQSFYRKKLKEVWKPAV

SEQ ID NO: 27345 - protein, 978 aa, synthetic construct
  REGION 1..978: note = engineered CasX variant
QEIKRINKIRRRLVKDSNTKKAGKTGPMKTLLVRVMTPDLRERLENLRKKPENIPQPISNTSRANLNKLLTDYTEMKKAILHVYWEEFQKDPVGLMSRVAQPASKKIDQNKLKPEMDEKGNLTTAGFACSQCGQPLFVYKLEQVSEKGKAYTNYFGRCNVAEHEKLILLAQLKPEKDSDEAVTYSLGKFGQRALDFYSIHVTKESTHPVKPLAQIAGNRYASGPVGKALSDACMGTIASFLSKYQDIIIEHQKVVKGNQKRLESLRELAGKENLEYPSVTLPPQPHTKEGVDAYNEVIARVRMWVNLNLWQKLKLSRDDAKPLLRLKGFPSFPLVERQANEVDWWDMVCNVKKLINEKKEDGKVFWQNLAGYKRQEALRPYLSSEEDRKKGKKFARYQLGDLLLHLEKKHGEDWGKVYDEAWERIDKKVEGLSKHIKLEEERRSEDAQSKAALTDWLRAKASFVIEGLKEADKDEFCRCELKLQKWYGDLRGKPFAIEAENSILDISGFSKQYNCAFIWQKDGVKKLNLYLIINYFKGGKLRFKKIKPEAFEANRFYTVINKKSGEIVPMEVNFNFDDPNLIILPLAFGKRQGREFIWNDLLSLETGSLKLANGRVIEKTLYNRRTRQDEPALFVALTFERREVLDSSNIKPMNLIGVDRGENIPACIALTDPEGCPLSNFKDSLGNPTHILRIGESYKEKQRTIQAKKEVEQRRAGGYSRKYASKAKNLADDMVRNTARDLLYYAVTQDAMLIFENLSRGFGRQGKRTFMAERQYTRMEDWLTAKLAYEGLPSKTYLSKTLAQYTSKTCSNCGFTITSADYDRVLEKLKKTATGWMTTINGKELKVEGQITYYNRYKRQNVVKDLSVELDRLSEESVNNDISSWTKGRSGEALSLLKKRFSHRPVQEKFVCLNCGFETHADEQAALNIARSWLFLRSQEYKKYQTNKTTGNTDKRAFVETWQSFYRKKLKEVWKPAV

SEQ ID NO: 27346 - protein, 978 aa, synthetic construct
  REGION 1..978: note = engineered CasX variant
QEIKRINKIRRRLVKDSNTKKAGKTGPMKTLLVRVMTPDLRERLENLRKKPENIPQPISNTSRANLNKLLTDYTEMKKAILHVYWEEFQKDPVGLMSRVAQPASKKIDQNKLKPEMDEKGNLTTAGFACSQCGQPLFVYKLEQVSEKGKAYTNYFGRCNVAEHEKLILLAQLKPEKDSDEAVTYSLGKFGQRALDFYSIHVTKESTHPVKPLAQIAGNRYASGPVGKALSDACMGTIASFLSKYQDIIIEHQKVVKGNQKRLESLRELAGKENLEYPSVTLPPQPHTKEGVDAYNEVIARVRMWVNLNLWQKLKLSRDDAKPLLRLKGFPSFPLVERQANEVDWWDMVCNVKKLINEKKEDGKVFWQNLAGYKRQEALRPYLSSEEDRKKGKKFARYQLGDLLLHLEKKHGEDWGKVYDEAWERIDKKVEGLSKHIKLEEERRSEDAQSKAALTDWLRAKASFVIEGLKEADKDEFCRCELKLQKWYGDLRGKPFAIEAENSILDISGFSKQYNCAFIWQKDGVKKLNLYLIINYFKGGKLRFKKIKPEAFEANRFYTVINKKSGEIVPMEVNFNFDDPNLIILPLAFGKRQGREFIWNDLLSLETGSLKLANGRVIEKTLYNRRTRQDEPALFVALTFERREVLDSSNIKPMNLIGVDRGENIPACIALTDPEGCPISYFKDSLGNPTHILRIGESYKEKQRTIQAKKEVEQRRAGGYSRKYASKAKNLADDMVRNTARDLLYYAVTQDAMLIFENLSRGFGRQGKRTFMAERQYTRMEDWLTAKLAYEGLPSKTYLSKTLAQYTSKTCSNCGFTITSADYDRVLEKLKKTATGWMTTINGKELKVEGQITYYNRYKRQNVVKDLSVELDRLSEESVNNDISSWTKGRSGEALSLLKKRFSHRPVQEKFVCLNCGFETHADEQAALNIARSWLFLRSQEYKKYQTNKTTGNTDKRAFVETWQSFYRKKLKEVWKPAV

SEQ ID NO: 27347 - protein, 978 aa, synthetic construct
  REGION 1..978: note = engineered CasX variant
QEIKRINKIRRRLVKDSNTKKAGKTGPMKTLLVRVMTPDLRERLENLRKKPENIPQPISNTSRANLNKLLTDYTEMKKAILHVYWEEFQKDPVGLMSRVAQPASKKIDQNKLKPEMDEKGNLTTAGFACSQCGQPLFVYKLEQVSEKGKAYTNYFGRCNVAEHEKLILLAQLKPEKDSDEAVTYSLGKFGQRALDFYSIHVTKESTHPVKPLAQIAGNRYASGPVGKALSDACMGTIASFLSKYQDIIIEHQKVVKGNQKRLESLRELAGKENLEYPSVTLPPQPHTKEGVDAYNEVIARVRMWVNLNLWQKLKLSRDDAKPLLRLKGFPSFPLVERQANEVDWWDMVCNVKKLINEKKEDGKVFWQNLAGYKRQEALRPYLSSEEDRKKGKKFARYQLGDLLLHLEKKHGEDWGKVYDEAWERIDKKVEGLSKHIKLEEERRSEDAQSKAALTDWLRAKASFVIEGLKEADKDEFCRCELKLQKWYGDLRGKPFAIEAENSILDISGFSKQYNCAFIWQKDGVKKLNLYLIINYFKGGKLRFKKIKPEAFEANRFYTVINKKSGEIVPMEVNFNFDDPNLIILPLAFGKRQGREFIWNDLLSLETGSLKLANGRVIEKTLYNRRTRQDEPALFVALTFERREVLDSSNIKPMNLIGVDRGENIPACIALTDPEGCPISRFKDSMGNPTHILRIGESYKEKQRTIQAKKEVEQRRAGGYSRKYASKAKNLADDMVRNTARDLLYYAVTQDAMLIFENLSRGFGRQGKRTFMAERQYTRMEDWLTAKLAYEGLPSKTYLSKTLAQYTSKTCSNCGFTITSADYDRVLEKLKKTATGWMTTINGKELKVEGQITYYNRYKRQNVVKDLSVELDRLSEESVNNDISSWTKGRSGEALSLLKKRFSHRPVQEKFVCLNCGFETHADEQAALNIARSWLFLRSQEYKKYQTNKTTGNTDKRAFVETWQSFYRKKLKEVWKPAV

SEQ ID NO: 27348 - protein, 978 aa, synthetic construct
  REGION 1..978: note = engineered CasX variant
QEIKRINKIRRRLVKDSNTKKAGKTGPMKTLLVRVMTPDLRERLENLRKKPENIPQPISNTSRANLNKLLTDYTEMKKAILHVYWEEFQKDPVGLMSRVAQPASKKIDQNKLKPEMDEKGNLTTAGFACSQCGQPLFVYKLEQVSEKGKAYTNYFGRCNVAEHEKLILLAQLKPEKDSDEAVTYSLGKFGQRALDFYSIHVTKESTHPVKPLAQIAGNRYASGPVGKALSDACMGTIASFLSKYQDIIIEHQKVVKGNQKRLESLRELAGKENLEYPSVTLPPQPHTKEGVDAYNEVIARVRMWVNLNLWQKLKLSRDDAKPLLRLKGFPSFPLVERQANEVDWWDMVCNVKKLINEKKEDGKVFWQNLAGYKRQEALRPYLSSEEDRKKGKKFARYQLGDLLLHLEKKHGEDWGKVYDEAWERIDKKVEGLSKHIKLEEERRSEDAQSKAALTDWLRAKASFVIEGLKEADKDEFCRCELKLQKWYGDLRGKPFAIEAENSILDISGFSKQYNCAFIWQKDGVKKLNLYLIINYFKGGKLRFKKIKPEAFEANRFYTVINKKSGEIVPMEVNFNFDDPNLIILPLAFGKRQGREFIWNDLLSLETGSLKLANGRVIEKTLYNRRTRQDEPALFVALTFERREVLDSSNIKPMNLIGVDRGENIPACIALTDPEGCPISRFKDSLGNPTHILRIRESYKEKQRTIQAKKEVEQRRAGGYSRKYASKAKNLADDMVRNTARDLLYYAVTQDAMLIFENLSRGFGRQGKRTFMAERQYTRMEDWLTAKLAYEGLPSKTYLSKTLAQYTSKTCSNCGFTITSADYDRVLEKLKKTATGWMTTINGKELKVEGQITYYNRYKRQNVVKDLSVELDRLSEESVNNDISSWTKGRSGEALSLLKKRFSHRPVQEKFVCLNCGFETHADEQAALNIARSWLFLRSQEYKKYQTNKTTGNTDKRAFVETWQSFYRKKLKEVWKPAV

SEQ ID NO: 27349 - protein, 978 aa, synthetic construct
  REGION 1..978: note = engineered CasX variant
QEIKRINKIRRRLVKDSNTKKAGKTGPMKTLLVRVMTPDLRERLENLRKKPENIPQPISNTSRANLNKLLTDYTEMKKAILHVYWEEFQKDPVGLMSRVAQPASKKIDQNKLKPEMDEKGNLTTAGFACSQCGQPLFVYKLEQVSEKGKAYTNYFGRCNVAEHEKLILLAQLKPEKDSDEAVTYSLGKFGQRALDFYSIHVTKESTHPVKPLAQIAGNRYASGPVGKALSDACMGTIASFLSKYQDIIIEHQKVVKGNQKRLESLRELAGKENLEYPSVTLPPQPHTKEGVDAYNEVIARVRMWVNLNLWQKLKLSRDDAKPLLRLKGFPSFPLVERQANEVDWWDMVCNVKKLINEKKEDGKVFWQNLAGYKRQEALRPYLSSEEDRKKGKKFARYQLGDLLLHLEKKHGEDWGKVYDEAWERIDKKVEGLSKHIKLEEERRSEDAQSKAALTDWLRAKASFVIEGLKEADKDEFCRCELKLQKWYGDLRGKPFAIEAENSILDISGFSKQYNCAFIWQKDGVKKLNLYLIINYFKGGKLRFKKIKPEAFEANRFYTVINKKSGEIVPMEVNFNFDDPNLIILPLAFGKRQGREFIWNDLLSLETGSLKLANGRVIEKTLYNRRTRQDEPALFVALTFERREVLDSSNIKPMNLIGVDRGENIPACIALTDPEGCPISRFKDSLGNPTHILRIGESYKEKQRTIQAKKEVEQRRAGGYSRKYASKAKNLADDMVRNTARDLLYYAVTQDAMLIFENLSRGFGRQGKRTFMAERQYTRMEDWLTAKLAYEGLPSKTYLSKTLAQYTSKTCSNCGFTITSADYDRVLEKLKKTATGWMTTINGKELKVEGQITYYNRYKRQNVVKDLSVELDRLSEESVNNDISSWTKGRSGEALSLLKKRFSHRPVQEKFVCLNCGFETHADEQAALNIARSWLFLRSQEYKKYQTNKTTGNTDKRAFVETWQSFYRKKLKEVWKPAV

SEQ ID NO: 27350 - protein, 978 aa, synthetic construct
  REGION 1..978: note = engineered CasX variant
QEIKRINKIRRRLVKDSNTKKAGKTGPMKTLLVRVMTPDLRERLENLRKKPENIPQPISNTSRANLNKLLTDYTEMKKAILHVYWEEFQKDPVGLMSRVAQPASKKIDQNKLKPEMDEKGNLTTAGFACSQCGQPLFVYKLEQVSEKGKAYTNYFGRCNVAEHEKLILLAQLKPEKDSDEAVTYSLGKFGQRALDFYSIHVTKESTHPVKPLAQIAGNRYASGPVGKALSDACMGTIASFLSKYQDIIIEHQKVVKGNQKRLESLRELAGKENLEYPSVTLPPQPHTKEGVDAYNEVIARVRMWVNLNLWQKLKLSRDDAKPLLRLKGFPSFPLVERQANEVDWWDMVCNVKKLINEKKEDGKVFWQNLAGYKRQEALRPYLSSEEDRKKGKKFARYQLGDLLLHLEKKHGEDWGKVYDEAWERIDKKVEGLSKHIKLEEERRSEDAQSKAALTDWLRAKASFVIEGLKEADKDEFCRCELKLQKWYGDLRGKPFAIEAENSILDISGFSKQYNCAFIWQKDGVKKLNLYLIINYFKGGKLRFKKIKPEAFEANRFYTVINKKSGEIVPMEVNFNFDDPNLIILPLAFGKRQGREFIWNDLLSLETGSLKLANGRVIEKTLYNRRTRQDEPALFVALTFERREVLDSSNIKPMNLIGVDRGENIPACIALTDPEGCPISRFKDSLGNPTHILRIGESYKEKQRTIFAKKEVEQRRAGGYSRKYASKAKNLADDMVRNTARDLLYYAVTQDAMLIFENLSRGFGRQGKRTFMAERQYTRMEDWLTAKLAYEGLPSKTYLSKTLAQYTSKTCSNCGFTITSADYDRVLEKLKKTATGWMTTINGKELKVEGQITYYNRYKRQNVVKDLSVELDRLSEESVNNDISSWTKGRSGEALSLLKKRFSHRPVQEKFVCLNCGFETHADEQAALNIARSWLFLRSQEYKKYQTNKTTGNTDKRAFVETWQSFYRKKLKEVWKPAV

SEQ ID NO: 27351 - protein, 978 aa, synthetic construct
  REGION 1..978: note = engineered CasX variant
QEIKRINKIRRRLVKDSNTKKAGKTGPMKTLLVRVMTPDLRERLENLRKKPENIPQPISNTSRANLNKLLTDYTEMKKAILHVYWEEFQKDPVGLMSRVAQPASKKIDQNKLKPEMDEKGNLTTAGFACSQCGQPLFVYKLEQVSEKGKAYTNYFGRCNVAEHEKLILLAQLKPEKDSDEAVTYSLGKFGQRALDFYSIHVTKESTHPVKPLAQIAGNRYASGPVGKALSDACMGTIASFLSKYQDIIIEHQKVVKGNQKRLESLRELAGKENLEYPSVTLPPQPHTKEGVDAYNEVIARVRMWVNLNLWQKLKLSRDDAKPLLRLKGFPSFPLVERQANEVDWWDMVCNVKKLINEKKEDGKVFWQNLAGYKRQEALRPYLSSEEDRKKGKKFARYQLGDLLLHLEKKHGEDWGKVYDEAWERIDKKVEGLSKHIKLEEERRSEDAQSKAALTDWLRAKASFVIEGLKEADKDEFCRCELKLQKWYGDLRGKPFAIEAENSILDISGFSKQYNCAFIWQKDGVKKLNLYLIINYFKGGKLRFKKIKPEAFEANRFYTVINKKSGEIVPMEVNFNFDDPNLIILPLAFGKRQGREFIWNDLLSLETGSLKLANGRVIEKTLYNRRTRQDEPALFVALTFERREVLDSSNIKPMNLIGVDRGENIPACIALTDPEGCPISRFKDSLGNKTHILRIGESYKEKQRTIQAKKEVEQRRAGGYSRKYASKAKNLADDMVRNTARDLLYYAVTQDAMLIFENLSRGFGRQGKRTFMAERQYTRMEDWLTAKLAYEGLPSKTYLSKTLAQYTSKTCSNCGFTITSADYDRVLEKLKKTATGWMTTINGKELKVEGQITYYNRYKRQNVVKDLSVELDRLSEESVNNDISSWTKGRSGEALSLLKKRFSHRPVQEKFVCLNCGFETHADEQAALNIARSWLFLRSQEYKKYQTNKTTGNTDKRAFVETWQSFYRKKLKEVWKPAV

SEQ ID NO: 27352 - protein, 978 aa, synthetic construct
  REGION 1..978: note = engineered CasX variant
QEIKRINKIRRRLVKDSNTKKAGKTGPMKTLLVRVMTPDLRERLENLRKKPENIPQPISNTSRANLNKLLTDYTEMKKAILHVYWEEFQKDPVGLMSRVAQPASKKIDQNKLKPEMDEKGNLTTAGFACSQCGQPLFVYKLEQVSEKGKAYTNYFGRCNVAEHEKLILLAQLKPEKDSDEAVTYSLGKFGQRALDFYSIHVTKESTHPVKPLAQIAGNRYASGPVGKALSDACMGTIASFLSKYQDIIIEHQKVVKGNQKRLESLRELAGKENLEYPSVTLPPQPHTKEGVDAYNEVIARVRMWVNLNLWQKLKLSRDDAKPLLRLKGFPSFPLVERQANEVDWWDMVCNVKKLINEKKEDGKVFWQNLAGYKRQEALRPYLSSEEDRKKGKKFARYQLGDLLLHLEKKHGEDWGKVYDEAWERIDKKVEGLSKHIKLEEERRSEDAQSKAALTDWLRAKASFVIEGLKEADKDEFCRCELKLQKWYGDLRGKPFAIEAENSILDISGFSKQYNCAFIWQKDGVKKLNLYLIINYFKGGKLRFKKIKPEAFEANRFYTVINKKSGEIVPMEVNFNFDDPNLIILPLAFGKRQGREFIWNDLLSLETGSLKLANGRVIEKTLYNRRTRQDEPALFVALTFERREVLDSSNIKPMNLIGVDRGENIPACIALTDPEGCPISNFKDSLGNPTHILRIGESYKEKQRTIQAKKEVEQRRAGGYSRKYASKAKNLADDMVRNTARDLLYYAVTQDAMLIFENLSRGFGRQGKRTFMAERQYTRMEDWLTAKLAYEGLPSKTYLSKTLAQYTSKTCSNCGFTITSADYDRVLEKLKKTATGWMTTINGKELKVEGQITYYNRYKRQNVVKDLSVELDRLSEESVNNDISSWTKGRSGEALSLLKKRFSHRPVQEKFVCLNCGFETHADEQAALNIARSWLFLRSQEYKKYQTNKTTGNTDKRAFVETWQSFYRKKLKEVWKPAV

SEQ ID NO: 27353 - protein, 978 aa, synthetic construct
  REGION 1..978: note = engineered CasX variant
QEIKRINKIRRRLVKDSNTKKAGKTGPMKTLLVRVMTPDLRERLENLRKKPENIPQPISNTSRANLNKLLTDYTEMKKAILHVYWEEFQKDPVGLMSRVAQPASKKIDQNKLKPEMDEKGNLTTAGFACSQCGQPLFVYKLEQVSEKGKAYTNYFGRCNVAEHEKLILLAQLKPEKDSDEAVTYSLGKFGQRALDFYSIHVTKESTHPVKPLAQIAGNRYASGPVGKALSDACMGTIASFLSKYQDIIIEHQKVVKGNQKRLESLRELAGKENLEYPSVTLPPQPHTKEGVDAYNEVIARVRMWVNLNLWQKLKLSRDDAKPLLRLKGFPSFPLVERQANEVDWWDMVCNVKKLINEKKEDGKVFWQNLAGYKRQEALRPYLSSEEDRKKGKKFARYQLGDLLLHLEKKHGEDWGKVYDEAWERIDKKVEGLSKHIKLEEERRSEDAQSKAALTDWLRAKASFVIEGLKEADKDEFCRCELKLQKWYGDLRGKPFAIEAENSILDISGFSKQYNCAFIWQKDGVKKLNLYLIINYFKGGKLRFKKIKPEAFEANRFYTVINKKSGEIVPMEVNFNFDDPNLIILPLAFGKRQGREFIWNDLLSLETGSLKLANGRVIEKTLYNRRTRQDEPALFVALTFERREVLDSSNIKPMNLIGVDRGENIPAAIALTDPEGRPLSRFKDSLGNPTHILRIGESYKEKQRTIQAKKEVEQRRFGGYSRKYASKAKNLADDMVRNTARDLLYYAVTQDAMLIFENLSRGFGRQGKRTFMAERQYTRMEDWLTAKLAYEGLPSKTYLSKTLAQYTSKTCSNCGFTITSADYDRVLEKLKKTATGWMTTINGKELKVEGQITYYNRYKRQNVVKDLSVELDRLSEESVNNDISSWTKGRSGEALSLLKKRFSHRPVQEKFVCLNCGFETHADEQAALNIARSWLFLRSQEYKKYQTNKTTGNTDKRAFVETWQSFYRKKLKEVWKPAV

SEQ ID NO: 27354 - protein, 978 aa, synthetic construct
  REGION 1..978: note = engineered CasX variant
QEIKRINKIRRRLVKDSNTKKAGKTGPMKTLLVRVMTPDLRERLENLRKKPENIPQPISNTSRANLNKLLTDYTEMKKAILHVYWEEFQKDPVGLMSRVAQPASKKIDQNKLKPEMDEKGNLTTAGFACSQCGQPLFVYKLEQVSEKGKAYTNYFGRCNVAEHEKLILLAQLKPEKDSDEAVTYSLGKFGQRALDFYSIHVTKESTHPVKPLAQIAGNRYASGPVGKALSDACMGTIASFLSKYQDIIIEHQKVVKGNQKRLESLRELAGKENLEYPSVTLPPQPHTKEGVDAYNEVIARVRMWVNLNLWQKLKLSRDDAKPLLRLKGFPSFPLVERQANEVDWWDMVCNVKKLINEKKEDGKVFWQNLAGYKRQEALRPYLSSEEDRKKGKKFARYQLGDLLLHLEKKHGEDWGKVYDEAWERIDKKVEGLSKHIKLEEERRSEDAQSKAALTDWLRAKASFVIEGLKEADKDEFCRCELKLQKWYGDLRGKPFAIEAENSILDISGFSKQYNCAFIWQKDGVKKLNLYLIINYFKGGKLRFKKIKPEAFEANRFYTVINKKSGEIVPMEVNFNFDDPNLIILPLAFGKRQGREFIWNDLLSLETGSLKLANGRVIEKTLYNRRTRQDEPALFVALTFERREVLDSSNIKPMNLIGVDRGENIPAAIALTDPEGRPLSRFKDSLGNPTHILRIGESYKEKQRTIQAKKEVEQRRAGGYSRKYASKAKNLADDMVRNTARDLLYYAVTQDAMLIFENLSRGFGRQGKRTFMAERQYTRMEDWLTAKLAYEGLPSKTYLSKTLAQYTSKTCSNCGFTITSADYDRVLEKLKKTATGWMTTINGKELKVEGQITYYNRYKRQNVVKDLSVELDRLSEESVNNDISSWTKGRSGEALSLLKKRFSHRPVQEKFVCLNCGFETHADEQAALNIARSWLFLRSQEYKKYQTNKTTGNTDKRAFVETWQSFYRKKLKEVWKPAV

SEQ ID NO: 27355 - protein, 978 aa, synthetic construct
  REGION 1..978: note = engineered CasX variant
QEIKRINKIRRRLVKDSNTKKAGKTGPMKTLLVRVMTPDLRERLENLRKKPENIPQPISNTSRANLNKLLTDYTEMKKAILHVYWEEFQKDPVGLMSRVAQPASKKIDQNKLKPEMDEKGNLTTAGFACSQCGQPLFVYKLEQVSEKGKAYTNYFGRCNVAEHEKLILLAQLKPEKDSDEAVTYSLGKFGQRALDFYSIHVTKESTHPVKPLAQIAGNRYASGPVGKALSDACMGTIASFLSKYQDIIIEHQKVVKGNQKRLESLRELAGKENLEYPSVTLPPQPHTKEGVDAYNEVIARVRMWVNLNLWQKLKLSRDDAKPLLRLKGFPSFPLVERQANEVDWWDMVCNVKKLINEKKEDGKVFWQNLAGYKRQEALRPYLSSEEDRKKGKKFARYQLGDLLLHLEKKHGEDWGKVYDEAWERIDKKVEGLSKHIKLEEERRSEDAQSKAALTDWLRAKASFVIEGLKEADKDEFCRCELKLQKWYGDLRGKPFAIEAENSILDISGFSKQYNCAFIWQKDGVKKLNLYLIINYFKGGKLRFKKIKPEAFEANRFYTVINKKSGEIVPMEVNFNFDDPNLIILPLAFGKRQGREFIWNDLLSLETGSLKLANGRVIEKTLYNRRTRQDEPALFVALTFERREVLDSSNIKPMNLIGVDRGENIPAAIALTDPEGCPLSRFKDSLGNPTHILRIGESYKEKQRTIQAKKHVEQRRAGGYSRKYASKAKNLADDMVRNTARDLLYYAVTQDAMLIFENLSRGFGRQGKRTFMAERQYTRMEDWLTAKLAYEGLPSKTYLSKTLAQYTSKTCSNCGFTITSADYDRVLEKLKKTATGWMTTINGKELKVEGQITYYNRYKRQNVVKDLSVELDRLSEESVNNDISSWTKGRSGEALSLLKKRFSHRPVQEKFVCLNCGFETHADEQAALNIARSWLFLRSQEYKKYQTNKTTGNTDKRAFVETWQSFYRKKLKEVWKPAV

SEQ ID NO: 27356 - protein, 978 aa, synthetic construct
  REGION 1..978: note = engineered CasX variant
QEIKRINKIRRRLVKDSNTKKAGKTGPMKTLLVRVMTPDLRERLENLRKKPENIPQPISNTSRANLNKLLTDYTEMKKAILHVYWEEFQKDPVGLMSRVAQPASKKIDQNKLKPEMDEKGNLTTAGFACSQCGQPLFVYKLEQVSEKGKAYTNYFGRCNVAEHEKLILLAQLKPEKDSDEAVTYSLGKFGQRALDFYSIHVTKESTHPVKPLAQIAGNRYASGPVGKALSDACMGTIASFLSKYQDIIIEHQKVVKGNQKRLESLRELAGKENLEYPSVTLPPQPHTKEGVDAYNEVIARVRMWVNLNLWQKLKLSRDDAKPLLRLKGFPSFPLVERQANEVDWWDMVCNVKKLINEKKEDGKVFWQNLAGYKRQEALRPYLSSEEDRKKGKKFARYQLGDLLLHLEKKHGEDWGKVYDEAWERIDKKVEGLSKHIKLEEERRSEDAQSKAALTDWLRAKASFVIEGLKEADKDEFCRCELKLQKWYGDLRGKPFAIEAENSILDISGFSKQYNCAFIWQKDGVKKLNLYLIINYFKGGKLRFKKIKPEAFEANRFYTVINKKSGEIVPMEVNFNFDDPNLIILPLAFGKRQGREFIWNDLLSLETGSLKLANGRVIEKTLYNRRTRQDEPALFVALTFERREVLDSSNIKPMNLIGVDRGENIPAAIALTDPEGCPLSRFKDSLGNPTHILRIGESYKEKQRTIQAKKEVEQRRFGGYSRKYASKAKNLADDMVRNTARDLLYYAVTQDAMLIFENLSRGFGRQGKRTFMAERQYTRMEDWLTAKLAYEGLPSKTYLSKTLAQYTSKTCSNCGFTITSADYDRVLEKLKKTATGWMTTINGKELKVEGQITYYNRYKRQNVVKDLSVELDRLSEESVNNDISSWTKGRSGEALSLLKKRFSHRPVQEKFVCLNCGFETHADEQAALNIARSWLFLRSQEYKKYQTNKTTGNTDKRAFVETWQSFYRKKLKEVWKPAV

SEQ ID NO: 27357 - protein, 978 aa, synthetic construct
  REGION 1..978: note = engineered CasX variant
QEIKRINKIRRRLVKDSNTKKAGKTGPMKTLLVRVMTPDLRERLENLRKKPENIPQPISNTSRANLNKLLTDYTEMKKAILHVYWEEFQKDPVGLMSRVAQPASKKIDQNKLKPEMDEKGNLTTAGFACSQCGQPLFVYKLEQVSEKGKAYTNYFGRCNVAEHEKLILLAQLKPEKDSDEAVTYSLGKFGQRALDFYSIHVTKESTHPVKPLAQIAGNRYASGPVGKALSDACMGTIASFLSKYQDIIIEHQKVVKGNQKRLESLRELAGKENLEYPSVTLPPQPHTKEGVDAYNEVIARVRMWVNLNLWQKLKLSRDDAKPLLRLKGFPSFPLVERQANEVDWWDMVCNVKKLINEKKEDGKVFWQNLAGYKRQEALRPYLSSEEDRKKGKKFARYQLGDLLLHLEKKHGEDWGKVYDEAWERIDKKVEGLSKHIKLEEERRSEDAQSKAALTDWLRAKASFVIEGLKEADKDEFCRCELKLQKWYGDLRGKPFAIEAENSILDISGFSKQYNCAFIWQKDGVKKLNLYLIINYFKGGKLRFKKIKPEAFEANRFYTVINKKSGEIVPMEVNFNFDDPNLIILPLAFGKRQGREFIWNDLLSLETGSLKLANGRVIEKTLYNRRTRQDEPALFVALTFERREVLDSSNIKPMNLIGVDRGENIPAAIALTDPEGCPLSRFKDSLGNPTHILRIGESYKEKQRTIQAKKEVEQRRAGGYSRKYASKAKNLADDMVRNTARDLLYYAVTQDAMLIFENLSRGFGRQGKRTFMAERQYTRMEDWLTAKLAYEGLPSKTYLSKTLAQYTSKTCSNCGFTITSADYDRVLEKLKKTATGWMTTINGKELKVEGQITYYNRYKRQNVVKDLSVELDRLSEESVNNDISSWTKGRSGEALSLLKKRFSHRPVQEKFVCLNCGFETHADEQAALNIARSWLFLRSQEYKKYQTNKTTGNTDKRAFVETWQSFYRKKLKEVWKPAV

SEQ ID NO: 27358 - protein, 978 aa, synthetic construct
  REGION 1..978: note = engineered CasX variant
QEIKRINKIRRRLVKDSNTKKAGKTGPMKTLLVRVMTPDLRERLENLRKKPENIPQPISNTSRANLNKLLTDYTEMKKAILHVYWEEFQKDPVGLMSRVAQPASKKIDQNKLKPEMDEKGNLTTAGFACSQCGQPLFVYKLEQVSEKGKAYTNYFGRCNVAEHEKLILLAQLKPEKDSDEAVTYSLGKFGQRALDFYSIHVTKESTHPVKPLAQIAGNRYASGPVGKALSDACMGTIASFLSKYQDIIIEHQKVVKGNQKRLESLRELAGKENLEYPSVTLPPQPHTKEGVDAYNEVIARVRMWVNLNLWQKLKLSRDDAKPLLRLKGFPSFPLVERQANEVDWWDMVCNVKKLINEKKEDGKVFWQNLAGYKRQEALRPYLSSEEDRKKGKKFARYQLGDLLLHLEKKHGEDWGKVYDEAWERIDKKVEGLSKHIKLEEERRSEDAQSKAALTDWLRAKASFVIEGLKEADKDEFCRCELKLQKWYGDLRGKPFAIEAENSILDISGFSKQYNCAFIWQKDGVKKLNLYLIINYFKGGKLRFKKIKPEAFEANRFYTVINKKSGEIVPMEVNFNFDDPNLIILPLAFGKRQGREFIWNDLLSLETGSLKLANGRVIEKTLYNRRTRQDEPALFVALTFERREVLDSSNIKPMNLIGVDRGENIPAAIALTDPEGCPLSRFKDSLGNPTHILRIGESYKEKQRTFQAKKEVEQRRAGGYSRKYASKAKNLADDMVRNTARDLLYYAVTQDAMLIFENLSRGFGRQGKRTFMAERQYTRMEDWLTAKLAYEGLPSKTYLSKTLAQYTSKTCSNCGFTITSADYDRVLEKLKKTATGWMTTINGKELKVEGQITYYNRYKRQNVVKDLSVELDRLSEESVNNDISSWTKGRSGEALSLLKKRFSHRPVQEKFVCLNCGFETHADEQAALNIARSWLFLRSQEYKKYQTNKTTGNTDKRAFVETWQSFYRKKLKEVWKPAV

SEQ ID NO: 27359 - protein, 978 aa, synthetic construct
  REGION 1..978: note = engineered CasX variant
QEIKRINKIRRRLVKDSNTKKAGKTGPMKTLLVRVMTPDLRERLENLRKKPENIPQPISNTSRANLNKLLTDYTEMKKAILHVYWEEFQKDPVGLMSRVAQPASKKIDQNKLKPEMDEKGNLTTAGFACSQCGQPLFVYKLEQVSEKGKAYTNYFGRCNVAEHEKLILLAQLKPEKDSDEAVTYSLGKFGQRALDFYSIHVTKESTHPVKPLAQIAGNRYASGPVGKALSDACMGTIASFLSKYQDIIIEHQKVVKGNQKRLESLRELAGKENLEYPSVTLPPQPHTKEGVDAYNEVIARVRMWVNLNLWQKLKLSRDDAKPLLRLKGFPSFPLVERQANEVDWWDMVCNVKKLINEKKEDGKVFWQNLAGYKRQEALRPYLSSEEDRKKGKKFARYQLGDLLLHLEKKHGEDWGKVYDEAWERIDKKVEGLSKHIKLEEERRSEDAQSKAALTDWLRAKASFVIEGLKEADKDEFCRCELKLQKWYGDLRGKPFAIEAENSILDISGFSKQYNCAFIWQKDGVKKLNLYLIINYFKGGKLRFKKIKPEAFEANRFYTVINKKSGEIVPMEVNFNFDDPNLIILPLAFGKRQGREFIWNDLLSLETGSLKLANGRVIEKTLYNRRTRQDEPALFVALTFERREVLDSSNIKPMNLIGVDRGENIPAAIALTDPEGCPLSHFKDSLGNPTHILRIGESYKEKQRTIQAKKEVEQRRAGGYSRKYASKAKNLADDMVRNTARDLLYYAVTQDAMLIFENLSRGFGRQGKRTFMAERQYTRMEDWLTAKLAYEGLPSKTYLSKTLAQYTSKTCSNCGFTITSADYDRVLEKLKKTATGWMTTINGKELKVEGQITYYNRYKRQNVVKDLSVELDRLSEESVNNDISSWTKGRSGEALSLLKKRFSHRPVQEKFVCLNCGFETHADEQAALNIARSWLFLRSQEYKKYQTNKTTGNTDKRAFVETWQSFYRKKLKEVWKPAV

SEQ ID NO: 27360 - protein, 978 aa, synthetic construct
  REGION 1..978: note = engineered CasX variant
QEIKRINKIRRRLVKDSNTKKAGKTGPMKTLLVRVMTPDLRERLENLRKKPENIPQPISNTSRANLNKLLTDYTEMKKAILHVYWEEFQKDPVGLMSRVAQPASKKIDQNKLKPEMDEKGNLTTAGFACSQCGQPLFVYKLEQVSEKGKAYTNYFGRCNVAEHEKLILLAQLKPEKDSDEAVTYSLGKFGQRALDFYSIHVTKESTHPVKPLAQIAGNRYASGPVGKALSDACMGTIASFLSKYQDIIIEHQKVVKGNQKRLESLRELAGKENLEYPSVTLPPQPHTKEGVDAYNEVIARVRMWVNLNLWQKLKLSRDDAKPLLRLKGFPSFPLVERQANEVDWWDMVCNVKKLINEKKEDGKVFWQNLAGYKRQEALRPYLSSEEDRKKGKKFARYQLGDLLLHLEKKHGEDWGKVYDEAWERIDKKVEGLSKHIKLEEERRSEDAQSKAALTDWLRAKASFVIEGLKEADKDEFCRCELKLQKWYGDLRGKPFAIEAENSILDISGFSKQYNCAFIWQKDGVKKLNLYLIINYFKGGKLRFKKIKPEAFEANRFYTVINKKSGEIVPMEVNFNFDDPNLIILPLAFGKRQGREFIWNDLLSLETGSLKLANGRVIEKTLYNRRTRQDEPALFVALTFERREVLDSSNIKPMNLIGVDRGENIPAAIALTDPEGCPLSHFKDSLGNPTHILRIGESYKEKQRTFQAKKEVEQRRAGGYSRKYASKAKNLADDMVRNTARDLLYYAVTQDAMLIFENLSRGFGRQGKRTFMAERQYTRMEDWLTAKLAYEGLPSKTYLSKTLAQYTSKTCSNCGFTITSADYDRVLEKLKKTATGWMTTINGKELKVEGQITYYNRYKRQNVVKDLSVELDRLSEESVNNDISSWTKGRSGEALSLLKKRFSHRPVQEKFVCLNCGFETHADEQAALNIARSWLFLRSQEYKKYQTNKTTGNTDKRAFVETWQSFYRKKLKEVWKPAV

SEQ ID NO: 27361 - protein, 978 aa, synthetic construct
  REGION 1..978: note = engineered CasX variant
QEIKRINKIRRRLVKDSNTKKAGKTGPMKTLLVRVMTPDLRERLENLRKKPENIPQPISNTSRANLNKLLTDYTEMKKAILHVYWEEFQKDPVGLMSRVAQPASKKIDQNKLKPEMDEKGNLTTAGFACSQCGQPLFVYKLEQVSEKGKAYTNYFGRCNVAEHEKLILLAQLKPEKDSDEAVTYSLGKFGQRALDFYSIHVTKESTHPVKPLAQIAGNRYASGPVGKALSDACMGTIASFLSKYQDIIIEHQKVVKGNQKRLESLRELAGKENLEYPSVTLPPQPHTKEGVDAYNEVIARVRMWVNLNLWQKLKLSRDDAKPLLRLKGFPSFPLVERQANEVDWWDMVCNVKKLINEKKEDGKVFWQNLAGYKRQEALRPYLSSEEDRKKGKKFARYQLGDLLLHLEKKHGEDWGKVYDEAWERIDKKVEGLSKHIKLEEERRSEDAQSKAALTDWLRAKASFVIEGLKEADKDEFCRCELKLQKWYGDLRGKPFAIEAENSILDISGFSKQYNCAFIWQKDGVKKLNLYLIINYFKGGKLRFKKIKPEAFEANRFYTVINKKSGEIVPMEVNFNFDDPNLIILPLAFGKRQGREFIWNDLLSLETGSLKLANGRVIEKTLYNRRTRQDEPALFVALTFERREVLDSSNIKPMNLIGVDRGENIPAAIALTDPEGCPLNRFKDSLGNPTHILRIGESYKEKQRTIQAKKEVEQRRAGGYSRKYASKAKNLADDMVRNTARDLLYYAVTQDAMLIFENLSRGFGRQGKRTFMAERQYTRMEDWLTAKLAYEGLPSKTYLSKTLAQYTSKTCSNCGFTITSADYDRVLEKLKKTATGWMTTINGKELKVEGQITYYNRYKRQNVVKDLSVELDRLSEESVNNDISSWTKGRSGEALSLLKKRFSHRPVQEKFVCLNCGFETHADEQAALNIARSWLFLRSQEYKKYQTNKTTGNTDKRAFVETWQSFYRKKLKEVWKPAV

SEQ ID NO: 27362 - protein, 978 aa, synthetic construct
  REGION 1..978: note = engineered CasX variant
QEIKRINKIRRRLVKDSNTKKAGKTGPMKTLLVRVMTPDLRERLENLRKKPENIPQPISNTSRANLNKLLTDYTEMKKAILHVYWEEFQKDPVGLMSRVAQPASKKIDQNKLKPEMDEKGNLTTAGFACSQCGQPLFVYKLEQVSEKGKAYTNYFGRCNVAEHEKLILLAQLKPEKDSDEAVTYSLGKFGQRALDFYSIHVTKESTHPVKPLAQIAGNRYASGPVGKALSDACMGTIASFLSKYQDIIIEHQKVVKGNQKRLESLRELAGKENLEYPSVTLPPQPHTKEGVDAYNEVIARVRMWVNLNLWQKLKLSRDDAKPLLRLKGFPSFPLVERQANEVDWWDMVCNVKKLINEKKEDGKVFWQNLAGYKRQEALRPYLSSEEDRKKGKKFARYQLGDLLLHLEKKHGEDWGKVYDEAWERIDKKVEGLSKHIKLEEERRSEDAQSKAALTDWLRAKASFVIEGLKEADKDEFCRCELKLQKWYGDLRGKPFAIEAENSILDISGFSKQYNCAFIWQKDGVKKLNLYLIINYFKGGKLRFKKIKPEAFEANRFYTVINKKSGEIVPMEVNFNFDDPNLIILPLAFGKRQGREFIWNDLLSLETGSLKLANGRVIEKTLYNRRTRQDEPALFVALTFERREVLDSSNIKPMNLIGVDRGENINAVIALTDPEGCPLSRFKDSLGNPTHILRIGESYKEKQRQIQAKKEVEQRRAGGYSRKYASKAKNLADDMVRNTARDLLYYAVTQDAMLIFENLSRGFGRQGKRTFMAERQYTRMEDWLTAKLAYEGLPSKTYLSKTLAQYTSKTCSNCGFTITSADYDRVLEKLKKTATGWMTTINGKELKVEGQITYYNRYKRQNVVKDLSVELDRLSEESVNNDISSWTKGRSGEALSLLKKRFSHRPVQEKFVCLNCGFETHADEQAALNIARSWLFLRSQEYKKYQTNKTTGNTDKRAFVETWQSFYRKKLKEVWKPAV

SEQ ID NO: 27363 - protein, 978 aa, synthetic construct
  REGION 1..978: note = engineered CasX variant
QEIKRINKIRRRLVKDSNTKKAGKTGPMKTLLVRVMTPDLRERLENLRKKPENIPQPISNTSRANLNKLLTDYTEMKKAILHVYWEEFQKDPVGLMSRVAQPASKKIDQNKLKPEMDEKGNLTTAGFACSQCGQPLFVYKLEQVSEKGKAYTNYFGRCNVAEHEKLILLAQLKPEKDSDEAVTYSLGKFGQRALDFYSIHVTKESTHPVKPLAQIAGNRYASGPVGKALSDACMGTIASFLSKYQDIIIEHQKVVKGNQKRLESLRELAGKENLEYPSVTLPPQPHTKEGVDAYNEVIARVRMWVNLNLWQKLKLSRDDAKPLLRLKGFPSFPLVERQANEVDWWDMVCNVKKLINEKKEDGKVFWQNLAGYKRQEALRPYLSSEEDRKKGKKFARYQLGDLLLHLEKKHGEDWGKVYDEAWERIDKKVEGLSKHIKLEEERRSEDAQSKAALTDWLRAKASFVIEGLKEADKDEFCRCELKLQKWYGDLRGKPFAIEAENSILDISGFSKQYNCAFIWQKDGVKKLNLYLIINYFKGGKLRFKKIKPEAFEANRFYTVINKKSGEIVPMEVNFNFDDPNLIILPLAFGKRQGREFIWNDLLSLETGSLKLANGRVIEKTLYNRRTRQDEPALFVALTFERREVLDSSNIKPMNLIGVDRGENILAVIALTDPEGCPLSRFKDSLGNPTHILRIGESYKEKQRTIQAKKETEQRRAGGYSRKYASKAKNLADDMVRNTARDLLYYAVTQDAMLIFENLSRGFGRQGKRTFMAERQYTRMEDWLTAKLAYEGLPSKTYLSKTLAQYTSKTCSNCGFTITSADYDRVLEKLKKTATGWMTTINGKELKVEGQITYYNRYKRQNVVKDLSVELDRLSEESVNNDISSWTKGRSGEALSLLKKRFSHRPVQEKFVCLNCGFETHADEQAALNIARSWLFLRSQEYKKYQTNKTTGNTDKRAFVETWQSFYRKKLKEVWKPAV

SEQ ID NO: 27364 - protein, 978 aa, synthetic construct
  REGION 1..978: note = engineered CasX variant
QEIKRINKIRRRLVKDSNTKKAGKTGPMKTLLVRVMTPDLRERLENLRKKPENIPQPISNTSRANLNKLLTDYTEMKKAILHVYWEEFQKDPVGLMSRVAQPASKKIDQNKLKPEMDEKGNLTTAGFACSQCGQPLFVYKLEQVSEKGKAYTNYFGRCNVAEHEKLILLAQLKPEKDSDEAVTYSLGKFGQRALDFYSIHVTKESTHPVKPLAQIAGNRYASGPVGKALSDACMGTIASFLSKYQDIIIEHQKVVKGNQKRLESLRELAGKENLEYPSVTLPPQPHTKEGVDAYNEVIARVRMWVNLNLWQKLKLSRDDAKPLLRLKGFPSFPLVERQANEVDWWDMVCNVKKLINEKKEDGKVFWQNLAGYKRQEALRPYLSSEEDRKKGKKFARYQLGDLLLHLEKKHGEDWGKVYDEAWERIDKKVEGLSKHIKLEEERRSEDAQSKAALTDWLRAKASFVIEGLKEADKDEFCRCELKLQKWYGDLRGKPFAIEAENSILDISGFSKQYNCAFIWQKDGVKKLNLYLIINYFKGGKLRFKKIKPEAFEANRFYTVINKKSGEIVPMEVNFNFDDPNLIILPLAFGKRQGREFIWNDLLSLETGSLKLANGRVIEKTLYNRRTRQDEPALFVALTFERREVLDSSNIKPMNLIGVDRGEKIPAVIALTDPEGCPLSRFKDSLGNPTHILRIGESYKEKQRTIQAKKEVEQRRAGGYSRKYASKAKNLADDMVRNTARDLLYYAVTQDAMLIFENLSRGFGRQGKRTFMAERQYTRMEDWLTAKLAYEGLPSKTYLSKTLAQYTSKTCSNCGFTITSADYDRVLEKLKKTATGWMTTINGKELKVEGQITYYNRYKRQNVVKDLSVELDRLSEESVNNDISSWTKGRSGEALSLLKKRFSHRPVQEKFVCLNCGFETHADEQAALNIARSWLFLRSQEYKKYQTNKTTGNTDKRAFVETWQSFYRKKLKEVWKPAV

SEQ ID NO: 27365 - protein, 978 aa, synthetic construct
  REGION 1..978: note = engineered CasX variant
QEIKRINKIRRRLVKDSNTKKAGKTGPMKTLLVRVMTPDLRERLENLRKKPENIPQPISNTSRANLNKLLTDYTEMKKAILHVYWEEFQKDPVGLMSRVAQPASKKIDQNKLKPEMDEKGNLTTAGFACSQCGQPLFVYKLEQVSEKGKAYTNYFGRCNVAEHEKLILLAQLKPEKDSDEAVTYSLGKFGQRALDFYSIHVTKESTHPVKPLAQIAGNRYASGPVGKALSDACMGTIASFLSKYQDIIIEHQKVVKGNQKRLESLRELAGKENLEYPSVTLPPQPHTKEGVDAYNEVIARVRMWVNLNLWQKLKLSRDDAKPLLRLKGFPSFPLVERQANEVDWWDMVCNVKKLINEKKEDGKVFWQNLAGYKRQEALRPYLSSEEDRKKGKKFARYQLGDLLLHLEKKHGEDWGKVYDEAWERIDKKVEGLSKHIKLEEERRSEDAQSKAALTDWLRAKASFVIEGLKEADKDEFCRCELKLQKWYGDLRGKPFAIEAENSILDISGFSKQYNCAFIWQKDGVKKLNLYLIINYFKGGKLRFKKIKPEAFEANRFYTVINKKSGEIVPMEVNFNFDDPNLIILPLAFGKRQGREFIWNDLLSLETGSLKLANGRVIEKTLYNRRTRQDEPALFVALTFERREVLDSSNIKPMNLIGVDRGEKIPAVIALTDPEGCPLSNFKDSYGNPTHILRIGESYKEKQRTIQAKKEVEQRRAGGYSRKYASKAKNLADDMVRNTARDLLYYAVTQDAMLIFENLSRGFGRQGKRTFMAERQYTRMEDWLTAKLAYEGLPSKTYLSKTLAQYTSKTCSNCGFTITSADYDRVLEKLKKTATGWMTTINGKELKVEGQITYYNRYKRQNVVKDLSVELDRLSEESVNNDISSWTKGRSGEALSLLKKRFSHRPVQEKFVCLNCGFETHADEQAALNIARSWLFLRSQEYKKYQTNKTTGNTDKRAFVETWQSFYRKKLKEVWKPAV

SEQ ID NO: 27366 - protein, 978 aa, synthetic construct
  REGION 1..978: note = engineered CasX variant
QEIKRINKIRRRLVKDSNTKKAGKTGPMKTLLVRVMTPDLRERLENLRKKPENIPQPISNTSRANLNKLLTDYTEMKKAILHVYWEEFQKDPVGLMSRVAQPASKKIDQNKLKPEMDEKGNLTTAGFACSQCGQPLFVYKLEQVSEKGKAYTNYFGRCNVAEHEKLILLAQLKPEKDSDEAVTYSLGKFGQRALDFYSIHVTKESTHPVKPLAQIAGNRYASGPVGKALSDACMGTIASFLSKYQDIIIEHQKVVKGNQKRLESLRELAGKENLEYPSVTLPPQPHTKEGVDAYNEVIARVRMWVNLNLWQKLKLSRDDAKPLLRLKGFPSFPLVERQANEVDWWDMVCNVKKLINEKKEDGKVFWQNLAGYKRQEALRPYLSSEEDRKKGKKFARYQLGDLLLHLEKKHGEDWGKVYDEAWERIDKKVEGLSKHIKLEEERRSEDAQSKAALTDWLRAKASFVIEGLKEADKDEFCRCELKLQKWYGDLRGKPFAIEAENSILDISGFSKQYNCAFIWQKDGVKKLNLYLIINYFKGGKLRFKKIKPEAFEANRFYTVINKKSGEIVPMEVNFNFDDPNLIILPLAFGKRQGREFIWNDLLSLETGSLKLANGRVIEKTLYNRRTRQDEPALFVALTFERREVLDSSNIKPMNLIGVDRGEIIPAVIALTDPEGCPLSRFKDSLGNPTHILRIGESYKEKQRTIQAKKEVEQRRTGGYSRKYASKAKNLADDMVRNTARDLLYYAVTQDAMLIFENLSRGFGRQGKRTFMAERQYTRMEDWLTAKLAYEGLPSKTYLSKTLAQYTSKTCSNCGFTITSADYDRVLEKLKKTATGWMTTINGKELKVEGQITYYNRYKRQNVVKDLSVELDRLSEESVNNDISSWTKGRSGEALSLLKKRFSHRPVQEKFVCLNCGFETHADEQAALNIARSWLFLRSQEYKKYQTNKTTGNTDKRAFVETWQSFYRKKLKEVWKPAV

SEQ ID NO: 27367 - protein, 978 aa, synthetic construct
  REGION 1..978: note = engineered CasX variant
QEIKRINKIRRRLVKDSNTKKAGKTGPMKTLLVRVMTPDLRERLENLRKKPENIPQPISNTSRANLNKLLTDYTEMKKAILHVYWEEFQKDPVGLMSRVAQPASKKIDQNKLKPEMDEKGNLTTAGFACSQCGQPLFVYKLEQVSEKGKAYTNYFGRCNVAEHEKLILLAQLKPEKDSDEAVTYSLGKFGQRALDFYSIHVTKESTHPVKPLAQIAGNRYASGPVGKALSDACMGTIASFLSKYQDIIIEHQKVVKGNQKRLESLRELAGKENLEYPSVTLPPQPHTKEGVDAYNEVIARVRMWVNLNLWQKLKLSRDDAKPLLRLKGFPSFPLVERQANEVDWWDMVCNVKKLINEKKEDGKVFWQNLAGYKRQEALRPYLSSEEDRKKGKKFARYQLGDLLLHLEKKHGEDWGKVYDEAWERIDKKVEGLSKHIKLEEERRSEDAQSKAALTDWLRAKASFVIEGLKEADKDEFCRCELKLQKWYGDLRGKPFAIEAENSILDISGFSKQYNCAFIWQKDGVKKLNLYLIINYFKGGKLRFKKIKPEAFEANRFYTVINKKSGEIVPMEVNFNFDDPNLIILPLAFGKRQGREFIWNDLLSLETGSLKLANGRVIEKTLYNRRTRQDEPALFVALTFERREVLDSSNIKPMNLIGVDRGEIIPAVIALTDPEGCPLSRFKDSLGNPTHILRIGESYKEKQRTIQAKKEVEQRRIGGYSRKYASKAKNLADDMVRNTARDLLYYAVTQDAMLIFENLSRGFGRQGKRTFMAERQYTRMEDWLTAKLAYEGLPSKTYLSKTLAQYTSKTCSNCGFTITSADYDRVLEKLKKTATGWMTTINGKELKVEGQITYYNRYKRQNVVKDLSVELDRLSEESVNNDISSWTKGRSGEALSLLKKRFSHRPVQEKFVCLNCGFETHADEQAALNIARSWLFLRSQEYKKYQTNKTTGNTDKRAFVETWQSFYRKKLKEVWKPAV

SEQ ID NO: 27368 - protein, 978 aa, synthetic construct
  REGION 1..978: note = engineered CasX variant
QEIKRINKIRRRLVKDSNTKKAGKTGPMKTLLVRVMTPDLRERLENLRKKPENIPQPISNTSRANLNKLLTDYTEMKKAILHVYWEEFQKDPVGLMSRVAQPASKKIDQNKLKPEMDEKGNLTTAGFACSQCGQPLFVYKLEQVSEKGKAYTNYFGRCNVAEHEKLILLAQLKPEKDSDEAVTYSLGKFGQRALDFYSIHVTKESTHPVKPLAQIAGNRYASGPVGKALSDACMGTIASFLSKYQDIIIEHQKVVKGNQKRLESLRELAGKENLEYPSVTLPPQPHTKEGVDAYNEVIARVRMWVNLNLWQKLKLSRDDAKPLLRLKGFPSFPLVERQANEVDWWDMVCNVKKLINEKKEDGKVFWQNLAGYKRQEALRPYLSSEEDRKKGKKFARYQLGDLLLHLEKKHGEDWGKVYDEAWERIDKKVEGLSKHIKLEEERRSEDAQSKAALTDWLRAKASFVIEGLKEADKDEFCRCELKLQKWYGDLRGKPFAIEAENSILDISGFSKQYNCAFIWQKDGVKKLNLYLIINYFKGGKLRFKKIKPEAFEANRFYTVINKKSGEIVPMEVNFNFDDPNLIILPLAFGKRQGREFIWNDLLSLETGSLKLANGRVIEKTLYNRRTRQDEPALFVALTFERREVLDSSNIKPMNLIGVDRGEIIPAVIALTDPEGCPLSRFKDSLGNPTHILRIGESYKEKQRTIQAKKEVEQRRAGGYSRKYASKAKNLADDMVRNTARDLLYYAVTQDAMLIFENLSRGFGRQGKRTFMAERQYTRMEDWLTAKLAYEGLPSKTYLSKTLAQYTSKTCSNCGFTITSADYDRVLEKLKKTATGWMTTINGKELKVEGQITYYNRYKRQNVVKDLSVELDRLSEESVNNDISSWTKGRSGEALSLLKKRFSHRPVQEKFVCLNCGFETHADEQAALNIARSWLFLRSQEYKKYQTNKTTGNTDKRAFVETWQSFYRKKLKEVWKPAV

SEQ ID NO: 27369 - protein, 978 aa, synthetic construct
  REGION 1..978: note = engineered CasX variant
QEIKRINKIRRRLVKDSNTKKAGKTGPMKTLLVRVMTPDLRERLENLRKKPENIPQPISNTSRANLNKLLTDYTEMKKAILHVYWEEFQKDPVGLMSRVAQPASKKIDQNKLKPEMDEKGNLTTAGFACSQCGQPLFVYKLEQVSEKGKAYTNYFGRCNVAEHEKLILLAQLKPEKDSDEAVTYSLGKFGQRALDFYSIHVTKESTHPVKPLAQIAGNRYASGPVGKALSDACMGTIASFLSKYQDIIIEHQKVVKGNQKRLESLRELAGKENLEYPSVTLPPQPHTKEGVDAYNEVIARVRMWVNLNLWQKLKLSRDDAKPLLRLKGFPSFPLVERQANEVDWWDMVCNVKKLINEKKEDGKVFWQNLAGYKRQEALRPYLSSEEDRKKGKKFARYQLGDLLLHLEKKHGEDWGKVYDEAWERIDKKVEGLSKHIKLEEERRSEDAQSKAALTDWLRAKASFVIEGLKEADKDEFCRCELKLQKWYGDLRGKPFAIEAENSILDISGFSKQYNCAFIWQKDGVKKLNLYLIINYFKGGKLRFKKIKPEAFEANRFYTVINKKSGEIVPMEVNFNFDDPNLIILPLAFGKRQGREFIWNDLLSLETGSLKLANGRVIEKTLYNRRTRQDEPALFVALTFERREVLDSSNIKPMNLIGVDRGEIIPAVIALTDPEGCPLSGFKDSLGNPTHILRIGESYKEKQRTIQAKKEVEQRRAFGYSRKYASKAKNLADDMVRNTARDLLYYAVTQDAMLIFENLSRGFGRQGKRTFMAERQYTRMEDWLTAKLAYEGLPSKTYLSKTLAQYTSKTCSNCGFTITSADYDRVLEKLKKTATGWMTTINGKELKVEGQITYYNRYKRQNVVKDLSVELDRLSEESVNNDISSWTKGRSGEALSLLKKRFSHRPVQEKFVCLNCGFETHADEQAALNIARSWLFLRSQEYKKYQTNKTTGNTDKRAFVETWQSFYRKKLKEVWKPAV

SEQ ID NO: 27370 - protein, 978 aa, synthetic construct
  REGION 1..978: note = engineered CasX variant
QEIKRINKIRRRLVKDSNTKKAGKTGPMKTLLVRVMTPDLRERLENLRKKPENIPQPISNTSRANLNKLLTDYTEMKKAILHVYWEEFQKDPVGLMSRVAQPASKKIDQNKLKPEMDEKGNLTTAGFACSQCGQPLFVYKLEQVSEKGKAYTNYFGRCNVAEHEKLILLAQLKPEKDSDEAVTYSLGKFGQRALDFYSIHVTKESTHPVKPLAQIAGNRYASGPVGKALSDACMGTIASFLSKYQDIIIEHQKVVKGNQKRLESLRELAGKENLEYPSVTLPPQPHTKEGVDAYNEVIARVRMWVNLNLWQKLKLSRDDAKPLLRLKGFPSFPLVERQANEVDWWDMVCNVKKLINEKKEDGKVFWQNLAGYKRQEALRPYLSSEEDRKKGKKFARYQLGDLLLHLEKKHGEDWGKVYDEAWERIDKKVEGLSKHIKLEEERRSEDAQSKAALTDWLRAKASFVIEGLKEADKDEFCRCELKLQKWYGDLRGKPFAIEAENSILDISGFSKQYNCAFIWQKDGVKKLNLYLIINYFKGGKLRFKKIKPEAFEANRFYTVINKKSGEIVPMEVNFNFDDPNLIILPLAFGKRQGREFIWNDLLSLETGSLKLANGRVIEKTLYNRRTRQDEPALFVALTFERREVLDSSNIKPMNLIGVDRGECIPAVIALTDPEGCPLSRFKDSLGNPTHILRIGESYKEKQRTIQAKKEVEQRRAGGYSRKYASKAKNLADDMVRNTARDLLYYAVTQDAMLIFENLSRGFGRQGKRTFMAERQYTRMEDWLTAKLAYEGLPSKTYLSKTLAQYTSKTCSNCGFTITSADYDRVLEKLKKTATGWMTTINGKELKVEGQITYYNRYKRQNVVKDLSVELDRLSEESVNNDISSWTKGRSGEALSLLKKRFSHRPVQEKFVCLNCGFETHADEQAALNIARSWLFLRSQEYKKYQTNKTTGNTDKRAFVETWQSFYRKKLKEVWKPAV

SEQ ID NO: 27371 - protein, 978 aa, synthetic construct
  REGION 1..978: note = engineered CasX variant
QEIKRINKIRRRLVKDSNTKKAGKTGPMKTLLVRVMTPDLRERLENLRKKPENIPQPISNTSRANLNKLLTDYTEMKKAILHVYWEEFQKDPVGLMSRVAQPASKKIDQNKLKPEMDEKGNLTTAGFACSQCGQPLFVYKLEQVSEKGKAYTNYFGRCNVAEHEKLILLAQLKPEKDSDEAVTYSLGKFGQRALDFYSIHVTKESTHPVKPLAQIAGNRYASGPVGKALSDACMGTIASFLSKYQDIIIEHQKVVKGNQKRLESLRELAGKENLEYPSVTLPPQPHTKEGVDAYNEVIARVRMWVNLNLWQKLKLSRDDAKPLLRLKGFPSFPLVERQANEVDWWDMVCNVKKLINEKKEDGKVFWQNLAGYKRQEALRPYLSSEEDRKKGKKFARYQLGDLLLHLEKKHGEDWGKVYDEAWERIDKKVEGLSKHIKLEEERRSEDAQSKAALTDWLRAKASFVIEGLKEADKDEFCRCELKLQKWYGDLRGKPFAIEAENSILDISGFSKQYNCAFIWQKDGVKKLNLYLIINYFKGGKLRFKKIKPEAFEANRFYTVINKKSGEIVPMEVNFNFDDPNLIILPLAFGKRQGREFIWNDLLSLETGSLKLANGRVIEKTLYNRRTRQDEPALFVALTFERREVLDSSNIKPMNLIGVDRGECIPAVIALTDPEGCPLSRFKDSLGNPTHILRIGESYKEKQRTIQAKKEVEQRRAFGYSRKYASKAKNLADDMVRNTARDLLYYAVTQDAMLIFENLSRGFGRQGKRTFMAERQYTRMEDWLTAKLAYEGLPSKTYLSKTLAQYTSKTCSNCGFTITSADYDRVLEKLKKTATGWMTTINGKELKVEGQITYYNRYKRQNVVKDLSVELDRLSEESVNNDISSWTKGRSGEALSLLKKRFSHRPVQEKFVCLNCGFETHADEQAALNIARSWLFLRSQEYKKYQTNKTTGNTDKRAFVETWQSFYRKKLKEVWKPAV

SEQ ID NO: 27372 - protein, 978 aa, synthetic construct
  REGION 1..978: note = engineered CasX variant
QEIKRINKIRRRLVKDSNTKKAGKTGPMKTLLVRVMTPDLRERLENLRKKPENIPQPISNTSRANLNKLLTDYTEMKKAILHVYWEEFQKDPVGLMSRVAQPASKKIDQNKLKPEMDEKGNLTTAGFACSQCGQPLFVYKLEQVSEKGKAYTNYFGRCNVAEHEKLILLAQLKPEKDSDEAVTYSLGKFGQRALDFYSIHVTKESTHPVKPLAQIAGNRYASGPVGKALSDACMGTIASFLSKYQDIIIEHQKVVKGNQKRLESLRELAGKENLEYPSVTLPPQPHTKEGVDAYNEVIARVRMWVNLNLWQKLKLSRDDAKPLLRLKGFPSFPLVERQANEVDWWDMVCNVKKLINEKKEDGKVFWQNLAGYKRQEALRPYLSSEEDRKKGKKFARYQLGDLLLHLEKKHGEDWGKVYDEAWERIDKKVEGLSKHIKLEEERRSEDAQSKAALTDWLRAKASFVIEGLKEADKDEFCRCELKLQKWYGDLRGKPFAIEAENSILDISGFSKQYNCAFIWQKDGVKKLNLYLIINYFKGGKLRFKKIKPEAFEANRFYTVINKKSGEIVPMEVNFNFDDPNLIILPLAFGKRQGREFIWNDLLSLETGSLKLANGRVIEKTLYNRRTRQDEPALFVALTFERREVLDSSNIKPMNLIGTDRGENIPAVIALTDPEGCPLSRFKDSLGNPTHILRIGESYKEKQRTIQAYKEVEQRRAGGYSRKYASKAKNLADDMVRNTARDLLYYAVTQDAMLIFENLSRGFGRQGKRTFMAERQYTRMEDWLTAKLAYEGLPSKTYLSKTLAQYTSKTCSNCGFTITSADYDRVLEKLKKTATGWMTTINGKELKVEGQITYYNRYKRQNVVKDLSVELDRLSEESVNNDISSWTKGRSGEALSLLKKRFSHRPVQEKFVCLNCGFETHADEQAALNIARSWLFLRSQEYKKYQTNKTTGNTDKRAFVETWQSFYRKKLKEVWKPAV

SEQ ID NO: 27373 - protein, 978 aa, synthetic construct
  REGION 1..978: note = engineered CasX variant
QEIKRINKIRRRLVKDSNTKKAGKTGPMKTLLVRVMTPDLRERLENLRKKPENIPQPISNTSRANLNKLLTDYTEMKKAILHVYWEEFQKDPVGLMSRVAQPASKKIDQNKLKPEMDEKGNLTTAGFACSQCGQPLFVYKLEQVSEKGKAYTNYFGRCNVAEHEKLILLAQLKPEKDSDEAVTYSLGKFGQRALDFYSIHVTKESTHPVKPLAQIAGNRYASGPVGKALSDACMGTIASFLSKYQDIIIEHQKVVKGNQKRLESLRELAGKENLEYPSVTLPPQPHTKEGVDAYNEVIARVRMWVNLNLWQKLKLSRDDAKPLLRLKGFPSFPLVERQANEVDWWDMVCNVKKLINEKKEDGKVFWQNLAGYKRQEALRPYLSSEEDRKKGKKFARYQLGDLLLHLEKKHGEDWGKVYDEAWERIDKKVEGLSKHIKLEEERRSEDAQSKAALTDWLRAKASFVIEGLKEADKDEFCRCELKLQKWYGDLRGKPFAIEAENSILDISGFSKQYNCAFIWQKDGVKKLNLYLIINYFKGGKLRFKKIKPEAFEANRFYTVINKKSGEIVPMEVNFNFDDPNLIILPLAFGKRQGREFIWNDLLSLETGSLKLANGRVIEKTLYNRRTRQDEPALFVALTFERREVLDSSNIKPMNLIGTDRGENIPAVIALTDPEGCPLSRFKDSLGNPTHILRIGESYKEKQRTIQAKKEVEQRRAGGYSRKYASKAKNLADDMVRNTARDLLYYAVTQDAMLIFENLSRGFGRQGKRTFMAERQYTRMEDWLTAKLAYEGLPSKTYLSKTLAQYTSKTCSNCGFTITSADYDRVLEKLKKTATGWMTTINGKELKVEGQITYYNRYKRQNVVKDLSVELDRLSEESVNNDISSWTKGRSGEALSLLKKRFSHRPVQEKFVCLNCGFETHADEQAALNIARSWLFLRSQEYKKYQTNKTTGNTDKRAFVETWQSFYRKKLKEVWKPAV

SEQ ID NO: 27374 - protein, 978 aa, synthetic construct
  REGION 1..978: note = engineered CasX variant
QEIKRINKIRRRLVKDSNTKKAGKTGPMKTLLVRVMTPDLRERLENLRKKPENIPQPISNTSRANLNKLLTDYTEMKKAILHVYWEEFQKDPVGLMSRVAQPASKKIDQNKLKPEMDEKGNLTTAGFACSQCGQPLFVYKLEQVSEKGKAYTNYFGRCNVAEHEKLILLAQLKPEKDSDEAVTYSLGKFGQRALDFYSIHVTKESTHPVKPLAQIAGNRYASGPVGKALSDACMGTIASFLSKYQDIIIEHQKVVKGNQKRLESLRELAGKENLEYPSVTLPPQPHTKEGVDAYNEVIARVRMWVNLNLWQKLKLSRDDAKPLLRLKGFPSFPLVERQANEVDWWDMVCNVKKLINEKKEDGKVFWQNLAGYKRQEALRPYLSSEEDRKKGKKFARYQLGDLLLHLEKKHGEDWGKVYDEAWERIDKKVEGLSKHIKLEEERRSEDAQSKAALTDWLRAKASFVIEGLKEADKDEFCRCELKLQKWYGDLRGKPFAIEAENSILDISGFSKQYNCAFIWQKDGVKKLNLYLIINYFKGGKLRFKKIKPEAFEANRFYTVINKKSGEIVPMEVNFNFDDPNLIILPLAFGKRQGREFIWNDLLSLETGSLKLANGRVIEKTLYNRRTRQDEPALFVALTFERREVLDSSNIKPMNLIGTDRGENIPAVIALTDPEGCPLSRFKDSLGNPTHILRIGENYKEKQRTIQAYKEVEQRRAGGYSRKYASKAKNLADDMVRNTARDLLYYAVTQDAMLIFENLSRGFGRQGKRTFMAERQYTRMEDWLTAKLAYEGLPSKTYLSKTLAQYTSKTCSNCGFTITSADYDRVLEKLKKTATGWMTTINGKELKVEGQITYYNRYKRQNVVKDLSVELDRLSEESVNNDISSWTKGRSGEALSLLKKRFSHRPVQEKFVCLNCGFETHADEQAALNIARSWLFLRSQEYKKYQTNKTTGNTDKRAFVETWQSFYRKKLKEVWKPAV

SEQ ID NO: 27375 - protein, 978 aa, synthetic construct
  REGION 1..978: note = engineered CasX variant
QEIKRINKIRRRLVKDSNTKKAGKTGPMKTLLVRVMTPDLRERLENLRKKPENIPQPISNTSRANLNKLLTDYTEMKKAILHVYWEEFQKDPVGLMSRVAQPASKKIDQNKLKPEMDEKGNLTTAGFACSQCGQPLFVYKLEQVSEKGKAYTNYFGRCNVAEHEKLILLAQLKPEKDSDEAVTYSLGKFGQRALDFYSIHVTKESTHPVKPLAQIAGNRYASGPVGKALSDACMGTIASFLSKYQDIIIEHQKVVKGNQKRLESLRELAGKENLEYPSVTLPPQPHTKEGVDAYNEVIARVRMWVNLNLWQKLKLSRDDAKPLLRLKGFPSFPLVERQANEVDWWDMVCNVKKLINEKKEDGKVFWQNLAGYKRQEALRPYLSSEEDRKKGKKFARYQLGDLLLHLEKKHGEDWGKVYDEAWERIDKKVEGLSKHIKLEEERRSEDAQSKAALTDWLRAKASFVIEGLKEADKDEFCRCELKLQKWYGDLRGKPFAIEAENSILDISGFSKQYNCAFIWQKDGVKKLNLYLIINYFKGGKLRFKKIKPEAFEANRFYTVINKKSGEIVPMEVNFNFDDPNLIILPLAFGKRQGREFIWNDLLSLETGSLKLANGRVIEKTLYNRRTRQDEPALFVALTFERREVLDSSNIKPMNLIGTDRGENIPAVIALTDPEGCPLSRFKDSLGNPTHILRIGENYKEKQRTIQAKKEVEQRRAGGYSRKYASKAKNLADDMVRNTARDLLYYAVTQDAMLIFENLSRGFGRQGKRTFMAERQYTRMEDWLTAKLAYEGLPSKTYLSKTLAQYTSKTCSNCGFTITSADYDRVLEKLKKTATGWMTTINGKELKVEGQITYYNRYKRQNVVKDLSVELDRLSEESVNNDISSWTKGRSGEALSLLKKRFSHRPVQEKFVCLNCGFETHADEQAALNIARSWLFLRSQEYKKYQTNKTTGNTDKRAFVETWQSFYRKKLKEVWKPAV

SEQ ID NO: 27376 - protein, 978 aa, synthetic construct
  REGION 1..978: note = engineered CasX variant
QEIKRINKIRRRLVKDSNTKKAGKTGPMKTLLVRVMTPDLRERLENLRKKPENIPQPISNTSRANLNKLLTDYTEMKKAILHVYWEEFQKDPVGLMSRVAQPASKKIDQNKLKPEMDEKGNLTTAGFACSQCGQPLFVYKLEQVSEKGKAYTNYFGRCNVAEHEKLILLAQLKPEKDSDEAVTYSLGKFGQRALDFYSIHVTKESTHPVKPLAQIAGNRYASGPVGKALSDACMGTIASFLSKYQDIIIEHQKVVKGNQKRLESLRELAGKENLEYPSVTLPPQPHTKEGVDAYNEVIARVRMWVNLNLWQKLKLSRDDAKPLLRLKGFPSFPLVERQANEVDWWDMVCNVKKLINEKKEDGKVFWQNLAGYKRQEALRPYLSSEEDRKKGKKFARYQLGDLLLHLEKKHGEDWGKVYDEAWERIDKKVEGLSKHIKLEEERRSEDAQSKAALTDWLRAKASFVIEGLKEADKDEFCRCELKLQKWYGDLRGKPFAIEAENSILDISGFSKQYNCAFIWQKDGVKKLNLYLIINYFKGGKLRFKKIKPEAFEANRFYTVINKKSGEIVPMEVNFNFDDPNLIILPLAFGKRQGREFIWNDLLSLETGSLKLANGRVIEKTLYNRRTRQDEPALFVALTFERREVLDSSNIKPMNLIGTDRGENIPAVIALTDPEGCPLSAFKDSLGNPTHILRIGESYKEKQRTIQAKKEVEQRRAGGYSRKYASKAKNLADDMVRNTARDLLYYAVTQDAMLIFENLSRGFGRQGKRTFMAERQYTRMEDWLTAKLAYEGLPSKTYLSKTLAQYTSKTCSNCGFTITSADYDRVLEKLKKTATGWMTTINGKELKVEGQITYYNRYKRQNVVKDLSVELDRLSEESVNNDISSWTKGRSGEALSLLKKRFSHRPVQEKFVCLNCGFETHADEQAALNIARSWLFLRSQEYKKYQTNKTTGNTDKRAFVETWQSFYRKKLKEVWKPAV

SEQ ID NO: 27377 - protein, 978 aa, synthetic construct
  REGION 1..978: note = engineered CasX variant
QEIKRINKIRRRLVKDSNTKKAGKTGPMKTLLVRVMTPDLRERLENLRKKPENIPQPISNTSRANLNKLLTDYTEMKKAILHVYWEEFQKDPVGLMSRVAQPASKKIDQNKLKPEMDEKGNLTTAGFACSQCGQPLFVYKLEQVSEKGKAYTNYFGRCNVAEHEKLILLAQLKPEKDSDEAVTYSLGKFGQRALDFYSIHVTKESTHPVKPLAQIAGNRYASGPVGKALSDACMGTIASFLSKYQDIIIEHQKVVKGNQKRLESLRELAGKENLEYPSVTLPPQPHTKEGVDAYNEVIARVRMWVNLNLWQKLKLSRDDAKPLLRLKGFPSFPLVERQANEVDWWDMVCNVKKLINEKKEDGKVFWQNLAGYKRQEALRPYLSSEEDRKKGKKFARYQLGDLLLHLEKKHGEDWGKVYDEAWERIDKKVEGLSKHIKLEEERRSEDAQSKAALTDWLRAKASFVIEGLKEADKDEFCRCELKLQKWYGDLRGKPFAIEAENSILDISGFSKQYNCAFIWQKDGVKKLNLYLIINYFKGGKLRFKKIKPEAFEANRFYTVINKKSGEIVPMEVNFNFDDPNLIILPLAFGKRQGREFIWNDLLSLETGSLKLANGRVIEKTLYNRRTRQDEPALFVALTFERREVLDSSNIKPMNLIGMDRGENIPAVIALTDPEGCPLSRFKDSSGNPTHILRIGESYKEKQRTIQAKKEVEQRRAGGYSRKYASKAKNLADDMVRNTARDLLYYAVTQDAMLIFENLSRGFGRQGKRTFMAERQYTRMEDWLTAKLAYEGLPSKTYLSKTLAQYTSKTCSNCGFTITSADYDRVLEKLKKTATGWMTTINGKELKVEGQITYYNRYKRQNVVKDLSVELDRLSEESVNNDISSWTKGRSGEALSLLKKRFSHRPVQEKFVCLNCGFETHADEQAALNIARSWLFLRSQEYKKYQTNKTTGNTDKRAFVETWQSFYRKKLKEVWKPAV

SEQ ID NO: 27378 - protein, 978 aa, synthetic construct
  REGION 1..978: note = engineered CasX variant
QEIKRINKIRRRLVKDSNTKKAGKTGPMKTLLVRVMTPDLRERLENLRKKPENIPQPISNTSRANLNKLLTDYTEMKKAILHVYWEEFQKDPVGLMSRVAQPASKKIDQNKLKPEMDEKGNLTTAGFACSQCGQPLFVYKLEQVSEKGKAYTNYFGRCNVAEHEKLILLAQLKPEKDSDEAVTYSLGKFGQRALDFYSIHVTKESTHPVKPLAQIAGNRYASGPVGKALSDACMGTIASFLSKYQDIIIEHQKVVKGNQKRLESLRELAGKENLEYPSVTLPPQPHTKEGVDAYNEVIARVRMWVNLNLWQKLKLSRDDAKPLLRLKGFPSFPLVERQANEVDWWDMVCNVKKLINEKKEDGKVFWQNLAGYKRQEALRPYLSSEEDRKKGKKFARYQLGDLLLHLEKKHGEDWGKVYDEAWERIDKKVEGLSKHIKLEEERRSEDAQSKAALTDWLRAKASFVIEGLKEADKDEFCRCELKLQKWYGDLRGKPFAIEAENSILDISGFSKQYNCAFIWQKDGVKKLNLYLIINYFKGGKLRFKKIKPEAFEANRFYTVINKKSGEIVPMEVNFNFDDPNLIILPLAFGKRQGREFIWNDLLSLETGSLKLANGRVIEKTLYNRRTRQDEPALFVALTFERREVLDSSNIKPMNLIGMDRGENIPAVIALTDPEGCPLSRFKDSLGNPTHILRIGESYKEKQRTIQAKKVVEQRRAGGYSRKYASKAKNLADDMVRNTARDLLYYAVTQDAMLIFENLSRGFGRQGKRTFMAERQYTRMEDWLTAKLAYEGLPSKTYLSKTLAQYTSKTCSNCGFTITSADYDRVLEKLKKTATGWMTTINGKELKVEGQITYYNRYKRQNVVKDLSVELDRLSEESVNNDISSWTKGRSGEALSLLKKRFSHRPVQEKFVCLNCGFETHADEQAALNIARSWLFLRSQEYKKYQTNKTTGNTDKRAFVETWQSFYRKKLKEVWKPAV

SEQ ID NO: 27379 - protein, 978 aa, synthetic construct
  REGION 1..978: note = engineered CasX variant
QEIKRINKIRRRLVKDSNTKKAGKTGPMKTLLVRVMTPDLRERLENLRKKPENIPQPISNTSRANLNKLLTDYTEMKKAILHVYWEEFQKDPVGLMSRVAQPASKKIDQNKLKPEMDEKGNLTTAGFACSQCGQPLFVYKLEQVSEKGKAYTNYFGRCNVAEHEKLILLAQLKPEKDSDEAVTYSLGKFGQRALDFYSIHVTKESTHPVKPLAQIAGNRYASGPVGKALSDACMGTIASFLSKYQDIIIEHQKVVKGNQKRLESLRELAGKENLEYPSVTLPPQPHTKEGVDAYNEVIARVRMWVNLNLWQKLKLSRDDAKPLLRLKGFPSFPLVERQANEVDWWDMVCNVKKLINEKKEDGKVFWQNLAGYKRQEALRPYLSSEEDRKKGKKFARYQLGDLLLHLEKKHGEDWGKVYDEAWERIDKKVEGLSKHIKLEEERRSEDAQSKAALTDWLRAKASFVIEGLKEADKDEFCRCELKLQKWYGDLRGKPFAIEAENSILDISGFSKQYNCAFIWQKDGVKKLNLYLIINYFKGGKLRFKKIKPEAFEANRFYTVINKKSGEIVPMEVNFNFDDPNLIILPLAFGKRQGREFIWNDLLSLETGSLKLANGRVIEKTLYNRRTRQDEPALFVALTFERREVLDSSNIKPMNLIGMDRGENIPAVIALTDPEGCPLSRFKDSLGNPTHILRIGESYKEKQRTIQAKKEVEQRRAGGYSRKYASKAKNLADDMVRNTARDLLYYAVTQDAMLIFENLSRGFGRQGKRTFMAERQYTRMEDWLTAKLAYEGLPSKTYLSKTLAQYTSKTCSNCGFTITSADYDRVLEKLKKTATGWMTTINGKELKVEGQITYYNRYKRQNVVKDLSVELDRLSEESVNNDISSWTKGRSGEALSLLKKRFSHRPVQEKFVCLNCGFETHADEQAALNIARSWLFLRSQEYKKYQTNKTTGNTDKRAFVETWQSFYRKKLKEVWKPAV

SEQ ID NO: 27380 - protein, 978 aa, synthetic construct
  REGION 1..978: note = engineered CasX variant
QEIKRINKIRRRLVKDSNTKKAGKTGPMKTLLVRVMTPDLRERLENLRKKPENIPQPISNTSRANLNKLLTDYTEMKKAILHVYWEEFQKDPVGLMSRVAQPASKKIDQNKLKPEMDEKGNLTTAGFACSQCGQPLFVYKLEQVSEKGKAYTNYFGRCNVAEHEKLILLAQLKPEKDSDEAVTYSLGKFGQRALDFYSIHVTKESTHPVKPLAQIAGNRYASGPVGKALSDACMGTIASFLSKYQDIIIEHQKVVKGNQKRLESLRELAGKENLEYPSVTLPPQPHTKEGVDAYNEVIARVRMWVNLNLWQKLKLSRDDAKPLLRLKGFPSFPLVERQANEVDWWDMVCNVKKLINEKKEDGKVFWQNLAGYKRQEALRPYLSSEEDRKKGKKFARYQLGDLLLHLEKKHGEDWGKVYDEAWERIDKKVEGLSKHIKLEEERRSEDAQSKAALTDWLRAKASFVIEGLKEADKDEFCRCELKLQKWYGDLRGKPFAIEAENSILDISGFSKQYNCAFIWQKDGVKKLNLYLIINYFKGGKLRFKKIKPEAFEANRFYTVINKKSGEIVPMEVNFNFDDPNLIILPLAFGKRQGREFIWNDLLSLETGSLKLANGRVIEKTLYNRRTRQDEPALFVALTFERREVLDSSNIKPMNLIGLDRGENIPAVIALTDPEGCPLSRFKDSLGNPTHIRRIGESYKEKQRTIQAKKEVEQRRAGGYSRKYASKAKNLADDMVRNTARDLLYYAVTQDAMLIFENLSRGFGRQGKRTFMAERQYTRMEDWLTAKLAYEGLPSKTYLSKTLAQYTSKTCSNCGFTITSADYDRVLEKLKKTATGWMTTINGKELKVEGQITYYNRYKRQNVVKDLSVELDRLSEESVNNDISSWTKGRSGEALSLLKKRFSHRPVQEKFVCLNCGFETHADEQAALNIARSWLFLRSQEYKKYQTNKTTGNTDKRAFVETWQSFYRKKLKEVWKPAV

SEQ ID NO: 27381 - protein, 978 aa, synthetic construct
  REGION 1..978: note = engineered CasX variant
QEIKRINKIRRRLVKDSNTKKAGKTGPMKTLLVRVMTPDLRERLENLRKKPENIPQPISNTSRANLNKLLTDYTEMKKAILHVYWEEFQKDPVGLMSRVAQPASKKIDQNKLKPEMDEKGNLTTAGFACSQCGQPLFVYKLEQVSEKGKAYTNYFGRCNVAEHEKLILLAQLKPEKDSDEAVTYSLGKFGQRALDFYSIHVTKESTHPVKPLAQIAGNRYASGPVGKALSDACMGTIASFLSKYQDIIIEHQKVVKGNQKRLESLRELAGKENLEYPSVTLPPQPHTKEGVDAYNEVIARVRMWVNLNLWQKLKLSRDDAKPLLRLKGFPSFPLVERQANEVDWWDMVCNVKKLINEKKEDGKVFWQNLAGYKRQEALRPYLSSEEDRKKGKKFARYQLGDLLLHLEKKHGEDWGKVYDEAWERIDKKVEGLSKHIKLEEERRSEDAQSKAALTDWLRAKASFVIEGLKEADKDEFCRCELKLQKWYGDLRGKPFAIEAENSILDISGFSKQYNCAFIWQKDGVKKLNLYLIINYFKGGKLRFKKIKPEAFEANRFYTVINKKSGEIVPMEVNFNFDDPNLIILPLAFGKRQGREFIWNDLLSLETGSLKLANGRVIEKTLYNRRTRQDEPALFVALTFERREVLDSSNIKPMNLIGLDRGENIPAVIALTDPEGCPLSRFKDSLGNPTHIRRIGESYKEKQRIIQAKKEVEQRRAGGYSRKYASKAKNLADDMVRNTARDLLYYAVTQDAMLIFENLSRGFGRQGKRTFMAERQYTRMEDWLTAKLAYEGLPSKTYLSKTLAQYTSKTCSNCGFTITSADYDRVLEKLKKTATGWMTTINGKELKVEGQITYYNRYKRQNVVKDLSVELDRLSEESVNNDISSWTKGRSGEALSLLKKRFSHRPVQEKFVCLNCGFETHADEQAALNIARSWLFLRSQEYKKYQTNKTTGNTDKRAFVETWQSFYRKKLKEVWKPAV

SEQ ID NO: 27382 - protein, 978 aa, synthetic construct
  REGION 1..978: note = engineered CasX variant
QEIKRINKIRRRLVKDSNTKKAGKTGPMKTLLVRVMTPDLRERLENLRKKPENIPQPISNTSRANLNKLLTDYTEMKKAILHVYWEEFQKDPVGLMSRVAQPASKKIDQNKLKPEMDEKGNLTTAGFACSQCGQPLFVYKLEQVSEKGKAYTNYFGRCNVAEHEKLILLAQLKPEKDSDEAVTYSLGKFGQRALDFYSIHVTKESTHPVKPLAQIAGNRYASGPVGKALSDACMGTIASFLSKYQDIIIEHQKVVKGNQKRLESLRELAGKENLEYPSVTLPPQPHTKEGVDAYNEVIARVRMWVNLNLWQKLKLSRDDAKPLLRLKGFPSFPLVERQANEVDWWDMVCNVKKLINEKKEDGKVFWQNLAGYKRQEALRPYLSSEEDRKKGKKFARYQLGDLLLHLEKKHGEDWGKVYDEAWERIDKKVEGLSKHIKLEEERRSEDAQSKAALTDWLRAKASFVIEGLKEADKDEFCRCELKLQKWYGDLRGKPFAIEAENSILDISGFSKQYNCAFIWQKDGVKKLNLYLIINYFKGGKLRFKKIKPEAFEANRFYTVINKKSGEIVPMEVNFNFDDPNLIILPLAFGKRQGREFIWNDLLSLETGSLKLANGRVIEKTLYNRRTRQDEPALFVALTFERREVLDSSNIKPMNLIGLDRGENIPAVIALTDPEGCPLSRFKDSLGNPTHILRIGESYKEKQRTIQAYKEVEQRRAGGYSRKYASKAKNLADDMVRNTARDLLYYAVTQDAMLIFENLSRGFGRQGKRTFMAERQYTRMEDWLTAKLAYEGLPSKTYLSKTLAQYTSKTCSNCGFTITSADYDRVLEKLKKTATGWMTTINGKELKVEGQITYYNRYKRQNVVKDLSVELDRLSEESVNNDISSWTKGRSGEALSLLKKRFSHRPVQEKFVCLNCGFETHADEQAALNIARSWLFLRSQEYKKYQTNKTTGNTDKRAFVETWQSFYRKKLKEVWKPAV

SEQ ID NO: 27383 - protein, 978 aa, synthetic construct
  REGION 1..978: note = engineered CasX variant
QEIKRINKIRRRLVKDSNTKKAGKTGPMKTLLVRVMTPDLRERLENLRKKPENIPQPISNTSRANLNKLLTDYTEMKKAILHVYWEEFQKDPVGLMSRVAQPASKKIDQNKLKPEMDEKGNLTTAGFACSQCGQPLFVYKLEQVSEKGKAYTNYFGRCNVAEHEKLILLAQLKPEKDSDEAVTYSLGKFGQRALDFYSIHVTKESTHPVKPLAQIAGNRYASGPVGKALSDACMGTIASFLSKYQDIIIEHQKVVKGNQKRLESLRELAGKENLEYPSVTLPPQPHTKEGVDAYNEVIARVRMWVNLNLWQKLKLSRDDAKPLLRLKGFPSFPLVERQANEVDWWDMVCNVKKLINEKKEDGKVFWQNLAGYKRQEALRPYLSSEEDRKKGKKFARYQLGDLLLHLEKKHGEDWGKVYDEAWERIDKKVEGLSKHIKLEEERRSEDAQSKAALTDWLRAKASFVIEGLKEADKDEFCRCELKLQKWYGDLRGKPFAIEAENSILDISGFSKQYNCAFIWQKDGVKKLNLYLIINYFKGGKLRFKKIKPEAFEANRFYTVINKKSGEIVPMEVNFNFDDPNLIILPLAFGKRQGREFIWNDLLSLETGSLKLANGRVIEKTLYNRRTRQDEPALFVALTFERREVLDSSNIKPMNLIGLDRGENIPAVIALTDPEGCPLSRFKDSLGNPTHILRIGESYKEKQRTIQAKKEVEQRRAGGYSRKYASKAKNLADDMVRNTARDLLYYAVTQDAMLIFENLSRGFGRQGKRTFMAERQYTRMEDWLTAKLAYEGLPSKTYLSKTLAQYTSKTCSNCGFTITSADYDRVLEKLKKTATGWMTTINGKELKVEGQITYYNRYKRQNVVKDLSVELDRLSEESVNNDISSWTKGRSGEALSLLKKRFSHRPVQEKFVCLNCGFETHADEQAALNIARSWLFLRSQEYKKYQTNKTTGNTDKRAFVETWQSFYRKKLKEVWKPAV

SEQ ID NO: 27384 - protein, 978 aa, synthetic construct
  REGION 1..978: note = engineered CasX variant
QEIKRINKIRRRLVKDSNTKKAGKTGPMKTLLVRVMTPDLRERLENLRKKPENIPQPISNTSRANLNKLLTDYTEMKKAILHVYWEEFQKDPVGLMSRVAQPASKKIDQNKLKPEMDEKGNLTTAGFACSQCGQPLFVYKLEQVSEKGKAYTNYFGRCNVAEHEKLILLAQLKPEKDSDEAVTYSLGKFGQRALDFYSIHVTKESTHPVKPLAQIAGNRYASGPVGKALSDACMGTIASFLSKYQDIIIEHQKVVKGNQKRLESLRELAGKENLEYPSVTLPPQPHTKEGVDAYNEVIARVRMWVNLNLWQKLKLSRDDAKPLLRLKGFPSFPLVERQANEVDWWDMVCNVKKLINEKKEDGKVFWQNLAGYKRQEALRPYLSSEEDRKKGKKFARYQLGDLLLHLEKKHGEDWGKVYDEAWERIDKKVEGLSKHIKLEEERRSEDAQSKAALTDWLRAKASFVIEGLKEADKDEFCRCELKLQKWYGDLRGKPFAIEAENSILDISGFSKQYNCAFIWQKDGVKKLNLYLIINYFKGGKLRFKKIKPEAFEANRFYTVINKKSGEIVPMEVNFNFDDPNLIILPLAFGKRQGREFIWNDLLSLETGSLKLANGRVIEKTLYNRRTRQDEPALFVALTFERREVLDSSNIKPMNLIGLDRGENIPAVIALTDPEGCPLSRFKDSLGNPTHILRIGESYKEKQRIIQAKKEVEQRRAGGYSRKYASKAKNLADDMVRNTARDLLYYAVTQDAMLIFENLSRGFGRQGKRTFMAERQYTRMEDWLTAKLAYEGLPSKTYLSKTLAQYTSKTCSNCGFTITSADYDRVLEKLKKTATGWMTTINGKELKVEGQITYYNRYKRQNVVKDLSVELDRLSEESVNNDISSWTKGRSGEALSLLKKRFSHRPVQEKFVCLNCGFETHADEQAALNIARSWLFLRSQEYKKYQTNKTTGNTDKRAFVETWQSFYRKKLKEVWKPAV

SEQ ID NO: 27385 - protein, 978 aa, synthetic construct
  REGION 1..978: note = engineered CasX variant
QEIKRINKIRRRLVKDSNTKKAGKTGPMKTLLVRVMTPDLRERLENLRKKPENIPQPISNTSRANLNKLLTDYTEMKKAILHVYWEEFQKDPVGLMSRVAQPASKKIDQNKLKPEMDEKGNLTTAGFACSQCGQPLFVYKLEQVSEKGKAYTNYFGRCNVAEHEKLILLAQLKPEKDSDEAVTYSLGKFGQRALDFYSIHVTKESTHPVKPLAQIAGNRYASGPVGKALSDACMGTIASFLSKYQDIIIEHQKVVKGNQKRLESLRELAGKENLEYPSVTLPPQPHTKEGVDAYNEVIARVRMWVNLNLWQKLKLSRDDAKPLLRLKGFPSFPLVERQANEVDWWDMVCNVKKLINEKKEDGKVFWQNLAGYKRQEALRPYLSSEEDRKKGKKFARYQLGDLLLHLEKKHGEDWGKVYDEAWERIDKKVEGLSKHIKLEEERRSEDAQSKAALTDWLRAKASFVIEGLKEADKDEFCRCELKLQKWYGDLRGKPFAIEAENSILDISGFSKQYNCAFIWQKDGVKKLNLYLIINYFKGGKLRFKKIKPEAFEANRFYTVINKKSGEIVPMEVNFNFDDPNLIILPLAFGKRQGREFIWNDLLSLETGSLKLANGRVIEKTLYNRRTRQDEPALFVALTFERREVLDSSNIKPMNLIGLDRGENIPAVIALTDPEGCPLSRFKDSLGNPTHILRIGENYKEKQRTIQAYKEVEQRRAGGYSRKYASKAKNLADDMVRNTARDLLYYAVTQDAMLIFENLSRGFGRQGKRTFMAERQYTRMEDWLTAKLAYEGLPSKTYLSKTLAQYTSKTCSNCGFTITSADYDRVLEKLKKTATGWMTTINGKELKVEGQITYYNRYKRQNVVKDLSVELDRLSEESVNNDISSWTKGRSGEALSLLKKRFSHRPVQEKFVCLNCGFETHADEQAALNIARSWLFLRSQEYKKYQTNKTTGNTDKRAFVETWQSFYRKKLKEVWKPAV

SEQ ID NO: 27386 - protein, 978 aa, synthetic construct
  REGION 1..978: note = engineered CasX variant
QEIKRINKIRRRLVKDSNTKKAGKTGPMKTLLVRVMTPDLRERLENLRKKPENIPQPISNTSRANLNKLLTDYTEMKKAILHVYWEEFQKDPVGLMSRVAQPASKKIDQNKLKPEMDEKGNLTTAGFACSQCGQPLFVYKLEQVSEKGKAYTNYFGRCNVAEHEKLILLAQLKPEKDSDEAVTYSLGKFGQRALDFYSIHVTKESTHPVKPLAQIAGNRYASGPVGKALSDACMGTIASFLSKYQDIIIEHQKVVKGNQKRLESLRELAGKENLEYPSVTLPPQPHTKEGVDAYNEVIARVRMWVNLNLWQKLKLSRDDAKPLLRLKGFPSFPLVERQANEVDWWDMVCNVKKLINEKKEDGKVFWQNLAGYKRQEALRPYLSSEEDRKKGKKFARYQLGDLLLHLEKKHGEDWGKVYDEAWERIDKKVEGLSKHIKLEEERRSEDAQSKAALTDWLRAKASFVIEGLKEADKDEFCRCELKLQKWYGDLRGKPFAIEAENSILDISGFSKQYNCAFIWQKDGVKKLNLYLIINYFKGGKLRFKKIKPEAFEANRFYTVINKKSGEIVPMEVNFNFDDPNLIILPLAFGKRQGREFIWNDLLSLETGSLKLANGRVIEKTLYNRRTRQDEPALFVALTFERREVLDSSNIKPMNLIGLDRGENIPAVIALTDPEGCPLSRFKDSLGNPTHILRIGENYKEKQRTIQAKKEVEQRRAGGYSRKYASKAKNLADDMVRNTARDLLYYAVTQDAMLIFENLSRGFGRQGKRTFMAERQYTRMEDWLTAKLAYEGLPSKTYLSKTLAQYTSKTCSNCGFTITSADYDRVLEKLKKTATGWMTTINGKELKVEGQITYYNRYKRQNVVKDLSVELDRLSEESVNNDISSWTKGRSGEALSLLKKRFSHRPVQEKFVCLNCGFETHADEQAALNIARSWLFLRSQEYKKYQTNKTTGNTDKRAFVETWQSFYRKKLKEVWKPAV

SEQ ID NO: 27387 - protein, 978 aa, synthetic construct
  REGION 1..978: note = engineered CasX variant
QEIKRINKIRRRLVKDSNTKKAGKTGPMKTLLVRVMTPDLRERLENLRKKPENIPQPISNTSRANLNKLLTDYTEMKKAILHVYWEEFQKDPVGLMSRVAQPASKKIDQNKLKPEMDEKGNLTTAGFACSQCGQPLFVYKLEQVSEKGKAYTNYFGRCNVAEHEKLILLAQLKPEKDSDEAVTYSLGKFGQRALDFYSIHVTKESTHPVKPLAQIAGNRYASGPVGKALSDACMGTIASFLSKYQDIIIEHQKVVKGNQKRLESLRELAGKENLEYPSVTLPPQPHTKEGVDAYNEVIARVRMWVNLNLWQKLKLSRDDAKPLLRLKGFPSFPLVERQANEVDWWDMVCNVKKLINEKKEDGKVFWQNLAGYKRQEALRPYLSSEEDRKKGKKFARYQLGDLLLHLEKKHGEDWGKVYDEAWERIDKKVEGLSKHIKLEEERRSEDAQSKAALTDWLRAKASFVIEGLKEADKDEFCRCELKLQKWYGDLRGKPFAIEAENSILDISGFSKQYNCAFIWQKDGVKKLNLYLIINYFKGGKLRFKKIKPEAFEANRFYTVINKKSGEIVPMEVNFNFDDPNLIILPLAFGKRQGREFIWNDLLSLETGSLKLANGRVIEKTLYNRRTRQDEPALFVALTFERREVLDSSNIKPMNLIGIDRGENIPAVIALTDPEGCPLSRFKDSLGNPTHILRIGESYKEKQRTIQAKKEVEQRRAGGYSRKYASKAKNLADDMVRNTARDLLYYAVTQDAMLIFENLSRGFGRQGKRTFMAERQYTRMEDWLTAKLAYEGLPSKTYLSKTLAQYTSKTCSNCGFTITSADYDRVLEKLKKTATGWMTTINGKELKVEGQITYYNRYKRQNVVKDLSVELDRLSEESVNNDISSWTKGRSGEALSLLKKRFSHRPVQEKFVCLNCGFETHADEQAALNIARSWLFLRSQEYKKYQTNKTTGNTDKRAFVETWQSFYRKKLKEVWKPAV

SEQ ID NO: 27388 - protein, 978 aa, synthetic construct
  REGION 1..978: note = engineered CasX variant
QEIKRINKIRRRLVKDSNTKKAGKTGPMKTLLVRVMTPDLRERLENLRKKPENIPQPISNTSRANLNKLLTDYTEMKKAILHVYWEEFQKDPVGLMSRVAQPASKKIDQNKLKPEMDEKGNLTTAGFACSQCGQPLFVYKLEQVSEKGKAYTNYFGRCNVAEHEKLILLAQLKPEKDSDEAVTYSLGKFGQRALDFYSIHVTKESTHPVKPLAQIAGNRYASGPVGKALSDACMGTIASFLSKYQDIIIEHQKVVKGNQKRLESLRELAGKENLEYPSVTLPPQPHTKEGVDAYNEVIARVRMWVNLNLWQKLKLSRDDAKPLLRLKGFPSFPLVERQANEVDWWDMVCNVKKLINEKKEDGKVFWQNLAGYKRQEALRPYLSSEEDRKKGKKFARYQLGDLLLHLEKKHGEDWGKVYDEAWERIDKKVEGLSKHIKLEEERRSEDAQSKAALTDWLRAKASFVIEGLKEADKDEFCRCELKLQKWYGDLRGKPFAIEAENSILDISGFSKQYNCAFIWQKDGVKKLNLYLIINYFKGGKLRFKKIKPEAFEANRFYTVINKKSGEIVPMEVNFNFDDPNLIILPLAFGKRQGREFIWNDLLSLETGSLKLANGRVIEKTLYNRRTRQDEPALFVALTFERREVLDSSNIKPMNLIGIDRGENIPAMIALTDPEGCPLSRFKDSLGNPTHILRIGESYKEKQRTIQAKKEVEQRRAGGYSRKYASKAKNLADDMVRNTARDLLYYAVTQDAMLIFENLSRGFGRQGKRTFMAERQYTRMEDWLTAKLAYEGLPSKTYLSKTLAQYTSKTCSNCGFTITSADYDRVLEKLKKTATGWMTTINGKELKVEGQITYYNRYKRQNVVKDLSVELDRLSEESVNNDISSWTKGRSGEALSLLKKRFSHRPVQEKFVCLNCGFETHADEQAALNIARSWLFLRSQEYKKYQTNKTTGNTDKRAFVETWQSFYRKKLKEVWKPAV

SEQ ID NO: 27389 - protein, 978 aa, synthetic construct
  REGION 1..978: note = engineered CasX variant
QEIKRINKIRRRLVKDSNTKKAGKTGPMKTLLVRVMTPDLRERLENLRKKPENIPQPISNTSRANLNKLLTDYTEMKKAILHVYWEEFQKDPVGLMSRVAQPASKKIDQNKLKPEMDEKGNLTTAGFACSQCGQPLFVYKLEQVSEKGKAYTNYFGRCNVAEHEKLILLAQLKPEKDSDEAVTYSLGKFGQRALDFYSIHVTKESTHPVKPLAQIAGNRYASGPVGKALSDACMGTIASFLSKYQDIIIEHQKVVKGNQKRLESLRELAGKENLEYPSVTLPPQPHTKEGVDAYNEVIARVRMWVNLNLWQKLKLSRDDAKPLLRLKGFPSFPLVERQANEVDWWDMVCNVKKLINEKKEDGKVFWQNLAGYKRQEALRPYLSSEEDRKKGKKFARYQLGDLLLHLEKKHGEDWGKVYDEAWERIDKKVEGLSKHIKLEEERRSEDAQSKAALTDWLRAKASFVIEGLKEADKDEFCRCELKLQKWYGDLRGKPFAIEAENSILDISGFSKQYNCAFIWQKDGVKKLNLYLIINYFKGGKLRFKKIKPEAFEANRFYTVINKKSGEIVPMEVNFNFDDPNLIILPLAFGKRQGREFIWNDLLSLETGSLKLANGRVIEKTLYNRRTRQDEPALFVALTFERREVLDSSNIKPMNLIGCDRGENIPAVIALTDPEGCPLSRFKDSLGNPTHILRIGESYKEKQRTIQAKKEVSQRRAGGYSRKYASKAKNLADDMVRNTARDLLYYAVTQDAMLIFENLSRGFGRQGKRTFMAERQYTRMEDWLTAKLAYEGLPSKTYLSKTLAQYTSKTCSNCGFTITSADYDRVLEKLKKTATGWMTTINGKELKVEGQITYYNRYKRQNVVKDLSVELDRLSEESVNNDISSWTKGRSGEALSLLKKRFSHRPVQEKFVCLNCGFETHADEQAALNIARSWLFLRSQEYKKYQTNKTTGNTDKRAFVETWQSFYRKKLKEVWKPAV

SEQ ID NO: 27390 - protein, 978 aa, synthetic construct
  REGION 1..978: note = engineered CasX variant
QEIKRINKIRRRLVKDSNTKKAGKTGPMKTLLVRVMTPDLRERLENLRKKPENIPQPISNTSRANLNKLLTDYTEMKKAILHVYWEEFQKDPVGLMSRVAQPASKKIDQNKLKPEMDEKGNLTTAGFACSQCGQPLFVYKLEQVSEKGKAYTNYFGRCNVAEHEKLILLAQLKPEKDSDEAVTYSLGKFGQRALDFYSIHVTKESTHPVKPLAQIAGNRYASGPVGKALSDACMGTIASFLSKYQDIIIEHQKVVKGNQKRLESLRELAGKENLEYPSVTLPPQPHTKEGVDAYNEVIARVRMWVNLNLWQKLKLSRDDAKPLLRLKGFPSFPLVERQANEVDWWDMVCNVKKLINEKKEDGKVFWQNLAGYKRQEALRPYLSSEEDRKKGKKFARYQLGDLLLHLEKKHGEDWGKVYDEAWERIDKKVEGLSKHIKLEEERRSEDAQSKAALTDWLRAKASFVIEGLKEADKDEFCRCELKLQKWYGDLRGKPFAIEAENSILDISGFSKQYNCAFIWQKDGVKKLNLYLIINYFKGGKLRFKKIKPEAFEANRFYTVINKKSGEIVPMEVNFNFDDPNLIILPLAFGKRQGREFIWNDLLSLETGSLKLANGRVIEKTLYNRRTRQDEPALFVALTFERREVLDSSNIKPMNLIGCDRGENIPAVIALTDPEGCPLSRFKDSLGNPTHILRIGESYKEKQRTIQAKKEVEQRRAGGYSRKYASKAKNLADDMVRNTARDLLYYAVTQDAMLIFENLSRGFGRQGKRTFMAERQYTRMEDWLTAKLAYEGLPSKTYLSKTLAQYTSKTCSNCGFTITSADYDRVLEKLKKTATGWMTTINGKELKVEGQITYYNRYKRQNVVKDLSVELDRLSEESVNNDISSWTKGRSGEALSLLKKRFSHRPVQEKFVCLNCGFETHADEQAALNIARSWLFLRSQEYKKYQTNKTTGNTDKRAFVETWQSFYRKKLKEVWKPAV

SEQ ID NO: 27391 - protein, 978 aa, synthetic construct
  REGION 1..978: note = engineered CasX variant
QEIKRINKIRRRLVKDSNTKKAGKTGPMKTLLVRVMTPDLRERLENLRKKPENIPQPISNTSRANLNKLLTDYTEMKKAILHVYWEEFQKDPVGLMSRVAQPASKKIDQNKLKPEMDEKGNLTTAGFACSQCGQPLFVYKLEQVSEKGKAYTNYFGRCNVAEHEKLILLAQLKPEKDSDEAVTYSLGKFGQRALDFYSIHVTKESTHPVKPLAQIAGNRYASGPVGKALSDACMGTIASFLSKYQDIIIEHQKVVKGNQKRLESLRELAGKENLEYPSVTLPPQPHTKEGVDAYNEVIARVRMWVNLNLWQKLKLSRDDAKPLLRLKGFPSFPLVERQANEVDWWDMVCNVKKLINEKKEDGKVFWQNLAGYKRQEALRPYLSSEEDRKKGKKFARYQLGDLLLHLEKKHGEDWGKVYDEAWERIDKKVEGLSKHIKLEEERRSEDAQSKAALTDWLRAKASFVIEGLKEADKDEFCRCELKLQKWYGDLRGKPFAIEAENSILDISGFSKQYNCAFIWQKDGVKKLNLYLIINYFKGGKLRFKKIKPEAFEANRFYTVINKKSGEIVPMEVNFNFDDPNLIILPLAFGKRQGREFIWNDLLSLETGSLKLANGRVIEKTLYNRRTRQDEPALFVALTFERREVLDSSNIKPMNLIGCDRGENIPAVIALTDPEGCPLSRFKDSLGNPTHILRIGESYKEKQRTIQAKKEVEQRRAFGYSRKYASKAKNLADDMVRNTARDLLYYAVTQDAMLIFENLSRGFGRQGKRTFMAERQYTRMEDWLTAKLAYEGLPSKTYLSKTLAQYTSKTCSNCGFTITSADYDRVLEKLKKTATGWMTTINGKELKVEGQITYYNRYKRQNVVKDLSVELDRLSEESVNNDISSWTKGRSGEALSLLKKRFSHRPVQEKFVCLNCGFETHADEQAALNIARSWLFLRSQEYKKYQTNKTTGNTDKRAFVETWQSFYRKKLKEVWKPAV

SEQ ID NO: 27392 - protein, 978 aa, synthetic construct
  REGION 1..978: note = engineered CasX variant
QEIKRINKIRRRLVKDSNTKKAGKTGPMKTLLVRVMTPDLRERLENLRKKPENIPQPISNTSRANLNKLLTDYTEMKKAILHVYWEEFQKDPVGLMSRVAQPASKKIDQNKLKPEMDEKGNLTTAGFACSQCGQPLFVYKLEQVSEKGKAYTNYFGRCNVAEHEKLILLAQLKPEKDSDEAVTYSLGKFGQRALDFYSIHVTKESTHPVKPLAQIAGNRYASGPVGKALSDACMGTIASFLSKYQDIIIEHQKVVKGNQKRLESLRELAGKENLEYPSVTLPPQPHTKEGVDAYNEVIARVRMWVNLNLWQKLKLSRDDAKPLLRLKGFPSFPLVERQANEVDWWDMVCNVKKLINEKKEDGKVFWQNLAGYKRQEALRPYLSSEEDRKKGKKFARYQLGDLLLHLEKKHGEDWGKVYDEAWERIDKKVEGLSKHIKLEEERRSEDAQSKAALTDWLRAKASFVIEGLKEADKDEFCRCELKLQKWYGDLRGKPFAIEAENSILDISGFSKQYNCAFIWQKDGVKKLNLYLIINYFKGGKLRFKKIKPEAFEANRFYTVINKKSGEIVPMEVNFNFDDPNLIILPLAFGKRQGREFIWNDLLSLETGSLKLANGRVIEKTLYNRRTRQDEPALFVALTFERREVLDSSNIKPMNLIGCDRGENIPAVIALTDPEGCPLSRFKDSLGNPTHIKRIGESYKEKQRTIQAKKEVEQRRAGGYSRKYASKAKNLADDMVRNTARDLLYYAVTQDAMLIFENLSRGFGRQGKRTFMAERQYTRMEDWLTAKLAYEGLPSKTYLSKTLAQYTSKTCSNCGFTITSADYDRVLEKLKKTATGWMTTINGKELKVEGQITYYNRYKRQNVVKDLSVELDRLSEESVNNDISSWTKGRSGEALSLLKKRFSHRPVQEKFVCLNCGFETHADEQAALNIARSWLFLRSQEYKKYQTNKTTGNTDKRAFVETWQSFYRKKLKEVWKPAV

SEQ ID NO: 27393 - protein, 978 aa, synthetic construct
  REGION 1..978: note = engineered CasX variant
QEIKRINKIRRRLVKDSNTKKAGKTGPMKTLLVRVMTPDLRERLENLRKKPENIPQPISNTSRANLNKLLTDYTEMKKAILHVYWEEFQKDPVGLMSRVAQPASKKIDQNKLKPEMDEKGNLTTAGFACSQCGQPLFVYKLEQVSEKGKAYTNYFGRCNVAEHEKLILLAQLKPEKDSDEAVTYSLGKFGQRALDFYSIHVTKESTHPVKPLAQIAGNRYASGPVGKALSDACMGTIASFLSKYQDIIIEHQKVVKGNQKRLESLRELAGKENLEYPSVTLPPQPHTKEGVDAYNEVIARVRMWVNLNLWQKLKLSRDDAKPLLRLKGFPSFPLVERQANEVDWWDMVCNVKKLINEKKEDGKVFWQNLAGYKRQEALRPYLSSEEDRKKGKKFARYQLGDLLLHLEKKHGEDWGKVYDEAWERIDKKVEGLSKHIKLEEERRSEDAQSKAALTDWLRAKASFVIEGLKEADKDEFCRCELKLQKWYGDLRGKPFAIEAENSILDISGFSKQYNCAFIWQKDGVKKLNLYLIINYFKGGKLRFKKIKPEAFEANRFYTVINKKSGEIVPMEVNFNFDDPNLIILPLAFGKRQGREFIWNDLLSLETGSLKLANGRVIEKTLYNRRTRQDEPALFVALTFERREVLDSSNIKPMNLIGCDRGENIPAVIALTDPEGCPLSRFKDSEGNPTHILRIGESYKEKQRTIQAKKEVEQRRAGGYSRKYASKAKNLADDMVRNTARDLLYYAVTQDAMLIFENLSRGFGRQGKRTFMAERQYTRMEDWLTAKLAYEGLPSKTYLSKTLAQYTSKTCSNCGFTITSADYDRVLEKLKKTATGWMTTINGKELKVEGQITYYNRYKRQNVVKDLSVELDRLSEESVNNDISSWTKGRSGEALSLLKKRFSHRPVQEKFVCLNCGFETHADEQAALNIARSWLFLRSQEYKKYQTNKTTGNTDKRAFVETWQSFYRKKLKEVWKPAV

SEQ ID NO: 27394 - protein, 978 aa, synthetic construct
  REGION 1..978: note = engineered CasX variant
QEIKRINKIRRRLVKDSNTKKAGKTGPMKTLLVRVMTPDLRERLENLRKKPENIPQPISNTSRANLNKLLTDYTEMKKAILHVYWEEFQKDPVGLMSRVAQPASKKIDQNKLKPEMDEKGNLTTAGFACSQCGQPLFVYKLEQVSEKGKAYTNYFGRCNVAEHEKLILLAQLKPEKDSDEAVTYSLGKFGQRALDFYSIHVTKESTHPVKPLAQIAGNRYASGPVGKALSDACMGTIASFLSKYQDIIIEHQKVVKGNQKRLESLRELAGKENLEYPSVTLPPQPHTKEGVDAYNEVIARVRMWVNLNLWQKLKLSRDDAKPLLRLKGFPSFPLVERQANEVDWWDMVCNVKKLINEKKEDGKVFWQNLAGYKRQEALRPYLSSEEDRKKGKKFARYQLGDLLLHLEKKHGEDWGKVYDEAWERIDKKVEGLSKHIKLEEERRSEDAQSKAALTDWLRAKASFVIEGLKEADKDEFCRCELKLQKWYGDLRGKPFAIEAENSILDISGFSKQYNCAFIWQKDGVKKLNLYLIINYFKGGKLRFKKIKPEAFEANRFYTVINKKSGEIVPMEVNFNFDDPNLIILPLAFGKRQGREFIWNDLLSLETGSLKLANGRVIEKTLYNRRTRQDEPALFVALTFERREVLDSSNIKPMNLIGCDRGENIPAVIALTDPEGCPLSIFKDSLGNPTHILRIGESYKEKQRTIQAKKEVEQRRAGGYSRKYASKAKNLADDMVRNTARDLLYYAVTQDAMLIFENLSRGFGRQGKRTFMAERQYTRMEDWLTAKLAYEGLPSKTYLSKTLAQYTSKTCSNCGFTITSADYDRVLEKLKKTATGWMTTINGKELKVEGQITYYNRYKRQNVVKDLSVELDRLSEESVNNDISSWTKGRSGEALSLLKKRFSHRPVQEKFVCLNCGFETHADEQAALNIARSWLFLRSQEYKKYQTNKTTGNTDKRAFVETWQSFYRKKLKEVWKPAV

SEQ ID NO: 27395 - protein, 978 aa, synthetic construct
  REGION 1..978: note = engineered CasX variant
QEIKRINKIRRRLVKDSNTKKAGKTGPMKTLLVRVMTPDLRERLENLRKKPENIPQPISNTSRANLNKLLTDYTEMKKAILHVYWEEFQKDPVGLMSRVAQPASKKIDQNKLKPEMDEKGNLTTAGFACSQCGQPLFVYKLEQVSEKGKAYTNYFGRCNVAEHEKLILLAQLKPEKDSDEAVTYSLGKFGQRALDFYSIHVTKESTHPVKPLAQIAGNRYASGPVGKALSDACMGTIASFLSKYQDIIIEHQKVVKGNQKRLESLRELAGKENLEYPSVTLPPQPHTKEGVDAYNEVIARVRMWVNLNLWQKLKLSRDDAKPLLRLKGFPSFPLVERQANEVDWWDMVCNVKKLINEKKEDGKVFWQNLAGYKRQEALRPYLSSEEDRKKGKKFARYQLGDLLLHLEKKHGEDWGKVYDEAWERIDKKVEGLSKHIKLEEERRSEDAQSKAALTDWLRAKASFVIEGLKEADKDEFCRCELKLQKWYGDLRGKPFAIEAENSILDISGFSKQYNCAFIWQKDGVKKLNLYLIINYFKGGKLRFKKIKPEAFEANRFYTVINKKSGEIVPMEVNFNFDDPNLIILPLAFGKRQGREFIWNDLLSLETGSLKLANGRVIEKTLYNRRTRQDEPALFVALTFERREVLDSSNIKPMNLIGADRGENIPAVIALTDPEGCPLSRFKDSLGNPTHILRINESYKEKQRTIQAKKEVEQRRAGGYSRKYASKAKNLADDMVRNTARDLLYYAVTQDAMLIFENLSRGFGRQGKRTFMAERQYTRMEDWLTAKLAYEGLPSKTYLSKTLAQYTSKTCSNCGFTITSADYDRVLEKLKKTATGWMTTINGKELKVEGQITYYNRYKRQNVVKDLSVELDRLSEESVNNDISSWTKGRSGEALSLLKKRFSHRPVQEKFVCLNCGFETHADEQAALNIARSWLFLRSQEYKKYQTNKTTGNTDKRAFVETWQSFYRKKLKEVWKPAV

SEQ ID NO: 27396 - protein, 978 aa, synthetic construct
  REGION 1..978: note = engineered CasX variant
QEIKRINKIRRRLVKDSNTKKAGKTGPMKTLLVRVMTPDLRERLENLRKKPENIPQPISNTSRANLNKLLTDYTEMKKAILHVYWEEFQKDPVGLMSRVAQPASKKIDQNKLKPEMDEKGNLTTAGFACSQCGQPLFVYKLEQVSEKGKAYTNYFGRCNVAEHEKLILLAQLKPEKDSDEAVTYSLGKFGQRALDFYSIHVTKESTHPVKPLAQIAGNRYASGPVGKALSDACMGTIASFLSKYQDIIIEHQKVVKGNQKRLESLRELAGKENLEYPSVTLPPQPHTKEGVDAYNEVIARVRMWVNLNLWQKLKLSRDDAKPLLRLKGFPSFPLVERQANEVDWWDMVCNVKKLINEKKEDGKVFWQNLAGYKRQEALRPYLSSEEDRKKGKKFARYQLGDLLLHLEKKHGEDWGKVYDEAWERIDKKVEGLSKHIKLEEERRSEDAQSKAALTDWLRAKASFVIEGLKEADKDEFCRCELKLQKWYGDLRGKPFAIEAENSILDISGFSKQYNCAFIWQKDGVKKLNLYLIINYFKGGKLRFKKIKPEAFEANRFYTVINKKSGEIVPMEVNFNFDDPNLIILPLAFGKRQGREFIWNDLLSLETGSLKLANGRVIEKTLYNRRTRQDEPALFVALTFERREVLDSSNIKPMNLIGADRGENIPAVIALTDPEGCPLSRFKDSLGNPTHILRIGESYKEQQRTIQAKKEVEQRRAGGYSRKYASKAKNLADDMVRNTARDLLYYAVTQDAMLIFENLSRGFGRQGKRTFMAERQYTRMEDWLTAKLAYEGLPSKTYLSKTLAQYTSKTCSNCGFTITSADYDRVLEKLKKTATGWMTTINGKELKVEGQITYYNRYKRQNVVKDLSVELDRLSEESVNNDISSWTKGRSGEALSLLKKRFSHRPVQEKFVCLNCGFETHADEQAALNIARSWLFLRSQEYKKYQTNKTTGNTDKRAFVETWQSFYRKKLKEVWKPAV

SEQ ID NO: 27397 - protein, 978 aa, synthetic construct
  REGION 1..978: note = engineered CasX variant
QEIKRINKIRRRLVKDSNTKKAGKTGPMKTLLVRVMTPDLRERLENLRKKPENIPQPISNTSRANLNKLLTDYTEMKKAILHVYWEEFQKDPVGLMSRVAQPASKKIDQNKLKPEMDEKGNLTTAGFACSQCGQPLFVYKLEQVSEKGKAYTNYFGRCNVAEHEKLILLAQLKPEKDSDEAVTYSLGKFGQRALDFYSIHVTKESTHPVKPLAQIAGNRYASGPVGKALSDACMGTIASFLSKYQDIIIEHQKVVKGNQKRLESLRELAGKENLEYPSVTLPPQPHTKEGVDAYNEVIARVRMWVNLNLWQKLKLSRDDAKPLLRLKGFPSFPLVERQANEVDWWDMVCNVKKLINEKKEDGKVFWQNLAGYKRQEALRPYLSSEEDRKKGKKFARYQLGDLLLHLEKKHGEDWGKVYDEAWERIDKKVEGLSKHIKLEEERRSEDAQSKAALTDWLRAKASFVIEGLKEADKDEFCRCELKLQKWYGDLRGKPFAIEAENSILDISGFSKQYNCAFIWQKDGVKKLNLYLIINYFKGGKLRFKKIKPEAFEANRFYTVINKKSGEIVPMEVNFNFDDPNLIILPLAFGKRQGREFIWNDLLSLETGSLKLANGRVIEKTLYNRRTRQDEPALFVALTFERREVLDSSNIKPMNLIGADRGENIPAVIALTDPEGCPLSRFKDSLGNPTHILRIGESYKEKQRTIQAKKEVEQRRAGGYSRKYASKAKNLADDMVRNTARDLLYYAVTQDAMLIFENLSRGFGRQGKRTFMAERQYTRMEDWLTAKLAYEGLPSKTYLSKTLAQYTSKTCSNCGFTITSADYDRVLEKLKKTATGWMTTINGKELKVEGQITYYNRYKRQNVVKDLSVELDRLSEESVNNDISSWTKGRSGEALSLLKKRFSHRPVQEKFVCLNCGFETHADEQAALNIARSWLFLRSQEYKKYQTNKTTGNTDKRAFVETWQSFYRKKLKEVWKPAV

SEQ ID NO: 27398 - protein, 978 aa, synthetic construct
  REGION 1..978: note = engineered CasX variant
QEIKRINKIRRRLVKDSNTKKAGKTGPMKTLLVRVMTPDLRERLENLRKKPENIPQPISNTSRANLNKLLTDYTEMKKAILHVYWEEFQKDPVGLMSRVAQPASKKIDQNKLKPEMDEKGNLTTAGFACSQCGQPLFVYKLEQVSEKGKAYTNYFGRCNVAEHEKLILLAQLKPEKDSDEAVTYSLGKFGQRALDFYSIHVTKESTHPVKPLAQIAGNRYASGPVGKALSDACMGTIASFLSKYQDIIIEHQKVVKGNQKRLESLRELAGKENLEYPSVTLPPQPHTKEGVDAYNEVIARVRMWVNLNLWQKLKLSRDDAKPLLRLKGFPSFPLVERQANEVDWWDMVCNVKKLINEKKEDGKVFWQNLAGYKRQEALRPYLSSEEDRKKGKKFARYQLGDLLLHLEKKHGEDWGKVYDEAWERIDKKVEGLSKHIKLEEERRSEDAQSKAALTDWLRAKASFVIEGLKEADKDEFCRCELKLQKWYGDLRGKPFAIEAENSILDISGFSKQYNCAFIWQKDGVKKLNLYLIINYFKGGKLRFKKIKPEAFEANRFYTVINKKSGEIVPMEVNFNFDDPNLIILPLAFGKRQGREFIWNDLLSLETGSLKLANGRVIEKTLYNRRTRQDEPALFVALTFERREVLDSSNIKPMNLIGADRGENIPAVIALTDPEGCPLSRFKDSLGNPTHILRIGESYKEKQRTIQAKKEVEQRRAFGYSRKYASKAKNLADDMVRNTARDLLYYAVTQDAMLIFENLSRGFGRQGKRTFMAERQYTRMEDWLTAKLAYEGLPSKTYLSKTLAQYTSKTCSNCGFTITSADYDRVLEKLKKTATGWMTTINGKELKVEGQITYYNRYKRQNVVKDLSVELDRLSEESVNNDISSWTKGRSGEALSLLKKRFSHRPVQEKFVCLNCGFETHADEQAALNIARSWLFLRSQEYKKYQTNKTTGNTDKRAFVETWQSFYRKKLKEVWKPAV

SEQ ID NO: 27399 - protein, 978 aa, synthetic construct
  REGION 1..978: note = engineered CasX variant
QEIKRINKIRRRLVKDSNTKKAGKTGPMKTLLVRVMTPDLRERLENLRKKPENIPQPISNTSRANLNKLLTDYTEMKKAILHVYWEEFQKDPVGLMSRVAQPASKKIDQNKLKPEMDEKGNLTTAGFACSQCGQPLFVYKLEQVSEKGKAYTNYFGRCNVAEHEKLILLAQLKPEKDSDEAVTYSLGKFGQRALDFYSIHVTKESTHPVKPLAQIAGNRYASGPVGKALSDACMGTIASFLSKYQDIIIEHQKVVKGNQKRLESLRELAGKENLEYPSVTLPPQPHTKEGVDAYNEVIARVRMWVNLNLWQKLKLSRDDAKPLLRLKGFPSFPLVERQANEVDWWDMVCNVKKLINEKKEDGKVFWQNLAGYKRQEALRPYLSSEEDRKKGKKFARYQLGDLLLHLEKKHGEDWGKVYDEAWERIDKKVEGLSKHIKLEEERRSEDAQSKAALTDWLRAKASFVIEGLKEADKDEFCRCELKLQKWYGDLRGKPFAIEAENSILDISGFSKQYNCAFIWQKDGVKKLNLYLIINYFKGGKLRFKKIKPEAFEANRFYTVINKKSGEIVPMEVNFNFDDPNLIILPLAFGKRQGREFIWNDLLSLETGSLKLANGRVIEKTLYNRRTRQDEPALFVALTFERREVLDSSNIKPMNLIGADRGENIPAVIALTDPEGCPLSRFKDSLGNPTHILRIGEKYKEKQRTIQAKKEVEQRRAGGYSRKYASKAKNLADDMVRNTARDLLYYAVTQDAMLIFENLSRGFGRQGKRTFMAERQYTRMEDWLTAKLAYEGLPSKTYLSKTLAQYTSKTCSNCGFTITSADYDRVLEKLKKTATGWMTTINGKELKVEGQITYYNRYKRQNVVKDLSVELDRLSEESVNNDISSWTKGRSGEALSLLKKRFSHRPVQEKFVCLNCGFETHADEQAALNIARSWLFLRSQEYKKYQTNKTTGNTDKRAFVETWQSFYRKKLKEVWKPAV

SEQ ID NO: 27400 - protein, 978 aa, synthetic construct
  REGION 1..978: note = engineered CasX variant
QEIKRINKIRRRLVKDSNTKKAGKTGPMKTLLVRVMTPDLRERLENLRKKPENIPQPISNTSRANLNKLLTDYTEMKKAILHVYWEEFQKDPVGLMSRVAQPASKKIDQNKLKPEMDEKGNLTTAGFACSQCGQPLFVYKLEQVSEKGKAYTNYFGRCNVAEHEKLILLAQLKPEKDSDEAVTYSLGKFGQRALDFYSIHVTKESTHPVKPLAQIAGNRYASGPVGKALSDACMGTIASFLSKYQDIIIEHQKVVKGNQKRLESLRELAGKENLEYPSVTLPPQPHTKEGVDAYNEVIARVRMWVNLNLWQKLKLSRDDAKPLLRLKGFPSFPLVERQANEVDWWDMVCNVKKLINEKKEDGKVFWQNLAGYKRQEALRPYLSSEEDRKKGKKFARYQLGDLLLHLEKKHGEDWGKVYDEAWERIDKKVEGLSKHIKLEEERRSEDAQSKAALTDWLRAKASFVIEGLKEADKDEFCRCELKLQKWYGDLRGKPFAIEAENSILDISGFSKQYNCAFIWQKDGVKKLNLYLIINYFKGGKLRFKKIKPEAFEANRFYTVINKKSGEIVPMEVNFNFDDPNLIILPLAFGKRQGREFIWNDLLSLETGSLKLANGRVIEKTLYNRRTRQDEPALFVALTFERREVLDSSNIKPMNLIAVDRGENIPAVIALTDPEGCPLSRFKDSLGNPTHILRIGESYKEKQRTMQAKKEVEQRRAGGYSRKYASKAKNLADDMVRNTARDLLYYAVTQDAMLIFENLSRGFGRQGKRTFMAERQYTRMEDWLTAKLAYEGLPSKTYLSKTLAQYTSKTCSNCGFTITSADYDRVLEKLKKTATGWMTTINGKELKVEGQITYYNRYKRQNVVKDLSVELDRLSEESVNNDISSWTKGRSGEALSLLKKRFSHRPVQEKFVCLNCGFETHADEQAALNIARSWLFLRSQEYKKYQTNKTTGNTDKRAFVETWQSFYRKKLKEVWKPAV

SEQ ID NO: 27401 - protein, 978 aa, synthetic construct
  REGION 1..978: note = engineered CasX variant
QEIKRINKIRRRLVKDSNTKKAGKTGPMKTLLVRVMTPDLRERLENLRKKPENIPQPISNTSRANLNKLLTDYTEMKKAILHVYWEEFQKDPVGLMSRVAQPASKKIDQNKLKPEMDEKGNLTTAGFACSQCGQPLFVYKLEQVSEKGKAYTNYFGRCNVAEHEKLILLAQLKPEKDSDEAVTYSLGKFGQRALDFYSIHVTKESTHPVKPLAQIAGNRYASGPVGKALSDACMGTIASFLSKYQDIIIEHQKVVKGNQKRLESLRELAGKENLEYPSVTLPPQPHTKEGVDAYNEVIARVRMWVNLNLWQKLKLSRDDAKPLLRLKGFPSFPLVERQANEVDWWDMVCNVKKLINEKKEDGKVFWQNLAGYKRQEALRPYLSSEEDRKKGKKFARYQLGDLLLHLEKKHGEDWGKVYDEAWERIDKKVEGLSKHIKLEEERRSEDAQSKAALTDWLRAKASFVIEGLKEADKDEFCRCELKLQKWYGDLRGKPFAIEAENSILDISGFSKQYNCAFIWQKDGVKKLNLYLIINYFKGGKLRFKKIKPEAFEANRFYTVINKKSGEIVPMEVNFNFDDPNLIILPLAFGKRQGREFIWNDLLSLETGSLKLANGRVIEKTLYNRRTRQDEPALFVALTFERREVLDSSNIKPMNLIAVDRGENIPAVIALTDPEGCPLSRFKDSLGNPTHILRIGESYKEKQRTIQAKKEVEQRRAGGYSRKYASKAKNLADDMVRNTARDLLYYAVTQDAMLIFENLSRGFGRQGKRTFMAERQYTRMEDWLTAKLAYEGLPSKTYLSKTLAQYTSKTCSNCGFTITSADYDRVLEKLKKTATGWMTTINGKELKVEGQITYYNRYKRQNVVKDLSVELDRLSEESVNNDISSWTKGRSGEALSLLKKRFSHRPVQEKFVCLNCGFETHADEQAALNIARSWLFLRSQEYKKYQTNKTTGNTDKRAFVETWQSFYRKKLKEVWKPAV

SEQ ID NO: 27402 - protein, 978 aa, synthetic construct
  REGION 1..978: note = engineered CasX variant
QEIKRINKIRRRLVKDSNTKKAGKTGPMKTLLVRVMTPDLRERLENLRKKPENIPQPISNTSRANLNKLLTDYTEMKKAILHVYWEEFQKDPVGLMSRVAQPASKKIDQNKLKPEMDEKGNLTTAGFACSQCGQPLFVYKLEQVSEKGKAYTNYFGRCNVAEHEKLILLAQLKPEKDSDEAVTYSLGKFGQRALDFYSIHVTKESTHPVKPLAQIAGNRYASGPVGKALSDACMGTIASFLSKYQDIIIEHQKVVKGNQKRLESLRELAGKENLEYPSVTLPPQPHTKEGVDAYNEVIARVRMWVNLNLWQKLKLSRDDAKPLLRLKGFPSFPLVERQANEVDWWDMVCNVKKLINEKKEDGKVFWQNLAGYKRQEALRPYLSSEEDRKKGKKFARYQLGDLLLHLEKKHGEDWGKVYDEAWERIDKKVEGLSKHIKLEEERRSEDAQSKAALTDWLRAKASFVIEGLKEADKDEFCRCELKLQKWYGDLRGKPFAIEAENSILDISGFSKQYNCAFIWQKDGVKKLNLYLIINYFKGGKLRFKKIKPEAFEANRFYTVINKKSGEIVPMEVNFNFDDPNLIILPLAFGKRQGREFIWNDLLSLETGSLKLANGRVIEKTLYNRRTRQDEPALFVALTFERREVLDSSNIKPMNLIAVDRGENIPAVCALTDPEGCPLSRFKDSLGNPTHILRIGESYKEKQRTMQAKKEVEQRRAGGYSRKYASKAKNLADDMVRNTARDLLYYAVTQDAMLIFENLSRGFGRQGKRTFMAERQYTRMEDWLTAKLAYEGLPSKTYLSKTLAQYTSKTCSNCGFTITSADYDRVLEKLKKTATGWMTTINGKELKVEGQITYYNRYKRQNVVKDLSVELDRLSEESVNNDISSWTKGRSGEALSLLKKRFSHRPVQEKFVCLNCGFETHADEQAALNIARSWLFLRSQEYKKYQTNKTTGNTDKRAFVETWQSFYRKKLKEVWKPAV

SEQ ID NO: 27403 - protein, 978 aa, synthetic construct
  REGION 1..978: note = engineered CasX variant
QEIKRINKIRRRLVKDSNTKKAGKTGPMKTLLVRVMTPDLRERLENLRKKPENIPQPISNTSRANLNKLLTDYTEMKKAILHVYWEEFQKDPVGLMSRVAQPASKKIDQNKLKPEMDEKGNLTTAGFACSQCGQPLFVYKLEQVSEKGKAYTNYFGRCNVAEHEKLILLAQLKPEKDSDEAVTYSLGKFGQRALDFYSIHVTKESTHPVKPLAQIAGNRYASGPVGKALSDACMGTIASFLSKYQDIIIEHQKVVKGNQKRLESLRELAGKENLEYPSVTLPPQPHTKEGVDAYNEVIARVRMWVNLNLWQKLKLSRDDAKPLLRLKGFPSFPLVERQANEVDWWDMVCNVKKLINEKKEDGKVFWQNLAGYKRQEALRPYLSSEEDRKKGKKFARYQLGDLLLHLEKKHGEDWGKVYDEAWERIDKKVEGLSKHIKLEEERRSEDAQSKAALTDWLRAKASFVIEGLKEADKDEFCRCELKLQKWYGDLRGKPFAIEAENSILDISGFSKQYNCAFIWQKDGVKKLNLYLIINYFKGGKLRFKKIKPEAFEANRFYTVINKKSGEIVPMEVNFNFDDPNLIILPLAFGKRQGREFIWNDLLSLETGSLKLANGRVIEKTLYNRRTRQDEPALFVALTFERREVLDSSNIKPMNLFGVDRGENIPAVIALTDPEGCPLSRFKDSRGNPTHILRIGESYKEKQRTIQAKKEVEQRRAGGYSRKYASKAKNLADDMVRNTARDLLYYAVTQDAMLIFENLSRGFGRQGKRTFMAERQYTRMEDWLTAKLAYEGLPSKTYLSKTLAQYTSKTCSNCGFTITSADYDRVLEKLKKTATGWMTTINGKELKVEGQITYYNRYKRQNVVKDLSVELDRLSEESVNNDISSWTKGRSGEALSLLKKRFSHRPVQEKFVCLNCGFETHADEQAALNIARSWLFLRSQEYKKYQTNKTTGNTDKRAFVETWQSFYRKKLKEVWKPAV

SEQ ID NO: 27404 - protein, 978 aa, synthetic construct
  REGION 1..978: note = engineered CasX variant
QEIKRINKIRRRLVKDSNTKKAGKTGPMKTLLVRVMTPDLRERLENLRKKPENIPQPISNTSRANLNKLLTDYTEMKKAILHVYWEEFQKDPVGLMSRVAQPASKKIDQNKLKPEMDEKGNLTTAGFACSQCGQPLFVYKLEQVSEKGKAYTNYFGRCNVAEHEKLILLAQLKPEKDSDEAVTYSLGKFGQRALDFYSIHVTKESTHPVKPLAQIAGNRYASGPVGKALSDACMGTIASFLSKYQDIIIEHQKVVKGNQKRLESLRELAGKENLEYPSVTLPPQPHTKEGVDAYNEVIARVRMWVNLNLWQKLKLSRDDAKPLLRLKGFPSFPLVERQANEVDWWDMVCNVKKLINEKKEDGKVFWQNLAGYKRQEALRPYLSSEEDRKKGKKFARYQLGDLLLHLEKKHGEDWGKVYDEAWERIDKKVEGLSKHIKLEEERRSEDAQSKAALTDWLRAKASFVIEGLKEADKDEFCRCELKLQKWYGDLRGKPFAIEAENSILDISGFSKQYNCAFIWQKDGVKKLNLYLIINYFKGGKLRFKKIKPEAFEANRFYTVINKKSGEIVPMEVNFNFDDPNLIILPLAFGKRQGREFIWNDLLSLETGSLKLANGRVIEKTLYNRRTRQDEPALFVALTFERREVLDSSNIKPMNLFGVDRGENIPAVIALTDPEGCPLSRFKDSRGNPTHILRIGESYKEKQRSIQAKKEVEQRRAGGYSRKYASKAKNLADDMVRNTARDLLYYAVTQDAMLIFENLSRGFGRQGKRTFMAERQYTRMEDWLTAKLAYEGLPSKTYLSKTLAQYTSKTCSNCGFTITSADYDRVLEKLKKTATGWMTTINGKELKVEGQITYYNRYKRQNVVKDLSVELDRLSEESVNNDISSWTKGRSGEALSLLKKRFSHRPVQEKFVCLNCGFETHADEQAALNIARSWLFLRSQEYKKYQTNKTTGNTDKRAFVETWQSFYRKKLKEVWKPAV

SEQ ID NO: 27405 - protein, 978 aa, synthetic construct
  REGION 1..978: note = engineered CasX variant
QEIKRINKIRRRLVKDSNTKKAGKTGPMKTLLVRVMTPDLRERLENLRKKPENIPQPISNTSRANLNKLLTDYTEMKKAILHVYWEEFQKDPVGLMSRVAQPASKKIDQNKLKPEMDEKGNLTTAGFACSQCGQPLFVYKLEQVSEKGKAYTNYFGRCNVAEHEKLILLAQLKPEKDSDEAVTYSLGKFGQRALDFYSIHVTKESTHPVKPLAQIAGNRYASGPVGKALSDACMGTIASFLSKYQDIIIEHQKVVKGNQKRLESLRELAGKENLEYPSVTLPPQPHTKEGVDAYNEVIARVRMWVNLNLWQKLKLSRDDAKPLLRLKGFPSFPLVERQANEVDWWDMVCNVKKLINEKKEDGKVFWQNLAGYKRQEALRPYLSSEEDRKKGKKFARYQLGDLLLHLEKKHGEDWGKVYDEAWERIDKKVEGLSKHIKLEEERRSEDAQSKAALTDWLRAKASFVIEGLKEADKDEFCRCELKLQKWYGDLRGKPFAIEAENSILDISGFSKQYNCAFIWQKDGVKKLNLYLIINYFKGGKLRFKKIKPEAFEANRFYTVINKKSGEIVPMEVNFNFDDPNLIILPLAFGKRQGREFIWNDLLSLETGSLKLANGRVIEKTLYNRRTRQDEPALFVALTFERREVLDSSNIKPMNLFGVDRGENIPAVIALTDPEGCPLSRFKDSLGNPTHILRIGESYKEKQRTIQAKKFVEQRRAGGYSRKYASKAKNLADDMVRNTARDLLYYAVTQDAMLIFENLSRGFGRQGKRTFMAERQYTRMEDWLTAKLAYEGLPSKTYLSKTLAQYTSKTCSNCGFTITSADYDRVLEKLKKTATGWMTTINGKELKVEGQITYYNRYKRQNVVKDLSVELDRLSEESVNNDISSWTKGRSGEALSLLKKRFSHRPVQEKFVCLNCGFETHADEQAALNIARSWLFLRSQEYKKYQTNKTTGNTDKRAFVETWQSFYRKKLKEVWKPAV

SEQ ID NO: 27406 - protein, 978 aa, synthetic construct
  REGION 1..978: note = engineered CasX variant
QEIKRINKIRRRLVKDSNTKKAGKTGPMKTLLVRVMTPDLRERLENLRKKPENIPQPISNTSRANLNKLLTDYTEMKKAILHVYWEEFQKDPVGLMSRVAQPASKKIDQNKLKPEMDEKGNLTTAGFACSQCGQPLFVYKLEQVSEKGKAYTNYFGRCNVAEHEKLILLAQLKPEKDSDEAVTYSLGKFGQRALDFYSIHVTKESTHPVKPLAQIAGNRYASGPVGKALSDACMGTIASFLSKYQDIIIEHQKVVKGNQKRLESLRELAGKENLEYPSVTLPPQPHTKEGVDAYNEVIARVRMWVNLNLWQKLKLSRDDAKPLLRLKGFPSFPLVERQANEVDWWDMVCNVKKLINEKKEDGKVFWQNLAGYKRQEALRPYLSSEEDRKKGKKFARYQLGDLLLHLEKKHGEDWGKVYDEAWERIDKKVEGLSKHIKLEEERRSEDAQSKAALTDWLRAKASFVIEGLKEADKDEFCRCELKLQKWYGDLRGKPFAIEAENSILDISGFSKQYNCAFIWQKDGVKKLNLYLIINYFKGGKLRFKKIKPEAFEANRFYTVINKKSGEIVPMEVNFNFDDPNLIILPLAFGKRQGREFIWNDLLSLETGSLKLANGRVIEKTLYNRRTRQDEPALFVALTFERREVLDSSNIKPMNLFGVDRGENIPAVIALTDPEGCPLSRFKDSLGNPTHILRIGESYKEKQRTIQAKKEVEQRRAGGYSRKYASKAKNLADDMVRNTARDLLYYAVTQDAMLIFENLSRGFGRQGKRTFMAERQYTRMEDWLTAKLAYEGLPSKTYLSKTLAQYTSKTCSNCGFTITSADYDRVLEKLKKTATGWMTTINGKELKVEGQITYYNRYKRQNVVKDLSVELDRLSEESVNNDISSWTKGRSGEALSLLKKRFSHRPVQEKFVCLNCGFETHADEQAALNIARSWLFLRSQEYKKYQTNKTTGNTDKRAFVETWQSFYRKKLKEVWKPAV

SEQ ID NO: 27407 - protein, 978 aa, synthetic construct
  REGION 1..978: note = engineered CasX variant
QEIKRINKIRRRLVKDSNTKKAGKTGPMKTLLVRVMTPDLRERLENLRKKPENIPQPISNTSRANLNKLLTDYTEMKKAILHVYWEEFQKDPVGLMSRVAQPASKKIDQNKLKPEMDEKGNLTTAGFACSQCGQPLFVYKLEQVSEKGKAYTNYFGRCNVAEHEKLILLAQLKPEKDSDEAVTYSLGKFGQRALDFYSIHVTKESTHPVKPLAQIAGNRYASGPVGKALSDACMGTIASFLSKYQDIIIEHQKVVKGNQKRLESLRELAGKENLEYPSVTLPPQPHTKEGVDAYNEVIARVRMWVNLNLWQKLKLSRDDAKPLLRLKGFPSFPLVERQANEVDWWDMVCNVKKLINEKKEDGKVFWQNLAGYKRQEALRPYLSSEEDRKKGKKFARYQLGDLLLHLEKKHGEDWGKVYDEAWERIDKKVEGLSKHIKLEEERRSEDAQSKAALTDWLRAKASFVIEGLKEADKDEFCRCELKLQKWYGDLRGKPFAIEAENSILDISGFSKQYNCAFIWQKDGVKKLNLYLIINYFKGGKLRFKKIKPEAFEANRFYTVINKKSGEIVPMEVNFNFDDPNLIILPLAFGKRQGREFIWNDLLSLETGSLKLANGRVIEKTLYNRRTRQDEPALFVALTFERREVLDSSNIKPMNLFGVDRGENIPAVIALTDPEGCPLSRFKDSLGNPTHILRIGESYKEKQRSIQAKKEVEQRRAGGYSRKYASKAKNLADDMVRNTARDLLYYAVTQDAMLIFENLSRGFGRQGKRTFMAERQYTRMEDWLTAKLAYEGLPSKTYLSKTLAQYTSKTCSNCGFTITSADYDRVLEKLKKTATGWMTTINGKELKVEGQITYYNRYKRQNVVKDLSVELDRLSEESVNNDISSWTKGRSGEALSLLKKRFSHRPVQEKFVCLNCGFETHADEQAALNIARSWLFLRSQEYKKYQTNKTTGNTDKRAFVETWQSFYRKKLKEVWKPAV

SEQ ID NO: 27408 - protein, 978 aa, synthetic construct
  REGION 1..978: note = engineered CasX variant
QEIKRINKIRRRLVKDSNTKKAGKTGPMKTLLVRVMTPDLRERLENLRKKPENIPQPISNTSRANLNKLLTDYTEMKKAILHVYWEEFQKDPVGLMSRVAQPASKKIDQNKLKPEMDEKGNLTTAGFACSQCGQPLFVYKLEQVSEKGKAYTNYFGRCNVAEHEKLILLAQLKPEKDSDEAVTYSLGKFGQRALDFYSIHVTKESTHPVKPLAQIAGNRYASGPVGKALSDACMGTIASFLSKYQDIIIEHQKVVKGNQKRLESLRELAGKENLEYPSVTLPPQPHTKEGVDAYNEVIARVRMWVNLNLWQKLKLSRDDAKPLLRLKGFPSFPLVERQANEVDWWDMVCNVKKLINEKKEDGKVFWQNLAGYKRQEALRPYLSSEEDRKKGKKFARYQLGDLLLHLEKKHGEDWGKVYDEAWERIDKKVEGLSKHIKLEEERRSEDAQSKAALTDWLRAKASFVIEGLKEADKDEFCRCELKLQKWYGDLRGKPFAIEAENSILDISGFSKQYNCAFIWQKDGVKKLNLYLIINYFKGGKLRFKKIKPEAFEANRFYTVINKKSGEIVPMEVNFNFDDPNLIILPLAFGKRQGREFIWNDLLSLETGSLKLANGRVIEKTLYNRRTRQDEPALFVALTFERREVLDSSNIKPMNLFGVDRGENIPAVIALTDPEGCPLSRFKDSLGNPTHILRIGESYKCKQRTIQAKKEVEQRRAGGYSRKYASKAKNLADDMVRNTARDLLYYAVTQDAMLIFENLSRGFGRQGKRTFMAERQYTRMEDWLTAKLAYEGLPSKTYLSKTLAQYTSKTCSNCGFTITSADYDRVLEKLKKTATGWMTTINGKELKVEGQITYYNRYKRQNVVKDLSVELDRLSEESVNNDISSWTKGRSGEALSLLKKRFSHRPVQEKFVCLNCGFETHADEQAALNIARSWLFLRSQEYKKYQTNKTTGNTDKRAFVETWQSFYRKKLKEVWKPAV

SEQ ID NO: 27409 - protein, 978 aa, synthetic construct
  REGION 1..978: note = engineered CasX variant
QEIKRINKIRRRLVKDSNTKKAGKTGPMKTLLVRVMTPDLRERLENLRKKPENIPQPISNTSRANLNKLLTDYTEMKKAILHVYWEEFQKDPVGLMSRVAQPASKKIDQNKLKPEMDEKGNLTTAGFACSQCGQPLFVYKLEQVSEKGKAYTNYFGRCNVAEHEKLILLAQLKPEKDSDEAVTYSLGKFGQRALDFYSIHVTKESTHPVKPLAQIAGNRYASGPVGKALSDACMGTIASFLSKYQDIIIEHQKVVKGNQKRLESLRELAGKENLEYPSVTLPPQPHTKEGVDAYNEVIARVRMWVNLNLWQKLKLSRDDAKPLLRLKGFPSFPLVERQANEVDWWDMVCNVKKLINEKKEDGKVFWQNLAGYKRQEALRPYLSSEEDRKKGKKFARYQLGDLLLHLEKKHGEDWGKVYDEAWERIDKKVEGLSKHIKLEEERRSEDAQSKAALTDWLRAKASFVIEGLKEADKDEFCRCELKLQKWYGDLRGKPFAIEAENSILDISGFSKQYNCAFIWQKDGVKKLNLYLIINYFKGGKLRFKKIKPEAFEANRFYTVINKKSGEIVPMEVNFNFDDPNLIILPLAFGKRQGREFIWNDLLSLETGSLKLANGRVIEKTLYNRRTRQDEPALFVALTFERREVLDSSNIKPMNLFGVDRGENIPAVIALTDPEGCPLSRFKDSHGNPTHILRIGESYKEKQRTIQAKKEVEQRRAGGYSRKYASKAKNLADDMVRNTARDLLYYAVTQDAMLIFENLSRGFGRQGKRTFMAERQYTRMEDWLTAKLAYEGLPSKTYLSKTLAQYTSKTCSNCGFTITSADYDRVLEKLKKTATGWMTTINGKELKVEGQITYYNRYKRQNVVKDLSVELDRLSEESVNNDISSWTKGRSGEALSLLKKRFSHRPVQEKFVCLNCGFETHADEQAALNIARSWLFLRSQEYKKYQTNKTTGNTDKRAFVETWQSFYRKKLKEVWKPAV

SEQ ID NO: 27410 - protein, 978 aa, synthetic construct
  REGION 1..978: note = engineered CasX variant
QEIKRINKIRRRLVKDSNTKKAGKTGPMKTLLVRVMTPDLRERLENLRKKPENIPQPISNTSRANLNKLLTDYTEMKKAILHVYWEEFQKDPVGLMSRVAQPASKKIDQNKLKPEMDEKGNLTTAGFACSQCGQPLFVYKLEQVSEKGKAYTNYFGRCNVAEHEKLILLAQLKPEKDSDEAVTYSLGKFGQRALDFYSIHVTKESTHPVKPLAQIAGNRYASGPVGKALSDACMGTIASFLSKYQDIIIEHQKVVKGNQKRLESLRELAGKENLEYPSVTLPPQPHTKEGVDAYNEVIARVRMWVNLNLWQKLKLSRDDAKPLLRLKGFPSFPLVERQANEVDWWDMVCNVKKLINEKKEDGKVFWQNLAGYKRQEALRPYLSSEEDRKKGKKFARYQLGDLLLHLEKKHGEDWGKVYDEAWERIDKKVEGLSKHIKLEEERRSEDAQSKAALTDWLRAKASFVIEGLKEADKDEFCRCELKLQKWYGDLRGKPFAIEAENSILDISGFSKQYNCAFIWQKDGVKKLNLYLIINYFKGGKLRFKKIKPEAFEANRFYTVINKKSGEIVPMEVNFNFDDPNLIILPLAFGKRQGREFIWNDLLSLETGSLKLANGRVIEKTLYNRRTRQDEPALFVALTFERREVLDSSNIKPMNLFGVDRGENIPAVIALTDPEGCPLSRFKDSHGNPTHILRIGESYKCKQRTIQAKKEVEQRRAGGYSRKYASKAKNLADDMVRNTARDLLYYAVTQDAMLIFENLSRGFGRQGKRTFMAERQYTRMEDWLTAKLAYEGLPSKTYLSKTLAQYTSKTCSNCGFTITSADYDRVLEKLKKTATGWMTTINGKELKVEGQITYYNRYKRQNVVKDLSVELDRLSEESVNNDISSWTKGRSGEALSLLKKRFSHRPVQEKFVCLNCGFETHADEQAALNIARSWLFLRSQEYKKYQTNKTTGNTDKRAFVETWQSFYRKKLKEVWKPAV

SEQ ID NO: 27411 - protein, 978 aa, synthetic construct
  REGION 1..978: note = engineered CasX variant
QEIKRINKIRRRLVKDSNTKKAGKTGPMKTLLVRVMTPDLRERLENLRKKPENIPQPISNTSRANLNKLLTDYTEMKKAILHVYWEEFQKDPVGLMSRVAQPASKKIDQNKLKPEMDEKGNLTTAGFACSQCGQPLFVYKLEQVSEKGKAYTNYFGRCNVAEHEKLILLAQLKPEKDSDEAVTYSLGKFGQRALDFYSIHVTKESTHPVKPLAQIAGNRYASGPVGKALSDACMGTIASFLSKYQDIIIEHQKVVKGNQKRLESLRELAGKENLEYPSVTLPPQPHTKEGVDAYNEVIARVRMWVNLNLWQKLKLSRDDAKPLLRLKGFPSFPLVERQANEVDWWDMVCNVKKLINEKKEDGKVFWQNLAGYKRQEALRPYLSSEEDRKKGKKFARYQLGDLLLHLEKKHGEDWGKVYDEAWERIDKKVEGLSKHIKLEEERRSEDAQSKAALTDWLRAKASFVIEGLKEADKDEFCRCELKLQKWYGDLRGKPFAIEAENSILDISGFSKQYNCAFIWQKDGVKKLNLYLIINYFKGGKLRFKKIKPEAFEANRFYTVINKKSGEIVPMEVNFNFDDPNLIILPLAFGKRQGREFIWNDLLSLETGSLKLANGRVIEKTLYNRRTRQDEPALFVALTFERREVLDSSNIKPMNLCGVDRGENIPAVIALTDPEGCPLSRFKDSSGNPTHILRIGESYKEKQRTIQAKKEVEQRRAGGYSRKYASKAKNLADDMVRNTARDLLYYAVTQDAMLIFENLSRGFGRQGKRTFMAERQYTRMEDWLTAKLAYEGLPSKTYLSKTLAQYTSKTCSNCGFTITSADYDRVLEKLKKTATGWMTTINGKELKVEGQITYYNRYKRQNVVKDLSVELDRLSEESVNNDISSWTKGRSGEALSLLKKRFSHRPVQEKFVCLNCGFETHADEQAALNIARSWLFLRSQEYKKYQTNKTTGNTDKRAFVETWQSFYRKKLKEVWKPAV

SEQ ID NO: 27412 - protein, 978 aa, synthetic construct
  REGION 1..978: note = engineered CasX variant
QEIKRINKIRRRLVKDSNTKKAGKTGPMKTLLVRVMTPDLRERLENLRKKPENIPQPISNTSRANLNKLLTDYTEMKKAILHVYWEEFQKDPVGLMSRVAQPASKKIDQNKLKPEMDEKGNLTTAGFACSQCGQPLFVYKLEQVSEKGKAYTNYFGRCNVAEHEKLILLAQLKPEKDSDEAVTYSLGKFGQRALDFYSIHVTKESTHPVKPLAQIAGNRYASGPVGKALSDACMGTIASFLSKYQDIIIEHQKVVKGNQKRLESLRELAGKENLEYPSVTLPPQPHTKEGVDAYNEVIARVRMWVNLNLWQKLKLSRDDAKPLLRLKGFPSFPLVERQANEVDWWDMVCNVKKLINEKKEDGKVFWQNLAGYKRQEALRPYLSSEEDRKKGKKFARYQLGDLLLHLEKKHGEDWGKVYDEAWERIDKKVEGLSKHIKLEEERRSEDAQSKAALTDWLRAKASFVIEGLKEADKDEFCRCELKLQKWYGDLRGKPFAIEAENSILDISGFSKQYNCAFIWQKDGVKKLNLYLIINYFKGGKLRFKKIKPEAFEANRFYTVINKKSGEIVPMEVNFNFDDPNLIILPLAFGKRQGREFIWNDLLSLETGSLKLANGRVIEKTLYNRRTRQDEPALFVALTFERREVLDSSNIKPMNLCGVDRGENIPAVIALTDPEGCPLSRFKDSLGNPTHILRIGESYKEKQRTIQANKEVYQRRAGGYSRKYASKAKNLADDMVRNTARDLLYYAVTQDAMLIFENLSRGFGRQGKRTFMAERQYTRMEDWLTAKLAYEGLPSKTYLSKTLAQYTSKTCSNCGFTITSADYDRVLEKLKKTATGWMTTINGKELKVEGQITYYNRYKRQNVVKDLSVELDRLSEESVNNDISSWTKGRSGEALSLLKKRFSHRPVQEKFVCLNCGFETHADEQAALNIARSWLFLRSQEYKKYQTNKTTGNTDKRAFVETWQSFYRKKLKEVWKPAV

SEQ ID NO: 27413 - protein, 978 aa, synthetic construct
  REGION 1..978: note = engineered CasX variant
QEIKRINKIRRRLVKDSNTKKAGKTGPMKTLLVRVMTPDLRERLENLRKKPENIPQPISNTSRANLNKLLTDYTEMKKAILHVYWEEFQKDPVGLMSRVAQPASKKIDQNKLKPEMDEKGNLTTAGFACSQCGQPLFVYKLEQVSEKGKAYTNYFGRCNVAEHEKLILLAQLKPEKDSDEAVTYSLGKFGQRALDFYSIHVTKESTHPVKPLAQIAGNRYASGPVGKALSDACMGTIASFLSKYQDIIIEHQKVVKGNQKRLESLRELAGKENLEYPSVTLPPQPHTKEGVDAYNEVIARVRMWVNLNLWQKLKLSRDDAKPLLRLKGFPSFPLVERQANEVDWWDMVCNVKKLINEKKEDGKVFWQNLAGYKRQEALRPYLSSEEDRKKGKKFARYQLGDLLLHLEKKHGEDWGKVYDEAWERIDKKVEGLSKHIKLEEERRSEDAQSKAALTDWLRAKASFVIEGLKEADKDEFCRCELKLQKWYGDLRGKPFAIEAENSILDISGFSKQYNCAFIWQKDGVKKLNLYLIINYFKGGKLRFKKIKPEAFEANRFYTVINKKSGEIVPMEVNFNFDDPNLIILPLAFGKRQGREFIWNDLLSLETGSLKLANGRVIEKTLYNRRTRQDEPALFVALTFERREVLDSSNIKPMNLCGVDRGENIPAVIALTDPEGCPLSRFKDSLGNPTHILRIGESYKEKQRTIQANKEVEQRRAGGYSRKYASKAKNLADDMVRNTARDLLYYAVTQDAMLIFENLSRGFGRQGKRTFMAERQYTRMEDWLTAKLAYEGLPSKTYLSKTLAQYTSKTCSNCGFTITSADYDRVLEKLKKTATGWMTTINGKELKVEGQITYYNRYKRQNVVKDLSVELDRLSEESVNNDISSWTKGRSGEALSLLKKRFSHRPVQEKFVCLNCGFETHADEQAALNIARSWLFLRSQEYKKYQTNKTTGNTDKRAFVETWQSFYRKKLKEVWKPAV

SEQ ID NO: 27414 - protein, 978 aa, synthetic construct
  REGION 1..978: note = engineered CasX variant
QEIKRINKIRRRLVKDSNTKKAGKTGPMKTLLVRVMTPDLRERLENLRKKPENIPQPISNTSRANLNKLLTDYTEMKKAILHVYWEEFQKDPVGLMSRVAQPASKKIDQNKLKPEMDEKGNLTTAGFACSQCGQPLFVYKLEQVSEKGKAYTNYFGRCNVAEHEKLILLAQLKPEKDSDEAVTYSLGKFGQRALDFYSIHVTKESTHPVKPLAQIAGNRYASGPVGKALSDACMGTIASFLSKYQDIIIEHQKVVKGNQKRLESLRELAGKENLEYPSVTLPPQPHTKEGVDAYNEVIARVRMWVNLNLWQKLKLSRDDAKPLLRLKGFPSFPLVERQANEVDWWDMVCNVKKLINEKKEDGKVFWQNLAGYKRQEALRPYLSSEEDRKKGKKFARYQLGDLLLHLEKKHGEDWGKVYDEAWERIDKKVEGLSKHIKLEEERRSEDAQSKAALTDWLRAKASFVIEGLKEADKDEFCRCELKLQKWYGDLRGKPFAIEAENSILDISGFSKQYNCAFIWQKDGVKKLNLYLIINYFKGGKLRFKKIKPEAFEANRFYTVINKKSGEIVPMEVNFNFDDPNLIILPLAFGKRQGREFIWNDLLSLETGSLKLANGRVIEKTLYNRRTRQDEPALFVALTFERREVLDSSNIKPMNLCGVDRGENIPAVIALTDPEGCPLSRFKDSLGNPTHILRIGESYKEKQRTIQAKKTVEQRRAGGYSRKYASKAKNLADDMVRNTARDLLYYAVTQDAMLIFENLSRGFGRQGKRTFMAERQYTRMEDWLTAKLAYEGLPSKTYLSKTLAQYTSKTCSNCGFTITSADYDRVLEKLKKTATGWMTTINGKELKVEGQITYYNRYKRQNVVKDLSVELDRLSEESVNNDISSWTKGRSGEALSLLKKRFSHRPVQEKFVCLNCGFETHADEQAALNIARSWLFLRSQEYKKYQTNKTTGNTDKRAFVETWQSFYRKKLKEVWKPAV

SEQ ID NO: 27415 - protein, 978 aa, synthetic construct
  REGION 1..978: note = engineered CasX variant
QEIKRINKIRRRLVKDSNTKKAGKTGPMKTLLVRVMTPDLRERLENLRKKPENIPQPISNTSRANLNKLLTDYTEMKKAILHVYWEEFQKDPVGLMSRVAQPASKKIDQNKLKPEMDEKGNLTTAGFACSQCGQPLFVYKLEQVSEKGKAYTNYFGRCNVAEHEKLILLAQLKPEKDSDEAVTYSLGKFGQRALDFYSIHVTKESTHPVKPLAQIAGNRYASGPVGKALSDACMGTIASFLSKYQDIIIEHQKVVKGNQKRLESLRELAGKENLEYPSVTLPPQPHTKEGVDAYNEVIARVRMWVNLNLWQKLKLSRDDAKPLLRLKGFPSFPLVERQANEVDWWDMVCNVKKLINEKKEDGKVFWQNLAGYKRQEALRPYLSSEEDRKKGKKFARYQLGDLLLHLEKKHGEDWGKVYDEAWERIDKKVEGLSKHIKLEEERRSEDAQSKAALTDWLRAKASFVIEGLKEADKDEFCRCELKLQKWYGDLRGKPFAIEAENSILDISGFSKQYNCAFIWQKDGVKKLNLYLIINYFKGGKLRFKKIKPEAFEANRFYTVINKKSGEIVPMEVNFNFDDPNLIILPLAFGKRQGREFIWNDLLSLETGSLKLANGRVIEKTLYNRRTRQDEPALFVALTFERREVLDSSNIKPMNLCGVDRGENIPAVIALTDPEGCPLSRFKDSLGNPTHILRIGESYKEKQRTIQAKKTVEQRNAGGYSRKYASKAKNLADDMVRNTARDLLYYAVTQDAMLIFENLSRGFGRQGKRTFMAERQYTRMEDWLTAKLAYEGLPSKTYLSKTLAQYTSKTCSNCGFTITSADYDRVLEKLKKTATGWMTTINGKELKVEGQITYYNRYKRQNVVKDLSVELDRLSEESVNNDISSWTKGRSGEALSLLKKRFSHRPVQEKFVCLNCGFETHADEQAALNIARSWLFLRSQEYKKYQTNKTTGNTDKRAFVETWQSFYRKKLKEVWKPAV

SEQ ID NO: 27416 - protein, 978 aa, synthetic construct
  REGION 1..978: note = engineered CasX variant
QEIKRINKIRRRLVKDSNTKKAGKTGPMKTLLVRVMTPDLRERLENLRKKPENIPQPISNTSRANLNKLLTDYTEMKKAILHVYWEEFQKDPVGLMSRVAQPASKKIDQNKLKPEMDEKGNLTTAGFACSQCGQPLFVYKLEQVSEKGKAYTNYFGRCNVAEHEKLILLAQLKPEKDSDEAVTYSLGKFGQRALDFYSIHVTKESTHPVKPLAQIAGNRYASGPVGKALSDACMGTIASFLSKYQDIIIEHQKVVKGNQKRLESLRELAGKENLEYPSVTLPPQPHTKEGVDAYNEVIARVRMWVNLNLWQKLKLSRDDAKPLLRLKGFPSFPLVERQANEVDWWDMVCNVKKLINEKKEDGKVFWQNLAGYKRQEALRPYLSSEEDRKKGKKFARYQLGDLLLHLEKKHGEDWGKVYDEAWERIDKKVEGLSKHIKLEEERRSEDAQSKAALTDWLRAKASFVIEGLKEADKDEFCRCELKLQKWYGDLRGKPFAIEAENSILDISGFSKQYNCAFIWQKDGVKKLNLYLIINYFKGGKLRFKKIKPEAFEANRFYTVINKKSGEIVPMEVNFNFDDPNLIILPLAFGKRQGREFIWNDLLSLETGSLKLANGRVIEKTLYNRRTRQDEPALFVALTFERREVLDSSNIKPMNLCGVDRGENIPAVIALTDPEGCPLSRFKDSLGNPTHILRIGESYKEKQRTIQAKKEVYQRRAGGYSRKYASKAKNLADDMVRNTARDLLYYAVTQDAMLIFENLSRGFGRQGKRTFMAERQYTRMEDWLTAKLAYEGLPSKTYLSKTLAQYTSKTCSNCGFTITSADYDRVLEKLKKTATGWMTTINGKELKVEGQITYYNRYKRQNVVKDLSVELDRLSEESVNNDISSWTKGRSGEALSLLKKRFSHRPVQEKFVCLNCGFETHADEQAALNIARSWLFLRSQEYKKYQTNKTTGNTDKRAFVETWQSFYRKKLKEVWKPAV

SEQ ID NO: 27417 - protein, 978 aa, synthetic construct
  REGION 1..978: note = engineered CasX variant
QEIKRINKIRRRLVKDSNTKKAGKTGPMKTLLVRVMTPDLRERLENLRKKPENIPQPISNTSRANLNKLLTDYTEMKKAILHVYWEEFQKDPVGLMSRVAQPASKKIDQNKLKPEMDEKGNLTTAGFACSQCGQPLFVYKLEQVSEKGKAYTNYFGRCNVAEHEKLILLAQLKPEKDSDEAVTYSLGKFGQRALDFYSIHVTKESTHPVKPLAQIAGNRYASGPVGKALSDACMGTIASFLSKYQDIIIEHQKVVKGNQKRLESLRELAGKENLEYPSVTLPPQPHTKEGVDAYNEVIARVRMWVNLNLWQKLKLSRDDAKPLLRLKGFPSFPLVERQANEVDWWDMVCNVKKLINEKKEDGKVFWQNLAGYKRQEALRPYLSSEEDRKKGKKFARYQLGDLLLHLEKKHGEDWGKVYDEAWERIDKKVEGLSKHIKLEEERRSEDAQSKAALTDWLRAKASFVIEGLKEADKDEFCRCELKLQKWYGDLRGKPFAIEAENSILDISGFSKQYNCAFIWQKDGVKKLNLYLIINYFKGGKLRFKKIKPEAFEANRFYTVINKKSGEIVPMEVNFNFDDPNLIILPLAFGKRQGREFIWNDLLSLETGSLKLANGRVIEKTLYNRRTRQDEPALFVALTFERREVLDSSNIKPMNLCGVDRGENIPAVIALTDPEGCPLSRFKDSLGNPTHILRIGESYKEKQRTIQAKKEVEQRRAGGYSRKYASKAKNLADDMVRNTARDLLYYAVTQDAMLIFENLSRGFGRQGKRTFMAERQYTRMEDWLTAKLAYEGLPSKTYLSKTLAQYTSKTCSNCGFTITSADYDRVLEKLKKTATGWMTTINGKELKVEGQITYYNRYKRQNVVKDLSVELDRLSEESVNNDISSWTKGRSGEALSLLKKRFSHRPVQEKFVCLNCGFETHADEQAALNIARSWLFLRSQEYKKYQTNKTTGNTDKRAFVETWQSFYRKKLKEVWKPAV

SEQ ID NO: 27418 - protein, 978 aa, synthetic construct
  REGION 1..978: note = engineered CasX variant
QEIKRINKIRRRLVKDSNTKKAGKTGPMKTLLVRVMTPDLRERLENLRKKPENIPQPISNTSRANLNKLLTDYTEMKKAILHVYWEEFQKDPVGLMSRVAQPASKKIDQNKLKPEMDEKGNLTTAGFACSQCGQPLFVYKLEQVSEKGKAYTNYFGRCNVAEHEKLILLAQLKPEKDSDEAVTYSLGKFGQRALDFYSIHVTKESTHPVKPLAQIAGNRYASGPVGKALSDACMGTIASFLSKYQDIIIEHQKVVKGNQKRLESLRELAGKENLEYPSVTLPPQPHTKEGVDAYNEVIARVRMWVNLNLWQKLKLSRDDAKPLLRLKGFPSFPLVERQANEVDWWDMVCNVKKLINEKKEDGKVFWQNLAGYKRQEALRPYLSSEEDRKKGKKFARYQLGDLLLHLEKKHGEDWGKVYDEAWERIDKKVEGLSKHIKLEEERRSEDAQSKAALTDWLRAKASFVIEGLKEADKDEFCRCELKLQKWYGDLRGKPFAIEAENSILDISGFSKQYNCAFIWQKDGVKKLNLYLIINYFKGGKLRFKKIKPEAFEANRFYTVINKKSGEIVPMEVNFNFDDPNLIILPLAFGKRQGREFIWNDLLSLETGSLKLANGRVIEKTLYNRRTRQDEPALFVALTFERREVLDSSNIKPMNLCGVDRGENIPAVIALTDPEGCPLSRFKDSLGNPTHILRIGESYKEKQRTIQAKKEVEQRNAGGYSRKYASKAKNLADDMVRNTARDLLYYAVTQDAMLIFENLSRGFGRQGKRTFMAERQYTRMEDWLTAKLAYEGLPSKTYLSKTLAQYTSKTCSNCGFTITSADYDRVLEKLKKTATGWMTTINGKELKVEGQITYYNRYKRQNVVKDLSVELDRLSEESVNNDISSWTKGRSGEALSLLKKRFSHRPVQEKFVCLNCGFETHADEQAALNIARSWLFLRSQEYKKYQTNKTTGNTDKRAFVETWQSFYRKKLKEVWKPAV

SEQ ID NO: 27419 - protein, 978 aa, synthetic construct
  REGION 1..978: note = engineered CasX variant
QEIKRINKIRRRLVKDSNTKKAGKTGPMKTLLVRVMTPDLRERLENLRKKPENIPQPISNTSRANLNKLLTDYTEMKKAILHVYWEEFQKDPVGLMSRVAQPASKKIDQNKLKPEMDEKGNLTTAGFACSQCGQPLFVYKLEQVSEKGKAYTNYFGRCNVAEHEKLILLAQLKPEKDSDEAVTYSLGKFGQRALDFYSIHVTKESTHPVKPLAQIAGNRYASGPVGKALSDACMGTIASFLSKYQDIIIEHQKVVKGNQKRLESLRELAGKENLEYPSVTLPPQPHTKEGVDAYNEVIARVRMWVNLNLWQKLKLSRDDAKPLLRLKGFPSFPLVERQANEVDWWDMVCNVKKLINEKKEDGKVFWQNLAGYKRQEALRPYLSSEEDRKKGKKFARYQLGDLLLHLEKKHGEDWGKVYDEAWERIDKKVEGLSKHIKLEEERRSEDAQSKAALTDWLRAKASFVIEGLKEADKDEFCRCELKLQKWYGDLRGKPFAIEAENSILDISGFSKQYNCAFIWQKDGVKKLNLYLIINYFKGGKLRFKKIKPEAFEANRFYTVINKKSGEIVPMEVNFNFDDPNLIILPLAFGKRQGREFIWNDLLSLETGSLKLANGRVIEKTLYNRRTRQDEPALFVALTFERREVLDSSNIKPMNLCGVDRGENIPAVIALTDPEGCPLFRFKDSSGNPTHILRIGESYKEKQRTIQAKKEVEQRRAGGYSRKYASKAKNLADDMVRNTARDLLYYAVTQDAMLIFENLSRGFGRQGKRTFMAERQYTRMEDWLTAKLAYEGLPSKTYLSKTLAQYTSKTCSNCGFTITSADYDRVLEKLKKTATGWMTTINGKELKVEGQITYYNRYKRQNVVKDLSVELDRLSEESVNNDISSWTKGRSGEALSLLKKRFSHRPVQEKFVCLNCGFETHADEQAALNIARSWLFLRSQEYKKYQTNKTTGNTDKRAFVETWQSFYRKKLKEVWKPAV

SEQ ID NO: 27420 - protein, 978 aa, synthetic construct
  REGION 1..978: note = engineered CasX variant
QEIKRINKIRRRLVKDSNTKKAGKTGPMKTLLVRVMTPDLRERLENLRKKPENIPQPISNTSRANLNKLLTDYTEMKKAILHVYWEEFQKDPVGLMSRVAQPASKKIDQNKLKPEMDEKGNLTTAGFACSQCGQPLFVYKLEQVSEKGKAYTNYFGRCNVAEHEKLILLAQLKPEKDSDEAVTYSLGKFGQRALDFYSIHVTKESTHPVKPLAQIAGNRYASGPVGKALSDACMGTIASFLSKYQDIIIEHQKVVKGNQKRLESLRELAGKENLEYPSVTLPPQPHTKEGVDAYNEVIARVRMWVNLNLWQKLKLSRDDAKPLLRLKGFPSFPLVERQANEVDWWDMVCNVKKLINEKKEDGKVFWQNLAGYKRQEALRPYLSSEEDRKKGKKFARYQLGDLLLHLEKKHGEDWGKVYDEAWERIDKKVEGLSKHIKLEEERRSEDAQSKAALTDWLRAKASFVIEGLKEADKDEFCRCELKLQKWYGDLRGKPFAIEAENSILDISGFSKQYNCAFIWQKDGVKKLNLYLIINYFKGGKLRFKKIKPEAFEANRFYTVINKKSGEIVPMEVNFNFDDPNLIILPLAFGKRQGREFIWNDLLSLETGSLKLANGRVIEKTLYNRRTRQDEPALFVALTFERREVLDSSNIKPMNLCGVDRGENIPAVIALTDPEGCPLFRFKDSLGNPTHILRIGESYKEKQRTIQAKKEVEQRRAGGYSRKYASKAKNLADDMVRNTARDLLYYAVTQDAMLIFENLSRGFGRQGKRTFMAERQYTRMEDWLTAKLAYEGLPSKTYLSKTLAQYTSKTCSNCGFTITSADYDRVLEKLKKTATGWMTTINGKELKVEGQITYYNRYKRQNVVKDLSVELDRLSEESVNNDISSWTKGRSGEALSLLKKRFSHRPVQEKFVCLNCGFETHADEQAALNIARSWLFLRSQEYKKYQTNKTTGNTDKRAFVETWQSFYRKKLKEVWKPAV

SEQ ID NO: 27421 - protein, 978 aa, synthetic construct
  REGION 1..978: note = engineered CasX variant
QEIKRINKIRRRLVKDSNTKKAGKTGPMKTLLVRVMTPDLRERLENLRKKPENIPQPISNTSRANLNKLLTDYTEMKKAILHVYWEEFQKDPVGLMSRVAQPASKKIDQNKLKPEMDEKGNLTTAGFACSQCGQPLFVYKLEQVSEKGKAYTNYFGRCNVAEHEKLILLAQLKPEKDSDEAVTYSLGKFGQRALDFYSIHVTKESTHPVKPLAQIAGNRYASGPVGKALSDACMGTIASFLSKYQDIIIEHQKVVKGNQKRLESLRELAGKENLEYPSVTLPPQPHTKEGVDAYNEVIARVRMWVNLNLWQKLKLSRDDAKPLLRLKGFPSFPLVERQANEVDWWDMVCNVKKLINEKKEDGKVFWQNLAGYKRQEALRPYLSSEEDRKKGKKFARYQLGDLLLHLEKKHGEDWGKVYDEAWERIDKKVEGLSKHIKLEEERRSEDAQSKAALTDWLRAKASFVIEGLKEADKDEFCRCELKLQKWYGDLRGKPFAIEAENSILDISGFSKQYNCAFIWQKDGVKKLNLYLIINYFKGGKLRFKKIKPEAFEANRFYTVINKKSGEIVPMEVNFNFDDPNLIILPLAFGKRQGREFIWNDLLSLETGSLKLANGRVIEKTLYNRRTRQDEPALFVALTFERREVLDSSNIKPMNLCAVDRGENIPAVIALTDPEGCPLSRFKDSLGNPTHILRIGESYKEKQRTIQAKKEVEQRRAGGYSRKYASKAKNLADDMVRNTARDLLYYAVTQDAMLIFENLSRGFGRQGKRTFMAERQYTRMEDWLTAKLAYEGLPSKTYLSKTLAQYTSKTCSNCGFTITSADYDRVLEKLKKTATGWMTTINGKELKVEGQITYYNRYKRQNVVKDLSVELDRLSEESVNNDISSWTKGRSGEALSLLKKRFSHRPVQEKFVCLNCGFETHADEQAALNIARSWLFLRSQEYKKYQTNKTTGNTDKRAFVETWQSFYRKKLKEVWKPAV

SEQ ID NO: 27422 - protein, 978 aa, synthetic construct
  REGION 1..978: note = engineered CasX variant
QEIKRINKIRRRLVKDSNTKKAGKTGPMKTLLVRVMTPDLRERLENLRKKPENIPQPISNTSRANLNKLLTDYTEMKKAILHVYWEEFQKDPVGLMSRVAQPASKKIDQNKLKPEMDEKGNLTTAGFACSQCGQPLFVYKLEQVSEKGKAYTNYFGRCNVAEHEKLILLAQLKPEKDSDEAVTYSLGKFGQRALDFYSIHVTKESTHPVKPLAQIAGNRYASGPVGKALSDACMGTIASFLSKYQDIIIEHQKVVKGNQKRLESLRELAGKENLEYPSVTLPPQPHTKEGVDAYNEVIARVRMWVNLNLWQKLKLSRDDAKPLLRLKGFPSFPLVERQANEVDWWDMVCNVKKLINEKKEDGKVFWQNLAGYKRQEALRPYLSSEEDRKKGKKFARYQLGDLLLHLEKKHGEDWGKVYDEAWERIDKKVEGLSKHIKLEEERRSEDAQSKAALTDWLRAKASFVIEGLKEADKDEFCRCELKLQKWYGDLRGKPFAIEAENSILDISGFSKQYNCAFIWQKDGVKKLNLYLIINYFKGGKLRFKKIKPEAFEANRFYTVINKKSGEIVPMEVNFNFDDPNLIILPLAFGKRQGREFIWNDLLSLETGSLKLANGRVIEKTLYNRRTRQDEPALFVALTFERREVLDSSNIKPMNLAGVDRGENIPAVIALTDPEGCPLSYFKDSLGNPTHILRIGESYKEKQRTIQAKKEVEQRRAGGYSRKYASKAKNLADDMVRNTARDLLYYAVTQDAMLIFENLSRGFGRQGKRTFMAERQYTRMEDWLTAKLAYEGLPSKTYLSKTLAQYTSKTCSNCGFTITSADYDRVLEKLKKTATGWMTTINGKELKVEGQITYYNRYKRQNVVKDLSVELDRLSEESVNNDISSWTKGRSGEALSLLKKRFSHRPVQEKFVCLNCGFETHADEQAALNIARSWLFLRSQEYKKYQTNKTTGNTDKRAFVETWQSFYRKKLKEVWKPAV

SEQ ID NO: 27423 - protein, 978 aa, synthetic construct
  REGION 1..978: note = engineered CasX variant
QEIKRINKIRRRLVKDSNTKKAGKTGPMKTLLVRVMTPDLRERLENLRKKPENIPQPISNTSRANLNKLLTDYTEMKKAILHVYWEEFQKDPVGLMSRVAQPASKKIDQNKLKPEMDEKGNLTTAGFACSQCGQPLFVYKLEQVSEKGKAYTNYFGRCNVAEHEKLILLAQLKPEKDSDEAVTYSLGKFGQRALDFYSIHVTKESTHPVKPLAQIAGNRYASGPVGKALSDACMGTIASFLSKYQDIIIEHQKVVKGNQKRLESLRELAGKENLEYPSVTLPPQPHTKEGVDAYNEVIARVRMWVNLNLWQKLKLSRDDAKPLLRLKGFPSFPLVERQANEVDWWDMVCNVKKLINEKKEDGKVFWQNLAGYKRQEALRPYLSSEEDRKKGKKFARYQLGDLLLHLEKKHGEDWGKVYDEAWERIDKKVEGLSKHIKLEEERRSEDAQSKAALTDWLRAKASFVIEGLKEADKDEFCRCELKLQKWYGDLRGKPFAIEAENSILDISGFSKQYNCAFIWQKDGVKKLNLYLIINYFKGGKLRFKKIKPEAFEANRFYTVINKKSGEIVPMEVNFNFDDPNLIILPLAFGKRQGREFIWNDLLSLETGSLKLANGRVIEKTLYNRRTRQDEPALFVALTFERREVLDSSNIKPMNLAGVDRGENIPAVIALTDPEGCPLSYFKDSLGNPTHILRIGESYKEKQRQIQAKKEVEQRRAGGYSRKYASKAKNLADDMVRNTARDLLYYAVTQDAMLIFENLSRGFGRQGKRTFMAERQYTRMEDWLTAKLAYEGLPSKTYLSKTLAQYTSKTCSNCGFTITSADYDRVLEKLKKTATGWMTTINGKELKVEGQITYYNRYKRQNVVKDLSVELDRLSEESVNNDISSWTKGRSGEALSLLKKRFSHRPVQEKFVCLNCGFETHADEQAALNIARSWLFLRSQEYKKYQTNKTTGNTDKRAFVETWQSFYRKKLKEVWKPAV

SEQ ID NO: 27424 - protein, 978 aa, synthetic construct
  REGION 1..978: note = engineered CasX variant
QEIKRINKIRRRLVKDSNTKKAGKTGPMKTLLVRVMTPDLRERLENLRKKPENIPQPISNTSRANLNKLLTDYTEMKKAILHVYWEEFQKDPVGLMSRVAQPASKKIDQNKLKPEMDEKGNLTTAGFACSQCGQPLFVYKLEQVSEKGKAYTNYFGRCNVAEHEKLILLAQLKPEKDSDEAVTYSLGKFGQRALDFYSIHVTKESTHPVKPLAQIAGNRYASGPVGKALSDACMGTIASFLSKYQDIIIEHQKVVKGNQKRLESLRELAGKENLEYPSVTLPPQPHTKEGVDAYNEVIARVRMWVNLNLWQKLKLSRDDAKPLLRLKGFPSFPLVERQANEVDWWDMVCNVKKLINEKKEDGKVFWQNLAGYKRQEALRPYLSSEEDRKKGKKFARYQLGDLLLHLEKKHGEDWGKVYDEAWERIDKKVEGLSKHIKLEEERRSEDAQSKAALTDWLRAKASFVIEGLKEADKDEFCRCELKLQKWYGDLRGKPFAIEAENSILDISGFSKQYNCAFIWQKDGVKKLNLYLIINYFKGGKLRFKKIKPEAFEANRFYTVINKKSGEIVPMEVNFNFDDPNLIILPLAFGKRQGREFIWNDLLSLETGSLKLANGRVIEKTLYNRRTRQDEPALFVALTFERREVLDSSNIKPMNLAGVDRGENIPAVIALTDPEGCPLSVFKDSLGNPTHILRIGESYKEKQRTIQAKKEVEQRRAGGYSRKYASKAKNLADDMVRNTARDLLYYAVTQDAMLIFENLSRGFGRQGKRTFMAERQYTRMEDWLTAKLAYEGLPSKTYLSKTLAQYTSKTCSNCGFTITSADYDRVLEKLKKTATGWMTTINGKELKVEGQITYYNRYKRQNVVKDLSVELDRLSEESVNNDISSWTKGRSGEALSLLKKRFSHRPVQEKFVCLNCGFETHADEQAALNIARSWLFLRSQEYKKYQTNKTTGNTDKRAFVETWQSFYRKKLKEVWKPAV

SEQ ID NO: 27425 - protein, 978 aa, synthetic construct
  REGION 1..978: note = engineered CasX variant
QEIKRINKIRRRLVKDSNTKKAGKTGPMKTLLVRVMTPDLRERLENLRKKPENIPQPISNTSRANLNKLLTDYTEMKKAILHVYWEEFQKDPVGLMSRVAQPASKKIDQNKLKPEMDEKGNLTTAGFACSQCGQPLFVYKLEQVSEKGKAYTNYFGRCNVAEHEKLILLAQLKPEKDSDEAVTYSLGKFGQRALDFYSIHVTKESTHPVKPLAQIAGNRYASGPVGKALSDACMGTIASFLSKYQDIIIEHQKVVKGNQKRLESLRELAGKENLEYPSVTLPPQPHTKEGVDAYNEVIARVRMWVNLNLWQKLKLSRDDAKPLLRLKGFPSFPLVERQANEVDWWDMVCNVKKLINEKKEDGKVFWQNLAGYKRQEALRPYLSSEEDRKKGKKFARYQLGDLLLHLEKKHGEDWGKVYDEAWERIDKKVEGLSKHIKLEEERRSEDAQSKAALTDWLRAKASFVIEGLKEADKDEFCRCELKLQKWYGDLRGKPFAIEAENSILDISGFSKQYNCAFIWQKDGVKKLNLYLIINYFKGGKLRFKKIKPEAFEANRFYTVINKKSGEIVPMEVNFNFDDPNLIILPLAFGKRQGREFIWNDLLSLETGSLKLANGRVIEKTLYNRRTRQDEPALFVALTFERREVLDSSNIKPMNLAGVDRGENIPAVIALTDPEGCPLSVFKDSLGNPTHILRIGESYKEKQRQIQAKKEVEQRRAGGYSRKYASKAKNLADDMVRNTARDLLYYAVTQDAMLIFENLSRGFGRQGKRTFMAERQYTRMEDWLTAKLAYEGLPSKTYLSKTLAQYTSKTCSNCGFTITSADYDRVLEKLKKTATGWMTTINGKELKVEGQITYYNRYKRQNVVKDLSVELDRLSEESVNNDISSWTKGRSGEALSLLKKRFSHRPVQEKFVCLNCGFETHADEQAALNIARSWLFLRSQEYKKYQTNKTTGNTDKRAFVETWQSFYRKKLKEVWKPAV

SEQ ID NO: 27426 - protein, 978 aa, synthetic construct
  REGION 1..978: note = engineered CasX variant
QEIKRINKIRRRLVKDSNTKKAGKTGPMKTLLVRVMTPDLRERLENLRKKPENIPQPISNTSRANLNKLLTDYTEMKKAILHVYWEEFQKDPVGLMSRVAQPASKKIDQNKLKPEMDEKGNLTTAGFACSQCGQPLFVYKLEQVSEKGKAYTNYFGRCNVAEHEKLILLAQLKPEKDSDEAVTYSLGKFGQRALDFYSIHVTKESTHPVKPLAQIAGNRYASGPVGKALSDACMGTIASFLSKYQDIIIEHQKVVKGNQKRLESLRELAGKENLEYPSVTLPPQPHTKEGVDAYNEVIARVRMWVNLNLWQKLKLSRDDAKPLLRLKGFPSFPLVERQANEVDWWDMVCNVKKLINEKKEDGKVFWQNLAGYKRQEALRPYLSSEEDRKKGKKFARYQLGDLLLHLEKKHGEDWGKVYDEAWERIDKKVEGLSKHIKLEEERRSEDAQSKAALTDWLRAKASFVIEGLKEADKDEFCRCELKLQKWYGDLRGKPFAIEAENSILDISGFSKQYNCAFIWQKDGVKKLNLYLIINYFKGGKLRFKKIKPEAFEANRFYTVINKKSGEIVPMEVNFNFDDPNLIILPLAFGKRQGREFIWNDLLSLETGSLKLANGRVIEKTLYNRRTRQDEPALFVALTFERREVLDSSNIKPMNLAGVDRGENIPAVIALTDPEGCPLSRFKDSMGNPTHILRIGESYKEKQRTIQAKKEVEQRSAGGYSRKYASKAKNLADDMVRNTARDLLYYAVTQDAMLIFENLSRGFGRQGKRTFMAERQYTRMEDWLTAKLAYEGLPSKTYLSKTLAQYTSKTCSNCGFTITSADYDRVLEKLKKTATGWMTTINGKELKVEGQITYYNRYKRQNVVKDLSVELDRLSEESVNNDISSWTKGRSGEALSLLKKRFSHRPVQEKFVCLNCGFETHADEQAALNIARSWLFLRSQEYKKYQTNKTTGNTDKRAFVETWQSFYRKKLKEVWKPAV

SEQ ID NO: 27427 - protein, 978 aa, synthetic construct
  REGION 1..978: note = engineered CasX variant
QEIKRINKIRRRLVKDSNTKKAGKTGPMKTLLVRVMTPDLRERLENLRKKPENIPQPISNTSRANLNKLLTDYTEMKKAILHVYWEEFQKDPVGLMSRVAQPASKKIDQNKLKPEMDEKGNLTTAGFACSQCGQPLFVYKLEQVSEKGKAYTNYFGRCNVAEHEKLILLAQLKPEKDSDEAVTYSLGKFGQRALDFYSIHVTKESTHPVKPLAQIAGNRYASGPVGKALSDACMGTIASFLSKYQDIIIEHQKVVKGNQKRLESLRELAGKENLEYPSVTLPPQPHTKEGVDAYNEVIARVRMWVNLNLWQKLKLSRDDAKPLLRLKGFPSFPLVERQANEVDWWDMVCNVKKLINEKKEDGKVFWQNLAGYKRQEALRPYLSSEEDRKKGKKFARYQLGDLLLHLEKKHGEDWGKVYDEAWERIDKKVEGLSKHIKLEEERRSEDAQSKAALTDWLRAKASFVIEGLKEADKDEFCRCELKLQKWYGDLRGKPFAIEAENSILDISGFSKQYNCAFIWQKDGVKKLNLYLIINYFKGGKLRFKKIKPEAFEANRFYTVINKKSGEIVPMEVNFNFDDPNLIILPLAFGKRQGREFIWNDLLSLETGSLKLANGRVIEKTLYNRRTRQDEPALFVALTFERREVLDSSNIKPMNLAGVDRGENIPAVIALTDPEGCPLSRFKDSMGNPTHILRIGESYKEKQRTIQAKKEVEQRRAGGYSRKYASKAKNLADDMVRNTARDLLYYAVTQDAMLIFENLSRGFGRQGKRTFMAERQYTRMEDWLTAKLAYEGLPSKTYLSKTLAQYTSKTCSNCGFTITSADYDRVLEKLKKTATGWMTTINGKELKVEGQITYYNRYKRQNVVKDLSVELDRLSEESVNNDISSWTKGRSGEALSLLKKRFSHRPVQEKFVCLNCGFETHADEQAALNIARSWLFLRSQEYKKYQTNKTTGNTDKRAFVETWQSFYRKKLKEVWKPAV

SEQ ID NO: 27428 - protein, 978 aa, synthetic construct
  REGION 1..978: note = engineered CasX variant
QEIKRINKIRRRLVKDSNTKKAGKTGPMKTLLVRVMTPDLRERLENLRKKPENIPQPISNTSRANLNKLLTDYTEMKKAILHVYWEEFQKDPVGLMSRVAQPASKKIDQNKLKPEMDEKGNLTTAGFACSQCGQPLFVYKLEQVSEKGKAYTNYFGRCNVAEHEKLILLAQLKPEKDSDEAVTYSLGKFGQRALDFYSIHVTKESTHPVKPLAQIAGNRYASGPVGKALSDACMGTIASFLSKYQDIIIEHQKVVKGNQKRLESLRELAGKENLEYPSVTLPPQPHTKEGVDAYNEVIARVRMWVNLNLWQKLKLSRDDAKPLLRLKGFPSFPLVERQANEVDWWDMVCNVKKLINEKKEDGKVFWQNLAGYKRQEALRPYLSSEEDRKKGKKFARYQLGDLLLHLEKKHGEDWGKVYDEAWERIDKKVEGLSKHIKLEEERRSEDAQSKAALTDWLRAKASFVIEGLKEADKDEFCRCELKLQKWYGDLRGKPFAIEAENSILDISGFSKQYNCAFIWQKDGVKKLNLYLIINYFKGGKLRFKKIKPEAFEANRFYTVINKKSGEIVPMEVNFNFDDPNLIILPLAFGKRQGREFIWNDLLSLETGSLKLANGRVIEKTLYNRRTRQDEPALFVALTFERREVLDSSNIKPMNLAGVDRGENIPAVIALTDPEGCPLSRFKDSLGNPTHILRIGESYKEKQRTIQAKKEVEQRSAGGYSRKYASKAKNLADDMVRNTARDLLYYAVTQDAMLIFENLSRGFGRQGKRTFMAERQYTRMEDWLTAKLAYEGLPSKTYLSKTLAQYTSKTCSNCGFTITSADYDRVLEKLKKTATGWMTTINGKELKVEGQITYYNRYKRQNVVKDLSVELDRLSEESVNNDISSWTKGRSGEALSLLKKRFSHRPVQEKFVCLNCGFETHADEQAALNIARSWLFLRSQEYKKYQTNKTTGNTDKRAFVETWQSFYRKKLKEVWKPAV

SEQ ID NO: 27429 - protein, 978 aa, synthetic construct
  REGION 1..978: note = engineered CasX variant
QEIKRINKIRRRLVKDSNTKKAGKTGPMKTLLVRVMTPDLRERLENLRKKPENIPQPISNTSRANLNKLLTDYTEMKKAILHVYWEEFQKDPVGLMSRVAQPASKKIDQNKLKPEMDEKGNLTTAGFACSQCGQPLFVYKLEQVSEKGKAYTNYFGRCNVAEHEKLILLAQLKPEKDSDEAVTYSLGKFGQRALDFYSIHVTKESTHPVKPLAQIAGNRYASGPVGKALSDACMGTIASFLSKYQDIIIEHQKVVKGNQKRLESLRELAGKENLEYPSVTLPPQPHTKEGVDAYNEVIARVRMWVNLNLWQKLKLSRDDAKPLLRLKGFPSFPLVERQANEVDWWDMVCNVKKLINEKKEDGKVFWQNLAGYKRQEALRPYLSSEEDRKKGKKFARYQLGDLLLHLEKKHGEDWGKVYDEAWERIDKKVEGLSKHIKLEEERRSEDAQSKAALTDWLRAKASFVIEGLKEADKDEFCRCELKLQKWYGDLRGKPFAIEAENSILDISGFSKQYNCAFIWQKDGVKKLNLYLIINYFKGGKLRFKKIKPEAFEANRFYTVINKKSGEIVPMEVNFNFDDPNLIILPLAFGKRQGREFIWNDLLSLETGSLKLANGRVIEKTLYNRRTRQDEPALFVALTFERREVLDSSNIKPMNLAGVDRGENIPAVIALTDPEGCPLSRFKDSLGNPTHILRIGESYKEKQRTIQAKKEVEQRRAGGYSRKYASKAKNLADDMVRNTARDLLYYAVTQDAMLIFENLSRGFGRQGKRTFMAERQYTRMEDWLTAKLAYEGLPSKTYLSKTLAQYTSKTCSNCGFTITSADYDRVLEKLKKTATGWMTTINGKELKVEGQITYYNRYKRQNVVKDLSVELDRLSEESVNNDISSWTKGRSGEALSLLKKRFSHRPVQEKFVCLNCGFETHADEQAALNIARSWLFLRSQEYKKYQTNKTTGNTDKRAFVETWQSFYRKKLKEVWKPAV

SEQ ID NO: 27430 - protein, 978 aa, synthetic construct
  REGION 1..978: note = engineered CasX variant
QEIKRINKIRRRLVKDSNTKKAGKTGPMKTLLVRVMTPDLRERLENLRKKPENIPQPISNTSRANLNKLLTDYTEMKKAILHVYWEEFQKDPVGLMSRVAQPASKKIDQNKLKPEMDEKGNLTTAGFACSQCGQPLFVYKLEQVSEKGKAYTNYFGRCNVAEHEKLILLAQLKPEKDSDEAVTYSLGKFGQRALDFYSIHVTKESTHPVKPLAQIAGNRYASGPVGKALSDACMGTIASFLSKYQDIIIEHQKVVKGNQKRLESLRELAGKENLEYPSVTLPPQPHTKEGVDAYNEVIARVRMWVNLNLWQKLKLSRDDAKPLLRLKGFPSFPLVERQANEVDWWDMVCNVKKLINEKKEDGKVFWQNLAGYKRQEALRPYLSSEEDRKKGKKFARYQLGDLLLHLEKKHGEDWGKVYDEAWERIDKKVEGLSKHIKLEEERRSEDAQSKAALTDWLRAKASFVIEGLKEADKDEFCRCELKLQKWYGDLRGKPFAIEAENSILDISGFSKQYNCAFIWQKDGVKKLNLYLIINYFKGGKLRFKKIKPEAFEANRFYTVINKKSGEIVPMEVNFNFDDPNLIILPLAFGKRQGREFIWNDLLSLETGSLKLANGRVIEKTLYNRRTRQDEPALFVALTFERREVLDSSNIKPMNLAGVDRGENIPAVIALTDPEGCPLSRFKDSLGNPTHILRIGESYKEKQRQIQAKKEVEQRRAGGYSRKYASKAKNLADDMVRNTARDLLYYAVTQDAMLIFENLSRGFGRQGKRTFMAERQYTRMEDWLTAKLAYEGLPSKTYLSKTLAQYTSKTCSNCGFTITSADYDRVLEKLKKTATGWMTTINGKELKVEGQITYYNRYKRQNVVKDLSVELDRLSEESVNNDISSWTKGRSGEALSLLKKRFSHRPVQEKFVCLNCGFETHADEQAALNIARSWLFLRSQEYKKYQTNKTTGNTDKRAFVETWQSFYRKKLKEVWKPAV

SEQ ID NO: 27431 - protein, 978 aa, synthetic construct
  REGION 1..978: note = engineered CasX variant
QEIKRINKIRRRLVKDSNTKKAGKTGPMKTLLVRVMTPDLRERLENLRKKPENIPQPISNTSRANLNKLLTDYTEMKKAILHVYWEEFQKDPVGLMSRVAQPASKKIDQNKLKPEMDEKGNLTTAGFACSQCGQPLFVYKLEQVSEKGKAYTNYFGRCNVAEHEKLILLAQLKPEKDSDEAVTYSLGKFGQRALDFYSIHVTKESTHPVKPLAQIAGNRYASGPVGKALSDACMGTIASFLSKYQDIIIEHQKVVKGNQKRLESLRELAGKENLEYPSVTLPPQPHTKEGVDAYNEVIARVRMWVNLNLWQKLKLSRDDAKPLLRLKGFPSFPLVERQANEVDWWDMVCNVKKLINEKKEDGKVFWQNLAGYKRQEALRPYLSSEEDRKKGKKFARYQLGDLLLHLEKKHGEDWGKVYDEAWERIDKKVEGLSKHIKLEEERRSEDAQSKAALTDWLRAKASFVIEGLKEADKDEFCRCELKLQKWYGDLRGKPFAIEAENSILDISGFSKQYNCAFIWQKDGVKKLNLYLIINYFKGGKLRFKKIKPEAFEANRFYTVINKKSGEIVPMEVNFNFDDPNLIILPLAFGKRQGREFIWNDLLSLETGSLKLANGRVIEKTLYNRRTRQDEPALFVALTFERREVLDSSNIKPMNLAGVDRGENIPAVIALTDPEGCPLSRFKDSLGNPTHILRIGESYKEKQRFIQAKKEVEQRRAGGYSRKYASKAKNLADDMVRNTARDLLYYAVTQDAMLIFENLSRGFGRQGKRTFMAERQYTRMEDWLTAKLAYEGLPSKTYLSKTLAQYTSKTCSNCGFTITSADYDRVLEKLKKTATGWMTTINGKELKVEGQITYYNRYKRQNVVKDLSVELDRLSEESVNNDISSWTKGRSGEALSLLKKRFSHRPVQEKFVCLNCGFETHADEQAALNIARSWLFLRSQEYKKYQTNKTTGNTDKRAFVETWQSFYRKKLKEVWKPAV

SEQ ID NO: 27432 - protein, 978 aa, synthetic construct
  REGION 1..978: note = engineered CasX variant
QEIKRINKIRRRLVKDSNTKKAGKTGPMKTLLVRVMTPDLRERLENLRKKPENIPQPISNTSRANLNKLLTDYTEMKKAILHVYWEEFQKDPVGLMSRVAQPASKKIDQNKLKPEMDEKGNLTTAGFACSQCGQPLFVYKLEQVSEKGKAYTNYFGRCNVAEHEKLILLAQLKPEKDSDEAVTYSLGKFGQRALDFYSIHVTKESTHPVKPLAQIAGNRYASGPVGKALSDACMGTIASFLSKYQDIIIEHQKVVKGNQKRLESLRELAGKENLEYPSVTLPPQPHTKEGVDAYNEVIARVRMWVNLNLWQKLKLSRDDAKPLLRLKGFPSFPLVERQANEVDWWDMVCNVKKLINEKKEDGKVFWQNLAGYKRQEALRPYLSSEEDRKKGKKFARYQLGDLLLHLEKKHGEDWGKVYDEAWERIDKKVEGLSKHIKLEEERRSEDAQSKAALTDWLRAKASFVIEGLKEADKDEFCRCELKLQKWYGDLRGKPFAIEAENSILDISGFSKQYNCAFIWQKDGVKKLNLYLIINYFKGGKLRFKKIKPEAFEANRFYTVINKKSGEIVPMEVNFNFDDPNLIILPLAFGKRQGREFIWNDLLSLETGSLKLANGRVIEKTLYNRRTRQDEPALFVALTFERREVLDSSNIKPMNLAGVDRGENIPAVIALTDPEGCPLSRFKDSLGNPTHILRIGESFKEKQRTIQAKKEVEQRRAGGYSRKYASKAKNLADDMVRNTARDLLYYAVTQDAMLIFENLSRGFGRQGKRTFMAERQYTRMEDWLTAKLAYEGLPSKTYLSKTLAQYTSKTCSNCGFTITSADYDRVLEKLKKTATGWMTTINGKELKVEGQITYYNRYKRQNVVKDLSVELDRLSEESVNNDISSWTKGRSGEALSLLKKRFSHRPVQEKFVCLNCGFETHADEQAALNIARSWLFLRSQEYKKYQTNKTTGNTDKRAFVETWQSFYRKKLKEVWKPAV

SEQ ID NO: 27433 - protein, 978 aa, synthetic construct
  REGION 1..978: note = engineered CasX variant
QEIKRINKIRRRLVKDSNTKKAGKTGPMKTLLVRVMTPDLRERLENLRKKPENIPQPISNTSRANLNKLLTDYTEMKKAILHVYWEEFQKDPVGLMSRVAQPASKKIDQNKLKPEMDEKGNLTTAGFACSQCGQPLFVYKLEQVSEKGKAYTNYFGRCNVAEHEKLILLAQLKPEKDSDEAVTYSLGKFGQRALDFYSIHVTKESTHPVKPLAQIAGNRYASGPVGKALSDACMGTIASFLSKYQDIIIEHQKVVKGNQKRLESLRELAGKENLEYPSVTLPPQPHTKEGVDAYNEVIARVRMWVNLNLWQKLKLSRDDAKPLLRLKGFPSFPLVERQANEVDWWDMVCNVKKLINEKKEDGKVFWQNLAGYKRQEALRPYLSSEEDRKKGKKFARYQLGDLLLHLEKKHGEDWGKVYDEAWERIDKKVEGLSKHIKLEEERRSEDAQSKAALTDWLRAKASFVIEGLKEADKDEFCRCELKLQKWYGDLRGKPFAIEAENSILDISGFSKQYNCAFIWQKDGVKKLNLYLIINYFKGGKLRFKKIKPEAFEANRFYTVINKKSGEIVPMEVNFNFDDPNLIILPLAFGKRQGREFIWNDLLSLETGSLKLANGRVIEKTLYNRRTRQDEPALFVALTFERREVLDSSNIKPMNLAGVDRGENIPAVIALTDPEGCPLSRFKDSLGNPTHILRIGEAYKEKQRTIQAKKEVEQRRAGGYSRKYASKAKNLADDMVRNTARDLLYYAVTQDAMLIFENLSRGFGRQGKRTFMAERQYTRMEDWLTAKLAYEGLPSKTYLSKTLAQYTSKTCSNCGFTITSADYDRVLEKLKKTATGWMTTINGKELKVEGQITYYNRYKRQNVVKDLSVELDRLSEESVNNDISSWTKGRSGEALSLLKKRFSHRPVQEKFVCLNCGFETHADEQAALNIARSWLFLRSQEYKKYQTNKTTGNTDKRAFVETWQSFYRKKLKEVWKPAV

SEQ ID NO: 27434 - protein, 978 aa, synthetic construct
  REGION 1..978: note = engineered CasX variant
QEIKRINKIRRRLVKDSNTKKAGKTGPMKTLLVRVMTPDLRERLENLRKKPENIPQPISNTSRANLNKLLTDYTEMKKAILHVYWEEFQKDPVGLMSRVAQPASKKIDQNKLKPEMDEKGNLTTAGFACSQCGQPLFVYKLEQVSEKGKAYTNYFGRCNVAEHEKLILLAQLKPEKDSDEAVTYSLGKFGQRALDFYSIHVTKESTHPVKPLAQIAGNRYASGPVGKALSDACMGTIASFLSKYQDIIIEHQKVVKGNQKRLESLRELAGKENLEYPSVTLPPQPHTKEGVDAYNEVIARVRMWVNLNLWQKLKLSRDDAKPLLRLKGFPSFPLVERQANEVDWWDMVCNVKKLINEKKEDGKVFWQNLAGYKRQEALRPYLSSEEDRKKGKKFARYQLGDLLLHLEKKHGEDWGKVYDEAWERIDKKVEGLSKHIKLEEERRSEDAQSKAALTDWLRAKASFVIEGLKEADKDEFCRCELKLQKWYGDLRGKPFAIEAENSILDISGFSKQYNCAFIWQKDGVKKLNLYLIINYFKGGKLRFKKIKPEAFEANRFYTVINKKSGEIVPMEVNFNFDDPNLIILPLAFGKRQGREFIWNDLLSLETGSLKLANGRVIEKTLYNRRTRQDEPALFVALTFERREVLDSSNIKPMNLAGVDRGENIPAVIALTDPEGCPLSRFKDSLGNPTHILRIGEAFKEKQRTIQAKKEVEQRRAGGYSRKYASKAKNLADDMVRNTARDLLYYAVTQDAMLIFENLSRGFGRQGKRTFMAERQYTRMEDWLTAKLAYEGLPSKTYLSKTLAQYTSKTCSNCGFTITSADYDRVLEKLKKTATGWMTTINGKELKVEGQITYYNRYKRQNVVKDLSVELDRLSEESVNNDISSWTKGRSGEALSLLKKRFSHRPVQEKFVCLNCGFETHADEQAALNIARSWLFLRSQEYKKYQTNKTTGNTDKRAFVETWQSFYRKKLKEVWKPAV

SEQ ID NO: 27435 - protein, 978 aa, synthetic construct
  REGION 1..978: note = engineered CasX variant
QEIKRINKIRRRLVKDSNTKKAGKTGPMKTLLVRVMTPDLRERLENLRKKPENIPQPISNTSRANLNKLLTDYTEMKKAILHVYWEEFQKDPVGLMSRVAQPASKKIDQNKLKPEMDEKGNLTTAGFACSQCGQPLFVYKLEQVSEKGKAYTNYFGRCNVAEHEKLILLAQLKPEKDSDEAVTYSLGKFGQRALDFYSIHVTKESTHPVKPLAQIAGNRYASGPVGKALSDACMGTIASFLSKYQDIIIEHQKVVKGNQKRLESLRELAGKENLEYPSVTLPPQPHTKEGVDAYNEVIARVRMWVNLNLWQKLKLSRDDAKPLLRLKGFPSFPLVERQANEVDWWDMVCNVKKLINEKKEDGKVFWQNLAGYKRQEALRPYLSSEEDRKKGKKFARYQLGDLLLHLEKKHGEDWGKVYDEAWERIDKKVEGLSKHIKLEEERRSEDAQSKAALTDWLRAKASFVIEGLKEADKDEFCRCELKLQKWYGDLRGKPFAIEAENSILDISGFSKQYNCAFIWQKDGVKKLNLYLIINYFKGGKLRFKKIKPEAFEANRFYTVINKKSGEIVPMEVNFNFDDPNLIILPLAFGKRQGREFIWNDLLSLETGSLKLANGRVIEKTLYNRRTRQDEPALFVALTFERREVLDSSNIKPMNLAGVDRGENIPAVIALTDPEGCPLSHFKDSLGNPTHILRIGESYKEKQRTIQAKKEVEQRRAGGYSRKYASKAKNLADDMVRNTARDLLYYAVTQDAMLIFENLSRGFGRQGKRTFMAERQYTRMEDWLTAKLAYEGLPSKTYLSKTLAQYTSKTCSNCGFTITSADYDRVLEKLKKTATGWMTTINGKELKVEGQITYYNRYKRQNVVKDLSVELDRLSEESVNNDISSWTKGRSGEALSLLKKRFSHRPVQEKFVCLNCGFETHADEQAALNIARSWLFLRSQEYKKYQTNKTTGNTDKRAFVETWQSFYRKKLKEVWKPAV

SEQ ID NO: 27436 - protein, 978 aa, synthetic construct
  REGION 1..978: note = engineered CasX variant
QEIKRINKIRRRLVKDSNTKKAGKTGPMKTLLVRVMTPDLRERLENLRKKPENIPQPISNTSRANLNKLLTDYTEMKKAILHVYWEEFQKDPVGLMSRVAQPASKKIDQNKLKPEMDEKGNLTTAGFACSQCGQPLFVYKLEQVSEKGKAYTNYFGRCNVAEHEKLILLAQLKPEKDSDEAVTYSLGKFGQRALDFYSIHVTKESTHPVKPLAQIAGNRYASGPVGKALSDACMGTIASFLSKYQDIIIEHQKVVKGNQKRLESLRELAGKENLEYPSVTLPPQPHTKEGVDAYNEVIARVRMWVNLNLWQKLKLSRDDAKPLLRLKGFPSFPLVERQANEVDWWDMVCNVKKLINEKKEDGKVFWQNLAGYKRQEALRPYLSSEEDRKKGKKFARYQLGDLLLHLEKKHGEDWGKVYDEAWERIDKKVEGLSKHIKLEEERRSEDAQSKAALTDWLRAKASFVIEGLKEADKDEFCRCELKLQKWYGDLRGKPFAIEAENSILDISGFSKQYNCAFIWQKDGVKKLNLYLIINYFKGGKLRFKKIKPEAFEANRFYTVINKKSGEIVPMEVNFNFDDPNLIILPLAFGKRQGREFIWNDLLSLETGSLKLANGRVIEKTLYNRRTRQDEPALFVALTFERREVLDSSNIKPMNLAGVDRGENIPAVIALTDPEGCPLSHFKDSLGNPTHILRIGESYKEKQRFIQAKKEVEQRRAGGYSRKYASKAKNLADDMVRNTARDLLYYAVTQDAMLIFENLSRGFGRQGKRTFMAERQYTRMEDWLTAKLAYEGLPSKTYLSKTLAQYTSKTCSNCGFTITSADYDRVLEKLKKTATGWMTTINGKELKVEGQITYYNRYKRQNVVKDLSVELDRLSEESVNNDISSWTKGRSGEALSLLKKRFSHRPVQEKFVCLNCGFETHADEQAALNIARSWLFLRSQEYKKYQTNKTTGNTDKRAFVETWQSFYRKKLKEVWKPAV

SEQ ID NO: 27437 - protein, 978 aa, synthetic construct
  REGION 1..978: note = engineered CasX variant
QEIKRINKIRRRLVKDSNTKKAGKTGPMKTLLVRVMTPDLRERLENLRKKPENIPQPISNTSRANLNKLLTDYTEMKKAILHVYWEEFQKDPVGLMSRVAQPASKKIDQNKLKPEMDEKGNLTTAGFACSQCGQPLFVYKLEQVSEKGKAYTNYFGRCNVAEHEKLILLAQLKPEKDSDEAVTYSLGKFGQRALDFYSIHVTKESTHPVKPLAQIAGNRYASGPVGKALSDACMGTIASFLSKYQDIIIEHQKVVKGNQKRLESLRELAGKENLEYPSVTLPPQPHTKEGVDAYNEVIARVRMWVNLNLWQKLKLSRDDAKPLLRLKGFPSFPLVERQANEVDWWDMVCNVKKLINEKKEDGKVFWQNLAGYKRQEALRPYLSSEEDRKKGKKFARYQLGDLLLHLEKKHGEDWGKVYDEAWERIDKKVEGLSKHIKLEEERRSEDAQSKAALTDWLRAKASFVIEGLKEADKDEFCRCELKLQKWYGDLRGKPFAIEAENSILDISGFSKQYNCAFIWQKDGVKKLNLYLIINYFKGGKLRFKKIKPEAFEANRFYTVINKKSGEIVPMEVNFNFDDPNLIILPLAFGKRQGREFIWNDLLSLETGSLKLANGRVIEKTLYNRRTRQDEPALFVALTFERREVLDSSNIKPMNIIGVDRGENIPAVIALTDPEGCPLSRFKDSLGNPTHILRIGESYKEKQRTIQAKKEVEQRRAGGYSRKYASKAKNLADDMVRNTARDLLYYAVTQDAMLIFENLSRGFGRQGKRTFMAERQYTRMEDWLTAKLAYEGLPSKTYLSKTLAQYTSKTCSNCGFTITSADYDRVLEKLKKTATGWMTTINGKELKVEGQITYYNRYKRQNVVKDLSVELDRLSEESVNNDISSWTKGRSGEALSLLKKRFSHRPVQEKFVCLNCGFETHADEQAALNIARSWLFLRSQEYKKYQTNKTTGNTDKRAFVETWQSFYRKKLKEVWKPAV

SEQ ID NO: 27438 - protein, 978 aa, synthetic construct
  REGION 1..978: note = engineered CasX variant
QEIKRINKIRRRLVKDSNTKKAGKTGPMKTLLVRVMTPDLRERLENLRKKPENIPQPISNTSRANLNKLLTDYTEMKKAILHVYWEEFQKDPVGLMSRVAQPASKKIDQNKLKPEMDEKGNLTTAGFACSQCGQPLFVYKLEQVSEKGKAYTNYFGRCNVAEHEKLILLAQLKPEKDSDEAVTYSLGKFGQRALDFYSIHVTKESTHPVKPLAQIAGNRYASGPVGKALSDACMGTIASFLSKYQDIIIEHQKVVKGNQKRLESLRELAGKENLEYPSVTLPPQPHTKEGVDAYNEVIARVRMWVNLNLWQKLKLSRDDAKPLLRLKGFPSFPLVERQANEVDWWDMVCNVKKLINEKKEDGKVFWQNLAGYKRQEALRPYLSSEEDRKKGKKFARYQLGDLLLHLEKKHGEDWGKVYDEAWERIDKKVEGLSKHIKLEEERRSEDAQSKAALTDWLRAKASFVIEGLKEADKDEFCRCELKLQKWYGDLRGKPFAIEAENSILDISGFSKQYNCAFIWQKDGVKKLNLYLIINYFKGGKLRFKKIKPEAFEANRFYTVINKKSGEIVPMEVNFNFDDPNLIILPLAFGKRQGREFIWNDLLSLETGSLKLANGRVIEKTLYNRRTRQDEPALFVALTFERREVLDSSNIKPMNIIGVDRGENIPAVIALTDPEGCPLSRFKDSLGNPTHILRIGEHYKEKQRTIQAKKEVEQRRAGGYSRKYASKAKNLADDMVRNTARDLLYYAVTQDAMLIFENLSRGFGRQGKRTFMAERQYTRMEDWLTAKLAYEGLPSKTYLSKTLAQYTSKTCSNCGFTITSADYDRVLEKLKKTATGWMTTINGKELKVEGQITYYNRYKRQNVVKDLSVELDRLSEESVNNDISSWTKGRSGEALSLLKKRFSHRPVQEKFVCLNCGFETHADEQAALNIARSWLFLRSQEYKKYQTNKTTGNTDKRAFVETWQSFYRKKLKEVWKPAV

SEQ ID NO: 27439 - protein, 978 aa, synthetic construct
  REGION 1..978: note = engineered CasX variant
QEIKRINKIRRRLVKDSNTKKAGKTGPMKTLLVRVMTPDLRERLENLRKKPENIPQPISNTSRANLNKLLTDYTEMKKAILHVYWEEFQKDPVGLMSRVAQPASKKIDQNKLKPEMDEKGNLTTAGFACSQCGQPLFVYKLEQVSEKGKAYTNYFGRCNVAEHEKLILLAQLKPEKDSDEAVTYSLGKFGQRALDFYSIHVTKESTHPVKPLAQIAGNRYASGPVGKALSDACMGTIASFLSKYQDIIIEHQKVVKGNQKRLESLRELAGKENLEYPSVTLPPQPHTKEGVDAYNEVIARVRMWVNLNLWQKLKLSRDDAKPLLRLKGFPSFPLVERQANEVDWWDMVCNVKKLINEKKEDGKVFWQNLAGYKRQEALRPYLSSEEDRKKGKKFARYQLGDLLLHLEKKHGEDWGKVYDEAWERIDKKVEGLSKHIKLEEERRSEDAQSKAALTDWLRAKASFVIEGLKEADKDEFCRCELKLQKWYGDLRGKPFAIEAENSILDISGFSKQYNCAFIWQKDGVKKLNLYLIINYFKGGKLRFKKIKPEAFEANRFYTVINKKSGEIVPMEVNFNFDDPNLIILPLAFGKRQGREFIWNDLLSLETGSLKLANGRVIEKTLYNRRTRQDEPALFVALTFERREVLDSSNIKPMNIIGVDRGENIPAVIALTDPEGCPLLRFKDSLGNPTHILRIGESYKEKQRTIQAKKEVEQRRAGGYSRKYASKAKNLADDMVRNTARDLLYYAVTQDAMLIFENLSRGFGRQGKRTFMAERQYTRMEDWLTAKLAYEGLPSKTYLSKTLAQYTSKTCSNCGFTITSADYDRVLEKLKKTATGWMTTINGKELKVEGQITYYNRYKRQNVVKDLSVELDRLSEESVNNDISSWTKGRSGEALSLLKKRFSHRPVQEKFVCLNCGFETHADEQAALNIARSWLFLRSQEYKKYQTNKTTGNTDKRAFVETWQSFYRKKLKEVWKPAV

SEQ ID NO: 27440 - protein, 978 aa, synthetic construct
  REGION 1..978: note = engineered CasX variant
QEIKRINKIRRRLVKDSNTKKAGKTGPMKTLLVRVMTPDLRERLENLRKKPENIPQPISNTSRANLNKLLTDYTEMKKAILHVYWEEFQKDPVGLMSRVAQPASKKIDQNKLKPEMDEKGNLTTAGFACSQCGQPLFVYKLEQVSEKGKAYTNYFGRCNVAEHEKLILLAQLKPEKDSDEAVTYSLGKFGQRALDFYSIHVTKESTHPVKPLAQIAGNRYASGPVGKALSDACMGTIASFLSKYQDIIIEHQKVVKGNQKRLESLRELAGKENLEYPSVTLPPQPHTKEGVDAYNEVIARVRMWVNLNLWQKLKLSRDDAKPLLRLKGFPSFPLVERQANEVDWWDMVCNVKKLINEKKEDGKVFWQNLAGYKRQEALRPYLSSEEDRKKGKKFARYQLGDLLLHLEKKHGEDWGKVYDEAWERIDKKVEGLSKHIKLEEERRSEDAQSKAALTDWLRAKASFVIEGLKEADKDEFCRCELKLQKWYGDLRGKPFAIEAENSILDISGFSKQYNCAFIWQKDGVKKLNLYLIINYFKGGKLRFKKIKPEAFEANRFYTVINKKSGEIVPMEVNFNFDDPNLIILPLAFGKRQGREFIWNDLLSLETGSLKLANGRVIEKTLYNRRTRQDEPALFVALTFERREVLDSSNIKPMNIIGVDRGENIPAVIALTDPEGCPLLRFKDSLGNPTHILRIGEHYKEKQRTIQAKKEVEQRRAGGYSRKYASKAKNLADDMVRNTARDLLYYAVTQDAMLIFENLSRGFGRQGKRTFMAERQYTRMEDWLTAKLAYEGLPSKTYLSKTLAQYTSKTCSNCGFTITSADYDRVLEKLKKTATGWMTTINGKELKVEGQITYYNRYKRQNVVKDLSVELDRLSEESVNNDISSWTKGRSGEALSLLKKRFSHRPVQEKFVCLNCGFETHADEQAALNIARSWLFLRSQEYKKYQTNKTTGNTDKRAFVETWQSFYRKKLKEVWKPAV

SEQ ID NO: 27441 - protein, 978 aa, synthetic construct
  REGION 1..978: note = engineered CasX variant
QEIKRINKIRRRLVKDSNTKKAGKTGPMKTLLVRVMTPDLRERLENLRKKPENIPQPISNTSRANLNKLLTDYTEMKKAILHVYWEEFQKDPVGLMSRVAQPASKKIDQNKLKPEMDEKGNLTTAGFACSQCGQPLFVYKLEQVSEKGKAYTNYFGRCNVAEHEKLILLAQLKPEKDSDEAVTYSLGKFGQRALDFYSIHVTKESTHPVKPLAQIAGNRYASGPVGKALSDACMGTIASFLSKYQDIIIEHQKVVKGNQKRLESLRELAGKENLEYPSVTLPPQPHTKEGVDAYNEVIARVRMWVNLNLWQKLKLSRDDAKPLLRLKGFPSFPLVERQANEVDWWDMVCNVKKLINEKKEDGKVFWQNLAGYKRQEALRPYLSSEEDRKKGKKFARYQLGDLLLHLEKKHGEDWGKVYDEAWERIDKKVEGLSKHIKLEEERRSEDAQSKAALTDWLRAKASFVIEGLKEADKDEFCRCELKLQKWYGDLRGKPFAIEAENSILDISGFSKQYNCAFIWQKDGVKKLNLYLIINYFKGGKLRFKKIKPEAFEANRFYTVINKKSGEIVPMEVNFNFDDPNLIILPLAFGKRQGREFIWNDLLSLETGSLKLANGRVIEKTLYNRRTRQDEPALFVALTFERREVLDSSNIKPMNFIGVDRGENIPAVIALTDPEGCPLSSFKDSLGNPTHILRIGESYKEKQRTIQAKKEVEQRRAGGYSRKYASKAKNLADDMVRNTARDLLYYAVTQDAMLIFENLSRGFGRQGKRTFMAERQYTRMEDWLTAKLAYEGLPSKTYLSKTLAQYTSKTCSNCGFTITSADYDRVLEKLKKTATGWMTTINGKELKVEGQITYYNRYKRQNVVKDLSVELDRLSEESVNNDISSWTKGRSGEALSLLKKRFSHRPVQEKFVCLNCGFETHADEQAALNIARSWLFLRSQEYKKYQTNKTTGNTDKRAFVETWQSFYRKKLKEVWKPAV

SEQ ID NO: 27442 - protein, 978 aa, synthetic construct
  REGION 1..978: note = engineered CasX variant
QEIKRINKIRRRLVKDSNTKKAGKTGPMKTLLVRVMTPDLRERLENLRKKPENIPQPISNTSRANLNKLLTDYTEMKKAILHVYWEEFQKDPVGLMSRVAQPASKKIDQNKLKPEMDEKGNLTTAGFACSQCGQPLFVYKLEQVSEKGKAYTNYFGRCNVAEHEKLILLAQLKPEKDSDEAVTYSLGKFGQRALDFYSIHVTKESTHPVKPLAQIAGNRYASGPVGKALSDACMGTIASFLSKYQDIIIEHQKVVKGNQKRLESLRELAGKENLEYPSVTLPPQPHTKEGVDAYNEVIARVRMWVNLNLWQKLKLSRDDAKPLLRLKGFPSFPLVERQANEVDWWDMVCNVKKLINEKKEDGKVFWQNLAGYKRQEALRPYLSSEEDRKKGKKFARYQLGDLLLHLEKKHGEDWGKVYDEAWERIDKKVEGLSKHIKLEEERRSEDAQSKAALTDWLRAKASFVIEGLKEADKDEFCRCELKLQKWYGDLRGKPFAIEAENSILDISGFSKQYNCAFIWQKDGVKKLNLYLIINYFKGGKLRFKKIKPEAFEANRFYTVINKKSGEIVPMEVNFNFDDPNLIILPLAFGKRQGREFIWNDLLSLETGSLKLANGRVIEKTLYNRRTRQDEPALFVALTFERREVLDSSNIKPMNFIGVDRGENIPAVIALTDPEGCPLSRFKDSLGNPTHILRIGNSYKEKQRTIQAKKEVEQRRAGGYSRKYASKAKNLADDMVRNTARDLLYYAVTQDAMLIFENLSRGFGRQGKRTFMAERQYTRMEDWLTAKLAYEGLPSKTYLSKTLAQYTSKTCSNCGFTITSADYDRVLEKLKKTATGWMTTINGKELKVEGQITYYNRYKRQNVVKDLSVELDRLSEESVNNDISSWTKGRSGEALSLLKKRFSHRPVQEKFVCLNCGFETHADEQAALNIARSWLFLRSQEYKKYQTNKTTGNTDKRAFVETWQSFYRKKLKEVWKPAV

SEQ ID NO: 27443 - protein, 978 aa, synthetic construct
  REGION 1..978: note = engineered CasX variant
QEIKRINKIRRRLVKDSNTKKAGKTGPMKTLLVRVMTPDLRERLENLRKKPENIPQPISNTSRANLNKLLTDYTEMKKAILHVYWEEFQKDPVGLMSRVAQPASKKIDQNKLKPEMDEKGNLTTAGFACSQCGQPLFVYKLEQVSEKGKAYTNYFGRCNVAEHEKLILLAQLKPEKDSDEAVTYSLGKFGQRALDFYSIHVTKESTHPVKPLAQIAGNRYASGPVGKALSDACMGTIASFLSKYQDIIIEHQKVVKGNQKRLESLRELAGKENLEYPSVTLPPQPHTKEGVDAYNEVIARVRMWVNLNLWQKLKLSRDDAKPLLRLKGFPSFPLVERQANEVDWWDMVCNVKKLINEKKEDGKVFWQNLAGYKRQEALRPYLSSEEDRKKGKKFARYQLGDLLLHLEKKHGEDWGKVYDEAWERIDKKVEGLSKHIKLEEERRSEDAQSKAALTDWLRAKASFVIEGLKEADKDEFCRCELKLQKWYGDLRGKPFAIEAENSILDISGFSKQYNCAFIWQKDGVKKLNLYLIINYFKGGKLRFKKIKPEAFEANRFYTVINKKSGEIVPMEVNFNFDDPNLIILPLAFGKRQGREFIWNDLLSLETGSLKLANGRVIEKTLYNRRTRQDEPALFVALTFERREVLDSSNIKPMNFIGVDRGENIPAVIALTDPEGCPLSRFKDSLGNPTHILRIGESYKEKQRTIQAKKEVEQRRAGGYSRKYASKAKNLADDMVRNTARDLLYYAVTQDAMLIFENLSRGFGRQGKRTFMAERQYTRMEDWLTAKLAYEGLPSKTYLSKTLAQYTSKTCSNCGFTITSADYDRVLEKLKKTATGWMTTINGKELKVEGQITYYNRYKRQNVVKDLSVELDRLSEESVNNDISSWTKGRSGEALSLLKKRFSHRPVQEKFVCLNCGFETHADEQAALNIARSWLFLRSQEYKKYQTNKTTGNTDKRAFVETWQSFYRKKLKEVWKPAV

SEQ ID NO: 27444 - protein, 978 aa, synthetic construct
  REGION 1..978: note = engineered CasX variant
QEIKRINKIRRRLVKDSNTKKAGKTGPMKTLLVRVMTPDLRERLENLRKKPENIPQPISNTSRANLNKLLTDYTEMKKAILHVYWEEFQKDPVGLMSRVAQPASKKIDQNKLKPEMDEKGNLTTAGFACSQCGQPLFVYKLEQVSEKGKAYTNYFGRCNVAEHEKLILLAQLKPEKDSDEAVTYSLGKFGQRALDFYSIHVTKESTHPVKPLAQIAGNRYASGPVGKALSDACMGTIASFLSKYQDIIIEHQKVVKGNQKRLESLRELAGKENLEYPSVTLPPQPHTKEGVDAYNEVIARVRMWVNLNLWQKLKLSRDDAKPLLRLKGFPSFPLVERQANEVDWWDMVCNVKKLINEKKEDGKVFWQNLAGYKRQEALRPYLSSEEDRKKGKKFARYQLGDLLLHLEKKHGEDWGKVYDEAWERIDKKVEGLSKHIKLEEERRSEDAQSKAALTDWLRAKASFVIEGLKEADKDEFCRCELKLQKWYGDLRGKPFAIEAENSILDISGFSKQYNCAFIWQKDGVKKLNLYLIINYFKGGKLRFKKIKPEAFEANRFYTVINKKSGEIVPMEVNFNFDDPNLIILPLAFGKRQGREFIWNDLLSLETGSLKLANGRVIEKTLYNRRTRQDEPALFVALTFERREVLDSSNIKPMNFIGVDRGENIPAVIALTDPEGCPLSRFCDSLGNPTHILRIGESYKEKQRTIQAKKEVEQRRAGGYSRKYASKAKNLADDMVRNTARDLLYYAVTQDAMLIFENLSRGFGRQGKRTFMAERQYTRMEDWLTAKLAYEGLPSKTYLSKTLAQYTSKTCSNCGFTITSADYDRVLEKLKKTATGWMTTINGKELKVEGQITYYNRYKRQNVVKDLSVELDRLSEESVNNDISSWTKGRSGEALSLLKKRFSHRPVQEKFVCLNCGFETHADEQAALNIARSWLFLRSQEYKKYQTNKTTGNTDKRAFVETWQSFYRKKLKEVWKPAV

SEQ ID NO: 27445 - protein, 978 aa, synthetic construct
  REGION 1..978: note = engineered CasX variant
QEIKRINKIRRRLVKDSNTKKAGKTGPMKTLLVRVMTPDLRERLENLRKKPENIPQPISNTSRANLNKLLTDYTEMKKAILHVYWEEFQKDPVGLMSRVAQPASKKIDQNKLKPEMDEKGNLTTAGFACSQCGQPLFVYKLEQVSEKGKAYTNYFGRCNVAEHEKLILLAQLKPEKDSDEAVTYSLGKFGQRALDFYSIHVTKESTHPVKPLAQIAGNRYASGPVGKALSDACMGTIASFLSKYQDIIIEHQKVVKGNQKRLESLRELAGKENLEYPSVTLPPQPHTKEGVDAYNEVIARVRMWVNLNLWQKLKLSRDDAKPLLRLKGFPSFPLVERQANEVDWWDMVCNVKKLINEKKEDGKVFWQNLAGYKRQEALRPYLSSEEDRKKGKKFARYQLGDLLLHLEKKHGEDWGKVYDEAWERIDKKVEGLSKHIKLEEERRSEDAQSKAALTDWLRAKASFVIEGLKEADKDEFCRCELKLQKWYGDLRGKPFAIEAENSILDISGFSKQYNCAFIWQKDGVKKLNLYLIINYFKGGKLRFKKIKPEAFEANRFYTVINKKSGEIVPMEVNFNFDDPNLIILPLAFGKRQGREFIWNDLLSLETGSLKLANGRVIEKTLYNRRTRQDEPALFVALTFERREVLDSSNIKPMNCIGVDRGENIPAVIALTDPEGCPLSRFKDSLGNPTHILRIGESYKEKQRTIQAKKEVEQRRAGGYSRKYASKAKNLADDMVRNTARDLLYYAVTQDAMLIFENLSRGFGRQGKRTFMAERQYTRMEDWLTAKLAYEGLPSKTYLSKTLAQYTSKTCSNCGFTITSADYDRVLEKLKKTATGWMTTINGKELKVEGQITYYNRYKRQNVVKDLSVELDRLSEESVNNDISSWTKGRSGEALSLLKKRFSHRPVQEKFVCLNCGFETHADEQAALNIARSWLFLRSQEYKKYQTNKTTGNTDKRAFVETWQSFYRKKLKEVWKPAV

SEQ ID NO: 27446 - protein, 978 aa, synthetic construct
  REGION 1..978: note = engineered CasX variant
QEIKRINKIRRRLVKDSNTKKAGKTGPMKTLLVRVMTPDLRERLENLRKKPENIPQPISNTSRANLNKLLTDYTEMKKAILHVYWEEFQKDPVGLMSRVAQPASKKIDQNKLKPEMDEKGNLTTAGFACSQCGQPLFVYKLEQVSEKGKAYTNYFGRCNVAEHEKLILLAQLKPEKDSDEAVTYSLGKFGQRALDFYSIHVTKESTHPVKPLAQIAGNRYASGPVGKALSDACMGTIASFLSKYQDIIIEHQKVVKGNQKRLESLRELAGKENLEYPSVTLPPQPHTKEGVDAYNEVIARVRMWVNLNLWQKLKLSRDDAKPLLRLKGFPSFPLVERQANEVDWWDMVCNVKKLINEKKEDGKVFWQNLAGYKRQEALRPYLSSEEDRKKGKKFARYQLGDLLLHLEKKHGEDWGKVYDEAWERIDKKVEGLSKHIKLEEERRSEDAQSKAALTDWLRAKASFVIEGLKEADKDEFCRCELKLQKWYGDLRGKPFAIEAENSILDISGFSKQYNCAFIWQKDGVKKLNLYLIINYFKGGKLRFKKIKPEAFEANRFYTVINKKSGEIVPMEVNFNFDDPNLIILPLAFGKRQGREFIWNDLLSLETGSLKLANGRVIEKTLYNRRTRQDEPALFVALTFERREVLDSSNIKPMNCIGVDRGENIPAVIALTDPEGCPLSRFKDSLGNPTHILRIGESYKEKQRTIQAKKEVEQRRACGYSRKYASKAKNLADDMVRNTARDLLYYAVTQDAMLIFENLSRGFGRQGKRTFMAERQYTRMEDWLTAKLAYEGLPSKTYLSKTLAQYTSKTCSNCGFTITSADYDRVLEKLKKTATGWMTTINGKELKVEGQITYYNRYKRQNVVKDLSVELDRLSEESVNNDISSWTKGRSGEALSLLKKRFSHRPVQEKFVCLNCGFETHADEQAALNIARSWLFLRSQEYKKYQTNKTTGNTDKRAFVETWQSFYRKKLKEVWKPAV

SEQ ID NO: 27447 - protein, 978 aa, synthetic construct
  REGION 1..978: note = engineered CasX variant
QEIKRINKIRRRLVKDSNTKKAGKTGPMKTLLVRVMTPDLRERLENLRKKPENIPQPISNTSRANLNKLLTDYTEMKKAILHVYWEEFQKDPVGLMSRVAQPASKKIDQNKLKPEMDEKGNLTTAGFACSQCGQPLFVYKLEQVSEKGKAYTNYFGRCNVAEHEKLILLAQLKPEKDSDEAVTYSLGKFGQRALDFYSIHVTKESTHPVKPLAQIAGNRYASGPVGKALSDACMGTIASFLSKYQDIIIEHQKVVKGNQKRLESLRELAGKENLEYPSVTLPPQPHTKEGVDAYNEVIARVRMWVNLNLWQKLKLSRDDAKPLLRLKGFPSFPLVERQANEVDWWDMVCNVKKLINEKKEDGKVFWQNLAGYKRQEALRPYLSSEEDRKKGKKFARYQLGDLLLHLEKKHGEDWGKVYDEAWERIDKKVEGLSKHIKLEEERRSEDAQSKAALTDWLRAKASFVIEGLKEADKDEFCRCELKLQKWYGDLRGKPFAIEAENSILDISGFSKQYNCAFIWQKDGVKKLNLYLIINYFKGGKLRFKKIKPEAFEANRFYTVINKKSGEIVPMEVNFNFDDPNLIILPLAFGKRQGREFIWNDLLSLETGSLKLANGRVIEKTLYNRRTRQDEPALFVALTFERREVLDSSNIKPMMLIGVDRGENIPAVIALTDPEGCPLSRFKDSWGNPTHILRIGESYKEKQRTIQAKKEVEQRRAGGYSRKYASKAKNLADDMVRNTARDLLYYAVTQDAMLIFENLSRGFGRQGKRTFMAERQYTRMEDWLTAKLAYEGLPSKTYLSKTLAQYTSKTCSNCGFTITSADYDRVLEKLKKTATGWMTTINGKELKVEGQITYYNRYKRQNVVKDLSVELDRLSEESVNNDISSWTKGRSGEALSLLKKRFSHRPVQEKFVCLNCGFETHADEQAALNIARSWLFLRSQEYKKYQTNKTTGNTDKRAFVETWQSFYRKKLKEVWKPAV

SEQ ID NO: 27448 - protein, 978 aa, synthetic construct
  REGION 1..978: note = engineered CasX variant
QEIKRINKIRRRLVKDSNTKKAGKTGPMKTLLVRVMTPDLRERLENLRKKPENIPQPISNTSRANLNKLLTDYTEMKKAILHVYWEEFQKDPVGLMSRVAQPASKKIDQNKLKPEMDEKGNLTTAGFACSQCGQPLFVYKLEQVSEKGKAYTNYFGRCNVAEHEKLILLAQLKPEKDSDEAVTYSLGKFGQRALDFYSIHVTKESTHPVKPLAQIAGNRYASGPVGKALSDACMGTIASFLSKYQDIIIEHQKVVKGNQKRLESLRELAGKENLEYPSVTLPPQPHTKEGVDAYNEVIARVRMWVNLNLWQKLKLSRDDAKPLLRLKGFPSFPLVERQANEVDWWDMVCNVKKLINEKKEDGKVFWQNLAGYKRQEALRPYLSSEEDRKKGKKFARYQLGDLLLHLEKKHGEDWGKVYDEAWERIDKKVEGLSKHIKLEEERRSEDAQSKAALTDWLRAKASFVIEGLKEADKDEFCRCELKLQKWYGDLRGKPFAIEAENSILDISGFSKQYNCAFIWQKDGVKKLNLYLIINYFKGGKLRFKKIKPEAFEANRFYTVINKKSGEIVPMEVNFNFDDPNLIILPLAFGKRQGREFIWNDLLSLETGSLKLANGRVIEKTLYNRRTRQDEPALFVALTFERREVLDSSNIKPMMLIGVDRGENIPAVIALTDPEGCPLSRFKDSLGNPTHILRIGESYKEKQRTIQAKKEVEQRRAGGYSRKYASKAKNLADDMVRNTARDLLYYAVTQDAMLIFENLSRGFGRQGKRTFMAERQYTRMEDWLTAKLAYEGLPSKTYLSKTLAQYTSKTCSNCGFTITSADYDRVLEKLKKTATGWMTTINGKELKVEGQITYYNRYKRQNVVKDLSVELDRLSEESVNNDISSWTKGRSGEALSLLKKRFSHRPVQEKFVCLNCGFETHADEQAALNIARSWLFLRSQEYKKYQTNKTTGNTDKRAFVETWQSFYRKKLKEVWKPAV

SEQ ID NO: 27449 - protein, 978 aa, synthetic construct
  REGION 1..978: note = engineered CasX variant
QEIKRINKIRRRLVKDSNTKKAGKTGPMKTLLVRVMTPDLRERLENLRKKPENIPQPISNTSRANLNKLLTDYTEMKKAILHVYWEEFQKDPVGLMSRVAQPASKKIDQNKLKPEMDEKGNLTTAGFACSQCGQPLFVYKLEQVSEKGKAYTNYFGRCNVAEHEKLILLAQLKPEKDSDEAVTYSLGKFGQRALDFYSIHVTKESTHPVKPLAQIAGNRYASGPVGKALSDACMGTIASFLSKYQDIIIEHQKVVKGNQKRLESLRELAGKENLEYPSVTLPPQPHTKEGVDAYNEVIARVRMWVNLNLWQKLKLSRDDAKPLLRLKGFPSFPLVERQANEVDWWDMVCNVKKLINEKKEDGKVFWQNLAGYKRQEALRPYLSSEEDRKKGKKFARYQLGDLLLHLEKKHGEDWGKVYDEAWERIDKKVEGLSKHIKLEEERRSEDAQSKAALTDWLRAKASFVIEGLKEADKDEFCRCELKLQKWYGDLRGKPFAIEAENSILDISGFSKQYNCAFIWQKDGVKKLNLYLIINYFKGGKLRFKKIKPEAFEANRFYTVINKKSGEIVPMEVNFNFDDPNLIILPLAFGKRQGREFIWNDLLSLETGSLKLANGRVIEKTLYNRRTRQDEPALFVALTFERREVLDSSNIKPMMLIGVDRGENIPAVIALTDPEGCPLSRFKDSEGNPTHILRIGESYKEKQRTIQAKKEVEQRRAGGYSRKYASKAKNLADDMVRNTARDLLYYAVTQDAMLIFENLSRGFGRQGKRTFMAERQYTRMEDWLTAKLAYEGLPSKTYLSKTLAQYTSKTCSNCGFTITSADYDRVLEKLKKTATGWMTTINGKELKVEGQITYYNRYKRQNVVKDLSVELDRLSEESVNNDISSWTKGRSGEALSLLKKRFSHRPVQEKFVCLNCGFETHADEQAALNIARSWLFLRSQEYKKYQTNKTTGNTDKRAFVETWQSFYRKKLKEVWKPAV

SEQ ID NO: 27450 - protein, 978 aa, synthetic construct
  REGION 1..978: note = engineered CasX variant
QEIKRINKIRRRLVKDSNTKKAGKTGPMKTLLVRVMTPDLRERLENLRKKPENIPQPISNTSRANLNKLLTDYTEMKKAILHVYWEEFQKDPVGLMSRVAQPASKKIDQNKLKPEMDEKGNLTTAGFACSQCGQPLFVYKLEQVSEKGKAYTNYFGRCNVAEHEKLILLAQLKPEKDSDEAVTYSLGKFGQRALDFYSIHVTKESTHPVKPLAQIAGNRYASGPVGKALSDACMGTIASFLSKYQDIIIEHQKVVKGNQKRLESLRELAGKENLEYPSVTLPPQPHTKEGVDAYNEVIARVRMWVNLNLWQKLKLSRDDAKPLLRLKGFPSFPLVERQANEVDWWDMVCNVKKLINEKKEDGKVFWQNLAGYKRQEALRPYLSSEEDRKKGKKFARYQLGDLLLHLEKKHGEDWGKVYDEAWERIDKKVEGLSKHIKLEEERRSEDAQSKAALTDWLRAKASFVIEGLKEADKDEFCRCELKLQKWYGDLRGKPFAIEAENSILDISGFSKQYNCAFIWQKDGVKKLNLYLIINYFKGGKLRFKKIKPEAFEANRFYTVINKKSGEIVPMEVNFNFDDPNLIILPLAFGKRQGREFIWNDLLSLETGSLKLANGRVIEKTLYNRRTRQDEPALFVALTFERREVLDSSNIKPMMLIGVDRGENIPAVIALTDPEGCPLSRFKDSEGNKTHILRIGESYKEKQRTIQAKKEVEQRRAGGYSRKYASKAKNLADDMVRNTARDLLYYAVTQDAMLIFENLSRGFGRQGKRTFMAERQYTRMEDWLTAKLAYEGLPSKTYLSKTLAQYTSKTCSNCGFTITSADYDRVLEKLKKTATGWMTTINGKELKVEGQITYYNRYKRQNVVKDLSVELDRLSEESVNNDISSWTKGRSGEALSLLKKRFSHRPVQEKFVCLNCGFETHADEQAALNIARSWLFLRSQEYKKYQTNKTTGNTDKRAFVETWQSFYRKKLKEVWKPAV

SEQ ID NO: 27451 - protein, 978 aa, synthetic construct
  REGION 1..978: note = engineered CasX variant
QEIKRINKIRRRLVKDSNTKKAGKTGPMKTLLVRVMTPDLRERLENLRKKPENIPQPISNTSRANLNKLLTDYTEMKKAILHVYWEEFQKDPVGLMSRVAQPASKKIDQNKLKPEMDEKGNLTTAGFACSQCGQPLFVYKLEQVSEKGKAYTNYFGRCNVAEHEKLILLAQLKPEKDSDEAVTYSLGKFGQRALDFYSIHVTKESTHPVKPLAQIAGNRYASGPVGKALSDACMGTIASFLSKYQDIIIEHQKVVKGNQKRLESLRELAGKENLEYPSVTLPPQPHTKEGVDAYNEVIARVRMWVNLNLWQKLKLSRDDAKPLLRLKGFPSFPLVERQANEVDWWDMVCNVKKLINEKKEDGKVFWQNLAGYKRQEALRPYLSSEEDRKKGKKFARYQLGDLLLHLEKKHGEDWGKVYDEAWERIDKKVEGLSKHIKLEEERRSEDAQSKAALTDWLRAKASFVIEGLKEADKDEFCRCELKLQKWYGDLRGKPFAIEAENSILDISGFSKQYNCAFIWQKDGVKKLNLYLIINYFKGGKLRFKKIKPEAFEANRFYTVINKKSGEIVPMEVNFNFDDPNLIILPLAFGKRQGREFIWNDLLSLETGSLKLANGRVIEKTLYNRRTRQDEPALFVALTFERREVLDSSNIKPMLLIGVDRGENIPAVIALTDPEGCPLSRFKDSLGNPTHILRLGESYKEKQRTIQAKKEVEQRRAGGYSRKYASKAKNLADDMVRNTARDLLYYAVTQDAMLIFENLSRGFGRQGKRTFMAERQYTRMEDWLTAKLAYEGLPSKTYLSKTLAQYTSKTCSNCGFTITSADYDRVLEKLKKTATGWMTTINGKELKVEGQITYYNRYKRQNVVKDLSVELDRLSEESVNNDISSWTKGRSGEALSLLKKRFSHRPVQEKFVCLNCGFETHADEQAALNIARSWLFLRSQEYKKYQTNKTTGNTDKRAFVETWQSFYRKKLKEVWKPAV

SEQ ID NO: 27452 - protein, 978 aa, synthetic construct
  REGION 1..978: note = engineered CasX variant
QEIKRINKIRRRLVKDSNTKKAGKTGPMKTLLVRVMTPDLRERLENLRKKPENIPQPISNTSRANLNKLLTDYTEMKKAILHVYWEEFQKDPVGLMSRVAQPASKKIDQNKLKPEMDEKGNLTTAGFACSQCGQPLFVYKLEQVSEKGKAYTNYFGRCNVAEHEKLILLAQLKPEKDSDEAVTYSLGKFGQRALDFYSIHVTKESTHPVKPLAQIAGNRYASGPVGKALSDACMGTIASFLSKYQDIIIEHQKVVKGNQKRLESLRELAGKENLEYPSVTLPPQPHTKEGVDAYNEVIARVRMWVNLNLWQKLKLSRDDAKPLLRLKGFPSFPLVERQANEVDWWDMVCNVKKLINEKKEDGKVFWQNLAGYKRQEALRPYLSSEEDRKKGKKFARYQLGDLLLHLEKKHGEDWGKVYDEAWERIDKKVEGLSKHIKLEEERRSEDAQSKAALTDWLRAKASFVIEGLKEADKDEFCRCELKLQKWYGDLRGKPFAIEAENSILDISGFSKQYNCAFIWQKDGVKKLNLYLIINYFKGGKLRFKKIKPEAFEANRFYTVINKKSGEIVPMEVNFNFDDPNLIILPLAFGKRQGREFIWNDLLSLETGSLKLANGRVIEKTLYNRRTRQDEPALFVALTFERREVLDSSNIKPMLLIGVDRGENIPAVIALTDPEGCPLSRFKDSLGNPTHILRLGESYKEKQRTIQAFKEVEQRRAGGYSRKYASKAKNLADDMVRNTARDLLYYAVTQDAMLIFENLSRGFGRQGKRTFMAERQYTRMEDWLTAKLAYEGLPSKTYLSKTLAQYTSKTCSNCGFTITSADYDRVLEKLKKTATGWMTTINGKELKVEGQITYYNRYKRQNVVKDLSVELDRLSEESVNNDISSWTKGRSGEALSLLKKRFSHRPVQEKFVCLNCGFETHADEQAALNIARSWLFLRSQEYKKYQTNKTTGNTDKRAFVETWQSFYRKKLKEVWKPAV

SEQ ID NO: 27453 - protein, 978 aa, synthetic construct
  REGION 1..978: note = engineered CasX variant
QEIKRINKIRRRLVKDSNTKKAGKTGPMKTLLVRVMTPDLRERLENLRKKPENIPQPISNTSRANLNKLLTDYTEMKKAILHVYWEEFQKDPVGLMSRVAQPASKKIDQNKLKPEMDEKGNLTTAGFACSQCGQPLFVYKLEQVSEKGKAYTNYFGRCNVAEHEKLILLAQLKPEKDSDEAVTYSLGKFGQRALDFYSIHVTKESTHPVKPLAQIAGNRYASGPVGKALSDACMGTIASFLSKYQDIIIEHQKVVKGNQKRLESLRELAGKENLEYPSVTLPPQPHTKEGVDAYNEVIARVRMWVNLNLWQKLKLSRDDAKPLLRLKGFPSFPLVERQANEVDWWDMVCNVKKLINEKKEDGKVFWQNLAGYKRQEALRPYLSSEEDRKKGKKFARYQLGDLLLHLEKKHGEDWGKVYDEAWERIDKKVEGLSKHIKLEEERRSEDAQSKAALTDWLRAKASFVIEGLKEADKDEFCRCELKLQKWYGDLRGKPFAIEAENSILDISGFSKQYNCAFIWQKDGVKKLNLYLIINYFKGGKLRFKKIKPEAFEANRFYTVINKKSGEIVPMEVNFNFDDPNLIILPLAFGKRQGREFIWNDLLSLETGSLKLANGRVIEKTLYNRRTRQDEPALFVALTFERREVLDSSNIKPMKLIGVDRGENIPAVIALTDPEGCPLSRFKDSYGNPTHILRIGESYKEKQRTIQAYKEVEQRRAGGYSRKYASKAKNLADDMVRNTARDLLYYAVTQDAMLIFENLSRGFGRQGKRTFMAERQYTRMEDWLTAKLAYEGLPSKTYLSKTLAQYTSKTCSNCGFTITSADYDRVLEKLKKTATGWMTTINGKELKVEGQITYYNRYKRQNVVKDLSVELDRLSEESVNNDISSWTKGRSGEALSLLKKRFSHRPVQEKFVCLNCGFETHADEQAALNIARSWLFLRSQEYKKYQTNKTTGNTDKRAFVETWQSFYRKKLKEVWKPAV

SEQ ID NO: 27454 - protein, 978 aa, synthetic construct
  REGION 1..978: note = engineered CasX variant
QEIKRINKIRRRLVKDSNTKKAGKTGPMKTLLVRVMTPDLRERLENLRKKPENIPQPISNTSRANLNKLLTDYTEMKKAILHVYWEEFQKDPVGLMSRVAQPASKKIDQNKLKPEMDEKGNLTTAGFACSQCGQPLFVYKLEQVSEKGKAYTNYFGRCNVAEHEKLILLAQLKPEKDSDEAVTYSLGKFGQRALDFYSIHVTKESTHPVKPLAQIAGNRYASGPVGKALSDACMGTIASFLSKYQDIIIEHQKVVKGNQKRLESLRELAGKENLEYPSVTLPPQPHTKEGVDAYNEVIARVRMWVNLNLWQKLKLSRDDAKPLLRLKGFPSFPLVERQANEVDWWDMVCNVKKLINEKKEDGKVFWQNLAGYKRQEALRPYLSSEEDRKKGKKFARYQLGDLLLHLEKKHGEDWGKVYDEAWERIDKKVEGLSKHIKLEEERRSEDAQSKAALTDWLRAKASFVIEGLKEADKDEFCRCELKLQKWYGDLRGKPFAIEAENSILDISGFSKQYNCAFIWQKDGVKKLNLYLIINYFKGGKLRFKKIKPEAFEANRFYTVINKKSGEIVPMEVNFNFDDPNLIILPLAFGKRQGREFIWNDLLSLETGSLKLANGRVIEKTLYNRRTRQDEPALFVALTFERREVLDSSNIKPMKLIGVDRGENIPAVIALTDPEGCPLSRFKDSYGNPTHILRIGESYKEKQRTIQAKKEVEQRRAGGYSRKYASKAKNLADDMVRNTARDLLYYAVTQDAMLIFENLSRGFGRQGKRTFMAERQYTRMEDWLTAKLAYEGLPSKTYLSKTLAQYTSKTCSNCGFTITSADYDRVLEKLKKTATGWMTTINGKELKVEGQITYYNRYKRQNVVKDLSVELDRLSEESVNNDISSWTKGRSGEALSLLKKRFSHRPVQEKFVCLNCGFETHADEQAALNIARSWLFLRSQEYKKYQTNKTTGNTDKRAFVETWQSFYRKKLKEVWKPAV

SEQ ID NO: 27455 - protein, 978 aa, synthetic construct
  REGION 1..978: note = engineered CasX variant
QEIKRINKIRRRLVKDSNTKKAGKTGPMKTLLVRVMTPDLRERLENLRKKPENIPQPISNTSRANLNKLLTDYTEMKKAILHVYWEEFQKDPVGLMSRVAQPASKKIDQNKLKPEMDEKGNLTTAGFACSQCGQPLFVYKLEQVSEKGKAYTNYFGRCNVAEHEKLILLAQLKPEKDSDEAVTYSLGKFGQRALDFYSIHVTKESTHPVKPLAQIAGNRYASGPVGKALSDACMGTIASFLSKYQDIIIEHQKVVKGNQKRLESLRELAGKENLEYPSVTLPPQPHTKEGVDAYNEVIARVRMWVNLNLWQKLKLSRDDAKPLLRLKGFPSFPLVERQANEVDWWDMVCNVKKLINEKKEDGKVFWQNLAGYKRQEALRPYLSSEEDRKKGKKFARYQLGDLLLHLEKKHGEDWGKVYDEAWERIDKKVEGLSKHIKLEEERRSEDAQSKAALTDWLRAKASFVIEGLKEADKDEFCRCELKLQKWYGDLRGKPFAIEAENSILDISGFSKQYNCAFIWQKDGVKKLNLYLIINYFKGGKLRFKKIKPEAFEANRFYTVINKKSGEIVPMEVNFNFDDPNLIILPLAFGKRQGREFIWNDLLSLETGSLKLANGRVIEKTLYNRRTRQDEPALFVALTFERREVLDSSNIKPMKLIGVDRGENIPAVIALTDPEGCPLSRFKDSLGNPTHILRIGESYKEKQRTIQAYKEVEQRRAGGYSRKYASKAKNLADDMVRNTARDLLYYAVTQDAMLIFENLSRGFGRQGKRTFMAERQYTRMEDWLTAKLAYEGLPSKTYLSKTLAQYTSKTCSNCGFTITSADYDRVLEKLKKTATGWMTTINGKELKVEGQITYYNRYKRQNVVKDLSVELDRLSEESVNNDISSWTKGRSGEALSLLKKRFSHRPVQEKFVCLNCGFETHADEQAALNIARSWLFLRSQEYKKYQTNKTTGNTDKRAFVETWQSFYRKKLKEVWKPAV

SEQ ID NO: 27456 - protein, 978 aa, synthetic construct
  REGION 1..978: note = engineered CasX variant
QEIKRINKIRRRLVKDSNTKKAGKTGPMKTLLVRVMTPDLRERLENLRKKPENIPQPISNTSRANLNKLLTDYTEMKKAILHVYWEEFQKDPVGLMSRVAQPASKKIDQNKLKPEMDEKGNLTTAGFACSQCGQPLFVYKLEQVSEKGKAYTNYFGRCNVAEHEKLILLAQLKPEKDSDEAVTYSLGKFGQRALDFYSIHVTKESTHPVKPLAQIAGNRYASGPVGKALSDACMGTIASFLSKYQDIIIEHQKVVKGNQKRLESLRELAGKENLEYPSVTLPPQPHTKEGVDAYNEVIARVRMWVNLNLWQKLKLSRDDAKPLLRLKGFPSFPLVERQANEVDWWDMVCNVKKLINEKKEDGKVFWQNLAGYKRQEALRPYLSSEEDRKKGKKFARYQLGDLLLHLEKKHGEDWGKVYDEAWERIDKKVEGLSKHIKLEEERRSEDAQSKAALTDWLRAKASFVIEGLKEADKDEFCRCELKLQKWYGDLRGKPFAIEAENSILDISGFSKQYNCAFIWQKDGVKKLNLYLIINYFKGGKLRFKKIKPEAFEANRFYTVINKKSGEIVPMEVNFNFDDPNLIILPLAFGKRQGREFIWNDLLSLETGSLKLANGRVIEKTLYNRRTRQDEPALFVALTFERREVLDSSNIKPMKLIGVDRGENIPAVIALTDPEGCPLSRFKDSLGNPTHILRIGESYKEKQRTIQAKKEVEQRRAGGYSRKYASKAKNLADDMVRNTARDLLYYAVTQDAMLIFENLSRGFGRQGKRTFMAERQYTRMEDWLTAKLAYEGLPSKTYLSKTLAQYTSKTCSNCGFTITSADYDRVLEKLKKTATGWMTTINGKELKVEGQITYYNRYKRQNVVKDLSVELDRLSEESVNNDISSWTKGRSGEALSLLKKRFSHRPVQEKFVCLNCGFETHADEQAALNIARSWLFLRSQEYKKYQTNKTTGNTDKRAFVETWQSFYRKKLKEVWKPAV

SEQ ID NO: 27457 - protein, 978 aa, synthetic construct
  REGION 1..978: note = engineered CasX variant
QEIKRINKIRRRLVKDSNTKKAGKTGPMKTLLVRVMTPDLRERLENLRKKPENIPQPISNTSRANLNKLLTDYTEMKKAILHVYWEEFQKDPVGLMSRVAQPASKKIDQNKLKPEMDEKGNLTTAGFACSQCGQPLFVYKLEQVSEKGKAYTNYFGRCNVAEHEKLILLAQLKPEKDSDEAVTYSLGKFGQRALDFYSIHVTKESTHPVKPLAQIAGNRYASGPVGKALSDACMGTIASFLSKYQDIIIEHQKVVKGNQKRLESLRELAGKENLEYPSVTLPPQPHTKEGVDAYNEVIARVRMWVNLNLWQKLKLSRDDAKPLLRLKGFPSFPLVERQANEVDWWDMVCNVKKLINEKKEDGKVFWQNLAGYKRQEALRPYLSSEEDRKKGKKFARYQLGDLLLHLEKKHGEDWGKVYDEAWERIDKKVEGLSKHIKLEEERRSEDAQSKAALTDWLRAKASFVIEGLKEADKDEFCRCELKLQKWYGDLRGKPFAIEAENSILDISGFSKQYNCAFIWQKDGVKKLNLYLIINYFKGGKLRFKKIKPEAFEANRFYTVINKKSGEIVPMEVNFNFDDPNLIILPLAFGKRQGREFIWNDLLSLETGSLKLANGRVIEKTLYNRRTRQDEPALFVALTFERREVLDSSNIKPMKLIGVDRGENIPAVIALTDPEGCPLSRFKDSLGNPTHILRIGESFKQKQRTIQAKKEVEQRRAGGYSRKYASKAKNLADDMVRNTARDLLYYAVTQDAMLIFENLSRGFGRQGKRTFMAERQYTRMEDWLTAKLAYEGLPSKTYLSKTLAQYTSKTCSNCGFTITSADYDRVLEKLKKTATGWMTTINGKELKVEGQITYYNRYKRQNVVKDLSVELDRLSEESVNNDISSWTKGRSGEALSLLKKRFSHRPVQEKFVCLNCGFETHADEQAALNIARSWLFLRSQEYKKYQTNKTTGNTDKRAFVETWQSFYRKKLKEVWKPAV

SEQ ID NO: 27458 - protein, 978 aa, synthetic construct
  REGION 1..978: note = engineered CasX variant
QEIKRINKIRRRLVKDSNTKKAGKTGPMKTLLVRVMTPDLRERLENLRKKPENIPQPISNTSRANLNKLLTDYTEMKKAILHVYWEEFQKDPVGLMSRVAQPASKKIDQNKLKPEMDEKGNLTTAGFACSQCGQPLFVYKLEQVSEKGKAYTNYFGRCNVAEHEKLILLAQLKPEKDSDEAVTYSLGKFGQRALDFYSIHVTKESTHPVKPLAQIAGNRYASGPVGKALSDACMGTIASFLSKYQDIIIEHQKVVKGNQKRLESLRELAGKENLEYPSVTLPPQPHTKEGVDAYNEVIARVRMWVNLNLWQKLKLSRDDAKPLLRLKGFPSFPLVERQANEVDWWDMVCNVKKLINEKKEDGKVFWQNLAGYKRQEALRPYLSSEEDRKKGKKFARYQLGDLLLHLEKKHGEDWGKVYDEAWERIDKKVEGLSKHIKLEEERRSEDAQSKAALTDWLRAKASFVIEGLKEADKDEFCRCELKLQKWYGDLRGKPFAIEAENSILDISGFSKQYNCAFIWQKDGVKKLNLYLIINYFKGGKLRFKKIKPEAFEANRFYTVINKKSGEIVPMEVNFNFDDPNLIILPLAFGKRQGREFIWNDLLSLETGSLKLANGRVIEKTLYNRRTRQDEPALFVALTFERREVLDSSNIKPMKLIGVDRGENIPAVIALTDPEGCPLSRFKDSLGNPTHILRIGESFKEKQRTIQAKKEVEQRRAGGYSRKYASKAKNLADDMVRNTARDLLYYAVTQDAMLIFENLSRGFGRQGKRTFMAERQYTRMEDWLTAKLAYEGLPSKTYLSKTLAQYTSKTCSNCGFTITSADYDRVLEKLKKTATGWMTTINGKELKVEGQITYYNRYKRQNVVKDLSVELDRLSEESVNNDISSWTKGRSGEALSLLKKRFSHRPVQEKFVCLNCGFETHADEQAALNIARSWLFLRSQEYKKYQTNKTTGNTDKRAFVETWQSFYRKKLKEVWKPAV

SEQ ID NO: 27459 - protein, 978 aa, synthetic construct
  REGION 1..978: note = engineered CasX variant
QEIKRINKIRRRLVKDSNTKKAGKTGPMKTLLVRVMTPDLRERLENLRKKPENIPQPISNTSRANLNKLLTDYTEMKKAILHVYWEEFQKDPVGLMSRVAQPASKKIDQNKLKPEMDEKGNLTTAGFACSQCGQPLFVYKLEQVSEKGKAYTNYFGRCNVAEHEKLILLAQLKPEKDSDEAVTYSLGKFGQRALDFYSIHVTKESTHPVKPLAQIAGNRYASGPVGKALSDACMGTIASFLSKYQDIIIEHQKVVKGNQKRLESLRELAGKENLEYPSVTLPPQPHTKEGVDAYNEVIARVRMWVNLNLWQKLKLSRDDAKPLLRLKGFPSFPLVERQANEVDWWDMVCNVKKLINEKKEDGKVFWQNLAGYKRQEALRPYLSSEEDRKKGKKFARYQLGDLLLHLEKKHGEDWGKVYDEAWERIDKKVEGLSKHIKLEEERRSEDAQSKAALTDWLRAKASFVIEGLKEADKDEFCRCELKLQKWYGDLRGKPFAIEAENSILDISGFSKQYNCAFIWQKDGVKKLNLYLIINYFKGGKLRFKKIKPEAFEANRFYTVINKKSGEIVPMEVNFNFDDPNLIILPLAFGKRQGREFIWNDLLSLETGSLKLANGRVIEKTLYNRRTRQDEPALFVALTFERREVLDSSNIKPMHLIGVDRGENIPAVIALTDPEGCPLSRFKDSLGNPTHILRIGESYKEQQRTIQAKKEVEQRRAGGYSRKYASKAKNLADDMVRNTARDLLYYAVTQDAMLIFENLSRGFGRQGKRTFMAERQYTRMEDWLTAKLAYEGLPSKTYLSKTLAQYTSKTCSNCGFTITSADYDRVLEKLKKTATGWMTTINGKELKVEGQITYYNRYKRQNVVKDLSVELDRLSEESVNNDISSWTKGRSGEALSLLKKRFSHRPVQEKFVCLNCGFETHADEQAALNIARSWLFLRSQEYKKYQTNKTTGNTDKRAFVETWQSFYRKKLKEVWKPAV

SEQ ID NO: 27460 - protein, 978 aa, synthetic construct
  REGION 1..978: note = engineered CasX variant
QEIKRINKIRRRLVKDSNTKKAGKTGPMKTLLVRVMTPDLRERLENLRKKPENIPQPISNTSRANLNKLLTDYTEMKKAILHVYWEEFQKDPVGLMSRVAQPASKKIDQNKLKPEMDEKGNLTTAGFACSQCGQPLFVYKLEQVSEKGKAYTNYFGRCNVAEHEKLILLAQLKPEKDSDEAVTYSLGKFGQRALDFYSIHVTKESTHPVKPLAQIAGNRYASGPVGKALSDACMGTIASFLSKYQDIIIEHQKVVKGNQKRLESLRELAGKENLEYPSVTLPPQPHTKEGVDAYNEVIARVRMWVNLNLWQKLKLSRDDAKPLLRLKGFPSFPLVERQANEVDWWDMVCNVKKLINEKKEDGKVFWQNLAGYKRQEALRPYLSSEEDRKKGKKFARYQLGDLLLHLEKKHGEDWGKVYDEAWERIDKKVEGLSKHIKLEEERRSEDAQSKAALTDWLRAKASFVIEGLKEADKDEFCRCELKLQKWYGDLRGKPFAIEAENSILDISGFSKQYNCAFIWQKDGVKKLNLYLIINYFKGGKLRFKKIKPEAFEANRFYTVINKKSGEIVPMEVNFNFDDPNLIILPLAFGKRQGREFIWNDLLSLETGSLKLANGRVIEKTLYNRRTRQDEPALFVALTFERREVLDSSNIKPMHLIGVDRGENIPAVIALTDPEGCPLSRFKDSLGNPTHILRIGESYKEKQRTIQAKKEVEQRRAGGYSRKYASKAKNLADDMVRNTARDLLYYAVTQDAMLIFENLSRGFGRQGKRTFMAERQYTRMEDWLTAKLAYEGLPSKTYLSKTLAQYTSKTCSNCGFTITSADYDRVLEKLKKTATGWMTTINGKELKVEGQITYYNRYKRQNVVKDLSVELDRLSEESVNNDISSWTKGRSGEALSLLKKRFSHRPVQEKFVCLNCGFETHADEQAALNIARSWLFLRSQEYKKYQTNKTTGNTDKRAFVETWQSFYRKKLKEVWKPAV

SEQ ID NO: 27461 - protein, 978 aa, synthetic construct
  REGION 1..978: note = engineered CasX variant
QEIKRINKIRRRLVKDSNTKKAGKTGPMKTLLVRVMTPDLRERLENLRKKPENIPQPISNTSRANLNKLLTDYTEMKKAILHVYWEEFQKDPVGLMSRVAQPASKKIDQNKLKPEMDEKGNLTTAGFACSQCGQPLFVYKLEQVSEKGKAYTNYFGRCNVAEHEKLILLAQLKPEKDSDEAVTYSLGKFGQRALDFYSIHVTKESTHPVKPLAQIAGNRYASGPVGKALSDACMGTIASFLSKYQDIIIEHQKVVKGNQKRLESLRELAGKENLEYPSVTLPPQPHTKEGVDAYNEVIARVRMWVNLNLWQKLKLSRDDAKPLLRLKGFPSFPLVERQANEVDWWDMVCNVKKLINEKKEDGKVFWQNLAGYKRQEALRPYLSSEEDRKKGKKFARYQLGDLLLHLEKKHGEDWGKVYDEAWERIDKKVEGLSKHIKLEEERRSEDAQSKAALTDWLRAKASFVIEGLKEADKDEFCRCELKLQKWYGDLRGKPFAIEAENSILDISGFSKQYNCAFIWQKDGVKKLNLYLIINYFKGGKLRFKKIKPEAFEANRFYTVINKKSGEIVPMEVNFNFDDPNLIILPLAFGKRQGREFIWNDLLSLETGSLKLANGRVIEKTLYNRRTRQDEPALFVALTFERREVLDSSNIKPMHLIGVDRGENIPAVIALTDPEGCPLSRFKDSLGNPTHILRIGESYKEKQRTIQAAKEVEQRRAGGYSRKYASKAKNLADDMVRNTARDLLYYAVTQDAMLIFENLSRGFGRQGKRTFMAERQYTRMEDWLTAKLAYEGLPSKTYLSKTLAQYTSKTCSNCGFTITSADYDRVLEKLKKTATGWMTTINGKELKVEGQITYYNRYKRQNVVKDLSVELDRLSEESVNNDISSWTKGRSGEALSLLKKRFSHRPVQEKFVCLNCGFETHADEQAALNIARSWLFLRSQEYKKYQTNKTTGNTDKRAFVETWQSFYRKKLKEVWKPAV

SEQ ID NO: 27462 - protein, 978 aa, synthetic construct
  REGION 1..978: note = engineered CasX variant
QEIKRINKIRRRLVKDSNTKKAGKTGPMKTLLVRVMTPDLRERLENLRKKPENIPQPISNTSRANLNKLLTDYTEMKKAILHVYWEEFQKDPVGLMSRVAQPASKKIDQNKLKPEMDEKGNLTTAGFACSQCGQPLFVYKLEQVSEKGKAYTNYFGRCNVAEHEKLILLAQLKPEKDSDEAVTYSLGKFGQRALDFYSIHVTKESTHPVKPLAQIAGNRYASGPVGKALSDACMGTIASFLSKYQDIIIEHQKVVKGNQKRLESLRELAGKENLEYPSVTLPPQPHTKEGVDAYNEVIARVRMWVNLNLWQKLKLSRDDAKPLLRLKGFPSFPLVERQANEVDWWDMVCNVKKLINEKKEDGKVFWQNLAGYKRQEALRPYLSSEEDRKKGKKFARYQLGDLLLHLEKKHGEDWGKVYDEAWERIDKKVEGLSKHIKLEEERRSEDAQSKAALTDWLRAKASFVIEGLKEADKDEFCRCELKLQKWYGDLRGKPFAIEAENSILDISGFSKQYNCAFIWQKDGVKKLNLYLIINYFKGGKLRFKKIKPEAFEANRFYTVINKKSGEIVPMEVNFNFDDPNLIILPLAFGKRQGREFIWNDLLSLETGSLKLANGRVIEKTLYNRRTRQDEPALFVALTFERREVLDSSNIKPMGLIGVDRGENIPAVIALTDPEGCPLSRFKDSLGNPTHILRIGESYKEKQRTIQAKKEVEQRRAGGYSRKYASKAKNLADDMVRNTARDLLYYAVTQDAMLIFENLSRGFGRQGKRTFMAERQYTRMEDWLTAKLAYEGLPSKTYLSKTLAQYTSKTCSNCGFTITSADYDRVLEKLKKTATGWMTTINGKELKVEGQITYYNRYKRQNVVKDLSVELDRLSEESVNNDISSWTKGRSGEALSLLKKRFSHRPVQEKFVCLNCGFETHADEQAALNIARSWLFLRSQEYKKYQTNKTTGNTDKRAFVETWQSFYRKKLKEVWKPAV

SEQ ID NO: 27463 - protein, 978 aa, synthetic construct
  REGION 1..978: note = engineered CasX variant
QEIKRINKIRRRLVKDSNTKKAGKTGPMKTLLVRVMTPDLRERLENLRKKPENIPQPISNTSRANLNKLLTDYTEMKKAILHVYWEEFQKDPVGLMSRVAQPASKKIDQNKLKPEMDEKGNLTTAGFACSQCGQPLFVYKLEQVSEKGKAYTNYFGRCNVAEHEKLILLAQLKPEKDSDEAVTYSLGKFGQRALDFYSIHVTKESTHPVKPLAQIAGNRYASGPVGKALSDACMGTIASFLSKYQDIIIEHQKVVKGNQKRLESLRELAGKENLEYPSVTLPPQPHTKEGVDAYNEVIARVRMWVNLNLWQKLKLSRDDAKPLLRLKGFPSFPLVERQANEVDWWDMVCNVKKLINEKKEDGKVFWQNLAGYKRQEALRPYLSSEEDRKKGKKFARYQLGDLLLHLEKKHGEDWGKVYDEAWERIDKKVEGLSKHIKLEEERRSEDAQSKAALTDWLRAKASFVIEGLKEADKDEFCRCELKLQKWYGDLRGKPFAIEAENSILDISGFSKQYNCAFIWQKDGVKKLNLYLIINYFKGGKLRFKKIKPEAFEANRFYTVINKKSGEIVPMEVNFNFDDPNLIILPLAFGKRQGREFIWNDLLSLETGSLKLANGRVIEKTLYNRRTRQDEPALFVALTFERREVLDSSNIKPMALIGVDRGENIPAVIALTDPEGCPLSRFKDSLGNPTHILRIGESYKEKQRTIQAKKEVEQRRAGGYSRKYASKAKNLADDMVRNTARDLLYYAVTQDAMLIFENLSRGFGRQGKRTFMAERQYTRMEDWLTAKLAYEGLPSKTYLSKTLAQYTSKTCSNCGFTITSADYDRVLEKLKKTATGWMTTINGKELKVEGQITYYNRYKRQNVVKDLSVELDRLSEESVNNDISSWTKGRSGEALSLLKKRFSHRPVQEKFVCLNCGFETHADEQAALNIARSWLFLRSQEYKKYQTNKTTGNTDKRAFVETWQSFYRKKLKEVWKPAV

SEQ ID NO: 27464 - protein, 978 aa, synthetic construct
  REGION 1..978: note = engineered CasX variant
QEIKRINKIRRRLVKDSNTKKAGKTGPMKTLLVRVMTPDLRERLENLRKKPENIPQPISNTSRANLNKLLTDYTEMKKAILHVYWEEFQKDPVGLMSRVAQPASKKIDQNKLKPEMDEKGNLTTAGFACSQCGQPLFVYKLEQVSEKGKAYTNYFGRCNVAEHEKLILLAQLKPEKDSDEAVTYSLGKFGQRALDFYSIHVTKESTHPVKPLAQIAGNRYASGPVGKALSDACMGTIASFLSKYQDIIIEHQKVVKGNQKRLESLRELAGKENLEYPSVTLPPQPHTKEGVDAYNEVIARVRMWVNLNLWQKLKLSRDDAKPLLRLKGFPSFPLVERQANEVDWWDMVCNVKKLINEKKEDGKVFWQNLAGYKRQEALRPYLSSEEDRKKGKKFARYQLGDLLLHLEKKHGEDWGKVYDEAWERIDKKVEGLSKHIKLEEERRSEDAQSKAALTDWLRAKASFVIEGLKEADKDEFCRCELKLQKWYGDLRGKPFAIEAENSILDISGFSKQYNCAFIWQKDGVKKLNLYLIINYFKGGKLRFKKIKPEAFEANRFYTVINKKSGEIVPMEVNFNFDDPNLIILPLAFGKRQGREFIWNDLLSLETGSLKLANGRVIEKTLYNRRTRQDEPALFVALTFERREVLDSSNIKPMALIGVDRGENIPAVIALTDPEGCPLSRFKDSLGNPTHILRIGESYKEKQRTIQAKKCVEQRRAGGYSRKYASKAKNLADDMVRNTARDLLYYAVTQDAMLIFENLSRGFGRQGKRTFMAERQYTRMEDWLTAKLAYEGLPSKTYLSKTLAQYTSKTCSNCGFTITSADYDRVLEKLKKTATGWMTTINGKELKVEGQITYYNRYKRQNVVKDLSVELDRLSEESVNNDISSWTKGRSGEALSLLKKRFSHRPVQEKFVCLNCGFETHADEQAALNIARSWLFLRSQEYKKYQTNKTTGNTDKRAFVETWQSFYRKKLKEVWKPAV

SEQ ID NO: 27465 - protein, 978 aa, synthetic construct
  REGION 1..978: note = engineered CasX variant
QEIKRINKIRRRLVKDSNTKKAGKTGPMKTLLVRVMTPDLRERLENLRKKPENIPQPISNTSRANLNKLLTDYTEMKKAILHVYWEEFQKDPVGLMSRVAQPASKKIDQNKLKPEMDEKGNLTTAGFACSQCGQPLFVYKLEQVSEKGKAYTNYFGRCNVAEHEKLILLAQLKPEKDSDEAVTYSLGKFGQRALDFYSIHVTKESTHPVKPLAQIAGNRYASGPVGKALSDACMGTIASFLSKYQDIIIEHQKVVKGNQKRLESLRELAGKENLEYPSVTLPPQPHTKEGVDAYNEVIARVRMWVNLNLWQKLKLSRDDAKPLLRLKGFPSFPLVERQANEVDWWDMVCNVKKLINEKKEDGKVFWQNLAGYKRQEALRPYLSSEEDRKKGKKFARYQLGDLLLHLEKKHGEDWGKVYDEAWERIDKKVEGLSKHIKLEEERRSEDAQSKAALTDWLRAKASFVIEGLKEADKDEFCRCELKLQKWYGDLRGKPFAIEAENSILDISGFSKQYNCAFIWQKDGVKKLNLYLIINYFKGGKLRFKKIKPEAFEANRFYTVINKKSGEIVPMEVNFNFDDPNLIILPLAFGKRQGREFIWNDLLSLETGSLKLANGRVIEKTLYNRRTRQDEPALFVALTFERREVLDSSNIKPMALIGVDRGENIPAVIALTDPEGCPLSRFKDSLGNPTHILRIGESYKCKQRTIQAKKEVEQRRAGGYSRKYASKAKNLADDMVRNTARDLLYYAVTQDAMLIFENLSRGFGRQGKRTFMAERQYTRMEDWLTAKLAYEGLPSKTYLSKTLAQYTSKTCSNCGFTITSADYDRVLEKLKKTATGWMTTINGKELKVEGQITYYNRYKRQNVVKDLSVELDRLSEESVNNDISSWTKGRSGEALSLLKKRFSHRPVQEKFVCLNCGFETHADEQAALNIARSWLFLRSQEYKKYQTNKTTGNTDKRAFVETWQSFYRKKLKEVWKPAV

SEQ ID NO: 27466 - protein, 978 aa, synthetic construct
  REGION 1..978: note = engineered CasX variant
QEIKRINKIRRRLVKDSNTKKAGKTGPMKTLLVRVMTPDLRERLENLRKKPENIPQPISNTSRANLNKLLTDYTEMKKAILHVYWEEFQKDPVGLMSRVAQPASKKIDQNKLKPEMDEKGNLTTAGFACSQCGQPLFVYKLEQVSEKGKAYTNYFGRCNVAEHEKLILLAQLKPEKDSDEAVTYSLGKFGQRALDFYSIHVTKESTHPVKPLAQIAGNRYASGPVGKALSDACMGTIASFLSKYQDIIIEHQKVVKGNQKRLESLRELAGKENLEYPSVTLPPQPHTKEGVDAYNEVIARVRMWVNLNLWQKLKLSRDDAKPLLRLKGFPSFPLVERQANEVDWWDMVCNVKKLINEKKEDGKVFWQNLAGYKRQEALRPYLSSEEDRKKGKKFARYQLGDLLLHLEKKHGEDWGKVYDEAWERIDKKVEGLSKHIKLEEERRSEDAQSKAALTDWLRAKASFVIEGLKEADKDEFCRCELKLQKWYGDLRGKPFAIEAENSILDISGFSKQYNCAFIWQKDGVKKLNLYLIINYFKGGKLRFKKIKPEAFEANRFYTVINKKSGEIVPMEVNFNFDDPNLIILPLAFGKRQGREFIWNDLLSLETGSLKLANGRVIEKTLYNRRTRQDEPALFVALTFERREVLDSSNIKPMALIGVDRGENIPAVIALTDPEGCPLSRFKDSLGNPTHILRIGEPYKEKQRTIQAKKEVEQRRAGGYSRKYASKAKNLADDMVRNTARDLLYYAVTQDAMLIFENLSRGFGRQGKRTFMAERQYTRMEDWLTAKLAYEGLPSKTYLSKTLAQYTSKTCSNCGFTITSADYDRVLEKLKKTATGWMTTINGKELKVEGQITYYNRYKRQNVVKDLSVELDRLSEESVNNDISSWTKGRSGEALSLLKKRFSHRPVQEKFVCLNCGFETHADEQAALNIARSWLFLRSQEYKKYQTNKTTGNTDKRAFVETWQSFYRKKLKEVWKPAV

SEQ ID NO: 27467 - protein, 978 aa, synthetic construct
  REGION 1..978: note = engineered CasX variant
QEIKRINKIRRRLVKDSNTKKAGKTGPMKTLLVRVMTPDLRERLENLRKKPENIPQPISNTSRANLNKLLTDYTEMKKAILHVYWEEFQKDPVGLMSRVAQPASKKIDQNKLKPEMDEKGNLTTAGFACSQCGQPLFVYKLEQVSEKGKAYTNYFGRCNVAEHEKLILLAQLKPEKDSDEAVTYSLGKFGQRALDFYSIHVTKESTHPVKPLAQIAGNRYASGPVGKALSDACMGTIASFLSKYQDIIIEHQKVVKGNQKRLESLRELAGKENLEYPSVTLPPQPHTKEGVDAYNEVIARVRMWVNLNLWQKLKLSRDDAKPLLRLKGFPSFPLVERQANEVDWWDMVCNVKKLINEKKEDGKVFWQNLAGYKRQEALRPYLSSEEDRKKGKKFARYQLGDLLLHLEKKHGEDWGKVYDEAWERIDKKVEGLSKHIKLEEERRSEDAQSKAALTDWLRAKASFVIEGLKEADKDEFCRCELKLQKWYGDLRGKPFAIEAENSILDISGFSKQYNCAFIWQKDGVKKLNLYLIINYFKGGKLRFKKIKPEAFEANRFYTVINKKSGEIVPMEVNFNFDDPNLIILPLAFGKRQGREFIWNDLLSLETGSLKLANGRVIEKTLYNRRTRQDEPALFVALTFERREVLDSSNIKPMALIGVDRGENIPAVIALTDPEGCPLSRFKDSLGNPTHILRIGEPYKCKQRTIQAKKEVEQRRAGGYSRKYASKAKNLADDMVRNTARDLLYYAVTQDAMLIFENLSRGFGRQGKRTFMAERQYTRMEDWLTAKLAYEGLPSKTYLSKTLAQYTSKTCSNCGFTITSADYDRVLEKLKKTATGWMTTINGKELKVEGQITYYNRYKRQNVVKDLSVELDRLSEESVNNDISSWTKGRSGEALSLLKKRFSHRPVQEKFVCLNCGFETHADEQAALNIARSWLFLRSQEYKKYQTNKTTGNTDKRAFVETWQSFYRKKLKEVWKPAV

SEQ ID NO: 27468 - protein, 978 aa, synthetic construct
  REGION 1..978: note = engineered CasX variant
QEIKRINKIRRRLVKDSNTKKAGKTGPMKTLLVRVMTPDLRERLENLRKKPENIPQPISNTSRANLNKLLTDYTEMKKAILHVYWEEFQKDPVGLMSRVAQPASKKIDQNKLKPEMDEKGNLTTAGFACSQCGQPLFVYKLEQVSEKGKAYTNYFGRCNVAEHEKLILLAQLKPEKDSDEAVTYSLGKFGQRALDFYSIHVTKESTHPVKPLAQIAGNRYASGPVGKALSDACMGTIASFLSKYQDIIIEHQKVVKGNQKRLESLRELAGKENLEYPSVTLPPQPHTKEGVDAYNEVIARVRMWVNLNLWQKLKLSRDDAKPLLRLKGFPSFPLVERQANEVDWWDMVCNVKKLINEKKEDGKVFWQNLAGYKRQEALRPYLSSEEDRKKGKKFARYQLGDLLLHLEKKHGEDWGKVYDEAWERIDKKVEGLSKHIKLEEERRSEDAQSKAALTDWLRAKASFVIEGLKEADKDEFCRCELKLQKWYGDLRGKPFAIEAENSILDISGFSKQYNCAFIWQKDGVKKLNLYLIINYFKGGKLRFKKIKPEAFEANRFYTVINKKSGEIVPMEVNFNFDDPNLIILPLAFGKRQGREFIWNDLLSLETGSLKLANGRVIEKTLYNRRTRQDEPALFVALTFERREVLDSSNIKPMALIGVDRGENIPAVIALTDPEGCPLSRFKDSLGNPTHILRIGENYKEKQRTIQAKKEVEQRRAGGYSRKYASKAKNLADDMVRNTARDLLYYAVTQDAMLIFENLSRGFGRQGKRTFMAERQYTRMEDWLTAKLAYEGLPSKTYLSKTLAQYTSKTCSNCGFTITSADYDRVLEKLKKTATGWMTTINGKELKVEGQITYYNRYKRQNVVKDLSVELDRLSEESVNNDISSWTKGRSGEALSLLKKRFSHRPVQEKFVCLNCGFETHADEQAALNIARSWLFLRSQEYKKYQTNKTTGNTDKRAFVETWQSFYRKKLKEVWKPAV

SEQ ID NO: 27469 - protein, 978 aa, synthetic construct
  REGION 1..978: note = engineered CasX variant
QEIKRINKIRRRLVKDSNTKKAGKTGPMKTLLVRVMTPDLRERLENLRKKPENIPQPISNTSRANLNKLLTDYTEMKKAILHVYWEEFQKDPVGLMSRVAQPASKKIDQNKLKPEMDEKGNLTTAGFACSQCGQPLFVYKLEQVSEKGKAYTNYFGRCNVAEHEKLILLAQLKPEKDSDEAVTYSLGKFGQRALDFYSIHVTKESTHPVKPLAQIAGNRYASGPVGKALSDACMGTIASFLSKYQDIIIEHQKVVKGNQKRLESLRELAGKENLEYPSVTLPPQPHTKEGVDAYNEVIARVRMWVNLNLWQKLKLSRDDAKPLLRLKGFPSFPLVERQANEVDWWDMVCNVKKLINEKKEDGKVFWQNLAGYKRQEALRPYLSSEEDRKKGKKFARYQLGDLLLHLEKKHGEDWGKVYDEAWERIDKKVEGLSKHIKLEEERRSEDAQSKAALTDWLRAKASFVIEGLKEADKDEFCRCELKLQKWYGDLRGKPFAIEAENSILDISGFSKQYNCAFIWQKDGVKKLNLYLIINYFKGGKLRFKKIKPEAFEANRFYTVINKKSGEIVPMEVNFNFDDPNLIILPLAFGKRQGREFIWNDLLSLETGSLKLANGRVIEKTLYNRRTRQDEPALFVALTFERREVLDSSNIKPMALIGVDRGENIPAVIALTDPEGCPLSRFKDKLGNPTHILRIGESYKEKQRTIQAKKEVEQRRAGGYSRKYASKAKNLADDMVRNTARDLLYYAVTQDAMLIFENLSRGFGRQGKRTFMAERQYTRMEDWLTAKLAYEGLPSKTYLSKTLAQYTSKTCSNCGFTITSADYDRVLEKLKKTATGWMTTINGKELKVEGQITYYNRYKRQNVVKDLSVELDRLSEESVNNDISSWTKGRSGEALSLLKKRFSHRPVQEKFVCLNCGFETHADEQAALNIARSWLFLRSQEYKKYQTNKTTGNTDKRAFVETWQSFYRKKLKEVWKPAV

SEQ ID NO: 27470 - protein, 978 aa, synthetic construct
  REGION 1..978: note = engineered CasX variant
QEIKRINKIRRRLVKDSNTKKAGKTGPMKTLLVRVMTPDLRERLENLRKKPENIPQPISNTSRANLNKLLTDYTEMKKAILHVYWEEFQKDPVGLMSRVAQPASKKIDQNKLKPEMDEKGNLTTAGFACSQCGQPLFVYKLEQVSEKGKAYTNYFGRCNVAEHEKLILLAQLKPEKDSDEAVTYSLGKFGQRALDFYSIHVTKESTHPVKPLAQIAGNRYASGPVGKALSDACMGTIASFLSKYQDIIIEHQKVVKGNQKRLESLRELAGKENLEYPSVTLPPQPHTKEGVDAYNEVIARVRMWVNLNLWQKLKLSRDDAKPLLRLKGFPSFPLVERQANEVDWWDMVCNVKKLINEKKEDGKVFWQNLAGYKRQEALRPYLSSEEDRKKGKKFARYQLGDLLLHLEKKHGEDWGKVYDEAWERIDKKVEGLSKHIKLEEERRSEDAQSKAALTDWLRAKASFVIEGLKEADKDEFCRCELKLQKWYGDLRGKPFAIEAENSILDISGFSKQYNCAFIWQKDGVKKLNLYLIINYFKGGKLRFKKIKPEAFEANRFYTVINKKSGEIVPMEVNFNFDDPNLIILPLAFGKRQGREFIWNDLLSLETGSLKLANGRVIEKTLYNRRTRQDEPALFVALTFERREVLDSSNIKPMALIGVDRGENIPAVIALTDPEGCPLSRFKDKLGNPTHILRIGEPYKEKQRTIQAKKEVEQRRAGGYSRKYASKAKNLADDMVRNTARDLLYYAVTQDAMLIFENLSRGFGRQGKRTFMAERQYTRMEDWLTAKLAYEGLPSKTYLSKTLAQYTSKTCSNCGFTITSADYDRVLEKLKKTATGWMTTINGKELKVEGQITYYNRYKRQNVVKDLSVELDRLSEESVNNDISSWTKGRSGEALSLLKKRFSHRPVQEKFVCLNCGFETHADEQAALNIARSWLFLRSQEYKKYQTNKTTGNTDKRAFVETWQSFYRKKLKEVWKPAV

SEQ ID NO: 27471 - protein, 978 aa, synthetic construct
  REGION 1..978: note = engineered CasX variant
QEIKRINKIRRRLVKDSNTKKAGKTGPMKTLLVRVMTPDLRERLENLRKKPENIPQPISNTSRANLNKLLTDYTEMKKAILHVYWEEFQKDPVGLMSRVAQPASKKIDQNKLKPEMDEKGNLTTAGFACSQCGQPLFVYKLEQVSEKGKAYTNYFGRCNVAEHEKLILLAQLKPEKDSDEAVTYSLGKFGQRALDFYSIHVTKESTHPVKPLAQIAGNRYASGPVGKALSDACMGTIASFLSKYQDIIIEHQKVVKGNQKRLESLRELAGKENLEYPSVTLPPQPHTKEGVDAYNEVIARVRMWVNLNLWQKLKLSRDDAKPLLRLKGFPSFPLVERQANEVDWWDMVCNVKKLINEKKEDGKVFWQNLAGYKRQEALRPYLSSEEDRKKGKKFARYQLGDLLLHLEKKHGEDWGKVYDEAWERIDKKVEGLSKHIKLEEERRSEDAQSKAALTDWLRAKASFVIEGLKEADKDEFCRCELKLQKWYGDLRGKPFAIEAENSILDISGFSKQYNCAFIWQKDGVKKLNLYLIINYFKGGKLRFKKIKPEAFEANRFYTVINKKSGEIVPMEVNFNFDDPNLIILPLAFGKRQGREFIWNDLLSLETGSLKLANGRVIEKTLYNRRTRQDEPALFVALTFERREVLDSSNIKPMALIGVDRGENIPAVIALTDPEGCPLSAFKDSLGNPTHILRIGESYKEKQRTIQAKKEVEQRRAGGYSRKYASKAKNLADDMVRNTARDLLYYAVTQDAMLIFENLSRGFGRQGKRTFMAERQYTRMEDWLTAKLAYEGLPSKTYLSKTLAQYTSKTCSNCGFTITSADYDRVLEKLKKTATGWMTTINGKELKVEGQITYYNRYKRQNVVKDLSVELDRLSEESVNNDISSWTKGRSGEALSLLKKRFSHRPVQEKFVCLNCGFETHADEQAALNIARSWLFLRSQEYKKYQTNKTTGNTDKRAFVETWQSFYRKKLKEVWKPAV

SEQ ID NO: 27472 - protein, 978 aa, synthetic construct
  REGION 1..978: note = engineered CasX variant
QEIKRINKIRRRLVKDSNTKKAGKTGPMKTLLVRVMTPDLRERLENLRKKPENIPQPISNTSRANLNKLLTDYTEMKKAILHVYWEEFQKDPVGLMSRVAQPASKKIDQNKLKPEMDEKGNLTTAGFACSQCGQPLFVYKLEQVSEKGKAYTNYFGRCNVAEHEKLILLAQLKPEKDSDEAVTYSLGKFGQRALDFYSIHVTKESTHPVKPLAQIAGNRYASGPVGKALSDACMGTIASFLSKYQDIIIEHQKVVKGNQKRLESLRELAGKENLEYPSVTLPPQPHTKEGVDAYNEVIARVRMWVNLNLWQKLKLSRDDAKPLLRLKGFPSFPLVERQANEVDWWDMVCNVKKLINEKKEDGKVFWQNLAGYKRQEALRPYLSSEEDRKKGKKFARYQLGDLLLHLEKKHGEDWGKVYDEAWERIDKKVEGLSKHIKLEEERRSEDAQSKAALTDWLRAKASFVIEGLKEADKDEFCRCELKLQKWYGDLRGKPFAIEAENSILDISGFSKQYNCAFIWQKDGVKKLNLYLIINYFKGGKLRFKKIKPEAFEANRFYTVINKKSGEIVPMEVNFNFDDPNLIILPLAFGKRQGREFIWNDLLSLETGSLKLANGRVIEKTLYNRRTRQDEPALFVALTFERREVLDSSNIKPMALIGVDRGENIPAVIALTDPEGCPLSAFKDSLGNPTHILRIGEPYKEKQRTIQAKKEVEQRRAGGYSRKYASKAKNLADDMVRNTARDLLYYAVTQDAMLIFENLSRGFGRQGKRTFMAERQYTRMEDWLTAKLAYEGLPSKTYLSKTLAQYTSKTCSNCGFTITSADYDRVLEKLKKTATGWMTTINGKELKVEGQITYYNRYKRQNVVKDLSVELDRLSEESVNNDISSWTKGRSGEALSLLKKRFSHRPVQEKFVCLNCGFETHADEQAALNIARSWLFLRSQEYKKYQTNKTTGNTDKRAFVETWQSFYRKKLKEVWKPAV

SEQ ID NO: 27473 - protein, 978 aa, synthetic construct
  REGION 1..978: note = engineered CasX variant
QEIKRINKIRRRLVKDSNTKKAGKTGPMKTLLVRVMTPDLRERLENLRKKPENIPQPISNTSRANLNKLLTDYTEMKKAILHVYWEEFQKDPVGLMSRVAQPASKKIDQNKLKPEMDEKGNLTTAGFACSQCGQPLFVYKLEQVSEKGKAYTNYFGRCNVAEHEKLILLAQLKPEKDSDEAVTYSLGKFGQRALDFYSIHVTKESTHPVKPLAQIAGNRYASGPVGKALSDACMGTIASFLSKYQDIIIEHQKVVKGNQKRLESLRELAGKENLEYPSVTLPPQPHTKEGVDAYNEVIARVRMWVNLNLWQKLKLSRDDAKPLLRLKGFPSFPLVERQANEVDWWDMVCNVKKLINEKKEDGKVFWQNLAGYKRQEALRPYLSSEEDRKKGKKFARYQLGDLLLHLEKKHGEDWGKVYDEAWERIDKKVEGLSKHIKLEEERRSEDAQSKAALTDWLRAKASFVIEGLKEADKDEFCRCELKLQKWYGDLRGKPFAIEAENSILDISGFSKQYNCAFIWQKDGVKKLNLYLIINYFKGGKLRFKKIKPEAFEANRFYTVINKKSGEIVPMEVNFNFDDPNLIILPLAFGKRQGREFIWNDLLSLETGSLKLANGRVIEKTLYNRRTRQDEPALFVALTFERREVLDSSNIKPMALIGVDRGENIPAVIALTDPEGCPLSAFKDKLGNPTHILRIGESYKEKQRTIQAKKEVEQRRAGGYSRKYASKAKNLADDMVRNTARDLLYYAVTQDAMLIFENLSRGFGRQGKRTFMAERQYTRMEDWLTAKLAYEGLPSKTYLSKTLAQYTSKTCSNCGFTITSADYDRVLEKLKKTATGWMTTINGKELKVEGQITYYNRYKRQNVVKDLSVELDRLSEESVNNDISSWTKGRSGEALSLLKKRFSHRPVQEKFVCLNCGFETHADEQAALNIARSWLFLRSQEYKKYQTNKTTGNTDKRAFVETWQSFYRKKLKEVWKPAV

SEQ ID NO: 27474 - protein, 978 aa, synthetic construct
  REGION 1..978: note = engineered CasX variant
QEIKRINKIRRRLVKDSNTKKAGKTGPMKTLLVRVMTPDLRERLENLRKKPENIPQPISNTSRANLNKLLTDYTEMKKAILHVYWEEFQKDPVGLMSRVAQPASKKIDQNKLKPEMDEKGNLTTAGFACSQCGQPLFVYKLEQVSEKGKAYTNYFGRCNVAEHEKLILLAQLKPEKDSDEAVTYSLGKFGQRALDFYSIHVTKESTHPVKPLAQIAGNRYASGPVGKALSDACMGTIASFLSKYQDIIIEHQKVVKGNQKRLESLRELAGKENLEYPSVTLPPQPHTKEGVDAYNEVIARVRMWVNLNLWQKLKLSRDDAKPLLRLKGFPSFPLVERQANEVDWWDMVCNVKKLINEKKEDGKVFWQNLAGYKRQEALRPYLSSEEDRKKGKKFARYQLGDLLLHLEKKHGEDWGKVYDEAWERIDKKVEGLSKHIKLEEERRSEDAQSKAALTDWLRAKASFVIEGLKEADKDEFCRCELKLQKWYGDLRGKPFAIEAENSILDISGFSKQYNCAFIWQKDGVKKLNLYLIINYFKGGKLRFKKIKPEAFEANRFYTVINKKSGEIVPMEVNFNFDDPNLIILPLAFGKRQGREFIWNDLLSLETGSLKLANGRVIEKTLYNRRTRQDEPALFVALTFERREVLDSSNIKPLNLIGVDRGENIPAVLALTDPEGCPLSRFKDSLGNPTHILRIGESYKEKQRTIQAKKEVEQRRAGGYSRKYASKAKNLADDMVRNTARDLLYYAVTQDAMLIFENLSRGFGRQGKRTFMAERQYTRMEDWLTAKLAYEGLPSKTYLSKTLAQYTSKTCSNCGFTITSADYDRVLEKLKKTATGWMTTINGKELKVEGQITYYNRYKRQNVVKDLSVELDRLSEESVNNDISSWTKGRSGEALSLLKKRFSHRPVQEKFVCLNCGFETHADEQAALNIARSWLFLRSQEYKKYQTNKTTGNTDKRAFVETWQSFYRKKLKEVWKPAV

SEQ ID NO: 27475 - protein, 978 aa, synthetic construct
  REGION 1..978: note = engineered CasX variant
QEIKRINKIRRRLVKDSNTKKAGKTGPMKTLLVRVMTPDLRERLENLRKKPENIPQPISNTSRANLNKLLTDYTEMKKAILHVYWEEFQKDPVGLMSRVAQPASKKIDQNKLKPEMDEKGNLTTAGFACSQCGQPLFVYKLEQVSEKGKAYTNYFGRCNVAEHEKLILLAQLKPEKDSDEAVTYSLGKFGQRALDFYSIHVTKESTHPVKPLAQIAGNRYASGPVGKALSDACMGTIASFLSKYQDIIIEHQKVVKGNQKRLESLRELAGKENLEYPSVTLPPQPHTKEGVDAYNEVIARVRMWVNLNLWQKLKLSRDDAKPLLRLKGFPSFPLVERQANEVDWWDMVCNVKKLINEKKEDGKVFWQNLAGYKRQEALRPYLSSEEDRKKGKKFARYQLGDLLLHLEKKHGEDWGKVYDEAWERIDKKVEGLSKHIKLEEERRSEDAQSKAALTDWLRAKASFVIEGLKEADKDEFCRCELKLQKWYGDLRGKPFAIEAENSILDISGFSKQYNCAFIWQKDGVKKLNLYLIINYFKGGKLRFKKIKPEAFEANRFYTVINKKSGEIVPMEVNFNFDDPNLIILPLAFGKRQGREFIWNDLLSLETGSLKLANGRVIEKTLYNRRTRQDEPALFVALTFERREVLDSSNIKPLNLIGVDRGENIPAVLALTDPEGCPLSRFKDSLGNPTHILRIGESYKEKQRTIQAFKEVEQRRAGGYSRKYASKAKNLADDMVRNTARDLLYYAVTQDAMLIFENLSRGFGRQGKRTFMAERQYTRMEDWLTAKLAYEGLPSKTYLSKTLAQYTSKTCSNCGFTITSADYDRVLEKLKKTATGWMTTINGKELKVEGQITYYNRYKRQNVVKDLSVELDRLSEESVNNDISSWTKGRSGEALSLLKKRFSHRPVQEKFVCLNCGFETHADEQAALNIARSWLFLRSQEYKKYQTNKTTGNTDKRAFVETWQSFYRKKLKEVWKPAV

SEQ ID NO: 27476 - protein, 978 aa, synthetic construct
  REGION 1..978: note = engineered CasX variant
QEIKRINKIRRRLVKDSNTKKAGKTGPMKTLLVRVMTPDLRERLENLRKKPENIPQPISNTSRANLNKLLTDYTEMKKAILHVYWEEFQKDPVGLMSRVAQPASKKIDQNKLKPEMDEKGNLTTAGFACSQCGQPLFVYKLEQVSEKGKAYTNYFGRCNVAEHEKLILLAQLKPEKDSDEAVTYSLGKFGQRALDFYSIHVTKESTHPVKPLAQIAGNRYASGPVGKALSDACMGTIASFLSKYQDIIIEHQKVVKGNQKRLESLRELAGKENLEYPSVTLPPQPHTKEGVDAYNEVIARVRMWVNLNLWQKLKLSRDDAKPLLRLKGFPSFPLVERQANEVDWWDMVCNVKKLINEKKEDGKVFWQNLAGYKRQEALRPYLSSEEDRKKGKKFARYQLGDLLLHLEKKHGEDWGKVYDEAWERIDKKVEGLSKHIKLEEERRSEDAQSKAALTDWLRAKASFVIEGLKEADKDEFCRCELKLQKWYGDLRGKPFAIEAENSILDISGFSKQYNCAFIWQKDGVKKLNLYLIINYFKGGKLRFKKIKPEAFEANRFYTVINKKSGEIVPMEVNFNFDDPNLIILPLAFGKRQGREFIWNDLLSLETGSLKLANGRVIEKTLYNRRTRQDEPALFVALTFERREVLDSSNIKPLNLIGVDRGENIPAVIALTDPEGCPLSRFKDSLGNPTHILRIGESYKEKQRTIQAKKEVEQRRAGGYSRKYASKAKNLADDMVRNTARDLLYYAVTQDAMLIFENLSRGFGRQGKRTFMAERQYTRMEDWLTAKLAYEGLPSKTYLSKTLAQYTSKTCSNCGFTITSADYDRVLEKLKKTATGWMTTINGKELKVEGQITYYNRYKRQNVVKDLSVELDRLSEESVNNDISSWTKGRSGEALSLLKKRFSHRPVQEKFVCLNCGFETHADEQAALNIARSWLFLRSQEYKKYQTNKTTGNTDKRAFVETWQSFYRKKLKEVWKPAV

SEQ ID NO: 27477 - protein, 978 aa, synthetic construct
  REGION 1..978: note = engineered CasX variant
QEIKRINKIRRRLVKDSNTKKAGKTGPMKTLLVRVMTPDLRERLENLRKKPENIPQPISNTSRANLNKLLTDYTEMKKAILHVYWEEFQKDPVGLMSRVAQPASKKIDQNKLKPEMDEKGNLTTAGFACSQCGQPLFVYKLEQVSEKGKAYTNYFGRCNVAEHEKLILLAQLKPEKDSDEAVTYSLGKFGQRALDFYSIHVTKESTHPVKPLAQIAGNRYASGPVGKALSDACMGTIASFLSKYQDIIIEHQKVVKGNQKRLESLRELAGKENLEYPSVTLPPQPHTKEGVDAYNEVIARVRMWVNLNLWQKLKLSRDDAKPLLRLKGFPSFPLVERQANEVDWWDMVCNVKKLINEKKEDGKVFWQNLAGYKRQEALRPYLSSEEDRKKGKKFARYQLGDLLLHLEKKHGEDWGKVYDEAWERIDKKVEGLSKHIKLEEERRSEDAQSKAALTDWLRAKASFVIEGLKEADKDEFCRCELKLQKWYGDLRGKPFAIEAENSILDISGFSKQYNCAFIWQKDGVKKLNLYLIINYFKGGKLRFKKIKPEAFEANRFYTVINKKSGEIVPMEVNFNFDDPNLIILPLAFGKRQGREFIWNDLLSLETGSLKLANGRVIEKTLYNRRTRQDEPALFVALTFERREVLDSSNIKPLNLIGVDRGENIPAVIALTDPEGCPLSRFKDSLGNPTHILRIGESYKEKQRTIQAFKEVEQRRAGGYSRKYASKAKNLADDMVRNTARDLLYYAVTQDAMLIFENLSRGFGRQGKRTFMAERQYTRMEDWLTAKLAYEGLPSKTYLSKTLAQYTSKTCSNCGFTITSADYDRVLEKLKKTATGWMTTINGKELKVEGQITYYNRYKRQNVVKDLSVELDRLSEESVNNDISSWTKGRSGEALSLLKKRFSHRPVQEKFVCLNCGFETHADEQAALNIARSWLFLRSQEYKKYQTNKTTGNTDKRAFVETWQSFYRKKLKEVWKPAV

SEQ ID NO: 27478 - protein, 978 aa, synthetic construct
  REGION 1..978: note = engineered CasX variant
QEIKRINKIRRRLVKDSNTKKAGKTGPMKTLLVRVMTPDLRERLENLRKKPENIPQPISNTSRANLNKLLTDYTEMKKAILHVYWEEFQKDPVGLMSRVAQPASKKIDQNKLKPEMDEKGNLTTAGFACSQCGQPLFVYKLEQVSEKGKAYTNYFGRCNVAEHEKLILLAQLKPEKDSDEAVTYSLGKFGQRALDFYSIHVTKESTHPVKPLAQIAGNRYASGPVGKALSDACMGTIASFLSKYQDIIIEHQKVVKGNQKRLESLRELAGKENLEYPSVTLPPQPHTKEGVDAYNEVIARVRMWVNLNLWQKLKLSRDDAKPLLRLKGFPSFPLVERQANEVDWWDMVCNVKKLINEKKEDGKVFWQNLAGYKRQEALRPYLSSEEDRKKGKKFARYQLGDLLLHLEKKHGEDWGKVYDEAWERIDKKVEGLSKHIKLEEERRSEDAQSKAALTDWLRAKASFVIEGLKEADKDEFCRCELKLQKWYGDLRGKPFAIEAENSILDISGFSKQYNCAFIWQKDGVKKLNLYLIINYFKGGKLRFKKIKPEAFEANRFYTVINKKSGEIVPMEVNFNFDDPNLIILPLAFGKRQGREFIWNDLLSLETGSLKLANGRVIEKTLYNRRTRQDEPALFVALTFERREVLDSSNIKPLNLIGVDRGENIPAVIALTDPEGCPLDRFKDSLGNPTHILRIGESYKEKQRTIQAKKEVEQRRAGGYSRKYASKAKNLADDMVRNTARDLLYYAVTQDAMLIFENLSRGFGRQGKRTFMAERQYTRMEDWLTAKLAYEGLPSKTYLSKTLAQYTSKTCSNCGFTITSADYDRVLEKLKKTATGWMTTINGKELKVEGQITYYNRYKRQNVVKDLSVELDRLSEESVNNDISSWTKGRSGEALSLLKKRFSHRPVQEKFVCLNCGFETHADEQAALNIARSWLFLRSQEYKKYQTNKTTGNTDKRAFVETWQSFYRKKLKEVWKPAV

SEQ ID NO: 27479 - protein, 978 aa, synthetic construct
  REGION 1..978: note = engineered CasX variant
QEIKRINKIRRRLVKDSNTKKAGKTGPMKTLLVRVMTPDLRERLENLRKKPENIPQPISNTSRANLNKLLTDYTEMKKAILHVYWEEFQKDPVGLMSRVAQPASKKIDQNKLKPEMDEKGNLTTAGFACSQCGQPLFVYKLEQVSEKGKAYTNYFGRCNVAEHEKLILLAQLKPEKDSDEAVTYSLGKFGQRALDFYSIHVTKESTHPVKPLAQIAGNRYASGPVGKALSDACMGTIASFLSKYQDIIIEHQKVVKGNQKRLESLRELAGKENLEYPSVTLPPQPHTKEGVDAYNEVIARVRMWVNLNLWQKLKLSRDDAKPLLRLKGFPSFPLVERQANEVDWWDMVCNVKKLINEKKEDGKVFWQNLAGYKRQEALRPYLSSEEDRKKGKKFARYQLGDLLLHLEKKHGEDWGKVYDEAWERIDKKVEGLSKHIKLEEERRSEDAQSKAALTDWLRAKASFVIEGLKEADKDEFCRCELKLQKWYGDLRGKPFAIEAENSILDISGFSKQYNCAFIWQKDGVKKLNLYLIINYFKGGKLRFKKIKPEAFEANRFYTVINKKSGEIVPMEVNFNFDDPNLIILPLAFGKRQGREFIWNDLLSLETGSLKLANGRVIEKTLYNRRTRQDEPALFVALTFERREVLDSSNIKPKNLIGVDRGENIPAVISLTDPEGCPLSRFKDSLGNPTHILRIGESYKEKQRTIQAKKEVEQRRAGGYSRKYASKAKNLADDMVRNTARDLLYYAVTQDAMLIFENLSRGFGRQGKRTFMAERQYTRMEDWLTAKLAYEGLPSKTYLSKTLAQYTSKTCSNCGFTITSADYDRVLEKLKKTATGWMTTINGKELKVEGQITYYNRYKRQNVVKDLSVELDRLSEESVNNDISSWTKGRSGEALSLLKKRFSHRPVQEKFVCLNCGFETHADEQAALNIARSWLFLRSQEYKKYQTNKTTGNTDKRAFVETWQSFYRKKLKEVWKPAV

SEQ ID NO: 27480 - protein, 978 aa, synthetic construct
  REGION 1..978: note = engineered CasX variant
QEIKRINKIRRRLVKDSNTKKAGKTGPMKTLLVRVMTPDLRERLENLRKKPENIPQPISNTSRANLNKLLTDYTEMKKAILHVYWEEFQKDPVGLMSRVAQPASKKIDQNKLKPEMDEKGNLTTAGFACSQCGQPLFVYKLEQVSEKGKAYTNYFGRCNVAEHEKLILLAQLKPEKDSDEAVTYSLGKFGQRALDFYSIHVTKESTHPVKPLAQIAGNRYASGPVGKALSDACMGTIASFLSKYQDIIIEHQKVVKGNQKRLESLRELAGKENLEYPSVTLPPQPHTKEGVDAYNEVIARVRMWVNLNLWQKLKLSRDDAKPLLRLKGFPSFPLVERQANEVDWWDMVCNVKKLINEKKEDGKVFWQNLAGYKRQEALRPYLSSEEDRKKGKKFARYQLGDLLLHLEKKHGEDWGKVYDEAWERIDKKVEGLSKHIKLEEERRSEDAQSKAALTDWLRAKASFVIEGLKEADKDEFCRCELKLQKWYGDLRGKPFAIEAENSILDISGFSKQYNCAFIWQKDGVKKLNLYLIINYFKGGKLRFKKIKPEAFEANRFYTVINKKSGEIVPMEVNFNFDDPNLIILPLAFGKRQGREFIWNDLLSLETGSLKLANGRVIEKTLYNRRTRQDEPALFVALTFERREVLDSSNIKPKNLIGVDRGENIPAVISLTDPEGCPLSRFKDSLGNPTHILRIGESYKEKQRHIQAKKEVEQRRAGGYSRKYASKAKNLADDMVRNTARDLLYYAVTQDAMLIFENLSRGFGRQGKRTFMAERQYTRMEDWLTAKLAYEGLPSKTYLSKTLAQYTSKTCSNCGFTITSADYDRVLEKLKKTATGWMTTINGKELKVEGQITYYNRYKRQNVVKDLSVELDRLSEESVNNDISSWTKGRSGEALSLLKKRFSHRPVQEKFVCLNCGFETHADEQAALNIARSWLFLRSQEYKKYQTNKTTGNTDKRAFVETWQSFYRKKLKEVWKPAV

SEQ ID NO: 27481 - protein, 978 aa, synthetic construct
  REGION 1..978: note = engineered CasX variant
QEIKRINKIRRRLVKDSNTKKAGKTGPMKTLLVRVMTPDLRERLENLRKKPENIPQPISNTSRANLNKLLTDYTEMKKAILHVYWEEFQKDPVGLMSRVAQPASKKIDQNKLKPEMDEKGNLTTAGFACSQCGQPLFVYKLEQVSEKGKAYTNYFGRCNVAEHEKLILLAQLKPEKDSDEAVTYSLGKFGQRALDFYSIHVTKESTHPVKPLAQIAGNRYASGPVGKALSDACMGTIASFLSKYQDIIIEHQKVVKGNQKRLESLRELAGKENLEYPSVTLPPQPHTKEGVDAYNEVIARVRMWVNLNLWQKLKLSRDDAKPLLRLKGFPSFPLVERQANEVDWWDMVCNVKKLINEKKEDGKVFWQNLAGYKRQEALRPYLSSEEDRKKGKKFARYQLGDLLLHLEKKHGEDWGKVYDEAWERIDKKVEGLSKHIKLEEERRSEDAQSKAALTDWLRAKASFVIEGLKEADKDEFCRCELKLQKWYGDLRGKPFAIEAENSILDISGFSKQYNCAFIWQKDGVKKLNLYLIINYFKGGKLRFKKIKPEAFEANRFYTVINKKSGEIVPMEVNFNFDDPNLIILPLAFGKRQGREFIWNDLLSLETGSLKLANGRVIEKTLYNRRTRQDEPALFVALTFERREVLDSSNIKPKNLIGVDRGENIPAVIALTDPEGIPLSRFKDSLGNPTHILRIGESYKEKQTTIQAKKEVEQRRAGGYSRKYASKAKNLADDMVRNTARDLLYYAVTQDAMLIFENLSRGFGRQGKRTFMAERQYTRMEDWLTAKLAYEGLPSKTYLSKTLAQYTSKTCSNCGFTITSADYDRVLEKLKKTATGWMTTINGKELKVEGQITYYNRYKRQNVVKDLSVELDRLSEESVNNDISSWTKGRSGEALSLLKKRFSHRPVQEKFVCLNCGFETHADEQAALNIARSWLFLRSQEYKKYQTNKTTGNTDKRAFVETWQSFYRKKLKEVWKPAV

SEQ ID NO: 27482 - protein, 978 aa, synthetic construct
  REGION 1..978: note = engineered CasX variant
QEIKRINKIRRRLVKDSNTKKAGKTGPMKTLLVRVMTPDLRERLENLRKKPENIPQPISNTSRANLNKLLTDYTEMKKAILHVYWEEFQKDPVGLMSRVAQPASKKIDQNKLKPEMDEKGNLTTAGFACSQCGQPLFVYKLEQVSEKGKAYTNYFGRCNVAEHEKLILLAQLKPEKDSDEAVTYSLGKFGQRALDFYSIHVTKESTHPVKPLAQIAGNRYASGPVGKALSDACMGTIASFLSKYQDIIIEHQKVVKGNQKRLESLRELAGKENLEYPSVTLPPQPHTKEGVDAYNEVIARVRMWVNLNLWQKLKLSRDDAKPLLRLKGFPSFPLVERQANEVDWWDMVCNVKKLINEKKEDGKVFWQNLAGYKRQEALRPYLSSEEDRKKGKKFARYQLGDLLLHLEKKHGEDWGKVYDEAWERIDKKVEGLSKHIKLEEERRSEDAQSKAALTDWLRAKASFVIEGLKEADKDEFCRCELKLQKWYGDLRGKPFAIEAENSILDISGFSKQYNCAFIWQKDGVKKLNLYLIINYFKGGKLRFKKIKPEAFEANRFYTVINKKSGEIVPMEVNFNFDDPNLIILPLAFGKRQGREFIWNDLLSLETGSLKLANGRVIEKTLYNRRTRQDEPALFVALTFERREVLDSSNIKPKNLIGVDRGENIPAVIALTDPEGIPLSRFKDSLGNPTHILRIGESYKEKQRTIQAKKEVEQRRAGGYSRKYASKAKNLADDMVRNTARDLLYYAVTQDAMLIFENLSRGFGRQGKRTFMAERQYTRMEDWLTAKLAYEGLPSKTYLSKTLAQYTSKTCSNCGFTITSADYDRVLEKLKKTATGWMTTINGKELKVEGQITYYNRYKRQNVVKDLSVELDRLSEESVNNDISSWTKGRSGEALSLLKKRFSHRPVQEKFVCLNCGFETHADEQAALNIARSWLFLRSQEYKKYQTNKTTGNTDKRAFVETWQSFYRKKLKEVWKPAV

SEQ ID NO: 27483 - protein, 978 aa, synthetic construct
  REGION 1..978: note = engineered CasX variant
QEIKRINKIRRRLVKDSNTKKAGKTGPMKTLLVRVMTPDLRERLENLRKKPENIPQPISNTSRANLNKLLTDYTEMKKAILHVYWEEFQKDPVGLMSRVAQPASKKIDQNKLKPEMDEKGNLTTAGFACSQCGQPLFVYKLEQVSEKGKAYTNYFGRCNVAEHEKLILLAQLKPEKDSDEAVTYSLGKFGQRALDFYSIHVTKESTHPVKPLAQIAGNRYASGPVGKALSDACMGTIASFLSKYQDIIIEHQKVVKGNQKRLESLRELAGKENLEYPSVTLPPQPHTKEGVDAYNEVIARVRMWVNLNLWQKLKLSRDDAKPLLRLKGFPSFPLVERQANEVDWWDMVCNVKKLINEKKEDGKVFWQNLAGYKRQEALRPYLSSEEDRKKGKKFARYQLGDLLLHLEKKHGEDWGKVYDEAWERIDKKVEGLSKHIKLEEERRSEDAQSKAALTDWLRAKASFVIEGLKEADKDEFCRCELKLQKWYGDLRGKPFAIEAENSILDISGFSKQYNCAFIWQKDGVKKLNLYLIINYFKGGKLRFKKIKPEAFEANRFYTVINKKSGEIVPMEVNFNFDDPNLIILPLAFGKRQGREFIWNDLLSLETGSLKLANGRVIEKTLYNRRTRQDEPALFVALTFERREVLDSSNIKPKNLIGVDRGENIPAVIALTDPEGCPLSRFKDSLGNPTHILRIGESYKEKQTTIQAKKEVEQRRAGGYSRKYASKAKNLADDMVRNTARDLLYYAVTQDAMLIFENLSRGFGRQGKRTFMAERQYTRMEDWLTAKLAYEGLPSKTYLSKTLAQYTSKTCSNCGFTITSADYDRVLEKLKKTATGWMTTINGKELKVEGQITYYNRYKRQNVVKDLSVELDRLSEESVNNDISSWTKGRSGEALSLLKKRFSHRPVQEKFVCLNCGFETHADEQAALNIARSWLFLRSQEYKKYQTNKTTGNTDKRAFVETWQSFYRKKLKEVWKPAV

SEQ ID NO: 27484 - protein, 978 aa, synthetic construct
  REGION 1..978: note = engineered CasX variant
QEIKRINKIRRRLVKDSNTKKAGKTGPMKTLLVRVMTPDLRERLENLRKKPENIPQPISNTSRANLNKLLTDYTEMKKAILHVYWEEFQKDPVGLMSRVAQPASKKIDQNKLKPEMDEKGNLTTAGFACSQCGQPLFVYKLEQVSEKGKAYTNYFGRCNVAEHEKLILLAQLKPEKDSDEAVTYSLGKFGQRALDFYSIHVTKESTHPVKPLAQIAGNRYASGPVGKALSDACMGTIASFLSKYQDIIIEHQKVVKGNQKRLESLRELAGKENLEYPSVTLPPQPHTKEGVDAYNEVIARVRMWVNLNLWQKLKLSRDDAKPLLRLKGFPSFPLVERQANEVDWWDMVCNVKKLINEKKEDGKVFWQNLAGYKRQEALRPYLSSEEDRKKGKKFARYQLGDLLLHLEKKHGEDWGKVYDEAWERIDKKVEGLSKHIKLEEERRSEDAQSKAALTDWLRAKASFVIEGLKEADKDEFCRCELKLQKWYGDLRGKPFAIEAENSILDISGFSKQYNCAFIWQKDGVKKLNLYLIINYFKGGKLRFKKIKPEAFEANRFYTVINKKSGEIVPMEVNFNFDDPNLIILPLAFGKRQGREFIWNDLLSLETGSLKLANGRVIEKTLYNRRTRQDEPALFVALTFERREVLDSSNIKPKNLIGVDRGENIPAVIALTDPEGCPLSRFKDSLGNPTHILRIGESYKEKQRTIQAKKEVEQRRAGGYSRKYASKAKNLADDMVRNTARDLLYYAVTQDAMLIFENLSRGFGRQGKRTFMAERQYTRMEDWLTAKLAYEGLPSKTYLSKTLAQYTSKTCSNCGFTITSADYDRVLEKLKKTATGWMTTINGKELKVEGQITYYNRYKRQNVVKDLSVELDRLSEESVNNDISSWTKGRSGEALSLLKKRFSHRPVQEKFVCLNCGFETHADEQAALNIARSWLFLRSQEYKKYQTNKTTGNTDKRAFVETWQSFYRKKLKEVWKPAV

SEQ ID NO: 27485 - protein, 978 aa, synthetic construct
  REGION 1..978: note = engineered CasX variant
QEIKRINKIRRRLVKDSNTKKAGKTGPMKTLLVRVMTPDLRERLENLRKKPENIPQPISNTSRANLNKLLTDYTEMKKAILHVYWEEFQKDPVGLMSRVAQPASKKIDQNKLKPEMDEKGNLTTAGFACSQCGQPLFVYKLEQVSEKGKAYTNYFGRCNVAEHEKLILLAQLKPEKDSDEAVTYSLGKFGQRALDFYSIHVTKESTHPVKPLAQIAGNRYASGPVGKALSDACMGTIASFLSKYQDIIIEHQKVVKGNQKRLESLRELAGKENLEYPSVTLPPQPHTKEGVDAYNEVIARVRMWVNLNLWQKLKLSRDDAKPLLRLKGFPSFPLVERQANEVDWWDMVCNVKKLINEKKEDGKVFWQNLAGYKRQEALRPYLSSEEDRKKGKKFARYQLGDLLLHLEKKHGEDWGKVYDEAWERIDKKVEGLSKHIKLEEERRSEDAQSKAALTDWLRAKASFVIEGLKEADKDEFCRCELKLQKWYGDLRGKPFAIEAENSILDISGFSKQYNCAFIWQKDGVKKLNLYLIINYFKGGKLRFKKIKPEAFEANRFYTVINKKSGEIVPMEVNFNFDDPNLIILPLAFGKRQGREFIWNDLLSLETGSLKLANGRVIEKTLYNRRTRQDEPALFVALTFERREVLDSSNIKPKNLIGVDRGENIPAVIALTDPEGCPLSRFKDSLGNPTHILRIGESYKEKQRHIQAKKEVEQRRAGGYSRKYASKAKNLADDMVRNTARDLLYYAVTQDAMLIFENLSRGFGRQGKRTFMAERQYTRMEDWLTAKLAYEGLPSKTYLSKTLAQYTSKTCSNCGFTITSADYDRVLEKLKKTATGWMTTINGKELKVEGQITYYNRYKRQNVVKDLSVELDRLSEESVNNDISSWTKGRSGEALSLLKKRFSHRPVQEKFVCLNCGFETHADEQAALNIARSWLFLRSQEYKKYQTNKTTGNTDKRAFVETWQSFYRKKLKEVWKPAV

SEQ ID NO: 27486 - protein, 978 aa, synthetic construct
  REGION 1..978: note = engineered CasX variant
QEIKRINKIRRRLVKDSNTKKAGKTGPMKTLLVRVMTPDLRERLENLRKKPENIPQPISNTSRANLNKLLTDYTEMKKAILHVYWEEFQKDPVGLMSRVAQPASKKIDQNKLKPEMDEKGNLTTAGFACSQCGQPLFVYKLEQVSEKGKAYTNYFGRCNVAEHEKLILLAQLKPEKDSDEAVTYSLGKFGQRALDFYSIHVTKESTHPVKPLAQIAGNRYASGPVGKALSDACMGTIASFLSKYQDIIIEHQKVVKGNQKRLESLRELAGKENLEYPSVTLPPQPHTKEGVDAYNEVIARVRMWVNLNLWQKLKLSRDDAKPLLRLKGFPSFPLVERQANEVDWWDMVCNVKKLINEKKEDGKVFWQNLAGYKRQEALRPYLSSEEDRKKGKKFARYQLGDLLLHLEKKHGEDWGKVYDEAWERIDKKVEGLSKHIKLEEERRSEDAQSKAALTDWLRAKASFVIEGLKEADKDEFCRCELKLQKWYGDLRGKPFAIEAENSILDISGFSKQYNCAFIWQKDGVKKLNLYLIINYFKGGKLRFKKIKPEAFEANRFYTVINKKSGEIVPMEVNFNFDDPNLIILPLAFGKRQGREFIWNDLLSLETGSLKLANGRVIEKTLYNRRTRQDEPALFVALTFERREVLDSSNIKPINLIGVDRGENIPAVIALTDQEGCPLSRFKDSLGNPTHILRIGESYKEKQRTIQAKKEVEQRRAGGYSRKYASKAKNLADDMVRNTARDLLYYAVTQDAMLIFENLSRGFGRQGKRTFMAERQYTRMEDWLTAKLAYEGLPSKTYLSKTLAQYTSKTCSNCGFTITSADYDRVLEKLKKTATGWMTTINGKELKVEGQITYYNRYKRQNVVKDLSVELDRLSEESVNNDISSWTKGRSGEALSLLKKRFSHRPVQEKFVCLNCGFETHADEQAALNIARSWLFLRSQEYKKYQTNKTTGNTDKRAFVETWQSFYRKKLKEVWKPAV

SEQ ID NO: 27487 - protein, 978 aa, synthetic construct
  REGION 1..978: note = engineered CasX variant
QEIKRINKIRRRLVKDSNTKKAGKTGPMKTLLVRVMTPDLRERLENLRKKPENIPQPISNTSRANLNKLLTDYTEMKKAILHVYWEEFQKDPVGLMSRVAQPASKKIDQNKLKPEMDEKGNLTTAGFACSQCGQPLFVYKLEQVSEKGKAYTNYFGRCNVAEHEKLILLAQLKPEKDSDEAVTYSLGKFGQRALDFYSIHVTKESTHPVKPLAQIAGNRYASGPVGKALSDACMGTIASFLSKYQDIIIEHQKVVKGNQKRLESLRELAGKENLEYPSVTLPPQPHTKEGVDAYNEVIARVRMWVNLNLWQKLKLSRDDAKPLLRLKGFPSFPLVERQANEVDWWDMVCNVKKLINEKKEDGKVFWQNLAGYKRQEALRPYLSSEEDRKKGKKFARYQLGDLLLHLEKKHGEDWGKVYDEAWERIDKKVEGLSKHIKLEEERRSEDAQSKAALTDWLRAKASFVIEGLKEADKDEFCRCELKLQKWYGDLRGKPFAIEAENSILDISGFSKQYNCAFIWQKDGVKKLNLYLIINYFKGGKLRFKKIKPEAFEANRFYTVINKKSGEIVPMEVNFNFDDPNLIILPLAFGKRQGREFIWNDLLSLETGSLKLANGRVIEKTLYNRRTRQDEPALFVALTFERREVLDSSNIKPINLIGVDRGENIPAVIALTDPEGCPLSRFKDSLGNPTHILRYGESYKEKQRTIQAKKEVEQRRAGGYSRKYASKAKNLADDMVRNTARDLLYYAVTQDAMLIFENLSRGFGRQGKRTFMAERQYTRMEDWLTAKLAYEGLPSKTYLSKTLAQYTSKTCSNCGFTITSADYDRVLEKLKKTATGWMTTINGKELKVEGQITYYNRYKRQNVVKDLSVELDRLSEESVNNDISSWTKGRSGEALSLLKKRFSHRPVQEKFVCLNCGFETHADEQAALNIARSWLFLRSQEYKKYQTNKTTGNTDKRAFVETWQSFYRKKLKEVWKPAV

SEQ ID NO: 27488 - protein, 978 aa, synthetic construct
  REGION 1..978: note = engineered CasX variant
QEIKRINKIRRRLVKDSNTKKAGKTGPMKTLLVRVMTPDLRERLENLRKKPENIPQPISNTSRANLNKLLTDYTEMKKAILHVYWEEFQKDPVGLMSRVAQPASKKIDQNKLKPEMDEKGNLTTAGFACSQCGQPLFVYKLEQVSEKGKAYTNYFGRCNVAEHEKLILLAQLKPEKDSDEAVTYSLGKFGQRALDFYSIHVTKESTHPVKPLAQIAGNRYASGPVGKALSDACMGTIASFLSKYQDIIIEHQKVVKGNQKRLESLRELAGKENLEYPSVTLPPQPHTKEGVDAYNEVIARVRMWVNLNLWQKLKLSRDDAKPLLRLKGFPSFPLVERQANEVDWWDMVCNVKKLINEKKEDGKVFWQNLAGYKRQEALRPYLSSEEDRKKGKKFARYQLGDLLLHLEKKHGEDWGKVYDEAWERIDKKVEGLSKHIKLEEERRSEDAQSKAALTDWLRAKASFVIEGLKEADKDEFCRCELKLQKWYGDLRGKPFAIEAENSILDISGFSKQYNCAFIWQKDGVKKLNLYLIINYFKGGKLRFKKIKPEAFEANRFYTVINKKSGEIVPMEVNFNFDDPNLIILPLAFGKRQGREFIWNDLLSLETGSLKLANGRVIEKTLYNRRTRQDEPALFVALTFERREVLDSSNIKPINLIGVDRGENIPAVIALTDPEGCPLSRFKDSLGNPTHILRIGESYKEKQRTIQAKKEVEQRRATGYSRKYASKAKNLADDMVRNTARDLLYYAVTQDAMLIFENLSRGFGRQGKRTFMAERQYTRMEDWLTAKLAYEGLPSKTYLSKTLAQYTSKTCSNCGFTITSADYDRVLEKLKKTATGWMTTINGKELKVEGQITYYNRYKRQNVVKDLSVELDRLSEESVNNDISSWTKGRSGEALSLLKKRFSHRPVQEKFVCLNCGFETHADEQAALNIARSWLFLRSQEYKKYQTNKTTGNTDKRAFVETWQSFYRKKLKEVWKPAV

SEQ ID NO: 27489 - protein, 978 aa, synthetic construct
  REGION 1..978: note = engineered CasX variant
QEIKRINKIRRRLVKDSNTKKAGKTGPMKTLLVRVMTPDLRERLENLRKKPENIPQPISNTSRANLNKLLTDYTEMKKAILHVYWEEFQKDPVGLMSRVAQPASKKIDQNKLKPEMDEKGNLTTAGFACSQCGQPLFVYKLEQVSEKGKAYTNYFGRCNVAEHEKLILLAQLKPEKDSDEAVTYSLGKFGQRALDFYSIHVTKESTHPVKPLAQIAGNRYASGPVGKALSDACMGTIASFLSKYQDIIIEHQKVVKGNQKRLESLRELAGKENLEYPSVTLPPQPHTKEGVDAYNEVIARVRMWVNLNLWQKLKLSRDDAKPLLRLKGFPSFPLVERQANEVDWWDMVCNVKKLINEKKEDGKVFWQNLAGYKRQEALRPYLSSEEDRKKGKKFARYQLGDLLLHLEKKHGEDWGKVYDEAWERIDKKVEGLSKHIKLEEERRSEDAQSKAALTDWLRAKASFVIEGLKEADKDEFCRCELKLQKWYGDLRGKPFAIEAENSILDISGFSKQYNCAFIWQKDGVKKLNLYLIINYFKGGKLRFKKIKPEAFEANRFYTVINKKSGEIVPMEVNFNFDDPNLIILPLAFGKRQGREFIWNDLLSLETGSLKLANGRVIEKTLYNRRTRQDEPALFVALTFERREVLDSSNIKPINLIGVDRGENIPAVIALTDPEGCPLSRFKDSLGNPTHILRIGESYKEKQRTIQAKKEVEQRRAGGYSRKYASKAKNLADDMVRNTARDLLYYAVTQDAMLIFENLSRGFGRQGKRTFMAERQYTRMEDWLTAKLAYEGLPSKTYLSKTLAQYTSKTCSNCGFTITSADYDRVLEKLKKTATGWMTTINGKELKVEGQITYYNRYKRQNVVKDLSVELDRLSEESVNNDISSWTKGRSGEALSLLKKRFSHRPVQEKFVCLNCGFETHADEQAALNIARSWLFLRSQEYKKYQTNKTTGNTDKRAFVETWQSFYRKKLKEVWKPAV

SEQ ID NO: 27490 - protein, 978 aa, synthetic construct
  REGION 1..978: note = engineered CasX variant
QEIKRINKIRRRLVKDSNTKKAGKTGPMKTLLVRVMTPDLRERLENLRKKPENIPQPISNTSRANLNKLLTDYTEMKKAILHVYWEEFQKDPVGLMSRVAQPASKKIDQNKLKPEMDEKGNLTTAGFACSQCGQPLFVYKLEQVSEKGKAYTNYFGRCNVAEHEKLILLAQLKPEKDSDEAVTYSLGKFGQRALDFYSIHVTKESTHPVKPLAQIAGNRYASGPVGKALSDACMGTIASFLSKYQDIIIEHQKVVKGNQKRLESLRELAGKENLEYPSVTLPPQPHTKEGVDAYNEVIARVRMWVNLNLWQKLKLSRDDAKPLLRLKGFPSFPLVERQANEVDWWDMVCNVKKLINEKKEDGKVFWQNLAGYKRQEALRPYLSSEEDRKKGKKFARYQLGDLLLHLEKKHGEDWGKVYDEAWERIDKKVEGLSKHIKLEEERRSEDAQSKAALTDWLRAKASFVIEGLKEADKDEFCRCELKLQKWYGDLRGKPFAIEAENSILDISGFSKQYNCAFIWQKDGVKKLNLYLIINYFKGGKLRFKKIKPEAFEANRFYTVINKKSGEIVPMEVNFNFDDPNLIILPLAFGKRQGREFIWNDLLSLETGSLKLANGRVIEKTLYNRRTRQDEPALFVALTFERREVLDSSNIKPHNLIGVDRGENIPAVIALTDPEGCPLSRFKDSLGNPTHILRIGESYKEKQRTIQAKKEVEQRRAGGYSRKYASKAKNLADDMVRNTARDLLYYAVTQDAMLIFENLSRGFGRQGKRTFMAERQYTRMEDWLTAKLAYEGLPSKTYLSKTLAQYTSKTCSNCGFTITSADYDRVLEKLKKTATGWMTTINGKELKVEGQITYYNRYKRQNVVKDLSVELDRLSEESVNNDISSWTKGRSGEALSLLKKRFSHRPVQEKFVCLNCGFETHADEQAALNIARSWLFLRSQEYKKYQTNKTTGNTDKRAFVETWQSFYRKKLKEVWKPAV

SEQ ID NO: 27491 - protein, 978 aa, synthetic construct
  REGION 1..978: note = engineered CasX variant
QEIKRINKIRRRLVKDSNTKKAGKTGPMKTLLVRVMTPDLRERLENLRKKPENIPQPISNTSRANLNKLLTDYTEMKKAILHVYWEEFQKDPVGLMSRVAQPASKKIDQNKLKPEMDEKGNLTTAGFACSQCGQPLFVYKLEQVSEKGKAYTNYFGRCNVAEHEKLILLAQLKPEKDSDEAVTYSLGKFGQRALDFYSIHVTKESTHPVKPLAQIAGNRYASGPVGKALSDACMGTIASFLSKYQDIIIEHQKVVKGNQKRLESLRELAGKENLEYPSVTLPPQPHTKEGVDAYNEVIARVRMWVNLNLWQKLKLSRDDAKPLLRLKGFPSFPLVERQANEVDWWDMVCNVKKLINEKKEDGKVFWQNLAGYKRQEALRPYLSSEEDRKKGKKFARYQLGDLLLHLEKKHGEDWGKVYDEAWERIDKKVEGLSKHIKLEEERRSEDAQSKAALTDWLRAKASFVIEGLKEADKDEFCRCELKLQKWYGDLRGKPFAIEAENSILDISGFSKQYNCAFIWQKDGVKKLNLYLIINYFKGGKLRFKKIKPEAFEANRFYTVINKKSGEIVPMEVNFNFDDPNLIILPLAFGKRQGREFIWNDLLSLETGSLKLANGRVIEKTLYNRRTRQDEPALFVALTFERREVLDSSNIKPGSLIGVDRGENIPAVIALTDPEGCPLSRFKDSLGNPTHILRIGESYKEKQRTIQVKKEVEQRRAGGYSRKYASKAKNLADDMVRNTARDLLYYAVTQDAMLIFENLSRGFGRQGKRTFMAERQYTRMEDWLTAKLAYEGLPSKTYLSKTLAQYTSKTCSNCGFTITSADYDRVLEKLKKTATGWMTTINGKELKVEGQITYYNRYKRQNVVKDLSVELDRLSEESVNNDISSWTKGRSGEALSLLKKRFSHRPVQEKFVCLNCGFETHADEQAALNIARSWLFLRSQEYKKYQTNKTTGNTDKRAFVETWQSFYRKKLKEVWKPAV

SEQ ID NO: 27492 - protein, 978 aa, synthetic construct
  REGION 1..978: note = engineered CasX variant
QEIKRINKIRRRLVKDSNTKKAGKTGPMKTLLVRVMTPDLRERLENLRKKPENIPQPISNTSRANLNKLLTDYTEMKKAILHVYWEEFQKDPVGLMSRVAQPASKKIDQNKLKPEMDEKGNLTTAGFACSQCGQPLFVYKLEQVSEKGKAYTNYFGRCNVAEHEKLILLAQLKPEKDSDEAVTYSLGKFGQRALDFYSIHVTKESTHPVKPLAQIAGNRYASGPVGKALSDACMGTIASFLSKYQDIIIEHQKVVKGNQKRLESLRELAGKENLEYPSVTLPPQPHTKEGVDAYNEVIARVRMWVNLNLWQKLKLSRDDAKPLLRLKGFPSFPLVERQANEVDWWDMVCNVKKLINEKKEDGKVFWQNLAGYKRQEALRPYLSSEEDRKKGKKFARYQLGDLLLHLEKKHGEDWGKVYDEAWERIDKKVEGLSKHIKLEEERRSEDAQSKAALTDWLRAKASFVIEGLKEADKDEFCRCELKLQKWYGDLRGKPFAIEAENSILDISGFSKQYNCAFIWQKDGVKKLNLYLIINYFKGGKLRFKKIKPEAFEANRFYTVINKKSGEIVPMEVNFNFDDPNLIILPLAFGKRQGREFIWNDLLSLETGSLKLANGRVIEKTLYNRRTRQDEPALFVALTFERREVLDSSNIKPGNLIGVDRGENIPAVIALTDPEGCPLSRFKDSLGNPTHILRIGESYKEKQRTIQVKKEVEQRRAGGYSRKYASKAKNLADDMVRNTARDLLYYAVTQDAMLIFENLSRGFGRQGKRTFMAERQYTRMEDWLTAKLAYEGLPSKTYLSKTLAQYTSKTCSNCGFTITSADYDRVLEKLKKTATGWMTTINGKELKVEGQITYYNRYKRQNVVKDLSVELDRLSEESVNNDISSWTKGRSGEALSLLKKRFSHRPVQEKFVCLNCGFETHADEQAALNIARSWLFLRSQEYKKYQTNKTTGNTDKRAFVETWQSFYRKKLKEVWKPAV

SEQ ID NO: 27493 - protein, 978 aa, synthetic construct
  REGION 1..978: note = engineered CasX variant
QEIKRINKIRRRLVKDSNTKKAGKTGPMKTLLVRVMTPDLRERLENLRKKPENIPQPISNTSRANLNKLLTDYTEMKKAILHVYWEEFQKDPVGLMSRVAQPASKKIDQNKLKPEMDEKGNLTTAGFACSQCGQPLFVYKLEQVSEKGKAYTNYFGRCNVAEHEKLILLAQLKPEKDSDEAVTYSLGKFGQRALDFYSIHVTKESTHPVKPLAQIAGNRYASGPVGKALSDACMGTIASFLSKYQDIIIEHQKVVKGNQKRLESLRELAGKENLEYPSVTLPPQPHTKEGVDAYNEVIARVRMWVNLNLWQKLKLSRDDAKPLLRLKGFPSFPLVERQANEVDWWDMVCNVKKLINEKKEDGKVFWQNLAGYKRQEALRPYLSSEEDRKKGKKFARYQLGDLLLHLEKKHGEDWGKVYDEAWERIDKKVEGLSKHIKLEEERRSEDAQSKAALTDWLRAKASFVIEGLKEADKDEFCRCELKLQKWYGDLRGKPFAIEAENSILDISGFSKQYNCAFIWQKDGVKKLNLYLIINYFKGGKLRFKKIKPEAFEANRFYTVINKKSGEIVPMEVNFNFDDPNLIILPLAFGKRQGREFIWNDLLSLETGSLKLANGRVIEKTLYNRRTRQDEPALFVALTFERREVLDSSNIKPGNLIGVDRGENIPAVIALTDPEGCPLSRFKDSLGNPTHILRIGESYKEKQRTIQAKKEVEQRRAGGYSRKYASKAKNLADDMVRNTARDLLYYAVTQDAMLIFENLSRGFGRQGKRTFMAERQYTRMEDWLTAKLAYEGLPSKTYLSKTLAQYTSKTCSNCGFTITSADYDRVLEKLKKTATGWMTTINGKELKVEGQITYYNRYKRQNVVKDLSVELDRLSEESVNNDISSWTKGRSGEALSLLKKRFSHRPVQEKFVCLNCGFETHADEQAALNIARSWLFLRSQEYKKYQTNKTTGNTDKRAFVETWQSFYRKKLKEVWKPAV

SEQ ID NO: 27494 - protein, 978 aa, synthetic construct
  REGION 1..978: note = engineered CasX variant
QEIKRINKIRRRLVKDSNTKKAGKTGPMKTLLVRVMTPDLRERLENLRKKPENIPQPISNTSRANLNKLLTDYTEMKKAILHVYWEEFQKDPVGLMSRVAQPASKKIDQNKLKPEMDEKGNLTTAGFACSQCGQPLFVYKLEQVSEKGKAYTNYFGRCNVAEHEKLILLAQLKPEKDSDEAVTYSLGKFGQRALDFYSIHVTKESTHPVKPLAQIAGNRYASGPVGKALSDACMGTIASFLSKYQDIIIEHQKVVKGNQKRLESLRELAGKENLEYPSVTLPPQPHTKEGVDAYNEVIARVRMWVNLNLWQKLKLSRDDAKPLLRLKGFPSFPLVERQANEVDWWDMVCNVKKLINEKKEDGKVFWQNLAGYKRQEALRPYLSSEEDRKKGKKFARYQLGDLLLHLEKKHGEDWGKVYDEAWERIDKKVEGLSKHIKLEEERRSEDAQSKAALTDWLRAKASFVIEGLKEADKDEFCRCELKLQKWYGDLRGKPFAIEAENSILDISGFSKQYNCAFIWQKDGVKKLNLYLIINYFKGGKLRFKKIKPEAFEANRFYTVINKKSGEIVPMEVNFNFDDPNLIILPLAFGKRQGREFIWNDLLSLETGSLKLANGRVIEKTLYNRRTRQDEPALFVALTFERREVLDSSNIKPFNLIGVDRGENIPAVIALTDPEGCPLSRFKDSLGNPTHILRIGESYKEKQRTIQAKKEVEQRRAGGYSRKYASKAKNLADDMVRNTARDLLYYAVTQDAMLIFENLSRGFGRQGKRTFMAERQYTRMEDWLTAKLAYEGLPSKTYLSKTLAQYTSKTCSNCGFTITSADYDRVLEKLKKTATGWMTTINGKELKVEGQITYYNRYKRQNVVKDLSVELDRLSEESVNNDISSWTKGRSGEALSLLKKRFSHRPVQEKFVCLNCGFETHADEQAALNIARSWLFLRSQEYKKYQTNKTTGNTDKRAFVETWQSFYRKKLKEVWKPAV

SEQ ID NO: 27495 - protein, 978 aa, synthetic construct
  REGION 1..978: note = engineered CasX variant
QEIKRINKIRRRLVKDSNTKKAGKTGPMKTLLVRVMTPDLRERLENLRKKPENIPQPISNTSRANLNKLLTDYTEMKKAILHVYWEEFQKDPVGLMSRVAQPASKKIDQNKLKPEMDEKGNLTTAGFACSQCGQPLFVYKLEQVSEKGKAYTNYFGRCNVAEHEKLILLAQLKPEKDSDEAVTYSLGKFGQRALDFYSIHVTKESTHPVKPLAQIAGNRYASGPVGKALSDACMGTIASFLSKYQDIIIEHQKVVKGNQKRLESLRELAGKENLEYPSVTLPPQPHTKEGVDAYNEVIARVRMWVNLNLWQKLKLSRDDAKPLLRLKGFPSFPLVERQANEVDWWDMVCNVKKLINEKKEDGKVFWQNLAGYKRQEALRPYLSSEEDRKKGKKFARYQLGDLLLHLEKKHGEDWGKVYDEAWERIDKKVEGLSKHIKLEEERRSEDAQSKAALTDWLRAKASFVIEGLKEADKDEFCRCELKLQKWYGDLRGKPFAIEAENSILDISGFSKQYNCAFIWQKDGVKKLNLYLIINYFKGGKLRFKKIKPEAFEANRFYTVINKKSGEIVPMEVNFNFDDPNLIILPLAFGKRQGREFIWNDLLSLETGSLKLANGRVIEKTLYNRRTRQDEPALFVALTFERREVLDSSNIKPFNLIGVDRGENIPAVIALTDPEGCPLSRFKDSLGNPTHILRIGESYKEKQRTIQAKKEVEQRRAFGYSRKYASKAKNLADDMVRNTARDLLYYAVTQDAMLIFENLSRGFGRQGKRTFMAERQYTRMEDWLTAKLAYEGLPSKTYLSKTLAQYTSKTCSNCGFTITSADYDRVLEKLKKTATGWMTTINGKELKVEGQITYYNRYKRQNVVKDLSVELDRLSEESVNNDISSWTKGRSGEALSLLKKRFSHRPVQEKFVCLNCGFETHADEQAALNIARSWLFLRSQEYKKYQTNKTTGNTDKRAFVETWQSFYRKKLKEVWKPAV

SEQ ID NO: 27496 - protein, 978 aa, synthetic construct
  REGION 1..978: note = engineered CasX variant
QEIKRINKIRRRLVKDSNTKKAGKTGPMKTLLVRVMTPDLRERLENLRKKPENIPQPISNTSRANLNKLLTDYTEMKKAILHVYWEEFQKDPVGLMSRVAQPASKKIDQNKLKPEMDEKGNLTTAGFACSQCGQPLFVYKLEQVSEKGKAYTNYFGRCNVAEHEKLILLAQLKPEKDSDEAVTYSLGKFGQRALDFYSIHVTKESTHPVKPLAQIAGNRYASGPVGKALSDACMGTIASFLSKYQDIIIEHQKVVKGNQKRLESLRELAGKENLEYPSVTLPPQPHTKEGVDAYNEVIARVRMWVNLNLWQKLKLSRDDAKPLLRLKGFPSFPLVERQANEVDWWDMVCNVKKLINEKKEDGKVFWQNLAGYKRQEALRPYLSSEEDRKKGKKFARYQLGDLLLHLEKKHGEDWGKVYDEAWERIDKKVEGLSKHIKLEEERRSEDAQSKAALTDWLRAKASFVIEGLKEADKDEFCRCELKLQKWYGDLRGKPFAIEAENSILDISGFSKQYNCAFIWQKDGVKKLNLYLIINYFKGGKLRFKKIKPEAFEANRFYTVINKKSGEIVPMEVNFNFDDPNLIILPLAFGKRQGREFIWNDLLSLETGSLKLANGRVIEKTLYNRRTRQDEPALFVALTFERREVLDSSNIKPFNLIGCDRGENIPAVIALTDPEGCPLSRFKDSLGNPTHILRIGESYKEKQRTIQAKKEVEQRRAGGYSRKYASKAKNLADDMVRNTARDLLYYAVTQDAMLIFENLSRGFGRQGKRTFMAERQYTRMEDWLTAKLAYEGLPSKTYLSKTLAQYTSKTCSNCGFTITSADYDRVLEKLKKTATGWMTTINGKELKVEGQITYYNRYKRQNVVKDLSVELDRLSEESVNNDISSWTKGRSGEALSLLKKRFSHRPVQEKFVCLNCGFETHADEQAALNIARSWLFLRSQEYKKYQTNKTTGNTDKRAFVETWQSFYRKKLKEVWKPAV

SEQ ID NO: 27497 - protein, 978 aa, synthetic construct
  REGION 1..978: note = engineered CasX variant
QEIKRINKIRRRLVKDSNTKKAGKTGPMKTLLVRVMTPDLRERLENLRKKPENIPQPISNTSRANLNKLLTDYTEMKKAILHVYWEEFQKDPVGLMSRVAQPASKKIDQNKLKPEMDEKGNLTTAGFACSQCGQPLFVYKLEQVSEKGKAYTNYFGRCNVAEHEKLILLAQLKPEKDSDEAVTYSLGKFGQRALDFYSIHVTKESTHPVKPLAQIAGNRYASGPVGKALSDACMGTIASFLSKYQDIIIEHQKVVKGNQKRLESLRELAGKENLEYPSVTLPPQPHTKEGVDAYNEVIARVRMWVNLNLWQKLKLSRDDAKPLLRLKGFPSFPLVERQANEVDWWDMVCNVKKLINEKKEDGKVFWQNLAGYKRQEALRPYLSSEEDRKKGKKFARYQLGDLLLHLEKKHGEDWGKVYDEAWERIDKKVEGLSKHIKLEEERRSEDAQSKAALTDWLRAKASFVIEGLKEADKDEFCRCELKLQKWYGDLRGKPFAIEAENSILDISGFSKQYNCAFIWQKDGVKKLNLYLIINYFKGGKLRFKKIKPEAFEANRFYTVINKKSGEIVPMEVNFNFDDPNLIILPLAFGKRQGREFIWNDLLSLETGSLKLANGRVIEKTLYNRRTRQDEPALFVALTFERREVLDSSNIKPFNLIGCDRGENIPAVIALTDPEGCPLSRFKDSLGNPTHILRIGESYKEKQRTIQAKKEVEQRRAFGYSRKYASKAKNLADDMVRNTARDLLYYAVTQDAMLIFENLSRGFGRQGKRTFMAERQYTRMEDWLTAKLAYEGLPSKTYLSKTLAQYTSKTCSNCGFTITSADYDRVLEKLKKTATGWMTTINGKELKVEGQITYYNRYKRQNVVKDLSVELDRLSEESVNNDISSWTKGRSGEALSLLKKRFSHRPVQEKFVCLNCGFETHADEQAALNIARSWLFLRSQEYKKYQTNKTTGNTDKRAFVETWQSFYRKKLKEVWKPAV

SEQ ID NO: 27498 - protein, 978 aa, synthetic construct
  REGION 1..978: note = engineered CasX variant
QEIKRINKIRRRLVKDSNTKKAGKTGPMKTLLVRVMTPDLRERLENLRKKPENIPQPISNTSRANLNKLLTDYTEMKKAILHVYWEEFQKDPVGLMSRVAQPASKKIDQNKLKPEMDEKGNLTTAGFACSQCGQPLFVYKLEQVSEKGKAYTNYFGRCNVAEHEKLILLAQLKPEKDSDEAVTYSLGKFGQRALDFYSIHVTKESTHPVKPLAQIAGNRYASGPVGKALSDACMGTIASFLSKYQDIIIEHQKVVKGNQKRLESLRELAGKENLEYPSVTLPPQPHTKEGVDAYNEVIARVRMWVNLNLWQKLKLSRDDAKPLLRLKGFPSFPLVERQANEVDWWDMVCNVKKLINEKKEDGKVFWQNLAGYKRQEALRPYLSSEEDRKKGKKFARYQLGDLLLHLEKKHGEDWGKVYDEAWERIDKKVEGLSKHIKLEEERRSEDAQSKAALTDWLRAKASFVIEGLKEADKDEFCRCELKLQKWYGDLRGKPFAIEAENSILDISGFSKQYNCAFIWQKDGVKKLNLYLIINYFKGGKLRFKKIKPEAFEANRFYTVINKKSGEIVPMEVNFNFDDPNLIILPLAFGKRQGREFIWNDLLSLETGSLKLANGRVIEKTLYNRRTRQDEPALFVALTFERREVLDSSNIKPCNLIGVDRGENIPAVIALTDPVGCPLSRFKDSLGNSTHILRIGESYKEKQRTIQAKKEVEQRRAGGYSRKYASKAKNLADDMVRNTARDLLYYAVTQDAMLIFENLSRGFGRQGKRTFMAERQYTRMEDWLTAKLAYEGLPSKTYLSKTLAQYTSKTCSNCGFTITSADYDRVLEKLKKTATGWMTTINGKELKVEGQITYYNRYKRQNVVKDLSVELDRLSEESVNNDISSWTKGRSGEALSLLKKRFSHRPVQEKFVCLNCGFETHADEQAALNIARSWLFLRSQEYKKYQTNKTTGNTDKRAFVETWQSFYRKKLKEVWKPAV

SEQ ID NO: 27499 - protein, 978 aa, synthetic construct
  REGION 1..978: note = engineered CasX variant
QEIKRINKIRRRLVKDSNTKKAGKTGPMKTLLVRVMTPDLRERLENLRKKPENIPQPISNTSRANLNKLLTDYTEMKKAILHVYWEEFQKDPVGLMSRVAQPASKKIDQNKLKPEMDEKGNLTTAGFACSQCGQPLFVYKLEQVSEKGKAYTNYFGRCNVAEHEKLILLAQLKPEKDSDEAVTYSLGKFGQRALDFYSIHVTKESTHPVKPLAQIAGNRYASGPVGKALSDACMGTIASFLSKYQDIIIEHQKVVKGNQKRLESLRELAGKENLEYPSVTLPPQPHTKEGVDAYNEVIARVRMWVNLNLWQKLKLSRDDAKPLLRLKGFPSFPLVERQANEVDWWDMVCNVKKLINEKKEDGKVFWQNLAGYKRQEALRPYLSSEEDRKKGKKFARYQLGDLLLHLEKKHGEDWGKVYDEAWERIDKKVEGLSKHIKLEEERRSEDAQSKAALTDWLRAKASFVIEGLKEADKDEFCRCELKLQKWYGDLRGKPFAIEAENSILDISGFSKQYNCAFIWQKDGVKKLNLYLIINYFKGGKLRFKKIKPEAFEANRFYTVINKKSGEIVPMEVNFNFDDPNLIILPLAFGKRQGREFIWNDLLSLETGSLKLANGRVIEKTLYNRRTRQDEPALFVALTFERREVLDSSNIKPCNLIGVDRGENIPAVIALTDPVGCPLSRFKDSLGNPTHILRIGESYKEKQRTIQAKKEVEQRRAGGYSRKYASKAKNLADDMVRNTARDLLYYAVTQDAMLIFENLSRGFGRQGKRTFMAERQYTRMEDWLTAKLAYEGLPSKTYLSKTLAQYTSKTCSNCGFTITSADYDRVLEKLKKTATGWMTTINGKELKVEGQITYYNRYKRQNVVKDLSVELDRLSEESVNNDISSWTKGRSGEALSLLKKRFSHRPVQEKFVCLNCGFETHADEQAALNIARSWLFLRSQEYKKYQTNKTTGNTDKRAFVETWQSFYRKKLKEVWKPAV

SEQ ID NO: 27500 - protein, 978 aa, synthetic construct
  REGION 1..978: note = engineered CasX variant
QEIKRINKIRRRLVKDSNTKKAGKTGPMKTLLVRVMTPDLRERLENLRKKPENIPQPISNTSRANLNKLLTDYTEMKKAILHVYWEEFQKDPVGLMSRVAQPASKKIDQNKLKPEMDEKGNLTTAGFACSQCGQPLFVYKLEQVSEKGKAYTNYFGRCNVAEHEKLILLAQLKPEKDSDEAVTYSLGKFGQRALDFYSIHVTKESTHPVKPLAQIAGNRYASGPVGKALSDACMGTIASFLSKYQDIIIEHQKVVKGNQKRLESLRELAGKENLEYPSVTLPPQPHTKEGVDAYNEVIARVRMWVNLNLWQKLKLSRDDAKPLLRLKGFPSFPLVERQANEVDWWDMVCNVKKLINEKKEDGKVFWQNLAGYKRQEALRPYLSSEEDRKKGKKFARYQLGDLLLHLEKKHGEDWGKVYDEAWERIDKKVEGLSKHIKLEEERRSEDAQSKAALTDWLRAKASFVIEGLKEADKDEFCRCELKLQKWYGDLRGKPFAIEAENSILDISGFSKQYNCAFIWQKDGVKKLNLYLIINYFKGGKLRFKKIKPEAFEANRFYTVINKKSGEIVPMEVNFNFDDPNLIILPLAFGKRQGREFIWNDLLSLETGSLKLANGRVIEKTLYNRRTRQDEPALFVALTFERREVLDSSNIKPCNLIGVDRGENIPAVIALTDPEGCPLSRFKDSLGNSTHILRIGESYKEKQRTIQAKKEVEQRRAGGYSRKYASKAKNLADDMVRNTARDLLYYAVTQDAMLIFENLSRGFGRQGKRTFMAERQYTRMEDWLTAKLAYEGLPSKTYLSKTLAQYTSKTCSNCGFTITSADYDRVLEKLKKTATGWMTTINGKELKVEGQITYYNRYKRQNVVKDLSVELDRLSEESVNNDISSWTKGRSGEALSLLKKRFSHRPVQEKFVCLNCGFETHADEQAALNIARSWLFLRSQEYKKYQTNKTTGNTDKRAFVETWQSFYRKKLKEVWKPAV

SEQ ID NO: 27501 - protein, 978 aa, synthetic construct
  REGION 1..978: note = engineered CasX variant
QEIKRINKIRRRLVKDSNTKKAGKTGPMKTLLVRVMTPDLRERLENLRKKPENIPQPISNTSRANLNKLLTDYTEMKKAILHVYWEEFQKDPVGLMSRVAQPASKKIDQNKLKPEMDEKGNLTTAGFACSQCGQPLFVYKLEQVSEKGKAYTNYFGRCNVAEHEKLILLAQLKPEKDSDEAVTYSLGKFGQRALDFYSIHVTKESTHPVKPLAQIAGNRYASGPVGKALSDACMGTIASFLSKYQDIIIEHQKVVKGNQKRLESLRELAGKENLEYPSVTLPPQPHTKEGVDAYNEVIARVRMWVNLNLWQKLKLSRDDAKPLLRLKGFPSFPLVERQANEVDWWDMVCNVKKLINEKKEDGKVFWQNLAGYKRQEALRPYLSSEEDRKKGKKFARYQLGDLLLHLEKKHGEDWGKVYDEAWERIDKKVEGLSKHIKLEEERRSEDAQSKAALTDWLRAKASFVIEGLKEADKDEFCRCELKLQKWYGDLRGKPFAIEAENSILDISGFSKQYNCAFIWQKDGVKKLNLYLIINYFKGGKLRFKKIKPEAFEANRFYTVINKKSGEIVPMEVNFNFDDPNLIILPLAFGKRQGREFIWNDLLSLETGSLKLANGRVIEKTLYNRRTRQDEPALFVALTFERREVLDSSNIKPCNLIGVDRGENIPAVIALTDPEGCPLSRFKDSLGNPTHILRIGESYKEKQRTIQAKKEVEQRRAGGYSRKYASKAKNLADDMVRNTARDLLYYAVTQDAMLIFENLSRGFGRQGKRTFMAERQYTRMEDWLTAKLAYEGLPSKTYLSKTLAQYTSKTCSNCGFTITSADYDRVLEKLKKTATGWMTTINGKELKVEGQITYYNRYKRQNVVKDLSVELDRLSEESVNNDISSWTKGRSGEALSLLKKRFSHRPVQEKFVCLNCGFETHADEQAALNIARSWLFLRSQEYKKYQTNKTTGNTDKRAFVETWQSFYRKKLKEVWKPAV

SEQ ID NO: 27502 - protein, 978 aa, synthetic construct
  REGION 1..978: note = engineered CasX variant
QEIKRINKIRRRLVKDSNTKKAGKTGPMKTLLVRVMTPDLRERLENLRKKPENIPQPISNTSRANLNKLLTDYTEMKKAILHVYWEEFQKDPVGLMSRVAQPASKKIDQNKLKPEMDEKGNLTTAGFACSQCGQPLFVYKLEQVSEKGKAYTNYFGRCNVAEHEKLILLAQLKPEKDSDEAVTYSLGKFGQRALDFYSIHVTKESTHPVKPLAQIAGNRYASGPVGKALSDACMGTIASFLSKYQDIIIEHQKVVKGNQKRLESLRELAGKENLEYPSVTLPPQPHTKEGVDAYNEVIARVRMWVNLNLWQKLKLSRDDAKPLLRLKGFPSFPLVERQANEVDWWDMVCNVKKLINEKKEDGKVFWQNLAGYKRQEALRPYLSSEEDRKKGKKFARYQLGDLLLHLEKKHGEDWGKVYDEAWERIDKKVEGLSKHIKLEEERRSEDAQSKAALTDWLRAKASFVIEGLKEADKDEFCRCELKLQKWYGDLRGKPFAIEAENSILDISGFSKQYNCAFIWQKDGVKKLNLYLIINYFKGGKLRFKKIKPEAFEANRFYTVINKKSGEIVPMEVNFNFDDPNLIILPLAFGKRQGREFIWNDLLSLETGSLKLANGRVIEKTLYNRRTRQDEPALFVALTFERREVLDSSNIKPCNLIGVDRGENIPAVIALTDPEGCPLSRFKDSLGNPTHILRIGESYKEKQRTIQAKKEVEQRRAFGYSRKYASKAKNLADDMVRNTARDLLYYAVTQDAMLIFENLSRGFGRQGKRTFMAERQYTRMEDWLTAKLAYEGLPSKTYLSKTLAQYTSKTCSNCGFTITSADYDRVLEKLKKTATGWMTTINGKELKVEGQITYYNRYKRQNVVKDLSVELDRLSEESVNNDISSWTKGRSGEALSLLKKRFSHRPVQEKFVCLNCGFETHADEQAALNIARSWLFLRSQEYKKYQTNKTTGNTDKRAFVETWQSFYRKKLKEVWKPAV

SEQ ID NO: 27503 - protein, 978 aa, synthetic construct
  REGION 1..978: note = engineered CasX variant
QEIKRINKIRRRLVKDSNTKKAGKTGPMKTLLVRVMTPDLRERLENLRKKPENIPQPISNTSRANLNKLLTDYTEMKKAILHVYWEEFQKDPVGLMSRVAQPASKKIDQNKLKPEMDEKGNLTTAGFACSQCGQPLFVYKLEQVSEKGKAYTNYFGRCNVAEHEKLILLAQLKPEKDSDEAVTYSLGKFGQRALDFYSIHVTKESTHPVKPLAQIAGNRYASGPVGKALSDACMGTIASFLSKYQDIIIEHQKVVKGNQKRLESLRELAGKENLEYPSVTLPPQPHTKEGVDAYNEVIARVRMWVNLNLWQKLKLSRDDAKPLLRLKGFPSFPLVERQANEVDWWDMVCNVKKLINEKKEDGKVFWQNLAGYKRQEALRPYLSSEEDRKKGKKFARYQLGDLLLHLEKKHGEDWGKVYDEAWERIDKKVEGLSKHIKLEEERRSEDAQSKAALTDWLRAKASFVIEGLKEADKDEFCRCELKLQKWYGDLRGKPFAIEAENSILDISGFSKQYNCAFIWQKDGVKKLNLYLIINYFKGGKLRFKKIKPEAFEANRFYTVINKKSGEIVPMEVNFNFDDPNLIILPLAFGKRQGREFIWNDLLSLETGSLKLANGRVIEKTLYNRRTRQDEPALFVALTFERREVLDSSNIKPCNLIGVDRGENIPAVIALTDPEGCPLSRFKDSLGLPTHILRIGESYKEKQRTIQAKKEVEQRRAGGYSRKYASKAKNLADDMVRNTARDLLYYAVTQDAMLIFENLSRGFGRQGKRTFMAERQYTRMEDWLTAKLAYEGLPSKTYLSKTLAQYTSKTCSNCGFTITSADYDRVLEKLKKTATGWMTTINGKELKVEGQITYYNRYKRQNVVKDLSVELDRLSEESVNNDISSWTKGRSGEALSLLKKRFSHRPVQEKFVCLNCGFETHADEQAALNIARSWLFLRSQEYKKYQTNKTTGNTDKRAFVETWQSFYRKKLKEVWKPAV

SEQ ID NO: 27504 - protein, 978 aa, synthetic construct
  REGION 1..978: note = engineered CasX variant
QEIKRINKIRRRLVKDSNTKKAGKTGPMKTLLVRVMTPDLRERLENLRKKPENIPQPISNTSRANLNKLLTDYTEMKKAILHVYWEEFQKDPVGLMSRVAQPASKKIDQNKLKPEMDEKGNLTTAGFACSQCGQPLFVYKLEQVSEKGKAYTNYFGRCNVAEHEKLILLAQLKPEKDSDEAVTYSLGKFGQRALDFYSIHVTKESTHPVKPLAQIAGNRYASGPVGKALSDACMGTIASFLSKYQDIIIEHQKVVKGNQKRLESLRELAGKENLEYPSVTLPPQPHTKEGVDAYNEVIARVRMWVNLNLWQKLKLSRDDAKPLLRLKGFPSFPLVERQANEVDWWDMVCNVKKLINEKKEDGKVFWQNLAGYKRQEALRPYLSSEEDRKKGKKFARYQLGDLLLHLEKKHGEDWGKVYDEAWERIDKKVEGLSKHIKLEEERRSEDAQSKAALTDWLRAKASFVIEGLKEADKDEFCRCELKLQKWYGDLRGKPFAIEAENSILDISGFSKQYNCAFIWQKDGVKKLNLYLIINYFKGGKLRFKKIKPEAFEANRFYTVINKKSGEIVPMEVNFNFDDPNLIILPLAFGKRQGREFIWNDLLSLETGSLKLANGRVIEKTLYNRRTRQDEPALFVALTFERREVLDSSNIKPCNLIGVDRGENIPAVIALTDPEGCPLSRFKDSLGLPTHILRIGESYKEKQRTIQAKKEVEQRRAFGYSRKYASKAKNLADDMVRNTARDLLYYAVTQDAMLIFENLSRGFGRQGKRTFMAERQYTRMEDWLTAKLAYEGLPSKTYLSKTLAQYTSKTCSNCGFTITSADYDRVLEKLKKTATGWMTTINGKELKVEGQITYYNRYKRQNVVKDLSVELDRLSEESVNNDISSWTKGRSGEALSLLKKRFSHRPVQEKFVCLNCGFETHADEQAALNIARSWLFLRSQEYKKYQTNKTTGNTDKRAFVETWQSFYRKKLKEVWKPAV

SEQ ID NO: 27505 - protein, 978 aa, synthetic construct
  REGION 1..978: note = engineered CasX variant
QEIKRINKIRRRLVKDSNTKKAGKTGPMKTLLVRVMTPDLRERLENLRKKPENIPQPISNTSRANLNKLLTDYTEMKKAILHVYWEEFQKDPVGLMSRVAQPASKKIDQNKLKPEMDEKGNLTTAGFACSQCGQPLFVYKLEQVSEKGKAYTNYFGRCNVAEHEKLILLAQLKPEKDSDEAVTYSLGKFGQRALDFYSIHVTKESTHPVKPLAQIAGNRYASGPVGKALSDACMGTIASFLSKYQDIIIEHQKVVKGNQKRLESLRELAGKENLEYPSVTLPPQPHTKEGVDAYNEVIARVRMWVNLNLWQKLKLSRDDAKPLLRLKGFPSFPLVERQANEVDWWDMVCNVKKLINEKKEDGKVFWQNLAGYKRQEALRPYLSSEEDRKKGKKFARYQLGDLLLHLEKKHGEDWGKVYDEAWERIDKKVEGLSKHIKLEEERRSEDAQSKAALTDWLRAKASFVIEGLKEADKDEFCRCELKLQKWYGDLRGKPFAIEAENSILDISGFSKQYNCAFIWQKDGVKKLNLYLIINYFKGGKLRFKKIKPEAFEANRFYTVINKKSGEIVPMEVNFNFDDPNLIILPLAFGKRQGREFIWNDLLSLETGSLKLANGRVIEKTLYNRRTRQDEPALFVALTFERREVLDSSNIKPCNLIGVDRGENIPAVIALTDPEGCPLSRFKDSLGHPTHILRIGESYKEKQRTIQAKKEVEQRRAGGYSRKYASKAKNLADDMVRNTARDLLYYAVTQDAMLIFENLSRGFGRQGKRTFMAERQYTRMEDWLTAKLAYEGLPSKTYLSKTLAQYTSKTCSNCGFTITSADYDRVLEKLKKTATGWMTTINGKELKVEGQITYYNRYKRQNVVKDLSVELDRLSEESVNNDISSWTKGRSGEALSLLKKRFSHRPVQEKFVCLNCGFETHADEQAALNIARSWLFLRSQEYKKYQTNKTTGNTDKRAFVETWQSFYRKKLKEVWKPAV

SEQ ID NO: 27506 - protein, 978 aa, synthetic construct
  REGION 1..978: note = engineered CasX variant
QEIKRINKIRRRLVKDSNTKKAGKTGPMKTLLVRVMTPDLRERLENLRKKPENIPQPISNTSRANLNKLLTDYTEMKKAILHVYWEEFQKDPVGLMSRVAQPASKKIDQNKLKPEMDEKGNLTTAGFACSQCGQPLFVYKLEQVSEKGKAYTNYFGRCNVAEHEKLILLAQLKPEKDSDEAVTYSLGKFGQRALDFYSIHVTKESTHPVKPLAQIAGNRYASGPVGKALSDACMGTIASFLSKYQDIIIEHQKVVKGNQKRLESLRELAGKENLEYPSVTLPPQPHTKEGVDAYNEVIARVRMWVNLNLWQKLKLSRDDAKPLLRLKGFPSFPLVERQANEVDWWDMVCNVKKLINEKKEDGKVFWQNLAGYKRQEALRPYLSSEEDRKKGKKFARYQLGDLLLHLEKKHGEDWGKVYDEAWERIDKKVEGLSKHIKLEEERRSEDAQSKAALTDWLRAKASFVIEGLKEADKDEFCRCELKLQKWYGDLRGKPFAIEAENSILDISGFSKQYNCAFIWQKDGVKKLNLYLIINYFKGGKLRFKKIKPEAFEANRFYTVINKKSGEIVPMEVNFNFDDPNLIILPLAFGKRQGREFIWNDLLSLETGSLKLANGRVIEKTLYNRRTRQDEPALFVALTFERREVLDSSNIKPCNLIGVDRGENIPAVIALTDPEGCPLSGFKDSLGNPTHILRIGESYKEKQRTIQAKKEVEQRRAGGYSRKYASKAKNLADDMVRNTARDLLYYAVTQDAMLIFENLSRGFGRQGKRTFMAERQYTRMEDWLTAKLAYEGLPSKTYLSKTLAQYTSKTCSNCGFTITSADYDRVLEKLKKTATGWMTTINGKELKVEGQITYYNRYKRQNVVKDLSVELDRLSEESVNNDISSWTKGRSGEALSLLKKRFSHRPVQEKFVCLNCGFETHADEQAALNIARSWLFLRSQEYKKYQTNKTTGNTDKRAFVETWQSFYRKKLKEVWKPAV

SEQ ID NO: 27507 - protein, 978 aa, synthetic construct
  REGION 1..978: note = engineered CasX variant
QEIKRINKIRRRLVKDSNTKKAGKTGPMKTLLVRVMTPDLRERLENLRKKPENIPQPISNTSRANLNKLLTDYTEMKKAILHVYWEEFQKDPVGLMSRVAQPASKKIDQNKLKPEMDEKGNLTTAGFACSQCGQPLFVYKLEQVSEKGKAYTNYFGRCNVAEHEKLILLAQLKPEKDSDEAVTYSLGKFGQRALDFYSIHVTKESTHPVKPLAQIAGNRYASGPVGKALSDACMGTIASFLSKYQDIIIEHQKVVKGNQKRLESLRELAGKENLEYPSVTLPPQPHTKEGVDAYNEVIARVRMWVNLNLWQKLKLSRDDAKPLLRLKGFPSFPLVERQANEVDWWDMVCNVKKLINEKKEDGKVFWQNLAGYKRQEALRPYLSSEEDRKKGKKFARYQLGDLLLHLEKKHGEDWGKVYDEAWERIDKKVEGLSKHIKLEEERRSEDAQSKAALTDWLRAKASFVIEGLKEADKDEFCRCELKLQKWYGDLRGKPFAIEAENSILDISGFSKQYNCAFIWQKDGVKKLNLYLIINYFKGGKLRFKKIKPEAFEANRFYTVINKKSGEIVPMEVNFNFDDPNLIILPLAFGKRQGREFIWNDLLSLETGSLKLANGRVIEKTLYNRRTRQDEPALFVALTFERREVLDSSNIKPCALIGVDRGENIPAVIALTDPEGCPLSRFKDSLGNPTHILRIGESYKEKQRTIQAKKEVEQRRAGGYSRKYASKAKNLADDMVRNTARDLLYYAVTQDAMLIFENLSRGFGRQGKRTFMAERQYTRMEDWLTAKLAYEGLPSKTYLSKTLAQYTSKTCSNCGFTITSADYDRVLEKLKKTATGWMTTINGKELKVEGQITYYNRYKRQNVVKDLSVELDRLSEESVNNDISSWTKGRSGEALSLLKKRFSHRPVQEKFVCLNCGFETHADEQAALNIARSWLFLRSQEYKKYQTNKTTGNTDKRAFVETWQSFYRKKLKEVWKPAV

SEQ ID NO: 27508 - protein, 978 aa, synthetic construct
  REGION 1..978: note = engineered CasX variant
QEIKRINKIRRRLVKDSNTKKAGKTGPMKTLLVRVMTPDLRERLENLRKKPENIPQPISNTSRANLNKLLTDYTEMKKAILHVYWEEFQKDPVGLMSRVAQPASKKIDQNKLKPEMDEKGNLTTAGFACSQCGQPLFVYKLEQVSEKGKAYTNYFGRCNVAEHEKLILLAQLKPEKDSDEAVTYSLGKFGQRALDFYSIHVTKESTHPVKPLAQIAGNRYASGPVGKALSDACMGTIASFLSKYQDIIIEHQKVVKGNQKRLESLRELAGKENLEYPSVTLPPQPHTKEGVDAYNEVIARVRMWVNLNLWQKLKLSRDDAKPLLRLKGFPSFPLVERQANEVDWWDMVCNVKKLINEKKEDGKVFWQNLAGYKRQEALRPYLSSEEDRKKGKKFARYQLGDLLLHLEKKHGEDWGKVYDEAWERIDKKVEGLSKHIKLEEERRSEDAQSKAALTDWLRAKASFVIEGLKEADKDEFCRCELKLQKWYGDLRGKPFAIEAENSILDISGFSKQYNCAFIWQKDGVKKLNLYLIINYFKGGKLRFKKIKPEAFEANRFYTVINKKSGEIVPMEVNFNFDDPNLIILPLAFGKRQGREFIWNDLLSLETGSLKLANGRVIEKTLYNRRTRQDEPALFVALTFERREVLDSSNIKPANLIGVDRGENIPAVIALTDPEGCPLSTFYDSLGNPTHILRIGESYKEKQRTIQAKKEVEQRRAGGYSRKYASKAKNLADDMVRNTARDLLYYAVTQDAMLIFENLSRGFGRQGKRTFMAERQYTRMEDWLTAKLAYEGLPSKTYLSKTLAQYTSKTCSNCGFTITSADYDRVLEKLKKTATGWMTTINGKELKVEGQITYYNRYKRQNVVKDLSVELDRLSEESVNNDISSWTKGRSGEALSLLKKRFSHRPVQEKFVCLNCGFETHADEQAALNIARSWLFLRSQEYKKYQTNKTTGNTDKRAFVETWQSFYRKKLKEVWKPAV

SEQ ID NO: 27509 - protein, 978 aa, synthetic construct
  REGION 1..978: note = engineered CasX variant
QEIKRINKIRRRLVKDSNTKKAGKTGPMKTLLVRVMTPDLRERLENLRKKPENIPQPISNTSRANLNKLLTDYTEMKKAILHVYWEEFQKDPVGLMSRVAQPASKKIDQNKLKPEMDEKGNLTTAGFACSQCGQPLFVYKLEQVSEKGKAYTNYFGRCNVAEHEKLILLAQLKPEKDSDEAVTYSLGKFGQRALDFYSIHVTKESTHPVKPLAQIAGNRYASGPVGKALSDACMGTIASFLSKYQDIIIEHQKVVKGNQKRLESLRELAGKENLEYPSVTLPPQPHTKEGVDAYNEVIARVRMWVNLNLWQKLKLSRDDAKPLLRLKGFPSFPLVERQANEVDWWDMVCNVKKLINEKKEDGKVFWQNLAGYKRQEALRPYLSSEEDRKKGKKFARYQLGDLLLHLEKKHGEDWGKVYDEAWERIDKKVEGLSKHIKLEEERRSEDAQSKAALTDWLRAKASFVIEGLKEADKDEFCRCELKLQKWYGDLRGKPFAIEAENSILDISGFSKQYNCAFIWQKDGVKKLNLYLIINYFKGGKLRFKKIKPEAFEANRFYTVINKKSGEIVPMEVNFNFDDPNLIILPLAFGKRQGREFIWNDLLSLETGSLKLANGRVIEKTLYNRRTRQDEPALFVALTFERREVLDSSNIKPANLIGVDRGENIPAVIALTDPEGCPLSTFKDSLGNPTHILRIGESYKEKQRTIQAKKEVEQRRAGGYSRKYASKAKNLADDMVRNTARDLLYYAVTQDAMLIFENLSRGFGRQGKRTFMAERQYTRMEDWLTAKLAYEGLPSKTYLSKTLAQYTSKTCSNCGFTITSADYDRVLEKLKKTATGWMTTINGKELKVEGQITYYNRYKRQNVVKDLSVELDRLSEESVNNDISSWTKGRSGEALSLLKKRFSHRPVQEKFVCLNCGFETHADEQAALNIARSWLFLRSQEYKKYQTNKTTGNTDKRAFVETWQSFYRKKLKEVWKPAV

SEQ ID NO: 27510 - protein, 978 aa, synthetic construct
  REGION 1..978: note = engineered CasX variant
QEIKRINKIRRRLVKDSNTKKAGKTGPMKTLLVRVMTPDLRERLENLRKKPENIPQPISNTSRANLNKLLTDYTEMKKAILHVYWEEFQKDPVGLMSRVAQPASKKIDQNKLKPEMDEKGNLTTAGFACSQCGQPLFVYKLEQVSEKGKAYTNYFGRCNVAEHEKLILLAQLKPEKDSDEAVTYSLGKFGQRALDFYSIHVTKESTHPVKPLAQIAGNRYASGPVGKALSDACMGTIASFLSKYQDIIIEHQKVVKGNQKRLESLRELAGKENLEYPSVTLPPQPHTKEGVDAYNEVIARVRMWVNLNLWQKLKLSRDDAKPLLRLKGFPSFPLVERQANEVDWWDMVCNVKKLINEKKEDGKVFWQNLAGYKRQEALRPYLSSEEDRKKGKKFARYQLGDLLLHLEKKHGEDWGKVYDEAWERIDKKVEGLSKHIKLEEERRSEDAQSKAALTDWLRAKASFVIEGLKEADKDEFCRCELKLQKWYGDLRGKPFAIEAENSILDISGFSKQYNCAFIWQKDGVKKLNLYLIINYFKGGKLRFKKIKPEAFEANRFYTVINKKSGEIVPMEVNFNFDDPNLIILPLAFGKRQGREFIWNDLLSLETGSLKLANGRVIEKTLYNRRTRQDEPALFVALTFERREVLDSSNIKPANLIGVDRGENIPAVIALTDPEGCPLSRFYDSLGNPTHILRIGESYKEKQRTIQAKKEVEQRRAGGYSRKYASKAKNLADDMVRNTARDLLYYAVTQDAMLIFENLSRGFGRQGKRTFMAERQYTRMEDWLTAKLAYEGLPSKTYLSKTLAQYTSKTCSNCGFTITSADYDRVLEKLKKTATGWMTTINGKELKVEGQITYYNRYKRQNVVKDLSVELDRLSEESVNNDISSWTKGRSGEALSLLKKRFSHRPVQEKFVCLNCGFETHADEQAALNIARSWLFLRSQEYKKYQTNKTTGNTDKRAFVETWQSFYRKKLKEVWKPAV

SEQ ID NO: 27511 - protein, 978 aa, synthetic construct
  REGION 1..978: note = engineered CasX variant
QEIKRINKIRRRLVKDSNTKKAGKTGPMKTLLVRVMTPDLRERLENLRKKPENIPQPISNTSRANLNKLLTDYTEMKKAILHVYWEEFQKDPVGLMSRVAQPASKKIDQNKLKPEMDEKGNLTTAGFACSQCGQPLFVYKLEQVSEKGKAYTNYFGRCNVAEHEKLILLAQLKPEKDSDEAVTYSLGKFGQRALDFYSIHVTKESTHPVKPLAQIAGNRYASGPVGKALSDACMGTIASFLSKYQDIIIEHQKVVKGNQKRLESLRELAGKENLEYPSVTLPPQPHTKEGVDAYNEVIARVRMWVNLNLWQKLKLSRDDAKPLLRLKGFPSFPLVERQANEVDWWDMVCNVKKLINEKKEDGKVFWQNLAGYKRQEALRPYLSSEEDRKKGKKFARYQLGDLLLHLEKKHGEDWGKVYDEAWERIDKKVEGLSKHIKLEEERRSEDAQSKAALTDWLRAKASFVIEGLKEADKDEFCRCELKLQKWYGDLRGKPFAIEAENSILDISGFSKQYNCAFIWQKDGVKKLNLYLIINYFKGGKLRFKKIKPEAFEANRFYTVINKKSGEIVPMEVNFNFDDPNLIILPLAFGKRQGREFIWNDLLSLETGSLKLANGRVIEKTLYNRRTRQDEPALFVALTFERREVLDSSNIKPANLIGVDRGENIPAVIALTDPEGCPLSRFKDSLGNPTHILRIGESYKEKQRTIQAKKEVEQRRAGGYSRKYASKAKNLADDMVRNTARDLLYYAVTQDAMLIFENLSRGFGRQGKRTFMAERQYTRMEDWLTAKLAYEGLPSKTYLSKTLAQYTSKTCSNCGFTITSADYDRVLEKLKKTATGWMTTINGKELKVEGQITYYNRYKRQNVVKDLSVELDRLSEESVNNDISSWTKGRSGEALSLLKKRFSHRPVQEKFVCLNCGFETHADEQAALNIARSWLFLRSQEYKKYQTNKTTGNTDKRAFVETWQSFYRKKLKEVWKPAV

SEQ ID NO: 27512 - protein, 978 aa, synthetic construct
  REGION 1..978: note = engineered CasX variant
QEIKRINKIRRRLVKDSNTKKAGKTGPMKTLLVRVMTPDLRERLENLRKKPENIPQPISNTSRANLNKLLTDYTEMKKAILHVYWEEFQKDPVGLMSRVAQPASKKIDQNKLKPEMDEKGNLTTAGFACSQCGQPLFVYKLEQVSEKGKAYTNYFGRCNVAEHEKLILLAQLKPEKDSDEAVTYSLGKFGQRALDFYSIHVTKESTHPVKPLAQIAGNRYASGPVGKALSDACMGTIASFLSKYQDIIIEHQKVVKGNQKRLESLRELAGKENLEYPSVTLPPQPHTKEGVDAYNEVIARVRMWVNLNLWQKLKLSRDDAKPLLRLKGFPSFPLVERQANEVDWWDMVCNVKKLINEKKEDGKVFWQNLAGYKRQEALRPYLSSEEDRKKGKKFARYQLGDLLLHLEKKHGEDWGKVYDEAWERIDKKVEGLSKHIKLEEERRSEDAQSKAALTDWLRAKASFVIEGLKEADKDEFCRCELKLQKWYGDLRGKPFAIEAENSILDISGFSKQYNCAFIWQKDGVKKLNLYLIINYFKGGKLRFKKIKPEAFEANRFYTVINKKSGEIVPMEVNFNFDDPNLIILPLAFGKRQGREFIWNDLLSLETGSLKLANGRVIEKTLYNRRTRQDEPALFVALTFERREVLDSSNIKMMNLIGVDRGENIPAVIALTDPEGCPLSRFKDSLGNPTHILRIGESYKEKQRTIQAKKEVEQRRAGGYSRKYASKAKNLADDMVRNTARDLLYYAVTQDAMLIFENLSRGFGRQGKRTFMAERQYTRMEDWLTAKLAYEGLPSKTYLSKTLAQYTSKTCSNCGFTITSADYDRVLEKLKKTATGWMTTINGKELKVEGQITYYNRYKRQNVVKDLSVELDRLSEESVNNDISSWTKGRSGEALSLLKKRFSHRPVQEKFVCLNCGFETHADEQAALNIARSWLFLRSQEYKKYQTNKTTGNTDKRAFVETWQSFYRKKLKEVWKPAV

SEQ ID NO: 27513 - protein, 978 aa, synthetic construct
  REGION 1..978: note = engineered CasX variant
QEIKRINKIRRRLVKDSNTKKAGKTGPMKTLLVRVMTPDLRERLENLRKKPENIPQPISNTSRANLNKLLTDYTEMKKAILHVYWEEFQKDPVGLMSRVAQPASKKIDQNKLKPEMDEKGNLTTAGFACSQCGQPLFVYKLEQVSEKGKAYTNYFGRCNVAEHEKLILLAQLKPEKDSDEAVTYSLGKFGQRALDFYSIHVTKESTHPVKPLAQIAGNRYASGPVGKALSDACMGTIASFLSKYQDIIIEHQKVVKGNQKRLESLRELAGKENLEYPSVTLPPQPHTKEGVDAYNEVIARVRMWVNLNLWQKLKLSRDDAKPLLRLKGFPSFPLVERQANEVDWWDMVCNVKKLINEKKEDGKVFWQNLAGYKRQEALRPYLSSEEDRKKGKKFARYQLGDLLLHLEKKHGEDWGKVYDEAWERIDKKVEGLSKHIKLEEERRSEDAQSKAALTDWLRAKASFVIEGLKEADKDEFCRCELKLQKWYGDLRGKPFAIEAENSILDISGFSKQYNCAFIWQKDGVKKLNLYLIINYFKGGKLRFKKIKPEAFEANRFYTVINKKSGEIVPMEVNFNFDDPNLIILPLAFGKRQGREFIWNDLLSLETGSLKLANGRVIEKTLYNRRTRQDEPALFVALTFERREVLDSSNIKLMNLIGVDRGENIPAVIALTDPEGCPLSRFKDSLGNPTHILRIGESYKEKQRTIQAKKEVEQRRAGGYSRKYASKAKNLADDMVRNTARDLLYYAVTQDAMLIFENLSRGFGRQGKRTFMAERQYTRMEDWLTAKLAYEGLPSKTYLSKTLAQYTSKTCSNCGFTITSADYDRVLEKLKKTATGWMTTINGKELKVEGQITYYNRYKRQNVVKDLSVELDRLSEESVNNDISSWTKGRSGEALSLLKKRFSHRPVQEKFVCLNCGFETHADEQAALNIARSWLFLRSQEYKKYQTNKTTGNTDKRAFVETWQSFYRKKLKEVWKPAV

SEQ ID NO: 27514 - protein, 978 aa, synthetic construct
  REGION 1..978: note = engineered CasX variant
QEIKRINKIRRRLVKDSNTKKAGKTGPMKTLLVRVMTPDLRERLENLRKKPENIPQPISNTSRANLNKLLTDYTEMKKAILHVYWEEFQKDPVGLMSRVAQPASKKIDQNKLKPEMDEKGNLTTAGFACSQCGQPLFVYKLEQVSEKGKAYTNYFGRCNVAEHEKLILLAQLKPEKDSDEAVTYSLGKFGQRALDFYSIHVTKESTHPVKPLAQIAGNRYASGPVGKALSDACMGTIASFLSKYQDIIIEHQKVVKGNQKRLESLRELAGKENLEYPSVTLPPQPHTKEGVDAYNEVIARVRMWVNLNLWQKLKLSRDDAKPLLRLKGFPSFPLVERQANEVDWWDMVCNVKKLINEKKEDGKVFWQNLAGYKRQEALRPYLSSEEDRKKGKKFARYQLGDLLLHLEKKHGEDWGKVYDEAWERIDKKVEGLSKHIKLEEERRSEDAQSKAALTDWLRAKASFVIEGLKEADKDEFCRCELKLQKWYGDLRGKPFAIEAENSILDISGFSKQYNCAFIWQKDGVKKLNLYLIINYFKGGKLRFKKIKPEAFEANRFYTVINKKSGEIVPMEVNFNFDDPNLIILPLAFGKRQGREFIWNDLLSLETGSLKLANGRVIEKTLYNRRTRQDEPALFVALTFERREVLDSSNIKLMNLIGVDRGENIPAVIALTDPEGCPLSRFKDSLGNDTHILRIGESYKEKQRTIQAKKEVEQRRAGGYSRKYASKAKNLADDMVRNTARDLLYYAVTQDAMLIFENLSRGFGRQGKRTFMAERQYTRMEDWLTAKLAYEGLPSKTYLSKTLAQYTSKTCSNCGFTITSADYDRVLEKLKKTATGWMTTINGKELKVEGQITYYNRYKRQNVVKDLSVELDRLSEESVNNDISSWTKGRSGEALSLLKKRFSHRPVQEKFVCLNCGFETHADEQAALNIARSWLFLRSQEYKKYQTNKTTGNTDKRAFVETWQSFYRKKLKEVWKPAV

SEQ ID NO: 27515 - protein, 978 aa, synthetic construct
  REGION 1..978: note = engineered CasX variant
QEIKRINKIRRRLVKDSNTKKAGKTGPMKTLLVRVMTPDLRERLENLRKKPENIPQPISNTSRANLNKLLTDYTEMKKAILHVYWEEFQKDPVGLMSRVAQPASKKIDQNKLKPEMDEKGNLTTAGFACSQCGQPLFVYKLEQVSEKGKAYTNYFGRCNVAEHEKLILLAQLKPEKDSDEAVTYSLGKFGQRALDFYSIHVTKESTHPVKPLAQIAGNRYASGPVGKALSDACMGTIASFLSKYQDIIIEHQKVVKGNQKRLESLRELAGKENLEYPSVTLPPQPHTKEGVDAYNEVIARVRMWVNLNLWQKLKLSRDDAKPLLRLKGFPSFPLVERQANEVDWWDMVCNVKKLINEKKEDGKVFWQNLAGYKRQEALRPYLSSEEDRKKGKKFARYQLGDLLLHLEKKHGEDWGKVYDEAWERIDKKVEGLSKHIKLEEERRSEDAQSKAALTDWLRAKASFVIEGLKEADKDEFCRCELKLQKWYGDLRGKPFAIEAENSILDISGFSKQYNCAFIWQKDGVKKLNLYLIINYFKGGKLRFKKIKPEAFEANRFYTVINKKSGEIVPMEVNFNFDDPNLIILPLAFGKRQGREFIWNDLLSLETGSLKLANGRVIEKTLYNRRTRQDEPALFVALTFERREVLDSSNIKLMNLIGVDRGENIPAVIALTDPEGCPLSMFKDSLGNPTHILRIGESYKEKQRTIQAKKEVEQRRAGGYSRKYASKAKNLADDMVRNTARDLLYYAVTQDAMLIFENLSRGFGRQGKRTFMAERQYTRMEDWLTAKLAYEGLPSKTYLSKTLAQYTSKTCSNCGFTITSADYDRVLEKLKKTATGWMTTINGKELKVEGQITYYNRYKRQNVVKDLSVELDRLSEESVNNDISSWTKGRSGEALSLLKKRFSHRPVQEKFVCLNCGFETHADEQAALNIARSWLFLRSQEYKKYQTNKTTGNTDKRAFVETWQSFYRKKLKEVWKPAV

SEQ ID NO: 27516 - protein, 978 aa, synthetic construct
  REGION 1..978: note = engineered CasX variant
QEIKRINKIRRRLVKDSNTKKAGKTGPMKTLLVRVMTPDLRERLENLRKKPENIPQPISNTSRANLNKLLTDYTEMKKAILHVYWEEFQKDPVGLMSRVAQPASKKIDQNKLKPEMDEKGNLTTAGFACSQCGQPLFVYKLEQVSEKGKAYTNYFGRCNVAEHEKLILLAQLKPEKDSDEAVTYSLGKFGQRALDFYSIHVTKESTHPVKPLAQIAGNRYASGPVGKALSDACMGTIASFLSKYQDIIIEHQKVVKGNQKRLESLRELAGKENLEYPSVTLPPQPHTKEGVDAYNEVIARVRMWVNLNLWQKLKLSRDDAKPLLRLKGFPSFPLVERQANEVDWWDMVCNVKKLINEKKEDGKVFWQNLAGYKRQEALRPYLSSEEDRKKGKKFARYQLGDLLLHLEKKHGEDWGKVYDEAWERIDKKVEGLSKHIKLEEERRSEDAQSKAALTDWLRAKASFVIEGLKEADKDEFCRCELKLQKWYGDLRGKPFAIEAENSILDISGFSKQYNCAFIWQKDGVKKLNLYLIINYFKGGKLRFKKIKPEAFEANRFYTVINKKSGEIVPMEVNFNFDDPNLIILPLAFGKRQGREFIWNDLLSLETGSLKLANGRVIEKTLYNRRTRQDEPALFVALTFERREVLDSSNIKKMPLIGVDRGENIPAVIALTDPEGCPLSRFKDSLGNPTHILRIGESYKEKQRTIQAKKEVEQRRAGGYSRKYASKAKNLADDMVRNTARDLLYYAVTQDAMLIFENLSRGFGRQGKRTFMAERQYTRMEDWLTAKLAYEGLPSKTYLSKTLAQYTSKTCSNCGFTITSADYDRVLEKLKKTATGWMTTINGKELKVEGQITYYNRYKRQNVVKDLSVELDRLSEESVNNDISSWTKGRSGEALSLLKKRFSHRPVQEKFVCLNCGFETHADEQAALNIARSWLFLRSQEYKKYQTNKTTGNTDKRAFVETWQSFYRKKLKEVWKPAV

SEQ ID NO: 27517 - protein, 978 aa, synthetic construct
  REGION 1..978: note = engineered CasX variant
QEIKRINKIRRRLVKDSNTKKAGKTGPMKTLLVRVMTPDLRERLENLRKKPENIPQPISNTSRANLNKLLTDYTEMKKAILHVYWEEFQKDPVGLMSRVAQPASKKIDQNKLKPEMDEKGNLTTAGFACSQCGQPLFVYKLEQVSEKGKAYTNYFGRCNVAEHEKLILLAQLKPEKDSDEAVTYSLGKFGQRALDFYSIHVTKESTHPVKPLAQIAGNRYASGPVGKALSDACMGTIASFLSKYQDIIIEHQKVVKGNQKRLESLRELAGKENLEYPSVTLPPQPHTKEGVDAYNEVIARVRMWVNLNLWQKLKLSRDDAKPLLRLKGFPSFPLVERQANEVDWWDMVCNVKKLINEKKEDGKVFWQNLAGYKRQEALRPYLSSEEDRKKGKKFARYQLGDLLLHLEKKHGEDWGKVYDEAWERIDKKVEGLSKHIKLEEERRSEDAQSKAALTDWLRAKASFVIEGLKEADKDEFCRCELKLQKWYGDLRGKPFAIEAENSILDISGFSKQYNCAFIWQKDGVKKLNLYLIINYFKGGKLRFKKIKPEAFEANRFYTVINKKSGEIVPMEVNFNFDDPNLIILPLAFGKRQGREFIWNDLLSLETGSLKLANGRVIEKTLYNRRTRQDEPALFVALTFERREVLDSSNIKKMPLIGVDRGENIPAVIALTDPEGCPLSRFKDSLGNPTHILRIGESYKEKQRTCQAKKEVEQRRAGGYSRKYASKAKNLADDMVRNTARDLLYYAVTQDAMLIFENLSRGFGRQGKRTFMAERQYTRMEDWLTAKLAYEGLPSKTYLSKTLAQYTSKTCSNCGFTITSADYDRVLEKLKKTATGWMTTINGKELKVEGQITYYNRYKRQNVVKDLSVELDRLSEESVNNDISSWTKGRSGEALSLLKKRFSHRPVQEKFVCLNCGFETHADEQAALNIARSWLFLRSQEYKKYQTNKTTGNTDKRAFVETWQSFYRKKLKEVWKPAV

SEQ ID NO: 27518 - protein, 978 aa, synthetic construct
  REGION 1..978: note = engineered CasX variant
QEIKRINKIRRRLVKDSNTKKAGKTGPMKTLLVRVMTPDLRERLENLRKKPENIPQPISNTSRANLNKLLTDYTEMKKAILHVYWEEFQKDPVGLMSRVAQPASKKIDQNKLKPEMDEKGNLTTAGFACSQCGQPLFVYKLEQVSEKGKAYTNYFGRCNVAEHEKLILLAQLKPEKDSDEAVTYSLGKFGQRALDFYSIHVTKESTHPVKPLAQIAGNRYASGPVGKALSDACMGTIASFLSKYQDIIIEHQKVVKGNQKRLESLRELAGKENLEYPSVTLPPQPHTKEGVDAYNEVIARVRMWVNLNLWQKLKLSRDDAKPLLRLKGFPSFPLVERQANEVDWWDMVCNVKKLINEKKEDGKVFWQNLAGYKRQEALRPYLSSEEDRKKGKKFARYQLGDLLLHLEKKHGEDWGKVYDEAWERIDKKVEGLSKHIKLEEERRSEDAQSKAALTDWLRAKASFVIEGLKEADKDEFCRCELKLQKWYGDLRGKPFAIEAENSILDISGFSKQYNCAFIWQKDGVKKLNLYLIINYFKGGKLRFKKIKPEAFEANRFYTVINKKSGEIVPMEVNFNFDDPNLIILPLAFGKRQGREFIWNDLLSLETGSLKLANGRVIEKTLYNRRTRQDEPALFVALTFERREVLDSSNIKKMNLIGVDRGENIPAVIALTDPEGCPLSRFKDSLGNPTHILRIGESYKEKQRTIQAKKEVEQRRAGNYSRKYASKAKNLADDMVRNTARDLLYYAVTQDAMLIFENLSRGFGRQGKRTFMAERQYTRMEDWLTAKLAYEGLPSKTYLSKTLAQYTSKTCSNCGFTITSADYDRVLEKLKKTATGWMTTINGKELKVEGQITYYNRYKRQNVVKDLSVELDRLSEESVNNDISSWTKGRSGEALSLLKKRFSHRPVQEKFVCLNCGFETHADEQAALNIARSWLFLRSQEYKKYQTNKTTGNTDKRAFVETWQSFYRKKLKEVWKPAV

SEQ ID NO: 27519 - protein, 978 aa, synthetic construct
  REGION 1..978: note = engineered CasX variant
QEIKRINKIRRRLVKDSNTKKAGKTGPMKTLLVRVMTPDLRERLENLRKKPENIPQPISNTSRANLNKLLTDYTEMKKAILHVYWEEFQKDPVGLMSRVAQPASKKIDQNKLKPEMDEKGNLTTAGFACSQCGQPLFVYKLEQVSEKGKAYTNYFGRCNVAEHEKLILLAQLKPEKDSDEAVTYSLGKFGQRALDFYSIHVTKESTHPVKPLAQIAGNRYASGPVGKALSDACMGTIASFLSKYQDIIIEHQKVVKGNQKRLESLRELAGKENLEYPSVTLPPQPHTKEGVDAYNEVIARVRMWVNLNLWQKLKLSRDDAKPLLRLKGFPSFPLVERQANEVDWWDMVCNVKKLINEKKEDGKVFWQNLAGYKRQEALRPYLSSEEDRKKGKKFARYQLGDLLLHLEKKHGEDWGKVYDEAWERIDKKVEGLSKHIKLEEERRSEDAQSKAALTDWLRAKASFVIEGLKEADKDEFCRCELKLQKWYGDLRGKPFAIEAENSILDISGFSKQYNCAFIWQKDGVKKLNLYLIINYFKGGKLRFKKIKPEAFEANRFYTVINKKSGEIVPMEVNFNFDDPNLIILPLAFGKRQGREFIWNDLLSLETGSLKLANGRVIEKTLYNRRTRQDEPALFVALTFERREVLDSSNIKKMNLIGVDRGENIPAVIALTDPEGCPLSRFKDSLGNPTHILRIGESYKEKQRTIQAKKEVEQRRAGGYSRKYASKAKNLADDMVRNTARDLLYYAVTQDAMLIFENLSRGFGRQGKRTFMAERQYTRMEDWLTAKLAYEGLPSKTYLSKTLAQYTSKTCSNCGFTITSADYDRVLEKLKKTATGWMTTINGKELKVEGQITYYNRYKRQNVVKDLSVELDRLSEESVNNDISSWTKGRSGEALSLLKKRFSHRPVQEKFVCLNCGFETHADEQAALNIARSWLFLRSQEYKKYQTNKTTGNTDKRAFVETWQSFYRKKLKEVWKPAV

SEQ ID NO: 27520 - protein, 978 aa, synthetic construct
  REGION 1..978: note = engineered CasX variant
QEIKRINKIRRRLVKDSNTKKAGKTGPMKTLLVRVMTPDLRERLENLRKKPENIPQPISNTSRANLNKLLTDYTEMKKAILHVYWEEFQKDPVGLMSRVAQPASKKIDQNKLKPEMDEKGNLTTAGFACSQCGQPLFVYKLEQVSEKGKAYTNYFGRCNVAEHEKLILLAQLKPEKDSDEAVTYSLGKFGQRALDFYSIHVTKESTHPVKPLAQIAGNRYASGPVGKALSDACMGTIASFLSKYQDIIIEHQKVVKGNQKRLESLRELAGKENLEYPSVTLPPQPHTKEGVDAYNEVIARVRMWVNLNLWQKLKLSRDDAKPLLRLKGFPSFPLVERQANEVDWWDMVCNVKKLINEKKEDGKVFWQNLAGYKRQEALRPYLSSEEDRKKGKKFARYQLGDLLLHLEKKHGEDWGKVYDEAWERIDKKVEGLSKHIKLEEERRSEDAQSKAALTDWLRAKASFVIEGLKEADKDEFCRCELKLQKWYGDLRGKPFAIEAENSILDISGFSKQYNCAFIWQKDGVKKLNLYLIINYFKGGKLRFKKIKPEAFEANRFYTVINKKSGEIVPMEVNFNFDDPNLIILPLAFGKRQGREFIWNDLLSLETGSLKLANGRVIEKTLYNRRTRQDEPALFVALTFERREVLDSSNIKKMNLIGVDRGENIPAVIALTDPEGCPLSRFKDSLGNPTHILRIGESYKEKQRTIQAKKCVEQRRAGGYSRKYASKAKNLADDMVRNTARDLLYYAVTQDAMLIFENLSRGFGRQGKRTFMAERQYTRMEDWLTAKLAYEGLPSKTYLSKTLAQYTSKTCSNCGFTITSADYDRVLEKLKKTATGWMTTINGKELKVEGQITYYNRYKRQNVVKDLSVELDRLSEESVNNDISSWTKGRSGEALSLLKKRFSHRPVQEKFVCLNCGFETHADEQAALNIARSWLFLRSQEYKKYQTNKTTGNTDKRAFVETWQSFYRKKLKEVWKPAV

SEQ ID NO: 27521 - protein, 978 aa, synthetic construct
  REGION 1..978: note = engineered CasX variant
QEIKRINKIRRRLVKDSNTKKAGKTGPMKTLLVRVMTPDLRERLENLRKKPENIPQPISNTSRANLNKLLTDYTEMKKAILHVYWEEFQKDPVGLMSRVAQPASKKIDQNKLKPEMDEKGNLTTAGFACSQCGQPLFVYKLEQVSEKGKAYTNYFGRCNVAEHEKLILLAQLKPEKDSDEAVTYSLGKFGQRALDFYSIHVTKESTHPVKPLAQIAGNRYASGPVGKALSDACMGTIASFLSKYQDIIIEHQKVVKGNQKRLESLRELAGKENLEYPSVTLPPQPHTKEGVDAYNEVIARVRMWVNLNLWQKLKLSRDDAKPLLRLKGFPSFPLVERQANEVDWWDMVCNVKKLINEKKEDGKVFWQNLAGYKRQEALRPYLSSEEDRKKGKKFARYQLGDLLLHLEKKHGEDWGKVYDEAWERIDKKVEGLSKHIKLEEERRSEDAQSKAALTDWLRAKASFVIEGLKEADKDEFCRCELKLQKWYGDLRGKPFAIEAENSILDISGFSKQYNCAFIWQKDGVKKLNLYLIINYFKGGKLRFKKIKPEAFEANRFYTVINKKSGEIVPMEVNFNFDDPNLIILPLAFGKRQGREFIWNDLLSLETGSLKLANGRVIEKTLYNRRTRQDEPALFVALTFERREVLDSSNIKKMNLIGVDRGENIPAVIALTDPEGCPLSRFKDSLGNPTHILRIGESYKEKQRTCQAKKEVEQRRAGGYSRKYASKAKNLADDMVRNTARDLLYYAVTQDAMLIFENLSRGFGRQGKRTFMAERQYTRMEDWLTAKLAYEGLPSKTYLSKTLAQYTSKTCSNCGFTITSADYDRVLEKLKKTATGWMTTINGKELKVEGQITYYNRYKRQNVVKDLSVELDRLSEESVNNDISSWTKGRSGEALSLLKKRFSHRPVQEKFVCLNCGFETHADEQAALNIARSWLFLRSQEYKKYQTNKTTGNTDKRAFVETWQSFYRKKLKEVWKPAV

SEQ ID NO: 27522 - protein, 978 aa, synthetic construct
  REGION 1..978: note = engineered CasX variant
QEIKRINKIRRRLVKDSNTKKAGKTGPMKTLLVRVMTPDLRERLENLRKKPENIPQPISNTSRANLNKLLTDYTEMKKAILHVYWEEFQKDPVGLMSRVAQPASKKIDQNKLKPEMDEKGNLTTAGFACSQCGQPLFVYKLEQVSEKGKAYTNYFGRCNVAEHEKLILLAQLKPEKDSDEAVTYSLGKFGQRALDFYSIHVTKESTHPVKPLAQIAGNRYASGPVGKALSDACMGTIASFLSKYQDIIIEHQKVVKGNQKRLESLRELAGKENLEYPSVTLPPQPHTKEGVDAYNEVIARVRMWVNLNLWQKLKLSRDDAKPLLRLKGFPSFPLVERQANEVDWWDMVCNVKKLINEKKEDGKVFWQNLAGYKRQEALRPYLSSEEDRKKGKKFARYQLGDLLLHLEKKHGEDWGKVYDEAWERIDKKVEGLSKHIKLEEERRSEDAQSKAALTDWLRAKASFVIEGLKEADKDEFCRCELKLQKWYGDLRGKPFAIEAENSILDISGFSKQYNCAFIWQKDGVKKLNLYLIINYFKGGKLRFKKIKPEAFEANRFYTVINKKSGEIVPMEVNFNFDDPNLIILPLAFGKRQGREFIWNDLLSLETGSLKLANGRVIEKTLYNRRTRQDEPALFVALTFERREVLDSSNIKIMNLIGVDRGENIPAVIALTDPEGHPLSRFKDSLGNPTHILRIGESYKEKQRTIQATKEVEQRRAGGYSRKYASKAKNLADDMVRNTARDLLYYAVTQDAMLIFENLSRGFGRQGKRTFMAERQYTRMEDWLTAKLAYEGLPSKTYLSKTLAQYTSKTCSNCGFTITSADYDRVLEKLKKTATGWMTTINGKELKVEGQITYYNRYKRQNVVKDLSVELDRLSEESVNNDISSWTKGRSGEALSLLKKRFSHRPVQEKFVCLNCGFETHADEQAALNIARSWLFLRSQEYKKYQTNKTTGNTDKRAFVETWQSFYRKKLKEVWKPAV

SEQ ID NO: 27523 - protein, 978 aa, synthetic construct
  REGION 1..978: note = engineered CasX variant
QEIKRINKIRRRLVKDSNTKKAGKTGPMKTLLVRVMTPDLRERLENLRKKPENIPQPISNTSRANLNKLLTDYTEMKKAILHVYWEEFQKDPVGLMSRVAQPASKKIDQNKLKPEMDEKGNLTTAGFACSQCGQPLFVYKLEQVSEKGKAYTNYFGRCNVAEHEKLILLAQLKPEKDSDEAVTYSLGKFGQRALDFYSIHVTKESTHPVKPLAQIAGNRYASGPVGKALSDACMGTIASFLSKYQDIIIEHQKVVKGNQKRLESLRELAGKENLEYPSVTLPPQPHTKEGVDAYNEVIARVRMWVNLNLWQKLKLSRDDAKPLLRLKGFPSFPLVERQANEVDWWDMVCNVKKLINEKKEDGKVFWQNLAGYKRQEALRPYLSSEEDRKKGKKFARYQLGDLLLHLEKKHGEDWGKVYDEAWERIDKKVEGLSKHIKLEEERRSEDAQSKAALTDWLRAKASFVIEGLKEADKDEFCRCELKLQKWYGDLRGKPFAIEAENSILDISGFSKQYNCAFIWQKDGVKKLNLYLIINYFKGGKLRFKKIKPEAFEANRFYTVINKKSGEIVPMEVNFNFDDPNLIILPLAFGKRQGREFIWNDLLSLETGSLKLANGRVIEKTLYNRRTRQDEPALFVALTFERREVLDSSNIKIMNLIGVDRGENIPAVIALTDPEGCPLSRFKDSLGNPTHILRIGESYKEKQRTIQQKKEVEQRRAGGYSRKYASKAKNLADDMVRNTARDLLYYAVTQDAMLIFENLSRGFGRQGKRTFMAERQYTRMEDWLTAKLAYEGLPSKTYLSKTLAQYTSKTCSNCGFTITSADYDRVLEKLKKTATGWMTTINGKELKVEGQITYYNRYKRQNVVKDLSVELDRLSEESVNNDISSWTKGRSGEALSLLKKRFSHRPVQEKFVCLNCGFETHADEQAALNIARSWLFLRSQEYKKYQTNKTTGNTDKRAFVETWQSFYRKKLKEVWKPAV

SEQ ID NO: 27524 - protein, 978 aa, synthetic construct
  REGION 1..978: note = engineered CasX variant
QEIKRINKIRRRLVKDSNTKKAGKTGPMKTLLVRVMTPDLRERLENLRKKPENIPQPISNTSRANLNKLLTDYTEMKKAILHVYWEEFQKDPVGLMSRVAQPASKKIDQNKLKPEMDEKGNLTTAGFACSQCGQPLFVYKLEQVSEKGKAYTNYFGRCNVAEHEKLILLAQLKPEKDSDEAVTYSLGKFGQRALDFYSIHVTKESTHPVKPLAQIAGNRYASGPVGKALSDACMGTIASFLSKYQDIIIEHQKVVKGNQKRLESLRELAGKENLEYPSVTLPPQPHTKEGVDAYNEVIARVRMWVNLNLWQKLKLSRDDAKPLLRLKGFPSFPLVERQANEVDWWDMVCNVKKLINEKKEDGKVFWQNLAGYKRQEALRPYLSSEEDRKKGKKFARYQLGDLLLHLEKKHGEDWGKVYDEAWERIDKKVEGLSKHIKLEEERRSEDAQSKAALTDWLRAKASFVIEGLKEADKDEFCRCELKLQKWYGDLRGKPFAIEAENSILDISGFSKQYNCAFIWQKDGVKKLNLYLIINYFKGGKLRFKKIKPEAFEANRFYTVINKKSGEIVPMEVNFNFDDPNLIILPLAFGKRQGREFIWNDLLSLETGSLKLANGRVIEKTLYNRRTRQDEPALFVALTFERREVLDSSNIKIMNLIGVDRGENIPAVIALTDPEGCPLSRFKDSLGNPTHILRIGESYKEKQRTIQATKEVEQRRAGGYSRKYASKAKNLADDMVRNTARDLLYYAVTQDAMLIFENLSRGFGRQGKRTFMAERQYTRMEDWLTAKLAYEGLPSKTYLSKTLAQYTSKTCSNCGFTITSADYDRVLEKLKKTATGWMTTINGKELKVEGQITYYNRYKRQNVVKDLSVELDRLSEESVNNDISSWTKGRSGEALSLLKKRFSHRPVQEKFVCLNCGFETHADEQAALNIARSWLFLRSQEYKKYQTNKTTGNTDKRAFVETWQSFYRKKLKEVWKPAV

SEQ ID NO: 27525 - protein, 978 aa, synthetic construct
  REGION 1..978: note = engineered CasX variant
QEIKRINKIRRRLVKDSNTKKAGKTGPMKTLLVRVMTPDLRERLENLRKKPENIPQPISNTSRANLNKLLTDYTEMKKAILHVYWEEFQKDPVGLMSRVAQPASKKIDQNKLKPEMDEKGNLTTAGFACSQCGQPLFVYKLEQVSEKGKAYTNYFGRCNVAEHEKLILLAQLKPEKDSDEAVTYSLGKFGQRALDFYSIHVTKESTHPVKPLAQIAGNRYASGPVGKALSDACMGTIASFLSKYQDIIIEHQKVVKGNQKRLESLRELAGKENLEYPSVTLPPQPHTKEGVDAYNEVIARVRMWVNLNLWQKLKLSRDDAKPLLRLKGFPSFPLVERQANEVDWWDMVCNVKKLINEKKEDGKVFWQNLAGYKRQEALRPYLSSEEDRKKGKKFARYQLGDLLLHLEKKHGEDWGKVYDEAWERIDKKVEGLSKHIKLEEERRSEDAQSKAALTDWLRAKASFVIEGLKEADKDEFCRCELKLQKWYGDLRGKPFAIEAENSILDISGFSKQYNCAFIWQKDGVKKLNLYLIINYFKGGKLRFKKIKPEAFEANRFYTVINKKSGEIVPMEVNFNFDDPNLIILPLAFGKRQGREFIWNDLLSLETGSLKLANGRVIEKTLYNRRTRQDEPALFVALTFERREVLDSSNIKIMNLIGVDRGENIPAVIALTDPEGCPLSRFKDSLGNPTHILRIGESYKEKQRTIQAKKEVEQRRAGGYSRKYASKAKNLADDMVRNTARDLLYYAVTQDAMLIFENLSRGFGRQGKRTFMAERQYTRMEDWLTAKLAYEGLPSKTYLSKTLAQYTSKTCSNCGFTITSADYDRVLEKLKKTATGWMTTINGKELKVEGQITYYNRYKRQNVVKDLSVELDRLSEESVNNDISSWTKGRSGEALSLLKKRFSHRPVQEKFVCLNCGFETHADEQAALNIARSWLFLRSQEYKKYQTNKTTGNTDKRAFVETWQSFYRKKLKEVWKPAV

SEQ ID NO: 27526 - protein, 978 aa, synthetic construct
  REGION 1..978: note = engineered CasX variant
QEIKRINKIRRRLVKDSNTKKAGKTGPMKTLLVRVMTPDLRERLENLRKKPENIPQPISNTSRANLNKLLTDYTEMKKAILHVYWEEFQKDPVGLMSRVAQPASKKIDQNKLKPEMDEKGNLTTAGFACSQCGQPLFVYKLEQVSEKGKAYTNYFGRCNVAEHEKLILLAQLKPEKDSDEAVTYSLGKFGQRALDFYSIHVTKESTHPVKPLAQIAGNRYASGPVGKALSDACMGTIASFLSKYQDIIIEHQKVVKGNQKRLESLRELAGKENLEYPSVTLPPQPHTKEGVDAYNEVIARVRMWVNLNLWQKLKLSRDDAKPLLRLKGFPSFPLVERQANEVDWWDMVCNVKKLINEKKEDGKVFWQNLAGYKRQEALRPYLSSEEDRKKGKKFARYQLGDLLLHLEKKHGEDWGKVYDEAWERIDKKVEGLSKHIKLEEERRSEDAQSKAALTDWLRAKASFVIEGLKEADKDEFCRCELKLQKWYGDLRGKPFAIEAENSILDISGFSKQYNCAFIWQKDGVKKLNLYLIINYFKGGKLRFKKIKPEAFEANRFYTVINKKSGEIVPMEVNFNFDDPNLIILPLAFGKRQGREFIWNDLLSLETGSLKLANGRVIEKTLYNRRTRQDEPALFVALTFERREVLDSSNIKIMNLIGVDRGENIPAVIALTDPEGCPLSRFKDSLGNPTHILRIGESYKEKQRTIQAAKEVEQRRAGGYSRKYASKAKNLADDMVRNTARDLLYYAVTQDAMLIFENLSRGFGRQGKRTFMAERQYTRMEDWLTAKLAYEGLPSKTYLSKTLAQYTSKTCSNCGFTITSADYDRVLEKLKKTATGWMTTINGKELKVEGQITYYNRYKRQNVVKDLSVELDRLSEESVNNDISSWTKGRSGEALSLLKKRFSHRPVQEKFVCLNCGFETHADEQAALNIARSWLFLRSQEYKKYQTNKTTGNTDKRAFVETWQSFYRKKLKEVWKPAV

SEQ ID NO: 27527 - protein, 978 aa, synthetic construct
  REGION 1..978: note = engineered CasX variant
QEIKRINKIRRRLVKDSNTKKAGKTGPMKTLLVRVMTPDLRERLENLRKKPENIPQPISNTSRANLNKLLTDYTEMKKAILHVYWEEFQKDPVGLMSRVAQPASKKIDQNKLKPEMDEKGNLTTAGFACSQCGQPLFVYKLEQVSEKGKAYTNYFGRCNVAEHEKLILLAQLKPEKDSDEAVTYSLGKFGQRALDFYSIHVTKESTHPVKPLAQIAGNRYASGPVGKALSDACMGTIASFLSKYQDIIIEHQKVVKGNQKRLESLRELAGKENLEYPSVTLPPQPHTKEGVDAYNEVIARVRMWVNLNLWQKLKLSRDDAKPLLRLKGFPSFPLVERQANEVDWWDMVCNVKKLINEKKEDGKVFWQNLAGYKRQEALRPYLSSEEDRKKGKKFARYQLGDLLLHLEKKHGEDWGKVYDEAWERIDKKVEGLSKHIKLEEERRSEDAQSKAALTDWLRAKASFVIEGLKEADKDEFCRCELKLQKWYGDLRGKPFAIEAENSILDISGFSKQYNCAFIWQKDGVKKLNLYLIINYFKGGKLRFKKIKPEAFEANRFYTVINKKSGEIVPMEVNFNFDDPNLIILPLAFGKRQGREFIWNDLLSLETGSLKLANGRVIEKTLYNRRTRQDEPALFVALTFERREVLDSSNIKIMNLIGVDRGENIPAVIALTDPEGCPLSFFKDSLGNPTHILRIGESYKEKQRTIQAAKEVEQRRAGGYSRKYASKAKNLADDMVRNTARDLLYYAVTQDAMLIFENLSRGFGRQGKRTFMAERQYTRMEDWLTAKLAYEGLPSKTYLSKTLAQYTSKTCSNCGFTITSADYDRVLEKLKKTATGWMTTINGKELKVEGQITYYNRYKRQNVVKDLSVELDRLSEESVNNDISSWTKGRSGEALSLLKKRFSHRPVQEKFVCLNCGFETHADEQAALNIARSWLFLRSQEYKKYQTNKTTGNTDKRAFVETWQSFYRKKLKEVWKPAV

SEQ ID NO: 27528 - protein, 978 aa, synthetic construct
  REGION 1..978: note = engineered CasX variant
QEIKRINKIRRRLVKDSNTKKAGKTGPMKTLLVRVMTPDLRERLENLRKKPENIPQPISNTSRANLNKLLTDYTEMKKAILHVYWEEFQKDPVGLMSRVAQPASKKIDQNKLKPEMDEKGNLTTAGFACSQCGQPLFVYKLEQVSEKGKAYTNYFGRCNVAEHEKLILLAQLKPEKDSDEAVTYSLGKFGQRALDFYSIHVTKESTHPVKPLAQIAGNRYASGPVGKALSDACMGTIASFLSKYQDIIIEHQKVVKGNQKRLESLRELAGKENLEYPSVTLPPQPHTKEGVDAYNEVIARVRMWVNLNLWQKLKLSRDDAKPLLRLKGFPSFPLVERQANEVDWWDMVCNVKKLINEKKEDGKVFWQNLAGYKRQEALRPYLSSEEDRKKGKKFARYQLGDLLLHLEKKHGEDWGKVYDEAWERIDKKVEGLSKHIKLEEERRSEDAQSKAALTDWLRAKASFVIEGLKEADKDEFCRCELKLQKWYGDLRGKPFAIEAENSILDISGFSKQYNCAFIWQKDGVKKLNLYLIINYFKGGKLRFKKIKPEAFEANRFYTVINKKSGEIVPMEVNFNFDDPNLIILPLAFGKRQGREFIWNDLLSLETGSLKLANGRVIEKTLYNRRTRQDEPALFVALTFERREVLDSSNIKHMNLIGVDRGENIPAVIALTDPEGCPLSRFKDSLGNPTHILRIGETYKEKQRTIQAKKEVEQRRAGGYSRKYASKAKNLADDMVRNTARDLLYYAVTQDAMLIFENLSRGFGRQGKRTFMAERQYTRMEDWLTAKLAYEGLPSKTYLSKTLAQYTSKTCSNCGFTITSADYDRVLEKLKKTATGWMTTINGKELKVEGQITYYNRYKRQNVVKDLSVELDRLSEESVNNDISSWTKGRSGEALSLLKKRFSHRPVQEKFVCLNCGFETHADEQAALNIARSWLFLRSQEYKKYQTNKTTGNTDKRAFVETWQSFYRKKLKEVWKPAV

SEQ ID NO: 27529 - protein, 978 aa, synthetic construct
  REGION 1..978: note = engineered CasX variant
QEIKRINKIRRRLVKDSNTKKAGKTGPMKTLLVRVMTPDLRERLENLRKKPENIPQPISNTSRANLNKLLTDYTEMKKAILHVYWEEFQKDPVGLMSRVAQPASKKIDQNKLKPEMDEKGNLTTAGFACSQCGQPLFVYKLEQVSEKGKAYTNYFGRCNVAEHEKLILLAQLKPEKDSDEAVTYSLGKFGQRALDFYSIHVTKESTHPVKPLAQIAGNRYASGPVGKALSDACMGTIASFLSKYQDIIIEHQKVVKGNQKRLESLRELAGKENLEYPSVTLPPQPHTKEGVDAYNEVIARVRMWVNLNLWQKLKLSRDDAKPLLRLKGFPSFPLVERQANEVDWWDMVCNVKKLINEKKEDGKVFWQNLAGYKRQEALRPYLSSEEDRKKGKKFARYQLGDLLLHLEKKHGEDWGKVYDEAWERIDKKVEGLSKHIKLEEERRSEDAQSKAALTDWLRAKASFVIEGLKEADKDEFCRCELKLQKWYGDLRGKPFAIEAENSILDISGFSKQYNCAFIWQKDGVKKLNLYLIINYFKGGKLRFKKIKPEAFEANRFYTVINKKSGEIVPMEVNFNFDDPNLIILPLAFGKRQGREFIWNDLLSLETGSLKLANGRVIEKTLYNRRTRQDEPALFVALTFERREVLDSSNIKHMNLIGVDRGENIPAVIALTDPEGCPLSRFKDSLGNPTHILRIGESYKEKQRTIQAKKEVEQRRAGGYSRKYASKAKNLADDMVRNTARDLLYYAVTQDAMLIFENLSRGFGRQGKRTFMAERQYTRMEDWLTAKLAYEGLPSKTYLSKTLAQYTSKTCSNCGFTITSADYDRVLEKLKKTATGWMTTINGKELKVEGQITYYNRYKRQNVVKDLSVELDRLSEESVNNDISSWTKGRSGEALSLLKKRFSHRPVQEKFVCLNCGFETHADEQAALNIARSWLFLRSQEYKKYQTNKTTGNTDKRAFVETWQSFYRKKLKEVWKPAV

SEQ ID NO: 27530 - protein, 978 aa, synthetic construct
  REGION 1..978: note = engineered CasX variant
QEIKRINKIRRRLVKDSNTKKAGKTGPMKTLLVRVMTPDLRERLENLRKKPENIPQPISNTSRANLNKLLTDYTEMKKAILHVYWEEFQKDPVGLMSRVAQPASKKIDQNKLKPEMDEKGNLTTAGFACSQCGQPLFVYKLEQVSEKGKAYTNYFGRCNVAEHEKLILLAQLKPEKDSDEAVTYSLGKFGQRALDFYSIHVTKESTHPVKPLAQIAGNRYASGPVGKALSDACMGTIASFLSKYQDIIIEHQKVVKGNQKRLESLRELAGKENLEYPSVTLPPQPHTKEGVDAYNEVIARVRMWVNLNLWQKLKLSRDDAKPLLRLKGFPSFPLVERQANEVDWWDMVCNVKKLINEKKEDGKVFWQNLAGYKRQEALRPYLSSEEDRKKGKKFARYQLGDLLLHLEKKHGEDWGKVYDEAWERIDKKVEGLSKHIKLEEERRSEDAQSKAALTDWLRAKASFVIEGLKEADKDEFCRCELKLQKWYGDLRGKPFAIEAENSILDISGFSKQYNCAFIWQKDGVKKLNLYLIINYFKGGKLRFKKIKPEAFEANRFYTVINKKSGEIVPMEVNFNFDDPNLIILPLAFGKRQGREFIWNDLLSLETGSLKLANGRVIEKTLYNRRTRQDEPALFVALTFERREVLDSSNIKHMNLIGVDRGENIPAVIALTDPEGCPLSRFKDSLGNPTHILRIGESYKEKQRTIQAIKEVEQRRAGGYSRKYASKAKNLADDMVRNTARDLLYYAVTQDAMLIFENLSRGFGRQGKRTFMAERQYTRMEDWLTAKLAYEGLPSKTYLSKTLAQYTSKTCSNCGFTITSADYDRVLEKLKKTATGWMTTINGKELKVEGQITYYNRYKRQNVVKDLSVELDRLSEESVNNDISSWTKGRSGEALSLLKKRFSHRPVQEKFVCLNCGFETHADEQAALNIARSWLFLRSQEYKKYQTNKTTGNTDKRAFVETWQSFYRKKLKEVWKPAV

SEQ ID NO: 27531 - protein, 978 aa, synthetic construct
  REGION 1..978: note = engineered CasX variant
QEIKRINKIRRRLVKDSNTKKAGKTGPMKTLLVRVMTPDLRERLENLRKKPENIPQPISNTSRANLNKLLTDYTEMKKAILHVYWEEFQKDPVGLMSRVAQPASKKIDQNKLKPEMDEKGNLTTAGFACSQCGQPLFVYKLEQVSEKGKAYTNYFGRCNVAEHEKLILLAQLKPEKDSDEAVTYSLGKFGQRALDFYSIHVTKESTHPVKPLAQIAGNRYASGPVGKALSDACMGTIASFLSKYQDIIIEHQKVVKGNQKRLESLRELAGKENLEYPSVTLPPQPHTKEGVDAYNEVIARVRMWVNLNLWQKLKLSRDDAKPLLRLKGFPSFPLVERQANEVDWWDMVCNVKKLINEKKEDGKVFWQNLAGYKRQEALRPYLSSEEDRKKGKKFARYQLGDLLLHLEKKHGEDWGKVYDEAWERIDKKVEGLSKHIKLEEERRSEDAQSKAALTDWLRAKASFVIEGLKEADKDEFCRCELKLQKWYGDLRGKPFAIEAENSILDISGFSKQYNCAFIWQKDGVKKLNLYLIINYFKGGKLRFKKIKPEAFEANRFYTVINKKSGEIVPMEVNFNFDDPNLIILPLAFGKRQGREFIWNDLLSLETGSLKLANGRVIEKTLYNRRTRQDEPALFVALTFERREVLDSSNIKHMNLIGVDRGENIPAVIALTDPEGCPLSRFKDSLGNPTHILRIGESYKEKQRTIFAKKEVEQRRAGGYSRKYASKAKNLADDMVRNTARDLLYYAVTQDAMLIFENLSRGFGRQGKRTFMAERQYTRMEDWLTAKLAYEGLPSKTYLSKTLAQYTSKTCSNCGFTITSADYDRVLEKLKKTATGWMTTINGKELKVEGQITYYNRYKRQNVVKDLSVELDRLSEESVNNDISSWTKGRSGEALSLLKKRFSHRPVQEKFVCLNCGFETHADEQAALNIARSWLFLRSQEYKKYQTNKTTGNTDKRAFVETWQSFYRKKLKEVWKPAV

SEQ ID NO: 27532 - protein, 978 aa, synthetic construct
  REGION 1..978: note = engineered CasX variant
QEIKRINKIRRRLVKDSNTKKAGKTGPMKTLLVRVMTPDLRERLENLRKKPENIPQPISNTSRANLNKLLTDYTEMKKAILHVYWEEFQKDPVGLMSRVAQPASKKIDQNKLKPEMDEKGNLTTAGFACSQCGQPLFVYKLEQVSEKGKAYTNYFGRCNVAEHEKLILLAQLKPEKDSDEAVTYSLGKFGQRALDFYSIHVTKESTHPVKPLAQIAGNRYASGPVGKALSDACMGTIASFLSKYQDIIIEHQKVVKGNQKRLESLRELAGKENLEYPSVTLPPQPHTKEGVDAYNEVIARVRMWVNLNLWQKLKLSRDDAKPLLRLKGFPSFPLVERQANEVDWWDMVCNVKKLINEKKEDGKVFWQNLAGYKRQEALRPYLSSEEDRKKGKKFARYQLGDLLLHLEKKHGEDWGKVYDEAWERIDKKVEGLSKHIKLEEERRSEDAQSKAALTDWLRAKASFVIEGLKEADKDEFCRCELKLQKWYGDLRGKPFAIEAENSILDISGFSKQYNCAFIWQKDGVKKLNLYLIINYFKGGKLRFKKIKPEAFEANRFYTVINKKSGEIVPMEVNFNFDDPNLIILPLAFGKRQGREFIWNDLLSLETGSLKLANGRVIEKTLYNRRTRQDEPALFVALTFERREVLDSSNIKHMNLIGVDRGENIPAVIALTDPEGCPLSRFKDSLGNPTHILRIGESYKEKQRTAQAKKEVEQRRAGGYSRKYASKAKNLADDMVRNTARDLLYYAVTQDAMLIFENLSRGFGRQGKRTFMAERQYTRMEDWLTAKLAYEGLPSKTYLSKTLAQYTSKTCSNCGFTITSADYDRVLEKLKKTATGWMTTINGKELKVEGQITYYNRYKRQNVVKDLSVELDRLSEESVNNDISSWTKGRSGEALSLLKKRFSHRPVQEKFVCLNCGFETHADEQAALNIARSWLFLRSQEYKKYQTNKTTGNTDKRAFVETWQSFYRKKLKEVWKPAV

SEQ ID NO: 27533 - protein, 978 aa, synthetic construct
  REGION 1..978: note = engineered CasX variant
QEIKRINKIRRRLVKDSNTKKAGKTGPMKTLLVRVMTPDLRERLENLRKKPENIPQPISNTSRANLNKLLTDYTEMKKAILHVYWEEFQKDPVGLMSRVAQPASKKIDQNKLKPEMDEKGNLTTAGFACSQCGQPLFVYKLEQVSEKGKAYTNYFGRCNVAEHEKLILLAQLKPEKDSDEAVTYSLGKFGQRALDFYSIHVTKESTHPVKPLAQIAGNRYASGPVGKALSDACMGTIASFLSKYQDIIIEHQKVVKGNQKRLESLRELAGKENLEYPSVTLPPQPHTKEGVDAYNEVIARVRMWVNLNLWQKLKLSRDDAKPLLRLKGFPSFPLVERQANEVDWWDMVCNVKKLINEKKEDGKVFWQNLAGYKRQEALRPYLSSEEDRKKGKKFARYQLGDLLLHLEKKHGEDWGKVYDEAWERIDKKVEGLSKHIKLEEERRSEDAQSKAALTDWLRAKASFVIEGLKEADKDEFCRCELKLQKWYGDLRGKPFAIEAENSILDISGFSKQYNCAFIWQKDGVKKLNLYLIINYFKGGKLRFKKIKPEAFEANRFYTVINKKSGEIVPMEVNFNFDDPNLIILPLAFGKRQGREFIWNDLLSLETGSLKLANGRVIEKTLYNRRTRQDEPALFVALTFERREVLDSSNIKHMNLIGVDRGENIPAVIALTDPEGCPLSRFKDSLGNPTHILRIGESYKEKQRTAFAKKEVEQRRAGGYSRKYASKAKNLADDMVRNTARDLLYYAVTQDAMLIFENLSRGFGRQGKRTFMAERQYTRMEDWLTAKLAYEGLPSKTYLSKTLAQYTSKTCSNCGFTITSADYDRVLEKLKKTATGWMTTINGKELKVEGQITYYNRYKRQNVVKDLSVELDRLSEESVNNDISSWTKGRSGEALSLLKKRFSHRPVQEKFVCLNCGFETHADEQAALNIARSWLFLRSQEYKKYQTNKTTGNTDKRAFVETWQSFYRKKLKEVWKPAV

SEQ ID NO: 27534 - protein, 978 aa, synthetic construct
  REGION 1..978: note = engineered CasX variant
QEIKRINKIRRRLVKDSNTKKAGKTGPMKTLLVRVMTPDLRERLENLRKKPENIPQPISNTSRANLNKLLTDYTEMKKAILHVYWEEFQKDPVGLMSRVAQPASKKIDQNKLKPEMDEKGNLTTAGFACSQCGQPLFVYKLEQVSEKGKAYTNYFGRCNVAEHEKLILLAQLKPEKDSDEAVTYSLGKFGQRALDFYSIHVTKESTHPVKPLAQIAGNRYASGPVGKALSDACMGTIASFLSKYQDIIIEHQKVVKGNQKRLESLRELAGKENLEYPSVTLPPQPHTKEGVDAYNEVIARVRMWVNLNLWQKLKLSRDDAKPLLRLKGFPSFPLVERQANEVDWWDMVCNVKKLINEKKEDGKVFWQNLAGYKRQEALRPYLSSEEDRKKGKKFARYQLGDLLLHLEKKHGEDWGKVYDEAWERIDKKVEGLSKHIKLEEERRSEDAQSKAALTDWLRAKASFVIEGLKEADKDEFCRCELKLQKWYGDLRGKPFAIEAENSILDISGFSKQYNCAFIWQKDGVKKLNLYLIINYFKGGKLRFKKIKPEAFEANRFYTVINKKSGEIVPMEVNFNFDDPNLIILPLAFGKRQGREFIWNDLLSLETGSLKLANGRVIEKTLYNRRTRQDEPALFVALTFERREVLDSSNIKHMNLIGVDRGENIPAVIALTDPEGCPLSMFKDSLGNPTHILRIGESYKEKQRTIQAKKEVEQRRAGGYSRKYASKAKNLADDMVRNTARDLLYYAVTQDAMLIFENLSRGFGRQGKRTFMAERQYTRMEDWLTAKLAYEGLPSKTYLSKTLAQYTSKTCSNCGFTITSADYDRVLEKLKKTATGWMTTINGKELKVEGQITYYNRYKRQNVVKDLSVELDRLSEESVNNDISSWTKGRSGEALSLLKKRFSHRPVQEKFVCLNCGFETHADEQAALNIARSWLFLRSQEYKKYQTNKTTGNTDKRAFVETWQSFYRKKLKEVWKPAV

SEQ ID NO: 27535 - protein, 978 aa, synthetic construct
  REGION 1..978: note = engineered CasX variant
QEIKRINKIRRRLVKDSNTKKAGKTGPMKTLLVRVMTPDLRERLENLRKKPENIPQPISNTSRANLNKLLTDYTEMKKAILHVYWEEFQKDPVGLMSRVAQPASKKIDQNKLKPEMDEKGNLTTAGFACSQCGQPLFVYKLEQVSEKGKAYTNYFGRCNVAEHEKLILLAQLKPEKDSDEAVTYSLGKFGQRALDFYSIHVTKESTHPVKPLAQIAGNRYASGPVGKALSDACMGTIASFLSKYQDIIIEHQKVVKGNQKRLESLRELAGKENLEYPSVTLPPQPHTKEGVDAYNEVIARVRMWVNLNLWQKLKLSRDDAKPLLRLKGFPSFPLVERQANEVDWWDMVCNVKKLINEKKEDGKVFWQNLAGYKRQEALRPYLSSEEDRKKGKKFARYQLGDLLLHLEKKHGEDWGKVYDEAWERIDKKVEGLSKHIKLEEERRSEDAQSKAALTDWLRAKASFVIEGLKEADKDEFCRCELKLQKWYGDLRGKPFAIEAENSILDISGFSKQYNCAFIWQKDGVKKLNLYLIINYFKGGKLRFKKIKPEAFEANRFYTVINKKSGEIVPMEVNFNFDDPNLIILPLAFGKRQGREFIWNDLLSLETGSLKLANGRVIEKTLYNRRTRQDEPALFVALTFERREVLDSSNIKHMNLIGVDRGENIPAVIALTDPEGCPLSMFKDSLGNPTHILRIGESYKEKQRTIQAIKEVEQRRAGGYSRKYASKAKNLADDMVRNTARDLLYYAVTQDAMLIFENLSRGFGRQGKRTFMAERQYTRMEDWLTAKLAYEGLPSKTYLSKTLAQYTSKTCSNCGFTITSADYDRVLEKLKKTATGWMTTINGKELKVEGQITYYNRYKRQNVVKDLSVELDRLSEESVNNDISSWTKGRSGEALSLLKKRFSHRPVQEKFVCLNCGFETHADEQAALNIARSWLFLRSQEYKKYQTNKTTGNTDKRAFVETWQSFYRKKLKEVWKPAV

SEQ ID NO: 27536 - protein, 978 aa, synthetic construct
  REGION 1..978: note = engineered CasX variant
QEIKRINKIRRRLVKDSNTKKAGKTGPMKTLLVRVMTPDLRERLENLRKKPENIPQPISNTSRANLNKLLTDYTEMKKAILHVYWEEFQKDPVGLMSRVAQPASKKIDQNKLKPEMDEKGNLTTAGFACSQCGQPLFVYKLEQVSEKGKAYTNYFGRCNVAEHEKLILLAQLKPEKDSDEAVTYSLGKFGQRALDFYSIHVTKESTHPVKPLAQIAGNRYASGPVGKALSDACMGTIASFLSKYQDIIIEHQKVVKGNQKRLESLRELAGKENLEYPSVTLPPQPHTKEGVDAYNEVIARVRMWVNLNLWQKLKLSRDDAKPLLRLKGFPSFPLVERQANEVDWWDMVCNVKKLINEKKEDGKVFWQNLAGYKRQEALRPYLSSEEDRKKGKKFARYQLGDLLLHLEKKHGEDWGKVYDEAWERIDKKVEGLSKHIKLEEERRSEDAQSKAALTDWLRAKASFVIEGLKEADKDEFCRCELKLQKWYGDLRGKPFAIEAENSILDISGFSKQYNCAFIWQKDGVKKLNLYLIINYFKGGKLRFKKIKPEAFEANRFYTVINKKSGEIVPMEVNFNFDDPNLIILPLAFGKRQGREFIWNDLLSLETGSLKLANGRVIEKTLYNRRTRQDEPALFVALTFERREVLDSSNIKGMNLIGVDRGENIPAVIALTDPEGCPLSRFKDSLGNPTHILRIGESYKEKQRTIQAKKEVEQRRSGGYSRKYASKAKNLADDMVRNTARDLLYYAVTQDAMLIFENLSRGFGRQGKRTFMAERQYTRMEDWLTAKLAYEGLPSKTYLSKTLAQYTSKTCSNCGFTITSADYDRVLEKLKKTATGWMTTINGKELKVEGQITYYNRYKRQNVVKDLSVELDRLSEESVNNDISSWTKGRSGEALSLLKKRFSHRPVQEKFVCLNCGFETHADEQAALNIARSWLFLRSQEYKKYQTNKTTGNTDKRAFVETWQSFYRKKLKEVWKPAV

SEQ ID NO: 27537 - protein, 978 aa, synthetic construct
  REGION 1..978: note = engineered CasX variant
QEIKRINKIRRRLVKDSNTKKAGKTGPMKTLLVRVMTPDLRERLENLRKKPENIPQPISNTSRANLNKLLTDYTEMKKAILHVYWEEFQKDPVGLMSRVAQPASKKIDQNKLKPEMDEKGNLTTAGFACSQCGQPLFVYKLEQVSEKGKAYTNYFGRCNVAEHEKLILLAQLKPEKDSDEAVTYSLGKFGQRALDFYSIHVTKESTHPVKPLAQIAGNRYASGPVGKALSDACMGTIASFLSKYQDIIIEHQKVVKGNQKRLESLRELAGKENLEYPSVTLPPQPHTKEGVDAYNEVIARVRMWVNLNLWQKLKLSRDDAKPLLRLKGFPSFPLVERQANEVDWWDMVCNVKKLINEKKEDGKVFWQNLAGYKRQEALRPYLSSEEDRKKGKKFARYQLGDLLLHLEKKHGEDWGKVYDEAWERIDKKVEGLSKHIKLEEERRSEDAQSKAALTDWLRAKASFVIEGLKEADKDEFCRCELKLQKWYGDLRGKPFAIEAENSILDISGFSKQYNCAFIWQKDGVKKLNLYLIINYFKGGKLRFKKIKPEAFEANRFYTVINKKSGEIVPMEVNFNFDDPNLIILPLAFGKRQGREFIWNDLLSLETGSLKLANGRVIEKTLYNRRTRQDEPALFVALTFERREVLDSSNIKGMNLIGVDRGENIPAVIALTDPEGCPLSRFKDSLGNPTHILRIGESYKEKQRTIQAKKEVEQRRAGGYSRKYASKAKNLADDMVRNTARDLLYYAVTQDAMLIFENLSRGFGRQGKRTFMAERQYTRMEDWLTAKLAYEGLPSKTYLSKTLAQYTSKTCSNCGFTITSADYDRVLEKLKKTATGWMTTINGKELKVEGQITYYNRYKRQNVVKDLSVELDRLSEESVNNDISSWTKGRSGEALSLLKKRFSHRPVQEKFVCLNCGFETHADEQAALNIARSWLFLRSQEYKKYQTNKTTGNTDKRAFVETWQSFYRKKLKEVWKPAV

SEQ ID NO: 27538 - protein, 978 aa, synthetic construct
  REGION 1..978: note = engineered CasX variant
QEIKRINKIRRRLVKDSNTKKAGKTGPMKTLLVRVMTPDLRERLENLRKKPENIPQPISNTSRANLNKLLTDYTEMKKAILHVYWEEFQKDPVGLMSRVAQPASKKIDQNKLKPEMDEKGNLTTAGFACSQCGQPLFVYKLEQVSEKGKAYTNYFGRCNVAEHEKLILLAQLKPEKDSDEAVTYSLGKFGQRALDFYSIHVTKESTHPVKPLAQIAGNRYASGPVGKALSDACMGTIASFLSKYQDIIIEHQKVVKGNQKRLESLRELAGKENLEYPSVTLPPQPHTKEGVDAYNEVIARVRMWVNLNLWQKLKLSRDDAKPLLRLKGFPSFPLVERQANEVDWWDMVCNVKKLINEKKEDGKVFWQNLAGYKRQEALRPYLSSEEDRKKGKKFARYQLGDLLLHLEKKHGEDWGKVYDEAWERIDKKVEGLSKHIKLEEERRSEDAQSKAALTDWLRAKASFVIEGLKEADKDEFCRCELKLQKWYGDLRGKPFAIEAENSILDISGFSKQYNCAFIWQKDGVKKLNLYLIINYFKGGKLRFKKIKPEAFEANRFYTVINKKSGEIVPMEVNFNFDDPNLIILPLAFGKRQGREFIWNDLLSLETGSLKLANGRVIEKTLYNRRTRQDEPALFVALTFERREVLDSSNIKGMNLIGVDRGENIPAVIALTDPEGCPLSRFKDSLGNPTHILRIGESYKEKQRTIQAKKEQEQRRAGGYSRKYASKAKNLADDMVRNTARDLLYYAVTQDAMLIFENLSRGFGRQGKRTFMAERQYTRMEDWLTAKLAYEGLPSKTYLSKTLAQYTSKTCSNCGFTITSADYDRVLEKLKKTATGWMTTINGKELKVEGQITYYNRYKRQNVVKDLSVELDRLSEESVNNDISSWTKGRSGEALSLLKKRFSHRPVQEKFVCLNCGFETHADEQAALNIARSWLFLRSQEYKKYQTNKTTGNTDKRAFVETWQSFYRKKLKEVWKPAV

SEQ ID NO: 27539 - protein, 978 aa, synthetic construct
  REGION 1..978: note = engineered CasX variant
QEIKRINKIRRRLVKDSNTKKAGKTGPMKTLLVRVMTPDLRERLENLRKKPENIPQPISNTSRANLNKLLTDYTEMKKAILHVYWEEFQKDPVGLMSRVAQPASKKIDQNKLKPEMDEKGNLTTAGFACSQCGQPLFVYKLEQVSEKGKAYTNYFGRCNVAEHEKLILLAQLKPEKDSDEAVTYSLGKFGQRALDFYSIHVTKESTHPVKPLAQIAGNRYASGPVGKALSDACMGTIASFLSKYQDIIIEHQKVVKGNQKRLESLRELAGKENLEYPSVTLPPQPHTKEGVDAYNEVIARVRMWVNLNLWQKLKLSRDDAKPLLRLKGFPSFPLVERQANEVDWWDMVCNVKKLINEKKEDGKVFWQNLAGYKRQEALRPYLSSEEDRKKGKKFARYQLGDLLLHLEKKHGEDWGKVYDEAWERIDKKVEGLSKHIKLEEERRSEDAQSKAALTDWLRAKASFVIEGLKEADKDEFCRCELKLQKWYGDLRGKPFAIEAENSILDISGFSKQYNCAFIWQKDGVKKLNLYLIINYFKGGKLRFKKIKPEAFEANRFYTVINKKSGEIVPMEVNFNFDDPNLIILPLAFGKRQGREFIWNDLLSLETGSLKLANGRVIEKTLYNRRTRQDEPALFVALTFERREVLDSSNIKGMNLIGVDRGENIPAVIALTDPEGCPLSRFKDSLGNPTHILRIGESYKEKQRTIQAKKECEQRRAGGYSRKYASKAKNLADDMVRNTARDLLYYAVTQDAMLIFENLSRGFGRQGKRTFMAERQYTRMEDWLTAKLAYEGLPSKTYLSKTLAQYTSKTCSNCGFTITSADYDRVLEKLKKTATGWMTTINGKELKVEGQITYYNRYKRQNVVKDLSVELDRLSEESVNNDISSWTKGRSGEALSLLKKRFSHRPVQEKFVCLNCGFETHADEQAALNIARSWLFLRSQEYKKYQTNKTTGNTDKRAFVETWQSFYRKKLKEVWKPAV

SEQ ID NO: 27540 - protein, 978 aa, synthetic construct
  REGION 1..978: note = engineered CasX variant
QEIKRINKIRRRLVKDSNTKKAGKTGPMKTLLVRVMTPDLRERLENLRKKPENIPQPISNTSRANLNKLLTDYTEMKKAILHVYWEEFQKDPVGLMSRVAQPASKKIDQNKLKPEMDEKGNLTTAGFACSQCGQPLFVYKLEQVSEKGKAYTNYFGRCNVAEHEKLILLAQLKPEKDSDEAVTYSLGKFGQRALDFYSIHVTKESTHPVKPLAQIAGNRYASGPVGKALSDACMGTIASFLSKYQDIIIEHQKVVKGNQKRLESLRELAGKENLEYPSVTLPPQPHTKEGVDAYNEVIARVRMWVNLNLWQKLKLSRDDAKPLLRLKGFPSFPLVERQANEVDWWDMVCNVKKLINEKKEDGKVFWQNLAGYKRQEALRPYLSSEEDRKKGKKFARYQLGDLLLHLEKKHGEDWGKVYDEAWERIDKKVEGLSKHIKLEEERRSEDAQSKAALTDWLRAKASFVIEGLKEADKDEFCRCELKLQKWYGDLRGKPFAIEAENSILDISGFSKQYNCAFIWQKDGVKKLNLYLIINYFKGGKLRFKKIKPEAFEANRFYTVINKKSGEIVPMEVNFNFDDPNLIILPLAFGKRQGREFIWNDLLSLETGSLKLANGRVIEKTLYNRRTRQDEPALFVALTFERREVLDSSNIKGMNLIGVDRGENIPAVIALTDPEGAPLSRFKDSLGNPTHILRIGESYKEKQRTIQAKKEVEQRRAGGYSRKYASKAKNLADDMVRNTARDLLYYAVTQDAMLIFENLSRGFGRQGKRTFMAERQYTRMEDWLTAKLAYEGLPSKTYLSKTLAQYTSKTCSNCGFTITSADYDRVLEKLKKTATGWMTTINGKELKVEGQITYYNRYKRQNVVKDLSVELDRLSEESVNNDISSWTKGRSGEALSLLKKRFSHRPVQEKFVCLNCGFETHADEQAALNIARSWLFLRSQEYKKYQTNKTTGNTDKRAFVETWQSFYRKKLKEVWKPAV

SEQ ID NO: 27541 - protein, 978 aa, synthetic construct
  REGION 1..978: note = engineered CasX variant
QEIKRINKIRRRLVKDSNTKKAGKTGPMKTLLVRVMTPDLRERLENLRKKPENIPQPISNTSRANLNKLLTDYTEMKKAILHVYWEEFQKDPVGLMSRVAQPASKKIDQNKLKPEMDEKGNLTTAGFACSQCGQPLFVYKLEQVSEKGKAYTNYFGRCNVAEHEKLILLAQLKPEKDSDEAVTYSLGKFGQRALDFYSIHVTKESTHPVKPLAQIAGNRYASGPVGKALSDACMGTIASFLSKYQDIIIEHQKVVKGNQKRLESLRELAGKENLEYPSVTLPPQPHTKEGVDAYNEVIARVRMWVNLNLWQKLKLSRDDAKPLLRLKGFPSFPLVERQANEVDWWDMVCNVKKLINEKKEDGKVFWQNLAGYKRQEALRPYLSSEEDRKKGKKFARYQLGDLLLHLEKKHGEDWGKVYDEAWERIDKKVEGLSKHIKLEEERRSEDAQSKAALTDWLRAKASFVIEGLKEADKDEFCRCELKLQKWYGDLRGKPFAIEAENSILDISGFSKQYNCAFIWQKDGVKKLNLYLIINYFKGGKLRFKKIKPEAFEANRFYTVINKKSGEIVPMEVNFNFDDPNLIILPLAFGKRQGREFIWNDLLSLETGSLKLANGRVIEKTLYNRRTRQDEPALFVALTFERREVLDSSNIKGMNLIGVDRGENIPAVIALTDPEGAPLSRFKDSLGNPTHILRIGESYKEKQRTIQAKKEQEQRRAGGYSRKYASKAKNLADDMVRNTARDLLYYAVTQDAMLIFENLSRGFGRQGKRTFMAERQYTRMEDWLTAKLAYEGLPSKTYLSKTLAQYTSKTCSNCGFTITSADYDRVLEKLKKTATGWMTTINGKELKVEGQITYYNRYKRQNVVKDLSVELDRLSEESVNNDISSWTKGRSGEALSLLKKRFSHRPVQEKFVCLNCGFETHADEQAALNIARSWLFLRSQEYKKYQTNKTTGNTDKRAFVETWQSFYRKKLKEVWKPAV

SEQ ID NO: 27542 - protein, 978 aa, synthetic construct
  REGION 1..978: note = engineered CasX variant
QEIKRINKIRRRLVKDSNTKKAGKTGPMKTLLVRVMTPDLRERLENLRKKPENIPQPISNTSRANLNKLLTDYTEMKKAILHVYWEEFQKDPVGLMSRVAQPASKKIDQNKLKPEMDEKGNLTTAGFACSQCGQPLFVYKLEQVSEKGKAYTNYFGRCNVAEHEKLILLAQLKPEKDSDEAVTYSLGKFGQRALDFYSIHVTKESTHPVKPLAQIAGNRYASGPVGKALSDACMGTIASFLSKYQDIIIEHQKVVKGNQKRLESLRELAGKENLEYPSVTLPPQPHTKEGVDAYNEVIARVRMWVNLNLWQKLKLSRDDAKPLLRLKGFPSFPLVERQANEVDWWDMVCNVKKLINEKKEDGKVFWQNLAGYKRQEALRPYLSSEEDRKKGKKFARYQLGDLLLHLEKKHGEDWGKVYDEAWERIDKKVEGLSKHIKLEEERRSEDAQSKAALTDWLRAKASFVIEGLKEADKDEFCRCELKLQKWYGDLRGKPFAIEAENSILDISGFSKQYNCAFIWQKDGVKKLNLYLIINYFKGGKLRFKKIKPEAFEANRFYTVINKKSGEIVPMEVNFNFDDPNLIILPLAFGKRQGREFIWNDLLSLETGSLKLANGRVIEKTLYNRRTRQDEPALFVALTFERREVLDSSNIKFMNLIGVDRGENIPAVIALTDPEGCPLSRFKDSLGNPTHILRISESYKEKQRTIQAKKEVEQRRAGGYSRKYASKAKNLADDMVRNTARDLLYYAVTQDAMLIFENLSRGFGRQGKRTFMAERQYTRMEDWLTAKLAYEGLPSKTYLSKTLAQYTSKTCSNCGFTITSADYDRVLEKLKKTATGWMTTINGKELKVEGQITYYNRYKRQNVVKDLSVELDRLSEESVNNDISSWTKGRSGEALSLLKKRFSHRPVQEKFVCLNCGFETHADEQAALNIARSWLFLRSQEYKKYQTNKTTGNTDKRAFVETWQSFYRKKLKEVWKPAV

SEQ ID NO: 27543 - protein, 978 aa, synthetic construct
  REGION 1..978: note = engineered CasX variant
QEIKRINKIRRRLVKDSNTKKAGKTGPMKTLLVRVMTPDLRERLENLRKKPENIPQPISNTSRANLNKLLTDYTEMKKAILHVYWEEFQKDPVGLMSRVAQPASKKIDQNKLKPEMDEKGNLTTAGFACSQCGQPLFVYKLEQVSEKGKAYTNYFGRCNVAEHEKLILLAQLKPEKDSDEAVTYSLGKFGQRALDFYSIHVTKESTHPVKPLAQIAGNRYASGPVGKALSDACMGTIASFLSKYQDIIIEHQKVVKGNQKRLESLRELAGKENLEYPSVTLPPQPHTKEGVDAYNEVIARVRMWVNLNLWQKLKLSRDDAKPLLRLKGFPSFPLVERQANEVDWWDMVCNVKKLINEKKEDGKVFWQNLAGYKRQEALRPYLSSEEDRKKGKKFARYQLGDLLLHLEKKHGEDWGKVYDEAWERIDKKVEGLSKHIKLEEERRSEDAQSKAALTDWLRAKASFVIEGLKEADKDEFCRCELKLQKWYGDLRGKPFAIEAENSILDISGFSKQYNCAFIWQKDGVKKLNLYLIINYFKGGKLRFKKIKPEAFEANRFYTVINKKSGEIVPMEVNFNFDDPNLIILPLAFGKRQGREFIWNDLLSLETGSLKLANGRVIEKTLYNRRTRQDEPALFVALTFERREVLDSSNIKFMNLIGVDRGENIPAVIALTDPEGCPLSRFKDSLGNPTHILRISESYKEKQRTIQAKKEVEQRRAGFYSRKYASKAKNLADDMVRNTARDLLYYAVTQDAMLIFENLSRGFGRQGKRTFMAERQYTRMEDWLTAKLAYEGLPSKTYLSKTLAQYTSKTCSNCGFTITSADYDRVLEKLKKTATGWMTTINGKELKVEGQITYYNRYKRQNVVKDLSVELDRLSEESVNNDISSWTKGRSGEALSLLKKRFSHRPVQEKFVCLNCGFETHADEQAALNIARSWLFLRSQEYKKYQTNKTTGNTDKRAFVETWQSFYRKKLKEVWKPAV

SEQ ID NO: 27544 - protein, 978 aa, synthetic construct
  REGION 1..978: note = engineered CasX variant
QEIKRINKIRRRLVKDSNTKKAGKTGPMKTLLVRVMTPDLRERLENLRKKPENIPQPISNTSRANLNKLLTDYTEMKKAILHVYWEEFQKDPVGLMSRVAQPASKKIDQNKLKPEMDEKGNLTTAGFACSQCGQPLFVYKLEQVSEKGKAYTNYFGRCNVAEHEKLILLAQLKPEKDSDEAVTYSLGKFGQRALDFYSIHVTKESTHPVKPLAQIAGNRYASGPVGKALSDACMGTIASFLSKYQDIIIEHQKVVKGNQKRLESLRELAGKENLEYPSVTLPPQPHTKEGVDAYNEVIARVRMWVNLNLWQKLKLSRDDAKPLLRLKGFPSFPLVERQANEVDWWDMVCNVKKLINEKKEDGKVFWQNLAGYKRQEALRPYLSSEEDRKKGKKFARYQLGDLLLHLEKKHGEDWGKVYDEAWERIDKKVEGLSKHIKLEEERRSEDAQSKAALTDWLRAKASFVIEGLKEADKDEFCRCELKLQKWYGDLRGKPFAIEAENSILDISGFSKQYNCAFIWQKDGVKKLNLYLIINYFKGGKLRFKKIKPEAFEANRFYTVINKKSGEIVPMEVNFNFDDPNLIILPLAFGKRQGREFIWNDLLSLETGSLKLANGRVIEKTLYNRRTRQDEPALFVALTFERREVLDSSNIKFMNLIGVDRGENIPAVIALTDPEGCPLSRFKDSLGNPTHILRIGESYKEKQRTIQAKKEVEQSRAGGYSRKYASKAKNLADDMVRNTARDLLYYAVTQDAMLIFENLSRGFGRQGKRTFMAERQYTRMEDWLTAKLAYEGLPSKTYLSKTLAQYTSKTCSNCGFTITSADYDRVLEKLKKTATGWMTTINGKELKVEGQITYYNRYKRQNVVKDLSVELDRLSEESVNNDISSWTKGRSGEALSLLKKRFSHRPVQEKFVCLNCGFETHADEQAALNIARSWLFLRSQEYKKYQTNKTTGNTDKRAFVETWQSFYRKKLKEVWKPAV

SEQ ID NO: 27545 - protein, 978 aa, synthetic construct
  REGION 1..978: note = engineered CasX variant
QEIKRINKIRRRLVKDSNTKKAGKTGPMKTLLVRVMTPDLRERLENLRKKPENIPQPISNTSRANLNKLLTDYTEMKKAILHVYWEEFQKDPVGLMSRVAQPASKKIDQNKLKPEMDEKGNLTTAGFACSQCGQPLFVYKLEQVSEKGKAYTNYFGRCNVAEHEKLILLAQLKPEKDSDEAVTYSLGKFGQRALDFYSIHVTKESTHPVKPLAQIAGNRYASGPVGKALSDACMGTIASFLSKYQDIIIEHQKVVKGNQKRLESLRELAGKENLEYPSVTLPPQPHTKEGVDAYNEVIARVRMWVNLNLWQKLKLSRDDAKPLLRLKGFPSFPLVERQANEVDWWDMVCNVKKLINEKKEDGKVFWQNLAGYKRQEALRPYLSSEEDRKKGKKFARYQLGDLLLHLEKKHGEDWGKVYDEAWERIDKKVEGLSKHIKLEEERRSEDAQSKAALTDWLRAKASFVIEGLKEADKDEFCRCELKLQKWYGDLRGKPFAIEAENSILDISGFSKQYNCAFIWQKDGVKKLNLYLIINYFKGGKLRFKKIKPEAFEANRFYTVINKKSGEIVPMEVNFNFDDPNLIILPLAFGKRQGREFIWNDLLSLETGSLKLANGRVIEKTLYNRRTRQDEPALFVALTFERREVLDSSNIKFMNLIGVDRGENIPAVIALTDPEGCPLSRFKDSLGNPTHILRIGESYKEKQRTIQAKKEVEQRRAGGYSRKYASKAKNLADDMVRNTARDLLYYAVTQDAMLIFENLSRGFGRQGKRTFMAERQYTRMEDWLTAKLAYEGLPSKTYLSKTLAQYTSKTCSNCGFTITSADYDRVLEKLKKTATGWMTTINGKELKVEGQITYYNRYKRQNVVKDLSVELDRLSEESVNNDISSWTKGRSGEALSLLKKRFSHRPVQEKFVCLNCGFETHADEQAALNIARSWLFLRSQEYKKYQTNKTTGNTDKRAFVETWQSFYRKKLKEVWKPAV

SEQ ID NO: 27546 - protein, 978 aa, synthetic construct
  REGION 1..978: note = engineered CasX variant
QEIKRINKIRRRLVKDSNTKKAGKTGPMKTLLVRVMTPDLRERLENLRKKPENIPQPISNTSRANLNKLLTDYTEMKKAILHVYWEEFQKDPVGLMSRVAQPASKKIDQNKLKPEMDEKGNLTTAGFACSQCGQPLFVYKLEQVSEKGKAYTNYFGRCNVAEHEKLILLAQLKPEKDSDEAVTYSLGKFGQRALDFYSIHVTKESTHPVKPLAQIAGNRYASGPVGKALSDACMGTIASFLSKYQDIIIEHQKVVKGNQKRLESLRELAGKENLEYPSVTLPPQPHTKEGVDAYNEVIARVRMWVNLNLWQKLKLSRDDAKPLLRLKGFPSFPLVERQANEVDWWDMVCNVKKLINEKKEDGKVFWQNLAGYKRQEALRPYLSSEEDRKKGKKFARYQLGDLLLHLEKKHGEDWGKVYDEAWERIDKKVEGLSKHIKLEEERRSEDAQSKAALTDWLRAKASFVIEGLKEADKDEFCRCELKLQKWYGDLRGKPFAIEAENSILDISGFSKQYNCAFIWQKDGVKKLNLYLIINYFKGGKLRFKKIKPEAFEANRFYTVINKKSGEIVPMEVNFNFDDPNLIILPLAFGKRQGREFIWNDLLSLETGSLKLANGRVIEKTLYNRRTRQDEPALFVALTFERREVLDSSNIKFMNLIGVDRGENIPAVIALTDPEGCPLSRFKDSLGNPTHILRIGESYKEKQRTIQAKKEVEQRRAGFYSRKYASKAKNLADDMVRNTARDLLYYAVTQDAMLIFENLSRGFGRQGKRTFMAERQYTRMEDWLTAKLAYEGLPSKTYLSKTLAQYTSKTCSNCGFTITSADYDRVLEKLKKTATGWMTTINGKELKVEGQITYYNRYKRQNVVKDLSVELDRLSEESVNNDISSWTKGRSGEALSLLKKRFSHRPVQEKFVCLNCGFETHADEQAALNIARSWLFLRSQEYKKYQTNKTTGNTDKRAFVETWQSFYRKKLKEVWKPAV

SEQ ID NO: 27547 - protein, 978 aa, synthetic construct
  REGION 1..978: note = engineered CasX variant
QEIKRINKIRRRLVKDSNTKKAGKTGPMKTLLVRVMTPDLRERLENLRKKPENIPQPISNTSRANLNKLLTDYTEMKKAILHVYWEEFQKDPVGLMSRVAQPASKKIDQNKLKPEMDEKGNLTTAGFACSQCGQPLFVYKLEQVSEKGKAYTNYFGRCNVAEHEKLILLAQLKPEKDSDEAVTYSLGKFGQRALDFYSIHVTKESTHPVKPLAQIAGNRYASGPVGKALSDACMGTIASFLSKYQDIIIEHQKVVKGNQKRLESLRELAGKENLEYPSVTLPPQPHTKEGVDAYNEVIARVRMWVNLNLWQKLKLSRDDAKPLLRLKGFPSFPLVERQANEVDWWDMVCNVKKLINEKKEDGKVFWQNLAGYKRQEALRPYLSSEEDRKKGKKFARYQLGDLLLHLEKKHGEDWGKVYDEAWERIDKKVEGLSKHIKLEEERRSEDAQSKAALTDWLRAKASFVIEGLKEADKDEFCRCELKLQKWYGDLRGKPFAIEAENSILDISGFSKQYNCAFIWQKDGVKKLNLYLIINYFKGGKLRFKKIKPEAFEANRFYTVINKKSGEIVPMEVNFNFDDPNLIILPLAFGKRQGREFIWNDLLSLETGSLKLANGRVIEKTLYNRRTRQDEPALFVALTFERREVLDSSNIKFMNLIGVDRGENIPAVIALTDPEGCPLSRFKDSLGNPTHILRIGESYKEKQRTIQAFKEVEQSRAGGYSRKYASKAKNLADDMVRNTARDLLYYAVTQDAMLIFENLSRGFGRQGKRTFMAERQYTRMEDWLTAKLAYEGLPSKTYLSKTLAQYTSKTCSNCGFTITSADYDRVLEKLKKTATGWMTTINGKELKVEGQITYYNRYKRQNVVKDLSVELDRLSEESVNNDISSWTKGRSGEALSLLKKRFSHRPVQEKFVCLNCGFETHADEQAALNIARSWLFLRSQEYKKYQTNKTTGNTDKRAFVETWQSFYRKKLKEVWKPAV

SEQ ID NO: 27548 - protein, 978 aa, synthetic construct
  REGION 1..978: note = engineered CasX variant
QEIKRINKIRRRLVKDSNTKKAGKTGPMKTLLVRVMTPDLRERLENLRKKPENIPQPISNTSRANLNKLLTDYTEMKKAILHVYWEEFQKDPVGLMSRVAQPASKKIDQNKLKPEMDEKGNLTTAGFACSQCGQPLFVYKLEQVSEKGKAYTNYFGRCNVAEHEKLILLAQLKPEKDSDEAVTYSLGKFGQRALDFYSIHVTKESTHPVKPLAQIAGNRYASGPVGKALSDACMGTIASFLSKYQDIIIEHQKVVKGNQKRLESLRELAGKENLEYPSVTLPPQPHTKEGVDAYNEVIARVRMWVNLNLWQKLKLSRDDAKPLLRLKGFPSFPLVERQANEVDWWDMVCNVKKLINEKKEDGKVFWQNLAGYKRQEALRPYLSSEEDRKKGKKFARYQLGDLLLHLEKKHGEDWGKVYDEAWERIDKKVEGLSKHIKLEEERRSEDAQSKAALTDWLRAKASFVIEGLKEADKDEFCRCELKLQKWYGDLRGKPFAIEAENSILDISGFSKQYNCAFIWQKDGVKKLNLYLIINYFKGGKLRFKKIKPEAFEANRFYTVINKKSGEIVPMEVNFNFDDPNLIILPLAFGKRQGREFIWNDLLSLETGSLKLANGRVIEKTLYNRRTRQDEPALFVALTFERREVLDSSNIKFMNLIGVDRGENIPAVIALTDPEGCPLSRFKDSLGNPTHILRIGESYKEKQRTIQAFKEVEQRRAGGYSRKYASKAKNLADDMVRNTARDLLYYAVTQDAMLIFENLSRGFGRQGKRTFMAERQYTRMEDWLTAKLAYEGLPSKTYLSKTLAQYTSKTCSNCGFTITSADYDRVLEKLKKTATGWMTTINGKELKVEGQITYYNRYKRQNVVKDLSVELDRLSEESVNNDISSWTKGRSGEALSLLKKRFSHRPVQEKFVCLNCGFETHADEQAALNIARSWLFLRSQEYKKYQTNKTTGNTDKRAFVETWQSFYRKKLKEVWKPAV

SEQ ID NO: 27549 - protein, 978 aa, synthetic construct
  REGION 1..978: note = engineered CasX variant
QEIKRINKIRRRLVKDSNTKKAGKTGPMKTLLVRVMTPDLRERLENLRKKPENIPQPISNTSRANLNKLLTDYTEMKKAILHVYWEEFQKDPVGLMSRVAQPASKKIDQNKLKPEMDEKGNLTTAGFACSQCGQPLFVYKLEQVSEKGKAYTNYFGRCNVAEHEKLILLAQLKPEKDSDEAVTYSLGKFGQRALDFYSIHVTKESTHPVKPLAQIAGNRYASGPVGKALSDACMGTIASFLSKYQDIIIEHQKVVKGNQKRLESLRELAGKENLEYPSVTLPPQPHTKEGVDAYNEVIARVRMWVNLNLWQKLKLSRDDAKPLLRLKGFPSFPLVERQANEVDWWDMVCNVKKLINEKKEDGKVFWQNLAGYKRQEALRPYLSSEEDRKKGKKFARYQLGDLLLHLEKKHGEDWGKVYDEAWERIDKKVEGLSKHIKLEEERRSEDAQSKAALTDWLRAKASFVIEGLKEADKDEFCRCELKLQKWYGDLRGKPFAIEAENSILDISGFSKQYNCAFIWQKDGVKKLNLYLIINYFKGGKLRFKKIKPEAFEANRFYTVINKKSGEIVPMEVNFNFDDPNLIILPLAFGKRQGREFIWNDLLSLETGSLKLANGRVIEKTLYNRRTRQDEPALFVALTFERREVLDSSNIKDMNLIGVDRGENIPAVIALTDPEGCPLSRFKDSLGNPTHILRMGESYKEKQRTIQAKKEVEQRRAGGYSRKYASKAKNLADDMVRNTARDLLYYAVTQDAMLIFENLSRGFGRQGKRTFMAERQYTRMEDWLTAKLAYEGLPSKTYLSKTLAQYTSKTCSNCGFTITSADYDRVLEKLKKTATGWMTTINGKELKVEGQITYYNRYKRQNVVKDLSVELDRLSEESVNNDISSWTKGRSGEALSLLKKRFSHRPVQEKFVCLNCGFETHADEQAALNIARSWLFLRSQEYKKYQTNKTTGNTDKRAFVETWQSFYRKKLKEVWKPAV

SEQ ID NO: 27550 - protein, 978 aa, synthetic construct
  REGION 1..978: note = engineered CasX variant
QEIKRINKIRRRLVKDSNTKKAGKTGPMKTLLVRVMTPDLRERLENLRKKPENIPQPISNTSRANLNKLLTDYTEMKKAILHVYWEEFQKDPVGLMSRVAQPASKKIDQNKLKPEMDEKGNLTTAGFACSQCGQPLFVYKLEQVSEKGKAYTNYFGRCNVAEHEKLILLAQLKPEKDSDEAVTYSLGKFGQRALDFYSIHVTKESTHPVKPLAQIAGNRYASGPVGKALSDACMGTIASFLSKYQDIIIEHQKVVKGNQKRLESLRELAGKENLEYPSVTLPPQPHTKEGVDAYNEVIARVRMWVNLNLWQKLKLSRDDAKPLLRLKGFPSFPLVERQANEVDWWDMVCNVKKLINEKKEDGKVFWQNLAGYKRQEALRPYLSSEEDRKKGKKFARYQLGDLLLHLEKKHGEDWGKVYDEAWERIDKKVEGLSKHIKLEEERRSEDAQSKAALTDWLRAKASFVIEGLKEADKDEFCRCELKLQKWYGDLRGKPFAIEAENSILDISGFSKQYNCAFIWQKDGVKKLNLYLIINYFKGGKLRFKKIKPEAFEANRFYTVINKKSGEIVPMEVNFNFDDPNLIILPLAFGKRQGREFIWNDLLSLETGSLKLANGRVIEKTLYNRRTRQDEPALFVALTFERREVLDSSNIKDMNLIGVDRGENIPAVIALTDPEGCPLSRFKDSLGNPTHILRIGESYKEKQRTIQAKKEVEQRRAGGYSRKYASKAKNLADDMVRNTARDLLYYAVTQDAMLIFENLSRGFGRQGKRTFMAERQYTRMEDWLTAKLAYEGLPSKTYLSKTLAQYTSKTCSNCGFTITSADYDRVLEKLKKTATGWMTTINGKELKVEGQITYYNRYKRQNVVKDLSVELDRLSEESVNNDISSWTKGRSGEALSLLKKRFSHRPVQEKFVCLNCGFETHADEQAALNIARSWLFLRSQEYKKYQTNKTTGNTDKRAFVETWQSFYRKKLKEVWKPAV

SEQ ID NO: 27551 - protein, 978 aa, synthetic construct
  REGION 1..978: note = engineered CasX variant
QEIKRINKIRRRLVKDSNTKKAGKTGPMKTLLVRVMTPDLRERLENLRKKPENIPQPISNTSRANLNKLLTDYTEMKKAILHVYWEEFQKDPVGLMSRVAQPASKKIDQNKLKPEMDEKGNLTTAGFACSQCGQPLFVYKLEQVSEKGKAYTNYFGRCNVAEHEKLILLAQLKPEKDSDEAVTYSLGKFGQRALDFYSIHVTKESTHPVKPLAQIAGNRYASGPVGKALSDACMGTIASFLSKYQDIIIEHQKVVKGNQKRLESLRELAGKENLEYPSVTLPPQPHTKEGVDAYNEVIARVRMWVNLNLWQKLKLSRDDAKPLLRLKGFPSFPLVERQANEVDWWDMVCNVKKLINEKKEDGKVFWQNLAGYKRQEALRPYLSSEEDRKKGKKFARYQLGDLLLHLEKKHGEDWGKVYDEAWERIDKKVEGLSKHIKLEEERRSEDAQSKAALTDWLRAKASFVIEGLKEADKDEFCRCELKLQKWYGDLRGKPFAIEAENSILDISGFSKQYNCAFIWQKDGVKKLNLYLIINYFKGGKLRFKKIKPEAFEANRFYTVINKKSGEIVPMEVNFNFDDPNLIILPLAFGKRQGREFIWNDLLSLETGSLKLANGRVIEKTLYNRRTRQDEPALFVALTFERREVLDSSNIKDMNLIGVDRGENIPAVIALTDPEGCPLSRFKDSLGNPTHILRIGESYKEKQRFIQAKKEVEQRRAGGYSRKYASKAKNLADDMVRNTARDLLYYAVTQDAMLIFENLSRGFGRQGKRTFMAERQYTRMEDWLTAKLAYEGLPSKTYLSKTLAQYTSKTCSNCGFTITSADYDRVLEKLKKTATGWMTTINGKELKVEGQITYYNRYKRQNVVKDLSVELDRLSEESVNNDISSWTKGRSGEALSLLKKRFSHRPVQEKFVCLNCGFETHADEQAALNIARSWLFLRSQEYKKYQTNKTTGNTDKRAFVETWQSFYRKKLKEVWKPAV

SEQ ID NO: 27552 - protein, 978 aa, synthetic construct
  REGION 1..978: note = engineered CasX variant
QEIKRINKIRRRLVKDSNTKKAGKTGPMKTLLVRVMTPDLRERLENLRKKPENIPQPISNTSRANLNKLLTDYTEMKKAILHVYWEEFQKDPVGLMSRVAQPASKKIDQNKLKPEMDEKGNLTTAGFACSQCGQPLFVYKLEQVSEKGKAYTNYFGRCNVAEHEKLILLAQLKPEKDSDEAVTYSLGKFGQRALDFYSIHVTKESTHPVKPLAQIAGNRYASGPVGKALSDACMGTIASFLSKYQDIIIEHQKVVKGNQKRLESLRELAGKENLEYPSVTLPPQPHTKEGVDAYNEVIARVRMWVNLNLWQKLKLSRDDAKPLLRLKGFPSFPLVERQANEVDWWDMVCNVKKLINEKKEDGKVFWQNLAGYKRQEALRPYLSSEEDRKKGKKFARYQLGDLLLHLEKKHGEDWGKVYDEAWERIDKKVEGLSKHIKLEEERRSEDAQSKAALTDWLRAKASFVIEGLKEADKDEFCRCELKLQKWYGDLRGKPFAIEAENSILDISGFSKQYNCAFIWQKDGVKKLNLYLIINYFKGGKLRFKKIKPEAFEANRFYTVINKKSGEIVPMEVNFNFDDPNLIILPLAFGKRQGREFIWNDLLSLETGSLKLANGRVIEKTLYNRRTRQDEPALFVALTFERREVLDSSNIKCMNLMGVDRGENIPAVIALTDPEGCPLSRFKDSLGNPTHILRIGESYKEKQRTIQAKKEVEQRRAGGYSRKYASKAKNLADDMVRNTARDLLYYAVTQDAMLIFENLSRGFGRQGKRTFMAERQYTRMEDWLTAKLAYEGLPSKTYLSKTLAQYTSKTCSNCGFTITSADYDRVLEKLKKTATGWMTTINGKELKVEGQITYYNRYKRQNVVKDLSVELDRLSEESVNNDISSWTKGRSGEALSLLKKRFSHRPVQEKFVCLNCGFETHADEQAALNIARSWLFLRSQEYKKYQTNKTTGNTDKRAFVETWQSFYRKKLKEVWKPAV

SEQ ID NO: 27553 - protein, 978 aa, synthetic construct
  REGION 1..978: note = engineered CasX variant
QEIKRINKIRRRLVKDSNTKKAGKTGPMKTLLVRVMTPDLRERLENLRKKPENIPQPISNTSRANLNKLLTDYTEMKKAILHVYWEEFQKDPVGLMSRVAQPASKKIDQNKLKPEMDEKGNLTTAGFACSQCGQPLFVYKLEQVSEKGKAYTNYFGRCNVAEHEKLILLAQLKPEKDSDEAVTYSLGKFGQRALDFYSIHVTKESTHPVKPLAQIAGNRYASGPVGKALSDACMGTIASFLSKYQDIIIEHQKVVKGNQKRLESLRELAGKENLEYPSVTLPPQPHTKEGVDAYNEVIARVRMWVNLNLWQKLKLSRDDAKPLLRLKGFPSFPLVERQANEVDWWDMVCNVKKLINEKKEDGKVFWQNLAGYKRQEALRPYLSSEEDRKKGKKFARYQLGDLLLHLEKKHGEDWGKVYDEAWERIDKKVEGLSKHIKLEEERRSEDAQSKAALTDWLRAKASFVIEGLKEADKDEFCRCELKLQKWYGDLRGKPFAIEAENSILDISGFSKQYNCAFIWQKDGVKKLNLYLIINYFKGGKLRFKKIKPEAFEANRFYTVINKKSGEIVPMEVNFNFDDPNLIILPLAFGKRQGREFIWNDLLSLETGSLKLANGRVIEKTLYNRRTRQDEPALFVALTFERREVLDSSNIKCMNLMGVDRGENIPAVIALTDPEGCPLSRFKDSLGNPTHILRIGESYKEKQRTIIAKKEVEQRRAGGYSRKYASKAKNLADDMVRNTARDLLYYAVTQDAMLIFENLSRGFGRQGKRTFMAERQYTRMEDWLTAKLAYEGLPSKTYLSKTLAQYTSKTCSNCGFTITSADYDRVLEKLKKTATGWMTTINGKELKVEGQITYYNRYKRQNVVKDLSVELDRLSEESVNNDISSWTKGRSGEALSLLKKRFSHRPVQEKFVCLNCGFETHADEQAALNIARSWLFLRSQEYKKYQTNKTTGNTDKRAFVETWQSFYRKKLKEVWKPAV

SEQ ID NO: 27554 - protein, 978 aa, synthetic construct
  REGION 1..978: note = engineered CasX variant
QEIKRINKIRRRLVKDSNTKKAGKTGPMKTLLVRVMTPDLRERLENLRKKPENIPQPISNTSRANLNKLLTDYTEMKKAILHVYWEEFQKDPVGLMSRVAQPASKKIDQNKLKPEMDEKGNLTTAGFACSQCGQPLFVYKLEQVSEKGKAYTNYFGRCNVAEHEKLILLAQLKPEKDSDEAVTYSLGKFGQRALDFYSIHVTKESTHPVKPLAQIAGNRYASGPVGKALSDACMGTIASFLSKYQDIIIEHQKVVKGNQKRLESLRELAGKENLEYPSVTLPPQPHTKEGVDAYNEVIARVRMWVNLNLWQKLKLSRDDAKPLLRLKGFPSFPLVERQANEVDWWDMVCNVKKLINEKKEDGKVFWQNLAGYKRQEALRPYLSSEEDRKKGKKFARYQLGDLLLHLEKKHGEDWGKVYDEAWERIDKKVEGLSKHIKLEEERRSEDAQSKAALTDWLRAKASFVIEGLKEADKDEFCRCELKLQKWYGDLRGKPFAIEAENSILDISGFSKQYNCAFIWQKDGVKKLNLYLIINYFKGGKLRFKKIKPEAFEANRFYTVINKKSGEIVPMEVNFNFDDPNLIILPLAFGKRQGREFIWNDLLSLETGSLKLANGRVIEKTLYNRRTRQDEPALFVALTFERREVLDSSNIKCMNLIGVDRGENIPAVIALTDPEGCPLSRFKDSLGNPTHILRIGESYKEKQRTIQAKKEVEQRRAGGYSRKYASKAKNLADDMVRNTARDLLYYAVTQDAMLIFENLSRGFGRQGKRTFMAERQYTRMEDWLTAKLAYEGLPSKTYLSKTLAQYTSKTCSNCGFTITSADYDRVLEKLKKTATGWMTTINGKELKVEGQITYYNRYKRQNVVKDLSVELDRLSEESVNNDISSWTKGRSGEALSLLKKRFSHRPVQEKFVCLNCGFETHADEQAALNIARSWLFLRSQEYKKYQTNKTTGNTDKRAFVETWQSFYRKKLKEVWKPAV

SEQ ID NO: 27555 - protein, 978 aa, synthetic construct
  REGION 1..978: note = engineered CasX variant
QEIKRINKIRRRLVKDSNTKKAGKTGPMKTLLVRVMTPDLRERLENLRKKPENIPQPISNTSRANLNKLLTDYTEMKKAILHVYWEEFQKDPVGLMSRVAQPASKKIDQNKLKPEMDEKGNLTTAGFACSQCGQPLFVYKLEQVSEKGKAYTNYFGRCNVAEHEKLILLAQLKPEKDSDEAVTYSLGKFGQRALDFYSIHVTKESTHPVKPLAQIAGNRYASGPVGKALSDACMGTIASFLSKYQDIIIEHQKVVKGNQKRLESLRELAGKENLEYPSVTLPPQPHTKEGVDAYNEVIARVRMWVNLNLWQKLKLSRDDAKPLLRLKGFPSFPLVERQANEVDWWDMVCNVKKLINEKKEDGKVFWQNLAGYKRQEALRPYLSSEEDRKKGKKFARYQLGDLLLHLEKKHGEDWGKVYDEAWERIDKKVEGLSKHIKLEEERRSEDAQSKAALTDWLRAKASFVIEGLKEADKDEFCRCELKLQKWYGDLRGKPFAIEAENSILDISGFSKQYNCAFIWQKDGVKKLNLYLIINYFKGGKLRFKKIKPEAFEANRFYTVINKKSGEIVPMEVNFNFDDPNLIILPLAFGKRQGREFIWNDLLSLETGSLKLANGRVIEKTLYNRRTRQDEPALFVALTFERREVLDSSNIKCMNLIGVDRGENIPAVIALTDPEGCPLSRFKDSLGNPTHILRIGESYKEKQRTIIAKKEVEQRRAGGYSRKYASKAKNLADDMVRNTARDLLYYAVTQDAMLIFENLSRGFGRQGKRTFMAERQYTRMEDWLTAKLAYEGLPSKTYLSKTLAQYTSKTCSNCGFTITSADYDRVLEKLKKTATGWMTTINGKELKVEGQITYYNRYKRQNVVKDLSVELDRLSEESVNNDISSWTKGRSGEALSLLKKRFSHRPVQEKFVCLNCGFETHADEQAALNIARSWLFLRSQEYKKYQTNKTTGNTDKRAFVETWQSFYRKKLKEVWKPAV

SEQ ID NO: 27556 - protein, 978 aa, synthetic construct
  REGION 1..978: note = engineered CasX variant
QEIKRINKIRRRLVKDSNTKKAGKTGPMKTLLVRVMTPDLRERLENLRKKPENIPQPISNTSRANLNKLLTDYTEMKKAILHVYWEEFQKDPVGLMSRVAQPASKKIDQNKLKPEMDEKGNLTTAGFACSQCGQPLFVYKLEQVSEKGKAYTNYFGRCNVAEHEKLILLAQLKPEKDSDEAVTYSLGKFGQRALDFYSIHVTKESTHPVKPLAQIAGNRYASGPVGKALSDACMGTIASFLSKYQDIIIEHQKVVKGNQKRLESLRELAGKENLEYPSVTLPPQPHTKEGVDAYNEVIARVRMWVNLNLWQKLKLSRDDAKPLLRLKGFPSFPLVERQANEVDWWDMVCNVKKLINEKKEDGKVFWQNLAGYKRQEALRPYLSSEEDRKKGKKFARYQLGDLLLHLEKKHGEDWGKVYDEAWERIDKKVEGLSKHIKLEEERRSEDAQSKAALTDWLRAKASFVIEGLKEADKDEFCRCELKLQKWYGDLRGKPFAIEAENSILDISGFSKQYNCAFIWQKDGVKKLNLYLIINYFKGGKLRFKKIKPEAFEANRFYTVINKKSGEIVPMEVNFNFDDPNLIILPLAFGKRQGREFIWNDLLSLETGSLKLANGRVIEKTLYNRRTRQDEPALFVALTFERREVLDSSNIKCMNLIGVDRGENIPAVIALTDPEGCPLSRFKDSLGNPTHILRIGESYKEKQRRIQAKKEVEQRRAGGYSRKYASKAKNLADDMVRNTARDLLYYAVTQDAMLIFENLSRGFGRQGKRTFMAERQYTRMEDWLTAKLAYEGLPSKTYLSKTLAQYTSKTCSNCGFTITSADYDRVLEKLKKTATGWMTTINGKELKVEGQITYYNRYKRQNVVKDLSVELDRLSEESVNNDISSWTKGRSGEALSLLKKRFSHRPVQEKFVCLNCGFETHADEQAALNIARSWLFLRSQEYKKYQTNKTTGNTDKRAFVETWQSFYRKKLKEVWKPAV

SEQ ID NO: 27557 - protein, 978 aa, synthetic construct
  REGION 1..978: note = engineered CasX variant
QEIKRINKIRRRLVKDSNTKKAGKTGPMKTLLVRVMTPDLRERLENLRKKPENIPQPISNTSRANLNKLLTDYTEMKKAILHVYWEEFQKDPVGLMSRVAQPASKKIDQNKLKPEMDEKGNLTTAGFACSQCGQPLFVYKLEQVSEKGKAYTNYFGRCNVAEHEKLILLAQLKPEKDSDEAVTYSLGKFGQRALDFYSIHVTKESTHPVKPLAQIAGNRYASGPVGKALSDACMGTIASFLSKYQDIIIEHQKVVKGNQKRLESLRELAGKENLEYPSVTLPPQPHTKEGVDAYNEVIARVRMWVNLNLWQKLKLSRDDAKPLLRLKGFPSFPLVERQANEVDWWDMVCNVKKLINEKKEDGKVFWQNLAGYKRQEALRPYLSSEEDRKKGKKFARYQLGDLLLHLEKKHGEDWGKVYDEAWERIDKKVEGLSKHIKLEEERRSEDAQSKAALTDWLRAKASFVIEGLKEADKDEFCRCELKLQKWYGDLRGKPFAIEAENSILDISGFSKQYNCAFIWQKDGVKKLNLYLIINYFKGGKLRFKKIKPEAFEANRFYTVINKKSGEIVPMEVNFNFDDPNLIILPLAFGKRQGREFIWNDLLSLETGSLKLANGRVIEKTLYNRRTRQDEPALFVALTFERREVLDSSNIKCMNLIGVDRGENIPAVIALTDPEGCPLSRFKDSLGNPTHILRIGESYKEKQRRIQAKKETEQRRAGGYSRKYASKAKNLADDMVRNTARDLLYYAVTQDAMLIFENLSRGFGRQGKRTFMAERQYTRMEDWLTAKLAYEGLPSKTYLSKTLAQYTSKTCSNCGFTITSADYDRVLEKLKKTATGWMTTINGKELKVEGQITYYNRYKRQNVVKDLSVELDRLSEESVNNDISSWTKGRSGEALSLLKKRFSHRPVQEKFVCLNCGFETHADEQAALNIARSWLFLRSQEYKKYQTNKTTGNTDKRAFVETWQSFYRKKLKEVWKPAV

SEQ ID NO: 27558 - protein, 978 aa, synthetic construct
  REGION 1..978: note = engineered CasX variant
QEIKRINKIRRRLVKDSNTKKAGKTGPMKTLLVRVMTPDLRERLENLRKKPENIPQPISNTSRANLNKLLTDYTEMKKAILHVYWEEFQKDPVGLMSRVAQPASKKIDQNKLKPEMDEKGNLTTAGFACSQCGQPLFVYKLEQVSEKGKAYTNYFGRCNVAEHEKLILLAQLKPEKDSDEAVTYSLGKFGQRALDFYSIHVTKESTHPVKPLAQIAGNRYASGPVGKALSDACMGTIASFLSKYQDIIIEHQKVVKGNQKRLESLRELAGKENLEYPSVTLPPQPHTKEGVDAYNEVIARVRMWVNLNLWQKLKLSRDDAKPLLRLKGFPSFPLVERQANEVDWWDMVCNVKKLINEKKEDGKVFWQNLAGYKRQEALRPYLSSEEDRKKGKKFARYQLGDLLLHLEKKHGEDWGKVYDEAWERIDKKVEGLSKHIKLEEERRSEDAQSKAALTDWLRAKASFVIEGLKEADKDEFCRCELKLQKWYGDLRGKPFAIEAENSILDISGFSKQYNCAFIWQKDGVKKLNLYLIINYFKGGKLRFKKIKPEAFEANRFYTVINKKSGEIVPMEVNFNFDDPNLIILPLAFGKRQGREFIWNDLLSLETGSLKLANGRVIEKTLYNRRTRQDEPALFVALTFERREVLDSSNIKAMNLIGVDRGENIPAVIALTDPEGCPLSRFKDSLGNPTHILRIGESYKEKQRTIQAKKEVEQRRAGGYSRKYASKAKNLADDMVRNTARDLLYYAVTQDAMLIFENLSRGFGRQGKRTFMAERQYTRMEDWLTAKLAYEGLPSKTYLSKTLAQYTSKTCSNCGFTITSADYDRVLEKLKKTATGWMTTINGKELKVEGQITYYNRYKRQNVVKDLSVELDRLSEESVNNDISSWTKGRSGEALSLLKKRFSHRPVQEKFVCLNCGFETHADEQAALNIARSWLFLRSQEYKKYQTNKTTGNTDKRAFVETWQSFYRKKLKEVWKPAV

SEQ ID NO: 27559 - protein, 978 aa, synthetic construct
  REGION 1..978: note = engineered CasX variant
QEIKRINKIRRRLVKDSNTKKAGKTGPMKTLLVRVMTPDLRERLENLRKKPENIPQPISNTSRANLNKLLTDYTEMKKAILHVYWEEFQKDPVGLMSRVAQPASKKIDQNKLKPEMDEKGNLTTAGFACSQCGQPLFVYKLEQVSEKGKAYTNYFGRCNVAEHEKLILLAQLKPEKDSDEAVTYSLGKFGQRALDFYSIHVTKESTHPVKPLAQIAGNRYASGPVGKALSDACMGTIASFLSKYQDIIIEHQKVVKGNQKRLESLRELAGKENLEYPSVTLPPQPHTKEGVDAYNEVIARVRMWVNLNLWQKLKLSRDDAKPLLRLKGFPSFPLVERQANEVDWWDMVCNVKKLINEKKEDGKVFWQNLAGYKRQEALRPYLSSEEDRKKGKKFARYQLGDLLLHLEKKHGEDWGKVYDEAWERIDKKVEGLSKHIKLEEERRSEDAQSKAALTDWLRAKASFVIEGLKEADKDEFCRCELKLQKWYGDLRGKPFAIEAENSILDISGFSKQYNCAFIWQKDGVKKLNLYLIINYFKGGKLRFKKIKPEAFEANRFYTVINKKSGEIVPMEVNFNFDDPNLIILPLAFGKRQGREFIWNDLLSLETGSLKLANGRVIEKTLYNRRTRQDEPALFVALTFERREVLDSSNIIPMNLIGVDRGENIPQVIALTDPEGCPLSRFKDSLGNPTHILRIGESYKEKQRTIQAKKEVEQRRAGGYSRKYASKAKNLADDMVRNTARDLLYYAVTQDAMLIFENLSRGFGRQGKRTFMAERQYTRMEDWLTAKLAYEGLPSKTYLSKTLAQYTSKTCSNCGFTITSADYDRVLEKLKKTATGWMTTINGKELKVEGQITYYNRYKRQNVVKDLSVELDRLSEESVNNDISSWTKGRSGEALSLLKKRFSHRPVQEKFVCLNCGFETHADEQAALNIARSWLFLRSQEYKKYQTNKTTGNTDKRAFVETWQSFYRKKLKEVWKPAV

SEQ ID NO: 27560 - protein, 978 aa, synthetic construct
  REGION 1..978: note = engineered CasX variant
QEIKRINKIRRRLVKDSNTKKAGKTGPMKTLLVRVMTPDLRERLENLRKKPENIPQPISNTSRANLNKLLTDYTEMKKAILHVYWEEFQKDPVGLMSRVAQPASKKIDQNKLKPEMDEKGNLTTAGFACSQCGQPLFVYKLEQVSEKGKAYTNYFGRCNVAEHEKLILLAQLKPEKDSDEAVTYSLGKFGQRALDFYSIHVTKESTHPVKPLAQIAGNRYASGPVGKALSDACMGTIASFLSKYQDIIIEHQKVVKGNQKRLESLRELAGKENLEYPSVTLPPQPHTKEGVDAYNEVIARVRMWVNLNLWQKLKLSRDDAKPLLRLKGFPSFPLVERQANEVDWWDMVCNVKKLINEKKEDGKVFWQNLAGYKRQEALRPYLSSEEDRKKGKKFARYQLGDLLLHLEKKHGEDWGKVYDEAWERIDKKVEGLSKHIKLEEERRSEDAQSKAALTDWLRAKASFVIEGLKEADKDEFCRCELKLQKWYGDLRGKPFAIEAENSILDISGFSKQYNCAFIWQKDGVKKLNLYLIINYFKGGKLRFKKIKPEAFEANRFYTVINKKSGEIVPMEVNFNFDDPNLIILPLAFGKRQGREFIWNDLLSLETGSLKLANGRVIEKTLYNRRTRQDEPALFVALTFERREVLDSSNIIPMNLIGVDRGENIPAVIALTDPEGCPLSRFKDSLGNPTHILRIGESYKEKQRTIQAKKEVEQRRAGGYSRKYASKAKNLADDMVRNTARDLLYYAVTQDAMLIFENLSRGFGRQGKRTFMAERQYTRMEDWLTAKLAYEGLPSKTYLSKTLAQYTSKTCSNCGFTITSADYDRVLEKLKKTATGWMTTINGKELKVEGQITYYNRYKRQNVVKDLSVELDRLSEESVNNDISSWTKGRSGEALSLLKKRFSHRPVQEKFVCLNCGFETHADEQAALNIARSWLFLRSQEYKKYQTNKTTGNTDKRAFVETWQSFYRKKLKEVWKPAV

SEQ ID NO: 27561 - protein, 978 aa, synthetic construct
  REGION 1..978: note = engineered CasX variant
QEIKRINKIRRRLVKDSNTKKAGKTGPMKTLLVRVMTPDLRERLENLRKKPENIPQPISNTSRANLNKLLTDYTEMKKAILHVYWEEFQKDPVGLMSRVAQPASKKIDQNKLKPEMDEKGNLTTAGFACSQCGQPLFVYKLEQVSEKGKAYTNYFGRCNVAEHEKLILLAQLKPEKDSDEAVTYSLGKFGQRALDFYSIHVTKESTHPVKPLAQIAGNRYASGPVGKALSDACMGTIASFLSKYQDIIIEHQKVVKGNQKRLESLRELAGKENLEYPSVTLPPQPHTKEGVDAYNEVIARVRMWVNLNLWQKLKLSRDDAKPLLRLKGFPSFPLVERQANEVDWWDMVCNVKKLINEKKEDGKVFWQNLAGYKRQEALRPYLSSEEDRKKGKKFARYQLGDLLLHLEKKHGEDWGKVYDEAWERIDKKVEGLSKHIKLEEERRSEDAQSKAALTDWLRAKASFVIEGLKEADKDEFCRCELKLQKWYGDLRGKPFAIEAENSILDISGFSKQYNCAFIWQKDGVKKLNLYLIINYFKGGKLRFKKIKPEAFEANRFYTVINKKSGEIVPMEVNFNFDDPNLIILPLAFGKRQGREFIWNDLLSLETGSLKLANGRVIEKTLYNRRTRQDEPALFVALTFERREVLDSSNIHPMNLIGVDRGENIPAVIALTDPEGCPLSRFKDSLGNPTHILRIGESYKYKQRTIQAKKEVEQRRAGGYSRKYASKAKNLADDMVRNTARDLLYYAVTQDAMLIFENLSRGFGRQGKRTFMAERQYTRMEDWLTAKLAYEGLPSKTYLSKTLAQYTSKTCSNCGFTITSADYDRVLEKLKKTATGWMTTINGKELKVEGQITYYNRYKRQNVVKDLSVELDRLSEESVNNDISSWTKGRSGEALSLLKKRFSHRPVQEKFVCLNCGFETHADEQAALNIARSWLFLRSQEYKKYQTNKTTGNTDKRAFVETWQSFYRKKLKEVWKPAV

SEQ ID NO: 27562 - protein, 978 aa, synthetic construct
  REGION 1..978: note = engineered CasX variant
QEIKRINKIRRRLVKDSNTKKAGKTGPMKTLLVRVMTPDLRERLENLRKKPENIPQPISNTSRANLNKLLTDYTEMKKAILHVYWEEFQKDPVGLMSRVAQPASKKIDQNKLKPEMDEKGNLTTAGFACSQCGQPLFVYKLEQVSEKGKAYTNYFGRCNVAEHEKLILLAQLKPEKDSDEAVTYSLGKFGQRALDFYSIHVTKESTHPVKPLAQIAGNRYASGPVGKALSDACMGTIASFLSKYQDIIIEHQKVVKGNQKRLESLRELAGKENLEYPSVTLPPQPHTKEGVDAYNEVIARVRMWVNLNLWQKLKLSRDDAKPLLRLKGFPSFPLVERQANEVDWWDMVCNVKKLINEKKEDGKVFWQNLAGYKRQEALRPYLSSEEDRKKGKKFARYQLGDLLLHLEKKHGEDWGKVYDEAWERIDKKVEGLSKHIKLEEERRSEDAQSKAALTDWLRAKASFVIEGLKEADKDEFCRCELKLQKWYGDLRGKPFAIEAENSILDISGFSKQYNCAFIWQKDGVKKLNLYLIINYFKGGKLRFKKIKPEAFEANRFYTVINKKSGEIVPMEVNFNFDDPNLIILPLAFGKRQGREFIWNDLLSLETGSLKLANGRVIEKTLYNRRTRQDEPALFVALTFERREVLDSSNIHPMNLIGVDRGENIPAVIALTDPEGCPLSRFKDSLGNPTHILRIGESYKEKQRTIQAKKEVEQRRAGGYSRKYASKAKNLADDMVRNTARDLLYYAVTQDAMLIFENLSRGFGRQGKRTFMAERQYTRMEDWLTAKLAYEGLPSKTYLSKTLAQYTSKTCSNCGFTITSADYDRVLEKLKKTATGWMTTINGKELKVEGQITYYNRYKRQNVVKDLSVELDRLSEESVNNDISSWTKGRSGEALSLLKKRFSHRPVQEKFVCLNCGFETHADEQAALNIARSWLFLRSQEYKKYQTNKTTGNTDKRAFVETWQSFYRKKLKEVWKPAV

SEQ ID NO: 27563 - protein, 978 aa, synthetic construct
  REGION 1..978: note = engineered CasX variant
QEIKRINKIRRRLVKDSNTKKAGKTGPMKTLLVRVMTPDLRERLENLRKKPENIPQPISNTSRANLNKLLTDYTEMKKAILHVYWEEFQKDPVGLMSRVAQPASKKIDQNKLKPEMDEKGNLTTAGFACSQCGQPLFVYKLEQVSEKGKAYTNYFGRCNVAEHEKLILLAQLKPEKDSDEAVTYSLGKFGQRALDFYSIHVTKESTHPVKPLAQIAGNRYASGPVGKALSDACMGTIASFLSKYQDIIIEHQKVVKGNQKRLESLRELAGKENLEYPSVTLPPQPHTKEGVDAYNEVIARVRMWVNLNLWQKLKLSRDDAKPLLRLKGFPSFPLVERQANEVDWWDMVCNVKKLINEKKEDGKVFWQNLAGYKRQEALRPYLSSEEDRKKGKKFARYQLGDLLLHLEKKHGEDWGKVYDEAWERIDKKVEGLSKHIKLEEERRSEDAQSKAALTDWLRAKASFVIEGLKEADKDEFCRCELKLQKWYGDLRGKPFAIEAENSILDISGFSKQYNCAFIWQKDGVKKLNLYLIINYFKGGKLRFKKIKPEAFEANRFYTVINKKSGEIVPMEVNFNFDDPNLIILPLAFGKRQGREFIWNDLLSLETGSLKLANGRVIEKTLYNRRTRQDEPALFVALTFERREVLDSSNIHPMNLIGVDRGENIPAVIALTDPEGCPLSRFKDSLGNPTHILRIGESYKEKQQTIQAKKEVEQRRAGGYSRKYASKAKNLADDMVRNTARDLLYYAVTQDAMLIFENLSRGFGRQGKRTFMAERQYTRMEDWLTAKLAYEGLPSKTYLSKTLAQYTSKTCSNCGFTITSADYDRVLEKLKKTATGWMTTINGKELKVEGQITYYNRYKRQNVVKDLSVELDRLSEESVNNDISSWTKGRSGEALSLLKKRFSHRPVQEKFVCLNCGFETHADEQAALNIARSWLFLRSQEYKKYQTNKTTGNTDKRAFVETWQSFYRKKLKEVWKPAV

SEQ ID NO: 27564 - protein, 978 aa, synthetic construct
  REGION 1..978: note = engineered CasX variant
QEIKRINKIRRRLVKDSNTKKAGKTGPMKTLLVRVMTPDLRERLENLRKKPENIPQPISNTSRANLNKLLTDYTEMKKAILHVYWEEFQKDPVGLMSRVAQPASKKIDQNKLKPEMDEKGNLTTAGFACSQCGQPLFVYKLEQVSEKGKAYTNYFGRCNVAEHEKLILLAQLKPEKDSDEAVTYSLGKFGQRALDFYSIHVTKESTHPVKPLAQIAGNRYASGPVGKALSDACMGTIASFLSKYQDIIIEHQKVVKGNQKRLESLRELAGKENLEYPSVTLPPQPHTKEGVDAYNEVIARVRMWVNLNLWQKLKLSRDDAKPLLRLKGFPSFPLVERQANEVDWWDMVCNVKKLINEKKEDGKVFWQNLAGYKRQEALRPYLSSEEDRKKGKKFARYQLGDLLLHLEKKHGEDWGKVYDEAWERIDKKVEGLSKHIKLEEERRSEDAQSKAALTDWLRAKASFVIEGLKEADKDEFCRCELKLQKWYGDLRGKPFAIEAENSILDISGFSKQYNCAFIWQKDGVKKLNLYLIINYFKGGKLRFKKIKPEAFEANRFYTVINKKSGEIVPMEVNFNFDDPNLIILPLAFGKRQGREFIWNDLLSLETGSLKLANGRVIEKTLYNRRTRQDEPALFVALTFERREVLDSSNIGPMNLIGVDRGENIPAVIALTDPEGCPLSRFKDSLGNPTHILRIGESYKEKQRTIQAKKEVEQRRAGGYSRKYASKAKNLADDMVRNTARDLLYYAVTQDAMLIFENLSRGFGRQGKRTFMAERQYTRMEDWLTAKLAYEGLPSKTYLSKTLAQYTSKTCSNCGFTITSADYDRVLEKLKKTATGWMTTINGKELKVEGQITYYNRYKRQNVVKDLSVELDRLSEESVNNDISSWTKGRSGEALSLLKKRFSHRPVQEKFVCLNCGFETHADEQAALNIARSWLFLRSQEYKKYQTNKTTGNTDKRAFVETWQSFYRKKLKEVWKPAV

SEQ ID NO: 27565 - protein, 978 aa, synthetic construct
  REGION 1..978: note = engineered CasX variant
QEIKRINKIRRRLVKDSNTKKAGKTGPMKTLLVRVMTPDLRERLENLRKKPENIPQPISNTSRANLNKLLTDYTEMKKAILHVYWEEFQKDPVGLMSRVAQPASKKIDQNKLKPEMDEKGNLTTAGFACSQCGQPLFVYKLEQVSEKGKAYTNYFGRCNVAEHEKLILLAQLKPEKDSDEAVTYSLGKFGQRALDFYSIHVTKESTHPVKPLAQIAGNRYASGPVGKALSDACMGTIASFLSKYQDIIIEHQKVVKGNQKRLESLRELAGKENLEYPSVTLPPQPHTKEGVDAYNEVIARVRMWVNLNLWQKLKLSRDDAKPLLRLKGFPSFPLVERQANEVDWWDMVCNVKKLINEKKEDGKVFWQNLAGYKRQEALRPYLSSEEDRKKGKKFARYQLGDLLLHLEKKHGEDWGKVYDEAWERIDKKVEGLSKHIKLEEERRSEDAQSKAALTDWLRAKASFVIEGLKEADKDEFCRCELKLQKWYGDLRGKPFAIEAENSILDISGFSKQYNCAFIWQKDGVKKLNLYLIINYFKGGKLRFKKIKPEAFEANRFYTVINKKSGEIVPMEVNFNFDDPNLIILPLAFGKRQGREFIWNDLLSLETGSLKLANGRVIEKTLYNRRTRQDEPALFVALTFERREVLDSSNIGPMNLIGVDRGENIPAVIALTDPEGCPLSRFKDSLGNPTHILRIGESYKEKQRTIQAKKESEQRRAGGYSRKYASKAKNLADDMVRNTARDLLYYAVTQDAMLIFENLSRGFGRQGKRTFMAERQYTRMEDWLTAKLAYEGLPSKTYLSKTLAQYTSKTCSNCGFTITSADYDRVLEKLKKTATGWMTTINGKELKVEGQITYYNRYKRQNVVKDLSVELDRLSEESVNNDISSWTKGRSGEALSLLKKRFSHRPVQEKFVCLNCGFETHADEQAALNIARSWLFLRSQEYKKYQTNKTTGNTDKRAFVETWQSFYRKKLKEVWKPAV

SEQ ID NO: 27566 - protein, 978 aa, synthetic construct
  REGION 1..978: note = engineered CasX variant
QEIKRINKIRRRLVKDSNTKKAGKTGPMKTLLVRVMTPDLRERLENLRKKPENIPQPISNTSRANLNKLLTDYTEMKKAILHVYWEEFQKDPVGLMSRVAQPASKKIDQNKLKPEMDEKGNLTTAGFACSQCGQPLFVYKLEQVSEKGKAYTNYFGRCNVAEHEKLILLAQLKPEKDSDEAVTYSLGKFGQRALDFYSIHVTKESTHPVKPLAQIAGNRYASGPVGKALSDACMGTIASFLSKYQDIIIEHQKVVKGNQKRLESLRELAGKENLEYPSVTLPPQPHTKEGVDAYNEVIARVRMWVNLNLWQKLKLSRDDAKPLLRLKGFPSFPLVERQANEVDWWDMVCNVKKLINEKKEDGKVFWQNLAGYKRQEALRPYLSSEEDRKKGKKFARYQLGDLLLHLEKKHGEDWGKVYDEAWERIDKKVEGLSKHIKLEEERRSEDAQSKAALTDWLRAKASFVIEGLKEADKDEFCRCELKLQKWYGDLRGKPFAIEAENSILDISGFSKQYNCAFIWQKDGVKKLNLYLIINYFKGGKLRFKKIKPEAFEANRFYTVINKKSGEIVPMEVNFNFDDPNLIILPLAFGKRQGREFIWNDLLSLETGSLKLANGRVIEKTLYNRRTRQDEPALFVALTFERREVLDSSNIFPMNLIGVDRGENIPAVIALTDPTGCPLSRFKDSLGNPTHILRIGESYKEKQRTIQAKKEVEQRRAGGYSRKYASKAKNLADDMVRNTARDLLYYAVTQDAMLIFENLSRGFGRQGKRTFMAERQYTRMEDWLTAKLAYEGLPSKTYLSKTLAQYTSKTCSNCGFTITSADYDRVLEKLKKTATGWMTTINGKELKVEGQITYYNRYKRQNVVKDLSVELDRLSEESVNNDISSWTKGRSGEALSLLKKRFSHRPVQEKFVCLNCGFETHADEQAALNIARSWLFLRSQEYKKYQTNKTTGNTDKRAFVETWQSFYRKKLKEVWKPAV

SEQ ID NO: 27567 - protein, 978 aa, synthetic construct
  REGION 1..978: note = engineered CasX variant
QEIKRINKIRRRLVKDSNTKKAGKTGPMKTLLVRVMTPDLRERLENLRKKPENIPQPISNTSRANLNKLLTDYTEMKKAILHVYWEEFQKDPVGLMSRVAQPASKKIDQNKLKPEMDEKGNLTTAGFACSQCGQPLFVYKLEQVSEKGKAYTNYFGRCNVAEHEKLILLAQLKPEKDSDEAVTYSLGKFGQRALDFYSIHVTKESTHPVKPLAQIAGNRYASGPVGKALSDACMGTIASFLSKYQDIIIEHQKVVKGNQKRLESLRELAGKENLEYPSVTLPPQPHTKEGVDAYNEVIARVRMWVNLNLWQKLKLSRDDAKPLLRLKGFPSFPLVERQANEVDWWDMVCNVKKLINEKKEDGKVFWQNLAGYKRQEALRPYLSSEEDRKKGKKFARYQLGDLLLHLEKKHGEDWGKVYDEAWERIDKKVEGLSKHIKLEEERRSEDAQSKAALTDWLRAKASFVIEGLKEADKDEFCRCELKLQKWYGDLRGKPFAIEAENSILDISGFSKQYNCAFIWQKDGVKKLNLYLIINYFKGGKLRFKKIKPEAFEANRFYTVINKKSGEIVPMEVNFNFDDPNLIILPLAFGKRQGREFIWNDLLSLETGSLKLANGRVIEKTLYNRRTRQDEPALFVALTFERREVLDSSNIFPMNLIGVDRGENIPAVIALTDPTGCPLSRFKDSLGNPTHILRIGESYKEKQRTIAAKKEVEQRRAGGYSRKYASKAKNLADDMVRNTARDLLYYAVTQDAMLIFENLSRGFGRQGKRTFMAERQYTRMEDWLTAKLAYEGLPSKTYLSKTLAQYTSKTCSNCGFTITSADYDRVLEKLKKTATGWMTTINGKELKVEGQITYYNRYKRQNVVKDLSVELDRLSEESVNNDISSWTKGRSGEALSLLKKRFSHRPVQEKFVCLNCGFETHADEQAALNIARSWLFLRSQEYKKYQTNKTTGNTDKRAFVETWQSFYRKKLKEVWKPAV

SEQ ID NO: 27568 - protein, 978 aa, synthetic construct
  REGION 1..978: note = engineered CasX variant
QEIKRINKIRRRLVKDSNTKKAGKTGPMKTLLVRVMTPDLRERLENLRKKPENIPQPISNTSRANLNKLLTDYTEMKKAILHVYWEEFQKDPVGLMSRVAQPASKKIDQNKLKPEMDEKGNLTTAGFACSQCGQPLFVYKLEQVSEKGKAYTNYFGRCNVAEHEKLILLAQLKPEKDSDEAVTYSLGKFGQRALDFYSIHVTKESTHPVKPLAQIAGNRYASGPVGKALSDACMGTIASFLSKYQDIIIEHQKVVKGNQKRLESLRELAGKENLEYPSVTLPPQPHTKEGVDAYNEVIARVRMWVNLNLWQKLKLSRDDAKPLLRLKGFPSFPLVERQANEVDWWDMVCNVKKLINEKKEDGKVFWQNLAGYKRQEALRPYLSSEEDRKKGKKFARYQLGDLLLHLEKKHGEDWGKVYDEAWERIDKKVEGLSKHIKLEEERRSEDAQSKAALTDWLRAKASFVIEGLKEADKDEFCRCELKLQKWYGDLRGKPFAIEAENSILDISGFSKQYNCAFIWQKDGVKKLNLYLIINYFKGGKLRFKKIKPEAFEANRFYTVINKKSGEIVPMEVNFNFDDPNLIILPLAFGKRQGREFIWNDLLSLETGSLKLANGRVIEKTLYNRRTRQDEPALFVALTFERREVLDSSNIFPMNLIGVDRGENIPAVIALTDPEGCPLSRFKDSLGNPTHILRIGESYKEKQRTYQAKKEVEQRRAGGYSRKYASKAKNLADDMVRNTARDLLYYAVTQDAMLIFENLSRGFGRQGKRTFMAERQYTRMEDWLTAKLAYEGLPSKTYLSKTLAQYTSKTCSNCGFTITSADYDRVLEKLKKTATGWMTTINGKELKVEGQITYYNRYKRQNVVKDLSVELDRLSEESVNNDISSWTKGRSGEALSLLKKRFSHRPVQEKFVCLNCGFETHADEQAALNIARSWLFLRSQEYKKYQTNKTTGNTDKRAFVETWQSFYRKKLKEVWKPAV

SEQ ID NO: 27569 - protein, 978 aa, synthetic construct
  REGION 1..978: note = engineered CasX variant
QEIKRINKIRRRLVKDSNTKKAGKTGPMKTLLVRVMTPDLRERLENLRKKPENIPQPISNTSRANLNKLLTDYTEMKKAILHVYWEEFQKDPVGLMSRVAQPASKKIDQNKLKPEMDEKGNLTTAGFACSQCGQPLFVYKLEQVSEKGKAYTNYFGRCNVAEHEKLILLAQLKPEKDSDEAVTYSLGKFGQRALDFYSIHVTKESTHPVKPLAQIAGNRYASGPVGKALSDACMGTIASFLSKYQDIIIEHQKVVKGNQKRLESLRELAGKENLEYPSVTLPPQPHTKEGVDAYNEVIARVRMWVNLNLWQKLKLSRDDAKPLLRLKGFPSFPLVERQANEVDWWDMVCNVKKLINEKKEDGKVFWQNLAGYKRQEALRPYLSSEEDRKKGKKFARYQLGDLLLHLEKKHGEDWGKVYDEAWERIDKKVEGLSKHIKLEEERRSEDAQSKAALTDWLRAKASFVIEGLKEADKDEFCRCELKLQKWYGDLRGKPFAIEAENSILDISGFSKQYNCAFIWQKDGVKKLNLYLIINYFKGGKLRFKKIKPEAFEANRFYTVINKKSGEIVPMEVNFNFDDPNLIILPLAFGKRQGREFIWNDLLSLETGSLKLANGRVIEKTLYNRRTRQDEPALFVALTFERREVLDSSNIFPMNLIGVDRGENIPAVIALTDPEGCPLSRFKDSLGNPTHILRIGESYKEKQRTIQAKKEVEQRRAGGYSRKYASKAKNLADDMVRNTARDLLYYAVTQDAMLIFENLSRGFGRQGKRTFMAERQYTRMEDWLTAKLAYEGLPSKTYLSKTLAQYTSKTCSNCGFTITSADYDRVLEKLKKTATGWMTTINGKELKVEGQITYYNRYKRQNVVKDLSVELDRLSEESVNNDISSWTKGRSGEALSLLKKRFSHRPVQEKFVCLNCGFETHADEQAALNIARSWLFLRSQEYKKYQTNKTTGNTDKRAFVETWQSFYRKKLKEVWKPAV

SEQ ID NO: 27570 - protein, 978 aa, synthetic construct
  REGION 1..978: note = engineered CasX variant
QEIKRINKIRRRLVKDSNTKKAGKTGPMKTLLVRVMTPDLRERLENLRKKPENIPQPISNTSRANLNKLLTDYTEMKKAILHVYWEEFQKDPVGLMSRVAQPASKKIDQNKLKPEMDEKGNLTTAGFACSQCGQPLFVYKLEQVSEKGKAYTNYFGRCNVAEHEKLILLAQLKPEKDSDEAVTYSLGKFGQRALDFYSIHVTKESTHPVKPLAQIAGNRYASGPVGKALSDACMGTIASFLSKYQDIIIEHQKVVKGNQKRLESLRELAGKENLEYPSVTLPPQPHTKEGVDAYNEVIARVRMWVNLNLWQKLKLSRDDAKPLLRLKGFPSFPLVERQANEVDWWDMVCNVKKLINEKKEDGKVFWQNLAGYKRQEALRPYLSSEEDRKKGKKFARYQLGDLLLHLEKKHGEDWGKVYDEAWERIDKKVEGLSKHIKLEEERRSEDAQSKAALTDWLRAKASFVIEGLKEADKDEFCRCELKLQKWYGDLRGKPFAIEAENSILDISGFSKQYNCAFIWQKDGVKKLNLYLIINYFKGGKLRFKKIKPEAFEANRFYTVINKKSGEIVPMEVNFNFDDPNLIILPLAFGKRQGREFIWNDLLSLETGSLKLANGRVIEKTLYNRRTRQDEPALFVALTFERREVLDSSNIFPMNLIGVDRGENIPAVIALTDPEGCPLSRFKDSLGNPTHILRIGESYKEKQRTIAAKKEVEQRRAGGYSRKYASKAKNLADDMVRNTARDLLYYAVTQDAMLIFENLSRGFGRQGKRTFMAERQYTRMEDWLTAKLAYEGLPSKTYLSKTLAQYTSKTCSNCGFTITSADYDRVLEKLKKTATGWMTTINGKELKVEGQITYYNRYKRQNVVKDLSVELDRLSEESVNNDISSWTKGRSGEALSLLKKRFSHRPVQEKFVCLNCGFETHADEQAALNIARSWLFLRSQEYKKYQTNKTTGNTDKRAFVETWQSFYRKKLKEVWKPAV

SEQ ID NO: 27571 - protein, 978 aa, synthetic construct
  REGION 1..978: note = engineered CasX variant
QEIKRINKIRRRLVKDSNTKKAGKTGPMKTLLVRVMTPDLRERLENLRKKPENIPQPISNTSRANLNKLLTDYTEMKKAILHVYWEEFQKDPVGLMSRVAQPASKKIDQNKLKPEMDEKGNLTTAGFACSQCGQPLFVYKLEQVSEKGKAYTNYFGRCNVAEHEKLILLAQLKPEKDSDEAVTYSLGKFGQRALDFYSIHVTKESTHPVKPLAQIAGNRYASGPVGKALSDACMGTIASFLSKYQDIIIEHQKVVKGNQKRLESLRELAGKENLEYPSVTLPPQPHTKEGVDAYNEVIARVRMWVNLNLWQKLKLSRDDAKPLLRLKGFPSFPLVERQANEVDWWDMVCNVKKLINEKKEDGKVFWQNLAGYKRQEALRPYLSSEEDRKKGKKFARYQLGDLLLHLEKKHGEDWGKVYDEAWERIDKKVEGLSKHIKLEEERRSEDAQSKAALTDWLRAKASFVIEGLKEADKDEFCRCELKLQKWYGDLRGKPFAIEAENSILDISGFSKQYNCAFIWQKDGVKKLNLYLIINYFKGGKLRFKKIKPEAFEANRFYTVINKKSGEIVPMEVNFNFDDPNLIILPLAFGKRQGREFIWNDLLSLETGSLKLANGRVIEKTLYNRRTRQDEPALFVALTFERREVLDSSNIFPMNLIGVDRGENIPAVIALTDPEGCPLSRFKDSKGNPTHILRIGESYKEKQRTYQAKKEVEQRRAGGYSRKYASKAKNLADDMVRNTARDLLYYAVTQDAMLIFENLSRGFGRQGKRTFMAERQYTRMEDWLTAKLAYEGLPSKTYLSKTLAQYTSKTCSNCGFTITSADYDRVLEKLKKTATGWMTTINGKELKVEGQITYYNRYKRQNVVKDLSVELDRLSEESVNNDISSWTKGRSGEALSLLKKRFSHRPVQEKFVCLNCGFETHADEQAALNIARSWLFLRSQEYKKYQTNKTTGNTDKRAFVETWQSFYRKKLKEVWKPAV

SEQ ID NO: 27572 - protein, 978 aa, synthetic construct
  REGION 1..978: note = engineered CasX variant
QEIKRINKIRRRLVKDSNTKKAGKTGPMKTLLVRVMTPDLRERLENLRKKPENIPQPISNTSRANLNKLLTDYTEMKKAILHVYWEEFQKDPVGLMSRVAQPASKKIDQNKLKPEMDEKGNLTTAGFACSQCGQPLFVYKLEQVSEKGKAYTNYFGRCNVAEHEKLILLAQLKPEKDSDEAVTYSLGKFGQRALDFYSIHVTKESTHPVKPLAQIAGNRYASGPVGKALSDACMGTIASFLSKYQDIIIEHQKVVKGNQKRLESLRELAGKENLEYPSVTLPPQPHTKEGVDAYNEVIARVRMWVNLNLWQKLKLSRDDAKPLLRLKGFPSFPLVERQANEVDWWDMVCNVKKLINEKKEDGKVFWQNLAGYKRQEALRPYLSSEEDRKKGKKFARYQLGDLLLHLEKKHGEDWGKVYDEAWERIDKKVEGLSKHIKLEEERRSEDAQSKAALTDWLRAKASFVIEGLKEADKDEFCRCELKLQKWYGDLRGKPFAIEAENSILDISGFSKQYNCAFIWQKDGVKKLNLYLIINYFKGGKLRFKKIKPEAFEANRFYTVINKKSGEIVPMEVNFNFDDPNLIILPLAFGKRQGREFIWNDLLSLETGSLKLANGRVIEKTLYNRRTRQDEPALFVALTFERREVLDSSNIFPMNLIGVDRGENIPAVIALTDPEGCPLSRFKDSKGNPTHILRIGESYKEKQRTIQAKKEVEQRRAGGYSRKYASKAKNLADDMVRNTARDLLYYAVTQDAMLIFENLSRGFGRQGKRTFMAERQYTRMEDWLTAKLAYEGLPSKTYLSKTLAQYTSKTCSNCGFTITSADYDRVLEKLKKTATGWMTTINGKELKVEGQITYYNRYKRQNVVKDLSVELDRLSEESVNNDISSWTKGRSGEALSLLKKRFSHRPVQEKFVCLNCGFETHADEQAALNIARSWLFLRSQEYKKYQTNKTTGNTDKRAFVETWQSFYRKKLKEVWKPAV

SEQ ID NO: 27573 - protein, 978 aa, synthetic construct
  REGION 1..978: note = engineered CasX variant
QEIKRINKIRRRLVKDSNTKKAGKTGPMKTLLVRVMTPDLRERLENLRKKPENIPQPISNTSRANLNKLLTDYTEMKKAILHVYWEEFQKDPVGLMSRVAQPASKKIDQNKLKPEMDEKGNLTTAGFACSQCGQPLFVYKLEQVSEKGKAYTNYFGRCNVAEHEKLILLAQLKPEKDSDEAVTYSLGKFGQRALDFYSIHVTKESTHPVKPLAQIAGNRYASGPVGKALSDACMGTIASFLSKYQDIIIEHQKVVKGNQKRLESLRELAGKENLEYPSVTLPPQPHTKEGVDAYNEVIARVRMWVNLNLWQKLKLSRDDAKPLLRLKGFPSFPLVERQANEVDWWDMVCNVKKLINEKKEDGKVFWQNLAGYKRQEALRPYLSSEEDRKKGKKFARYQLGDLLLHLEKKHGEDWGKVYDEAWERIDKKVEGLSKHIKLEEERRSEDAQSKAALTDWLRAKASFVIEGLKEADKDEFCRCELKLQKWYGDLRGKPFAIEAENSILDISGFSKQYNCAFIWQKDGVKKLNLYLIINYFKGGKLRFKKIKPEAFEANRFYTVINKKSGEIVPMEVNFNFDDPNLIILPLAFGKRQGREFIWNDLLSLETGSLKLANGRVIEKTLYNRRTRQDEPALFVALTFERREVLDSSNIEPMNLIGVDRGENIPAVIALTDPEGCPLSRFKDSLGNPTHILRIGESYKEKQRTIQAKKEVEQRRAGGYSRKYASKAKNLADDMVRNTARDLLYYAVTQDAMLIFENLSRGFGRQGKRTFMAERQYTRMEDWLTAKLAYEGLPSKTYLSKTLAQYTSKTCSNCGFTITSADYDRVLEKLKKTATGWMTTINGKELKVEGQITYYNRYKRQNVVKDLSVELDRLSEESVNNDISSWTKGRSGEALSLLKKRFSHRPVQEKFVCLNCGFETHADEQAALNIARSWLFLRSQEYKKYQTNKTTGNTDKRAFVETWQSFYRKKLKEVWKPAV

SEQ ID NO: 27574 - protein, 978 aa, synthetic construct
  REGION 1..978: note = engineered CasX variant
QEIKRINKIRRRLVKDSNTKKAGKTGPMKTLLVRVMTPDLRERLENLRKKPENIPQPISNTSRANLNKLLTDYTEMKKAILHVYWEEFQKDPVGLMSRVAQPASKKIDQNKLKPEMDEKGNLTTAGFACSQCGQPLFVYKLEQVSEKGKAYTNYFGRCNVAEHEKLILLAQLKPEKDSDEAVTYSLGKFGQRALDFYSIHVTKESTHPVKPLAQIAGNRYASGPVGKALSDACMGTIASFLSKYQDIIIEHQKVVKGNQKRLESLRELAGKENLEYPSVTLPPQPHTKEGVDAYNEVIARVRMWVNLNLWQKLKLSRDDAKPLLRLKGFPSFPLVERQANEVDWWDMVCNVKKLINEKKEDGKVFWQNLAGYKRQEALRPYLSSEEDRKKGKKFARYQLGDLLLHLEKKHGEDWGKVYDEAWERIDKKVEGLSKHIKLEEERRSEDAQSKAALTDWLRAKASFVIEGLKEADKDEFCRCELKLQKWYGDLRGKPFAIEAENSILDISGFSKQYNCAFIWQKDGVKKLNLYLIINYFKGGKLRFKKIKPEAFEANRFYTVINKKSGEIVPMEVNFNFDDPNLIILPLAFGKRQGREFIWNDLLSLETGSLKLANGRVIEKTLYNRRTRQDEPALFVALTFERREVLDSSNIEPMNLIGVDRGENIPAVIALTDPEGCPLSRFKDSLGNPTHILRIGESYKEKQRTIQAKKEVEARRAGGYSRKYASKAKNLADDMVRNTARDLLYYAVTQDAMLIFENLSRGFGRQGKRTFMAERQYTRMEDWLTAKLAYEGLPSKTYLSKTLAQYTSKTCSNCGFTITSADYDRVLEKLKKTATGWMTTINGKELKVEGQITYYNRYKRQNVVKDLSVELDRLSEESVNNDISSWTKGRSGEALSLLKKRFSHRPVQEKFVCLNCGFETHADEQAALNIARSWLFLRSQEYKKYQTNKTTGNTDKRAFVETWQSFYRKKLKEVWKPAV

SEQ ID NO: 27575 - protein, 978 aa, synthetic construct
  REGION 1..978: note = engineered CasX variant
QEIKRINKIRRRLVKDSNTKKAGKTGPMKTLLVRVMTPDLRERLENLRKKPENIPQPISNTSRANLNKLLTDYTEMKKAILHVYWEEFQKDPVGLMSRVAQPASKKIDQNKLKPEMDEKGNLTTAGFACSQCGQPLFVYKLEQVSEKGKAYTNYFGRCNVAEHEKLILLAQLKPEKDSDEAVTYSLGKFGQRALDFYSIHVTKESTHPVKPLAQIAGNRYASGPVGKALSDACMGTIASFLSKYQDIIIEHQKVVKGNQKRLESLRELAGKENLEYPSVTLPPQPHTKEGVDAYNEVIARVRMWVNLNLWQKLKLSRDDAKPLLRLKGFPSFPLVERQANEVDWWDMVCNVKKLINEKKEDGKVFWQNLAGYKRQEALRPYLSSEEDRKKGKKFARYQLGDLLLHLEKKHGEDWGKVYDEAWERIDKKVEGLSKHIKLEEERRSEDAQSKAALTDWLRAKASFVIEGLKEADKDEFCRCELKLQKWYGDLRGKPFAIEAENSILDISGFSKQYNCAFIWQKDGVKKLNLYLIINYFKGGKLRFKKIKPEAFEANRFYTVINKKSGEIVPMEVNFNFDDPNLIILPLAFGKRQGREFIWNDLLSLETGSLKLANGRVIEKTLYNRRTRQDEPALFVALTFERREVLDSSNIEPMNLIGVDRGENIPAVIALTDPEGCPLSRFKDSLGNPTHILRIGESYKEKQRTIQAKKCVEQRRAGGYSRKYASKAKNLADDMVRNTARDLLYYAVTQDAMLIFENLSRGFGRQGKRTFMAERQYTRMEDWLTAKLAYEGLPSKTYLSKTLAQYTSKTCSNCGFTITSADYDRVLEKLKKTATGWMTTINGKELKVEGQITYYNRYKRQNVVKDLSVELDRLSEESVNNDISSWTKGRSGEALSLLKKRFSHRPVQEKFVCLNCGFETHADEQAALNIARSWLFLRSQEYKKYQTNKTTGNTDKRAFVETWQSFYRKKLKEVWKPAV

SEQ ID NO: 27576 - protein, 978 aa, synthetic construct
  REGION 1..978: note = engineered CasX variant
QEIKRINKIRRRLVKDSNTKKAGKTGPMKTLLVRVMTPDLRERLENLRKKPENIPQPISNTSRANLNKLLTDYTEMKKAILHVYWEEFQKDPVGLMSRVAQPASKKIDQNKLKPEMDEKGNLTTAGFACSQCGQPLFVYKLEQVSEKGKAYTNYFGRCNVAEHEKLILLAQLKPEKDSDEAVTYSLGKFGQRALDFYSIHVTKESTHPVKPLAQIAGNRYASGPVGKALSDACMGTIASFLSKYQDIIIEHQKVVKGNQKRLESLRELAGKENLEYPSVTLPPQPHTKEGVDAYNEVIARVRMWVNLNLWQKLKLSRDDAKPLLRLKGFPSFPLVERQANEVDWWDMVCNVKKLINEKKEDGKVFWQNLAGYKRQEALRPYLSSEEDRKKGKKFARYQLGDLLLHLEKKHGEDWGKVYDEAWERIDKKVEGLSKHIKLEEERRSEDAQSKAALTDWLRAKASFVIEGLKEADKDEFCRCELKLQKWYGDLRGKPFAIEAENSILDISGFSKQYNCAFIWQKDGVKKLNLYLIINYFKGGKLRFKKIKPEAFEANRFYTVINKKSGEIVPMEVNFNFDDPNLIILPLAFGKRQGREFIWNDLLSLETGSLKLANGRVIEKTLYNRRTRQDEPALFVALTFERREVLDSSNIEPMNLIGVDRGENIPAVIALTDPEGCPLSRFKDSLGNPTHILRIGESYKEKQRTIQAKKCVEARRAGGYSRKYASKAKNLADDMVRNTARDLLYYAVTQDAMLIFENLSRGFGRQGKRTFMAERQYTRMEDWLTAKLAYEGLPSKTYLSKTLAQYTSKTCSNCGFTITSADYDRVLEKLKKTATGWMTTINGKELKVEGQITYYNRYKRQNVVKDLSVELDRLSEESVNNDISSWTKGRSGEALSLLKKRFSHRPVQEKFVCLNCGFETHADEQAALNIARSWLFLRSQEYKKYQTNKTTGNTDKRAFVETWQSFYRKKLKEVWKPAV

SEQ ID NO: 27577 - protein, 978 aa, synthetic construct
  REGION 1..978: note = engineered CasX variant
QEIKRINKIRRRLVKDSNTKKAGKTGPMKTLLVRVMTPDLRERLENLRKKPENIPQPISNTSRANLNKLLTDYTEMKKAILHVYWEEFQKDPVGLMSRVAQPASKKIDQNKLKPEMDEKGNLTTAGFACSQCGQPLFVYKLEQVSEKGKAYTNYFGRCNVAEHEKLILLAQLKPEKDSDEAVTYSLGKFGQRALDFYSIHVTKESTHPVKPLAQIAGNRYASGPVGKALSDACMGTIASFLSKYQDIIIEHQKVVKGNQKRLESLRELAGKENLEYPSVTLPPQPHTKEGVDAYNEVIARVRMWVNLNLWQKLKLSRDDAKPLLRLKGFPSFPLVERQANEVDWWDMVCNVKKLINEKKEDGKVFWQNLAGYKRQEALRPYLSSEEDRKKGKKFARYQLGDLLLHLEKKHGEDWGKVYDEAWERIDKKVEGLSKHIKLEEERRSEDAQSKAALTDWLRAKASFVIEGLKEADKDEFCRCELKLQKWYGDLRGKPFAIEAENSILDISGFSKQYNCAFIWQKDGVKKLNLYLIINYFKGGKLRFKKIKPEAFEANRFYTVINKKSGEIVPMEVNFNFDDPNLIILPLAFGKRQGREFIWNDLLSLETGSLKLANGRVIEKTLYNRRTRQDEPALFVALTFERREVLDSSNIDPMNLIGVDRGENIPAVIALTDPEGSPLSRFKDSLGNPTHILRIGESYKEKQRTIQAKKEVEQRRAGGYSRKYASKAKNLADDMVRNTARDLLYYAVTQDAMLIFENLSRGFGRQGKRTFMAERQYTRMEDWLTAKLAYEGLPSKTYLSKTLAQYTSKTCSNCGFTITSADYDRVLEKLKKTATGWMTTINGKELKVEGQITYYNRYKRQNVVKDLSVELDRLSEESVNNDISSWTKGRSGEALSLLKKRFSHRPVQEKFVCLNCGFETHADEQAALNIARSWLFLRSQEYKKYQTNKTTGNTDKRAFVETWQSFYRKKLKEVWKPAV

SEQ ID NO: 27578 - protein, 978 aa, synthetic construct
  REGION 1..978: note = engineered CasX variant
QEIKRINKIRRRLVKDSNTKKAGKTGPMKTLLVRVMTPDLRERLENLRKKPENIPQPISNTSRANLNKLLTDYTEMKKAILHVYWEEFQKDPVGLMSRVAQPASKKIDQNKLKPEMDEKGNLTTAGFACSQCGQPLFVYKLEQVSEKGKAYTNYFGRCNVAEHEKLILLAQLKPEKDSDEAVTYSLGKFGQRALDFYSIHVTKESTHPVKPLAQIAGNRYASGPVGKALSDACMGTIASFLSKYQDIIIEHQKVVKGNQKRLESLRELAGKENLEYPSVTLPPQPHTKEGVDAYNEVIARVRMWVNLNLWQKLKLSRDDAKPLLRLKGFPSFPLVERQANEVDWWDMVCNVKKLINEKKEDGKVFWQNLAGYKRQEALRPYLSSEEDRKKGKKFARYQLGDLLLHLEKKHGEDWGKVYDEAWERIDKKVEGLSKHIKLEEERRSEDAQSKAALTDWLRAKASFVIEGLKEADKDEFCRCELKLQKWYGDLRGKPFAIEAENSILDISGFSKQYNCAFIWQKDGVKKLNLYLIINYFKGGKLRFKKIKPEAFEANRFYTVINKKSGEIVPMEVNFNFDDPNLIILPLAFGKRQGREFIWNDLLSLETGSLKLANGRVIEKTLYNRRTRQDEPALFVALTFERREVLDSSNIDPMNLIGVDRGENIPAVIALTDPEGCPLSRFKDSLGNPTHILRIGESYKEKQRTIQAKKSVEQRRAGGYSRKYASKAKNLADDMVRNTARDLLYYAVTQDAMLIFENLSRGFGRQGKRTFMAERQYTRMEDWLTAKLAYEGLPSKTYLSKTLAQYTSKTCSNCGFTITSADYDRVLEKLKKTATGWMTTINGKELKVEGQITYYNRYKRQNVVKDLSVELDRLSEESVNNDISSWTKGRSGEALSLLKKRFSHRPVQEKFVCLNCGFETHADEQAALNIARSWLFLRSQEYKKYQTNKTTGNTDKRAFVETWQSFYRKKLKEVWKPAV

SEQ ID NO: 27579 - protein, 978 aa, synthetic construct
  REGION 1..978: note = engineered CasX variant
QEIKRINKIRRRLVKDSNTKKAGKTGPMKTLLVRVMTPDLRERLENLRKKPENIPQPISNTSRANLNKLLTDYTEMKKAILHVYWEEFQKDPVGLMSRVAQPASKKIDQNKLKPEMDEKGNLTTAGFACSQCGQPLFVYKLEQVSEKGKAYTNYFGRCNVAEHEKLILLAQLKPEKDSDEAVTYSLGKFGQRALDFYSIHVTKESTHPVKPLAQIAGNRYASGPVGKALSDACMGTIASFLSKYQDIIIEHQKVVKGNQKRLESLRELAGKENLEYPSVTLPPQPHTKEGVDAYNEVIARVRMWVNLNLWQKLKLSRDDAKPLLRLKGFPSFPLVERQANEVDWWDMVCNVKKLINEKKEDGKVFWQNLAGYKRQEALRPYLSSEEDRKKGKKFARYQLGDLLLHLEKKHGEDWGKVYDEAWERIDKKVEGLSKHIKLEEERRSEDAQSKAALTDWLRAKASFVIEGLKEADKDEFCRCELKLQKWYGDLRGKPFAIEAENSILDISGFSKQYNCAFIWQKDGVKKLNLYLIINYFKGGKLRFKKIKPEAFEANRFYTVINKKSGEIVPMEVNFNFDDPNLIILPLAFGKRQGREFIWNDLLSLETGSLKLANGRVIEKTLYNRRTRQDEPALFVALTFERREVLDSSNIDPMNLIGVDRGENIPAVIALTDPEGCPLSRFKDSLGNPTHILRIGESYKEKQRTIQAKKEVEQRRAGGYSRKYASKAKNLADDMVRNTARDLLYYAVTQDAMLIFENLSRGFGRQGKRTFMAERQYTRMEDWLTAKLAYEGLPSKTYLSKTLAQYTSKTCSNCGFTITSADYDRVLEKLKKTATGWMTTINGKELKVEGQITYYNRYKRQNVVKDLSVELDRLSEESVNNDISSWTKGRSGEALSLLKKRFSHRPVQEKFVCLNCGFETHADEQAALNIARSWLFLRSQEYKKYQTNKTTGNTDKRAFVETWQSFYRKKLKEVWKPAV

SEQ ID NO: 27580 - protein, 978 aa, synthetic construct
  REGION 1..978: note = engineered CasX variant
QEIKRINKIRRRLVKDSNTKKAGKTGPMKTLLVRVMTPDLRERLENLRKKPENIPQPISNTSRANLNKLLTDYTEMKKAILHVYWEEFQKDPVGLMSRVAQPASKKIDQNKLKPEMDEKGNLTTAGFACSQCGQPLFVYKLEQVSEKGKAYTNYFGRCNVAEHEKLILLAQLKPEKDSDEAVTYSLGKFGQRALDFYSIHVTKESTHPVKPLAQIAGNRYASGPVGKALSDACMGTIASFLSKYQDIIIEHQKVVKGNQKRLESLRELAGKENLEYPSVTLPPQPHTKEGVDAYNEVIARVRMWVNLNLWQKLKLSRDDAKPLLRLKGFPSFPLVERQANEVDWWDMVCNVKKLINEKKEDGKVFWQNLAGYKRQEALRPYLSSEEDRKKGKKFARYQLGDLLLHLEKKHGEDWGKVYDEAWERIDKKVEGLSKHIKLEEERRSEDAQSKAALTDWLRAKASFVIEGLKEADKDEFCRCELKLQKWYGDLRGKPFAIEAENSILDISGFSKQYNCAFIWQKDGVKKLNLYLIINYFKGGKLRFKKIKPEAFEANRFYTVINKKSGEIVPMEVNFNFDDPNLIILPLAFGKRQGREFIWNDLLSLETGSLKLANGRVIEKTLYNRRTRQDEPALFVALTFERREVLDSSNIDPMNLIGVDRGENIPAVIALTDPEGCPLSRFKDSLGNPTHILRIGESYKEKQRCIQAKKSVEQRRAGGYSRKYASKAKNLADDMVRNTARDLLYYAVTQDAMLIFENLSRGFGRQGKRTFMAERQYTRMEDWLTAKLAYEGLPSKTYLSKTLAQYTSKTCSNCGFTITSADYDRVLEKLKKTATGWMTTINGKELKVEGQITYYNRYKRQNVVKDLSVELDRLSEESVNNDISSWTKGRSGEALSLLKKRFSHRPVQEKFVCLNCGFETHADEQAALNIARSWLFLRSQEYKKYQTNKTTGNTDKRAFVETWQSFYRKKLKEVWKPAV

SEQ ID NO: 27581 - protein, 978 aa, synthetic construct
  REGION 1..978: note = engineered CasX variant
QEIKRINKIRRRLVKDSNTKKAGKTGPMKTLLVRVMTPDLRERLENLRKKPENIPQPISNTSRANLNKLLTDYTEMKKAILHVYWEEFQKDPVGLMSRVAQPASKKIDQNKLKPEMDEKGNLTTAGFACSQCGQPLFVYKLEQVSEKGKAYTNYFGRCNVAEHEKLILLAQLKPEKDSDEAVTYSLGKFGQRALDFYSIHVTKESTHPVKPLAQIAGNRYASGPVGKALSDACMGTIASFLSKYQDIIIEHQKVVKGNQKRLESLRELAGKENLEYPSVTLPPQPHTKEGVDAYNEVIARVRMWVNLNLWQKLKLSRDDAKPLLRLKGFPSFPLVERQANEVDWWDMVCNVKKLINEKKEDGKVFWQNLAGYKRQEALRPYLSSEEDRKKGKKFARYQLGDLLLHLEKKHGEDWGKVYDEAWERIDKKVEGLSKHIKLEEERRSEDAQSKAALTDWLRAKASFVIEGLKEADKDEFCRCELKLQKWYGDLRGKPFAIEAENSILDISGFSKQYNCAFIWQKDGVKKLNLYLIINYFKGGKLRFKKIKPEAFEANRFYTVINKKSGEIVPMEVNFNFDDPNLIILPLAFGKRQGREFIWNDLLSLETGSLKLANGRVIEKTLYNRRTRQDEPALFVALTFERREVLDSSNIDPMNLIGVDRGENIPAVIALTDPEGCPLSRFKDSLGNPTHILRIGESYKEKQRCIQAKKEVEQRRAGGYSRKYASKAKNLADDMVRNTARDLLYYAVTQDAMLIFENLSRGFGRQGKRTFMAERQYTRMEDWLTAKLAYEGLPSKTYLSKTLAQYTSKTCSNCGFTITSADYDRVLEKLKKTATGWMTTINGKELKVEGQITYYNRYKRQNVVKDLSVELDRLSEESVNNDISSWTKGRSGEALSLLKKRFSHRPVQEKFVCLNCGFETHADEQAALNIARSWLFLRSQEYKKYQTNKTTGNTDKRAFVETWQSFYRKKLKEVWKPAV

SEQ ID NO: 27582 - protein, 978 aa, synthetic construct
  REGION 1..978: note = engineered CasX variant
QEIKRINKIRRRLVKDSNTKKAGKTGPMKTLLVRVMTPDLRERLENLRKKPENIPQPISNTSRANLNKLLTDYTEMKKAILHVYWEEFQKDPVGLMSRVAQPASKKIDQNKLKPEMDEKGNLTTAGFACSQCGQPLFVYKLEQVSEKGKAYTNYFGRCNVAEHEKLILLAQLKPEKDSDEAVTYSLGKFGQRALDFYSIHVTKESTHPVKPLAQIAGNRYASGPVGKALSDACMGTIASFLSKYQDIIIEHQKVVKGNQKRLESLRELAGKENLEYPSVTLPPQPHTKEGVDAYNEVIARVRMWVNLNLWQKLKLSRDDAKPLLRLKGFPSFPLVERQANEVDWWDMVCNVKKLINEKKEDGKVFWQNLAGYKRQEALRPYLSSEEDRKKGKKFARYQLGDLLLHLEKKHGEDWGKVYDEAWERIDKKVEGLSKHIKLEEERRSEDAQSKAALTDWLRAKASFVIEGLKEADKDEFCRCELKLQKWYGDLRGKPFAIEAENSILDISGFSKQYNCAFIWQKDGVKKLNLYLIINYFKGGKLRFKKIKPEAFEANRFYTVINKKSGEIVPMEVNFNFDDPNLIILPLAFGKRQGREFIWNDLLSLETGSLKLANGRVIEKTLYNRRTRQDEPALFVALTFERREVLDSSNICPMNLIGVDRGENIPAVIALTDSEGCPLSRFKDSLGNPTHILRIGESYKEKQRTIQAKKEVEQRRAGGYSRKYASKAKNLADDMVRNTARDLLYYAVTQDAMLIFENLSRGFGRQGKRTFMAERQYTRMEDWLTAKLAYEGLPSKTYLSKTLAQYTSKTCSNCGFTITSADYDRVLEKLKKTATGWMTTINGKELKVEGQITYYNRYKRQNVVKDLSVELDRLSEESVNNDISSWTKGRSGEALSLLKKRFSHRPVQEKFVCLNCGFETHADEQAALNIARSWLFLRSQEYKKYQTNKTTGNTDKRAFVETWQSFYRKKLKEVWKPAV

SEQ ID NO: 27583 - protein, 978 aa, synthetic construct
  REGION 1..978: note = engineered CasX variant
QEIKRINKIRRRLVKDSNTKKAGKTGPMKTLLVRVMTPDLRERLENLRKKPENIPQPISNTSRANLNKLLTDYTEMKKAILHVYWEEFQKDPVGLMSRVAQPASKKIDQNKLKPEMDEKGNLTTAGFACSQCGQPLFVYKLEQVSEKGKAYTNYFGRCNVAEHEKLILLAQLKPEKDSDEAVTYSLGKFGQRALDFYSIHVTKESTHPVKPLAQIAGNRYASGPVGKALSDACMGTIASFLSKYQDIIIEHQKVVKGNQKRLESLRELAGKENLEYPSVTLPPQPHTKEGVDAYNEVIARVRMWVNLNLWQKLKLSRDDAKPLLRLKGFPSFPLVERQANEVDWWDMVCNVKKLINEKKEDGKVFWQNLAGYKRQEALRPYLSSEEDRKKGKKFARYQLGDLLLHLEKKHGEDWGKVYDEAWERIDKKVEGLSKHIKLEEERRSEDAQSKAALTDWLRAKASFVIEGLKEADKDEFCRCELKLQKWYGDLRGKPFAIEAENSILDISGFSKQYNCAFIWQKDGVKKLNLYLIINYFKGGKLRFKKIKPEAFEANRFYTVINKKSGEIVPMEVNFNFDDPNLIILPLAFGKRQGREFIWNDLLSLETGSLKLANGRVIEKTLYNRRTRQDEPALFVALTFERREVLDSSNICPMNLIGVDRGENIPAVIALTDPEGCPLSRFKDTLGNPTHILRIGESYKEKQRTIQAKKEVEQRRAGGYSRKYASKAKNLADDMVRNTARDLLYYAVTQDAMLIFENLSRGFGRQGKRTFMAERQYTRMEDWLTAKLAYEGLPSKTYLSKTLAQYTSKTCSNCGFTITSADYDRVLEKLKKTATGWMTTINGKELKVEGQITYYNRYKRQNVVKDLSVELDRLSEESVNNDISSWTKGRSGEALSLLKKRFSHRPVQEKFVCLNCGFETHADEQAALNIARSWLFLRSQEYKKYQTNKTTGNTDKRAFVETWQSFYRKKLKEVWKPAV

SEQ ID NO: 27584 - protein, 978 aa, synthetic construct
  REGION 1..978: note = engineered CasX variant
QEIKRINKIRRRLVKDSNTKKAGKTGPMKTLLVRVMTPDLRERLENLRKKPENIPQPISNTSRANLNKLLTDYTEMKKAILHVYWEEFQKDPVGLMSRVAQPASKKIDQNKLKPEMDEKGNLTTAGFACSQCGQPLFVYKLEQVSEKGKAYTNYFGRCNVAEHEKLILLAQLKPEKDSDEAVTYSLGKFGQRALDFYSIHVTKESTHPVKPLAQIAGNRYASGPVGKALSDACMGTIASFLSKYQDIIIEHQKVVKGNQKRLESLRELAGKENLEYPSVTLPPQPHTKEGVDAYNEVIARVRMWVNLNLWQKLKLSRDDAKPLLRLKGFPSFPLVERQANEVDWWDMVCNVKKLINEKKEDGKVFWQNLAGYKRQEALRPYLSSEEDRKKGKKFARYQLGDLLLHLEKKHGEDWGKVYDEAWERIDKKVEGLSKHIKLEEERRSEDAQSKAALTDWLRAKASFVIEGLKEADKDEFCRCELKLQKWYGDLRGKPFAIEAENSILDISGFSKQYNCAFIWQKDGVKKLNLYLIINYFKGGKLRFKKIKPEAFEANRFYTVINKKSGEIVPMEVNFNFDDPNLIILPLAFGKRQGREFIWNDLLSLETGSLKLANGRVIEKTLYNRRTRQDEPALFVALTFERREVLDSSNICPMNLIGVDRGENIPAVIALTDPEGCPLSRFKDTLGNPTHILRIGEHYKEKQRTIQAKKEVEQRRAGGYSRKYASKAKNLADDMVRNTARDLLYYAVTQDAMLIFENLSRGFGRQGKRTFMAERQYTRMEDWLTAKLAYEGLPSKTYLSKTLAQYTSKTCSNCGFTITSADYDRVLEKLKKTATGWMTTINGKELKVEGQITYYNRYKRQNVVKDLSVELDRLSEESVNNDISSWTKGRSGEALSLLKKRFSHRPVQEKFVCLNCGFETHADEQAALNIARSWLFLRSQEYKKYQTNKTTGNTDKRAFVETWQSFYRKKLKEVWKPAV

SEQ ID NO: 27585 - protein, 978 aa, synthetic construct
  REGION 1..978: note = engineered CasX variant
QEIKRINKIRRRLVKDSNTKKAGKTGPMKTLLVRVMTPDLRERLENLRKKPENIPQPISNTSRANLNKLLTDYTEMKKAILHVYWEEFQKDPVGLMSRVAQPASKKIDQNKLKPEMDEKGNLTTAGFACSQCGQPLFVYKLEQVSEKGKAYTNYFGRCNVAEHEKLILLAQLKPEKDSDEAVTYSLGKFGQRALDFYSIHVTKESTHPVKPLAQIAGNRYASGPVGKALSDACMGTIASFLSKYQDIIIEHQKVVKGNQKRLESLRELAGKENLEYPSVTLPPQPHTKEGVDAYNEVIARVRMWVNLNLWQKLKLSRDDAKPLLRLKGFPSFPLVERQANEVDWWDMVCNVKKLINEKKEDGKVFWQNLAGYKRQEALRPYLSSEEDRKKGKKFARYQLGDLLLHLEKKHGEDWGKVYDEAWERIDKKVEGLSKHIKLEEERRSEDAQSKAALTDWLRAKASFVIEGLKEADKDEFCRCELKLQKWYGDLRGKPFAIEAENSILDISGFSKQYNCAFIWQKDGVKKLNLYLIINYFKGGKLRFKKIKPEAFEANRFYTVINKKSGEIVPMEVNFNFDDPNLIILPLAFGKRQGREFIWNDLLSLETGSLKLANGRVIEKTLYNRRTRQDEPALFVALTFERREVLDSSNICPMNLIGVDRGENIPAVIALTDPEGCPLSRFKDSLGNPTHILRIGESYKEKQRTIQAKKEVEQRRAGGYSRKYASKAKNLADDMVRNTARDLLYYAVTQDAMLIFENLSRGFGRQGKRTFMAERQYTRMEDWLTAKLAYEGLPSKTYLSKTLAQYTSKTCSNCGFTITSADYDRVLEKLKKTATGWMTTINGKELKVEGQITYYNRYKRQNVVKDLSVELDRLSEESVNNDISSWTKGRSGEALSLLKKRFSHRPVQEKFVCLNCGFETHADEQAALNIARSWLFLRSQEYKKYQTNKTTGNTDKRAFVETWQSFYRKKLKEVWKPAV

SEQ ID NO: 27586 - protein, 978 aa, synthetic construct
  REGION 1..978: note = engineered CasX variant
QEIKRINKIRRRLVKDSNTKKAGKTGPMKTLLVRVMTPDLRERLENLRKKPENIPQPISNTSRANLNKLLTDYTEMKKAILHVYWEEFQKDPVGLMSRVAQPASKKIDQNKLKPEMDEKGNLTTAGFACSQCGQPLFVYKLEQVSEKGKAYTNYFGRCNVAEHEKLILLAQLKPEKDSDEAVTYSLGKFGQRALDFYSIHVTKESTHPVKPLAQIAGNRYASGPVGKALSDACMGTIASFLSKYQDIIIEHQKVVKGNQKRLESLRELAGKENLEYPSVTLPPQPHTKEGVDAYNEVIARVRMWVNLNLWQKLKLSRDDAKPLLRLKGFPSFPLVERQANEVDWWDMVCNVKKLINEKKEDGKVFWQNLAGYKRQEALRPYLSSEEDRKKGKKFARYQLGDLLLHLEKKHGEDWGKVYDEAWERIDKKVEGLSKHIKLEEERRSEDAQSKAALTDWLRAKASFVIEGLKEADKDEFCRCELKLQKWYGDLRGKPFAIEAENSILDISGFSKQYNCAFIWQKDGVKKLNLYLIINYFKGGKLRFKKIKPEAFEANRFYTVINKKSGEIVPMEVNFNFDDPNLIILPLAFGKRQGREFIWNDLLSLETGSLKLANGRVIEKTLYNRRTRQDEPALFVALTFERREVLDSSNICPMNLIGVDRGENIPAVIALTDPEGCPLSRFKDSLGNPTHILRIGESYKEKQRTIQAKKEVAQRRAGGYSRKYASKAKNLADDMVRNTARDLLYYAVTQDAMLIFENLSRGFGRQGKRTFMAERQYTRMEDWLTAKLAYEGLPSKTYLSKTLAQYTSKTCSNCGFTITSADYDRVLEKLKKTATGWMTTINGKELKVEGQITYYNRYKRQNVVKDLSVELDRLSEESVNNDISSWTKGRSGEALSLLKKRFSHRPVQEKFVCLNCGFETHADEQAALNIARSWLFLRSQEYKKYQTNKTTGNTDKRAFVETWQSFYRKKLKEVWKPAV

SEQ ID NO: 27587 - protein, 978 aa, synthetic construct
  REGION 1..978: note = engineered CasX variant
QEIKRINKIRRRLVKDSNTKKAGKTGPMKTLLVRVMTPDLRERLENLRKKPENIPQPISNTSRANLNKLLTDYTEMKKAILHVYWEEFQKDPVGLMSRVAQPASKKIDQNKLKPEMDEKGNLTTAGFACSQCGQPLFVYKLEQVSEKGKAYTNYFGRCNVAEHEKLILLAQLKPEKDSDEAVTYSLGKFGQRALDFYSIHVTKESTHPVKPLAQIAGNRYASGPVGKALSDACMGTIASFLSKYQDIIIEHQKVVKGNQKRLESLRELAGKENLEYPSVTLPPQPHTKEGVDAYNEVIARVRMWVNLNLWQKLKLSRDDAKPLLRLKGFPSFPLVERQANEVDWWDMVCNVKKLINEKKEDGKVFWQNLAGYKRQEALRPYLSSEEDRKKGKKFARYQLGDLLLHLEKKHGEDWGKVYDEAWERIDKKVEGLSKHIKLEEERRSEDAQSKAALTDWLRAKASFVIEGLKEADKDEFCRCELKLQKWYGDLRGKPFAIEAENSILDISGFSKQYNCAFIWQKDGVKKLNLYLIINYFKGGKLRFKKIKPEAFEANRFYTVINKKSGEIVPMEVNFNFDDPNLIILPLAFGKRQGREFIWNDLLSLETGSLKLANGRVIEKTLYNRRTRQDEPALFVALTFERREVLDSSNICPMNLIGVDRGENIPAVIALTDPEGCPLSRFKDSLGNPTHILRIGESYKEKQRTIQAKKEMEQRRAGGYSRKYASKAKNLADDMVRNTARDLLYYAVTQDAMLIFENLSRGFGRQGKRTFMAERQYTRMEDWLTAKLAYEGLPSKTYLSKTLAQYTSKTCSNCGFTITSADYDRVLEKLKKTATGWMTTINGKELKVEGQITYYNRYKRQNVVKDLSVELDRLSEESVNNDISSWTKGRSGEALSLLKKRFSHRPVQEKFVCLNCGFETHADEQAALNIARSWLFLRSQEYKKYQTNKTTGNTDKRAFVETWQSFYRKKLKEVWKPAV

SEQ ID NO: 27588 - protein, 978 aa, synthetic construct
  REGION 1..978: note = engineered CasX variant
QEIKRINKIRRRLVKDSNTKKAGKTGPMKTLLVRVMTPDLRERLENLRKKPENIPQPISNTSRANLNKLLTDYTEMKKAILHVYWEEFQKDPVGLMSRVAQPASKKIDQNKLKPEMDEKGNLTTAGFACSQCGQPLFVYKLEQVSEKGKAYTNYFGRCNVAEHEKLILLAQLKPEKDSDEAVTYSLGKFGQRALDFYSIHVTKESTHPVKPLAQIAGNRYASGPVGKALSDACMGTIASFLSKYQDIIIEHQKVVKGNQKRLESLRELAGKENLEYPSVTLPPQPHTKEGVDAYNEVIARVRMWVNLNLWQKLKLSRDDAKPLLRLKGFPSFPLVERQANEVDWWDMVCNVKKLINEKKEDGKVFWQNLAGYKRQEALRPYLSSEEDRKKGKKFARYQLGDLLLHLEKKHGEDWGKVYDEAWERIDKKVEGLSKHIKLEEERRSEDAQSKAALTDWLRAKASFVIEGLKEADKDEFCRCELKLQKWYGDLRGKPFAIEAENSILDISGFSKQYNCAFIWQKDGVKKLNLYLIINYFKGGKLRFKKIKPEAFEANRFYTVINKKSGEIVPMEVNFNFDDPNLIILPLAFGKRQGREFIWNDLLSLETGSLKLANGRVIEKTLYNRRTRQDEPALFVALTFERREVLDSSNICPMNLIGVDRGENIPAVIALTDPEGCPLSRFKDSLGNPTHILRIGESYKEKQRTIQAKKEMAQRRAGGYSRKYASKAKNLADDMVRNTARDLLYYAVTQDAMLIFENLSRGFGRQGKRTFMAERQYTRMEDWLTAKLAYEGLPSKTYLSKTLAQYTSKTCSNCGFTITSADYDRVLEKLKKTATGWMTTINGKELKVEGQITYYNRYKRQNVVKDLSVELDRLSEESVNNDISSWTKGRSGEALSLLKKRFSHRPVQEKFVCLNCGFETHADEQAALNIARSWLFLRSQEYKKYQTNKTTGNTDKRAFVETWQSFYRKKLKEVWKPAV

SEQ ID NO: 27589 - protein, 978 aa, synthetic construct
  REGION 1..978: note = engineered CasX variant
QEIKRINKIRRRLVKDSNTKKAGKTGPMKTLLVRVMTPDLRERLENLRKKPENIPQPISNTSRANLNKLLTDYTEMKKAILHVYWEEFQKDPVGLMSRVAQPASKKIDQNKLKPEMDEKGNLTTAGFACSQCGQPLFVYKLEQVSEKGKAYTNYFGRCNVAEHEKLILLAQLKPEKDSDEAVTYSLGKFGQRALDFYSIHVTKESTHPVKPLAQIAGNRYASGPVGKALSDACMGTIASFLSKYQDIIIEHQKVVKGNQKRLESLRELAGKENLEYPSVTLPPQPHTKEGVDAYNEVIARVRMWVNLNLWQKLKLSRDDAKPLLRLKGFPSFPLVERQANEVDWWDMVCNVKKLINEKKEDGKVFWQNLAGYKRQEALRPYLSSEEDRKKGKKFARYQLGDLLLHLEKKHGEDWGKVYDEAWERIDKKVEGLSKHIKLEEERRSEDAQSKAALTDWLRAKASFVIEGLKEADKDEFCRCELKLQKWYGDLRGKPFAIEAENSILDISGFSKQYNCAFIWQKDGVKKLNLYLIINYFKGGKLRFKKIKPEAFEANRFYTVINKKSGEIVPMEVNFNFDDPNLIILPLAFGKRQGREFIWNDLLSLETGSLKLANGRVIEKTLYNRRTRQDEPALFVALTFERREVLDSSNICPMNLIGVDRGENIPAVIALTDPEGCPLSRFKDSLGNPTHILRIGEHYKEKQRTIQAKKEVEQRRAGGYSRKYASKAKNLADDMVRNTARDLLYYAVTQDAMLIFENLSRGFGRQGKRTFMAERQYTRMEDWLTAKLAYEGLPSKTYLSKTLAQYTSKTCSNCGFTITSADYDRVLEKLKKTATGWMTTINGKELKVEGQITYYNRYKRQNVVKDLSVELDRLSEESVNNDISSWTKGRSGEALSLLKKRFSHRPVQEKFVCLNCGFETHADEQAALNIARSWLFLRSQEYKKYQTNKTTGNTDKRAFVETWQSFYRKKLKEVWKPAV

SEQ ID NO: 27590 - protein, 978 aa, synthetic construct
  REGION 1..978: note = engineered CasX variant
QEIKRINKIRRRLVKDSNTKKAGKTGPMKTLLVRVMTPDLRERLENLRKKPENIPQPISNTSRANLNKLLTDYTEMKKAILHVYWEEFQKDPVGLMSRVAQPASKKIDQNKLKPEMDEKGNLTTAGFACSQCGQPLFVYKLEQVSEKGKAYTNYFGRCNVAEHEKLILLAQLKPEKDSDEAVTYSLGKFGQRALDFYSIHVTKESTHPVKPLAQIAGNRYASGPVGKALSDACMGTIASFLSKYQDIIIEHQKVVKGNQKRLESLRELAGKENLEYPSVTLPPQPHTKEGVDAYNEVIARVRMWVNLNLWQKLKLSRDDAKPLLRLKGFPSFPLVERQANEVDWWDMVCNVKKLINEKKEDGKVFWQNLAGYKRQEALRPYLSSEEDRKKGKKFARYQLGDLLLHLEKKHGEDWGKVYDEAWERIDKKVEGLSKHIKLEEERRSEDAQSKAALTDWLRAKASFVIEGLKEADKDEFCRCELKLQKWYGDLRGKPFAIEAENSILDISGFSKQYNCAFIWQKDGVKKLNLYLIINYFKGGKLRFKKIKPEAFEANRFYTVINKKSGEIVPMEVNFNFDDPNLIILPLAFGKRQGREFIWNDLLSLETGSLKLANGRVIEKTLYNRRTRQDEPALFVALTFERREVLDSSNICPHNLIGVDRGENIPAVIALTDPEGCPLSRFKDSLNNPTHILRIGESYKEKQRTIQAKKEVEQRRAGGYSRKYASKAKNLADDMVRNTARDLLYYAVTQDAMLIFENLSRGFGRQGKRTFMAERQYTRMEDWLTAKLAYEGLPSKTYLSKTLAQYTSKTCSNCGFTITSADYDRVLEKLKKTATGWMTTINGKELKVEGQITYYNRYKRQNVVKDLSVELDRLSEESVNNDISSWTKGRSGEALSLLKKRFSHRPVQEKFVCLNCGFETHADEQAALNIARSWLFLRSQEYKKYQTNKTTGNTDKRAFVETWQSFYRKKLKEVWKPAV

SEQ ID NO: 27591 - protein, 978 aa, synthetic construct
  REGION 1..978: note = engineered CasX variant
QEIKRINKIRRRLVKDSNTKKAGKTGPMKTLLVRVMTPDLRERLENLRKKPENIPQPISNTSRANLNKLLTDYTEMKKAILHVYWEEFQKDPVGLMSRVAQPASKKIDQNKLKPEMDEKGNLTTAGFACSQCGQPLFVYKLEQVSEKGKAYTNYFGRCNVAEHEKLILLAQLKPEKDSDEAVTYSLGKFGQRALDFYSIHVTKESTHPVKPLAQIAGNRYASGPVGKALSDACMGTIASFLSKYQDIIIEHQKVVKGNQKRLESLRELAGKENLEYPSVTLPPQPHTKEGVDAYNEVIARVRMWVNLNLWQKLKLSRDDAKPLLRLKGFPSFPLVERQANEVDWWDMVCNVKKLINEKKEDGKVFWQNLAGYKRQEALRPYLSSEEDRKKGKKFARYQLGDLLLHLEKKHGEDWGKVYDEAWERIDKKVEGLSKHIKLEEERRSEDAQSKAALTDWLRAKASFVIEGLKEADKDEFCRCELKLQKWYGDLRGKPFAIEAENSILDISGFSKQYNCAFIWQKDGVKKLNLYLIINYFKGGKLRFKKIKPEAFEANRFYTVINKKSGEIVPMEVNFNFDDPNLIILPLAFGKRQGREFIWNDLLSLETGSLKLANGRVIEKTLYNRRTRQDEPALFVALTFERREVLDSSNICPHNLIGVDRGENIPAVIALTDPEGCPLSRFKDSLGNPTHILRIGESYKEKQRTIQAKKEVEQRRAGGYSRKYASKAKNLADDMVRNTARDLLYYAVTQDAMLIFENLSRGFGRQGKRTFMAERQYTRMEDWLTAKLAYEGLPSKTYLSKTLAQYTSKTCSNCGFTITSADYDRVLEKLKKTATGWMTTINGKELKVEGQITYYNRYKRQNVVKDLSVELDRLSEESVNNDISSWTKGRSGEALSLLKKRFSHRPVQEKFVCLNCGFETHADEQAALNIARSWLFLRSQEYKKYQTNKTTGNTDKRAFVETWQSFYRKKLKEVWKPAV

SEQ ID NO: 27592 - protein, 978 aa, synthetic construct
  REGION 1..978: note = engineered CasX variant
QEIKRINKIRRRLVKDSNTKKAGKTGPMKTLLVRVMTPDLRERLENLRKKPENIPQPISNTSRANLNKLLTDYTEMKKAILHVYWEEFQKDPVGLMSRVAQPASKKIDQNKLKPEMDEKGNLTTAGFACSQCGQPLFVYKLEQVSEKGKAYTNYFGRCNVAEHEKLILLAQLKPEKDSDEAVTYSLGKFGQRALDFYSIHVTKESTHPVKPLAQIAGNRYASGPVGKALSDACMGTIASFLSKYQDIIIEHQKVVKGNQKRLESLRELAGKENLEYPSVTLPPQPHTKEGVDAYNEVIARVRMWVNLNLWQKLKLSRDDAKPLLRLKGFPSFPLVERQANEVDWWDMVCNVKKLINEKKEDGKVFWQNLAGYKRQEALRPYLSSEEDRKKGKKFARYQLGDLLLHLEKKHGEDWGKVYDEAWERIDKKVEGLSKHIKLEEERRSEDAQSKAALTDWLRAKASFVIEGLKEADKDEFCRCELKLQKWYGDLRGKPFAIEAENSILDISGFSKQYNCAFIWQKDGVKKLNLYLIINYFKGGKLRFKKIKPEAFEANRFYTVINKKSGEIVPMEVNFNFDDPNLIILPLAFGKRQGREFIWNDLLSLETGSLKLANGRVIEKTLYNRRTRQDEPALFVALTFERREVLDSSNIAPVNLIGVDRGENIPAVIALTDPEGCPLSRFKDSLGNPTHILRIGESYKEKQRTIQAKKEVEQRRAGGYSRKYASKAKNLADDMVRNTARDLLYYAVTQDAMLIFENLSRGFGRQGKRTFMAERQYTRMEDWLTAKLAYEGLPSKTYLSKTLAQYTSKTCSNCGFTITSADYDRVLEKLKKTATGWMTTINGKELKVEGQITYYNRYKRQNVVKDLSVELDRLSEESVNNDISSWTKGRSGEALSLLKKRFSHRPVQEKFVCLNCGFETHADEQAALNIARSWLFLRSQEYKKYQTNKTTGNTDKRAFVETWQSFYRKKLKEVWKPAV

SEQ ID NO: 27593 - protein, 978 aa, synthetic construct
  REGION 1..978: note = engineered CasX variant
QEIKRINKIRRRLVKDSNTKKAGKTGPMKTLLVRVMTPDLRERLENLRKKPENIPQPISNTSRANLNKLLTDYTEMKKAILHVYWEEFQKDPVGLMSRVAQPASKKIDQNKLKPEMDEKGNLTTAGFACSQCGQPLFVYKLEQVSEKGKAYTNYFGRCNVAEHEKLILLAQLKPEKDSDEAVTYSLGKFGQRALDFYSIHVTKESTHPVKPLAQIAGNRYASGPVGKALSDACMGTIASFLSKYQDIIIEHQKVVKGNQKRLESLRELAGKENLEYPSVTLPPQPHTKEGVDAYNEVIARVRMWVNLNLWQKLKLSRDDAKPLLRLKGFPSFPLVERQANEVDWWDMVCNVKKLINEKKEDGKVFWQNLAGYKRQEALRPYLSSEEDRKKGKKFARYQLGDLLLHLEKKHGEDWGKVYDEAWERIDKKVEGLSKHIKLEEERRSEDAQSKAALTDWLRAKASFVIEGLKEADKDEFCRCELKLQKWYGDLRGKPFAIEAENSILDISGFSKQYNCAFIWQKDGVKKLNLYLIINYFKGGKLRFKKIKPEAFEANRFYTVINKKSGEIVPMEVNFNFDDPNLIILPLAFGKRQGREFIWNDLLSLETGSLKLANGRVIEKTLYNRRTRQDEPALFVALTFERREVLDSSNIAPVNLIGVDRGENIPAVIALTDPEGCPLSRFKDSLGNPTHILRIGESYKEKQRTIQAKKCVEQRRAGGYSRKYASKAKNLADDMVRNTARDLLYYAVTQDAMLIFENLSRGFGRQGKRTFMAERQYTRMEDWLTAKLAYEGLPSKTYLSKTLAQYTSKTCSNCGFTITSADYDRVLEKLKKTATGWMTTINGKELKVEGQITYYNRYKRQNVVKDLSVELDRLSEESVNNDISSWTKGRSGEALSLLKKRFSHRPVQEKFVCLNCGFETHADEQAALNIARSWLFLRSQEYKKYQTNKTTGNTDKRAFVETWQSFYRKKLKEVWKPAV

SEQ ID NO: 27594 - protein, 978 aa, synthetic construct
  REGION 1..978: note = engineered CasX variant
QEIKRINKIRRRLVKDSNTKKAGKTGPMKTLLVRVMTPDLRERLENLRKKPENIPQPISNTSRANLNKLLTDYTEMKKAILHVYWEEFQKDPVGLMSRVAQPASKKIDQNKLKPEMDEKGNLTTAGFACSQCGQPLFVYKLEQVSEKGKAYTNYFGRCNVAEHEKLILLAQLKPEKDSDEAVTYSLGKFGQRALDFYSIHVTKESTHPVKPLAQIAGNRYASGPVGKALSDACMGTIASFLSKYQDIIIEHQKVVKGNQKRLESLRELAGKENLEYPSVTLPPQPHTKEGVDAYNEVIARVRMWVNLNLWQKLKLSRDDAKPLLRLKGFPSFPLVERQANEVDWWDMVCNVKKLINEKKEDGKVFWQNLAGYKRQEALRPYLSSEEDRKKGKKFARYQLGDLLLHLEKKHGEDWGKVYDEAWERIDKKVEGLSKHIKLEEERRSEDAQSKAALTDWLRAKASFVIEGLKEADKDEFCRCELKLQKWYGDLRGKPFAIEAENSILDISGFSKQYNCAFIWQKDGVKKLNLYLIINYFKGGKLRFKKIKPEAFEANRFYTVINKKSGEIVPMEVNFNFDDPNLIILPLAFGKRQGREFIWNDLLSLETGSLKLANGRVIEKTLYNRRTRQDEPALFVALTFERREVLDSSNIAPVNLIGVDRGENIPAVIALTDPEGCPLSRFKDSLGNPTHILRIGESYKCKQRTIQAKKEVEQRRAGGYSRKYASKAKNLADDMVRNTARDLLYYAVTQDAMLIFENLSRGFGRQGKRTFMAERQYTRMEDWLTAKLAYEGLPSKTYLSKTLAQYTSKTCSNCGFTITSADYDRVLEKLKKTATGWMTTINGKELKVEGQITYYNRYKRQNVVKDLSVELDRLSEESVNNDISSWTKGRSGEALSLLKKRFSHRPVQEKFVCLNCGFETHADEQAALNIARSWLFLRSQEYKKYQTNKTTGNTDKRAFVETWQSFYRKKLKEVWKPAV

SEQ ID NO: 27595 - protein, 978 aa, synthetic construct
  REGION 1..978: note = engineered CasX variant
QEIKRINKIRRRLVKDSNTKKAGKTGPMKTLLVRVMTPDLRERLENLRKKPENIPQPISNTSRANLNKLLTDYTEMKKAILHVYWEEFQKDPVGLMSRVAQPASKKIDQNKLKPEMDEKGNLTTAGFACSQCGQPLFVYKLEQVSEKGKAYTNYFGRCNVAEHEKLILLAQLKPEKDSDEAVTYSLGKFGQRALDFYSIHVTKESTHPVKPLAQIAGNRYASGPVGKALSDACMGTIASFLSKYQDIIIEHQKVVKGNQKRLESLRELAGKENLEYPSVTLPPQPHTKEGVDAYNEVIARVRMWVNLNLWQKLKLSRDDAKPLLRLKGFPSFPLVERQANEVDWWDMVCNVKKLINEKKEDGKVFWQNLAGYKRQEALRPYLSSEEDRKKGKKFARYQLGDLLLHLEKKHGEDWGKVYDEAWERIDKKVEGLSKHIKLEEERRSEDAQSKAALTDWLRAKASFVIEGLKEADKDEFCRCELKLQKWYGDLRGKPFAIEAENSILDISGFSKQYNCAFIWQKDGVKKLNLYLIINYFKGGKLRFKKIKPEAFEANRFYTVINKKSGEIVPMEVNFNFDDPNLIILPLAFGKRQGREFIWNDLLSLETGSLKLANGRVIEKTLYNRRTRQDEPALFVALTFERREVLDSSNIAPVNLIGVDRGENIPAVIALTDPEGCPLSRFKDSLGNPTHILRIGEPYKEKQRTIQAKKEVEQRRAGGYSRKYASKAKNLADDMVRNTARDLLYYAVTQDAMLIFENLSRGFGRQGKRTFMAERQYTRMEDWLTAKLAYEGLPSKTYLSKTLAQYTSKTCSNCGFTITSADYDRVLEKLKKTATGWMTTINGKELKVEGQITYYNRYKRQNVVKDLSVELDRLSEESVNNDISSWTKGRSGEALSLLKKRFSHRPVQEKFVCLNCGFETHADEQAALNIARSWLFLRSQEYKKYQTNKTTGNTDKRAFVETWQSFYRKKLKEVWKPAV

SEQ ID NO: 27596 - protein, 978 aa, synthetic construct
  REGION 1..978: note = engineered CasX variant
QEIKRINKIRRRLVKDSNTKKAGKTGPMKTLLVRVMTPDLRERLENLRKKPENIPQPISNTSRANLNKLLTDYTEMKKAILHVYWEEFQKDPVGLMSRVAQPASKKIDQNKLKPEMDEKGNLTTAGFACSQCGQPLFVYKLEQVSEKGKAYTNYFGRCNVAEHEKLILLAQLKPEKDSDEAVTYSLGKFGQRALDFYSIHVTKESTHPVKPLAQIAGNRYASGPVGKALSDACMGTIASFLSKYQDIIIEHQKVVKGNQKRLESLRELAGKENLEYPSVTLPPQPHTKEGVDAYNEVIARVRMWVNLNLWQKLKLSRDDAKPLLRLKGFPSFPLVERQANEVDWWDMVCNVKKLINEKKEDGKVFWQNLAGYKRQEALRPYLSSEEDRKKGKKFARYQLGDLLLHLEKKHGEDWGKVYDEAWERIDKKVEGLSKHIKLEEERRSEDAQSKAALTDWLRAKASFVIEGLKEADKDEFCRCELKLQKWYGDLRGKPFAIEAENSILDISGFSKQYNCAFIWQKDGVKKLNLYLIINYFKGGKLRFKKIKPEAFEANRFYTVINKKSGEIVPMEVNFNFDDPNLIILPLAFGKRQGREFIWNDLLSLETGSLKLANGRVIEKTLYNRRTRQDEPALFVALTFERREVLDSSNIAPVNLIGVDRGENIPAVIALTDPEGCPLSRFKDSLGNPTHILRIDESYKEKQRTIQAKKEVEQRRAGGYSRKYASKAKNLADDMVRNTARDLLYYAVTQDAMLIFENLSRGFGRQGKRTFMAERQYTRMEDWLTAKLAYEGLPSKTYLSKTLAQYTSKTCSNCGFTITSADYDRVLEKLKKTATGWMTTINGKELKVEGQITYYNRYKRQNVVKDLSVELDRLSEESVNNDISSWTKGRSGEALSLLKKRFSHRPVQEKFVCLNCGFETHADEQAALNIARSWLFLRSQEYKKYQTNKTTGNTDKRAFVETWQSFYRKKLKEVWKPAV

SEQ ID NO: 27597 - protein, 978 aa, synthetic construct
  REGION 1..978: note = engineered CasX variant
QEIKRINKIRRRLVKDSNTKKAGKTGPMKTLLVRVMTPDLRERLENLRKKPENIPQPISNTSRANLNKLLTDYTEMKKAILHVYWEEFQKDPVGLMSRVAQPASKKIDQNKLKPEMDEKGNLTTAGFACSQCGQPLFVYKLEQVSEKGKAYTNYFGRCNVAEHEKLILLAQLKPEKDSDEAVTYSLGKFGQRALDFYSIHVTKESTHPVKPLAQIAGNRYASGPVGKALSDACMGTIASFLSKYQDIIIEHQKVVKGNQKRLESLRELAGKENLEYPSVTLPPQPHTKEGVDAYNEVIARVRMWVNLNLWQKLKLSRDDAKPLLRLKGFPSFPLVERQANEVDWWDMVCNVKKLINEKKEDGKVFWQNLAGYKRQEALRPYLSSEEDRKKGKKFARYQLGDLLLHLEKKHGEDWGKVYDEAWERIDKKVEGLSKHIKLEEERRSEDAQSKAALTDWLRAKASFVIEGLKEADKDEFCRCELKLQKWYGDLRGKPFAIEAENSILDISGFSKQYNCAFIWQKDGVKKLNLYLIINYFKGGKLRFKKIKPEAFEANRFYTVINKKSGEIVPMEVNFNFDDPNLIILPLAFGKRQGREFIWNDLLSLETGSLKLANGRVIEKTLYNRRTRQDEPALFVALTFERREVLDSSNIAPMNLIGVDRGENIPAVIALTDPEGRPLSRFKDSLGNPTHILRIGESYKEKQRTIQAKKEVEQRRAGGYSRKYASKAKNLADDMVRNTARDLLYYAVTQDAMLIFENLSRGFGRQGKRTFMAERQYTRMEDWLTAKLAYEGLPSKTYLSKTLAQYTSKTCSNCGFTITSADYDRVLEKLKKTATGWMTTINGKELKVEGQITYYNRYKRQNVVKDLSVELDRLSEESVNNDISSWTKGRSGEALSLLKKRFSHRPVQEKFVCLNCGFETHADEQAALNIARSWLFLRSQEYKKYQTNKTTGNTDKRAFVETWQSFYRKKLKEVWKPAV

SEQ ID NO: 27598 - protein, 978 aa, synthetic construct
  REGION 1..978: note = engineered CasX variant
QEIKRINKIRRRLVKDSNTKKAGKTGPMKTLLVRVMTPDLRERLENLRKKPENIPQPISNTSRANLNKLLTDYTEMKKAILHVYWEEFQKDPVGLMSRVAQPASKKIDQNKLKPEMDEKGNLTTAGFACSQCGQPLFVYKLEQVSEKGKAYTNYFGRCNVAEHEKLILLAQLKPEKDSDEAVTYSLGKFGQRALDFYSIHVTKESTHPVKPLAQIAGNRYASGPVGKALSDACMGTIASFLSKYQDIIIEHQKVVKGNQKRLESLRELAGKENLEYPSVTLPPQPHTKEGVDAYNEVIARVRMWVNLNLWQKLKLSRDDAKPLLRLKGFPSFPLVERQANEVDWWDMVCNVKKLINEKKEDGKVFWQNLAGYKRQEALRPYLSSEEDRKKGKKFARYQLGDLLLHLEKKHGEDWGKVYDEAWERIDKKVEGLSKHIKLEEERRSEDAQSKAALTDWLRAKASFVIEGLKEADKDEFCRCELKLQKWYGDLRGKPFAIEAENSILDISGFSKQYNCAFIWQKDGVKKLNLYLIINYFKGGKLRFKKIKPEAFEANRFYTVINKKSGEIVPMEVNFNFDDPNLIILPLAFGKRQGREFIWNDLLSLETGSLKLANGRVIEKTLYNRRTRQDEPALFVALTFERREVLDSSNIAPMNLIGVDRGENIPAVIALTDPEGRPLSRFKDSLGNPTHILRIDESYKEKQRTIQAKKEVEQRRAGGYSRKYASKAKNLADDMVRNTARDLLYYAVTQDAMLIFENLSRGFGRQGKRTFMAERQYTRMEDWLTAKLAYEGLPSKTYLSKTLAQYTSKTCSNCGFTITSADYDRVLEKLKKTATGWMTTINGKELKVEGQITYYNRYKRQNVVKDLSVELDRLSEESVNNDISSWTKGRSGEALSLLKKRFSHRPVQEKFVCLNCGFETHADEQAALNIARSWLFLRSQEYKKYQTNKTTGNTDKRAFVETWQSFYRKKLKEVWKPAV

SEQ ID NO: 27599 - protein, 978 aa, synthetic construct
  REGION 1..978: note = engineered CasX variant
QEIKRINKIRRRLVKDSNTKKAGKTGPMKTLLVRVMTPDLRERLENLRKKPENIPQPISNTSRANLNKLLTDYTEMKKAILHVYWEEFQKDPVGLMSRVAQPASKKIDQNKLKPEMDEKGNLTTAGFACSQCGQPLFVYKLEQVSEKGKAYTNYFGRCNVAEHEKLILLAQLKPEKDSDEAVTYSLGKFGQRALDFYSIHVTKESTHPVKPLAQIAGNRYASGPVGKALSDACMGTIASFLSKYQDIIIEHQKVVKGNQKRLESLRELAGKENLEYPSVTLPPQPHTKEGVDAYNEVIARVRMWVNLNLWQKLKLSRDDAKPLLRLKGFPSFPLVERQANEVDWWDMVCNVKKLINEKKEDGKVFWQNLAGYKRQEALRPYLSSEEDRKKGKKFARYQLGDLLLHLEKKHGEDWGKVYDEAWERIDKKVEGLSKHIKLEEERRSEDAQSKAALTDWLRAKASFVIEGLKEADKDEFCRCELKLQKWYGDLRGKPFAIEAENSILDISGFSKQYNCAFIWQKDGVKKLNLYLIINYFKGGKLRFKKIKPEAFEANRFYTVINKKSGEIVPMEVNFNFDDPNLIILPLAFGKRQGREFIWNDLLSLETGSLKLANGRVIEKTLYNRRTRQDEPALFVALTFERREVLDSSNIAPMNLIGVDRGENIPAVIALTDPEGCPLWRFKDSLGNPTHILRIGESYKEKQRTIQAKKEVEQRRAGGYSRKYASKAKNLADDMVRNTARDLLYYAVTQDAMLIFENLSRGFGRQGKRTFMAERQYTRMEDWLTAKLAYEGLPSKTYLSKTLAQYTSKTCSNCGFTITSADYDRVLEKLKKTATGWMTTINGKELKVEGQITYYNRYKRQNVVKDLSVELDRLSEESVNNDISSWTKGRSGEALSLLKKRFSHRPVQEKFVCLNCGFETHADEQAALNIARSWLFLRSQEYKKYQTNKTTGNTDKRAFVETWQSFYRKKLKEVWKPAV

SEQ ID NO: 27600 - protein, 978 aa, synthetic construct
  REGION 1..978: note = engineered CasX variant
QEIKRINKIRRRLVKDSNTKKAGKTGPMKTLLVRVMTPDLRERLENLRKKPENIPQPISNTSRANLNKLLTDYTEMKKAILHVYWEEFQKDPVGLMSRVAQPASKKIDQNKLKPEMDEKGNLTTAGFACSQCGQPLFVYKLEQVSEKGKAYTNYFGRCNVAEHEKLILLAQLKPEKDSDEAVTYSLGKFGQRALDFYSIHVTKESTHPVKPLAQIAGNRYASGPVGKALSDACMGTIASFLSKYQDIIIEHQKVVKGNQKRLESLRELAGKENLEYPSVTLPPQPHTKEGVDAYNEVIARVRMWVNLNLWQKLKLSRDDAKPLLRLKGFPSFPLVERQANEVDWWDMVCNVKKLINEKKEDGKVFWQNLAGYKRQEALRPYLSSEEDRKKGKKFARYQLGDLLLHLEKKHGEDWGKVYDEAWERIDKKVEGLSKHIKLEEERRSEDAQSKAALTDWLRAKASFVIEGLKEADKDEFCRCELKLQKWYGDLRGKPFAIEAENSILDISGFSKQYNCAFIWQKDGVKKLNLYLIINYFKGGKLRFKKIKPEAFEANRFYTVINKKSGEIVPMEVNFNFDDPNLIILPLAFGKRQGREFIWNDLLSLETGSLKLANGRVIEKTLYNRRTRQDEPALFVALTFERREVLDSSNIAPMNLIGVDRGENIPAVIALTDPEGCPLSRFKDSLGNPTHILRIGESYKHKQRTIQAKKEVEQRRAGGYSRKYASKAKNLADDMVRNTARDLLYYAVTQDAMLIFENLSRGFGRQGKRTFMAERQYTRMEDWLTAKLAYEGLPSKTYLSKTLAQYTSKTCSNCGFTITSADYDRVLEKLKKTATGWMTTINGKELKVEGQITYYNRYKRQNVVKDLSVELDRLSEESVNNDISSWTKGRSGEALSLLKKRFSHRPVQEKFVCLNCGFETHADEQAALNIARSWLFLRSQEYKKYQTNKTTGNTDKRAFVETWQSFYRKKLKEVWKPAV

SEQ ID NO: 27601 - protein, 978 aa, synthetic construct
  REGION 1..978: note = engineered CasX variant
QEIKRINKIRRRLVKDSNTKKAGKTGPMKTLLVRVMTPDLRERLENLRKKPENIPQPISNTSRANLNKLLTDYTEMKKAILHVYWEEFQKDPVGLMSRVAQPASKKIDQNKLKPEMDEKGNLTTAGFACSQCGQPLFVYKLEQVSEKGKAYTNYFGRCNVAEHEKLILLAQLKPEKDSDEAVTYSLGKFGQRALDFYSIHVTKESTHPVKPLAQIAGNRYASGPVGKALSDACMGTIASFLSKYQDIIIEHQKVVKGNQKRLESLRELAGKENLEYPSVTLPPQPHTKEGVDAYNEVIARVRMWVNLNLWQKLKLSRDDAKPLLRLKGFPSFPLVERQANEVDWWDMVCNVKKLINEKKEDGKVFWQNLAGYKRQEALRPYLSSEEDRKKGKKFARYQLGDLLLHLEKKHGEDWGKVYDEAWERIDKKVEGLSKHIKLEEERRSEDAQSKAALTDWLRAKASFVIEGLKEADKDEFCRCELKLQKWYGDLRGKPFAIEAENSILDISGFSKQYNCAFIWQKDGVKKLNLYLIINYFKGGKLRFKKIKPEAFEANRFYTVINKKSGEIVPMEVNFNFDDPNLIILPLAFGKRQGREFIWNDLLSLETGSLKLANGRVIEKTLYNRRTRQDEPALFVALTFERREVLDSSNIAPMNLIGVDRGENIPAVIALTDPEGCPLSRFKDSLGNPTHILRIGESYKHKQRTIQAKKCVEQRRAGGYSRKYASKAKNLADDMVRNTARDLLYYAVTQDAMLIFENLSRGFGRQGKRTFMAERQYTRMEDWLTAKLAYEGLPSKTYLSKTLAQYTSKTCSNCGFTITSADYDRVLEKLKKTATGWMTTINGKELKVEGQITYYNRYKRQNVVKDLSVELDRLSEESVNNDISSWTKGRSGEALSLLKKRFSHRPVQEKFVCLNCGFETHADEQAALNIARSWLFLRSQEYKKYQTNKTTGNTDKRAFVETWQSFYRKKLKEVWKPAV

SEQ ID NO: 27602 - protein, 978 aa, synthetic construct
  REGION 1..978: note = engineered CasX variant
QEIKRINKIRRRLVKDSNTKKAGKTGPMKTLLVRVMTPDLRERLENLRKKPENIPQPISNTSRANLNKLLTDYTEMKKAILHVYWEEFQKDPVGLMSRVAQPASKKIDQNKLKPEMDEKGNLTTAGFACSQCGQPLFVYKLEQVSEKGKAYTNYFGRCNVAEHEKLILLAQLKPEKDSDEAVTYSLGKFGQRALDFYSIHVTKESTHPVKPLAQIAGNRYASGPVGKALSDACMGTIASFLSKYQDIIIEHQKVVKGNQKRLESLRELAGKENLEYPSVTLPPQPHTKEGVDAYNEVIARVRMWVNLNLWQKLKLSRDDAKPLLRLKGFPSFPLVERQANEVDWWDMVCNVKKLINEKKEDGKVFWQNLAGYKRQEALRPYLSSEEDRKKGKKFARYQLGDLLLHLEKKHGEDWGKVYDEAWERIDKKVEGLSKHIKLEEERRSEDAQSKAALTDWLRAKASFVIEGLKEADKDEFCRCELKLQKWYGDLRGKPFAIEAENSILDISGFSKQYNCAFIWQKDGVKKLNLYLIINYFKGGKLRFKKIKPEAFEANRFYTVINKKSGEIVPMEVNFNFDDPNLIILPLAFGKRQGREFIWNDLLSLETGSLKLANGRVIEKTLYNRRTRQDEPALFVALTFERREVLDSSNIAPMNLIGVDRGENIPAVIALTDPEGCPLSRFKDSLGNPTHILRIGESYKEKTRTIQAKKEVEQRRAGGYSRKYASKAKNLADDMVRNTARDLLYYAVTQDAMLIFENLSRGFGRQGKRTFMAERQYTRMEDWLTAKLAYEGLPSKTYLSKTLAQYTSKTCSNCGFTITSADYDRVLEKLKKTATGWMTTINGKELKVEGQITYYNRYKRQNVVKDLSVELDRLSEESVNNDISSWTKGRSGEALSLLKKRFSHRPVQEKFVCLNCGFETHADEQAALNIARSWLFLRSQEYKKYQTNKTTGNTDKRAFVETWQSFYRKKLKEVWKPAV

SEQ ID NO: 27603 - protein, 978 aa, synthetic construct
  REGION 1..978: note = engineered CasX variant
QEIKRINKIRRRLVKDSNTKKAGKTGPMKTLLVRVMTPDLRERLENLRKKPENIPQPISNTSRANLNKLLTDYTEMKKAILHVYWEEFQKDPVGLMSRVAQPASKKIDQNKLKPEMDEKGNLTTAGFACSQCGQPLFVYKLEQVSEKGKAYTNYFGRCNVAEHEKLILLAQLKPEKDSDEAVTYSLGKFGQRALDFYSIHVTKESTHPVKPLAQIAGNRYASGPVGKALSDACMGTIASFLSKYQDIIIEHQKVVKGNQKRLESLRELAGKENLEYPSVTLPPQPHTKEGVDAYNEVIARVRMWVNLNLWQKLKLSRDDAKPLLRLKGFPSFPLVERQANEVDWWDMVCNVKKLINEKKEDGKVFWQNLAGYKRQEALRPYLSSEEDRKKGKKFARYQLGDLLLHLEKKHGEDWGKVYDEAWERIDKKVEGLSKHIKLEEERRSEDAQSKAALTDWLRAKASFVIEGLKEADKDEFCRCELKLQKWYGDLRGKPFAIEAENSILDISGFSKQYNCAFIWQKDGVKKLNLYLIINYFKGGKLRFKKIKPEAFEANRFYTVINKKSGEIVPMEVNFNFDDPNLIILPLAFGKRQGREFIWNDLLSLETGSLKLANGRVIEKTLYNRRTRQDEPALFVALTFERREVLDSSNIAPMNLIGVDRGENIPAVIALTDPEGCPLSRFKDSLGNPTHILRIGESYKEKQRTIQAKKEVESRRYGGYSRKYASKAKNLADDMVRNTARDLLYYAVTQDAMLIFENLSRGFGRQGKRTFMAERQYTRMEDWLTAKLAYEGLPSKTYLSKTLAQYTSKTCSNCGFTITSADYDRVLEKLKKTATGWMTTINGKELKVEGQITYYNRYKRQNVVKDLSVELDRLSEESVNNDISSWTKGRSGEALSLLKKRFSHRPVQEKFVCLNCGFETHADEQAALNIARSWLFLRSQEYKKYQTNKTTGNTDKRAFVETWQSFYRKKLKEVWKPAV

SEQ ID NO: 27604 - protein, 978 aa, synthetic construct
  REGION 1..978: note = engineered CasX variant
QEIKRINKIRRRLVKDSNTKKAGKTGPMKTLLVRVMTPDLRERLENLRKKPENIPQPISNTSRANLNKLLTDYTEMKKAILHVYWEEFQKDPVGLMSRVAQPASKKIDQNKLKPEMDEKGNLTTAGFACSQCGQPLFVYKLEQVSEKGKAYTNYFGRCNVAEHEKLILLAQLKPEKDSDEAVTYSLGKFGQRALDFYSIHVTKESTHPVKPLAQIAGNRYASGPVGKALSDACMGTIASFLSKYQDIIIEHQKVVKGNQKRLESLRELAGKENLEYPSVTLPPQPHTKEGVDAYNEVIARVRMWVNLNLWQKLKLSRDDAKPLLRLKGFPSFPLVERQANEVDWWDMVCNVKKLINEKKEDGKVFWQNLAGYKRQEALRPYLSSEEDRKKGKKFARYQLGDLLLHLEKKHGEDWGKVYDEAWERIDKKVEGLSKHIKLEEERRSEDAQSKAALTDWLRAKASFVIEGLKEADKDEFCRCELKLQKWYGDLRGKPFAIEAENSILDISGFSKQYNCAFIWQKDGVKKLNLYLIINYFKGGKLRFKKIKPEAFEANRFYTVINKKSGEIVPMEVNFNFDDPNLIILPLAFGKRQGREFIWNDLLSLETGSLKLANGRVIEKTLYNRRTRQDEPALFVALTFERREVLDSSNIAPMNLIGVDRGENIPAVIALTDPEGCPLSRFKDSLGNPTHILRIGESYKEKQRTIQAKKEVESRRAGGYSRKYASKAKNLADDMVRNTARDLLYYAVTQDAMLIFENLSRGFGRQGKRTFMAERQYTRMEDWLTAKLAYEGLPSKTYLSKTLAQYTSKTCSNCGFTITSADYDRVLEKLKKTATGWMTTINGKELKVEGQITYYNRYKRQNVVKDLSVELDRLSEESVNNDISSWTKGRSGEALSLLKKRFSHRPVQEKFVCLNCGFETHADEQAALNIARSWLFLRSQEYKKYQTNKTTGNTDKRAFVETWQSFYRKKLKEVWKPAV

SEQ ID NO: 27605 - protein, 978 aa, synthetic construct
  REGION 1..978: note = engineered CasX variant
QEIKRINKIRRRLVKDSNTKKAGKTGPMKTLLVRVMTPDLRERLENLRKKPENIPQPISNTSRANLNKLLTDYTEMKKAILHVYWEEFQKDPVGLMSRVAQPASKKIDQNKLKPEMDEKGNLTTAGFACSQCGQPLFVYKLEQVSEKGKAYTNYFGRCNVAEHEKLILLAQLKPEKDSDEAVTYSLGKFGQRALDFYSIHVTKESTHPVKPLAQIAGNRYASGPVGKALSDACMGTIASFLSKYQDIIIEHQKVVKGNQKRLESLRELAGKENLEYPSVTLPPQPHTKEGVDAYNEVIARVRMWVNLNLWQKLKLSRDDAKPLLRLKGFPSFPLVERQANEVDWWDMVCNVKKLINEKKEDGKVFWQNLAGYKRQEALRPYLSSEEDRKKGKKFARYQLGDLLLHLEKKHGEDWGKVYDEAWERIDKKVEGLSKHIKLEEERRSEDAQSKAALTDWLRAKASFVIEGLKEADKDEFCRCELKLQKWYGDLRGKPFAIEAENSILDISGFSKQYNCAFIWQKDGVKKLNLYLIINYFKGGKLRFKKIKPEAFEANRFYTVINKKSGEIVPMEVNFNFDDPNLIILPLAFGKRQGREFIWNDLLSLETGSLKLANGRVIEKTLYNRRTRQDEPALFVALTFERREVLDSSNIAPMNLIGVDRGENIPAVIALTDPEGCPLSRFKDSLGNPTHILRIGESYKEKQRTIQAKKEVEQRRYGGYSRKYASKAKNLADDMVRNTARDLLYYAVTQDAMLIFENLSRGFGRQGKRTFMAERQYTRMEDWLTAKLAYEGLPSKTYLSKTLAQYTSKTCSNCGFTITSADYDRVLEKLKKTATGWMTTINGKELKVEGQITYYNRYKRQNVVKDLSVELDRLSEESVNNDISSWTKGRSGEALSLLKKRFSHRPVQEKFVCLNCGFETHADEQAALNIARSWLFLRSQEYKKYQTNKTTGNTDKRAFVETWQSFYRKKLKEVWKPAV

SEQ ID NO: 27606 - protein, 978 aa, synthetic construct
  REGION 1..978: note = engineered CasX variant
QEIKRINKIRRRLVKDSNTKKAGKTGPMKTLLVRVMTPDLRERLENLRKKPENIPQPISNTSRANLNKLLTDYTEMKKAILHVYWEEFQKDPVGLMSRVAQPASKKIDQNKLKPEMDEKGNLTTAGFACSQCGQPLFVYKLEQVSEKGKAYTNYFGRCNVAEHEKLILLAQLKPEKDSDEAVTYSLGKFGQRALDFYSIHVTKESTHPVKPLAQIAGNRYASGPVGKALSDACMGTIASFLSKYQDIIIEHQKVVKGNQKRLESLRELAGKENLEYPSVTLPPQPHTKEGVDAYNEVIARVRMWVNLNLWQKLKLSRDDAKPLLRLKGFPSFPLVERQANEVDWWDMVCNVKKLINEKKEDGKVFWQNLAGYKRQEALRPYLSSEEDRKKGKKFARYQLGDLLLHLEKKHGEDWGKVYDEAWERIDKKVEGLSKHIKLEEERRSEDAQSKAALTDWLRAKASFVIEGLKEADKDEFCRCELKLQKWYGDLRGKPFAIEAENSILDISGFSKQYNCAFIWQKDGVKKLNLYLIINYFKGGKLRFKKIKPEAFEANRFYTVINKKSGEIVPMEVNFNFDDPNLIILPLAFGKRQGREFIWNDLLSLETGSLKLANGRVIEKTLYNRRTRQDEPALFVALTFERREVLDSSNIAPMNLIGVDRGENIPAVIALTDPEGCPLSRFKDSLGNPTHILRIGESYKEKQRTIQAKKEVEQRRMGGYSRKYASKAKNLADDMVRNTARDLLYYAVTQDAMLIFENLSRGFGRQGKRTFMAERQYTRMEDWLTAKLAYEGLPSKTYLSKTLAQYTSKTCSNCGFTITSADYDRVLEKLKKTATGWMTTINGKELKVEGQITYYNRYKRQNVVKDLSVELDRLSEESVNNDISSWTKGRSGEALSLLKKRFSHRPVQEKFVCLNCGFETHADEQAALNIARSWLFLRSQEYKKYQTNKTTGNTDKRAFVETWQSFYRKKLKEVWKPAV

SEQ ID NO: 27607 - protein, 978 aa, synthetic construct
  REGION 1..978: note = engineered CasX variant
QEIKRINKIRRRLVKDSNTKKAGKTGPMKTLLVRVMTPDLRERLENLRKKPENIPQPISNTSRANLNKLLTDYTEMKKAILHVYWEEFQKDPVGLMSRVAQPASKKIDQNKLKPEMDEKGNLTTAGFACSQCGQPLFVYKLEQVSEKGKAYTNYFGRCNVAEHEKLILLAQLKPEKDSDEAVTYSLGKFGQRALDFYSIHVTKESTHPVKPLAQIAGNRYASGPVGKALSDACMGTIASFLSKYQDIIIEHQKVVKGNQKRLESLRELAGKENLEYPSVTLPPQPHTKEGVDAYNEVIARVRMWVNLNLWQKLKLSRDDAKPLLRLKGFPSFPLVERQANEVDWWDMVCNVKKLINEKKEDGKVFWQNLAGYKRQEALRPYLSSEEDRKKGKKFARYQLGDLLLHLEKKHGEDWGKVYDEAWERIDKKVEGLSKHIKLEEERRSEDAQSKAALTDWLRAKASFVIEGLKEADKDEFCRCELKLQKWYGDLRGKPFAIEAENSILDISGFSKQYNCAFIWQKDGVKKLNLYLIINYFKGGKLRFKKIKPEAFEANRFYTVINKKSGEIVPMEVNFNFDDPNLIILPLAFGKRQGREFIWNDLLSLETGSLKLANGRVIEKTLYNRRTRQDEPALFVALTFERREVLDSSNIAPMNLIGVDRGENIPAVIALTDPEGCPLSRFKDSLGNPTHILRIGESYKEKQRTIQAKKEVEQRRAGGYSRKYASKAKNLADDMVRNTARDLLYYAVTQDAMLIFENLSRGFGRQGKRTFMAERQYTRMEDWLTAKLAYEGLPSKTYLSKTLAQYTSKTCSNCGFTITSADYDRVLEKLKKTATGWMTTINGKELKVEGQITYYNRYKRQNVVKDLSVELDRLSEESVNNDISSWTKGRSGEALSLLKKRFSHRPVQEKFVCLNCGFETHADEQAALNIARSWLFLRSQEYKKYQTNKTTGNTDKRAFVETWQSFYRKKLKEVWKPAV

SEQ ID NO: 27608 - protein, 978 aa, synthetic construct
  REGION 1..978: note = engineered CasX variant
QEIKRINKIRRRLVKDSNTKKAGKTGPMKTLLVRVMTPDLRERLENLRKKPENIPQPISNTSRANLNKLLTDYTEMKKAILHVYWEEFQKDPVGLMSRVAQPASKKIDQNKLKPEMDEKGNLTTAGFACSQCGQPLFVYKLEQVSEKGKAYTNYFGRCNVAEHEKLILLAQLKPEKDSDEAVTYSLGKFGQRALDFYSIHVTKESTHPVKPLAQIAGNRYASGPVGKALSDACMGTIASFLSKYQDIIIEHQKVVKGNQKRLESLRELAGKENLEYPSVTLPPQPHTKEGVDAYNEVIARVRMWVNLNLWQKLKLSRDDAKPLLRLKGFPSFPLVERQANEVDWWDMVCNVKKLINEKKEDGKVFWQNLAGYKRQEALRPYLSSEEDRKKGKKFARYQLGDLLLHLEKKHGEDWGKVYDEAWERIDKKVEGLSKHIKLEEERRSEDAQSKAALTDWLRAKASFVIEGLKEADKDEFCRCELKLQKWYGDLRGKPFAIEAENSILDISGFSKQYNCAFIWQKDGVKKLNLYLIINYFKGGKLRFKKIKPEAFEANRFYTVINKKSGEIVPMEVNFNFDDPNLIILPLAFGKRQGREFIWNDLLSLETGSLKLANGRVIEKTLYNRRTRQDEPALFVALTFERREVLDSSNIAPMNLIGVDRGENIPAVIALTDPEGCPLSRFKDSLGNPTHILRIGESYKEKQRTIQAKKCVEQRRAGGYSRKYASKAKNLADDMVRNTARDLLYYAVTQDAMLIFENLSRGFGRQGKRTFMAERQYTRMEDWLTAKLAYEGLPSKTYLSKTLAQYTSKTCSNCGFTITSADYDRVLEKLKKTATGWMTTINGKELKVEGQITYYNRYKRQNVVKDLSVELDRLSEESVNNDISSWTKGRSGEALSLLKKRFSHRPVQEKFVCLNCGFETHADEQAALNIARSWLFLRSQEYKKYQTNKTTGNTDKRAFVETWQSFYRKKLKEVWKPAV

SEQ ID NO: 27609 - protein, 978 aa, synthetic construct
  REGION 1..978: note = engineered CasX variant
QEIKRINKIRRRLVKDSNTKKAGKTGPMKTLLVRVMTPDLRERLENLRKKPENIPQPISNTSRANLNKLLTDYTEMKKAILHVYWEEFQKDPVGLMSRVAQPASKKIDQNKLKPEMDEKGNLTTAGFACSQCGQPLFVYKLEQVSEKGKAYTNYFGRCNVAEHEKLILLAQLKPEKDSDEAVTYSLGKFGQRALDFYSIHVTKESTHPVKPLAQIAGNRYASGPVGKALSDACMGTIASFLSKYQDIIIEHQKVVKGNQKRLESLRELAGKENLEYPSVTLPPQPHTKEGVDAYNEVIARVRMWVNLNLWQKLKLSRDDAKPLLRLKGFPSFPLVERQANEVDWWDMVCNVKKLINEKKEDGKVFWQNLAGYKRQEALRPYLSSEEDRKKGKKFARYQLGDLLLHLEKKHGEDWGKVYDEAWERIDKKVEGLSKHIKLEEERRSEDAQSKAALTDWLRAKASFVIEGLKEADKDEFCRCELKLQKWYGDLRGKPFAIEAENSILDISGFSKQYNCAFIWQKDGVKKLNLYLIINYFKGGKLRFKKIKPEAFEANRFYTVINKKSGEIVPMEVNFNFDDPNLIILPLAFGKRQGREFIWNDLLSLETGSLKLANGRVIEKTLYNRRTRQDEPALFVALTFERREVLDSSNIAPMNLIGVDRGENIPAVIALTDPEGCPLSRFKDSLGNPTHILRIGESYKCKQRTIQAKKEVEQRRAGGYSRKYASKAKNLADDMVRNTARDLLYYAVTQDAMLIFENLSRGFGRQGKRTFMAERQYTRMEDWLTAKLAYEGLPSKTYLSKTLAQYTSKTCSNCGFTITSADYDRVLEKLKKTATGWMTTINGKELKVEGQITYYNRYKRQNVVKDLSVELDRLSEESVNNDISSWTKGRSGEALSLLKKRFSHRPVQEKFVCLNCGFETHADEQAALNIARSWLFLRSQEYKKYQTNKTTGNTDKRAFVETWQSFYRKKLKEVWKPAV

SEQ ID NO: 27610 - protein, 978 aa, synthetic construct
  REGION 1..978: note = engineered CasX variant
QEIKRINKIRRRLVKDSNTKKAGKTGPMKTLLVRVMTPDLRERLENLRKKPENIPQPISNTSRANLNKLLTDYTEMKKAILHVYWEEFQKDPVGLMSRVAQPASKKIDQNKLKPEMDEKGNLTTAGFACSQCGQPLFVYKLEQVSEKGKAYTNYFGRCNVAEHEKLILLAQLKPEKDSDEAVTYSLGKFGQRALDFYSIHVTKESTHPVKPLAQIAGNRYASGPVGKALSDACMGTIASFLSKYQDIIIEHQKVVKGNQKRLESLRELAGKENLEYPSVTLPPQPHTKEGVDAYNEVIARVRMWVNLNLWQKLKLSRDDAKPLLRLKGFPSFPLVERQANEVDWWDMVCNVKKLINEKKEDGKVFWQNLAGYKRQEALRPYLSSEEDRKKGKKFARYQLGDLLLHLEKKHGEDWGKVYDEAWERIDKKVEGLSKHIKLEEERRSEDAQSKAALTDWLRAKASFVIEGLKEADKDEFCRCELKLQKWYGDLRGKPFAIEAENSILDISGFSKQYNCAFIWQKDGVKKLNLYLIINYFKGGKLRFKKIKPEAFEANRFYTVINKKSGEIVPMEVNFNFDDPNLIILPLAFGKRQGREFIWNDLLSLETGSLKLANGRVIEKTLYNRRTRQDEPALFVALTFERREVLDSSNIAPMNLIGVDRGENIPAVIALTDPEGCPLSRFKDSLGNPTHILRIGEPYKEKQRTIQAKKEVEQRRAGGYSRKYASKAKNLADDMVRNTARDLLYYAVTQDAMLIFENLSRGFGRQGKRTFMAERQYTRMEDWLTAKLAYEGLPSKTYLSKTLAQYTSKTCSNCGFTITSADYDRVLEKLKKTATGWMTTINGKELKVEGQITYYNRYKRQNVVKDLSVELDRLSEESVNNDISSWTKGRSGEALSLLKKRFSHRPVQEKFVCLNCGFETHADEQAALNIARSWLFLRSQEYKKYQTNKTTGNTDKRAFVETWQSFYRKKLKEVWKPAV

SEQ ID NO: 27611 - protein, 978 aa, synthetic construct
  REGION 1..978: note = engineered CasX variant
QEIKRINKIRRRLVKDSNTKKAGKTGPMKTLLVRVMTPDLRERLENLRKKPENIPQPISNTSRANLNKLLTDYTEMKKAILHVYWEEFQKDPVGLMSRVAQPASKKIDQNKLKPEMDEKGNLTTAGFACSQCGQPLFVYKLEQVSEKGKAYTNYFGRCNVAEHEKLILLAQLKPEKDSDEAVTYSLGKFGQRALDFYSIHVTKESTHPVKPLAQIAGNRYASGPVGKALSDACMGTIASFLSKYQDIIIEHQKVVKGNQKRLESLRELAGKENLEYPSVTLPPQPHTKEGVDAYNEVIARVRMWVNLNLWQKLKLSRDDAKPLLRLKGFPSFPLVERQANEVDWWDMVCNVKKLINEKKEDGKVFWQNLAGYKRQEALRPYLSSEEDRKKGKKFARYQLGDLLLHLEKKHGEDWGKVYDEAWERIDKKVEGLSKHIKLEEERRSEDAQSKAALTDWLRAKASFVIEGLKEADKDEFCRCELKLQKWYGDLRGKPFAIEAENSILDISGFSKQYNCAFIWQKDGVKKLNLYLIINYFKGGKLRFKKIKPEAFEANRFYTVINKKSGEIVPMEVNFNFDDPNLIILPLAFGKRQGREFIWNDLLSLETGSLKLANGRVIEKTLYNRRTRQDEPALFVALTFERREVLDSSNIAPMNLIGVDRGENIPAVIALTDPEGCPLSRFKDSLGNPTHILRIDESYKHKQRTIQAKKEVEQRRAGGYSRKYASKAKNLADDMVRNTARDLLYYAVTQDAMLIFENLSRGFGRQGKRTFMAERQYTRMEDWLTAKLAYEGLPSKTYLSKTLAQYTSKTCSNCGFTITSADYDRVLEKLKKTATGWMTTINGKELKVEGQITYYNRYKRQNVVKDLSVELDRLSEESVNNDISSWTKGRSGEALSLLKKRFSHRPVQEKFVCLNCGFETHADEQAALNIARSWLFLRSQEYKKYQTNKTTGNTDKRAFVETWQSFYRKKLKEVWKPAV

SEQ ID NO: 27612 - protein, 978 aa, synthetic construct
  REGION 1..978: note = engineered CasX variant
QEIKRINKIRRRLVKDSNTKKAGKTGPMKTLLVRVMTPDLRERLENLRKKPENIPQPISNTSRANLNKLLTDYTEMKKAILHVYWEEFQKDPVGLMSRVAQPASKKIDQNKLKPEMDEKGNLTTAGFACSQCGQPLFVYKLEQVSEKGKAYTNYFGRCNVAEHEKLILLAQLKPEKDSDEAVTYSLGKFGQRALDFYSIHVTKESTHPVKPLAQIAGNRYASGPVGKALSDACMGTIASFLSKYQDIIIEHQKVVKGNQKRLESLRELAGKENLEYPSVTLPPQPHTKEGVDAYNEVIARVRMWVNLNLWQKLKLSRDDAKPLLRLKGFPSFPLVERQANEVDWWDMVCNVKKLINEKKEDGKVFWQNLAGYKRQEALRPYLSSEEDRKKGKKFARYQLGDLLLHLEKKHGEDWGKVYDEAWERIDKKVEGLSKHIKLEEERRSEDAQSKAALTDWLRAKASFVIEGLKEADKDEFCRCELKLQKWYGDLRGKPFAIEAENSILDISGFSKQYNCAFIWQKDGVKKLNLYLIINYFKGGKLRFKKIKPEAFEANRFYTVINKKSGEIVPMEVNFNFDDPNLIILPLAFGKRQGREFIWNDLLSLETGSLKLANGRVIEKTLYNRRTRQDEPALFVALTFERREVLDSSNIAPMNLIGVDRGENIPAVIALTDPEGCPLSRFKDSLGNPTHILRIDESYKEKTRTIQAKKEVEQRRAGGYSRKYASKAKNLADDMVRNTARDLLYYAVTQDAMLIFENLSRGFGRQGKRTFMAERQYTRMEDWLTAKLAYEGLPSKTYLSKTLAQYTSKTCSNCGFTITSADYDRVLEKLKKTATGWMTTINGKELKVEGQITYYNRYKRQNVVKDLSVELDRLSEESVNNDISSWTKGRSGEALSLLKKRFSHRPVQEKFVCLNCGFETHADEQAALNIARSWLFLRSQEYKKYQTNKTTGNTDKRAFVETWQSFYRKKLKEVWKPAV

SEQ ID NO: 27613 - protein, 978 aa, synthetic construct
  REGION 1..978: note = engineered CasX variant
QEIKRINKIRRRLVKDSNTKKAGKTGPMKTLLVRVMTPDLRERLENLRKKPENIPQPISNTSRANLNKLLTDYTEMKKAILHVYWEEFQKDPVGLMSRVAQPASKKIDQNKLKPEMDEKGNLTTAGFACSQCGQPLFVYKLEQVSEKGKAYTNYFGRCNVAEHEKLILLAQLKPEKDSDEAVTYSLGKFGQRALDFYSIHVTKESTHPVKPLAQIAGNRYASGPVGKALSDACMGTIASFLSKYQDIIIEHQKVVKGNQKRLESLRELAGKENLEYPSVTLPPQPHTKEGVDAYNEVIARVRMWVNLNLWQKLKLSRDDAKPLLRLKGFPSFPLVERQANEVDWWDMVCNVKKLINEKKEDGKVFWQNLAGYKRQEALRPYLSSEEDRKKGKKFARYQLGDLLLHLEKKHGEDWGKVYDEAWERIDKKVEGLSKHIKLEEERRSEDAQSKAALTDWLRAKASFVIEGLKEADKDEFCRCELKLQKWYGDLRGKPFAIEAENSILDISGFSKQYNCAFIWQKDGVKKLNLYLIINYFKGGKLRFKKIKPEAFEANRFYTVINKKSGEIVPMEVNFNFDDPNLIILPLAFGKRQGREFIWNDLLSLETGSLKLANGRVIEKTLYNRRTRQDEPALFVALTFERREVLDSSNIAPMNLIGVDRGENIPAVIALTDPEGCPLSRFKDSLGNPTHILRIDESYKEKQRTIQAKKEVEQRRMGGYSRKYASKAKNLADDMVRNTARDLLYYAVTQDAMLIFENLSRGFGRQGKRTFMAERQYTRMEDWLTAKLAYEGLPSKTYLSKTLAQYTSKTCSNCGFTITSADYDRVLEKLKKTATGWMTTINGKELKVEGQITYYNRYKRQNVVKDLSVELDRLSEESVNNDISSWTKGRSGEALSLLKKRFSHRPVQEKFVCLNCGFETHADEQAALNIARSWLFLRSQEYKKYQTNKTTGNTDKRAFVETWQSFYRKKLKEVWKPAV

SEQ ID NO: 27614 - protein, 978 aa, synthetic construct
  REGION 1..978: note = engineered CasX variant
QEIKRINKIRRRLVKDSNTKKAGKTGPMKTLLVRVMTPDLRERLENLRKKPENIPQPISNTSRANLNKLLTDYTEMKKAILHVYWEEFQKDPVGLMSRVAQPASKKIDQNKLKPEMDEKGNLTTAGFACSQCGQPLFVYKLEQVSEKGKAYTNYFGRCNVAEHEKLILLAQLKPEKDSDEAVTYSLGKFGQRALDFYSIHVTKESTHPVKPLAQIAGNRYASGPVGKALSDACMGTIASFLSKYQDIIIEHQKVVKGNQKRLESLRELAGKENLEYPSVTLPPQPHTKEGVDAYNEVIARVRMWVNLNLWQKLKLSRDDAKPLLRLKGFPSFPLVERQANEVDWWDMVCNVKKLINEKKEDGKVFWQNLAGYKRQEALRPYLSSEEDRKKGKKFARYQLGDLLLHLEKKHGEDWGKVYDEAWERIDKKVEGLSKHIKLEEERRSEDAQSKAALTDWLRAKASFVIEGLKEADKDEFCRCELKLQKWYGDLRGKPFAIEAENSILDISGFSKQYNCAFIWQKDGVKKLNLYLIINYFKGGKLRFKKIKPEAFEANRFYTVINKKSGEIVPMEVNFNFDDPNLIILPLAFGKRQGREFIWNDLLSLETGSLKLANGRVIEKTLYNRRTRQDEPALFVALTFERREVLDSSNIAPMNLIGVDRGENIPAVIALTDPEGCPLSRFKDSLGNPTHILRIDESYKEKQRTIQAKKEVEQRRAGGYSRKYASKAKNLADDMVRNTARDLLYYAVTQDAMLIFENLSRGFGRQGKRTFMAERQYTRMEDWLTAKLAYEGLPSKTYLSKTLAQYTSKTCSNCGFTITSADYDRVLEKLKKTATGWMTTINGKELKVEGQITYYNRYKRQNVVKDLSVELDRLSEESVNNDISSWTKGRSGEALSLLKKRFSHRPVQEKFVCLNCGFETHADEQAALNIARSWLFLRSQEYKKYQTNKTTGNTDKRAFVETWQSFYRKKLKEVWKPAV

SEQ ID NO: 27615 - protein, 978 aa, synthetic construct
  REGION 1..978: note = engineered CasX variant
QEIKRINKIRRRLVKDSNTKKAGKTGPMKTLLVRVMTPDLRERLENLRKKPENIPQPISNTSRANLNKLLTDYTEMKKAILHVYWEEFQKDPVGLMSRVAQPASKKIDQNKLKPEMDEKGNLTTAGFACSQCGQPLFVYKLEQVSEKGKAYTNYFGRCNVAEHEKLILLAQLKPEKDSDEAVTYSLGKFGQRALDFYSIHVTKESTHPVKPLAQIAGNRYASGPVGKALSDACMGTIASFLSKYQDIIIEHQKVVKGNQKRLESLRELAGKENLEYPSVTLPPQPHTKEGVDAYNEVIARVRMWVNLNLWQKLKLSRDDAKPLLRLKGFPSFPLVERQANEVDWWDMVCNVKKLINEKKEDGKVFWQNLAGYKRQEALRPYLSSEEDRKKGKKFARYQLGDLLLHLEKKHGEDWGKVYDEAWERIDKKVEGLSKHIKLEEERRSEDAQSKAALTDWLRAKASFVIEGLKEADKDEFCRCELKLQKWYGDLRGKPFAIEAENSILDISGFSKQYNCAFIWQKDGVKKLNLYLIINYFKGGKLRFKKIKPEAFEANRFYTVINKKSGEIVPMEVNFNFDDPNLIILPLAFGKRQGREFIWNDLLSLETGSLKLANGRVIEKTLYNRRTRQDEPALFVALTFERREVLDSSNIAPMNLIGVDRGENIPAVIALTDPEGCPLSRFKDSLGNPTHILRIDESYKEKQRTIQAKKCVEQRRAGGYSRKYASKAKNLADDMVRNTARDLLYYAVTQDAMLIFENLSRGFGRQGKRTFMAERQYTRMEDWLTAKLAYEGLPSKTYLSKTLAQYTSKTCSNCGFTITSADYDRVLEKLKKTATGWMTTINGKELKVEGQITYYNRYKRQNVVKDLSVELDRLSEESVNNDISSWTKGRSGEALSLLKKRFSHRPVQEKFVCLNCGFETHADEQAALNIARSWLFLRSQEYKKYQTNKTTGNTDKRAFVETWQSFYRKKLKEVWKPAV

SEQ ID NO: 27616 - protein, 978 aa, synthetic construct
  REGION 1..978: note = engineered CasX variant
QEIKRINKIRRRLVKDSNTKKAGKTGPMKTLLVRVMTPDLRERLENLRKKPENIPQPISNTSRANLNKLLTDYTEMKKAILHVYWEEFQKDPVGLMSRVAQPASKKIDQNKLKPEMDEKGNLTTAGFACSQCGQPLFVYKLEQVSEKGKAYTNYFGRCNVAEHEKLILLAQLKPEKDSDEAVTYSLGKFGQRALDFYSIHVTKESTHPVKPLAQIAGNRYASGPVGKALSDACMGTIASFLSKYQDIIIEHQKVVKGNQKRLESLRELAGKENLEYPSVTLPPQPHTKEGVDAYNEVIARVRMWVNLNLWQKLKLSRDDAKPLLRLKGFPSFPLVERQANEVDWWDMVCNVKKLINEKKEDGKVFWQNLAGYKRQEALRPYLSSEEDRKKGKKFARYQLGDLLLHLEKKHGEDWGKVYDEAWERIDKKVEGLSKHIKLEEERRSEDAQSKAALTDWLRAKASFVIEGLKEADKDEFCRCELKLQKWYGDLRGKPFAIEAENSILDISGFSKQYNCAFIWQKDGVKKLNLYLIINYFKGGKLRFKKIKPEAFEANRFYTVINKKSGEIVPMEVNFNFDDPNLIILPLAFGKRQGREFIWNDLLSLETGSLKLANGRVIEKTLYNRRTRQDEPALFVALTFERREVLDSSNIAPMNLIGVDRGENIPAVIALTDPEGCPLSRFKDSLGNPTHILRIDESYKCKQRTIQAKKEVEQRRAGGYSRKYASKAKNLADDMVRNTARDLLYYAVTQDAMLIFENLSRGFGRQGKRTFMAERQYTRMEDWLTAKLAYEGLPSKTYLSKTLAQYTSKTCSNCGFTITSADYDRVLEKLKKTATGWMTTINGKELKVEGQITYYNRYKRQNVVKDLSVELDRLSEESVNNDISSWTKGRSGEALSLLKKRFSHRPVQEKFVCLNCGFETHADEQAALNIARSWLFLRSQEYKKYQTNKTTGNTDKRAFVETWQSFYRKKLKEVWKPAV

SEQ ID NO: 27617 - protein, 978 aa, synthetic construct
  REGION 1..978: note = engineered CasX variant
QEIKRINKIRRRLVKDSNTKKAGKTGPMKTLLVRVMTPDLRERLENLRKKPENIPQPISNTSRANLNKLLTDYTEMKKAILHVYWEEFQKDPVGLMSRVAQPASKKIDQNKLKPEMDEKGNLTTAGFACSQCGQPLFVYKLEQVSEKGKAYTNYFGRCNVAEHEKLILLAQLKPEKDSDEAVTYSLGKFGQRALDFYSIHVTKESTHPVKPLAQIAGNRYASGPVGKALSDACMGTIASFLSKYQDIIIEHQKVVKGNQKRLESLRELAGKENLEYPSVTLPPQPHTKEGVDAYNEVIARVRMWVNLNLWQKLKLSRDDAKPLLRLKGFPSFPLVERQANEVDWWDMVCNVKKLINEKKEDGKVFWQNLAGYKRQEALRPYLSSEEDRKKGKKFARYQLGDLLLHLEKKHGEDWGKVYDEAWERIDKKVEGLSKHIKLEEERRSEDAQSKAALTDWLRAKASFVIEGLKEADKDEFCRCELKLQKWYGDLRGKPFAIEAENSILDISGFSKQYNCAFIWQKDGVKKLNLYLIINYFKGGKLRFKKIKPEAFEANRFYTVINKKSGEIVPMEVNFNFDDPNLIILPLAFGKRQGREFIWNDLLSLETGSLKLANGRVIEKTLYNRRTRQDEPALFVALTFERREVLDSSNIAPMNLIGVDRGENIPAVIALTDPEGCPLSRFKDCLGNPTHILRIGESYKEKQRTIQAKKEVEQRRAGGYSRKYASKAKNLADDMVRNTARDLLYYAVTQDAMLIFENLSRGFGRQGKRTFMAERQYTRMEDWLTAKLAYEGLPSKTYLSKTLAQYTSKTCSNCGFTITSADYDRVLEKLKKTATGWMTTINGKELKVEGQITYYNRYKRQNVVKDLSVELDRLSEESVNNDISSWTKGRSGEALSLLKKRFSHRPVQEKFVCLNCGFETHADEQAALNIARSWLFLRSQEYKKYQTNKTTGNTDKRAFVETWQSFYRKKLKEVWKPAV

SEQ ID NO: 27618 - protein, 978 aa, synthetic construct
  REGION 1..978: note = engineered CasX variant
QEIKRINKIRRRLVKDSNTKKAGKTGPMKTLLVRVMTPDLRERLENLRKKPENIPQPISNTSRANLNKLLTDYTEMKKAILHVYWEEFQKDPVGLMSRVAQPASKKIDQNKLKPEMDEKGNLTTAGFACSQCGQPLFVYKLEQVSEKGKAYTNYFGRCNVAEHEKLILLAQLKPEKDSDEAVTYSLGKFGQRALDFYSIHVTKESTHPVKPLAQIAGNRYASGPVGKALSDACMGTIASFLSKYQDIIIEHQKVVKGNQKRLESLRELAGKENLEYPSVTLPPQPHTKEGVDAYNEVIARVRMWVNLNLWQKLKLSRDDAKPLLRLKGFPSFPLVERQANEVDWWDMVCNVKKLINEKKEDGKVFWQNLAGYKRQEALRPYLSSEEDRKKGKKFARYQLGDLLLHLEKKHGEDWGKVYDEAWERIDKKVEGLSKHIKLEEERRSEDAQSKAALTDWLRAKASFVIEGLKEADKDEFCRCELKLQKWYGDLRGKPFAIEAENSILDISGFSKQYNCAFIWQKDGVKKLNLYLIINYFKGGKLRFKKIKPEAFEANRFYTVINKKSGEIVPMEVNFNFDDPNLIILPLAFGKRQGREFIWNDLLSLETGSLKLANGRVIEKTLYNRRTRQDEPALFVALTFERREVLDSSNIAPMALIGVDRGENIPAVIALTDPEGCPLSRFKDSLGNPTHILRIGESYKEKQRTIQAKKEVEQRRAGGYSRKYASKAKNLADDMVRNTARDLLYYAVTQDAMLIFENLSRGFGRQGKRTFMAERQYTRMEDWLTAKLAYEGLPSKTYLSKTLAQYTSKTCSNCGFTITSADYDRVLEKLKKTATGWMTTINGKELKVEGQITYYNRYKRQNVVKDLSVELDRLSEESVNNDISSWTKGRSGEALSLLKKRFSHRPVQEKFVCLNCGFETHADEQAALNIARSWLFLRSQEYKKYQTNKTTGNTDKRAFVETWQSFYRKKLKEVWKPAV

SEQ ID NO: 27619 - protein, 978 aa, synthetic construct
  REGION 1..978: note = engineered CasX variant
QEIKRINKIRRRLVKDSNTKKAGKTGPMKTLLVRVMTPDLRERLENLRKKPENIPQPISNTSRANLNKLLTDYTEMKKAILHVYWEEFQKDPVGLMSRVAQPASKKIDQNKLKPEMDEKGNLTTAGFACSQCGQPLFVYKLEQVSEKGKAYTNYFGRCNVAEHEKLILLAQLKPEKDSDEAVTYSLGKFGQRALDFYSIHVTKESTHPVKPLAQIAGNRYASGPVGKALSDACMGTIASFLSKYQDIIIEHQKVVKGNQKRLESLRELAGKENLEYPSVTLPPQPHTKEGVDAYNEVIARVRMWVNLNLWQKLKLSRDDAKPLLRLKGFPSFPLVERQANEVDWWDMVCNVKKLINEKKEDGKVFWQNLAGYKRQEALRPYLSSEEDRKKGKKFARYQLGDLLLHLEKKHGEDWGKVYDEAWERIDKKVEGLSKHIKLEEERRSEDAQSKAALTDWLRAKASFVIEGLKEADKDEFCRCELKLQKWYGDLRGKPFAIEAENSILDISGFSKQYNCAFIWQKDGVKKLNLYLIINYFKGGKLRFKKIKPEAFEANRFYTVINKKSGEIVPMEVNFNFDDPNLIILPLAFGKRQGREFIWNDLLSLETGSLKLANGRVIEKTLYNRRTRQDEPALFVALTFERREVLDSSNIAPMALIGVDRGENIPAVIALTDPEGCPLSRFKDSLGNPTHILRIGESYKCKQRTIQAKKEVEQRRAGGYSRKYASKAKNLADDMVRNTARDLLYYAVTQDAMLIFENLSRGFGRQGKRTFMAERQYTRMEDWLTAKLAYEGLPSKTYLSKTLAQYTSKTCSNCGFTITSADYDRVLEKLKKTATGWMTTINGKELKVEGQITYYNRYKRQNVVKDLSVELDRLSEESVNNDISSWTKGRSGEALSLLKKRFSHRPVQEKFVCLNCGFETHADEQAALNIARSWLFLRSQEYKKYQTNKTTGNTDKRAFVETWQSFYRKKLKEVWKPAV

SEQ ID NO: 27620 - protein, 978 aa, synthetic construct
  REGION 1..978: note = engineered CasX variant
QEIKRINKIRRRLVKDSNTKKAGKTGPMKTLLVRVMTPDLRERLENLRKKPENIPQPISNTSRANLNKLLTDYTEMKKAILHVYWEEFQKDPVGLMSRVAQPASKKIDQNKLKPEMDEKGNLTTAGFACSQCGQPLFVYKLEQVSEKGKAYTNYFGRCNVAEHEKLILLAQLKPEKDSDEAVTYSLGKFGQRALDFYSIHVTKESTHPVKPLAQIAGNRYASGPVGKALSDACMGTIASFLSKYQDIIIEHQKVVKGNQKRLESLRELAGKENLEYPSVTLPPQPHTKEGVDAYNEVIARVRMWVNLNLWQKLKLSRDDAKPLLRLKGFPSFPLVERQANEVDWWDMVCNVKKLINEKKEDGKVFWQNLAGYKRQEALRPYLSSEEDRKKGKKFARYQLGDLLLHLEKKHGEDWGKVYDEAWERIDKKVEGLSKHIKLEEERRSEDAQSKAALTDWLRAKASFVIEGLKEADKDEFCRCELKLQKWYGDLRGKPFAIEAENSILDISGFSKQYNCAFIWQKDGVKKLNLYLIINYFKGGKLRFKKIKPEAFEANRFYTVINKKSGEIVPMEVNFNFDDPNLIILPLAFGKRQGREFIWNDLLSLETGSLKLANGRVIEKTLYNRRTRQDEPALFVALTFERREVLDSSNIAPMALIGVDRGENIPAVIALTDPEGCPLSRFKDSLGNPTHILRIGEPYKEKQRTIQAKKEVEQRRAGGYSRKYASKAKNLADDMVRNTARDLLYYAVTQDAMLIFENLSRGFGRQGKRTFMAERQYTRMEDWLTAKLAYEGLPSKTYLSKTLAQYTSKTCSNCGFTITSADYDRVLEKLKKTATGWMTTINGKELKVEGQITYYNRYKRQNVVKDLSVELDRLSEESVNNDISSWTKGRSGEALSLLKKRFSHRPVQEKFVCLNCGFETHADEQAALNIARSWLFLRSQEYKKYQTNKTTGNTDKRAFVETWQSFYRKKLKEVWKPAV

SEQ ID NO: 27621 - protein, 978 aa, synthetic construct
  REGION 1..978: note = engineered CasX variant
QEIKRINKIRRRLVKDSNTKKAGKTGPMKTLLVRVMTPDLRERLENLRKKPENIPQPISNTSRANLNKLLTDYTEMKKAILHVYWEEFQKDPVGLMSRVAQPASKKIDQNKLKPEMDEKGNLTTAGFACSQCGQPLFVYKLEQVSEKGKAYTNYFGRCNVAEHEKLILLAQLKPEKDSDEAVTYSLGKFGQRALDFYSIHVTKESTHPVKPLAQIAGNRYASGPVGKALSDACMGTIASFLSKYQDIIIEHQKVVKGNQKRLESLRELAGKENLEYPSVTLPPQPHTKEGVDAYNEVIARVRMWVNLNLWQKLKLSRDDAKPLLRLKGFPSFPLVERQANEVDWWDMVCNVKKLINEKKEDGKVFWQNLAGYKRQEALRPYLSSEEDRKKGKKFARYQLGDLLLHLEKKHGEDWGKVYDEAWERIDKKVEGLSKHIKLEEERRSEDAQSKAALTDWLRAKASFVIEGLKEADKDEFCRCELKLQKWYGDLRGKPFAIEAENSILDISGFSKQYNCAFIWQKDGVKKLNLYLIINYFKGGKLRFKKIKPEAFEANRFYTVINKKSGEIVPMEVNFNFDDPNLIILPLAFGKRQGREFIWNDLLSLETGSLKLANGRVIEKTLYNRRTRQDEPALFVALTFERREVLDSSNIAPINLIGVDRGENIPAVIALTDPEGCPLSRFKDSLGNPTHILRIGESYKEKQRTIQAKKEVEQRRAGGYSRKYASKAKNLADDMVRNTARDLLYYAVTQDAMLIFENLSRGFGRQGKRTFMAERQYTRMEDWLTAKLAYEGLPSKTYLSKTLAQYTSKTCSNCGFTITSADYDRVLEKLKKTATGWMTTINGKELKVEGQITYYNRYKRQNVVKDLSVELDRLSEESVNNDISSWTKGRSGEALSLLKKRFSHRPVQEKFVCLNCGFETHADEQAALNIARSWLFLRSQEYKKYQTNKTTGNTDKRAFVETWQSFYRKKLKEVWKPAV

SEQ ID NO: 27622 - protein, 978 aa, synthetic construct
  REGION 1..978: note = engineered CasX variant
QEIKRINKIRRRLVKDSNTKKAGKTGPMKTLLVRVMTPDLRERLENLRKKPENIPQPISNTSRANLNKLLTDYTEMKKAILHVYWEEFQKDPVGLMSRVAQPASKKIDQNKLKPEMDEKGNLTTAGFACSQCGQPLFVYKLEQVSEKGKAYTNYFGRCNVAEHEKLILLAQLKPEKDSDEAVTYSLGKFGQRALDFYSIHVTKESTHPVKPLAQIAGNRYASGPVGKALSDACMGTIASFLSKYQDIIIEHQKVVKGNQKRLESLRELAGKENLEYPSVTLPPQPHTKEGVDAYNEVIARVRMWVNLNLWQKLKLSRDDAKPLLRLKGFPSFPLVERQANEVDWWDMVCNVKKLINEKKEDGKVFWQNLAGYKRQEALRPYLSSEEDRKKGKKFARYQLGDLLLHLEKKHGEDWGKVYDEAWERIDKKVEGLSKHIKLEEERRSEDAQSKAALTDWLRAKASFVIEGLKEADKDEFCRCELKLQKWYGDLRGKPFAIEAENSILDISGFSKQYNCAFIWQKDGVKKLNLYLIINYFKGGKLRFKKIKPEAFEANRFYTVINKKSGEIVPMEVNFNFDDPNLIILPLAFGKRQGREFIWNDLLSLETGSLKLANGRVIEKTLYNRRTRQDEPALFVALTFERREVLDSSNHKPMNLIGVDRGENIPAVIALTDPEGCPLSRFKDSLGNPTHILRIHESYKEKQRTIQAKKEVEQRRAGGYSRKYASKAKNLADDMVRNTARDLLYYAVTQDAMLIFENLSRGFGRQGKRTFMAERQYTRMEDWLTAKLAYEGLPSKTYLSKTLAQYTSKTCSNCGFTITSADYDRVLEKLKKTATGWMTTINGKELKVEGQITYYNRYKRQNVVKDLSVELDRLSEESVNNDISSWTKGRSGEALSLLKKRFSHRPVQEKFVCLNCGFETHADEQAALNIARSWLFLRSQEYKKYQTNKTTGNTDKRAFVETWQSFYRKKLKEVWKPAV

SEQ ID NO: 27623 - protein, 978 aa, synthetic construct
  REGION 1..978: note = engineered CasX variant
QEIKRINKIRRRLVKDSNTKKAGKTGPMKTLLVRVMTPDLRERLENLRKKPENIPQPISNTSRANLNKLLTDYTEMKKAILHVYWEEFQKDPVGLMSRVAQPASKKIDQNKLKPEMDEKGNLTTAGFACSQCGQPLFVYKLEQVSEKGKAYTNYFGRCNVAEHEKLILLAQLKPEKDSDEAVTYSLGKFGQRALDFYSIHVTKESTHPVKPLAQIAGNRYASGPVGKALSDACMGTIASFLSKYQDIIIEHQKVVKGNQKRLESLRELAGKENLEYPSVTLPPQPHTKEGVDAYNEVIARVRMWVNLNLWQKLKLSRDDAKPLLRLKGFPSFPLVERQANEVDWWDMVCNVKKLINEKKEDGKVFWQNLAGYKRQEALRPYLSSEEDRKKGKKFARYQLGDLLLHLEKKHGEDWGKVYDEAWERIDKKVEGLSKHIKLEEERRSEDAQSKAALTDWLRAKASFVIEGLKEADKDEFCRCELKLQKWYGDLRGKPFAIEAENSILDISGFSKQYNCAFIWQKDGVKKLNLYLIINYFKGGKLRFKKIKPEAFEANRFYTVINKKSGEIVPMEVNFNFDDPNLIILPLAFGKRQGREFIWNDLLSLETGSLKLANGRVIEKTLYNRRTRQDEPALFVALTFERREVLDSSNHKPMNLIGVDRGENIPAVIALTDPEGCPLSRFKDSLGNPTHILRIGESYKEKQRTIQAKKEVEQRRAGGYSRKYASKAKNLADDMVRNTARDLLYYAVTQDAMLIFENLSRGFGRQGKRTFMAERQYTRMEDWLTAKLAYEGLPSKTYLSKTLAQYTSKTCSNCGFTITSADYDRVLEKLKKTATGWMTTINGKELKVEGQITYYNRYKRQNVVKDLSVELDRLSEESVNNDISSWTKGRSGEALSLLKKRFSHRPVQEKFVCLNCGFETHADEQAALNIARSWLFLRSQEYKKYQTNKTTGNTDKRAFVETWQSFYRKKLKEVWKPAV

SEQ ID NO: 27624 - protein, 978 aa, synthetic construct
  REGION 1..978: note = engineered CasX variant
QEIKRINKIRRRLVKDSNTKKAGKTGPMKTLLVRVMTPDLRERLENLRKKPENIPQPISNTSRANLNKLLTDYTEMKKAILHVYWEEFQKDPVGLMSRVAQPASKKIDQNKLKPEMDEKGNLTTAGFACSQCGQPLFVYKLEQVSEKGKAYTNYFGRCNVAEHEKLILLAQLKPEKDSDEAVTYSLGKFGQRALDFYSIHVTKESTHPVKPLAQIAGNRYASGPVGKALSDACMGTIASFLSKYQDIIIEHQKVVKGNQKRLESLRELAGKENLEYPSVTLPPQPHTKEGVDAYNEVIARVRMWVNLNLWQKLKLSRDDAKPLLRLKGFPSFPLVERQANEVDWWDMVCNVKKLINEKKEDGKVFWQNLAGYKRQEALRPYLSSEEDRKKGKKFARYQLGDLLLHLEKKHGEDWGKVYDEAWERIDKKVEGLSKHIKLEEERRSEDAQSKAALTDWLRAKASFVIEGLKEADKDEFCRCELKLQKWYGDLRGKPFAIEAENSILDISGFSKQYNCAFIWQKDGVKKLNLYLIINYFKGGKLRFKKIKPEAFEANRFYTVINKKSGEIVPMEVNFNFDDPNLIILPLAFGKRQGREFIWNDLLSLETGSLKLANGRVIEKTLYNRRTRQDEPALFVALTFERREVLDSSNHKPMNLIGVDRGENIPAVIALTDPEGCPLSDFKDSLGNPTHILRIHESYKEKQRTIQAKKEVEQRRAGGYSRKYASKAKNLADDMVRNTARDLLYYAVTQDAMLIFENLSRGFGRQGKRTFMAERQYTRMEDWLTAKLAYEGLPSKTYLSKTLAQYTSKTCSNCGFTITSADYDRVLEKLKKTATGWMTTINGKELKVEGQITYYNRYKRQNVVKDLSVELDRLSEESVNNDISSWTKGRSGEALSLLKKRFSHRPVQEKFVCLNCGFETHADEQAALNIARSWLFLRSQEYKKYQTNKTTGNTDKRAFVETWQSFYRKKLKEVWKPAV

SEQ ID NO: 27625 - protein, 978 aa, synthetic construct
  REGION 1..978: note = engineered CasX variant
QEIKRINKIRRRLVKDSNTKKAGKTGPMKTLLVRVMTPDLRERLENLRKKPENIPQPISNTSRANLNKLLTDYTEMKKAILHVYWEEFQKDPVGLMSRVAQPASKKIDQNKLKPEMDEKGNLTTAGFACSQCGQPLFVYKLEQVSEKGKAYTNYFGRCNVAEHEKLILLAQLKPEKDSDEAVTYSLGKFGQRALDFYSIHVTKESTHPVKPLAQIAGNRYASGPVGKALSDACMGTIASFLSKYQDIIIEHQKVVKGNQKRLESLRELAGKENLEYPSVTLPPQPHTKEGVDAYNEVIARVRMWVNLNLWQKLKLSRDDAKPLLRLKGFPSFPLVERQANEVDWWDMVCNVKKLINEKKEDGKVFWQNLAGYKRQEALRPYLSSEEDRKKGKKFARYQLGDLLLHLEKKHGEDWGKVYDEAWERIDKKVEGLSKHIKLEEERRSEDAQSKAALTDWLRAKASFVIEGLKEADKDEFCRCELKLQKWYGDLRGKPFAIEAENSILDISGFSKQYNCAFIWQKDGVKKLNLYLIINYFKGGKLRFKKIKPEAFEANRFYTVINKKSGEIVPMEVNFNFDDPNLIILPLAFGKRQGREFIWNDLLSLETGSLKLANGRVIEKTLYNRRTRQDEPALFVALTFERREVLDSSNHKPMNLIGVDRGENIPAVIALTDPEGCPLSDFKDSLGNPTHILRIGESYKEKQRTIQAKKEVEQRRAGGYSRKYASKAKNLADDMVRNTARDLLYYAVTQDAMLIFENLSRGFGRQGKRTFMAERQYTRMEDWLTAKLAYEGLPSKTYLSKTLAQYTSKTCSNCGFTITSADYDRVLEKLKKTATGWMTTINGKELKVEGQITYYNRYKRQNVVKDLSVELDRLSEESVNNDISSWTKGRSGEALSLLKKRFSHRPVQEKFVCLNCGFETHADEQAALNIARSWLFLRSQEYKKYQTNKTTGNTDKRAFVETWQSFYRKKLKEVWKPAV

SEQ ID NO: 27626 - protein, 978 aa, synthetic construct
  REGION 1..978: note = engineered CasX variant
QEIKRINKIRRRLVKDSNTKKAGKTGPMKTLLVRVMTPDLRERLENLRKKPENIPQPISNTSRANLNKLLTDYTEMKKAILHVYWEEFQKDPVGLMSRVAQPASKKIDQNKLKPEMDEKGNLTTAGFACSQCGQPLFVYKLEQVSEKGKAYTNYFGRCNVAEHEKLILLAQLKPEKDSDEAVTYSLGKFGQRALDFYSIHVTKESTHPVKPLAQIAGNRYASGPVGKALSDACMGTIASFLSKYQDIIIEHQKVVKGNQKRLESLRELAGKENLEYPSVTLPPQPHTKEGVDAYNEVIARVRMWVNLNLWQKLKLSRDDAKPLLRLKGFPSFPLVERQANEVDWWDMVCNVKKLINEKKEDGKVFWQNLAGYKRQEALRPYLSSEEDRKKGKKFARYQLGDLLLHLEKKHGEDWGKVYDEAWERIDKKVEGLSKHIKLEEERRSEDAQSKAALTDWLRAKASFVIEGLKEADKDEFCRCELKLQKWYGDLRGKPFAIEAENSILDISGFSKQYNCAFIWQKDGVKKLNLYLIINYFKGGKLRFKKIKPEAFEANRFYTVINKKSGEIVPMEVNFNFDDPNLIILPLAFGKRQGREFIWNDLLSLETGSLKLANGRVIEKTLYNRRTRQDEPALFVALTFERREVLDSSNFKPMNMIGVDRGENIPAVIALTDPEGCPLSSFKDSLGNPTHILRIGESYKEKQRTIQAKKEVEQRRAGGYSRKYASKAKNLADDMVRNTARDLLYYAVTQDAMLIFENLSRGFGRQGKRTFMAERQYTRMEDWLTAKLAYEGLPSKTYLSKTLAQYTSKTCSNCGFTITSADYDRVLEKLKKTATGWMTTINGKELKVEGQITYYNRYKRQNVVKDLSVELDRLSEESVNNDISSWTKGRSGEALSLLKKRFSHRPVQEKFVCLNCGFETHADEQAALNIARSWLFLRSQEYKKYQTNKTTGNTDKRAFVETWQSFYRKKLKEVWKPAV

SEQ ID NO: 27627 - protein, 978 aa, synthetic construct
  REGION 1..978: note = engineered CasX variant
QEIKRINKIRRRLVKDSNTKKAGKTGPMKTLLVRVMTPDLRERLENLRKKPENIPQPISNTSRANLNKLLTDYTEMKKAILHVYWEEFQKDPVGLMSRVAQPASKKIDQNKLKPEMDEKGNLTTAGFACSQCGQPLFVYKLEQVSEKGKAYTNYFGRCNVAEHEKLILLAQLKPEKDSDEAVTYSLGKFGQRALDFYSIHVTKESTHPVKPLAQIAGNRYASGPVGKALSDACMGTIASFLSKYQDIIIEHQKVVKGNQKRLESLRELAGKENLEYPSVTLPPQPHTKEGVDAYNEVIARVRMWVNLNLWQKLKLSRDDAKPLLRLKGFPSFPLVERQANEVDWWDMVCNVKKLINEKKEDGKVFWQNLAGYKRQEALRPYLSSEEDRKKGKKFARYQLGDLLLHLEKKHGEDWGKVYDEAWERIDKKVEGLSKHIKLEEERRSEDAQSKAALTDWLRAKASFVIEGLKEADKDEFCRCELKLQKWYGDLRGKPFAIEAENSILDISGFSKQYNCAFIWQKDGVKKLNLYLIINYFKGGKLRFKKIKPEAFEANRFYTVINKKSGEIVPMEVNFNFDDPNLIILPLAFGKRQGREFIWNDLLSLETGSLKLANGRVIEKTLYNRRTRQDEPALFVALTFERREVLDSSNFKPMNMIGVDRGENIPAVIALTDPEGCPLSRFKDSLGNPTHILRIGESYKEKQRTIQAKKEVEQRRAGGYSRKYASKAKNLADDMVRNTARDLLYYAVTQDAMLIFENLSRGFGRQGKRTFMAERQYTRMEDWLTAKLAYEGLPSKTYLSKTLAQYTSKTCSNCGFTITSADYDRVLEKLKKTATGWMTTINGKELKVEGQITYYNRYKRQNVVKDLSVELDRLSEESVNNDISSWTKGRSGEALSLLKKRFSHRPVQEKFVCLNCGFETHADEQAALNIARSWLFLRSQEYKKYQTNKTTGNTDKRAFVETWQSFYRKKLKEVWKPAV

SEQ ID NO: 27628 - protein, 978 aa, synthetic construct
  REGION 1..978: note = engineered CasX variant
QEIKRINKIRRRLVKDSNTKKAGKTGPMKTLLVRVMTPDLRERLENLRKKPENIPQPISNTSRANLNKLLTDYTEMKKAILHVYWEEFQKDPVGLMSRVAQPASKKIDQNKLKPEMDEKGNLTTAGFACSQCGQPLFVYKLEQVSEKGKAYTNYFGRCNVAEHEKLILLAQLKPEKDSDEAVTYSLGKFGQRALDFYSIHVTKESTHPVKPLAQIAGNRYASGPVGKALSDACMGTIASFLSKYQDIIIEHQKVVKGNQKRLESLRELAGKENLEYPSVTLPPQPHTKEGVDAYNEVIARVRMWVNLNLWQKLKLSRDDAKPLLRLKGFPSFPLVERQANEVDWWDMVCNVKKLINEKKEDGKVFWQNLAGYKRQEALRPYLSSEEDRKKGKKFARYQLGDLLLHLEKKHGEDWGKVYDEAWERIDKKVEGLSKHIKLEEERRSEDAQSKAALTDWLRAKASFVIEGLKEADKDEFCRCELKLQKWYGDLRGKPFAIEAENSILDISGFSKQYNCAFIWQKDGVKKLNLYLIINYFKGGKLRFKKIKPEAFEANRFYTVINKKSGEIVPMEVNFNFDDPNLIILPLAFGKRQGREFIWNDLLSLETGSLKLANGRVIEKTLYNRRTRQDEPALFVALTFERREVLDSSNFKPMNLIGVDRGENIPAVICLTDPEGCPLSRFKDSLGNPTHILRIGESYKEKQRTIQAKKEVEQRRAGGYSRKYASKAKNLADDMVRNTARDLLYYAVTQDAMLIFENLSRGFGRQGKRTFMAERQYTRMEDWLTAKLAYEGLPSKTYLSKTLAQYTSKTCSNCGFTITSADYDRVLEKLKKTATGWMTTINGKELKVEGQITYYNRYKRQNVVKDLSVELDRLSEESVNNDISSWTKGRSGEALSLLKKRFSHRPVQEKFVCLNCGFETHADEQAALNIARSWLFLRSQEYKKYQTNKTTGNTDKRAFVETWQSFYRKKLKEVWKPAV

SEQ ID NO: 27629 - protein, 978 aa, synthetic construct
  REGION 1..978: note = engineered CasX variant
QEIKRINKIRRRLVKDSNTKKAGKTGPMKTLLVRVMTPDLRERLENLRKKPENIPQPISNTSRANLNKLLTDYTEMKKAILHVYWEEFQKDPVGLMSRVAQPASKKIDQNKLKPEMDEKGNLTTAGFACSQCGQPLFVYKLEQVSEKGKAYTNYFGRCNVAEHEKLILLAQLKPEKDSDEAVTYSLGKFGQRALDFYSIHVTKESTHPVKPLAQIAGNRYASGPVGKALSDACMGTIASFLSKYQDIIIEHQKVVKGNQKRLESLRELAGKENLEYPSVTLPPQPHTKEGVDAYNEVIARVRMWVNLNLWQKLKLSRDDAKPLLRLKGFPSFPLVERQANEVDWWDMVCNVKKLINEKKEDGKVFWQNLAGYKRQEALRPYLSSEEDRKKGKKFARYQLGDLLLHLEKKHGEDWGKVYDEAWERIDKKVEGLSKHIKLEEERRSEDAQSKAALTDWLRAKASFVIEGLKEADKDEFCRCELKLQKWYGDLRGKPFAIEAENSILDISGFSKQYNCAFIWQKDGVKKLNLYLIINYFKGGKLRFKKIKPEAFEANRFYTVINKKSGEIVPMEVNFNFDDPNLIILPLAFGKRQGREFIWNDLLSLETGSLKLANGRVIEKTLYNRRTRQDEPALFVALTFERREVLDSSNFKPMNLIGVDRGENIPAVIALTDPQGCPLSRFKDSLGNPTHILRIGESYKEKQRTIQAKKEVEQRRAGGYSRKYASKAKNLADDMVRNTARDLLYYAVTQDAMLIFENLSRGFGRQGKRTFMAERQYTRMEDWLTAKLAYEGLPSKTYLSKTLAQYTSKTCSNCGFTITSADYDRVLEKLKKTATGWMTTINGKELKVEGQITYYNRYKRQNVVKDLSVELDRLSEESVNNDISSWTKGRSGEALSLLKKRFSHRPVQEKFVCLNCGFETHADEQAALNIARSWLFLRSQEYKKYQTNKTTGNTDKRAFVETWQSFYRKKLKEVWKPAV

SEQ ID NO: 27630 - protein, 978 aa, synthetic construct
  REGION 1..978: note = engineered CasX variant
QEIKRINKIRRRLVKDSNTKKAGKTGPMKTLLVRVMTPDLRERLENLRKKPENIPQPISNTSRANLNKLLTDYTEMKKAILHVYWEEFQKDPVGLMSRVAQPASKKIDQNKLKPEMDEKGNLTTAGFACSQCGQPLFVYKLEQVSEKGKAYTNYFGRCNVAEHEKLILLAQLKPEKDSDEAVTYSLGKFGQRALDFYSIHVTKESTHPVKPLAQIAGNRYASGPVGKALSDACMGTIASFLSKYQDIIIEHQKVVKGNQKRLESLRELAGKENLEYPSVTLPPQPHTKEGVDAYNEVIARVRMWVNLNLWQKLKLSRDDAKPLLRLKGFPSFPLVERQANEVDWWDMVCNVKKLINEKKEDGKVFWQNLAGYKRQEALRPYLSSEEDRKKGKKFARYQLGDLLLHLEKKHGEDWGKVYDEAWERIDKKVEGLSKHIKLEEERRSEDAQSKAALTDWLRAKASFVIEGLKEADKDEFCRCELKLQKWYGDLRGKPFAIEAENSILDISGFSKQYNCAFIWQKDGVKKLNLYLIINYFKGGKLRFKKIKPEAFEANRFYTVINKKSGEIVPMEVNFNFDDPNLIILPLAFGKRQGREFIWNDLLSLETGSLKLANGRVIEKTLYNRRTRQDEPALFVALTFERREVLDSSNFKPMNLIGVDRGENIPAVIALTDPEGKPLSRFKDSLGNPTHILRIGESYKEKQRTIQAKKEVEQRRAGGYSRKYASKAKNLADDMVRNTARDLLYYAVTQDAMLIFENLSRGFGRQGKRTFMAERQYTRMEDWLTAKLAYEGLPSKTYLSKTLAQYTSKTCSNCGFTITSADYDRVLEKLKKTATGWMTTINGKELKVEGQITYYNRYKRQNVVKDLSVELDRLSEESVNNDISSWTKGRSGEALSLLKKRFSHRPVQEKFVCLNCGFETHADEQAALNIARSWLFLRSQEYKKYQTNKTTGNTDKRAFVETWQSFYRKKLKEVWKPAV

SEQ ID NO: 27631 - protein, 978 aa, synthetic construct
  REGION 1..978: note = engineered CasX variant
QEIKRINKIRRRLVKDSNTKKAGKTGPMKTLLVRVMTPDLRERLENLRKKPENIPQPISNTSRANLNKLLTDYTEMKKAILHVYWEEFQKDPVGLMSRVAQPASKKIDQNKLKPEMDEKGNLTTAGFACSQCGQPLFVYKLEQVSEKGKAYTNYFGRCNVAEHEKLILLAQLKPEKDSDEAVTYSLGKFGQRALDFYSIHVTKESTHPVKPLAQIAGNRYASGPVGKALSDACMGTIASFLSKYQDIIIEHQKVVKGNQKRLESLRELAGKENLEYPSVTLPPQPHTKEGVDAYNEVIARVRMWVNLNLWQKLKLSRDDAKPLLRLKGFPSFPLVERQANEVDWWDMVCNVKKLINEKKEDGKVFWQNLAGYKRQEALRPYLSSEEDRKKGKKFARYQLGDLLLHLEKKHGEDWGKVYDEAWERIDKKVEGLSKHIKLEEERRSEDAQSKAALTDWLRAKASFVIEGLKEADKDEFCRCELKLQKWYGDLRGKPFAIEAENSILDISGFSKQYNCAFIWQKDGVKKLNLYLIINYFKGGKLRFKKIKPEAFEANRFYTVINKKSGEIVPMEVNFNFDDPNLIILPLAFGKRQGREFIWNDLLSLETGSLKLANGRVIEKTLYNRRTRQDEPALFVALTFERREVLDSSNFKPMNLIGVDRGENIPAVIALTDPEGKPLCRFKDSLGNPTHILRIGESYKEKQRTIQAKKEVEQRRAGGYSRKYASKAKNLADDMVRNTARDLLYYAVTQDAMLIFENLSRGFGRQGKRTFMAERQYTRMEDWLTAKLAYEGLPSKTYLSKTLAQYTSKTCSNCGFTITSADYDRVLEKLKKTATGWMTTINGKELKVEGQITYYNRYKRQNVVKDLSVELDRLSEESVNNDISSWTKGRSGEALSLLKKRFSHRPVQEKFVCLNCGFETHADEQAALNIARSWLFLRSQEYKKYQTNKTTGNTDKRAFVETWQSFYRKKLKEVWKPAV

SEQ ID NO: 27632 - protein, 978 aa, synthetic construct
  REGION 1..978: note = engineered CasX variant
QEIKRINKIRRRLVKDSNTKKAGKTGPMKTLLVRVMTPDLRERLENLRKKPENIPQPISNTSRANLNKLLTDYTEMKKAILHVYWEEFQKDPVGLMSRVAQPASKKIDQNKLKPEMDEKGNLTTAGFACSQCGQPLFVYKLEQVSEKGKAYTNYFGRCNVAEHEKLILLAQLKPEKDSDEAVTYSLGKFGQRALDFYSIHVTKESTHPVKPLAQIAGNRYASGPVGKALSDACMGTIASFLSKYQDIIIEHQKVVKGNQKRLESLRELAGKENLEYPSVTLPPQPHTKEGVDAYNEVIARVRMWVNLNLWQKLKLSRDDAKPLLRLKGFPSFPLVERQANEVDWWDMVCNVKKLINEKKEDGKVFWQNLAGYKRQEALRPYLSSEEDRKKGKKFARYQLGDLLLHLEKKHGEDWGKVYDEAWERIDKKVEGLSKHIKLEEERRSEDAQSKAALTDWLRAKASFVIEGLKEADKDEFCRCELKLQKWYGDLRGKPFAIEAENSILDISGFSKQYNCAFIWQKDGVKKLNLYLIINYFKGGKLRFKKIKPEAFEANRFYTVINKKSGEIVPMEVNFNFDDPNLIILPLAFGKRQGREFIWNDLLSLETGSLKLANGRVIEKTLYNRRTRQDEPALFVALTFERREVLDSSNFKPMNLIGVDRGENIPAVIALTDPEGCPLSYFKDSLGNPTHILRIGESYKEKQRTIQAKKEVEQRRAGGYSRKYASKAKNLADDMVRNTARDLLYYAVTQDAMLIFENLSRGFGRQGKRTFMAERQYTRMEDWLTAKLAYEGLPSKTYLSKTLAQYTSKTCSNCGFTITSADYDRVLEKLKKTATGWMTTINGKELKVEGQITYYNRYKRQNVVKDLSVELDRLSEESVNNDISSWTKGRSGEALSLLKKRFSHRPVQEKFVCLNCGFETHADEQAALNIARSWLFLRSQEYKKYQTNKTTGNTDKRAFVETWQSFYRKKLKEVWKPAV

SEQ ID NO: 27633 - protein, 978 aa, synthetic construct
  REGION 1..978: note = engineered CasX variant
QEIKRINKIRRRLVKDSNTKKAGKTGPMKTLLVRVMTPDLRERLENLRKKPENIPQPISNTSRANLNKLLTDYTEMKKAILHVYWEEFQKDPVGLMSRVAQPASKKIDQNKLKPEMDEKGNLTTAGFACSQCGQPLFVYKLEQVSEKGKAYTNYFGRCNVAEHEKLILLAQLKPEKDSDEAVTYSLGKFGQRALDFYSIHVTKESTHPVKPLAQIAGNRYASGPVGKALSDACMGTIASFLSKYQDIIIEHQKVVKGNQKRLESLRELAGKENLEYPSVTLPPQPHTKEGVDAYNEVIARVRMWVNLNLWQKLKLSRDDAKPLLRLKGFPSFPLVERQANEVDWWDMVCNVKKLINEKKEDGKVFWQNLAGYKRQEALRPYLSSEEDRKKGKKFARYQLGDLLLHLEKKHGEDWGKVYDEAWERIDKKVEGLSKHIKLEEERRSEDAQSKAALTDWLRAKASFVIEGLKEADKDEFCRCELKLQKWYGDLRGKPFAIEAENSILDISGFSKQYNCAFIWQKDGVKKLNLYLIINYFKGGKLRFKKIKPEAFEANRFYTVINKKSGEIVPMEVNFNFDDPNLIILPLAFGKRQGREFIWNDLLSLETGSLKLANGRVIEKTLYNRRTRQDEPALFVALTFERREVLDSSNFKPMNLIGVDRGENIPAVIALTDPEGCPLSSFKDSLGNPTHILRIGESYKEKQRTIQAKKEVEQRRAGGYSRKYASKAKNLADDMVRNTARDLLYYAVTQDAMLIFENLSRGFGRQGKRTFMAERQYTRMEDWLTAKLAYEGLPSKTYLSKTLAQYTSKTCSNCGFTITSADYDRVLEKLKKTATGWMTTINGKELKVEGQITYYNRYKRQNVVKDLSVELDRLSEESVNNDISSWTKGRSGEALSLLKKRFSHRPVQEKFVCLNCGFETHADEQAALNIARSWLFLRSQEYKKYQTNKTTGNTDKRAFVETWQSFYRKKLKEVWKPAV

SEQ ID NO: 27634 - protein, 978 aa, synthetic construct
  REGION 1..978: note = engineered CasX variant
QEIKRINKIRRRLVKDSNTKKAGKTGPMKTLLVRVMTPDLRERLENLRKKPENIPQPISNTSRANLNKLLTDYTEMKKAILHVYWEEFQKDPVGLMSRVAQPASKKIDQNKLKPEMDEKGNLTTAGFACSQCGQPLFVYKLEQVSEKGKAYTNYFGRCNVAEHEKLILLAQLKPEKDSDEAVTYSLGKFGQRALDFYSIHVTKESTHPVKPLAQIAGNRYASGPVGKALSDACMGTIASFLSKYQDIIIEHQKVVKGNQKRLESLRELAGKENLEYPSVTLPPQPHTKEGVDAYNEVIARVRMWVNLNLWQKLKLSRDDAKPLLRLKGFPSFPLVERQANEVDWWDMVCNVKKLINEKKEDGKVFWQNLAGYKRQEALRPYLSSEEDRKKGKKFARYQLGDLLLHLEKKHGEDWGKVYDEAWERIDKKVEGLSKHIKLEEERRSEDAQSKAALTDWLRAKASFVIEGLKEADKDEFCRCELKLQKWYGDLRGKPFAIEAENSILDISGFSKQYNCAFIWQKDGVKKLNLYLIINYFKGGKLRFKKIKPEAFEANRFYTVINKKSGEIVPMEVNFNFDDPNLIILPLAFGKRQGREFIWNDLLSLETGSLKLANGRVIEKTLYNRRTRQDEPALFVALTFERREVLDSSNFKPMNLIGVDRGENIPAVIALTDPEGCPLSRFKDSMGNPTHILRIGESYKEKQRTIQAKKEVEQRRAGGYSRKYASKAKNLADDMVRNTARDLLYYAVTQDAMLIFENLSRGFGRQGKRTFMAERQYTRMEDWLTAKLAYEGLPSKTYLSKTLAQYTSKTCSNCGFTITSADYDRVLEKLKKTATGWMTTINGKELKVEGQITYYNRYKRQNVVKDLSVELDRLSEESVNNDISSWTKGRSGEALSLLKKRFSHRPVQEKFVCLNCGFETHADEQAALNIARSWLFLRSQEYKKYQTNKTTGNTDKRAFVETWQSFYRKKLKEVWKPAV

SEQ ID NO: 27635 - protein, 978 aa, synthetic construct
  REGION 1..978: note = engineered CasX variant
QEIKRINKIRRRLVKDSNTKKAGKTGPMKTLLVRVMTPDLRERLENLRKKPENIPQPISNTSRANLNKLLTDYTEMKKAILHVYWEEFQKDPVGLMSRVAQPASKKIDQNKLKPEMDEKGNLTTAGFACSQCGQPLFVYKLEQVSEKGKAYTNYFGRCNVAEHEKLILLAQLKPEKDSDEAVTYSLGKFGQRALDFYSIHVTKESTHPVKPLAQIAGNRYASGPVGKALSDACMGTIASFLSKYQDIIIEHQKVVKGNQKRLESLRELAGKENLEYPSVTLPPQPHTKEGVDAYNEVIARVRMWVNLNLWQKLKLSRDDAKPLLRLKGFPSFPLVERQANEVDWWDMVCNVKKLINEKKEDGKVFWQNLAGYKRQEALRPYLSSEEDRKKGKKFARYQLGDLLLHLEKKHGEDWGKVYDEAWERIDKKVEGLSKHIKLEEERRSEDAQSKAALTDWLRAKASFVIEGLKEADKDEFCRCELKLQKWYGDLRGKPFAIEAENSILDISGFSKQYNCAFIWQKDGVKKLNLYLIINYFKGGKLRFKKIKPEAFEANRFYTVINKKSGEIVPMEVNFNFDDPNLIILPLAFGKRQGREFIWNDLLSLETGSLKLANGRVIEKTLYNRRTRQDEPALFVALTFERREVLDSSNFKPMNLIGVDRGENIPAVIALTDPEGCPLSRFKDSLGNTTHILRIGESYKEKQRTIQAKKEVEQRRAGGYSRKYASKAKNLADDMVRNTARDLLYYAVTQDAMLIFENLSRGFGRQGKRTFMAERQYTRMEDWLTAKLAYEGLPSKTYLSKTLAQYTSKTCSNCGFTITSADYDRVLEKLKKTATGWMTTINGKELKVEGQITYYNRYKRQNVVKDLSVELDRLSEESVNNDISSWTKGRSGEALSLLKKRFSHRPVQEKFVCLNCGFETHADEQAALNIARSWLFLRSQEYKKYQTNKTTGNTDKRAFVETWQSFYRKKLKEVWKPAV

SEQ ID NO: 27636 - protein, 978 aa, synthetic construct
  REGION 1..978: note = engineered CasX variant
QEIKRINKIRRRLVKDSNTKKAGKTGPMKTLLVRVMTPDLRERLENLRKKPENIPQPISNTSRANLNKLLTDYTEMKKAILHVYWEEFQKDPVGLMSRVAQPASKKIDQNKLKPEMDEKGNLTTAGFACSQCGQPLFVYKLEQVSEKGKAYTNYFGRCNVAEHEKLILLAQLKPEKDSDEAVTYSLGKFGQRALDFYSIHVTKESTHPVKPLAQIAGNRYASGPVGKALSDACMGTIASFLSKYQDIIIEHQKVVKGNQKRLESLRELAGKENLEYPSVTLPPQPHTKEGVDAYNEVIARVRMWVNLNLWQKLKLSRDDAKPLLRLKGFPSFPLVERQANEVDWWDMVCNVKKLINEKKEDGKVFWQNLAGYKRQEALRPYLSSEEDRKKGKKFARYQLGDLLLHLEKKHGEDWGKVYDEAWERIDKKVEGLSKHIKLEEERRSEDAQSKAALTDWLRAKASFVIEGLKEADKDEFCRCELKLQKWYGDLRGKPFAIEAENSILDISGFSKQYNCAFIWQKDGVKKLNLYLIINYFKGGKLRFKKIKPEAFEANRFYTVINKKSGEIVPMEVNFNFDDPNLIILPLAFGKRQGREFIWNDLLSLETGSLKLANGRVIEKTLYNRRTRQDEPALFVALTFERREVLDSSNFKPMNLIGVDRGENIPAVIALTDPEGCPLSRFKDSLGNPTHILRIGESYKEKQRTIQAKQEVEQRRAGGYSRKYASKAKNLADDMVRNTARDLLYYAVTQDAMLIFENLSRGFGRQGKRTFMAERQYTRMEDWLTAKLAYEGLPSKTYLSKTLAQYTSKTCSNCGFTITSADYDRVLEKLKKTATGWMTTINGKELKVEGQITYYNRYKRQNVVKDLSVELDRLSEESVNNDISSWTKGRSGEALSLLKKRFSHRPVQEKFVCLNCGFETHADEQAALNIARSWLFLRSQEYKKYQTNKTTGNTDKRAFVETWQSFYRKKLKEVWKPAV

SEQ ID NO: 27637 - protein, 978 aa, synthetic construct
  REGION 1..978: note = engineered CasX variant
QEIKRINKIRRRLVKDSNTKKAGKTGPMKTLLVRVMTPDLRERLENLRKKPENIPQPISNTSRANLNKLLTDYTEMKKAILHVYWEEFQKDPVGLMSRVAQPASKKIDQNKLKPEMDEKGNLTTAGFACSQCGQPLFVYKLEQVSEKGKAYTNYFGRCNVAEHEKLILLAQLKPEKDSDEAVTYSLGKFGQRALDFYSIHVTKESTHPVKPLAQIAGNRYASGPVGKALSDACMGTIASFLSKYQDIIIEHQKVVKGNQKRLESLRELAGKENLEYPSVTLPPQPHTKEGVDAYNEVIARVRMWVNLNLWQKLKLSRDDAKPLLRLKGFPSFPLVERQANEVDWWDMVCNVKKLINEKKEDGKVFWQNLAGYKRQEALRPYLSSEEDRKKGKKFARYQLGDLLLHLEKKHGEDWGKVYDEAWERIDKKVEGLSKHIKLEEERRSEDAQSKAALTDWLRAKASFVIEGLKEADKDEFCRCELKLQKWYGDLRGKPFAIEAENSILDISGFSKQYNCAFIWQKDGVKKLNLYLIINYFKGGKLRFKKIKPEAFEANRFYTVINKKSGEIVPMEVNFNFDDPNLIILPLAFGKRQGREFIWNDLLSLETGSLKLANGRVIEKTLYNRRTRQDEPALFVALTFERREVLDSSNFKPMNLIGVDRGENIPAVIALTDPEGCPLSRFKDSLGNPTHILRIGESYKEKQRTIQAKKEVEQRRAGGYSRKYASKAKNLADDMVRNTARDLLYYAVTQDAMLIFENLSRGFGRQGKRTFMAERQYTRMEDWLTAKLAYEGLPSKTYLSKTLAQYTSKTCSNCGFTITSADYDRVLEKLKKTATGWMTTINGKELKVEGQITYYNRYKRQNVVKDLSVELDRLSEESVNNDISSWTKGRSGEALSLLKKRFSHRPVQEKFVCLNCGFETHADEQAALNIARSWLFLRSQEYKKYQTNKTTGNTDKRAFVETWQSFYRKKLKEVWKPAV

SEQ ID NO: 27638 - protein, 978 aa, synthetic construct
  REGION 1..978: note = engineered CasX variant
QEIKRINKIRRRLVKDSNTKKAGKTGPMKTLLVRVMTPDLRERLENLRKKPENIPQPISNTSRANLNKLLTDYTEMKKAILHVYWEEFQKDPVGLMSRVAQPASKKIDQNKLKPEMDEKGNLTTAGFACSQCGQPLFVYKLEQVSEKGKAYTNYFGRCNVAEHEKLILLAQLKPEKDSDEAVTYSLGKFGQRALDFYSIHVTKESTHPVKPLAQIAGNRYASGPVGKALSDACMGTIASFLSKYQDIIIEHQKVVKGNQKRLESLRELAGKENLEYPSVTLPPQPHTKEGVDAYNEVIARVRMWVNLNLWQKLKLSRDDAKPLLRLKGFPSFPLVERQANEVDWWDMVCNVKKLINEKKEDGKVFWQNLAGYKRQEALRPYLSSEEDRKKGKKFARYQLGDLLLHLEKKHGEDWGKVYDEAWERIDKKVEGLSKHIKLEEERRSEDAQSKAALTDWLRAKASFVIEGLKEADKDEFCRCELKLQKWYGDLRGKPFAIEAENSILDISGFSKQYNCAFIWQKDGVKKLNLYLIINYFKGGKLRFKKIKPEAFEANRFYTVINKKSGEIVPMEVNFNFDDPNLIILPLAFGKRQGREFIWNDLLSLETGSLKLANGRVIEKTLYNRRTRQDEPALFVALTFERREVLDSSNFKPMNLIGVDRGENIPAVIALTDPEGCPLSRFKDSLGNNTHILRIGESYKEKQRTIQAKKEVEQRRAGGYSRKYASKAKNLADDMVRNTARDLLYYAVTQDAMLIFENLSRGFGRQGKRTFMAERQYTRMEDWLTAKLAYEGLPSKTYLSKTLAQYTSKTCSNCGFTITSADYDRVLEKLKKTATGWMTTINGKELKVEGQITYYNRYKRQNVVKDLSVELDRLSEESVNNDISSWTKGRSGEALSLLKKRFSHRPVQEKFVCLNCGFETHADEQAALNIARSWLFLRSQEYKKYQTNKTTGNTDKRAFVETWQSFYRKKLKEVWKPAV

SEQ ID NO: 27639 - protein, 978 aa, synthetic construct
  REGION 1..978: note = engineered CasX variant
QEIKRINKIRRRLVKDSNTKKAGKTGPMKTLLVRVMTPDLRERLENLRKKPENIPQPISNTSRANLNKLLTDYTEMKKAILHVYWEEFQKDPVGLMSRVAQPASKKIDQNKLKPEMDEKGNLTTAGFACSQCGQPLFVYKLEQVSEKGKAYTNYFGRCNVAEHEKLILLAQLKPEKDSDEAVTYSLGKFGQRALDFYSIHVTKESTHPVKPLAQIAGNRYASGPVGKALSDACMGTIASFLSKYQDIIIEHQKVVKGNQKRLESLRELAGKENLEYPSVTLPPQPHTKEGVDAYNEVIARVRMWVNLNLWQKLKLSRDDAKPLLRLKGFPSFPLVERQANEVDWWDMVCNVKKLINEKKEDGKVFWQNLAGYKRQEALRPYLSSEEDRKKGKKFARYQLGDLLLHLEKKHGEDWGKVYDEAWERIDKKVEGLSKHIKLEEERRSEDAQSKAALTDWLRAKASFVIEGLKEADKDEFCRCELKLQKWYGDLRGKPFAIEAENSILDISGFSKQYNCAFIWQKDGVKKLNLYLIINYFKGGKLRFKKIKPEAFEANRFYTVINKKSGEIVPMEVNFNFDDPNLIILPLAFGKRQGREFIWNDLLSLETGSLKLANGRVIEKTLYNRRTRQDEPALFVALTFERREVLDSSNFKPMNLIGVDRGENIPAVIALTDPEGCPLSRFKDSKGNTTHILRIGESYKEKQRTIQAKKEVEQRRAGGYSRKYASKAKNLADDMVRNTARDLLYYAVTQDAMLIFENLSRGFGRQGKRTFMAERQYTRMEDWLTAKLAYEGLPSKTYLSKTLAQYTSKTCSNCGFTITSADYDRVLEKLKKTATGWMTTINGKELKVEGQITYYNRYKRQNVVKDLSVELDRLSEESVNNDISSWTKGRSGEALSLLKKRFSHRPVQEKFVCLNCGFETHADEQAALNIARSWLFLRSQEYKKYQTNKTTGNTDKRAFVETWQSFYRKKLKEVWKPAV

SEQ ID NO: 27640 - protein, 978 aa, synthetic construct
  REGION 1..978: note = engineered CasX variant
QEIKRINKIRRRLVKDSNTKKAGKTGPMKTLLVRVMTPDLRERLENLRKKPENIPQPISNTSRANLNKLLTDYTEMKKAILHVYWEEFQKDPVGLMSRVAQPASKKIDQNKLKPEMDEKGNLTTAGFACSQCGQPLFVYKLEQVSEKGKAYTNYFGRCNVAEHEKLILLAQLKPEKDSDEAVTYSLGKFGQRALDFYSIHVTKESTHPVKPLAQIAGNRYASGPVGKALSDACMGTIASFLSKYQDIIIEHQKVVKGNQKRLESLRELAGKENLEYPSVTLPPQPHTKEGVDAYNEVIARVRMWVNLNLWQKLKLSRDDAKPLLRLKGFPSFPLVERQANEVDWWDMVCNVKKLINEKKEDGKVFWQNLAGYKRQEALRPYLSSEEDRKKGKKFARYQLGDLLLHLEKKHGEDWGKVYDEAWERIDKKVEGLSKHIKLEEERRSEDAQSKAALTDWLRAKASFVIEGLKEADKDEFCRCELKLQKWYGDLRGKPFAIEAENSILDISGFSKQYNCAFIWQKDGVKKLNLYLIINYFKGGKLRFKKIKPEAFEANRFYTVINKKSGEIVPMEVNFNFDDPNLIILPLAFGKRQGREFIWNDLLSLETGSLKLANGRVIEKTLYNRRTRQDEPALFVALTFERREVLDSSNFKPMNLIGVDRGENIPAVIALTDPEGCPLSRFKDSKGNPTHILRIGESYKEKQRTIQAKKEVEQRRAGGYSRKYASKAKNLADDMVRNTARDLLYYAVTQDAMLIFENLSRGFGRQGKRTFMAERQYTRMEDWLTAKLAYEGLPSKTYLSKTLAQYTSKTCSNCGFTITSADYDRVLEKLKKTATGWMTTINGKELKVEGQITYYNRYKRQNVVKDLSVELDRLSEESVNNDISSWTKGRSGEALSLLKKRFSHRPVQEKFVCLNCGFETHADEQAALNIARSWLFLRSQEYKKYQTNKTTGNTDKRAFVETWQSFYRKKLKEVWKPAV

SEQ ID NO: 27641 - protein, 978 aa, synthetic construct
  REGION 1..978: note = engineered CasX variant
QEIKRINKIRRRLVKDSNTKKAGKTGPMKTLLVRVMTPDLRERLENLRKKPENIPQPISNTSRANLNKLLTDYTEMKKAILHVYWEEFQKDPVGLMSRVAQPASKKIDQNKLKPEMDEKGNLTTAGFACSQCGQPLFVYKLEQVSEKGKAYTNYFGRCNVAEHEKLILLAQLKPEKDSDEAVTYSLGKFGQRALDFYSIHVTKESTHPVKPLAQIAGNRYASGPVGKALSDACMGTIASFLSKYQDIIIEHQKVVKGNQKRLESLRELAGKENLEYPSVTLPPQPHTKEGVDAYNEVIARVRMWVNLNLWQKLKLSRDDAKPLLRLKGFPSFPLVERQANEVDWWDMVCNVKKLINEKKEDGKVFWQNLAGYKRQEALRPYLSSEEDRKKGKKFARYQLGDLLLHLEKKHGEDWGKVYDEAWERIDKKVEGLSKHIKLEEERRSEDAQSKAALTDWLRAKASFVIEGLKEADKDEFCRCELKLQKWYGDLRGKPFAIEAENSILDISGFSKQYNCAFIWQKDGVKKLNLYLIINYFKGGKLRFKKIKPEAFEANRFYTVINKKSGEIVPMEVNFNFDDPNLIILPLAFGKRQGREFIWNDLLSLETGSLKLANGRVIEKTLYNRRTRQDEPALFVALTFERREVLDSSNFKPMNLIGVDRGENIPAVIALTDPEGCPLSNFKDSMGNPTHILRIGESYKEKQRTIQAKKEVEQRRAGGYSRKYASKAKNLADDMVRNTARDLLYYAVTQDAMLIFENLSRGFGRQGKRTFMAERQYTRMEDWLTAKLAYEGLPSKTYLSKTLAQYTSKTCSNCGFTITSADYDRVLEKLKKTATGWMTTINGKELKVEGQITYYNRYKRQNVVKDLSVELDRLSEESVNNDISSWTKGRSGEALSLLKKRFSHRPVQEKFVCLNCGFETHADEQAALNIARSWLFLRSQEYKKYQTNKTTGNTDKRAFVETWQSFYRKKLKEVWKPAV

SEQ ID NO: 27642 - protein, 978 aa, synthetic construct
  REGION 1..978: note = engineered CasX variant
QEIKRINKIRRRLVKDSNTKKAGKTGPMKTLLVRVMTPDLRERLENLRKKPENIPQPISNTSRANLNKLLTDYTEMKKAILHVYWEEFQKDPVGLMSRVAQPASKKIDQNKLKPEMDEKGNLTTAGFACSQCGQPLFVYKLEQVSEKGKAYTNYFGRCNVAEHEKLILLAQLKPEKDSDEAVTYSLGKFGQRALDFYSIHVTKESTHPVKPLAQIAGNRYASGPVGKALSDACMGTIASFLSKYQDIIIEHQKVVKGNQKRLESLRELAGKENLEYPSVTLPPQPHTKEGVDAYNEVIARVRMWVNLNLWQKLKLSRDDAKPLLRLKGFPSFPLVERQANEVDWWDMVCNVKKLINEKKEDGKVFWQNLAGYKRQEALRPYLSSEEDRKKGKKFARYQLGDLLLHLEKKHGEDWGKVYDEAWERIDKKVEGLSKHIKLEEERRSEDAQSKAALTDWLRAKASFVIEGLKEADKDEFCRCELKLQKWYGDLRGKPFAIEAENSILDISGFSKQYNCAFIWQKDGVKKLNLYLIINYFKGGKLRFKKIKPEAFEANRFYTVINKKSGEIVPMEVNFNFDDPNLIILPLAFGKRQGREFIWNDLLSLETGSLKLANGRVIEKTLYNRRTRQDEPALFVALTFERREVLDSSNFKPMNLIGVDRGENIPAVIALTDPEGCPLSNFKDSLGNPTHILRIGESYKEKQRTIQAKKEVEQRRAGGYSRKYASKAKNLADDMVRNTARDLLYYAVTQDAMLIFENLSRGFGRQGKRTFMAERQYTRMEDWLTAKLAYEGLPSKTYLSKTLAQYTSKTCSNCGFTITSADYDRVLEKLKKTATGWMTTINGKELKVEGQITYYNRYKRQNVVKDLSVELDRLSEESVNNDISSWTKGRSGEALSLLKKRFSHRPVQEKFVCLNCGFETHADEQAALNIARSWLFLRSQEYKKYQTNKTTGNTDKRAFVETWQSFYRKKLKEVWKPAV

SEQ ID NO: 27643 - protein, 978 aa, synthetic construct
  REGION 1..978: note = engineered CasX variant
QEIKRINKIRRRLVKDSNTKKAGKTGPMKTLLVRVMTPDLRERLENLRKKPENIPQPISNTSRANLNKLLTDYTEMKKAILHVYWEEFQKDPVGLMSRVAQPASKKIDQNKLKPEMDEKGNLTTAGFACSQCGQPLFVYKLEQVSEKGKAYTNYFGRCNVAEHEKLILLAQLKPEKDSDEAVTYSLGKFGQRALDFYSIHVTKESTHPVKPLAQIAGNRYASGPVGKALSDACMGTIASFLSKYQDIIIEHQKVVKGNQKRLESLRELAGKENLEYPSVTLPPQPHTKEGVDAYNEVIARVRMWVNLNLWQKLKLSRDDAKPLLRLKGFPSFPLVERQANEVDWWDMVCNVKKLINEKKEDGKVFWQNLAGYKRQEALRPYLSSEEDRKKGKKFARYQLGDLLLHLEKKHGEDWGKVYDEAWERIDKKVEGLSKHIKLEEERRSEDAQSKAALTDWLRAKASFVIEGLKEADKDEFCRCELKLQKWYGDLRGKPFAIEAENSILDISGFSKQYNCAFIWQKDGVKKLNLYLIINYFKGGKLRFKKIKPEAFEANRFYTVINKKSGEIVPMEVNFNFDDPNLIILPLAFGKRQGREFIWNDLLSLETGSLKLANGRVIEKTLYNRRTRQDEPALFVALTFERREVLDSSNFKPMNLIGVDRGENIPAVIALTDPEGCPLSMFKDSLGNPTHILRIGESYKEKQRTIQAKKEVEQRRAGGYSRKYASKAKNLADDMVRNTARDLLYYAVTQDAMLIFENLSRGFGRQGKRTFMAERQYTRMEDWLTAKLAYEGLPSKTYLSKTLAQYTSKTCSNCGFTITSADYDRVLEKLKKTATGWMTTINGKELKVEGQITYYNRYKRQNVVKDLSVELDRLSEESVNNDISSWTKGRSGEALSLLKKRFSHRPVQEKFVCLNCGFETHADEQAALNIARSWLFLRSQEYKKYQTNKTTGNTDKRAFVETWQSFYRKKLKEVWKPAV

SEQ ID NO: 27644 - protein, 978 aa, synthetic construct
  REGION 1..978: note = engineered CasX variant
QEIKRINKIRRRLVKDSNTKKAGKTGPMKTLLVRVMTPDLRERLENLRKKPENIPQPISNTSRANLNKLLTDYTEMKKAILHVYWEEFQKDPVGLMSRVAQPASKKIDQNKLKPEMDEKGNLTTAGFACSQCGQPLFVYKLEQVSEKGKAYTNYFGRCNVAEHEKLILLAQLKPEKDSDEAVTYSLGKFGQRALDFYSIHVTKESTHPVKPLAQIAGNRYASGPVGKALSDACMGTIASFLSKYQDIIIEHQKVVKGNQKRLESLRELAGKENLEYPSVTLPPQPHTKEGVDAYNEVIARVRMWVNLNLWQKLKLSRDDAKPLLRLKGFPSFPLVERQANEVDWWDMVCNVKKLINEKKEDGKVFWQNLAGYKRQEALRPYLSSEEDRKKGKKFARYQLGDLLLHLEKKHGEDWGKVYDEAWERIDKKVEGLSKHIKLEEERRSEDAQSKAALTDWLRAKASFVIEGLKEADKDEFCRCELKLQKWYGDLRGKPFAIEAENSILDISGFSKQYNCAFIWQKDGVKKLNLYLIINYFKGGKLRFKKIKPEAFEANRFYTVINKKSGEIVPMEVNFNFDDPNLIILPLAFGKRQGREFIWNDLLSLETGSLKLANGRVIEKTLYNRRTRQDEPALFVALTFERREVLDSSNFKPMNLIGVDRGENIPAVIALTDPAGCPLSRFKDSLGNPTHILRIGESYKEKQRTIQAKKEVEQRRAGGYSRKYASKAKNLADDMVRNTARDLLYYAVTQDAMLIFENLSRGFGRQGKRTFMAERQYTRMEDWLTAKLAYEGLPSKTYLSKTLAQYTSKTCSNCGFTITSADYDRVLEKLKKTATGWMTTINGKELKVEGQITYYNRYKRQNVVKDLSVELDRLSEESVNNDISSWTKGRSGEALSLLKKRFSHRPVQEKFVCLNCGFETHADEQAALNIARSWLFLRSQEYKKYQTNKTTGNTDKRAFVETWQSFYRKKLKEVWKPAV

SEQ ID NO: 27645 - protein, 978 aa, synthetic construct
  REGION 1..978: note = engineered CasX variant
QEIKRINKIRRRLVKDSNTKKAGKTGPMKTLLVRVMTPDLRERLENLRKKPENIPQPISNTSRANLNKLLTDYTEMKKAILHVYWEEFQKDPVGLMSRVAQPASKKIDQNKLKPEMDEKGNLTTAGFACSQCGQPLFVYKLEQVSEKGKAYTNYFGRCNVAEHEKLILLAQLKPEKDSDEAVTYSLGKFGQRALDFYSIHVTKESTHPVKPLAQIAGNRYASGPVGKALSDACMGTIASFLSKYQDIIIEHQKVVKGNQKRLESLRELAGKENLEYPSVTLPPQPHTKEGVDAYNEVIARVRMWVNLNLWQKLKLSRDDAKPLLRLKGFPSFPLVERQANEVDWWDMVCNVKKLINEKKEDGKVFWQNLAGYKRQEALRPYLSSEEDRKKGKKFARYQLGDLLLHLEKKHGEDWGKVYDEAWERIDKKVEGLSKHIKLEEERRSEDAQSKAALTDWLRAKASFVIEGLKEADKDEFCRCELKLQKWYGDLRGKPFAIEAENSILDISGFSKQYNCAFIWQKDGVKKLNLYLIINYFKGGKLRFKKIKPEAFEANRFYTVINKKSGEIVPMEVNFNFDDPNLIILPLAFGKRQGREFIWNDLLSLETGSLKLANGRVIEKTLYNRRTRQDEPALFVALTFERREVLDSSNFKPMALIGVDRGENIPAVIALTDPEGCPLSRFKDSLGNPTHILRIGESYKEKQRTIQAKKEVEQRRAGGYSRKYASKAKNLADDMVRNTARDLLYYAVTQDAMLIFENLSRGFGRQGKRTFMAERQYTRMEDWLTAKLAYEGLPSKTYLSKTLAQYTSKTCSNCGFTITSADYDRVLEKLKKTATGWMTTINGKELKVEGQITYYNRYKRQNVVKDLSVELDRLSEESVNNDISSWTKGRSGEALSLLKKRFSHRPVQEKFVCLNCGFETHADEQAALNIARSWLFLRSQEYKKYQTNKTTGNTDKRAFVETWQSFYRKKLKEVWKPAV

SEQ ID NO: 27646 - protein, 978 aa, synthetic construct
  REGION 1..978: note = engineered CasX variant
QEIKRINKIRRRLVKDSNTKKAGKTGPMKTLLVRVMTPDLRERLENLRKKPENIPQPISNTSRANLNKLLTDYTEMKKAILHVYWEEFQKDPVGLMSRVAQPASKKIDQNKLKPEMDEKGNLTTAGFACSQCGQPLFVYKLEQVSEKGKAYTNYFGRCNVAEHEKLILLAQLKPEKDSDEAVTYSLGKFGQRALDFYSIHVTKESTHPVKPLAQIAGNRYASGPVGKALSDACMGTIASFLSKYQDIIIEHQKVVKGNQKRLESLRELAGKENLEYPSVTLPPQPHTKEGVDAYNEVIARVRMWVNLNLWQKLKLSRDDAKPLLRLKGFPSFPLVERQANEVDWWDMVCNVKKLINEKKEDGKVFWQNLAGYKRQEALRPYLSSEEDRKKGKKFARYQLGDLLLHLEKKHGEDWGKVYDEAWERIDKKVEGLSKHIKLEEERRSEDAQSKAALTDWLRAKASFVIEGLKEADKDEFCRCELKLQKWYGDLRGKPFAIEAENSILDISGFSKQYNCAFIWQKDGVKKLNLYLIINYFKGGKLRFKKIKPEAFEANRFYTVINKKSGEIVPMEVNFNFDDPNLIILPLAFGKRQGREFIWNDLLSLETGSLKLANGRVIEKTLYNRRTRQDEPALFVALTFERREVLDSSNFKPCNLIGVDRGENIPAVIALTDPEGCPLSRFKDSLGNPTHILRIGESYKEKQRTIQAKKEVEQRRAGGYSRKYASKAKNLADDMVRNTARDLLYYAVTQDAMLIFENLSRGFGRQGKRTFMAERQYTRMEDWLTAKLAYEGLPSKTYLSKTLAQYTSKTCSNCGFTITSADYDRVLEKLKKTATGWMTTINGKELKVEGQITYYNRYKRQNVVKDLSVELDRLSEESVNNDISSWTKGRSGEALSLLKKRFSHRPVQEKFVCLNCGFETHADEQAALNIARSWLFLRSQEYKKYQTNKTTGNTDKRAFVETWQSFYRKKLKEVWKPAV

SEQ ID NO: 27647 - protein, 978 aa, synthetic construct
  REGION 1..978: note = engineered CasX variant
QEIKRINKIRRRLVKDSNTKKAGKTGPMKTLLVRVMTPDLRERLENLRKKPENIPQPISNTSRANLNKLLTDYTEMKKAILHVYWEEFQKDPVGLMSRVAQPASKKIDQNKLKPEMDEKGNLTTAGFACSQCGQPLFVYKLEQVSEKGKAYTNYFGRCNVAEHEKLILLAQLKPEKDSDEAVTYSLGKFGQRALDFYSIHVTKESTHPVKPLAQIAGNRYASGPVGKALSDACMGTIASFLSKYQDIIIEHQKVVKGNQKRLESLRELAGKENLEYPSVTLPPQPHTKEGVDAYNEVIARVRMWVNLNLWQKLKLSRDDAKPLLRLKGFPSFPLVERQANEVDWWDMVCNVKKLINEKKEDGKVFWQNLAGYKRQEALRPYLSSEEDRKKGKKFARYQLGDLLLHLEKKHGEDWGKVYDEAWERIDKKVEGLSKHIKLEEERRSEDAQSKAALTDWLRAKASFVIEGLKEADKDEFCRCELKLQKWYGDLRGKPFAIEAENSILDISGFSKQYNCAFIWQKDGVKKLNLYLIINYFKGGKLRFKKIKPEAFEANRFYTVINKKSGEIVPMEVNFNFDDPNLIILPLAFGKRQGREFIWNDLLSLETGSLKLANGRVIEKTLYNRRTRQDEPALFVALTFERREVLDSSNFKLMNLIGVDRGENIPAVIALTDPEGCPLSRFKDSLGNPTHILRIGESYKEKQRTIQAKKEVEQRRAGGYSRKYASKAKNLADDMVRNTARDLLYYAVTQDAMLIFENLSRGFGRQGKRTFMAERQYTRMEDWLTAKLAYEGLPSKTYLSKTLAQYTSKTCSNCGFTITSADYDRVLEKLKKTATGWMTTINGKELKVEGQITYYNRYKRQNVVKDLSVELDRLSEESVNNDISSWTKGRSGEALSLLKKRFSHRPVQEKFVCLNCGFETHADEQAALNIARSWLFLRSQEYKKYQTNKTTGNTDKRAFVETWQSFYRKKLKEVWKPAV

SEQ ID NO: 27648 - protein, 978 aa, synthetic construct
  REGION 1..978: note = engineered CasX variant
QEIKRINKIRRRLVKDSNTKKAGKTGPMKTLLVRVMTPDLRERLENLRKKPENIPQPISNTSRANLNKLLTDYTEMKKAILHVYWEEFQKDPVGLMSRVAQPASKKIDQNKLKPEMDEKGNLTTAGFACSQCGQPLFVYKLEQVSEKGKAYTNYFGRCNVAEHEKLILLAQLKPEKDSDEAVTYSLGKFGQRALDFYSIHVTKESTHPVKPLAQIAGNRYASGPVGKALSDACMGTIASFLSKYQDIIIEHQKVVKGNQKRLESLRELAGKENLEYPSVTLPPQPHTKEGVDAYNEVIARVRMWVNLNLWQKLKLSRDDAKPLLRLKGFPSFPLVERQANEVDWWDMVCNVKKLINEKKEDGKVFWQNLAGYKRQEALRPYLSSEEDRKKGKKFARYQLGDLLLHLEKKHGEDWGKVYDEAWERIDKKVEGLSKHIKLEEERRSEDAQSKAALTDWLRAKASFVIEGLKEADKDEFCRCELKLQKWYGDLRGKPFAIEAENSILDISGFSKQYNCAFIWQKDGVKKLNLYLIINYFKGGKLRFKKIKPEAFEANRFYTVINKKSGEIVPMEVNFNFDDPNLIILPLAFGKRQGREFIWNDLLSLETGSLKLANGRVIEKTLYNRRTRQDEPALFVALTFERREVLDSSNFKLMNLIGVDRGENIPAVIALTDPEGCPLSMFKDSLGNPTHILRIGESYKEKQRTIQAKKEVEQRRAGGYSRKYASKAKNLADDMVRNTARDLLYYAVTQDAMLIFENLSRGFGRQGKRTFMAERQYTRMEDWLTAKLAYEGLPSKTYLSKTLAQYTSKTCSNCGFTITSADYDRVLEKLKKTATGWMTTINGKELKVEGQITYYNRYKRQNVVKDLSVELDRLSEESVNNDISSWTKGRSGEALSLLKKRFSHRPVQEKFVCLNCGFETHADEQAALNIARSWLFLRSQEYKKYQTNKTTGNTDKRAFVETWQSFYRKKLKEVWKPAV

SEQ ID NO: 27649 - protein, 978 aa, synthetic construct
  REGION 1..978: note = engineered CasX variant
QEIKRINKIRRRLVKDSNTKKAGKTGPMKTLLVRVMTPDLRERLENLRKKPENIPQPISNTSRANLNKLLTDYTEMKKAILHVYWEEFQKDPVGLMSRVAQPASKKIDQNKLKPEMDEKGNLTTAGFACSQCGQPLFVYKLEQVSEKGKAYTNYFGRCNVAEHEKLILLAQLKPEKDSDEAVTYSLGKFGQRALDFYSIHVTKESTHPVKPLAQIAGNRYASGPVGKALSDACMGTIASFLSKYQDIIIEHQKVVKGNQKRLESLRELAGKENLEYPSVTLPPQPHTKEGVDAYNEVIARVRMWVNLNLWQKLKLSRDDAKPLLRLKGFPSFPLVERQANEVDWWDMVCNVKKLINEKKEDGKVFWQNLAGYKRQEALRPYLSSEEDRKKGKKFARYQLGDLLLHLEKKHGEDWGKVYDEAWERIDKKVEGLSKHIKLEEERRSEDAQSKAALTDWLRAKASFVIEGLKEADKDEFCRCELKLQKWYGDLRGKPFAIEAENSILDISGFSKQYNCAFIWQKDGVKKLNLYLIINYFKGGKLRFKKIKPEAFEANRFYTVINKKSGEIVPMEVNFNFDDPNLIILPLAFGKRQGREFIWNDLLSLETGSLKLANGRVIEKTLYNRRTRQDEPALFVALTFERREVLDSSNEKPMNLIGVDRGENIPAVIALTDPEGCPLSRFKDSLGNPTHILRIGESYKEKQRTIQANKEVEQRRAGGYSRKYASKAKNLADDMVRNTARDLLYYAVTQDAMLIFENLSRGFGRQGKRTFMAERQYTRMEDWLTAKLAYEGLPSKTYLSKTLAQYTSKTCSNCGFTITSADYDRVLEKLKKTATGWMTTINGKELKVEGQITYYNRYKRQNVVKDLSVELDRLSEESVNNDISSWTKGRSGEALSLLKKRFSHRPVQEKFVCLNCGFETHADEQAALNIARSWLFLRSQEYKKYQTNKTTGNTDKRAFVETWQSFYRKKLKEVWKPAV

SEQ ID NO: 27650 - protein, 978 aa, synthetic construct
  REGION 1..978: note = engineered CasX variant
QEIKRINKIRRRLVKDSNTKKAGKTGPMKTLLVRVMTPDLRERLENLRKKPENIPQPISNTSRANLNKLLTDYTEMKKAILHVYWEEFQKDPVGLMSRVAQPASKKIDQNKLKPEMDEKGNLTTAGFACSQCGQPLFVYKLEQVSEKGKAYTNYFGRCNVAEHEKLILLAQLKPEKDSDEAVTYSLGKFGQRALDFYSIHVTKESTHPVKPLAQIAGNRYASGPVGKALSDACMGTIASFLSKYQDIIIEHQKVVKGNQKRLESLRELAGKENLEYPSVTLPPQPHTKEGVDAYNEVIARVRMWVNLNLWQKLKLSRDDAKPLLRLKGFPSFPLVERQANEVDWWDMVCNVKKLINEKKEDGKVFWQNLAGYKRQEALRPYLSSEEDRKKGKKFARYQLGDLLLHLEKKHGEDWGKVYDEAWERIDKKVEGLSKHIKLEEERRSEDAQSKAALTDWLRAKASFVIEGLKEADKDEFCRCELKLQKWYGDLRGKPFAIEAENSILDISGFSKQYNCAFIWQKDGVKKLNLYLIINYFKGGKLRFKKIKPEAFEANRFYTVINKKSGEIVPMEVNFNFDDPNLIILPLAFGKRQGREFIWNDLLSLETGSLKLANGRVIEKTLYNRRTRQDEPALFVALTFERREVLDSSNEKPMNLIGVDRGENIPAVIALTDPEGCPLSRFKDSLGNPTHILRIGESYKEKQRTIQAKKEVEQRRAGGYSRKYASKAKNLADDMVRNTARDLLYYAVTQDAMLIFENLSRGFGRQGKRTFMAERQYTRMEDWLTAKLAYEGLPSKTYLSKTLAQYTSKTCSNCGFTITSADYDRVLEKLKKTATGWMTTINGKELKVEGQITYYNRYKRQNVVKDLSVELDRLSEESVNNDISSWTKGRSGEALSLLKKRFSHRPVQEKFVCLNCGFETHADEQAALNIARSWLFLRSQEYKKYQTNKTTGNTDKRAFVETWQSFYRKKLKEVWKPAV

SEQ ID NO: 27651 - protein, 978 aa, synthetic construct
  REGION 1..978: note = engineered CasX variant
QEIKRINKIRRRLVKDSNTKKAGKTGPMKTLLVRVMTPDLRERLENLRKKPENIPQPISNTSRANLNKLLTDYTEMKKAILHVYWEEFQKDPVGLMSRVAQPASKKIDQNKLKPEMDEKGNLTTAGFACSQCGQPLFVYKLEQVSEKGKAYTNYFGRCNVAEHEKLILLAQLKPEKDSDEAVTYSLGKFGQRALDFYSIHVTKESTHPVKPLAQIAGNRYASGPVGKALSDACMGTIASFLSKYQDIIIEHQKVVKGNQKRLESLRELAGKENLEYPSVTLPPQPHTKEGVDAYNEVIARVRMWVNLNLWQKLKLSRDDAKPLLRLKGFPSFPLVERQANEVDWWDMVCNVKKLINEKKEDGKVFWQNLAGYKRQEALRPYLSSEEDRKKGKKFARYQLGDLLLHLEKKHGEDWGKVYDEAWERIDKKVEGLSKHIKLEEERRSEDAQSKAALTDWLRAKASFVIEGLKEADKDEFCRCELKLQKWYGDLRGKPFAIEAENSILDISGFSKQYNCAFIWQKDGVKKLNLYLIINYFKGGKLRFKKIKPEAFEANRFYTVINKKSGEIVPMEVNFNFDDPNLIILPLAFGKRQGREFIWNDLLSLETGSLKLANGRVIEKTLYNRRTRQDEPALFVALTFERREVLDSSNEKPMNLIGVDRGENIPAVIALTDPEGCPLSRFKDGLGNPTHILRIGESYKEKQRTIQAKKEVQQRRAGGYSRKYASKAKNLADDMVRNTARDLLYYAVTQDAMLIFENLSRGFGRQGKRTFMAERQYTRMEDWLTAKLAYEGLPSKTYLSKTLAQYTSKTCSNCGFTITSADYDRVLEKLKKTATGWMTTINGKELKVEGQITYYNRYKRQNVVKDLSVELDRLSEESVNNDISSWTKGRSGEALSLLKKRFSHRPVQEKFVCLNCGFETHADEQAALNIARSWLFLRSQEYKKYQTNKTTGNTDKRAFVETWQSFYRKKLKEVWKPAV

SEQ ID NO: 27652 - protein, 978 aa, synthetic construct
  REGION 1..978: note = engineered CasX variant
QEIKRINKIRRRLVKDSNTKKAGKTGPMKTLLVRVMTPDLRERLENLRKKPENIPQPISNTSRANLNKLLTDYTEMKKAILHVYWEEFQKDPVGLMSRVAQPASKKIDQNKLKPEMDEKGNLTTAGFACSQCGQPLFVYKLEQVSEKGKAYTNYFGRCNVAEHEKLILLAQLKPEKDSDEAVTYSLGKFGQRALDFYSIHVTKESTHPVKPLAQIAGNRYASGPVGKALSDACMGTIASFLSKYQDIIIEHQKVVKGNQKRLESLRELAGKENLEYPSVTLPPQPHTKEGVDAYNEVIARVRMWVNLNLWQKLKLSRDDAKPLLRLKGFPSFPLVERQANEVDWWDMVCNVKKLINEKKEDGKVFWQNLAGYKRQEALRPYLSSEEDRKKGKKFARYQLGDLLLHLEKKHGEDWGKVYDEAWERIDKKVEGLSKHIKLEEERRSEDAQSKAALTDWLRAKASFVIEGLKEADKDEFCRCELKLQKWYGDLRGKPFAIEAENSILDISGFSKQYNCAFIWQKDGVKKLNLYLIINYFKGGKLRFKKIKPEAFEANRFYTVINKKSGEIVPMEVNFNFDDPNLIILPLAFGKRQGREFIWNDLLSLETGSLKLANGRVIEKTLYNRRTRQDEPALFVALTFERREVLDSSNEKPMNLIGVDRGENIPAVIALTDPEGCPLSRFKDGLGNPTHILRIGESYKEKQRTIQAKKEVEQRRAGGYSRKYASKAKNLADDMVRNTARDLLYYAVTQDAMLIFENLSRGFGRQGKRTFMAERQYTRMEDWLTAKLAYEGLPSKTYLSKTLAQYTSKTCSNCGFTITSADYDRVLEKLKKTATGWMTTINGKELKVEGQITYYNRYKRQNVVKDLSVELDRLSEESVNNDISSWTKGRSGEALSLLKKRFSHRPVQEKFVCLNCGFETHADEQAALNIARSWLFLRSQEYKKYQTNKTTGNTDKRAFVETWQSFYRKKLKEVWKPAV

SEQ ID NO: 27653 - protein, 978 aa, synthetic construct
  REGION 1..978: note = engineered CasX variant
QEIKRINKIRRRLVKDSNTKKAGKTGPMKTLLVRVMTPDLRERLENLRKKPENIPQPISNTSRANLNKLLTDYTEMKKAILHVYWEEFQKDPVGLMSRVAQPASKKIDQNKLKPEMDEKGNLTTAGFACSQCGQPLFVYKLEQVSEKGKAYTNYFGRCNVAEHEKLILLAQLKPEKDSDEAVTYSLGKFGQRALDFYSIHVTKESTHPVKPLAQIAGNRYASGPVGKALSDACMGTIASFLSKYQDIIIEHQKVVKGNQKRLESLRELAGKENLEYPSVTLPPQPHTKEGVDAYNEVIARVRMWVNLNLWQKLKLSRDDAKPLLRLKGFPSFPLVERQANEVDWWDMVCNVKKLINEKKEDGKVFWQNLAGYKRQEALRPYLSSEEDRKKGKKFARYQLGDLLLHLEKKHGEDWGKVYDEAWERIDKKVEGLSKHIKLEEERRSEDAQSKAALTDWLRAKASFVIEGLKEADKDEFCRCELKLQKWYGDLRGKPFAIEAENSILDISGFSKQYNCAFIWQKDGVKKLNLYLIINYFKGGKLRFKKIKPEAFEANRFYTVINKKSGEIVPMEVNFNFDDPNLIILPLAFGKRQGREFIWNDLLSLETGSLKLANGRVIEKTLYNRRTRQDEPALFVALTFERREVLDSSNDKPMNLIGVDRGENIPAVIALTDPEGCPLSRFKDSLGNPTHILRIGESYKEKQRTIQAKKEVEQRRAGGYSRKYASKAKNLADDMVRNTARDLLYYAVTQDAMLIFENLSRGFGRQGKRTFMAERQYTRMEDWLTAKLAYEGLPSKTYLSKTLAQYTSKTCSNCGFTITSADYDRVLEKLKKTATGWMTTINGKELKVEGQITYYNRYKRQNVVKDLSVELDRLSEESVNNDISSWTKGRSGEALSLLKKRFSHRPVQEKFVCLNCGFETHADEQAALNIARSWLFLRSQEYKKYQTNKTTGNTDKRAFVETWQSFYRKKLKEVWKPAV

SEQ ID NO: 27654 - protein, 978 aa, synthetic construct
  REGION 1..978: note = engineered CasX variant
QEIKRINKIRRRLVKDSNTKKAGKTGPMKTLLVRVMTPDLRERLENLRKKPENIPQPISNTSRANLNKLLTDYTEMKKAILHVYWEEFQKDPVGLMSRVAQPASKKIDQNKLKPEMDEKGNLTTAGFACSQCGQPLFVYKLEQVSEKGKAYTNYFGRCNVAEHEKLILLAQLKPEKDSDEAVTYSLGKFGQRALDFYSIHVTKESTHPVKPLAQIAGNRYASGPVGKALSDACMGTIASFLSKYQDIIIEHQKVVKGNQKRLESLRELAGKENLEYPSVTLPPQPHTKEGVDAYNEVIARVRMWVNLNLWQKLKLSRDDAKPLLRLKGFPSFPLVERQANEVDWWDMVCNVKKLINEKKEDGKVFWQNLAGYKRQEALRPYLSSEEDRKKGKKFARYQLGDLLLHLEKKHGEDWGKVYDEAWERIDKKVEGLSKHIKLEEERRSEDAQSKAALTDWLRAKASFVIEGLKEADKDEFCRCELKLQKWYGDLRGKPFAIEAENSILDISGFSKQYNCAFIWQKDGVKKLNLYLIINYFKGGKLRFKKIKPEAFEANRFYTVINKKSGEIVPMEVNFNFDDPNLIILPLAFGKRQGREFIWNDLLSLETGSLKLANGRVIEKTLYNRRTRQDEPALFVALTFERREVLDSSNDKPMNLIGVDRGENIPAVIALTDPEGCPLSRFKDSLGNPTHILRIGESYKEIQRTIQAKKEVEQRRAGGYSRKYASKAKNLADDMVRNTARDLLYYAVTQDAMLIFENLSRGFGRQGKRTFMAERQYTRMEDWLTAKLAYEGLPSKTYLSKTLAQYTSKTCSNCGFTITSADYDRVLEKLKKTATGWMTTINGKELKVEGQITYYNRYKRQNVVKDLSVELDRLSEESVNNDISSWTKGRSGEALSLLKKRFSHRPVQEKFVCLNCGFETHADEQAALNIARSWLFLRSQEYKKYQTNKTTGNTDKRAFVETWQSFYRKKLKEVWKPAV

SEQ ID NO: 27655 - protein, 978 aa, synthetic construct
  REGION 1..978: note = engineered CasX variant
QEIKRINKIRRRLVKDSNTKKAGKTGPMKTLLVRVMTPDLRERLENLRKKPENIPQPISNTSRANLNKLLTDYTEMKKAILHVYWEEFQKDPVGLMSRVAQPASKKIDQNKLKPEMDEKGNLTTAGFACSQCGQPLFVYKLEQVSEKGKAYTNYFGRCNVAEHEKLILLAQLKPEKDSDEAVTYSLGKFGQRALDFYSIHVTKESTHPVKPLAQIAGNRYASGPVGKALSDACMGTIASFLSKYQDIIIEHQKVVKGNQKRLESLRELAGKENLEYPSVTLPPQPHTKEGVDAYNEVIARVRMWVNLNLWQKLKLSRDDAKPLLRLKGFPSFPLVERQANEVDWWDMVCNVKKLINEKKEDGKVFWQNLAGYKRQEALRPYLSSEEDRKKGKKFARYQLGDLLLHLEKKHGEDWGKVYDEAWERIDKKVEGLSKHIKLEEERRSEDAQSKAALTDWLRAKASFVIEGLKEADKDEFCRCELKLQKWYGDLRGKPFAIEAENSILDISGFSKQYNCAFIWQKDGVKKLNLYLIINYFKGGKLRFKKIKPEAFEANRFYTVINKKSGEIVPMEVNFNFDDPNLIILPLAFGKRQGREFIWNDLLSLETGSLKLANGRVIEKTLYNRRTRQDEPALFVALTFERREVLDSSNCKPMNLIGVDRGENIPAVIALTDPEGCVLSRFKDSLGNPTHILRIGESYKEKQRTIQAKKEVEQRRAGGYSRKYASKAKNLADDMVRNTARDLLYYAVTQDAMLIFENLSRGFGRQGKRTFMAERQYTRMEDWLTAKLAYEGLPSKTYLSKTLAQYTSKTCSNCGFTITSADYDRVLEKLKKTATGWMTTINGKELKVEGQITYYNRYKRQNVVKDLSVELDRLSEESVNNDISSWTKGRSGEALSLLKKRFSHRPVQEKFVCLNCGFETHADEQAALNIARSWLFLRSQEYKKYQTNKTTGNTDKRAFVETWQSFYRKKLKEVWKPAV

SEQ ID NO: 27656 - protein, 978 aa, synthetic construct
  REGION 1..978: note = engineered CasX variant
QEIKRINKIRRRLVKDSNTKKAGKTGPMKTLLVRVMTPDLRERLENLRKKPENIPQPISNTSRANLNKLLTDYTEMKKAILHVYWEEFQKDPVGLMSRVAQPASKKIDQNKLKPEMDEKGNLTTAGFACSQCGQPLFVYKLEQVSEKGKAYTNYFGRCNVAEHEKLILLAQLKPEKDSDEAVTYSLGKFGQRALDFYSIHVTKESTHPVKPLAQIAGNRYASGPVGKALSDACMGTIASFLSKYQDIIIEHQKVVKGNQKRLESLRELAGKENLEYPSVTLPPQPHTKEGVDAYNEVIARVRMWVNLNLWQKLKLSRDDAKPLLRLKGFPSFPLVERQANEVDWWDMVCNVKKLINEKKEDGKVFWQNLAGYKRQEALRPYLSSEEDRKKGKKFARYQLGDLLLHLEKKHGEDWGKVYDEAWERIDKKVEGLSKHIKLEEERRSEDAQSKAALTDWLRAKASFVIEGLKEADKDEFCRCELKLQKWYGDLRGKPFAIEAENSILDISGFSKQYNCAFIWQKDGVKKLNLYLIINYFKGGKLRFKKIKPEAFEANRFYTVINKKSGEIVPMEVNFNFDDPNLIILPLAFGKRQGREFIWNDLLSLETGSLKLANGRVIEKTLYNRRTRQDEPALFVALTFERREVLDSSNCKPMNLIGVDRGENIPAVIALTDPEGCPLSWFKDSLGNPTHILRIGESYKEKQRTIQAKKEVEQRRAGGYSRKYASKAKNLADDMVRNTARDLLYYAVTQDAMLIFENLSRGFGRQGKRTFMAERQYTRMEDWLTAKLAYEGLPSKTYLSKTLAQYTSKTCSNCGFTITSADYDRVLEKLKKTATGWMTTINGKELKVEGQITYYNRYKRQNVVKDLSVELDRLSEESVNNDISSWTKGRSGEALSLLKKRFSHRPVQEKFVCLNCGFETHADEQAALNIARSWLFLRSQEYKKYQTNKTTGNTDKRAFVETWQSFYRKKLKEVWKPAV

SEQ ID NO: 27657 - protein, 978 aa, synthetic construct
  REGION 1..978: note = engineered CasX variant
QEIKRINKIRRRLVKDSNTKKAGKTGPMKTLLVRVMTPDLRERLENLRKKPENIPQPISNTSRANLNKLLTDYTEMKKAILHVYWEEFQKDPVGLMSRVAQPASKKIDQNKLKPEMDEKGNLTTAGFACSQCGQPLFVYKLEQVSEKGKAYTNYFGRCNVAEHEKLILLAQLKPEKDSDEAVTYSLGKFGQRALDFYSIHVTKESTHPVKPLAQIAGNRYASGPVGKALSDACMGTIASFLSKYQDIIIEHQKVVKGNQKRLESLRELAGKENLEYPSVTLPPQPHTKEGVDAYNEVIARVRMWVNLNLWQKLKLSRDDAKPLLRLKGFPSFPLVERQANEVDWWDMVCNVKKLINEKKEDGKVFWQNLAGYKRQEALRPYLSSEEDRKKGKKFARYQLGDLLLHLEKKHGEDWGKVYDEAWERIDKKVEGLSKHIKLEEERRSEDAQSKAALTDWLRAKASFVIEGLKEADKDEFCRCELKLQKWYGDLRGKPFAIEAENSILDISGFSKQYNCAFIWQKDGVKKLNLYLIINYFKGGKLRFKKIKPEAFEANRFYTVINKKSGEIVPMEVNFNFDDPNLIILPLAFGKRQGREFIWNDLLSLETGSLKLANGRVIEKTLYNRRTRQDEPALFVALTFERREVLDSSNCKPMNLIGVDRGENIPAVIALTDPEGCPLSWFKDSLGNPTHCLRIGESYKEKQRTIQAKKEVEQRRAGGYSRKYASKAKNLADDMVRNTARDLLYYAVTQDAMLIFENLSRGFGRQGKRTFMAERQYTRMEDWLTAKLAYEGLPSKTYLSKTLAQYTSKTCSNCGFTITSADYDRVLEKLKKTATGWMTTINGKELKVEGQITYYNRYKRQNVVKDLSVELDRLSEESVNNDISSWTKGRSGEALSLLKKRFSHRPVQEKFVCLNCGFETHADEQAALNIARSWLFLRSQEYKKYQTNKTTGNTDKRAFVETWQSFYRKKLKEVWKPAV

SEQ ID NO: 27658 - protein, 978 aa, synthetic construct
  REGION 1..978: note = engineered CasX variant
QEIKRINKIRRRLVKDSNTKKAGKTGPMKTLLVRVMTPDLRERLENLRKKPENIPQPISNTSRANLNKLLTDYTEMKKAILHVYWEEFQKDPVGLMSRVAQPASKKIDQNKLKPEMDEKGNLTTAGFACSQCGQPLFVYKLEQVSEKGKAYTNYFGRCNVAEHEKLILLAQLKPEKDSDEAVTYSLGKFGQRALDFYSIHVTKESTHPVKPLAQIAGNRYASGPVGKALSDACMGTIASFLSKYQDIIIEHQKVVKGNQKRLESLRELAGKENLEYPSVTLPPQPHTKEGVDAYNEVIARVRMWVNLNLWQKLKLSRDDAKPLLRLKGFPSFPLVERQANEVDWWDMVCNVKKLINEKKEDGKVFWQNLAGYKRQEALRPYLSSEEDRKKGKKFARYQLGDLLLHLEKKHGEDWGKVYDEAWERIDKKVEGLSKHIKLEEERRSEDAQSKAALTDWLRAKASFVIEGLKEADKDEFCRCELKLQKWYGDLRGKPFAIEAENSILDISGFSKQYNCAFIWQKDGVKKLNLYLIINYFKGGKLRFKKIKPEAFEANRFYTVINKKSGEIVPMEVNFNFDDPNLIILPLAFGKRQGREFIWNDLLSLETGSLKLANGRVIEKTLYNRRTRQDEPALFVALTFERREVLDSSNCKPMNLIGVDRGENIPAVIALTDPEGCPLSRFNDSLGNPTHILRIGESYKEKQRTIQAKKEVEQRRAGGYSRKYASKAKNLADDMVRNTARDLLYYAVTQDAMLIFENLSRGFGRQGKRTFMAERQYTRMEDWLTAKLAYEGLPSKTYLSKTLAQYTSKTCSNCGFTITSADYDRVLEKLKKTATGWMTTINGKELKVEGQITYYNRYKRQNVVKDLSVELDRLSEESVNNDISSWTKGRSGEALSLLKKRFSHRPVQEKFVCLNCGFETHADEQAALNIARSWLFLRSQEYKKYQTNKTTGNTDKRAFVETWQSFYRKKLKEVWKPAV

SEQ ID NO: 27659 - protein, 978 aa, synthetic construct
  REGION 1..978: note = engineered CasX variant
QEIKRINKIRRRLVKDSNTKKAGKTGPMKTLLVRVMTPDLRERLENLRKKPENIPQPISNTSRANLNKLLTDYTEMKKAILHVYWEEFQKDPVGLMSRVAQPASKKIDQNKLKPEMDEKGNLTTAGFACSQCGQPLFVYKLEQVSEKGKAYTNYFGRCNVAEHEKLILLAQLKPEKDSDEAVTYSLGKFGQRALDFYSIHVTKESTHPVKPLAQIAGNRYASGPVGKALSDACMGTIASFLSKYQDIIIEHQKVVKGNQKRLESLRELAGKENLEYPSVTLPPQPHTKEGVDAYNEVIARVRMWVNLNLWQKLKLSRDDAKPLLRLKGFPSFPLVERQANEVDWWDMVCNVKKLINEKKEDGKVFWQNLAGYKRQEALRPYLSSEEDRKKGKKFARYQLGDLLLHLEKKHGEDWGKVYDEAWERIDKKVEGLSKHIKLEEERRSEDAQSKAALTDWLRAKASFVIEGLKEADKDEFCRCELKLQKWYGDLRGKPFAIEAENSILDISGFSKQYNCAFIWQKDGVKKLNLYLIINYFKGGKLRFKKIKPEAFEANRFYTVINKKSGEIVPMEVNFNFDDPNLIILPLAFGKRQGREFIWNDLLSLETGSLKLANGRVIEKTLYNRRTRQDEPALFVALTFERREVLDSSNCKPMNLIGVDRGENIPAVIALTDPEGCPLSRFKDSLGNPTHILRIGESYKEKQRTIQAKKEVEQRRAGRYSRKYASKAKNLADDMVRNTARDLLYYAVTQDAMLIFENLSRGFGRQGKRTFMAERQYTRMEDWLTAKLAYEGLPSKTYLSKTLAQYTSKTCSNCGFTITSADYDRVLEKLKKTATGWMTTINGKELKVEGQITYYNRYKRQNVVKDLSVELDRLSEESVNNDISSWTKGRSGEALSLLKKRFSHRPVQEKFVCLNCGFETHADEQAALNIARSWLFLRSQEYKKYQTNKTTGNTDKRAFVETWQSFYRKKLKEVWKPAV

SEQ ID NO: 27660 - protein, 978 aa, synthetic construct
  REGION 1..978: note = engineered CasX variant
QEIKRINKIRRRLVKDSNTKKAGKTGPMKTLLVRVMTPDLRERLENLRKKPENIPQPISNTSRANLNKLLTDYTEMKKAILHVYWEEFQKDPVGLMSRVAQPASKKIDQNKLKPEMDEKGNLTTAGFACSQCGQPLFVYKLEQVSEKGKAYTNYFGRCNVAEHEKLILLAQLKPEKDSDEAVTYSLGKFGQRALDFYSIHVTKESTHPVKPLAQIAGNRYASGPVGKALSDACMGTIASFLSKYQDIIIEHQKVVKGNQKRLESLRELAGKENLEYPSVTLPPQPHTKEGVDAYNEVIARVRMWVNLNLWQKLKLSRDDAKPLLRLKGFPSFPLVERQANEVDWWDMVCNVKKLINEKKEDGKVFWQNLAGYKRQEALRPYLSSEEDRKKGKKFARYQLGDLLLHLEKKHGEDWGKVYDEAWERIDKKVEGLSKHIKLEEERRSEDAQSKAALTDWLRAKASFVIEGLKEADKDEFCRCELKLQKWYGDLRGKPFAIEAENSILDISGFSKQYNCAFIWQKDGVKKLNLYLIINYFKGGKLRFKKIKPEAFEANRFYTVINKKSGEIVPMEVNFNFDDPNLIILPLAFGKRQGREFIWNDLLSLETGSLKLANGRVIEKTLYNRRTRQDEPALFVALTFERREVLDSSNCKPMNLIGVDRGENIPAVIALTDPEGCPLSRFKDSLGNPTHILRIGESYKEKQRTIQAKKEVEQRRAGGYSRKYASKAKNLADDMVRNTARDLLYYAVTQDAMLIFENLSRGFGRQGKRTFMAERQYTRMEDWLTAKLAYEGLPSKTYLSKTLAQYTSKTCSNCGFTITSADYDRVLEKLKKTATGWMTTINGKELKVEGQITYYNRYKRQNVVKDLSVELDRLSEESVNNDISSWTKGRSGEALSLLKKRFSHRPVQEKFVCLNCGFETHADEQAALNIARSWLFLRSQEYKKYQTNKTTGNTDKRAFVETWQSFYRKKLKEVWKPAV

SEQ ID NO: 27661 - protein, 978 aa, synthetic construct
  REGION 1..978: note = engineered CasX variant
QEIKRINKIRRRLVKDSNTKKAGKTGPMKTLLVRVMTPDLRERLENLRKKPENIPQPISNTSRANLNKLLTDYTEMKKAILHVYWEEFQKDPVGLMSRVAQPASKKIDQNKLKPEMDEKGNLTTAGFACSQCGQPLFVYKLEQVSEKGKAYTNYFGRCNVAEHEKLILLAQLKPEKDSDEAVTYSLGKFGQRALDFYSIHVTKESTHPVKPLAQIAGNRYASGPVGKALSDACMGTIASFLSKYQDIIIEHQKVVKGNQKRLESLRELAGKENLEYPSVTLPPQPHTKEGVDAYNEVIARVRMWVNLNLWQKLKLSRDDAKPLLRLKGFPSFPLVERQANEVDWWDMVCNVKKLINEKKEDGKVFWQNLAGYKRQEALRPYLSSEEDRKKGKKFARYQLGDLLLHLEKKHGEDWGKVYDEAWERIDKKVEGLSKHIKLEEERRSEDAQSKAALTDWLRAKASFVIEGLKEADKDEFCRCELKLQKWYGDLRGKPFAIEAENSILDISGFSKQYNCAFIWQKDGVKKLNLYLIINYFKGGKLRFKKIKPEAFEANRFYTVINKKSGEIVPMEVNFNFDDPNLIILPLAFGKRQGREFIWNDLLSLETGSLKLANGRVIEKTLYNRRTRQDEPALFVALTFERREVLDSSNCKPMNLIGVDRGENIPAVIALTDPEGCPLSRFKDSLGNPTHILRIGEPYKEKQRTIQAKKEVEQRRAGRYSRKYASKAKNLADDMVRNTARDLLYYAVTQDAMLIFENLSRGFGRQGKRTFMAERQYTRMEDWLTAKLAYEGLPSKTYLSKTLAQYTSKTCSNCGFTITSADYDRVLEKLKKTATGWMTTINGKELKVEGQITYYNRYKRQNVVKDLSVELDRLSEESVNNDISSWTKGRSGEALSLLKKRFSHRPVQEKFVCLNCGFETHADEQAALNIARSWLFLRSQEYKKYQTNKTTGNTDKRAFVETWQSFYRKKLKEVWKPAV

SEQ ID NO: 27662 - protein, 978 aa, synthetic construct
  REGION 1..978: note = engineered CasX variant
QEIKRINKIRRRLVKDSNTKKAGKTGPMKTLLVRVMTPDLRERLENLRKKPENIPQPISNTSRANLNKLLTDYTEMKKAILHVYWEEFQKDPVGLMSRVAQPASKKIDQNKLKPEMDEKGNLTTAGFACSQCGQPLFVYKLEQVSEKGKAYTNYFGRCNVAEHEKLILLAQLKPEKDSDEAVTYSLGKFGQRALDFYSIHVTKESTHPVKPLAQIAGNRYASGPVGKALSDACMGTIASFLSKYQDIIIEHQKVVKGNQKRLESLRELAGKENLEYPSVTLPPQPHTKEGVDAYNEVIARVRMWVNLNLWQKLKLSRDDAKPLLRLKGFPSFPLVERQANEVDWWDMVCNVKKLINEKKEDGKVFWQNLAGYKRQEALRPYLSSEEDRKKGKKFARYQLGDLLLHLEKKHGEDWGKVYDEAWERIDKKVEGLSKHIKLEEERRSEDAQSKAALTDWLRAKASFVIEGLKEADKDEFCRCELKLQKWYGDLRGKPFAIEAENSILDISGFSKQYNCAFIWQKDGVKKLNLYLIINYFKGGKLRFKKIKPEAFEANRFYTVINKKSGEIVPMEVNFNFDDPNLIILPLAFGKRQGREFIWNDLLSLETGSLKLANGRVIEKTLYNRRTRQDEPALFVALTFERREVLDSSNCKPMNLIGVDRGENIPAVIALTDPEGCPLSRFKDSLGNPTHILRIGEPYKEKQRTIQAKKEVEQRRAGGYSRKYASKAKNLADDMVRNTARDLLYYAVTQDAMLIFENLSRGFGRQGKRTFMAERQYTRMEDWLTAKLAYEGLPSKTYLSKTLAQYTSKTCSNCGFTITSADYDRVLEKLKKTATGWMTTINGKELKVEGQITYYNRYKRQNVVKDLSVELDRLSEESVNNDISSWTKGRSGEALSLLKKRFSHRPVQEKFVCLNCGFETHADEQAALNIARSWLFLRSQEYKKYQTNKTTGNTDKRAFVETWQSFYRKKLKEVWKPAV

SEQ ID NO: 27663 - protein, 978 aa, synthetic construct
  REGION 1..978: note = engineered CasX variant
QEIKRINKIRRRLVKDSNTKKAGKTGPMKTLLVRVMTPDLRERLENLRKKPENIPQPISNTSRANLNKLLTDYTEMKKAILHVYWEEFQKDPVGLMSRVAQPASKKIDQNKLKPEMDEKGNLTTAGFACSQCGQPLFVYKLEQVSEKGKAYTNYFGRCNVAEHEKLILLAQLKPEKDSDEAVTYSLGKFGQRALDFYSIHVTKESTHPVKPLAQIAGNRYASGPVGKALSDACMGTIASFLSKYQDIIIEHQKVVKGNQKRLESLRELAGKENLEYPSVTLPPQPHTKEGVDAYNEVIARVRMWVNLNLWQKLKLSRDDAKPLLRLKGFPSFPLVERQANEVDWWDMVCNVKKLINEKKEDGKVFWQNLAGYKRQEALRPYLSSEEDRKKGKKFARYQLGDLLLHLEKKHGEDWGKVYDEAWERIDKKVEGLSKHIKLEEERRSEDAQSKAALTDWLRAKASFVIEGLKEADKDEFCRCELKLQKWYGDLRGKPFAIEAENSILDISGFSKQYNCAFIWQKDGVKKLNLYLIINYFKGGKLRFKKIKPEAFEANRFYTVINKKSGEIVPMEVNFNFDDPNLIILPLAFGKRQGREFIWNDLLSLETGSLKLANGRVIEKTLYNRRTRQDEPALFVALTFERREVLDSSNCKPMNLIGVDRGENIPAVIALTDPEGCPLSRFKDSLGNPTHCLRIGESYKEKQRTIQAKKEVEQRRAGGYSRKYASKAKNLADDMVRNTARDLLYYAVTQDAMLIFENLSRGFGRQGKRTFMAERQYTRMEDWLTAKLAYEGLPSKTYLSKTLAQYTSKTCSNCGFTITSADYDRVLEKLKKTATGWMTTINGKELKVEGQITYYNRYKRQNVVKDLSVELDRLSEESVNNDISSWTKGRSGEALSLLKKRFSHRPVQEKFVCLNCGFETHADEQAALNIARSWLFLRSQEYKKYQTNKTTGNTDKRAFVETWQSFYRKKLKEVWKPAV

SEQ ID NO: 27664 - protein, 978 aa, synthetic construct
  REGION 1..978: note = engineered CasX variant
QEIKRINKIRRRLVKDSNTKKAGKTGPMKTLLVRVMTPDLRERLENLRKKPENIPQPISNTSRANLNKLLTDYTEMKKAILHVYWEEFQKDPVGLMSRVAQPASKKIDQNKLKPEMDEKGNLTTAGFACSQCGQPLFVYKLEQVSEKGKAYTNYFGRCNVAEHEKLILLAQLKPEKDSDEAVTYSLGKFGQRALDFYSIHVTKESTHPVKPLAQIAGNRYASGPVGKALSDACMGTIASFLSKYQDIIIEHQKVVKGNQKRLESLRELAGKENLEYPSVTLPPQPHTKEGVDAYNEVIARVRMWVNLNLWQKLKLSRDDAKPLLRLKGFPSFPLVERQANEVDWWDMVCNVKKLINEKKEDGKVFWQNLAGYKRQEALRPYLSSEEDRKKGKKFARYQLGDLLLHLEKKHGEDWGKVYDEAWERIDKKVEGLSKHIKLEEERRSEDAQSKAALTDWLRAKASFVIEGLKEADKDEFCRCELKLQKWYGDLRGKPFAIEAENSILDISGFSKQYNCAFIWQKDGVKKLNLYLIINYFKGGKLRFKKIKPEAFEANRFYTVINKKSGEIVPMEVNFNFDDPNLIILPLAFGKRQGREFIWNDLLSLETGSLKLANGRVIEKTLYNRRTRQDEPALFVALTFERREVLDSSNCKPMNLIGVDRGENIPAVIALTDPEGCPLSLFNDSLGNPTHILRIGESYKEKQRTIQAKKEVEQRRAGGYSRKYASKAKNLADDMVRNTARDLLYYAVTQDAMLIFENLSRGFGRQGKRTFMAERQYTRMEDWLTAKLAYEGLPSKTYLSKTLAQYTSKTCSNCGFTITSADYDRVLEKLKKTATGWMTTINGKELKVEGQITYYNRYKRQNVVKDLSVELDRLSEESVNNDISSWTKGRSGEALSLLKKRFSHRPVQEKFVCLNCGFETHADEQAALNIARSWLFLRSQEYKKYQTNKTTGNTDKRAFVETWQSFYRKKLKEVWKPAV

SEQ ID NO: 27665 - protein, 978 aa, synthetic construct
  REGION 1..978: note = engineered CasX variant
QEIKRINKIRRRLVKDSNTKKAGKTGPMKTLLVRVMTPDLRERLENLRKKPENIPQPISNTSRANLNKLLTDYTEMKKAILHVYWEEFQKDPVGLMSRVAQPASKKIDQNKLKPEMDEKGNLTTAGFACSQCGQPLFVYKLEQVSEKGKAYTNYFGRCNVAEHEKLILLAQLKPEKDSDEAVTYSLGKFGQRALDFYSIHVTKESTHPVKPLAQIAGNRYASGPVGKALSDACMGTIASFLSKYQDIIIEHQKVVKGNQKRLESLRELAGKENLEYPSVTLPPQPHTKEGVDAYNEVIARVRMWVNLNLWQKLKLSRDDAKPLLRLKGFPSFPLVERQANEVDWWDMVCNVKKLINEKKEDGKVFWQNLAGYKRQEALRPYLSSEEDRKKGKKFARYQLGDLLLHLEKKHGEDWGKVYDEAWERIDKKVEGLSKHIKLEEERRSEDAQSKAALTDWLRAKASFVIEGLKEADKDEFCRCELKLQKWYGDLRGKPFAIEAENSILDISGFSKQYNCAFIWQKDGVKKLNLYLIINYFKGGKLRFKKIKPEAFEANRFYTVINKKSGEIVPMEVNFNFDDPNLIILPLAFGKRQGREFIWNDLLSLETGSLKLANGRVIEKTLYNRRTRQDEPALFVALTFERREVLDSSNCKPMNLIGVDRGENIPAVIALTDPEGCPLSLFKDSLGNPTHILRIGESYKEKQRTIQAKKEVEQRRAGGYSRKYASKAKNLADDMVRNTARDLLYYAVTQDAMLIFENLSRGFGRQGKRTFMAERQYTRMEDWLTAKLAYEGLPSKTYLSKTLAQYTSKTCSNCGFTITSADYDRVLEKLKKTATGWMTTINGKELKVEGQITYYNRYKRQNVVKDLSVELDRLSEESVNNDISSWTKGRSGEALSLLKKRFSHRPVQEKFVCLNCGFETHADEQAALNIARSWLFLRSQEYKKYQTNKTTGNTDKRAFVETWQSFYRKKLKEVWKPAV

SEQ ID NO: 27666 - protein, 978 aa, synthetic construct
  REGION 1..978: note = engineered CasX variant
QEIKRINKIRRRLVKDSNTKKAGKTGPMKTLLVRVMTPDLRERLENLRKKPENIPQPISNTSRANLNKLLTDYTEMKKAILHVYWEEFQKDPVGLMSRVAQPASKKIDQNKLKPEMDEKGNLTTAGFACSQCGQPLFVYKLEQVSEKGKAYTNYFGRCNVAEHEKLILLAQLKPEKDSDEAVTYSLGKFGQRALDFYSIHVTKESTHPVKPLAQIAGNRYASGPVGKALSDACMGTIASFLSKYQDIIIEHQKVVKGNQKRLESLRELAGKENLEYPSVTLPPQPHTKEGVDAYNEVIARVRMWVNLNLWQKLKLSRDDAKPLLRLKGFPSFPLVERQANEVDWWDMVCNVKKLINEKKEDGKVFWQNLAGYKRQEALRPYLSSEEDRKKGKKFARYQLGDLLLHLEKKHGEDWGKVYDEAWERIDKKVEGLSKHIKLEEERRSEDAQSKAALTDWLRAKASFVIEGLKEADKDEFCRCELKLQKWYGDLRGKPFAIEAENSILDISGFSKQYNCAFIWQKDGVKKLNLYLIINYFKGGKLRFKKIKPEAFEANRFYTVINKKSGEIVPMEVNFNFDDPNLIILPLAFGKRQGREFIWNDLLSLETGSLKLANGRVIEKTLYNRRTRQDEPALFVALTFERREVLDSSNCKPMNLIGVDRGENIPAVIAFTDPEGCPLSRFKDSLGNPTHILRIGESYKEKQRTIQAKKEVEQRRAGGYSRKYASKAKNLADDMVRNTARDLLYYAVTQDAMLIFENLSRGFGRQGKRTFMAERQYTRMEDWLTAKLAYEGLPSKTYLSKTLAQYTSKTCSNCGFTITSADYDRVLEKLKKTATGWMTTINGKELKVEGQITYYNRYKRQNVVKDLSVELDRLSEESVNNDISSWTKGRSGEALSLLKKRFSHRPVQEKFVCLNCGFETHADEQAALNIARSWLFLRSQEYKKYQTNKTTGNTDKRAFVETWQSFYRKKLKEVWKPAV

SEQ ID NO: 27667 - protein, 978 aa, synthetic construct
  REGION 1..978: note = engineered CasX variant
QEIKRINKIRRRLVKDSNTKKAGKTGPMKTLLVRVMTPDLRERLENLRKKPENIPQPISNTSRANLNKLLTDYTEMKKAILHVYWEEFQKDPVGLMSRVAQPASKKIDQNKLKPEMDEKGNLTTAGFACSQCGQPLFVYKLEQVSEKGKAYTNYFGRCNVAEHEKLILLAQLKPEKDSDEAVTYSLGKFGQRALDFYSIHVTKESTHPVKPLAQIAGNRYASGPVGKALSDACMGTIASFLSKYQDIIIEHQKVVKGNQKRLESLRELAGKENLEYPSVTLPPQPHTKEGVDAYNEVIARVRMWVNLNLWQKLKLSRDDAKPLLRLKGFPSFPLVERQANEVDWWDMVCNVKKLINEKKEDGKVFWQNLAGYKRQEALRPYLSSEEDRKKGKKFARYQLGDLLLHLEKKHGEDWGKVYDEAWERIDKKVEGLSKHIKLEEERRSEDAQSKAALTDWLRAKASFVIEGLKEADKDEFCRCELKLQKWYGDLRGKPFAIEAENSILDISGFSKQYNCAFIWQKDGVKKLNLYLIINYFKGGKLRFKKIKPEAFEANRFYTVINKKSGEIVPMEVNFNFDDPNLIILPLAFGKRQGREFIWNDLLSLETGSLKLANGRVIEKTLYNRRTRQDEPALFVALTFERREVLDSSNAKPMNLIGVDRGENIPAVIALTDPEGRPLSRFKDSLGNPTHILRIGESYKEKQRTIQAKKEVEQRRAGGYSRKYASKAKNLADDMVRNTARDLLYYAVTQDAMLIFENLSRGFGRQGKRTFMAERQYTRMEDWLTAKLAYEGLPSKTYLSKTLAQYTSKTCSNCGFTITSADYDRVLEKLKKTATGWMTTINGKELKVEGQITYYNRYKRQNVVKDLSVELDRLSEESVNNDISSWTKGRSGEALSLLKKRFSHRPVQEKFVCLNCGFETHADEQAALNIARSWLFLRSQEYKKYQTNKTTGNTDKRAFVETWQSFYRKKLKEVWKPAV

SEQ ID NO: 27668 - protein, 978 aa, synthetic construct
  REGION 1..978: note = engineered CasX variant
QEIKRINKIRRRLVKDSNTKKAGKTGPMKTLLVRVMTPDLRERLENLRKKPENIPQPISNTSRANLNKLLTDYTEMKKAILHVYWEEFQKDPVGLMSRVAQPASKKIDQNKLKPEMDEKGNLTTAGFACSQCGQPLFVYKLEQVSEKGKAYTNYFGRCNVAEHEKLILLAQLKPEKDSDEAVTYSLGKFGQRALDFYSIHVTKESTHPVKPLAQIAGNRYASGPVGKALSDACMGTIASFLSKYQDIIIEHQKVVKGNQKRLESLRELAGKENLEYPSVTLPPQPHTKEGVDAYNEVIARVRMWVNLNLWQKLKLSRDDAKPLLRLKGFPSFPLVERQANEVDWWDMVCNVKKLINEKKEDGKVFWQNLAGYKRQEALRPYLSSEEDRKKGKKFARYQLGDLLLHLEKKHGEDWGKVYDEAWERIDKKVEGLSKHIKLEEERRSEDAQSKAALTDWLRAKASFVIEGLKEADKDEFCRCELKLQKWYGDLRGKPFAIEAENSILDISGFSKQYNCAFIWQKDGVKKLNLYLIINYFKGGKLRFKKIKPEAFEANRFYTVINKKSGEIVPMEVNFNFDDPNLIILPLAFGKRQGREFIWNDLLSLETGSLKLANGRVIEKTLYNRRTRQDEPALFVALTFERREVLDSSNAKPMNLIGVDRGENIPAVIALTDPEGRPLSRFKDSLGNPTHILRIGESYKEKQRTIQAKKEVEQRNAGGYSRKYASKAKNLADDMVRNTARDLLYYAVTQDAMLIFENLSRGFGRQGKRTFMAERQYTRMEDWLTAKLAYEGLPSKTYLSKTLAQYTSKTCSNCGFTITSADYDRVLEKLKKTATGWMTTINGKELKVEGQITYYNRYKRQNVVKDLSVELDRLSEESVNNDISSWTKGRSGEALSLLKKRFSHRPVQEKFVCLNCGFETHADEQAALNIARSWLFLRSQEYKKYQTNKTTGNTDKRAFVETWQSFYRKKLKEVWKPAV

SEQ ID NO: 27669 - protein, 978 aa, synthetic construct
  REGION 1..978: note = engineered CasX variant
QEIKRINKIRRRLVKDSNTKKAGKTGPMKTLLVRVMTPDLRERLENLRKKPENIPQPISNTSRANLNKLLTDYTEMKKAILHVYWEEFQKDPVGLMSRVAQPASKKIDQNKLKPEMDEKGNLTTAGFACSQCGQPLFVYKLEQVSEKGKAYTNYFGRCNVAEHEKLILLAQLKPEKDSDEAVTYSLGKFGQRALDFYSIHVTKESTHPVKPLAQIAGNRYASGPVGKALSDACMGTIASFLSKYQDIIIEHQKVVKGNQKRLESLRELAGKENLEYPSVTLPPQPHTKEGVDAYNEVIARVRMWVNLNLWQKLKLSRDDAKPLLRLKGFPSFPLVERQANEVDWWDMVCNVKKLINEKKEDGKVFWQNLAGYKRQEALRPYLSSEEDRKKGKKFARYQLGDLLLHLEKKHGEDWGKVYDEAWERIDKKVEGLSKHIKLEEERRSEDAQSKAALTDWLRAKASFVIEGLKEADKDEFCRCELKLQKWYGDLRGKPFAIEAENSILDISGFSKQYNCAFIWQKDGVKKLNLYLIINYFKGGKLRFKKIKPEAFEANRFYTVINKKSGEIVPMEVNFNFDDPNLIILPLAFGKRQGREFIWNDLLSLETGSLKLANGRVIEKTLYNRRTRQDEPALFVALTFERREVLDSSNAKPMNLIGVDRGENIPAVIALTDPEGCPLSVFKDSLGNPTHILRIGESYKEKQRTIQAKKEVEQRRAGGYSRKYASKAKNLADDMVRNTARDLLYYAVTQDAMLIFENLSRGFGRQGKRTFMAERQYTRMEDWLTAKLAYEGLPSKTYLSKTLAQYTSKTCSNCGFTITSADYDRVLEKLKKTATGWMTTINGKELKVEGQITYYNRYKRQNVVKDLSVELDRLSEESVNNDISSWTKGRSGEALSLLKKRFSHRPVQEKFVCLNCGFETHADEQAALNIARSWLFLRSQEYKKYQTNKTTGNTDKRAFVETWQSFYRKKLKEVWKPAV

SEQ ID NO: 27670 - protein, 978 aa, synthetic construct
  REGION 1..978: note = engineered CasX variant
QEIKRINKIRRRLVKDSNTKKAGKTGPMKTLLVRVMTPDLRERLENLRKKPENIPQPISNTSRANLNKLLTDYTEMKKAILHVYWEEFQKDPVGLMSRVAQPASKKIDQNKLKPEMDEKGNLTTAGFACSQCGQPLFVYKLEQVSEKGKAYTNYFGRCNVAEHEKLILLAQLKPEKDSDEAVTYSLGKFGQRALDFYSIHVTKESTHPVKPLAQIAGNRYASGPVGKALSDACMGTIASFLSKYQDIIIEHQKVVKGNQKRLESLRELAGKENLEYPSVTLPPQPHTKEGVDAYNEVIARVRMWVNLNLWQKLKLSRDDAKPLLRLKGFPSFPLVERQANEVDWWDMVCNVKKLINEKKEDGKVFWQNLAGYKRQEALRPYLSSEEDRKKGKKFARYQLGDLLLHLEKKHGEDWGKVYDEAWERIDKKVEGLSKHIKLEEERRSEDAQSKAALTDWLRAKASFVIEGLKEADKDEFCRCELKLQKWYGDLRGKPFAIEAENSILDISGFSKQYNCAFIWQKDGVKKLNLYLIINYFKGGKLRFKKIKPEAFEANRFYTVINKKSGEIVPMEVNFNFDDPNLIILPLAFGKRQGREFIWNDLLSLETGSLKLANGRVIEKTLYNRRTRQDEPALFVALTFERREVLDSSNAKPMNLIGVDRGENIPAVIALTDPEGCPLSVFKDSHGNPTHILRIGESYKEKQRTIQAKKEVEQRRAGGYSRKYASKAKNLADDMVRNTARDLLYYAVTQDAMLIFENLSRGFGRQGKRTFMAERQYTRMEDWLTAKLAYEGLPSKTYLSKTLAQYTSKTCSNCGFTITSADYDRVLEKLKKTATGWMTTINGKELKVEGQITYYNRYKRQNVVKDLSVELDRLSEESVNNDISSWTKGRSGEALSLLKKRFSHRPVQEKFVCLNCGFETHADEQAALNIARSWLFLRSQEYKKYQTNKTTGNTDKRAFVETWQSFYRKKLKEVWKPAV

SEQ ID NO: 27671 - protein, 978 aa, synthetic construct
  REGION 1..978: note = engineered CasX variant
QEIKRINKIRRRLVKDSNTKKAGKTGPMKTLLVRVMTPDLRERLENLRKKPENIPQPISNTSRANLNKLLTDYTEMKKAILHVYWEEFQKDPVGLMSRVAQPASKKIDQNKLKPEMDEKGNLTTAGFACSQCGQPLFVYKLEQVSEKGKAYTNYFGRCNVAEHEKLILLAQLKPEKDSDEAVTYSLGKFGQRALDFYSIHVTKESTHPVKPLAQIAGNRYASGPVGKALSDACMGTIASFLSKYQDIIIEHQKVVKGNQKRLESLRELAGKENLEYPSVTLPPQPHTKEGVDAYNEVIARVRMWVNLNLWQKLKLSRDDAKPLLRLKGFPSFPLVERQANEVDWWDMVCNVKKLINEKKEDGKVFWQNLAGYKRQEALRPYLSSEEDRKKGKKFARYQLGDLLLHLEKKHGEDWGKVYDEAWERIDKKVEGLSKHIKLEEERRSEDAQSKAALTDWLRAKASFVIEGLKEADKDEFCRCELKLQKWYGDLRGKPFAIEAENSILDISGFSKQYNCAFIWQKDGVKKLNLYLIINYFKGGKLRFKKIKPEAFEANRFYTVINKKSGEIVPMEVNFNFDDPNLIILPLAFGKRQGREFIWNDLLSLETGSLKLANGRVIEKTLYNRRTRQDEPALFVALTFERREVLDSSNAKPMNLIGVDRGENIPAVIALTDPEGCPLSRFKDSLGNPTHILRIGESYKEKQRTIQAKKEVEQRRAGGYSRKYASKAKNLADDMVRNTARDLLYYAVTQDAMLIFENLSRGFGRQGKRTFMAERQYTRMEDWLTAKLAYEGLPSKTYLSKTLAQYTSKTCSNCGFTITSADYDRVLEKLKKTATGWMTTINGKELKVEGQITYYNRYKRQNVVKDLSVELDRLSEESVNNDISSWTKGRSGEALSLLKKRFSHRPVQEKFVCLNCGFETHADEQAALNIARSWLFLRSQEYKKYQTNKTTGNTDKRAFVETWQSFYRKKLKEVWKPAV

SEQ ID NO: 27672 - protein, 978 aa, synthetic construct
  REGION 1..978: note = engineered CasX variant
QEIKRINKIRRRLVKDSNTKKAGKTGPMKTLLVRVMTPDLRERLENLRKKPENIPQPISNTSRANLNKLLTDYTEMKKAILHVYWEEFQKDPVGLMSRVAQPASKKIDQNKLKPEMDEKGNLTTAGFACSQCGQPLFVYKLEQVSEKGKAYTNYFGRCNVAEHEKLILLAQLKPEKDSDEAVTYSLGKFGQRALDFYSIHVTKESTHPVKPLAQIAGNRYASGPVGKALSDACMGTIASFLSKYQDIIIEHQKVVKGNQKRLESLRELAGKENLEYPSVTLPPQPHTKEGVDAYNEVIARVRMWVNLNLWQKLKLSRDDAKPLLRLKGFPSFPLVERQANEVDWWDMVCNVKKLINEKKEDGKVFWQNLAGYKRQEALRPYLSSEEDRKKGKKFARYQLGDLLLHLEKKHGEDWGKVYDEAWERIDKKVEGLSKHIKLEEERRSEDAQSKAALTDWLRAKASFVIEGLKEADKDEFCRCELKLQKWYGDLRGKPFAIEAENSILDISGFSKQYNCAFIWQKDGVKKLNLYLIINYFKGGKLRFKKIKPEAFEANRFYTVINKKSGEIVPMEVNFNFDDPNLIILPLAFGKRQGREFIWNDLLSLETGSLKLANGRVIEKTLYNRRTRQDEPALFVALTFERREVLDSSNAKPMNLIGVDRGENIPAVIALTDPEGCPLSRFKDSLGNPTHILRIGESYKEKQRTIQAKKEVEQRNAGGYSRKYASKAKNLADDMVRNTARDLLYYAVTQDAMLIFENLSRGFGRQGKRTFMAERQYTRMEDWLTAKLAYEGLPSKTYLSKTLAQYTSKTCSNCGFTITSADYDRVLEKLKKTATGWMTTINGKELKVEGQITYYNRYKRQNVVKDLSVELDRLSEESVNNDISSWTKGRSGEALSLLKKRFSHRPVQEKFVCLNCGFETHADEQAALNIARSWLFLRSQEYKKYQTNKTTGNTDKRAFVETWQSFYRKKLKEVWKPAV

SEQ ID NO: 27673 - protein, 978 aa, synthetic construct
  REGION 1..978: note = engineered CasX variant
QEIKRINKIRRRLVKDSNTKKAGKTGPMKTLLVRVMTPDLRERLENLRKKPENIPQPISNTSRANLNKLLTDYTEMKKAILHVYWEEFQKDPVGLMSRVAQPASKKIDQNKLKPEMDEKGNLTTAGFACSQCGQPLFVYKLEQVSEKGKAYTNYFGRCNVAEHEKLILLAQLKPEKDSDEAVTYSLGKFGQRALDFYSIHVTKESTHPVKPLAQIAGNRYASGPVGKALSDACMGTIASFLSKYQDIIIEHQKVVKGNQKRLESLRELAGKENLEYPSVTLPPQPHTKEGVDAYNEVIARVRMWVNLNLWQKLKLSRDDAKPLLRLKGFPSFPLVERQANEVDWWDMVCNVKKLINEKKEDGKVFWQNLAGYKRQEALRPYLSSEEDRKKGKKFARYQLGDLLLHLEKKHGEDWGKVYDEAWERIDKKVEGLSKHIKLEEERRSEDAQSKAALTDWLRAKASFVIEGLKEADKDEFCRCELKLQKWYGDLRGKPFAIEAENSILDISGFSKQYNCAFIWQKDGVKKLNLYLIINYFKGGKLRFKKIKPEAFEANRFYTVINKKSGEIVPMEVNFNFDDPNLIILPLAFGKRQGREFIWNDLLSLETGSLKLANGRVIEKTLYNRRTRQDEPALFVALTFERREVLDSSNAKPMNLIGVDRGENIPAVIALTDPEGCPLSRFKDSHGNPTHILRIGESYKEKQRTIQAKKEVEQRRAGGYSRKYASKAKNLADDMVRNTARDLLYYAVTQDAMLIFENLSRGFGRQGKRTFMAERQYTRMEDWLTAKLAYEGLPSKTYLSKTLAQYTSKTCSNCGFTITSADYDRVLEKLKKTATGWMTTINGKELKVEGQITYYNRYKRQNVVKDLSVELDRLSEESVNNDISSWTKGRSGEALSLLKKRFSHRPVQEKFVCLNCGFETHADEQAALNIARSWLFLRSQEYKKYQTNKTTGNTDKRAFVETWQSFYRKKLKEVWKPAV

SEQ ID NO: 27674 - protein, 978 aa, synthetic construct
  REGION 1..978: note = engineered CasX variant
QEIKRINKIRRRLVKDSNTKKAGKTGPMKTLLVRVMTPDLRERLENLRKKPENIPQPISNTSRANLNKLLTDYTEMKKAILHVYWEEFQKDPVGLMSRVAQPASKKIDQNKLKPEMDEKGNLTTAGFACSQCGQPLFVYKLEQVSEKGKAYTNYFGRCNVAEHEKLILLAQLKPEKDSDEAVTYSLGKFGQRALDFYSIHVTKESTHPVKPLAQIAGNRYASGPVGKALSDACMGTIASFLSKYQDIIIEHQKVVKGNQKRLESLRELAGKENLEYPSVTLPPQPHTKEGVDAYNEVIARVRMWVNLNLWQKLKLSRDDAKPLLRLKGFPSFPLVERQANEVDWWDMVCNVKKLINEKKEDGKVFWQNLAGYKRQEALRPYLSSEEDRKKGKKFARYQLGDLLLHLEKKHGEDWGKVYDEAWERIDKKVEGLSKHIKLEEERRSEDAQSKAALTDWLRAKASFVIEGLKEADKDEFCRCELKLQKWYGDLRGKPFAIEAENSILDISGFSKQYNCAFIWQKDGVKKLNLYLIINYFKGGKLRFKKIKPEAFEANRFYTVINKKSGEIVPMEVNFNFDDPNLIILPLAFGKRQGREFIWNDLLSLETGSLKLANGRVIEKTLYNRRTRQDEPALFVALTFERREVLDSSMIKPMNLIGVDRGENIPAVIALTDPEGCPLSRFKDSLGNPTHILRIGESYKEKQRTIQAKKHVEQRRAGGYSRKYASKAKNLADDMVRNTARDLLYYAVTQDAMLIFENLSRGFGRQGKRTFMAERQYTRMEDWLTAKLAYEGLPSKTYLSKTLAQYTSKTCSNCGFTITSADYDRVLEKLKKTATGWMTTINGKELKVEGQITYYNRYKRQNVVKDLSVELDRLSEESVNNDISSWTKGRSGEALSLLKKRFSHRPVQEKFVCLNCGFETHADEQAALNIARSWLFLRSQEYKKYQTNKTTGNTDKRAFVETWQSFYRKKLKEVWKPAV

SEQ ID NO: 27675 - protein, 978 aa, synthetic construct
  REGION 1..978: note = engineered CasX variant
QEIKRINKIRRRLVKDSNTKKAGKTGPMKTLLVRVMTPDLRERLENLRKKPENIPQPISNTSRANLNKLLTDYTEMKKAILHVYWEEFQKDPVGLMSRVAQPASKKIDQNKLKPEMDEKGNLTTAGFACSQCGQPLFVYKLEQVSEKGKAYTNYFGRCNVAEHEKLILLAQLKPEKDSDEAVTYSLGKFGQRALDFYSIHVTKESTHPVKPLAQIAGNRYASGPVGKALSDACMGTIASFLSKYQDIIIEHQKVVKGNQKRLESLRELAGKENLEYPSVTLPPQPHTKEGVDAYNEVIARVRMWVNLNLWQKLKLSRDDAKPLLRLKGFPSFPLVERQANEVDWWDMVCNVKKLINEKKEDGKVFWQNLAGYKRQEALRPYLSSEEDRKKGKKFARYQLGDLLLHLEKKHGEDWGKVYDEAWERIDKKVEGLSKHIKLEEERRSEDAQSKAALTDWLRAKASFVIEGLKEADKDEFCRCELKLQKWYGDLRGKPFAIEAENSILDISGFSKQYNCAFIWQKDGVKKLNLYLIINYFKGGKLRFKKIKPEAFEANRFYTVINKKSGEIVPMEVNFNFDDPNLIILPLAFGKRQGREFIWNDLLSLETGSLKLANGRVIEKTLYNRRTRQDEPALFVALTFERREVLDSSMIKPMNLIGVDRGENIPAVIALTDPEGCPLSRFKDSLGNPTHILRIGESYKEKQRTIQAKKEVEQRRAGGYSRKYASKAKNLADDMVRNTARDLLYYAVTQDAMLIFENLSRGFGRQGKRTFMAERQYTRMEDWLTAKLAYEGLPSKTYLSKTLAQYTSKTCSNCGFTITSADYDRVLEKLKKTATGWMTTINGKELKVEGQITYYNRYKRQNVVKDLSVELDRLSEESVNNDISSWTKGRSGEALSLLKKRFSHRPVQEKFVCLNCGFETHADEQAALNIARSWLFLRSQEYKKYQTNKTTGNTDKRAFVETWQSFYRKKLKEVWKPAV

SEQ ID NO: 27676 - protein, 978 aa, synthetic construct
  REGION 1..978: note = engineered CasX variant
QEIKRINKIRRRLVKDSNTKKAGKTGPMKTLLVRVMTPDLRERLENLRKKPENIPQPISNTSRANLNKLLTDYTEMKKAILHVYWEEFQKDPVGLMSRVAQPASKKIDQNKLKPEMDEKGNLTTAGFACSQCGQPLFVYKLEQVSEKGKAYTNYFGRCNVAEHEKLILLAQLKPEKDSDEAVTYSLGKFGQRALDFYSIHVTKESTHPVKPLAQIAGNRYASGPVGKALSDACMGTIASFLSKYQDIIIEHQKVVKGNQKRLESLRELAGKENLEYPSVTLPPQPHTKEGVDAYNEVIARVRMWVNLNLWQKLKLSRDDAKPLLRLKGFPSFPLVERQANEVDWWDMVCNVKKLINEKKEDGKVFWQNLAGYKRQEALRPYLSSEEDRKKGKKFARYQLGDLLLHLEKKHGEDWGKVYDEAWERIDKKVEGLSKHIKLEEERRSEDAQSKAALTDWLRAKASFVIEGLKEADKDEFCRCELKLQKWYGDLRGKPFAIEAENSILDISGFSKQYNCAFIWQKDGVKKLNLYLIINYFKGGKLRFKKIKPEAFEANRFYTVINKKSGEIVPMEVNFNFDDPNLIILPLAFGKRQGREFIWNDLLSLETGSLKLANGRVIEKTLYNRRTRQDEPALFVALTFERREVLDSSMIKPMNLIGVDRGENIPAVIALTDPEGCPLSRFKDSLGNKTHILRIGESYKEKQRTIQAKKEVEQRRAGGYSRKYASKAKNLADDMVRNTARDLLYYAVTQDAMLIFENLSRGFGRQGKRTFMAERQYTRMEDWLTAKLAYEGLPSKTYLSKTLAQYTSKTCSNCGFTITSADYDRVLEKLKKTATGWMTTINGKELKVEGQITYYNRYKRQNVVKDLSVELDRLSEESVNNDISSWTKGRSGEALSLLKKRFSHRPVQEKFVCLNCGFETHADEQAALNIARSWLFLRSQEYKKYQTNKTTGNTDKRAFVETWQSFYRKKLKEVWKPAV

SEQ ID NO: 27677 - protein, 978 aa, synthetic construct
  REGION 1..978: note = engineered CasX variant
QEIKRINKIRRRLVKDSNTKKAGKTGPMKTLLVRVMTPDLRERLENLRKKPENIPQPISNTSRANLNKLLTDYTEMKKAILHVYWEEFQKDPVGLMSRVAQPASKKIDQNKLKPEMDEKGNLTTAGFACSQCGQPLFVYKLEQVSEKGKAYTNYFGRCNVAEHEKLILLAQLKPEKDSDEAVTYSLGKFGQRALDFYSIHVTKESTHPVKPLAQIAGNRYASGPVGKALSDACMGTIASFLSKYQDIIIEHQKVVKGNQKRLESLRELAGKENLEYPSVTLPPQPHTKEGVDAYNEVIARVRMWVNLNLWQKLKLSRDDAKPLLRLKGFPSFPLVERQANEVDWWDMVCNVKKLINEKKEDGKVFWQNLAGYKRQEALRPYLSSEEDRKKGKKFARYQLGDLLLHLEKKHGEDWGKVYDEAWERIDKKVEGLSKHIKLEEERRSEDAQSKAALTDWLRAKASFVIEGLKEADKDEFCRCELKLQKWYGDLRGKPFAIEAENSILDISGFSKQYNCAFIWQKDGVKKLNLYLIINYFKGGKLRFKKIKPEAFEANRFYTVINKKSGEIVPMEVNFNFDDPNLIILPLAFGKRQGREFIWNDLLSLETGSLKLANGRVIEKTLYNRRTRQDEPALFVALTFERREVLDSSMIKPMNLIGVDRGENIPAVIALTDPEGCPLSRFHDSLGNPTHILRIGESYKEKQRTIQAKKEVEQRRAGGYSRKYASKAKNLADDMVRNTARDLLYYAVTQDAMLIFENLSRGFGRQGKRTFMAERQYTRMEDWLTAKLAYEGLPSKTYLSKTLAQYTSKTCSNCGFTITSADYDRVLEKLKKTATGWMTTINGKELKVEGQITYYNRYKRQNVVKDLSVELDRLSEESVNNDISSWTKGRSGEALSLLKKRFSHRPVQEKFVCLNCGFETHADEQAALNIARSWLFLRSQEYKKYQTNKTTGNTDKRAFVETWQSFYRKKLKEVWKPAV

SEQ ID NO: 27678 - protein, 978 aa, synthetic construct
  REGION 1..978: note = engineered CasX variant
QEIKRINKIRRRLVKDSNTKKAGKTGPMKTLLVRVMTPDLRERLENLRKKPENIPQPISNTSRANLNKLLTDYTEMKKAILHVYWEEFQKDPVGLMSRVAQPASKKIDQNKLKPEMDEKGNLTTAGFACSQCGQPLFVYKLEQVSEKGKAYTNYFGRCNVAEHEKLILLAQLKPEKDSDEAVTYSLGKFGQRALDFYSIHVTKESTHPVKPLAQIAGNRYASGPVGKALSDACMGTIASFLSKYQDIIIEHQKVVKGNQKRLESLRELAGKENLEYPSVTLPPQPHTKEGVDAYNEVIARVRMWVNLNLWQKLKLSRDDAKPLLRLKGFPSFPLVERQANEVDWWDMVCNVKKLINEKKEDGKVFWQNLAGYKRQEALRPYLSSEEDRKKGKKFARYQLGDLLLHLEKKHGEDWGKVYDEAWERIDKKVEGLSKHIKLEEERRSEDAQSKAALTDWLRAKASFVIEGLKEADKDEFCRCELKLQKWYGDLRGKPFAIEAENSILDISGFSKQYNCAFIWQKDGVKKLNLYLIINYFKGGKLRFKKIKPEAFEANRFYTVINKKSGEIVPMEVNFNFDDPNLIILPLAFGKRQGREFIWNDLLSLETGSLKLANGRVIEKTLYNRRTRQDEPALFVALTFERREVLDSSMIKPMNLIGVDRGENIPAVIALTDPEGCPLSRFHDSLGNKTHILRIGESYKEKQRTIQAKKEVEQRRAGGYSRKYASKAKNLADDMVRNTARDLLYYAVTQDAMLIFENLSRGFGRQGKRTFMAERQYTRMEDWLTAKLAYEGLPSKTYLSKTLAQYTSKTCSNCGFTITSADYDRVLEKLKKTATGWMTTINGKELKVEGQITYYNRYKRQNVVKDLSVELDRLSEESVNNDISSWTKGRSGEALSLLKKRFSHRPVQEKFVCLNCGFETHADEQAALNIARSWLFLRSQEYKKYQTNKTTGNTDKRAFVETWQSFYRKKLKEVWKPAV

SEQ ID NO: 27679 - protein, 978 aa, synthetic construct
  REGION 1..978: note = engineered CasX variant
QEIKRINKIRRRLVKDSNTKKAGKTGPMKTLLVRVMTPDLRERLENLRKKPENIPQPISNTSRANLNKLLTDYTEMKKAILHVYWEEFQKDPVGLMSRVAQPASKKIDQNKLKPEMDEKGNLTTAGFACSQCGQPLFVYKLEQVSEKGKAYTNYFGRCNVAEHEKLILLAQLKPEKDSDEAVTYSLGKFGQRALDFYSIHVTKESTHPVKPLAQIAGNRYASGPVGKALSDACMGTIASFLSKYQDIIIEHQKVVKGNQKRLESLRELAGKENLEYPSVTLPPQPHTKEGVDAYNEVIARVRMWVNLNLWQKLKLSRDDAKPLLRLKGFPSFPLVERQANEVDWWDMVCNVKKLINEKKEDGKVFWQNLAGYKRQEALRPYLSSEEDRKKGKKFARYQLGDLLLHLEKKHGEDWGKVYDEAWERIDKKVEGLSKHIKLEEERRSEDAQSKAALTDWLRAKASFVIEGLKEADKDEFCRCELKLQKWYGDLRGKPFAIEAENSILDISGFSKQYNCAFIWQKDGVKKLNLYLIINYFKGGKLRFKKIKPEAFEANRFYTVINKKSGEIVPMEVNFNFDDPNLIILPLAFGKRQGREFIWNDLLSLETGSLKLANGRVIEKTLYNRRTRQDEPALFVALTFERREVLDSSMIKPMNLIGVDRGENIPAVIALTDPEGCPLSNFKDSLGNPTHILRIGESYKEKQRTISAKKEVEQRRAGGYSRKYASKAKNLADDMVRNTARDLLYYAVTQDAMLIFENLSRGFGRQGKRTFMAERQYTRMEDWLTAKLAYEGLPSKTYLSKTLAQYTSKTCSNCGFTITSADYDRVLEKLKKTATGWMTTINGKELKVEGQITYYNRYKRQNVVKDLSVELDRLSEESVNNDISSWTKGRSGEALSLLKKRFSHRPVQEKFVCLNCGFETHADEQAALNIARSWLFLRSQEYKKYQTNKTTGNTDKRAFVETWQSFYRKKLKEVWKPAV

SEQ ID NO: 27680 - protein, 978 aa, synthetic construct
  REGION 1..978: note = engineered CasX variant
QEIKRINKIRRRLVKDSNTKKAGKTGPMKTLLVRVMTPDLRERLENLRKKPENIPQPISNTSRANLNKLLTDYTEMKKAILHVYWEEFQKDPVGLMSRVAQPASKKIDQNKLKPEMDEKGNLTTAGFACSQCGQPLFVYKLEQVSEKGKAYTNYFGRCNVAEHEKLILLAQLKPEKDSDEAVTYSLGKFGQRALDFYSIHVTKESTHPVKPLAQIAGNRYASGPVGKALSDACMGTIASFLSKYQDIIIEHQKVVKGNQKRLESLRELAGKENLEYPSVTLPPQPHTKEGVDAYNEVIARVRMWVNLNLWQKLKLSRDDAKPLLRLKGFPSFPLVERQANEVDWWDMVCNVKKLINEKKEDGKVFWQNLAGYKRQEALRPYLSSEEDRKKGKKFARYQLGDLLLHLEKKHGEDWGKVYDEAWERIDKKVEGLSKHIKLEEERRSEDAQSKAALTDWLRAKASFVIEGLKEADKDEFCRCELKLQKWYGDLRGKPFAIEAENSILDISGFSKQYNCAFIWQKDGVKKLNLYLIINYFKGGKLRFKKIKPEAFEANRFYTVINKKSGEIVPMEVNFNFDDPNLIILPLAFGKRQGREFIWNDLLSLETGSLKLANGRVIEKTLYNRRTRQDEPALFVALTFERREVLDSSMIKPMNLIGVDRGENIPAVIALTDPEGCPLSNFKDSLGNPTHILRIGESYKEKQRTIQAKKEVEQRRAGGYSRKYASKAKNLADDMVRNTARDLLYYAVTQDAMLIFENLSRGFGRQGKRTFMAERQYTRMEDWLTAKLAYEGLPSKTYLSKTLAQYTSKTCSNCGFTITSADYDRVLEKLKKTATGWMTTINGKELKVEGQITYYNRYKRQNVVKDLSVELDRLSEESVNNDISSWTKGRSGEALSLLKKRFSHRPVQEKFVCLNCGFETHADEQAALNIARSWLFLRSQEYKKYQTNKTTGNTDKRAFVETWQSFYRKKLKEVWKPAV

SEQ ID NO: 27681 - protein, 978 aa, synthetic construct
  REGION 1..978: note = engineered CasX variant
QEIKRINKIRRRLVKDSNTKKAGKTGPMKTLLVRVMTPDLRERLENLRKKPENIPQPISNTSRANLNKLLTDYTEMKKAILHVYWEEFQKDPVGLMSRVAQPASKKIDQNKLKPEMDEKGNLTTAGFACSQCGQPLFVYKLEQVSEKGKAYTNYFGRCNVAEHEKLILLAQLKPEKDSDEAVTYSLGKFGQRALDFYSIHVTKESTHPVKPLAQIAGNRYASGPVGKALSDACMGTIASFLSKYQDIIIEHQKVVKGNQKRLESLRELAGKENLEYPSVTLPPQPHTKEGVDAYNEVIARVRMWVNLNLWQKLKLSRDDAKPLLRLKGFPSFPLVERQANEVDWWDMVCNVKKLINEKKEDGKVFWQNLAGYKRQEALRPYLSSEEDRKKGKKFARYQLGDLLLHLEKKHGEDWGKVYDEAWERIDKKVEGLSKHIKLEEERRSEDAQSKAALTDWLRAKASFVIEGLKEADKDEFCRCELKLQKWYGDLRGKPFAIEAENSILDISGFSKQYNCAFIWQKDGVKKLNLYLIINYFKGGKLRFKKIKPEAFEANRFYTVINKKSGEIVPMEVNFNFDDPNLIILPLAFGKRQGREFIWNDLLSLETGSLKLANGRVIEKTLYNRRTRQDEPALFVALTFERREVLDSSLIKPMNLIGVDRGENIPAVIALTDPEGKPLSRFKDSLGNPTHILRIGESYKEKQRTIQAKKEVEQRRAGGYSRKYASKAKNLADDMVRNTARDLLYYAVTQDAMLIFENLSRGFGRQGKRTFMAERQYTRMEDWLTAKLAYEGLPSKTYLSKTLAQYTSKTCSNCGFTITSADYDRVLEKLKKTATGWMTTINGKELKVEGQITYYNRYKRQNVVKDLSVELDRLSEESVNNDISSWTKGRSGEALSLLKKRFSHRPVQEKFVCLNCGFETHADEQAALNIARSWLFLRSQEYKKYQTNKTTGNTDKRAFVETWQSFYRKKLKEVWKPAV

SEQ ID NO: 27682 - protein, 978 aa, synthetic construct
  REGION 1..978: note = engineered CasX variant
QEIKRINKIRRRLVKDSNTKKAGKTGPMKTLLVRVMTPDLRERLENLRKKPENIPQPISNTSRANLNKLLTDYTEMKKAILHVYWEEFQKDPVGLMSRVAQPASKKIDQNKLKPEMDEKGNLTTAGFACSQCGQPLFVYKLEQVSEKGKAYTNYFGRCNVAEHEKLILLAQLKPEKDSDEAVTYSLGKFGQRALDFYSIHVTKESTHPVKPLAQIAGNRYASGPVGKALSDACMGTIASFLSKYQDIIIEHQKVVKGNQKRLESLRELAGKENLEYPSVTLPPQPHTKEGVDAYNEVIARVRMWVNLNLWQKLKLSRDDAKPLLRLKGFPSFPLVERQANEVDWWDMVCNVKKLINEKKEDGKVFWQNLAGYKRQEALRPYLSSEEDRKKGKKFARYQLGDLLLHLEKKHGEDWGKVYDEAWERIDKKVEGLSKHIKLEEERRSEDAQSKAALTDWLRAKASFVIEGLKEADKDEFCRCELKLQKWYGDLRGKPFAIEAENSILDISGFSKQYNCAFIWQKDGVKKLNLYLIINYFKGGKLRFKKIKPEAFEANRFYTVINKKSGEIVPMEVNFNFDDPNLIILPLAFGKRQGREFIWNDLLSLETGSLKLANGRVIEKTLYNRRTRQDEPALFVALTFERREVLDSSLIKPMNLIGVDRGENIPAVIALTDPEGKPLSRFKDSLGNPTHILRIGESYKEKQRTIQAKKEREQRRAGGYSRKYASKAKNLADDMVRNTARDLLYYAVTQDAMLIFENLSRGFGRQGKRTFMAERQYTRMEDWLTAKLAYEGLPSKTYLSKTLAQYTSKTCSNCGFTITSADYDRVLEKLKKTATGWMTTINGKELKVEGQITYYNRYKRQNVVKDLSVELDRLSEESVNNDISSWTKGRSGEALSLLKKRFSHRPVQEKFVCLNCGFETHADEQAALNIARSWLFLRSQEYKKYQTNKTTGNTDKRAFVETWQSFYRKKLKEVWKPAV

SEQ ID NO: 27683 - protein, 978 aa, synthetic construct
  REGION 1..978: note = engineered CasX variant
QEIKRINKIRRRLVKDSNTKKAGKTGPMKTLLVRVMTPDLRERLENLRKKPENIPQPISNTSRANLNKLLTDYTEMKKAILHVYWEEFQKDPVGLMSRVAQPASKKIDQNKLKPEMDEKGNLTTAGFACSQCGQPLFVYKLEQVSEKGKAYTNYFGRCNVAEHEKLILLAQLKPEKDSDEAVTYSLGKFGQRALDFYSIHVTKESTHPVKPLAQIAGNRYASGPVGKALSDACMGTIASFLSKYQDIIIEHQKVVKGNQKRLESLRELAGKENLEYPSVTLPPQPHTKEGVDAYNEVIARVRMWVNLNLWQKLKLSRDDAKPLLRLKGFPSFPLVERQANEVDWWDMVCNVKKLINEKKEDGKVFWQNLAGYKRQEALRPYLSSEEDRKKGKKFARYQLGDLLLHLEKKHGEDWGKVYDEAWERIDKKVEGLSKHIKLEEERRSEDAQSKAALTDWLRAKASFVIEGLKEADKDEFCRCELKLQKWYGDLRGKPFAIEAENSILDISGFSKQYNCAFIWQKDGVKKLNLYLIINYFKGGKLRFKKIKPEAFEANRFYTVINKKSGEIVPMEVNFNFDDPNLIILPLAFGKRQGREFIWNDLLSLETGSLKLANGRVIEKTLYNRRTRQDEPALFVALTFERREVLDSSLIKPMNLIGVDRGENIPAVIALTDPEGCPLSRFKDSLGNPTHILRIGESYKEKQRTIQAKKEVEQRRAGYYSRKYASKAKNLADDMVRNTARDLLYYAVTQDAMLIFENLSRGFGRQGKRTFMAERQYTRMEDWLTAKLAYEGLPSKTYLSKTLAQYTSKTCSNCGFTITSADYDRVLEKLKKTATGWMTTINGKELKVEGQITYYNRYKRQNVVKDLSVELDRLSEESVNNDISSWTKGRSGEALSLLKKRFSHRPVQEKFVCLNCGFETHADEQAALNIARSWLFLRSQEYKKYQTNKTTGNTDKRAFVETWQSFYRKKLKEVWKPAV

SEQ ID NO: 27684 - protein, 978 aa, synthetic construct
  REGION 1..978: note = engineered CasX variant
QEIKRINKIRRRLVKDSNTKKAGKTGPMKTLLVRVMTPDLRERLENLRKKPENIPQPISNTSRANLNKLLTDYTEMKKAILHVYWEEFQKDPVGLMSRVAQPASKKIDQNKLKPEMDEKGNLTTAGFACSQCGQPLFVYKLEQVSEKGKAYTNYFGRCNVAEHEKLILLAQLKPEKDSDEAVTYSLGKFGQRALDFYSIHVTKESTHPVKPLAQIAGNRYASGPVGKALSDACMGTIASFLSKYQDIIIEHQKVVKGNQKRLESLRELAGKENLEYPSVTLPPQPHTKEGVDAYNEVIARVRMWVNLNLWQKLKLSRDDAKPLLRLKGFPSFPLVERQANEVDWWDMVCNVKKLINEKKEDGKVFWQNLAGYKRQEALRPYLSSEEDRKKGKKFARYQLGDLLLHLEKKHGEDWGKVYDEAWERIDKKVEGLSKHIKLEEERRSEDAQSKAALTDWLRAKASFVIEGLKEADKDEFCRCELKLQKWYGDLRGKPFAIEAENSILDISGFSKQYNCAFIWQKDGVKKLNLYLIINYFKGGKLRFKKIKPEAFEANRFYTVINKKSGEIVPMEVNFNFDDPNLIILPLAFGKRQGREFIWNDLLSLETGSLKLANGRVIEKTLYNRRTRQDEPALFVALTFERREVLDSSLIKPMNLIGVDRGENIPAVIALTDPEGCPLSRFKDSLGNPTHILRIGESYKEKQRTIQAKKEVEQRRAGGYSRKYASKAKNLADDMVRNTARDLLYYAVTQDAMLIFENLSRGFGRQGKRTFMAERQYTRMEDWLTAKLAYEGLPSKTYLSKTLAQYTSKTCSNCGFTITSADYDRVLEKLKKTATGWMTTINGKELKVEGQITYYNRYKRQNVVKDLSVELDRLSEESVNNDISSWTKGRSGEALSLLKKRFSHRPVQEKFVCLNCGFETHADEQAALNIARSWLFLRSQEYKKYQTNKTTGNTDKRAFVETWQSFYRKKLKEVWKPAV

SEQ ID NO: 27685 - protein, 978 aa, synthetic construct
  REGION 1..978: note = engineered CasX variant
QEIKRINKIRRRLVKDSNTKKAGKTGPMKTLLVRVMTPDLRERLENLRKKPENIPQPISNTSRANLNKLLTDYTEMKKAILHVYWEEFQKDPVGLMSRVAQPASKKIDQNKLKPEMDEKGNLTTAGFACSQCGQPLFVYKLEQVSEKGKAYTNYFGRCNVAEHEKLILLAQLKPEKDSDEAVTYSLGKFGQRALDFYSIHVTKESTHPVKPLAQIAGNRYASGPVGKALSDACMGTIASFLSKYQDIIIEHQKVVKGNQKRLESLRELAGKENLEYPSVTLPPQPHTKEGVDAYNEVIARVRMWVNLNLWQKLKLSRDDAKPLLRLKGFPSFPLVERQANEVDWWDMVCNVKKLINEKKEDGKVFWQNLAGYKRQEALRPYLSSEEDRKKGKKFARYQLGDLLLHLEKKHGEDWGKVYDEAWERIDKKVEGLSKHIKLEEERRSEDAQSKAALTDWLRAKASFVIEGLKEADKDEFCRCELKLQKWYGDLRGKPFAIEAENSILDISGFSKQYNCAFIWQKDGVKKLNLYLIINYFKGGKLRFKKIKPEAFEANRFYTVINKKSGEIVPMEVNFNFDDPNLIILPLAFGKRQGREFIWNDLLSLETGSLKLANGRVIEKTLYNRRTRQDEPALFVALTFERREVLDSSLIKPMNLIGVDRGENIPAVIALTDPEGCPLSRFKDSLGNPTHILRIGESYKEKQRTIQAKKEREQRRAGGYSRKYASKAKNLADDMVRNTARDLLYYAVTQDAMLIFENLSRGFGRQGKRTFMAERQYTRMEDWLTAKLAYEGLPSKTYLSKTLAQYTSKTCSNCGFTITSADYDRVLEKLKKTATGWMTTINGKELKVEGQITYYNRYKRQNVVKDLSVELDRLSEESVNNDISSWTKGRSGEALSLLKKRFSHRPVQEKFVCLNCGFETHADEQAALNIARSWLFLRSQEYKKYQTNKTTGNTDKRAFVETWQSFYRKKLKEVWKPAV

SEQ ID NO: 27686 - protein, 978 aa, synthetic construct
  REGION 1..978: note = engineered CasX variant
QEIKRINKIRRRLVKDSNTKKAGKTGPMKTLLVRVMTPDLRERLENLRKKPENIPQPISNTSRANLNKLLTDYTEMKKAILHVYWEEFQKDPVGLMSRVAQPASKKIDQNKLKPEMDEKGNLTTAGFACSQCGQPLFVYKLEQVSEKGKAYTNYFGRCNVAEHEKLILLAQLKPEKDSDEAVTYSLGKFGQRALDFYSIHVTKESTHPVKPLAQIAGNRYASGPVGKALSDACMGTIASFLSKYQDIIIEHQKVVKGNQKRLESLRELAGKENLEYPSVTLPPQPHTKEGVDAYNEVIARVRMWVNLNLWQKLKLSRDDAKPLLRLKGFPSFPLVERQANEVDWWDMVCNVKKLINEKKEDGKVFWQNLAGYKRQEALRPYLSSEEDRKKGKKFARYQLGDLLLHLEKKHGEDWGKVYDEAWERIDKKVEGLSKHIKLEEERRSEDAQSKAALTDWLRAKASFVIEGLKEADKDEFCRCELKLQKWYGDLRGKPFAIEAENSILDISGFSKQYNCAFIWQKDGVKKLNLYLIINYFKGGKLRFKKIKPEAFEANRFYTVINKKSGEIVPMEVNFNFDDPNLIILPLAFGKRQGREFIWNDLLSLETGSLKLANGRVIEKTLYNRRTRQDEPALFVALTFERREVLDSSLIKPMNLIGVDRGENIPAVIALTDPEGCPLSEFKDSLGNPTHILRIGESYKEKQRTIQAKKEVEQRRAGYYSRKYASKAKNLADDMVRNTARDLLYYAVTQDAMLIFENLSRGFGRQGKRTFMAERQYTRMEDWLTAKLAYEGLPSKTYLSKTLAQYTSKTCSNCGFTITSADYDRVLEKLKKTATGWMTTINGKELKVEGQITYYNRYKRQNVVKDLSVELDRLSEESVNNDISSWTKGRSGEALSLLKKRFSHRPVQEKFVCLNCGFETHADEQAALNIARSWLFLRSQEYKKYQTNKTTGNTDKRAFVETWQSFYRKKLKEVWKPAV

SEQ ID NO: 27687 - protein, 978 aa, synthetic construct
  REGION 1..978: note = engineered CasX variant
QEIKRINKIRRRLVKDSNTKKAGKTGPMKTLLVRVMTPDLRERLENLRKKPENIPQPISNTSRANLNKLLTDYTEMKKAILHVYWEEFQKDPVGLMSRVAQPASKKIDQNKLKPEMDEKGNLTTAGFACSQCGQPLFVYKLEQVSEKGKAYTNYFGRCNVAEHEKLILLAQLKPEKDSDEAVTYSLGKFGQRALDFYSIHVTKESTHPVKPLAQIAGNRYASGPVGKALSDACMGTIASFLSKYQDIIIEHQKVVKGNQKRLESLRELAGKENLEYPSVTLPPQPHTKEGVDAYNEVIARVRMWVNLNLWQKLKLSRDDAKPLLRLKGFPSFPLVERQANEVDWWDMVCNVKKLINEKKEDGKVFWQNLAGYKRQEALRPYLSSEEDRKKGKKFARYQLGDLLLHLEKKHGEDWGKVYDEAWERIDKKVEGLSKHIKLEEERRSEDAQSKAALTDWLRAKASFVIEGLKEADKDEFCRCELKLQKWYGDLRGKPFAIEAENSILDISGFSKQYNCAFIWQKDGVKKLNLYLIINYFKGGKLRFKKIKPEAFEANRFYTVINKKSGEIVPMEVNFNFDDPNLIILPLAFGKRQGREFIWNDLLSLETGSLKLANGRVIEKTLYNRRTRQDEPALFVALTFERREVLDSSLIKPMNLIGVDRGENIPAVIALTDPEGCPLSEFKDSLGNPTHILRIGESYKEKQRTIQAKKEVEQRRAGGYSRKYASKAKNLADDMVRNTARDLLYYAVTQDAMLIFENLSRGFGRQGKRTFMAERQYTRMEDWLTAKLAYEGLPSKTYLSKTLAQYTSKTCSNCGFTITSADYDRVLEKLKKTATGWMTTINGKELKVEGQITYYNRYKRQNVVKDLSVELDRLSEESVNNDISSWTKGRSGEALSLLKKRFSHRPVQEKFVCLNCGFETHADEQAALNIARSWLFLRSQEYKKYQTNKTTGNTDKRAFVETWQSFYRKKLKEVWKPAV

SEQ ID NO: 27688 - protein, 978 aa, synthetic construct
  REGION 1..978: note = engineered CasX variant
QEIKRINKIRRRLVKDSNTKKAGKTGPMKTLLVRVMTPDLRERLENLRKKPENIPQPISNTSRANLNKLLTDYTEMKKAILHVYWEEFQKDPVGLMSRVAQPASKKIDQNKLKPEMDEKGNLTTAGFACSQCGQPLFVYKLEQVSEKGKAYTNYFGRCNVAEHEKLILLAQLKPEKDSDEAVTYSLGKFGQRALDFYSIHVTKESTHPVKPLAQIAGNRYASGPVGKALSDACMGTIASFLSKYQDIIIEHQKVVKGNQKRLESLRELAGKENLEYPSVTLPPQPHTKEGVDAYNEVIARVRMWVNLNLWQKLKLSRDDAKPLLRLKGFPSFPLVERQANEVDWWDMVCNVKKLINEKKEDGKVFWQNLAGYKRQEALRPYLSSEEDRKKGKKFARYQLGDLLLHLEKKHGEDWGKVYDEAWERIDKKVEGLSKHIKLEEERRSEDAQSKAALTDWLRAKASFVIEGLKEADKDEFCRCELKLQKWYGDLRGKPFAIEAENSILDISGFSKQYNCAFIWQKDGVKKLNLYLIINYFKGGKLRFKKIKPEAFEANRFYTVINKKSGEIVPMEVNFNFDDPNLIILPLAFGKRQGREFIWNDLLSLETGSLKLANGRVIEKTLYNRRTRQDEPALFVALTFERREVLDSSKIKPMNLIGVDRGENIPAVIALTDPHGCPLSRFKDSLGNPTHILRIGESYKEKQRTIQAKKEVEQRRAGGYSRKYASKAKNLADDMVRNTARDLLYYAVTQDAMLIFENLSRGFGRQGKRTFMAERQYTRMEDWLTAKLAYEGLPSKTYLSKTLAQYTSKTCSNCGFTITSADYDRVLEKLKKTATGWMTTINGKELKVEGQITYYNRYKRQNVVKDLSVELDRLSEESVNNDISSWTKGRSGEALSLLKKRFSHRPVQEKFVCLNCGFETHADEQAALNIARSWLFLRSQEYKKYQTNKTTGNTDKRAFVETWQSFYRKKLKEVWKPAV

SEQ ID NO: 27689 - protein, 978 aa, synthetic construct
  REGION 1..978: note = engineered CasX variant
QEIKRINKIRRRLVKDSNTKKAGKTGPMKTLLVRVMTPDLRERLENLRKKPENIPQPISNTSRANLNKLLTDYTEMKKAILHVYWEEFQKDPVGLMSRVAQPASKKIDQNKLKPEMDEKGNLTTAGFACSQCGQPLFVYKLEQVSEKGKAYTNYFGRCNVAEHEKLILLAQLKPEKDSDEAVTYSLGKFGQRALDFYSIHVTKESTHPVKPLAQIAGNRYASGPVGKALSDACMGTIASFLSKYQDIIIEHQKVVKGNQKRLESLRELAGKENLEYPSVTLPPQPHTKEGVDAYNEVIARVRMWVNLNLWQKLKLSRDDAKPLLRLKGFPSFPLVERQANEVDWWDMVCNVKKLINEKKEDGKVFWQNLAGYKRQEALRPYLSSEEDRKKGKKFARYQLGDLLLHLEKKHGEDWGKVYDEAWERIDKKVEGLSKHIKLEEERRSEDAQSKAALTDWLRAKASFVIEGLKEADKDEFCRCELKLQKWYGDLRGKPFAIEAENSILDISGFSKQYNCAFIWQKDGVKKLNLYLIINYFKGGKLRFKKIKPEAFEANRFYTVINKKSGEIVPMEVNFNFDDPNLIILPLAFGKRQGREFIWNDLLSLETGSLKLANGRVIEKTLYNRRTRQDEPALFVALTFERREVLDSSKIKPMNLIGVDRGENIPAVIALTDPEGCPLSVFKDSLGNPTHILRIGESYKEKQRTIQAKKEVEQRRAGGYSRKYASKAKNLADDMVRNTARDLLYYAVTQDAMLIFENLSRGFGRQGKRTFMAERQYTRMEDWLTAKLAYEGLPSKTYLSKTLAQYTSKTCSNCGFTITSADYDRVLEKLKKTATGWMTTINGKELKVEGQITYYNRYKRQNVVKDLSVELDRLSEESVNNDISSWTKGRSGEALSLLKKRFSHRPVQEKFVCLNCGFETHADEQAALNIARSWLFLRSQEYKKYQTNKTTGNTDKRAFVETWQSFYRKKLKEVWKPAV

SEQ ID NO: 27690 - protein, 978 aa, synthetic construct
  REGION 1..978: note = engineered CasX variant
QEIKRINKIRRRLVKDSNTKKAGKTGPMKTLLVRVMTPDLRERLENLRKKPENIPQPISNTSRANLNKLLTDYTEMKKAILHVYWEEFQKDPVGLMSRVAQPASKKIDQNKLKPEMDEKGNLTTAGFACSQCGQPLFVYKLEQVSEKGKAYTNYFGRCNVAEHEKLILLAQLKPEKDSDEAVTYSLGKFGQRALDFYSIHVTKESTHPVKPLAQIAGNRYASGPVGKALSDACMGTIASFLSKYQDIIIEHQKVVKGNQKRLESLRELAGKENLEYPSVTLPPQPHTKEGVDAYNEVIARVRMWVNLNLWQKLKLSRDDAKPLLRLKGFPSFPLVERQANEVDWWDMVCNVKKLINEKKEDGKVFWQNLAGYKRQEALRPYLSSEEDRKKGKKFARYQLGDLLLHLEKKHGEDWGKVYDEAWERIDKKVEGLSKHIKLEEERRSEDAQSKAALTDWLRAKASFVIEGLKEADKDEFCRCELKLQKWYGDLRGKPFAIEAENSILDISGFSKQYNCAFIWQKDGVKKLNLYLIINYFKGGKLRFKKIKPEAFEANRFYTVINKKSGEIVPMEVNFNFDDPNLIILPLAFGKRQGREFIWNDLLSLETGSLKLANGRVIEKTLYNRRTRQDEPALFVALTFERREVLDSSKIKPMNLIGVDRGENIPAVIALTDPEGCPLSRFKDSWGNPTHILRIGESYKEKQRTIQAKKEVEQRRAGGYSRKYASKAKNLADDMVRNTARDLLYYAVTQDAMLIFENLSRGFGRQGKRTFMAERQYTRMEDWLTAKLAYEGLPSKTYLSKTLAQYTSKTCSNCGFTITSADYDRVLEKLKKTATGWMTTINGKELKVEGQITYYNRYKRQNVVKDLSVELDRLSEESVNNDISSWTKGRSGEALSLLKKRFSHRPVQEKFVCLNCGFETHADEQAALNIARSWLFLRSQEYKKYQTNKTTGNTDKRAFVETWQSFYRKKLKEVWKPAV

SEQ ID NO: 27691 - protein, 978 aa, synthetic construct
  REGION 1..978: note = engineered CasX variant
QEIKRINKIRRRLVKDSNTKKAGKTGPMKTLLVRVMTPDLRERLENLRKKPENIPQPISNTSRANLNKLLTDYTEMKKAILHVYWEEFQKDPVGLMSRVAQPASKKIDQNKLKPEMDEKGNLTTAGFACSQCGQPLFVYKLEQVSEKGKAYTNYFGRCNVAEHEKLILLAQLKPEKDSDEAVTYSLGKFGQRALDFYSIHVTKESTHPVKPLAQIAGNRYASGPVGKALSDACMGTIASFLSKYQDIIIEHQKVVKGNQKRLESLRELAGKENLEYPSVTLPPQPHTKEGVDAYNEVIARVRMWVNLNLWQKLKLSRDDAKPLLRLKGFPSFPLVERQANEVDWWDMVCNVKKLINEKKEDGKVFWQNLAGYKRQEALRPYLSSEEDRKKGKKFARYQLGDLLLHLEKKHGEDWGKVYDEAWERIDKKVEGLSKHIKLEEERRSEDAQSKAALTDWLRAKASFVIEGLKEADKDEFCRCELKLQKWYGDLRGKPFAIEAENSILDISGFSKQYNCAFIWQKDGVKKLNLYLIINYFKGGKLRFKKIKPEAFEANRFYTVINKKSGEIVPMEVNFNFDDPNLIILPLAFGKRQGREFIWNDLLSLETGSLKLANGRVIEKTLYNRRTRQDEPALFVALTFERREVLDSSKIKPMNLIGVDRGENIPAVIALTDPEGCPLSRFKDSSGNPTHILRIGESYKEKQRTIQAKKEVEQRRAGGYSRKYASKAKNLADDMVRNTARDLLYYAVTQDAMLIFENLSRGFGRQGKRTFMAERQYTRMEDWLTAKLAYEGLPSKTYLSKTLAQYTSKTCSNCGFTITSADYDRVLEKLKKTATGWMTTINGKELKVEGQITYYNRYKRQNVVKDLSVELDRLSEESVNNDISSWTKGRSGEALSLLKKRFSHRPVQEKFVCLNCGFETHADEQAALNIARSWLFLRSQEYKKYQTNKTTGNTDKRAFVETWQSFYRKKLKEVWKPAV

SEQ ID NO: 27692 - protein, 978 aa, synthetic construct
  REGION 1..978: note = engineered CasX variant
QEIKRINKIRRRLVKDSNTKKAGKTGPMKTLLVRVMTPDLRERLENLRKKPENIPQPISNTSRANLNKLLTDYTEMKKAILHVYWEEFQKDPVGLMSRVAQPASKKIDQNKLKPEMDEKGNLTTAGFACSQCGQPLFVYKLEQVSEKGKAYTNYFGRCNVAEHEKLILLAQLKPEKDSDEAVTYSLGKFGQRALDFYSIHVTKESTHPVKPLAQIAGNRYASGPVGKALSDACMGTIASFLSKYQDIIIEHQKVVKGNQKRLESLRELAGKENLEYPSVTLPPQPHTKEGVDAYNEVIARVRMWVNLNLWQKLKLSRDDAKPLLRLKGFPSFPLVERQANEVDWWDMVCNVKKLINEKKEDGKVFWQNLAGYKRQEALRPYLSSEEDRKKGKKFARYQLGDLLLHLEKKHGEDWGKVYDEAWERIDKKVEGLSKHIKLEEERRSEDAQSKAALTDWLRAKASFVIEGLKEADKDEFCRCELKLQKWYGDLRGKPFAIEAENSILDISGFSKQYNCAFIWQKDGVKKLNLYLIINYFKGGKLRFKKIKPEAFEANRFYTVINKKSGEIVPMEVNFNFDDPNLIILPLAFGKRQGREFIWNDLLSLETGSLKLANGRVIEKTLYNRRTRQDEPALFVALTFERREVLDSSKIKPMNLIGVDRGENIPAVIALTDPEGCPLSRFKDSSGNPTHILRIGESYKEKQKTIQAKKEVEQRRAGGYSRKYASKAKNLADDMVRNTARDLLYYAVTQDAMLIFENLSRGFGRQGKRTFMAERQYTRMEDWLTAKLAYEGLPSKTYLSKTLAQYTSKTCSNCGFTITSADYDRVLEKLKKTATGWMTTINGKELKVEGQITYYNRYKRQNVVKDLSVELDRLSEESVNNDISSWTKGRSGEALSLLKKRFSHRPVQEKFVCLNCGFETHADEQAALNIARSWLFLRSQEYKKYQTNKTTGNTDKRAFVETWQSFYRKKLKEVWKPAV

SEQ ID NO: 27693 - protein, 978 aa, synthetic construct
  REGION 1..978: note = engineered CasX variant
QEIKRINKIRRRLVKDSNTKKAGKTGPMKTLLVRVMTPDLRERLENLRKKPENIPQPISNTSRANLNKLLTDYTEMKKAILHVYWEEFQKDPVGLMSRVAQPASKKIDQNKLKPEMDEKGNLTTAGFACSQCGQPLFVYKLEQVSEKGKAYTNYFGRCNVAEHEKLILLAQLKPEKDSDEAVTYSLGKFGQRALDFYSIHVTKESTHPVKPLAQIAGNRYASGPVGKALSDACMGTIASFLSKYQDIIIEHQKVVKGNQKRLESLRELAGKENLEYPSVTLPPQPHTKEGVDAYNEVIARVRMWVNLNLWQKLKLSRDDAKPLLRLKGFPSFPLVERQANEVDWWDMVCNVKKLINEKKEDGKVFWQNLAGYKRQEALRPYLSSEEDRKKGKKFARYQLGDLLLHLEKKHGEDWGKVYDEAWERIDKKVEGLSKHIKLEEERRSEDAQSKAALTDWLRAKASFVIEGLKEADKDEFCRCELKLQKWYGDLRGKPFAIEAENSILDISGFSKQYNCAFIWQKDGVKKLNLYLIINYFKGGKLRFKKIKPEAFEANRFYTVINKKSGEIVPMEVNFNFDDPNLIILPLAFGKRQGREFIWNDLLSLETGSLKLANGRVIEKTLYNRRTRQDEPALFVALTFERREVLDSSKIKPMNLIGVDRGENIPAVIALTDPEGCPLSRFKDSLGNPTHILRIGESYKEKQRTIQAKKEVEQRRAGGYSRKYASKAKNLADDMVRNTARDLLYYAVTQDAMLIFENLSRGFGRQGKRTFMAERQYTRMEDWLTAKLAYEGLPSKTYLSKTLAQYTSKTCSNCGFTITSADYDRVLEKLKKTATGWMTTINGKELKVEGQITYYNRYKRQNVVKDLSVELDRLSEESVNNDISSWTKGRSGEALSLLKKRFSHRPVQEKFVCLNCGFETHADEQAALNIARSWLFLRSQEYKKYQTNKTTGNTDKRAFVETWQSFYRKKLKEVWKPAV

SEQ ID NO: 27694 - protein, 978 aa, synthetic construct
  REGION 1..978: note = engineered CasX variant
QEIKRINKIRRRLVKDSNTKKAGKTGPMKTLLVRVMTPDLRERLENLRKKPENIPQPISNTSRANLNKLLTDYTEMKKAILHVYWEEFQKDPVGLMSRVAQPASKKIDQNKLKPEMDEKGNLTTAGFACSQCGQPLFVYKLEQVSEKGKAYTNYFGRCNVAEHEKLILLAQLKPEKDSDEAVTYSLGKFGQRALDFYSIHVTKESTHPVKPLAQIAGNRYASGPVGKALSDACMGTIASFLSKYQDIIIEHQKVVKGNQKRLESLRELAGKENLEYPSVTLPPQPHTKEGVDAYNEVIARVRMWVNLNLWQKLKLSRDDAKPLLRLKGFPSFPLVERQANEVDWWDMVCNVKKLINEKKEDGKVFWQNLAGYKRQEALRPYLSSEEDRKKGKKFARYQLGDLLLHLEKKHGEDWGKVYDEAWERIDKKVEGLSKHIKLEEERRSEDAQSKAALTDWLRAKASFVIEGLKEADKDEFCRCELKLQKWYGDLRGKPFAIEAENSILDISGFSKQYNCAFIWQKDGVKKLNLYLIINYFKGGKLRFKKIKPEAFEANRFYTVINKKSGEIVPMEVNFNFDDPNLIILPLAFGKRQGREFIWNDLLSLETGSLKLANGRVIEKTLYNRRTRQDEPALFVALTFERREVLDSSKIKPMNLIGVDRGENIPAVIALTDPEGCPLSRFKDSLGNPTHILRIGESYKEKQRTIQAKKEHEQRRAGGYSRKYASKAKNLADDMVRNTARDLLYYAVTQDAMLIFENLSRGFGRQGKRTFMAERQYTRMEDWLTAKLAYEGLPSKTYLSKTLAQYTSKTCSNCGFTITSADYDRVLEKLKKTATGWMTTINGKELKVEGQITYYNRYKRQNVVKDLSVELDRLSEESVNNDISSWTKGRSGEALSLLKKRFSHRPVQEKFVCLNCGFETHADEQAALNIARSWLFLRSQEYKKYQTNKTTGNTDKRAFVETWQSFYRKKLKEVWKPAV

SEQ ID NO: 27695 - protein, 978 aa, synthetic construct
  REGION 1..978: note = engineered CasX variant
QEIKRINKIRRRLVKDSNTKKAGKTGPMKTLLVRVMTPDLRERLENLRKKPENIPQPISNTSRANLNKLLTDYTEMKKAILHVYWEEFQKDPVGLMSRVAQPASKKIDQNKLKPEMDEKGNLTTAGFACSQCGQPLFVYKLEQVSEKGKAYTNYFGRCNVAEHEKLILLAQLKPEKDSDEAVTYSLGKFGQRALDFYSIHVTKESTHPVKPLAQIAGNRYASGPVGKALSDACMGTIASFLSKYQDIIIEHQKVVKGNQKRLESLRELAGKENLEYPSVTLPPQPHTKEGVDAYNEVIARVRMWVNLNLWQKLKLSRDDAKPLLRLKGFPSFPLVERQANEVDWWDMVCNVKKLINEKKEDGKVFWQNLAGYKRQEALRPYLSSEEDRKKGKKFARYQLGDLLLHLEKKHGEDWGKVYDEAWERIDKKVEGLSKHIKLEEERRSEDAQSKAALTDWLRAKASFVIEGLKEADKDEFCRCELKLQKWYGDLRGKPFAIEAENSILDISGFSKQYNCAFIWQKDGVKKLNLYLIINYFKGGKLRFKKIKPEAFEANRFYTVINKKSGEIVPMEVNFNFDDPNLIILPLAFGKRQGREFIWNDLLSLETGSLKLANGRVIEKTLYNRRTRQDEPALFVALTFERREVLDSSKIKPMNLIGVDRGENIPAVIALTDPEGCPLSRFKDSLGNPTHILRIGESYKEKQKTIQAKKEVEQRRAGGYSRKYASKAKNLADDMVRNTARDLLYYAVTQDAMLIFENLSRGFGRQGKRTFMAERQYTRMEDWLTAKLAYEGLPSKTYLSKTLAQYTSKTCSNCGFTITSADYDRVLEKLKKTATGWMTTINGKELKVEGQITYYNRYKRQNVVKDLSVELDRLSEESVNNDISSWTKGRSGEALSLLKKRFSHRPVQEKFVCLNCGFETHADEQAALNIARSWLFLRSQEYKKYQTNKTTGNTDKRAFVETWQSFYRKKLKEVWKPAV

SEQ ID NO: 27696 - protein, 978 aa, synthetic construct
  REGION 1..978: note = engineered CasX variant
QEIKRINKIRRRLVKDSNTKKAGKTGPMKTLLVRVMTPDLRERLENLRKKPENIPQPISNTSRANLNKLLTDYTEMKKAILHVYWEEFQKDPVGLMSRVAQPASKKIDQNKLKPEMDEKGNLTTAGFACSQCGQPLFVYKLEQVSEKGKAYTNYFGRCNVAEHEKLILLAQLKPEKDSDEAVTYSLGKFGQRALDFYSIHVTKESTHPVKPLAQIAGNRYASGPVGKALSDACMGTIASFLSKYQDIIIEHQKVVKGNQKRLESLRELAGKENLEYPSVTLPPQPHTKEGVDAYNEVIARVRMWVNLNLWQKLKLSRDDAKPLLRLKGFPSFPLVERQANEVDWWDMVCNVKKLINEKKEDGKVFWQNLAGYKRQEALRPYLSSEEDRKKGKKFARYQLGDLLLHLEKKHGEDWGKVYDEAWERIDKKVEGLSKHIKLEEERRSEDAQSKAALTDWLRAKASFVIEGLKEADKDEFCRCELKLQKWYGDLRGKPFAIEAENSILDISGFSKQYNCAFIWQKDGVKKLNLYLIINYFKGGKLRFKKIKPEAFEANRFYTVINKKSGEIVPMEVNFNFDDPNLIILPLAFGKRQGREFIWNDLLSLETGSLKLANGRVIEKTLYNRRTRQDEPALFVALTFERREVLDSSKIKPMNLIGVDRGENIPAVIALTDPEGCPLSRFKDSLGNPTHILRIGEHYKEKQRTIQAKKEVEQRRAGGYSRKYASKAKNLADDMVRNTARDLLYYAVTQDAMLIFENLSRGFGRQGKRTFMAERQYTRMEDWLTAKLAYEGLPSKTYLSKTLAQYTSKTCSNCGFTITSADYDRVLEKLKKTATGWMTTINGKELKVEGQITYYNRYKRQNVVKDLSVELDRLSEESVNNDISSWTKGRSGEALSLLKKRFSHRPVQEKFVCLNCGFETHADEQAALNIARSWLFLRSQEYKKYQTNKTTGNTDKRAFVETWQSFYRKKLKEVWKPAV

SEQ ID NO: 27697 - protein, 978 aa, synthetic construct
  REGION 1..978: note = engineered CasX variant
QEIKRINKIRRRLVKDSNTKKAGKTGPMKTLLVRVMTPDLRERLENLRKKPENIPQPISNTSRANLNKLLTDYTEMKKAILHVYWEEFQKDPVGLMSRVAQPASKKIDQNKLKPEMDEKGNLTTAGFACSQCGQPLFVYKLEQVSEKGKAYTNYFGRCNVAEHEKLILLAQLKPEKDSDEAVTYSLGKFGQRALDFYSIHVTKESTHPVKPLAQIAGNRYASGPVGKALSDACMGTIASFLSKYQDIIIEHQKVVKGNQKRLESLRELAGKENLEYPSVTLPPQPHTKEGVDAYNEVIARVRMWVNLNLWQKLKLSRDDAKPLLRLKGFPSFPLVERQANEVDWWDMVCNVKKLINEKKEDGKVFWQNLAGYKRQEALRPYLSSEEDRKKGKKFARYQLGDLLLHLEKKHGEDWGKVYDEAWERIDKKVEGLSKHIKLEEERRSEDAQSKAALTDWLRAKASFVIEGLKEADKDEFCRCELKLQKWYGDLRGKPFAIEAENSILDISGFSKQYNCAFIWQKDGVKKLNLYLIINYFKGGKLRFKKIKPEAFEANRFYTVINKKSGEIVPMEVNFNFDDPNLIILPLAFGKRQGREFIWNDLLSLETGSLKLANGRVIEKTLYNRRTRQDEPALFVALTFERREVLDSSKIKPMNLIGVDRGENIPAVIALTDPEGCPLSRFKDQLGNPTHILRIGESYKEKQRTIQAKKEVEQRRAGGYSRKYASKAKNLADDMVRNTARDLLYYAVTQDAMLIFENLSRGFGRQGKRTFMAERQYTRMEDWLTAKLAYEGLPSKTYLSKTLAQYTSKTCSNCGFTITSADYDRVLEKLKKTATGWMTTINGKELKVEGQITYYNRYKRQNVVKDLSVELDRLSEESVNNDISSWTKGRSGEALSLLKKRFSHRPVQEKFVCLNCGFETHADEQAALNIARSWLFLRSQEYKKYQTNKTTGNTDKRAFVETWQSFYRKKLKEVWKPAV

SEQ ID NO: 27698 - protein, 978 aa, synthetic construct
  REGION 1..978: note = engineered CasX variant
QEIKRINKIRRRLVKDSNTKKAGKTGPMKTLLVRVMTPDLRERLENLRKKPENIPQPISNTSRANLNKLLTDYTEMKKAILHVYWEEFQKDPVGLMSRVAQPASKKIDQNKLKPEMDEKGNLTTAGFACSQCGQPLFVYKLEQVSEKGKAYTNYFGRCNVAEHEKLILLAQLKPEKDSDEAVTYSLGKFGQRALDFYSIHVTKESTHPVKPLAQIAGNRYASGPVGKALSDACMGTIASFLSKYQDIIIEHQKVVKGNQKRLESLRELAGKENLEYPSVTLPPQPHTKEGVDAYNEVIARVRMWVNLNLWQKLKLSRDDAKPLLRLKGFPSFPLVERQANEVDWWDMVCNVKKLINEKKEDGKVFWQNLAGYKRQEALRPYLSSEEDRKKGKKFARYQLGDLLLHLEKKHGEDWGKVYDEAWERIDKKVEGLSKHIKLEEERRSEDAQSKAALTDWLRAKASFVIEGLKEADKDEFCRCELKLQKWYGDLRGKPFAIEAENSILDISGFSKQYNCAFIWQKDGVKKLNLYLIINYFKGGKLRFKKIKPEAFEANRFYTVINKKSGEIVPMEVNFNFDDPNLIILPLAFGKRQGREFIWNDLLSLETGSLKLANGRVIEKTLYNRRTRQDEPALFVALTFERREVLDSSKIKPMNLIGVDRGENIPAVIALTDPEGCPLSRFKDQLGNPTHILRIGEHYKEKQRTIQAKKEVEQRRAGGYSRKYASKAKNLADDMVRNTARDLLYYAVTQDAMLIFENLSRGFGRQGKRTFMAERQYTRMEDWLTAKLAYEGLPSKTYLSKTLAQYTSKTCSNCGFTITSADYDRVLEKLKKTATGWMTTINGKELKVEGQITYYNRYKRQNVVKDLSVELDRLSEESVNNDISSWTKGRSGEALSLLKKRFSHRPVQEKFVCLNCGFETHADEQAALNIARSWLFLRSQEYKKYQTNKTTGNTDKRAFVETWQSFYRKKLKEVWKPAV

SEQ ID NO: 27699 - protein, 978 aa, synthetic construct
  REGION 1..978: note = engineered CasX variant
QEIKRINKIRRRLVKDSNTKKAGKTGPMKTLLVRVMTPDLRERLENLRKKPENIPQPISNTSRANLNKLLTDYTEMKKAILHVYWEEFQKDPVGLMSRVAQPASKKIDQNKLKPEMDEKGNLTTAGFACSQCGQPLFVYKLEQVSEKGKAYTNYFGRCNVAEHEKLILLAQLKPEKDSDEAVTYSLGKFGQRALDFYSIHVTKESTHPVKPLAQIAGNRYASGPVGKALSDACMGTIASFLSKYQDIIIEHQKVVKGNQKRLESLRELAGKENLEYPSVTLPPQPHTKEGVDAYNEVIARVRMWVNLNLWQKLKLSRDDAKPLLRLKGFPSFPLVERQANEVDWWDMVCNVKKLINEKKEDGKVFWQNLAGYKRQEALRPYLSSEEDRKKGKKFARYQLGDLLLHLEKKHGEDWGKVYDEAWERIDKKVEGLSKHIKLEEERRSEDAQSKAALTDWLRAKASFVIEGLKEADKDEFCRCELKLQKWYGDLRGKPFAIEAENSILDISGFSKQYNCAFIWQKDGVKKLNLYLIINYFKGGKLRFKKIKPEAFEANRFYTVINKKSGEIVPMEVNFNFDDPNLIILPLAFGKRQGREFIWNDLLSLETGSLKLANGRVIEKTLYNRRTRQDEPALFVALTFERREVLDSSKIKPMNLIGVDRGENIPAVIALTDPEGCPLSIFKDSWGNPTHILRIGESYKEKQRTIQAKKEVEQRRAGGYSRKYASKAKNLADDMVRNTARDLLYYAVTQDAMLIFENLSRGFGRQGKRTFMAERQYTRMEDWLTAKLAYEGLPSKTYLSKTLAQYTSKTCSNCGFTITSADYDRVLEKLKKTATGWMTTINGKELKVEGQITYYNRYKRQNVVKDLSVELDRLSEESVNNDISSWTKGRSGEALSLLKKRFSHRPVQEKFVCLNCGFETHADEQAALNIARSWLFLRSQEYKKYQTNKTTGNTDKRAFVETWQSFYRKKLKEVWKPAV

SEQ ID NO: 27700 - protein, 978 aa, synthetic construct
  REGION 1..978: note = engineered CasX variant
QEIKRINKIRRRLVKDSNTKKAGKTGPMKTLLVRVMTPDLRERLENLRKKPENIPQPISNTSRANLNKLLTDYTEMKKAILHVYWEEFQKDPVGLMSRVAQPASKKIDQNKLKPEMDEKGNLTTAGFACSQCGQPLFVYKLEQVSEKGKAYTNYFGRCNVAEHEKLILLAQLKPEKDSDEAVTYSLGKFGQRALDFYSIHVTKESTHPVKPLAQIAGNRYASGPVGKALSDACMGTIASFLSKYQDIIIEHQKVVKGNQKRLESLRELAGKENLEYPSVTLPPQPHTKEGVDAYNEVIARVRMWVNLNLWQKLKLSRDDAKPLLRLKGFPSFPLVERQANEVDWWDMVCNVKKLINEKKEDGKVFWQNLAGYKRQEALRPYLSSEEDRKKGKKFARYQLGDLLLHLEKKHGEDWGKVYDEAWERIDKKVEGLSKHIKLEEERRSEDAQSKAALTDWLRAKASFVIEGLKEADKDEFCRCELKLQKWYGDLRGKPFAIEAENSILDISGFSKQYNCAFIWQKDGVKKLNLYLIINYFKGGKLRFKKIKPEAFEANRFYTVINKKSGEIVPMEVNFNFDDPNLIILPLAFGKRQGREFIWNDLLSLETGSLKLANGRVIEKTLYNRRTRQDEPALFVALTFERREVLDSSKIKPMNLIGVDRGENIPAVIALTDPEGCPLSIFKDSLGNPTHILRIGESYKEKQRTIQAKKEVEQRRAGGYSRKYASKAKNLADDMVRNTARDLLYYAVTQDAMLIFENLSRGFGRQGKRTFMAERQYTRMEDWLTAKLAYEGLPSKTYLSKTLAQYTSKTCSNCGFTITSADYDRVLEKLKKTATGWMTTINGKELKVEGQITYYNRYKRQNVVKDLSVELDRLSEESVNNDISSWTKGRSGEALSLLKKRFSHRPVQEKFVCLNCGFETHADEQAALNIARSWLFLRSQEYKKYQTNKTTGNTDKRAFVETWQSFYRKKLKEVWKPAV

SEQ ID NO: 27701 - protein, 978 aa, synthetic construct
  REGION 1..978: note = engineered CasX variant
QEIKRINKIRRRLVKDSNTKKAGKTGPMKTLLVRVMTPDLRERLENLRKKPENIPQPISNTSRANLNKLLTDYTEMKKAILHVYWEEFQKDPVGLMSRVAQPASKKIDQNKLKPEMDEKGNLTTAGFACSQCGQPLFVYKLEQVSEKGKAYTNYFGRCNVAEHEKLILLAQLKPEKDSDEAVTYSLGKFGQRALDFYSIHVTKESTHPVKPLAQIAGNRYASGPVGKALSDACMGTIASFLSKYQDIIIEHQKVVKGNQKRLESLRELAGKENLEYPSVTLPPQPHTKEGVDAYNEVIARVRMWVNLNLWQKLKLSRDDAKPLLRLKGFPSFPLVERQANEVDWWDMVCNVKKLINEKKEDGKVFWQNLAGYKRQEALRPYLSSEEDRKKGKKFARYQLGDLLLHLEKKHGEDWGKVYDEAWERIDKKVEGLSKHIKLEEERRSEDAQSKAALTDWLRAKASFVIEGLKEADKDEFCRCELKLQKWYGDLRGKPFAIEAENSILDISGFSKQYNCAFIWQKDGVKKLNLYLIINYFKGGKLRFKKIKPEAFEANRFYTVINKKSGEIVPMEVNFNFDDPNLIILPLAFGKRQGREFIWNDLLSLETGSLKLANGRVIEKTLYNRRTRQDEPALFVALTFERREVLDSSIIKPMNLIGVDRGENIPAVIALTDPEGCPLSRFKDSLGNPTHILRIGESYKEKQRTIQAKKEVEQRRAGGYSRKYASKAKNLADDMVRNTARDLLYYAVTQDAMLIFENLSRGFGRQGKRTFMAERQYTRMEDWLTAKLAYEGLPSKTYLSKTLAQYTSKTCSNCGFTITSADYDRVLEKLKKTATGWMTTINGKELKVEGQITYYNRYKRQNVVKDLSVELDRLSEESVNNDISSWTKGRSGEALSLLKKRFSHRPVQEKFVCLNCGFETHADEQAALNIARSWLFLRSQEYKKYQTNKTTGNTDKRAFVETWQSFYRKKLKEVWKPAV

SEQ ID NO: 27702 - protein, 978 aa, synthetic construct
  REGION 1..978: note = engineered CasX variant
QEIKRINKIRRRLVKDSNTKKAGKTGPMKTLLVRVMTPDLRERLENLRKKPENIPQPISNTSRANLNKLLTDYTEMKKAILHVYWEEFQKDPVGLMSRVAQPASKKIDQNKLKPEMDEKGNLTTAGFACSQCGQPLFVYKLEQVSEKGKAYTNYFGRCNVAEHEKLILLAQLKPEKDSDEAVTYSLGKFGQRALDFYSIHVTKESTHPVKPLAQIAGNRYASGPVGKALSDACMGTIASFLSKYQDIIIEHQKVVKGNQKRLESLRELAGKENLEYPSVTLPPQPHTKEGVDAYNEVIARVRMWVNLNLWQKLKLSRDDAKPLLRLKGFPSFPLVERQANEVDWWDMVCNVKKLINEKKEDGKVFWQNLAGYKRQEALRPYLSSEEDRKKGKKFARYQLGDLLLHLEKKHGEDWGKVYDEAWERIDKKVEGLSKHIKLEEERRSEDAQSKAALTDWLRAKASFVIEGLKEADKDEFCRCELKLQKWYGDLRGKPFAIEAENSILDISGFSKQYNCAFIWQKDGVKKLNLYLIINYFKGGKLRFKKIKPEAFEANRFYTVINKKSGEIVPMEVNFNFDDPNLIILPLAFGKRQGREFIWNDLLSLETGSLKLANGRVIEKTLYNRRTRQDEPALFVALTFERREVLDSSHIKPMNLIGVDRGENIPAVIALTDPEGRPLSRFKDSLGNPTHILRIGESYKEKQRTIQAKKEVEQRRAGGYSRKYASKAKNLADDMVRNTARDLLYYAVTQDAMLIFENLSRGFGRQGKRTFMAERQYTRMEDWLTAKLAYEGLPSKTYLSKTLAQYTSKTCSNCGFTITSADYDRVLEKLKKTATGWMTTINGKELKVEGQITYYNRYKRQNVVKDLSVELDRLSEESVNNDISSWTKGRSGEALSLLKKRFSHRPVQEKFVCLNCGFETHADEQAALNIARSWLFLRSQEYKKYQTNKTTGNTDKRAFVETWQSFYRKKLKEVWKPAV

SEQ ID NO: 27703 - protein, 978 aa, synthetic construct
  REGION 1..978: note = engineered CasX variant
QEIKRINKIRRRLVKDSNTKKAGKTGPMKTLLVRVMTPDLRERLENLRKKPENIPQPISNTSRANLNKLLTDYTEMKKAILHVYWEEFQKDPVGLMSRVAQPASKKIDQNKLKPEMDEKGNLTTAGFACSQCGQPLFVYKLEQVSEKGKAYTNYFGRCNVAEHEKLILLAQLKPEKDSDEAVTYSLGKFGQRALDFYSIHVTKESTHPVKPLAQIAGNRYASGPVGKALSDACMGTIASFLSKYQDIIIEHQKVVKGNQKRLESLRELAGKENLEYPSVTLPPQPHTKEGVDAYNEVIARVRMWVNLNLWQKLKLSRDDAKPLLRLKGFPSFPLVERQANEVDWWDMVCNVKKLINEKKEDGKVFWQNLAGYKRQEALRPYLSSEEDRKKGKKFARYQLGDLLLHLEKKHGEDWGKVYDEAWERIDKKVEGLSKHIKLEEERRSEDAQSKAALTDWLRAKASFVIEGLKEADKDEFCRCELKLQKWYGDLRGKPFAIEAENSILDISGFSKQYNCAFIWQKDGVKKLNLYLIINYFKGGKLRFKKIKPEAFEANRFYTVINKKSGEIVPMEVNFNFDDPNLIILPLAFGKRQGREFIWNDLLSLETGSLKLANGRVIEKTLYNRRTRQDEPALFVALTFERREVLDSSHIKPMNLIGVDRGENIPAVIALTDPEGKPLSRFKDSLGNPTHILRIGESYKEKQRTIQAKKEVEQRRAGGYSRKYASKAKNLADDMVRNTARDLLYYAVTQDAMLIFENLSRGFGRQGKRTFMAERQYTRMEDWLTAKLAYEGLPSKTYLSKTLAQYTSKTCSNCGFTITSADYDRVLEKLKKTATGWMTTINGKELKVEGQITYYNRYKRQNVVKDLSVELDRLSEESVNNDISSWTKGRSGEALSLLKKRFSHRPVQEKFVCLNCGFETHADEQAALNIARSWLFLRSQEYKKYQTNKTTGNTDKRAFVETWQSFYRKKLKEVWKPAV

SEQ ID NO: 27704 - protein, 978 aa, synthetic construct
  REGION 1..978: note = engineered CasX variant
QEIKRINKIRRRLVKDSNTKKAGKTGPMKTLLVRVMTPDLRERLENLRKKPENIPQPISNTSRANLNKLLTDYTEMKKAILHVYWEEFQKDPVGLMSRVAQPASKKIDQNKLKPEMDEKGNLTTAGFACSQCGQPLFVYKLEQVSEKGKAYTNYFGRCNVAEHEKLILLAQLKPEKDSDEAVTYSLGKFGQRALDFYSIHVTKESTHPVKPLAQIAGNRYASGPVGKALSDACMGTIASFLSKYQDIIIEHQKVVKGNQKRLESLRELAGKENLEYPSVTLPPQPHTKEGVDAYNEVIARVRMWVNLNLWQKLKLSRDDAKPLLRLKGFPSFPLVERQANEVDWWDMVCNVKKLINEKKEDGKVFWQNLAGYKRQEALRPYLSSEEDRKKGKKFARYQLGDLLLHLEKKHGEDWGKVYDEAWERIDKKVEGLSKHIKLEEERRSEDAQSKAALTDWLRAKASFVIEGLKEADKDEFCRCELKLQKWYGDLRGKPFAIEAENSILDISGFSKQYNCAFIWQKDGVKKLNLYLIINYFKGGKLRFKKIKPEAFEANRFYTVINKKSGEIVPMEVNFNFDDPNLIILPLAFGKRQGREFIWNDLLSLETGSLKLANGRVIEKTLYNRRTRQDEPALFVALTFERREVLDSSHIKPMNLIGVDRGENIPAVIALTDPEGKPLSRFKDSLGNPTHILRIGERYKEKQRTIQAKKEVEQRRAGGYSRKYASKAKNLADDMVRNTARDLLYYAVTQDAMLIFENLSRGFGRQGKRTFMAERQYTRMEDWLTAKLAYEGLPSKTYLSKTLAQYTSKTCSNCGFTITSADYDRVLEKLKKTATGWMTTINGKELKVEGQITYYNRYKRQNVVKDLSVELDRLSEESVNNDISSWTKGRSGEALSLLKKRFSHRPVQEKFVCLNCGFETHADEQAALNIARSWLFLRSQEYKKYQTNKTTGNTDKRAFVETWQSFYRKKLKEVWKPAV

SEQ ID NO: 27705 - protein, 978 aa, synthetic construct
  REGION 1..978: note = engineered CasX variant
QEIKRINKIRRRLVKDSNTKKAGKTGPMKTLLVRVMTPDLRERLENLRKKPENIPQPISNTSRANLNKLLTDYTEMKKAILHVYWEEFQKDPVGLMSRVAQPASKKIDQNKLKPEMDEKGNLTTAGFACSQCGQPLFVYKLEQVSEKGKAYTNYFGRCNVAEHEKLILLAQLKPEKDSDEAVTYSLGKFGQRALDFYSIHVTKESTHPVKPLAQIAGNRYASGPVGKALSDACMGTIASFLSKYQDIIIEHQKVVKGNQKRLESLRELAGKENLEYPSVTLPPQPHTKEGVDAYNEVIARVRMWVNLNLWQKLKLSRDDAKPLLRLKGFPSFPLVERQANEVDWWDMVCNVKKLINEKKEDGKVFWQNLAGYKRQEALRPYLSSEEDRKKGKKFARYQLGDLLLHLEKKHGEDWGKVYDEAWERIDKKVEGLSKHIKLEEERRSEDAQSKAALTDWLRAKASFVIEGLKEADKDEFCRCELKLQKWYGDLRGKPFAIEAENSILDISGFSKQYNCAFIWQKDGVKKLNLYLIINYFKGGKLRFKKIKPEAFEANRFYTVINKKSGEIVPMEVNFNFDDPNLIILPLAFGKRQGREFIWNDLLSLETGSLKLANGRVIEKTLYNRRTRQDEPALFVALTFERREVLDSSHIKPMNLIGVDRGENIPAVIALTDPEGCPLSRFKDSLGNPTHILRIGESYKETQRTIQAKKEVEQRRAGGYSRKYASKAKNLADDMVRNTARDLLYYAVTQDAMLIFENLSRGFGRQGKRTFMAERQYTRMEDWLTAKLAYEGLPSKTYLSKTLAQYTSKTCSNCGFTITSADYDRVLEKLKKTATGWMTTINGKELKVEGQITYYNRYKRQNVVKDLSVELDRLSEESVNNDISSWTKGRSGEALSLLKKRFSHRPVQEKFVCLNCGFETHADEQAALNIARSWLFLRSQEYKKYQTNKTTGNTDKRAFVETWQSFYRKKLKEVWKPAV

SEQ ID NO: 27706 - protein, 978 aa, synthetic construct
  REGION 1..978: note = engineered CasX variant
QEIKRINKIRRRLVKDSNTKKAGKTGPMKTLLVRVMTPDLRERLENLRKKPENIPQPISNTSRANLNKLLTDYTEMKKAILHVYWEEFQKDPVGLMSRVAQPASKKIDQNKLKPEMDEKGNLTTAGFACSQCGQPLFVYKLEQVSEKGKAYTNYFGRCNVAEHEKLILLAQLKPEKDSDEAVTYSLGKFGQRALDFYSIHVTKESTHPVKPLAQIAGNRYASGPVGKALSDACMGTIASFLSKYQDIIIEHQKVVKGNQKRLESLRELAGKENLEYPSVTLPPQPHTKEGVDAYNEVIARVRMWVNLNLWQKLKLSRDDAKPLLRLKGFPSFPLVERQANEVDWWDMVCNVKKLINEKKEDGKVFWQNLAGYKRQEALRPYLSSEEDRKKGKKFARYQLGDLLLHLEKKHGEDWGKVYDEAWERIDKKVEGLSKHIKLEEERRSEDAQSKAALTDWLRAKASFVIEGLKEADKDEFCRCELKLQKWYGDLRGKPFAIEAENSILDISGFSKQYNCAFIWQKDGVKKLNLYLIINYFKGGKLRFKKIKPEAFEANRFYTVINKKSGEIVPMEVNFNFDDPNLIILPLAFGKRQGREFIWNDLLSLETGSLKLANGRVIEKTLYNRRTRQDEPALFVALTFERREVLDSSHIKPMNLIGVDRGENIPAVIALTDPEGCPLSRFKDSLGNPTHILRIGESYKETQRTIQAKKEAEQRRAGGYSRKYASKAKNLADDMVRNTARDLLYYAVTQDAMLIFENLSRGFGRQGKRTFMAERQYTRMEDWLTAKLAYEGLPSKTYLSKTLAQYTSKTCSNCGFTITSADYDRVLEKLKKTATGWMTTINGKELKVEGQITYYNRYKRQNVVKDLSVELDRLSEESVNNDISSWTKGRSGEALSLLKKRFSHRPVQEKFVCLNCGFETHADEQAALNIARSWLFLRSQEYKKYQTNKTTGNTDKRAFVETWQSFYRKKLKEVWKPAV

SEQ ID NO: 27707 - protein, 978 aa, synthetic construct
  REGION 1..978: note = engineered CasX variant
QEIKRINKIRRRLVKDSNTKKAGKTGPMKTLLVRVMTPDLRERLENLRKKPENIPQPISNTSRANLNKLLTDYTEMKKAILHVYWEEFQKDPVGLMSRVAQPASKKIDQNKLKPEMDEKGNLTTAGFACSQCGQPLFVYKLEQVSEKGKAYTNYFGRCNVAEHEKLILLAQLKPEKDSDEAVTYSLGKFGQRALDFYSIHVTKESTHPVKPLAQIAGNRYASGPVGKALSDACMGTIASFLSKYQDIIIEHQKVVKGNQKRLESLRELAGKENLEYPSVTLPPQPHTKEGVDAYNEVIARVRMWVNLNLWQKLKLSRDDAKPLLRLKGFPSFPLVERQANEVDWWDMVCNVKKLINEKKEDGKVFWQNLAGYKRQEALRPYLSSEEDRKKGKKFARYQLGDLLLHLEKKHGEDWGKVYDEAWERIDKKVEGLSKHIKLEEERRSEDAQSKAALTDWLRAKASFVIEGLKEADKDEFCRCELKLQKWYGDLRGKPFAIEAENSILDISGFSKQYNCAFIWQKDGVKKLNLYLIINYFKGGKLRFKKIKPEAFEANRFYTVINKKSGEIVPMEVNFNFDDPNLIILPLAFGKRQGREFIWNDLLSLETGSLKLANGRVIEKTLYNRRTRQDEPALFVALTFERREVLDSSHIKPMNLIGVDRGENIPAVIALTDPEGCPLSRFKDSLGNPTHILRIGESYKEKQRTIQAKKEVEQRRAGGYSRKYASKAKNLADDMVRNTARDLLYYAVTQDAMLIFENLSRGFGRQGKRTFMAERQYTRMEDWLTAKLAYEGLPSKTYLSKTLAQYTSKTCSNCGFTITSADYDRVLEKLKKTATGWMTTINGKELKVEGQITYYNRYKRQNVVKDLSVELDRLSEESVNNDISSWTKGRSGEALSLLKKRFSHRPVQEKFVCLNCGFETHADEQAALNIARSWLFLRSQEYKKYQTNKTTGNTDKRAFVETWQSFYRKKLKEVWKPAV

SEQ ID NO: 27708 - protein, 978 aa, synthetic construct
  REGION 1..978: note = engineered CasX variant
QEIKRINKIRRRLVKDSNTKKAGKTGPMKTLLVRVMTPDLRERLENLRKKPENIPQPISNTSRANLNKLLTDYTEMKKAILHVYWEEFQKDPVGLMSRVAQPASKKIDQNKLKPEMDEKGNLTTAGFACSQCGQPLFVYKLEQVSEKGKAYTNYFGRCNVAEHEKLILLAQLKPEKDSDEAVTYSLGKFGQRALDFYSIHVTKESTHPVKPLAQIAGNRYASGPVGKALSDACMGTIASFLSKYQDIIIEHQKVVKGNQKRLESLRELAGKENLEYPSVTLPPQPHTKEGVDAYNEVIARVRMWVNLNLWQKLKLSRDDAKPLLRLKGFPSFPLVERQANEVDWWDMVCNVKKLINEKKEDGKVFWQNLAGYKRQEALRPYLSSEEDRKKGKKFARYQLGDLLLHLEKKHGEDWGKVYDEAWERIDKKVEGLSKHIKLEEERRSEDAQSKAALTDWLRAKASFVIEGLKEADKDEFCRCELKLQKWYGDLRGKPFAIEAENSILDISGFSKQYNCAFIWQKDGVKKLNLYLIINYFKGGKLRFKKIKPEAFEANRFYTVINKKSGEIVPMEVNFNFDDPNLIILPLAFGKRQGREFIWNDLLSLETGSLKLANGRVIEKTLYNRRTRQDEPALFVALTFERREVLDSSHIKPMNLIGVDRGENIPAVIALTDPEGCPLSRFKDSLGNPTHILRIGESYKEKQRTIQAKKEAEQRRAGGYSRKYASKAKNLADDMVRNTARDLLYYAVTQDAMLIFENLSRGFGRQGKRTFMAERQYTRMEDWLTAKLAYEGLPSKTYLSKTLAQYTSKTCSNCGFTITSADYDRVLEKLKKTATGWMTTINGKELKVEGQITYYNRYKRQNVVKDLSVELDRLSEESVNNDISSWTKGRSGEALSLLKKRFSHRPVQEKFVCLNCGFETHADEQAALNIARSWLFLRSQEYKKYQTNKTTGNTDKRAFVETWQSFYRKKLKEVWKPAV

SEQ ID NO: 27709 - protein, 978 aa, synthetic construct
  REGION 1..978: note = engineered CasX variant
QEIKRINKIRRRLVKDSNTKKAGKTGPMKTLLVRVMTPDLRERLENLRKKPENIPQPISNTSRANLNKLLTDYTEMKKAILHVYWEEFQKDPVGLMSRVAQPASKKIDQNKLKPEMDEKGNLTTAGFACSQCGQPLFVYKLEQVSEKGKAYTNYFGRCNVAEHEKLILLAQLKPEKDSDEAVTYSLGKFGQRALDFYSIHVTKESTHPVKPLAQIAGNRYASGPVGKALSDACMGTIASFLSKYQDIIIEHQKVVKGNQKRLESLRELAGKENLEYPSVTLPPQPHTKEGVDAYNEVIARVRMWVNLNLWQKLKLSRDDAKPLLRLKGFPSFPLVERQANEVDWWDMVCNVKKLINEKKEDGKVFWQNLAGYKRQEALRPYLSSEEDRKKGKKFARYQLGDLLLHLEKKHGEDWGKVYDEAWERIDKKVEGLSKHIKLEEERRSEDAQSKAALTDWLRAKASFVIEGLKEADKDEFCRCELKLQKWYGDLRGKPFAIEAENSILDISGFSKQYNCAFIWQKDGVKKLNLYLIINYFKGGKLRFKKIKPEAFEANRFYTVINKKSGEIVPMEVNFNFDDPNLIILPLAFGKRQGREFIWNDLLSLETGSLKLANGRVIEKTLYNRRTRQDEPALFVALTFERREVLDSSHIKPMNLIGVDRGENIPAVIALTDPEGCPLSRFKDSLGNPTHILRIGERYKEKQRTIQAKKEVEQRRAGGYSRKYASKAKNLADDMVRNTARDLLYYAVTQDAMLIFENLSRGFGRQGKRTFMAERQYTRMEDWLTAKLAYEGLPSKTYLSKTLAQYTSKTCSNCGFTITSADYDRVLEKLKKTATGWMTTINGKELKVEGQITYYNRYKRQNVVKDLSVELDRLSEESVNNDISSWTKGRSGEALSLLKKRFSHRPVQEKFVCLNCGFETHADEQAALNIARSWLFLRSQEYKKYQTNKTTGNTDKRAFVETWQSFYRKKLKEVWKPAV

SEQ ID NO: 27710 - protein, 978 aa, synthetic construct
  REGION 1..978: note = engineered CasX variant
QEIKRINKIRRRLVKDSNTKKAGKTGPMKTLLVRVMTPDLRERLENLRKKPENIPQPISNTSRANLNKLLTDYTEMKKAILHVYWEEFQKDPVGLMSRVAQPASKKIDQNKLKPEMDEKGNLTTAGFACSQCGQPLFVYKLEQVSEKGKAYTNYFGRCNVAEHEKLILLAQLKPEKDSDEAVTYSLGKFGQRALDFYSIHVTKESTHPVKPLAQIAGNRYASGPVGKALSDACMGTIASFLSKYQDIIIEHQKVVKGNQKRLESLRELAGKENLEYPSVTLPPQPHTKEGVDAYNEVIARVRMWVNLNLWQKLKLSRDDAKPLLRLKGFPSFPLVERQANEVDWWDMVCNVKKLINEKKEDGKVFWQNLAGYKRQEALRPYLSSEEDRKKGKKFARYQLGDLLLHLEKKHGEDWGKVYDEAWERIDKKVEGLSKHIKLEEERRSEDAQSKAALTDWLRAKASFVIEGLKEADKDEFCRCELKLQKWYGDLRGKPFAIEAENSILDISGFSKQYNCAFIWQKDGVKKLNLYLIINYFKGGKLRFKKIKPEAFEANRFYTVINKKSGEIVPMEVNFNFDDPNLIILPLAFGKRQGREFIWNDLLSLETGSLKLANGRVIEKTLYNRRTRQDEPALFVALTFERREVLDSSHIKPMNLIGVDRGENIPAVIAITDPEGRPLSRFKDSLGNPTHILRIGESYKEKQRTIQAKKEVEQRRAGGYSRKYASKAKNLADDMVRNTARDLLYYAVTQDAMLIFENLSRGFGRQGKRTFMAERQYTRMEDWLTAKLAYEGLPSKTYLSKTLAQYTSKTCSNCGFTITSADYDRVLEKLKKTATGWMTTINGKELKVEGQITYYNRYKRQNVVKDLSVELDRLSEESVNNDISSWTKGRSGEALSLLKKRFSHRPVQEKFVCLNCGFETHADEQAALNIARSWLFLRSQEYKKYQTNKTTGNTDKRAFVETWQSFYRKKLKEVWKPAV

SEQ ID NO: 27711 - protein, 978 aa, synthetic construct
  REGION 1..978: note = engineered CasX variant
QEIKRINKIRRRLVKDSNTKKAGKTGPMKTLLVRVMTPDLRERLENLRKKPENIPQPISNTSRANLNKLLTDYTEMKKAILHVYWEEFQKDPVGLMSRVAQPASKKIDQNKLKPEMDEKGNLTTAGFACSQCGQPLFVYKLEQVSEKGKAYTNYFGRCNVAEHEKLILLAQLKPEKDSDEAVTYSLGKFGQRALDFYSIHVTKESTHPVKPLAQIAGNRYASGPVGKALSDACMGTIASFLSKYQDIIIEHQKVVKGNQKRLESLRELAGKENLEYPSVTLPPQPHTKEGVDAYNEVIARVRMWVNLNLWQKLKLSRDDAKPLLRLKGFPSFPLVERQANEVDWWDMVCNVKKLINEKKEDGKVFWQNLAGYKRQEALRPYLSSEEDRKKGKKFARYQLGDLLLHLEKKHGEDWGKVYDEAWERIDKKVEGLSKHIKLEEERRSEDAQSKAALTDWLRAKASFVIEGLKEADKDEFCRCELKLQKWYGDLRGKPFAIEAENSILDISGFSKQYNCAFIWQKDGVKKLNLYLIINYFKGGKLRFKKIKPEAFEANRFYTVINKKSGEIVPMEVNFNFDDPNLIILPLAFGKRQGREFIWNDLLSLETGSLKLANGRVIEKTLYNRRTRQDEPALFVALTFERREVLDSSHIKPMNLIGVDRGENIPAVIAITDPEGCPLSRFKDSLGNPTHILRIGESYKEKQRTIQAKKEVEQRRAGGYSRKYASKAKNLADDMVRNTARDLLYYAVTQDAMLIFENLSRGFGRQGKRTFMAERQYTRMEDWLTAKLAYEGLPSKTYLSKTLAQYTSKTCSNCGFTITSADYDRVLEKLKKTATGWMTTINGKELKVEGQITYYNRYKRQNVVKDLSVELDRLSEESVNNDISSWTKGRSGEALSLLKKRFSHRPVQEKFVCLNCGFETHADEQAALNIARSWLFLRSQEYKKYQTNKTTGNTDKRAFVETWQSFYRKKLKEVWKPAV

SEQ ID NO: 27712 - protein, 978 aa, synthetic construct
  REGION 1..978: note = engineered CasX variant
QEIKRINKIRRRLVKDSNTKKAGKTGPMKTLLVRVMTPDLRERLENLRKKPENIPQPISNTSRANLNKLLTDYTEMKKAILHVYWEEFQKDPVGLMSRVAQPASKKIDQNKLKPEMDEKGNLTTAGFACSQCGQPLFVYKLEQVSEKGKAYTNYFGRCNVAEHEKLILLAQLKPEKDSDEAVTYSLGKFGQRALDFYSIHVTKESTHPVKPLAQIAGNRYASGPVGKALSDACMGTIASFLSKYQDIIIEHQKVVKGNQKRLESLRELAGKENLEYPSVTLPPQPHTKEGVDAYNEVIARVRMWVNLNLWQKLKLSRDDAKPLLRLKGFPSFPLVERQANEVDWWDMVCNVKKLINEKKEDGKVFWQNLAGYKRQEALRPYLSSEEDRKKGKKFARYQLGDLLLHLEKKHGEDWGKVYDEAWERIDKKVEGLSKHIKLEEERRSEDAQSKAALTDWLRAKASFVIEGLKEADKDEFCRCELKLQKWYGDLRGKPFAIEAENSILDISGFSKQYNCAFIWQKDGVKKLNLYLIINYFKGGKLRFKKIKPEAFEANRFYTVINKKSGEIVPMEVNFNFDDPNLIILPLAFGKRQGREFIWNDLLSLETGSLKLANGRVIEKTLYNRRTRQDEPALFVALTFERREVLDSSGIKPNNLIGVDRGENIPAVIALTDPEGCPLSRFKDSLGNPTHILRIGESYKEKQRTIQAKKEVEQRRAGGYSRKYASKAKNLADDMVRNTARDLLYYAVTQDAMLIFENLSRGFGRQGKRTFMAERQYTRMEDWLTAKLAYEGLPSKTYLSKTLAQYTSKTCSNCGFTITSADYDRVLEKLKKTATGWMTTINGKELKVEGQITYYNRYKRQNVVKDLSVELDRLSEESVNNDISSWTKGRSGEALSLLKKRFSHRPVQEKFVCLNCGFETHADEQAALNIARSWLFLRSQEYKKYQTNKTTGNTDKRAFVETWQSFYRKKLKEVWKPAV

SEQ ID NO: 27713 - protein, 978 aa, synthetic construct
  REGION 1..978: note = engineered CasX variant
QEIKRINKIRRRLVKDSNTKKAGKTGPMKTLLVRVMTPDLRERLENLRKKPENIPQPISNTSRANLNKLLTDYTEMKKAILHVYWEEFQKDPVGLMSRVAQPASKKIDQNKLKPEMDEKGNLTTAGFACSQCGQPLFVYKLEQVSEKGKAYTNYFGRCNVAEHEKLILLAQLKPEKDSDEAVTYSLGKFGQRALDFYSIHVTKESTHPVKPLAQIAGNRYASGPVGKALSDACMGTIASFLSKYQDIIIEHQKVVKGNQKRLESLRELAGKENLEYPSVTLPPQPHTKEGVDAYNEVIARVRMWVNLNLWQKLKLSRDDAKPLLRLKGFPSFPLVERQANEVDWWDMVCNVKKLINEKKEDGKVFWQNLAGYKRQEALRPYLSSEEDRKKGKKFARYQLGDLLLHLEKKHGEDWGKVYDEAWERIDKKVEGLSKHIKLEEERRSEDAQSKAALTDWLRAKASFVIEGLKEADKDEFCRCELKLQKWYGDLRGKPFAIEAENSILDISGFSKQYNCAFIWQKDGVKKLNLYLIINYFKGGKLRFKKIKPEAFEANRFYTVINKKSGEIVPMEVNFNFDDPNLIILPLAFGKRQGREFIWNDLLSLETGSLKLANGRVIEKTLYNRRTRQDEPALFVALTFERREVLDSSGIKPNNLIGVDRGENIPAVIALTDPEGCPLSRFKDSLGNPTHILRIGESYKEKQRTIQAKKEVEARRAGGYSRKYASKAKNLADDMVRNTARDLLYYAVTQDAMLIFENLSRGFGRQGKRTFMAERQYTRMEDWLTAKLAYEGLPSKTYLSKTLAQYTSKTCSNCGFTITSADYDRVLEKLKKTATGWMTTINGKELKVEGQITYYNRYKRQNVVKDLSVELDRLSEESVNNDISSWTKGRSGEALSLLKKRFSHRPVQEKFVCLNCGFETHADEQAALNIARSWLFLRSQEYKKYQTNKTTGNTDKRAFVETWQSFYRKKLKEVWKPAV

SEQ ID NO: 27714 - protein, 978 aa, synthetic construct
  REGION 1..978: note = engineered CasX variant
QEIKRINKIRRRLVKDSNTKKAGKTGPMKTLLVRVMTPDLRERLENLRKKPENIPQPISNTSRANLNKLLTDYTEMKKAILHVYWEEFQKDPVGLMSRVAQPASKKIDQNKLKPEMDEKGNLTTAGFACSQCGQPLFVYKLEQVSEKGKAYTNYFGRCNVAEHEKLILLAQLKPEKDSDEAVTYSLGKFGQRALDFYSIHVTKESTHPVKPLAQIAGNRYASGPVGKALSDACMGTIASFLSKYQDIIIEHQKVVKGNQKRLESLRELAGKENLEYPSVTLPPQPHTKEGVDAYNEVIARVRMWVNLNLWQKLKLSRDDAKPLLRLKGFPSFPLVERQANEVDWWDMVCNVKKLINEKKEDGKVFWQNLAGYKRQEALRPYLSSEEDRKKGKKFARYQLGDLLLHLEKKHGEDWGKVYDEAWERIDKKVEGLSKHIKLEEERRSEDAQSKAALTDWLRAKASFVIEGLKEADKDEFCRCELKLQKWYGDLRGKPFAIEAENSILDISGFSKQYNCAFIWQKDGVKKLNLYLIINYFKGGKLRFKKIKPEAFEANRFYTVINKKSGEIVPMEVNFNFDDPNLIILPLAFGKRQGREFIWNDLLSLETGSLKLANGRVIEKTLYNRRTRQDEPALFVALTFERREVLDSSGIKPMNLIGVDRGENIPAVIALTDPEGMPLSRFKDSLGNPTHILRIGESYKEKQRTIQAKKEVEQRRAGGYSRKYASKAKNLADDMVRNTARDLLYYAVTQDAMLIFENLSRGFGRQGKRTFMAERQYTRMEDWLTAKLAYEGLPSKTYLSKTLAQYTSKTCSNCGFTITSADYDRVLEKLKKTATGWMTTINGKELKVEGQITYYNRYKRQNVVKDLSVELDRLSEESVNNDISSWTKGRSGEALSLLKKRFSHRPVQEKFVCLNCGFETHADEQAALNIARSWLFLRSQEYKKYQTNKTTGNTDKRAFVETWQSFYRKKLKEVWKPAV

SEQ ID NO: 27715 - protein, 978 aa, synthetic construct
  REGION 1..978: note = engineered CasX variant
QEIKRINKIRRRLVKDSNTKKAGKTGPMKTLLVRVMTPDLRERLENLRKKPENIPQPISNTSRANLNKLLTDYTEMKKAILHVYWEEFQKDPVGLMSRVAQPASKKIDQNKLKPEMDEKGNLTTAGFACSQCGQPLFVYKLEQVSEKGKAYTNYFGRCNVAEHEKLILLAQLKPEKDSDEAVTYSLGKFGQRALDFYSIHVTKESTHPVKPLAQIAGNRYASGPVGKALSDACMGTIASFLSKYQDIIIEHQKVVKGNQKRLESLRELAGKENLEYPSVTLPPQPHTKEGVDAYNEVIARVRMWVNLNLWQKLKLSRDDAKPLLRLKGFPSFPLVERQANEVDWWDMVCNVKKLINEKKEDGKVFWQNLAGYKRQEALRPYLSSEEDRKKGKKFARYQLGDLLLHLEKKHGEDWGKVYDEAWERIDKKVEGLSKHIKLEEERRSEDAQSKAALTDWLRAKASFVIEGLKEADKDEFCRCELKLQKWYGDLRGKPFAIEAENSILDISGFSKQYNCAFIWQKDGVKKLNLYLIINYFKGGKLRFKKIKPEAFEANRFYTVINKKSGEIVPMEVNFNFDDPNLIILPLAFGKRQGREFIWNDLLSLETGSLKLANGRVIEKTLYNRRTRQDEPALFVALTFERREVLDSSGIKPMNLIGVDRGENIPAVIALTDPEGCPLSRFKDSLGNPTHILRIGESYKEKQRTIQAKQEVEQRRAGGYSRKYASKAKNLADDMVRNTARDLLYYAVTQDAMLIFENLSRGFGRQGKRTFMAERQYTRMEDWLTAKLAYEGLPSKTYLSKTLAQYTSKTCSNCGFTITSADYDRVLEKLKKTATGWMTTINGKELKVEGQITYYNRYKRQNVVKDLSVELDRLSEESVNNDISSWTKGRSGEALSLLKKRFSHRPVQEKFVCLNCGFETHADEQAALNIARSWLFLRSQEYKKYQTNKTTGNTDKRAFVETWQSFYRKKLKEVWKPAV

SEQ ID NO: 27716 - protein, 978 aa, synthetic construct
  REGION 1..978: note = engineered CasX variant
QEIKRINKIRRRLVKDSNTKKAGKTGPMKTLLVRVMTPDLRERLENLRKKPENIPQPISNTSRANLNKLLTDYTEMKKAILHVYWEEFQKDPVGLMSRVAQPASKKIDQNKLKPEMDEKGNLTTAGFACSQCGQPLFVYKLEQVSEKGKAYTNYFGRCNVAEHEKLILLAQLKPEKDSDEAVTYSLGKFGQRALDFYSIHVTKESTHPVKPLAQIAGNRYASGPVGKALSDACMGTIASFLSKYQDIIIEHQKVVKGNQKRLESLRELAGKENLEYPSVTLPPQPHTKEGVDAYNEVIARVRMWVNLNLWQKLKLSRDDAKPLLRLKGFPSFPLVERQANEVDWWDMVCNVKKLINEKKEDGKVFWQNLAGYKRQEALRPYLSSEEDRKKGKKFARYQLGDLLLHLEKKHGEDWGKVYDEAWERIDKKVEGLSKHIKLEEERRSEDAQSKAALTDWLRAKASFVIEGLKEADKDEFCRCELKLQKWYGDLRGKPFAIEAENSILDISGFSKQYNCAFIWQKDGVKKLNLYLIINYFKGGKLRFKKIKPEAFEANRFYTVINKKSGEIVPMEVNFNFDDPNLIILPLAFGKRQGREFIWNDLLSLETGSLKLANGRVIEKTLYNRRTRQDEPALFVALTFERREVLDSSGIKPMNLIGVDRGENIPAVIALTDPEGCPLSRFKDSLGNPTHILRIGESYKEKQRTIQAKKEVEQRRAGGYSRKYASKAKNLADDMVRNTARDLLYYAVTQDAMLIFENLSRGFGRQGKRTFMAERQYTRMEDWLTAKLAYEGLPSKTYLSKTLAQYTSKTCSNCGFTITSADYDRVLEKLKKTATGWMTTINGKELKVEGQITYYNRYKRQNVVKDLSVELDRLSEESVNNDISSWTKGRSGEALSLLKKRFSHRPVQEKFVCLNCGFETHADEQAALNIARSWLFLRSQEYKKYQTNKTTGNTDKRAFVETWQSFYRKKLKEVWKPAV

SEQ ID NO: 27717 - protein, 978 aa, synthetic construct
  REGION 1..978: note = engineered CasX variant
QEIKRINKIRRRLVKDSNTKKAGKTGPMKTLLVRVMTPDLRERLENLRKKPENIPQPISNTSRANLNKLLTDYTEMKKAILHVYWEEFQKDPVGLMSRVAQPASKKIDQNKLKPEMDEKGNLTTAGFACSQCGQPLFVYKLEQVSEKGKAYTNYFGRCNVAEHEKLILLAQLKPEKDSDEAVTYSLGKFGQRALDFYSIHVTKESTHPVKPLAQIAGNRYASGPVGKALSDACMGTIASFLSKYQDIIIEHQKVVKGNQKRLESLRELAGKENLEYPSVTLPPQPHTKEGVDAYNEVIARVRMWVNLNLWQKLKLSRDDAKPLLRLKGFPSFPLVERQANEVDWWDMVCNVKKLINEKKEDGKVFWQNLAGYKRQEALRPYLSSEEDRKKGKKFARYQLGDLLLHLEKKHGEDWGKVYDEAWERIDKKVEGLSKHIKLEEERRSEDAQSKAALTDWLRAKASFVIEGLKEADKDEFCRCELKLQKWYGDLRGKPFAIEAENSILDISGFSKQYNCAFIWQKDGVKKLNLYLIINYFKGGKLRFKKIKPEAFEANRFYTVINKKSGEIVPMEVNFNFDDPNLIILPLAFGKRQGREFIWNDLLSLETGSLKLANGRVIEKTLYNRRTRQDEPALFVALTFERREVLDSSGIKPMNLIGVDRGENIPAVIALTDPEGCPLSRFKDSLGNPTHILRIGESYKEKQRTIQAKKEVEQRRAFGYSRKYASKAKNLADDMVRNTARDLLYYAVTQDAMLIFENLSRGFGRQGKRTFMAERQYTRMEDWLTAKLAYEGLPSKTYLSKTLAQYTSKTCSNCGFTITSADYDRVLEKLKKTATGWMTTINGKELKVEGQITYYNRYKRQNVVKDLSVELDRLSEESVNNDISSWTKGRSGEALSLLKKRFSHRPVQEKFVCLNCGFETHADEQAALNIARSWLFLRSQEYKKYQTNKTTGNTDKRAFVETWQSFYRKKLKEVWKPAV

SEQ ID NO: 27718 - protein, 978 aa, synthetic construct
  REGION 1..978: note = engineered CasX variant
QEIKRINKIRRRLVKDSNTKKAGKTGPMKTLLVRVMTPDLRERLENLRKKPENIPQPISNTSRANLNKLLTDYTEMKKAILHVYWEEFQKDPVGLMSRVAQPASKKIDQNKLKPEMDEKGNLTTAGFACSQCGQPLFVYKLEQVSEKGKAYTNYFGRCNVAEHEKLILLAQLKPEKDSDEAVTYSLGKFGQRALDFYSIHVTKESTHPVKPLAQIAGNRYASGPVGKALSDACMGTIASFLSKYQDIIIEHQKVVKGNQKRLESLRELAGKENLEYPSVTLPPQPHTKEGVDAYNEVIARVRMWVNLNLWQKLKLSRDDAKPLLRLKGFPSFPLVERQANEVDWWDMVCNVKKLINEKKEDGKVFWQNLAGYKRQEALRPYLSSEEDRKKGKKFARYQLGDLLLHLEKKHGEDWGKVYDEAWERIDKKVEGLSKHIKLEEERRSEDAQSKAALTDWLRAKASFVIEGLKEADKDEFCRCELKLQKWYGDLRGKPFAIEAENSILDISGFSKQYNCAFIWQKDGVKKLNLYLIINYFKGGKLRFKKIKPEAFEANRFYTVINKKSGEIVPMEVNFNFDDPNLIILPLAFGKRQGREFIWNDLLSLETGSLKLANGRVIEKTLYNRRTRQDEPALFVALTFERREVLDSSGIKPMNLIGVDRGENIPAVIALTDPEGCPLSRFKDSLGNPTHILRIGESYKEKQRTIQAKKEVEARRAGGYSRKYASKAKNLADDMVRNTARDLLYYAVTQDAMLIFENLSRGFGRQGKRTFMAERQYTRMEDWLTAKLAYEGLPSKTYLSKTLAQYTSKTCSNCGFTITSADYDRVLEKLKKTATGWMTTINGKELKVEGQITYYNRYKRQNVVKDLSVELDRLSEESVNNDISSWTKGRSGEALSLLKKRFSHRPVQEKFVCLNCGFETHADEQAALNIARSWLFLRSQEYKKYQTNKTTGNTDKRAFVETWQSFYRKKLKEVWKPAV

SEQ ID NO: 27719 - protein, 978 aa, synthetic construct
  REGION 1..978: note = engineered CasX variant
QEIKRINKIRRRLVKDSNTKKAGKTGPMKTLLVRVMTPDLRERLENLRKKPENIPQPISNTSRANLNKLLTDYTEMKKAILHVYWEEFQKDPVGLMSRVAQPASKKIDQNKLKPEMDEKGNLTTAGFACSQCGQPLFVYKLEQVSEKGKAYTNYFGRCNVAEHEKLILLAQLKPEKDSDEAVTYSLGKFGQRALDFYSIHVTKESTHPVKPLAQIAGNRYASGPVGKALSDACMGTIASFLSKYQDIIIEHQKVVKGNQKRLESLRELAGKENLEYPSVTLPPQPHTKEGVDAYNEVIARVRMWVNLNLWQKLKLSRDDAKPLLRLKGFPSFPLVERQANEVDWWDMVCNVKKLINEKKEDGKVFWQNLAGYKRQEALRPYLSSEEDRKKGKKFARYQLGDLLLHLEKKHGEDWGKVYDEAWERIDKKVEGLSKHIKLEEERRSEDAQSKAALTDWLRAKASFVIEGLKEADKDEFCRCELKLQKWYGDLRGKPFAIEAENSILDISGFSKQYNCAFIWQKDGVKKLNLYLIINYFKGGKLRFKKIKPEAFEANRFYTVINKKSGEIVPMEVNFNFDDPNLIILPLAFGKRQGREFIWNDLLSLETGSLKLANGRVIEKTLYNRRTRQDEPALFVALTFERREVLDSSGIKPMNLIGVDRGENIPAVIALTDPEGCPLSRFKDSLGLPTHILRIGESYKEKQRTIQAKKEVEQRRAFGYSRKYASKAKNLADDMVRNTARDLLYYAVTQDAMLIFENLSRGFGRQGKRTFMAERQYTRMEDWLTAKLAYEGLPSKTYLSKTLAQYTSKTCSNCGFTITSADYDRVLEKLKKTATGWMTTINGKELKVEGQITYYNRYKRQNVVKDLSVELDRLSEESVNNDISSWTKGRSGEALSLLKKRFSHRPVQEKFVCLNCGFETHADEQAALNIARSWLFLRSQEYKKYQTNKTTGNTDKRAFVETWQSFYRKKLKEVWKPAV

SEQ ID NO: 27720 - protein, 978 aa, synthetic construct
  REGION 1..978: note = engineered CasX variant
QEIKRINKIRRRLVKDSNTKKAGKTGPMKTLLVRVMTPDLRERLENLRKKPENIPQPISNTSRANLNKLLTDYTEMKKAILHVYWEEFQKDPVGLMSRVAQPASKKIDQNKLKPEMDEKGNLTTAGFACSQCGQPLFVYKLEQVSEKGKAYTNYFGRCNVAEHEKLILLAQLKPEKDSDEAVTYSLGKFGQRALDFYSIHVTKESTHPVKPLAQIAGNRYASGPVGKALSDACMGTIASFLSKYQDIIIEHQKVVKGNQKRLESLRELAGKENLEYPSVTLPPQPHTKEGVDAYNEVIARVRMWVNLNLWQKLKLSRDDAKPLLRLKGFPSFPLVERQANEVDWWDMVCNVKKLINEKKEDGKVFWQNLAGYKRQEALRPYLSSEEDRKKGKKFARYQLGDLLLHLEKKHGEDWGKVYDEAWERIDKKVEGLSKHIKLEEERRSEDAQSKAALTDWLRAKASFVIEGLKEADKDEFCRCELKLQKWYGDLRGKPFAIEAENSILDISGFSKQYNCAFIWQKDGVKKLNLYLIINYFKGGKLRFKKIKPEAFEANRFYTVINKKSGEIVPMEVNFNFDDPNLIILPLAFGKRQGREFIWNDLLSLETGSLKLANGRVIEKTLYNRRTRQDEPALFVALTFERREVLDSSGIKPMNLIGVDRGENIPAVIALTDPEGCPLSRFKDNLGNPTHILRIGESYKEKQRTIQAKKEVEQRRAGGYSRKYASKAKNLADDMVRNTARDLLYYAVTQDAMLIFENLSRGFGRQGKRTFMAERQYTRMEDWLTAKLAYEGLPSKTYLSKTLAQYTSKTCSNCGFTITSADYDRVLEKLKKTATGWMTTINGKELKVEGQITYYNRYKRQNVVKDLSVELDRLSEESVNNDISSWTKGRSGEALSLLKKRFSHRPVQEKFVCLNCGFETHADEQAALNIARSWLFLRSQEYKKYQTNKTTGNTDKRAFVETWQSFYRKKLKEVWKPAV

SEQ ID NO: 27721 - protein, 978 aa, synthetic construct
  REGION 1..978: note = engineered CasX variant
QEIKRINKIRRRLVKDSNTKKAGKTGPMKTLLVRVMTPDLRERLENLRKKPENIPQPISNTSRANLNKLLTDYTEMKKAILHVYWEEFQKDPVGLMSRVAQPASKKIDQNKLKPEMDEKGNLTTAGFACSQCGQPLFVYKLEQVSEKGKAYTNYFGRCNVAEHEKLILLAQLKPEKDSDEAVTYSLGKFGQRALDFYSIHVTKESTHPVKPLAQIAGNRYASGPVGKALSDACMGTIASFLSKYQDIIIEHQKVVKGNQKRLESLRELAGKENLEYPSVTLPPQPHTKEGVDAYNEVIARVRMWVNLNLWQKLKLSRDDAKPLLRLKGFPSFPLVERQANEVDWWDMVCNVKKLINEKKEDGKVFWQNLAGYKRQEALRPYLSSEEDRKKGKKFARYQLGDLLLHLEKKHGEDWGKVYDEAWERIDKKVEGLSKHIKLEEERRSEDAQSKAALTDWLRAKASFVIEGLKEADKDEFCRCELKLQKWYGDLRGKPFAIEAENSILDISGFSKQYNCAFIWQKDGVKKLNLYLIINYFKGGKLRFKKIKPEAFEANRFYTVINKKSGEIVPMEVNFNFDDPNLIILPLAFGKRQGREFIWNDLLSLETGSLKLANGRVIEKTLYNRRTRQDEPALFVALTFERREVLDSSGFKPMNLIGVDRGENIPAVIALTDPEGCPLSRFKDSLGNPTHILRIGESYKEKQRTIQAKQEVEQRRAGGYSRKYASKAKNLADDMVRNTARDLLYYAVTQDAMLIFENLSRGFGRQGKRTFMAERQYTRMEDWLTAKLAYEGLPSKTYLSKTLAQYTSKTCSNCGFTITSADYDRVLEKLKKTATGWMTTINGKELKVEGQITYYNRYKRQNVVKDLSVELDRLSEESVNNDISSWTKGRSGEALSLLKKRFSHRPVQEKFVCLNCGFETHADEQAALNIARSWLFLRSQEYKKYQTNKTTGNTDKRAFVETWQSFYRKKLKEVWKPAV

SEQ ID NO: 27722 - protein, 978 aa, synthetic construct
  REGION 1..978: note = engineered CasX variant
QEIKRINKIRRRLVKDSNTKKAGKTGPMKTLLVRVMTPDLRERLENLRKKPENIPQPISNTSRANLNKLLTDYTEMKKAILHVYWEEFQKDPVGLMSRVAQPASKKIDQNKLKPEMDEKGNLTTAGFACSQCGQPLFVYKLEQVSEKGKAYTNYFGRCNVAEHEKLILLAQLKPEKDSDEAVTYSLGKFGQRALDFYSIHVTKESTHPVKPLAQIAGNRYASGPVGKALSDACMGTIASFLSKYQDIIIEHQKVVKGNQKRLESLRELAGKENLEYPSVTLPPQPHTKEGVDAYNEVIARVRMWVNLNLWQKLKLSRDDAKPLLRLKGFPSFPLVERQANEVDWWDMVCNVKKLINEKKEDGKVFWQNLAGYKRQEALRPYLSSEEDRKKGKKFARYQLGDLLLHLEKKHGEDWGKVYDEAWERIDKKVEGLSKHIKLEEERRSEDAQSKAALTDWLRAKASFVIEGLKEADKDEFCRCELKLQKWYGDLRGKPFAIEAENSILDISGFSKQYNCAFIWQKDGVKKLNLYLIINYFKGGKLRFKKIKPEAFEANRFYTVINKKSGEIVPMEVNFNFDDPNLIILPLAFGKRQGREFIWNDLLSLETGSLKLANGRVIEKTLYNRRTRQDEPALFVALTFERREVLDSSGFKPMNLIGVDRGENIPAVIALTDPEGCPLSRFKDSLGNPTHILRIGESYKEKQRTIQAKKEVEQRRAGGYSRKYASKAKNLADDMVRNTARDLLYYAVTQDAMLIFENLSRGFGRQGKRTFMAERQYTRMEDWLTAKLAYEGLPSKTYLSKTLAQYTSKTCSNCGFTITSADYDRVLEKLKKTATGWMTTINGKELKVEGQITYYNRYKRQNVVKDLSVELDRLSEESVNNDISSWTKGRSGEALSLLKKRFSHRPVQEKFVCLNCGFETHADEQAALNIARSWLFLRSQEYKKYQTNKTTGNTDKRAFVETWQSFYRKKLKEVWKPAV

SEQ ID NO: 27723 - protein, 978 aa, synthetic construct
  REGION 1..978: note = engineered CasX variant
QEIKRINKIRRRLVKDSNTKKAGKTGPMKTLLVRVMTPDLRERLENLRKKPENIPQPISNTSRANLNKLLTDYTEMKKAILHVYWEEFQKDPVGLMSRVAQPASKKIDQNKLKPEMDEKGNLTTAGFACSQCGQPLFVYKLEQVSEKGKAYTNYFGRCNVAEHEKLILLAQLKPEKDSDEAVTYSLGKFGQRALDFYSIHVTKESTHPVKPLAQIAGNRYASGPVGKALSDACMGTIASFLSKYQDIIIEHQKVVKGNQKRLESLRELAGKENLEYPSVTLPPQPHTKEGVDAYNEVIARVRMWVNLNLWQKLKLSRDDAKPLLRLKGFPSFPLVERQANEVDWWDMVCNVKKLINEKKEDGKVFWQNLAGYKRQEALRPYLSSEEDRKKGKKFARYQLGDLLLHLEKKHGEDWGKVYDEAWERIDKKVEGLSKHIKLEEERRSEDAQSKAALTDWLRAKASFVIEGLKEADKDEFCRCELKLQKWYGDLRGKPFAIEAENSILDISGFSKQYNCAFIWQKDGVKKLNLYLIINYFKGGKLRFKKIKPEAFEANRFYTVINKKSGEIVPMEVNFNFDDPNLIILPLAFGKRQGREFIWNDLLSLETGSLKLANGRVIEKTLYNRRTRQDEPALFVALTFERREVLDSSFILPMNLIGVDRGENIPAVIALTDPEGCPLSRFKDSLGNPTHILRIGESYKEKQRTIFAKKEVEQRRAGGYSRKYASKAKNLADDMVRNTARDLLYYAVTQDAMLIFENLSRGFGRQGKRTFMAERQYTRMEDWLTAKLAYEGLPSKTYLSKTLAQYTSKTCSNCGFTITSADYDRVLEKLKKTATGWMTTINGKELKVEGQITYYNRYKRQNVVKDLSVELDRLSEESVNNDISSWTKGRSGEALSLLKKRFSHRPVQEKFVCLNCGFETHADEQAALNIARSWLFLRSQEYKKYQTNKTTGNTDKRAFVETWQSFYRKKLKEVWKPAV

SEQ ID NO: 27724 - protein, 978 aa, synthetic construct
  REGION 1..978: note = engineered CasX variant
QEIKRINKIRRRLVKDSNTKKAGKTGPMKTLLVRVMTPDLRERLENLRKKPENIPQPISNTSRANLNKLLTDYTEMKKAILHVYWEEFQKDPVGLMSRVAQPASKKIDQNKLKPEMDEKGNLTTAGFACSQCGQPLFVYKLEQVSEKGKAYTNYFGRCNVAEHEKLILLAQLKPEKDSDEAVTYSLGKFGQRALDFYSIHVTKESTHPVKPLAQIAGNRYASGPVGKALSDACMGTIASFLSKYQDIIIEHQKVVKGNQKRLESLRELAGKENLEYPSVTLPPQPHTKEGVDAYNEVIARVRMWVNLNLWQKLKLSRDDAKPLLRLKGFPSFPLVERQANEVDWWDMVCNVKKLINEKKEDGKVFWQNLAGYKRQEALRPYLSSEEDRKKGKKFARYQLGDLLLHLEKKHGEDWGKVYDEAWERIDKKVEGLSKHIKLEEERRSEDAQSKAALTDWLRAKASFVIEGLKEADKDEFCRCELKLQKWYGDLRGKPFAIEAENSILDISGFSKQYNCAFIWQKDGVKKLNLYLIINYFKGGKLRFKKIKPEAFEANRFYTVINKKSGEIVPMEVNFNFDDPNLIILPLAFGKRQGREFIWNDLLSLETGSLKLANGRVIEKTLYNRRTRQDEPALFVALTFERREVLDSSFIKPMNLIGVDRGENIPAVIALTDPEGCPLSRFKDTLGNPTHILRIGESYKEKQRTIQAKKEVEQRRAGGYSRKYASKAKNLADDMVRNTARDLLYYAVTQDAMLIFENLSRGFGRQGKRTFMAERQYTRMEDWLTAKLAYEGLPSKTYLSKTLAQYTSKTCSNCGFTITSADYDRVLEKLKKTATGWMTTINGKELKVEGQITYYNRYKRQNVVKDLSVELDRLSEESVNNDISSWTKGRSGEALSLLKKRFSHRPVQEKFVCLNCGFETHADEQAALNIARSWLFLRSQEYKKYQTNKTTGNTDKRAFVETWQSFYRKKLKEVWKPAV

SEQ ID NO: 27725 - protein, 978 aa, synthetic construct
  REGION 1..978: note = engineered CasX variant
QEIKRINKIRRRLVKDSNTKKAGKTGPMKTLLVRVMTPDLRERLENLRKKPENIPQPISNTSRANLNKLLTDYTEMKKAILHVYWEEFQKDPVGLMSRVAQPASKKIDQNKLKPEMDEKGNLTTAGFACSQCGQPLFVYKLEQVSEKGKAYTNYFGRCNVAEHEKLILLAQLKPEKDSDEAVTYSLGKFGQRALDFYSIHVTKESTHPVKPLAQIAGNRYASGPVGKALSDACMGTIASFLSKYQDIIIEHQKVVKGNQKRLESLRELAGKENLEYPSVTLPPQPHTKEGVDAYNEVIARVRMWVNLNLWQKLKLSRDDAKPLLRLKGFPSFPLVERQANEVDWWDMVCNVKKLINEKKEDGKVFWQNLAGYKRQEALRPYLSSEEDRKKGKKFARYQLGDLLLHLEKKHGEDWGKVYDEAWERIDKKVEGLSKHIKLEEERRSEDAQSKAALTDWLRAKASFVIEGLKEADKDEFCRCELKLQKWYGDLRGKPFAIEAENSILDISGFSKQYNCAFIWQKDGVKKLNLYLIINYFKGGKLRFKKIKPEAFEANRFYTVINKKSGEIVPMEVNFNFDDPNLIILPLAFGKRQGREFIWNDLLSLETGSLKLANGRVIEKTLYNRRTRQDEPALFVALTFERREVLDSSFIKPMNLIGVDRGENIPAVIALTDPEGCPLSRFKDTLGNPTHILRIGESYKEKQRTIQAHKEVEQRRAGGYSRKYASKAKNLADDMVRNTARDLLYYAVTQDAMLIFENLSRGFGRQGKRTFMAERQYTRMEDWLTAKLAYEGLPSKTYLSKTLAQYTSKTCSNCGFTITSADYDRVLEKLKKTATGWMTTINGKELKVEGQITYYNRYKRQNVVKDLSVELDRLSEESVNNDISSWTKGRSGEALSLLKKRFSHRPVQEKFVCLNCGFETHADEQAALNIARSWLFLRSQEYKKYQTNKTTGNTDKRAFVETWQSFYRKKLKEVWKPAV

SEQ ID NO: 27726 - protein, 978 aa, synthetic construct
  REGION 1..978: note = engineered CasX variant
QEIKRINKIRRRLVKDSNTKKAGKTGPMKTLLVRVMTPDLRERLENLRKKPENIPQPISNTSRANLNKLLTDYTEMKKAILHVYWEEFQKDPVGLMSRVAQPASKKIDQNKLKPEMDEKGNLTTAGFACSQCGQPLFVYKLEQVSEKGKAYTNYFGRCNVAEHEKLILLAQLKPEKDSDEAVTYSLGKFGQRALDFYSIHVTKESTHPVKPLAQIAGNRYASGPVGKALSDACMGTIASFLSKYQDIIIEHQKVVKGNQKRLESLRELAGKENLEYPSVTLPPQPHTKEGVDAYNEVIARVRMWVNLNLWQKLKLSRDDAKPLLRLKGFPSFPLVERQANEVDWWDMVCNVKKLINEKKEDGKVFWQNLAGYKRQEALRPYLSSEEDRKKGKKFARYQLGDLLLHLEKKHGEDWGKVYDEAWERIDKKVEGLSKHIKLEEERRSEDAQSKAALTDWLRAKASFVIEGLKEADKDEFCRCELKLQKWYGDLRGKPFAIEAENSILDISGFSKQYNCAFIWQKDGVKKLNLYLIINYFKGGKLRFKKIKPEAFEANRFYTVINKKSGEIVPMEVNFNFDDPNLIILPLAFGKRQGREFIWNDLLSLETGSLKLANGRVIEKTLYNRRTRQDEPALFVALTFERREVLDSSFIKPMNLIGVDRGENIPAVIALTDPEGCPLSRFKDSLGNPTHILRIGESYKEMQRTIQAKKEVEQRRAGGYSRKYASKAKNLADDMVRNTARDLLYYAVTQDAMLIFENLSRGFGRQGKRTFMAERQYTRMEDWLTAKLAYEGLPSKTYLSKTLAQYTSKTCSNCGFTITSADYDRVLEKLKKTATGWMTTINGKELKVEGQITYYNRYKRQNVVKDLSVELDRLSEESVNNDISSWTKGRSGEALSLLKKRFSHRPVQEKFVCLNCGFETHADEQAALNIARSWLFLRSQEYKKYQTNKTTGNTDKRAFVETWQSFYRKKLKEVWKPAV

SEQ ID NO: 27727 - protein, 978 aa, synthetic construct
  REGION 1..978: note = engineered CasX variant
QEIKRINKIRRRLVKDSNTKKAGKTGPMKTLLVRVMTPDLRERLENLRKKPENIPQPISNTSRANLNKLLTDYTEMKKAILHVYWEEFQKDPVGLMSRVAQPASKKIDQNKLKPEMDEKGNLTTAGFACSQCGQPLFVYKLEQVSEKGKAYTNYFGRCNVAEHEKLILLAQLKPEKDSDEAVTYSLGKFGQRALDFYSIHVTKESTHPVKPLAQIAGNRYASGPVGKALSDACMGTIASFLSKYQDIIIEHQKVVKGNQKRLESLRELAGKENLEYPSVTLPPQPHTKEGVDAYNEVIARVRMWVNLNLWQKLKLSRDDAKPLLRLKGFPSFPLVERQANEVDWWDMVCNVKKLINEKKEDGKVFWQNLAGYKRQEALRPYLSSEEDRKKGKKFARYQLGDLLLHLEKKHGEDWGKVYDEAWERIDKKVEGLSKHIKLEEERRSEDAQSKAALTDWLRAKASFVIEGLKEADKDEFCRCELKLQKWYGDLRGKPFAIEAENSILDISGFSKQYNCAFIWQKDGVKKLNLYLIINYFKGGKLRFKKIKPEAFEANRFYTVINKKSGEIVPMEVNFNFDDPNLIILPLAFGKRQGREFIWNDLLSLETGSLKLANGRVIEKTLYNRRTRQDEPALFVALTFERREVLDSSFIKPMNLIGVDRGENIPAVIALTDPEGCPLSRFKDSLGNPTHILRIGESYKEKQRTISAKKEVEQRRAGGYSRKYASKAKNLADDMVRNTARDLLYYAVTQDAMLIFENLSRGFGRQGKRTFMAERQYTRMEDWLTAKLAYEGLPSKTYLSKTLAQYTSKTCSNCGFTITSADYDRVLEKLKKTATGWMTTINGKELKVEGQITYYNRYKRQNVVKDLSVELDRLSEESVNNDISSWTKGRSGEALSLLKKRFSHRPVQEKFVCLNCGFETHADEQAALNIARSWLFLRSQEYKKYQTNKTTGNTDKRAFVETWQSFYRKKLKEVWKPAV

SEQ ID NO: 27728 - protein, 978 aa, synthetic construct
  REGION 1..978: note = engineered CasX variant
QEIKRINKIRRRLVKDSNTKKAGKTGPMKTLLVRVMTPDLRERLENLRKKPENIPQPISNTSRANLNKLLTDYTEMKKAILHVYWEEFQKDPVGLMSRVAQPASKKIDQNKLKPEMDEKGNLTTAGFACSQCGQPLFVYKLEQVSEKGKAYTNYFGRCNVAEHEKLILLAQLKPEKDSDEAVTYSLGKFGQRALDFYSIHVTKESTHPVKPLAQIAGNRYASGPVGKALSDACMGTIASFLSKYQDIIIEHQKVVKGNQKRLESLRELAGKENLEYPSVTLPPQPHTKEGVDAYNEVIARVRMWVNLNLWQKLKLSRDDAKPLLRLKGFPSFPLVERQANEVDWWDMVCNVKKLINEKKEDGKVFWQNLAGYKRQEALRPYLSSEEDRKKGKKFARYQLGDLLLHLEKKHGEDWGKVYDEAWERIDKKVEGLSKHIKLEEERRSEDAQSKAALTDWLRAKASFVIEGLKEADKDEFCRCELKLQKWYGDLRGKPFAIEAENSILDISGFSKQYNCAFIWQKDGVKKLNLYLIINYFKGGKLRFKKIKPEAFEANRFYTVINKKSGEIVPMEVNFNFDDPNLIILPLAFGKRQGREFIWNDLLSLETGSLKLANGRVIEKTLYNRRTRQDEPALFVALTFERREVLDSSFIKPMNLIGVDRGENIPAVIALTDPEGCPLSRFKDSLGNPTHILRIGESYKEKQRTISAKKEVEQRFAGGYSRKYASKAKNLADDMVRNTARDLLYYAVTQDAMLIFENLSRGFGRQGKRTFMAERQYTRMEDWLTAKLAYEGLPSKTYLSKTLAQYTSKTCSNCGFTITSADYDRVLEKLKKTATGWMTTINGKELKVEGQITYYNRYKRQNVVKDLSVELDRLSEESVNNDISSWTKGRSGEALSLLKKRFSHRPVQEKFVCLNCGFETHADEQAALNIARSWLFLRSQEYKKYQTNKTTGNTDKRAFVETWQSFYRKKLKEVWKPAV

SEQ ID NO: 27729 - protein, 978 aa, synthetic construct
  REGION 1..978: note = engineered CasX variant
QEIKRINKIRRRLVKDSNTKKAGKTGPMKTLLVRVMTPDLRERLENLRKKPENIPQPISNTSRANLNKLLTDYTEMKKAILHVYWEEFQKDPVGLMSRVAQPASKKIDQNKLKPEMDEKGNLTTAGFACSQCGQPLFVYKLEQVSEKGKAYTNYFGRCNVAEHEKLILLAQLKPEKDSDEAVTYSLGKFGQRALDFYSIHVTKESTHPVKPLAQIAGNRYASGPVGKALSDACMGTIASFLSKYQDIIIEHQKVVKGNQKRLESLRELAGKENLEYPSVTLPPQPHTKEGVDAYNEVIARVRMWVNLNLWQKLKLSRDDAKPLLRLKGFPSFPLVERQANEVDWWDMVCNVKKLINEKKEDGKVFWQNLAGYKRQEALRPYLSSEEDRKKGKKFARYQLGDLLLHLEKKHGEDWGKVYDEAWERIDKKVEGLSKHIKLEEERRSEDAQSKAALTDWLRAKASFVIEGLKEADKDEFCRCELKLQKWYGDLRGKPFAIEAENSILDISGFSKQYNCAFIWQKDGVKKLNLYLIINYFKGGKLRFKKIKPEAFEANRFYTVINKKSGEIVPMEVNFNFDDPNLIILPLAFGKRQGREFIWNDLLSLETGSLKLANGRVIEKTLYNRRTRQDEPALFVALTFERREVLDSSFIKPMNLIGVDRGENIPAVIALTDPEGCPLSRFKDSLGNPTHILRIGESYKEKQRTIQAKKEVEQRRSGGYSRKYASKAKNLADDMVRNTARDLLYYAVTQDAMLIFENLSRGFGRQGKRTFMAERQYTRMEDWLTAKLAYEGLPSKTYLSKTLAQYTSKTCSNCGFTITSADYDRVLEKLKKTATGWMTTINGKELKVEGQITYYNRYKRQNVVKDLSVELDRLSEESVNNDISSWTKGRSGEALSLLKKRFSHRPVQEKFVCLNCGFETHADEQAALNIARSWLFLRSQEYKKYQTNKTTGNTDKRAFVETWQSFYRKKLKEVWKPAV

SEQ ID NO: 27730 - protein, 978 aa, synthetic construct
  REGION 1..978: note = engineered CasX variant
QEIKRINKIRRRLVKDSNTKKAGKTGPMKTLLVRVMTPDLRERLENLRKKPENIPQPISNTSRANLNKLLTDYTEMKKAILHVYWEEFQKDPVGLMSRVAQPASKKIDQNKLKPEMDEKGNLTTAGFACSQCGQPLFVYKLEQVSEKGKAYTNYFGRCNVAEHEKLILLAQLKPEKDSDEAVTYSLGKFGQRALDFYSIHVTKESTHPVKPLAQIAGNRYASGPVGKALSDACMGTIASFLSKYQDIIIEHQKVVKGNQKRLESLRELAGKENLEYPSVTLPPQPHTKEGVDAYNEVIARVRMWVNLNLWQKLKLSRDDAKPLLRLKGFPSFPLVERQANEVDWWDMVCNVKKLINEKKEDGKVFWQNLAGYKRQEALRPYLSSEEDRKKGKKFARYQLGDLLLHLEKKHGEDWGKVYDEAWERIDKKVEGLSKHIKLEEERRSEDAQSKAALTDWLRAKASFVIEGLKEADKDEFCRCELKLQKWYGDLRGKPFAIEAENSILDISGFSKQYNCAFIWQKDGVKKLNLYLIINYFKGGKLRFKKIKPEAFEANRFYTVINKKSGEIVPMEVNFNFDDPNLIILPLAFGKRQGREFIWNDLLSLETGSLKLANGRVIEKTLYNRRTRQDEPALFVALTFERREVLDSSFIKPMNLIGVDRGENIPAVIALTDPEGCPLSRFKDSLGNPTHILRIGESYKEKQRTIQAKKEVEQRRCGGYSRKYASKAKNLADDMVRNTARDLLYYAVTQDAMLIFENLSRGFGRQGKRTFMAERQYTRMEDWLTAKLAYEGLPSKTYLSKTLAQYTSKTCSNCGFTITSADYDRVLEKLKKTATGWMTTINGKELKVEGQITYYNRYKRQNVVKDLSVELDRLSEESVNNDISSWTKGRSGEALSLLKKRFSHRPVQEKFVCLNCGFETHADEQAALNIARSWLFLRSQEYKKYQTNKTTGNTDKRAFVETWQSFYRKKLKEVWKPAV

SEQ ID NO: 27731 - protein, 978 aa, synthetic construct
  REGION 1..978: note = engineered CasX variant
QEIKRINKIRRRLVKDSNTKKAGKTGPMKTLLVRVMTPDLRERLENLRKKPENIPQPISNTSRANLNKLLTDYTEMKKAILHVYWEEFQKDPVGLMSRVAQPASKKIDQNKLKPEMDEKGNLTTAGFACSQCGQPLFVYKLEQVSEKGKAYTNYFGRCNVAEHEKLILLAQLKPEKDSDEAVTYSLGKFGQRALDFYSIHVTKESTHPVKPLAQIAGNRYASGPVGKALSDACMGTIASFLSKYQDIIIEHQKVVKGNQKRLESLRELAGKENLEYPSVTLPPQPHTKEGVDAYNEVIARVRMWVNLNLWQKLKLSRDDAKPLLRLKGFPSFPLVERQANEVDWWDMVCNVKKLINEKKEDGKVFWQNLAGYKRQEALRPYLSSEEDRKKGKKFARYQLGDLLLHLEKKHGEDWGKVYDEAWERIDKKVEGLSKHIKLEEERRSEDAQSKAALTDWLRAKASFVIEGLKEADKDEFCRCELKLQKWYGDLRGKPFAIEAENSILDISGFSKQYNCAFIWQKDGVKKLNLYLIINYFKGGKLRFKKIKPEAFEANRFYTVINKKSGEIVPMEVNFNFDDPNLIILPLAFGKRQGREFIWNDLLSLETGSLKLANGRVIEKTLYNRRTRQDEPALFVALTFERREVLDSSFIKPMNLIGVDRGENIPAVIALTDPEGCPLSRFKDSLGNPTHILRIGESYKEKQRTIQAKKEVEQRRAGGYSRKYASKAKNLADDMVRNTARDLLYYAVTQDAMLIFENLSRGFGRQGKRTFMAERQYTRMEDWLTAKLAYEGLPSKTYLSKTLAQYTSKTCSNCGFTITSADYDRVLEKLKKTATGWMTTINGKELKVEGQITYYNRYKRQNVVKDLSVELDRLSEESVNNDISSWTKGRSGEALSLLKKRFSHRPVQEKFVCLNCGFETHADEQAALNIARSWLFLRSQEYKKYQTNKTTGNTDKRAFVETWQSFYRKKLKEVWKPAV

SEQ ID NO: 27732 - protein, 978 aa, synthetic construct
  REGION 1..978: note = engineered CasX variant
QEIKRINKIRRRLVKDSNTKKAGKTGPMKTLLVRVMTPDLRERLENLRKKPENIPQPISNTSRANLNKLLTDYTEMKKAILHVYWEEFQKDPVGLMSRVAQPASKKIDQNKLKPEMDEKGNLTTAGFACSQCGQPLFVYKLEQVSEKGKAYTNYFGRCNVAEHEKLILLAQLKPEKDSDEAVTYSLGKFGQRALDFYSIHVTKESTHPVKPLAQIAGNRYASGPVGKALSDACMGTIASFLSKYQDIIIEHQKVVKGNQKRLESLRELAGKENLEYPSVTLPPQPHTKEGVDAYNEVIARVRMWVNLNLWQKLKLSRDDAKPLLRLKGFPSFPLVERQANEVDWWDMVCNVKKLINEKKEDGKVFWQNLAGYKRQEALRPYLSSEEDRKKGKKFARYQLGDLLLHLEKKHGEDWGKVYDEAWERIDKKVEGLSKHIKLEEERRSEDAQSKAALTDWLRAKASFVIEGLKEADKDEFCRCELKLQKWYGDLRGKPFAIEAENSILDISGFSKQYNCAFIWQKDGVKKLNLYLIINYFKGGKLRFKKIKPEAFEANRFYTVINKKSGEIVPMEVNFNFDDPNLIILPLAFGKRQGREFIWNDLLSLETGSLKLANGRVIEKTLYNRRTRQDEPALFVALTFERREVLDSSFIKPMNLIGVDRGENIPAVIALTDPEGCPLSRFKDSLGNPTHILRIGESYKEKQRTIQAKKEVEQRNAGGYSRKYASKAKNLADDMVRNTARDLLYYAVTQDAMLIFENLSRGFGRQGKRTFMAERQYTRMEDWLTAKLAYEGLPSKTYLSKTLAQYTSKTCSNCGFTITSADYDRVLEKLKKTATGWMTTINGKELKVEGQITYYNRYKRQNVVKDLSVELDRLSEESVNNDISSWTKGRSGEALSLLKKRFSHRPVQEKFVCLNCGFETHADEQAALNIARSWLFLRSQEYKKYQTNKTTGNTDKRAFVETWQSFYRKKLKEVWKPAV

SEQ ID NO: 27733 - protein, 978 aa, synthetic construct
  REGION 1..978: note = engineered CasX variant
QEIKRINKIRRRLVKDSNTKKAGKTGPMKTLLVRVMTPDLRERLENLRKKPENIPQPISNTSRANLNKLLTDYTEMKKAILHVYWEEFQKDPVGLMSRVAQPASKKIDQNKLKPEMDEKGNLTTAGFACSQCGQPLFVYKLEQVSEKGKAYTNYFGRCNVAEHEKLILLAQLKPEKDSDEAVTYSLGKFGQRALDFYSIHVTKESTHPVKPLAQIAGNRYASGPVGKALSDACMGTIASFLSKYQDIIIEHQKVVKGNQKRLESLRELAGKENLEYPSVTLPPQPHTKEGVDAYNEVIARVRMWVNLNLWQKLKLSRDDAKPLLRLKGFPSFPLVERQANEVDWWDMVCNVKKLINEKKEDGKVFWQNLAGYKRQEALRPYLSSEEDRKKGKKFARYQLGDLLLHLEKKHGEDWGKVYDEAWERIDKKVEGLSKHIKLEEERRSEDAQSKAALTDWLRAKASFVIEGLKEADKDEFCRCELKLQKWYGDLRGKPFAIEAENSILDISGFSKQYNCAFIWQKDGVKKLNLYLIINYFKGGKLRFKKIKPEAFEANRFYTVINKKSGEIVPMEVNFNFDDPNLIILPLAFGKRQGREFIWNDLLSLETGSLKLANGRVIEKTLYNRRTRQDEPALFVALTFERREVLDSSFIKPMNLIGVDRGENIPAVIALTDPEGCPLSRFKDSLGNPTHILRIGESYKEKQRTIQAKKEVEQRFAGGYSRKYASKAKNLADDMVRNTARDLLYYAVTQDAMLIFENLSRGFGRQGKRTFMAERQYTRMEDWLTAKLAYEGLPSKTYLSKTLAQYTSKTCSNCGFTITSADYDRVLEKLKKTATGWMTTINGKELKVEGQITYYNRYKRQNVVKDLSVELDRLSEESVNNDISSWTKGRSGEALSLLKKRFSHRPVQEKFVCLNCGFETHADEQAALNIARSWLFLRSQEYKKYQTNKTTGNTDKRAFVETWQSFYRKKLKEVWKPAV

SEQ ID NO: 27734 - protein, 978 aa, synthetic construct
  REGION 1..978: note = engineered CasX variant
QEIKRINKIRRRLVKDSNTKKAGKTGPMKTLLVRVMTPDLRERLENLRKKPENIPQPISNTSRANLNKLLTDYTEMKKAILHVYWEEFQKDPVGLMSRVAQPASKKIDQNKLKPEMDEKGNLTTAGFACSQCGQPLFVYKLEQVSEKGKAYTNYFGRCNVAEHEKLILLAQLKPEKDSDEAVTYSLGKFGQRALDFYSIHVTKESTHPVKPLAQIAGNRYASGPVGKALSDACMGTIASFLSKYQDIIIEHQKVVKGNQKRLESLRELAGKENLEYPSVTLPPQPHTKEGVDAYNEVIARVRMWVNLNLWQKLKLSRDDAKPLLRLKGFPSFPLVERQANEVDWWDMVCNVKKLINEKKEDGKVFWQNLAGYKRQEALRPYLSSEEDRKKGKKFARYQLGDLLLHLEKKHGEDWGKVYDEAWERIDKKVEGLSKHIKLEEERRSEDAQSKAALTDWLRAKASFVIEGLKEADKDEFCRCELKLQKWYGDLRGKPFAIEAENSILDISGFSKQYNCAFIWQKDGVKKLNLYLIINYFKGGKLRFKKIKPEAFEANRFYTVINKKSGEIVPMEVNFNFDDPNLIILPLAFGKRQGREFIWNDLLSLETGSLKLANGRVIEKTLYNRRTRQDEPALFVALTFERREVLDSSFIKPMNLIGVDRGENIPAVIALTDPEGCPLSRFKDSLGNPTHILRIGESYKEKQRTIQAHKEVEQRRAGGYSRKYASKAKNLADDMVRNTARDLLYYAVTQDAMLIFENLSRGFGRQGKRTFMAERQYTRMEDWLTAKLAYEGLPSKTYLSKTLAQYTSKTCSNCGFTITSADYDRVLEKLKKTATGWMTTINGKELKVEGQITYYNRYKRQNVVKDLSVELDRLSEESVNNDISSWTKGRSGEALSLLKKRFSHRPVQEKFVCLNCGFETHADEQAALNIARSWLFLRSQEYKKYQTNKTTGNTDKRAFVETWQSFYRKKLKEVWKPAV

SEQ ID NO: 27735 - protein, 978 aa, synthetic construct
  REGION 1..978: note = engineered CasX variant
QEIKRINKIRRRLVKDSNTKKAGKTGPMKTLLVRVMTPDLRERLENLRKKPENIPQPISNTSRANLNKLLTDYTEMKKAILHVYWEEFQKDPVGLMSRVAQPASKKIDQNKLKPEMDEKGNLTTAGFACSQCGQPLFVYKLEQVSEKGKAYTNYFGRCNVAEHEKLILLAQLKPEKDSDEAVTYSLGKFGQRALDFYSIHVTKESTHPVKPLAQIAGNRYASGPVGKALSDACMGTIASFLSKYQDIIIEHQKVVKGNQKRLESLRELAGKENLEYPSVTLPPQPHTKEGVDAYNEVIARVRMWVNLNLWQKLKLSRDDAKPLLRLKGFPSFPLVERQANEVDWWDMVCNVKKLINEKKEDGKVFWQNLAGYKRQEALRPYLSSEEDRKKGKKFARYQLGDLLLHLEKKHGEDWGKVYDEAWERIDKKVEGLSKHIKLEEERRSEDAQSKAALTDWLRAKASFVIEGLKEADKDEFCRCELKLQKWYGDLRGKPFAIEAENSILDISGFSKQYNCAFIWQKDGVKKLNLYLIINYFKGGKLRFKKIKPEAFEANRFYTVINKKSGEIVPMEVNFNFDDPNLIILPLAFGKRQGREFIWNDLLSLETGSLKLANGRVIEKTLYNRRTRQDEPALFVALTFERREVLDSSFIKPMNLIGVDRGENIPAVIALTDPEGCPLSRFKDSLGNPTHILRIGESYKEKQRTIFAKKEVEQRRAGGYSRKYASKAKNLADDMVRNTARDLLYYAVTQDAMLIFENLSRGFGRQGKRTFMAERQYTRMEDWLTAKLAYEGLPSKTYLSKTLAQYTSKTCSNCGFTITSADYDRVLEKLKKTATGWMTTINGKELKVEGQITYYNRYKRQNVVKDLSVELDRLSEESVNNDISSWTKGRSGEALSLLKKRFSHRPVQEKFVCLNCGFETHADEQAALNIARSWLFLRSQEYKKYQTNKTTGNTDKRAFVETWQSFYRKKLKEVWKPAV

SEQ ID NO: 27736 - protein, 978 aa, synthetic construct
  REGION 1..978: note = engineered CasX variant
QEIKRINKIRRRLVKDSNTKKAGKTGPMKTLLVRVMTPDLRERLENLRKKPENIPQPISNTSRANLNKLLTDYTEMKKAILHVYWEEFQKDPVGLMSRVAQPASKKIDQNKLKPEMDEKGNLTTAGFACSQCGQPLFVYKLEQVSEKGKAYTNYFGRCNVAEHEKLILLAQLKPEKDSDEAVTYSLGKFGQRALDFYSIHVTKESTHPVKPLAQIAGNRYASGPVGKALSDACMGTIASFLSKYQDIIIEHQKVVKGNQKRLESLRELAGKENLEYPSVTLPPQPHTKEGVDAYNEVIARVRMWVNLNLWQKLKLSRDDAKPLLRLKGFPSFPLVERQANEVDWWDMVCNVKKLINEKKEDGKVFWQNLAGYKRQEALRPYLSSEEDRKKGKKFARYQLGDLLLHLEKKHGEDWGKVYDEAWERIDKKVEGLSKHIKLEEERRSEDAQSKAALTDWLRAKASFVIEGLKEADKDEFCRCELKLQKWYGDLRGKPFAIEAENSILDISGFSKQYNCAFIWQKDGVKKLNLYLIINYFKGGKLRFKKIKPEAFEANRFYTVINKKSGEIVPMEVNFNFDDPNLIILPLAFGKRQGREFIWNDLLSLETGSLKLANGRVIEKTLYNRRTRQDEPALFVALTFERREVLDSSFIKPMNLIGVDRGENIPAVIALTDPEGCPLSRFKDSLGNPTHILRIGESYKCKQRTIQAKKEVEQRRAGGYSRKYASKAKNLADDMVRNTARDLLYYAVTQDAMLIFENLSRGFGRQGKRTFMAERQYTRMEDWLTAKLAYEGLPSKTYLSKTLAQYTSKTCSNCGFTITSADYDRVLEKLKKTATGWMTTINGKELKVEGQITYYNRYKRQNVVKDLSVELDRLSEESVNNDISSWTKGRSGEALSLLKKRFSHRPVQEKFVCLNCGFETHADEQAALNIARSWLFLRSQEYKKYQTNKTTGNTDKRAFVETWQSFYRKKLKEVWKPAV

SEQ ID NO: 27737 - protein, 978 aa, synthetic construct
  REGION 1..978: note = engineered CasX variant
QEIKRINKIRRRLVKDSNTKKAGKTGPMKTLLVRVMTPDLRERLENLRKKPENIPQPISNTSRANLNKLLTDYTEMKKAILHVYWEEFQKDPVGLMSRVAQPASKKIDQNKLKPEMDEKGNLTTAGFACSQCGQPLFVYKLEQVSEKGKAYTNYFGRCNVAEHEKLILLAQLKPEKDSDEAVTYSLGKFGQRALDFYSIHVTKESTHPVKPLAQIAGNRYASGPVGKALSDACMGTIASFLSKYQDIIIEHQKVVKGNQKRLESLRELAGKENLEYPSVTLPPQPHTKEGVDAYNEVIARVRMWVNLNLWQKLKLSRDDAKPLLRLKGFPSFPLVERQANEVDWWDMVCNVKKLINEKKEDGKVFWQNLAGYKRQEALRPYLSSEEDRKKGKKFARYQLGDLLLHLEKKHGEDWGKVYDEAWERIDKKVEGLSKHIKLEEERRSEDAQSKAALTDWLRAKASFVIEGLKEADKDEFCRCELKLQKWYGDLRGKPFAIEAENSILDISGFSKQYNCAFIWQKDGVKKLNLYLIINYFKGGKLRFKKIKPEAFEANRFYTVINKKSGEIVPMEVNFNFDDPNLIILPLAFGKRQGREFIWNDLLSLETGSLKLANGRVIEKTLYNRRTRQDEPALFVALTFERREVLDSSFIKPMNLIGVDRGENIPAVIALTDPEGCPLSRFKDSCGNPTHILRIGESYKEKQRTIQAKKEVEQRRAGGYSRKYASKAKNLADDMVRNTARDLLYYAVTQDAMLIFENLSRGFGRQGKRTFMAERQYTRMEDWLTAKLAYEGLPSKTYLSKTLAQYTSKTCSNCGFTITSADYDRVLEKLKKTATGWMTTINGKELKVEGQITYYNRYKRQNVVKDLSVELDRLSEESVNNDISSWTKGRSGEALSLLKKRFSHRPVQEKFVCLNCGFETHADEQAALNIARSWLFLRSQEYKKYQTNKTTGNTDKRAFVETWQSFYRKKLKEVWKPAV

SEQ ID NO: 27738 - protein, 978 aa, synthetic construct
  REGION 1..978: note = engineered CasX variant
QEIKRINKIRRRLVKDSNTKKAGKTGPMKTLLVRVMTPDLRERLENLRKKPENIPQPISNTSRANLNKLLTDYTEMKKAILHVYWEEFQKDPVGLMSRVAQPASKKIDQNKLKPEMDEKGNLTTAGFACSQCGQPLFVYKLEQVSEKGKAYTNYFGRCNVAEHEKLILLAQLKPEKDSDEAVTYSLGKFGQRALDFYSIHVTKESTHPVKPLAQIAGNRYASGPVGKALSDACMGTIASFLSKYQDIIIEHQKVVKGNQKRLESLRELAGKENLEYPSVTLPPQPHTKEGVDAYNEVIARVRMWVNLNLWQKLKLSRDDAKPLLRLKGFPSFPLVERQANEVDWWDMVCNVKKLINEKKEDGKVFWQNLAGYKRQEALRPYLSSEEDRKKGKKFARYQLGDLLLHLEKKHGEDWGKVYDEAWERIDKKVEGLSKHIKLEEERRSEDAQSKAALTDWLRAKASFVIEGLKEADKDEFCRCELKLQKWYGDLRGKPFAIEAENSILDISGFSKQYNCAFIWQKDGVKKLNLYLIINYFKGGKLRFKKIKPEAFEANRFYTVINKKSGEIVPMEVNFNFDDPNLIILPLAFGKRQGREFIWNDLLSLETGSLKLANGRVIEKTLYNRRTRQDEPALFVALTFERREVLDSSFIKPMNLIGVDRGENIPAVIALTDPEGCPLSRFKDSCGNPTHILRIGESYKCKQRTIQAKKEVEQRRAGGYSRKYASKAKNLADDMVRNTARDLLYYAVTQDAMLIFENLSRGFGRQGKRTFMAERQYTRMEDWLTAKLAYEGLPSKTYLSKTLAQYTSKTCSNCGFTITSADYDRVLEKLKKTATGWMTTINGKELKVEGQITYYNRYKRQNVVKDLSVELDRLSEESVNNDISSWTKGRSGEALSLLKKRFSHRPVQEKFVCLNCGFETHADEQAALNIARSWLFLRSQEYKKYQTNKTTGNTDKRAFVETWQSFYRKKLKEVWKPAV

SEQ ID NO: 27739 - protein, 978 aa, synthetic construct
  REGION 1..978: note = engineered CasX variant
QEIKRINKIRRRLVKDSNTKKAGKTGPMKTLLVRVMTPDLRERLENLRKKPENIPQPISNTSRANLNKLLTDYTEMKKAILHVYWEEFQKDPVGLMSRVAQPASKKIDQNKLKPEMDEKGNLTTAGFACSQCGQPLFVYKLEQVSEKGKAYTNYFGRCNVAEHEKLILLAQLKPEKDSDEAVTYSLGKFGQRALDFYSIHVTKESTHPVKPLAQIAGNRYASGPVGKALSDACMGTIASFLSKYQDIIIEHQKVVKGNQKRLESLRELAGKENLEYPSVTLPPQPHTKEGVDAYNEVIARVRMWVNLNLWQKLKLSRDDAKPLLRLKGFPSFPLVERQANEVDWWDMVCNVKKLINEKKEDGKVFWQNLAGYKRQEALRPYLSSEEDRKKGKKFARYQLGDLLLHLEKKHGEDWGKVYDEAWERIDKKVEGLSKHIKLEEERRSEDAQSKAALTDWLRAKASFVIEGLKEADKDEFCRCELKLQKWYGDLRGKPFAIEAENSILDISGFSKQYNCAFIWQKDGVKKLNLYLIINYFKGGKLRFKKIKPEAFEANRFYTVINKKSGEIVPMEVNFNFDDPNLIILPLAFGKRQGREFIWNDLLSLETGSLKLANGRVIEKTLYNRRTRQDEPALFVALTFERREVLDSSFIKPMNLIGVDRGENIPAVIALTDPEGCPLNRFKDSLGNPTHILRIGESYKEKQRTIQAKKEVEQRRAGGYSRKYASKAKNLADDMVRNTARDLLYYAVTQDAMLIFENLSRGFGRQGKRTFMAERQYTRMEDWLTAKLAYEGLPSKTYLSKTLAQYTSKTCSNCGFTITSADYDRVLEKLKKTATGWMTTINGKELKVEGQITYYNRYKRQNVVKDLSVELDRLSEESVNNDISSWTKGRSGEALSLLKKRFSHRPVQEKFVCLNCGFETHADEQAALNIARSWLFLRSQEYKKYQTNKTTGNTDKRAFVETWQSFYRKKLKEVWKPAV

SEQ ID NO: 27740 - protein, 978 aa, synthetic construct
  REGION 1..978: note = engineered CasX variant
QEIKRINKIRRRLVKDSNTKKAGKTGPMKTLLVRVMTPDLRERLENLRKKPENIPQPISNTSRANLNKLLTDYTEMKKAILHVYWEEFQKDPVGLMSRVAQPASKKIDQNKLKPEMDEKGNLTTAGFACSQCGQPLFVYKLEQVSEKGKAYTNYFGRCNVAEHEKLILLAQLKPEKDSDEAVTYSLGKFGQRALDFYSIHVTKESTHPVKPLAQIAGNRYASGPVGKALSDACMGTIASFLSKYQDIIIEHQKVVKGNQKRLESLRELAGKENLEYPSVTLPPQPHTKEGVDAYNEVIARVRMWVNLNLWQKLKLSRDDAKPLLRLKGFPSFPLVERQANEVDWWDMVCNVKKLINEKKEDGKVFWQNLAGYKRQEALRPYLSSEEDRKKGKKFARYQLGDLLLHLEKKHGEDWGKVYDEAWERIDKKVEGLSKHIKLEEERRSEDAQSKAALTDWLRAKASFVIEGLKEADKDEFCRCELKLQKWYGDLRGKPFAIEAENSILDISGFSKQYNCAFIWQKDGVKKLNLYLIINYFKGGKLRFKKIKPEAFEANRFYTVINKKSGEIVPMEVNFNFDDPNLIILPLAFGKRQGREFIWNDLLSLETGSLKLANGRVIEKTLYNRRTRQDEPALFVALTFERREVLDSSFIKPMNLIGVDRGENIPAVIALTDPEGAPLSRFKDSLGNPTHILRIGESYKEKQRTIQAKKEVEQRRCGGYSRKYASKAKNLADDMVRNTARDLLYYAVTQDAMLIFENLSRGFGRQGKRTFMAERQYTRMEDWLTAKLAYEGLPSKTYLSKTLAQYTSKTCSNCGFTITSADYDRVLEKLKKTATGWMTTINGKELKVEGQITYYNRYKRQNVVKDLSVELDRLSEESVNNDISSWTKGRSGEALSLLKKRFSHRPVQEKFVCLNCGFETHADEQAALNIARSWLFLRSQEYKKYQTNKTTGNTDKRAFVETWQSFYRKKLKEVWKPAV

SEQ ID NO: 27741 - protein, 978 aa, synthetic construct
  REGION 1..978: note = engineered CasX variant
QEIKRINKIRRRLVKDSNTKKAGKTGPMKTLLVRVMTPDLRERLENLRKKPENIPQPISNTSRANLNKLLTDYTEMKKAILHVYWEEFQKDPVGLMSRVAQPASKKIDQNKLKPEMDEKGNLTTAGFACSQCGQPLFVYKLEQVSEKGKAYTNYFGRCNVAEHEKLILLAQLKPEKDSDEAVTYSLGKFGQRALDFYSIHVTKESTHPVKPLAQIAGNRYASGPVGKALSDACMGTIASFLSKYQDIIIEHQKVVKGNQKRLESLRELAGKENLEYPSVTLPPQPHTKEGVDAYNEVIARVRMWVNLNLWQKLKLSRDDAKPLLRLKGFPSFPLVERQANEVDWWDMVCNVKKLINEKKEDGKVFWQNLAGYKRQEALRPYLSSEEDRKKGKKFARYQLGDLLLHLEKKHGEDWGKVYDEAWERIDKKVEGLSKHIKLEEERRSEDAQSKAALTDWLRAKASFVIEGLKEADKDEFCRCELKLQKWYGDLRGKPFAIEAENSILDISGFSKQYNCAFIWQKDGVKKLNLYLIINYFKGGKLRFKKIKPEAFEANRFYTVINKKSGEIVPMEVNFNFDDPNLIILPLAFGKRQGREFIWNDLLSLETGSLKLANGRVIEKTLYNRRTRQDEPALFVALTFERREVLDSSFIKPMNLIGVDRGENIPAVIALTDPEGAPLSRFKDSLGNPTHILRIGESYKEKQRTIQAKKEVEQRRAGGYSRKYASKAKNLADDMVRNTARDLLYYAVTQDAMLIFENLSRGFGRQGKRTFMAERQYTRMEDWLTAKLAYEGLPSKTYLSKTLAQYTSKTCSNCGFTITSADYDRVLEKLKKTATGWMTTINGKELKVEGQITYYNRYKRQNVVKDLSVELDRLSEESVNNDISSWTKGRSGEALSLLKKRFSHRPVQEKFVCLNCGFETHADEQAALNIARSWLFLRSQEYKKYQTNKTTGNTDKRAFVETWQSFYRKKLKEVWKPAV

SEQ ID NO: 27742 - protein, 978 aa, synthetic construct
  REGION 1..978: note = engineered CasX variant
QEIKRINKIRRRLVKDSNTKKAGKTGPMKTLLVRVMTPDLRERLENLRKKPENIPQPISNTSRANLNKLLTDYTEMKKAILHVYWEEFQKDPVGLMSRVAQPASKKIDQNKLKPEMDEKGNLTTAGFACSQCGQPLFVYKLEQVSEKGKAYTNYFGRCNVAEHEKLILLAQLKPEKDSDEAVTYSLGKFGQRALDFYSIHVTKESTHPVKPLAQIAGNRYASGPVGKALSDACMGTIASFLSKYQDIIIEHQKVVKGNQKRLESLRELAGKENLEYPSVTLPPQPHTKEGVDAYNEVIARVRMWVNLNLWQKLKLSRDDAKPLLRLKGFPSFPLVERQANEVDWWDMVCNVKKLINEKKEDGKVFWQNLAGYKRQEALRPYLSSEEDRKKGKKFARYQLGDLLLHLEKKHGEDWGKVYDEAWERIDKKVEGLSKHIKLEEERRSEDAQSKAALTDWLRAKASFVIEGLKEADKDEFCRCELKLQKWYGDLRGKPFAIEAENSILDISGFSKQYNCAFIWQKDGVKKLNLYLIINYFKGGKLRFKKIKPEAFEANRFYTVINKKSGEIVPMEVNFNFDDPNLIILPLAFGKRQGREFIWNDLLSLETGSLKLANGRVIEKTLYNRRTRQDEPALFVALTFERREVLDSSFIKPMNLIGVDRGENIPAAIALTDPEGCPLSRFKDSLGNPTHILRIGESYKEKQRTIQAKKEVEQRRAGGYSRKYASKAKNLADDMVRNTARDLLYYAVTQDAMLIFENLSRGFGRQGKRTFMAERQYTRMEDWLTAKLAYEGLPSKTYLSKTLAQYTSKTCSNCGFTITSADYDRVLEKLKKTATGWMTTINGKELKVEGQITYYNRYKRQNVVKDLSVELDRLSEESVNNDISSWTKGRSGEALSLLKKRFSHRPVQEKFVCLNCGFETHADEQAALNIARSWLFLRSQEYKKYQTNKTTGNTDKRAFVETWQSFYRKKLKEVWKPAV

SEQ ID NO: 27743 - protein, 978 aa, synthetic construct
  REGION 1..978: note = engineered CasX variant
QEIKRINKIRRRLVKDSNTKKAGKTGPMKTLLVRVMTPDLRERLENLRKKPENIPQPISNTSRANLNKLLTDYTEMKKAILHVYWEEFQKDPVGLMSRVAQPASKKIDQNKLKPEMDEKGNLTTAGFACSQCGQPLFVYKLEQVSEKGKAYTNYFGRCNVAEHEKLILLAQLKPEKDSDEAVTYSLGKFGQRALDFYSIHVTKESTHPVKPLAQIAGNRYASGPVGKALSDACMGTIASFLSKYQDIIIEHQKVVKGNQKRLESLRELAGKENLEYPSVTLPPQPHTKEGVDAYNEVIARVRMWVNLNLWQKLKLSRDDAKPLLRLKGFPSFPLVERQANEVDWWDMVCNVKKLINEKKEDGKVFWQNLAGYKRQEALRPYLSSEEDRKKGKKFARYQLGDLLLHLEKKHGEDWGKVYDEAWERIDKKVEGLSKHIKLEEERRSEDAQSKAALTDWLRAKASFVIEGLKEADKDEFCRCELKLQKWYGDLRGKPFAIEAENSILDISGFSKQYNCAFIWQKDGVKKLNLYLIINYFKGGKLRFKKIKPEAFEANRFYTVINKKSGEIVPMEVNFNFDDPNLIILPLAFGKRQGREFIWNDLLSLETGSLKLANGRVIEKTLYNRRTRQDEPALFVALTFERREVLDSSFIKPMNLIGVDRGENIPAAIALTDPEGCPLNRFKDSLGNPTHILRIGESYKEKQRTIQAKKEVEQRRAGGYSRKYASKAKNLADDMVRNTARDLLYYAVTQDAMLIFENLSRGFGRQGKRTFMAERQYTRMEDWLTAKLAYEGLPSKTYLSKTLAQYTSKTCSNCGFTITSADYDRVLEKLKKTATGWMTTINGKELKVEGQITYYNRYKRQNVVKDLSVELDRLSEESVNNDISSWTKGRSGEALSLLKKRFSHRPVQEKFVCLNCGFETHADEQAALNIARSWLFLRSQEYKKYQTNKTTGNTDKRAFVETWQSFYRKKLKEVWKPAV

SEQ ID NO: 27744 - protein, 978 aa, synthetic construct
  REGION 1..978: note = engineered CasX variant
QEIKRINKIRRRLVKDSNTKKAGKTGPMKTLLVRVMTPDLRERLENLRKKPENIPQPISNTSRANLNKLLTDYTEMKKAILHVYWEEFQKDPVGLMSRVAQPASKKIDQNKLKPEMDEKGNLTTAGFACSQCGQPLFVYKLEQVSEKGKAYTNYFGRCNVAEHEKLILLAQLKPEKDSDEAVTYSLGKFGQRALDFYSIHVTKESTHPVKPLAQIAGNRYASGPVGKALSDACMGTIASFLSKYQDIIIEHQKVVKGNQKRLESLRELAGKENLEYPSVTLPPQPHTKEGVDAYNEVIARVRMWVNLNLWQKLKLSRDDAKPLLRLKGFPSFPLVERQANEVDWWDMVCNVKKLINEKKEDGKVFWQNLAGYKRQEALRPYLSSEEDRKKGKKFARYQLGDLLLHLEKKHGEDWGKVYDEAWERIDKKVEGLSKHIKLEEERRSEDAQSKAALTDWLRAKASFVIEGLKEADKDEFCRCELKLQKWYGDLRGKPFAIEAENSILDISGFSKQYNCAFIWQKDGVKKLNLYLIINYFKGGKLRFKKIKPEAFEANRFYTVINKKSGEIVPMEVNFNFDDPNLIILPLAFGKRQGREFIWNDLLSLETGSLKLANGRVIEKTLYNRRTRQDEPALFVALTFERREVLDSSFIKPMNIIGVDRGENIPAVIALTDPEGCPLSRFKDSLGNPTHILRIGESYKEKQRTIQAKKEVEQRRAGGYSRKYASKAKNLADDMVRNTARDLLYYAVTQDAMLIFENLSRGFGRQGKRTFMAERQYTRMEDWLTAKLAYEGLPSKTYLSKTLAQYTSKTCSNCGFTITSADYDRVLEKLKKTATGWMTTINGKELKVEGQITYYNRYKRQNVVKDLSVELDRLSEESVNNDISSWTKGRSGEALSLLKKRFSHRPVQEKFVCLNCGFETHADEQAALNIARSWLFLRSQEYKKYQTNKTTGNTDKRAFVETWQSFYRKKLKEVWKPAV

SEQ ID NO: 27745 - protein, 978 aa, synthetic construct
  REGION 1..978: note = engineered CasX variant
QEIKRINKIRRRLVKDSNTKKAGKTGPMKTLLVRVMTPDLRERLENLRKKPENIPQPISNTSRANLNKLLTDYTEMKKAILHVYWEEFQKDPVGLMSRVAQPASKKIDQNKLKPEMDEKGNLTTAGFACSQCGQPLFVYKLEQVSEKGKAYTNYFGRCNVAEHEKLILLAQLKPEKDSDEAVTYSLGKFGQRALDFYSIHVTKESTHPVKPLAQIAGNRYASGPVGKALSDACMGTIASFLSKYQDIIIEHQKVVKGNQKRLESLRELAGKENLEYPSVTLPPQPHTKEGVDAYNEVIARVRMWVNLNLWQKLKLSRDDAKPLLRLKGFPSFPLVERQANEVDWWDMVCNVKKLINEKKEDGKVFWQNLAGYKRQEALRPYLSSEEDRKKGKKFARYQLGDLLLHLEKKHGEDWGKVYDEAWERIDKKVEGLSKHIKLEEERRSEDAQSKAALTDWLRAKASFVIEGLKEADKDEFCRCELKLQKWYGDLRGKPFAIEAENSILDISGFSKQYNCAFIWQKDGVKKLNLYLIINYFKGGKLRFKKIKPEAFEANRFYTVINKKSGEIVPMEVNFNFDDPNLIILPLAFGKRQGREFIWNDLLSLETGSLKLANGRVIEKTLYNRRTRQDEPALFVALTFERREVLDSSEIKPMNLIGVDRGENIPAVIALTDPEGCPLSRFKDSLGNPTHILRIGESYKEKQRTLQAKKEVESRRAGGYSRKYASKAKNLADDMVRNTARDLLYYAVTQDAMLIFENLSRGFGRQGKRTFMAERQYTRMEDWLTAKLAYEGLPSKTYLSKTLAQYTSKTCSNCGFTITSADYDRVLEKLKKTATGWMTTINGKELKVEGQITYYNRYKRQNVVKDLSVELDRLSEESVNNDISSWTKGRSGEALSLLKKRFSHRPVQEKFVCLNCGFETHADEQAALNIARSWLFLRSQEYKKYQTNKTTGNTDKRAFVETWQSFYRKKLKEVWKPAV

SEQ ID NO: 27746 - protein, 978 aa, synthetic construct
  REGION 1..978: note = engineered CasX variant
QEIKRINKIRRRLVKDSNTKKAGKTGPMKTLLVRVMTPDLRERLENLRKKPENIPQPISNTSRANLNKLLTDYTEMKKAILHVYWEEFQKDPVGLMSRVAQPASKKIDQNKLKPEMDEKGNLTTAGFACSQCGQPLFVYKLEQVSEKGKAYTNYFGRCNVAEHEKLILLAQLKPEKDSDEAVTYSLGKFGQRALDFYSIHVTKESTHPVKPLAQIAGNRYASGPVGKALSDACMGTIASFLSKYQDIIIEHQKVVKGNQKRLESLRELAGKENLEYPSVTLPPQPHTKEGVDAYNEVIARVRMWVNLNLWQKLKLSRDDAKPLLRLKGFPSFPLVERQANEVDWWDMVCNVKKLINEKKEDGKVFWQNLAGYKRQEALRPYLSSEEDRKKGKKFARYQLGDLLLHLEKKHGEDWGKVYDEAWERIDKKVEGLSKHIKLEEERRSEDAQSKAALTDWLRAKASFVIEGLKEADKDEFCRCELKLQKWYGDLRGKPFAIEAENSILDISGFSKQYNCAFIWQKDGVKKLNLYLIINYFKGGKLRFKKIKPEAFEANRFYTVINKKSGEIVPMEVNFNFDDPNLIILPLAFGKRQGREFIWNDLLSLETGSLKLANGRVIEKTLYNRRTRQDEPALFVALTFERREVLDSSEIKPMNLIGVDRGENIPAVIALTDPEGCPLSRFKDSLGNPTHILRIGESYKEKQRTLQAKKEVEQRRAGGYSRKYASKAKNLADDMVRNTARDLLYYAVTQDAMLIFENLSRGFGRQGKRTFMAERQYTRMEDWLTAKLAYEGLPSKTYLSKTLAQYTSKTCSNCGFTITSADYDRVLEKLKKTATGWMTTINGKELKVEGQITYYNRYKRQNVVKDLSVELDRLSEESVNNDISSWTKGRSGEALSLLKKRFSHRPVQEKFVCLNCGFETHADEQAALNIARSWLFLRSQEYKKYQTNKTTGNTDKRAFVETWQSFYRKKLKEVWKPAV

SEQ ID NO: 27747 - protein, 978 aa, synthetic construct
  REGION 1..978: note = engineered CasX variant
QEIKRINKIRRRLVKDSNTKKAGKTGPMKTLLVRVMTPDLRERLENLRKKPENIPQPISNTSRANLNKLLTDYTEMKKAILHVYWEEFQKDPVGLMSRVAQPASKKIDQNKLKPEMDEKGNLTTAGFACSQCGQPLFVYKLEQVSEKGKAYTNYFGRCNVAEHEKLILLAQLKPEKDSDEAVTYSLGKFGQRALDFYSIHVTKESTHPVKPLAQIAGNRYASGPVGKALSDACMGTIASFLSKYQDIIIEHQKVVKGNQKRLESLRELAGKENLEYPSVTLPPQPHTKEGVDAYNEVIARVRMWVNLNLWQKLKLSRDDAKPLLRLKGFPSFPLVERQANEVDWWDMVCNVKKLINEKKEDGKVFWQNLAGYKRQEALRPYLSSEEDRKKGKKFARYQLGDLLLHLEKKHGEDWGKVYDEAWERIDKKVEGLSKHIKLEEERRSEDAQSKAALTDWLRAKASFVIEGLKEADKDEFCRCELKLQKWYGDLRGKPFAIEAENSILDISGFSKQYNCAFIWQKDGVKKLNLYLIINYFKGGKLRFKKIKPEAFEANRFYTVINKKSGEIVPMEVNFNFDDPNLIILPLAFGKRQGREFIWNDLLSLETGSLKLANGRVIEKTLYNRRTRQDEPALFVALTFERREVLDSSEIKPMNLIGVDRGENIPAVIALTDPEGCPLSRFKDSLGNPTHILRIGESYKEKQRTIQAKKEVESRRAGGYSRKYASKAKNLADDMVRNTARDLLYYAVTQDAMLIFENLSRGFGRQGKRTFMAERQYTRMEDWLTAKLAYEGLPSKTYLSKTLAQYTSKTCSNCGFTITSADYDRVLEKLKKTATGWMTTINGKELKVEGQITYYNRYKRQNVVKDLSVELDRLSEESVNNDISSWTKGRSGEALSLLKKRFSHRPVQEKFVCLNCGFETHADEQAALNIARSWLFLRSQEYKKYQTNKTTGNTDKRAFVETWQSFYRKKLKEVWKPAV

SEQ ID NO: 27748 - protein, 978 aa, synthetic construct
  REGION 1..978: note = engineered CasX variant
QEIKRINKIRRRLVKDSNTKKAGKTGPMKTLLVRVMTPDLRERLENLRKKPENIPQPISNTSRANLNKLLTDYTEMKKAILHVYWEEFQKDPVGLMSRVAQPASKKIDQNKLKPEMDEKGNLTTAGFACSQCGQPLFVYKLEQVSEKGKAYTNYFGRCNVAEHEKLILLAQLKPEKDSDEAVTYSLGKFGQRALDFYSIHVTKESTHPVKPLAQIAGNRYASGPVGKALSDACMGTIASFLSKYQDIIIEHQKVVKGNQKRLESLRELAGKENLEYPSVTLPPQPHTKEGVDAYNEVIARVRMWVNLNLWQKLKLSRDDAKPLLRLKGFPSFPLVERQANEVDWWDMVCNVKKLINEKKEDGKVFWQNLAGYKRQEALRPYLSSEEDRKKGKKFARYQLGDLLLHLEKKHGEDWGKVYDEAWERIDKKVEGLSKHIKLEEERRSEDAQSKAALTDWLRAKASFVIEGLKEADKDEFCRCELKLQKWYGDLRGKPFAIEAENSILDISGFSKQYNCAFIWQKDGVKKLNLYLIINYFKGGKLRFKKIKPEAFEANRFYTVINKKSGEIVPMEVNFNFDDPNLIILPLAFGKRQGREFIWNDLLSLETGSLKLANGRVIEKTLYNRRTRQDEPALFVALTFERREVLDSSEIKPMNLIGVDRGENIPAVIALTDPEGCPLSRFKDSLGNPTHILRIGESYKEKQRTIQAKKEVEQRRAGGYSRKYASKAKNLADDMVRNTARDLLYYAVTQDAMLIFENLSRGFGRQGKRTFMAERQYTRMEDWLTAKLAYEGLPSKTYLSKTLAQYTSKTCSNCGFTITSADYDRVLEKLKKTATGWMTTINGKELKVEGQITYYNRYKRQNVVKDLSVELDRLSEESVNNDISSWTKGRSGEALSLLKKRFSHRPVQEKFVCLNCGFETHADEQAALNIARSWLFLRSQEYKKYQTNKTTGNTDKRAFVETWQSFYRKKLKEVWKPAV

SEQ ID NO: 27749 - protein, 978 aa, synthetic construct
  REGION 1..978: note = engineered CasX variant
QEIKRINKIRRRLVKDSNTKKAGKTGPMKTLLVRVMTPDLRERLENLRKKPENIPQPISNTSRANLNKLLTDYTEMKKAILHVYWEEFQKDPVGLMSRVAQPASKKIDQNKLKPEMDEKGNLTTAGFACSQCGQPLFVYKLEQVSEKGKAYTNYFGRCNVAEHEKLILLAQLKPEKDSDEAVTYSLGKFGQRALDFYSIHVTKESTHPVKPLAQIAGNRYASGPVGKALSDACMGTIASFLSKYQDIIIEHQKVVKGNQKRLESLRELAGKENLEYPSVTLPPQPHTKEGVDAYNEVIARVRMWVNLNLWQKLKLSRDDAKPLLRLKGFPSFPLVERQANEVDWWDMVCNVKKLINEKKEDGKVFWQNLAGYKRQEALRPYLSSEEDRKKGKKFARYQLGDLLLHLEKKHGEDWGKVYDEAWERIDKKVEGLSKHIKLEEERRSEDAQSKAALTDWLRAKASFVIEGLKEADKDEFCRCELKLQKWYGDLRGKPFAIEAENSILDISGFSKQYNCAFIWQKDGVKKLNLYLIINYFKGGKLRFKKIKPEAFEANRFYTVINKKSGEIVPMEVNFNFDDPNLIILPLAFGKRQGREFIWNDLLSLETGSLKLANGRVIEKTLYNRRTRQDEPALFVALTFERREVLDSSEIKPMNLIGVDRGENIPAVIALTDPEGCPLSRFKDSLGNPTHILRIGESYKEKQRTIQAKKEVEQRRAGFYSRKYASKAKNLADDMVRNTARDLLYYAVTQDAMLIFENLSRGFGRQGKRTFMAERQYTRMEDWLTAKLAYEGLPSKTYLSKTLAQYTSKTCSNCGFTITSADYDRVLEKLKKTATGWMTTINGKELKVEGQITYYNRYKRQNVVKDLSVELDRLSEESVNNDISSWTKGRSGEALSLLKKRFSHRPVQEKFVCLNCGFETHADEQAALNIARSWLFLRSQEYKKYQTNKTTGNTDKRAFVETWQSFYRKKLKEVWKPAV

SEQ ID NO: 27750 - protein, 978 aa, synthetic construct
  REGION 1..978: note = engineered CasX variant
QEIKRINKIRRRLVKDSNTKKAGKTGPMKTLLVRVMTPDLRERLENLRKKPENIPQPISNTSRANLNKLLTDYTEMKKAILHVYWEEFQKDPVGLMSRVAQPASKKIDQNKLKPEMDEKGNLTTAGFACSQCGQPLFVYKLEQVSEKGKAYTNYFGRCNVAEHEKLILLAQLKPEKDSDEAVTYSLGKFGQRALDFYSIHVTKESTHPVKPLAQIAGNRYASGPVGKALSDACMGTIASFLSKYQDIIIEHQKVVKGNQKRLESLRELAGKENLEYPSVTLPPQPHTKEGVDAYNEVIARVRMWVNLNLWQKLKLSRDDAKPLLRLKGFPSFPLVERQANEVDWWDMVCNVKKLINEKKEDGKVFWQNLAGYKRQEALRPYLSSEEDRKKGKKFARYQLGDLLLHLEKKHGEDWGKVYDEAWERIDKKVEGLSKHIKLEEERRSEDAQSKAALTDWLRAKASFVIEGLKEADKDEFCRCELKLQKWYGDLRGKPFAIEAENSILDISGFSKQYNCAFIWQKDGVKKLNLYLIINYFKGGKLRFKKIKPEAFEANRFYTVINKKSGEIVPMEVNFNFDDPNLIILPLAFGKRQGREFIWNDLLSLETGSLKLANGRVIEKTLYNRRTRQDEPALFVALTFERREVLDSSDIKPMNLIGVDRGENIPAVIALTDPEGHPLSRFKDSLGNPTHILRIGESYKEKQRTIQAKKEVEQRRAGGYSRKYASKAKNLADDMVRNTARDLLYYAVTQDAMLIFENLSRGFGRQGKRTFMAERQYTRMEDWLTAKLAYEGLPSKTYLSKTLAQYTSKTCSNCGFTITSADYDRVLEKLKKTATGWMTTINGKELKVEGQITYYNRYKRQNVVKDLSVELDRLSEESVNNDISSWTKGRSGEALSLLKKRFSHRPVQEKFVCLNCGFETHADEQAALNIARSWLFLRSQEYKKYQTNKTTGNTDKRAFVETWQSFYRKKLKEVWKPAV

SEQ ID NO: 27751 - protein, 978 aa, synthetic construct
  REGION 1..978: note = engineered CasX variant
QEIKRINKIRRRLVKDSNTKKAGKTGPMKTLLVRVMTPDLRERLENLRKKPENIPQPISNTSRANLNKLLTDYTEMKKAILHVYWEEFQKDPVGLMSRVAQPASKKIDQNKLKPEMDEKGNLTTAGFACSQCGQPLFVYKLEQVSEKGKAYTNYFGRCNVAEHEKLILLAQLKPEKDSDEAVTYSLGKFGQRALDFYSIHVTKESTHPVKPLAQIAGNRYASGPVGKALSDACMGTIASFLSKYQDIIIEHQKVVKGNQKRLESLRELAGKENLEYPSVTLPPQPHTKEGVDAYNEVIARVRMWVNLNLWQKLKLSRDDAKPLLRLKGFPSFPLVERQANEVDWWDMVCNVKKLINEKKEDGKVFWQNLAGYKRQEALRPYLSSEEDRKKGKKFARYQLGDLLLHLEKKHGEDWGKVYDEAWERIDKKVEGLSKHIKLEEERRSEDAQSKAALTDWLRAKASFVIEGLKEADKDEFCRCELKLQKWYGDLRGKPFAIEAENSILDISGFSKQYNCAFIWQKDGVKKLNLYLIINYFKGGKLRFKKIKPEAFEANRFYTVINKKSGEIVPMEVNFNFDDPNLIILPLAFGKRQGREFIWNDLLSLETGSLKLANGRVIEKTLYNRRTRQDEPALFVALTFERREVLDSSDIKPMNLIGVDRGENIPAVIALTDPEGCPLSRFKDSLGNPTHILRIGESYKEKQRTIQQKKEVEQRRAGGYSRKYASKAKNLADDMVRNTARDLLYYAVTQDAMLIFENLSRGFGRQGKRTFMAERQYTRMEDWLTAKLAYEGLPSKTYLSKTLAQYTSKTCSNCGFTITSADYDRVLEKLKKTATGWMTTINGKELKVEGQITYYNRYKRQNVVKDLSVELDRLSEESVNNDISSWTKGRSGEALSLLKKRFSHRPVQEKFVCLNCGFETHADEQAALNIARSWLFLRSQEYKKYQTNKTTGNTDKRAFVETWQSFYRKKLKEVWKPAV

SEQ ID NO: 27752 - protein, 978 aa, synthetic construct
  REGION 1..978: note = engineered CasX variant
QEIKRINKIRRRLVKDSNTKKAGKTGPMKTLLVRVMTPDLRERLENLRKKPENIPQPISNTSRANLNKLLTDYTEMKKAILHVYWEEFQKDPVGLMSRVAQPASKKIDQNKLKPEMDEKGNLTTAGFACSQCGQPLFVYKLEQVSEKGKAYTNYFGRCNVAEHEKLILLAQLKPEKDSDEAVTYSLGKFGQRALDFYSIHVTKESTHPVKPLAQIAGNRYASGPVGKALSDACMGTIASFLSKYQDIIIEHQKVVKGNQKRLESLRELAGKENLEYPSVTLPPQPHTKEGVDAYNEVIARVRMWVNLNLWQKLKLSRDDAKPLLRLKGFPSFPLVERQANEVDWWDMVCNVKKLINEKKEDGKVFWQNLAGYKRQEALRPYLSSEEDRKKGKKFARYQLGDLLLHLEKKHGEDWGKVYDEAWERIDKKVEGLSKHIKLEEERRSEDAQSKAALTDWLRAKASFVIEGLKEADKDEFCRCELKLQKWYGDLRGKPFAIEAENSILDISGFSKQYNCAFIWQKDGVKKLNLYLIINYFKGGKLRFKKIKPEAFEANRFYTVINKKSGEIVPMEVNFNFDDPNLIILPLAFGKRQGREFIWNDLLSLETGSLKLANGRVIEKTLYNRRTRQDEPALFVALTFERREVLDSSDIKPMNLIGVDRGENIPAVIALTDPEGCPLSRFKDSLGNPTHILRIGESYKEKQRTIQAKKEVEQRRLGGYSRKYASKAKNLADDMVRNTARDLLYYAVTQDAMLIFENLSRGFGRQGKRTFMAERQYTRMEDWLTAKLAYEGLPSKTYLSKTLAQYTSKTCSNCGFTITSADYDRVLEKLKKTATGWMTTINGKELKVEGQITYYNRYKRQNVVKDLSVELDRLSEESVNNDISSWTKGRSGEALSLLKKRFSHRPVQEKFVCLNCGFETHADEQAALNIARSWLFLRSQEYKKYQTNKTTGNTDKRAFVETWQSFYRKKLKEVWKPAV

SEQ ID NO: 27753 - protein, 978 aa, synthetic construct
  REGION 1..978: note = engineered CasX variant
QEIKRINKIRRRLVKDSNTKKAGKTGPMKTLLVRVMTPDLRERLENLRKKPENIPQPISNTSRANLNKLLTDYTEMKKAILHVYWEEFQKDPVGLMSRVAQPASKKIDQNKLKPEMDEKGNLTTAGFACSQCGQPLFVYKLEQVSEKGKAYTNYFGRCNVAEHEKLILLAQLKPEKDSDEAVTYSLGKFGQRALDFYSIHVTKESTHPVKPLAQIAGNRYASGPVGKALSDACMGTIASFLSKYQDIIIEHQKVVKGNQKRLESLRELAGKENLEYPSVTLPPQPHTKEGVDAYNEVIARVRMWVNLNLWQKLKLSRDDAKPLLRLKGFPSFPLVERQANEVDWWDMVCNVKKLINEKKEDGKVFWQNLAGYKRQEALRPYLSSEEDRKKGKKFARYQLGDLLLHLEKKHGEDWGKVYDEAWERIDKKVEGLSKHIKLEEERRSEDAQSKAALTDWLRAKASFVIEGLKEADKDEFCRCELKLQKWYGDLRGKPFAIEAENSILDISGFSKQYNCAFIWQKDGVKKLNLYLIINYFKGGKLRFKKIKPEAFEANRFYTVINKKSGEIVPMEVNFNFDDPNLIILPLAFGKRQGREFIWNDLLSLETGSLKLANGRVIEKTLYNRRTRQDEPALFVALTFERREVLDSSDIKPMNLIGVDRGENIPAVIALTDPEGCPLSRFKDSLGNPTHILRIGESYKEKQRTIQAKKEVEQRRAGGYSRKYASKAKNLADDMVRNTARDLLYYAVTQDAMLIFENLSRGFGRQGKRTFMAERQYTRMEDWLTAKLAYEGLPSKTYLSKTLAQYTSKTCSNCGFTITSADYDRVLEKLKKTATGWMTTINGKELKVEGQITYYNRYKRQNVVKDLSVELDRLSEESVNNDISSWTKGRSGEALSLLKKRFSHRPVQEKFVCLNCGFETHADEQAALNIARSWLFLRSQEYKKYQTNKTTGNTDKRAFVETWQSFYRKKLKEVWKPAV

SEQ ID NO: 27754 - protein, 978 aa, synthetic construct
  REGION 1..978: note = engineered CasX variant
QEIKRINKIRRRLVKDSNTKKAGKTGPMKTLLVRVMTPDLRERLENLRKKPENIPQPISNTSRANLNKLLTDYTEMKKAILHVYWEEFQKDPVGLMSRVAQPASKKIDQNKLKPEMDEKGNLTTAGFACSQCGQPLFVYKLEQVSEKGKAYTNYFGRCNVAEHEKLILLAQLKPEKDSDEAVTYSLGKFGQRALDFYSIHVTKESTHPVKPLAQIAGNRYASGPVGKALSDACMGTIASFLSKYQDIIIEHQKVVKGNQKRLESLRELAGKENLEYPSVTLPPQPHTKEGVDAYNEVIARVRMWVNLNLWQKLKLSRDDAKPLLRLKGFPSFPLVERQANEVDWWDMVCNVKKLINEKKEDGKVFWQNLAGYKRQEALRPYLSSEEDRKKGKKFARYQLGDLLLHLEKKHGEDWGKVYDEAWERIDKKVEGLSKHIKLEEERRSEDAQSKAALTDWLRAKASFVIEGLKEADKDEFCRCELKLQKWYGDLRGKPFAIEAENSILDISGFSKQYNCAFIWQKDGVKKLNLYLIINYFKGGKLRFKKIKPEAFEANRFYTVINKKSGEIVPMEVNFNFDDPNLIILPLAFGKRQGREFIWNDLLSLETGSLKLANGRVIEKTLYNRRTRQDEPALFVALTFERREVLDSSDIKPMNLIGVDRGENIPAVIALTDPEGCPLSRFKDSLGNPTHILRIGESYKEKQRTIQAKKEVEQKRAGGYSRKYASKAKNLADDMVRNTARDLLYYAVTQDAMLIFENLSRGFGRQGKRTFMAERQYTRMEDWLTAKLAYEGLPSKTYLSKTLAQYTSKTCSNCGFTITSADYDRVLEKLKKTATGWMTTINGKELKVEGQITYYNRYKRQNVVKDLSVELDRLSEESVNNDISSWTKGRSGEALSLLKKRFSHRPVQEKFVCLNCGFETHADEQAALNIARSWLFLRSQEYKKYQTNKTTGNTDKRAFVETWQSFYRKKLKEVWKPAV

SEQ ID NO: 27755 - protein, 978 aa, synthetic construct
  REGION 1..978: note = engineered CasX variant
QEIKRINKIRRRLVKDSNTKKAGKTGPMKTLLVRVMTPDLRERLENLRKKPENIPQPISNTSRANLNKLLTDYTEMKKAILHVYWEEFQKDPVGLMSRVAQPASKKIDQNKLKPEMDEKGNLTTAGFACSQCGQPLFVYKLEQVSEKGKAYTNYFGRCNVAEHEKLILLAQLKPEKDSDEAVTYSLGKFGQRALDFYSIHVTKESTHPVKPLAQIAGNRYASGPVGKALSDACMGTIASFLSKYQDIIIEHQKVVKGNQKRLESLRELAGKENLEYPSVTLPPQPHTKEGVDAYNEVIARVRMWVNLNLWQKLKLSRDDAKPLLRLKGFPSFPLVERQANEVDWWDMVCNVKKLINEKKEDGKVFWQNLAGYKRQEALRPYLSSEEDRKKGKKFARYQLGDLLLHLEKKHGEDWGKVYDEAWERIDKKVEGLSKHIKLEEERRSEDAQSKAALTDWLRAKASFVIEGLKEADKDEFCRCELKLQKWYGDLRGKPFAIEAENSILDISGFSKQYNCAFIWQKDGVKKLNLYLIINYFKGGKLRFKKIKPEAFEANRFYTVINKKSGEIVPMEVNFNFDDPNLIILPLAFGKRQGREFIWNDLLSLETGSLKLANGRVIEKTLYNRRTRQDEPALFVALTFERREVLDSSDIKPMCLIGVDRGENIPAVIALTDPEGCPLSRFKDSLGNPTHILRIGESYKEKQRTIQAKKEVEQRRLGGYSRKYASKAKNLADDMVRNTARDLLYYAVTQDAMLIFENLSRGFGRQGKRTFMAERQYTRMEDWLTAKLAYEGLPSKTYLSKTLAQYTSKTCSNCGFTITSADYDRVLEKLKKTATGWMTTINGKELKVEGQITYYNRYKRQNVVKDLSVELDRLSEESVNNDISSWTKGRSGEALSLLKKRFSHRPVQEKFVCLNCGFETHADEQAALNIARSWLFLRSQEYKKYQTNKTTGNTDKRAFVETWQSFYRKKLKEVWKPAV

SEQ ID NO: 27756 - protein, 978 aa, synthetic construct
  REGION 1..978: note = engineered CasX variant
QEIKRINKIRRRLVKDSNTKKAGKTGPMKTLLVRVMTPDLRERLENLRKKPENIPQPISNTSRANLNKLLTDYTEMKKAILHVYWEEFQKDPVGLMSRVAQPASKKIDQNKLKPEMDEKGNLTTAGFACSQCGQPLFVYKLEQVSEKGKAYTNYFGRCNVAEHEKLILLAQLKPEKDSDEAVTYSLGKFGQRALDFYSIHVTKESTHPVKPLAQIAGNRYASGPVGKALSDACMGTIASFLSKYQDIIIEHQKVVKGNQKRLESLRELAGKENLEYPSVTLPPQPHTKEGVDAYNEVIARVRMWVNLNLWQKLKLSRDDAKPLLRLKGFPSFPLVERQANEVDWWDMVCNVKKLINEKKEDGKVFWQNLAGYKRQEALRPYLSSEEDRKKGKKFARYQLGDLLLHLEKKHGEDWGKVYDEAWERIDKKVEGLSKHIKLEEERRSEDAQSKAALTDWLRAKASFVIEGLKEADKDEFCRCELKLQKWYGDLRGKPFAIEAENSILDISGFSKQYNCAFIWQKDGVKKLNLYLIINYFKGGKLRFKKIKPEAFEANRFYTVINKKSGEIVPMEVNFNFDDPNLIILPLAFGKRQGREFIWNDLLSLETGSLKLANGRVIEKTLYNRRTRQDEPALFVALTFERREVLDSSDIKPMCLIGVDRGENIPAVIALTDPEGCPLSRFKDSLGNPTHILRIGESYKEKQRTIQAKKEVEQRRAGGYSRKYASKAKNLADDMVRNTARDLLYYAVTQDAMLIFENLSRGFGRQGKRTFMAERQYTRMEDWLTAKLAYEGLPSKTYLSKTLAQYTSKTCSNCGFTITSADYDRVLEKLKKTATGWMTTINGKELKVEGQITYYNRYKRQNVVKDLSVELDRLSEESVNNDISSWTKGRSGEALSLLKKRFSHRPVQEKFVCLNCGFETHADEQAALNIARSWLFLRSQEYKKYQTNKTTGNTDKRAFVETWQSFYRKKLKEVWKPAV

SEQ ID NO: 27757 - protein, 978 aa, synthetic construct
  REGION 1..978: note = engineered CasX variant
QEIKRINKIRRRLVKDSNTKKAGKTGPMKTLLVRVMTPDLRERLENLRKKPENIPQPISNTSRANLNKLLTDYTEMKKAILHVYWEEFQKDPVGLMSRVAQPASKKIDQNKLKPEMDEKGNLTTAGFACSQCGQPLFVYKLEQVSEKGKAYTNYFGRCNVAEHEKLILLAQLKPEKDSDEAVTYSLGKFGQRALDFYSIHVTKESTHPVKPLAQIAGNRYASGPVGKALSDACMGTIASFLSKYQDIIIEHQKVVKGNQKRLESLRELAGKENLEYPSVTLPPQPHTKEGVDAYNEVIARVRMWVNLNLWQKLKLSRDDAKPLLRLKGFPSFPLVERQANEVDWWDMVCNVKKLINEKKEDGKVFWQNLAGYKRQEALRPYLSSEEDRKKGKKFARYQLGDLLLHLEKKHGEDWGKVYDEAWERIDKKVEGLSKHIKLEEERRSEDAQSKAALTDWLRAKASFVIEGLKEADKDEFCRCELKLQKWYGDLRGKPFAIEAENSILDISGFSKQYNCAFIWQKDGVKKLNLYLIINYFKGGKLRFKKIKPEAFEANRFYTVINKKSGEIVPMEVNFNFDDPNLIILPLAFGKRQGREFIWNDLLSLETGSLKLANGRVIEKTLYNRRTRQDEPALFVALTFERREVLDSSDIKIMNLIGVDRGENIPAVIALTDPEGCPLSRFKDSLGNPTHILRIGESYKEKQRTIQQKKEVEQRRAGGYSRKYASKAKNLADDMVRNTARDLLYYAVTQDAMLIFENLSRGFGRQGKRTFMAERQYTRMEDWLTAKLAYEGLPSKTYLSKTLAQYTSKTCSNCGFTITSADYDRVLEKLKKTATGWMTTINGKELKVEGQITYYNRYKRQNVVKDLSVELDRLSEESVNNDISSWTKGRSGEALSLLKKRFSHRPVQEKFVCLNCGFETHADEQAALNIARSWLFLRSQEYKKYQTNKTTGNTDKRAFVETWQSFYRKKLKEVWKPAV

SEQ ID NO: 27758 - protein, 978 aa, synthetic construct
  REGION 1..978: note = engineered CasX variant
QEIKRINKIRRRLVKDSNTKKAGKTGPMKTLLVRVMTPDLRERLENLRKKPENIPQPISNTSRANLNKLLTDYTEMKKAILHVYWEEFQKDPVGLMSRVAQPASKKIDQNKLKPEMDEKGNLTTAGFACSQCGQPLFVYKLEQVSEKGKAYTNYFGRCNVAEHEKLILLAQLKPEKDSDEAVTYSLGKFGQRALDFYSIHVTKESTHPVKPLAQIAGNRYASGPVGKALSDACMGTIASFLSKYQDIIIEHQKVVKGNQKRLESLRELAGKENLEYPSVTLPPQPHTKEGVDAYNEVIARVRMWVNLNLWQKLKLSRDDAKPLLRLKGFPSFPLVERQANEVDWWDMVCNVKKLINEKKEDGKVFWQNLAGYKRQEALRPYLSSEEDRKKGKKFARYQLGDLLLHLEKKHGEDWGKVYDEAWERIDKKVEGLSKHIKLEEERRSEDAQSKAALTDWLRAKASFVIEGLKEADKDEFCRCELKLQKWYGDLRGKPFAIEAENSILDISGFSKQYNCAFIWQKDGVKKLNLYLIINYFKGGKLRFKKIKPEAFEANRFYTVINKKSGEIVPMEVNFNFDDPNLIILPLAFGKRQGREFIWNDLLSLETGSLKLANGRVIEKTLYNRRTRQDEPALFVALTFERREVLDSSDIKIMNLIGVDRGENIPAVIALTDPEGCPLSRFKDSLGNPTHILRIGESYKEKQRTIQAKKEVEQRRAGGYSRKYASKAKNLADDMVRNTARDLLYYAVTQDAMLIFENLSRGFGRQGKRTFMAERQYTRMEDWLTAKLAYEGLPSKTYLSKTLAQYTSKTCSNCGFTITSADYDRVLEKLKKTATGWMTTINGKELKVEGQITYYNRYKRQNVVKDLSVELDRLSEESVNNDISSWTKGRSGEALSLLKKRFSHRPVQEKFVCLNCGFETHADEQAALNIARSWLFLRSQEYKKYQTNKTTGNTDKRAFVETWQSFYRKKLKEVWKPAV

SEQ ID NO: 27759 - protein, 978 aa, synthetic construct
  REGION 1..978: note = engineered CasX variant
QEIKRINKIRRRLVKDSNTKKAGKTGPMKTLLVRVMTPDLRERLENLRKKPENIPQPISNTSRANLNKLLTDYTEMKKAILHVYWEEFQKDPVGLMSRVAQPASKKIDQNKLKPEMDEKGNLTTAGFACSQCGQPLFVYKLEQVSEKGKAYTNYFGRCNVAEHEKLILLAQLKPEKDSDEAVTYSLGKFGQRALDFYSIHVTKESTHPVKPLAQIAGNRYASGPVGKALSDACMGTIASFLSKYQDIIIEHQKVVKGNQKRLESLRELAGKENLEYPSVTLPPQPHTKEGVDAYNEVIARVRMWVNLNLWQKLKLSRDDAKPLLRLKGFPSFPLVERQANEVDWWDMVCNVKKLINEKKEDGKVFWQNLAGYKRQEALRPYLSSEEDRKKGKKFARYQLGDLLLHLEKKHGEDWGKVYDEAWERIDKKVEGLSKHIKLEEERRSEDAQSKAALTDWLRAKASFVIEGLKEADKDEFCRCELKLQKWYGDLRGKPFAIEAENSILDISGFSKQYNCAFIWQKDGVKKLNLYLIINYFKGGKLRFKKIKPEAFEANRFYTVINKKSGEIVPMEVNFNFDDPNLIILPLAFGKRQGREFIWNDLLSLETGSLKLANGRVIEKTLYNRRTRQDEPALFVALTFERREVLDSSCIKPMNLIGVDRGENIPAVIALTDPEGCPLYRFKDSLGNPTHILRIGESYKEKQRTIQAKKEVEQRRAGGYSRKYASKAKNLADDMVRNTARDLLYYAVTQDAMLIFENLSRGFGRQGKRTFMAERQYTRMEDWLTAKLAYEGLPSKTYLSKTLAQYTSKTCSNCGFTITSADYDRVLEKLKKTATGWMTTINGKELKVEGQITYYNRYKRQNVVKDLSVELDRLSEESVNNDISSWTKGRSGEALSLLKKRFSHRPVQEKFVCLNCGFETHADEQAALNIARSWLFLRSQEYKKYQTNKTTGNTDKRAFVETWQSFYRKKLKEVWKPAV

SEQ ID NO: 27760 - protein, 978 aa, synthetic construct
  REGION 1..978: note = engineered CasX variant
QEIKRINKIRRRLVKDSNTKKAGKTGPMKTLLVRVMTPDLRERLENLRKKPENIPQPISNTSRANLNKLLTDYTEMKKAILHVYWEEFQKDPVGLMSRVAQPASKKIDQNKLKPEMDEKGNLTTAGFACSQCGQPLFVYKLEQVSEKGKAYTNYFGRCNVAEHEKLILLAQLKPEKDSDEAVTYSLGKFGQRALDFYSIHVTKESTHPVKPLAQIAGNRYASGPVGKALSDACMGTIASFLSKYQDIIIEHQKVVKGNQKRLESLRELAGKENLEYPSVTLPPQPHTKEGVDAYNEVIARVRMWVNLNLWQKLKLSRDDAKPLLRLKGFPSFPLVERQANEVDWWDMVCNVKKLINEKKEDGKVFWQNLAGYKRQEALRPYLSSEEDRKKGKKFARYQLGDLLLHLEKKHGEDWGKVYDEAWERIDKKVEGLSKHIKLEEERRSEDAQSKAALTDWLRAKASFVIEGLKEADKDEFCRCELKLQKWYGDLRGKPFAIEAENSILDISGFSKQYNCAFIWQKDGVKKLNLYLIINYFKGGKLRFKKIKPEAFEANRFYTVINKKSGEIVPMEVNFNFDDPNLIILPLAFGKRQGREFIWNDLLSLETGSLKLANGRVIEKTLYNRRTRQDEPALFVALTFERREVLDSSCIKPMNLIGVDRGENIPAVIALTDPEGCPLYRFKDSLGNKTHILRIGESYKEKQRTIQAKKEVEQRRAGGYSRKYASKAKNLADDMVRNTARDLLYYAVTQDAMLIFENLSRGFGRQGKRTFMAERQYTRMEDWLTAKLAYEGLPSKTYLSKTLAQYTSKTCSNCGFTITSADYDRVLEKLKKTATGWMTTINGKELKVEGQITYYNRYKRQNVVKDLSVELDRLSEESVNNDISSWTKGRSGEALSLLKKRFSHRPVQEKFVCLNCGFETHADEQAALNIARSWLFLRSQEYKKYQTNKTTGNTDKRAFVETWQSFYRKKLKEVWKPAV

SEQ ID NO: 27761 - protein, 978 aa, synthetic construct
  REGION 1..978: note = engineered CasX variant
QEIKRINKIRRRLVKDSNTKKAGKTGPMKTLLVRVMTPDLRERLENLRKKPENIPQPISNTSRANLNKLLTDYTEMKKAILHVYWEEFQKDPVGLMSRVAQPASKKIDQNKLKPEMDEKGNLTTAGFACSQCGQPLFVYKLEQVSEKGKAYTNYFGRCNVAEHEKLILLAQLKPEKDSDEAVTYSLGKFGQRALDFYSIHVTKESTHPVKPLAQIAGNRYASGPVGKALSDACMGTIASFLSKYQDIIIEHQKVVKGNQKRLESLRELAGKENLEYPSVTLPPQPHTKEGVDAYNEVIARVRMWVNLNLWQKLKLSRDDAKPLLRLKGFPSFPLVERQANEVDWWDMVCNVKKLINEKKEDGKVFWQNLAGYKRQEALRPYLSSEEDRKKGKKFARYQLGDLLLHLEKKHGEDWGKVYDEAWERIDKKVEGLSKHIKLEEERRSEDAQSKAALTDWLRAKASFVIEGLKEADKDEFCRCELKLQKWYGDLRGKPFAIEAENSILDISGFSKQYNCAFIWQKDGVKKLNLYLIINYFKGGKLRFKKIKPEAFEANRFYTVINKKSGEIVPMEVNFNFDDPNLIILPLAFGKRQGREFIWNDLLSLETGSLKLANGRVIEKTLYNRRTRQDEPALFVALTFERREVLDSSCIKPMNLIGVDRGENIPAVIALTDPEGCPLSRFKDSLGNPTHILRIGESYKEKQRTIQAKKEVEQRRAGGYSRKYASKAKNLADDMVRNTARDLLYYAVTQDAMLIFENLSRGFGRQGKRTFMAERQYTRMEDWLTAKLAYEGLPSKTYLSKTLAQYTSKTCSNCGFTITSADYDRVLEKLKKTATGWMTTINGKELKVEGQITYYNRYKRQNVVKDLSVELDRLSEESVNNDISSWTKGRSGEALSLLKKRFSHRPVQEKFVCLNCGFETHADEQAALNIARSWLFLRSQEYKKYQTNKTTGNTDKRAFVETWQSFYRKKLKEVWKPAV

SEQ ID NO: 27762 - protein, 978 aa, synthetic construct
  REGION 1..978: note = engineered CasX variant
QEIKRINKIRRRLVKDSNTKKAGKTGPMKTLLVRVMTPDLRERLENLRKKPENIPQPISNTSRANLNKLLTDYTEMKKAILHVYWEEFQKDPVGLMSRVAQPASKKIDQNKLKPEMDEKGNLTTAGFACSQCGQPLFVYKLEQVSEKGKAYTNYFGRCNVAEHEKLILLAQLKPEKDSDEAVTYSLGKFGQRALDFYSIHVTKESTHPVKPLAQIAGNRYASGPVGKALSDACMGTIASFLSKYQDIIIEHQKVVKGNQKRLESLRELAGKENLEYPSVTLPPQPHTKEGVDAYNEVIARVRMWVNLNLWQKLKLSRDDAKPLLRLKGFPSFPLVERQANEVDWWDMVCNVKKLINEKKEDGKVFWQNLAGYKRQEALRPYLSSEEDRKKGKKFARYQLGDLLLHLEKKHGEDWGKVYDEAWERIDKKVEGLSKHIKLEEERRSEDAQSKAALTDWLRAKASFVIEGLKEADKDEFCRCELKLQKWYGDLRGKPFAIEAENSILDISGFSKQYNCAFIWQKDGVKKLNLYLIINYFKGGKLRFKKIKPEAFEANRFYTVINKKSGEIVPMEVNFNFDDPNLIILPLAFGKRQGREFIWNDLLSLETGSLKLANGRVIEKTLYNRRTRQDEPALFVALTFERREVLDSSCIKPMNLIGVDRGENIPAVIALTDPEGCPLSRFKDSLGNKTHILRIGESYKEKQRTIQAKKEVEQRRAGGYSRKYASKAKNLADDMVRNTARDLLYYAVTQDAMLIFENLSRGFGRQGKRTFMAERQYTRMEDWLTAKLAYEGLPSKTYLSKTLAQYTSKTCSNCGFTITSADYDRVLEKLKKTATGWMTTINGKELKVEGQITYYNRYKRQNVVKDLSVELDRLSEESVNNDISSWTKGRSGEALSLLKKRFSHRPVQEKFVCLNCGFETHADEQAALNIARSWLFLRSQEYKKYQTNKTTGNTDKRAFVETWQSFYRKKLKEVWKPAV

SEQ ID NO: 27763 - protein, 978 aa, synthetic construct
  REGION 1..978: note = engineered CasX variant
QEIKRINKIRRRLVKDSNTKKAGKTGPMKTLLVRVMTPDLRERLENLRKKPENIPQPISNTSRANLNKLLTDYTEMKKAILHVYWEEFQKDPVGLMSRVAQPASKKIDQNKLKPEMDEKGNLTTAGFACSQCGQPLFVYKLEQVSEKGKAYTNYFGRCNVAEHEKLILLAQLKPEKDSDEAVTYSLGKFGQRALDFYSIHVTKESTHPVKPLAQIAGNRYASGPVGKALSDACMGTIASFLSKYQDIIIEHQKVVKGNQKRLESLRELAGKENLEYPSVTLPPQPHTKEGVDAYNEVIARVRMWVNLNLWQKLKLSRDDAKPLLRLKGFPSFPLVERQANEVDWWDMVCNVKKLINEKKEDGKVFWQNLAGYKRQEALRPYLSSEEDRKKGKKFARYQLGDLLLHLEKKHGEDWGKVYDEAWERIDKKVEGLSKHIKLEEERRSEDAQSKAALTDWLRAKASFVIEGLKEADKDEFCRCELKLQKWYGDLRGKPFAIEAENSILDISGFSKQYNCAFIWQKDGVKKLNLYLIINYFKGGKLRFKKIKPEAFEANRFYTVINKKSGEIVPMEVNFNFDDPNLIILPLAFGKRQGREFIWNDLLSLETGSLKLANGRVIEKTLYNRRTRQDEPALFVALTFERREVLDSSCIKPMNLIGVDRGENIPAMIALTDPEGCPLSRFKDSLGNPTHILRIGESYKEKQRTIQAKKEVEQRRAGGYSRKYASKAKNLADDMVRNTARDLLYYAVTQDAMLIFENLSRGFGRQGKRTFMAERQYTRMEDWLTAKLAYEGLPSKTYLSKTLAQYTSKTCSNCGFTITSADYDRVLEKLKKTATGWMTTINGKELKVEGQITYYNRYKRQNVVKDLSVELDRLSEESVNNDISSWTKGRSGEALSLLKKRFSHRPVQEKFVCLNCGFETHADEQAALNIARSWLFLRSQEYKKYQTNKTTGNTDKRAFVETWQSFYRKKLKEVWKPAV

SEQ ID NO: 27764 - protein, 978 aa, synthetic construct
  REGION 1..978: note = engineered CasX variant
QEIKRINKIRRRLVKDSNTKKAGKTGPMKTLLVRVMTPDLRERLENLRKKPENIPQPISNTSRANLNKLLTDYTEMKKAILHVYWEEFQKDPVGLMSRVAQPASKKIDQNKLKPEMDEKGNLTTAGFACSQCGQPLFVYKLEQVSEKGKAYTNYFGRCNVAEHEKLILLAQLKPEKDSDEAVTYSLGKFGQRALDFYSIHVTKESTHPVKPLAQIAGNRYASGPVGKALSDACMGTIASFLSKYQDIIIEHQKVVKGNQKRLESLRELAGKENLEYPSVTLPPQPHTKEGVDAYNEVIARVRMWVNLNLWQKLKLSRDDAKPLLRLKGFPSFPLVERQANEVDWWDMVCNVKKLINEKKEDGKVFWQNLAGYKRQEALRPYLSSEEDRKKGKKFARYQLGDLLLHLEKKHGEDWGKVYDEAWERIDKKVEGLSKHIKLEEERRSEDAQSKAALTDWLRAKASFVIEGLKEADKDEFCRCELKLQKWYGDLRGKPFAIEAENSILDISGFSKQYNCAFIWQKDGVKKLNLYLIINYFKGGKLRFKKIKPEAFEANRFYTVINKKSGEIVPMEVNFNFDDPNLIILPLAFGKRQGREFIWNDLLSLETGSLKLANGRVIEKTLYNRRTRQDEPALFVALTFERREVLDSSCFKPMNLIGVDRGENIPAVIALTDPEGCPLSRFKDSLGNPTHILRIGESYKEKQRTIQAKKEVEQRRAGGYSRKYASKAKNLADDMVRNTARDLLYYAVTQDAMLIFENLSRGFGRQGKRTFMAERQYTRMEDWLTAKLAYEGLPSKTYLSKTLAQYTSKTCSNCGFTITSADYDRVLEKLKKTATGWMTTINGKELKVEGQITYYNRYKRQNVVKDLSVELDRLSEESVNNDISSWTKGRSGEALSLLKKRFSHRPVQEKFVCLNCGFETHADEQAALNIARSWLFLRSQEYKKYQTNKTTGNTDKRAFVETWQSFYRKKLKEVWKPAV

SEQ ID NO: 27765 - protein, 978 aa, synthetic construct
  REGION 1..978: note = engineered CasX variant
QEIKRINKIRRRLVKDSNTKKAGKTGPMKTLLVRVMTPDLRERLENLRKKPENIPQPISNTSRANLNKLLTDYTEMKKAILHVYWEEFQKDPVGLMSRVAQPASKKIDQNKLKPEMDEKGNLTTAGFACSQCGQPLFVYKLEQVSEKGKAYTNYFGRCNVAEHEKLILLAQLKPEKDSDEAVTYSLGKFGQRALDFYSIHVTKESTHPVKPLAQIAGNRYASGPVGKALSDACMGTIASFLSKYQDIIIEHQKVVKGNQKRLESLRELAGKENLEYPSVTLPPQPHTKEGVDAYNEVIARVRMWVNLNLWQKLKLSRDDAKPLLRLKGFPSFPLVERQANEVDWWDMVCNVKKLINEKKEDGKVFWQNLAGYKRQEALRPYLSSEEDRKKGKKFARYQLGDLLLHLEKKHGEDWGKVYDEAWERIDKKVEGLSKHIKLEEERRSEDAQSKAALTDWLRAKASFVIEGLKEADKDEFCRCELKLQKWYGDLRGKPFAIEAENSILDISGFSKQYNCAFIWQKDGVKKLNLYLIINYFKGGKLRFKKIKPEAFEANRFYTVINKKSGEIVPMEVNFNFDDPNLIILPLAFGKRQGREFIWNDLLSLETGSLKLANGRVIEKTLYNRRTRQDEPALFVALTFERREVLDSSAIKPMNLIGVDRGENIPAVIALTDPEGGPLSCFKDSLGNPTHILRIGESYKEKQRTIQAKKEVEQRRAGGYSRKYASKAKNLADDMVRNTARDLLYYAVTQDAMLIFENLSRGFGRQGKRTFMAERQYTRMEDWLTAKLAYEGLPSKTYLSKTLAQYTSKTCSNCGFTITSADYDRVLEKLKKTATGWMTTINGKELKVEGQITYYNRYKRQNVVKDLSVELDRLSEESVNNDISSWTKGRSGEALSLLKKRFSHRPVQEKFVCLNCGFETHADEQAALNIARSWLFLRSQEYKKYQTNKTTGNTDKRAFVETWQSFYRKKLKEVWKPAV

SEQ ID NO: 27766 - protein, 978 aa, synthetic construct
  REGION 1..978: note = engineered CasX variant
QEIKRINKIRRRLVKDSNTKKAGKTGPMKTLLVRVMTPDLRERLENLRKKPENIPQPISNTSRANLNKLLTDYTEMKKAILHVYWEEFQKDPVGLMSRVAQPASKKIDQNKLKPEMDEKGNLTTAGFACSQCGQPLFVYKLEQVSEKGKAYTNYFGRCNVAEHEKLILLAQLKPEKDSDEAVTYSLGKFGQRALDFYSIHVTKESTHPVKPLAQIAGNRYASGPVGKALSDACMGTIASFLSKYQDIIIEHQKVVKGNQKRLESLRELAGKENLEYPSVTLPPQPHTKEGVDAYNEVIARVRMWVNLNLWQKLKLSRDDAKPLLRLKGFPSFPLVERQANEVDWWDMVCNVKKLINEKKEDGKVFWQNLAGYKRQEALRPYLSSEEDRKKGKKFARYQLGDLLLHLEKKHGEDWGKVYDEAWERIDKKVEGLSKHIKLEEERRSEDAQSKAALTDWLRAKASFVIEGLKEADKDEFCRCELKLQKWYGDLRGKPFAIEAENSILDISGFSKQYNCAFIWQKDGVKKLNLYLIINYFKGGKLRFKKIKPEAFEANRFYTVINKKSGEIVPMEVNFNFDDPNLIILPLAFGKRQGREFIWNDLLSLETGSLKLANGRVIEKTLYNRRTRQDEPALFVALTFERREVLDSSAIKPMNLIGVDRGENIPAVIALTDPEGCPLSRFKDSLGNPTHILRIGESYKEKQRTIQAKKEVEQRRAGGYSRKYASKAKNLADDMVRNTARDLLYYAVTQDAMLIFENLSRGFGRQGKRTFMAERQYTRMEDWLTAKLAYEGLPSKTYLSKTLAQYTSKTCSNCGFTITSADYDRVLEKLKKTATGWMTTINGKELKVEGQITYYNRYKRQNVVKDLSVELDRLSEESVNNDISSWTKGRSGEALSLLKKRFSHRPVQEKFVCLNCGFETHADEQAALNIARSWLFLRSQEYKKYQTNKTTGNTDKRAFVETWQSFYRKKLKEVWKPAV

SEQ ID NO: 27767 - protein, 978 aa, synthetic construct
  REGION 1..978: note = engineered CasX variant
QEIKRINKIRRRLVKDSNTKKAGKTGPMKTLLVRVMTPDLRERLENLRKKPENIPQPISNTSRANLNKLLTDYTEMKKAILHVYWEEFQKDPVGLMSRVAQPASKKIDQNKLKPEMDEKGNLTTAGFACSQCGQPLFVYKLEQVSEKGKAYTNYFGRCNVAEHEKLILLAQLKPEKDSDEAVTYSLGKFGQRALDFYSIHVTKESTHPVKPLAQIAGNRYASGPVGKALSDACMGTIASFLSKYQDIIIEHQKVVKGNQKRLESLRELAGKENLEYPSVTLPPQPHTKEGVDAYNEVIARVRMWVNLNLWQKLKLSRDDAKPLLRLKGFPSFPLVERQANEVDWWDMVCNVKKLINEKKEDGKVFWQNLAGYKRQEALRPYLSSEEDRKKGKKFARYQLGDLLLHLEKKHGEDWGKVYDEAWERIDKKVEGLSKHIKLEEERRSEDAQSKAALTDWLRAKASFVIEGLKEADKDEFCRCELKLQKWYGDLRGKPFAIEAENSILDISGFSKQYNCAFIWQKDGVKKLNLYLIINYFKGGKLRFKKIKPEAFEANRFYTVINKKSGEIVPMEVNFNFDDPNLIILPLAFGKRQGREFIWNDLLSLETGSLKLANGRVIEKTLYNRRTRQDEPALFVALTFERREVLDSSAIKPMNLIGVDRGENIPAVIALTDPEGCPLSCFKDSLGNPTHILRIGESYKEKQRTIQAKKEVEQRRAGGYSRKYASKAKNLADDMVRNTARDLLYYAVTQDAMLIFENLSRGFGRQGKRTFMAERQYTRMEDWLTAKLAYEGLPSKTYLSKTLAQYTSKTCSNCGFTITSADYDRVLEKLKKTATGWMTTINGKELKVEGQITYYNRYKRQNVVKDLSVELDRLSEESVNNDISSWTKGRSGEALSLLKKRFSHRPVQEKFVCLNCGFETHADEQAALNIARSWLFLRSQEYKKYQTNKTTGNTDKRAFVETWQSFYRKKLKEVWKPAV

SEQ ID NO: 27768 - protein, 978 aa, synthetic construct
  REGION 1..978: note = engineered CasX variant
QEIKRINKIRRRLVKDSNTKKAGKTGPMKTLLVRVMTPDLRERLENLRKKPENIPQPISNTSRANLNKLLTDYTEMKKAILHVYWEEFQKDPVGLMSRVAQPASKKIDQNKLKPEMDEKGNLTTAGFACSQCGQPLFVYKLEQVSEKGKAYTNYFGRCNVAEHEKLILLAQLKPEKDSDEAVTYSLGKFGQRALDFYSIHVTKESTHPVKPLAQIAGNRYASGPVGKALSDACMGTIASFLSKYQDIIIEHQKVVKGNQKRLESLRELAGKENLEYPSVTLPPQPHTKEGVDAYNEVIARVRMWVNLNLWQKLKLSRDDAKPLLRLKGFPSFPLVERQANEVDWWDMVCNVKKLINEKKEDGKVFWQNLAGYKRQEALRPYLSSEEDRKKGKKFARYQLGDLLLHLEKKHGEDWGKVYDEAWERIDKKVEGLSKHIKLEEERRSEDAQSKAALTDWLRAKASFVIEGLKEADKDEFCRCELKLQKWYGDLRGKPFAIEAENSILDISGFSKQYNCAFIWQKDGVKKLNLYLIINYFKGGKLRFKKIKPEAFEANRFYTVINKKSGEIVPMEVNFNFDDPNLIILPLAFGKRQGREFIWNDLLSLETGSLKLANGRVIEKTLYNRRTRQDEPALFVALTFERREVLDSRNIKPMNLIGVDRGENIPAVIALTDPEGCPLSRFKDSLGNPTHILRIGESYKEKQRTIQAKKEVEQRRAGRYSRKYASKAKNLADDMVRNTARDLLYYAVTQDAMLIFENLSRGFGRQGKRTFMAERQYTRMEDWLTAKLAYEGLPSKTYLSKTLAQYTSKTCSNCGFTITSADYDRVLEKLKKTATGWMTTINGKELKVEGQITYYNRYKRQNVVKDLSVELDRLSEESVNNDISSWTKGRSGEALSLLKKRFSHRPVQEKFVCLNCGFETHADEQAALNIARSWLFLRSQEYKKYQTNKTTGNTDKRAFVETWQSFYRKKLKEVWKPAV

SEQ ID NO: 27769 - protein, 978 aa, synthetic construct
  REGION 1..978: note = engineered CasX variant
QEIKRINKIRRRLVKDSNTKKAGKTGPMKTLLVRVMTPDLRERLENLRKKPENIPQPISNTSRANLNKLLTDYTEMKKAILHVYWEEFQKDPVGLMSRVAQPASKKIDQNKLKPEMDEKGNLTTAGFACSQCGQPLFVYKLEQVSEKGKAYTNYFGRCNVAEHEKLILLAQLKPEKDSDEAVTYSLGKFGQRALDFYSIHVTKESTHPVKPLAQIAGNRYASGPVGKALSDACMGTIASFLSKYQDIIIEHQKVVKGNQKRLESLRELAGKENLEYPSVTLPPQPHTKEGVDAYNEVIARVRMWVNLNLWQKLKLSRDDAKPLLRLKGFPSFPLVERQANEVDWWDMVCNVKKLINEKKEDGKVFWQNLAGYKRQEALRPYLSSEEDRKKGKKFARYQLGDLLLHLEKKHGEDWGKVYDEAWERIDKKVEGLSKHIKLEEERRSEDAQSKAALTDWLRAKASFVIEGLKEADKDEFCRCELKLQKWYGDLRGKPFAIEAENSILDISGFSKQYNCAFIWQKDGVKKLNLYLIINYFKGGKLRFKKIKPEAFEANRFYTVINKKSGEIVPMEVNFNFDDPNLIILPLAFGKRQGREFIWNDLLSLETGSLKLANGRVIEKTLYNRRTRQDEPALFVALTFERREVLDSRNIKPMNLIGVDRGENIPAVIALTDPEGCPLSRFKDSLGNPTHILRIGESYKEKQRTIQAKKEVEQRRAGGYSRKYASKAKNLADDMVRNTARDLLYYAVTQDAMLIFENLSRGFGRQGKRTFMAERQYTRMEDWLTAKLAYEGLPSKTYLSKTLAQYTSKTCSNCGFTITSADYDRVLEKLKKTATGWMTTINGKELKVEGQITYYNRYKRQNVVKDLSVELDRLSEESVNNDISSWTKGRSGEALSLLKKRFSHRPVQEKFVCLNCGFETHADEQAALNIARSWLFLRSQEYKKYQTNKTTGNTDKRAFVETWQSFYRKKLKEVWKPAV

SEQ ID NO: 27770 - protein, 978 aa, synthetic construct
  REGION 1..978: note = engineered CasX variant
QEIKRINKIRRRLVKDSNTKKAGKTGPMKTLLVRVMTPDLRERLENLRKKPENIPQPISNTSRANLNKLLTDYTEMKKAILHVYWEEFQKDPVGLMSRVAQPASKKIDQNKLKPEMDEKGNLTTAGFACSQCGQPLFVYKLEQVSEKGKAYTNYFGRCNVAEHEKLILLAQLKPEKDSDEAVTYSLGKFGQRALDFYSIHVTKESTHPVKPLAQIAGNRYASGPVGKALSDACMGTIASFLSKYQDIIIEHQKVVKGNQKRLESLRELAGKENLEYPSVTLPPQPHTKEGVDAYNEVIARVRMWVNLNLWQKLKLSRDDAKPLLRLKGFPSFPLVERQANEVDWWDMVCNVKKLINEKKEDGKVFWQNLAGYKRQEALRPYLSSEEDRKKGKKFARYQLGDLLLHLEKKHGEDWGKVYDEAWERIDKKVEGLSKHIKLEEERRSEDAQSKAALTDWLRAKASFVIEGLKEADKDEFCRCELKLQKWYGDLRGKPFAIEAENSILDISGFSKQYNCAFIWQKDGVKKLNLYLIINYFKGGKLRFKKIKPEAFEANRFYTVINKKSGEIVPMEVNFNFDDPNLIILPLAFGKRQGREFIWNDLLSLETGSLKLANGRVIEKTLYNRRTRQDEPALFVALTFERREVLDSRNIKPMNLIGVDRGENIPAVIALTDPEGCPLSRFKDSLGNPTHILRIGESYKEKQRTIQAKKEHEQRRAGGYSRKYASKAKNLADDMVRNTARDLLYYAVTQDAMLIFENLSRGFGRQGKRTFMAERQYTRMEDWLTAKLAYEGLPSKTYLSKTLAQYTSKTCSNCGFTITSADYDRVLEKLKKTATGWMTTINGKELKVEGQITYYNRYKRQNVVKDLSVELDRLSEESVNNDISSWTKGRSGEALSLLKKRFSHRPVQEKFVCLNCGFETHADEQAALNIARSWLFLRSQEYKKYQTNKTTGNTDKRAFVETWQSFYRKKLKEVWKPAV

SEQ ID NO: 27771 - protein, 978 aa, synthetic construct
  REGION 1..978: note = engineered CasX variant
QEIKRINKIRRRLVKDSNTKKAGKTGPMKTLLVRVMTPDLRERLENLRKKPENIPQPISNTSRANLNKLLTDYTEMKKAILHVYWEEFQKDPVGLMSRVAQPASKKIDQNKLKPEMDEKGNLTTAGFACSQCGQPLFVYKLEQVSEKGKAYTNYFGRCNVAEHEKLILLAQLKPEKDSDEAVTYSLGKFGQRALDFYSIHVTKESTHPVKPLAQIAGNRYASGPVGKALSDACMGTIASFLSKYQDIIIEHQKVVKGNQKRLESLRELAGKENLEYPSVTLPPQPHTKEGVDAYNEVIARVRMWVNLNLWQKLKLSRDDAKPLLRLKGFPSFPLVERQANEVDWWDMVCNVKKLINEKKEDGKVFWQNLAGYKRQEALRPYLSSEEDRKKGKKFARYQLGDLLLHLEKKHGEDWGKVYDEAWERIDKKVEGLSKHIKLEEERRSEDAQSKAALTDWLRAKASFVIEGLKEADKDEFCRCELKLQKWYGDLRGKPFAIEAENSILDISGFSKQYNCAFIWQKDGVKKLNLYLIINYFKGGKLRFKKIKPEAFEANRFYTVINKKSGEIVPMEVNFNFDDPNLIILPLAFGKRQGREFIWNDLLSLETGSLKLANGRVIEKTLYNRRTRQDEPALFVALTFERREVLDSRKIKPMNLIGVDRGENIPAVIALTDPEGCPLSRFKDSLGNPTHILRIGESYKEKQRTIQAKKEVEQRRAGGYSRKYASKAKNLADDMVRNTARDLLYYAVTQDAMLIFENLSRGFGRQGKRTFMAERQYTRMEDWLTAKLAYEGLPSKTYLSKTLAQYTSKTCSNCGFTITSADYDRVLEKLKKTATGWMTTINGKELKVEGQITYYNRYKRQNVVKDLSVELDRLSEESVNNDISSWTKGRSGEALSLLKKRFSHRPVQEKFVCLNCGFETHADEQAALNIARSWLFLRSQEYKKYQTNKTTGNTDKRAFVETWQSFYRKKLKEVWKPAV

SEQ ID NO: 27772 - protein, 978 aa, synthetic construct
  REGION 1..978: note = engineered CasX variant
QEIKRINKIRRRLVKDSNTKKAGKTGPMKTLLVRVMTPDLRERLENLRKKPENIPQPISNTSRANLNKLLTDYTEMKKAILHVYWEEFQKDPVGLMSRVAQPASKKIDQNKLKPEMDEKGNLTTAGFACSQCGQPLFVYKLEQVSEKGKAYTNYFGRCNVAEHEKLILLAQLKPEKDSDEAVTYSLGKFGQRALDFYSIHVTKESTHPVKPLAQIAGNRYASGPVGKALSDACMGTIASFLSKYQDIIIEHQKVVKGNQKRLESLRELAGKENLEYPSVTLPPQPHTKEGVDAYNEVIARVRMWVNLNLWQKLKLSRDDAKPLLRLKGFPSFPLVERQANEVDWWDMVCNVKKLINEKKEDGKVFWQNLAGYKRQEALRPYLSSEEDRKKGKKFARYQLGDLLLHLEKKHGEDWGKVYDEAWERIDKKVEGLSKHIKLEEERRSEDAQSKAALTDWLRAKASFVIEGLKEADKDEFCRCELKLQKWYGDLRGKPFAIEAENSILDISGFSKQYNCAFIWQKDGVKKLNLYLIINYFKGGKLRFKKIKPEAFEANRFYTVINKKSGEIVPMEVNFNFDDPNLIILPLAFGKRQGREFIWNDLLSLETGSLKLANGRVIEKTLYNRRTRQDEPALFVALTFERREVLDSRKIKPMNLIGVDRGENIPAVIALTDPEGCPLSRFKDSLGNPTHILRIGESYKEKQRTIQAKKEHEQRRAGGYSRKYASKAKNLADDMVRNTARDLLYYAVTQDAMLIFENLSRGFGRQGKRTFMAERQYTRMEDWLTAKLAYEGLPSKTYLSKTLAQYTSKTCSNCGFTITSADYDRVLEKLKKTATGWMTTINGKELKVEGQITYYNRYKRQNVVKDLSVELDRLSEESVNNDISSWTKGRSGEALSLLKKRFSHRPVQEKFVCLNCGFETHADEQAALNIARSWLFLRSQEYKKYQTNKTTGNTDKRAFVETWQSFYRKKLKEVWKPAV

SEQ ID NO: 27773 - protein, 978 aa, synthetic construct
  REGION 1..978: note = engineered CasX variant
QEIKRINKIRRRLVKDSNTKKAGKTGPMKTLLVRVMTPDLRERLENLRKKPENIPQPISNTSRANLNKLLTDYTEMKKAILHVYWEEFQKDPVGLMSRVAQPASKKIDQNKLKPEMDEKGNLTTAGFACSQCGQPLFVYKLEQVSEKGKAYTNYFGRCNVAEHEKLILLAQLKPEKDSDEAVTYSLGKFGQRALDFYSIHVTKESTHPVKPLAQIAGNRYASGPVGKALSDACMGTIASFLSKYQDIIIEHQKVVKGNQKRLESLRELAGKENLEYPSVTLPPQPHTKEGVDAYNEVIARVRMWVNLNLWQKLKLSRDDAKPLLRLKGFPSFPLVERQANEVDWWDMVCNVKKLINEKKEDGKVFWQNLAGYKRQEALRPYLSSEEDRKKGKKFARYQLGDLLLHLEKKHGEDWGKVYDEAWERIDKKVEGLSKHIKLEEERRSEDAQSKAALTDWLRAKASFVIEGLKEADKDEFCRCELKLQKWYGDLRGKPFAIEAENSILDISGFSKQYNCAFIWQKDGVKKLNLYLIINYFKGGKLRFKKIKPEAFEANRFYTVINKKSGEIVPMEVNFNFDDPNLIILPLAFGKRQGREFIWNDLLSLETGSLKLANGRVIEKTLYNRRTRQDEPALFVALTFERREVLDSQNIKPMNLIGVDRGENIPAVIALTDPEGNPLSRFKDSLGNPTHILRIGESYKEKQRTIQAKKEVEQRRAGGYSRKYASKAKNLADDMVRNTARDLLYYAVTQDAMLIFENLSRGFGRQGKRTFMAERQYTRMEDWLTAKLAYEGLPSKTYLSKTLAQYTSKTCSNCGFTITSADYDRVLEKLKKTATGWMTTINGKELKVEGQITYYNRYKRQNVVKDLSVELDRLSEESVNNDISSWTKGRSGEALSLLKKRFSHRPVQEKFVCLNCGFETHADEQAALNIARSWLFLRSQEYKKYQTNKTTGNTDKRAFVETWQSFYRKKLKEVWKPAV

SEQ ID NO: 27774 - protein, 978 aa, synthetic construct
  REGION 1..978: note = engineered CasX variant
QEIKRINKIRRRLVKDSNTKKAGKTGPMKTLLVRVMTPDLRERLENLRKKPENIPQPISNTSRANLNKLLTDYTEMKKAILHVYWEEFQKDPVGLMSRVAQPASKKIDQNKLKPEMDEKGNLTTAGFACSQCGQPLFVYKLEQVSEKGKAYTNYFGRCNVAEHEKLILLAQLKPEKDSDEAVTYSLGKFGQRALDFYSIHVTKESTHPVKPLAQIAGNRYASGPVGKALSDACMGTIASFLSKYQDIIIEHQKVVKGNQKRLESLRELAGKENLEYPSVTLPPQPHTKEGVDAYNEVIARVRMWVNLNLWQKLKLSRDDAKPLLRLKGFPSFPLVERQANEVDWWDMVCNVKKLINEKKEDGKVFWQNLAGYKRQEALRPYLSSEEDRKKGKKFARYQLGDLLLHLEKKHGEDWGKVYDEAWERIDKKVEGLSKHIKLEEERRSEDAQSKAALTDWLRAKASFVIEGLKEADKDEFCRCELKLQKWYGDLRGKPFAIEAENSILDISGFSKQYNCAFIWQKDGVKKLNLYLIINYFKGGKLRFKKIKPEAFEANRFYTVINKKSGEIVPMEVNFNFDDPNLIILPLAFGKRQGREFIWNDLLSLETGSLKLANGRVIEKTLYNRRTRQDEPALFVALTFERREVLDSQNIKPMNLIGVDRGENIPAVIALTDPEGNPLSRFKDQLGNPTHILRIGESYKEKQRTIQAKKEVEQRRAGGYSRKYASKAKNLADDMVRNTARDLLYYAVTQDAMLIFENLSRGFGRQGKRTFMAERQYTRMEDWLTAKLAYEGLPSKTYLSKTLAQYTSKTCSNCGFTITSADYDRVLEKLKKTATGWMTTINGKELKVEGQITYYNRYKRQNVVKDLSVELDRLSEESVNNDISSWTKGRSGEALSLLKKRFSHRPVQEKFVCLNCGFETHADEQAALNIARSWLFLRSQEYKKYQTNKTTGNTDKRAFVETWQSFYRKKLKEVWKPAV

SEQ ID NO: 27775 - protein, 978 aa, synthetic construct
  REGION 1..978: note = engineered CasX variant
QEIKRINKIRRRLVKDSNTKKAGKTGPMKTLLVRVMTPDLRERLENLRKKPENIPQPISNTSRANLNKLLTDYTEMKKAILHVYWEEFQKDPVGLMSRVAQPASKKIDQNKLKPEMDEKGNLTTAGFACSQCGQPLFVYKLEQVSEKGKAYTNYFGRCNVAEHEKLILLAQLKPEKDSDEAVTYSLGKFGQRALDFYSIHVTKESTHPVKPLAQIAGNRYASGPVGKALSDACMGTIASFLSKYQDIIIEHQKVVKGNQKRLESLRELAGKENLEYPSVTLPPQPHTKEGVDAYNEVIARVRMWVNLNLWQKLKLSRDDAKPLLRLKGFPSFPLVERQANEVDWWDMVCNVKKLINEKKEDGKVFWQNLAGYKRQEALRPYLSSEEDRKKGKKFARYQLGDLLLHLEKKHGEDWGKVYDEAWERIDKKVEGLSKHIKLEEERRSEDAQSKAALTDWLRAKASFVIEGLKEADKDEFCRCELKLQKWYGDLRGKPFAIEAENSILDISGFSKQYNCAFIWQKDGVKKLNLYLIINYFKGGKLRFKKIKPEAFEANRFYTVINKKSGEIVPMEVNFNFDDPNLIILPLAFGKRQGREFIWNDLLSLETGSLKLANGRVIEKTLYNRRTRQDEPALFVALTFERREVLDSQNIKPMNLIGVDRGENIPAVIALTDPEGCPLSRFKDSLGNPTHILRIGESYKEKQRTIQAKKEVEQRRAGGYSRKYASKAKNLADDMVRNTARDLLYYAVTQDAMLIFENLSRGFGRQGKRTFMAERQYTRMEDWLTAKLAYEGLPSKTYLSKTLAQYTSKTCSNCGFTITSADYDRVLEKLKKTATGWMTTINGKELKVEGQITYYNRYKRQNVVKDLSVELDRLSEESVNNDISSWTKGRSGEALSLLKKRFSHRPVQEKFVCLNCGFETHADEQAALNIARSWLFLRSQEYKKYQTNKTTGNTDKRAFVETWQSFYRKKLKEVWKPAV

SEQ ID NO: 27776 - protein, 978 aa, synthetic construct
  REGION 1..978: note = engineered CasX variant
QEIKRINKIRRRLVKDSNTKKAGKTGPMKTLLVRVMTPDLRERLENLRKKPENIPQPISNTSRANLNKLLTDYTEMKKAILHVYWEEFQKDPVGLMSRVAQPASKKIDQNKLKPEMDEKGNLTTAGFACSQCGQPLFVYKLEQVSEKGKAYTNYFGRCNVAEHEKLILLAQLKPEKDSDEAVTYSLGKFGQRALDFYSIHVTKESTHPVKPLAQIAGNRYASGPVGKALSDACMGTIASFLSKYQDIIIEHQKVVKGNQKRLESLRELAGKENLEYPSVTLPPQPHTKEGVDAYNEVIARVRMWVNLNLWQKLKLSRDDAKPLLRLKGFPSFPLVERQANEVDWWDMVCNVKKLINEKKEDGKVFWQNLAGYKRQEALRPYLSSEEDRKKGKKFARYQLGDLLLHLEKKHGEDWGKVYDEAWERIDKKVEGLSKHIKLEEERRSEDAQSKAALTDWLRAKASFVIEGLKEADKDEFCRCELKLQKWYGDLRGKPFAIEAENSILDISGFSKQYNCAFIWQKDGVKKLNLYLIINYFKGGKLRFKKIKPEAFEANRFYTVINKKSGEIVPMEVNFNFDDPNLIILPLAFGKRQGREFIWNDLLSLETGSLKLANGRVIEKTLYNRRTRQDEPALFVALTFERREVLDSQNIKPMNLIGVDRGENIPAVIALTDPEGCPLSRFKDQLGNPTHILRIGESYKEKQRTIQAKKEVEQRRAGGYSRKYASKAKNLADDMVRNTARDLLYYAVTQDAMLIFENLSRGFGRQGKRTFMAERQYTRMEDWLTAKLAYEGLPSKTYLSKTLAQYTSKTCSNCGFTITSADYDRVLEKLKKTATGWMTTINGKELKVEGQITYYNRYKRQNVVKDLSVELDRLSEESVNNDISSWTKGRSGEALSLLKKRFSHRPVQEKFVCLNCGFETHADEQAALNIARSWLFLRSQEYKKYQTNKTTGNTDKRAFVETWQSFYRKKLKEVWKPAV

SEQ ID NO: 27777 - protein, 978 aa, synthetic construct
  REGION 1..978: note = engineered CasX variant
QEIKRINKIRRRLVKDSNTKKAGKTGPMKTLLVRVMTPDLRERLENLRKKPENIPQPISNTSRANLNKLLTDYTEMKKAILHVYWEEFQKDPVGLMSRVAQPASKKIDQNKLKPEMDEKGNLTTAGFACSQCGQPLFVYKLEQVSEKGKAYTNYFGRCNVAEHEKLILLAQLKPEKDSDEAVTYSLGKFGQRALDFYSIHVTKESTHPVKPLAQIAGNRYASGPVGKALSDACMGTIASFLSKYQDIIIEHQKVVKGNQKRLESLRELAGKENLEYPSVTLPPQPHTKEGVDAYNEVIARVRMWVNLNLWQKLKLSRDDAKPLLRLKGFPSFPLVERQANEVDWWDMVCNVKKLINEKKEDGKVFWQNLAGYKRQEALRPYLSSEEDRKKGKKFARYQLGDLLLHLEKKHGEDWGKVYDEAWERIDKKVEGLSKHIKLEEERRSEDAQSKAALTDWLRAKASFVIEGLKEADKDEFCRCELKLQKWYGDLRGKPFAIEAENSILDISGFSKQYNCAFIWQKDGVKKLNLYLIINYFKGGKLRFKKIKPEAFEANRFYTVINKKSGEIVPMEVNFNFDDPNLIILPLAFGKRQGREFIWNDLLSLETGSLKLANGRVIEKTLYNRRTRQDEPALFVALTFERREVLDSPNIKPMNLIGVDRGENIPAVIALTDPEGCPLSRFKDSLGNPTHILRIGHSYKEKQRTIQAKKEVEQRRAGGYSRKYASKAKNLADDMVRNTARDLLYYAVTQDAMLIFENLSRGFGRQGKRTFMAERQYTRMEDWLTAKLAYEGLPSKTYLSKTLAQYTSKTCSNCGFTITSADYDRVLEKLKKTATGWMTTINGKELKVEGQITYYNRYKRQNVVKDLSVELDRLSEESVNNDISSWTKGRSGEALSLLKKRFSHRPVQEKFVCLNCGFETHADEQAALNIARSWLFLRSQEYKKYQTNKTTGNTDKRAFVETWQSFYRKKLKEVWKPAV

SEQ ID NO: 27778 - protein, 978 aa, synthetic construct
  REGION 1..978: note = engineered CasX variant
QEIKRINKIRRRLVKDSNTKKAGKTGPMKTLLVRVMTPDLRERLENLRKKPENIPQPISNTSRANLNKLLTDYTEMKKAILHVYWEEFQKDPVGLMSRVAQPASKKIDQNKLKPEMDEKGNLTTAGFACSQCGQPLFVYKLEQVSEKGKAYTNYFGRCNVAEHEKLILLAQLKPEKDSDEAVTYSLGKFGQRALDFYSIHVTKESTHPVKPLAQIAGNRYASGPVGKALSDACMGTIASFLSKYQDIIIEHQKVVKGNQKRLESLRELAGKENLEYPSVTLPPQPHTKEGVDAYNEVIARVRMWVNLNLWQKLKLSRDDAKPLLRLKGFPSFPLVERQANEVDWWDMVCNVKKLINEKKEDGKVFWQNLAGYKRQEALRPYLSSEEDRKKGKKFARYQLGDLLLHLEKKHGEDWGKVYDEAWERIDKKVEGLSKHIKLEEERRSEDAQSKAALTDWLRAKASFVIEGLKEADKDEFCRCELKLQKWYGDLRGKPFAIEAENSILDISGFSKQYNCAFIWQKDGVKKLNLYLIINYFKGGKLRFKKIKPEAFEANRFYTVINKKSGEIVPMEVNFNFDDPNLIILPLAFGKRQGREFIWNDLLSLETGSLKLANGRVIEKTLYNRRTRQDEPALFVALTFERREVLDSPNIKPMNLIGVDRGENIPAVIALTDPEGCPLSRFKDSLGNPTHILRIGESYKEKQRTIQAKMEVEQRRAGGYSRKYASKAKNLADDMVRNTARDLLYYAVTQDAMLIFENLSRGFGRQGKRTFMAERQYTRMEDWLTAKLAYEGLPSKTYLSKTLAQYTSKTCSNCGFTITSADYDRVLEKLKKTATGWMTTINGKELKVEGQITYYNRYKRQNVVKDLSVELDRLSEESVNNDISSWTKGRSGEALSLLKKRFSHRPVQEKFVCLNCGFETHADEQAALNIARSWLFLRSQEYKKYQTNKTTGNTDKRAFVETWQSFYRKKLKEVWKPAV

SEQ ID NO: 27779 - protein, 978 aa, synthetic construct
  REGION 1..978: note = engineered CasX variant
QEIKRINKIRRRLVKDSNTKKAGKTGPMKTLLVRVMTPDLRERLENLRKKPENIPQPISNTSRANLNKLLTDYTEMKKAILHVYWEEFQKDPVGLMSRVAQPASKKIDQNKLKPEMDEKGNLTTAGFACSQCGQPLFVYKLEQVSEKGKAYTNYFGRCNVAEHEKLILLAQLKPEKDSDEAVTYSLGKFGQRALDFYSIHVTKESTHPVKPLAQIAGNRYASGPVGKALSDACMGTIASFLSKYQDIIIEHQKVVKGNQKRLESLRELAGKENLEYPSVTLPPQPHTKEGVDAYNEVIARVRMWVNLNLWQKLKLSRDDAKPLLRLKGFPSFPLVERQANEVDWWDMVCNVKKLINEKKEDGKVFWQNLAGYKRQEALRPYLSSEEDRKKGKKFARYQLGDLLLHLEKKHGEDWGKVYDEAWERIDKKVEGLSKHIKLEEERRSEDAQSKAALTDWLRAKASFVIEGLKEADKDEFCRCELKLQKWYGDLRGKPFAIEAENSILDISGFSKQYNCAFIWQKDGVKKLNLYLIINYFKGGKLRFKKIKPEAFEANRFYTVINKKSGEIVPMEVNFNFDDPNLIILPLAFGKRQGREFIWNDLLSLETGSLKLANGRVIEKTLYNRRTRQDEPALFVALTFERREVLDSPNIKPMNLIGVDRGENIPAVIALTDPEGCPLSRFKDSLGNPTHILRIGESYKEKQRTIQAKKEVEQRRAGGYSRKYASKAKNLADDMVRNTARDLLYYAVTQDAMLIFENLSRGFGRQGKRTFMAERQYTRMEDWLTAKLAYEGLPSKTYLSKTLAQYTSKTCSNCGFTITSADYDRVLEKLKKTATGWMTTINGKELKVEGQITYYNRYKRQNVVKDLSVELDRLSEESVNNDISSWTKGRSGEALSLLKKRFSHRPVQEKFVCLNCGFETHADEQAALNIARSWLFLRSQEYKKYQTNKTTGNTDKRAFVETWQSFYRKKLKEVWKPAV

SEQ ID NO: 27780 - protein, 978 aa, synthetic construct
  REGION 1..978: note = engineered CasX variant
QEIKRINKIRRRLVKDSNTKKAGKTGPMKTLLVRVMTPDLRERLENLRKKPENIPQPISNTSRANLNKLLTDYTEMKKAILHVYWEEFQKDPVGLMSRVAQPASKKIDQNKLKPEMDEKGNLTTAGFACSQCGQPLFVYKLEQVSEKGKAYTNYFGRCNVAEHEKLILLAQLKPEKDSDEAVTYSLGKFGQRALDFYSIHVTKESTHPVKPLAQIAGNRYASGPVGKALSDACMGTIASFLSKYQDIIIEHQKVVKGNQKRLESLRELAGKENLEYPSVTLPPQPHTKEGVDAYNEVIARVRMWVNLNLWQKLKLSRDDAKPLLRLKGFPSFPLVERQANEVDWWDMVCNVKKLINEKKEDGKVFWQNLAGYKRQEALRPYLSSEEDRKKGKKFARYQLGDLLLHLEKKHGEDWGKVYDEAWERIDKKVEGLSKHIKLEEERRSEDAQSKAALTDWLRAKASFVIEGLKEADKDEFCRCELKLQKWYGDLRGKPFAIEAENSILDISGFSKQYNCAFIWQKDGVKKLNLYLIINYFKGGKLRFKKIKPEAFEANRFYTVINKKSGEIVPMEVNFNFDDPNLIILPLAFGKRQGREFIWNDLLSLETGSLKLANGRVIEKTLYNRRTRQDEPALFVALTFERREVLDSNNIKQMNLIGVDRGENIPAVIALTDPEGCPLSRFKDSLGNPTHILRIGESYKEKQRTIQAKKEVEQRRAGGYSRKYASKAKNLADDMVRNTARDLLYYAVTQDAMLIFENLSRGFGRQGKRTFMAERQYTRMEDWLTAKLAYEGLPSKTYLSKTLAQYTSKTCSNCGFTITSADYDRVLEKLKKTATGWMTTINGKELKVEGQITYYNRYKRQNVVKDLSVELDRLSEESVNNDISSWTKGRSGEALSLLKKRFSHRPVQEKFVCLNCGFETHADEQAALNIARSWLFLRSQEYKKYQTNKTTGNTDKRAFVETWQSFYRKKLKEVWKPAV

SEQ ID NO: 27781 - protein, 978 aa, synthetic construct
  REGION 1..978: note = engineered CasX variant
QEIKRINKIRRRLVKDSNTKKAGKTGPMKTLLVRVMTPDLRERLENLRKKPENIPQPISNTSRANLNKLLTDYTEMKKAILHVYWEEFQKDPVGLMSRVAQPASKKIDQNKLKPEMDEKGNLTTAGFACSQCGQPLFVYKLEQVSEKGKAYTNYFGRCNVAEHEKLILLAQLKPEKDSDEAVTYSLGKFGQRALDFYSIHVTKESTHPVKPLAQIAGNRYASGPVGKALSDACMGTIASFLSKYQDIIIEHQKVVKGNQKRLESLRELAGKENLEYPSVTLPPQPHTKEGVDAYNEVIARVRMWVNLNLWQKLKLSRDDAKPLLRLKGFPSFPLVERQANEVDWWDMVCNVKKLINEKKEDGKVFWQNLAGYKRQEALRPYLSSEEDRKKGKKFARYQLGDLLLHLEKKHGEDWGKVYDEAWERIDKKVEGLSKHIKLEEERRSEDAQSKAALTDWLRAKASFVIEGLKEADKDEFCRCELKLQKWYGDLRGKPFAIEAENSILDISGFSKQYNCAFIWQKDGVKKLNLYLIINYFKGGKLRFKKIKPEAFEANRFYTVINKKSGEIVPMEVNFNFDDPNLIILPLAFGKRQGREFIWNDLLSLETGSLKLANGRVIEKTLYNRRTRQDEPALFVALTFERREVLDSNNIKQMNLIGVDRGENIPAVIALTDNEGCPLSRFKDSLGNPTHILRIGESYKEKQRTIQAKKEVEQRRAGGYSRKYASKAKNLADDMVRNTARDLLYYAVTQDAMLIFENLSRGFGRQGKRTFMAERQYTRMEDWLTAKLAYEGLPSKTYLSKTLAQYTSKTCSNCGFTITSADYDRVLEKLKKTATGWMTTINGKELKVEGQITYYNRYKRQNVVKDLSVELDRLSEESVNNDISSWTKGRSGEALSLLKKRFSHRPVQEKFVCLNCGFETHADEQAALNIARSWLFLRSQEYKKYQTNKTTGNTDKRAFVETWQSFYRKKLKEVWKPAV

SEQ ID NO: 27782 - protein, 978 aa, synthetic construct
  REGION 1..978: note = engineered CasX variant
QEIKRINKIRRRLVKDSNTKKAGKTGPMKTLLVRVMTPDLRERLENLRKKPENIPQPISNTSRANLNKLLTDYTEMKKAILHVYWEEFQKDPVGLMSRVAQPASKKIDQNKLKPEMDEKGNLTTAGFACSQCGQPLFVYKLEQVSEKGKAYTNYFGRCNVAEHEKLILLAQLKPEKDSDEAVTYSLGKFGQRALDFYSIHVTKESTHPVKPLAQIAGNRYASGPVGKALSDACMGTIASFLSKYQDIIIEHQKVVKGNQKRLESLRELAGKENLEYPSVTLPPQPHTKEGVDAYNEVIARVRMWVNLNLWQKLKLSRDDAKPLLRLKGFPSFPLVERQANEVDWWDMVCNVKKLINEKKEDGKVFWQNLAGYKRQEALRPYLSSEEDRKKGKKFARYQLGDLLLHLEKKHGEDWGKVYDEAWERIDKKVEGLSKHIKLEEERRSEDAQSKAALTDWLRAKASFVIEGLKEADKDEFCRCELKLQKWYGDLRGKPFAIEAENSILDISGFSKQYNCAFIWQKDGVKKLNLYLIINYFKGGKLRFKKIKPEAFEANRFYTVINKKSGEIVPMEVNFNFDDPNLIILPLAFGKRQGREFIWNDLLSLETGSLKLANGRVIEKTLYNRRTRQDEPALFVALTFERREVLDSNNIKPMNLIGVDRGENIPAVLALTDPEGCPLSRFKDSLGNPTHILRIGESYKEKQRTIQAKKEVEQRRAGGYSRKYASKAKNLADDMVRNTARDLLYYAVTQDAMLIFENLSRGFGRQGKRTFMAERQYTRMEDWLTAKLAYEGLPSKTYLSKTLAQYTSKTCSNCGFTITSADYDRVLEKLKKTATGWMTTINGKELKVEGQITYYNRYKRQNVVKDLSVELDRLSEESVNNDISSWTKGRSGEALSLLKKRFSHRPVQEKFVCLNCGFETHADEQAALNIARSWLFLRSQEYKKYQTNKTTGNTDKRAFVETWQSFYRKKLKEVWKPAV

SEQ ID NO: 27783 - protein, 978 aa, synthetic construct
  REGION 1..978: note = engineered CasX variant
QEIKRINKIRRRLVKDSNTKKAGKTGPMKTLLVRVMTPDLRERLENLRKKPENIPQPISNTSRANLNKLLTDYTEMKKAILHVYWEEFQKDPVGLMSRVAQPASKKIDQNKLKPEMDEKGNLTTAGFACSQCGQPLFVYKLEQVSEKGKAYTNYFGRCNVAEHEKLILLAQLKPEKDSDEAVTYSLGKFGQRALDFYSIHVTKESTHPVKPLAQIAGNRYASGPVGKALSDACMGTIASFLSKYQDIIIEHQKVVKGNQKRLESLRELAGKENLEYPSVTLPPQPHTKEGVDAYNEVIARVRMWVNLNLWQKLKLSRDDAKPLLRLKGFPSFPLVERQANEVDWWDMVCNVKKLINEKKEDGKVFWQNLAGYKRQEALRPYLSSEEDRKKGKKFARYQLGDLLLHLEKKHGEDWGKVYDEAWERIDKKVEGLSKHIKLEEERRSEDAQSKAALTDWLRAKASFVIEGLKEADKDEFCRCELKLQKWYGDLRGKPFAIEAENSILDISGFSKQYNCAFIWQKDGVKKLNLYLIINYFKGGKLRFKKIKPEAFEANRFYTVINKKSGEIVPMEVNFNFDDPNLIILPLAFGKRQGREFIWNDLLSLETGSLKLANGRVIEKTLYNRRTRQDEPALFVALTFERREVLDSNNIKPMNLIGVDRGENIPAVIALTDPEGCPLSRFKDSLGNPTHILRIGESYKEKQRTIQAKKEVEQRRAGGYSRKYASKAKNLADDMVRNTARDLLYYAVTQDAMLIFENLSRGFGRQGKRTFMAERQYTRMEDWLTAKLAYEGLPSKTYLSKTLAQYTSKTCSNCGFTITSADYDRVLEKLKKTATGWMTTINGKELKVEGQITYYNRYKRQNVVKDLSVELDRLSEESVNNDISSWTKGRSGEALSLLKKRFSHRPVQEKFVCLNCGFETHADEQAALNIARSWLFLRSQEYKKYQTNKTTGNTDKRAFVETWQSFYRKKLKEVWKPAV

SEQ ID NO: 27784 - protein, 978 aa, synthetic construct
  REGION 1..978: note = engineered CasX variant
QEIKRINKIRRRLVKDSNTKKAGKTGPMKTLLVRVMTPDLRERLENLRKKPENIPQPISNTSRANLNKLLTDYTEMKKAILHVYWEEFQKDPVGLMSRVAQPASKKIDQNKLKPEMDEKGNLTTAGFACSQCGQPLFVYKLEQVSEKGKAYTNYFGRCNVAEHEKLILLAQLKPEKDSDEAVTYSLGKFGQRALDFYSIHVTKESTHPVKPLAQIAGNRYASGPVGKALSDACMGTIASFLSKYQDIIIEHQKVVKGNQKRLESLRELAGKENLEYPSVTLPPQPHTKEGVDAYNEVIARVRMWVNLNLWQKLKLSRDDAKPLLRLKGFPSFPLVERQANEVDWWDMVCNVKKLINEKKEDGKVFWQNLAGYKRQEALRPYLSSEEDRKKGKKFARYQLGDLLLHLEKKHGEDWGKVYDEAWERIDKKVEGLSKHIKLEEERRSEDAQSKAALTDWLRAKASFVIEGLKEADKDEFCRCELKLQKWYGDLRGKPFAIEAENSILDISGFSKQYNCAFIWQKDGVKKLNLYLIINYFKGGKLRFKKIKPEAFEANRFYTVINKKSGEIVPMEVNFNFDDPNLIILPLAFGKRQGREFIWNDLLSLETGSLKLANGRVIEKTLYNRRTRQDEPALFVALTFERREVLDSNNIKPMNLIGVDRGENIPAVIALTDNEGCPLSRFKDSLGNPTHILRIGESYKEKQRTIQAKKEVEQRRAGGYSRKYASKAKNLADDMVRNTARDLLYYAVTQDAMLIFENLSRGFGRQGKRTFMAERQYTRMEDWLTAKLAYEGLPSKTYLSKTLAQYTSKTCSNCGFTITSADYDRVLEKLKKTATGWMTTINGKELKVEGQITYYNRYKRQNVVKDLSVELDRLSEESVNNDISSWTKGRSGEALSLLKKRFSHRPVQEKFVCLNCGFETHADEQAALNIARSWLFLRSQEYKKYQTNKTTGNTDKRAFVETWQSFYRKKLKEVWKPAV

SEQ ID NO: 27785 - protein, 978 aa, synthetic construct
  REGION 1..978: note = engineered CasX variant
QEIKRINKIRRRLVKDSNTKKAGKTGPMKTLLVRVMTPDLRERLENLRKKPENIPQPISNTSRANLNKLLTDYTEMKKAILHVYWEEFQKDPVGLMSRVAQPASKKIDQNKLKPEMDEKGNLTTAGFACSQCGQPLFVYKLEQVSEKGKAYTNYFGRCNVAEHEKLILLAQLKPEKDSDEAVTYSLGKFGQRALDFYSIHVTKESTHPVKPLAQIAGNRYASGPVGKALSDACMGTIASFLSKYQDIIIEHQKVVKGNQKRLESLRELAGKENLEYPSVTLPPQPHTKEGVDAYNEVIARVRMWVNLNLWQKLKLSRDDAKPLLRLKGFPSFPLVERQANEVDWWDMVCNVKKLINEKKEDGKVFWQNLAGYKRQEALRPYLSSEEDRKKGKKFARYQLGDLLLHLEKKHGEDWGKVYDEAWERIDKKVEGLSKHIKLEEERRSEDAQSKAALTDWLRAKASFVIEGLKEADKDEFCRCELKLQKWYGDLRGKPFAIEAENSILDISGFSKQYNCAFIWQKDGVKKLNLYLIINYFKGGKLRFKKIKPEAFEANRFYTVINKKSGEIVPMEVNFNFDDPNLIILPLAFGKRQGREFIWNDLLSLETGSLKLANGRVIEKTLYNRRTRQDEPALFVALTFERREVLDSLNIKYMNLIGVDRGENIPAVIALTDPEGCPLSRFKDSLGNPTHILRIGESYKEKQRTIQAKKEVEQRRAGGYSRKYASKAKNLADDMVRNTARDLLYYAVTQDAMLIFENLSRGFGRQGKRTFMAERQYTRMEDWLTAKLAYEGLPSKTYLSKTLAQYTSKTCSNCGFTITSADYDRVLEKLKKTATGWMTTINGKELKVEGQITYYNRYKRQNVVKDLSVELDRLSEESVNNDISSWTKGRSGEALSLLKKRFSHRPVQEKFVCLNCGFETHADEQAALNIARSWLFLRSQEYKKYQTNKTTGNTDKRAFVETWQSFYRKKLKEVWKPAV

SEQ ID NO: 27786 - protein, 978 aa, synthetic construct
  REGION 1..978: note = engineered CasX variant
QEIKRINKIRRRLVKDSNTKKAGKTGPMKTLLVRVMTPDLRERLENLRKKPENIPQPISNTSRANLNKLLTDYTEMKKAILHVYWEEFQKDPVGLMSRVAQPASKKIDQNKLKPEMDEKGNLTTAGFACSQCGQPLFVYKLEQVSEKGKAYTNYFGRCNVAEHEKLILLAQLKPEKDSDEAVTYSLGKFGQRALDFYSIHVTKESTHPVKPLAQIAGNRYASGPVGKALSDACMGTIASFLSKYQDIIIEHQKVVKGNQKRLESLRELAGKENLEYPSVTLPPQPHTKEGVDAYNEVIARVRMWVNLNLWQKLKLSRDDAKPLLRLKGFPSFPLVERQANEVDWWDMVCNVKKLINEKKEDGKVFWQNLAGYKRQEALRPYLSSEEDRKKGKKFARYQLGDLLLHLEKKHGEDWGKVYDEAWERIDKKVEGLSKHIKLEEERRSEDAQSKAALTDWLRAKASFVIEGLKEADKDEFCRCELKLQKWYGDLRGKPFAIEAENSILDISGFSKQYNCAFIWQKDGVKKLNLYLIINYFKGGKLRFKKIKPEAFEANRFYTVINKKSGEIVPMEVNFNFDDPNLIILPLAFGKRQGREFIWNDLLSLETGSLKLANGRVIEKTLYNRRTRQDEPALFVALTFERREVLDSLNIKPMNLIGVDRGENIPAVIALTDPEGCPLSRFKDSLGNPTHILRIGESYKEKQRTIQAKKEVEQRRAGGYSRKYASKAKNLADDMVRNTARDLLYYAVTQDAMLIFENLSRGFGRQGKRTFMAERQYTRMEDWLTAKLAYEGLPSKTYLSKTLAQYTSKTCSNCGFTITSADYDRVLEKLKKTATGWMTTINGKELKVEGQITYYNRYKRQNVVKDLSVELDRLSEESVNNDISSWTKGRSGEALSLLKKRFSHRPVQEKFVCLNCGFETHADEQAALNIARSWLFLRSQEYKKYQTNKTTGNTDKRAFVETWQSFYRKKLKEVWKPAV

SEQ ID NO: 27787 - protein, 978 aa, synthetic construct
  REGION 1..978: note = engineered CasX variant
QEIKRINKIRRRLVKDSNTKKAGKTGPMKTLLVRVMTPDLRERLENLRKKPENIPQPISNTSRANLNKLLTDYTEMKKAILHVYWEEFQKDPVGLMSRVAQPASKKIDQNKLKPEMDEKGNLTTAGFACSQCGQPLFVYKLEQVSEKGKAYTNYFGRCNVAEHEKLILLAQLKPEKDSDEAVTYSLGKFGQRALDFYSIHVTKESTHPVKPLAQIAGNRYASGPVGKALSDACMGTIASFLSKYQDIIIEHQKVVKGNQKRLESLRELAGKENLEYPSVTLPPQPHTKEGVDAYNEVIARVRMWVNLNLWQKLKLSRDDAKPLLRLKGFPSFPLVERQANEVDWWDMVCNVKKLINEKKEDGKVFWQNLAGYKRQEALRPYLSSEEDRKKGKKFARYQLGDLLLHLEKKHGEDWGKVYDEAWERIDKKVEGLSKHIKLEEERRSEDAQSKAALTDWLRAKASFVIEGLKEADKDEFCRCELKLQKWYGDLRGKPFAIEAENSILDISGFSKQYNCAFIWQKDGVKKLNLYLIINYFKGGKLRFKKIKPEAFEANRFYTVINKKSGEIVPMEVNFNFDDPNLIILPLAFGKRQGREFIWNDLLSLETGSLKLANGRVIEKTLYNRRTRQDEPALFVALTFERREVLDSKNIKPMNLIGVDRGENIPAVIALTDPEGHPLSRFKDSLGNPTHILRIGESYKEKQRTIQAKKEVEQRRAGGYSRKYASKAKNLADDMVRNTARDLLYYAVTQDAMLIFENLSRGFGRQGKRTFMAERQYTRMEDWLTAKLAYEGLPSKTYLSKTLAQYTSKTCSNCGFTITSADYDRVLEKLKKTATGWMTTINGKELKVEGQITYYNRYKRQNVVKDLSVELDRLSEESVNNDISSWTKGRSGEALSLLKKRFSHRPVQEKFVCLNCGFETHADEQAALNIARSWLFLRSQEYKKYQTNKTTGNTDKRAFVETWQSFYRKKLKEVWKPAV

SEQ ID NO: 27788 - protein, 978 aa, synthetic construct
  REGION 1..978: note = engineered CasX variant
QEIKRINKIRRRLVKDSNTKKAGKTGPMKTLLVRVMTPDLRERLENLRKKPENIPQPISNTSRANLNKLLTDYTEMKKAILHVYWEEFQKDPVGLMSRVAQPASKKIDQNKLKPEMDEKGNLTTAGFACSQCGQPLFVYKLEQVSEKGKAYTNYFGRCNVAEHEKLILLAQLKPEKDSDEAVTYSLGKFGQRALDFYSIHVTKESTHPVKPLAQIAGNRYASGPVGKALSDACMGTIASFLSKYQDIIIEHQKVVKGNQKRLESLRELAGKENLEYPSVTLPPQPHTKEGVDAYNEVIARVRMWVNLNLWQKLKLSRDDAKPLLRLKGFPSFPLVERQANEVDWWDMVCNVKKLINEKKEDGKVFWQNLAGYKRQEALRPYLSSEEDRKKGKKFARYQLGDLLLHLEKKHGEDWGKVYDEAWERIDKKVEGLSKHIKLEEERRSEDAQSKAALTDWLRAKASFVIEGLKEADKDEFCRCELKLQKWYGDLRGKPFAIEAENSILDISGFSKQYNCAFIWQKDGVKKLNLYLIINYFKGGKLRFKKIKPEAFEANRFYTVINKKSGEIVPMEVNFNFDDPNLIILPLAFGKRQGREFIWNDLLSLETGSLKLANGRVIEKTLYNRRTRQDEPALFVALTFERREVLDSKNIKPMNLIGVDRGENIPAVIALTDPEGCPLSRFKDSLGNPTHILRIGESYKYKQRTIQAKKEVEQRRAGGYSRKYASKAKNLADDMVRNTARDLLYYAVTQDAMLIFENLSRGFGRQGKRTFMAERQYTRMEDWLTAKLAYEGLPSKTYLSKTLAQYTSKTCSNCGFTITSADYDRVLEKLKKTATGWMTTINGKELKVEGQITYYNRYKRQNVVKDLSVELDRLSEESVNNDISSWTKGRSGEALSLLKKRFSHRPVQEKFVCLNCGFETHADEQAALNIARSWLFLRSQEYKKYQTNKTTGNTDKRAFVETWQSFYRKKLKEVWKPAV

SEQ ID NO: 27789 - protein, 978 aa, synthetic construct
  REGION 1..978: note = engineered CasX variant
QEIKRINKIRRRLVKDSNTKKAGKTGPMKTLLVRVMTPDLRERLENLRKKPENIPQPISNTSRANLNKLLTDYTEMKKAILHVYWEEFQKDPVGLMSRVAQPASKKIDQNKLKPEMDEKGNLTTAGFACSQCGQPLFVYKLEQVSEKGKAYTNYFGRCNVAEHEKLILLAQLKPEKDSDEAVTYSLGKFGQRALDFYSIHVTKESTHPVKPLAQIAGNRYASGPVGKALSDACMGTIASFLSKYQDIIIEHQKVVKGNQKRLESLRELAGKENLEYPSVTLPPQPHTKEGVDAYNEVIARVRMWVNLNLWQKLKLSRDDAKPLLRLKGFPSFPLVERQANEVDWWDMVCNVKKLINEKKEDGKVFWQNLAGYKRQEALRPYLSSEEDRKKGKKFARYQLGDLLLHLEKKHGEDWGKVYDEAWERIDKKVEGLSKHIKLEEERRSEDAQSKAALTDWLRAKASFVIEGLKEADKDEFCRCELKLQKWYGDLRGKPFAIEAENSILDISGFSKQYNCAFIWQKDGVKKLNLYLIINYFKGGKLRFKKIKPEAFEANRFYTVINKKSGEIVPMEVNFNFDDPNLIILPLAFGKRQGREFIWNDLLSLETGSLKLANGRVIEKTLYNRRTRQDEPALFVALTFERREVLDSKNIKPMNLIGVDRGENIPAVIALTDPEGCPLSRFKDSLGNPTHILRIGESYKEKQRTIQAKKEVEQRRAGGYSRKYASKAKNLADDMVRNTARDLLYYAVTQDAMLIFENLSRGFGRQGKRTFMAERQYTRMEDWLTAKLAYEGLPSKTYLSKTLAQYTSKTCSNCGFTITSADYDRVLEKLKKTATGWMTTINGKELKVEGQITYYNRYKRQNVVKDLSVELDRLSEESVNNDISSWTKGRSGEALSLLKKRFSHRPVQEKFVCLNCGFETHADEQAALNIARSWLFLRSQEYKKYQTNKTTGNTDKRAFVETWQSFYRKKLKEVWKPAV

SEQ ID NO: 27790 - protein, 978 aa, synthetic construct
  REGION 1..978: note = engineered CasX variant
QEIKRINKIRRRLVKDSNTKKAGKTGPMKTLLVRVMTPDLRERLENLRKKPENIPQPISNTSRANLNKLLTDYTEMKKAILHVYWEEFQKDPVGLMSRVAQPASKKIDQNKLKPEMDEKGNLTTAGFACSQCGQPLFVYKLEQVSEKGKAYTNYFGRCNVAEHEKLILLAQLKPEKDSDEAVTYSLGKFGQRALDFYSIHVTKESTHPVKPLAQIAGNRYASGPVGKALSDACMGTIASFLSKYQDIIIEHQKVVKGNQKRLESLRELAGKENLEYPSVTLPPQPHTKEGVDAYNEVIARVRMWVNLNLWQKLKLSRDDAKPLLRLKGFPSFPLVERQANEVDWWDMVCNVKKLINEKKEDGKVFWQNLAGYKRQEALRPYLSSEEDRKKGKKFARYQLGDLLLHLEKKHGEDWGKVYDEAWERIDKKVEGLSKHIKLEEERRSEDAQSKAALTDWLRAKASFVIEGLKEADKDEFCRCELKLQKWYGDLRGKPFAIEAENSILDISGFSKQYNCAFIWQKDGVKKLNLYLIINYFKGGKLRFKKIKPEAFEANRFYTVINKKSGEIVPMEVNFNFDDPNLIILPLAFGKRQGREFIWNDLLSLETGSLKLANGRVIEKTLYNRRTRQDEPALFVALTFERREVLDSKNIHPMNLIGVDRGENIPAVIALTDPEGCPLSRFKDSLGNPTHILRIGESYKYKQRTIQAKKEVEQRRAGGYSRKYASKAKNLADDMVRNTARDLLYYAVTQDAMLIFENLSRGFGRQGKRTFMAERQYTRMEDWLTAKLAYEGLPSKTYLSKTLAQYTSKTCSNCGFTITSADYDRVLEKLKKTATGWMTTINGKELKVEGQITYYNRYKRQNVVKDLSVELDRLSEESVNNDISSWTKGRSGEALSLLKKRFSHRPVQEKFVCLNCGFETHADEQAALNIARSWLFLRSQEYKKYQTNKTTGNTDKRAFVETWQSFYRKKLKEVWKPAV

SEQ ID NO: 27791 - protein, 978 aa, synthetic construct
  REGION 1..978: note = engineered CasX variant
QEIKRINKIRRRLVKDSNTKKAGKTGPMKTLLVRVMTPDLRERLENLRKKPENIPQPISNTSRANLNKLLTDYTEMKKAILHVYWEEFQKDPVGLMSRVAQPASKKIDQNKLKPEMDEKGNLTTAGFACSQCGQPLFVYKLEQVSEKGKAYTNYFGRCNVAEHEKLILLAQLKPEKDSDEAVTYSLGKFGQRALDFYSIHVTKESTHPVKPLAQIAGNRYASGPVGKALSDACMGTIASFLSKYQDIIIEHQKVVKGNQKRLESLRELAGKENLEYPSVTLPPQPHTKEGVDAYNEVIARVRMWVNLNLWQKLKLSRDDAKPLLRLKGFPSFPLVERQANEVDWWDMVCNVKKLINEKKEDGKVFWQNLAGYKRQEALRPYLSSEEDRKKGKKFARYQLGDLLLHLEKKHGEDWGKVYDEAWERIDKKVEGLSKHIKLEEERRSEDAQSKAALTDWLRAKASFVIEGLKEADKDEFCRCELKLQKWYGDLRGKPFAIEAENSILDISGFSKQYNCAFIWQKDGVKKLNLYLIINYFKGGKLRFKKIKPEAFEANRFYTVINKKSGEIVPMEVNFNFDDPNLIILPLAFGKRQGREFIWNDLLSLETGSLKLANGRVIEKTLYNRRTRQDEPALFVALTFERREVLDSKNIHPMNLIGVDRGENIPAVIALTDPEGCPLSRFKDSLGNPTHILRIGESYKEKQRTIQAKKEVEQRRAGGYSRKYASKAKNLADDMVRNTARDLLYYAVTQDAMLIFENLSRGFGRQGKRTFMAERQYTRMEDWLTAKLAYEGLPSKTYLSKTLAQYTSKTCSNCGFTITSADYDRVLEKLKKTATGWMTTINGKELKVEGQITYYNRYKRQNVVKDLSVELDRLSEESVNNDISSWTKGRSGEALSLLKKRFSHRPVQEKFVCLNCGFETHADEQAALNIARSWLFLRSQEYKKYQTNKTTGNTDKRAFVETWQSFYRKKLKEVWKPAV

SEQ ID NO: 27792 - protein, 978 aa, synthetic construct
  REGION 1..978: note = engineered CasX variant
QEIKRINKIRRRLVKDSNTKKAGKTGPMKTLLVRVMTPDLRERLENLRKKPENIPQPISNTSRANLNKLLTDYTEMKKAILHVYWEEFQKDPVGLMSRVAQPASKKIDQNKLKPEMDEKGNLTTAGFACSQCGQPLFVYKLEQVSEKGKAYTNYFGRCNVAEHEKLILLAQLKPEKDSDEAVTYSLGKFGQRALDFYSIHVTKESTHPVKPLAQIAGNRYASGPVGKALSDACMGTIASFLSKYQDIIIEHQKVVKGNQKRLESLRELAGKENLEYPSVTLPPQPHTKEGVDAYNEVIARVRMWVNLNLWQKLKLSRDDAKPLLRLKGFPSFPLVERQANEVDWWDMVCNVKKLINEKKEDGKVFWQNLAGYKRQEALRPYLSSEEDRKKGKKFARYQLGDLLLHLEKKHGEDWGKVYDEAWERIDKKVEGLSKHIKLEEERRSEDAQSKAALTDWLRAKASFVIEGLKEADKDEFCRCELKLQKWYGDLRGKPFAIEAENSILDISGFSKQYNCAFIWQKDGVKKLNLYLIINYFKGGKLRFKKIKPEAFEANRFYTVINKKSGEIVPMEVNFNFDDPNLIILPLAFGKRQGREFIWNDLLSLETGSLKLANGRVIEKTLYNRRTRQDEPALFVALTFERREVLDSKDIKPMNLIGVDRGENIPAVIALTDPEGHPLSRFKDSLGNPTHILRIGESYKEKQRTIQAKKEVEQRRAGGYSRKYASKAKNLADDMVRNTARDLLYYAVTQDAMLIFENLSRGFGRQGKRTFMAERQYTRMEDWLTAKLAYEGLPSKTYLSKTLAQYTSKTCSNCGFTITSADYDRVLEKLKKTATGWMTTINGKELKVEGQITYYNRYKRQNVVKDLSVELDRLSEESVNNDISSWTKGRSGEALSLLKKRFSHRPVQEKFVCLNCGFETHADEQAALNIARSWLFLRSQEYKKYQTNKTTGNTDKRAFVETWQSFYRKKLKEVWKPAV

SEQ ID NO: 27793 - protein, 978 aa, synthetic construct
  REGION 1..978: note = engineered CasX variant
QEIKRINKIRRRLVKDSNTKKAGKTGPMKTLLVRVMTPDLRERLENLRKKPENIPQPISNTSRANLNKLLTDYTEMKKAILHVYWEEFQKDPVGLMSRVAQPASKKIDQNKLKPEMDEKGNLTTAGFACSQCGQPLFVYKLEQVSEKGKAYTNYFGRCNVAEHEKLILLAQLKPEKDSDEAVTYSLGKFGQRALDFYSIHVTKESTHPVKPLAQIAGNRYASGPVGKALSDACMGTIASFLSKYQDIIIEHQKVVKGNQKRLESLRELAGKENLEYPSVTLPPQPHTKEGVDAYNEVIARVRMWVNLNLWQKLKLSRDDAKPLLRLKGFPSFPLVERQANEVDWWDMVCNVKKLINEKKEDGKVFWQNLAGYKRQEALRPYLSSEEDRKKGKKFARYQLGDLLLHLEKKHGEDWGKVYDEAWERIDKKVEGLSKHIKLEEERRSEDAQSKAALTDWLRAKASFVIEGLKEADKDEFCRCELKLQKWYGDLRGKPFAIEAENSILDISGFSKQYNCAFIWQKDGVKKLNLYLIINYFKGGKLRFKKIKPEAFEANRFYTVINKKSGEIVPMEVNFNFDDPNLIILPLAFGKRQGREFIWNDLLSLETGSLKLANGRVIEKTLYNRRTRQDEPALFVALTFERREVLDSKDIKPMNLIGVDRGENIPAVIALTDPEGCPLSRFKDSLGNPTHILRIGESYKEKQRTIQAKKEVEQRRAGGYSRKYASKAKNLADDMVRNTARDLLYYAVTQDAMLIFENLSRGFGRQGKRTFMAERQYTRMEDWLTAKLAYEGLPSKTYLSKTLAQYTSKTCSNCGFTITSADYDRVLEKLKKTATGWMTTINGKELKVEGQITYYNRYKRQNVVKDLSVELDRLSEESVNNDISSWTKGRSGEALSLLKKRFSHRPVQEKFVCLNCGFETHADEQAALNIARSWLFLRSQEYKKYQTNKTTGNTDKRAFVETWQSFYRKKLKEVWKPAV

SEQ ID NO: 27794 - protein, 978 aa, synthetic construct
  REGION 1..978: note = engineered CasX variant
QEIKRINKIRRRLVKDSNTKKAGKTGPMKTLLVRVMTPDLRERLENLRKKPENIPQPISNTSRANLNKLLTDYTEMKKAILHVYWEEFQKDPVGLMSRVAQPASKKIDQNKLKPEMDEKGNLTTAGFACSQCGQPLFVYKLEQVSEKGKAYTNYFGRCNVAEHEKLILLAQLKPEKDSDEAVTYSLGKFGQRALDFYSIHVTKESTHPVKPLAQIAGNRYASGPVGKALSDACMGTIASFLSKYQDIIIEHQKVVKGNQKRLESLRELAGKENLEYPSVTLPPQPHTKEGVDAYNEVIARVRMWVNLNLWQKLKLSRDDAKPLLRLKGFPSFPLVERQANEVDWWDMVCNVKKLINEKKEDGKVFWQNLAGYKRQEALRPYLSSEEDRKKGKKFARYQLGDLLLHLEKKHGEDWGKVYDEAWERIDKKVEGLSKHIKLEEERRSEDAQSKAALTDWLRAKASFVIEGLKEADKDEFCRCELKLQKWYGDLRGKPFAIEAENSILDISGFSKQYNCAFIWQKDGVKKLNLYLIINYFKGGKLRFKKIKPEAFEANRFYTVINKKSGEIVPMEVNFNFDDPNLIILPLAFGKRQGREFIWNDLLSLETGSLKLANGRVIEKTLYNRRTRQDEPALFVALTFERREVLDSINIKPMNMIGVDRGENIPAVIALTDPFGCPLSRFKDSLGNPTHILRIGESYKEKQRTIQAKKEVEQRRAGGYSRKYASKAKNLADDMVRNTARDLLYYAVTQDAMLIFENLSRGFGRQGKRTFMAERQYTRMEDWLTAKLAYEGLPSKTYLSKTLAQYTSKTCSNCGFTITSADYDRVLEKLKKTATGWMTTINGKELKVEGQITYYNRYKRQNVVKDLSVELDRLSEESVNNDISSWTKGRSGEALSLLKKRFSHRPVQEKFVCLNCGFETHADEQAALNIARSWLFLRSQEYKKYQTNKTTGNTDKRAFVETWQSFYRKKLKEVWKPAV

SEQ ID NO: 27795 - protein, 978 aa, synthetic construct
  REGION 1..978: note = engineered CasX variant
QEIKRINKIRRRLVKDSNTKKAGKTGPMKTLLVRVMTPDLRERLENLRKKPENIPQPISNTSRANLNKLLTDYTEMKKAILHVYWEEFQKDPVGLMSRVAQPASKKIDQNKLKPEMDEKGNLTTAGFACSQCGQPLFVYKLEQVSEKGKAYTNYFGRCNVAEHEKLILLAQLKPEKDSDEAVTYSLGKFGQRALDFYSIHVTKESTHPVKPLAQIAGNRYASGPVGKALSDACMGTIASFLSKYQDIIIEHQKVVKGNQKRLESLRELAGKENLEYPSVTLPPQPHTKEGVDAYNEVIARVRMWVNLNLWQKLKLSRDDAKPLLRLKGFPSFPLVERQANEVDWWDMVCNVKKLINEKKEDGKVFWQNLAGYKRQEALRPYLSSEEDRKKGKKFARYQLGDLLLHLEKKHGEDWGKVYDEAWERIDKKVEGLSKHIKLEEERRSEDAQSKAALTDWLRAKASFVIEGLKEADKDEFCRCELKLQKWYGDLRGKPFAIEAENSILDISGFSKQYNCAFIWQKDGVKKLNLYLIINYFKGGKLRFKKIKPEAFEANRFYTVINKKSGEIVPMEVNFNFDDPNLIILPLAFGKRQGREFIWNDLLSLETGSLKLANGRVIEKTLYNRRTRQDEPALFVALTFERREVLDSINIKPMNMIGVDRGENIPAVIALTDPEGCPLSRFKDSLGNPTHILRIGESYKEKQRTIQAKKEVEQRRAGGYSRKYASKAKNLADDMVRNTARDLLYYAVTQDAMLIFENLSRGFGRQGKRTFMAERQYTRMEDWLTAKLAYEGLPSKTYLSKTLAQYTSKTCSNCGFTITSADYDRVLEKLKKTATGWMTTINGKELKVEGQITYYNRYKRQNVVKDLSVELDRLSEESVNNDISSWTKGRSGEALSLLKKRFSHRPVQEKFVCLNCGFETHADEQAALNIARSWLFLRSQEYKKYQTNKTTGNTDKRAFVETWQSFYRKKLKEVWKPAV

SEQ ID NO: 27796 - protein, 978 aa, synthetic construct
  REGION 1..978: note = engineered CasX variant
QEIKRINKIRRRLVKDSNTKKAGKTGPMKTLLVRVMTPDLRERLENLRKKPENIPQPISNTSRANLNKLLTDYTEMKKAILHVYWEEFQKDPVGLMSRVAQPASKKIDQNKLKPEMDEKGNLTTAGFACSQCGQPLFVYKLEQVSEKGKAYTNYFGRCNVAEHEKLILLAQLKPEKDSDEAVTYSLGKFGQRALDFYSIHVTKESTHPVKPLAQIAGNRYASGPVGKALSDACMGTIASFLSKYQDIIIEHQKVVKGNQKRLESLRELAGKENLEYPSVTLPPQPHTKEGVDAYNEVIARVRMWVNLNLWQKLKLSRDDAKPLLRLKGFPSFPLVERQANEVDWWDMVCNVKKLINEKKEDGKVFWQNLAGYKRQEALRPYLSSEEDRKKGKKFARYQLGDLLLHLEKKHGEDWGKVYDEAWERIDKKVEGLSKHIKLEEERRSEDAQSKAALTDWLRAKASFVIEGLKEADKDEFCRCELKLQKWYGDLRGKPFAIEAENSILDISGFSKQYNCAFIWQKDGVKKLNLYLIINYFKGGKLRFKKIKPEAFEANRFYTVINKKSGEIVPMEVNFNFDDPNLIILPLAFGKRQGREFIWNDLLSLETGSLKLANGRVIEKTLYNRRTRQDEPALFVALTFERREVLDSINIKPMNLIGVDRGENIPAVIALTDPFGCPLSRFKDSLGNPTHILRIGESYKEKQRTIQAKKEVEQRRAGGYSRKYASKAKNLADDMVRNTARDLLYYAVTQDAMLIFENLSRGFGRQGKRTFMAERQYTRMEDWLTAKLAYEGLPSKTYLSKTLAQYTSKTCSNCGFTITSADYDRVLEKLKKTATGWMTTINGKELKVEGQITYYNRYKRQNVVKDLSVELDRLSEESVNNDISSWTKGRSGEALSLLKKRFSHRPVQEKFVCLNCGFETHADEQAALNIARSWLFLRSQEYKKYQTNKTTGNTDKRAFVETWQSFYRKKLKEVWKPAV

SEQ ID NO: 27797 - protein, 978 aa, synthetic construct
  REGION 1..978: note = engineered CasX variant
QEIKRINKIRRRLVKDSNTKKAGKTGPMKTLLVRVMTPDLRERLENLRKKPENIPQPISNTSRANLNKLLTDYTEMKKAILHVYWEEFQKDPVGLMSRVAQPASKKIDQNKLKPEMDEKGNLTTAGFACSQCGQPLFVYKLEQVSEKGKAYTNYFGRCNVAEHEKLILLAQLKPEKDSDEAVTYSLGKFGQRALDFYSIHVTKESTHPVKPLAQIAGNRYASGPVGKALSDACMGTIASFLSKYQDIIIEHQKVVKGNQKRLESLRELAGKENLEYPSVTLPPQPHTKEGVDAYNEVIARVRMWVNLNLWQKLKLSRDDAKPLLRLKGFPSFPLVERQANEVDWWDMVCNVKKLINEKKEDGKVFWQNLAGYKRQEALRPYLSSEEDRKKGKKFARYQLGDLLLHLEKKHGEDWGKVYDEAWERIDKKVEGLSKHIKLEEERRSEDAQSKAALTDWLRAKASFVIEGLKEADKDEFCRCELKLQKWYGDLRGKPFAIEAENSILDISGFSKQYNCAFIWQKDGVKKLNLYLIINYFKGGKLRFKKIKPEAFEANRFYTVINKKSGEIVPMEVNFNFDDPNLIILPLAFGKRQGREFIWNDLLSLETGSLKLANGRVIEKTLYNRRTRQDEPALFVALTFERREVLDSINIKPMNLIGVDRGENIPAVIALTDPEGCPLSRFKDSLGNPTHILRIGESYKEKQRTIQAKKEVEQRRAGGYSRKYASKAKNLADDMVRNTARDLLYYAVTQDAMLIFENLSRGFGRQGKRTFMAERQYTRMEDWLTAKLAYEGLPSKTYLSKTLAQYTSKTCSNCGFTITSADYDRVLEKLKKTATGWMTTINGKELKVEGQITYYNRYKRQNVVKDLSVELDRLSEESVNNDISSWTKGRSGEALSLLKKRFSHRPVQEKFVCLNCGFETHADEQAALNIARSWLFLRSQEYKKYQTNKTTGNTDKRAFVETWQSFYRKKLKEVWKPAV

SEQ ID NO: 27798 - protein, 978 aa, synthetic construct
  REGION 1..978: note = engineered CasX variant
QEIKRINKIRRRLVKDSNTKKAGKTGPMKTLLVRVMTPDLRERLENLRKKPENIPQPISNTSRANLNKLLTDYTEMKKAILHVYWEEFQKDPVGLMSRVAQPASKKIDQNKLKPEMDEKGNLTTAGFACSQCGQPLFVYKLEQVSEKGKAYTNYFGRCNVAEHEKLILLAQLKPEKDSDEAVTYSLGKFGQRALDFYSIHVTKESTHPVKPLAQIAGNRYASGPVGKALSDACMGTIASFLSKYQDIIIEHQKVVKGNQKRLESLRELAGKENLEYPSVTLPPQPHTKEGVDAYNEVIARVRMWVNLNLWQKLKLSRDDAKPLLRLKGFPSFPLVERQANEVDWWDMVCNVKKLINEKKEDGKVFWQNLAGYKRQEALRPYLSSEEDRKKGKKFARYQLGDLLLHLEKKHGEDWGKVYDEAWERIDKKVEGLSKHIKLEEERRSEDAQSKAALTDWLRAKASFVIEGLKEADKDEFCRCELKLQKWYGDLRGKPFAIEAENSILDISGFSKQYNCAFIWQKDGVKKLNLYLIINYFKGGKLRFKKIKPEAFEANRFYTVINKKSGEIVPMEVNFNFDDPNLIILPLAFGKRQGREFIWNDLLSLETGSLKLANGRVIEKTLYNRRTRQDEPALFVALTFERREVLDSHNIKPMNLIGVDRGENIPAVIALTDPEGCPLSRFKDSLGNPTHILRIGESYKEKQRTIQAYKEVEQRRAGGYSRKYASKAKNLADDMVRNTARDLLYYAVTQDAMLIFENLSRGFGRQGKRTFMAERQYTRMEDWLTAKLAYEGLPSKTYLSKTLAQYTSKTCSNCGFTITSADYDRVLEKLKKTATGWMTTINGKELKVEGQITYYNRYKRQNVVKDLSVELDRLSEESVNNDISSWTKGRSGEALSLLKKRFSHRPVQEKFVCLNCGFETHADEQAALNIARSWLFLRSQEYKKYQTNKTTGNTDKRAFVETWQSFYRKKLKEVWKPAV

SEQ ID NO: 27799 - protein, 978 aa, synthetic construct
  REGION 1..978: note = engineered CasX variant
QEIKRINKIRRRLVKDSNTKKAGKTGPMKTLLVRVMTPDLRERLENLRKKPENIPQPISNTSRANLNKLLTDYTEMKKAILHVYWEEFQKDPVGLMSRVAQPASKKIDQNKLKPEMDEKGNLTTAGFACSQCGQPLFVYKLEQVSEKGKAYTNYFGRCNVAEHEKLILLAQLKPEKDSDEAVTYSLGKFGQRALDFYSIHVTKESTHPVKPLAQIAGNRYASGPVGKALSDACMGTIASFLSKYQDIIIEHQKVVKGNQKRLESLRELAGKENLEYPSVTLPPQPHTKEGVDAYNEVIARVRMWVNLNLWQKLKLSRDDAKPLLRLKGFPSFPLVERQANEVDWWDMVCNVKKLINEKKEDGKVFWQNLAGYKRQEALRPYLSSEEDRKKGKKFARYQLGDLLLHLEKKHGEDWGKVYDEAWERIDKKVEGLSKHIKLEEERRSEDAQSKAALTDWLRAKASFVIEGLKEADKDEFCRCELKLQKWYGDLRGKPFAIEAENSILDISGFSKQYNCAFIWQKDGVKKLNLYLIINYFKGGKLRFKKIKPEAFEANRFYTVINKKSGEIVPMEVNFNFDDPNLIILPLAFGKRQGREFIWNDLLSLETGSLKLANGRVIEKTLYNRRTRQDEPALFVALTFERREVLDSHNIKPMNLIGVDRGENIPAVIALTDPEGCPLSRFKDSLGNPTHILRIGESYKEKQRTIQAKKEVSQRRAGGYSRKYASKAKNLADDMVRNTARDLLYYAVTQDAMLIFENLSRGFGRQGKRTFMAERQYTRMEDWLTAKLAYEGLPSKTYLSKTLAQYTSKTCSNCGFTITSADYDRVLEKLKKTATGWMTTINGKELKVEGQITYYNRYKRQNVVKDLSVELDRLSEESVNNDISSWTKGRSGEALSLLKKRFSHRPVQEKFVCLNCGFETHADEQAALNIARSWLFLRSQEYKKYQTNKTTGNTDKRAFVETWQSFYRKKLKEVWKPAV

SEQ ID NO: 27800 - protein, 978 aa, synthetic construct
  REGION 1..978: note = engineered CasX variant
QEIKRINKIRRRLVKDSNTKKAGKTGPMKTLLVRVMTPDLRERLENLRKKPENIPQPISNTSRANLNKLLTDYTEMKKAILHVYWEEFQKDPVGLMSRVAQPASKKIDQNKLKPEMDEKGNLTTAGFACSQCGQPLFVYKLEQVSEKGKAYTNYFGRCNVAEHEKLILLAQLKPEKDSDEAVTYSLGKFGQRALDFYSIHVTKESTHPVKPLAQIAGNRYASGPVGKALSDACMGTIASFLSKYQDIIIEHQKVVKGNQKRLESLRELAGKENLEYPSVTLPPQPHTKEGVDAYNEVIARVRMWVNLNLWQKLKLSRDDAKPLLRLKGFPSFPLVERQANEVDWWDMVCNVKKLINEKKEDGKVFWQNLAGYKRQEALRPYLSSEEDRKKGKKFARYQLGDLLLHLEKKHGEDWGKVYDEAWERIDKKVEGLSKHIKLEEERRSEDAQSKAALTDWLRAKASFVIEGLKEADKDEFCRCELKLQKWYGDLRGKPFAIEAENSILDISGFSKQYNCAFIWQKDGVKKLNLYLIINYFKGGKLRFKKIKPEAFEANRFYTVINKKSGEIVPMEVNFNFDDPNLIILPLAFGKRQGREFIWNDLLSLETGSLKLANGRVIEKTLYNRRTRQDEPALFVALTFERREVLDSHNIKPMNLIGVDRGENIPAVIALTDPEGCPLSRFKDSLGNPTHILRIGESYKEKQRTIQAKKEVEQRRAGGYSRKYASKAKNLADDMVRNTARDLLYYAVTQDAMLIFENLSRGFGRQGKRTFMAERQYTRMEDWLTAKLAYEGLPSKTYLSKTLAQYTSKTCSNCGFTITSADYDRVLEKLKKTATGWMTTINGKELKVEGQITYYNRYKRQNVVKDLSVELDRLSEESVNNDISSWTKGRSGEALSLLKKRFSHRPVQEKFVCLNCGFETHADEQAALNIARSWLFLRSQEYKKYQTNKTTGNTDKRAFVETWQSFYRKKLKEVWKPAV

SEQ ID NO: 27801 - protein, 978 aa, synthetic construct
  REGION 1..978: note = engineered CasX variant
QEIKRINKIRRRLVKDSNTKKAGKTGPMKTLLVRVMTPDLRERLENLRKKPENIPQPISNTSRANLNKLLTDYTEMKKAILHVYWEEFQKDPVGLMSRVAQPASKKIDQNKLKPEMDEKGNLTTAGFACSQCGQPLFVYKLEQVSEKGKAYTNYFGRCNVAEHEKLILLAQLKPEKDSDEAVTYSLGKFGQRALDFYSIHVTKESTHPVKPLAQIAGNRYASGPVGKALSDACMGTIASFLSKYQDIIIEHQKVVKGNQKRLESLRELAGKENLEYPSVTLPPQPHTKEGVDAYNEVIARVRMWVNLNLWQKLKLSRDDAKPLLRLKGFPSFPLVERQANEVDWWDMVCNVKKLINEKKEDGKVFWQNLAGYKRQEALRPYLSSEEDRKKGKKFARYQLGDLLLHLEKKHGEDWGKVYDEAWERIDKKVEGLSKHIKLEEERRSEDAQSKAALTDWLRAKASFVIEGLKEADKDEFCRCELKLQKWYGDLRGKPFAIEAENSILDISGFSKQYNCAFIWQKDGVKKLNLYLIINYFKGGKLRFKKIKPEAFEANRFYTVINKKSGEIVPMEVNFNFDDPNLIILPLAFGKRQGREFIWNDLLSLETGSLKLANGRVIEKTLYNRRTRQDEPALFVALTFERREVLDSHNIKPMNLIGVDRGENIPAVIALTDPEGCPLSRFKDSLGNPTHILRIGESFKEKQRTIQAYKEVEQRRAGGYSRKYASKAKNLADDMVRNTARDLLYYAVTQDAMLIFENLSRGFGRQGKRTFMAERQYTRMEDWLTAKLAYEGLPSKTYLSKTLAQYTSKTCSNCGFTITSADYDRVLEKLKKTATGWMTTINGKELKVEGQITYYNRYKRQNVVKDLSVELDRLSEESVNNDISSWTKGRSGEALSLLKKRFSHRPVQEKFVCLNCGFETHADEQAALNIARSWLFLRSQEYKKYQTNKTTGNTDKRAFVETWQSFYRKKLKEVWKPAV

SEQ ID NO: 27802 - protein, 978 aa, synthetic construct
  REGION 1..978: note = engineered CasX variant
QEIKRINKIRRRLVKDSNTKKAGKTGPMKTLLVRVMTPDLRERLENLRKKPENIPQPISNTSRANLNKLLTDYTEMKKAILHVYWEEFQKDPVGLMSRVAQPASKKIDQNKLKPEMDEKGNLTTAGFACSQCGQPLFVYKLEQVSEKGKAYTNYFGRCNVAEHEKLILLAQLKPEKDSDEAVTYSLGKFGQRALDFYSIHVTKESTHPVKPLAQIAGNRYASGPVGKALSDACMGTIASFLSKYQDIIIEHQKVVKGNQKRLESLRELAGKENLEYPSVTLPPQPHTKEGVDAYNEVIARVRMWVNLNLWQKLKLSRDDAKPLLRLKGFPSFPLVERQANEVDWWDMVCNVKKLINEKKEDGKVFWQNLAGYKRQEALRPYLSSEEDRKKGKKFARYQLGDLLLHLEKKHGEDWGKVYDEAWERIDKKVEGLSKHIKLEEERRSEDAQSKAALTDWLRAKASFVIEGLKEADKDEFCRCELKLQKWYGDLRGKPFAIEAENSILDISGFSKQYNCAFIWQKDGVKKLNLYLIINYFKGGKLRFKKIKPEAFEANRFYTVINKKSGEIVPMEVNFNFDDPNLIILPLAFGKRQGREFIWNDLLSLETGSLKLANGRVIEKTLYNRRTRQDEPALFVALTFERREVLDSHNIKPMNLIGVDRGENIPAVIALTDPEGCPLSRFKDSLGNPTHILRIGESFKEKQRTIQAKKEVEQRRAGGYSRKYASKAKNLADDMVRNTARDLLYYAVTQDAMLIFENLSRGFGRQGKRTFMAERQYTRMEDWLTAKLAYEGLPSKTYLSKTLAQYTSKTCSNCGFTITSADYDRVLEKLKKTATGWMTTINGKELKVEGQITYYNRYKRQNVVKDLSVELDRLSEESVNNDISSWTKGRSGEALSLLKKRFSHRPVQEKFVCLNCGFETHADEQAALNIARSWLFLRSQEYKKYQTNKTTGNTDKRAFVETWQSFYRKKLKEVWKPAV

SEQ ID NO: 27803 - protein, 978 aa, synthetic construct
  REGION 1..978: note = engineered CasX variant
QEIKRINKIRRRLVKDSNTKKAGKTGPMKTLLVRVMTPDLRERLENLRKKPENIPQPISNTSRANLNKLLTDYTEMKKAILHVYWEEFQKDPVGLMSRVAQPASKKIDQNKLKPEMDEKGNLTTAGFACSQCGQPLFVYKLEQVSEKGKAYTNYFGRCNVAEHEKLILLAQLKPEKDSDEAVTYSLGKFGQRALDFYSIHVTKESTHPVKPLAQIAGNRYASGPVGKALSDACMGTIASFLSKYQDIIIEHQKVVKGNQKRLESLRELAGKENLEYPSVTLPPQPHTKEGVDAYNEVIARVRMWVNLNLWQKLKLSRDDAKPLLRLKGFPSFPLVERQANEVDWWDMVCNVKKLINEKKEDGKVFWQNLAGYKRQEALRPYLSSEEDRKKGKKFARYQLGDLLLHLEKKHGEDWGKVYDEAWERIDKKVEGLSKHIKLEEERRSEDAQSKAALTDWLRAKASFVIEGLKEADKDEFCRCELKLQKWYGDLRGKPFAIEAENSILDISGFSKQYNCAFIWQKDGVKKLNLYLIINYFKGGKLRFKKIKPEAFEANRFYTVINKKSGEIVPMEVNFNFDDPNLIILPLAFGKRQGREFIWNDLLSLETGSLKLANGRVIEKTLYNRRTRQDEPALFVALTFERREVLDSHNIKPMNLIGVDRGENIPAVIALTDPEGCPLSFFKDSLGNPTHILRIGESYKEKQRTIQAKKEVSQRRAGGYSRKYASKAKNLADDMVRNTARDLLYYAVTQDAMLIFENLSRGFGRQGKRTFMAERQYTRMEDWLTAKLAYEGLPSKTYLSKTLAQYTSKTCSNCGFTITSADYDRVLEKLKKTATGWMTTINGKELKVEGQITYYNRYKRQNVVKDLSVELDRLSEESVNNDISSWTKGRSGEALSLLKKRFSHRPVQEKFVCLNCGFETHADEQAALNIARSWLFLRSQEYKKYQTNKTTGNTDKRAFVETWQSFYRKKLKEVWKPAV

SEQ ID NO: 27804 - protein, 978 aa, synthetic construct
  REGION 1..978: note = engineered CasX variant
QEIKRINKIRRRLVKDSNTKKAGKTGPMKTLLVRVMTPDLRERLENLRKKPENIPQPISNTSRANLNKLLTDYTEMKKAILHVYWEEFQKDPVGLMSRVAQPASKKIDQNKLKPEMDEKGNLTTAGFACSQCGQPLFVYKLEQVSEKGKAYTNYFGRCNVAEHEKLILLAQLKPEKDSDEAVTYSLGKFGQRALDFYSIHVTKESTHPVKPLAQIAGNRYASGPVGKALSDACMGTIASFLSKYQDIIIEHQKVVKGNQKRLESLRELAGKENLEYPSVTLPPQPHTKEGVDAYNEVIARVRMWVNLNLWQKLKLSRDDAKPLLRLKGFPSFPLVERQANEVDWWDMVCNVKKLINEKKEDGKVFWQNLAGYKRQEALRPYLSSEEDRKKGKKFARYQLGDLLLHLEKKHGEDWGKVYDEAWERIDKKVEGLSKHIKLEEERRSEDAQSKAALTDWLRAKASFVIEGLKEADKDEFCRCELKLQKWYGDLRGKPFAIEAENSILDISGFSKQYNCAFIWQKDGVKKLNLYLIINYFKGGKLRFKKIKPEAFEANRFYTVINKKSGEIVPMEVNFNFDDPNLIILPLAFGKRQGREFIWNDLLSLETGSLKLANGRVIEKTLYNRRTRQDEPALFVALTFERREVLDSHNIKPMNLIGVDRGENIPAVIALTDPEGCPLSFFKDSLGNPTHILRIGESYKEKQRTIQAKKEVEQRRAGGYSRKYASKAKNLADDMVRNTARDLLYYAVTQDAMLIFENLSRGFGRQGKRTFMAERQYTRMEDWLTAKLAYEGLPSKTYLSKTLAQYTSKTCSNCGFTITSADYDRVLEKLKKTATGWMTTINGKELKVEGQITYYNRYKRQNVVKDLSVELDRLSEESVNNDISSWTKGRSGEALSLLKKRFSHRPVQEKFVCLNCGFETHADEQAALNIARSWLFLRSQEYKKYQTNKTTGNTDKRAFVETWQSFYRKKLKEVWKPAV

SEQ ID NO: 27805 - protein, 978 aa, synthetic construct
  REGION 1..978: note = engineered CasX variant
QEIKRINKIRRRLVKDSNTKKAGKTGPMKTLLVRVMTPDLRERLENLRKKPENIPQPISNTSRANLNKLLTDYTEMKKAILHVYWEEFQKDPVGLMSRVAQPASKKIDQNKLKPEMDEKGNLTTAGFACSQCGQPLFVYKLEQVSEKGKAYTNYFGRCNVAEHEKLILLAQLKPEKDSDEAVTYSLGKFGQRALDFYSIHVTKESTHPVKPLAQIAGNRYASGPVGKALSDACMGTIASFLSKYQDIIIEHQKVVKGNQKRLESLRELAGKENLEYPSVTLPPQPHTKEGVDAYNEVIARVRMWVNLNLWQKLKLSRDDAKPLLRLKGFPSFPLVERQANEVDWWDMVCNVKKLINEKKEDGKVFWQNLAGYKRQEALRPYLSSEEDRKKGKKFARYQLGDLLLHLEKKHGEDWGKVYDEAWERIDKKVEGLSKHIKLEEERRSEDAQSKAALTDWLRAKASFVIEGLKEADKDEFCRCELKLQKWYGDLRGKPFAIEAENSILDISGFSKQYNCAFIWQKDGVKKLNLYLIINYFKGGKLRFKKIKPEAFEANRFYTVINKKSGEIVPMEVNFNFDDPNLIILPLAFGKRQGREFIWNDLLSLETGSLKLANGRVIEKTLYNRRTRQDEPALFVALTFERREVLDSGNIKPMNLIGVDRGENIPAVIALTDPEGCPLSRFKDSQGNPTHILRIGESYKEKQRTIQAKKEVEQRRAGGYSRKYASKAKNLADDMVRNTARDLLYYAVTQDAMLIFENLSRGFGRQGKRTFMAERQYTRMEDWLTAKLAYEGLPSKTYLSKTLAQYTSKTCSNCGFTITSADYDRVLEKLKKTATGWMTTINGKELKVEGQITYYNRYKRQNVVKDLSVELDRLSEESVNNDISSWTKGRSGEALSLLKKRFSHRPVQEKFVCLNCGFETHADEQAALNIARSWLFLRSQEYKKYQTNKTTGNTDKRAFVETWQSFYRKKLKEVWKPAV

SEQ ID NO: 27806 - protein, 978 aa, synthetic construct
  REGION 1..978: note = engineered CasX variant
QEIKRINKIRRRLVKDSNTKKAGKTGPMKTLLVRVMTPDLRERLENLRKKPENIPQPISNTSRANLNKLLTDYTEMKKAILHVYWEEFQKDPVGLMSRVAQPASKKIDQNKLKPEMDEKGNLTTAGFACSQCGQPLFVYKLEQVSEKGKAYTNYFGRCNVAEHEKLILLAQLKPEKDSDEAVTYSLGKFGQRALDFYSIHVTKESTHPVKPLAQIAGNRYASGPVGKALSDACMGTIASFLSKYQDIIIEHQKVVKGNQKRLESLRELAGKENLEYPSVTLPPQPHTKEGVDAYNEVIARVRMWVNLNLWQKLKLSRDDAKPLLRLKGFPSFPLVERQANEVDWWDMVCNVKKLINEKKEDGKVFWQNLAGYKRQEALRPYLSSEEDRKKGKKFARYQLGDLLLHLEKKHGEDWGKVYDEAWERIDKKVEGLSKHIKLEEERRSEDAQSKAALTDWLRAKASFVIEGLKEADKDEFCRCELKLQKWYGDLRGKPFAIEAENSILDISGFSKQYNCAFIWQKDGVKKLNLYLIINYFKGGKLRFKKIKPEAFEANRFYTVINKKSGEIVPMEVNFNFDDPNLIILPLAFGKRQGREFIWNDLLSLETGSLKLANGRVIEKTLYNRRTRQDEPALFVALTFERREVLDSGNIKPMNLIGVDRGENIPAVIALTDPEGCPLSRFKDSLGNPTHILRIGESYKEKQRTIQAKKEVMQRRAGGYSRKYASKAKNLADDMVRNTARDLLYYAVTQDAMLIFENLSRGFGRQGKRTFMAERQYTRMEDWLTAKLAYEGLPSKTYLSKTLAQYTSKTCSNCGFTITSADYDRVLEKLKKTATGWMTTINGKELKVEGQITYYNRYKRQNVVKDLSVELDRLSEESVNNDISSWTKGRSGEALSLLKKRFSHRPVQEKFVCLNCGFETHADEQAALNIARSWLFLRSQEYKKYQTNKTTGNTDKRAFVETWQSFYRKKLKEVWKPAV

SEQ ID NO: 27807 - protein, 978 aa, synthetic construct
  REGION 1..978: note = engineered CasX variant
QEIKRINKIRRRLVKDSNTKKAGKTGPMKTLLVRVMTPDLRERLENLRKKPENIPQPISNTSRANLNKLLTDYTEMKKAILHVYWEEFQKDPVGLMSRVAQPASKKIDQNKLKPEMDEKGNLTTAGFACSQCGQPLFVYKLEQVSEKGKAYTNYFGRCNVAEHEKLILLAQLKPEKDSDEAVTYSLGKFGQRALDFYSIHVTKESTHPVKPLAQIAGNRYASGPVGKALSDACMGTIASFLSKYQDIIIEHQKVVKGNQKRLESLRELAGKENLEYPSVTLPPQPHTKEGVDAYNEVIARVRMWVNLNLWQKLKLSRDDAKPLLRLKGFPSFPLVERQANEVDWWDMVCNVKKLINEKKEDGKVFWQNLAGYKRQEALRPYLSSEEDRKKGKKFARYQLGDLLLHLEKKHGEDWGKVYDEAWERIDKKVEGLSKHIKLEEERRSEDAQSKAALTDWLRAKASFVIEGLKEADKDEFCRCELKLQKWYGDLRGKPFAIEAENSILDISGFSKQYNCAFIWQKDGVKKLNLYLIINYFKGGKLRFKKIKPEAFEANRFYTVINKKSGEIVPMEVNFNFDDPNLIILPLAFGKRQGREFIWNDLLSLETGSLKLANGRVIEKTLYNRRTRQDEPALFVALTFERREVLDSGNIKPMNLIGVDRGENIPAVIALTDPEGCPLSRFKDSLGNPTHILRIGESYKEKQRTIQAKKEVEQRRAGGYSRKYASKAKNLADDMVRNTARDLLYYAVTQDAMLIFENLSRGFGRQGKRTFMAERQYTRMEDWLTAKLAYEGLPSKTYLSKTLAQYTSKTCSNCGFTITSADYDRVLEKLKKTATGWMTTINGKELKVEGQITYYNRYKRQNVVKDLSVELDRLSEESVNNDISSWTKGRSGEALSLLKKRFSHRPVQEKFVCLNCGFETHADEQAALNIARSWLFLRSQEYKKYQTNKTTGNTDKRAFVETWQSFYRKKLKEVWKPAV

SEQ ID NO: 27808 - protein, 978 aa, synthetic construct
  REGION 1..978: note = engineered CasX variant
QEIKRINKIRRRLVKDSNTKKAGKTGPMKTLLVRVMTPDLRERLENLRKKPENIPQPISNTSRANLNKLLTDYTEMKKAILHVYWEEFQKDPVGLMSRVAQPASKKIDQNKLKPEMDEKGNLTTAGFACSQCGQPLFVYKLEQVSEKGKAYTNYFGRCNVAEHEKLILLAQLKPEKDSDEAVTYSLGKFGQRALDFYSIHVTKESTHPVKPLAQIAGNRYASGPVGKALSDACMGTIASFLSKYQDIIIEHQKVVKGNQKRLESLRELAGKENLEYPSVTLPPQPHTKEGVDAYNEVIARVRMWVNLNLWQKLKLSRDDAKPLLRLKGFPSFPLVERQANEVDWWDMVCNVKKLINEKKEDGKVFWQNLAGYKRQEALRPYLSSEEDRKKGKKFARYQLGDLLLHLEKKHGEDWGKVYDEAWERIDKKVEGLSKHIKLEEERRSEDAQSKAALTDWLRAKASFVIEGLKEADKDEFCRCELKLQKWYGDLRGKPFAIEAENSILDISGFSKQYNCAFIWQKDGVKKLNLYLIINYFKGGKLRFKKIKPEAFEANRFYTVINKKSGEIVPMEVNFNFDDPNLIILPLAFGKRQGREFIWNDLLSLETGSLKLANGRVIEKTLYNRRTRQDEPALFVALTFERREVLDSGNIKPMNLIGVDRGENIPAVIALTDPEGCPLSCFKDSQGNPTHILRIGESYKEKQRTIQAKKEVEQRRAGGYSRKYASKAKNLADDMVRNTARDLLYYAVTQDAMLIFENLSRGFGRQGKRTFMAERQYTRMEDWLTAKLAYEGLPSKTYLSKTLAQYTSKTCSNCGFTITSADYDRVLEKLKKTATGWMTTINGKELKVEGQITYYNRYKRQNVVKDLSVELDRLSEESVNNDISSWTKGRSGEALSLLKKRFSHRPVQEKFVCLNCGFETHADEQAALNIARSWLFLRSQEYKKYQTNKTTGNTDKRAFVETWQSFYRKKLKEVWKPAV

SEQ ID NO: 27809 - protein, 978 aa, synthetic construct
  REGION 1..978: note = engineered CasX variant
QEIKRINKIRRRLVKDSNTKKAGKTGPMKTLLVRVMTPDLRERLENLRKKPENIPQPISNTSRANLNKLLTDYTEMKKAILHVYWEEFQKDPVGLMSRVAQPASKKIDQNKLKPEMDEKGNLTTAGFACSQCGQPLFVYKLEQVSEKGKAYTNYFGRCNVAEHEKLILLAQLKPEKDSDEAVTYSLGKFGQRALDFYSIHVTKESTHPVKPLAQIAGNRYASGPVGKALSDACMGTIASFLSKYQDIIIEHQKVVKGNQKRLESLRELAGKENLEYPSVTLPPQPHTKEGVDAYNEVIARVRMWVNLNLWQKLKLSRDDAKPLLRLKGFPSFPLVERQANEVDWWDMVCNVKKLINEKKEDGKVFWQNLAGYKRQEALRPYLSSEEDRKKGKKFARYQLGDLLLHLEKKHGEDWGKVYDEAWERIDKKVEGLSKHIKLEEERRSEDAQSKAALTDWLRAKASFVIEGLKEADKDEFCRCELKLQKWYGDLRGKPFAIEAENSILDISGFSKQYNCAFIWQKDGVKKLNLYLIINYFKGGKLRFKKIKPEAFEANRFYTVINKKSGEIVPMEVNFNFDDPNLIILPLAFGKRQGREFIWNDLLSLETGSLKLANGRVIEKTLYNRRTRQDEPALFVALTFERREVLDSGNIKPMNLIGVDRGENIPAVIALTDPEGCPLSCFKDSLGNPTHILRIGESYKEKQRTIQAKKEVEQRRAGGYSRKYASKAKNLADDMVRNTARDLLYYAVTQDAMLIFENLSRGFGRQGKRTFMAERQYTRMEDWLTAKLAYEGLPSKTYLSKTLAQYTSKTCSNCGFTITSADYDRVLEKLKKTATGWMTTINGKELKVEGQITYYNRYKRQNVVKDLSVELDRLSEESVNNDISSWTKGRSGEALSLLKKRFSHRPVQEKFVCLNCGFETHADEQAALNIARSWLFLRSQEYKKYQTNKTTGNTDKRAFVETWQSFYRKKLKEVWKPAV

SEQ ID NO: 27810 - protein, 978 aa, synthetic construct
  REGION 1..978: note = engineered CasX variant
QEIKRINKIRRRLVKDSNTKKAGKTGPMKTLLVRVMTPDLRERLENLRKKPENIPQPISNTSRANLNKLLTDYTEMKKAILHVYWEEFQKDPVGLMSRVAQPASKKIDQNKLKPEMDEKGNLTTAGFACSQCGQPLFVYKLEQVSEKGKAYTNYFGRCNVAEHEKLILLAQLKPEKDSDEAVTYSLGKFGQRALDFYSIHVTKESTHPVKPLAQIAGNRYASGPVGKALSDACMGTIASFLSKYQDIIIEHQKVVKGNQKRLESLRELAGKENLEYPSVTLPPQPHTKEGVDAYNEVIARVRMWVNLNLWQKLKLSRDDAKPLLRLKGFPSFPLVERQANEVDWWDMVCNVKKLINEKKEDGKVFWQNLAGYKRQEALRPYLSSEEDRKKGKKFARYQLGDLLLHLEKKHGEDWGKVYDEAWERIDKKVEGLSKHIKLEEERRSEDAQSKAALTDWLRAKASFVIEGLKEADKDEFCRCELKLQKWYGDLRGKPFAIEAENSILDISGFSKQYNCAFIWQKDGVKKLNLYLIINYFKGGKLRFKKIKPEAFEANRFYTVINKKSGEIVPMEVNFNFDDPNLIILPLAFGKRQGREFIWNDLLSLETGSLKLANGRVIEKTLYNRRTRQDEPALFVALTFERREVLDSFNPKPMNLIGVDRGENIPAVIALTDPEGCPLSRFTDSLGNPTHILRIGESYKEKQRTIQAKKEVEQRRAGGYSRKYASKAKNLADDMVRNTARDLLYYAVTQDAMLIFENLSRGFGRQGKRTFMAERQYTRMEDWLTAKLAYEGLPSKTYLSKTLAQYTSKTCSNCGFTITSADYDRVLEKLKKTATGWMTTINGKELKVEGQITYYNRYKRQNVVKDLSVELDRLSEESVNNDISSWTKGRSGEALSLLKKRFSHRPVQEKFVCLNCGFETHADEQAALNIARSWLFLRSQEYKKYQTNKTTGNTDKRAFVETWQSFYRKKLKEVWKPAV

SEQ ID NO: 27811 - protein, 978 aa, synthetic construct
  REGION 1..978: note = engineered CasX variant
QEIKRINKIRRRLVKDSNTKKAGKTGPMKTLLVRVMTPDLRERLENLRKKPENIPQPISNTSRANLNKLLTDYTEMKKAILHVYWEEFQKDPVGLMSRVAQPASKKIDQNKLKPEMDEKGNLTTAGFACSQCGQPLFVYKLEQVSEKGKAYTNYFGRCNVAEHEKLILLAQLKPEKDSDEAVTYSLGKFGQRALDFYSIHVTKESTHPVKPLAQIAGNRYASGPVGKALSDACMGTIASFLSKYQDIIIEHQKVVKGNQKRLESLRELAGKENLEYPSVTLPPQPHTKEGVDAYNEVIARVRMWVNLNLWQKLKLSRDDAKPLLRLKGFPSFPLVERQANEVDWWDMVCNVKKLINEKKEDGKVFWQNLAGYKRQEALRPYLSSEEDRKKGKKFARYQLGDLLLHLEKKHGEDWGKVYDEAWERIDKKVEGLSKHIKLEEERRSEDAQSKAALTDWLRAKASFVIEGLKEADKDEFCRCELKLQKWYGDLRGKPFAIEAENSILDISGFSKQYNCAFIWQKDGVKKLNLYLIINYFKGGKLRFKKIKPEAFEANRFYTVINKKSGEIVPMEVNFNFDDPNLIILPLAFGKRQGREFIWNDLLSLETGSLKLANGRVIEKTLYNRRTRQDEPALFVALTFERREVLDSFNPKPMNLIGVDRGENIPAVIALTDPEGCPLSRFKDSLGNPTHILRIGESYKEKQRTIQAKKEVEQRRAGGYSRKYASKAKNLADDMVRNTARDLLYYAVTQDAMLIFENLSRGFGRQGKRTFMAERQYTRMEDWLTAKLAYEGLPSKTYLSKTLAQYTSKTCSNCGFTITSADYDRVLEKLKKTATGWMTTINGKELKVEGQITYYNRYKRQNVVKDLSVELDRLSEESVNNDISSWTKGRSGEALSLLKKRFSHRPVQEKFVCLNCGFETHADEQAALNIARSWLFLRSQEYKKYQTNKTTGNTDKRAFVETWQSFYRKKLKEVWKPAV

SEQ ID NO: 27812 - protein, 978 aa, synthetic construct
  REGION 1..978: note = engineered CasX variant
QEIKRINKIRRRLVKDSNTKKAGKTGPMKTLLVRVMTPDLRERLENLRKKPENIPQPISNTSRANLNKLLTDYTEMKKAILHVYWEEFQKDPVGLMSRVAQPASKKIDQNKLKPEMDEKGNLTTAGFACSQCGQPLFVYKLEQVSEKGKAYTNYFGRCNVAEHEKLILLAQLKPEKDSDEAVTYSLGKFGQRALDFYSIHVTKESTHPVKPLAQIAGNRYASGPVGKALSDACMGTIASFLSKYQDIIIEHQKVVKGNQKRLESLRELAGKENLEYPSVTLPPQPHTKEGVDAYNEVIARVRMWVNLNLWQKLKLSRDDAKPLLRLKGFPSFPLVERQANEVDWWDMVCNVKKLINEKKEDGKVFWQNLAGYKRQEALRPYLSSEEDRKKGKKFARYQLGDLLLHLEKKHGEDWGKVYDEAWERIDKKVEGLSKHIKLEEERRSEDAQSKAALTDWLRAKASFVIEGLKEADKDEFCRCELKLQKWYGDLRGKPFAIEAENSILDISGFSKQYNCAFIWQKDGVKKLNLYLIINYFKGGKLRFKKIKPEAFEANRFYTVINKKSGEIVPMEVNFNFDDPNLIILPLAFGKRQGREFIWNDLLSLETGSLKLANGRVIEKTLYNRRTRQDEPALFVALTFERREVLDSFNIKPMNLIGVDRGENIPAVIALTDPEGCPLSYFKDSLGNPTHILRIGESYKEKQRTIQAKKEVEQRRAGGYSRKYASKAKNLADDMVRNTARDLLYYAVTQDAMLIFENLSRGFGRQGKRTFMAERQYTRMEDWLTAKLAYEGLPSKTYLSKTLAQYTSKTCSNCGFTITSADYDRVLEKLKKTATGWMTTINGKELKVEGQITYYNRYKRQNVVKDLSVELDRLSEESVNNDISSWTKGRSGEALSLLKKRFSHRPVQEKFVCLNCGFETHADEQAALNIARSWLFLRSQEYKKYQTNKTTGNTDKRAFVETWQSFYRKKLKEVWKPAV

SEQ ID NO: 27813 - protein, 978 aa, synthetic construct
  REGION 1..978: note = engineered CasX variant
QEIKRINKIRRRLVKDSNTKKAGKTGPMKTLLVRVMTPDLRERLENLRKKPENIPQPISNTSRANLNKLLTDYTEMKKAILHVYWEEFQKDPVGLMSRVAQPASKKIDQNKLKPEMDEKGNLTTAGFACSQCGQPLFVYKLEQVSEKGKAYTNYFGRCNVAEHEKLILLAQLKPEKDSDEAVTYSLGKFGQRALDFYSIHVTKESTHPVKPLAQIAGNRYASGPVGKALSDACMGTIASFLSKYQDIIIEHQKVVKGNQKRLESLRELAGKENLEYPSVTLPPQPHTKEGVDAYNEVIARVRMWVNLNLWQKLKLSRDDAKPLLRLKGFPSFPLVERQANEVDWWDMVCNVKKLINEKKEDGKVFWQNLAGYKRQEALRPYLSSEEDRKKGKKFARYQLGDLLLHLEKKHGEDWGKVYDEAWERIDKKVEGLSKHIKLEEERRSEDAQSKAALTDWLRAKASFVIEGLKEADKDEFCRCELKLQKWYGDLRGKPFAIEAENSILDISGFSKQYNCAFIWQKDGVKKLNLYLIINYFKGGKLRFKKIKPEAFEANRFYTVINKKSGEIVPMEVNFNFDDPNLIILPLAFGKRQGREFIWNDLLSLETGSLKLANGRVIEKTLYNRRTRQDEPALFVALTFERREVLDSFNIKPMNLIGVDRGENIPAVIALTDPEGCPLSYFCDSLGNPTHILRIGESYKEKQRTIQAKKEVEQRRAGGYSRKYASKAKNLADDMVRNTARDLLYYAVTQDAMLIFENLSRGFGRQGKRTFMAERQYTRMEDWLTAKLAYEGLPSKTYLSKTLAQYTSKTCSNCGFTITSADYDRVLEKLKKTATGWMTTINGKELKVEGQITYYNRYKRQNVVKDLSVELDRLSEESVNNDISSWTKGRSGEALSLLKKRFSHRPVQEKFVCLNCGFETHADEQAALNIARSWLFLRSQEYKKYQTNKTTGNTDKRAFVETWQSFYRKKLKEVWKPAV

SEQ ID NO: 27814 - protein, 978 aa, synthetic construct
  REGION 1..978: note = engineered CasX variant
QEIKRINKIRRRLVKDSNTKKAGKTGPMKTLLVRVMTPDLRERLENLRKKPENIPQPISNTSRANLNKLLTDYTEMKKAILHVYWEEFQKDPVGLMSRVAQPASKKIDQNKLKPEMDEKGNLTTAGFACSQCGQPLFVYKLEQVSEKGKAYTNYFGRCNVAEHEKLILLAQLKPEKDSDEAVTYSLGKFGQRALDFYSIHVTKESTHPVKPLAQIAGNRYASGPVGKALSDACMGTIASFLSKYQDIIIEHQKVVKGNQKRLESLRELAGKENLEYPSVTLPPQPHTKEGVDAYNEVIARVRMWVNLNLWQKLKLSRDDAKPLLRLKGFPSFPLVERQANEVDWWDMVCNVKKLINEKKEDGKVFWQNLAGYKRQEALRPYLSSEEDRKKGKKFARYQLGDLLLHLEKKHGEDWGKVYDEAWERIDKKVEGLSKHIKLEEERRSEDAQSKAALTDWLRAKASFVIEGLKEADKDEFCRCELKLQKWYGDLRGKPFAIEAENSILDISGFSKQYNCAFIWQKDGVKKLNLYLIINYFKGGKLRFKKIKPEAFEANRFYTVINKKSGEIVPMEVNFNFDDPNLIILPLAFGKRQGREFIWNDLLSLETGSLKLANGRVIEKTLYNRRTRQDEPALFVALTFERREVLDSFNIKPMNLIGVDRGENIPAVIALTDPEGCPLSWFKDSLGNPTHILRIGESYKEKQRTIQAKKEVEQRRAGGYSRKYASKAKNLADDMVRNTARDLLYYAVTQDAMLIFENLSRGFGRQGKRTFMAERQYTRMEDWLTAKLAYEGLPSKTYLSKTLAQYTSKTCSNCGFTITSADYDRVLEKLKKTATGWMTTINGKELKVEGQITYYNRYKRQNVVKDLSVELDRLSEESVNNDISSWTKGRSGEALSLLKKRFSHRPVQEKFVCLNCGFETHADEQAALNIARSWLFLRSQEYKKYQTNKTTGNTDKRAFVETWQSFYRKKLKEVWKPAV

SEQ ID NO: 27815 - protein, 978 aa, synthetic construct
  REGION 1..978: note = engineered CasX variant
QEIKRINKIRRRLVKDSNTKKAGKTGPMKTLLVRVMTPDLRERLENLRKKPENIPQPISNTSRANLNKLLTDYTEMKKAILHVYWEEFQKDPVGLMSRVAQPASKKIDQNKLKPEMDEKGNLTTAGFACSQCGQPLFVYKLEQVSEKGKAYTNYFGRCNVAEHEKLILLAQLKPEKDSDEAVTYSLGKFGQRALDFYSIHVTKESTHPVKPLAQIAGNRYASGPVGKALSDACMGTIASFLSKYQDIIIEHQKVVKGNQKRLESLRELAGKENLEYPSVTLPPQPHTKEGVDAYNEVIARVRMWVNLNLWQKLKLSRDDAKPLLRLKGFPSFPLVERQANEVDWWDMVCNVKKLINEKKEDGKVFWQNLAGYKRQEALRPYLSSEEDRKKGKKFARYQLGDLLLHLEKKHGEDWGKVYDEAWERIDKKVEGLSKHIKLEEERRSEDAQSKAALTDWLRAKASFVIEGLKEADKDEFCRCELKLQKWYGDLRGKPFAIEAENSILDISGFSKQYNCAFIWQKDGVKKLNLYLIINYFKGGKLRFKKIKPEAFEANRFYTVINKKSGEIVPMEVNFNFDDPNLIILPLAFGKRQGREFIWNDLLSLETGSLKLANGRVIEKTLYNRRTRQDEPALFVALTFERREVLDSFNIKPMNLIGVDRGENIPAVIALTDPEGCPLSWFKDSGGNPTHILRIGESYKEKQRTIQAKKEVEQRRAGGYSRKYASKAKNLADDMVRNTARDLLYYAVTQDAMLIFENLSRGFGRQGKRTFMAERQYTRMEDWLTAKLAYEGLPSKTYLSKTLAQYTSKTCSNCGFTITSADYDRVLEKLKKTATGWMTTINGKELKVEGQITYYNRYKRQNVVKDLSVELDRLSEESVNNDISSWTKGRSGEALSLLKKRFSHRPVQEKFVCLNCGFETHADEQAALNIARSWLFLRSQEYKKYQTNKTTGNTDKRAFVETWQSFYRKKLKEVWKPAV

SEQ ID NO: 27816 - protein, 978 aa, synthetic construct
  REGION 1..978: note = engineered CasX variant
QEIKRINKIRRRLVKDSNTKKAGKTGPMKTLLVRVMTPDLRERLENLRKKPENIPQPISNTSRANLNKLLTDYTEMKKAILHVYWEEFQKDPVGLMSRVAQPASKKIDQNKLKPEMDEKGNLTTAGFACSQCGQPLFVYKLEQVSEKGKAYTNYFGRCNVAEHEKLILLAQLKPEKDSDEAVTYSLGKFGQRALDFYSIHVTKESTHPVKPLAQIAGNRYASGPVGKALSDACMGTIASFLSKYQDIIIEHQKVVKGNQKRLESLRELAGKENLEYPSVTLPPQPHTKEGVDAYNEVIARVRMWVNLNLWQKLKLSRDDAKPLLRLKGFPSFPLVERQANEVDWWDMVCNVKKLINEKKEDGKVFWQNLAGYKRQEALRPYLSSEEDRKKGKKFARYQLGDLLLHLEKKHGEDWGKVYDEAWERIDKKVEGLSKHIKLEEERRSEDAQSKAALTDWLRAKASFVIEGLKEADKDEFCRCELKLQKWYGDLRGKPFAIEAENSILDISGFSKQYNCAFIWQKDGVKKLNLYLIINYFKGGKLRFKKIKPEAFEANRFYTVINKKSGEIVPMEVNFNFDDPNLIILPLAFGKRQGREFIWNDLLSLETGSLKLANGRVIEKTLYNRRTRQDEPALFVALTFERREVLDSFNIKPMNLIGVDRGENIPAVIALTDPEGCPLSVFKDSLGNPTHILRIGESYKEKQRTIQAKKEVEQRRAGGYSRKYASKAKNLADDMVRNTARDLLYYAVTQDAMLIFENLSRGFGRQGKRTFMAERQYTRMEDWLTAKLAYEGLPSKTYLSKTLAQYTSKTCSNCGFTITSADYDRVLEKLKKTATGWMTTINGKELKVEGQITYYNRYKRQNVVKDLSVELDRLSEESVNNDISSWTKGRSGEALSLLKKRFSHRPVQEKFVCLNCGFETHADEQAALNIARSWLFLRSQEYKKYQTNKTTGNTDKRAFVETWQSFYRKKLKEVWKPAV

SEQ ID NO: 27817 - protein, 978 aa, synthetic construct
  REGION 1..978: note = engineered CasX variant
QEIKRINKIRRRLVKDSNTKKAGKTGPMKTLLVRVMTPDLRERLENLRKKPENIPQPISNTSRANLNKLLTDYTEMKKAILHVYWEEFQKDPVGLMSRVAQPASKKIDQNKLKPEMDEKGNLTTAGFACSQCGQPLFVYKLEQVSEKGKAYTNYFGRCNVAEHEKLILLAQLKPEKDSDEAVTYSLGKFGQRALDFYSIHVTKESTHPVKPLAQIAGNRYASGPVGKALSDACMGTIASFLSKYQDIIIEHQKVVKGNQKRLESLRELAGKENLEYPSVTLPPQPHTKEGVDAYNEVIARVRMWVNLNLWQKLKLSRDDAKPLLRLKGFPSFPLVERQANEVDWWDMVCNVKKLINEKKEDGKVFWQNLAGYKRQEALRPYLSSEEDRKKGKKFARYQLGDLLLHLEKKHGEDWGKVYDEAWERIDKKVEGLSKHIKLEEERRSEDAQSKAALTDWLRAKASFVIEGLKEADKDEFCRCELKLQKWYGDLRGKPFAIEAENSILDISGFSKQYNCAFIWQKDGVKKLNLYLIINYFKGGKLRFKKIKPEAFEANRFYTVINKKSGEIVPMEVNFNFDDPNLIILPLAFGKRQGREFIWNDLLSLETGSLKLANGRVIEKTLYNRRTRQDEPALFVALTFERREVLDSFNIKPMNLIGVDRGENIPAVIALTDPEGCPLSRFTDSLGNPTHILRIGESYKEKQRTIQAKKEVEQRRAGGYSRKYASKAKNLADDMVRNTARDLLYYAVTQDAMLIFENLSRGFGRQGKRTFMAERQYTRMEDWLTAKLAYEGLPSKTYLSKTLAQYTSKTCSNCGFTITSADYDRVLEKLKKTATGWMTTINGKELKVEGQITYYNRYKRQNVVKDLSVELDRLSEESVNNDISSWTKGRSGEALSLLKKRFSHRPVQEKFVCLNCGFETHADEQAALNIARSWLFLRSQEYKKYQTNKTTGNTDKRAFVETWQSFYRKKLKEVWKPAV

SEQ ID NO: 27818 - protein, 978 aa, synthetic construct
  REGION 1..978: note = engineered CasX variant
QEIKRINKIRRRLVKDSNTKKAGKTGPMKTLLVRVMTPDLRERLENLRKKPENIPQPISNTSRANLNKLLTDYTEMKKAILHVYWEEFQKDPVGLMSRVAQPASKKIDQNKLKPEMDEKGNLTTAGFACSQCGQPLFVYKLEQVSEKGKAYTNYFGRCNVAEHEKLILLAQLKPEKDSDEAVTYSLGKFGQRALDFYSIHVTKESTHPVKPLAQIAGNRYASGPVGKALSDACMGTIASFLSKYQDIIIEHQKVVKGNQKRLESLRELAGKENLEYPSVTLPPQPHTKEGVDAYNEVIARVRMWVNLNLWQKLKLSRDDAKPLLRLKGFPSFPLVERQANEVDWWDMVCNVKKLINEKKEDGKVFWQNLAGYKRQEALRPYLSSEEDRKKGKKFARYQLGDLLLHLEKKHGEDWGKVYDEAWERIDKKVEGLSKHIKLEEERRSEDAQSKAALTDWLRAKASFVIEGLKEADKDEFCRCELKLQKWYGDLRGKPFAIEAENSILDISGFSKQYNCAFIWQKDGVKKLNLYLIINYFKGGKLRFKKIKPEAFEANRFYTVINKKSGEIVPMEVNFNFDDPNLIILPLAFGKRQGREFIWNDLLSLETGSLKLANGRVIEKTLYNRRTRQDEPALFVALTFERREVLDSFNIKPMNLIGVDRGENIPAVIALTDPEGCPLSRFKDSLGNPTHILRIGESYKEKQRTIQAKKEVEQRRAGGYSRKYASKAKNLADDMVRNTARDLLYYAVTQDAMLIFENLSRGFGRQGKRTFMAERQYTRMEDWLTAKLAYEGLPSKTYLSKTLAQYTSKTCSNCGFTITSADYDRVLEKLKKTATGWMTTINGKELKVEGQITYYNRYKRQNVVKDLSVELDRLSEESVNNDISSWTKGRSGEALSLLKKRFSHRPVQEKFVCLNCGFETHADEQAALNIARSWLFLRSQEYKKYQTNKTTGNTDKRAFVETWQSFYRKKLKEVWKPAV

SEQ ID NO: 27819 - protein, 978 aa, synthetic construct
  REGION 1..978: note = engineered CasX variant
QEIKRINKIRRRLVKDSNTKKAGKTGPMKTLLVRVMTPDLRERLENLRKKPENIPQPISNTSRANLNKLLTDYTEMKKAILHVYWEEFQKDPVGLMSRVAQPASKKIDQNKLKPEMDEKGNLTTAGFACSQCGQPLFVYKLEQVSEKGKAYTNYFGRCNVAEHEKLILLAQLKPEKDSDEAVTYSLGKFGQRALDFYSIHVTKESTHPVKPLAQIAGNRYASGPVGKALSDACMGTIASFLSKYQDIIIEHQKVVKGNQKRLESLRELAGKENLEYPSVTLPPQPHTKEGVDAYNEVIARVRMWVNLNLWQKLKLSRDDAKPLLRLKGFPSFPLVERQANEVDWWDMVCNVKKLINEKKEDGKVFWQNLAGYKRQEALRPYLSSEEDRKKGKKFARYQLGDLLLHLEKKHGEDWGKVYDEAWERIDKKVEGLSKHIKLEEERRSEDAQSKAALTDWLRAKASFVIEGLKEADKDEFCRCELKLQKWYGDLRGKPFAIEAENSILDISGFSKQYNCAFIWQKDGVKKLNLYLIINYFKGGKLRFKKIKPEAFEANRFYTVINKKSGEIVPMEVNFNFDDPNLIILPLAFGKRQGREFIWNDLLSLETGSLKLANGRVIEKTLYNRRTRQDEPALFVALTFERREVLDSFNIKPMNLIGVDRGENIPAVIALTDPEGCPLSRFKDSLGNPTHILRIGESYKEKQRTIIAKKEVEQRRAGGYSRKYASKAKNLADDMVRNTARDLLYYAVTQDAMLIFENLSRGFGRQGKRTFMAERQYTRMEDWLTAKLAYEGLPSKTYLSKTLAQYTSKTCSNCGFTITSADYDRVLEKLKKTATGWMTTINGKELKVEGQITYYNRYKRQNVVKDLSVELDRLSEESVNNDISSWTKGRSGEALSLLKKRFSHRPVQEKFVCLNCGFETHADEQAALNIARSWLFLRSQEYKKYQTNKTTGNTDKRAFVETWQSFYRKKLKEVWKPAV

SEQ ID NO: 27820 - protein, 978 aa, synthetic construct
  REGION 1..978: note = engineered CasX variant
QEIKRINKIRRRLVKDSNTKKAGKTGPMKTLLVRVMTPDLRERLENLRKKPENIPQPISNTSRANLNKLLTDYTEMKKAILHVYWEEFQKDPVGLMSRVAQPASKKIDQNKLKPEMDEKGNLTTAGFACSQCGQPLFVYKLEQVSEKGKAYTNYFGRCNVAEHEKLILLAQLKPEKDSDEAVTYSLGKFGQRALDFYSIHVTKESTHPVKPLAQIAGNRYASGPVGKALSDACMGTIASFLSKYQDIIIEHQKVVKGNQKRLESLRELAGKENLEYPSVTLPPQPHTKEGVDAYNEVIARVRMWVNLNLWQKLKLSRDDAKPLLRLKGFPSFPLVERQANEVDWWDMVCNVKKLINEKKEDGKVFWQNLAGYKRQEALRPYLSSEEDRKKGKKFARYQLGDLLLHLEKKHGEDWGKVYDEAWERIDKKVEGLSKHIKLEEERRSEDAQSKAALTDWLRAKASFVIEGLKEADKDEFCRCELKLQKWYGDLRGKPFAIEAENSILDISGFSKQYNCAFIWQKDGVKKLNLYLIINYFKGGKLRFKKIKPEAFEANRFYTVINKKSGEIVPMEVNFNFDDPNLIILPLAFGKRQGREFIWNDLLSLETGSLKLANGRVIEKTLYNRRTRQDEPALFVALTFERREVLDSFNIKPMNLIGVDRGENIPAVIALTDPEGCPLSRFKDSLGNPTHILRIGESYKEKMRTIQAKKEVEQRRAGGYSRKYASKAKNLADDMVRNTARDLLYYAVTQDAMLIFENLSRGFGRQGKRTFMAERQYTRMEDWLTAKLAYEGLPSKTYLSKTLAQYTSKTCSNCGFTITSADYDRVLEKLKKTATGWMTTINGKELKVEGQITYYNRYKRQNVVKDLSVELDRLSEESVNNDISSWTKGRSGEALSLLKKRFSHRPVQEKFVCLNCGFETHADEQAALNIARSWLFLRSQEYKKYQTNKTTGNTDKRAFVETWQSFYRKKLKEVWKPAV

SEQ ID NO: 27821 - protein, 978 aa, synthetic construct
  REGION 1..978: note = engineered CasX variant
QEIKRINKIRRRLVKDSNTKKAGKTGPMKTLLVRVMTPDLRERLENLRKKPENIPQPISNTSRANLNKLLTDYTEMKKAILHVYWEEFQKDPVGLMSRVAQPASKKIDQNKLKPEMDEKGNLTTAGFACSQCGQPLFVYKLEQVSEKGKAYTNYFGRCNVAEHEKLILLAQLKPEKDSDEAVTYSLGKFGQRALDFYSIHVTKESTHPVKPLAQIAGNRYASGPVGKALSDACMGTIASFLSKYQDIIIEHQKVVKGNQKRLESLRELAGKENLEYPSVTLPPQPHTKEGVDAYNEVIARVRMWVNLNLWQKLKLSRDDAKPLLRLKGFPSFPLVERQANEVDWWDMVCNVKKLINEKKEDGKVFWQNLAGYKRQEALRPYLSSEEDRKKGKKFARYQLGDLLLHLEKKHGEDWGKVYDEAWERIDKKVEGLSKHIKLEEERRSEDAQSKAALTDWLRAKASFVIEGLKEADKDEFCRCELKLQKWYGDLRGKPFAIEAENSILDISGFSKQYNCAFIWQKDGVKKLNLYLIINYFKGGKLRFKKIKPEAFEANRFYTVINKKSGEIVPMEVNFNFDDPNLIILPLAFGKRQGREFIWNDLLSLETGSLKLANGRVIEKTLYNRRTRQDEPALFVALTFERREVLDSFNIKPMNLIGVDRGENIPAVIALTDPEGCPLSRFKDSGGNPTHILRIGESYKEKQRTIQAKKEVEQRRAGGYSRKYASKAKNLADDMVRNTARDLLYYAVTQDAMLIFENLSRGFGRQGKRTFMAERQYTRMEDWLTAKLAYEGLPSKTYLSKTLAQYTSKTCSNCGFTITSADYDRVLEKLKKTATGWMTTINGKELKVEGQITYYNRYKRQNVVKDLSVELDRLSEESVNNDISSWTKGRSGEALSLLKKRFSHRPVQEKFVCLNCGFETHADEQAALNIARSWLFLRSQEYKKYQTNKTTGNTDKRAFVETWQSFYRKKLKEVWKPAV

SEQ ID NO: 27822 - protein, 978 aa, synthetic construct
  REGION 1..978: note = engineered CasX variant
QEIKRINKIRRRLVKDSNTKKAGKTGPMKTLLVRVMTPDLRERLENLRKKPENIPQPISNTSRANLNKLLTDYTEMKKAILHVYWEEFQKDPVGLMSRVAQPASKKIDQNKLKPEMDEKGNLTTAGFACSQCGQPLFVYKLEQVSEKGKAYTNYFGRCNVAEHEKLILLAQLKPEKDSDEAVTYSLGKFGQRALDFYSIHVTKESTHPVKPLAQIAGNRYASGPVGKALSDACMGTIASFLSKYQDIIIEHQKVVKGNQKRLESLRELAGKENLEYPSVTLPPQPHTKEGVDAYNEVIARVRMWVNLNLWQKLKLSRDDAKPLLRLKGFPSFPLVERQANEVDWWDMVCNVKKLINEKKEDGKVFWQNLAGYKRQEALRPYLSSEEDRKKGKKFARYQLGDLLLHLEKKHGEDWGKVYDEAWERIDKKVEGLSKHIKLEEERRSEDAQSKAALTDWLRAKASFVIEGLKEADKDEFCRCELKLQKWYGDLRGKPFAIEAENSILDISGFSKQYNCAFIWQKDGVKKLNLYLIINYFKGGKLRFKKIKPEAFEANRFYTVINKKSGEIVPMEVNFNFDDPNLIILPLAFGKRQGREFIWNDLLSLETGSLKLANGRVIEKTLYNRRTRQDEPALFVALTFERREVLDSFNIKPMNLIGVDRGENIPAVIALTDPEGCPLSRFCDSLGNPTHILRIGESYKEKQRTIQAKKEVEQRRAGGYSRKYASKAKNLADDMVRNTARDLLYYAVTQDAMLIFENLSRGFGRQGKRTFMAERQYTRMEDWLTAKLAYEGLPSKTYLSKTLAQYTSKTCSNCGFTITSADYDRVLEKLKKTATGWMTTINGKELKVEGQITYYNRYKRQNVVKDLSVELDRLSEESVNNDISSWTKGRSGEALSLLKKRFSHRPVQEKFVCLNCGFETHADEQAALNIARSWLFLRSQEYKKYQTNKTTGNTDKRAFVETWQSFYRKKLKEVWKPAV

SEQ ID NO: 27823 - protein, 978 aa, synthetic construct
  REGION 1..978: note = engineered CasX variant
QEIKRINKIRRRLVKDSNTKKAGKTGPMKTLLVRVMTPDLRERLENLRKKPENIPQPISNTSRANLNKLLTDYTEMKKAILHVYWEEFQKDPVGLMSRVAQPASKKIDQNKLKPEMDEKGNLTTAGFACSQCGQPLFVYKLEQVSEKGKAYTNYFGRCNVAEHEKLILLAQLKPEKDSDEAVTYSLGKFGQRALDFYSIHVTKESTHPVKPLAQIAGNRYASGPVGKALSDACMGTIASFLSKYQDIIIEHQKVVKGNQKRLESLRELAGKENLEYPSVTLPPQPHTKEGVDAYNEVIARVRMWVNLNLWQKLKLSRDDAKPLLRLKGFPSFPLVERQANEVDWWDMVCNVKKLINEKKEDGKVFWQNLAGYKRQEALRPYLSSEEDRKKGKKFARYQLGDLLLHLEKKHGEDWGKVYDEAWERIDKKVEGLSKHIKLEEERRSEDAQSKAALTDWLRAKASFVIEGLKEADKDEFCRCELKLQKWYGDLRGKPFAIEAENSILDISGFSKQYNCAFIWQKDGVKKLNLYLIINYFKGGKLRFKKIKPEAFEANRFYTVINKKSGEIVPMEVNFNFDDPNLIILPLAFGKRQGREFIWNDLLSLETGSLKLANGRVIEKTLYNRRTRQDEPALFVALTFERREVLDSFKIKPMNLIGVDRGENIPAVIALTDPEGCPLSVFKDSLGNPTHILRIGESYKEKQRTIQAKKEVEQRRAGGYSRKYASKAKNLADDMVRNTARDLLYYAVTQDAMLIFENLSRGFGRQGKRTFMAERQYTRMEDWLTAKLAYEGLPSKTYLSKTLAQYTSKTCSNCGFTITSADYDRVLEKLKKTATGWMTTINGKELKVEGQITYYNRYKRQNVVKDLSVELDRLSEESVNNDISSWTKGRSGEALSLLKKRFSHRPVQEKFVCLNCGFETHADEQAALNIARSWLFLRSQEYKKYQTNKTTGNTDKRAFVETWQSFYRKKLKEVWKPAV

SEQ ID NO: 27824 - protein, 978 aa, synthetic construct
  REGION 1..978: note = engineered CasX variant
QEIKRINKIRRRLVKDSNTKKAGKTGPMKTLLVRVMTPDLRERLENLRKKPENIPQPISNTSRANLNKLLTDYTEMKKAILHVYWEEFQKDPVGLMSRVAQPASKKIDQNKLKPEMDEKGNLTTAGFACSQCGQPLFVYKLEQVSEKGKAYTNYFGRCNVAEHEKLILLAQLKPEKDSDEAVTYSLGKFGQRALDFYSIHVTKESTHPVKPLAQIAGNRYASGPVGKALSDACMGTIASFLSKYQDIIIEHQKVVKGNQKRLESLRELAGKENLEYPSVTLPPQPHTKEGVDAYNEVIARVRMWVNLNLWQKLKLSRDDAKPLLRLKGFPSFPLVERQANEVDWWDMVCNVKKLINEKKEDGKVFWQNLAGYKRQEALRPYLSSEEDRKKGKKFARYQLGDLLLHLEKKHGEDWGKVYDEAWERIDKKVEGLSKHIKLEEERRSEDAQSKAALTDWLRAKASFVIEGLKEADKDEFCRCELKLQKWYGDLRGKPFAIEAENSILDISGFSKQYNCAFIWQKDGVKKLNLYLIINYFKGGKLRFKKIKPEAFEANRFYTVINKKSGEIVPMEVNFNFDDPNLIILPLAFGKRQGREFIWNDLLSLETGSLKLANGRVIEKTLYNRRTRQDEPALFVALTFERREVLDSFKIKPMNLIGVDRGENIPAVIALTDPEGCPLSRFKDSLGNPTHILRIGESYKEKQRTIQAKKEVEQRRAGGYSRKYASKAKNLADDMVRNTARDLLYYAVTQDAMLIFENLSRGFGRQGKRTFMAERQYTRMEDWLTAKLAYEGLPSKTYLSKTLAQYTSKTCSNCGFTITSADYDRVLEKLKKTATGWMTTINGKELKVEGQITYYNRYKRQNVVKDLSVELDRLSEESVNNDISSWTKGRSGEALSLLKKRFSHRPVQEKFVCLNCGFETHADEQAALNIARSWLFLRSQEYKKYQTNKTTGNTDKRAFVETWQSFYRKKLKEVWKPAV

SEQ ID NO: 27825 - protein, 978 aa, synthetic construct
  REGION 1..978: note = engineered CasX variant
QEIKRINKIRRRLVKDSNTKKAGKTGPMKTLLVRVMTPDLRERLENLRKKPENIPQPISNTSRANLNKLLTDYTEMKKAILHVYWEEFQKDPVGLMSRVAQPASKKIDQNKLKPEMDEKGNLTTAGFACSQCGQPLFVYKLEQVSEKGKAYTNYFGRCNVAEHEKLILLAQLKPEKDSDEAVTYSLGKFGQRALDFYSIHVTKESTHPVKPLAQIAGNRYASGPVGKALSDACMGTIASFLSKYQDIIIEHQKVVKGNQKRLESLRELAGKENLEYPSVTLPPQPHTKEGVDAYNEVIARVRMWVNLNLWQKLKLSRDDAKPLLRLKGFPSFPLVERQANEVDWWDMVCNVKKLINEKKEDGKVFWQNLAGYKRQEALRPYLSSEEDRKKGKKFARYQLGDLLLHLEKKHGEDWGKVYDEAWERIDKKVEGLSKHIKLEEERRSEDAQSKAALTDWLRAKASFVIEGLKEADKDEFCRCELKLQKWYGDLRGKPFAIEAENSILDISGFSKQYNCAFIWQKDGVKKLNLYLIINYFKGGKLRFKKIKPEAFEANRFYTVINKKSGEIVPMEVNFNFDDPNLIILPLAFGKRQGREFIWNDLLSLETGSLKLANGRVIEKTLYNRRTRQDEPALFVALTFERREVLDSFFIKPMNLIGVDRGENIPAVIALTDPEGCPLSRFKDSLGNPTHILRIGESYKEKQRTIQAKKEVEQRRAGGYSRKYASKAKNLADDMVRNTARDLLYYAVTQDAMLIFENLSRGFGRQGKRTFMAERQYTRMEDWLTAKLAYEGLPSKTYLSKTLAQYTSKTCSNCGFTITSADYDRVLEKLKKTATGWMTTINGKELKVEGQITYYNRYKRQNVVKDLSVELDRLSEESVNNDISSWTKGRSGEALSLLKKRFSHRPVQEKFVCLNCGFETHADEQAALNIARSWLFLRSQEYKKYQTNKTTGNTDKRAFVETWQSFYRKKLKEVWKPAV

SEQ ID NO: 27826 - protein, 978 aa, synthetic construct
  REGION 1..978: note = engineered CasX variant
QEIKRINKIRRRLVKDSNTKKAGKTGPMKTLLVRVMTPDLRERLENLRKKPENIPQPISNTSRANLNKLLTDYTEMKKAILHVYWEEFQKDPVGLMSRVAQPASKKIDQNKLKPEMDEKGNLTTAGFACSQCGQPLFVYKLEQVSEKGKAYTNYFGRCNVAEHEKLILLAQLKPEKDSDEAVTYSLGKFGQRALDFYSIHVTKESTHPVKPLAQIAGNRYASGPVGKALSDACMGTIASFLSKYQDIIIEHQKVVKGNQKRLESLRELAGKENLEYPSVTLPPQPHTKEGVDAYNEVIARVRMWVNLNLWQKLKLSRDDAKPLLRLKGFPSFPLVERQANEVDWWDMVCNVKKLINEKKEDGKVFWQNLAGYKRQEALRPYLSSEEDRKKGKKFARYQLGDLLLHLEKKHGEDWGKVYDEAWERIDKKVEGLSKHIKLEEERRSEDAQSKAALTDWLRAKASFVIEGLKEADKDEFCRCELKLQKWYGDLRGKPFAIEAENSILDISGFSKQYNCAFIWQKDGVKKLNLYLIINYFKGGKLRFKKIKPEAFEANRFYTVINKKSGEIVPMEVNFNFDDPNLIILPLAFGKRQGREFIWNDLLSLETGSLKLANGRVIEKTLYNRRTRQDEPALFVALTFERREVLDSEPIKPMNLIGVDRGENIPAVIALTDPEGCPLSRFKDSLGNPTHILRIGESYKEKQRTIQAKKEVEQRRAGGYSRKYASKAKNLADDMVRNTARDLLYYAVTQDAMLIFENLSRGFGRQGKRTFMAERQYTRMEDWLTAKLAYEGLPSKTYLSKTLAQYTSKTCSNCGFTITSADYDRVLEKLKKTATGWMTTINGKELKVEGQITYYNRYKRQNVVKDLSVELDRLSEESVNNDISSWTKGRSGEALSLLKKRFSHRPVQEKFVCLNCGFETHADEQAALNIARSWLFLRSQEYKKYQTNKTTGNTDKRAFVETWQSFYRKKLKEVWKPAV

SEQ ID NO: 27827 - protein, 978 aa, synthetic construct
  REGION 1..978: note = engineered CasX variant
QEIKRINKIRRRLVKDSNTKKAGKTGPMKTLLVRVMTPDLRERLENLRKKPENIPQPISNTSRANLNKLLTDYTEMKKAILHVYWEEFQKDPVGLMSRVAQPASKKIDQNKLKPEMDEKGNLTTAGFACSQCGQPLFVYKLEQVSEKGKAYTNYFGRCNVAEHEKLILLAQLKPEKDSDEAVTYSLGKFGQRALDFYSIHVTKESTHPVKPLAQIAGNRYASGPVGKALSDACMGTIASFLSKYQDIIIEHQKVVKGNQKRLESLRELAGKENLEYPSVTLPPQPHTKEGVDAYNEVIARVRMWVNLNLWQKLKLSRDDAKPLLRLKGFPSFPLVERQANEVDWWDMVCNVKKLINEKKEDGKVFWQNLAGYKRQEALRPYLSSEEDRKKGKKFARYQLGDLLLHLEKKHGEDWGKVYDEAWERIDKKVEGLSKHIKLEEERRSEDAQSKAALTDWLRAKASFVIEGLKEADKDEFCRCELKLQKWYGDLRGKPFAIEAENSILDISGFSKQYNCAFIWQKDGVKKLNLYLIINYFKGGKLRFKKIKPEAFEANRFYTVINKKSGEIVPMEVNFNFDDPNLIILPLAFGKRQGREFIWNDLLSLETGSLKLANGRVIEKTLYNRRTRQDEPALFVALTFERREVLDSENIKPMNLIGVDRGENIPAVIALTDPEGCPLSRFKDSLGRPTHILRIGESYKEKQRTIQAKKEVEQRRAGGYSRKYASKAKNLADDMVRNTARDLLYYAVTQDAMLIFENLSRGFGRQGKRTFMAERQYTRMEDWLTAKLAYEGLPSKTYLSKTLAQYTSKTCSNCGFTITSADYDRVLEKLKKTATGWMTTINGKELKVEGQITYYNRYKRQNVVKDLSVELDRLSEESVNNDISSWTKGRSGEALSLLKKRFSHRPVQEKFVCLNCGFETHADEQAALNIARSWLFLRSQEYKKYQTNKTTGNTDKRAFVETWQSFYRKKLKEVWKPAV

SEQ ID NO: 27828 - protein, 978 aa, synthetic construct
  REGION 1..978: note = engineered CasX variant
QEIKRINKIRRRLVKDSNTKKAGKTGPMKTLLVRVMTPDLRERLENLRKKPENIPQPISNTSRANLNKLLTDYTEMKKAILHVYWEEFQKDPVGLMSRVAQPASKKIDQNKLKPEMDEKGNLTTAGFACSQCGQPLFVYKLEQVSEKGKAYTNYFGRCNVAEHEKLILLAQLKPEKDSDEAVTYSLGKFGQRALDFYSIHVTKESTHPVKPLAQIAGNRYASGPVGKALSDACMGTIASFLSKYQDIIIEHQKVVKGNQKRLESLRELAGKENLEYPSVTLPPQPHTKEGVDAYNEVIARVRMWVNLNLWQKLKLSRDDAKPLLRLKGFPSFPLVERQANEVDWWDMVCNVKKLINEKKEDGKVFWQNLAGYKRQEALRPYLSSEEDRKKGKKFARYQLGDLLLHLEKKHGEDWGKVYDEAWERIDKKVEGLSKHIKLEEERRSEDAQSKAALTDWLRAKASFVIEGLKEADKDEFCRCELKLQKWYGDLRGKPFAIEAENSILDISGFSKQYNCAFIWQKDGVKKLNLYLIINYFKGGKLRFKKIKPEAFEANRFYTVINKKSGEIVPMEVNFNFDDPNLIILPLAFGKRQGREFIWNDLLSLETGSLKLANGRVIEKTLYNRRTRQDEPALFVALTFERREVLDSENIKPMNLIGVDRGENIPAVIALTDPEGCPLSRFKDSLGNPTHILRIGESYKEKQRTIQAKKEVEQRRAGGYSRKYASKAKNLADDMVRNTARDLLYYAVTQDAMLIFENLSRGFGRQGKRTFMAERQYTRMEDWLTAKLAYEGLPSKTYLSKTLAQYTSKTCSNCGFTITSADYDRVLEKLKKTATGWMTTINGKELKVEGQITYYNRYKRQNVVKDLSVELDRLSEESVNNDISSWTKGRSGEALSLLKKRFSHRPVQEKFVCLNCGFETHADEQAALNIARSWLFLRSQEYKKYQTNKTTGNTDKRAFVETWQSFYRKKLKEVWKPAV

SEQ ID NO: 27829 - protein, 978 aa, synthetic construct
  REGION 1..978: note = engineered CasX variant
QEIKRINKIRRRLVKDSNTKKAGKTGPMKTLLVRVMTPDLRERLENLRKKPENIPQPISNTSRANLNKLLTDYTEMKKAILHVYWEEFQKDPVGLMSRVAQPASKKIDQNKLKPEMDEKGNLTTAGFACSQCGQPLFVYKLEQVSEKGKAYTNYFGRCNVAEHEKLILLAQLKPEKDSDEAVTYSLGKFGQRALDFYSIHVTKESTHPVKPLAQIAGNRYASGPVGKALSDACMGTIASFLSKYQDIIIEHQKVVKGNQKRLESLRELAGKENLEYPSVTLPPQPHTKEGVDAYNEVIARVRMWVNLNLWQKLKLSRDDAKPLLRLKGFPSFPLVERQANEVDWWDMVCNVKKLINEKKEDGKVFWQNLAGYKRQEALRPYLSSEEDRKKGKKFARYQLGDLLLHLEKKHGEDWGKVYDEAWERIDKKVEGLSKHIKLEEERRSEDAQSKAALTDWLRAKASFVIEGLKEADKDEFCRCELKLQKWYGDLRGKPFAIEAENSILDISGFSKQYNCAFIWQKDGVKKLNLYLIINYFKGGKLRFKKIKPEAFEANRFYTVINKKSGEIVPMEVNFNFDDPNLIILPLAFGKRQGREFIWNDLLSLETGSLKLANGRVIEKTLYNRRTRQDEPALFVALTFERREVLDSENIKPMNLIGVDRGENIPAVIALTDPEGCPLSRFKDSLGNPTHILRIGESYKEKQRTIQAKKEVEQRAAGGYSRKYASKAKNLADDMVRNTARDLLYYAVTQDAMLIFENLSRGFGRQGKRTFMAERQYTRMEDWLTAKLAYEGLPSKTYLSKTLAQYTSKTCSNCGFTITSADYDRVLEKLKKTATGWMTTINGKELKVEGQITYYNRYKRQNVVKDLSVELDRLSEESVNNDISSWTKGRSGEALSLLKKRFSHRPVQEKFVCLNCGFETHADEQAALNIARSWLFLRSQEYKKYQTNKTTGNTDKRAFVETWQSFYRKKLKEVWKPAV

SEQ ID NO: 27830 - protein, 978 aa, synthetic construct
  REGION 1..978: note = engineered CasX variant
QEIKRINKIRRRLVKDSNTKKAGKTGPMKTLLVRVMTPDLRERLENLRKKPENIPQPISNTSRANLNKLLTDYTEMKKAILHVYWEEFQKDPVGLMSRVAQPASKKIDQNKLKPEMDEKGNLTTAGFACSQCGQPLFVYKLEQVSEKGKAYTNYFGRCNVAEHEKLILLAQLKPEKDSDEAVTYSLGKFGQRALDFYSIHVTKESTHPVKPLAQIAGNRYASGPVGKALSDACMGTIASFLSKYQDIIIEHQKVVKGNQKRLESLRELAGKENLEYPSVTLPPQPHTKEGVDAYNEVIARVRMWVNLNLWQKLKLSRDDAKPLLRLKGFPSFPLVERQANEVDWWDMVCNVKKLINEKKEDGKVFWQNLAGYKRQEALRPYLSSEEDRKKGKKFARYQLGDLLLHLEKKHGEDWGKVYDEAWERIDKKVEGLSKHIKLEEERRSEDAQSKAALTDWLRAKASFVIEGLKEADKDEFCRCELKLQKWYGDLRGKPFAIEAENSILDISGFSKQYNCAFIWQKDGVKKLNLYLIINYFKGGKLRFKKIKPEAFEANRFYTVINKKSGEIVPMEVNFNFDDPNLIILPLAFGKRQGREFIWNDLLSLETGSLKLANGRVIEKTLYNRRTRQDEPALFVALTFERREVLDSENIKPMNLIGVDRGENIPAVIALTDPEGCPLERFKDSLGRPTHILRIGESYKEKQRTIQAKKEVEQRRAGGYSRKYASKAKNLADDMVRNTARDLLYYAVTQDAMLIFENLSRGFGRQGKRTFMAERQYTRMEDWLTAKLAYEGLPSKTYLSKTLAQYTSKTCSNCGFTITSADYDRVLEKLKKTATGWMTTINGKELKVEGQITYYNRYKRQNVVKDLSVELDRLSEESVNNDISSWTKGRSGEALSLLKKRFSHRPVQEKFVCLNCGFETHADEQAALNIARSWLFLRSQEYKKYQTNKTTGNTDKRAFVETWQSFYRKKLKEVWKPAV

SEQ ID NO: 27831 - protein, 978 aa, synthetic construct
  REGION 1..978: note = engineered CasX variant
QEIKRINKIRRRLVKDSNTKKAGKTGPMKTLLVRVMTPDLRERLENLRKKPENIPQPISNTSRANLNKLLTDYTEMKKAILHVYWEEFQKDPVGLMSRVAQPASKKIDQNKLKPEMDEKGNLTTAGFACSQCGQPLFVYKLEQVSEKGKAYTNYFGRCNVAEHEKLILLAQLKPEKDSDEAVTYSLGKFGQRALDFYSIHVTKESTHPVKPLAQIAGNRYASGPVGKALSDACMGTIASFLSKYQDIIIEHQKVVKGNQKRLESLRELAGKENLEYPSVTLPPQPHTKEGVDAYNEVIARVRMWVNLNLWQKLKLSRDDAKPLLRLKGFPSFPLVERQANEVDWWDMVCNVKKLINEKKEDGKVFWQNLAGYKRQEALRPYLSSEEDRKKGKKFARYQLGDLLLHLEKKHGEDWGKVYDEAWERIDKKVEGLSKHIKLEEERRSEDAQSKAALTDWLRAKASFVIEGLKEADKDEFCRCELKLQKWYGDLRGKPFAIEAENSILDISGFSKQYNCAFIWQKDGVKKLNLYLIINYFKGGKLRFKKIKPEAFEANRFYTVINKKSGEIVPMEVNFNFDDPNLIILPLAFGKRQGREFIWNDLLSLETGSLKLANGRVIEKTLYNRRTRQDEPALFVALTFERREVLDSENIKPMNLIGVDRGENIPAVIALTDPEGCPLERFKDSLGNPTHILRIGESYKEKQRTIQAKKEVEQRRAGGYSRKYASKAKNLADDMVRNTARDLLYYAVTQDAMLIFENLSRGFGRQGKRTFMAERQYTRMEDWLTAKLAYEGLPSKTYLSKTLAQYTSKTCSNCGFTITSADYDRVLEKLKKTATGWMTTINGKELKVEGQITYYNRYKRQNVVKDLSVELDRLSEESVNNDISSWTKGRSGEALSLLKKRFSHRPVQEKFVCLNCGFETHADEQAALNIARSWLFLRSQEYKKYQTNKTTGNTDKRAFVETWQSFYRKKLKEVWKPAV

SEQ ID NO: 27832 - protein, 978 aa, synthetic construct
  REGION 1..978: note = engineered CasX variant
QEIKRINKIRRRLVKDSNTKKAGKTGPMKTLLVRVMTPDLRERLENLRKKPENIPQPISNTSRANLNKLLTDYTEMKKAILHVYWEEFQKDPVGLMSRVAQPASKKIDQNKLKPEMDEKGNLTTAGFACSQCGQPLFVYKLEQVSEKGKAYTNYFGRCNVAEHEKLILLAQLKPEKDSDEAVTYSLGKFGQRALDFYSIHVTKESTHPVKPLAQIAGNRYASGPVGKALSDACMGTIASFLSKYQDIIIEHQKVVKGNQKRLESLRELAGKENLEYPSVTLPPQPHTKEGVDAYNEVIARVRMWVNLNLWQKLKLSRDDAKPLLRLKGFPSFPLVERQANEVDWWDMVCNVKKLINEKKEDGKVFWQNLAGYKRQEALRPYLSSEEDRKKGKKFARYQLGDLLLHLEKKHGEDWGKVYDEAWERIDKKVEGLSKHIKLEEERRSEDAQSKAALTDWLRAKASFVIEGLKEADKDEFCRCELKLQKWYGDLRGKPFAIEAENSILDISGFSKQYNCAFIWQKDGVKKLNLYLIINYFKGGKLRFKKIKPEAFEANRFYTVINKKSGEIVPMEVNFNFDDPNLIILPLAFGKRQGREFIWNDLLSLETGSLKLANGRVIEKTLYNRRTRQDEPALFVALTFERREVLDSDNIKPMNLIGVDRGENIPAVIALTDPEGKPLSRFKDSLGNPTHILRIGESYKEKQRTIQAKKEVEQRRAGGYSRKYASKAKNLADDMVRNTARDLLYYAVTQDAMLIFENLSRGFGRQGKRTFMAERQYTRMEDWLTAKLAYEGLPSKTYLSKTLAQYTSKTCSNCGFTITSADYDRVLEKLKKTATGWMTTINGKELKVEGQITYYNRYKRQNVVKDLSVELDRLSEESVNNDISSWTKGRSGEALSLLKKRFSHRPVQEKFVCLNCGFETHADEQAALNIARSWLFLRSQEYKKYQTNKTTGNTDKRAFVETWQSFYRKKLKEVWKPAV

SEQ ID NO: 27833 - protein, 978 aa, synthetic construct
  REGION 1..978: note = engineered CasX variant
QEIKRINKIRRRLVKDSNTKKAGKTGPMKTLLVRVMTPDLRERLENLRKKPENIPQPISNTSRANLNKLLTDYTEMKKAILHVYWEEFQKDPVGLMSRVAQPASKKIDQNKLKPEMDEKGNLTTAGFACSQCGQPLFVYKLEQVSEKGKAYTNYFGRCNVAEHEKLILLAQLKPEKDSDEAVTYSLGKFGQRALDFYSIHVTKESTHPVKPLAQIAGNRYASGPVGKALSDACMGTIASFLSKYQDIIIEHQKVVKGNQKRLESLRELAGKENLEYPSVTLPPQPHTKEGVDAYNEVIARVRMWVNLNLWQKLKLSRDDAKPLLRLKGFPSFPLVERQANEVDWWDMVCNVKKLINEKKEDGKVFWQNLAGYKRQEALRPYLSSEEDRKKGKKFARYQLGDLLLHLEKKHGEDWGKVYDEAWERIDKKVEGLSKHIKLEEERRSEDAQSKAALTDWLRAKASFVIEGLKEADKDEFCRCELKLQKWYGDLRGKPFAIEAENSILDISGFSKQYNCAFIWQKDGVKKLNLYLIINYFKGGKLRFKKIKPEAFEANRFYTVINKKSGEIVPMEVNFNFDDPNLIILPLAFGKRQGREFIWNDLLSLETGSLKLANGRVIEKTLYNRRTRQDEPALFVALTFERREVLDSDNIKPMNLIGVDRGENIPAVIALTDPEGCPLSRFKDSLGNPTHILRIGESYKEKQRTIQAKKEVEQRRAGGYSRKYASKAKNLADDMVRNTARDLLYYAVTQDAMLIFENLSRGFGRQGKRTFMAERQYTRMEDWLTAKLAYEGLPSKTYLSKTLAQYTSKTCSNCGFTITSADYDRVLEKLKKTATGWMTTINGKELKVEGQITYYNRYKRQNVVKDLSVELDRLSEESVNNDISSWTKGRSGEALSLLKKRFSHRPVQEKFVCLNCGFETHADEQAALNIARSWLFLRSQEYKKYQTNKTTGNTDKRAFVETWQSFYRKKLKEVWKPAV

SEQ ID NO: 27834 - protein, 978 aa, synthetic construct
  REGION 1..978: note = engineered CasX variant
QEIKRINKIRRRLVKDSNTKKAGKTGPMKTLLVRVMTPDLRERLENLRKKPENIPQPISNTSRANLNKLLTDYTEMKKAILHVYWEEFQKDPVGLMSRVAQPASKKIDQNKLKPEMDEKGNLTTAGFACSQCGQPLFVYKLEQVSEKGKAYTNYFGRCNVAEHEKLILLAQLKPEKDSDEAVTYSLGKFGQRALDFYSIHVTKESTHPVKPLAQIAGNRYASGPVGKALSDACMGTIASFLSKYQDIIIEHQKVVKGNQKRLESLRELAGKENLEYPSVTLPPQPHTKEGVDAYNEVIARVRMWVNLNLWQKLKLSRDDAKPLLRLKGFPSFPLVERQANEVDWWDMVCNVKKLINEKKEDGKVFWQNLAGYKRQEALRPYLSSEEDRKKGKKFARYQLGDLLLHLEKKHGEDWGKVYDEAWERIDKKVEGLSKHIKLEEERRSEDAQSKAALTDWLRAKASFVIEGLKEADKDEFCRCELKLQKWYGDLRGKPFAIEAENSILDISGFSKQYNCAFIWQKDGVKKLNLYLIINYFKGGKLRFKKIKPEAFEANRFYTVINKKSGEIVPMEVNFNFDDPNLIILPLAFGKRQGREFIWNDLLSLETGSLKLANGRVIEKTLYNRRTRQDEPALFVALTFERREVLDSCNIKPMNLIGVDRGENIPAVIALTDPEGCPLSRFKDSLGNPTHILRIGESYKEKQRTIQQKKEVEQRRAIGYSRKYASKAKNLADDMVRNTARDLLYYAVTQDAMLIFENLSRGFGRQGKRTFMAERQYTRMEDWLTAKLAYEGLPSKTYLSKTLAQYTSKTCSNCGFTITSADYDRVLEKLKKTATGWMTTINGKELKVEGQITYYNRYKRQNVVKDLSVELDRLSEESVNNDISSWTKGRSGEALSLLKKRFSHRPVQEKFVCLNCGFETHADEQAALNIARSWLFLRSQEYKKYQTNKTTGNTDKRAFVETWQSFYRKKLKEVWKPAV

SEQ ID NO: 27835 - protein, 978 aa, synthetic construct
  REGION 1..978: note = engineered CasX variant
QEIKRINKIRRRLVKDSNTKKAGKTGPMKTLLVRVMTPDLRERLENLRKKPENIPQPISNTSRANLNKLLTDYTEMKKAILHVYWEEFQKDPVGLMSRVAQPASKKIDQNKLKPEMDEKGNLTTAGFACSQCGQPLFVYKLEQVSEKGKAYTNYFGRCNVAEHEKLILLAQLKPEKDSDEAVTYSLGKFGQRALDFYSIHVTKESTHPVKPLAQIAGNRYASGPVGKALSDACMGTIASFLSKYQDIIIEHQKVVKGNQKRLESLRELAGKENLEYPSVTLPPQPHTKEGVDAYNEVIARVRMWVNLNLWQKLKLSRDDAKPLLRLKGFPSFPLVERQANEVDWWDMVCNVKKLINEKKEDGKVFWQNLAGYKRQEALRPYLSSEEDRKKGKKFARYQLGDLLLHLEKKHGEDWGKVYDEAWERIDKKVEGLSKHIKLEEERRSEDAQSKAALTDWLRAKASFVIEGLKEADKDEFCRCELKLQKWYGDLRGKPFAIEAENSILDISGFSKQYNCAFIWQKDGVKKLNLYLIINYFKGGKLRFKKIKPEAFEANRFYTVINKKSGEIVPMEVNFNFDDPNLIILPLAFGKRQGREFIWNDLLSLETGSLKLANGRVIEKTLYNRRTRQDEPALFVALTFERREVLDSCNIKPMNLIGVDRGENIPAVIALTDPEGCPLSRFKDSLGNPTHILRIGESYKEKQRTIQQKKEVEQRRAGGYSRKYASKAKNLADDMVRNTARDLLYYAVTQDAMLIFENLSRGFGRQGKRTFMAERQYTRMEDWLTAKLAYEGLPSKTYLSKTLAQYTSKTCSNCGFTITSADYDRVLEKLKKTATGWMTTINGKELKVEGQITYYNRYKRQNVVKDLSVELDRLSEESVNNDISSWTKGRSGEALSLLKKRFSHRPVQEKFVCLNCGFETHADEQAALNIARSWLFLRSQEYKKYQTNKTTGNTDKRAFVETWQSFYRKKLKEVWKPAV

SEQ ID NO: 27836 - protein, 978 aa, synthetic construct
  REGION 1..978: note = engineered CasX variant
QEIKRINKIRRRLVKDSNTKKAGKTGPMKTLLVRVMTPDLRERLENLRKKPENIPQPISNTSRANLNKLLTDYTEMKKAILHVYWEEFQKDPVGLMSRVAQPASKKIDQNKLKPEMDEKGNLTTAGFACSQCGQPLFVYKLEQVSEKGKAYTNYFGRCNVAEHEKLILLAQLKPEKDSDEAVTYSLGKFGQRALDFYSIHVTKESTHPVKPLAQIAGNRYASGPVGKALSDACMGTIASFLSKYQDIIIEHQKVVKGNQKRLESLRELAGKENLEYPSVTLPPQPHTKEGVDAYNEVIARVRMWVNLNLWQKLKLSRDDAKPLLRLKGFPSFPLVERQANEVDWWDMVCNVKKLINEKKEDGKVFWQNLAGYKRQEALRPYLSSEEDRKKGKKFARYQLGDLLLHLEKKHGEDWGKVYDEAWERIDKKVEGLSKHIKLEEERRSEDAQSKAALTDWLRAKASFVIEGLKEADKDEFCRCELKLQKWYGDLRGKPFAIEAENSILDISGFSKQYNCAFIWQKDGVKKLNLYLIINYFKGGKLRFKKIKPEAFEANRFYTVINKKSGEIVPMEVNFNFDDPNLIILPLAFGKRQGREFIWNDLLSLETGSLKLANGRVIEKTLYNRRTRQDEPALFVALTFERREVLDSCNIKPMNLIGVDRGENIPAVIALTDPEGCPLSRFKDSLGNPTHILRIGESYKEKQRTIQAKKEVEQRRAIGYSRKYASKAKNLADDMVRNTARDLLYYAVTQDAMLIFENLSRGFGRQGKRTFMAERQYTRMEDWLTAKLAYEGLPSKTYLSKTLAQYTSKTCSNCGFTITSADYDRVLEKLKKTATGWMTTINGKELKVEGQITYYNRYKRQNVVKDLSVELDRLSEESVNNDISSWTKGRSGEALSLLKKRFSHRPVQEKFVCLNCGFETHADEQAALNIARSWLFLRSQEYKKYQTNKTTGNTDKRAFVETWQSFYRKKLKEVWKPAV

SEQ ID NO: 27837 - protein, 978 aa, synthetic construct
  REGION 1..978: note = engineered CasX variant
QEIKRINKIRRRLVKDSNTKKAGKTGPMKTLLVRVMTPDLRERLENLRKKPENIPQPISNTSRANLNKLLTDYTEMKKAILHVYWEEFQKDPVGLMSRVAQPASKKIDQNKLKPEMDEKGNLTTAGFACSQCGQPLFVYKLEQVSEKGKAYTNYFGRCNVAEHEKLILLAQLKPEKDSDEAVTYSLGKFGQRALDFYSIHVTKESTHPVKPLAQIAGNRYASGPVGKALSDACMGTIASFLSKYQDIIIEHQKVVKGNQKRLESLRELAGKENLEYPSVTLPPQPHTKEGVDAYNEVIARVRMWVNLNLWQKLKLSRDDAKPLLRLKGFPSFPLVERQANEVDWWDMVCNVKKLINEKKEDGKVFWQNLAGYKRQEALRPYLSSEEDRKKGKKFARYQLGDLLLHLEKKHGEDWGKVYDEAWERIDKKVEGLSKHIKLEEERRSEDAQSKAALTDWLRAKASFVIEGLKEADKDEFCRCELKLQKWYGDLRGKPFAIEAENSILDISGFSKQYNCAFIWQKDGVKKLNLYLIINYFKGGKLRFKKIKPEAFEANRFYTVINKKSGEIVPMEVNFNFDDPNLIILPLAFGKRQGREFIWNDLLSLETGSLKLANGRVIEKTLYNRRTRQDEPALFVALTFERREVLDSCNIKPMNLIGVDRGENIPAVIALTDPEGCPLSRFKDSLGNPTHILRIGESYKEKQRTIQAKKEVEQRRAGGYSRKYASKAKNLADDMVRNTARDLLYYAVTQDAMLIFENLSRGFGRQGKRTFMAERQYTRMEDWLTAKLAYEGLPSKTYLSKTLAQYTSKTCSNCGFTITSADYDRVLEKLKKTATGWMTTINGKELKVEGQITYYNRYKRQNVVKDLSVELDRLSEESVNNDISSWTKGRSGEALSLLKKRFSHRPVQEKFVCLNCGFETHADEQAALNIARSWLFLRSQEYKKYQTNKTTGNTDKRAFVETWQSFYRKKLKEVWKPAV

SEQ ID NO: 27838 - protein, 978 aa, synthetic construct
  REGION 1..978: note = engineered CasX variant
QEIKRINKIRRRLVKDSNTKKAGKTGPMKTLLVRVMTPDLRERLENLRKKPENIPQPISNTSRANLNKLLTDYTEMKKAILHVYWEEFQKDPVGLMSRVAQPASKKIDQNKLKPEMDEKGNLTTAGFACSQCGQPLFVYKLEQVSEKGKAYTNYFGRCNVAEHEKLILLAQLKPEKDSDEAVTYSLGKFGQRALDFYSIHVTKESTHPVKPLAQIAGNRYASGPVGKALSDACMGTIASFLSKYQDIIIEHQKVVKGNQKRLESLRELAGKENLEYPSVTLPPQPHTKEGVDAYNEVIARVRMWVNLNLWQKLKLSRDDAKPLLRLKGFPSFPLVERQANEVDWWDMVCNVKKLINEKKEDGKVFWQNLAGYKRQEALRPYLSSEEDRKKGKKFARYQLGDLLLHLEKKHGEDWGKVYDEAWERIDKKVEGLSKHIKLEEERRSEDAQSKAALTDWLRAKASFVIEGLKEADKDEFCRCELKLQKWYGDLRGKPFAIEAENSILDISGFSKQYNCAFIWQKDGVKKLNLYLIINYFKGGKLRFKKIKPEAFEANRFYTVINKKSGEIVPMEVNFNFDDPNLIILPLAFGKRQGREFIWNDLLSLETGSLKLANGRVIEKTLYNRRTRQDEPALFVALTFERREVLDSANIKPMNLIGVDRGENIPAVIALTDPEGKPLSRFKDSLGNPTHILRIGESYKEKQRTIQAKKEVEQRRAGGYSRKYASKAKNLADDMVRNTARDLLYYAVTQDAMLIFENLSRGFGRQGKRTFMAERQYTRMEDWLTAKLAYEGLPSKTYLSKTLAQYTSKTCSNCGFTITSADYDRVLEKLKKTATGWMTTINGKELKVEGQITYYNRYKRQNVVKDLSVELDRLSEESVNNDISSWTKGRSGEALSLLKKRFSHRPVQEKFVCLNCGFETHADEQAALNIARSWLFLRSQEYKKYQTNKTTGNTDKRAFVETWQSFYRKKLKEVWKPAV

SEQ ID NO: 27839 - protein, 978 aa, synthetic construct
  REGION 1..978: note = engineered CasX variant
QEIKRINKIRRRLVKDSNTKKAGKTGPMKTLLVRVMTPDLRERLENLRKKPENIPQPISNTSRANLNKLLTDYTEMKKAILHVYWEEFQKDPVGLMSRVAQPASKKIDQNKLKPEMDEKGNLTTAGFACSQCGQPLFVYKLEQVSEKGKAYTNYFGRCNVAEHEKLILLAQLKPEKDSDEAVTYSLGKFGQRALDFYSIHVTKESTHPVKPLAQIAGNRYASGPVGKALSDACMGTIASFLSKYQDIIIEHQKVVKGNQKRLESLRELAGKENLEYPSVTLPPQPHTKEGVDAYNEVIARVRMWVNLNLWQKLKLSRDDAKPLLRLKGFPSFPLVERQANEVDWWDMVCNVKKLINEKKEDGKVFWQNLAGYKRQEALRPYLSSEEDRKKGKKFARYQLGDLLLHLEKKHGEDWGKVYDEAWERIDKKVEGLSKHIKLEEERRSEDAQSKAALTDWLRAKASFVIEGLKEADKDEFCRCELKLQKWYGDLRGKPFAIEAENSILDISGFSKQYNCAFIWQKDGVKKLNLYLIINYFKGGKLRFKKIKPEAFEANRFYTVINKKSGEIVPMEVNFNFDDPNLIILPLAFGKRQGREFIWNDLLSLETGSLKLANGRVIEKTLYNRRTRQDEPALFVALTFERREVLDSANIKPMNLIGVDRGENIPAVIALTDPEGCPLSRFKDSLGNPTHILRIGESYKEKQRTIQAKKEVEQRRAGGYSRKYASKAKNLADDMVRNTARDLLYYAVTQDAMLIFENLSRGFGRQGKRTFMAERQYTRMEDWLTAKLAYEGLPSKTYLSKTLAQYTSKTCSNCGFTITSADYDRVLEKLKKTATGWMTTINGKELKVEGQITYYNRYKRQNVVKDLSVELDRLSEESVNNDISSWTKGRSGEALSLLKKRFSHRPVQEKFVCLNCGFETHADEQAALNIARSWLFLRSQEYKKYQTNKTTGNTDKRAFVETWQSFYRKKLKEVWKPAV

SEQ ID NO: 27840 - protein, 978 aa, synthetic construct
  REGION 1..978: note = engineered CasX variant
QEIKRINKIRRRLVKDSNTKKAGKTGPMKTLLVRVMTPDLRERLENLRKKPENIPQPISNTSRANLNKLLTDYTEMKKAILHVYWEEFQKDPVGLMSRVAQPASKKIDQNKLKPEMDEKGNLTTAGFACSQCGQPLFVYKLEQVSEKGKAYTNYFGRCNVAEHEKLILLAQLKPEKDSDEAVTYSLGKFGQRALDFYSIHVTKESTHPVKPLAQIAGNRYASGPVGKALSDACMGTIASFLSKYQDIIIEHQKVVKGNQKRLESLRELAGKENLEYPSVTLPPQPHTKEGVDAYNEVIARVRMWVNLNLWQKLKLSRDDAKPLLRLKGFPSFPLVERQANEVDWWDMVCNVKKLINEKKEDGKVFWQNLAGYKRQEALRPYLSSEEDRKKGKKFARYQLGDLLLHLEKKHGEDWGKVYDEAWERIDKKVEGLSKHIKLEEERRSEDAQSKAALTDWLRAKASFVIEGLKEADKDEFCRCELKLQKWYGDLRGKPFAIEAENSILDISGFSKQYNCAFIWQKDGVKKLNLYLIINYFKGGKLRFKKIKPEAFEANRFYTVINKKSGEIVPMEVNFNFDDPNLIILPLAFGKRQGREFIWNDLLSLETGSLKLANGRVIEKTLYNRRTRQDEPALFVALTFERREVLDSANIKPMNLIGVDRGENIPAMIALTDPEGKPLSRFKDSLGNPTHILRIGESYKEKQRTIQAKKEVEQRRAGGYSRKYASKAKNLADDMVRNTARDLLYYAVTQDAMLIFENLSRGFGRQGKRTFMAERQYTRMEDWLTAKLAYEGLPSKTYLSKTLAQYTSKTCSNCGFTITSADYDRVLEKLKKTATGWMTTINGKELKVEGQITYYNRYKRQNVVKDLSVELDRLSEESVNNDISSWTKGRSGEALSLLKKRFSHRPVQEKFVCLNCGFETHADEQAALNIARSWLFLRSQEYKKYQTNKTTGNTDKRAFVETWQSFYRKKLKEVWKPAV

SEQ ID NO: 27841 - protein, 978 aa, synthetic construct
  REGION 1..978: note = engineered CasX variant
QEIKRINKIRRRLVKDSNTKKAGKTGPMKTLLVRVMTPDLRERLENLRKKPENIPQPISNTSRANLNKLLTDYTEMKKAILHVYWEEFQKDPVGLMSRVAQPASKKIDQNKLKPEMDEKGNLTTAGFACSQCGQPLFVYKLEQVSEKGKAYTNYFGRCNVAEHEKLILLAQLKPEKDSDEAVTYSLGKFGQRALDFYSIHVTKESTHPVKPLAQIAGNRYASGPVGKALSDACMGTIASFLSKYQDIIIEHQKVVKGNQKRLESLRELAGKENLEYPSVTLPPQPHTKEGVDAYNEVIARVRMWVNLNLWQKLKLSRDDAKPLLRLKGFPSFPLVERQANEVDWWDMVCNVKKLINEKKEDGKVFWQNLAGYKRQEALRPYLSSEEDRKKGKKFARYQLGDLLLHLEKKHGEDWGKVYDEAWERIDKKVEGLSKHIKLEEERRSEDAQSKAALTDWLRAKASFVIEGLKEADKDEFCRCELKLQKWYGDLRGKPFAIEAENSILDISGFSKQYNCAFIWQKDGVKKLNLYLIINYFKGGKLRFKKIKPEAFEANRFYTVINKKSGEIVPMEVNFNFDDPNLIILPLAFGKRQGREFIWNDLLSLETGSLKLANGRVIEKTLYNRRTRQDEPALFVALTFERREVLDSANIKPMNLIGVDRGENIPAMIALTDPEGCPLSRFKDSLGNPTHILRIGESYKEKQRTIQAKKEVEQRRAGGYSRKYASKAKNLADDMVRNTARDLLYYAVTQDAMLIFENLSRGFGRQGKRTFMAERQYTRMEDWLTAKLAYEGLPSKTYLSKTLAQYTSKTCSNCGFTITSADYDRVLEKLKKTATGWMTTINGKELKVEGQITYYNRYKRQNVVKDLSVELDRLSEESVNNDISSWTKGRSGEALSLLKKRFSHRPVQEKFVCLNCGFETHADEQAALNIARSWLFLRSQEYKKYQTNKTTGNTDKRAFVETWQSFYRKKLKEVWKPAV

SEQ ID NO: 27842 - protein, 978 aa, synthetic construct
  REGION 1..978: note = engineered CasX variant
QEIKRINKIRRRLVKDSNTKKAGKTGPMKTLLVRVMTPDLRERLENLRKKPENIPQPISNTSRANLNKLLTDYTEMKKAILHVYWEEFQKDPVGLMSRVAQPASKKIDQNKLKPEMDEKGNLTTAGFACSQCGQPLFVYKLEQVSEKGKAYTNYFGRCNVAEHEKLILLAQLKPEKDSDEAVTYSLGKFGQRALDFYSIHVTKESTHPVKPLAQIAGNRYASGPVGKALSDACMGTIASFLSKYQDIIIEHQKVVKGNQKRLESLRELAGKENLEYPSVTLPPQPHTKEGVDAYNEVIARVRMWVNLNLWQKLKLSRDDAKPLLRLKGFPSFPLVERQANEVDWWDMVCNVKKLINEKKEDGKVFWQNLAGYKRQEALRPYLSSEEDRKKGKKFARYQLGDLLLHLEKKHGEDWGKVYDEAWERIDKKVEGLSKHIKLEEERRSEDAQSKAALTDWLRAKASFVIEGLKEADKDEFCRCELKLQKWYGDLRGKPFAIEAENSILDISGFSKQYNCAFIWQKDGVKKLNLYLIINYFKGGKLRFKKIKPEAFEANRFYTVINKKSGEIVPMEVNFNFDDPNLIILPLAFGKRQGREFIWNDLLSLETGSLKLANGRVIEKTLYNRRTRQDEPALFVALTFERREVLDSANIKPPNLIGVDRGENIPAVIALTDPEGCLLSRFKDSLGNPTHILRIGESYKEKQRTIQAKKEVEQRRAFGYSRKYASKAKNLADDMVRNTARDLLYYAVTQDAMLIFENLSRGFGRQGKRTFMAERQYTRMEDWLTAKLAYEGLPSKTYLSKTLAQYTSKTCSNCGFTITSADYDRVLEKLKKTATGWMTTINGKELKVEGQITYYNRYKRQNVVKDLSVELDRLSEESVNNDISSWTKGRSGEALSLLKKRFSHRPVQEKFVCLNCGFETHADEQAALNIARSWLFLRSQEYKKYQTNKTTGNTDKRAFVETWQSFYRKKLKEVWKPAV

SEQ ID NO: 27843 - protein, 978 aa, synthetic construct
  REGION 1..978: note = engineered CasX variant
QEIKRINKIRRRLVKDSNTKKAGKTGPMKTLLVRVMTPDLRERLENLRKKPENIPQPISNTSRANLNKLLTDYTEMKKAILHVYWEEFQKDPVGLMSRVAQPASKKIDQNKLKPEMDEKGNLTTAGFACSQCGQPLFVYKLEQVSEKGKAYTNYFGRCNVAEHEKLILLAQLKPEKDSDEAVTYSLGKFGQRALDFYSIHVTKESTHPVKPLAQIAGNRYASGPVGKALSDACMGTIASFLSKYQDIIIEHQKVVKGNQKRLESLRELAGKENLEYPSVTLPPQPHTKEGVDAYNEVIARVRMWVNLNLWQKLKLSRDDAKPLLRLKGFPSFPLVERQANEVDWWDMVCNVKKLINEKKEDGKVFWQNLAGYKRQEALRPYLSSEEDRKKGKKFARYQLGDLLLHLEKKHGEDWGKVYDEAWERIDKKVEGLSKHIKLEEERRSEDAQSKAALTDWLRAKASFVIEGLKEADKDEFCRCELKLQKWYGDLRGKPFAIEAENSILDISGFSKQYNCAFIWQKDGVKKLNLYLIINYFKGGKLRFKKIKPEAFEANRFYTVINKKSGEIVPMEVNFNFDDPNLIILPLAFGKRQGREFIWNDLLSLETGSLKLANGRVIEKTLYNRRTRQDEPALFVALTFERREVLDSQSIFPMNLIGVDRGENIPAVIAMTDPEGRPLSRFKDSHGNPTNILRIGEMYKNKQRTIQAAKEVEQRRAGGYSRKYASKAKNLADDMVRNTARDLLYYAVTQDAMLIFENLSRGFGRQGKRTFMAERQYTRMEDWLTAKLAYEGLPSKTYLSKTLAQYTSKTCSNCGFTITSADYDRVLEKLKKTATGWMTTINGKELKVEGQITYYNRYKRQNVVKDLSVELDRLSEESVNNDISSWTKGRSGEALSLLKKRFSHRPVQEKFVCLNCGFETHADEQAALNIARSWLFLRSQEYKKYQTNKTTGNTDKRAFVETWQSFYRKKLKEVWKPAV

SEQ ID NO: 27844 - protein, 978 aa, synthetic construct
  REGION 1..978: note = engineered CasX variant
QEIKRINKIRRRLVKDSNTKKAGKTGPMKTLLVRVMTPDLRERLENLRKKPENIPQPISNTSRANLNKLLTDYTEMKKAILHVYWEEFQKDPVGLMSRVAQPASKKIDQNKLKPEMDEKGNLTTAGFACSQCGQPLFVYKLEQVSEKGKAYTNYFGRCNVAEHEKLILLAQLKPEKDSDEAVTYSLGKFGQRALDFYSIHVTKESTHPVKPLAQIAGNRYASGPVGKALSDACMGTIASFLSKYQDIIIEHQKVVKGNQKRLESLRELAGKENLEYPSVTLPPQPHTKEGVDAYNEVIARVRMWVNLNLWQKLKLSRDDAKPLLRLKGFPSFPLVERQANEVDWWDMVCNVKKLINEKKEDGKVFWQNLAGYKRQEALRPYLSSEEDRKKGKKFARYQLGDLLLHLEKKHGEDWGKVYDEAWERIDKKVEGLSKHIKLEEERRSEDAQSKAALTDWLRAKASFVIEGLKEADKDEFCRCELKLQKWYGDLRGKPFAIEAENSILDISGFSKQYNCAFIWQKDGVKKLNLYLIINYFKGGKLRFKKIKPEAFEANRFYTVINKKSGEIVPMEVNFNFDDPNLIILPLAFGKRQGREFIWNDLLSLETGSLKLANGRVIEKTLYNRRTRQDEPALFVALTFERREVLDSSNIMPMNLIGVDRGENIPAVIALTDTEGCPLKRFKDSLGNPTHILRCGESYKCKQRTIQAKKEVEQRRAFGYSRKYASKAKNLADDMVRNTARDLLYYAVTQDAMLIFENLSRGFGRQGKRTFMAERQYTRMEDWLTAKLAYEGLPSKTYLSKTLAQYTSKTCSNCGFTITSADYDRVLEKLKKTATGWMTTINGKELKVEGQITYYNRYKRQNVVKDLSVELDRLSEESVNNDISSWTKGRSGEALSLLKKRFSHRPVQEKFVCLNCGFETHADEQAALNIARSWLFLRSQEYKKYQTNKTTGNTDKRAFVETWQSFYRKKLKEVWKPAV

SEQ ID NO: 27845 - protein, 978 aa, synthetic construct
  REGION 1..978: note = engineered CasX variant
QEIKRINKIRRRLVKDSNTKKAGKTGPMKTLLVRVMTPDLRERLENLRKKPENIPQPISNTSRANLNKLLTDYTEMKKAILHVYWEEFQKDPVGLMSRVAQPASKKIDQNKLKPEMDEKGNLTTAGFACSQCGQPLFVYKLEQVSEKGKAYTNYFGRCNVAEHEKLILLAQLKPEKDSDEAVTYSLGKFGQRALDFYSIHVTKESTHPVKPLAQIAGNRYASGPVGKALSDACMGTIASFLSKYQDIIIEHQKVVKGNQKRLESLRELAGKENLEYPSVTLPPQPHTKEGVDAYNEVIARVRMWVNLNLWQKLKLSRDDAKPLLRLKGFPSFPLVERQANEVDWWDMVCNVKKLINEKKEDGKVFWQNLAGYKRQEALRPYLSSEEDRKKGKKFARYQLGDLLLHLEKKHGEDWGKVYDEAWERIDKKVEGLSKHIKLEEERRSEDAQSKAALTDWLRAKASFVIEGLKEADKDEFCRCELKLQKWYGDLRGKPFAIEAENSILDISGFSKQYNCAFIWQKDGVKKLNLYLIINYFKGGKLRFKKIKPEAFEANRFYTVINKKSGEIVPMEVNFNFDDPNLIILPLAFGKRQGREFIWNDLLSLETGSLKLANGRVIEKTLYNRRTRQDEPALFVALTFERREVLDSSNIKPMNLIGVDRGENIPAVIALTDPEGCPLSRWKDSLGNPTHILRIGEGFKERQRTIQAKKEVEQRRAFGYSRKYASKAKNLADDMVRNTARDLLYYAVTQDAMLIFENLSRGFGRQGKRTFMAERQYTRMEDWLTAKLAYEGLPSKTYLSKTLAQYTSKTCSNCGFTITSADYDRVLEKLKKTATGWMTTINGKELKVEGQITYYNRYKRQNVVKDLSVELDRLSEESVNNDISSWTKGRSGEALSLLKKRFSHRPVQEKFVCLNCGFETHADEQAALNIARSWLFLRSQEYKKYQTNKTTGNTDKRAFVETWQSFYRKKLKEVWKPAV

SEQ ID NO: 27846 - protein, 978 aa, synthetic construct
  REGION 1..978: note = engineered CasX variant
QEIKRINKIRRRLVKDSNTKKAGKTGPMKTLLVRVMTPDLRERLENLRKKPENIPQPISNTSRANLNKLLTDYTEMKKAILHVYWEEFQKDPVGLMSRVAQPASKKIDQNKLKPEMDEKGNLTTAGFACSQCGQPLFVYKLEQVSEKGKAYTNYFGRCNVAEHEKLILLAQLKPEKDSDEAVTYSLGKFGQRALDFYSIHVTKESTHPVKPLAQIAGNRYASGPVGKALSDACMGTIASFLSKYQDIIIEHQKVVKGNQKRLESLRELAGKENLEYPSVTLPPQPHTKEGVDAYNEVIARVRMWVNLNLWQKLKLSRDDAKPLLRLKGFPSFPLVERQANEVDWWDMVCNVKKLINEKKEDGKVFWQNLAGYKRQEALRPYLSSEEDRKKGKKFARYQLGDLLLHLEKKHGEDWGKVYDEAWERIDKKVEGLSKHIKLEEERRSEDAQSKAALTDWLRAKASFVIEGLKEADKDEFCRCELKLQKWYGDLRGKPFAIEAENSILDISGFSKQYNCAFIWQKDGVKKLNLYLIINYFKGGKLRFKKIKPEAFEANRFYTVINKKSGEIVPMEVNFNFDDPNLIILPLAFGKRQGREFIWNDLLSLETGSLKLANGRVIEKTLYNRRTRQDEPALFVALTFERREVLDSSNIKPMNLIGVDRGENIPAVIALTDPEGCPLSRFKDSLGNPTHILRIGGSFKEKQRTIQKHKEVEQRRAFGYSRKYASKAKNLADDMVRNTARDLLYYAVTQDAMLIFENLSRGFGRQGKRTFMAERQYTRMEDWLTAKLAYEGLPSKTYLSKTLAQYTSKTCSNCGFTITSADYDRVLEKLKKTATGWMTTINGKELKVEGQITYYNRYKRQNVVKDLSVELDRLSEESVNNDISSWTKGRSGEALSLLKKRFSHRPVQEKFVCLNCGFETHADEQAALNIARSWLFLRSQEYKKYQTNKTTGNTDKRAFVETWQSFYRKKLKEVWKPAV

SEQ ID NO: 27847 - protein, 978 aa, synthetic construct
  REGION 1..978: note = engineered CasX variant
QEIKRINKIRRRLVKDSNTKKAGKTGPMKTLLVRVMTPDLRERLENLRKKPENIPQPISNTSRANLNKLLTDYTEMKKAILHVYWEEFQKDPVGLMSRVAQPASKKIDQNKLKPEMDEKGNLTTAGFACSQCGQPLFVYKLEQVSEKGKAYTNYFGRCNVAEHEKLILLAQLKPEKDSDEAVTYSLGKFGQRALDFYSIHVTKESTHPVKPLAQIAGNRYASGPVGKALSDACMGTIASFLSKYQDIIIEHQKVVKGNQKRLESLRELAGKENLEYPSVTLPPQPHTKEGVDAYNEVIARVRMWVNLNLWQKLKLSRDDAKPLLRLKGFPSFPLVERQANEVDWWDMVCNVKKLINEKKEDGKVFWQNLAGYKRQEALRPYLSSEEDRKKGKKFARYQLGDLLLHLEKKHGEDWGKVYDEAWERIDKKVEGLSKHIKLEEERRSEDAQSKAALTDWLRAKASFVIEGLKEADKDEFCRCELKLQKWYGDLRGKPFAIEAENSILDISGFSKQYNCAFIWQKDGVKKLNLYLIINYFKGGKLRFKKIKPEAFEANRFYTVINKKSGEIVPMEVNFNFDDPNLIILPLAFGKRQGREFIWNDLLSLETGSLKLANGRVIEKTLYNRRTRQDEPALFVALTFERREVLDSSNIKPMNFIGVDRGENIPAVIALCDPEGCPLSIFKDSLGNPTHILRIGESYKEKQRTIQAKKEVEQRRAFGYSRKYASKAKNLADDMVRNTARDLLYYAVTQDAMLIFENLSRGFGRQGKRTFMAERQYTRMEDWLTAKLAYEGLPSKTYLSKTLAQYTSKTCSNCGFTITSADYDRVLEKLKKTATGWMTTINGKELKVEGQITYYNRYKRQNVVKDLSVELDRLSEESVNNDISSWTKGRSGEALSLLKKRFSHRPVQEKFVCLNCGFETHADEQAALNIARSWLFLRSQEYKKYQTNKTTGNTDKRAFVETWQSFYRKKLKEVWKPAV

SEQ ID NO: 27848 - protein, 978 aa, synthetic construct
  REGION 1..978: note = engineered CasX variant
QEIKRINKIRRRLVKDSNTKKAGKTGPMKTLLVRVMTPDLRERLENLRKKPENIPQPISNTSRANLNKLLTDYTEMKKAILHVYWEEFQKDPVGLMSRVAQPASKKIDQNKLKPEMDEKGNLTTAGFACSQCGQPLFVYKLEQVSEKGKAYTNYFGRCNVAEHEKLILLAQLKPEKDSDEAVTYSLGKFGQRALDFYSIHVTKESTHPVKPLAQIAGNRYASGPVGKALSDACMGTIASFLSKYQDIIIEHQKVVKGNQKRLESLRELAGKENLEYPSVTLPPQPHTKEGVDAYNEVIARVRMWVNLNLWQKLKLSRDDAKPLLRLKGFPSFPLVERQANEVDWWDMVCNVKKLINEKKEDGKVFWQNLAGYKRQEALRPYLSSEEDRKKGKKFARYQLGDLLLHLEKKHGEDWGKVYDEAWERIDKKVEGLSKHIKLEEERRSEDAQSKAALTDWLRAKASFVIEGLKEADKDEFCRCELKLQKWYGDLRGKPFAIEAENSILDISGFSKQYNCAFIWQKDGVKKLNLYLIINYFKGGKLRFKKIKPEAFEANRFYTVINKKSGEIVPMEVNFNFDDPNLIILPLAFGKRQGREFIWNDLLSLETGSLKLANGRVIEKTLYNRRTRQDEPALFVALTFERREVLDSSNIKPMNLLGVDRGENIPAVIALTDPEGCPLSGFKDSLGNPTHILRIGESFKEKQRTIQKHKEVEQRRAFGYSRKYASKAKNLADDMVRNTARDLLYYAVTQDAMLIFENLSRGFGRQGKRTFMAERQYTRMEDWLTAKLAYEGLPSKTYLSKTLAQYTSKTCSNCGFTITSADYDRVLEKLKKTATGWMTTINGKELKVEGQITYYNRYKRQNVVKDLSVELDRLSEESVNNDISSWTKGRSGEALSLLKKRFSHRPVQEKFVCLNCGFETHADEQAALNIARSWLFLRSQEYKKYQTNKTTGNTDKRAFVETWQSFYRKKLKEVWKPAV

SEQ ID NO: 27849 - protein, 978 aa, synthetic construct
  REGION 1..978: note = engineered CasX variant
QEIKRINKIRRRLVKDSNTKKAGKTGPMKTLLVRVMTPDLRERLENLRKKPENIPQPISNTSRANLNKLLTDYTEMKKAILHVYWEEFQKDPVGLMSRVAQPASKKIDQNKLKPEMDEKGNLTTAGFACSQCGQPLFVYKLEQVSEKGKAYTNYFGRCNVAEHEKLILLAQLKPEKDSDEAVTYSLGKFGQRALDFYSIHVTKESTHPVKPLAQIAGNRYASGPVGKALSDACMGTIASFLSKYQDIIIEHQKVVKGNQKRLESLRELAGKENLEYPSVTLPPQPHTKEGVDAYNEVIARVRMWVNLNLWQKLKLSRDDAKPLLRLKGFPSFPLVERQANEVDWWDMVCNVKKLINEKKEDGKVFWQNLAGYKRQEALRPYLSSEEDRKKGKKFARYQLGDLLLHLEKKHGEDWGKVYDEAWERIDKKVEGLSKHIKLEEERRSEDAQSKAALTDWLRAKASFVIEGLKEADKDEFCRCELKLQKWYGDLRGKPFAIEAENSILDISGFSKQYNCAFIWQKDGVKKLNLYLIINYFKGGKLRFKKIKPEAFEANRFYTVINKKSGEIVPMEVNFNFDDPNLIILPLAFGKRQGREFIWNDLLSLETGSLKLANGRVIEKTLYNRRTRQDEPALFVALTFERREVLDSSQIKPMNLIGVDRGENIPAVIALTDPEGCPLSRFKDCLGNPTHILRIGESFKEKQRTIQKHKEVEQRRAFGYSRKYASKAKNLADDMVRNTARDLLYYAVTQDAMLIFENLSRGFGRQGKRTFMAERQYTRMEDWLTAKLAYEGLPSKTYLSKTLAQYTSKTCSNCGFTITSADYDRVLEKLKKTATGWMTTINGKELKVEGQITYYNRYKRQNVVKDLSVELDRLSEESVNNDISSWTKGRSGEALSLLKKRFSHRPVQEKFVCLNCGFETHADEQAALNIARSWLFLRSQEYKKYQTNKTTGNTDKRAFVETWQSFYRKKLKEVWKPAV

SEQ ID NO: 27850 - protein, 978 aa, synthetic construct
  REGION 1..978: note = engineered CasX variant
QEIKRINKIRRRLVKDSNTKKAGKTGPMKTLLVRVMTPDLRERLENLRKKPENIPQPISNTSRANLNKLLTDYTEMKKAILHVYWEEFQKDPVGLMSRVAQPASKKIDQNKLKPEMDEKGNLTTAGFACSQCGQPLFVYKLEQVSEKGKAYTNYFGRCNVAEHEKLILLAQLKPEKDSDEAVTYSLGKFGQRALDFYSIHVTKESTHPVKPLAQIAGNRYASGPVGKALSDACMGTIASFLSKYQDIIIEHQKVVKGNQKRLESLRELAGKENLEYPSVTLPPQPHTKEGVDAYNEVIARVRMWVNLNLWQKLKLSRDDAKPLLRLKGFPSFPLVERQANEVDWWDMVCNVKKLINEKKEDGKVFWQNLAGYKRQEALRPYLSSEEDRKKGKKFARYQLGDLLLHLEKKHGEDWGKVYDEAWERIDKKVEGLSKHIKLEEERRSEDAQSKAALTDWLRAKASFVIEGLKEADKDEFCRCELKLQKWYGDLRGKPFAIEAENSILDISGFSKQYNCAFIWQKDGVKKLNLYLIINYFKGGKLRFKKIKPEAFEANRFYTVINKKSGEIVPMEVNFNFDDPNLIILPLAFGKRQGREFIWNDLLSLETGSLKLANGRVIEKTLYNRRTRQDEPALFVALTFERREVLDSSHIKPMNLIGVDRGENIPAVIALTDPEGCPLCNFKDSLGNTTHILRIGEQYKEKQRTIQAFKEVEQRRAGGYSRKYASKAKNLADDMVRNTARDLLYYAVTQDAMLIFENLSRGFGRQGKRTFMAERQYTRMEDWLTAKLAYEGLPSKTYLSKTLAQYTSKTCSNCGFTITSADYDRVLEKLKKTATGWMTTINGKELKVEGQITYYNRYKRQNVVKDLSVELDRLSEESVNNDISSWTKGRSGEALSLLKKRFSHRPVQEKFVCLNCGFETHADEQAALNIARSWLFLRSQEYKKYQTNKTTGNTDKRAFVETWQSFYRKKLKEVWKPAV

SEQ ID NO: 27851 - protein, 978 aa, synthetic construct
  REGION 1..978: note = engineered CasX variant
QEIKRINKIRRRLVKDSNTKKAGKTGPMKTLLVRVMTPDLRERLENLRKKPENIPQPISNTSRANLNKLLTDYTEMKKAILHVYWEEFQKDPVGLMSRVAQPASKKIDQNKLKPEMDEKGNLTTAGFACSQCGQPLFVYKLEQVSEKGKAYTNYFGRCNVAEHEKLILLAQLKPEKDSDEAVTYSLGKFGQRALDFYSIHVTKESTHPVKPLAQIAGNRYASGPVGKALSDACMGTIASFLSKYQDIIIEHQKVVKGNQKRLESLRELAGKENLEYPSVTLPPQPHTKEGVDAYNEVIARVRMWVNLNLWQKLKLSRDDAKPLLRLKGFPSFPLVERQANEVDWWDMVCNVKKLINEKKEDGKVFWQNLAGYKRQEALRPYLSSEEDRKKGKKFARYQLGDLLLHLEKKHGEDWGKVYDEAWERIDKKVEGLSKHIKLEEERRSEDAQSKAALTDWLRAKASFVIEGLKEADKDEFCRCELKLQKWYGDLRGKPFAIEAENSILDISGFSKQYNCAFIWQKDGVKKLNLYLIINYFKGGKLRFKKIKPEAFEANRFYTVINKKSGEIVPMEVNFNFDDPNLIILPLAFGKRQGREFIWNDLLSLETGSLKLANGRVIEKTLYNRRTRQDEPALFVALTFERREVLDSSREKCMNLIGVDRGENIPAVIALTDPEGCPLQNFKDSLGNPTHVLRIGSSIKEKQRTIQAFKEVEQRRAGGYSRKYASKAKNLADDMVRNTARDLLYYAVTQDAMLIFENLSRGFGRQGKRTFMAERQYTRMEDWLTAKLAYEGLPSKTYLSKTLAQYTSKTCSNCGFTITSADYDRVLEKLKKTATGWMTTINGKELKVEGQITYYNRYKRQNVVKDLSVELDRLSEESVNNDISSWTKGRSGEALSLLKKRFSHRPVQEKFVCLNCGFETHADEQAALNIARSWLFLRSQEYKKYQTNKTTGNTDKRAFVETWQSFYRKKLKEVWKPAV

SEQ ID NO: 27852 - protein, 978 aa, synthetic construct
  REGION 1..978: note = engineered CasX variant
QEIKRINKIRRRLVKDSNTKKAGKTGPMKTLLVRVMTPDLRERLENLRKKPENIPQPISNTSRANLNKLLTDYTEMKKAILHVYWEEFQKDPVGLMSRVAQPASKKIDQNKLKPEMDEKGNLTTAGFACSQCGQPLFVYKLEQVSEKGKAYTNYFGRCNVAEHEKLILLAQLKPEKDSDEAVTYSLGKFGQRALDFYSIHVTKESTHPVKPLAQIAGNRYASGPVGKALSDACMGTIASFLSKYQDIIIEHQKVVKGNQKRLESLRELAGKENLEYPSVTLPPQPHTKEGVDAYNEVIARVRMWVNLNLWQKLKLSRDDAKPLLRLKGFPSFPLVERQANEVDWWDMVCNVKKLINEKKEDGKVFWQNLAGYKRQEALRPYLSSEEDRKKGKKFARYQLGDLLLHLEKKHGEDWGKVYDEAWERIDKKVEGLSKHIKLEEERRSEDAQSKAALTDWLRAKASFVIEGLKEADKDEFCRCELKLQKWYGDLRGKPFAIEAENSILDISGFSKQYNCAFIWQKDGVKKLNLYLIINYFKGGKLRFKKIKPEAFEANRFYTVINKKSGEIVPMEVNFNFDDPNLIILPLAFGKRQGREFIWNDLLSLETGSLKLANGRVIEKTLYNRRTRQDEPALFVALTFERREVLDSSNIKPMNLIGVDRGENIPAVIALTDAEGCLLHRFKDSLGNPTHILRIGESYKEKQRTIQAKKEVEQRRAFGYSRKYASKAKNLADDMVRNTARDLLYYAVTQDAMLIFENLSRGFGRQGKRTFMAERQYTRMEDWLTAKLAYEGLPSKTYLSKTLAQYTSKTCSNCGFTITSADYDRVLEKLKKTATGWMTTINGKELKVEGQITYYNRYKRQNVVKDLSVELDRLSEESVNNDISSWTKGRSGEALSLLKKRFSHRPVQEKFVCLNCGFETHADEQAALNIARSWLFLRSQEYKKYQTNKTTGNTDKRAFVETWQSFYRKKLKEVWKPAV

SEQ ID NO: 27853 - protein, 978 aa, synthetic construct
  REGION 1..978: note = engineered CasX variant
QEIKRINKIRRRLVKDSNTKKAGKTGPMKTLLVRVMTPDLRERLENLRKKPENIPQPISNTSRANLNKLLTDYTEMKKAILHVYWEEFQKDPVGLMSRVAQPASKKIDQNKLKPEMDEKGNLTTAGFACSQCGQPLFVYKLEQVSEKGKAYTNYFGRCNVAEHEKLILLAQLKPEKDSDEAVTYSLGKFGQRALDFYSIHVTKESTHPVKPLAQIAGNRYASGPVGKALSDACMGTIASFLSKYQDIIIEHQKVVKGNQKRLESLRELAGKENLEYPSVTLPPQPHTKEGVDAYNEVIARVRMWVNLNLWQKLKLSRDDAKPLLRLKGFPSFPLVERQANEVDWWDMVCNVKKLINEKKEDGKVFWQNLAGYKRQEALRPYLSSEEDRKKGKKFARYQLGDLLLHLEKKHGEDWGKVYDEAWERIDKKVEGLSKHIKLEEERRSEDAQSKAALTDWLRAKASFVIEGLKEADKDEFCRCELKLQKWYGDLRGKPFAIEAENSILDISGFSKQYNCAFIWQKDGVKKLNLYLIINYFKGGKLRFKKIKPEAFEANRFYTVINKKSGEIVPMEVNFNFDDPNLIILPLAFGKRQGREFIWNDLLSLETGSLKLANGRVIEKTLYNRRTRQDEPALFVALTFERREVLDSSNIKPMNLIGVDRGENIPAVIALTDPEGCILSRFKDSKGNPTHILRIGESYKEKFRTIQAKKEVIQRRTGGYSRKYASKAKNLADDMVRNTARDLLYYAVTQDAMLIFENLSRGFGRQGKRTFMAERQYTRMEDWLTAKLAYEGLPSKTYLSKTLAQYTSKTCSNCGFTITSADYDRVLEKLKKTATGWMTTINGKELKVEGQITYYNRYKRQNVVKDLSVELDRLSEESVNNDISSWTKGRSGEALSLLKKRFSHRPVQEKFVCLNCGFETHADEQAALNIARSWLFLRSQEYKKYQTNKTTGNTDKRAFVETWQSFYRKKLKEVWKPAV

SEQ ID NO: 27854 - protein, 978 aa, synthetic construct
  REGION 1..978: note = engineered CasX variant
QEIKRINKIRRRLVKDSNTKKAGKTGPMKTLLVRVMTPDLRERLENLRKKPENIPQPISNTSRANLNKLLTDYTEMKKAILHVYWEEFQKDPVGLMSRVAQPASKKIDQNKLKPEMDEKGNLTTAGFACSQCGQPLFVYKLEQVSEKGKAYTNYFGRCNVAEHEKLILLAQLKPEKDSDEAVTYSLGKFGQRALDFYSIHVTKESTHPVKPLAQIAGNRYASGPVGKALSDACMGTIASFLSKYQDIIIEHQKVVKGNQKRLESLRELAGKENLEYPSVTLPPQPHTKEGVDAYNEVIARVRMWVNLNLWQKLKLSRDDAKPLLRLKGFPSFPLVERQANEVDWWDMVCNVKKLINEKKEDGKVFWQNLAGYKRQEALRPYLSSEEDRKKGKKFARYQLGDLLLHLEKKHGEDWGKVYDEAWERIDKKVEGLSKHIKLEEERRSEDAQSKAALTDWLRAKASFVIEGLKEADKDEFCRCELKLQKWYGDLRGKPFAIEAENSILDISGFSKQYNCAFIWQKDGVKKLNLYLIINYFKGGKLRFKKIKPEAFEANRFYTVINKKSGEIVPMEVNFNFDDPNLIILPLAFGKRQGREFIWNDLLSLETGSLKLANGRVIEKTLYNRRTRQDEPALFVALTFERREVLDSSNIKPMNLIGVDRGENIPAVIALTDPEGCLLHRFKDSLGNPTHILRIGDSYKEKQRTIQAKKEVEQRRAFGYSRKYASKAKNLADDMVRNTARDLLYYAVTQDAMLIFENLSRGFGRQGKRTFMAERQYTRMEDWLTAKLAYEGLPSKTYLSKTLAQYTSKTCSNCGFTITSADYDRVLEKLKKTATGWMTTINGKELKVEGQITYYNRYKRQNVVKDLSVELDRLSEESVNNDISSWTKGRSGEALSLLKKRFSHRPVQEKFVCLNCGFETHADEQAALNIARSWLFLRSQEYKKYQTNKTTGNTDKRAFVETWQSFYRKKLKEVWKPAV

SEQ ID NO: 27855 - protein, 978 aa, synthetic construct
  REGION 1..978: note = engineered CasX variant
QEIKRINKIRRRLVKDSNTKKAGKTGPMKTLLVRVMTPDLRERLENLRKKPENIPQPISNTSRANLNKLLTDYTEMKKAILHVYWEEFQKDPVGLMSRVAQPASKKIDQNKLKPEMDEKGNLTTAGFACSQCGQPLFVYKLEQVSEKGKAYTNYFGRCNVAEHEKLILLAQLKPEKDSDEAVTYSLGKFGQRALDFYSIHVTKESTHPVKPLAQIAGNRYASGPVGKALSDACMGTIASFLSKYQDIIIEHQKVVKGNQKRLESLRELAGKENLEYPSVTLPPQPHTKEGVDAYNEVIARVRMWVNLNLWQKLKLSRDDAKPLLRLKGFPSFPLVERQANEVDWWDMVCNVKKLINEKKEDGKVFWQNLAGYKRQEALRPYLSSEEDRKKGKKFARYQLGDLLLHLEKKHGEDWGKVYDEAWERIDKKVEGLSKHIKLEEERRSEDAQSKAALTDWLRAKASFVIEGLKEADKDEFCRCELKLQKWYGDLRGKPFAIEAENSILDISGFSKQYNCAFIWQKDGVKKLNLYLIINYFKGGKLRFKKIKPEAFEANRFYTVINKKSGEIVPMEVNFNFDDPNLIILPLAFGKRQGREFIWNDLLSLETGSLKLANGRVIEKTLYNRRTRQDEPALFVALTFERREVLDSSNIAPMNFIGVDRGENIPAVIALCDPEGCPLSRFKDSLGNPTHILRIGESYKEKQRTIQAKKEVEQRRAFGYSRKYASKAKNLADDMVRNTARDLLYYAVTQDAMLIFENLSRGFGRQGKRTFMAERQYTRMEDWLTAKLAYEGLPSKTYLSKTLAQYTSKTCSNCGFTITSADYDRVLEKLKKTATGWMTTINGKELKVEGQITYYNRYKRQNVVKDLSVELDRLSEESVNNDISSWTKGRSGEALSLLKKRFSHRPVQEKFVCLNCGFETHADEQAALNIARSWLFLRSQEYKKYQTNKTTGNTDKRAFVETWQSFYRKKLKEVWKPAV

SEQ ID NO: 27856 - protein, 978 aa, synthetic construct
  REGION 1..978: note = engineered CasX variant
QEIKRINKIRRRLVKDSNTKKAGKTGPMKTLLVRVMTPDLRERLENLRKKPENIPQPISNTSRANLNKLLTDYTEMKKAILHVYWEEFQKDPVGLMSRVAQPASKKIDQNKLKPEMDEKGNLTTAGFACSQCGQPLFVYKLEQVSEKGKAYTNYFGRCNVAEHEKLILLAQLKPEKDSDEAVTYSLGKFGQRALDFYSIHVTKESTHPVKPLAQIAGNRYASGPVGKALSDACMGTIASFLSKYQDIIIEHQKVVKGNQKRLESLRELAGKENLEYPSVTLPPQPHTKEGVDAYNEVIARVRMWVNLNLWQKLKLSRDDAKPLLRLKGFPSFPLVERQANEVDWWDMVCNVKKLINEKKEDGKVFWQNLAGYKRQEALRPYLSSEEDRKKGKKFARYQLGDLLLHLEKKHGEDWGKVYDEAWERIDKKVEGLSKHIKLEEERRSEDAQSKAALTDWLRAKASFVIEGLKEADKDEFCRCELKLQKWYGDLRGKPFAIEAENSILDISGFSKQYNCAFIWQKDGVKKLNLYLIINYFKGGKLRFKKIKPEAFEANRFYTVINKKSGEIVPMEVNFNFDDPNLIILPLAFGKRQGREFIWNDLLSLETGSLKLANGRVIEKTLYNRRTRQDEPALFVALTFERREVLDSSNIKPMNLIGVDRGENIPAVIALTDPEGCPLAEFKDSAGNPTHILRILESYKEKQRTIQAKKEVEQRRAGGYSRKYASKAKNLADDMVRNTARDLLYYAVTQDAMLIFENLSRGFGRQGKRTFMAERQYTRMEDWLTAKLAYEGLPSKTYLSKTLAQYTSKTCSNCGFTITSADYDRVLEKLKKTATGWMTTINGKELKVEGQITYYNRYKRQNVVKDLSVELDRLSEESVNNDISSWTKGRSGEALSLLKKRFSHRPVQEKFVCLNCGFETHADEQAALNIARSWLFLRSQEYKKYQTNKTTGNTDKRAFVETWQSFYRKKLKEVWKPAV

SEQ ID NO: 27857 - protein, 979 aa, synthetic construct; identical to SEQ ID NO: 497
  REGION 1..979: note = engineered CasX variant

SEQ ID NO: 27858 - protein, 979 aa, synthetic construct
  REGION 1..979: note = engineered CasX variant
QEIKRINKIRRRLVKDSNTKKAGKTRGPMKTLLVRVMTPDLRERLENLRKKPENIPQPISNTSRANLNKLLTDYTEMKKAILHVYWEEFQKDPVGLMSRVAQPASKKIDQNKLKPEMDEKGNLTTAGFACSQCGQPLFVYKLEQVSEKGKAYTNYFGRCNVAEHEKLILLDQLKPEKDSDEAVTYSLGKFGQRALDFYSIHVTKESTHPVKPLAQIAGNRYASGPVGKALSDACMGTIASFLSKYQDIIIEHQKVVKGNQKRLESLRELAGKENLEYPSVTLPPQPHTKEGVDAYNEVIARVRMWVNLNLWQKLKLSRDDAKPLLRLKGFPSFPLVERQANEVDWWDMVCNVKKLINEKKEDGKVFWQNLAGYKRQEALRPYLSSEEDRKKGKKFARYQLGDLLLHLEKKHGEDWGKVYDEAWERIDKKVEGLSKHIKLEEERRSEDAQSKAALTDWLRAKASFVIEGLKEADKDEFCRCELKLQKWYGDLRGKPFAIEAENSILDISGFSKQYNCAFIWQKDGVKKLNLYLIINYFKGGKLRFKKIKPEAFEANRFYTVINKKSGEIVPMEVNFNFDDPNLIILPLAFGKRQGREFIWNDLLSLETGSLKLANGRVIEKTLYNRRTRQDEPALFVALTFERREVLDSSNIKPMNLIGVDRGENIPAVIALTDPEGCPLSRFKDSLGNPTHILRIGESYKEKQRTIQAKKEVEQRRAGGYSRKYASKAKNLADDMVRNTARDLLYYAVTQDAMLIFENLSRGFGRQGKRTFMAERQYTRMEDWLTAKLAYEGLPSKTYLSKTLAQYTSKTCSNCGFTITSADYDRVLEKLKKTATGWMTTINGKELKVEGQITYYNRYKRQNVVKDLSVELDRLSEESVNNDISSWTKGRSGEALSLLKKRFSHRPVQEKFVCLNCGFETHADEQAALNIARSWLFLRSQEYKKYQTNKTTGNTDKRAFVETWQSFYRKKLKEVWKPAV

SEQ ID NO: 27859 - protein, 979 aa, synthetic construct
  REGION 1..979: note = engineered CasX variant
QEGKRINKIRRRLVKDSNTKKAGKTRGPMKTLLVRVMTPDLRERLENLRKKPENIPQPISNTSRANLNKLLTDYTEMKKAILHVYWEEFQKDPVGLMSRVAQPASKKIDQNKLKPEMDEKGNLTTAGFACSQCGQPLFVYKLEQVSEKGKAYTNYFGRCNVAEHEKLILLAQLKPEKDSDEAVTYSLGKFGQRALDFYSIHVTKESTHPVKPLAQIAGNRYASGPVGKALSDACMGTIASFLSKYQDIIIEHQKVVKGNQKRLESLRELAGKENLEYPSVTLPPQPHTKEGVDAYNEVIARVRMWVNLNLWQKLKLSRDDAKPLLRLKGFPSFPLVERQANEVDWWDMVCNVKKLINEKKEDGKVFWQNLAGYKRQEALRPYLSSEEDRKKGKKFARYQLGDLLLHLEKKHGEDWGKVYDEAWERIDKKVEGLSKHIKLEEERRSEDAQSKAALTDWLRAKASFVIEGLKEADKDEFCRCELKLQKWYGDLRGKPFAIEAENSILDISGFSKQYNCAFIWQKDGVKKLNLYLIINYFKGGKLRFKKIKPEAFEANRFYTVINKKSGEIVPMEVNFNFDDPNLIILPLAFGKRQGREFIWNDLLSLETGSLKLANGRVIEKTLYNRRTRQDEPALFVALTFERREVLDSSNIKPMNLIGVDRGENIPAVIALTDPEGCPLSRFKDSLGNPTHILRIGESYKEKQRTIQAKKEVEQRRAGGYSRKYASKAKNLADDMVRNTARDLLYYAVTQDAMLIFENLSRGFGRQGKRTFMAERQYTRMEDWLTAKLAYEGLPSKTYLSKTLAQYTSKTCSNCGFTITSADYDRVLEKLKKTATGWMTTINGKELKVEGQITYYNRYKRQNVVKDLSVELDRLSEESVNNDISSWTKGRSGEALSLLKKRFSHRPVQEKFVCLNCGFETHADEQAALNIARSWLFLRSQEYKKYQTNKTTGNTDKRAFVETWQSFYRKKLKEVWKPAV

SEQ ID NO: 27860 - protein, 980 aa, synthetic construct
  REGION 1..980: note = engineered CasX variant
QEIGKRINKIRRRLVKDSNTKKAGKTRGPMKTLLVRVMTPDLRERLENLRKKPENIPQPISNTSRANLNKLLTDYTEMKKAILHVYWEEFQKDPVGLMSRVAQPASKKIDQNKLKPEMDEKGNLTTAGFACSQCGQPLFVYKLEQVSEKGKAYTNYFGRCNVAEHEKLILLAQLKPEKDSDEAVTYSLGKFGQRALDFYSIHVTKESTHPVKPLAQIAGNRYASGPVGKALSDACMGTIASFLSKYQDIIIEHQKVVKGNQKRLESLRELAGKENLEYPSVTLPPQPHTKEGVDAYNEVIARVRMWVNLNLWQKLKLSRDDAKPLLRLKGFPSFPLVERQANEVDWWDMVCNVKKLINEKKEDGKVFWQNLAGYKRQEALRPYLSSEEDRKKGKKFARYQLGDLLLHLEKKHGEDWGKVYDEAWERIDKKVEGLSKHIKLEEERRSEDAQSKAALTDWLRAKASFVIEGLKEADKDEFCRCELKLQKWYGDLRGKPFAIEAENSILDISGFSKQYNCAFIWQKDGVKKLNLYLIINYFKGGKLRFKKIKPEAFEANRFYTVINKKSGEIVPMEVNFNFDDPNLIILPLAFGKRQGREFIWNDLLSLETGSLKLANGRVIEKTLYNRRTRQDEPALFVALTFERREVLDSSNIKPMNLIGVDRGENIPAVIALTDPEGCPLSRFKDSLGNPTHILRIGESYKEKQRTIQAKKEVEQRRAGGYSRKYASKAKNLADDMVRNTARDLLYYAVTQDAMLIFENLSRGFGRQGKRTFMAERQYTRMEDWLTAKLAYEGLPSKTYLSKTLAQYTSKTCSNCGFTITSADYDRVLEKLKKTATGWMTTINGKELKVEGQITYYNRYKRQNVVKDLSVELDRLSEESVNNDISSWTKGRSGEALSLLKKRFSHRPVQEKFVCLNCGFETHADEQAALNIARSWLFLRSQEYKKYQTNKTTGNTDKRAFVETWQSFYRKKLKEVWKPAV

SEQ ID NO: 27861 - protein, 979 aa, synthetic construct
  REGION 1..979: note = engineered CasX variant
QEIGRINKIRRRLVKDSNTKKAGKTRGPMKTLLVRVMTPDLRERLENLRKKPENIPQPISNTSRANLNKLLTDYTEMKKAILHVYWEEFQKDPVGLMSRVAQPASKKIDQNKLKPEMDEKGNLTTAGFACSQCGQPLFVYKLEQVSEKGKAYTNYFGRCNVAEHEKLILLAQLKPEKDSDEAVTYSLGKFGQRALDFYSIHVTKESTHPVKPLAQIAGNRYASGPVGKALSDACMGTIASFLSKYQDIIIEHQKVVKGNQKRLESLRELAGKENLEYPSVTLPPQPHTKEGVDAYNEVIARVRMWVNLNLWQKLKLSRDDAKPLLRLKGFPSFPLVERQANEVDWWDMVCNVKKLINEKKEDGKVFWQNLAGYKRQEALRPYLSSEEDRKKGKKFARYQLGDLLLHLEKKHGEDWGKVYDEAWERIDKKVEGLSKHIKLEEERRSEDAQSKAALTDWLRAKASFVIEGLKEADKDEFCRCELKLQKWYGDLRGKPFAIEAENSILDISGFSKQYNCAFIWQKDGVKKLNLYLIINYFKGGKLRFKKIKPEAFEANRFYTVINKKSGEIVPMEVNFNFDDPNLIILPLAFGKRQGREFIWNDLLSLETGSLKLANGRVIEKTLYNRRTRQDEPALFVALTFERREVLDSSNIKPMNLIGVDRGENIPAVIALTDPEGCPLSRFKDSLGNPTHILRIGESYKEKQRTIQAKKEVEQRRAGGYSRKYASKAKNLADDMVRNTARDLLYYAVTQDAMLIFENLSRGFGRQGKRTFMAERQYTRMEDWLTAKLAYEGLPSKTYLSKTLAQYTSKTCSNCGFTITSADYDRVLEKLKKTATGWMTTINGKELKVEGQITYYNRYKRQNVVKDLSVELDRLSEESVNNDISSWTKGRSGEALSLLKKRFSHRPVQEKFVCLNCGFETHADEQAALNIARSWLFLRSQEYKKYQTNKTTGNTDKRAFVETWQSFYRKKLKEVWKPAV

SEQ ID NO: 27862 - protein, 980 aa, synthetic construct
  REGION 1..980: note = engineered CasX variant
QEIKGRINKIRRRLVKDSNTKKAGKTRGPMKTLLVRVMTPDLRERLENLRKKPENIPQPISNTSRANLNKLLTDYTEMKKAILHVYWEEFQKDPVGLMSRVAQPASKKIDQNKLKPEMDEKGNLTTAGFACSQCGQPLFVYKLEQVSEKGKAYTNYFGRCNVAEHEKLILLAQLKPEKDSDEAVTYSLGKFGQRALDFYSIHVTKESTHPVKPLAQIAGNRYASGPVGKALSDACMGTIASFLSKYQDIIIEHQKVVKGNQKRLESLRELAGKENLEYPSVTLPPQPHTKEGVDAYNEVIARVRMWVNLNLWQKLKLSRDDAKPLLRLKGFPSFPLVERQANEVDWWDMVCNVKKLINEKKEDGKVFWQNLAGYKRQEALRPYLSSEEDRKKGKKFARYQLGDLLLHLEKKHGEDWGKVYDEAWERIDKKVEGLSKHIKLEEERRSEDAQSKAALTDWLRAKASFVIEGLKEADKDEFCRCELKLQKWYGDLRGKPFAIEAENSILDISGFSKQYNCAFIWQKDGVKKLNLYLIINYFKGGKLRFKKIKPEAFEANRFYTVINKKSGEIVPMEVNFNFDDPNLIILPLAFGKRQGREFIWNDLLSLETGSLKLANGRVIEKTLYNRRTRQDEPALFVALTFERREVLDSSNIKPMNLIGVDRGENIPAVIALTDPEGCPLSRFKDSLGNPTHILRIGESYKEKQRTIQAKKEVEQRRAGGYSRKYASKAKNLADDMVRNTARDLLYYAVTQDAMLIFENLSRGFGRQGKRTFMAERQYTRMEDWLTAKLAYEGLPSKTYLSKTLAQYTSKTCSNCGFTITSADYDRVLEKLKKTATGWMTTINGKELKVEGQITYYNRYKRQNVVKDLSVELDRLSEESVNNDISSWTKGRSGEALSLLKKRFSHRPVQEKFVCLNCGFETHADEQAALNIARSWLFLRSQEYKKYQTNKTTGNTDKRAFVETWQSFYRKKLKEVWKPAV

SEQ ID NO: 27863 - protein, 979 aa, synthetic construct
  REGION 1..979: note = engineered CasX variant
QEIKRANKIRRRLVKDSNTKKAGKTRGPMKTLLVRVMTPDLRERLENLRKKPENIPQPISNTSRANLNKLLTDYTEMKKAILHVYWEEFQKDPVGLMSRVAQPASKKIDQNKLKPEMDEKGNLTTAGFACSQCGQPLFVYKLEQVSEKGKAYTNYFGRCNVAEHEKLILLAQLKPEKDSDEAVTYSLGKFGQRALDFYSIHVTKESTHPVKPLAQIAGNRYASGPVGKALSDACMGTIASFLSKYQDIIIEHQKVVKGNQKRLESLRELAGKENLEYPSVTLPPQPHTKEGVDAYNEVIARVRMWVNLNLWQKLKLSRDDAKPLLRLKGFPSFPLVERQANEVDWWDMVCNVKKLINEKKEDGKVFWQNLAGYKRQEALRPYLSSEEDRKKGKKFARYQLGDLLLHLEKKHGEDWGKVYDEAWERIDKKVEGLSKHIKLEEERRSEDAQSKAALTDWLRAKASFVIEGLKEADKDEFCRCELKLQKWYGDLRGKPFAIEAENSILDISGFSKQYNCAFIWQKDGVKKLNLYLIINYFKGGKLRFKKIKPEAFEANRFYTVINKKSGEIVPMEVNFNFDDPNLIILPLAFGKRQGREFIWNDLLSLETGSLKLANGRVIEKTLYNRRTRQDEPALFVALTFERREVLDSSNIKPMNLIGVDRGENIPAVIALTDPEGCPLSRFKDSLGNPTHILRIGESYKEKQRTIQAKKEVEQRRAGGYSRKYASKAKNLADDMVRNTARDLLYYAVTQDAMLIFENLSRGFGRQGKRTFMAERQYTRMEDWLTAKLAYEGLPSKTYLSKTLAQYTSKTCSNCGFTITSADYDRVLEKLKKTATGWMTTINGKELKVEGQITYYNRYKRQNVVKDLSVELDRLSEESVNNDISSWTKGRSGEALSLLKKRFSHRPVQEKFVCLNCGFETHADEQAALNIARSWLFLRSQEYKKYQTNKTTGNTDKRAFVETWQSFYRKKLKEVWKPAV

SEQ ID NO: 27864 - protein, 979 aa, synthetic construct
  REGION 1..979: note = engineered CasX variant
QEIKRISKIRRRLVKDSNTKKAGKTRGPMKTLLVRVMTPDLRERLENLRKKPENIPQPISNTSRANLNKLLTDYTEMKKAILHVYWEEFQKDPVGLMSRVAQPASKKIDQNKLKPEMDEKGNLTTAGFACSQCGQPLFVYKLEQVSEKGKAYTNYFGRCNVAEHEKLILLAQLKPEKDSDEAVTYSLGKFGQRALDFYSIHVTKESTHPVKPLAQIAGNRYASGPVGKALSDACMGTIASFLSKYQDIIIEHQKVVKGNQKRLESLRELAGKENLEYPSVTLPPQPHTKEGVDAYNEVIARVRMWVNLNLWQKLKLSRDDAKPLLRLKGFPSFPLVERQANEVDWWDMVCNVKKLINEKKEDGKVFWQNLAGYKRQEALRPYLSSEEDRKKGKKFARYQLGDLLLHLEKKHGEDWGKVYDEAWERIDKKVEGLSKHIKLEEERRSEDAQSKAALTDWLRAKASFVIEGLKEADKDEFCRCELKLQKWYGDLRGKPFAIEAENSILDISGFSKQYNCAFIWQKDGVKKLNLYLIINYFKGGKLRFKKIKPEAFEANRFYTVINKKSGEIVPMEVNFNFDDPNLIILPLAFGKRQGREFIWNDLLSLETGSLKLANGRVIEKTLYNRRTRQDEPALFVALTFERREVLDSSNIKPMNLIGVDRGENIPAVIALTDPEGCPLSRFKDSLGNPTHILRIGESYKEKQRTIQAKKEVEQRRAGGYSRKYASKAKNLADDMVRNTARDLLYYAVTQDAMLIFENLSRGFGRQGKRTFMAERQYTRMEDWLTAKLAYEGLPSKTYLSKTLAQYTSKTCSNCGFTITSADYDRVLEKLKKTATGWMTTINGKELKVEGQITYYNRYKRQNVVKDLSVELDRLSEESVNNDISSWTKGRSGEALSLLKKRFSHRPVQEKFVCLNCGFETHADEQAALNIARSWLFLRSQEYKKYQTNKTTGNTDKRAFVETWQSFYRKKLKEVWKPAV

SEQ ID NO: 27865 - protein, 979 aa, synthetic construct
  REGION 1..979: note = engineered CasX variant
QEIKRINGIRRRLVKDSNTKKAGKTRGPMKTLLVRVMTPDLRERLENLRKKPENIPQPISNTSRANLNKLLTDYTEMKKAILHVYWEEFQKDPVGLMSRVAQPASKKIDQNKLKPEMDEKGNLTTAGFACSQCGQPLFVYKLEQVSEKGKAYTNYFGRCNVAEHEKLILLAQLKPEKDSDEAVTYSLGKFGQRALDFYSIHVTKESTHPVKPLAQIAGNRYASGPVGKALSDACMGTIASFLSKYQDIIIEHQKVVKGNQKRLESLRELAGKENLEYPSVTLPPQPHTKEGVDAYNEVIARVRMWVNLNLWQKLKLSRDDAKPLLRLKGFPSFPLVERQANEVDWWDMVCNVKKLINEKKEDGKVFWQNLAGYKRQEALRPYLSSEEDRKKGKKFARYQLGDLLLHLEKKHGEDWGKVYDEAWERIDKKVEGLSKHIKLEEERRSEDAQSKAALTDWLRAKASFVIEGLKEADKDEFCRCELKLQKWYGDLRGKPFAIEAENSILDISGFSKQYNCAFIWQKDGVKKLNLYLIINYFKGGKLRFKKIKPEAFEANRFYTVINKKSGEIVPMEVNFNFDDPNLIILPLAFGKRQGREFIWNDLLSLETGSLKLANGRVIEKTLYNRRTRQDEPALFVALTFERREVLDSSNIKPMNLIGVDRGENIPAVIALTDPEGCPLSRFKDSLGNPTHILRIGESYKEKQRTIQAKKEVEQRRAGGYSRKYASKAKNLADDMVRNTARDLLYYAVTQDAMLIFENLSRGFGRQGKRTFMAERQYTRMEDWLTAKLAYEGLPSKTYLSKTLAQYTSKTCSNCGFTITSADYDRVLEKLKKTATGWMTTINGKELKVEGQITYYNRYKRQNVVKDLSVELDRLSEESVNNDISSWTKGRSGEALSLLKKRFSHRPVQEKFVCLNCGFETHADEQAALNIARSWLFLRSQEYKKYQTNKTTGNTDKRAFVETWQSFYRKKLKEVWKPAV

SEQ ID NO: 27866 - protein, 979 aa, synthetic construct
  REGION 1..979: note = engineered CasX variant
QEIKRINKIRRRLVKDSNTKKAGKTRGPMKTLLVPVMTPDLRERLENLRKKPENIPQPISNTSRANLNKLLTDYTEMKKAILHVYWEEFQKDPVGLMSRVAQPASKKIDQNKLKPEMDEKGNLTTAGFACSQCGQPLFVYKLEQVSEKGKAYTNYFGRCNVAEHEKLILLAQLKPEKDSDEAVTYSLGKFGQRALDFYSIHVTKESTHPVKPLAQIAGNRYASGPVGKALSDACMGTIASFLSKYQDIIIEHQKVVKGNQKRLESLRELAGKENLEYPSVTLPPQPHTKEGVDAYNEVIARVRMWVNLNLWQKLKLSRDDAKPLLRLKGFPSFPLVERQANEVDWWDMVCNVKKLINEKKEDGKVFWQNLAGYKRQEALRPYLSSEEDRKKGKKFARYQLGDLLLHLEKKHGEDWGKVYDEAWERIDKKVEGLSKHIKLEEERRSEDAQSKAALTDWLRAKASFVIEGLKEADKDEFCRCELKLQKWYGDLRGKPFAIEAENSILDISGFSKQYNCAFIWQKDGVKKLNLYLIINYFKGGKLRFKKIKPEAFEANRFYTVINKKSGEIVPMEVNFNFDDPNLIILPLAFGKRQGREFIWNDLLSLETGSLKLANGRVIEKTLYNRRTRQDEPALFVALTFERREVLDSSNIKPMNLIGVDRGENIPAVIALTDPEGCPLSRFKDSLGNPTHILRIGESYKEKQRTIQAKKEVEQRRAGGYSRKYASKAKNLADDMVRNTARDLLYYAVTQDAMLIFENLSRGFGRQGKRTFMAERQYTRMEDWLTAKLAYEGLPSKTYLSKTLAQYTSKTCSNCGFTITSADYDRVLEKLKKTATGWMTTINGKELKVEGQITYYNRYKRQNVVKDLSVELDRLSEESVNNDISSWTKGRSGEALSLLKKRFSHRPVQEKFVCLNCGFETHADEQAALNIARSWLFLRSQEYKKYQTNKTTGNTDKRAFVETWQSFYRKKLKEVWKPAV

SEQ ID NO: 27867 - protein, 979 aa, synthetic construct
  REGION 1..979: note = engineered CasX variant
QEIKRINKIRRRLVKDSNTKKAGKTRGPMKTLLVRVMTPDLRERLENLRKKPPNIPQPISNTSRANLNKLLTDYTEMKKAILHVYWEEFQKDPVGLMSRVAQPASKKIDQNKLKPEMDEKGNLTTAGFACSQCGQPLFVYKLEQVSEKGKAYTNYFGRCNVAEHEKLILLAQLKPEKDSDEAVTYSLGKFGQRALDFYSIHVTKESTHPVKPLAQIAGNRYASGPVGKALSDACMGTIASFLSKYQDIIIEHQKVVKGNQKRLESLRELAGKENLEYPSVTLPPQPHTKEGVDAYNEVIARVRMWVNLNLWQKLKLSRDDAKPLLRLKGFPSFPLVERQANEVDWWDMVCNVKKLINEKKEDGKVFWQNLAGYKRQEALRPYLSSEEDRKKGKKFARYQLGDLLLHLEKKHGEDWGKVYDEAWERIDKKVEGLSKHIKLEEERRSEDAQSKAALTDWLRAKASFVIEGLKEADKDEFCRCELKLQKWYGDLRGKPFAIEAENSILDISGFSKQYNCAFIWQKDGVKKLNLYLIINYFKGGKLRFKKIKPEAFEANRFYTVINKKSGEIVPMEVNFNFDDPNLIILPLAFGKRQGREFIWNDLLSLETGSLKLANGRVIEKTLYNRRTRQDEPALFVALTFERREVLDSSNIKPMNLIGVDRGENIPAVIALTDPEGCPLSRFKDSLGNPTHILRIGESYKEKQRTIQAKKEVEQRRAGGYSRKYASKAKNLADDMVRNTARDLLYYAVTQDAMLIFENLSRGFGRQGKRTFMAERQYTRMEDWLTAKLAYEGLPSKTYLSKTLAQYTSKTCSNCGFTITSADYDRVLEKLKKTATGWMTTINGKELKVEGQITYYNRYKRQNVVKDLSVELDRLSEESVNNDISSWTKGRSGEALSLLKKRFSHRPVQEKFVCLNCGFETHADEQAALNIARSWLFLRSQEYKKYQTNKTTGNTDKRAFVETWQSFYRKKLKEVWKPAV

SEQ ID NO: 27868 - protein, 979 aa, synthetic construct
  REGION 1..979: note = engineered CasX variant
QEIKRINKIRRRLVKDSNTKKAGKTRGPMKTLLVRVMTPDLRERLENLRKKPENIPQPISNTSQANLNKLLTDYTEMKKAILHVYWEEFQKDPVGLMSRVAQPASKKIDQNKLKPEMDEKGNLTTAGFACSQCGQPLFVYKLEQVSEKGKAYTNYFGRCNVAEHEKLILLAQLKPEKDSDEAVTYSLGKFGQRALDFYSIHVTKESTHPVKPLAQIAGNRYASGPVGKALSDACMGTIASFLSKYQDIIIEHQKVVKGNQKRLESLRELAGKENLEYPSVTLPPQPHTKEGVDAYNEVIARVRMWVNLNLWQKLKLSRDDAKPLLRLKGFPSFPLVERQANEVDWWDMVCNVKKLINEKKEDGKVFWQNLAGYKRQEALRPYLSSEEDRKKGKKFARYQLGDLLLHLEKKHGEDWGKVYDEAWERIDKKVEGLSKHIKLEEERRSEDAQSKAALTDWLRAKASFVIEGLKEADKDEFCRCELKLQKWYGDLRGKPFAIEAENSILDISGFSKQYNCAFIWQKDGVKKLNLYLIINYFKGGKLRFKKIKPEAFEANRFYTVINKKSGEIVPMEVNFNFDDPNLIILPLAFGKRQGREFIWNDLLSLETGSLKLANGRVIEKTLYNRRTRQDEPALFVALTFERREVLDSSNIKPMNLIGVDRGENIPAVIALTDPEGCPLSRFKDSLGNPTHILRIGESYKEKQRTIQAKKEVEQRRAGGYSRKYASKAKNLADDMVRNTARDLLYYAVTQDAMLIFENLSRGFGRQGKRTFMAERQYTRMEDWLTAKLAYEGLPSKTYLSKTLAQYTSKTCSNCGFTITSADYDRVLEKLKKTATGWMTTINGKELKVEGQITYYNRYKRQNVVKDLSVELDRLSEESVNNDISSWTKGRSGEALSLLKKRFSHRPVQEKFVCLNCGFETHADEQAALNIARSWLFLRSQEYKKYQTNKTTGNTDKRAFVETWQSFYRKKLKEVWKPAV

SEQ ID NO: 27869 - protein, 979 aa, synthetic construct
  REGION 1..979: note = engineered CasX variant
QEIKRINKIRRRLVKDSNTKKAGKTRGPMKTLLVRVMTPDLRERLENLRKKPENIPQPISNTSRANLNKLLTDYTEMKKAILHVYDEEFQKDPVGLMSRVAQPASKKIDQNKLKPEMDEKGNLTTAGFACSQCGQPLFVYKLEQVSEKGKAYTNYFGRCNVAEHEKLILLAQLKPEKDSDEAVTYSLGKFGQRALDFYSIHVTKESTHPVKPLAQIAGNRYASGPVGKALSDACMGTIASFLSKYQDIIIEHQKVVKGNQKRLESLRELAGKENLEYPSVTLPPQPHTKEGVDAYNEVIARVRMWVNLNLWQKLKLSRDDAKPLLRLKGFPSFPLVERQANEVDWWDMVCNVKKLINEKKEDGKVFWQNLAGYKRQEALRPYLSSEEDRKKGKKFARYQLGDLLLHLEKKHGEDWGKVYDEAWERIDKKVEGLSKHIKLEEERRSEDAQSKAALTDWLRAKASFVIEGLKEADKDEFCRCELKLQKWYGDLRGKPFAIEAENSILDISGFSKQYNCAFIWQKDGVKKLNLYLIINYFKGGKLRFKKIKPEAFEANRFYTVINKKSGEIVPMEVNFNFDDPNLIILPLAFGKRQGREFIWNDLLSLETGSLKLANGRVIEKTLYNRRTRQDEPALFVALTFERREVLDSSNIKPMNLIGVDRGENIPAVIALTDPEGCPLSRFKDSLGNPTHILRIGESYKEKQRTIQAKKEVEQRRAGGYSRKYASKAKNLADDMVRNTARDLLYYAVTQDAMLIFENLSRGFGRQGKRTFMAERQYTRMEDWLTAKLAYEGLPSKTYLSKTLAQYTSKTCSNCGFTITSADYDRVLEKLKKTATGWMTTINGKELKVEGQITYYNRYKRQNVVKDLSVELDRLSEESVNNDISSWTKGRSGEALSLLKKRFSHRPVQEKFVCLNCGFETHADEQAALNIARSWLFLRSQEYKKYQTNKTTGNTDKRAFVETWQSFYRKKLKEVWKPAV

SEQ ID NO: 27870 - protein, 979 aa, synthetic construct
  REGION 1..979: note = engineered CasX variant
QEIKRINKIRRRLVKDSNTKKAGKTRGPMKTLLVRVMTPDLRERLENLRKKPENIPQPISNTSRANLNKLLTDYTEMKKAILHVYWEEFQKDPVGLMSRVAQPASKKIDQNKLKPEMDEKGNLTTAGFACSQCGQPLFVYKLEQVSEKGKAYTNYFGRCNVAEHEKLIKLAQLKPEKDSDEAVTYSLGKFGQRALDFYSIHVTKESTHPVKPLAQIAGNRYASGPVGKALSDACMGTIASFLSKYQDIIIEHQKVVKGNQKRLESLRELAGKENLEYPSVTLPPQPHTKEGVDAYNEVIARVRMWVNLNLWQKLKLSRDDAKPLLRLKGFPSFPLVERQANEVDWWDMVCNVKKLINEKKEDGKVFWQNLAGYKRQEALRPYLSSEEDRKKGKKFARYQLGDLLLHLEKKHGEDWGKVYDEAWERIDKKVEGLSKHIKLEEERRSEDAQSKAALTDWLRAKASFVIEGLKEADKDEFCRCELKLQKWYGDLRGKPFAIEAENSILDISGFSKQYNCAFIWQKDGVKKLNLYLIINYFKGGKLRFKKIKPEAFEANRFYTVINKKSGEIVPMEVNFNFDDPNLIILPLAFGKRQGREFIWNDLLSLETGSLKLANGRVIEKTLYNRRTRQDEPALFVALTFERREVLDSSNIKPMNLIGVDRGENIPAVIALTDPEGCPLSRFKDSLGNPTHILRIGESYKEKQRTIQAKKEVEQRRAGGYSRKYASKAKNLADDMVRNTARDLLYYAVTQDAMLIFENLSRGFGRQGKRTFMAERQYTRMEDWLTAKLAYEGLPSKTYLSKTLAQYTSKTCSNCGFTITSADYDRVLEKLKKTATGWMTTINGKELKVEGQITYYNRYKRQNVVKDLSVELDRLSEESVNNDISSWTKGRSGEALSLLKKRFSHRPVQEKFVCLNCGFETHADEQAALNIARSWLFLRSQEYKKYQTNKTTGNTDKRAFVETWQSFYRKKLKEVWKPAV

SEQ ID NO: 27871 - protein, 979 aa, synthetic construct
  REGION 1..979: note = engineered CasX variant
QEIKRINKIRRRLVKDSNTKKAGKTRGPMKTLLVRVMTPDLRERLENLRKKPENIPQPISNTSRANLNKLLTDYTEMKKAILHVYWEEFQKDPVGLMSRVAQPASKKIDQNKLKPEMDEKGNLTTAGFACSQCGQPLFVYKLEQVSEKGKAYTNYFGRCNVAEHEKLILLYQLKPEKDSDEAVTYSLGKFGQRALDFYSIHVTKESTHPVKPLAQIAGNRYASGPVGKALSDACMGTIASFLSKYQDIIIEHQKVVKGNQKRLESLRELAGKENLEYPSVTLPPQPHTKEGVDAYNEVIARVRMWVNLNLWQKLKLSRDDAKPLLRLKGFPSFPLVERQANEVDWWDMVCNVKKLINEKKEDGKVFWQNLAGYKRQEALRPYLSSEEDRKKGKKFARYQLGDLLLHLEKKHGEDWGKVYDEAWERIDKKVEGLSKHIKLEEERRSEDAQSKAALTDWLRAKASFVIEGLKEADKDEFCRCELKLQKWYGDLRGKPFAIEAENSILDISGFSKQYNCAFIWQKDGVKKLNLYLIINYFKGGKLRFKKIKPEAFEANRFYTVINKKSGEIVPMEVNFNFDDPNLIILPLAFGKRQGREFIWNDLLSLETGSLKLANGRVIEKTLYNRRTRQDEPALFVALTFERREVLDSSNIKPMNLIGVDRGENIPAVIALTDPEGCPLSRFKDSLGNPTHILRIGESYKEKQRTIQAKKEVEQRRAGGYSRKYASKAKNLADDMVRNTARDLLYYAVTQDAMLIFENLSRGFGRQGKRTFMAERQYTRMEDWLTAKLAYEGLPSKTYLSKTLAQYTSKTCSNCGFTITSADYDRVLEKLKKTATGWMTTINGKELKVEGQITYYNRYKRQNVVKDLSVELDRLSEESVNNDISSWTKGRSGEALSLLKKRFSHRPVQEKFVCLNCGFETHADEQAALNIARSWLFLRSQEYKKYQTNKTTGNTDKRAFVETWQSFYRKKLKEVWKPAV

SEQ ID NO: 27872 - protein, 979 aa, synthetic construct
  REGION 1..979: note = engineered CasX variant
QEIKRINKIRRRLVKDSNTKKAGKTRGPMKTLLVRVMTPDLRERLENLRKKPENIPQPISNTSRANLNKLLTDYTEMKKAILHVYWEEFQKDPVGLMSRVAQPASKKIDQNKLKPEMDEKGNLTTAGFACSQCGQPLFVYKLEQVSEKGKAYTNYFGRCNVAEHEKLILLSQLKPEKDSDEAVTYSLGKFGQRALDFYSIHVTKESTHPVKPLAQIAGNRYASGPVGKALSDACMGTIASFLSKYQDIIIEHQKVVKGNQKRLESLRELAGKENLEYPSVTLPPQPHTKEGVDAYNEVIARVRMWVNLNLWQKLKLSRDDAKPLLRLKGFPSFPLVERQANEVDWWDMVCNVKKLINEKKEDGKVFWQNLAGYKRQEALRPYLSSEEDRKKGKKFARYQLGDLLLHLEKKHGEDWGKVYDEAWERIDKKVEGLSKHIKLEEERRSEDAQSKAALTDWLRAKASFVIEGLKEADKDEFCRCELKLQKWYGDLRGKPFAIEAENSILDISGFSKQYNCAFIWQKDGVKKLNLYLIINYFKGGKLRFKKIKPEAFEANRFYTVINKKSGEIVPMEVNFNFDDPNLIILPLAFGKRQGREFIWNDLLSLETGSLKLANGRVIEKTLYNRRTRQDEPALFVALTFERREVLDSSNIKPMNLIGVDRGENIPAVIALTDPEGCPLSRFKDSLGNPTHILRIGESYKEKQRTIQAKKEVEQRRAGGYSRKYASKAKNLADDMVRNTARDLLYYAVTQDAMLIFENLSRGFGRQGKRTFMAERQYTRMEDWLTAKLAYEGLPSKTYLSKTLAQYTSKTCSNCGFTITSADYDRVLEKLKKTATGWMTTINGKELKVEGQITYYNRYKRQNVVKDLSVELDRLSEESVNNDISSWTKGRSGEALSLLKKRFSHRPVQEKFVCLNCGFETHADEQAALNIARSWLFLRSQEYKKYQTNKTTGNTDKRAFVETWQSFYRKKLKEVWKPAV

SEQ ID NO: 27873 - protein, 978 aa, synthetic construct
  REGION 1..978: note = engineered CasX variant
QEIKRINKIRRRLVKDSNTKKAGKTRGPMKTLLVRVMTPDLRERLENLRKKPENIPQPISNTSRANLNKLLTDYTEMKKAILHVYWEEFQKDPVGLMSRVAQPASKKIDQNKLKPEMDEKGNLTTAGFACSQCGQPLFVYKLEQVSEKGKAYTNYFGRCNVAEHEKLILLAQLKPEKDSDEAVTYSLGKFGQRALDFYSIHVTKESTHPVKPLAQIAGNRYASPVGKALSDACMGTIASFLSKYQDIIIEHQKVVKGNQKRLESLRELAGKENLEYPSVTLPPQPHTKEGVDAYNEVIARVRMWVNLNLWQKLKLSRDDAKPLLRLKGFPSFPLVERQANEVDWWDMVCNVKKLINEKKEDGKVFWQNLAGYKRQEALRPYLSSEEDRKKGKKFARYQLGDLLLHLEKKHGEDWGKVYDEAWERIDKKVEGLSKHIKLEEERRSEDAQSKAALTDWLRAKASFVIEGLKEADKDEFCRCELKLQKWYGDLRGKPFAIEAENSILDISGFSKQYNCAFIWQKDGVKKLNLYLIINYFKGGKLRFKKIKPEAFEANRFYTVINKKSGEIVPMEVNFNFDDPNLIILPLAFGKRQGREFIWNDLLSLETGSLKLANGRVIEKTLYNRRTRQDEPALFVALTFERREVLDSSNIKPMNLIGVDRGENIPAVIALTDPEGCPLSRFKDSLGNPTHILRIGESYKEKQRTIQAKKEVEQRRAGGYSRKYASKAKNLADDMVRNTARDLLYYAVTQDAMLIFENLSRGFGRQGKRTFMAERQYTRMEDWLTAKLAYEGLPSKTYLSKTLAQYTSKTCSNCGFTITSADYDRVLEKLKKTATGWMTTINGKELKVEGQITYYNRYKRQNVVKDLSVELDRLSEESVNNDISSWTKGRSGEALSLLKKRFSHRPVQEKFVCLNCGFETHADEQAALNIARSWLFLRSQEYKKYQTNKTTGNTDKRAFVETWQSFYRKKLKEVWKPAV

SEQ ID NO: 27874 - protein, 979 aa, synthetic construct
  REGION 1..979: note = engineered CasX variant
QEIKRINKIRRRLVKDSNTKKAGKTRGPMKTLLVRVMTPDLRERLENLRKKPENIPQPISNTSRANLNKLLTDYTEMKKAILHVYWEEFQKDPVGLMSRVAQPASKKIDQNKLKPEMDEKGNLTTAGFACSQCGQPLFVYKLEQVSEKGKAYTNYFGRCNVAEHEKLILLAQLKPEKDSDEAVTYSLGKFGQRALDFYSIHVTKESTHPVKPLAQIAGNRYASGPVGKALSDACMGTIASFLSKYQDIIIEHQKVVKGNQKRLESLRELAGKENLEYPSVTLPPQPHTSEGVDAYNEVIARVRMWVNLNLWQKLKLSRDDAKPLLRLKGFPSFPLVERQANEVDWWDMVCNVKKLINEKKEDGKVFWQNLAGYKRQEALRPYLSSEEDRKKGKKFARYQLGDLLLHLEKKHGEDWGKVYDEAWERIDKKVEGLSKHIKLEEERRSEDAQSKAALTDWLRAKASFVIEGLKEADKDEFCRCELKLQKWYGDLRGKPFAIEAENSILDISGFSKQYNCAFIWQKDGVKKLNLYLIINYFKGGKLRFKKIKPEAFEANRFYTVINKKSGEIVPMEVNFNFDDPNLIILPLAFGKRQGREFIWNDLLSLETGSLKLANGRVIEKTLYNRRTRQDEPALFVALTFERREVLDSSNIKPMNLIGVDRGENIPAVIALTDPEGCPLSRFKDSLGNPTHILRIGESYKEKQRTIQAKKEVEQRRAGGYSRKYASKAKNLADDMVRNTARDLLYYAVTQDAMLIFENLSRGFGRQGKRTFMAERQYTRMEDWLTAKLAYEGLPSKTYLSKTLAQYTSKTCSNCGFTITSADYDRVLEKLKKTATGWMTTINGKELKVEGQITYYNRYKRQNVVKDLSVELDRLSEESVNNDISSWTKGRSGEALSLLKKRFSHRPVQEKFVCLNCGFETHADEQAALNIARSWLFLRSQEYKKYQTNKTTGNTDKRAFVETWQSFYRKKLKEVWKPAV

SEQ ID NO: 27875 - protein, 979 aa, synthetic construct
  REGION 1..979: note = engineered CasX variant
QEIKRINKIRRRLVKDSNTKKAGKTRGPMKTLLVRVMTPDLRERLENLRKKPENIPQPISNTSRANLNKLLTDYTEMKKAILHVYWEEFQKDPVGLMSRVAQPASKKIDQNKLKPEMDEKGNLTTAGFACSQCGQPLFVYKLEQVSEKGKAYTNYFGRCNVAEHEKLILLAQLKPEKDSDEAVTYSLGKFGQRALDFYSIHVTKESTHPVKPLAQIAGNRYASGPVGKALSDACMGTIASFLSKYQDIIIEHQKVVKGNQKRLESLRELAGKENLEYPSVTLPPQPHTKEGLDAYNEVIARVRMWVNLNLWQKLKLSRDDAKPLLRLKGFPSFPLVERQANEVDWWDMVCNVKKLINEKKEDGKVFWQNLAGYKRQEALRPYLSSEEDRKKGKKFARYQLGDLLLHLEKKHGEDWGKVYDEAWERIDKKVEGLSKHIKLEEERRSEDAQSKAALTDWLRAKASFVIEGLKEADKDEFCRCELKLQKWYGDLRGKPFAIEAENSILDISGFSKQYNCAFIWQKDGVKKLNLYLIINYFKGGKLRFKKIKPEAFEANRFYTVINKKSGEIVPMEVNFNFDDPNLIILPLAFGKRQGREFIWNDLLSLETGSLKLANGRVIEKTLYNRRTRQDEPALFVALTFERREVLDSSNIKPMNLIGVDRGENIPAVIALTDPEGCPLSRFKDSLGNPTHILRIGESYKEKQRTIQAKKEVEQRRAGGYSRKYASKAKNLADDMVRNTARDLLYYAVTQDAMLIFENLSRGFGRQGKRTFMAERQYTRMEDWLTAKLAYEGLPSKTYLSKTLAQYTSKTCSNCGFTITSADYDRVLEKLKKTATGWMTTINGKELKVEGQITYYNRYKRQNVVKDLSVELDRLSEESVNNDISSWTKGRSGEALSLLKKRFSHRPVQEKFVCLNCGFETHADEQAALNIARSWLFLRSQEYKKYQTNKTTGNTDKRAFVETWQSFYRKKLKEVWKPAV

SEQ ID NO: 27876 - protein, 979 aa, synthetic construct
  REGION 1..979: note = engineered CasX variant
QEIKRINKIRRRLVKDSNTKKAGKTRGPMKTLLVRVMTPDLRERLENLRKKPENIPQPISNTSRANLNKLLTDYTEMKKAILHVYWEEFQKDPVGLMSRVAQPASKKIDQNKLKPEMDEKGNLTTAGFACSQCGQPLFVYKLEQVSEKGKAYTNYFGRCNVAEHEKLILLAQLKPEKDSDEAVTYSLGKFGQRALDFYSIHVTKESTHPVKPLAQIAGNRYASGPVGKALSDACMGTIASFLSKYQDIIIEHQKVVKGNQKRLESLRELAGKENLEYPSVTLPPQPHTKEGVDAYNEVIARVRTWVNLNLWQKLKLSRDDAKPLLRLKGFPSFPLVERQANEVDWWDMVCNVKKLINEKKEDGKVFWQNLAGYKRQEALRPYLSSEEDRKKGKKFARYQLGDLLLHLEKKHGEDWGKVYDEAWERIDKKVEGLSKHIKLEEERRSEDAQSKAALTDWLRAKASFVIEGLKEADKDEFCRCELKLQKWYGDLRGKPFAIEAENSILDISGFSKQYNCAFIWQKDGVKKLNLYLIINYFKGGKLRFKKIKPEAFEANRFYTVINKKSGEIVPMEVNFNFDDPNLIILPLAFGKRQGREFIWNDLLSLETGSLKLANGRVIEKTLYNRRTRQDEPALFVALTFERREVLDSSNIKPMNLIGVDRGENIPAVIALTDPEGCPLSRFKDSLGNPTHILRIGESYKEKQRTIQAKKEVEQRRAGGYSRKYASKAKNLADDMVRNTARDLLYYAVTQDAMLIFENLSRGFGRQGKRTFMAERQYTRMEDWLTAKLAYEGLPSKTYLSKTLAQYTSKTCSNCGFTITSADYDRVLEKLKKTATGWMTTINGKELKVEGQITYYNRYKRQNVVKDLSVELDRLSEESVNNDISSWTKGRSGEALSLLKKRFSHRPVQEKFVCLNCGFETHADEQAALNIARSWLFLRSQEYKKYQTNKTTGNTDKRAFVETWQSFYRKKLKEVWKPAV

SEQ ID NO: 27877 - protein, 979 aa, synthetic construct
  REGION 1..979: note = engineered CasX variant
QEIKRINKIRRRLVKDSNTKKAGKTRGPMKTLLVRVMTPDLRERLENLRKKPENIPQPISNTSRANLNKLLTDYTEMKKAILHVYWEEFQKDPVGLMSRVAQPASKKIDQNKLKPEMDEKGNLTTAGFACSQCGQPLFVYKLEQVSEKGKAYTNYFGRCNVAEHEKLILLAQLKPEKDSDEAVTYSLGKFGQRALDFYSIHVTKESTHPVKPLAQIAGNRYASGPVGKALSDACMGTIASFLSKYQDIIIEHQKVVKGNQKRLESLRELAGKENLEYPSVTLPPQPHTKEGVDAYNEVIARVRWWVNLNLWQKLKLSRDDAKPLLRLKGFPSFPLVERQANEVDWWDMVCNVKKLINEKKEDGKVFWQNLAGYKRQEALRPYLSSEEDRKKGKKFARYQLGDLLLHLEKKHGEDWGKVYDEAWERIDKKVEGLSKHIKLEEERRSEDAQSKAALTDWLRAKASFVIEGLKEADKDEFCRCELKLQKWYGDLRGKPFAIEAENSILDISGFSKQYNCAFIWQKDGVKKLNLYLIINYFKGGKLRFKKIKPEAFEANRFYTVINKKSGEIVPMEVNFNFDDPNLIILPLAFGKRQGREFIWNDLLSLETGSLKLANGRVIEKTLYNRRTRQDEPALFVALTFERREVLDSSNIKPMNLIGVDRGENIPAVIALTDPEGCPLSRFKDSLGNPTHILRIGESYKEKQRTIQAKKEVEQRRAGGYSRKYASKAKNLADDMVRNTARDLLYYAVTQDAMLIFENLSRGFGRQGKRTFMAERQYTRMEDWLTAKLAYEGLPSKTYLSKTLAQYTSKTCSNCGFTITSADYDRVLEKLKKTATGWMTTINGKELKVEGQITYYNRYKRQNVVKDLSVELDRLSEESVNNDISSWTKGRSGEALSLLKKRFSHRPVQEKFVCLNCGFETHADEQAALNIARSWLFLRSQEYKKYQTNKTTGNTDKRAFVETWQSFYRKKLKEVWKPAV

SEQ ID NO: 27878 - protein, 980 aa, synthetic construct
  REGION 1..980: note = engineered CasX variant
QEIKRINKIRRRLVKDSNTKKAGKTRGPMKTLLVRVMTPDLRERLENLRKKPENIPQPISNTSRANLNKLLTDYTEMKKAILHVYWEEFQKDPVGLMSRVAQPASKKIDQNKLKPEMDEKGNLTTAGFACSQCGQPLFVYKLEQVSEKGKAYTNYFGRCNVAEHEKLILLAQLKPEKDSDEAVTYSLGKFGQRALDFYSIHVTKESTHPVKPLAQIAGNRYASGPVGKALSDACMGTIASFLSKYQDIIIEHQKVVKGNQKRLESLRELAGKENLEYPSVTLPPQPHTKEGVDAYNEVIARVRMWVNLNLWQKLKLSRDDAKPLLRLKGFPSFPLVERQQANEVDWWDMVCNVKKLINEKKEDGKVFWQNLAGYKRQEALRPYLSSEEDRKKGKKFARYQLGDLLLHLEKKHGEDWGKVYDEAWERIDKKVEGLSKHIKLEEERRSEDAQSKAALTDWLRAKASFVIEGLKEADKDEFCRCELKLQKWYGDLRGKPFAIEAENSILDISGFSKQYNCAFIWQKDGVKKLNLYLIINYFKGGKLRFKKIKPEAFEANRFYTVINKKSGEIVPMEVNFNFDDPNLIILPLAFGKRQGREFIWNDLLSLETGSLKLANGRVIEKTLYNRRTRQDEPALFVALTFERREVLDSSNIKPMNLIGVDRGENIPAVIALTDPEGCPLSRFKDSLGNPTHILRIGESYKEKQRTIQAKKEVEQRRAGGYSRKYASKAKNLADDMVRNTARDLLYYAVTQDAMLIFENLSRGFGRQGKRTFMAERQYTRMEDWLTAKLAYEGLPSKTYLSKTLAQYTSKTCSNCGFTITSADYDRVLEKLKKTATGWMTTINGKELKVEGQITYYNRYKRQNVVKDLSVELDRLSEESVNNDISSWTKGRSGEALSLLKKRFSHRPVQEKFVCLNCGFETHADEQAALNIARSWLFLRSQEYKKYQTNKTTGNTDKRAFVETWQSFYRKKLKEVWKPAV

SEQ ID NO: 27879 - protein, 980 aa, synthetic construct
  REGION 1..980: note = engineered CasX variant
QEIKRINKIRRRLVKDSNTKKAGKTRGPMKTLLVRVMTPDLRERLENLRKKPENIPQPISNTSRANLNKLLTDYTEMKKAILHVYWEEFQKDPVGLMSRVAQPASKKIDQNKLKPEMDEKGNLTTAGFACSQCGQPLFVYKLEQVSEKGKAYTNYFGRCNVAEHEKLILLAQLKPEKDSDEAVTYSLGKFGQRALDFYSIHVTKESTHPVKPLAQIAGNRYASGPVGKALSDACMGTIASFLSKYQDIIIEHQKVVKGNQKRLESLRELAGKENLEYPSVTLPPQPHTKEGVDAYNEVIARVRMWVNLNLWQKLKLSRDDAKPLLRLKGFPSFPLVERQANAEVDWWDMVCNVKKLINEKKEDGKVFWQNLAGYKRQEALRPYLSSEEDRKKGKKFARYQLGDLLLHLEKKHGEDWGKVYDEAWERIDKKVEGLSKHIKLEEERRSEDAQSKAALTDWLRAKASFVIEGLKEADKDEFCRCELKLQKWYGDLRGKPFAIEAENSILDISGFSKQYNCAFIWQKDGVKKLNLYLIINYFKGGKLRFKKIKPEAFEANRFYTVINKKSGEIVPMEVNFNFDDPNLIILPLAFGKRQGREFIWNDLLSLETGSLKLANGRVIEKTLYNRRTRQDEPALFVALTFERREVLDSSNIKPMNLIGVDRGENIPAVIALTDPEGCPLSRFKDSLGNPTHILRIGESYKEKQRTIQAKKEVEQRRAGGYSRKYASKAKNLADDMVRNTARDLLYYAVTQDAMLIFENLSRGFGRQGKRTFMAERQYTRMEDWLTAKLAYEGLPSKTYLSKTLAQYTSKTCSNCGFTITSADYDRVLEKLKKTATGWMTTINGKELKVEGQITYYNRYKRQNVVKDLSVELDRLSEESVNNDISSWTKGRSGEALSLLKKRFSHRPVQEKFVCLNCGFETHADEQAALNIARSWLFLRSQEYKKYQTNKTTGNTDKRAFVETWQSFYRKKLKEVWKPAV

SEQ ID NO: 27880 - protein, 979 aa, synthetic construct
  REGION 1..979: note = engineered CasX variant
QEIKRINKIRRRLVKDSNTKKAGKTRGPMKTLLVRVMTPDLRERLENLRKKPENIPQPISNTSRANLNKLLTDYTEMKKAILHVYWEEFQKDPVGLMSRVAQPASKKIDQNKLKPEMDEKGNLTTAGFACSQCGQPLFVYKLEQVSEKGKAYTNYFGRCNVAEHEKLILLAQLKPEKDSDEAVTYSLGKFGQRALDFYSIHVTKESTHPVKPLAQIAGNRYASGPVGKALSDACMGTIASFLSKYQDIIIEHQKVVKGNQKRLESLRELAGKENLEYPSVTLPPQPHTKEGVDAYNEVIARVRMWVNLNLWQKLKLSRDDAKPLLRLKGFPSFPLVERQANEVDWWDMVCNVKKLINEKKEDGKVFWQNLAGYKRQEALRPYLSSEEDRKKGKKFARTQLGDLLLHLEKKHGEDWGKVYDEAWERIDKKVEGLSKHIKLEEERRSEDAQSKAALTDWLRAKASFVIEGLKEADKDEFCRCELKLQKWYGDLRGKPFAIEAENSILDISGFSKQYNCAFIWQKDGVKKLNLYLIINYFKGGKLRFKKIKPEAFEANRFYTVINKKSGEIVPMEVNFNFDDPNLIILPLAFGKRQGREFIWNDLLSLETGSLKLANGRVIEKTLYNRRTRQDEPALFVALTFERREVLDSSNIKPMNLIGVDRGENIPAVIALTDPEGCPLSRFKDSLGNPTHILRIGESYKEKQRTIQAKKEVEQRRAGGYSRKYASKAKNLADDMVRNTARDLLYYAVTQDAMLIFENLSRGFGRQGKRTFMAERQYTRMEDWLTAKLAYEGLPSKTYLSKTLAQYTSKTCSNCGFTITSADYDRVLEKLKKTATGWMTTINGKELKVEGQITYYNRYKRQNVVKDLSVELDRLSEESVNNDISSWTKGRSGEALSLLKKRFSHRPVQEKFVCLNCGFETHADEQAALNIARSWLFLRSQEYKKYQTNKTTGNTDKRAFVETWQSFYRKKLKEVWKPAV

SEQ ID NO: 27881 - protein, 980 aa, synthetic construct
  REGION 1..980: note = engineered CasX variant
QEIKRINKIRRRLVKDSNTKKAGKTRGPMKTLLVRVMTPDLRERLENLRKKPENIPQPISNTSRANLNKLLTDYTEMKKAILHVYWEEFQKDPVGLMSRVAQPASKKIDQNKLKPEMDEKGNLTTAGFACSQCGQPLFVYKLEQVSEKGKAYTNYFGRCNVAEHEKLILLAQLKPEKDSDEAVTYSLGKFGQRALDFYSIHVTKESTHPVKPLAQIAGNRYASGPVGKALSDACMGTIASFLSKYQDIIIEHQKVVKGNQKRLESLRELAGKENLEYPSVTLPPQPHTKEGVDAYNEVIARVRMWVNLNLWQKLKLSRDDAKPLLRLKGFPSFPLVERQANEVDWWDMVCNVKKLINEKKEDGKVFWQNLAGYKRQEALRPYLSSEEDRKKGKKFARYQLGDLLLHLEKKHEGEDWGKVYDEAWERIDKKVEGLSKHIKLEEERRSEDAQSKAALTDWLRAKASFVIEGLKEADKDEFCRCELKLQKWYGDLRGKPFAIEAENSILDISGFSKQYNCAFIWQKDGVKKLNLYLIINYFKGGKLRFKKIKPEAFEANRFYTVINKKSGEIVPMEVNFNFDDPNLIILPLAFGKRQGREFIWNDLLSLETGSLKLANGRVIEKTLYNRRTRQDEPALFVALTFERREVLDSSNIKPMNLIGVDRGENIPAVIALTDPEGCPLSRFKDSLGNPTHILRIGESYKEKQRTIQAKKEVEQRRAGGYSRKYASKAKNLADDMVRNTARDLLYYAVTQDAMLIFENLSRGFGRQGKRTFMAERQYTRMEDWLTAKLAYEGLPSKTYLSKTLAQYTSKTCSNCGFTITSADYDRVLEKLKKTATGWMTTINGKELKVEGQITYYNRYKRQNVVKDLSVELDRLSEESVNNDISSWTKGRSGEALSLLKKRFSHRPVQEKFVCLNCGFETHADEQAALNIARSWLFLRSQEYKKYQTNKTTGNTDKRAFVETWQSFYRKKLKEVWKPAV

SEQ ID NO: 27882 - protein, 979 aa, synthetic construct
  REGION 1..979: note = engineered CasX variant
QEIKRINKIRRRLVKDSNTKKAGKTRGPMKTLLVRVMTPDLRERLENLRKKPENIPQPISNTSRANLNKLLTDYTEMKKAILHVYWEEFQKDPVGLMSRVAQPASKKIDQNKLKPEMDEKGNLTTAGFACSQCGQPLFVYKLEQVSEKGKAYTNYFGRCNVAEHEKLILLAQLKPEKDSDEAVTYSLGKFGQRALDFYSIHVTKESTHPVKPLAQIAGNRYASGPVGKALSDACMGTIASFLSKYQDIIIEHQKVVKGNQKRLESLRELAGKENLEYPSVTLPPQPHTKEGVDAYNEVIARVRMWVNLNLWQKLKLSRDDAKPLLRLKGFPSFPLVERQANEVDWWDMVCNVKKLINEKKEDGKVFWQNLAGYKRQEALRPYLSSEEDRKKGKKFARYQLGDLLLHLEKKHGEDWGKVYDEAWERIDKKVEGLSKHIKLEEERRSEDAQSKAALTDWLRAKASFVIEGLKEADKDEFCRCDLKLQKWYGDLRGKPFAIEAENSILDISGFSKQYNCAFIWQKDGVKKLNLYLIINYFKGGKLRFKKIKPEAFEANRFYTVINKKSGEIVPMEVNFNFDDPNLIILPLAFGKRQGREFIWNDLLSLETGSLKLANGRVIEKTLYNRRTRQDEPALFVALTFERREVLDSSNIKPMNLIGVDRGENIPAVIALTDPEGCPLSRFKDSLGNPTHILRIGESYKEKQRTIQAKKEVEQRRAGGYSRKYASKAKNLADDMVRNTARDLLYYAVTQDAMLIFENLSRGFGRQGKRTFMAERQYTRMEDWLTAKLAYEGLPSKTYLSKTLAQYTSKTCSNCGFTITSADYDRVLEKLKKTATGWMTTINGKELKVEGQITYYNRYKRQNVVKDLSVELDRLSEESVNNDISSWTKGRSGEALSLLKKRFSHRPVQEKFVCLNCGFETHADEQAALNIARSWLFLRSQEYKKYQTNKTTGNTDKRAFVETWQSFYRKKLKEVWKPAV

SEQ ID NO: 27883 - protein, 979 aa, synthetic construct
  REGION 1..979: note = engineered CasX variant
QEIKRINKIRRRLVKDSNTKKAGKTRGPMKTLLVRVMTPDLRERLENLRKKPENIPQPISNTSRANLNKLLTDYTEMKKAILHVYWEEFQKDPVGLMSRVAQPASKKIDQNKLKPEMDEKGNLTTAGFACSQCGQPLFVYKLEQVSEKGKAYTNYFGRCNVAEHEKLILLAQLKPEKDSDEAVTYSLGKFGQRALDFYSIHVTKESTHPVKPLAQIAGNRYASGPVGKALSDACMGTIASFLSKYQDIIIEHQKVVKGNQKRLESLRELAGKENLEYPSVTLPPQPHTKEGVDAYNEVIARVRMWVNLNLWQKLKLSRDDAKPLLRLKGFPSFPLVERQANEVDWWDMVCNVKKLINEKKEDGKVFWQNLAGYKRQEALRPYLSSEEDRKKGKKFARYQLGDLLLHLEKKHGEDWGKVYDEAWERIDKKVEGLSKHIKLEEERRSEDAQSKAALTDWLRAKASFVIEGLKEADKDEFCRCELKLQKWYGDLRGKPFAIEAENSILDISGFSKQYNCAFIWQKDGVKKLNLYLIINYFKGGKLRFKKIKPEAFEANRFYTVINKKSGEIVPMEVNFNFDDPNLIILPLAFGKRFGREFIWNDLLSLETGSLKLANGRVIEKTLYNRRTRQDEPALFVALTFERREVLDSSNIKPMNLIGVDRGENIPAVIALTDPEGCPLSRFKDSLGNPTHILRIGESYKEKQRTIQAKKEVEQRRAGGYSRKYASKAKNLADDMVRNTARDLLYYAVTQDAMLIFENLSRGFGRQGKRTFMAERQYTRMEDWLTAKLAYEGLPSKTYLSKTLAQYTSKTCSNCGFTITSADYDRVLEKLKKTATGWMTTINGKELKVEGQITYYNRYKRQNVVKDLSVELDRLSEESVNNDISSWTKGRSGEALSLLKKRFSHRPVQEKFVCLNCGFETHADEQAALNIARSWLFLRSQEYKKYQTNKTTGNTDKRAFVETWQSFYRKKLKEVWKPAV

SEQ ID NO: 27884 - protein, 979 aa, synthetic construct
  REGION 1..979: note = engineered CasX variant
QEIKRINKIRRRLVKDSNTKKAGKTRGPMKTLLVRVMTPDLRERLENLRKKPENIPQPISNTSRANLNKLLTDYTEMKKAILHVYWEEFQKDPVGLMSRVAQPASKKIDQNKLKPEMDEKGNLTTAGFACSQCGQPLFVYKLEQVSEKGKAYTNYFGRCNVAEHEKLILLAQLKPEKDSDEAVTYSLGKFGQRALDFYSIHVTKESTHPVKPLAQIAGNRYASGPVGKALSDACMGTIASFLSKYQDIIIEHQKVVKGNQKRLESLRELAGKENLEYPSVTLPPQPHTKEGVDAYNEVIARVRMWVNLNLWQKLKLSRDDAKPLLRLKGFPSFPLVERQANEVDWWDMVCNVKKLINEKKEDGKVFWQNLAGYKRQEALRPYLSSEEDRKKGKKFARYQLGDLLLHLEKKHGEDWGKVYDEAWERIDKKVEGLSKHIKLEEERRSEDAQSKAALTDWLRAKASFVIEGLKEADKDEFCRCELKLQKWYGDLRGKPFAIEAENSILDISGFSKQYNCAFIWQKDGVKKLNLYLIINYFKGGKLRFKKIKPEAFEANRFYTVINKKSGEIVPMEVNFNFDDPNLIILPLAFGKRVGREFIWNDLLSLETGSLKLANGRVIEKTLYNRRTRQDEPALFVALTFERREVLDSSNIKPMNLIGVDRGENIPAVIALTDPEGCPLSRFKDSLGNPTHILRIGESYKEKQRTIQAKKEVEQRRAGGYSRKYASKAKNLADDMVRNTARDLLYYAVTQDAMLIFENLSRGFGRQGKRTFMAERQYTRMEDWLTAKLAYEGLPSKTYLSKTLAQYTSKTCSNCGFTITSADYDRVLEKLKKTATGWMTTINGKELKVEGQITYYNRYKRQNVVKDLSVELDRLSEESVNNDISSWTKGRSGEALSLLKKRFSHRPVQEKFVCLNCGFETHADEQAALNIARSWLFLRSQEYKKYQTNKTTGNTDKRAFVETWQSFYRKKLKEVWKPAV

SEQ ID NO: 27885 - protein, 980 aa, synthetic construct
  REGION 1..980: note = engineered CasX variant
QEIKRINKIRRRLVKDSNTKKAGKTRGPMKTLLVRVMTPDLRERLENLRKKPENIPQPISNTSRANLNKLLTDYTEMKKAILHVYWEEFQKDPVGLMSRVAQPASKKIDQNKLKPEMDEKGNLTTAGFACSQCGQPLFVYKLEQVSEKGKAYTNYFGRCNVAEHEKLILLAQLKPEKDSDEAVTYSLGKFGQRALDFYSIHVTKESTHPVKPLAQIAGNRYASGPVGKALSDACMGTIASFLSKYQDIIIEHQKVVKGNQKRLESLRELAGKENLEYPSVTLPPQPHTKEGVDAYNEVIARVRMWVNLNLWQKLKLSRDDAKPLLRLKGFPSFPLVERQANEVDWWDMVCNVKKLINEKKEDGKVFWQNLAGYKRQEALRPYLSSEEDRKKGKKFARYQLGDLLLHLEKKHGEDWGKVYDEAWERIDKKVEGLSKHIKLEEERRSEDAQSKAALTDWLRAKASFVIEGLKEADKDEFCRCELKLQKWYGDLRGKPFAIEAENSILDISGFSKQYNCAFIWQKDGVKKLNLYLIINYFKGGKLRFKKIKPEAFEANRFYTVINKKSGEIVPMEVNFNFDDPNLIILPLAFGKRQGREFIWNDLLSLETGSLKLANGRVIEKTLYNRRTRQDEPALFVALTFERREVLDSSNIKTPMNLIGVDRGENIPAVIALTDPEGCPLSRFKDSLGNPTHILRIGESYKEKQRTIQAKKEVEQRRAGGYSRKYASKAKNLADDMVRNTARDLLYYAVTQDAMLIFENLSRGFGRQGKRTFMAERQYTRMEDWLTAKLAYEGLPSKTYLSKTLAQYTSKTCSNCGFTITSADYDRVLEKLKKTATGWMTTINGKELKVEGQITYYNRYKRQNVVKDLSVELDRLSEESVNNDISSWTKGRSGEALSLLKKRFSHRPVQEKFVCLNCGFETHADEQAALNIARSWLFLRSQEYKKYQTNKTTGNTDKRAFVETWQSFYRKKLKEVWKPAV

SEQ ID NO: 27886 - protein, 980 aa, synthetic construct
  REGION 1..980: note = engineered CasX variant
QEIKRINKIRRRLVKDSNTKKAGKTRGPMKTLLVRVMTPDLRERLENLRKKPENIPQPISNTSRANLNKLLTDYTEMKKAILHVYWEEFQKDPVGLMSRVAQPASKKIDQNKLKPEMDEKGNLTTAGFACSQCGQPLFVYKLEQVSEKGKAYTNYFGRCNVAEHEKLILLAQLKPEKDSDEAVTYSLGKFGQRALDFYSIHVTKESTHPVKPLAQIAGNRYASGPVGKALSDACMGTIASFLSKYQDIIIEHQKVVKGNQKRLESLRELAGKENLEYPSVTLPPQPHTKEGVDAYNEVIARVRMWVNLNLWQKLKLSRDDAKPLLRLKGFPSFPLVERQANEVDWWDMVCNVKKLINEKKEDGKVFWQNLAGYKRQEALRPYLSSEEDRKKGKKFARYQLGDLLLHLEKKHGEDWGKVYDEAWERIDKKVEGLSKHIKLEEERRSEDAQSKAALTDWLRAKASFVIEGLKEADKDEFCRCELKLQKWYGDLRGKPFAIEAENSILDISGFSKQYNCAFIWQKDGVKKLNLYLIINYFKGGKLRFKKIKPEAFEANRFYTVINKKSGEIVPMEVNFNFDDPNLIILPLAFGKRQGREFIWNDLLSLETGSLKLANGRVIEKTLYNRRTRQDEPALFVALTFERREVLDSSNIKPMSNLIGVDRGENIPAVIALTDPEGCPLSRFKDSLGNPTHILRIGESYKEKQRTIQAKKEVEQRRAGGYSRKYASKAKNLADDMVRNTARDLLYYAVTQDAMLIFENLSRGFGRQGKRTFMAERQYTRMEDWLTAKLAYEGLPSKTYLSKTLAQYTSKTCSNCGFTITSADYDRVLEKLKKTATGWMTTINGKELKVEGQITYYNRYKRQNVVKDLSVELDRLSEESVNNDISSWTKGRSGEALSLLKKRFSHRPVQEKFVCLNCGFETHADEQAALNIARSWLFLRSQEYKKYQTNKTTGNTDKRAFVETWQSFYRKKLKEVWKPAV

SEQ ID NO: 27887 - protein, 979 aa, synthetic construct
  REGION 1..979: note = engineered CasX variant
QEIKRINKIRRRLVKDSNTKKAGKTRGPMKTLLVRVMTPDLRERLENLRKKPENIPQPISNTSRANLNKLLTDYTEMKKAILHVYWEEFQKDPVGLMSRVAQPASKKIDQNKLKPEMDEKGNLTTAGFACSQCGQPLFVYKLEQVSEKGKAYTNYFGRCNVAEHEKLILLAQLKPEKDSDEAVTYSLGKFGQRALDFYSIHVTKESTHPVKPLAQIAGNRYASGPVGKALSDACMGTIASFLSKYQDIIIEHQKVVKGNQKRLESLRELAGKENLEYPSVTLPPQPHTKEGVDAYNEVIARVRMWVNLNLWQKLKLSRDDAKPLLRLKGFPSFPLVERQANEVDWWDMVCNVKKLINEKKEDGKVFWQNLAGYKRQEALRPYLSSEEDRKKGKKFARYQLGDLLLHLEKKHGEDWGKVYDEAWERIDKKVEGLSKHIKLEEERRSEDAQSKAALTDWLRAKASFVIEGLKEADKDEFCRCELKLQKWYGDLRGKPFAIEAENSILDISGFSKQYNCAFIWQKDGVKKLNLYLIINYFKGGKLRFKKIKPEAFEANRFYTVINKKSGEIVPMEVNFNFDDPNLIILPLAFGKRQGREFIWNDLLSLETGSLKLANGRVIEKTLYNRRTRQDEPALFVALTFERREVLDSSNIKPMNLIGVDRGENIPAVIALTDPEGCPLSRFKDSLGNPTHILRIRESYKEKQRTIQAKKEVEQRRAGGYSRKYASKAKNLADDMVRNTARDLLYYAVTQDAMLIFENLSRGFGRQGKRTFMAERQYTRMEDWLTAKLAYEGLPSKTYLSKTLAQYTSKTCSNCGFTITSADYDRVLEKLKKTATGWMTTINGKELKVEGQITYYNRYKRQNVVKDLSVELDRLSEESVNNDISSWTKGRSGEALSLLKKRFSHRPVQEKFVCLNCGFETHADEQAALNIARSWLFLRSQEYKKYQTNKTTGNTDKRAFVETWQSFYRKKLKEVWKPAV

SEQ ID NO: 27888 - protein, 979 aa, synthetic construct
  REGION 1..979: note = engineered CasX variant
QEIKRINKIRRRLVKDSNTKKAGKTRGPMKTLLVRVMTPDLRERLENLRKKPENIPQPISNTSRANLNKLLTDYTEMKKAILHVYWEEFQKDPVGLMSRVAQPASKKIDQNKLKPEMDEKGNLTTAGFACSQCGQPLFVYKLEQVSEKGKAYTNYFGRCNVAEHEKLILLAQLKPEKDSDEAVTYSLGKFGQRALDFYSIHVTKESTHPVKPLAQIAGNRYASGPVGKALSDACMGTIASFLSKYQDIIIEHQKVVKGNQKRLESLRELAGKENLEYPSVTLPPQPHTKEGVDAYNEVIARVRMWVNLNLWQKLKLSRDDAKPLLRLKGFPSFPLVERQANEVDWWDMVCNVKKLINEKKEDGKVFWQNLAGYKRQEALRPYLSSEEDRKKGKKFARYQLGDLLLHLEKKHGEDWGKVYDEAWERIDKKVEGLSKHIKLEEERRSEDAQSKAALTDWLRAKASFVIEGLKEADKDEFCRCELKLQKWYGDLRGKPFAIEAENSILDISGFSKQYNCAFIWQKDGVKKLNLYLIINYFKGGKLRFKKIKPEAFEANRFYTVINKKSGEIVPMEVNFNFDDPNLIILPLAFGKRQGREFIWNDLLSLETGSLKLANGRVIEKTLYNRRTRQDEPALFVALTFERREVLDSSNIKPMNLIGVDRGENIPAVIALTDPEGCPLSRFKDSLGNPTHILRIGESYKEKQRTIQAKKEVEQRRAGGYSRKYASKAKNLADDMVRNTARDLLYYAVTQDAMLIFENLSRGFGRQGKRTFSAERQYTRMEDWLTAKLAYEGLPSKTYLSKTLAQYTSKTCSNCGFTITSADYDRVLEKLKKTATGWMTTINGKELKVEGQITYYNRYKRQNVVKDLSVELDRLSEESVNNDISSWTKGRSGEALSLLKKRFSHRPVQEKFVCLNCGFETHADEQAALNIARSWLFLRSQEYKKYQTNKTTGNTDKRAFVETWQSFYRKKLKEVWKPAV

SEQ ID NO: 27889 - protein, 979 aa, synthetic construct
  REGION 1..979: note = engineered CasX variant
QEIKRINKIRRRLVKDSNTKKAGKTRGPMKTLLVRVMTPDLRERLENLRKKPENIPQPISNTSRANLNKLLTDYTEMKKAILHVYWEEFQKDPVGLMSRVAQPASKKIDQNKLKPEMDEKGNLTTAGFACSQCGQPLFVYKLEQVSEKGKAYTNYFGRCNVAEHEKLILLAQLKPEKDSDEAVTYSLGKFGQRALDFYSIHVTKESTHPVKPLAQIAGNRYASGPVGKALSDACMGTIASFLSKYQDIIIEHQKVVKGNQKRLESLRELAGKENLEYPSVTLPPQPHTKEGVDAYNEVIARVRMWVNLNLWQKLKLSRDDAKPLLRLKGFPSFPLVERQANEVDWWDMVCNVKKLINEKKEDGKVFWQNLAGYKRQEALRPYLSSEEDRKKGKKFARYQLGDLLLHLEKKHGEDWGKVYDEAWERIDKKVEGLSKHIKLEEERRSEDAQSKAALTDWLRAKASFVIEGLKEADKDEFCRCELKLQKWYGDLRGKPFAIEAENSILDISGFSKQYNCAFIWQKDGVKKLNLYLIINYFKGGKLRFKKIKPEAFEANRFYTVINKKSGEIVPMEVNFNFDDPNLIILPLAFGKRQGREFIWNDLLSLETGSLKLANGRVIEKTLYNRRTRQDEPALFVALTFERREVLDSSNIKPMNLIGVDRGENIPAVIALTDPEGCPLSRFKDSLGNPTHILRIGESYKEKQRTIQAKKEVEQRRAGGYSRKYASKAKNLADDMVRNTARDLLYYAVTQDAMLIFENLSRGFGRQGKRTFMAERQYTRMEDWLTAKLAYEGLPSKTYLSKTLAQYTSKTCSNCGFTITSADYDRVLEKLKKTATGWMTTINGKELKVEGQITYYNRYKRQNVVKDLSVELDRLSEESVNNDISSWDKGRSGEALSLLKKRFSHRPVQEKFVCLNCGFETHADEQAALNIARSWLFLRSQEYKKYQTNKTTGNTDKRAFVETWQSFYRKKLKEVWKPAV

SEQ ID NO: 27890 - protein, 979 aa, synthetic construct
  REGION 1..979: note = engineered CasX variant
QEIKRINKIRRRLVKDSNTKKAGKTRGPMKTLLVRVMTPDLRERLENLRKKPENIPQPISNTSRANLNKLLTDYTEMKKAILHVYWEEFQVDPVGLMSRVAQPASKKIDQNKLKPEMDEKGNLTTAGFACSQCGQPLFVYKLEQVSEKGKAYTNYFGRCNVAEHEKLILLAQLKPEKDSDEAVTYSLGKFGQRALDFYSIHVTKESTHPVKPLAQIAGNRYASGPVGKALSDACMGTIASFLSKYQDIIIEHQKVVKGNQKRLESLRELAGKENLEYPSVTLPPQPHTKEGVDAYNEVIARVRMWVNLNLWQKLKLSRDDAKPLLRLKGFPSFPLVERQANEVDWWDMVCNVKKLINEKKEDGKVFWQNLAGYKRQEALRPYLSSEEDRKKGKKFARYQLGDLLLHLEKKHGEDWGKVYDEAWERIDKKVEGLSKHIKLEEERRSEDAQSKAALTDWLRAKASFVIEGLKEADKDEFCRCELKLQKWYGDLRGKPFAIEAENSILDISGFSKQYNCAFIWQKDGVKKLNLYLIINYFKGGKLRFKKIKPEAFEANRFYTVINKKSGEIVPMEVNFNFDDPNLIILPLAFGKRQGREFIWNDLLSLETGSLKLANGRVIEKTLYNRRTRQDEPALFVALTFERREVLDSSNIKPMNLIGVDRGENIPAVIALTDPEGCPLSRFKDSLGNPTHILRIGESYKEKQRTIQAKKEVEQRRAGGYSRKYASKAKNLADDMVRNTARDLLYYAVTQDAMLIFENLSRGFGRQGKRTFMAERQYTRMEDWLTAKLAYEGLPSKTYLSKTLAQYTSKTCSNCGFTITSADYDRVLEKLKKTATGWMTTINGKELKVEGQITYYNRYKRQNVVKDLSVELDRLSEESVNNDISSWTKGRSGEALSLLKKRFSHRPVQEKFVCLNCGFETHADEQAALNIARSWLFLRSQEYKKYQTNKTTGNTDKRAFVETWQSFYRKKLKEVWKPAV

SEQ ID NO: 27891 - protein, 979 aa, synthetic construct
  REGION 1..979: note = engineered CasX variant
QEIKRLNKIRRRLVKDSNTKKAGKTRGPMKTLLVRVMTPDLRERLENLRKKPENIPQPISNTSRANLNKLLTDYTEMKKAILHVYWEEFQKDPVGLMSRVAQPASKKIDQNKLKPEMDEKGNLTTAGFACSQCGQPLFVYKLEQVSEKGKAYTNYFGRCNVAEHEKLILLAQLKPEKDSDEAVTYSLGKFGQRALDFYSIHVTKESTHPVKPLAQIAGNRYASGPVGKALSDACMGTIASFLSKYQDIIIEHQKVVKGNQKRLESLRELAGKENLEYPSVTLPPQPHTKEGVDAYNEVIARVRMWVNLNLWQKLKLSRDDAKPLLRLKGFPSFPLVERQANEVDWWDMVCNVKKLINEKKEDGKVFWQNLAGYKRQEALRPYLSSEEDRKKGKKFARYQLGDLLLHLEKKHGEDWGKVYDEAWERIDKKVEGLSKHIKLEEERRSEDAQSKAALTDWLRAKASFVIEGLKEADKDEFCRCELKLQKWYGDLRGKPFAIEAENSILDISGFSKQYNCAFIWQKDGVKKLNLYLIINYFKGGKLRFKKIKPEAFEANRFYTVINKKSGEIVPMEVNFNFDDPNLIILPLAFGKRQGREFIWNDLLSLETGSLKLANGRVIEKTLYNRRTRQDEPALFVALTFERREVLDSSNIKPMNLIGVDRGENIPAVIALTDPEGCPLSRFKDSLGNPTHILRIGESYKEKQRTIQAKKEVEQRRAGGYSRKYASKAKNLADDMVRNTARDLLYYAVTQDAMLIFENLSRGFGRQGKRTFMAERQYTRMEDWLTAKLAYEGLPSKTYLSKTLAQYTSKTCSNCGFTITSADYDRVLEKLKKTATGWMTTINGKELKVEGQITYYNRYKRQNVVKDLSVELDRLSEESVNNDISSWTKGRSGEALSLLKKRFSHRPVQEKFVCLNCGFETHADEQAALNIARSWLFLRSQEYKKYQTNKTTGNTDKRAFVETWQSFYRKKLKEVWKPAV

SEQ ID NO: 27892 - protein, 979 aa, synthetic construct
  REGION 1..979: note = engineered CasX variant
QEIKRINKIRRRLVKDSNTKKAGKTRGPMKTLLVRVMTPDLRERLENLRKKPENIPQPISNTSRANLNKLLTDYTEMKKAILHVYWEEFQKDPVGLMSRVAQPASKKIDQNKLKPEMDEKGNLTTAGFACSQCGQPLFVYKLEQVSEKGKAYTNYVGRCNVAEHEKLILLAQLKPEKDSDEAVTYSLGKFGQRALDFYSIHVTKESTHPVKPLAQIAGNRYASGPVGKALSDACMGTIASFLSKYQDIIIEHQKVVKGNQKRLESLRELAGKENLEYPSVTLPPQPHTKEGVDAYNEVIARVRMWVNLNLWQKLKLSRDDAKPLLRLKGFPSFPLVERQANEVDWWDMVCNVKKLINEKKEDGKVFWQNLAGYKRQEALRPYLSSEEDRKKGKKFARYQLGDLLLHLEKKHGEDWGKVYDEAWERIDKKVEGLSKHIKLEEERRSEDAQSKAALTDWLRAKASFVIEGLKEADKDEFCRCELKLQKWYGDLRGKPFAIEAENSILDISGFSKQYNCAFIWQKDGVKKLNLYLIINYFKGGKLRFKKIKPEAFEANRFYTVINKKSGEIVPMEVNFNFDDPNLIILPLAFGKRQGREFIWNDLLSLETGSLKLANGRVIEKTLYNRRTRQDEPALFVALTFERREVLDSSNIKPMNLIGVDRGENIPAVIALTDPEGCPLSRFKDSLGNPTHILRIGESYKEKQRTIQAKKEVEQRRAGGYSRKYASKAKNLADDMVRNTARDLLYYAVTQDAMLIFENLSRGFGRQGKRTFMAERQYTRMEDWLTAKLAYEGLPSKTYLSKTLAQYTSKTCSNCGFTITSADYDRVLEKLKKTATGWMTTINGKELKVEGQITYYNRYKRQNVVKDLSVELDRLSEESVNNDISSWTKGRSGEALSLLKKRFSHRPVQEKFVCLNCGFETHADEQAALNIARSWLFLRSQEYKKYQTNKTTGNTDKRAFVETWQSFYRKKLKEVWKPAV

SEQ ID NO: 27893 - protein, 979 aa, synthetic construct
  REGION 1..979: note = engineered CasX variant
QEIKRINKIRRRLVKDSNTKKAGKTRGPMKTLLVRVMTPDLRERLENLRKKPENIPQPISNTSRANLNKLLTDYTEMKKAILHVYWEEFQKDPVGLMSRVAQPASKKIDQNKLKPEMDEKGNLTTAGFACSQCGQPLFVYKLEQVSEKGKAYTNYFGRCNVAEHEKLILLAQLKPEKDSDEAVTYSLGKFGQRALDFYSIHVTKESTHPVKPLAQIAGNRYASGPVGKALSDACMGTIASFLSKYQDIIIEHQKVVKGNQKRLESLRELAGKENLEYPSVTLPPQPHTKEGVDAYNEVIARVRMWVNLNLWQKLKLSRDDAKPLLRLKGFPSFPLVERQANEVDWWDMVCNVKKLINEKKEDGKVFWQNLAGYKRQEALRPYLSSEEDRKKGKKFARYQLGDLLLHLEKKHGEDWGKVYDEAWERIDKKVEGLSKHIKLEEERRSEDAQSKAALTDWLRAKASFVIEGLKEADKDEFCRCELKLQKWYGDLRGKPFAIEAENSILDISGFSKQYNCAFIWQKDGVKKLNLYLIINYFKGGKLRFKKIKPEAFEANRFYTVINKKSGEIVPMEVNFNFDDPNLIILPLAFGKRQGREFIWNDLLSLETGSLKLANGRVIEKTLYNRRTRQDEPALFVALTFERREVLDSSNIKPMNLIGVDRGENIPAVIALTDPEGCPLSRFKDSLGNPTHILRIGESYKEKQRTIQAKKEVEQRRAGGYSRKYASKAKNLADDMVRNTARDLLYYAVTQDAMLIFENLSRGFGRQGKRTFMAERQYTRMEDWLTAKLAYEGLASKTYLSKTLAQYTSKTCSNCGFTITSADYDRVLEKLKKTATGWMTTINGKELKVEGQITYYNRYKRQNVVKDLSVELDRLSEESVNNDISSWTKGRSGEALSLLKKRFSHRPVQEKFVCLNCGFETHADEQAALNIARSWLFLRSQEYKKYQTNKTTGNTDKRAFVETWQSFYRKKLKEVWKPAV

SEQ ID NO: 27894 - protein, 979 aa, synthetic construct
  REGION 1..979: note = engineered CasX variant
QEIKRINKIRRRLVKDSNTKKAGKTRGPMKTLLVRVMTPDLRERLENLRKKPENIPQPISNTSRANLNKLLTDYTEMKKAILHVYWEEFQKDPVGLMSRVAQPASKKIDQNKLKPEMDEKGNLTTAGFACSQCGQPLFVYKLEQVSEKGKAYTNYFGRCNVAEHEKLILLAQLKPEKDSDEAVTYSLGKFGQRALDFYSIHVTKESTHPVKPLAQIAGNRYASGPVGKALSDACMGTIASFLSKYQDIIIEHQKVVKGNQKRLESLRELAGKENLEYPSVTLPPQPHTKEGVDAYNEVIARVRMWVNLNLWQKLKLSRDDAKPLLRLKGFPSFPLVERQANEVDWWDMVCNVKKLINEKKEDGKVFWQNLAGYKRQEALRPYLSSEEDRKKGKKFARYQLGDLLLHLEKKHGEDWGKVYDEAWERIDKKVEGLSKHIKLEEERRSEDAQSKAALTDWLRAKASFVIEGLKEADKDEFCRCELKLQKWYGDLRGKPFAIEAENSILDISGFSKQYNCAFIWQKDGVKKLNLYLIINYFKGGKLRFKKIKPEAFEANRFYTVINKKSGEIVPMEVNFNFDDPNLIILPLAFGKRQGREFIWNDLLSLETGSLKLANGRVIEKTLYNRRTRQDEPALFVALTFERREVLDSSNIKPMNLIGVDRGENIPAVIALTDPEGCPLSRFKDSLGNPTHILRIGESYKEKQRTIQAKKEVEQRRAGGYSRKYASKAKNLADDMVRNTARDLLYYAVTQDAMLIFENLSRGFGRQGKRTFMAERQYTRMEDWLTAKLAYEGLPSKVYLSKTLAQYTSKTCSNCGFTITSADYDRVLEKLKKTATGWMTTINGKELKVEGQITYYNRYKRQNVVKDLSVELDRLSEESVNNDISSWTKGRSGEALSLLKKRFSHRPVQEKFVCLNCGFETHADEQAALNIARSWLFLRSQEYKKYQTNKTTGNTDKRAFVETWQSFYRKKLKEVWKPAV

SEQ ID NO: 27895 - protein, 980 aa, synthetic construct
  REGION 1..980: note = engineered CasX variant
QEIKRINKIRRRLVKDSNTKKAGKTRGPMKTLLVRVMTPDLRERLENLRKKPENIPQPISNTSRANLNKLLTDYTEMKKAILHVYWEEFQKDPVGLMSRVAQPASKKIDQNKLKPEMDEKGNLTTAGFACSQCGQPLFVYKLEQVSEKGKAYTNYFGRCNVAEHEKLILLAQLKPEKDSDEAVTYSLGKFGQRALDFYSIHVTKESTHPVKPLAQIAGNRYASGPVGKALSDACMGTIASFLSKYQDIIIEHQKVVKGNQKRLESLRELAGKENLEYPSVTLPPQPHTKEGVDAYNEVIARVRMWVNLNLWQKLKLSRDDAKPLLRLKGFPSFPLVERQANEVDWWDMVCNVKKLINEKKEDGKVFWQNLAGYKRQEALRPYLSSEEDRKKGKKFARYQLGDLLLHLEKKHGEDWGKVYDEAWERIDKKVEGLSKHIKLEEERRSEDAQSKAALTDWLRAKASFVIEGLKEADKDEFCRCELKLQKWYGDLRGKPFAIEAENSILDISGFSKQYNCAFIWQKDGVKKLNLYLIINYFKGGKLRFKKIKPEAFEANRFYTVINKKSGEIVPMEVNFNFDDPNLIILPLAFGKRQGREFIWNDLLSLETGSLKLANGRVIEKTLYNRRTRQDEPALFVALTFERREVLDSSNIKPMNLIGVDRGENIPAVIALTDPEGCPLSRFKDSLGNPTHILRIGESYKEKQRTIQAKKEVEQRRAGGYSRKYASKAKNLADDMVRNTARDLLYYAVTQDAMLIFENLSRGFGRQGKRTFMAERQYTRMEDWLTAKLAYEGPLPSKTYLSKTLAQYTSKTCSNCGFTITSADYDRVLEKLKKTATGWMTTINGKELKVEGQITYYNRYKRQNVVKDLSVELDRLSEESVNNDISSWTKGRSGEALSLLKKRFSHRPVQEKFVCLNCGFETHADEQAALNIARSWLFLRSQEYKKYQTNKTTGNTDKRAFVETWQSFYRKKLKEVWKPAV

SEQ ID NO: 27896 - protein, 980 aa, synthetic construct
  REGION 1..980: note = engineered CasX variant
QEIKRINKIRRRLVKDSNTKKAGKTRGPMKTLLVRVMTPDLRERLENLRKKPENIPQPISNTSRANLNKLLTDYTEMKKAILHVYWEEFQKDPVGLMSRVAQPASKKIDQNKLKPEMDEKGNLTTAGFACSQCGQPLFVYKLEQVSEKGKAYTNYFGRCNVAEHEKLILLAQLKPEKDSDEAVTYSLGKFGQRALDFYSIHVTKESTHPVKPLAQIAGNRYASGPVGKALSDACMGTIASFLSKYQDIIIEHQKVVKGNQKRLESLRELAGKENLEYPSVTLPPQPHTKEGVDAYNEVIARVRMWVNLNLWQKLKLSRDDAKPLLRLKGFPSFPLVERQANEVDWWDMVCNVKKLINEKKEDGKVFWQNLAGYKRQEALRPYLSSEEDVRKKGKKFARYQLGDLLLHLEKKHGEDWGKVYDEAWERIDKKVEGLSKHIKLEEERRSEDAQSKAALTDWLRAKASFVIEGLKEADKDEFCRCELKLQKWYGDLRGKPFAIEAENSILDISGFSKQYNCAFIWQKDGVKKLNLYLIINYFKGGKLRFKKIKPEAFEANRFYTVINKKSGEIVPMEVNFNFDDPNLIILPLAFGKRQGREFIWNDLLSLETGSLKLANGRVIEKTLYNRRTRQDEPALFVALTFERREVLDSSNIKPMNLIGVDRGENIPAVIALTDPEGCPLSRFKDSLGNPTHILRIGESYKEKQRTIQAKKEVEQRRAGGYSRKYASKAKNLADDMVRNTARDLLYYAVTQDAMLIFENLSRGFGRQGKRTFMAERQYTRMEDWLTAKLAYEGLPSKTYLSKTLAQYTSKTCSNCGFTITSADYDRVLEKLKKTATGWMTTINGKELKVEGQITYYNRYKRQNVVKDLSVELDRLSEESVNNDISSWTKGRSGEALSLLKKRFSHRPVQEKFVCLNCGFETHADEQAALNIARSWLFLRSQEYKKYQTNKTTGNTDKRAFVETWQSFYRKKLKEVWKPAV

SEQ ID NO: 27897 - protein, 979 aa, synthetic construct
  REGION 1..979: note = engineered CasX variant
QEIKRINKIRRRLVKDSNTKKAGKTRGPMKTLLVRVMTPDLRERLENLRKKPENIPQPISNTSRANLNKLLTDYTEMKKAILHVYWEEFQKDPVGLMSRVAQPASKKIDQNKLKPEMDEKGNLTTAGFACSQCGQPLFVYKLEQVSEKGKAYTNYFGRCNVAEHEKLILLAQLKPEKDSDEAVTYSLGKFGQRALDFYSIHVTKESTHPVKPLAQIAGNRYASGPVGKALSDACMGTIASFLSKYQDIIIEHQKVVKGNQKRLESLRELAGKENLEYPSVTLPPQPHTKEGVDAYNEVIARVRMWVNLNLWQKLKLSRDDAKPLLRLKGFPSFPLVERQANEVDWWDMVCNVKKLINEKKEDGKVFWQNLAGYKRQEALRPYLSSEEDRKKGKKFARYQLGDLLLHLEKKHGEDWGKVYDEAWERIDKKVEGLSKHIKLEEERRSEDAQSKAALTDWLRAKASFVIEGLKEADKDEFCRCELKLQKWYGDLRGKPFAIEAENSILDISGFSKQYNCAFIWQKDGVKKLNLYLIINYFKGGKLRFKKIKPEAFEANRFYTVINKKSGEIVPMEVNFNFDDPNLIILPLAFGKRQGREFIWNDLLSLETGSLKLANGRVIEKTLYNRRTRQDEPALFVALTFERREVLDSSNIKPMNLIGVDRGENIPAVIALTDPEGCPLSRFKDSLGNPTHILRIGESYKEKQRTIQAKKEVEQRRAGGYSRKYASKAKNLADDMVRNTARDLLYYAVTQDAMLIFENLSRGFGRQGKRTFMAERQYTRMEDWLTAKLAYEGLPSKTYLSKTLAQYTSKTCSNCGFTITSADYDRMLEKLKKTATGWMTTINGKELKVEGQITYYNRYKRQNVVKDLSVELDRLSEESVNNDISSWTKGRSGEALSLLKKRFSHRPVQEKFVCLNCGFETHADEQAALNIARSWLFLRSQEYKKYQTNKTTGNTDKRAFVETWQSFYRKKLKEVWKPAV

SEQ ID NO: 27898 - protein, 979 aa, synthetic construct
  REGION 1..979: note = engineered CasX variant
QEIKRINKIRRRLVKDSNTKKAGKTRGPMKTLLVRVMTPDLRERLENLRKKPENIPQPISNTSRANLNKLLTDYTEMKKAILHVYWEEFQKDPVGLMSRVAQPASKKIDQNKLKPEMDEKGNLTTAGFACSQCGQPLFVYKLEQVSEKGKAYTNYFGRCNVAEHEKLILLAQLKPEKDSDEAVTYSLGKFGQRALDFYSIHVTKESTHPVKPLAQIAGNRYASGPVGKALSDACMGTIASFLSKYQDIIIEHQKVVKGNQKRLESLRELAGKENLEYPSVTLPPQPHTKEGVDAYNEVIARVRMWVNLNLWQKLKLSRDDAKPLLRLKGFPSFPLVERQANEVDWWDMVCNVKKLINEKKEDGKVFWQNLAGYKRQEALRPYLSSEEDRKKGKKFARYQLGDLLLHLEKKHGEDWGKVYDEAWERIDKKVEGLSKHIKLEEERRSEDAQSKAALTDWLRAKASFVIEGLKEADKDEFCRCELKLQKWYGDLRGKPFAIEAENSILDISGFSKQYNCAFIWQKDGVKKLNLYLIINYFKGGKLRFKKIKPEAFEANRFYTVINKKSGEIVPMEVNFNFDDPNLIILPLAFGKRQGREFIWNDLLSLETGSLKLANGRVIEKTLYNRRTRQDEPALFVALTFERREVLDSSNIKPMNLIGVDRGENIPAVIALTDPEGCPLSRFKDSLGNPTHILRIGESYKEKQRTIQAKKEVEQRRAGGYSRKYASKAKNLADDMVRNTARDLLYYAVTQDAMLIFENLSRGFGRQGKRTFMAERQYTRMEDWLTAKLAYEGLPSKTYLSKTLAQYTSKTCSNCGFTITSADYDRVLEKLKKTATGWMTTINGKELKVEGQITYYNRYKRQNVVKDLSVELDRLSEESVNNDISSWTKGRQGEALSLLKKRFSHRPVQEKFVCLNCGFETHADEQAALNIARSWLFLRSQEYKKYQTNKTTGNTDKRAFVETWQSFYRKKLKEVWKPAV

SEQ ID NO: 27899 - protein, 979 aa, synthetic construct
  REGION 1..979: note = engineered CasX variant
QEIKRINKIRRRLVKDSNTKKAGKTRGPMKTLLVRVMTPDLRERLENLRKKPENIPQPISNTSRANLNKLLTDYTEMKKAILHVYWEEFQKDPVGLMSRVAQPASKKIDQNKLKPEMDEKGNLTTAGFACSQCGQPLFVYKLEQVSEKGKAYTNYFGRCNVAEHEKLILLAQLKPEKDSDEAVTYSLGKFGQRALDFYSIHVTKESTHPVKPLAQIAGNRYASGPVGKALSDACMGTIASFLSKYQDIIIEHQKVVKGNQKRLESLRELAGKENLEYPSVTLPPQPHTKEGVDAYNEVIARVRMWVNLNLWQKLKLSRDDAKPLLRLKGFPSFPLVERQANEVDWWDMVCNVKKLINEKKEDGKVFWQNLAGYKRQEALRPYLSSEEDRKKGKKFARYQLGDLLLHLEKKHGEDWGKVYDEAWERIDKKVEGLSKHIKLEEERRSEDAQSKAALTDWLRAKASFVIEGLKEADKDEFCRCELKLQKWYGDLRGKPFAIEAENSILDISGFSKQYNCAFIWQKDGVKKLNLYLIINYFKGGKLRFKKIKPEAFEANRFYTVINKKSGEIVPMEVNFNFDDPNLIILPLAFGKRQGREFIWNDLLSLETGSLKLANGRVIEKTLYNRRTRQDEPALFVALTFERREVLDSSNIKPMNLIGVDRGENIPAVIALTDPEGCPLSRFKDSLGNPTHILRIGESYKEKQRTIQAKKEVEQRRAGGYSRKYASKAKNLADDMVRNTARDLLYYAVTQDAMLIFENLSRGFGRQGKRTFMAERQYTRMEDWLTAKLAYEGLPSKTYLSKTLAQYTSKTCSNCGFTITSADYDRVLEKLKKTATGWMTTINGKELKVEGQITYYNRYKRQNVVKDLSVELDRLSEESVNNDISSWTKGRSGEALSLLKKRFSHRPVQEKFVCLNCEFETHADEQAALNIARSWLFLRSQEYKKYQTNKTTGNTDKRAFVETWQSFYRKKLKEVWKPAV

SEQ ID NO: 27900 - protein, 980 aa, synthetic construct
  REGION 1..980: note = engineered CasX variant
QEIKRINKIRRRLVKDSNTKKAGKTRGPMKTLLVRVMTPDLRERLENLRKKPENIPQPISNTSRANLNKLLTDYTEMKKAILHVYWEEFQKDPVGLMSRVAQPASKKIDQNKLKPEMDEKGNLTTAGFACSQCGQPLFVYKLEQVSEKGKAYTNYFGRCNVAEHEKLILLAQLKPEKDSDEAVTYSLGKFGQRALDFYSIHVTKESTHPVKPLAQIAGNRYASGPVGKALSDACMGTIASFLSKYQDIIIEHQKVVKGNQKRLESLRELAGKENLEYPSVTLPPQPHTKEGVDAYNEVIARVRMWVNLNLWQKLKLSRDDAKPLLRLKGFPSFPLVERQANEVDWWDMVCNVKKLINEKKEDGKVFWQNLAGYKRQEALRPYLSSEEDRKKGKKFARYQLGDLLLHLEKKHGEDWGKVYDEAWERIDKKVEGLSKHIKLEEERRSEDAQSKAALTDWLRAKASFVIEGLKEADKDEFCRCELKLQKWYGDLRGKPFAIEAENSILDISGFSKQYNCAFIWQKDGVKKLNLYLIINYFKGGKLRFKKIKPEAFEANRFYTVINKKSGEIVPMEVNFNFDDPNLIILPLAFGKRQGREFIWNDLLSLETGSLKLANGRVIEKTLYNRRTRQDEPALFVALTFERREVLDSSNIKPMNLIGVDRGENIPAVIALTDPEGCPLSRFKDSLGNPTHILRIGESYKEKQRTIQAKKEVEQRRAGGYSRKYASKAKNLADDMVRNTARDLLYYAVTQDAMLIFENLSRGFGRQGKRTFMAERQYTRMEDWLTAKLAYEGLPSKTYLSKTLAQYTSKTCSNCGFTITSADYDRVLEKLKKTATGWMTTINGKELKVEGQITYYNRYKRQNVVKDLSVELDRLSEESVNNDISSWTKGRSGEALSLLKKRFSHRPVQEKFVCLNCGFETHADEQAALNIARSWLFLRSQEYKKYQTNKTSTGNTDKRAFVETWQSFYRKKLKEVWKPAV

SEQ ID NO: 27901 - protein, 980 aa, synthetic construct
  REGION 1..980: note = engineered CasX variant
QEIKRINKIRRRLVKDSNTKKAGKTRGPMKTLLVRVMTPDLRERLENLRKKPENIPQPISNTSRANLNKLLTDYTEMKKAILHVYWEEFQKDPVGLMSRVAQPASKKIDQNKLKPEMDEKGNLTTAGFACSQCGQPLFVYKLEQVSEKGKAYTNYFGRCNVAEHEKLILLAQLKPEKDSDEAVTYSLGKFGQRALDFYSIHVTKESTHPVKPLAQIAGNRYASGPVGKALSDACMGTIASFLSKYQDIIIEHQKVVKGNQKRLESLRELAGKENLEYPSVTLPPQPHTKEGVDAYNEVIARVRMWVNLNLWQKLKLSRDDAKPLLRLKGFPSFPLVERQANEVDWWDMVCNVKKLINEKKEDGKVFWQNLAGYKRQEALRPYLSSEEDRKKGKKFARYQLGDLLLHLEKKHGEDWGKVYDEAWERIDKKVEGLSKHIKLEEERRSEDAQSKAALTDWLRAKASFVIEGLKEADKDEFCRCELKLQKWYGDLRGKPFAIEAENSILDISGFSKQYNCAFIWQKDGVKKLNLYLIINYFKGGKLRFKKIKPEAFEANRFYTVINKKSGEIVPMEVNFNFDDPNLIILPLAFGKRQGREFIWNDLLSLETGSLKLANGRVIEKTLYNRRTRQDEPALFVALTFERREVLDSSNIKPMNLIGVDRGENIPAVIALTDPEGCPLSRFKDSLGNPTHILRIGESYKEKQRTIQAKKEVEQRRAGGYSRKYASKAKNLADDMVRNTARDLLYYAVTQDAMLIFENLSRGFGRQGKRTFMAERQYTRMEDWLTAKLAYEGLPSKTYLSKTLAQYTSKTCSNCGFTITSADYDRVLEKLKKTATGWMTTINGKELKVEGQITYYNRYKRQNVVKDLSVELDRLSEESVNNDISSWTKGRSGEALSLLKKRFSHRPVQEKFVCLNCGFETHADEQAALNIARSWLFLRSQEYKKYQTNKTTGKNTDKRAFVETWQSFYRKKLKEVWKPAV

SEQ ID NO: 27902 - protein, 979 aa, synthetic construct
  REGION 1..979: note = engineered CasX variant
QEIKRINKIRRRLVKDSNTKKAGKTRGPMKTLLVRVMTPDLRERLENLRKKPENIPQPISNTSRANLNKLLTDYTEMKKAILHVYWEEFQKDPVGLMSRVAQPASKKIDQNKLKPEMDEKGNLTTAGFACSQCGQPLFVYKLEQVSEKGKAYTNYFGRCNVAEHEKLILLAQLKPEKDSDEAVTYSLGKFGQRALDFYSIHVTKESTHPVKPLAQIAGNRYASGPVGKALSDACMGTIASFLSKYQDIIIEHQKVVKGNQKRLESLRELAGKENLEYPSVTLPPQPHTKEGVDAYNEVIARVRMWVNLNLWQKLKLSRDDAKPLLRLKKFPSFPLVERQANEVDWWDMVCNVKKLINEKKEDGKVFWQNLAGYKRQEALRPYLSSEEDRKKGKKFARYQLGDLLLHLEKKHGEDWGKVYDEAWERIDKKVEGLSKHIKLEEERRSEDAQSKAALTDWLRAKASFVIEGLKEADKDEFCRCELKLQKWYGDLRGKPFAIEAENSILDISGFSKQYNCAFIWQKDGVKKLNLYLIINYFKGGKLRFKKIKPEAFEANRFYTVINKKSGEIVPMEVNFNFDDPNLIILPLAFGKRQGREFIWNDLLSLETGSLKLANGRVIEKTLYNRRTRQDEPALFVALTFERREVLDSSNIKPMNLIGVDRGENIPAVIALTDPEGCPLSRFKDSLGNPTHILRIGESYKEKQRTIQAKKEVEQRRAGGYSRKYASKAKNLADDMVRNTARDLLYYAVTQDAMLIFENLSRGFGRQGKRTFMAERQYTRMEDWLTAKLAYEGLPSKTYLSKTLAQYTSKTCSNCGFTITSADYDRVLEKLKKTATGWMTTINGKELKVEGQITYYNRYKRQNVVKDLSVELDRLSEESVNNDISSWTKGRSGEALSLLKKRFSHRPVQEKFVCLNCGFETHADEQAALNIARSWLFLRSQEYKKYQTNKTTGNTDKRAFVETWQSFYRKKLKEVWKPAV

SEQ ID NO: 27903 - protein, 979 aa, synthetic construct
  REGION 1..979: note = engineered CasX variant
QEIKRINKIRRRLVKDSNTKKAGKTRGPMKTLLVRVMTPDLRERLENLRKKPENIPQPISNTSRANLNKLLTDYTEMKKAILHVYWEEFQKDPVGLMSRVAQPASKKIDQNKLKPEMDEKGNLTTAGFACSQCGQPLFVYKLEQVSEKGKAYTNYFGRCNVAEHEKLILLAQLKPEKDSDEAVTYSLGKFGQRALDFYSIHVTKESTHPVKPLAQIAGNRYASGPVGKALSDACMGTIASFLSKYQDIIIEHQKVVKGNQKRLESLRELAGKENLEYPSVTLPPQPHTKEGVDAYNEVIARVRMWVNLNLWQKLKLSRDDAKPLLRLKGFPSFPLVERQANEVDWWDMVCNVKKLINEKKEDGKVFWQNLAGYKRQEALRPYLSSEEDRKKGKKFARYQLGDLLLHLEKKHGEDWGKVYDEAWERIDKKVEGLSKHIKLEEERRSEDAQSKAALTDWLRAKASFVIEGLKEADKDEFCRCELKLQKWYGDLRGKPFAIEAENSILDISGFSKQYNCAFIWQKDGVKKLNLYLIINYFKGGKLRFKKIKPEAFEANRFYTVINKKSGEIVPMEVNFNFDDPNLIILPLAFGKRQGREFIWNDLLSLETGSLKLANGRVIEKTLYNRRTRQDEPALFVALTFERREVLDSSNIKPMNLIGVDRGENIPAVIALTDPEGCPLSRFKDSLGNPTHILRIGERYKEKQRTIQAKKEVEQRRAGGYSRKYASKAKNLADDMVRNTARDLLYYAVTQDAMLIFENLSRGFGRQGKRTFMAERQYTRMEDWLTAKLAYEGLPSKTYLSKTLAQYTSKTCSNCGFTITSADYDRVLEKLKKTATGWMTTINGKELKVEGQITYYNRYKRQNVVKDLSVELDRLSEESVNNDISSWTKGRSGEALSLLKKRFSHRPVQEKFVCLNCGFETHADEQAALNIARSWLFLRSQEYKKYQTNKTTGNTDKRAFVETWQSFYRKKLKEVWKPAV

SEQ ID NO: 27904 - protein, 979 aa, synthetic construct
  REGION 1..979: note = engineered CasX variant
QEIKRINKIRRRLVKDSNTKKAGKTRGPMKTLLVRVMTPDLRERLENLRKKPENIPQPISNTSRANLNKLLTDYTEMKKAILHVYWEEFQKDPVGLMSRVAQPASKKIDQNKLKPEMDEKGNLTTAGFACSQCGQPLFVYKLEQVSEKGKAYTNYFGRCNVAEHEKLILLAQLKPEKDSDEAVTYSLGKFGQRALDFYSIHVTKESTHPVKPLAQIAGNRYASGPVGKALSDACMGTIASFLSKYQDIIIEHQKVVKGNQKRLESLRELAGKENLEYPSVTLPPQPHTKEGVDAYNEVIARVRMWVNLNLWQKLKLSRDDAKPLLRLKGFPSFPLVERQANEVDWWDMVCNVKKLINEKKEDGKVFWQNLAGYKRQEALRPYLSSEEDRKKGKKFARYQLGDLLLHLEKKHGEDWGKVYDEAWERIDKKVEGLSKHIKLEEERRSEDAQSKAALTDWLRAKASFVIEGLKEADKDEFCRCELKLQKWYGDLRGKPFAIEAENSILDISGFSKQYNCAFIWQKDGVKKLNLYLIINYFKGGKLRFKKIKPEAFEANRFYTVINKKSGEIVPMEVNFNFDDPNLIILPLAFGKRQGREFIWNDLLSLETGSLQLANGRVIEKTLYNRRTRQDEPALFVALTFERREVLDSSNIKPMNLIGVDRGENIPAVIALTDPEGCPLSRFKDSLGNPTHILRIGESYKEKQRTIQAKKEVEQRRAGGYSRKYASKAKNLADDMVRNTARDLLYYAVTQDAMLIFENLSRGFGRQGKRTFMAERQYTRMEDWLTAKLAYEGLPSKTYLSKTLAQYTSKTCSNCGFTITSADYDRVLEKLKKTATGWMTTINGKELKVEGQITYYNRYKRQNVVKDLSVELDRLSEESVNNDISSWTKGRSGEALSLLKKRFSHRPVQEKFVCLNCGFETHADEQAALNIARSWLFLRSQEYKKYQTNKTTGNTDKRAFVETWQSFYRKKLKEVWKPAV

SEQ ID NO: 27905 - protein, 978 aa, synthetic construct
  REGION 1..978: note = engineered CasX variant
QEIKRINKIRRRLVKDSNTKKAGKTGPMKTLLVRVMTPDLRERLENLRKKPENIPQPISNTSRANLNKLLTDYTEMKKAILHVYWEEFQKDPVGLMSRVAQPASKKIDQNKLKPEMDEKGNLTTAGFACSQCGQPLFVYKLEQVSEKGKAYTNYFGRCNVAEHEKLILLDQLKPEKDSDEAVTYSLGKFGQRALDFYSIHVTKESTHPVKPLAQIAGNRYASSPVGKALSDACMGTIASFLSKYQDIIIEHQKVVKGNQKRLESLRELAGKENLEYPSVTLPPQPHTKEGVDAYNEVIARVRMWVNLNLWQKLKLSRDDAKPLLRLKGFPSFPLVERQANEVDWWDMVCNVKKLINEKKEDGKVFWQNLAGYKRQEALRPYLSSEEDRKKGKKFARYQLGDLLLHLEKKHGEDWGKVYDEAWERIDKKVEGLSKHIKLEEERRSEDAQSKAALTDWLRAKASFVIEGLKEADKDEFCRCELKLQKWYGDLRGKPFAIEAENSILDISGFSKQYNCAFIWQKDGVKKLNLYLIINYFKGGKLRFKKIKPEAFEANRFYTVINKKSGEIVPMEVNFNFDDPNLIILPLAFGKRQGREFIWNDLLSLETGSLKLANGRVIEKTLYNRRTRQDEPALFVALTFERREVLDSSNIKPMNLIGVDRGENIPAVIALTDPEGCPLSRFKDSLGNPTHILRIGESYKEKQRTIQAKKEVEQRRAGGYSRKYASKAKNLADDMVRNTARDLLYYAVTQDAMLIFENLSRGFGRQGKRTFMAERQYTRMEDWLTAKLAYEGLPSKTYLSKTLAQYTSKTCSNCGFTITSADYDRVLEKLKKTATGWMTTINGKELKVEGQITYYNRYKRQNVVKDLSVELDRLSEESVNNDISSWTKGRSGEALSLLKKRFSHRPVQEKFVCLNCGFETHADEQAALNIARSWLFLRSQEYKKYQTNKTTGNTDKRAFVETWQSFYRKKLKEVWKPAV

SEQ ID NO: 27906 - protein, 978 aa, synthetic construct
  REGION 1..978: note = engineered CasX variant
QEGKRINKIRRRLVKDSNTKKAGKTGPMKTLLVRVMTPDLRERLENLRKKPENIPQPISNTSRANLNKLLTDYTEMKKAILHVYWEEFQKDPVGLMSRVAQPASKKIDQNKLKPEMDEKGNLTTAGFACSQCGQPLFVYKLEQVSEKGKAYTNYFGRCNVAEHEKLILLAQLKPEKDSDEAVTYSLGKFGQRALDFYSIHVTKESTHPVKPLAQIAGNRYASSPVGKALSDACMGTIASFLSKYQDIIIEHQKVVKGNQKRLESLRELAGKENLEYPSVTLPPQPHTKEGVDAYNEVIARVRMWVNLNLWQKLKLSRDDAKPLLRLKGFPSFPLVERQANEVDWWDMVCNVKKLINEKKEDGKVFWQNLAGYKRQEALRPYLSSEEDRKKGKKFARYQLGDLLLHLEKKHGEDWGKVYDEAWERIDKKVEGLSKHIKLEEERRSEDAQSKAALTDWLRAKASFVIEGLKEADKDEFCRCELKLQKWYGDLRGKPFAIEAENSILDISGFSKQYNCAFIWQKDGVKKLNLYLIINYFKGGKLRFKKIKPEAFEANRFYTVINKKSGEIVPMEVNFNFDDPNLIILPLAFGKRQGREFIWNDLLSLETGSLKLANGRVIEKTLYNRRTRQDEPALFVALTFERREVLDSSNIKPMNLIGVDRGENIPAVIALTDPEGCPLSRFKDSLGNPTHILRIGESYKEKQRTIQAKKEVEQRRAGGYSRKYASKAKNLADDMVRNTARDLLYYAVTQDAMLIFENLSRGFGRQGKRTFMAERQYTRMEDWLTAKLAYEGLPSKTYLSKTLAQYTSKTCSNCGFTITSADYDRVLEKLKKTATGWMTTINGKELKVEGQITYYNRYKRQNVVKDLSVELDRLSEESVNNDISSWTKGRSGEALSLLKKRFSHRPVQEKFVCLNCGFETHADEQAALNIARSWLFLRSQEYKKYQTNKTTGNTDKRAFVETWQSFYRKKLKEVWKPAV

SEQ ID NO: 27907 - protein, 979 aa, synthetic construct
  REGION 1..979: note = engineered CasX variant
QEIGKRINKIRRRLVKDSNTKKAGKTGPMKTLLVRVMTPDLRERLENLRKKPENIPQPISNTSRANLNKLLTDYTEMKKAILHVYWEEFQKDPVGLMSRVAQPASKKIDQNKLKPEMDEKGNLTTAGFACSQCGQPLFVYKLEQVSEKGKAYTNYFGRCNVAEHEKLILLAQLKPEKDSDEAVTYSLGKFGQRALDFYSIHVTKESTHPVKPLAQIAGNRYASSPVGKALSDACMGTIASFLSKYQDIIIEHQKVVKGNQKRLESLRELAGKENLEYPSVTLPPQPHTKEGVDAYNEVIARVRMWVNLNLWQKLKLSRDDAKPLLRLKGFPSFPLVERQANEVDWWDMVCNVKKLINEKKEDGKVFWQNLAGYKRQEALRPYLSSEEDRKKGKKFARYQLGDLLLHLEKKHGEDWGKVYDEAWERIDKKVEGLSKHIKLEEERRSEDAQSKAALTDWLRAKASFVIEGLKEADKDEFCRCELKLQKWYGDLRGKPFAIEAENSILDISGFSKQYNCAFIWQKDGVKKLNLYLIINYFKGGKLRFKKIKPEAFEANRFYTVINKKSGEIVPMEVNFNFDDPNLIILPLAFGKRQGREFIWNDLLSLETGSLKLANGRVIEKTLYNRRTRQDEPALFVALTFERREVLDSSNIKPMNLIGVDRGENIPAVIALTDPEGCPLSRFKDSLGNPTHILRIGESYKEKQRTIQAKKEVEQRRAGGYSRKYASKAKNLADDMVRNTARDLLYYAVTQDAMLIFENLSRGFGRQGKRTFMAERQYTRMEDWLTAKLAYEGLPSKTYLSKTLAQYTSKTCSNCGFTITSADYDRVLEKLKKTATGWMTTINGKELKVEGQITYYNRYKRQNVVKDLSVELDRLSEESVNNDISSWTKGRSGEALSLLKKRFSHRPVQEKFVCLNCGFETHADEQAALNIARSWLFLRSQEYKKYQTNKTTGNTDKRAFVETWQSFYRKKLKEVWKPAV

SEQ ID NO: 27908 - protein, 978 aa, synthetic construct
  REGION 1..978: note = engineered CasX variant
QEIGRINKIRRRLVKDSNTKKAGKTGPMKTLLVRVMTPDLRERLENLRKKPENIPQPISNTSRANLNKLLTDYTEMKKAILHVYWEEFQKDPVGLMSRVAQPASKKIDQNKLKPEMDEKGNLTTAGFACSQCGQPLFVYKLEQVSEKGKAYTNYFGRCNVAEHEKLILLAQLKPEKDSDEAVTYSLGKFGQRALDFYSIHVTKESTHPVKPLAQIAGNRYASSPVGKALSDACMGTIASFLSKYQDIIIEHQKVVKGNQKRLESLRELAGKENLEYPSVTLPPQPHTKEGVDAYNEVIARVRMWVNLNLWQKLKLSRDDAKPLLRLKGFPSFPLVERQANEVDWWDMVCNVKKLINEKKEDGKVFWQNLAGYKRQEALRPYLSSEEDRKKGKKFARYQLGDLLLHLEKKHGEDWGKVYDEAWERIDKKVEGLSKHIKLEEERRSEDAQSKAALTDWLRAKASFVIEGLKEADKDEFCRCELKLQKWYGDLRGKPFAIEAENSILDISGFSKQYNCAFIWQKDGVKKLNLYLIINYFKGGKLRFKKIKPEAFEANRFYTVINKKSGEIVPMEVNFNFDDPNLIILPLAFGKRQGREFIWNDLLSLETGSLKLANGRVIEKTLYNRRTRQDEPALFVALTFERREVLDSSNIKPMNLIGVDRGENIPAVIALTDPEGCPLSRFKDSLGNPTHILRIGESYKEKQRTIQAKKEVEQRRAGGYSRKYASKAKNLADDMVRNTARDLLYYAVTQDAMLIFENLSRGFGRQGKRTFMAERQYTRMEDWLTAKLAYEGLPSKTYLSKTLAQYTSKTCSNCGFTITSADYDRVLEKLKKTATGWMTTINGKELKVEGQITYYNRYKRQNVVKDLSVELDRLSEESVNNDISSWTKGRSGEALSLLKKRFSHRPVQEKFVCLNCGFETHADEQAALNIARSWLFLRSQEYKKYQTNKTTGNTDKRAFVETWQSFYRKKLKEVWKPAV

SEQ ID NO: 27909 - protein, 979 aa, synthetic construct
  REGION 1..979: note = engineered CasX variant
QEIKGRINKIRRRLVKDSNTKKAGKTGPMKTLLVRVMTPDLRERLENLRKKPENIPQPISNTSRANLNKLLTDYTEMKKAILHVYWEEFQKDPVGLMSRVAQPASKKIDQNKLKPEMDEKGNLTTAGFACSQCGQPLFVYKLEQVSEKGKAYTNYFGRCNVAEHEKLILLAQLKPEKDSDEAVTYSLGKFGQRALDFYSIHVTKESTHPVKPLAQIAGNRYASSPVGKALSDACMGTIASFLSKYQDIIIEHQKVVKGNQKRLESLRELAGKENLEYPSVTLPPQPHTKEGVDAYNEVIARVRMWVNLNLWQKLKLSRDDAKPLLRLKGFPSFPLVERQANEVDWWDMVCNVKKLINEKKEDGKVFWQNLAGYKRQEALRPYLSSEEDRKKGKKFARYQLGDLLLHLEKKHGEDWGKVYDEAWERIDKKVEGLSKHIKLEEERRSEDAQSKAALTDWLRAKASFVIEGLKEADKDEFCRCELKLQKWYGDLRGKPFAIEAENSILDISGFSKQYNCAFIWQKDGVKKLNLYLIINYFKGGKLRFKKIKPEAFEANRFYTVINKKSGEIVPMEVNFNFDDPNLIILPLAFGKRQGREFIWNDLLSLETGSLKLANGRVIEKTLYNRRTRQDEPALFVALTFERREVLDSSNIKPMNLIGVDRGENIPAVIALTDPEGCPLSRFKDSLGNPTHILRIGESYKEKQRTIQAKKEVEQRRAGGYSRKYASKAKNLADDMVRNTARDLLYYAVTQDAMLIFENLSRGFGRQGKRTFMAERQYTRMEDWLTAKLAYEGLPSKTYLSKTLAQYTSKTCSNCGFTITSADYDRVLEKLKKTATGWMTTINGKELKVEGQITYYNRYKRQNVVKDLSVELDRLSEESVNNDISSWTKGRSGEALSLLKKRFSHRPVQEKFVCLNCGFETHADEQAALNIARSWLFLRSQEYKKYQTNKTTGNTDKRAFVETWQSFYRKKLKEVWKPAV

SEQ ID NO: 27910 - protein, 978 aa, synthetic construct
  REGION 1..978: note = engineered CasX variant
QEIKRANKIRRRLVKDSNTKKAGKTGPMKTLLVRVMTPDLRERLENLRKKPENIPQPISNTSRANLNKLLTDYTEMKKAILHVYWEEFQKDPVGLMSRVAQPASKKIDQNKLKPEMDEKGNLTTAGFACSQCGQPLFVYKLEQVSEKGKAYTNYFGRCNVAEHEKLILLAQLKPEKDSDEAVTYSLGKFGQRALDFYSIHVTKESTHPVKPLAQIAGNRYASSPVGKALSDACMGTIASFLSKYQDIIIEHQKVVKGNQKRLESLRELAGKENLEYPSVTLPPQPHTKEGVDAYNEVIARVRMWVNLNLWQKLKLSRDDAKPLLRLKGFPSFPLVERQANEVDWWDMVCNVKKLINEKKEDGKVFWQNLAGYKRQEALRPYLSSEEDRKKGKKFARYQLGDLLLHLEKKHGEDWGKVYDEAWERIDKKVEGLSKHIKLEEERRSEDAQSKAALTDWLRAKASFVIEGLKEADKDEFCRCELKLQKWYGDLRGKPFAIEAENSILDISGFSKQYNCAFIWQKDGVKKLNLYLIINYFKGGKLRFKKIKPEAFEANRFYTVINKKSGEIVPMEVNFNFDDPNLIILPLAFGKRQGREFIWNDLLSLETGSLKLANGRVIEKTLYNRRTRQDEPALFVALTFERREVLDSSNIKPMNLIGVDRGENIPAVIALTDPEGCPLSRFKDSLGNPTHILRIGESYKEKQRTIQAKKEVEQRRAGGYSRKYASKAKNLADDMVRNTARDLLYYAVTQDAMLIFENLSRGFGRQGKRTFMAERQYTRMEDWLTAKLAYEGLPSKTYLSKTLAQYTSKTCSNCGFTITSADYDRVLEKLKKTATGWMTTINGKELKVEGQITYYNRYKRQNVVKDLSVELDRLSEESVNNDISSWTKGRSGEALSLLKKRFSHRPVQEKFVCLNCGFETHADEQAALNIARSWLFLRSQEYKKYQTNKTTGNTDKRAFVETWQSFYRKKLKEVWKPAV

SEQ ID NO: 27911 - protein, 978 aa, synthetic construct
  REGION 1..978: note = engineered CasX variant
QEIKRISKIRRRLVKDSNTKKAGKTGPMKTLLVRVMTPDLRERLENLRKKPENIPQPISNTSRANLNKLLTDYTEMKKAILHVYWEEFQKDPVGLMSRVAQPASKKIDQNKLKPEMDEKGNLTTAGFACSQCGQPLFVYKLEQVSEKGKAYTNYFGRCNVAEHEKLILLAQLKPEKDSDEAVTYSLGKFGQRALDFYSIHVTKESTHPVKPLAQIAGNRYASSPVGKALSDACMGTIASFLSKYQDIIIEHQKVVKGNQKRLESLRELAGKENLEYPSVTLPPQPHTKEGVDAYNEVIARVRMWVNLNLWQKLKLSRDDAKPLLRLKGFPSFPLVERQANEVDWWDMVCNVKKLINEKKEDGKVFWQNLAGYKRQEALRPYLSSEEDRKKGKKFARYQLGDLLLHLEKKHGEDWGKVYDEAWERIDKKVEGLSKHIKLEEERRSEDAQSKAALTDWLRAKASFVIEGLKEADKDEFCRCELKLQKWYGDLRGKPFAIEAENSILDISGFSKQYNCAFIWQKDGVKKLNLYLIINYFKGGKLRFKKIKPEAFEANRFYTVINKKSGEIVPMEVNFNFDDPNLIILPLAFGKRQGREFIWNDLLSLETGSLKLANGRVIEKTLYNRRTRQDEPALFVALTFERREVLDSSNIKPMNLIGVDRGENIPAVIALTDPEGCPLSRFKDSLGNPTHILRIGESYKEKQRTIQAKKEVEQRRAGGYSRKYASKAKNLADDMVRNTARDLLYYAVTQDAMLIFENLSRGFGRQGKRTFMAERQYTRMEDWLTAKLAYEGLPSKTYLSKTLAQYTSKTCSNCGFTITSADYDRVLEKLKKTATGWMTTINGKELKVEGQITYYNRYKRQNVVKDLSVELDRLSEESVNNDISSWTKGRSGEALSLLKKRFSHRPVQEKFVCLNCGFETHADEQAALNIARSWLFLRSQEYKKYQTNKTTGNTDKRAFVETWQSFYRKKLKEVWKPAV

SEQ ID NO: 27912 - protein, 978 aa, synthetic construct
  REGION 1..978: note = engineered CasX variant
QEIKRINGIRRRLVKDSNTKKAGKTGPMKTLLVRVMTPDLRERLENLRKKPENIPQPISNTSRANLNKLLTDYTEMKKAILHVYWEEFQKDPVGLMSRVAQPASKKIDQNKLKPEMDEKGNLTTAGFACSQCGQPLFVYKLEQVSEKGKAYTNYFGRCNVAEHEKLILLAQLKPEKDSDEAVTYSLGKFGQRALDFYSIHVTKESTHPVKPLAQIAGNRYASSPVGKALSDACMGTIASFLSKYQDIIIEHQKVVKGNQKRLESLRELAGKENLEYPSVTLPPQPHTKEGVDAYNEVIARVRMWVNLNLWQKLKLSRDDAKPLLRLKGFPSFPLVERQANEVDWWDMVCNVKKLINEKKEDGKVFWQNLAGYKRQEALRPYLSSEEDRKKGKKFARYQLGDLLLHLEKKHGEDWGKVYDEAWERIDKKVEGLSKHIKLEEERRSEDAQSKAALTDWLRAKASFVIEGLKEADKDEFCRCELKLQKWYGDLRGKPFAIEAENSILDISGFSKQYNCAFIWQKDGVKKLNLYLIINYFKGGKLRFKKIKPEAFEANRFYTVINKKSGEIVPMEVNFNFDDPNLIILPLAFGKRQGREFIWNDLLSLETGSLKLANGRVIEKTLYNRRTRQDEPALFVALTFERREVLDSSNIKPMNLIGVDRGENIPAVIALTDPEGCPLSRFKDSLGNPTHILRIGESYKEKQRTIQAKKEVEQRRAGGYSRKYASKAKNLADDMVRNTARDLLYYAVTQDAMLIFENLSRGFGRQGKRTFMAERQYTRMEDWLTAKLAYEGLPSKTYLSKTLAQYTSKTCSNCGFTITSADYDRVLEKLKKTATGWMTTINGKELKVEGQITYYNRYKRQNVVKDLSVELDRLSEESVNNDISSWTKGRSGEALSLLKKRFSHRPVQEKFVCLNCGFETHADEQAALNIARSWLFLRSQEYKKYQTNKTTGNTDKRAFVETWQSFYRKKLKEVWKPAV

SEQ ID NO: 27913 - protein, 978 aa, synthetic construct
  REGION 1..978: note = engineered CasX variant
QEIKRINKIRRRLVKDSNTKKAGKTGPMKTLLVPVMTPDLRERLENLRKKPENIPQPISNTSRANLNKLLTDYTEMKKAILHVYWEEFQKDPVGLMSRVAQPASKKIDQNKLKPEMDEKGNLTTAGFACSQCGQPLFVYKLEQVSEKGKAYTNYFGRCNVAEHEKLILLAQLKPEKDSDEAVTYSLGKFGQRALDFYSIHVTKESTHPVKPLAQIAGNRYASSPVGKALSDACMGTIASFLSKYQDIIIEHQKVVKGNQKRLESLRELAGKENLEYPSVTLPPQPHTKEGVDAYNEVIARVRMWVNLNLWQKLKLSRDDAKPLLRLKGFPSFPLVERQANEVDWWDMVCNVKKLINEKKEDGKVFWQNLAGYKRQEALRPYLSSEEDRKKGKKFARYQLGDLLLHLEKKHGEDWGKVYDEAWERIDKKVEGLSKHIKLEEERRSEDAQSKAALTDWLRAKASFVIEGLKEADKDEFCRCELKLQKWYGDLRGKPFAIEAENSILDISGFSKQYNCAFIWQKDGVKKLNLYLIINYFKGGKLRFKKIKPEAFEANRFYTVINKKSGEIVPMEVNFNFDDPNLIILPLAFGKRQGREFIWNDLLSLETGSLKLANGRVIEKTLYNRRTRQDEPALFVALTFERREVLDSSNIKPMNLIGVDRGENIPAVIALTDPEGCPLSRFKDSLGNPTHILRIGESYKEKQRTIQAKKEVEQRRAGGYSRKYASKAKNLADDMVRNTARDLLYYAVTQDAMLIFENLSRGFGRQGKRTFMAERQYTRMEDWLTAKLAYEGLPSKTYLSKTLAQYTSKTCSNCGFTITSADYDRVLEKLKKTATGWMTTINGKELKVEGQITYYNRYKRQNVVKDLSVELDRLSEESVNNDISSWTKGRSGEALSLLKKRFSHRPVQEKFVCLNCGFETHADEQAALNIARSWLFLRSQEYKKYQTNKTTGNTDKRAFVETWQSFYRKKLKEVWKPAV

SEQ ID NO: 27914 - protein, 978 aa, synthetic construct
  REGION 1..978: note = engineered CasX variant
QEIKRINKIRRRLVKDSNTKKAGKTGPMKTLLVRVMTPDLRERLENLRKKPPNIPQPISNTSRANLNKLLTDYTEMKKAILHVYWEEFQKDPVGLMSRVAQPASKKIDQNKLKPEMDEKGNLTTAGFACSQCGQPLFVYKLEQVSEKGKAYTNYFGRCNVAEHEKLILLAQLKPEKDSDEAVTYSLGKFGQRALDFYSIHVTKESTHPVKPLAQIAGNRYASSPVGKALSDACMGTIASFLSKYQDIIIEHQKVVKGNQKRLESLRELAGKENLEYPSVTLPPQPHTKEGVDAYNEVIARVRMWVNLNLWQKLKLSRDDAKPLLRLKGFPSFPLVERQANEVDWWDMVCNVKKLINEKKEDGKVFWQNLAGYKRQEALRPYLSSEEDRKKGKKFARYQLGDLLLHLEKKHGEDWGKVYDEAWERIDKKVEGLSKHIKLEEERRSEDAQSKAALTDWLRAKASFVIEGLKEADKDEFCRCELKLQKWYGDLRGKPFAIEAENSILDISGFSKQYNCAFIWQKDGVKKLNLYLIINYFKGGKLRFKKIKPEAFEANRFYTVINKKSGEIVPMEVNFNFDDPNLIILPLAFGKRQGREFIWNDLLSLETGSLKLANGRVIEKTLYNRRTRQDEPALFVALTFERREVLDSSNIKPMNLIGVDRGENIPAVIALTDPEGCPLSRFKDSLGNPTHILRIGESYKEKQRTIQAKKEVEQRRAGGYSRKYASKAKNLADDMVRNTARDLLYYAVTQDAMLIFENLSRGFGRQGKRTFMAERQYTRMEDWLTAKLAYEGLPSKTYLSKTLAQYTSKTCSNCGFTITSADYDRVLEKLKKTATGWMTTINGKELKVEGQITYYNRYKRQNVVKDLSVELDRLSEESVNNDISSWTKGRSGEALSLLKKRFSHRPVQEKFVCLNCGFETHADEQAALNIARSWLFLRSQEYKKYQTNKTTGNTDKRAFVETWQSFYRKKLKEVWKPAV

SEQ ID NO: 27915 - protein, 978 aa, synthetic construct
  REGION 1..978: note = engineered CasX variant
QEIKRINKIRRRLVKDSNTKKAGKTGPMKTLLVRVMTPDLRERLENLRKKPENIPQPISNTSQANLNKLLTDYTEMKKAILHVYWEEFQKDPVGLMSRVAQPASKKIDQNKLKPEMDEKGNLTTAGFACSQCGQPLFVYKLEQVSEKGKAYTNYFGRCNVAEHEKLILLAQLKPEKDSDEAVTYSLGKFGQRALDFYSIHVTKESTHPVKPLAQIAGNRYASSPVGKALSDACMGTIASFLSKYQDIIIEHQKVVKGNQKRLESLRELAGKENLEYPSVTLPPQPHTKEGVDAYNEVIARVRMWVNLNLWQKLKLSRDDAKPLLRLKGFPSFPLVERQANEVDWWDMVCNVKKLINEKKEDGKVFWQNLAGYKRQEALRPYLSSEEDRKKGKKFARYQLGDLLLHLEKKHGEDWGKVYDEAWERIDKKVEGLSKHIKLEEERRSEDAQSKAALTDWLRAKASFVIEGLKEADKDEFCRCELKLQKWYGDLRGKPFAIEAENSILDISGFSKQYNCAFIWQKDGVKKLNLYLIINYFKGGKLRFKKIKPEAFEANRFYTVINKKSGEIVPMEVNFNFDDPNLIILPLAFGKRQGREFIWNDLLSLETGSLKLANGRVIEKTLYNRRTRQDEPALFVALTFERREVLDSSNIKPMNLIGVDRGENIPAVIALTDPEGCPLSRFKDSLGNPTHILRIGESYKEKQRTIQAKKEVEQRRAGGYSRKYASKAKNLADDMVRNTARDLLYYAVTQDAMLIFENLSRGFGRQGKRTFMAERQYTRMEDWLTAKLAYEGLPSKTYLSKTLAQYTSKTCSNCGFTITSADYDRVLEKLKKTATGWMTTINGKELKVEGQITYYNRYKRQNVVKDLSVELDRLSEESVNNDISSWTKGRSGEALSLLKKRFSHRPVQEKFVCLNCGFETHADEQAALNIARSWLFLRSQEYKKYQTNKTTGNTDKRAFVETWQSFYRKKLKEVWKPAV

SEQ ID NO: 27916 - protein, 978 aa, synthetic construct
  REGION 1..978: note = engineered CasX variant
QEIKRINKIRRRLVKDSNTKKAGKTGPMKTLLVRVMTPDLRERLENLRKKPENIPQPISNTSRANLNKLLTDYTEMKKAILHVYDEEFQKDPVGLMSRVAQPASKKIDQNKLKPEMDEKGNLTTAGFACSQCGQPLFVYKLEQVSEKGKAYTNYFGRCNVAEHEKLILLAQLKPEKDSDEAVTYSLGKFGQRALDFYSIHVTKESTHPVKPLAQIAGNRYASSPVGKALSDACMGTIASFLSKYQDIIIEHQKVVKGNQKRLESLRELAGKENLEYPSVTLPPQPHTKEGVDAYNEVIARVRMWVNLNLWQKLKLSRDDAKPLLRLKGFPSFPLVERQANEVDWWDMVCNVKKLINEKKEDGKVFWQNLAGYKRQEALRPYLSSEEDRKKGKKFARYQLGDLLLHLEKKHGEDWGKVYDEAWERIDKKVEGLSKHIKLEEERRSEDAQSKAALTDWLRAKASFVIEGLKEADKDEFCRCELKLQKWYGDLRGKPFAIEAENSILDISGFSKQYNCAFIWQKDGVKKLNLYLIINYFKGGKLRFKKIKPEAFEANRFYTVINKKSGEIVPMEVNFNFDDPNLIILPLAFGKRQGREFIWNDLLSLETGSLKLANGRVIEKTLYNRRTRQDEPALFVALTFERREVLDSSNIKPMNLIGVDRGENIPAVIALTDPEGCPLSRFKDSLGNPTHILRIGESYKEKQRTIQAKKEVEQRRAGGYSRKYASKAKNLADDMVRNTARDLLYYAVTQDAMLIFENLSRGFGRQGKRTFMAERQYTRMEDWLTAKLAYEGLPSKTYLSKTLAQYTSKTCSNCGFTITSADYDRVLEKLKKTATGWMTTINGKELKVEGQITYYNRYKRQNVVKDLSVELDRLSEESVNNDISSWTKGRSGEALSLLKKRFSHRPVQEKFVCLNCGFETHADEQAALNIARSWLFLRSQEYKKYQTNKTTGNTDKRAFVETWQSFYRKKLKEVWKPAV

SEQ ID NO: 27917 - protein, 978 aa, synthetic construct
  REGION 1..978: note = engineered CasX variant
QEIKRINKIRRRLVKDSNTKKAGKTGPMKTLLVRVMTPDLRERLENLRKKPENIPQPISNTSRANLNKLLTDYTEMKKAILHVYWEEFQKDPVGLMSRVAQPASKKIDQNKLKPEMDEKGNLTTAGFACSQCGQPLFVYKLEQVSEKGKAYTNYFGRCNVAEHEKLIKLAQLKPEKDSDEAVTYSLGKFGQRALDFYSIHVTKESTHPVKPLAQIAGNRYASSPVGKALSDACMGTIASFLSKYQDIIIEHQKVVKGNQKRLESLRELAGKENLEYPSVTLPPQPHTKEGVDAYNEVIARVRMWVNLNLWQKLKLSRDDAKPLLRLKGFPSFPLVERQANEVDWWDMVCNVKKLINEKKEDGKVFWQNLAGYKRQEALRPYLSSEEDRKKGKKFARYQLGDLLLHLEKKHGEDWGKVYDEAWERIDKKVEGLSKHIKLEEERRSEDAQSKAALTDWLRAKASFVIEGLKEADKDEFCRCELKLQKWYGDLRGKPFAIEAENSILDISGFSKQYNCAFIWQKDGVKKLNLYLIINYFKGGKLRFKKIKPEAFEANRFYTVINKKSGEIVPMEVNFNFDDPNLIILPLAFGKRQGREFIWNDLLSLETGSLKLANGRVIEKTLYNRRTRQDEPALFVALTFERREVLDSSNIKPMNLIGVDRGENIPAVIALTDPEGCPLSRFKDSLGNPTHILRIGESYKEKQRTIQAKKEVEQRRAGGYSRKYASKAKNLADDMVRNTARDLLYYAVTQDAMLIFENLSRGFGRQGKRTFMAERQYTRMEDWLTAKLAYEGLPSKTYLSKTLAQYTSKTCSNCGFTITSADYDRVLEKLKKTATGWMTTINGKELKVEGQITYYNRYKRQNVVKDLSVELDRLSEESVNNDISSWTKGRSGEALSLLKKRFSHRPVQEKFVCLNCGFETHADEQAALNIARSWLFLRSQEYKKYQTNKTTGNTDKRAFVETWQSFYRKKLKEVWKPAV

SEQ ID NO: 27918 - protein, 978 aa, synthetic construct
  REGION 1..978: note = engineered CasX variant
QEIKRINKIRRRLVKDSNTKKAGKTGPMKTLLVRVMTPDLRERLENLRKKPENIPQPISNTSRANLNKLLTDYTEMKKAILHVYWEEFQKDPVGLMSRVAQPASKKIDQNKLKPEMDEKGNLTTAGFACSQCGQPLFVYKLEQVSEKGKAYTNYFGRCNVAEHEKLILLYQLKPEKDSDEAVTYSLGKFGQRALDFYSIHVTKESTHPVKPLAQIAGNRYASSPVGKALSDACMGTIASFLSKYQDIIIEHQKVVKGNQKRLESLRELAGKENLEYPSVTLPPQPHTKEGVDAYNEVIARVRMWVNLNLWQKLKLSRDDAKPLLRLKGFPSFPLVERQANEVDWWDMVCNVKKLINEKKEDGKVFWQNLAGYKRQEALRPYLSSEEDRKKGKKFARYQLGDLLLHLEKKHGEDWGKVYDEAWERIDKKVEGLSKHIKLEEERRSEDAQSKAALTDWLRAKASFVIEGLKEADKDEFCRCELKLQKWYGDLRGKPFAIEAENSILDISGFSKQYNCAFIWQKDGVKKLNLYLIINYFKGGKLRFKKIKPEAFEANRFYTVINKKSGEIVPMEVNFNFDDPNLIILPLAFGKRQGREFIWNDLLSLETGSLKLANGRVIEKTLYNRRTRQDEPALFVALTFERREVLDSSNIKPMNLIGVDRGENIPAVIALTDPEGCPLSRFKDSLGNPTHILRIGESYKEKQRTIQAKKEVEQRRAGGYSRKYASKAKNLADDMVRNTARDLLYYAVTQDAMLIFENLSRGFGRQGKRTFMAERQYTRMEDWLTAKLAYEGLPSKTYLSKTLAQYTSKTCSNCGFTITSADYDRVLEKLKKTATGWMTTINGKELKVEGQITYYNRYKRQNVVKDLSVELDRLSEESVNNDISSWTKGRSGEALSLLKKRFSHRPVQEKFVCLNCGFETHADEQAALNIARSWLFLRSQEYKKYQTNKTTGNTDKRAFVETWQSFYRKKLKEVWKPAV

SEQ ID NO: 27919 - protein, 978 aa, synthetic construct
  REGION 1..978: note = engineered CasX variant
QEIKRINKIRRRLVKDSNTKKAGKTGPMKTLLVRVMTPDLRERLENLRKKPENIPQPISNTSRANLNKLLTDYTEMKKAILHVYWEEFQKDPVGLMSRVAQPASKKIDQNKLKPEMDEKGNLTTAGFACSQCGQPLFVYKLEQVSEKGKAYTNYFGRCNVAEHEKLILLSQLKPEKDSDEAVTYSLGKFGQRALDFYSIHVTKESTHPVKPLAQIAGNRYASSPVGKALSDACMGTIASFLSKYQDIIIEHQKVVKGNQKRLESLRELAGKENLEYPSVTLPPQPHTKEGVDAYNEVIARVRMWVNLNLWQKLKLSRDDAKPLLRLKGFPSFPLVERQANEVDWWDMVCNVKKLINEKKEDGKVFWQNLAGYKRQEALRPYLSSEEDRKKGKKFARYQLGDLLLHLEKKHGEDWGKVYDEAWERIDKKVEGLSKHIKLEEERRSEDAQSKAALTDWLRAKASFVIEGLKEADKDEFCRCELKLQKWYGDLRGKPFAIEAENSILDISGFSKQYNCAFIWQKDGVKKLNLYLIINYFKGGKLRFKKIKPEAFEANRFYTVINKKSGEIVPMEVNFNFDDPNLIILPLAFGKRQGREFIWNDLLSLETGSLKLANGRVIEKTLYNRRTRQDEPALFVALTFERREVLDSSNIKPMNLIGVDRGENIPAVIALTDPEGCPLSRFKDSLGNPTHILRIGESYKEKQRTIQAKKEVEQRRAGGYSRKYASKAKNLADDMVRNTARDLLYYAVTQDAMLIFENLSRGFGRQGKRTFMAERQYTRMEDWLTAKLAYEGLPSKTYLSKTLAQYTSKTCSNCGFTITSADYDRVLEKLKKTATGWMTTINGKELKVEGQITYYNRYKRQNVVKDLSVELDRLSEESVNNDISSWTKGRSGEALSLLKKRFSHRPVQEKFVCLNCGFETHADEQAALNIARSWLFLRSQEYKKYQTNKTTGNTDKRAFVETWQSFYRKKLKEVWKPAV

SEQ ID NO: 27920 - protein, 978 aa, synthetic construct; identical to SEQ ID NO: 496
  REGION 1..978: note = engineered CasX variant

SEQ ID NO: 27921 - protein, 978 aa, synthetic construct
  REGION 1..978: note = engineered CasX variant
QEIKRINKIRRRLVKDSNTKKAGKTGPMKTLLVRVMTPDLRERLENLRKKPENIPQPISNTSRANLNKLLTDYTEMKKAILHVYWEEFQKDPVGLMSRVAQPASKKIDQNKLKPEMDEKGNLTTAGFACSQCGQPLFVYKLEQVSEKGKAYTNYFGRCNVAEHEKLILLAQLKPEKDSDEAVTYSLGKFGQRALDFYSIHVTKESTHPVKPLAQIAGNRYASSPVGKALSDACMGTIASFLSKYQDIIIEHQKVVKGNQKRLESLRELAGKENLEYPSVTLPPQPHTSEGVDAYNEVIARVRMWVNLNLWQKLKLSRDDAKPLLRLKGFPSFPLVERQANEVDWWDMVCNVKKLINEKKEDGKVFWQNLAGYKRQEALRPYLSSEEDRKKGKKFARYQLGDLLLHLEKKHGEDWGKVYDEAWERIDKKVEGLSKHIKLEEERRSEDAQSKAALTDWLRAKASFVIEGLKEADKDEFCRCELKLQKWYGDLRGKPFAIEAENSILDISGFSKQYNCAFIWQKDGVKKLNLYLIINYFKGGKLRFKKIKPEAFEANRFYTVINKKSGEIVPMEVNFNFDDPNLIILPLAFGKRQGREFIWNDLLSLETGSLKLANGRVIEKTLYNRRTRQDEPALFVALTFERREVLDSSNIKPMNLIGVDRGENIPAVIALTDPEGCPLSRFKDSLGNPTHILRIGESYKEKQRTIQAKKEVEQRRAGGYSRKYASKAKNLADDMVRNTARDLLYYAVTQDAMLIFENLSRGFGRQGKRTFMAERQYTRMEDWLTAKLAYEGLPSKTYLSKTLAQYTSKTCSNCGFTITSADYDRVLEKLKKTATGWMTTINGKELKVEGQITYYNRYKRQNVVKDLSVELDRLSEESVNNDISSWTKGRSGEALSLLKKRFSHRPVQEKFVCLNCGFETHADEQAALNIARSWLFLRSQEYKKYQTNKTTGNTDKRAFVETWQSFYRKKLKEVWKPAV

SEQ ID NO: 27922 - protein, 978 aa, synthetic construct
  REGION 1..978: note = engineered CasX variant
QEIKRINKIRRRLVKDSNTKKAGKTGPMKTLLVRVMTPDLRERLENLRKKPENIPQPISNTSRANLNKLLTDYTEMKKAILHVYWEEFQKDPVGLMSRVAQPASKKIDQNKLKPEMDEKGNLTTAGFACSQCGQPLFVYKLEQVSEKGKAYTNYFGRCNVAEHEKLILLAQLKPEKDSDEAVTYSLGKFGQRALDFYSIHVTKESTHPVKPLAQIAGNRYASSPVGKALSDACMGTIASFLSKYQDIIIEHQKVVKGNQKRLESLRELAGKENLEYPSVTLPPQPHTKEGLDAYNEVIARVRMWVNLNLWQKLKLSRDDAKPLLRLKGFPSFPLVERQANEVDWWDMVCNVKKLINEKKEDGKVFWQNLAGYKRQEALRPYLSSEEDRKKGKKFARYQLGDLLLHLEKKHGEDWGKVYDEAWERIDKKVEGLSKHIKLEEERRSEDAQSKAALTDWLRAKASFVIEGLKEADKDEFCRCELKLQKWYGDLRGKPFAIEAENSILDISGFSKQYNCAFIWQKDGVKKLNLYLIINYFKGGKLRFKKIKPEAFEANRFYTVINKKSGEIVPMEVNFNFDDPNLIILPLAFGKRQGREFIWNDLLSLETGSLKLANGRVIEKTLYNRRTRQDEPALFVALTFERREVLDSSNIKPMNLIGVDRGENIPAVIALTDPEGCPLSRFKDSLGNPTHILRIGESYKEKQRTIQAKKEVEQRRAGGYSRKYASKAKNLADDMVRNTARDLLYYAVTQDAMLIFENLSRGFGRQGKRTFMAERQYTRMEDWLTAKLAYEGLPSKTYLSKTLAQYTSKTCSNCGFTITSADYDRVLEKLKKTATGWMTTINGKELKVEGQITYYNRYKRQNVVKDLSVELDRLSEESVNNDISSWTKGRSGEALSLLKKRFSHRPVQEKFVCLNCGFETHADEQAALNIARSWLFLRSQEYKKYQTNKTTGNTDKRAFVETWQSFYRKKLKEVWKPAV

SEQ ID NO: 27923 - protein, 978 aa, synthetic construct
  REGION 1..978: note = engineered CasX variant
QEIKRINKIRRRLVKDSNTKKAGKTGPMKTLLVRVMTPDLRERLENLRKKPENIPQPISNTSRANLNKLLTDYTEMKKAILHVYWEEFQKDPVGLMSRVAQPASKKIDQNKLKPEMDEKGNLTTAGFACSQCGQPLFVYKLEQVSEKGKAYTNYFGRCNVAEHEKLILLAQLKPEKDSDEAVTYSLGKFGQRALDFYSIHVTKESTHPVKPLAQIAGNRYASSPVGKALSDACMGTIASFLSKYQDIIIEHQKVVKGNQKRLESLRELAGKENLEYPSVTLPPQPHTKEGVDAYNEVIARVRTWVNLNLWQKLKLSRDDAKPLLRLKGFPSFPLVERQANEVDWWDMVCNVKKLINEKKEDGKVFWQNLAGYKRQEALRPYLSSEEDRKKGKKFARYQLGDLLLHLEKKHGEDWGKVYDEAWERIDKKVEGLSKHIKLEEERRSEDAQSKAALTDWLRAKASFVIEGLKEADKDEFCRCELKLQKWYGDLRGKPFAIEAENSILDISGFSKQYNCAFIWQKDGVKKLNLYLIINYFKGGKLRFKKIKPEAFEANRFYTVINKKSGEIVPMEVNFNFDDPNLIILPLAFGKRQGREFIWNDLLSLETGSLKLANGRVIEKTLYNRRTRQDEPALFVALTFERREVLDSSNIKPMNLIGVDRGENIPAVIALTDPEGCPLSRFKDSLGNPTHILRIGESYKEKQRTIQAKKEVEQRRAGGYSRKYASKAKNLADDMVRNTARDLLYYAVTQDAMLIFENLSRGFGRQGKRTFMAERQYTRMEDWLTAKLAYEGLPSKTYLSKTLAQYTSKTCSNCGFTITSADYDRVLEKLKKTATGWMTTINGKELKVEGQITYYNRYKRQNVVKDLSVELDRLSEESVNNDISSWTKGRSGEALSLLKKRFSHRPVQEKFVCLNCGFETHADEQAALNIARSWLFLRSQEYKKYQTNKTTGNTDKRAFVETWQSFYRKKLKEVWKPAV

SEQ ID NO: 27924 - protein, 978 aa, synthetic construct
  REGION 1..978: note = engineered CasX variant
QEIKRINKIRRRLVKDSNTKKAGKTGPMKTLLVRVMTPDLRERLENLRKKPENIPQPISNTSRANLNKLLTDYTEMKKAILHVYWEEFQKDPVGLMSRVAQPASKKIDQNKLKPEMDEKGNLTTAGFACSQCGQPLFVYKLEQVSEKGKAYTNYFGRCNVAEHEKLILLAQLKPEKDSDEAVTYSLGKFGQRALDFYSIHVTKESTHPVKPLAQIAGNRYASSPVGKALSDACMGTIASFLSKYQDIIIEHQKVVKGNQKRLESLRELAGKENLEYPSVTLPPQPHTKEGVDAYNEVIARVRWWVNLNLWQKLKLSRDDAKPLLRLKGFPSFPLVERQANEVDWWDMVCNVKKLINEKKEDGKVFWQNLAGYKRQEALRPYLSSEEDRKKGKKFARYQLGDLLLHLEKKHGEDWGKVYDEAWERIDKKVEGLSKHIKLEEERRSEDAQSKAALTDWLRAKASFVIEGLKEADKDEFCRCELKLQKWYGDLRGKPFAIEAENSILDISGFSKQYNCAFIWQKDGVKKLNLYLIINYFKGGKLRFKKIKPEAFEANRFYTVINKKSGEIVPMEVNFNFDDPNLIILPLAFGKRQGREFIWNDLLSLETGSLKLANGRVIEKTLYNRRTRQDEPALFVALTFERREVLDSSNIKPMNLIGVDRGENIPAVIALTDPEGCPLSRFKDSLGNPTHILRIGESYKEKQRTIQAKKEVEQRRAGGYSRKYASKAKNLADDMVRNTARDLLYYAVTQDAMLIFENLSRGFGRQGKRTFMAERQYTRMEDWLTAKLAYEGLPSKTYLSKTLAQYTSKTCSNCGFTITSADYDRVLEKLKKTATGWMTTINGKELKVEGQITYYNRYKRQNVVKDLSVELDRLSEESVNNDISSWTKGRSGEALSLLKKRFSHRPVQEKFVCLNCGFETHADEQAALNIARSWLFLRSQEYKKYQTNKTTGNTDKRAFVETWQSFYRKKLKEVWKPAV

SEQ ID NO: 27925 - protein, 979 aa, synthetic construct
  REGION 1..979: note = engineered CasX variant
QEIKRINKIRRRLVKDSNTKKAGKTGPMKTLLVRVMTPDLRERLENLRKKPENIPQPISNTSRANLNKLLTDYTEMKKAILHVYWEEFQKDPVGLMSRVAQPASKKIDQNKLKPEMDEKGNLTTAGFACSQCGQPLFVYKLEQVSEKGKAYTNYFGRCNVAEHEKLILLAQLKPEKDSDEAVTYSLGKFGQRALDFYSIHVTKESTHPVKPLAQIAGNRYASSPVGKALSDACMGTIASFLSKYQDIIIEHQKVVKGNQKRLESLRELAGKENLEYPSVTLPPQPHTKEGVDAYNEVIARVRMWVNLNLWQKLKLSRDDAKPLLRLKGFPSFPLVERQQANEVDWWDMVCNVKKLINEKKEDGKVFWQNLAGYKRQEALRPYLSSEEDRKKGKKFARYQLGDLLLHLEKKHGEDWGKVYDEAWERIDKKVEGLSKHIKLEEERRSEDAQSKAALTDWLRAKASFVIEGLKEADKDEFCRCELKLQKWYGDLRGKPFAIEAENSILDISGFSKQYNCAFIWQKDGVKKLNLYLIINYFKGGKLRFKKIKPEAFEANRFYTVINKKSGEIVPMEVNFNFDDPNLIILPLAFGKRQGREFIWNDLLSLETGSLKLANGRVIEKTLYNRRTRQDEPALFVALTFERREVLDSSNIKPMNLIGVDRGENIPAVIALTDPEGCPLSRFKDSLGNPTHILRIGESYKEKQRTIQAKKEVEQRRAGGYSRKYASKAKNLADDMVRNTARDLLYYAVTQDAMLIFENLSRGFGRQGKRTFMAERQYTRMEDWLTAKLAYEGLPSKTYLSKTLAQYTSKTCSNCGFTITSADYDRVLEKLKKTATGWMTTINGKELKVEGQITYYNRYKRQNVVKDLSVELDRLSEESVNNDISSWTKGRSGEALSLLKKRFSHRPVQEKFVCLNCGFETHADEQAALNIARSWLFLRSQEYKKYQTNKTTGNTDKRAFVETWQSFYRKKLKEVWKPAV

SEQ ID NO: 27926 - protein, 979 aa, synthetic construct
  REGION 1..979: note = engineered CasX variant
QEIKRINKIRRRLVKDSNTKKAGKTGPMKTLLVRVMTPDLRERLENLRKKPENIPQPISNTSRANLNKLLTDYTEMKKAILHVYWEEFQKDPVGLMSRVAQPASKKIDQNKLKPEMDEKGNLTTAGFACSQCGQPLFVYKLEQVSEKGKAYTNYFGRCNVAEHEKLILLAQLKPEKDSDEAVTYSLGKFGQRALDFYSIHVTKESTHPVKPLAQIAGNRYASSPVGKALSDACMGTIASFLSKYQDIIIEHQKVVKGNQKRLESLRELAGKENLEYPSVTLPPQPHTKEGVDAYNEVIARVRMWVNLNLWQKLKLSRDDAKPLLRLKGFPSFPLVERQANAEVDWWDMVCNVKKLINEKKEDGKVFWQNLAGYKRQEALRPYLSSEEDRKKGKKFARYQLGDLLLHLEKKHGEDWGKVYDEAWERIDKKVEGLSKHIKLEEERRSEDAQSKAALTDWLRAKASFVIEGLKEADKDEFCRCELKLQKWYGDLRGKPFAIEAENSILDISGFSKQYNCAFIWQKDGVKKLNLYLIINYFKGGKLRFKKIKPEAFEANRFYTVINKKSGEIVPMEVNFNFDDPNLIILPLAFGKRQGREFIWNDLLSLETGSLKLANGRVIEKTLYNRRTRQDEPALFVALTFERREVLDSSNIKPMNLIGVDRGENIPAVIALTDPEGCPLSRFKDSLGNPTHILRIGESYKEKQRTIQAKKEVEQRRAGGYSRKYASKAKNLADDMVRNTARDLLYYAVTQDAMLIFENLSRGFGRQGKRTFMAERQYTRMEDWLTAKLAYEGLPSKTYLSKTLAQYTSKTCSNCGFTITSADYDRVLEKLKKTATGWMTTINGKELKVEGQITYYNRYKRQNVVKDLSVELDRLSEESVNNDISSWTKGRSGEALSLLKKRFSHRPVQEKFVCLNCGFETHADEQAALNIARSWLFLRSQEYKKYQTNKTTGNTDKRAFVETWQSFYRKKLKEVWKPAV

SEQ ID NO: 27927 - protein, 978 aa, synthetic construct
  REGION 1..978: note = engineered CasX variant
QEIKRINKIRRRLVKDSNTKKAGKTGPMKTLLVRVMTPDLRERLENLRKKPENIPQPISNTSRANLNKLLTDYTEMKKAILHVYWEEFQKDPVGLMSRVAQPASKKIDQNKLKPEMDEKGNLTTAGFACSQCGQPLFVYKLEQVSEKGKAYTNYFGRCNVAEHEKLILLAQLKPEKDSDEAVTYSLGKFGQRALDFYSIHVTKESTHPVKPLAQIAGNRYASSPVGKALSDACMGTIASFLSKYQDIIIEHQKVVKGNQKRLESLRELAGKENLEYPSVTLPPQPHTKEGVDAYNEVIARVRMWVNLNLWQKLKLSRDDAKPLLRLKGFPSFPLVERQANEVDWWDMVCNVKKLINEKKEDGKVFWQNLAGYKRQEALRPYLSSEEDRKKGKKFARTQLGDLLLHLEKKHGEDWGKVYDEAWERIDKKVEGLSKHIKLEEERRSEDAQSKAALTDWLRAKASFVIEGLKEADKDEFCRCELKLQKWYGDLRGKPFAIEAENSILDISGFSKQYNCAFIWQKDGVKKLNLYLIINYFKGGKLRFKKIKPEAFEANRFYTVINKKSGEIVPMEVNFNFDDPNLIILPLAFGKRQGREFIWNDLLSLETGSLKLANGRVIEKTLYNRRTRQDEPALFVALTFERREVLDSSNIKPMNLIGVDRGENIPAVIALTDPEGCPLSRFKDSLGNPTHILRIGESYKEKQRTIQAKKEVEQRRAGGYSRKYASKAKNLADDMVRNTARDLLYYAVTQDAMLIFENLSRGFGRQGKRTFMAERQYTRMEDWLTAKLAYEGLPSKTYLSKTLAQYTSKTCSNCGFTITSADYDRVLEKLKKTATGWMTTINGKELKVEGQITYYNRYKRQNVVKDLSVELDRLSEESVNNDISSWTKGRSGEALSLLKKRFSHRPVQEKFVCLNCGFETHADEQAALNIARSWLFLRSQEYKKYQTNKTTGNTDKRAFVETWQSFYRKKLKEVWKPAV

SEQ ID NO: 27928 - protein, 979 aa, synthetic construct
  REGION 1..979: note = engineered CasX variant
QEIKRINKIRRRLVKDSNTKKAGKTGPMKTLLVRVMTPDLRERLENLRKKPENIPQPISNTSRANLNKLLTDYTEMKKAILHVYWEEFQKDPVGLMSRVAQPASKKIDQNKLKPEMDEKGNLTTAGFACSQCGQPLFVYKLEQVSEKGKAYTNYFGRCNVAEHEKLILLAQLKPEKDSDEAVTYSLGKFGQRALDFYSIHVTKESTHPVKPLAQIAGNRYASSPVGKALSDACMGTIASFLSKYQDIIIEHQKVVKGNQKRLESLRELAGKENLEYPSVTLPPQPHTKEGVDAYNEVIARVRMWVNLNLWQKLKLSRDDAKPLLRLKGFPSFPLVERQANEVDWWDMVCNVKKLINEKKEDGKVFWQNLAGYKRQEALRPYLSSEEDRKKGKKFARYQLGDLLLHLEKKHEGEDWGKVYDEAWERIDKKVEGLSKHIKLEEERRSEDAQSKAALTDWLRAKASFVIEGLKEADKDEFCRCELKLQKWYGDLRGKPFAIEAENSILDISGFSKQYNCAFIWQKDGVKKLNLYLIINYFKGGKLRFKKIKPEAFEANRFYTVINKKSGEIVPMEVNFNFDDPNLIILPLAFGKRQGREFIWNDLLSLETGSLKLANGRVIEKTLYNRRTRQDEPALFVALTFERREVLDSSNIKPMNLIGVDRGENIPAVIALTDPEGCPLSRFKDSLGNPTHILRIGESYKEKQRTIQAKKEVEQRRAGGYSRKYASKAKNLADDMVRNTARDLLYYAVTQDAMLIFENLSRGFGRQGKRTFMAERQYTRMEDWLTAKLAYEGLPSKTYLSKTLAQYTSKTCSNCGFTITSADYDRVLEKLKKTATGWMTTINGKELKVEGQITYYNRYKRQNVVKDLSVELDRLSEESVNNDISSWTKGRSGEALSLLKKRFSHRPVQEKFVCLNCGFETHADEQAALNIARSWLFLRSQEYKKYQTNKTTGNTDKRAFVETWQSFYRKKLKEVWKPAV

SEQ ID NO: 27929 - protein, 978 aa, synthetic construct
  REGION 1..978: note = engineered CasX variant
QEIKRINKIRRRLVKDSNTKKAGKTGPMKTLLVRVMTPDLRERLENLRKKPENIPQPISNTSRANLNKLLTDYTEMKKAILHVYWEEFQKDPVGLMSRVAQPASKKIDQNKLKPEMDEKGNLTTAGFACSQCGQPLFVYKLEQVSEKGKAYTNYFGRCNVAEHEKLILLAQLKPEKDSDEAVTYSLGKFGQRALDFYSIHVTKESTHPVKPLAQIAGNRYASSPVGKALSDACMGTIASFLSKYQDIIIEHQKVVKGNQKRLESLRELAGKENLEYPSVTLPPQPHTKEGVDAYNEVIARVRMWVNLNLWQKLKLSRDDAKPLLRLKGFPSFPLVERQANEVDWWDMVCNVKKLINEKKEDGKVFWQNLAGYKRQEALRPYLSSEEDRKKGKKFARYQLGDLLLHLEKKHGEDWGKVYDEAWERIDKKVEGLSKHIKLEEERRSEDAQSKAALTDWLRAKASFVIEGLKEADKDEFCRCDLKLQKWYGDLRGKPFAIEAENSILDISGFSKQYNCAFIWQKDGVKKLNLYLIINYFKGGKLRFKKIKPEAFEANRFYTVINKKSGEIVPMEVNFNFDDPNLIILPLAFGKRQGREFIWNDLLSLETGSLKLANGRVIEKTLYNRRTRQDEPALFVALTFERREVLDSSNIKPMNLIGVDRGENIPAVIALTDPEGCPLSRFKDSLGNPTHILRIGESYKEKQRTIQAKKEVEQRRAGGYSRKYASKAKNLADDMVRNTARDLLYYAVTQDAMLIFENLSRGFGRQGKRTFMAERQYTRMEDWLTAKLAYEGLPSKTYLSKTLAQYTSKTCSNCGFTITSADYDRVLEKLKKTATGWMTTINGKELKVEGQITYYNRYKRQNVVKDLSVELDRLSEESVNNDISSWTKGRSGEALSLLKKRFSHRPVQEKFVCLNCGFETHADEQAALNIARSWLFLRSQEYKKYQTNKTTGNTDKRAFVETWQSFYRKKLKEVWKPAV

SEQ ID NO: 27930 - protein, 978 aa, synthetic construct
  REGION 1..978: note = engineered CasX variant
QEIKRINKIRRRLVKDSNTKKAGKTGPMKTLLVRVMTPDLRERLENLRKKPENIPQPISNTSRANLNKLLTDYTEMKKAILHVYWEEFQKDPVGLMSRVAQPASKKIDQNKLKPEMDEKGNLTTAGFACSQCGQPLFVYKLEQVSEKGKAYTNYFGRCNVAEHEKLILLAQLKPEKDSDEAVTYSLGKFGQRALDFYSIHVTKESTHPVKPLAQIAGNRYASSPVGKALSDACMGTIASFLSKYQDIIIEHQKVVKGNQKRLESLRELAGKENLEYPSVTLPPQPHTKEGVDAYNEVIARVRMWVNLNLWQKLKLSRDDAKPLLRLKGFPSFPLVERQANEVDWWDMVCNVKKLINEKKEDGKVFWQNLAGYKRQEALRPYLSSEEDRKKGKKFARYQLGDLLLHLEKKHGEDWGKVYDEAWERIDKKVEGLSKHIKLEEERRSEDAQSKAALTDWLRAKASFVIEGLKEADKDEFCRCELKLQKWYGDLRGKPFAIEAENSILDISGFSKQYNCAFIWQKDGVKKLNLYLIINYFKGGKLRFKKIKPEAFEANRFYTVINKKSGEIVPMEVNFNFDDPNLIILPLAFGKRFGREFIWNDLLSLETGSLKLANGRVIEKTLYNRRTRQDEPALFVALTFERREVLDSSNIKPMNLIGVDRGENIPAVIALTDPEGCPLSRFKDSLGNPTHILRIGESYKEKQRTIQAKKEVEQRRAGGYSRKYASKAKNLADDMVRNTARDLLYYAVTQDAMLIFENLSRGFGRQGKRTFMAERQYTRMEDWLTAKLAYEGLPSKTYLSKTLAQYTSKTCSNCGFTITSADYDRVLEKLKKTATGWMTTINGKELKVEGQITYYNRYKRQNVVKDLSVELDRLSEESVNNDISSWTKGRSGEALSLLKKRFSHRPVQEKFVCLNCGFETHADEQAALNIARSWLFLRSQEYKKYQTNKTTGNTDKRAFVETWQSFYRKKLKEVWKPAV

SEQ ID NO: 27931 - protein, 978 aa, synthetic construct
  REGION 1..978: note = engineered CasX variant
QEIKRINKIRRRLVKDSNTKKAGKTGPMKTLLVRVMTPDLRERLENLRKKPENIPQPISNTSRANLNKLLTDYTEMKKAILHVYWEEFQKDPVGLMSRVAQPASKKIDQNKLKPEMDEKGNLTTAGFACSQCGQPLFVYKLEQVSEKGKAYTNYFGRCNVAEHEKLILLAQLKPEKDSDEAVTYSLGKFGQRALDFYSIHVTKESTHPVKPLAQIAGNRYASSPVGKALSDACMGTIASFLSKYQDIIIEHQKVVKGNQKRLESLRELAGKENLEYPSVTLPPQPHTKEGVDAYNEVIARVRMWVNLNLWQKLKLSRDDAKPLLRLKGFPSFPLVERQANEVDWWDMVCNVKKLINEKKEDGKVFWQNLAGYKRQEALRPYLSSEEDRKKGKKFARYQLGDLLLHLEKKHGEDWGKVYDEAWERIDKKVEGLSKHIKLEEERRSEDAQSKAALTDWLRAKASFVIEGLKEADKDEFCRCELKLQKWYGDLRGKPFAIEAENSILDISGFSKQYNCAFIWQKDGVKKLNLYLIINYFKGGKLRFKKIKPEAFEANRFYTVINKKSGEIVPMEVNFNFDDPNLIILPLAFGKRVGREFIWNDLLSLETGSLKLANGRVIEKTLYNRRTRQDEPALFVALTFERREVLDSSNIKPMNLIGVDRGENIPAVIALTDPEGCPLSRFKDSLGNPTHILRIGESYKEKQRTIQAKKEVEQRRAGGYSRKYASKAKNLADDMVRNTARDLLYYAVTQDAMLIFENLSRGFGRQGKRTFMAERQYTRMEDWLTAKLAYEGLPSKTYLSKTLAQYTSKTCSNCGFTITSADYDRVLEKLKKTATGWMTTINGKELKVEGQITYYNRYKRQNVVKDLSVELDRLSEESVNNDISSWTKGRSGEALSLLKKRFSHRPVQEKFVCLNCGFETHADEQAALNIARSWLFLRSQEYKKYQTNKTTGNTDKRAFVETWQSFYRKKLKEVWKPAV

SEQ ID NO: 27932 - protein, 979 aa, synthetic construct
  REGION 1..979: note = engineered CasX variant
QEIKRINKIRRRLVKDSNTKKAGKTGPMKTLLVRVMTPDLRERLENLRKKPENIPQPISNTSRANLNKLLTDYTEMKKAILHVYWEEFQKDPVGLMSRVAQPASKKIDQNKLKPEMDEKGNLTTAGFACSQCGQPLFVYKLEQVSEKGKAYTNYFGRCNVAEHEKLILLAQLKPEKDSDEAVTYSLGKFGQRALDFYSIHVTKESTHPVKPLAQIAGNRYASSPVGKALSDACMGTIASFLSKYQDIIIEHQKVVKGNQKRLESLRELAGKENLEYPSVTLPPQPHTKEGVDAYNEVIARVRMWVNLNLWQKLKLSRDDAKPLLRLKGFPSFPLVERQANEVDWWDMVCNVKKLINEKKEDGKVFWQNLAGYKRQEALRPYLSSEEDRKKGKKFARYQLGDLLLHLEKKHGEDWGKVYDEAWERIDKKVEGLSKHIKLEEERRSEDAQSKAALTDWLRAKASFVIEGLKEADKDEFCRCELKLQKWYGDLRGKPFAIEAENSILDISGFSKQYNCAFIWQKDGVKKLNLYLIINYFKGGKLRFKKIKPEAFEANRFYTVINKKSGEIVPMEVNFNFDDPNLIILPLAFGKRQGREFIWNDLLSLETGSLKLANGRVIEKTLYNRRTRQDEPALFVALTFERREVLDSSNIKTPMNLIGVDRGENIPAVIALTDPEGCPLSRFKDSLGNPTHILRIGESYKEKQRTIQAKKEVEQRRAGGYSRKYASKAKNLADDMVRNTARDLLYYAVTQDAMLIFENLSRGFGRQGKRTFMAERQYTRMEDWLTAKLAYEGLPSKTYLSKTLAQYTSKTCSNCGFTITSADYDRVLEKLKKTATGWMTTINGKELKVEGQITYYNRYKRQNVVKDLSVELDRLSEESVNNDISSWTKGRSGEALSLLKKRFSHRPVQEKFVCLNCGFETHADEQAALNIARSWLFLRSQEYKKYQTNKTTGNTDKRAFVETWQSFYRKKLKEVWKPAV

SEQ ID NO: 27933 - protein, 979 aa, synthetic construct
  REGION 1..979: note = engineered CasX variant
QEIKRINKIRRRLVKDSNTKKAGKTGPMKTLLVRVMTPDLRERLENLRKKPENIPQPISNTSRANLNKLLTDYTEMKKAILHVYWEEFQKDPVGLMSRVAQPASKKIDQNKLKPEMDEKGNLTTAGFACSQCGQPLFVYKLEQVSEKGKAYTNYFGRCNVAEHEKLILLAQLKPEKDSDEAVTYSLGKFGQRALDFYSIHVTKESTHPVKPLAQIAGNRYASSPVGKALSDACMGTIASFLSKYQDIIIEHQKVVKGNQKRLESLRELAGKENLEYPSVTLPPQPHTKEGVDAYNEVIARVRMWVNLNLWQKLKLSRDDAKPLLRLKGFPSFPLVERQANEVDWWDMVCNVKKLINEKKEDGKVFWQNLAGYKRQEALRPYLSSEEDRKKGKKFARYQLGDLLLHLEKKHGEDWGKVYDEAWERIDKKVEGLSKHIKLEEERRSEDAQSKAALTDWLRAKASFVIEGLKEADKDEFCRCELKLQKWYGDLRGKPFAIEAENSILDISGFSKQYNCAFIWQKDGVKKLNLYLIINYFKGGKLRFKKIKPEAFEANRFYTVINKKSGEIVPMEVNFNFDDPNLIILPLAFGKRQGREFIWNDLLSLETGSLKLANGRVIEKTLYNRRTRQDEPALFVALTFERREVLDSSNIKPMSNLIGVDRGENIPAVIALTDPEGCPLSRFKDSLGNPTHILRIGESYKEKQRTIQAKKEVEQRRAGGYSRKYASKAKNLADDMVRNTARDLLYYAVTQDAMLIFENLSRGFGRQGKRTFMAERQYTRMEDWLTAKLAYEGLPSKTYLSKTLAQYTSKTCSNCGFTITSADYDRVLEKLKKTATGWMTTINGKELKVEGQITYYNRYKRQNVVKDLSVELDRLSEESVNNDISSWTKGRSGEALSLLKKRFSHRPVQEKFVCLNCGFETHADEQAALNIARSWLFLRSQEYKKYQTNKTTGNTDKRAFVETWQSFYRKKLKEVWKPAV

SEQ ID NO: 27934 - protein, 978 aa, synthetic construct
  REGION 1..978: note = engineered CasX variant
QEIKRINKIRRRLVKDSNTKKAGKTGPMKTLLVRVMTPDLRERLENLRKKPENIPQPISNTSRANLNKLLTDYTEMKKAILHVYWEEFQKDPVGLMSRVAQPASKKIDQNKLKPEMDEKGNLTTAGFACSQCGQPLFVYKLEQVSEKGKAYTNYFGRCNVAEHEKLILLAQLKPEKDSDEAVTYSLGKFGQRALDFYSIHVTKESTHPVKPLAQIAGNRYASSPVGKALSDACMGTIASFLSKYQDIIIEHQKVVKGNQKRLESLRELAGKENLEYPSVTLPPQPHTKEGVDAYNEVIARVRMWVNLNLWQKLKLSRDDAKPLLRLKGFPSFPLVERQANEVDWWDMVCNVKKLINEKKEDGKVFWQNLAGYKRQEALRPYLSSEEDRKKGKKFARYQLGDLLLHLEKKHGEDWGKVYDEAWERIDKKVEGLSKHIKLEEERRSEDAQSKAALTDWLRAKASFVIEGLKEADKDEFCRCELKLQKWYGDLRGKPFAIEAENSILDISGFSKQYNCAFIWQKDGVKKLNLYLIINYFKGGKLRFKKIKPEAFEANRFYTVINKKSGEIVPMEVNFNFDDPNLIILPLAFGKRQGREFIWNDLLSLETGSLKLANGRVIEKTLYNRRTRQDEPALFVALTFERREVLDSSNIKPMNLIGVDRGENIPAVIALTDPEGCPLSRFKDSLGNPTHILRIRESYKEKQRTIQAKKEVEQRRAGGYSRKYASKAKNLADDMVRNTARDLLYYAVTQDAMLIFENLSRGFGRQGKRTFMAERQYTRMEDWLTAKLAYEGLPSKTYLSKTLAQYTSKTCSNCGFTITSADYDRVLEKLKKTATGWMTTINGKELKVEGQITYYNRYKRQNVVKDLSVELDRLSEESVNNDISSWTKGRSGEALSLLKKRFSHRPVQEKFVCLNCGFETHADEQAALNIARSWLFLRSQEYKKYQTNKTTGNTDKRAFVETWQSFYRKKLKEVWKPAV

SEQ ID NO: 27935 - protein, 978 aa, synthetic construct
  REGION 1..978: note = engineered CasX variant
QEIKRINKIRRRLVKDSNTKKAGKTGPMKTLLVRVMTPDLRERLENLRKKPENIPQPISNTSRANLNKLLTDYTEMKKAILHVYWEEFQKDPVGLMSRVAQPASKKIDQNKLKPEMDEKGNLTTAGFACSQCGQPLFVYKLEQVSEKGKAYTNYFGRCNVAEHEKLILLAQLKPEKDSDEAVTYSLGKFGQRALDFYSIHVTKESTHPVKPLAQIAGNRYASSPVGKALSDACMGTIASFLSKYQDIIIEHQKVVKGNQKRLESLRELAGKENLEYPSVTLPPQPHTKEGVDAYNEVIARVRMWVNLNLWQKLKLSRDDAKPLLRLKGFPSFPLVERQANEVDWWDMVCNVKKLINEKKEDGKVFWQNLAGYKRQEALRPYLSSEEDRKKGKKFARYQLGDLLLHLEKKHGEDWGKVYDEAWERIDKKVEGLSKHIKLEEERRSEDAQSKAALTDWLRAKASFVIEGLKEADKDEFCRCELKLQKWYGDLRGKPFAIEAENSILDISGFSKQYNCAFIWQKDGVKKLNLYLIINYFKGGKLRFKKIKPEAFEANRFYTVINKKSGEIVPMEVNFNFDDPNLIILPLAFGKRQGREFIWNDLLSLETGSLKLANGRVIEKTLYNRRTRQDEPALFVALTFERREVLDSSNIKPMNLIGVDRGENIPAVIALTDPEGCPLSRFKDSLGNPTHILRIGESYKEKQRTIQAKKEVEQRRAGGYSRKYASKAKNLADDMVRNTARDLLYYAVTQDAMLIFENLSRGFGRQGKRTFSAERQYTRMEDWLTAKLAYEGLPSKTYLSKTLAQYTSKTCSNCGFTITSADYDRVLEKLKKTATGWMTTINGKELKVEGQITYYNRYKRQNVVKDLSVELDRLSEESVNNDISSWTKGRSGEALSLLKKRFSHRPVQEKFVCLNCGFETHADEQAALNIARSWLFLRSQEYKKYQTNKTTGNTDKRAFVETWQSFYRKKLKEVWKPAV

SEQ ID NO: 27936 - protein, 978 aa, synthetic construct
  REGION 1..978: note = engineered CasX variant
QEIKRINKIRRRLVKDSNTKKAGKTGPMKTLLVRVMTPDLRERLENLRKKPENIPQPISNTSRANLNKLLTDYTEMKKAILHVYWEEFQKDPVGLMSRVAQPASKKIDQNKLKPEMDEKGNLTTAGFACSQCGQPLFVYKLEQVSEKGKAYTNYFGRCNVAEHEKLILLAQLKPEKDSDEAVTYSLGKFGQRALDFYSIHVTKESTHPVKPLAQIAGNRYASSPVGKALSDACMGTIASFLSKYQDIIIEHQKVVKGNQKRLESLRELAGKENLEYPSVTLPPQPHTKEGVDAYNEVIARVRMWVNLNLWQKLKLSRDDAKPLLRLKGFPSFPLVERQANEVDWWDMVCNVKKLINEKKEDGKVFWQNLAGYKRQEALRPYLSSEEDRKKGKKFARYQLGDLLLHLEKKHGEDWGKVYDEAWERIDKKVEGLSKHIKLEEERRSEDAQSKAALTDWLRAKASFVIEGLKEADKDEFCRCELKLQKWYGDLRGKPFAIEAENSILDISGFSKQYNCAFIWQKDGVKKLNLYLIINYFKGGKLRFKKIKPEAFEANRFYTVINKKSGEIVPMEVNFNFDDPNLIILPLAFGKRQGREFIWNDLLSLETGSLKLANGRVIEKTLYNRRTRQDEPALFVALTFERREVLDSSNIKPMNLIGVDRGENIPAVIALTDPEGCPLSRFKDSLGNPTHILRIGESYKEKQRTIQAKKEVEQRRAGGYSRKYASKAKNLADDMVRNTARDLLYYAVTQDAMLIFENLSRGFGRQGKRTFMAERQYTRMEDWLTAKLAYEGLPSKTYLSKTLAQYTSKTCSNCGFTITSADYDRVLEKLKKTATGWMTTINGKELKVEGQITYYNRYKRQNVVKDLSVELDRLSEESVNNDISSWDKGRSGEALSLLKKRFSHRPVQEKFVCLNCGFETHADEQAALNIARSWLFLRSQEYKKYQTNKTTGNTDKRAFVETWQSFYRKKLKEVWKPAV

SEQ ID NO: 27937 - protein, 978 aa, synthetic construct
  REGION 1..978: note = engineered CasX variant
QEIKRINKIRRRLVKDSNTKKAGKTGPMKTLLVRVMTPDLRERLENLRKKPENIPQPISNTSRANLNKLLTDYTEMKKAILHVYWEEFQVDPVGLMSRVAQPASKKIDQNKLKPEMDEKGNLTTAGFACSQCGQPLFVYKLEQVSEKGKAYTNYFGRCNVAEHEKLILLAQLKPEKDSDEAVTYSLGKFGQRALDFYSIHVTKESTHPVKPLAQIAGNRYASSPVGKALSDACMGTIASFLSKYQDIIIEHQKVVKGNQKRLESLRELAGKENLEYPSVTLPPQPHTKEGVDAYNEVIARVRMWVNLNLWQKLKLSRDDAKPLLRLKGFPSFPLVERQANEVDWWDMVCNVKKLINEKKEDGKVFWQNLAGYKRQEALRPYLSSEEDRKKGKKFARYQLGDLLLHLEKKHGEDWGKVYDEAWERIDKKVEGLSKHIKLEEERRSEDAQSKAALTDWLRAKASFVIEGLKEADKDEFCRCELKLQKWYGDLRGKPFAIEAENSILDISGFSKQYNCAFIWQKDGVKKLNLYLIINYFKGGKLRFKKIKPEAFEANRFYTVINKKSGEIVPMEVNFNFDDPNLIILPLAFGKRQGREFIWNDLLSLETGSLKLANGRVIEKTLYNRRTRQDEPALFVALTFERREVLDSSNIKPMNLIGVDRGENIPAVIALTDPEGCPLSRFKDSLGNPTHILRIGESYKEKQRTIQAKKEVEQRRAGGYSRKYASKAKNLADDMVRNTARDLLYYAVTQDAMLIFENLSRGFGRQGKRTFMAERQYTRMEDWLTAKLAYEGLPSKTYLSKTLAQYTSKTCSNCGFTITSADYDRVLEKLKKTATGWMTTINGKELKVEGQITYYNRYKRQNVVKDLSVELDRLSEESVNNDISSWTKGRSGEALSLLKKRFSHRPVQEKFVCLNCGFETHADEQAALNIARSWLFLRSQEYKKYQTNKTTGNTDKRAFVETWQSFYRKKLKEVWKPAV

SEQ ID NO: 27938 - protein, 978 aa, synthetic construct
  REGION 1..978: note = engineered CasX variant
QEIKRLNKIRRRLVKDSNTKKAGKTGPMKTLLVRVMTPDLRERLENLRKKPENIPQPISNTSRANLNKLLTDYTEMKKAILHVYWEEFQKDPVGLMSRVAQPASKKIDQNKLKPEMDEKGNLTTAGFACSQCGQPLFVYKLEQVSEKGKAYTNYFGRCNVAEHEKLILLAQLKPEKDSDEAVTYSLGKFGQRALDFYSIHVTKESTHPVKPLAQIAGNRYASSPVGKALSDACMGTIASFLSKYQDIIIEHQKVVKGNQKRLESLRELAGKENLEYPSVTLPPQPHTKEGVDAYNEVIARVRMWVNLNLWQKLKLSRDDAKPLLRLKGFPSFPLVERQANEVDWWDMVCNVKKLINEKKEDGKVFWQNLAGYKRQEALRPYLSSEEDRKKGKKFARYQLGDLLLHLEKKHGEDWGKVYDEAWERIDKKVEGLSKHIKLEEERRSEDAQSKAALTDWLRAKASFVIEGLKEADKDEFCRCELKLQKWYGDLRGKPFAIEAENSILDISGFSKQYNCAFIWQKDGVKKLNLYLIINYFKGGKLRFKKIKPEAFEANRFYTVINKKSGEIVPMEVNFNFDDPNLIILPLAFGKRQGREFIWNDLLSLETGSLKLANGRVIEKTLYNRRTRQDEPALFVALTFERREVLDSSNIKPMNLIGVDRGENIPAVIALTDPEGCPLSRFKDSLGNPTHILRIGESYKEKQRTIQAKKEVEQRRAGGYSRKYASKAKNLADDMVRNTARDLLYYAVTQDAMLIFENLSRGFGRQGKRTFMAERQYTRMEDWLTAKLAYEGLPSKTYLSKTLAQYTSKTCSNCGFTITSADYDRVLEKLKKTATGWMTTINGKELKVEGQITYYNRYKRQNVVKDLSVELDRLSEESVNNDISSWTKGRSGEALSLLKKRFSHRPVQEKFVCLNCGFETHADEQAALNIARSWLFLRSQEYKKYQTNKTTGNTDKRAFVETWQSFYRKKLKEVWKPAV

SEQ ID NO: 27939 - protein, 978 aa, synthetic construct
  REGION 1..978: note = engineered CasX variant
QEIKRINKIRRRLVKDSNTKKAGKTGPMKTLLVRVMTPDLRERLENLRKKPENIPQPISNTSRANLNKLLTDYTEMKKAILHVYWEEFQKDPVGLMSRVAQPASKKIDQNKLKPEMDEKGNLTTAGFACSQCGQPLFVYKLEQVSEKGKAYTNYVGRCNVAEHEKLILLAQLKPEKDSDEAVTYSLGKFGQRALDFYSIHVTKESTHPVKPLAQIAGNRYASSPVGKALSDACMGTIASFLSKYQDIIIEHQKVVKGNQKRLESLRELAGKENLEYPSVTLPPQPHTKEGVDAYNEVIARVRMWVNLNLWQKLKLSRDDAKPLLRLKGFPSFPLVERQANEVDWWDMVCNVKKLINEKKEDGKVFWQNLAGYKRQEALRPYLSSEEDRKKGKKFARYQLGDLLLHLEKKHGEDWGKVYDEAWERIDKKVEGLSKHIKLEEERRSEDAQSKAALTDWLRAKASFVIEGLKEADKDEFCRCELKLQKWYGDLRGKPFAIEAENSILDISGFSKQYNCAFIWQKDGVKKLNLYLIINYFKGGKLRFKKIKPEAFEANRFYTVINKKSGEIVPMEVNFNFDDPNLIILPLAFGKRQGREFIWNDLLSLETGSLKLANGRVIEKTLYNRRTRQDEPALFVALTFERREVLDSSNIKPMNLIGVDRGENIPAVIALTDPEGCPLSRFKDSLGNPTHILRIGESYKEKQRTIQAKKEVEQRRAGGYSRKYASKAKNLADDMVRNTARDLLYYAVTQDAMLIFENLSRGFGRQGKRTFMAERQYTRMEDWLTAKLAYEGLPSKTYLSKTLAQYTSKTCSNCGFTITSADYDRVLEKLKKTATGWMTTINGKELKVEGQITYYNRYKRQNVVKDLSVELDRLSEESVNNDISSWTKGRSGEALSLLKKRFSHRPVQEKFVCLNCGFETHADEQAALNIARSWLFLRSQEYKKYQTNKTTGNTDKRAFVETWQSFYRKKLKEVWKPAV

SEQ ID NO: 27940 - protein, 978 aa, synthetic construct
  REGION 1..978: note = engineered CasX variant
QEIKRINKIRRRLVKDSNTKKAGKTGPMKTLLVRVMTPDLRERLENLRKKPENIPQPISNTSRANLNKLLTDYTEMKKAILHVYWEEFQKDPVGLMSRVAQPASKKIDQNKLKPEMDEKGNLTTAGFACSQCGQPLFVYKLEQVSEKGKAYTNYFGRCNVAEHEKLILLAQLKPEKDSDEAVTYSLGKFGQRALDFYSIHVTKESTHPVKPLAQIAGNRYASSPVGKALSDACMGTIASFLSKYQDIIIEHQKVVKGNQKRLESLRELAGKENLEYPSVTLPPQPHTKEGVDAYNEVIARVRMWVNLNLWQKLKLSRDDAKPLLRLKGFPSFPLVERQANEVDWWDMVCNVKKLINEKKEDGKVFWQNLAGYKRQEALRPYLSSEEDRKKGKKFARYQLGDLLLHLEKKHGEDWGKVYDEAWERIDKKVEGLSKHIKLEEERRSEDAQSKAALTDWLRAKASFVIEGLKEADKDEFCRCELKLQKWYGDLRGKPFAIEAENSILDISGFSKQYNCAFIWQKDGVKKLNLYLIINYFKGGKLRFKKIKPEAFEANRFYTVINKKSGEIVPMEVNFNFDDPNLIILPLAFGKRQGREFIWNDLLSLETGSLKLANGRVIEKTLYNRRTRQDEPALFVALTFERREVLDSSNIKPMNLIGVDRGENIPAVIALTDPEGCPLSRFKDSLGNPTHILRIGESYKEKQRTIQAKKEVEQRRAGGYSRKYASKAKNLADDMVRNTARDLLYYAVTQDAMLIFENLSRGFGRQGKRTFMAERQYTRMEDWLTAKLAYEGLASKTYLSKTLAQYTSKTCSNCGFTITSADYDRVLEKLKKTATGWMTTINGKELKVEGQITYYNRYKRQNVVKDLSVELDRLSEESVNNDISSWTKGRSGEALSLLKKRFSHRPVQEKFVCLNCGFETHADEQAALNIARSWLFLRSQEYKKYQTNKTTGNTDKRAFVETWQSFYRKKLKEVWKPAV

SEQ ID NO: 27941 - protein, 978 aa, synthetic construct
  REGION 1..978: note = engineered CasX variant
QEIKRINKIRRRLVKDSNTKKAGKTGPMKTLLVRVMTPDLRERLENLRKKPENIPQPISNTSRANLNKLLTDYTEMKKAILHVYWEEFQKDPVGLMSRVAQPASKKIDQNKLKPEMDEKGNLTTAGFACSQCGQPLFVYKLEQVSEKGKAYTNYFGRCNVAEHEKLILLAQLKPEKDSDEAVTYSLGKFGQRALDFYSIHVTKESTHPVKPLAQIAGNRYASSPVGKALSDACMGTIASFLSKYQDIIIEHQKVVKGNQKRLESLRELAGKENLEYPSVTLPPQPHTKEGVDAYNEVIARVRMWVNLNLWQKLKLSRDDAKPLLRLKGFPSFPLVERQANEVDWWDMVCNVKKLINEKKEDGKVFWQNLAGYKRQEALRPYLSSEEDRKKGKKFARYQLGDLLLHLEKKHGEDWGKVYDEAWERIDKKVEGLSKHIKLEEERRSEDAQSKAALTDWLRAKASFVIEGLKEADKDEFCRCELKLQKWYGDLRGKPFAIEAENSILDISGFSKQYNCAFIWQKDGVKKLNLYLIINYFKGGKLRFKKIKPEAFEANRFYTVINKKSGEIVPMEVNFNFDDPNLIILPLAFGKRQGREFIWNDLLSLETGSLKLANGRVIEKTLYNRRTRQDEPALFVALTFERREVLDSSNIKPMNLIGVDRGENIPAVIALTDPEGCPLSRFKDSLGNPTHILRIGESYKEKQRTIQAKKEVEQRRAGGYSRKYASKAKNLADDMVRNTARDLLYYAVTQDAMLIFENLSRGFGRQGKRTFMAERQYTRMEDWLTAKLAYEGLPSKVYLSKTLAQYTSKTCSNCGFTITSADYDRVLEKLKKTATGWMTTINGKELKVEGQITYYNRYKRQNVVKDLSVELDRLSEESVNNDISSWTKGRSGEALSLLKKRFSHRPVQEKFVCLNCGFETHADEQAALNIARSWLFLRSQEYKKYQTNKTTGNTDKRAFVETWQSFYRKKLKEVWKPAV

SEQ ID NO: 27942 - protein, 979 aa, synthetic construct
  REGION 1..979: note = engineered CasX variant
QEIKRINKIRRRLVKDSNTKKAGKTGPMKTLLVRVMTPDLRERLENLRKKPENIPQPISNTSRANLNKLLTDYTEMKKAILHVYWEEFQKDPVGLMSRVAQPASKKIDQNKLKPEMDEKGNLTTAGFACSQCGQPLFVYKLEQVSEKGKAYTNYFGRCNVAEHEKLILLAQLKPEKDSDEAVTYSLGKFGQRALDFYSIHVTKESTHPVKPLAQIAGNRYASSPVGKALSDACMGTIASFLSKYQDIIIEHQKVVKGNQKRLESLRELAGKENLEYPSVTLPPQPHTKEGVDAYNEVIARVRMWVNLNLWQKLKLSRDDAKPLLRLKGFPSFPLVERQANEVDWWDMVCNVKKLINEKKEDGKVFWQNLAGYKRQEALRPYLSSEEDRKKGKKFARYQLGDLLLHLEKKHGEDWGKVYDEAWERIDKKVEGLSKHIKLEEERRSEDAQSKAALTDWLRAKASFVIEGLKEADKDEFCRCELKLQKWYGDLRGKPFAIEAENSILDISGFSKQYNCAFIWQKDGVKKLNLYLIINYFKGGKLRFKKIKPEAFEANRFYTVINKKSGEIVPMEVNFNFDDPNLIILPLAFGKRQGREFIWNDLLSLETGSLKLANGRVIEKTLYNRRTRQDEPALFVALTFERREVLDSSNIKPMNLIGVDRGENIPAVIALTDPEGCPLSRFKDSLGNPTHILRIGESYKEKQRTIQAKKEVEQRRAGGYSRKYASKAKNLADDMVRNTARDLLYYAVTQDAMLIFENLSRGFGRQGKRTFMAERQYTRMEDWLTAKLAYEGPLPSKTYLSKTLAQYTSKTCSNCGFTITSADYDRVLEKLKKTATGWMTTINGKELKVEGQITYYNRYKRQNVVKDLSVELDRLSEESVNNDISSWTKGRSGEALSLLKKRFSHRPVQEKFVCLNCGFETHADEQAALNIARSWLFLRSQEYKKYQTNKTTGNTDKRAFVETWQSFYRKKLKEVWKPAV

SEQ ID NO: 27943 - protein, 979 aa, synthetic construct
  REGION 1..979: note = engineered CasX variant
QEIKRINKIRRRLVKDSNTKKAGKTGPMKTLLVRVMTPDLRERLENLRKKPENIPQPISNTSRANLNKLLTDYTEMKKAILHVYWEEFQKDPVGLMSRVAQPASKKIDQNKLKPEMDEKGNLTTAGFACSQCGQPLFVYKLEQVSEKGKAYTNYFGRCNVAEHEKLILLAQLKPEKDSDEAVTYSLGKFGQRALDFYSIHVTKESTHPVKPLAQIAGNRYASSPVGKALSDACMGTIASFLSKYQDIIIEHQKVVKGNQKRLESLRELAGKENLEYPSVTLPPQPHTKEGVDAYNEVIARVRMWVNLNLWQKLKLSRDDAKPLLRLKGFPSFPLVERQANEVDWWDMVCNVKKLINEKKEDGKVFWQNLAGYKRQEALRPYLSSEEDVRKKGKKFARYQLGDLLLHLEKKHGEDWGKVYDEAWERIDKKVEGLSKHIKLEEERRSEDAQSKAALTDWLRAKASFVIEGLKEADKDEFCRCELKLQKWYGDLRGKPFAIEAENSILDISGFSKQYNCAFIWQKDGVKKLNLYLIINYFKGGKLRFKKIKPEAFEANRFYTVINKKSGEIVPMEVNFNFDDPNLIILPLAFGKRQGREFIWNDLLSLETGSLKLANGRVIEKTLYNRRTRQDEPALFVALTFERREVLDSSNIKPMNLIGVDRGENIPAVIALTDPEGCPLSRFKDSLGNPTHILRIGESYKEKQRTIQAKKEVEQRRAGGYSRKYASKAKNLADDMVRNTARDLLYYAVTQDAMLIFENLSRGFGRQGKRTFMAERQYTRMEDWLTAKLAYEGLPSKTYLSKTLAQYTSKTCSNCGFTITSADYDRVLEKLKKTATGWMTTINGKELKVEGQITYYNRYKRQNVVKDLSVELDRLSEESVNNDISSWTKGRSGEALSLLKKRFSHRPVQEKFVCLNCGFETHADEQAALNIARSWLFLRSQEYKKYQTNKTTGNTDKRAFVETWQSFYRKKLKEVWKPAV

SEQ ID NO: 27944 - protein, 978 aa, synthetic construct
  REGION 1..978: note = engineered CasX variant
QEIKRINKIRRRLVKDSNTKKAGKTGPMKTLLVRVMTPDLRERLENLRKKPENIPQPISNTSRANLNKLLTDYTEMKKAILHVYWEEFQKDPVGLMSRVAQPASKKIDQNKLKPEMDEKGNLTTAGFACSQCGQPLFVYKLEQVSEKGKAYTNYFGRCNVAEHEKLILLAQLKPEKDSDEAVTYSLGKFGQRALDFYSIHVTKESTHPVKPLAQIAGNRYASSPVGKALSDACMGTIASFLSKYQDIIIEHQKVVKGNQKRLESLRELAGKENLEYPSVTLPPQPHTKEGVDAYNEVIARVRMWVNLNLWQKLKLSRDDAKPLLRLKGFPSFPLVERQANEVDWWDMVCNVKKLINEKKEDGKVFWQNLAGYKRQEALRPYLSSEEDRKKGKKFARYQLGDLLLHLEKKHGEDWGKVYDEAWERIDKKVEGLSKHIKLEEERRSEDAQSKAALTDWLRAKASFVIEGLKEADKDEFCRCELKLQKWYGDLRGKPFAIEAENSILDISGFSKQYNCAFIWQKDGVKKLNLYLIINYFKGGKLRFKKIKPEAFEANRFYTVINKKSGEIVPMEVNFNFDDPNLIILPLAFGKRQGREFIWNDLLSLETGSLKLANGRVIEKTLYNRRTRQDEPALFVALTFERREVLDSSNIKPMNLIGVDRGENIPAVIALTDPEGCPLSRFKDSLGNPTHILRIGESYKEKQRTIQAKKEVEQRRAGGYSRKYASKAKNLADDMVRNTARDLLYYAVTQDAMLIFENLSRGFGRQGKRTFMAERQYTRMEDWLTAKLAYEGLPSKTYLSKTLAQYTSKTCSNCGFTITSADYDRMLEKLKKTATGWMTTINGKELKVEGQITYYNRYKRQNVVKDLSVELDRLSEESVNNDISSWTKGRSGEALSLLKKRFSHRPVQEKFVCLNCGFETHADEQAALNIARSWLFLRSQEYKKYQTNKTTGNTDKRAFVETWQSFYRKKLKEVWKPAV

SEQ ID NO: 27945 - protein, 978 aa, synthetic construct
  REGION 1..978: note = engineered CasX variant
QEIKRINKIRRRLVKDSNTKKAGKTGPMKTLLVRVMTPDLRERLENLRKKPENIPQPISNTSRANLNKLLTDYTEMKKAILHVYWEEFQKDPVGLMSRVAQPASKKIDQNKLKPEMDEKGNLTTAGFACSQCGQPLFVYKLEQVSEKGKAYTNYFGRCNVAEHEKLILLAQLKPEKDSDEAVTYSLGKFGQRALDFYSIHVTKESTHPVKPLAQIAGNRYASSPVGKALSDACMGTIASFLSKYQDIIIEHQKVVKGNQKRLESLRELAGKENLEYPSVTLPPQPHTKEGVDAYNEVIARVRMWVNLNLWQKLKLSRDDAKPLLRLKGFPSFPLVERQANEVDWWDMVCNVKKLINEKKEDGKVFWQNLAGYKRQEALRPYLSSEEDRKKGKKFARYQLGDLLLHLEKKHGEDWGKVYDEAWERIDKKVEGLSKHIKLEEERRSEDAQSKAALTDWLRAKASFVIEGLKEADKDEFCRCELKLQKWYGDLRGKPFAIEAENSILDISGFSKQYNCAFIWQKDGVKKLNLYLIINYFKGGKLRFKKIKPEAFEANRFYTVINKKSGEIVPMEVNFNFDDPNLIILPLAFGKRQGREFIWNDLLSLETGSLKLANGRVIEKTLYNRRTRQDEPALFVALTFERREVLDSSNIKPMNLIGVDRGENIPAVIALTDPEGCPLSRFKDSLGNPTHILRIGESYKEKQRTIQAKKEVEQRRAGGYSRKYASKAKNLADDMVRNTARDLLYYAVTQDAMLIFENLSRGFGRQGKRTFMAERQYTRMEDWLTAKLAYEGLPSKTYLSKTLAQYTSKTCSNCGFTITSADYDRVLEKLKKTATGWMTTINGKELKVEGQITYYNRYKRQNVVKDLSVELDRLSEESVNNDISSWTKGRQGEALSLLKKRFSHRPVQEKFVCLNCGFETHADEQAALNIARSWLFLRSQEYKKYQTNKTTGNTDKRAFVETWQSFYRKKLKEVWKPAV

SEQ ID NO: 27946 - protein, 978 aa, synthetic construct
  REGION 1..978: note = engineered CasX variant
QEIKRINKIRRRLVKDSNTKKAGKTGPMKTLLVRVMTPDLRERLENLRKKPENIPQPISNTSRANLNKLLTDYTEMKKAILHVYWEEFQKDPVGLMSRVAQPASKKIDQNKLKPEMDEKGNLTTAGFACSQCGQPLFVYKLEQVSEKGKAYTNYFGRCNVAEHEKLILLAQLKPEKDSDEAVTYSLGKFGQRALDFYSIHVTKESTHPVKPLAQIAGNRYASSPVGKALSDACMGTIASFLSKYQDIIIEHQKVVKGNQKRLESLRELAGKENLEYPSVTLPPQPHTKEGVDAYNEVIARVRMWVNLNLWQKLKLSRDDAKPLLRLKGFPSFPLVERQANEVDWWDMVCNVKKLINEKKEDGKVFWQNLAGYKRQEALRPYLSSEEDRKKGKKFARYQLGDLLLHLEKKHGEDWGKVYDEAWERIDKKVEGLSKHIKLEEERRSEDAQSKAALTDWLRAKASFVIEGLKEADKDEFCRCELKLQKWYGDLRGKPFAIEAENSILDISGFSKQYNCAFIWQKDGVKKLNLYLIINYFKGGKLRFKKIKPEAFEANRFYTVINKKSGEIVPMEVNFNFDDPNLIILPLAFGKRQGREFIWNDLLSLETGSLKLANGRVIEKTLYNRRTRQDEPALFVALTFERREVLDSSNIKPMNLIGVDRGENIPAVIALTDPEGCPLSRFKDSLGNPTHILRIGESYKEKQRTIQAKKEVEQRRAGGYSRKYASKAKNLADDMVRNTARDLLYYAVTQDAMLIFENLSRGFGRQGKRTFMAERQYTRMEDWLTAKLAYEGLPSKTYLSKTLAQYTSKTCSNCGFTITSADYDRVLEKLKKTATGWMTTINGKELKVEGQITYYNRYKRQNVVKDLSVELDRLSEESVNNDISSWTKGRSGEALSLLKKRFSHRPVQEKFVCLNCEFETHADEQAALNIARSWLFLRSQEYKKYQTNKTTGNTDKRAFVETWQSFYRKKLKEVWKPAV

SEQ ID NO: 27947 - protein, 979 aa, synthetic construct
  REGION 1..979: note = engineered CasX variant
QEIKRINKIRRRLVKDSNTKKAGKTGPMKTLLVRVMTPDLRERLENLRKKPENIPQPISNTSRANLNKLLTDYTEMKKAILHVYWEEFQKDPVGLMSRVAQPASKKIDQNKLKPEMDEKGNLTTAGFACSQCGQPLFVYKLEQVSEKGKAYTNYFGRCNVAEHEKLILLAQLKPEKDSDEAVTYSLGKFGQRALDFYSIHVTKESTHPVKPLAQIAGNRYASSPVGKALSDACMGTIASFLSKYQDIIIEHQKVVKGNQKRLESLRELAGKENLEYPSVTLPPQPHTKEGVDAYNEVIARVRMWVNLNLWQKLKLSRDDAKPLLRLKGFPSFPLVERQANEVDWWDMVCNVKKLINEKKEDGKVFWQNLAGYKRQEALRPYLSSEEDRKKGKKFARYQLGDLLLHLEKKHGEDWGKVYDEAWERIDKKVEGLSKHIKLEEERRSEDAQSKAALTDWLRAKASFVIEGLKEADKDEFCRCELKLQKWYGDLRGKPFAIEAENSILDISGFSKQYNCAFIWQKDGVKKLNLYLIINYFKGGKLRFKKIKPEAFEANRFYTVINKKSGEIVPMEVNFNFDDPNLIILPLAFGKRQGREFIWNDLLSLETGSLKLANGRVIEKTLYNRRTRQDEPALFVALTFERREVLDSSNIKPMNLIGVDRGENIPAVIALTDPEGCPLSRFKDSLGNPTHILRIGESYKEKQRTIQAKKEVEQRRAGGYSRKYASKAKNLADDMVRNTARDLLYYAVTQDAMLIFENLSRGFGRQGKRTFMAERQYTRMEDWLTAKLAYEGLPSKTYLSKTLAQYTSKTCSNCGFTITSADYDRVLEKLKKTATGWMTTINGKELKVEGQITYYNRYKRQNVVKDLSVELDRLSEESVNNDISSWTKGRSGEALSLLKKRFSHRPVQEKFVCLNCGFETHADEQAALNIARSWLFLRSQEYKKYQTNKTSTGNTDKRAFVETWQSFYRKKLKEVWKPAV

SEQ ID NO: 27948 - protein, 979 aa, synthetic construct
  REGION 1..979: note = engineered CasX variant
QEIKRINKIRRRLVKDSNTKKAGKTGPMKTLLVRVMTPDLRERLENLRKKPENIPQPISNTSRANLNKLLTDYTEMKKAILHVYWEEFQKDPVGLMSRVAQPASKKIDQNKLKPEMDEKGNLTTAGFACSQCGQPLFVYKLEQVSEKGKAYTNYFGRCNVAEHEKLILLAQLKPEKDSDEAVTYSLGKFGQRALDFYSIHVTKESTHPVKPLAQIAGNRYASSPVGKALSDACMGTIASFLSKYQDIIIEHQKVVKGNQKRLESLRELAGKENLEYPSVTLPPQPHTKEGVDAYNEVIARVRMWVNLNLWQKLKLSRDDAKPLLRLKGFPSFPLVERQANEVDWWDMVCNVKKLINEKKEDGKVFWQNLAGYKRQEALRPYLSSEEDRKKGKKFARYQLGDLLLHLEKKHGEDWGKVYDEAWERIDKKVEGLSKHIKLEEERRSEDAQSKAALTDWLRAKASFVIEGLKEADKDEFCRCELKLQKWYGDLRGKPFAIEAENSILDISGFSKQYNCAFIWQKDGVKKLNLYLIINYFKGGKLRFKKIKPEAFEANRFYTVINKKSGEIVPMEVNFNFDDPNLIILPLAFGKRQGREFIWNDLLSLETGSLKLANGRVIEKTLYNRRTRQDEPALFVALTFERREVLDSSNIKPMNLIGVDRGENIPAVIALTDPEGCPLSRFKDSLGNPTHILRIGESYKEKQRTIQAKKEVEQRRAGGYSRKYASKAKNLADDMVRNTARDLLYYAVTQDAMLIFENLSRGFGRQGKRTFMAERQYTRMEDWLTAKLAYEGLPSKTYLSKTLAQYTSKTCSNCGFTITSADYDRVLEKLKKTATGWMTTINGKELKVEGQITYYNRYKRQNVVKDLSVELDRLSEESVNNDISSWTKGRSGEALSLLKKRFSHRPVQEKFVCLNCGFETHADEQAALNIARSWLFLRSQEYKKYQTNKTTGKNTDKRAFVETWQSFYRKKLKEVWKPAV

SEQ ID NO: 27949 - protein, 978 aa, synthetic construct
  REGION 1..978: note = engineered CasX variant
QEIKRINKIRRRLVKDSNTKKAGKTGPMKTLLVRVMTPDLRERLENLRKKPENIPQPISNTSRANLNKLLTDYTEMKKAILHVYWEEFQKDPVGLMSRVAQPASKKIDQNKLKPEMDEKGNLTTAGFACSQCGQPLFVYKLEQVSEKGKAYTNYFGRCNVAEHEKLILLAQLKPEKDSDEAVTYSLGKFGQRALDFYSIHVTKESTHPVKPLAQIAGNRYASSPVGKALSDACMGTIASFLSKYQDIIIEHQKVVKGNQKRLESLRELAGKENLEYPSVTLPPQPHTKEGVDAYNEVIARVRMWVNLNLWQKLKLSRDDAKPLLRLKKFPSFPLVERQANEVDWWDMVCNVKKLINEKKEDGKVFWQNLAGYKRQEALRPYLSSEEDRKKGKKFARYQLGDLLLHLEKKHGEDWGKVYDEAWERIDKKVEGLSKHIKLEEERRSEDAQSKAALTDWLRAKASFVIEGLKEADKDEFCRCELKLQKWYGDLRGKPFAIEAENSILDISGFSKQYNCAFIWQKDGVKKLNLYLIINYFKGGKLRFKKIKPEAFEANRFYTVINKKSGEIVPMEVNFNFDDPNLIILPLAFGKRQGREFIWNDLLSLETGSLKLANGRVIEKTLYNRRTRQDEPALFVALTFERREVLDSSNIKPMNLIGVDRGENIPAVIALTDPEGCPLSRFKDSLGNPTHILRIGESYKEKQRTIQAKKEVEQRRAGGYSRKYASKAKNLADDMVRNTARDLLYYAVTQDAMLIFENLSRGFGRQGKRTFMAERQYTRMEDWLTAKLAYEGLPSKTYLSKTLAQYTSKTCSNCGFTITSADYDRVLEKLKKTATGWMTTINGKELKVEGQITYYNRYKRQNVVKDLSVELDRLSEESVNNDISSWTKGRSGEALSLLKKRFSHRPVQEKFVCLNCGFETHADEQAALNIARSWLFLRSQEYKKYQTNKTTGNTDKRAFVETWQSFYRKKLKEVWKPAV

SEQ ID NO: 27950 - protein, 978 aa, synthetic construct
  REGION 1..978: note = engineered CasX variant
QEIKRINKIRRRLVKDSNTKKAGKTGPMKTLLVRVMTPDLRERLENLRKKPENIPQPISNTSRANLNKLLTDYTEMKKAILHVYWEEFQKDPVGLMSRVAQPASKKIDQNKLKPEMDEKGNLTTAGFACSQCGQPLFVYKLEQVSEKGKAYTNYFGRCNVAEHEKLILLAQLKPEKDSDEAVTYSLGKFGQRALDFYSIHVTKESTHPVKPLAQIAGNRYASSPVGKALSDACMGTIASFLSKYQDIIIEHQKVVKGNQKRLESLRELAGKENLEYPSVTLPPQPHTKEGVDAYNEVIARVRMWVNLNLWQKLKLSRDDAKPLLRLKGFPSFPLVERQANEVDWWDMVCNVKKLINEKKEDGKVFWQNLAGYKRQEALRPYLSSEEDRKKGKKFARYQLGDLLLHLEKKHGEDWGKVYDEAWERIDKKVEGLSKHIKLEEERRSEDAQSKAALTDWLRAKASFVIEGLKEADKDEFCRCELKLQKWYGDLRGKPFAIEAENSILDISGFSKQYNCAFIWQKDGVKKLNLYLIINYFKGGKLRFKKIKPEAFEANRFYTVINKKSGEIVPMEVNFNFDDPNLIILPLAFGKRQGREFIWNDLLSLETGSLKLANGRVIEKTLYNRRTRQDEPALFVALTFERREVLDSSNIKPMNLIGVDRGENIPAVIALTDPEGCPLSRFKDSLGNPTHILRIGERYKEKQRTIQAKKEVEQRRAGGYSRKYASKAKNLADDMVRNTARDLLYYAVTQDAMLIFENLSRGFGRQGKRTFMAERQYTRMEDWLTAKLAYEGLPSKTYLSKTLAQYTSKTCSNCGFTITSADYDRVLEKLKKTATGWMTTINGKELKVEGQITYYNRYKRQNVVKDLSVELDRLSEESVNNDISSWTKGRSGEALSLLKKRFSHRPVQEKFVCLNCGFETHADEQAALNIARSWLFLRSQEYKKYQTNKTTGNTDKRAFVETWQSFYRKKLKEVWKPAV

SEQ ID NO: 27951 - protein, 978 aa, synthetic construct
  REGION 1..978: note = engineered CasX variant
QEIKRINKIRRRLVKDSNTKKAGKTGPMKTLLVRVMTPDLRERLENLRKKPENIPQPISNTSRANLNKLLTDYTEMKKAILHVYWEEFQKDPVGLMSRVAQPASKKIDQNKLKPEMDEKGNLTTAGFACSQCGQPLFVYKLEQVSEKGKAYTNYFGRCNVAEHEKLILLAQLKPEKDSDEAVTYSLGKFGQRALDFYSIHVTKESTHPVKPLAQIAGNRYASSPVGKALSDACMGTIASFLSKYQDIIIEHQKVVKGNQKRLESLRELAGKENLEYPSVTLPPQPHTKEGVDAYNEVIARVRMWVNLNLWQKLKLSRDDAKPLLRLKGFPSFPLVERQANEVDWWDMVCNVKKLINEKKEDGKVFWQNLAGYKRQEALRPYLSSEEDRKKGKKFARYQLGDLLLHLEKKHGEDWGKVYDEAWERIDKKVEGLSKHIKLEEERRSEDAQSKAALTDWLRAKASFVIEGLKEADKDEFCRCELKLQKWYGDLRGKPFAIEAENSILDISGFSKQYNCAFIWQKDGVKKLNLYLIINYFKGGKLRFKKIKPEAFEANRFYTVINKKSGEIVPMEVNFNFDDPNLIILPLAFGKRQGREFIWNDLLSLETGSLQLANGRVIEKTLYNRRTRQDEPALFVALTFERREVLDSSNIKPMNLIGVDRGENIPAVIALTDPEGCPLSRFKDSLGNPTHILRIGESYKEKQRTIQAKKEVEQRRAGGYSRKYASKAKNLADDMVRNTARDLLYYAVTQDAMLIFENLSRGFGRQGKRTFMAERQYTRMEDWLTAKLAYEGLPSKTYLSKTLAQYTSKTCSNCGFTITSADYDRVLEKLKKTATGWMTTINGKELKVEGQITYYNRYKRQNVVKDLSVELDRLSEESVNNDISSWTKGRSGEALSLLKKRFSHRPVQEKFVCLNCGFETHADEQAALNIARSWLFLRSQEYKKYQTNKTTGNTDKRAFVETWQSFYRKKLKEVWKPAV

SEQ ID NO: 27952 - protein, 978 aa, synthetic construct
  REGION 1..978: note = engineered CasX variant
QEGKRINKIRRRLVKDSNTKKAGKTGPMKTLLVRVMTPDLRERLENLRKKPENIPQPISNTSRANLNKLLTDYTEMKKAILHVYWEEFQKDPVGLMSRVAQPASKKIDQNKLKPEMDEKGNLTTAGFACSQCGQPLFVYKLEQVSEKGKAYTNYFGRCNVAEHEKLILLDQLKPEKDSDEAVTYSLGKFGQRALDFYSIHVTKESTHPVKPLAQIAGNRYASGPVGKALSDACMGTIASFLSKYQDIIIEHQKVVKGNQKRLESLRELAGKENLEYPSVTLPPQPHTKEGVDAYNEVIARVRMWVNLNLWQKLKLSRDDAKPLLRLKGFPSFPLVERQANEVDWWDMVCNVKKLINEKKEDGKVFWQNLAGYKRQEALRPYLSSEEDRKKGKKFARYQLGDLLLHLEKKHGEDWGKVYDEAWERIDKKVEGLSKHIKLEEERRSEDAQSKAALTDWLRAKASFVIEGLKEADKDEFCRCELKLQKWYGDLRGKPFAIEAENSILDISGFSKQYNCAFIWQKDGVKKLNLYLIINYFKGGKLRFKKIKPEAFEANRFYTVINKKSGEIVPMEVNFNFDDPNLIILPLAFGKRQGREFIWNDLLSLETGSLKLANGRVIEKTLYNRRTRQDEPALFVALTFERREVLDSSNIKPMNLIGVDRGENIPAVIALTDPEGCPLSRFKDSLGNPTHILRIGESYKEKQRTIQAKKEVEQRRAGGYSRKYASKAKNLADDMVRNTARDLLYYAVTQDAMLIFENLSRGFGRQGKRTFMAERQYTRMEDWLTAKLAYEGLPSKTYLSKTLAQYTSKTCSNCGFTITSADYDRVLEKLKKTATGWMTTINGKELKVEGQITYYNRYKRQNVVKDLSVELDRLSEESVNNDISSWTKGRSGEALSLLKKRFSHRPVQEKFVCLNCGFETHADEQAALNIARSWLFLRSQEYKKYQTNKTTGNTDKRAFVETWQSFYRKKLKEVWKPAV

SEQ ID NO: 27953 - protein, 979 aa, synthetic construct
  REGION 1..979: note = engineered CasX variant
QEIGKRINKIRRRLVKDSNTKKAGKTGPMKTLLVRVMTPDLRERLENLRKKPENIPQPISNTSRANLNKLLTDYTEMKKAILHVYWEEFQKDPVGLMSRVAQPASKKIDQNKLKPEMDEKGNLTTAGFACSQCGQPLFVYKLEQVSEKGKAYTNYFGRCNVAEHEKLILLDQLKPEKDSDEAVTYSLGKFGQRALDFYSIHVTKESTHPVKPLAQIAGNRYASGPVGKALSDACMGTIASFLSKYQDIIIEHQKVVKGNQKRLESLRELAGKENLEYPSVTLPPQPHTKEGVDAYNEVIARVRMWVNLNLWQKLKLSRDDAKPLLRLKGFPSFPLVERQANEVDWWDMVCNVKKLINEKKEDGKVFWQNLAGYKRQEALRPYLSSEEDRKKGKKFARYQLGDLLLHLEKKHGEDWGKVYDEAWERIDKKVEGLSKHIKLEEERRSEDAQSKAALTDWLRAKASFVIEGLKEADKDEFCRCELKLQKWYGDLRGKPFAIEAENSILDISGFSKQYNCAFIWQKDGVKKLNLYLIINYFKGGKLRFKKIKPEAFEANRFYTVINKKSGEIVPMEVNFNFDDPNLIILPLAFGKRQGREFIWNDLLSLETGSLKLANGRVIEKTLYNRRTRQDEPALFVALTFERREVLDSSNIKPMNLIGVDRGENIPAVIALTDPEGCPLSRFKDSLGNPTHILRIGESYKEKQRTIQAKKEVEQRRAGGYSRKYASKAKNLADDMVRNTARDLLYYAVTQDAMLIFENLSRGFGRQGKRTFMAERQYTRMEDWLTAKLAYEGLPSKTYLSKTLAQYTSKTCSNCGFTITSADYDRVLEKLKKTATGWMTTINGKELKVEGQITYYNRYKRQNVVKDLSVELDRLSEESVNNDISSWTKGRSGEALSLLKKRFSHRPVQEKFVCLNCGFETHADEQAALNIARSWLFLRSQEYKKYQTNKTTGNTDKRAFVETWQSFYRKKLKEVWKPAV

SEQ ID NO: 27954 - protein, 978 aa, synthetic construct
  REGION 1..978: note = engineered CasX variant
QEIGRINKIRRRLVKDSNTKKAGKTGPMKTLLVRVMTPDLRERLENLRKKPENIPQPISNTSRANLNKLLTDYTEMKKAILHVYWEEFQKDPVGLMSRVAQPASKKIDQNKLKPEMDEKGNLTTAGFACSQCGQPLFVYKLEQVSEKGKAYTNYFGRCNVAEHEKLILLDQLKPEKDSDEAVTYSLGKFGQRALDFYSIHVTKESTHPVKPLAQIAGNRYASGPVGKALSDACMGTIASFLSKYQDIIIEHQKVVKGNQKRLESLRELAGKENLEYPSVTLPPQPHTKEGVDAYNEVIARVRMWVNLNLWQKLKLSRDDAKPLLRLKGFPSFPLVERQANEVDWWDMVCNVKKLINEKKEDGKVFWQNLAGYKRQEALRPYLSSEEDRKKGKKFARYQLGDLLLHLEKKHGEDWGKVYDEAWERIDKKVEGLSKHIKLEEERRSEDAQSKAALTDWLRAKASFVIEGLKEADKDEFCRCELKLQKWYGDLRGKPFAIEAENSILDISGFSKQYNCAFIWQKDGVKKLNLYLIINYFKGGKLRFKKIKPEAFEANRFYTVINKKSGEIVPMEVNFNFDDPNLIILPLAFGKRQGREFIWNDLLSLETGSLKLANGRVIEKTLYNRRTRQDEPALFVALTFERREVLDSSNIKPMNLIGVDRGENIPAVIALTDPEGCPLSRFKDSLGNPTHILRIGESYKEKQRTIQAKKEVEQRRAGGYSRKYASKAKNLADDMVRNTARDLLYYAVTQDAMLIFENLSRGFGRQGKRTFMAERQYTRMEDWLTAKLAYEGLPSKTYLSKTLAQYTSKTCSNCGFTITSADYDRVLEKLKKTATGWMTTINGKELKVEGQITYYNRYKRQNVVKDLSVELDRLSEESVNNDISSWTKGRSGEALSLLKKRFSHRPVQEKFVCLNCGFETHADEQAALNIARSWLFLRSQEYKKYQTNKTTGNTDKRAFVETWQSFYRKKLKEVWKPAV

SEQ ID NO: 27955 - protein, 979 aa, synthetic construct
  REGION 1..979: note = engineered CasX variant
QEIKGRINKIRRRLVKDSNTKKAGKTGPMKTLLVRVMTPDLRERLENLRKKPENIPQPISNTSRANLNKLLTDYTEMKKAILHVYWEEFQKDPVGLMSRVAQPASKKIDQNKLKPEMDEKGNLTTAGFACSQCGQPLFVYKLEQVSEKGKAYTNYFGRCNVAEHEKLILLDQLKPEKDSDEAVTYSLGKFGQRALDFYSIHVTKESTHPVKPLAQIAGNRYASGPVGKALSDACMGTIASFLSKYQDIIIEHQKVVKGNQKRLESLRELAGKENLEYPSVTLPPQPHTKEGVDAYNEVIARVRMWVNLNLWQKLKLSRDDAKPLLRLKGFPSFPLVERQANEVDWWDMVCNVKKLINEKKEDGKVFWQNLAGYKRQEALRPYLSSEEDRKKGKKFARYQLGDLLLHLEKKHGEDWGKVYDEAWERIDKKVEGLSKHIKLEEERRSEDAQSKAALTDWLRAKASFVIEGLKEADKDEFCRCELKLQKWYGDLRGKPFAIEAENSILDISGFSKQYNCAFIWQKDGVKKLNLYLIINYFKGGKLRFKKIKPEAFEANRFYTVINKKSGEIVPMEVNFNFDDPNLIILPLAFGKRQGREFIWNDLLSLETGSLKLANGRVIEKTLYNRRTRQDEPALFVALTFERREVLDSSNIKPMNLIGVDRGENIPAVIALTDPEGCPLSRFKDSLGNPTHILRIGESYKEKQRTIQAKKEVEQRRAGGYSRKYASKAKNLADDMVRNTARDLLYYAVTQDAMLIFENLSRGFGRQGKRTFMAERQYTRMEDWLTAKLAYEGLPSKTYLSKTLAQYTSKTCSNCGFTITSADYDRVLEKLKKTATGWMTTINGKELKVEGQITYYNRYKRQNVVKDLSVELDRLSEESVNNDISSWTKGRSGEALSLLKKRFSHRPVQEKFVCLNCGFETHADEQAALNIARSWLFLRSQEYKKYQTNKTTGNTDKRAFVETWQSFYRKKLKEVWKPAV

SEQ ID NO: 27956 - protein, 978 aa, synthetic construct
  REGION 1..978: note = engineered CasX variant
QEIKRANKIRRRLVKDSNTKKAGKTGPMKTLLVRVMTPDLRERLENLRKKPENIPQPISNTSRANLNKLLTDYTEMKKAILHVYWEEFQKDPVGLMSRVAQPASKKIDQNKLKPEMDEKGNLTTAGFACSQCGQPLFVYKLEQVSEKGKAYTNYFGRCNVAEHEKLILLDQLKPEKDSDEAVTYSLGKFGQRALDFYSIHVTKESTHPVKPLAQIAGNRYASGPVGKALSDACMGTIASFLSKYQDIIIEHQKVVKGNQKRLESLRELAGKENLEYPSVTLPPQPHTKEGVDAYNEVIARVRMWVNLNLWQKLKLSRDDAKPLLRLKGFPSFPLVERQANEVDWWDMVCNVKKLINEKKEDGKVFWQNLAGYKRQEALRPYLSSEEDRKKGKKFARYQLGDLLLHLEKKHGEDWGKVYDEAWERIDKKVEGLSKHIKLEEERRSEDAQSKAALTDWLRAKASFVIEGLKEADKDEFCRCELKLQKWYGDLRGKPFAIEAENSILDISGFSKQYNCAFIWQKDGVKKLNLYLIINYFKGGKLRFKKIKPEAFEANRFYTVINKKSGEIVPMEVNFNFDDPNLIILPLAFGKRQGREFIWNDLLSLETGSLKLANGRVIEKTLYNRRTRQDEPALFVALTFERREVLDSSNIKPMNLIGVDRGENIPAVIALTDPEGCPLSRFKDSLGNPTHILRIGESYKEKQRTIQAKKEVEQRRAGGYSRKYASKAKNLADDMVRNTARDLLYYAVTQDAMLIFENLSRGFGRQGKRTFMAERQYTRMEDWLTAKLAYEGLPSKTYLSKTLAQYTSKTCSNCGFTITSADYDRVLEKLKKTATGWMTTINGKELKVEGQITYYNRYKRQNVVKDLSVELDRLSEESVNNDISSWTKGRSGEALSLLKKRFSHRPVQEKFVCLNCGFETHADEQAALNIARSWLFLRSQEYKKYQTNKTTGNTDKRAFVETWQSFYRKKLKEVWKPAV

SEQ ID NO: 27957 - protein, 978 aa, synthetic construct
  REGION 1..978: note = engineered CasX variant
QEIKRISKIRRRLVKDSNTKKAGKTGPMKTLLVRVMTPDLRERLENLRKKPENIPQPISNTSRANLNKLLTDYTEMKKAILHVYWEEFQKDPVGLMSRVAQPASKKIDQNKLKPEMDEKGNLTTAGFACSQCGQPLFVYKLEQVSEKGKAYTNYFGRCNVAEHEKLILLDQLKPEKDSDEAVTYSLGKFGQRALDFYSIHVTKESTHPVKPLAQIAGNRYASGPVGKALSDACMGTIASFLSKYQDIIIEHQKVVKGNQKRLESLRELAGKENLEYPSVTLPPQPHTKEGVDAYNEVIARVRMWVNLNLWQKLKLSRDDAKPLLRLKGFPSFPLVERQANEVDWWDMVCNVKKLINEKKEDGKVFWQNLAGYKRQEALRPYLSSEEDRKKGKKFARYQLGDLLLHLEKKHGEDWGKVYDEAWERIDKKVEGLSKHIKLEEERRSEDAQSKAALTDWLRAKASFVIEGLKEADKDEFCRCELKLQKWYGDLRGKPFAIEAENSILDISGFSKQYNCAFIWQKDGVKKLNLYLIINYFKGGKLRFKKIKPEAFEANRFYTVINKKSGEIVPMEVNFNFDDPNLIILPLAFGKRQGREFIWNDLLSLETGSLKLANGRVIEKTLYNRRTRQDEPALFVALTFERREVLDSSNIKPMNLIGVDRGENIPAVIALTDPEGCPLSRFKDSLGNPTHILRIGESYKEKQRTIQAKKEVEQRRAGGYSRKYASKAKNLADDMVRNTARDLLYYAVTQDAMLIFENLSRGFGRQGKRTFMAERQYTRMEDWLTAKLAYEGLPSKTYLSKTLAQYTSKTCSNCGFTITSADYDRVLEKLKKTATGWMTTINGKELKVEGQITYYNRYKRQNVVKDLSVELDRLSEESVNNDISSWTKGRSGEALSLLKKRFSHRPVQEKFVCLNCGFETHADEQAALNIARSWLFLRSQEYKKYQTNKTTGNTDKRAFVETWQSFYRKKLKEVWKPAV

SEQ ID NO: 27958 - protein, 978 aa, synthetic construct
  REGION 1..978: note = engineered CasX variant
QEIKRINGIRRRLVKDSNTKKAGKTGPMKTLLVRVMTPDLRERLENLRKKPENIPQPISNTSRANLNKLLTDYTEMKKAILHVYWEEFQKDPVGLMSRVAQPASKKIDQNKLKPEMDEKGNLTTAGFACSQCGQPLFVYKLEQVSEKGKAYTNYFGRCNVAEHEKLILLDQLKPEKDSDEAVTYSLGKFGQRALDFYSIHVTKESTHPVKPLAQIAGNRYASGPVGKALSDACMGTIASFLSKYQDIIIEHQKVVKGNQKRLESLRELAGKENLEYPSVTLPPQPHTKEGVDAYNEVIARVRMWVNLNLWQKLKLSRDDAKPLLRLKGFPSFPLVERQANEVDWWDMVCNVKKLINEKKEDGKVFWQNLAGYKRQEALRPYLSSEEDRKKGKKFARYQLGDLLLHLEKKHGEDWGKVYDEAWERIDKKVEGLSKHIKLEEERRSEDAQSKAALTDWLRAKASFVIEGLKEADKDEFCRCELKLQKWYGDLRGKPFAIEAENSILDISGFSKQYNCAFIWQKDGVKKLNLYLIINYFKGGKLRFKKIKPEAFEANRFYTVINKKSGEIVPMEVNFNFDDPNLIILPLAFGKRQGREFIWNDLLSLETGSLKLANGRVIEKTLYNRRTRQDEPALFVALTFERREVLDSSNIKPMNLIGVDRGENIPAVIALTDPEGCPLSRFKDSLGNPTHILRIGESYKEKQRTIQAKKEVEQRRAGGYSRKYASKAKNLADDMVRNTARDLLYYAVTQDAMLIFENLSRGFGRQGKRTFMAERQYTRMEDWLTAKLAYEGLPSKTYLSKTLAQYTSKTCSNCGFTITSADYDRVLEKLKKTATGWMTTINGKELKVEGQITYYNRYKRQNVVKDLSVELDRLSEESVNNDISSWTKGRSGEALSLLKKRFSHRPVQEKFVCLNCGFETHADEQAALNIARSWLFLRSQEYKKYQTNKTTGNTDKRAFVETWQSFYRKKLKEVWKPAV

SEQ ID NO: 27959 - protein, 978 aa, synthetic construct
  REGION 1..978: note = engineered CasX variant
QEIKRINKIRRRLVKDSNTKKAGKTGPMKTLLVPVMTPDLRERLENLRKKPENIPQPISNTSRANLNKLLTDYTEMKKAILHVYWEEFQKDPVGLMSRVAQPASKKIDQNKLKPEMDEKGNLTTAGFACSQCGQPLFVYKLEQVSEKGKAYTNYFGRCNVAEHEKLILLDQLKPEKDSDEAVTYSLGKFGQRALDFYSIHVTKESTHPVKPLAQIAGNRYASGPVGKALSDACMGTIASFLSKYQDIIIEHQKVVKGNQKRLESLRELAGKENLEYPSVTLPPQPHTKEGVDAYNEVIARVRMWVNLNLWQKLKLSRDDAKPLLRLKGFPSFPLVERQANEVDWWDMVCNVKKLINEKKEDGKVFWQNLAGYKRQEALRPYLSSEEDRKKGKKFARYQLGDLLLHLEKKHGEDWGKVYDEAWERIDKKVEGLSKHIKLEEERRSEDAQSKAALTDWLRAKASFVIEGLKEADKDEFCRCELKLQKWYGDLRGKPFAIEAENSILDISGFSKQYNCAFIWQKDGVKKLNLYLIINYFKGGKLRFKKIKPEAFEANRFYTVINKKSGEIVPMEVNFNFDDPNLIILPLAFGKRQGREFIWNDLLSLETGSLKLANGRVIEKTLYNRRTRQDEPALFVALTFERREVLDSSNIKPMNLIGVDRGENIPAVIALTDPEGCPLSRFKDSLGNPTHILRIGESYKEKQRTIQAKKEVEQRRAGGYSRKYASKAKNLADDMVRNTARDLLYYAVTQDAMLIFENLSRGFGRQGKRTFMAERQYTRMEDWLTAKLAYEGLPSKTYLSKTLAQYTSKTCSNCGFTITSADYDRVLEKLKKTATGWMTTINGKELKVEGQITYYNRYKRQNVVKDLSVELDRLSEESVNNDISSWTKGRSGEALSLLKKRFSHRPVQEKFVCLNCGFETHADEQAALNIARSWLFLRSQEYKKYQTNKTTGNTDKRAFVETWQSFYRKKLKEVWKPAV

SEQ ID NO: 27960 - protein, 978 aa, synthetic construct
  REGION 1..978: note = engineered CasX variant
QEIKRINKIRRRLVKDSNTKKAGKTGPMKTLLVRVMTPDLRERLENLRKKPPNIPQPISNTSRANLNKLLTDYTEMKKAILHVYWEEFQKDPVGLMSRVAQPASKKIDQNKLKPEMDEKGNLTTAGFACSQCGQPLFVYKLEQVSEKGKAYTNYFGRCNVAEHEKLILLDQLKPEKDSDEAVTYSLGKFGQRALDFYSIHVTKESTHPVKPLAQIAGNRYASGPVGKALSDACMGTIASFLSKYQDIIIEHQKVVKGNQKRLESLRELAGKENLEYPSVTLPPQPHTKEGVDAYNEVIARVRMWVNLNLWQKLKLSRDDAKPLLRLKGFPSFPLVERQANEVDWWDMVCNVKKLINEKKEDGKVFWQNLAGYKRQEALRPYLSSEEDRKKGKKFARYQLGDLLLHLEKKHGEDWGKVYDEAWERIDKKVEGLSKHIKLEEERRSEDAQSKAALTDWLRAKASFVIEGLKEADKDEFCRCELKLQKWYGDLRGKPFAIEAENSILDISGFSKQYNCAFIWQKDGVKKLNLYLIINYFKGGKLRFKKIKPEAFEANRFYTVINKKSGEIVPMEVNFNFDDPNLIILPLAFGKRQGREFIWNDLLSLETGSLKLANGRVIEKTLYNRRTRQDEPALFVALTFERREVLDSSNIKPMNLIGVDRGENIPAVIALTDPEGCPLSRFKDSLGNPTHILRIGESYKEKQRTIQAKKEVEQRRAGGYSRKYASKAKNLADDMVRNTARDLLYYAVTQDAMLIFENLSRGFGRQGKRTFMAERQYTRMEDWLTAKLAYEGLPSKTYLSKTLAQYTSKTCSNCGFTITSADYDRVLEKLKKTATGWMTTINGKELKVEGQITYYNRYKRQNVVKDLSVELDRLSEESVNNDISSWTKGRSGEALSLLKKRFSHRPVQEKFVCLNCGFETHADEQAALNIARSWLFLRSQEYKKYQTNKTTGNTDKRAFVETWQSFYRKKLKEVWKPAV

SEQ ID NO: 27961 - protein, 978 aa, synthetic construct
  REGION 1..978: note = engineered CasX variant
QEIKRINKIRRRLVKDSNTKKAGKTGPMKTLLVRVMTPDLRERLENLRKKPENIPQPISNTSQANLNKLLTDYTEMKKAILHVYWEEFQKDPVGLMSRVAQPASKKIDQNKLKPEMDEKGNLTTAGFACSQCGQPLFVYKLEQVSEKGKAYTNYFGRCNVAEHEKLILLDQLKPEKDSDEAVTYSLGKFGQRALDFYSIHVTKESTHPVKPLAQIAGNRYASGPVGKALSDACMGTIASFLSKYQDIIIEHQKVVKGNQKRLESLRELAGKENLEYPSVTLPPQPHTKEGVDAYNEVIARVRMWVNLNLWQKLKLSRDDAKPLLRLKGFPSFPLVERQANEVDWWDMVCNVKKLINEKKEDGKVFWQNLAGYKRQEALRPYLSSEEDRKKGKKFARYQLGDLLLHLEKKHGEDWGKVYDEAWERIDKKVEGLSKHIKLEEERRSEDAQSKAALTDWLRAKASFVIEGLKEADKDEFCRCELKLQKWYGDLRGKPFAIEAENSILDISGFSKQYNCAFIWQKDGVKKLNLYLIINYFKGGKLRFKKIKPEAFEANRFYTVINKKSGEIVPMEVNFNFDDPNLIILPLAFGKRQGREFIWNDLLSLETGSLKLANGRVIEKTLYNRRTRQDEPALFVALTFERREVLDSSNIKPMNLIGVDRGENIPAVIALTDPEGCPLSRFKDSLGNPTHILRIGESYKEKQRTIQAKKEVEQRRAGGYSRKYASKAKNLADDMVRNTARDLLYYAVTQDAMLIFENLSRGFGRQGKRTFMAERQYTRMEDWLTAKLAYEGLPSKTYLSKTLAQYTSKTCSNCGFTITSADYDRVLEKLKKTATGWMTTINGKELKVEGQITYYNRYKRQNVVKDLSVELDRLSEESVNNDISSWTKGRSGEALSLLKKRFSHRPVQEKFVCLNCGFETHADEQAALNIARSWLFLRSQEYKKYQTNKTTGNTDKRAFVETWQSFYRKKLKEVWKPAV

SEQ ID NO: 27962 - protein, 978 aa, synthetic construct
  REGION 1..978: note = engineered CasX variant
QEIKRINKIRRRLVKDSNTKKAGKTGPMKTLLVRVMTPDLRERLENLRKKPENIPQPISNTSRANLNKLLTDYTEMKKAILHVYDEEFQKDPVGLMSRVAQPASKKIDQNKLKPEMDEKGNLTTAGFACSQCGQPLFVYKLEQVSEKGKAYTNYFGRCNVAEHEKLILLDQLKPEKDSDEAVTYSLGKFGQRALDFYSIHVTKESTHPVKPLAQIAGNRYASGPVGKALSDACMGTIASFLSKYQDIIIEHQKVVKGNQKRLESLRELAGKENLEYPSVTLPPQPHTKEGVDAYNEVIARVRMWVNLNLWQKLKLSRDDAKPLLRLKGFPSFPLVERQANEVDWWDMVCNVKKLINEKKEDGKVFWQNLAGYKRQEALRPYLSSEEDRKKGKKFARYQLGDLLLHLEKKHGEDWGKVYDEAWERIDKKVEGLSKHIKLEEERRSEDAQSKAALTDWLRAKASFVIEGLKEADKDEFCRCELKLQKWYGDLRGKPFAIEAENSILDISGFSKQYNCAFIWQKDGVKKLNLYLIINYFKGGKLRFKKIKPEAFEANRFYTVINKKSGEIVPMEVNFNFDDPNLIILPLAFGKRQGREFIWNDLLSLETGSLKLANGRVIEKTLYNRRTRQDEPALFVALTFERREVLDSSNIKPMNLIGVDRGENIPAVIALTDPEGCPLSRFKDSLGNPTHILRIGESYKEKQRTIQAKKEVEQRRAGGYSRKYASKAKNLADDMVRNTARDLLYYAVTQDAMLIFENLSRGFGRQGKRTFMAERQYTRMEDWLTAKLAYEGLPSKTYLSKTLAQYTSKTCSNCGFTITSADYDRVLEKLKKTATGWMTTINGKELKVEGQITYYNRYKRQNVVKDLSVELDRLSEESVNNDISSWTKGRSGEALSLLKKRFSHRPVQEKFVCLNCGFETHADEQAALNIARSWLFLRSQEYKKYQTNKTTGNTDKRAFVETWQSFYRKKLKEVWKPAV

SEQ ID NO: 27963 - protein, 978 aa, synthetic construct
  REGION 1..978: note = engineered CasX variant
QEIKRINKIRRRLVKDSNTKKAGKTGPMKTLLVRVMTPDLRERLENLRKKPENIPQPISNTSRANLNKLLTDYTEMKKAILHVYWEEFQKDPVGLMSRVAQPASKKIDQNKLKPEMDEKGNLTTAGFACSQCGQPLFVYKLEQVSEKGKAYTNYFGRCNVAEHEKLIKLDQLKPEKDSDEAVTYSLGKFGQRALDFYSIHVTKESTHPVKPLAQIAGNRYASGPVGKALSDACMGTIASFLSKYQDIIIEHQKVVKGNQKRLESLRELAGKENLEYPSVTLPPQPHTKEGVDAYNEVIARVRMWVNLNLWQKLKLSRDDAKPLLRLKGFPSFPLVERQANEVDWWDMVCNVKKLINEKKEDGKVFWQNLAGYKRQEALRPYLSSEEDRKKGKKFARYQLGDLLLHLEKKHGEDWGKVYDEAWERIDKKVEGLSKHIKLEEERRSEDAQSKAALTDWLRAKASFVIEGLKEADKDEFCRCELKLQKWYGDLRGKPFAIEAENSILDISGFSKQYNCAFIWQKDGVKKLNLYLIINYFKGGKLRFKKIKPEAFEANRFYTVINKKSGEIVPMEVNFNFDDPNLIILPLAFGKRQGREFIWNDLLSLETGSLKLANGRVIEKTLYNRRTRQDEPALFVALTFERREVLDSSNIKPMNLIGVDRGENIPAVIALTDPEGCPLSRFKDSLGNPTHILRIGESYKEKQRTIQAKKEVEQRRAGGYSRKYASKAKNLADDMVRNTARDLLYYAVTQDAMLIFENLSRGFGRQGKRTFMAERQYTRMEDWLTAKLAYEGLPSKTYLSKTLAQYTSKTCSNCGFTITSADYDRVLEKLKKTATGWMTTINGKELKVEGQITYYNRYKRQNVVKDLSVELDRLSEESVNNDISSWTKGRSGEALSLLKKRFSHRPVQEKFVCLNCGFETHADEQAALNIARSWLFLRSQEYKKYQTNKTTGNTDKRAFVETWQSFYRKKLKEVWKPAV

SEQ ID NO: 27964 - protein, 979 aa, synthetic construct
  REGION 1..979: note = engineered CasX variant
QEIKRINKIRRRLVKDSNTKKAGKTGPMKTLLVRVMTPDLRERLENLRKKPENIPQPISNTSRANLNKLLTDYTEMKKAILHVYWEEFQKDPVGLMSRVAQPASKKIDQNKLKPEMDEKGNLTTAGFACSQCGQPLFVYKLEQVSEKGKAYTNYFGRCNVAEHEKLILLDYQLKPEKDSDEAVTYSLGKFGQRALDFYSIHVTKESTHPVKPLAQIAGNRYASGPVGKALSDACMGTIASFLSKYQDIIIEHQKVVKGNQKRLESLRELAGKENLEYPSVTLPPQPHTKEGVDAYNEVIARVRMWVNLNLWQKLKLSRDDAKPLLRLKGFPSFPLVERQANEVDWWDMVCNVKKLINEKKEDGKVFWQNLAGYKRQEALRPYLSSEEDRKKGKKFARYQLGDLLLHLEKKHGEDWGKVYDEAWERIDKKVEGLSKHIKLEEERRSEDAQSKAALTDWLRAKASFVIEGLKEADKDEFCRCELKLQKWYGDLRGKPFAIEAENSILDISGFSKQYNCAFIWQKDGVKKLNLYLIINYFKGGKLRFKKIKPEAFEANRFYTVINKKSGEIVPMEVNFNFDDPNLIILPLAFGKRQGREFIWNDLLSLETGSLKLANGRVIEKTLYNRRTRQDEPALFVALTFERREVLDSSNIKPMNLIGVDRGENIPAVIALTDPEGCPLSRFKDSLGNPTHILRIGESYKEKQRTIQAKKEVEQRRAGGYSRKYASKAKNLADDMVRNTARDLLYYAVTQDAMLIFENLSRGFGRQGKRTFMAERQYTRMEDWLTAKLAYEGLPSKTYLSKTLAQYTSKTCSNCGFTITSADYDRVLEKLKKTATGWMTTINGKELKVEGQITYYNRYKRQNVVKDLSVELDRLSEESVNNDISSWTKGRSGEALSLLKKRFSHRPVQEKFVCLNCGFETHADEQAALNIARSWLFLRSQEYKKYQTNKTTGNTDKRAFVETWQSFYRKKLKEVWKPAV

SEQ ID NO: 27965 - protein, 979 aa, synthetic construct
  REGION 1..979: note = engineered CasX variant
QEIKRINKIRRRLVKDSNTKKAGKTGPMKTLLVRVMTPDLRERLENLRKKPENIPQPISNTSRANLNKLLTDYTEMKKAILHVYWEEFQKDPVGLMSRVAQPASKKIDQNKLKPEMDEKGNLTTAGFACSQCGQPLFVYKLEQVSEKGKAYTNYFGRCNVAEHEKLILLDSQLKPEKDSDEAVTYSLGKFGQRALDFYSIHVTKESTHPVKPLAQIAGNRYASGPVGKALSDACMGTIASFLSKYQDIIIEHQKVVKGNQKRLESLRELAGKENLEYPSVTLPPQPHTKEGVDAYNEVIARVRMWVNLNLWQKLKLSRDDAKPLLRLKGFPSFPLVERQANEVDWWDMVCNVKKLINEKKEDGKVFWQNLAGYKRQEALRPYLSSEEDRKKGKKFARYQLGDLLLHLEKKHGEDWGKVYDEAWERIDKKVEGLSKHIKLEEERRSEDAQSKAALTDWLRAKASFVIEGLKEADKDEFCRCELKLQKWYGDLRGKPFAIEAENSILDISGFSKQYNCAFIWQKDGVKKLNLYLIINYFKGGKLRFKKIKPEAFEANRFYTVINKKSGEIVPMEVNFNFDDPNLIILPLAFGKRQGREFIWNDLLSLETGSLKLANGRVIEKTLYNRRTRQDEPALFVALTFERREVLDSSNIKPMNLIGVDRGENIPAVIALTDPEGCPLSRFKDSLGNPTHILRIGESYKEKQRTIQAKKEVEQRRAGGYSRKYASKAKNLADDMVRNTARDLLYYAVTQDAMLIFENLSRGFGRQGKRTFMAERQYTRMEDWLTAKLAYEGLPSKTYLSKTLAQYTSKTCSNCGFTITSADYDRVLEKLKKTATGWMTTINGKELKVEGQITYYNRYKRQNVVKDLSVELDRLSEESVNNDISSWTKGRSGEALSLLKKRFSHRPVQEKFVCLNCGFETHADEQAALNIARSWLFLRSQEYKKYQTNKTTGNTDKRAFVETWQSFYRKKLKEVWKPAV

SEQ ID NO: 27966 - protein, 977 aa, synthetic construct
  REGION 1..977: note = engineered CasX variant
QEIKRINKIRRRLVKDSNTKKAGKTGPMKTLLVRVMTPDLRERLENLRKKPENIPQPISNTSRANLNKLLTDYTEMKKAILHVYWEEFQKDPVGLMSRVAQPASKKIDQNKLKPEMDEKGNLTTAGFACSQCGQPLFVYKLEQVSEKGKAYTNYFGRCNVAEHEKLILLDQLKPEKDSDEAVTYSLGKFGQRALDFYSIHVTKESTHPVKPLAQIAGNRYASPVGKALSDACMGTIASFLSKYQDIIIEHQKVVKGNQKRLESLRELAGKENLEYPSVTLPPQPHTKEGVDAYNEVIARVRMWVNLNLWQKLKLSRDDAKPLLRLKGFPSFPLVERQANEVDWWDMVCNVKKLINEKKEDGKVFWQNLAGYKRQEALRPYLSSEEDRKKGKKFARYQLGDLLLHLEKKHGEDWGKVYDEAWERIDKKVEGLSKHIKLEEERRSEDAQSKAALTDWLRAKASFVIEGLKEADKDEFCRCELKLQKWYGDLRGKPFAIEAENSILDISGFSKQYNCAFIWQKDGVKKLNLYLIINYFKGGKLRFKKIKPEAFEANRFYTVINKKSGEIVPMEVNFNFDDPNLIILPLAFGKRQGREFIWNDLLSLETGSLKLANGRVIEKTLYNRRTRQDEPALFVALTFERREVLDSSNIKPMNLIGVDRGENIPAVIALTDPEGCPLSRFKDSLGNPTHILRIGESYKEKQRTIQAKKEVEQRRAGGYSRKYASKAKNLADDMVRNTARDLLYYAVTQDAMLIFENLSRGFGRQGKRTFMAERQYTRMEDWLTAKLAYEGLPSKTYLSKTLAQYTSKTCSNCGFTITSADYDRVLEKLKKTATGWMTTINGKELKVEGQITYYNRYKRQNVVKDLSVELDRLSEESVNNDISSWTKGRSGEALSLLKKRFSHRPVQEKFVCLNCGFETHADEQAALNIARSWLFLRSQEYKKYQTNKTTGNTDKRAFVETWQSFYRKKLKEVWKPAV

SEQ ID NO: 27967 - protein, 978 aa, synthetic construct
  REGION 1..978: note = engineered CasX variant
QEIKRINKIRRRLVKDSNTKKAGKTGPMKTLLVRVMTPDLRERLENLRKKPENIPQPISNTSRANLNKLLTDYTEMKKAILHVYWEEFQKDPVGLMSRVAQPASKKIDQNKLKPEMDEKGNLTTAGFACSQCGQPLFVYKLEQVSEKGKAYTNYFGRCNVAEHEKLILLDQLKPEKDSDEAVTYSLGKFGQRALDFYSIHVTKESTHPVKPLAQIAGNRYASGPVGKALSDACMGTIASFLSKYQDIIIEHQKVVKGNQKRLESLRELAGKENLEYPSVTLPPQPHTSEGVDAYNEVIARVRMWVNLNLWQKLKLSRDDAKPLLRLKGFPSFPLVERQANEVDWWDMVCNVKKLINEKKEDGKVFWQNLAGYKRQEALRPYLSSEEDRKKGKKFARYQLGDLLLHLEKKHGEDWGKVYDEAWERIDKKVEGLSKHIKLEEERRSEDAQSKAALTDWLRAKASFVIEGLKEADKDEFCRCELKLQKWYGDLRGKPFAIEAENSILDISGFSKQYNCAFIWQKDGVKKLNLYLIINYFKGGKLRFKKIKPEAFEANRFYTVINKKSGEIVPMEVNFNFDDPNLIILPLAFGKRQGREFIWNDLLSLETGSLKLANGRVIEKTLYNRRTRQDEPALFVALTFERREVLDSSNIKPMNLIGVDRGENIPAVIALTDPEGCPLSRFKDSLGNPTHILRIGESYKEKQRTIQAKKEVEQRRAGGYSRKYASKAKNLADDMVRNTARDLLYYAVTQDAMLIFENLSRGFGRQGKRTFMAERQYTRMEDWLTAKLAYEGLPSKTYLSKTLAQYTSKTCSNCGFTITSADYDRVLEKLKKTATGWMTTINGKELKVEGQITYYNRYKRQNVVKDLSVELDRLSEESVNNDISSWTKGRSGEALSLLKKRFSHRPVQEKFVCLNCGFETHADEQAALNIARSWLFLRSQEYKKYQTNKTTGNTDKRAFVETWQSFYRKKLKEVWKPAV

SEQ ID NO: 27968 - protein, 978 aa, synthetic construct
  REGION 1..978: note = engineered CasX variant
QEIKRINKIRRRLVKDSNTKKAGKTGPMKTLLVRVMTPDLRERLENLRKKPENIPQPISNTSRANLNKLLTDYTEMKKAILHVYWEEFQKDPVGLMSRVAQPASKKIDQNKLKPEMDEKGNLTTAGFACSQCGQPLFVYKLEQVSEKGKAYTNYFGRCNVAEHEKLILLDQLKPEKDSDEAVTYSLGKFGQRALDFYSIHVTKESTHPVKPLAQIAGNRYASGPVGKALSDACMGTIASFLSKYQDIIIEHQKVVKGNQKRLESLRELAGKENLEYPSVTLPPQPHTKEGLDAYNEVIARVRMWVNLNLWQKLKLSRDDAKPLLRLKGFPSFPLVERQANEVDWWDMVCNVKKLINEKKEDGKVFWQNLAGYKRQEALRPYLSSEEDRKKGKKFARYQLGDLLLHLEKKHGEDWGKVYDEAWERIDKKVEGLSKHIKLEEERRSEDAQSKAALTDWLRAKASFVIEGLKEADKDEFCRCELKLQKWYGDLRGKPFAIEAENSILDISGFSKQYNCAFIWQKDGVKKLNLYLIINYFKGGKLRFKKIKPEAFEANRFYTVINKKSGEIVPMEVNFNFDDPNLIILPLAFGKRQGREFIWNDLLSLETGSLKLANGRVIEKTLYNRRTRQDEPALFVALTFERREVLDSSNIKPMNLIGVDRGENIPAVIALTDPEGCPLSRFKDSLGNPTHILRIGESYKEKQRTIQAKKEVEQRRAGGYSRKYASKAKNLADDMVRNTARDLLYYAVTQDAMLIFENLSRGFGRQGKRTFMAERQYTRMEDWLTAKLAYEGLPSKTYLSKTLAQYTSKTCSNCGFTITSADYDRVLEKLKKTATGWMTTINGKELKVEGQITYYNRYKRQNVVKDLSVELDRLSEESVNNDISSWTKGRSGEALSLLKKRFSHRPVQEKFVCLNCGFETHADEQAALNIARSWLFLRSQEYKKYQTNKTTGNTDKRAFVETWQSFYRKKLKEVWKPAV

SEQ ID NO: 27969 - protein, 978 aa, synthetic construct
  REGION 1..978: note = engineered CasX variant
QEIKRINKIRRRLVKDSNTKKAGKTGPMKTLLVRVMTPDLRERLENLRKKPENIPQPISNTSRANLNKLLTDYTEMKKAILHVYWEEFQKDPVGLMSRVAQPASKKIDQNKLKPEMDEKGNLTTAGFACSQCGQPLFVYKLEQVSEKGKAYTNYFGRCNVAEHEKLILLDQLKPEKDSDEAVTYSLGKFGQRALDFYSIHVTKESTHPVKPLAQIAGNRYASGPVGKALSDACMGTIASFLSKYQDIIIEHQKVVKGNQKRLESLRELAGKENLEYPSVTLPPQPHTKEGVDAYNEVIARVRTWVNLNLWQKLKLSRDDAKPLLRLKGFPSFPLVERQANEVDWWDMVCNVKKLINEKKEDGKVFWQNLAGYKRQEALRPYLSSEEDRKKGKKFARYQLGDLLLHLEKKHGEDWGKVYDEAWERIDKKVEGLSKHIKLEEERRSEDAQSKAALTDWLRAKASFVIEGLKEADKDEFCRCELKLQKWYGDLRGKPFAIEAENSILDISGFSKQYNCAFIWQKDGVKKLNLYLIINYFKGGKLRFKKIKPEAFEANRFYTVINKKSGEIVPMEVNFNFDDPNLIILPLAFGKRQGREFIWNDLLSLETGSLKLANGRVIEKTLYNRRTRQDEPALFVALTFERREVLDSSNIKPMNLIGVDRGENIPAVIALTDPEGCPLSRFKDSLGNPTHILRIGESYKEKQRTIQAKKEVEQRRAGGYSRKYASKAKNLADDMVRNTARDLLYYAVTQDAMLIFENLSRGFGRQGKRTFMAERQYTRMEDWLTAKLAYEGLPSKTYLSKTLAQYTSKTCSNCGFTITSADYDRVLEKLKKTATGWMTTINGKELKVEGQITYYNRYKRQNVVKDLSVELDRLSEESVNNDISSWTKGRSGEALSLLKKRFSHRPVQEKFVCLNCGFETHADEQAALNIARSWLFLRSQEYKKYQTNKTTGNTDKRAFVETWQSFYRKKLKEVWKPAV

SEQ ID NO: 27970 - protein, 978 aa, synthetic construct
  REGION 1..978: note = engineered CasX variant
QEIKRINKIRRRLVKDSNTKKAGKTGPMKTLLVRVMTPDLRERLENLRKKPENIPQPISNTSRANLNKLLTDYTEMKKAILHVYWEEFQKDPVGLMSRVAQPASKKIDQNKLKPEMDEKGNLTTAGFACSQCGQPLFVYKLEQVSEKGKAYTNYFGRCNVAEHEKLILLDQLKPEKDSDEAVTYSLGKFGQRALDFYSIHVTKESTHPVKPLAQIAGNRYASGPVGKALSDACMGTIASFLSKYQDIIIEHQKVVKGNQKRLESLRELAGKENLEYPSVTLPPQPHTKEGVDAYNEVIARVRWWVNLNLWQKLKLSRDDAKPLLRLKGFPSFPLVERQANEVDWWDMVCNVKKLINEKKEDGKVFWQNLAGYKRQEALRPYLSSEEDRKKGKKFARYQLGDLLLHLEKKHGEDWGKVYDEAWERIDKKVEGLSKHIKLEEERRSEDAQSKAALTDWLRAKASFVIEGLKEADKDEFCRCELKLQKWYGDLRGKPFAIEAENSILDISGFSKQYNCAFIWQKDGVKKLNLYLIINYFKGGKLRFKKIKPEAFEANRFYTVINKKSGEIVPMEVNFNFDDPNLIILPLAFGKRQGREFIWNDLLSLETGSLKLANGRVIEKTLYNRRTRQDEPALFVALTFERREVLDSSNIKPMNLIGVDRGENIPAVIALTDPEGCPLSRFKDSLGNPTHILRIGESYKEKQRTIQAKKEVEQRRAGGYSRKYASKAKNLADDMVRNTARDLLYYAVTQDAMLIFENLSRGFGRQGKRTFMAERQYTRMEDWLTAKLAYEGLPSKTYLSKTLAQYTSKTCSNCGFTITSADYDRVLEKLKKTATGWMTTINGKELKVEGQITYYNRYKRQNVVKDLSVELDRLSEESVNNDISSWTKGRSGEALSLLKKRFSHRPVQEKFVCLNCGFETHADEQAALNIARSWLFLRSQEYKKYQTNKTTGNTDKRAFVETWQSFYRKKLKEVWKPAV

SEQ ID NO: 27971 - protein, 979 aa, synthetic construct
  REGION 1..979: note = engineered CasX variant
QEIKRINKIRRRLVKDSNTKKAGKTGPMKTLLVRVMTPDLRERLENLRKKPENIPQPISNTSRANLNKLLTDYTEMKKAILHVYWEEFQKDPVGLMSRVAQPASKKIDQNKLKPEMDEKGNLTTAGFACSQCGQPLFVYKLEQVSEKGKAYTNYFGRCNVAEHEKLILLDQLKPEKDSDEAVTYSLGKFGQRALDFYSIHVTKESTHPVKPLAQIAGNRYASGPVGKALSDACMGTIASFLSKYQDIIIEHQKVVKGNQKRLESLRELAGKENLEYPSVTLPPQPHTKEGVDAYNEVIARVRMWVNLNLWQKLKLSRDDAKPLLRLKGFPSFPLVERQQANEVDWWDMVCNVKKLINEKKEDGKVFWQNLAGYKRQEALRPYLSSEEDRKKGKKFARYQLGDLLLHLEKKHGEDWGKVYDEAWERIDKKVEGLSKHIKLEEERRSEDAQSKAALTDWLRAKASFVIEGLKEADKDEFCRCELKLQKWYGDLRGKPFAIEAENSILDISGFSKQYNCAFIWQKDGVKKLNLYLIINYFKGGKLRFKKIKPEAFEANRFYTVINKKSGEIVPMEVNFNFDDPNLIILPLAFGKRQGREFIWNDLLSLETGSLKLANGRVIEKTLYNRRTRQDEPALFVALTFERREVLDSSNIKPMNLIGVDRGENIPAVIALTDPEGCPLSRFKDSLGNPTHILRIGESYKEKQRTIQAKKEVEQRRAGGYSRKYASKAKNLADDMVRNTARDLLYYAVTQDAMLIFENLSRGFGRQGKRTFMAERQYTRMEDWLTAKLAYEGLPSKTYLSKTLAQYTSKTCSNCGFTITSADYDRVLEKLKKTATGWMTTINGKELKVEGQITYYNRYKRQNVVKDLSVELDRLSEESVNNDISSWTKGRSGEALSLLKKRFSHRPVQEKFVCLNCGFETHADEQAALNIARSWLFLRSQEYKKYQTNKTTGNTDKRAFVETWQSFYRKKLKEVWKPAV

SEQ ID NO: 27972 - protein, 979 aa, synthetic construct
  REGION 1..979: note = engineered CasX variant
QEIKRINKIRRRLVKDSNTKKAGKTGPMKTLLVRVMTPDLRERLENLRKKPENIPQPISNTSRANLNKLLTDYTEMKKAILHVYWEEFQKDPVGLMSRVAQPASKKIDQNKLKPEMDEKGNLTTAGFACSQCGQPLFVYKLEQVSEKGKAYTNYFGRCNVAEHEKLILLDQLKPEKDSDEAVTYSLGKFGQRALDFYSIHVTKESTHPVKPLAQIAGNRYASGPVGKALSDACMGTIASFLSKYQDIIIEHQKVVKGNQKRLESLRELAGKENLEYPSVTLPPQPHTKEGVDAYNEVIARVRMWVNLNLWQKLKLSRDDAKPLLRLKGFPSFPLVERQANAEVDWWDMVCNVKKLINEKKEDGKVFWQNLAGYKRQEALRPYLSSEEDRKKGKKFARYQLGDLLLHLEKKHGEDWGKVYDEAWERIDKKVEGLSKHIKLEEERRSEDAQSKAALTDWLRAKASFVIEGLKEADKDEFCRCELKLQKWYGDLRGKPFAIEAENSILDISGFSKQYNCAFIWQKDGVKKLNLYLIINYFKGGKLRFKKIKPEAFEANRFYTVINKKSGEIVPMEVNFNFDDPNLIILPLAFGKRQGREFIWNDLLSLETGSLKLANGRVIEKTLYNRRTRQDEPALFVALTFERREVLDSSNIKPMNLIGVDRGENIPAVIALTDPEGCPLSRFKDSLGNPTHILRIGESYKEKQRTIQAKKEVEQRRAGGYSRKYASKAKNLADDMVRNTARDLLYYAVTQDAMLIFENLSRGFGRQGKRTFMAERQYTRMEDWLTAKLAYEGLPSKTYLSKTLAQYTSKTCSNCGFTITSADYDRVLEKLKKTATGWMTTINGKELKVEGQITYYNRYKRQNVVKDLSVELDRLSEESVNNDISSWTKGRSGEALSLLKKRFSHRPVQEKFVCLNCGFETHADEQAALNIARSWLFLRSQEYKKYQTNKTTGNTDKRAFVETWQSFYRKKLKEVWKPAV

SEQ ID NO: 27973 - protein, 978 aa, synthetic construct
  REGION 1..978: note = engineered CasX variant
QEIKRINKIRRRLVKDSNTKKAGKTGPMKTLLVRVMTPDLRERLENLRKKPENIPQPISNTSRANLNKLLTDYTEMKKAILHVYWEEFQKDPVGLMSRVAQPASKKIDQNKLKPEMDEKGNLTTAGFACSQCGQPLFVYKLEQVSEKGKAYTNYFGRCNVAEHEKLILLDQLKPEKDSDEAVTYSLGKFGQRALDFYSIHVTKESTHPVKPLAQIAGNRYASGPVGKALSDACMGTIASFLSKYQDIIIEHQKVVKGNQKRLESLRELAGKENLEYPSVTLPPQPHTKEGVDAYNEVIARVRMWVNLNLWQKLKLSRDDAKPLLRLKGFPSFPLVERQANEVDWWDMVCNVKKLINEKKEDGKVFWQNLAGYKRQEALRPYLSSEEDRKKGKKFARTQLGDLLLHLEKKHGEDWGKVYDEAWERIDKKVEGLSKHIKLEEERRSEDAQSKAALTDWLRAKASFVIEGLKEADKDEFCRCELKLQKWYGDLRGKPFAIEAENSILDISGFSKQYNCAFIWQKDGVKKLNLYLIINYFKGGKLRFKKIKPEAFEANRFYTVINKKSGEIVPMEVNFNFDDPNLIILPLAFGKRQGREFIWNDLLSLETGSLKLANGRVIEKTLYNRRTRQDEPALFVALTFERREVLDSSNIKPMNLIGVDRGENIPAVIALTDPEGCPLSRFKDSLGNPTHILRIGESYKEKQRTIQAKKEVEQRRAGGYSRKYASKAKNLADDMVRNTARDLLYYAVTQDAMLIFENLSRGFGRQGKRTFMAERQYTRMEDWLTAKLAYEGLPSKTYLSKTLAQYTSKTCSNCGFTITSADYDRVLEKLKKTATGWMTTINGKELKVEGQITYYNRYKRQNVVKDLSVELDRLSEESVNNDISSWTKGRSGEALSLLKKRFSHRPVQEKFVCLNCGFETHADEQAALNIARSWLFLRSQEYKKYQTNKTTGNTDKRAFVETWQSFYRKKLKEVWKPAV

SEQ ID NO: 27974 - protein, 979 aa, synthetic construct
  REGION 1..979: note = engineered CasX variant
QEIKRINKIRRRLVKDSNTKKAGKTGPMKTLLVRVMTPDLRERLENLRKKPENIPQPISNTSRANLNKLLTDYTEMKKAILHVYWEEFQKDPVGLMSRVAQPASKKIDQNKLKPEMDEKGNLTTAGFACSQCGQPLFVYKLEQVSEKGKAYTNYFGRCNVAEHEKLILLDQLKPEKDSDEAVTYSLGKFGQRALDFYSIHVTKESTHPVKPLAQIAGNRYASGPVGKALSDACMGTIASFLSKYQDIIIEHQKVVKGNQKRLESLRELAGKENLEYPSVTLPPQPHTKEGVDAYNEVIARVRMWVNLNLWQKLKLSRDDAKPLLRLKGFPSFPLVERQANEVDWWDMVCNVKKLINEKKEDGKVFWQNLAGYKRQEALRPYLSSEEDRKKGKKFARYQLGDLLLHLEKKHEGEDWGKVYDEAWERIDKKVEGLSKHIKLEEERRSEDAQSKAALTDWLRAKASFVIEGLKEADKDEFCRCELKLQKWYGDLRGKPFAIEAENSILDISGFSKQYNCAFIWQKDGVKKLNLYLIINYFKGGKLRFKKIKPEAFEANRFYTVINKKSGEIVPMEVNFNFDDPNLIILPLAFGKRQGREFIWNDLLSLETGSLKLANGRVIEKTLYNRRTRQDEPALFVALTFERREVLDSSNIKPMNLIGVDRGENIPAVIALTDPEGCPLSRFKDSLGNPTHILRIGESYKEKQRTIQAKKEVEQRRAGGYSRKYASKAKNLADDMVRNTARDLLYYAVTQDAMLIFENLSRGFGRQGKRTFMAERQYTRMEDWLTAKLAYEGLPSKTYLSKTLAQYTSKTCSNCGFTITSADYDRVLEKLKKTATGWMTTINGKELKVEGQITYYNRYKRQNVVKDLSVELDRLSEESVNNDISSWTKGRSGEALSLLKKRFSHRPVQEKFVCLNCGFETHADEQAALNIARSWLFLRSQEYKKYQTNKTTGNTDKRAFVETWQSFYRKKLKEVWKPAV

SEQ ID NO: 27975 - protein, 978 aa, synthetic construct
  REGION 1..978: note = engineered CasX variant
QEIKRINKIRRRLVKDSNTKKAGKTGPMKTLLVRVMTPDLRERLENLRKKPENIPQPISNTSRANLNKLLTDYTEMKKAILHVYWEEFQKDPVGLMSRVAQPASKKIDQNKLKPEMDEKGNLTTAGFACSQCGQPLFVYKLEQVSEKGKAYTNYFGRCNVAEHEKLILLDQLKPEKDSDEAVTYSLGKFGQRALDFYSIHVTKESTHPVKPLAQIAGNRYASGPVGKALSDACMGTIASFLSKYQDIIIEHQKVVKGNQKRLESLRELAGKENLEYPSVTLPPQPHTKEGVDAYNEVIARVRMWVNLNLWQKLKLSRDDAKPLLRLKGFPSFPLVERQANEVDWWDMVCNVKKLINEKKEDGKVFWQNLAGYKRQEALRPYLSSEEDRKKGKKFARYQLGDLLLHLEKKHGEDWGKVYDEAWERIDKKVEGLSKHIKLEEERRSEDAQSKAALTDWLRAKASFVIEGLKEADKDEFCRCDLKLQKWYGDLRGKPFAIEAENSILDISGFSKQYNCAFIWQKDGVKKLNLYLIINYFKGGKLRFKKIKPEAFEANRFYTVINKKSGEIVPMEVNFNFDDPNLIILPLAFGKRQGREFIWNDLLSLETGSLKLANGRVIEKTLYNRRTRQDEPALFVALTFERREVLDSSNIKPMNLIGVDRGENIPAVIALTDPEGCPLSRFKDSLGNPTHILRIGESYKEKQRTIQAKKEVEQRRAGGYSRKYASKAKNLADDMVRNTARDLLYYAVTQDAMLIFENLSRGFGRQGKRTFMAERQYTRMEDWLTAKLAYEGLPSKTYLSKTLAQYTSKTCSNCGFTITSADYDRVLEKLKKTATGWMTTINGKELKVEGQITYYNRYKRQNVVKDLSVELDRLSEESVNNDISSWTKGRSGEALSLLKKRFSHRPVQEKFVCLNCGFETHADEQAALNIARSWLFLRSQEYKKYQTNKTTGNTDKRAFVETWQSFYRKKLKEVWKPAV

SEQ ID NO: 27976 - protein, 978 aa, synthetic construct
  REGION 1..978: note = engineered CasX variant
QEIKRINKIRRRLVKDSNTKKAGKTGPMKTLLVRVMTPDLRERLENLRKKPENIPQPISNTSRANLNKLLTDYTEMKKAILHVYWEEFQKDPVGLMSRVAQPASKKIDQNKLKPEMDEKGNLTTAGFACSQCGQPLFVYKLEQVSEKGKAYTNYFGRCNVAEHEKLILLDQLKPEKDSDEAVTYSLGKFGQRALDFYSIHVTKESTHPVKPLAQIAGNRYASGPVGKALSDACMGTIASFLSKYQDIIIEHQKVVKGNQKRLESLRELAGKENLEYPSVTLPPQPHTKEGVDAYNEVIARVRMWVNLNLWQKLKLSRDDAKPLLRLKGFPSFPLVERQANEVDWWDMVCNVKKLINEKKEDGKVFWQNLAGYKRQEALRPYLSSEEDRKKGKKFARYQLGDLLLHLEKKHGEDWGKVYDEAWERIDKKVEGLSKHIKLEEERRSEDAQSKAALTDWLRAKASFVIEGLKEADKDEFCRCELKLQKWYGDLRGKPFAIEAENSILDISGFSKQYNCAFIWQKDGVKKLNLYLIINYFKGGKLRFKKIKPEAFEANRFYTVINKKSGEIVPMEVNFNFDDPNLIILPLAFGKRFGREFIWNDLLSLETGSLKLANGRVIEKTLYNRRTRQDEPALFVALTFERREVLDSSNIKPMNLIGVDRGENIPAVIALTDPEGCPLSRFKDSLGNPTHILRIGESYKEKQRTIQAKKEVEQRRAGGYSRKYASKAKNLADDMVRNTARDLLYYAVTQDAMLIFENLSRGFGRQGKRTFMAERQYTRMEDWLTAKLAYEGLPSKTYLSKTLAQYTSKTCSNCGFTITSADYDRVLEKLKKTATGWMTTINGKELKVEGQITYYNRYKRQNVVKDLSVELDRLSEESVNNDISSWTKGRSGEALSLLKKRFSHRPVQEKFVCLNCGFETHADEQAALNIARSWLFLRSQEYKKYQTNKTTGNTDKRAFVETWQSFYRKKLKEVWKPAV

SEQ ID NO: 27977 - protein, 978 aa, synthetic construct
  REGION 1..978: note = engineered CasX variant
QEIKRINKIRRRLVKDSNTKKAGKTGPMKTLLVRVMTPDLRERLENLRKKPENIPQPISNTSRANLNKLLTDYTEMKKAILHVYWEEFQKDPVGLMSRVAQPASKKIDQNKLKPEMDEKGNLTTAGFACSQCGQPLFVYKLEQVSEKGKAYTNYFGRCNVAEHEKLILLDQLKPEKDSDEAVTYSLGKFGQRALDFYSIHVTKESTHPVKPLAQIAGNRYASGPVGKALSDACMGTIASFLSKYQDIIIEHQKVVKGNQKRLESLRELAGKENLEYPSVTLPPQPHTKEGVDAYNEVIARVRMWVNLNLWQKLKLSRDDAKPLLRLKGFPSFPLVERQANEVDWWDMVCNVKKLINEKKEDGKVFWQNLAGYKRQEALRPYLSSEEDRKKGKKFARYQLGDLLLHLEKKHGEDWGKVYDEAWERIDKKVEGLSKHIKLEEERRSEDAQSKAALTDWLRAKASFVIEGLKEADKDEFCRCELKLQKWYGDLRGKPFAIEAENSILDISGFSKQYNCAFIWQKDGVKKLNLYLIINYFKGGKLRFKKIKPEAFEANRFYTVINKKSGEIVPMEVNFNFDDPNLIILPLAFGKRVGREFIWNDLLSLETGSLKLANGRVIEKTLYNRRTRQDEPALFVALTFERREVLDSSNIKPMNLIGVDRGENIPAVIALTDPEGCPLSRFKDSLGNPTHILRIGESYKEKQRTIQAKKEVEQRRAGGYSRKYASKAKNLADDMVRNTARDLLYYAVTQDAMLIFENLSRGFGRQGKRTFMAERQYTRMEDWLTAKLAYEGLPSKTYLSKTLAQYTSKTCSNCGFTITSADYDRVLEKLKKTATGWMTTINGKELKVEGQITYYNRYKRQNVVKDLSVELDRLSEESVNNDISSWTKGRSGEALSLLKKRFSHRPVQEKFVCLNCGFETHADEQAALNIARSWLFLRSQEYKKYQTNKTTGNTDKRAFVETWQSFYRKKLKEVWKPAV

SEQ ID NO: 27978 - protein, 979 aa, synthetic construct
  REGION 1..979: note = engineered CasX variant
QEIKRINKIRRRLVKDSNTKKAGKTGPMKTLLVRVMTPDLRERLENLRKKPENIPQPISNTSRANLNKLLTDYTEMKKAILHVYWEEFQKDPVGLMSRVAQPASKKIDQNKLKPEMDEKGNLTTAGFACSQCGQPLFVYKLEQVSEKGKAYTNYFGRCNVAEHEKLILLDQLKPEKDSDEAVTYSLGKFGQRALDFYSIHVTKESTHPVKPLAQIAGNRYASGPVGKALSDACMGTIASFLSKYQDIIIEHQKVVKGNQKRLESLRELAGKENLEYPSVTLPPQPHTKEGVDAYNEVIARVRMWVNLNLWQKLKLSRDDAKPLLRLKGFPSFPLVERQANEVDWWDMVCNVKKLINEKKEDGKVFWQNLAGYKRQEALRPYLSSEEDRKKGKKFARYQLGDLLLHLEKKHGEDWGKVYDEAWERIDKKVEGLSKHIKLEEERRSEDAQSKAALTDWLRAKASFVIEGLKEADKDEFCRCELKLQKWYGDLRGKPFAIEAENSILDISGFSKQYNCAFIWQKDGVKKLNLYLIINYFKGGKLRFKKIKPEAFEANRFYTVINKKSGEIVPMEVNFNFDDPNLIILPLAFGKRQGREFIWNDLLSLETGSLKLANGRVIEKTLYNRRTRQDEPALFVALTFERREVLDSSNIKTPMNLIGVDRGENIPAVIALTDPEGCPLSRFKDSLGNPTHILRIGESYKEKQRTIQAKKEVEQRRAGGYSRKYASKAKNLADDMVRNTARDLLYYAVTQDAMLIFENLSRGFGRQGKRTFMAERQYTRMEDWLTAKLAYEGLPSKTYLSKTLAQYTSKTCSNCGFTITSADYDRVLEKLKKTATGWMTTINGKELKVEGQITYYNRYKRQNVVKDLSVELDRLSEESVNNDISSWTKGRSGEALSLLKKRFSHRPVQEKFVCLNCGFETHADEQAALNIARSWLFLRSQEYKKYQTNKTTGNTDKRAFVETWQSFYRKKLKEVWKPAV

SEQ ID NO: 27979 - protein, 979 aa, synthetic construct
  REGION 1..979: note = engineered CasX variant
QEIKRINKIRRRLVKDSNTKKAGKTGPMKTLLVRVMTPDLRERLENLRKKPENIPQPISNTSRANLNKLLTDYTEMKKAILHVYWEEFQKDPVGLMSRVAQPASKKIDQNKLKPEMDEKGNLTTAGFACSQCGQPLFVYKLEQVSEKGKAYTNYFGRCNVAEHEKLILLDQLKPEKDSDEAVTYSLGKFGQRALDFYSIHVTKESTHPVKPLAQIAGNRYASGPVGKALSDACMGTIASFLSKYQDIIIEHQKVVKGNQKRLESLRELAGKENLEYPSVTLPPQPHTKEGVDAYNEVIARVRMWVNLNLWQKLKLSRDDAKPLLRLKGFPSFPLVERQANEVDWWDMVCNVKKLINEKKEDGKVFWQNLAGYKRQEALRPYLSSEEDRKKGKKFARYQLGDLLLHLEKKHGEDWGKVYDEAWERIDKKVEGLSKHIKLEEERRSEDAQSKAALTDWLRAKASFVIEGLKEADKDEFCRCELKLQKWYGDLRGKPFAIEAENSILDISGFSKQYNCAFIWQKDGVKKLNLYLIINYFKGGKLRFKKIKPEAFEANRFYTVINKKSGEIVPMEVNFNFDDPNLIILPLAFGKRQGREFIWNDLLSLETGSLKLANGRVIEKTLYNRRTRQDEPALFVALTFERREVLDSSNIKPMSNLIGVDRGENIPAVIALTDPEGCPLSRFKDSLGNPTHILRIGESYKEKQRTIQAKKEVEQRRAGGYSRKYASKAKNLADDMVRNTARDLLYYAVTQDAMLIFENLSRGFGRQGKRTFMAERQYTRMEDWLTAKLAYEGLPSKTYLSKTLAQYTSKTCSNCGFTITSADYDRVLEKLKKTATGWMTTINGKELKVEGQITYYNRYKRQNVVKDLSVELDRLSEESVNNDISSWTKGRSGEALSLLKKRFSHRPVQEKFVCLNCGFETHADEQAALNIARSWLFLRSQEYKKYQTNKTTGNTDKRAFVETWQSFYRKKLKEVWKPAV

SEQ ID NO: 27980 - protein, 978 aa, synthetic construct
  REGION 1..978: note = engineered CasX variant
QEIKRINKIRRRLVKDSNTKKAGKTGPMKTLLVRVMTPDLRERLENLRKKPENIPQPISNTSRANLNKLLTDYTEMKKAILHVYWEEFQKDPVGLMSRVAQPASKKIDQNKLKPEMDEKGNLTTAGFACSQCGQPLFVYKLEQVSEKGKAYTNYFGRCNVAEHEKLILLDQLKPEKDSDEAVTYSLGKFGQRALDFYSIHVTKESTHPVKPLAQIAGNRYASGPVGKALSDACMGTIASFLSKYQDIIIEHQKVVKGNQKRLESLRELAGKENLEYPSVTLPPQPHTKEGVDAYNEVIARVRMWVNLNLWQKLKLSRDDAKPLLRLKGFPSFPLVERQANEVDWWDMVCNVKKLINEKKEDGKVFWQNLAGYKRQEALRPYLSSEEDRKKGKKFARYQLGDLLLHLEKKHGEDWGKVYDEAWERIDKKVEGLSKHIKLEEERRSEDAQSKAALTDWLRAKASFVIEGLKEADKDEFCRCELKLQKWYGDLRGKPFAIEAENSILDISGFSKQYNCAFIWQKDGVKKLNLYLIINYFKGGKLRFKKIKPEAFEANRFYTVINKKSGEIVPMEVNFNFDDPNLIILPLAFGKRQGREFIWNDLLSLETGSLKLANGRVIEKTLYNRRTRQDEPALFVALTFERREVLDSSNIKPMNLIGVDRGENIPAVIALTDPEGCPLSRFKDSLGNPTHILRIRESYKEKQRTIQAKKEVEQRRAGGYSRKYASKAKNLADDMVRNTARDLLYYAVTQDAMLIFENLSRGFGRQGKRTFMAERQYTRMEDWLTAKLAYEGLPSKTYLSKTLAQYTSKTCSNCGFTITSADYDRVLEKLKKTATGWMTTINGKELKVEGQITYYNRYKRQNVVKDLSVELDRLSEESVNNDISSWTKGRSGEALSLLKKRFSHRPVQEKFVCLNCGFETHADEQAALNIARSWLFLRSQEYKKYQTNKTTGNTDKRAFVETWQSFYRKKLKEVWKPAV

SEQ ID NO: 27981 - protein, 978 aa, synthetic construct
  REGION 1..978: note = engineered CasX variant
QEIKRINKIRRRLVKDSNTKKAGKTGPMKTLLVRVMTPDLRERLENLRKKPENIPQPISNTSRANLNKLLTDYTEMKKAILHVYWEEFQKDPVGLMSRVAQPASKKIDQNKLKPEMDEKGNLTTAGFACSQCGQPLFVYKLEQVSEKGKAYTNYFGRCNVAEHEKLILLDQLKPEKDSDEAVTYSLGKFGQRALDFYSIHVTKESTHPVKPLAQIAGNRYASGPVGKALSDACMGTIASFLSKYQDIIIEHQKVVKGNQKRLESLRELAGKENLEYPSVTLPPQPHTKEGVDAYNEVIARVRMWVNLNLWQKLKLSRDDAKPLLRLKGFPSFPLVERQANEVDWWDMVCNVKKLINEKKEDGKVFWQNLAGYKRQEALRPYLSSEEDRKKGKKFARYQLGDLLLHLEKKHGEDWGKVYDEAWERIDKKVEGLSKHIKLEEERRSEDAQSKAALTDWLRAKASFVIEGLKEADKDEFCRCELKLQKWYGDLRGKPFAIEAENSILDISGFSKQYNCAFIWQKDGVKKLNLYLIINYFKGGKLRFKKIKPEAFEANRFYTVINKKSGEIVPMEVNFNFDDPNLIILPLAFGKRQGREFIWNDLLSLETGSLKLANGRVIEKTLYNRRTRQDEPALFVALTFERREVLDSSNIKPMNLIGVDRGENIPAVIALTDPEGCPLSRFKDSLGNPTHILRIGESYKEKQRTIQAKKEVEQRRAGGYSRKYASKAKNLADDMVRNTARDLLYYAVTQDAMLIFENLSRGFGRQGKRTFSAERQYTRMEDWLTAKLAYEGLPSKTYLSKTLAQYTSKTCSNCGFTITSADYDRVLEKLKKTATGWMTTINGKELKVEGQITYYNRYKRQNVVKDLSVELDRLSEESVNNDISSWTKGRSGEALSLLKKRFSHRPVQEKFVCLNCGFETHADEQAALNIARSWLFLRSQEYKKYQTNKTTGNTDKRAFVETWQSFYRKKLKEVWKPAV

SEQ ID NO: 27982 - protein, 978 aa, synthetic construct
  REGION 1..978: note = engineered CasX variant
QEIKRINKIRRRLVKDSNTKKAGKTGPMKTLLVRVMTPDLRERLENLRKKPENIPQPISNTSRANLNKLLTDYTEMKKAILHVYWEEFQKDPVGLMSRVAQPASKKIDQNKLKPEMDEKGNLTTAGFACSQCGQPLFVYKLEQVSEKGKAYTNYFGRCNVAEHEKLILLDQLKPEKDSDEAVTYSLGKFGQRALDFYSIHVTKESTHPVKPLAQIAGNRYASGPVGKALSDACMGTIASFLSKYQDIIIEHQKVVKGNQKRLESLRELAGKENLEYPSVTLPPQPHTKEGVDAYNEVIARVRMWVNLNLWQKLKLSRDDAKPLLRLKGFPSFPLVERQANEVDWWDMVCNVKKLINEKKEDGKVFWQNLAGYKRQEALRPYLSSEEDRKKGKKFARYQLGDLLLHLEKKHGEDWGKVYDEAWERIDKKVEGLSKHIKLEEERRSEDAQSKAALTDWLRAKASFVIEGLKEADKDEFCRCELKLQKWYGDLRGKPFAIEAENSILDISGFSKQYNCAFIWQKDGVKKLNLYLIINYFKGGKLRFKKIKPEAFEANRFYTVINKKSGEIVPMEVNFNFDDPNLIILPLAFGKRQGREFIWNDLLSLETGSLKLANGRVIEKTLYNRRTRQDEPALFVALTFERREVLDSSNIKPMNLIGVDRGENIPAVIALTDPEGCPLSRFKDSLGNPTHILRIGESYKEKQRTIQAKKEVEQRRAGGYSRKYASKAKNLADDMVRNTARDLLYYAVTQDAMLIFENLSRGFGRQGKRTFMAERQYTRMEDWLTAKLAYEGLPSKTYLSKTLAQYTSKTCSNCGFTITSADYDRVLEKLKKTATGWMTTINGKELKVEGQITYYNRYKRQNVVKDLSVELDRLSEESVNNDISSWDKGRSGEALSLLKKRFSHRPVQEKFVCLNCGFETHADEQAALNIARSWLFLRSQEYKKYQTNKTTGNTDKRAFVETWQSFYRKKLKEVWKPAV

SEQ ID NO: 27983 - protein, 978 aa, synthetic construct
  REGION 1..978: note = engineered CasX variant
QEIKRINKIRRRLVKDSNTKKAGKTGPMKTLLVRVMTPDLRERLENLRKKPENIPQPISNTSRANLNKLLTDYTEMKKAILHVYWEEFQVDPVGLMSRVAQPASKKIDQNKLKPEMDEKGNLTTAGFACSQCGQPLFVYKLEQVSEKGKAYTNYFGRCNVAEHEKLILLDQLKPEKDSDEAVTYSLGKFGQRALDFYSIHVTKESTHPVKPLAQIAGNRYASGPVGKALSDACMGTIASFLSKYQDIIIEHQKVVKGNQKRLESLRELAGKENLEYPSVTLPPQPHTKEGVDAYNEVIARVRMWVNLNLWQKLKLSRDDAKPLLRLKGFPSFPLVERQANEVDWWDMVCNVKKLINEKKEDGKVFWQNLAGYKRQEALRPYLSSEEDRKKGKKFARYQLGDLLLHLEKKHGEDWGKVYDEAWERIDKKVEGLSKHIKLEEERRSEDAQSKAALTDWLRAKASFVIEGLKEADKDEFCRCELKLQKWYGDLRGKPFAIEAENSILDISGFSKQYNCAFIWQKDGVKKLNLYLIINYFKGGKLRFKKIKPEAFEANRFYTVINKKSGEIVPMEVNFNFDDPNLIILPLAFGKRQGREFIWNDLLSLETGSLKLANGRVIEKTLYNRRTRQDEPALFVALTFERREVLDSSNIKPMNLIGVDRGENIPAVIALTDPEGCPLSRFKDSLGNPTHILRIGESYKEKQRTIQAKKEVEQRRAGGYSRKYASKAKNLADDMVRNTARDLLYYAVTQDAMLIFENLSRGFGRQGKRTFMAERQYTRMEDWLTAKLAYEGLPSKTYLSKTLAQYTSKTCSNCGFTITSADYDRVLEKLKKTATGWMTTINGKELKVEGQITYYNRYKRQNVVKDLSVELDRLSEESVNNDISSWTKGRSGEALSLLKKRFSHRPVQEKFVCLNCGFETHADEQAALNIARSWLFLRSQEYKKYQTNKTTGNTDKRAFVETWQSFYRKKLKEVWKPAV

SEQ ID NO: 27984 - protein, 978 aa, synthetic construct
  REGION 1..978: note = engineered CasX variant
QEIKRLNKIRRRLVKDSNTKKAGKTGPMKTLLVRVMTPDLRERLENLRKKPENIPQPISNTSRANLNKLLTDYTEMKKAILHVYWEEFQKDPVGLMSRVAQPASKKIDQNKLKPEMDEKGNLTTAGFACSQCGQPLFVYKLEQVSEKGKAYTNYFGRCNVAEHEKLILLDQLKPEKDSDEAVTYSLGKFGQRALDFYSIHVTKESTHPVKPLAQIAGNRYASGPVGKALSDACMGTIASFLSKYQDIIIEHQKVVKGNQKRLESLRELAGKENLEYPSVTLPPQPHTKEGVDAYNEVIARVRMWVNLNLWQKLKLSRDDAKPLLRLKGFPSFPLVERQANEVDWWDMVCNVKKLINEKKEDGKVFWQNLAGYKRQEALRPYLSSEEDRKKGKKFARYQLGDLLLHLEKKHGEDWGKVYDEAWERIDKKVEGLSKHIKLEEERRSEDAQSKAALTDWLRAKASFVIEGLKEADKDEFCRCELKLQKWYGDLRGKPFAIEAENSILDISGFSKQYNCAFIWQKDGVKKLNLYLIINYFKGGKLRFKKIKPEAFEANRFYTVINKKSGEIVPMEVNFNFDDPNLIILPLAFGKRQGREFIWNDLLSLETGSLKLANGRVIEKTLYNRRTRQDEPALFVALTFERREVLDSSNIKPMNLIGVDRGENIPAVIALTDPEGCPLSRFKDSLGNPTHILRIGESYKEKQRTIQAKKEVEQRRAGGYSRKYASKAKNLADDMVRNTARDLLYYAVTQDAMLIFENLSRGFGRQGKRTFMAERQYTRMEDWLTAKLAYEGLPSKTYLSKTLAQYTSKTCSNCGFTITSADYDRVLEKLKKTATGWMTTINGKELKVEGQITYYNRYKRQNVVKDLSVELDRLSEESVNNDISSWTKGRSGEALSLLKKRFSHRPVQEKFVCLNCGFETHADEQAALNIARSWLFLRSQEYKKYQTNKTTGNTDKRAFVETWQSFYRKKLKEVWKPAV

SEQ ID NO: 27985 - protein, 978 aa, synthetic construct
  REGION 1..978: note = engineered CasX variant
QEIKRINKIRRRLVKDSNTKKAGKTGPMKTLLVRVMTPDLRERLENLRKKPENIPQPISNTSRANLNKLLTDYTEMKKAILHVYWEEFQKDPVGLMSRVAQPASKKIDQNKLKPEMDEKGNLTTAGFACSQCGQPLFVYKLEQVSEKGKAYTNYVGRCNVAEHEKLILLDQLKPEKDSDEAVTYSLGKFGQRALDFYSIHVTKESTHPVKPLAQIAGNRYASGPVGKALSDACMGTIASFLSKYQDIIIEHQKVVKGNQKRLESLRELAGKENLEYPSVTLPPQPHTKEGVDAYNEVIARVRMWVNLNLWQKLKLSRDDAKPLLRLKGFPSFPLVERQANEVDWWDMVCNVKKLINEKKEDGKVFWQNLAGYKRQEALRPYLSSEEDRKKGKKFARYQLGDLLLHLEKKHGEDWGKVYDEAWERIDKKVEGLSKHIKLEEERRSEDAQSKAALTDWLRAKASFVIEGLKEADKDEFCRCELKLQKWYGDLRGKPFAIEAENSILDISGFSKQYNCAFIWQKDGVKKLNLYLIINYFKGGKLRFKKIKPEAFEANRFYTVINKKSGEIVPMEVNFNFDDPNLIILPLAFGKRQGREFIWNDLLSLETGSLKLANGRVIEKTLYNRRTRQDEPALFVALTFERREVLDSSNIKPMNLIGVDRGENIPAVIALTDPEGCPLSRFKDSLGNPTHILRIGESYKEKQRTIQAKKEVEQRRAGGYSRKYASKAKNLADDMVRNTARDLLYYAVTQDAMLIFENLSRGFGRQGKRTFMAERQYTRMEDWLTAKLAYEGLPSKTYLSKTLAQYTSKTCSNCGFTITSADYDRVLEKLKKTATGWMTTINGKELKVEGQITYYNRYKRQNVVKDLSVELDRLSEESVNNDISSWTKGRSGEALSLLKKRFSHRPVQEKFVCLNCGFETHADEQAALNIARSWLFLRSQEYKKYQTNKTTGNTDKRAFVETWQSFYRKKLKEVWKPAV

SEQ ID NO: 27986 - protein, 978 aa, synthetic construct
  REGION 1..978: note = engineered CasX variant
QEIKRINKIRRRLVKDSNTKKAGKTGPMKTLLVRVMTPDLRERLENLRKKPENIPQPISNTSRANLNKLLTDYTEMKKAILHVYWEEFQKDPVGLMSRVAQPASKKIDQNKLKPEMDEKGNLTTAGFACSQCGQPLFVYKLEQVSEKGKAYTNYFGRCNVAEHEKLILLDQLKPEKDSDEAVTYSLGKFGQRALDFYSIHVTKESTHPVKPLAQIAGNRYASGPVGKALSDACMGTIASFLSKYQDIIIEHQKVVKGNQKRLESLRELAGKENLEYPSVTLPPQPHTKEGVDAYNEVIARVRMWVNLNLWQKLKLSRDDAKPLLRLKGFPSFPLVERQANEVDWWDMVCNVKKLINEKKEDGKVFWQNLAGYKRQEALRPYLSSEEDRKKGKKFARYQLGDLLLHLEKKHGEDWGKVYDEAWERIDKKVEGLSKHIKLEEERRSEDAQSKAALTDWLRAKASFVIEGLKEADKDEFCRCELKLQKWYGDLRGKPFAIEAENSILDISGFSKQYNCAFIWQKDGVKKLNLYLIINYFKGGKLRFKKIKPEAFEANRFYTVINKKSGEIVPMEVNFNFDDPNLIILPLAFGKRQGREFIWNDLLSLETGSLKLANGRVIEKTLYNRRTRQDEPALFVALTFERREVLDSSNIKPMNLIGVDRGENIPAVIALTDPEGCPLSRFKDSLGNPTHILRIGESYKEKQRTIQAKKEVEQRRAGGYSRKYASKAKNLADDMVRNTARDLLYYAVTQDAMLIFENLSRGFGRQGKRTFMAERQYTRMEDWLTAKLAYEGLASKTYLSKTLAQYTSKTCSNCGFTITSADYDRVLEKLKKTATGWMTTINGKELKVEGQITYYNRYKRQNVVKDLSVELDRLSEESVNNDISSWTKGRSGEALSLLKKRFSHRPVQEKFVCLNCGFETHADEQAALNIARSWLFLRSQEYKKYQTNKTTGNTDKRAFVETWQSFYRKKLKEVWKPAV

SEQ ID NO: 27987 - protein, 978 aa, synthetic construct
  REGION 1..978: note = engineered CasX variant
QEIKRINKIRRRLVKDSNTKKAGKTGPMKTLLVRVMTPDLRERLENLRKKPENIPQPISNTSRANLNKLLTDYTEMKKAILHVYWEEFQKDPVGLMSRVAQPASKKIDQNKLKPEMDEKGNLTTAGFACSQCGQPLFVYKLEQVSEKGKAYTNYFGRCNVAEHEKLILLDQLKPEKDSDEAVTYSLGKFGQRALDFYSIHVTKESTHPVKPLAQIAGNRYASGPVGKALSDACMGTIASFLSKYQDIIIEHQKVVKGNQKRLESLRELAGKENLEYPSVTLPPQPHTKEGVDAYNEVIARVRMWVNLNLWQKLKLSRDDAKPLLRLKGFPSFPLVERQANEVDWWDMVCNVKKLINEKKEDGKVFWQNLAGYKRQEALRPYLSSEEDRKKGKKFARYQLGDLLLHLEKKHGEDWGKVYDEAWERIDKKVEGLSKHIKLEEERRSEDAQSKAALTDWLRAKASFVIEGLKEADKDEFCRCELKLQKWYGDLRGKPFAIEAENSILDISGFSKQYNCAFIWQKDGVKKLNLYLIINYFKGGKLRFKKIKPEAFEANRFYTVINKKSGEIVPMEVNFNFDDPNLIILPLAFGKRQGREFIWNDLLSLETGSLKLANGRVIEKTLYNRRTRQDEPALFVALTFERREVLDSSNIKPMNLIGVDRGENIPAVIALTDPEGCPLSRFKDSLGNPTHILRIGESYKEKQRTIQAKKEVEQRRAGGYSRKYASKAKNLADDMVRNTARDLLYYAVTQDAMLIFENLSRGFGRQGKRTFMAERQYTRMEDWLTAKLAYEGLPSKVYLSKTLAQYTSKTCSNCGFTITSADYDRVLEKLKKTATGWMTTINGKELKVEGQITYYNRYKRQNVVKDLSVELDRLSEESVNNDISSWTKGRSGEALSLLKKRFSHRPVQEKFVCLNCGFETHADEQAALNIARSWLFLRSQEYKKYQTNKTTGNTDKRAFVETWQSFYRKKLKEVWKPAV

SEQ ID NO: 27988 - protein, 979 aa, synthetic construct
  REGION 1..979: note = engineered CasX variant
QEIKRINKIRRRLVKDSNTKKAGKTGPMKTLLVRVMTPDLRERLENLRKKPENIPQPISNTSRANLNKLLTDYTEMKKAILHVYWEEFQKDPVGLMSRVAQPASKKIDQNKLKPEMDEKGNLTTAGFACSQCGQPLFVYKLEQVSEKGKAYTNYFGRCNVAEHEKLILLDQLKPEKDSDEAVTYSLGKFGQRALDFYSIHVTKESTHPVKPLAQIAGNRYASGPVGKALSDACMGTIASFLSKYQDIIIEHQKVVKGNQKRLESLRELAGKENLEYPSVTLPPQPHTKEGVDAYNEVIARVRMWVNLNLWQKLKLSRDDAKPLLRLKGFPSFPLVERQANEVDWWDMVCNVKKLINEKKEDGKVFWQNLAGYKRQEALRPYLSSEEDRKKGKKFARYQLGDLLLHLEKKHGEDWGKVYDEAWERIDKKVEGLSKHIKLEEERRSEDAQSKAALTDWLRAKASFVIEGLKEADKDEFCRCELKLQKWYGDLRGKPFAIEAENSILDISGFSKQYNCAFIWQKDGVKKLNLYLIINYFKGGKLRFKKIKPEAFEANRFYTVINKKSGEIVPMEVNFNFDDPNLIILPLAFGKRQGREFIWNDLLSLETGSLKLANGRVIEKTLYNRRTRQDEPALFVALTFERREVLDSSNIKPMNLIGVDRGENIPAVIALTDPEGCPLSRFKDSLGNPTHILRIGESYKEKQRTIQAKKEVEQRRAGGYSRKYASKAKNLADDMVRNTARDLLYYAVTQDAMLIFENLSRGFGRQGKRTFMAERQYTRMEDWLTAKLAYEGPLPSKTYLSKTLAQYTSKTCSNCGFTITSADYDRVLEKLKKTATGWMTTINGKELKVEGQITYYNRYKRQNVVKDLSVELDRLSEESVNNDISSWTKGRSGEALSLLKKRFSHRPVQEKFVCLNCGFETHADEQAALNIARSWLFLRSQEYKKYQTNKTTGNTDKRAFVETWQSFYRKKLKEVWKPAV

SEQ ID NO: 27989 - protein, 979 aa, synthetic construct
  REGION 1..979: note = engineered CasX variant
QEIKRINKIRRRLVKDSNTKKAGKTGPMKTLLVRVMTPDLRERLENLRKKPENIPQPISNTSRANLNKLLTDYTEMKKAILHVYWEEFQKDPVGLMSRVAQPASKKIDQNKLKPEMDEKGNLTTAGFACSQCGQPLFVYKLEQVSEKGKAYTNYFGRCNVAEHEKLILLDQLKPEKDSDEAVTYSLGKFGQRALDFYSIHVTKESTHPVKPLAQIAGNRYASGPVGKALSDACMGTIASFLSKYQDIIIEHQKVVKGNQKRLESLRELAGKENLEYPSVTLPPQPHTKEGVDAYNEVIARVRMWVNLNLWQKLKLSRDDAKPLLRLKGFPSFPLVERQANEVDWWDMVCNVKKLINEKKEDGKVFWQNLAGYKRQEALRPYLSSEEDVRKKGKKFARYQLGDLLLHLEKKHGEDWGKVYDEAWERIDKKVEGLSKHIKLEEERRSEDAQSKAALTDWLRAKASFVIEGLKEADKDEFCRCELKLQKWYGDLRGKPFAIEAENSILDISGFSKQYNCAFIWQKDGVKKLNLYLIINYFKGGKLRFKKIKPEAFEANRFYTVINKKSGEIVPMEVNFNFDDPNLIILPLAFGKRQGREFIWNDLLSLETGSLKLANGRVIEKTLYNRRTRQDEPALFVALTFERREVLDSSNIKPMNLIGVDRGENIPAVIALTDPEGCPLSRFKDSLGNPTHILRIGESYKEKQRTIQAKKEVEQRRAGGYSRKYASKAKNLADDMVRNTARDLLYYAVTQDAMLIFENLSRGFGRQGKRTFMAERQYTRMEDWLTAKLAYEGLPSKTYLSKTLAQYTSKTCSNCGFTITSADYDRVLEKLKKTATGWMTTINGKELKVEGQITYYNRYKRQNVVKDLSVELDRLSEESVNNDISSWTKGRSGEALSLLKKRFSHRPVQEKFVCLNCGFETHADEQAALNIARSWLFLRSQEYKKYQTNKTTGNTDKRAFVETWQSFYRKKLKEVWKPAV

SEQ ID NO: 27990 - protein, 978 aa, synthetic construct
  REGION 1..978: note = engineered CasX variant
QEIKRINKIRRRLVKDSNTKKAGKTGPMKTLLVRVMTPDLRERLENLRKKPENIPQPISNTSRANLNKLLTDYTEMKKAILHVYWEEFQKDPVGLMSRVAQPASKKIDQNKLKPEMDEKGNLTTAGFACSQCGQPLFVYKLEQVSEKGKAYTNYFGRCNVAEHEKLILLDQLKPEKDSDEAVTYSLGKFGQRALDFYSIHVTKESTHPVKPLAQIAGNRYASGPVGKALSDACMGTIASFLSKYQDIIIEHQKVVKGNQKRLESLRELAGKENLEYPSVTLPPQPHTKEGVDAYNEVIARVRMWVNLNLWQKLKLSRDDAKPLLRLKGFPSFPLVERQANEVDWWDMVCNVKKLINEKKEDGKVFWQNLAGYKRQEALRPYLSSEEDRKKGKKFARYQLGDLLLHLEKKHGEDWGKVYDEAWERIDKKVEGLSKHIKLEEERRSEDAQSKAALTDWLRAKASFVIEGLKEADKDEFCRCELKLQKWYGDLRGKPFAIEAENSILDISGFSKQYNCAFIWQKDGVKKLNLYLIINYFKGGKLRFKKIKPEAFEANRFYTVINKKSGEIVPMEVNFNFDDPNLIILPLAFGKRQGREFIWNDLLSLETGSLKLANGRVIEKTLYNRRTRQDEPALFVALTFERREVLDSSNIKPMNLIGVDRGENIPAVIALTDPEGCPLSRFKDSLGNPTHILRIGESYKEKQRTIQAKKEVEQRRAGGYSRKYASKAKNLADDMVRNTARDLLYYAVTQDAMLIFENLSRGFGRQGKRTFMAERQYTRMEDWLTAKLAYEGLPSKTYLSKTLAQYTSKTCSNCGFTITSADYDRMLEKLKKTATGWMTTINGKELKVEGQITYYNRYKRQNVVKDLSVELDRLSEESVNNDISSWTKGRSGEALSLLKKRFSHRPVQEKFVCLNCGFETHADEQAALNIARSWLFLRSQEYKKYQTNKTTGNTDKRAFVETWQSFYRKKLKEVWKPAV

SEQ ID NO: 27991 - protein, 978 aa, synthetic construct
  REGION 1..978: note = engineered CasX variant
QEIKRINKIRRRLVKDSNTKKAGKTGPMKTLLVRVMTPDLRERLENLRKKPENIPQPISNTSRANLNKLLTDYTEMKKAILHVYWEEFQKDPVGLMSRVAQPASKKIDQNKLKPEMDEKGNLTTAGFACSQCGQPLFVYKLEQVSEKGKAYTNYFGRCNVAEHEKLILLDQLKPEKDSDEAVTYSLGKFGQRALDFYSIHVTKESTHPVKPLAQIAGNRYASGPVGKALSDACMGTIASFLSKYQDIIIEHQKVVKGNQKRLESLRELAGKENLEYPSVTLPPQPHTKEGVDAYNEVIARVRMWVNLNLWQKLKLSRDDAKPLLRLKGFPSFPLVERQANEVDWWDMVCNVKKLINEKKEDGKVFWQNLAGYKRQEALRPYLSSEEDRKKGKKFARYQLGDLLLHLEKKHGEDWGKVYDEAWERIDKKVEGLSKHIKLEEERRSEDAQSKAALTDWLRAKASFVIEGLKEADKDEFCRCELKLQKWYGDLRGKPFAIEAENSILDISGFSKQYNCAFIWQKDGVKKLNLYLIINYFKGGKLRFKKIKPEAFEANRFYTVINKKSGEIVPMEVNFNFDDPNLIILPLAFGKRQGREFIWNDLLSLETGSLKLANGRVIEKTLYNRRTRQDEPALFVALTFERREVLDSSNIKPMNLIGVDRGENIPAVIALTDPEGCPLSRFKDSLGNPTHILRIGESYKEKQRTIQAKKEVEQRRAGGYSRKYASKAKNLADDMVRNTARDLLYYAVTQDAMLIFENLSRGFGRQGKRTFMAERQYTRMEDWLTAKLAYEGLPSKTYLSKTLAQYTSKTCSNCGFTITSADYDRVLEKLKKTATGWMTTINGKELKVEGQITYYNRYKRQNVVKDLSVELDRLSEESVNNDISSWTKGRQGEALSLLKKRFSHRPVQEKFVCLNCGFETHADEQAALNIARSWLFLRSQEYKKYQTNKTTGNTDKRAFVETWQSFYRKKLKEVWKPAV

SEQ ID NO: 27992 - protein, 978 aa, synthetic construct
  REGION 1..978: note = engineered CasX variant
QEIKRINKIRRRLVKDSNTKKAGKTGPMKTLLVRVMTPDLRERLENLRKKPENIPQPISNTSRANLNKLLTDYTEMKKAILHVYWEEFQKDPVGLMSRVAQPASKKIDQNKLKPEMDEKGNLTTAGFACSQCGQPLFVYKLEQVSEKGKAYTNYFGRCNVAEHEKLILLDQLKPEKDSDEAVTYSLGKFGQRALDFYSIHVTKESTHPVKPLAQIAGNRYASGPVGKALSDACMGTIASFLSKYQDIIIEHQKVVKGNQKRLESLRELAGKENLEYPSVTLPPQPHTKEGVDAYNEVIARVRMWVNLNLWQKLKLSRDDAKPLLRLKGFPSFPLVERQANEVDWWDMVCNVKKLINEKKEDGKVFWQNLAGYKRQEALRPYLSSEEDRKKGKKFARYQLGDLLLHLEKKHGEDWGKVYDEAWERIDKKVEGLSKHIKLEEERRSEDAQSKAALTDWLRAKASFVIEGLKEADKDEFCRCELKLQKWYGDLRGKPFAIEAENSILDISGFSKQYNCAFIWQKDGVKKLNLYLIINYFKGGKLRFKKIKPEAFEANRFYTVINKKSGEIVPMEVNFNFDDPNLIILPLAFGKRQGREFIWNDLLSLETGSLKLANGRVIEKTLYNRRTRQDEPALFVALTFERREVLDSSNIKPMNLIGVDRGENIPAVIALTDPEGCPLSRFKDSLGNPTHILRIGESYKEKQRTIQAKKEVEQRRAGGYSRKYASKAKNLADDMVRNTARDLLYYAVTQDAMLIFENLSRGFGRQGKRTFMAERQYTRMEDWLTAKLAYEGLPSKTYLSKTLAQYTSKTCSNCGFTITSADYDRVLEKLKKTATGWMTTINGKELKVEGQITYYNRYKRQNVVKDLSVELDRLSEESVNNDISSWTKGRSGEALSLLKKRFSHRPVQEKFVCLNCEFETHADEQAALNIARSWLFLRSQEYKKYQTNKTTGNTDKRAFVETWQSFYRKKLKEVWKPAV

SEQ ID NO: 27993 - protein, 979 aa, synthetic construct
  REGION 1..979: note = engineered CasX variant
QEIKRINKIRRRLVKDSNTKKAGKTGPMKTLLVRVMTPDLRERLENLRKKPENIPQPISNTSRANLNKLLTDYTEMKKAILHVYWEEFQKDPVGLMSRVAQPASKKIDQNKLKPEMDEKGNLTTAGFACSQCGQPLFVYKLEQVSEKGKAYTNYFGRCNVAEHEKLILLDQLKPEKDSDEAVTYSLGKFGQRALDFYSIHVTKESTHPVKPLAQIAGNRYASGPVGKALSDACMGTIASFLSKYQDIIIEHQKVVKGNQKRLESLRELAGKENLEYPSVTLPPQPHTKEGVDAYNEVIARVRMWVNLNLWQKLKLSRDDAKPLLRLKGFPSFPLVERQANEVDWWDMVCNVKKLINEKKEDGKVFWQNLAGYKRQEALRPYLSSEEDRKKGKKFARYQLGDLLLHLEKKHGEDWGKVYDEAWERIDKKVEGLSKHIKLEEERRSEDAQSKAALTDWLRAKASFVIEGLKEADKDEFCRCELKLQKWYGDLRGKPFAIEAENSILDISGFSKQYNCAFIWQKDGVKKLNLYLIINYFKGGKLRFKKIKPEAFEANRFYTVINKKSGEIVPMEVNFNFDDPNLIILPLAFGKRQGREFIWNDLLSLETGSLKLANGRVIEKTLYNRRTRQDEPALFVALTFERREVLDSSNIKPMNLIGVDRGENIPAVIALTDPEGCPLSRFKDSLGNPTHILRIGESYKEKQRTIQAKKEVEQRRAGGYSRKYASKAKNLADDMVRNTARDLLYYAVTQDAMLIFENLSRGFGRQGKRTFMAERQYTRMEDWLTAKLAYEGLPSKTYLSKTLAQYTSKTCSNCGFTITSADYDRVLEKLKKTATGWMTTINGKELKVEGQITYYNRYKRQNVVKDLSVELDRLSEESVNNDISSWTKGRSGEALSLLKKRFSHRPVQEKFVCLNCGFETHADEQAALNIARSWLFLRSQEYKKYQTNKTSTGNTDKRAFVETWQSFYRKKLKEVWKPAV

SEQ ID NO: 27994 - protein, 979 aa, synthetic construct
  REGION 1..979: note = engineered CasX variant
QEIKRINKIRRRLVKDSNTKKAGKTGPMKTLLVRVMTPDLRERLENLRKKPENIPQPISNTSRANLNKLLTDYTEMKKAILHVYWEEFQKDPVGLMSRVAQPASKKIDQNKLKPEMDEKGNLTTAGFACSQCGQPLFVYKLEQVSEKGKAYTNYFGRCNVAEHEKLILLDQLKPEKDSDEAVTYSLGKFGQRALDFYSIHVTKESTHPVKPLAQIAGNRYASGPVGKALSDACMGTIASFLSKYQDIIIEHQKVVKGNQKRLESLRELAGKENLEYPSVTLPPQPHTKEGVDAYNEVIARVRMWVNLNLWQKLKLSRDDAKPLLRLKGFPSFPLVERQANEVDWWDMVCNVKKLINEKKEDGKVFWQNLAGYKRQEALRPYLSSEEDRKKGKKFARYQLGDLLLHLEKKHGEDWGKVYDEAWERIDKKVEGLSKHIKLEEERRSEDAQSKAALTDWLRAKASFVIEGLKEADKDEFCRCELKLQKWYGDLRGKPFAIEAENSILDISGFSKQYNCAFIWQKDGVKKLNLYLIINYFKGGKLRFKKIKPEAFEANRFYTVINKKSGEIVPMEVNFNFDDPNLIILPLAFGKRQGREFIWNDLLSLETGSLKLANGRVIEKTLYNRRTRQDEPALFVALTFERREVLDSSNIKPMNLIGVDRGENIPAVIALTDPEGCPLSRFKDSLGNPTHILRIGESYKEKQRTIQAKKEVEQRRAGGYSRKYASKAKNLADDMVRNTARDLLYYAVTQDAMLIFENLSRGFGRQGKRTFMAERQYTRMEDWLTAKLAYEGLPSKTYLSKTLAQYTSKTCSNCGFTITSADYDRVLEKLKKTATGWMTTINGKELKVEGQITYYNRYKRQNVVKDLSVELDRLSEESVNNDISSWTKGRSGEALSLLKKRFSHRPVQEKFVCLNCGFETHADEQAALNIARSWLFLRSQEYKKYQTNKTTGKNTDKRAFVETWQSFYRKKLKEVWKPAV

SEQ ID NO: 27995 - protein, 978 aa, synthetic construct
  REGION 1..978: note = engineered CasX variant
QEIKRINKIRRRLVKDSNTKKAGKTGPMKTLLVRVMTPDLRERLENLRKKPENIPQPISNTSRANLNKLLTDYTEMKKAILHVYWEEFQKDPVGLMSRVAQPASKKIDQNKLKPEMDEKGNLTTAGFACSQCGQPLFVYKLEQVSEKGKAYTNYFGRCNVAEHEKLILLDQLKPEKDSDEAVTYSLGKFGQRALDFYSIHVTKESTHPVKPLAQIAGNRYASGPVGKALSDACMGTIASFLSKYQDIIIEHQKVVKGNQKRLESLRELAGKENLEYPSVTLPPQPHTKEGVDAYNEVIARVRMWVNLNLWQKLKLSRDDAKPLLRLKKFPSFPLVERQANEVDWWDMVCNVKKLINEKKEDGKVFWQNLAGYKRQEALRPYLSSEEDRKKGKKFARYQLGDLLLHLEKKHGEDWGKVYDEAWERIDKKVEGLSKHIKLEEERRSEDAQSKAALTDWLRAKASFVIEGLKEADKDEFCRCELKLQKWYGDLRGKPFAIEAENSILDISGFSKQYNCAFIWQKDGVKKLNLYLIINYFKGGKLRFKKIKPEAFEANRFYTVINKKSGEIVPMEVNFNFDDPNLIILPLAFGKRQGREFIWNDLLSLETGSLKLANGRVIEKTLYNRRTRQDEPALFVALTFERREVLDSSNIKPMNLIGVDRGENIPAVIALTDPEGCPLSRFKDSLGNPTHILRIGESYKEKQRTIQAKKEVEQRRAGGYSRKYASKAKNLADDMVRNTARDLLYYAVTQDAMLIFENLSRGFGRQGKRTFMAERQYTRMEDWLTAKLAYEGLPSKTYLSKTLAQYTSKTCSNCGFTITSADYDRVLEKLKKTATGWMTTINGKELKVEGQITYYNRYKRQNVVKDLSVELDRLSEESVNNDISSWTKGRSGEALSLLKKRFSHRPVQEKFVCLNCGFETHADEQAALNIARSWLFLRSQEYKKYQTNKTTGNTDKRAFVETWQSFYRKKLKEVWKPAV

SEQ ID NO: 27996 - protein, 978 aa, synthetic construct
  REGION 1..978: note = engineered CasX variant
QEIKRINKIRRRLVKDSNTKKAGKTGPMKTLLVRVMTPDLRERLENLRKKPENIPQPISNTSRANLNKLLTDYTEMKKAILHVYWEEFQKDPVGLMSRVAQPASKKIDQNKLKPEMDEKGNLTTAGFACSQCGQPLFVYKLEQVSEKGKAYTNYFGRCNVAEHEKLILLDQLKPEKDSDEAVTYSLGKFGQRALDFYSIHVTKESTHPVKPLAQIAGNRYASGPVGKALSDACMGTIASFLSKYQDIIIEHQKVVKGNQKRLESLRELAGKENLEYPSVTLPPQPHTKEGVDAYNEVIARVRMWVNLNLWQKLKLSRDDAKPLLRLKGFPSFPLVERQANEVDWWDMVCNVKKLINEKKEDGKVFWQNLAGYKRQEALRPYLSSEEDRKKGKKFARYQLGDLLLHLEKKHGEDWGKVYDEAWERIDKKVEGLSKHIKLEEERRSEDAQSKAALTDWLRAKASFVIEGLKEADKDEFCRCELKLQKWYGDLRGKPFAIEAENSILDISGFSKQYNCAFIWQKDGVKKLNLYLIINYFKGGKLRFKKIKPEAFEANRFYTVINKKSGEIVPMEVNFNFDDPNLIILPLAFGKRQGREFIWNDLLSLETGSLKLANGRVIEKTLYNRRTRQDEPALFVALTFERREVLDSSNIKPMNLIGVDRGENIPAVIALTDPEGCPLSRFKDSLGNPTHILRIGERYKEKQRTIQAKKEVEQRRAGGYSRKYASKAKNLADDMVRNTARDLLYYAVTQDAMLIFENLSRGFGRQGKRTFMAERQYTRMEDWLTAKLAYEGLPSKTYLSKTLAQYTSKTCSNCGFTITSADYDRVLEKLKKTATGWMTTINGKELKVEGQITYYNRYKRQNVVKDLSVELDRLSEESVNNDISSWTKGRSGEALSLLKKRFSHRPVQEKFVCLNCGFETHADEQAALNIARSWLFLRSQEYKKYQTNKTTGNTDKRAFVETWQSFYRKKLKEVWKPAV

SEQ ID NO: 27997 - protein, 978 aa, synthetic construct
  REGION 1..978: note = engineered CasX variant
QEIKRINKIRRRLVKDSNTKKAGKTGPMKTLLVRVMTPDLRERLENLRKKPENIPQPISNTSRANLNKLLTDYTEMKKAILHVYWEEFQKDPVGLMSRVAQPASKKIDQNKLKPEMDEKGNLTTAGFACSQCGQPLFVYKLEQVSEKGKAYTNYFGRCNVAEHEKLILLDQLKPEKDSDEAVTYSLGKFGQRALDFYSIHVTKESTHPVKPLAQIAGNRYASGPVGKALSDACMGTIASFLSKYQDIIIEHQKVVKGNQKRLESLRELAGKENLEYPSVTLPPQPHTKEGVDAYNEVIARVRMWVNLNLWQKLKLSRDDAKPLLRLKGFPSFPLVERQANEVDWWDMVCNVKKLINEKKEDGKVFWQNLAGYKRQEALRPYLSSEEDRKKGKKFARYQLGDLLLHLEKKHGEDWGKVYDEAWERIDKKVEGLSKHIKLEEERRSEDAQSKAALTDWLRAKASFVIEGLKEADKDEFCRCELKLQKWYGDLRGKPFAIEAENSILDISGFSKQYNCAFIWQKDGVKKLNLYLIINYFKGGKLRFKKIKPEAFEANRFYTVINKKSGEIVPMEVNFNFDDPNLIILPLAFGKRQGREFIWNDLLSLETGSLQLANGRVIEKTLYNRRTRQDEPALFVALTFERREVLDSSNIKPMNLIGVDRGENIPAVIALTDPEGCPLSRFKDSLGNPTHILRIGESYKEKQRTIQAKKEVEQRRAGGYSRKYASKAKNLADDMVRNTARDLLYYAVTQDAMLIFENLSRGFGRQGKRTFMAERQYTRMEDWLTAKLAYEGLPSKTYLSKTLAQYTSKTCSNCGFTITSADYDRVLEKLKKTATGWMTTINGKELKVEGQITYYNRYKRQNVVKDLSVELDRLSEESVNNDISSWTKGRSGEALSLLKKRFSHRPVQEKFVCLNCGFETHADEQAALNIARSWLFLRSQEYKKYQTNKTTGNTDKRAFVETWQSFYRKKLKEVWKPAV

SEQ ID NO: 27998 - protein, 979 aa, synthetic construct
  REGION 1..979: note = engineered CasX variant
QEGGKRINKIRRRLVKDSNTKKAGKTGPMKTLLVRVMTPDLRERLENLRKKPENIPQPISNTSRANLNKLLTDYTEMKKAILHVYWEEFQKDPVGLMSRVAQPASKKIDQNKLKPEMDEKGNLTTAGFACSQCGQPLFVYKLEQVSEKGKAYTNYFGRCNVAEHEKLILLAQLKPEKDSDEAVTYSLGKFGQRALDFYSIHVTKESTHPVKPLAQIAGNRYASGPVGKALSDACMGTIASFLSKYQDIIIEHQKVVKGNQKRLESLRELAGKENLEYPSVTLPPQPHTKEGVDAYNEVIARVRMWVNLNLWQKLKLSRDDAKPLLRLKGFPSFPLVERQANEVDWWDMVCNVKKLINEKKEDGKVFWQNLAGYKRQEALRPYLSSEEDRKKGKKFARYQLGDLLLHLEKKHGEDWGKVYDEAWERIDKKVEGLSKHIKLEEERRSEDAQSKAALTDWLRAKASFVIEGLKEADKDEFCRCELKLQKWYGDLRGKPFAIEAENSILDISGFSKQYNCAFIWQKDGVKKLNLYLIINYFKGGKLRFKKIKPEAFEANRFYTVINKKSGEIVPMEVNFNFDDPNLIILPLAFGKRQGREFIWNDLLSLETGSLKLANGRVIEKTLYNRRTRQDEPALFVALTFERREVLDSSNIKPMNLIGVDRGENIPAVIALTDPEGCPLSRFKDSLGNPTHILRIGESYKEKQRTIQAKKEVEQRRAGGYSRKYASKAKNLADDMVRNTARDLLYYAVTQDAMLIFENLSRGFGRQGKRTFMAERQYTRMEDWLTAKLAYEGLPSKTYLSKTLAQYTSKTCSNCGFTITSADYDRVLEKLKKTATGWMTTINGKELKVEGQITYYNRYKRQNVVKDLSVELDRLSEESVNNDISSWTKGRSGEALSLLKKRFSHRPVQEKFVCLNCGFETHADEQAALNIARSWLFLRSQEYKKYQTNKTTGNTDKRAFVETWQSFYRKKLKEVWKPAV

SEQ ID NO: 27999 - protein, 978 aa, synthetic construct
  REGION 1..978: note = engineered CasX variant
QEGGRINKIRRRLVKDSNTKKAGKTGPMKTLLVRVMTPDLRERLENLRKKPENIPQPISNTSRANLNKLLTDYTEMKKAILHVYWEEFQKDPVGLMSRVAQPASKKIDQNKLKPEMDEKGNLTTAGFACSQCGQPLFVYKLEQVSEKGKAYTNYFGRCNVAEHEKLILLAQLKPEKDSDEAVTYSLGKFGQRALDFYSIHVTKESTHPVKPLAQIAGNRYASGPVGKALSDACMGTIASFLSKYQDIIIEHQKVVKGNQKRLESLRELAGKENLEYPSVTLPPQPHTKEGVDAYNEVIARVRMWVNLNLWQKLKLSRDDAKPLLRLKGFPSFPLVERQANEVDWWDMVCNVKKLINEKKEDGKVFWQNLAGYKRQEALRPYLSSEEDRKKGKKFARYQLGDLLLHLEKKHGEDWGKVYDEAWERIDKKVEGLSKHIKLEEERRSEDAQSKAALTDWLRAKASFVIEGLKEADKDEFCRCELKLQKWYGDLRGKPFAIEAENSILDISGFSKQYNCAFIWQKDGVKKLNLYLIINYFKGGKLRFKKIKPEAFEANRFYTVINKKSGEIVPMEVNFNFDDPNLIILPLAFGKRQGREFIWNDLLSLETGSLKLANGRVIEKTLYNRRTRQDEPALFVALTFERREVLDSSNIKPMNLIGVDRGENIPAVIALTDPEGCPLSRFKDSLGNPTHILRIGESYKEKQRTIQAKKEVEQRRAGGYSRKYASKAKNLADDMVRNTARDLLYYAVTQDAMLIFENLSRGFGRQGKRTFMAERQYTRMEDWLTAKLAYEGLPSKTYLSKTLAQYTSKTCSNCGFTITSADYDRVLEKLKKTATGWMTTINGKELKVEGQITYYNRYKRQNVVKDLSVELDRLSEESVNNDISSWTKGRSGEALSLLKKRFSHRPVQEKFVCLNCGFETHADEQAALNIARSWLFLRSQEYKKYQTNKTTGNTDKRAFVETWQSFYRKKLKEVWKPAV

SEQ ID NO: 28000 - protein, 979 aa, synthetic construct
  REGION 1..979: note = engineered CasX variant
QEGKGRINKIRRRLVKDSNTKKAGKTGPMKTLLVRVMTPDLRERLENLRKKPENIPQPISNTSRANLNKLLTDYTEMKKAILHVYWEEFQKDPVGLMSRVAQPASKKIDQNKLKPEMDEKGNLTTAGFACSQCGQPLFVYKLEQVSEKGKAYTNYFGRCNVAEHEKLILLAQLKPEKDSDEAVTYSLGKFGQRALDFYSIHVTKESTHPVKPLAQIAGNRYASGPVGKALSDACMGTIASFLSKYQDIIIEHQKVVKGNQKRLESLRELAGKENLEYPSVTLPPQPHTKEGVDAYNEVIARVRMWVNLNLWQKLKLSRDDAKPLLRLKGFPSFPLVERQANEVDWWDMVCNVKKLINEKKEDGKVFWQNLAGYKRQEALRPYLSSEEDRKKGKKFARYQLGDLLLHLEKKHGEDWGKVYDEAWERIDKKVEGLSKHIKLEEERRSEDAQSKAALTDWLRAKASFVIEGLKEADKDEFCRCELKLQKWYGDLRGKPFAIEAENSILDISGFSKQYNCAFIWQKDGVKKLNLYLIINYFKGGKLRFKKIKPEAFEANRFYTVINKKSGEIVPMEVNFNFDDPNLIILPLAFGKRQGREFIWNDLLSLETGSLKLANGRVIEKTLYNRRTRQDEPALFVALTFERREVLDSSNIKPMNLIGVDRGENIPAVIALTDPEGCPLSRFKDSLGNPTHILRIGESYKEKQRTIQAKKEVEQRRAGGYSRKYASKAKNLADDMVRNTARDLLYYAVTQDAMLIFENLSRGFGRQGKRTFMAERQYTRMEDWLTAKLAYEGLPSKTYLSKTLAQYTSKTCSNCGFTITSADYDRVLEKLKKTATGWMTTINGKELKVEGQITYYNRYKRQNVVKDLSVELDRLSEESVNNDISSWTKGRSGEALSLLKKRFSHRPVQEKFVCLNCGFETHADEQAALNIARSWLFLRSQEYKKYQTNKTTGNTDKRAFVETWQSFYRKKLKEVWKPAV

SEQ ID NO: 28001 - protein, 978 aa, synthetic construct
  REGION 1..978: note = engineered CasX variant
QEGKRANKIRRRLVKDSNTKKAGKTGPMKTLLVRVMTPDLRERLENLRKKPENIPQPISNTSRANLNKLLTDYTEMKKAILHVYWEEFQKDPVGLMSRVAQPASKKIDQNKLKPEMDEKGNLTTAGFACSQCGQPLFVYKLEQVSEKGKAYTNYFGRCNVAEHEKLILLAQLKPEKDSDEAVTYSLGKFGQRALDFYSIHVTKESTHPVKPLAQIAGNRYASGPVGKALSDACMGTIASFLSKYQDIIIEHQKVVKGNQKRLESLRELAGKENLEYPSVTLPPQPHTKEGVDAYNEVIARVRMWVNLNLWQKLKLSRDDAKPLLRLKGFPSFPLVERQANEVDWWDMVCNVKKLINEKKEDGKVFWQNLAGYKRQEALRPYLSSEEDRKKGKKFARYQLGDLLLHLEKKHGEDWGKVYDEAWERIDKKVEGLSKHIKLEEERRSEDAQSKAALTDWLRAKASFVIEGLKEADKDEFCRCELKLQKWYGDLRGKPFAIEAENSILDISGFSKQYNCAFIWQKDGVKKLNLYLIINYFKGGKLRFKKIKPEAFEANRFYTVINKKSGEIVPMEVNFNFDDPNLIILPLAFGKRQGREFIWNDLLSLETGSLKLANGRVIEKTLYNRRTRQDEPALFVALTFERREVLDSSNIKPMNLIGVDRGENIPAVIALTDPEGCPLSRFKDSLGNPTHILRIGESYKEKQRTIQAKKEVEQRRAGGYSRKYASKAKNLADDMVRNTARDLLYYAVTQDAMLIFENLSRGFGRQGKRTFMAERQYTRMEDWLTAKLAYEGLPSKTYLSKTLAQYTSKTCSNCGFTITSADYDRVLEKLKKTATGWMTTINGKELKVEGQITYYNRYKRQNVVKDLSVELDRLSEESVNNDISSWTKGRSGEALSLLKKRFSHRPVQEKFVCLNCGFETHADEQAALNIARSWLFLRSQEYKKYQTNKTTGNTDKRAFVETWQSFYRKKLKEVWKPAV

SEQ ID NO: 28002 - protein, 978 aa, synthetic construct
  REGION 1..978: note = engineered CasX variant
QEGKRISKIRRRLVKDSNTKKAGKTGPMKTLLVRVMTPDLRERLENLRKKPENIPQPISNTSRANLNKLLTDYTEMKKAILHVYWEEFQKDPVGLMSRVAQPASKKIDQNKLKPEMDEKGNLTTAGFACSQCGQPLFVYKLEQVSEKGKAYTNYFGRCNVAEHEKLILLAQLKPEKDSDEAVTYSLGKFGQRALDFYSIHVTKESTHPVKPLAQIAGNRYASGPVGKALSDACMGTIASFLSKYQDIIIEHQKVVKGNQKRLESLRELAGKENLEYPSVTLPPQPHTKEGVDAYNEVIARVRMWVNLNLWQKLKLSRDDAKPLLRLKGFPSFPLVERQANEVDWWDMVCNVKKLINEKKEDGKVFWQNLAGYKRQEALRPYLSSEEDRKKGKKFARYQLGDLLLHLEKKHGEDWGKVYDEAWERIDKKVEGLSKHIKLEEERRSEDAQSKAALTDWLRAKASFVIEGLKEADKDEFCRCELKLQKWYGDLRGKPFAIEAENSILDISGFSKQYNCAFIWQKDGVKKLNLYLIINYFKGGKLRFKKIKPEAFEANRFYTVINKKSGEIVPMEVNFNFDDPNLIILPLAFGKRQGREFIWNDLLSLETGSLKLANGRVIEKTLYNRRTRQDEPALFVALTFERREVLDSSNIKPMNLIGVDRGENIPAVIALTDPEGCPLSRFKDSLGNPTHILRIGESYKEKQRTIQAKKEVEQRRAGGYSRKYASKAKNLADDMVRNTARDLLYYAVTQDAMLIFENLSRGFGRQGKRTFMAERQYTRMEDWLTAKLAYEGLPSKTYLSKTLAQYTSKTCSNCGFTITSADYDRVLEKLKKTATGWMTTINGKELKVEGQITYYNRYKRQNVVKDLSVELDRLSEESVNNDISSWTKGRSGEALSLLKKRFSHRPVQEKFVCLNCGFETHADEQAALNIARSWLFLRSQEYKKYQTNKTTGNTDKRAFVETWQSFYRKKLKEVWKPAV

SEQ ID NO: 28003 - protein, 978 aa, synthetic construct
  REGION 1..978: note = engineered CasX variant
QEGKRINGIRRRLVKDSNTKKAGKTGPMKTLLVRVMTPDLRERLENLRKKPENIPQPISNTSRANLNKLLTDYTEMKKAILHVYWEEFQKDPVGLMSRVAQPASKKIDQNKLKPEMDEKGNLTTAGFACSQCGQPLFVYKLEQVSEKGKAYTNYFGRCNVAEHEKLILLAQLKPEKDSDEAVTYSLGKFGQRALDFYSIHVTKESTHPVKPLAQIAGNRYASGPVGKALSDACMGTIASFLSKYQDIIIEHQKVVKGNQKRLESLRELAGKENLEYPSVTLPPQPHTKEGVDAYNEVIARVRMWVNLNLWQKLKLSRDDAKPLLRLKGFPSFPLVERQANEVDWWDMVCNVKKLINEKKEDGKVFWQNLAGYKRQEALRPYLSSEEDRKKGKKFARYQLGDLLLHLEKKHGEDWGKVYDEAWERIDKKVEGLSKHIKLEEERRSEDAQSKAALTDWLRAKASFVIEGLKEADKDEFCRCELKLQKWYGDLRGKPFAIEAENSILDISGFSKQYNCAFIWQKDGVKKLNLYLIINYFKGGKLRFKKIKPEAFEANRFYTVINKKSGEIVPMEVNFNFDDPNLIILPLAFGKRQGREFIWNDLLSLETGSLKLANGRVIEKTLYNRRTRQDEPALFVALTFERREVLDSSNIKPMNLIGVDRGENIPAVIALTDPEGCPLSRFKDSLGNPTHILRIGESYKEKQRTIQAKKEVEQRRAGGYSRKYASKAKNLADDMVRNTARDLLYYAVTQDAMLIFENLSRGFGRQGKRTFMAERQYTRMEDWLTAKLAYEGLPSKTYLSKTLAQYTSKTCSNCGFTITSADYDRVLEKLKKTATGWMTTINGKELKVEGQITYYNRYKRQNVVKDLSVELDRLSEESVNNDISSWTKGRSGEALSLLKKRFSHRPVQEKFVCLNCGFETHADEQAALNIARSWLFLRSQEYKKYQTNKTTGNTDKRAFVETWQSFYRKKLKEVWKPAV

SEQ ID NO: 28004 - protein, 978 aa, synthetic construct
  REGION 1..978: note = engineered CasX variant
QEGKRINKIRRRLVKDSNTKKAGKTGPMKTLLVPVMTPDLRERLENLRKKPENIPQPISNTSRANLNKLLTDYTEMKKAILHVYWEEFQKDPVGLMSRVAQPASKKIDQNKLKPEMDEKGNLTTAGFACSQCGQPLFVYKLEQVSEKGKAYTNYFGRCNVAEHEKLILLAQLKPEKDSDEAVTYSLGKFGQRALDFYSIHVTKESTHPVKPLAQIAGNRYASGPVGKALSDACMGTIASFLSKYQDIIIEHQKVVKGNQKRLESLRELAGKENLEYPSVTLPPQPHTKEGVDAYNEVIARVRMWVNLNLWQKLKLSRDDAKPLLRLKGFPSFPLVERQANEVDWWDMVCNVKKLINEKKEDGKVFWQNLAGYKRQEALRPYLSSEEDRKKGKKFARYQLGDLLLHLEKKHGEDWGKVYDEAWERIDKKVEGLSKHIKLEEERRSEDAQSKAALTDWLRAKASFVIEGLKEADKDEFCRCELKLQKWYGDLRGKPFAIEAENSILDISGFSKQYNCAFIWQKDGVKKLNLYLIINYFKGGKLRFKKIKPEAFEANRFYTVINKKSGEIVPMEVNFNFDDPNLIILPLAFGKRQGREFIWNDLLSLETGSLKLANGRVIEKTLYNRRTRQDEPALFVALTFERREVLDSSNIKPMNLIGVDRGENIPAVIALTDPEGCPLSRFKDSLGNPTHILRIGESYKEKQRTIQAKKEVEQRRAGGYSRKYASKAKNLADDMVRNTARDLLYYAVTQDAMLIFENLSRGFGRQGKRTFMAERQYTRMEDWLTAKLAYEGLPSKTYLSKTLAQYTSKTCSNCGFTITSADYDRVLEKLKKTATGWMTTINGKELKVEGQITYYNRYKRQNVVKDLSVELDRLSEESVNNDISSWTKGRSGEALSLLKKRFSHRPVQEKFVCLNCGFETHADEQAALNIARSWLFLRSQEYKKYQTNKTTGNTDKRAFVETWQSFYRKKLKEVWKPAV

SEQ ID NO: 28005 - protein, 978 aa, synthetic construct
  REGION 1..978: note = engineered CasX variant
QEGKRINKIRRRLVKDSNTKKAGKTGPMKTLLVRVMTPDLRERLENLRKKPPNIPQPISNTSRANLNKLLTDYTEMKKAILHVYWEEFQKDPVGLMSRVAQPASKKIDQNKLKPEMDEKGNLTTAGFACSQCGQPLFVYKLEQVSEKGKAYTNYFGRCNVAEHEKLILLAQLKPEKDSDEAVTYSLGKFGQRALDFYSIHVTKESTHPVKPLAQIAGNRYASGPVGKALSDACMGTIASFLSKYQDIIIEHQKVVKGNQKRLESLRELAGKENLEYPSVTLPPQPHTKEGVDAYNEVIARVRMWVNLNLWQKLKLSRDDAKPLLRLKGFPSFPLVERQANEVDWWDMVCNVKKLINEKKEDGKVFWQNLAGYKRQEALRPYLSSEEDRKKGKKFARYQLGDLLLHLEKKHGEDWGKVYDEAWERIDKKVEGLSKHIKLEEERRSEDAQSKAALTDWLRAKASFVIEGLKEADKDEFCRCELKLQKWYGDLRGKPFAIEAENSILDISGFSKQYNCAFIWQKDGVKKLNLYLIINYFKGGKLRFKKIKPEAFEANRFYTVINKKSGEIVPMEVNFNFDDPNLIILPLAFGKRQGREFIWNDLLSLETGSLKLANGRVIEKTLYNRRTRQDEPALFVALTFERREVLDSSNIKPMNLIGVDRGENIPAVIALTDPEGCPLSRFKDSLGNPTHILRIGESYKEKQRTIQAKKEVEQRRAGGYSRKYASKAKNLADDMVRNTARDLLYYAVTQDAMLIFENLSRGFGRQGKRTFMAERQYTRMEDWLTAKLAYEGLPSKTYLSKTLAQYTSKTCSNCGFTITSADYDRVLEKLKKTATGWMTTINGKELKVEGQITYYNRYKRQNVVKDLSVELDRLSEESVNNDISSWTKGRSGEALSLLKKRFSHRPVQEKFVCLNCGFETHADEQAALNIARSWLFLRSQEYKKYQTNKTTGNTDKRAFVETWQSFYRKKLKEVWKPAV

SEQ ID NO: 28006 - protein, 978 aa, synthetic construct
  REGION 1..978: note = engineered CasX variant
QEGKRINKIRRRLVKDSNTKKAGKTGPMKTLLVRVMTPDLRERLENLRKKPENIPQPISNTSQANLNKLLTDYTEMKKAILHVYWEEFQKDPVGLMSRVAQPASKKIDQNKLKPEMDEKGNLTTAGFACSQCGQPLFVYKLEQVSEKGKAYTNYFGRCNVAEHEKLILLAQLKPEKDSDEAVTYSLGKFGQRALDFYSIHVTKESTHPVKPLAQIAGNRYASGPVGKALSDACMGTIASFLSKYQDIIIEHQKVVKGNQKRLESLRELAGKENLEYPSVTLPPQPHTKEGVDAYNEVIARVRMWVNLNLWQKLKLSRDDAKPLLRLKGFPSFPLVERQANEVDWWDMVCNVKKLINEKKEDGKVFWQNLAGYKRQEALRPYLSSEEDRKKGKKFARYQLGDLLLHLEKKHGEDWGKVYDEAWERIDKKVEGLSKHIKLEEERRSEDAQSKAALTDWLRAKASFVIEGLKEADKDEFCRCELKLQKWYGDLRGKPFAIEAENSILDISGFSKQYNCAFIWQKDGVKKLNLYLIINYFKGGKLRFKKIKPEAFEANRFYTVINKKSGEIVPMEVNFNFDDPNLIILPLAFGKRQGREFIWNDLLSLETGSLKLANGRVIEKTLYNRRTRQDEPALFVALTFERREVLDSSNIKPMNLIGVDRGENIPAVIALTDPEGCPLSRFKDSLGNPTHILRIGESYKEKQRTIQAKKEVEQRRAGGYSRKYASKAKNLADDMVRNTARDLLYYAVTQDAMLIFENLSRGFGRQGKRTFMAERQYTRMEDWLTAKLAYEGLPSKTYLSKTLAQYTSKTCSNCGFTITSADYDRVLEKLKKTATGWMTTINGKELKVEGQITYYNRYKRQNVVKDLSVELDRLSEESVNNDISSWTKGRSGEALSLLKKRFSHRPVQEKFVCLNCGFETHADEQAALNIARSWLFLRSQEYKKYQTNKTTGNTDKRAFVETWQSFYRKKLKEVWKPAV

SEQ ID NO: 28007 - protein, 978 aa, synthetic construct
  REGION 1..978: note = engineered CasX variant
QEGKRINKIRRRLVKDSNTKKAGKTGPMKTLLVRVMTPDLRERLENLRKKPENIPQPISNTSRANLNKLLTDYTEMKKAILHVYDEEFQKDPVGLMSRVAQPASKKIDQNKLKPEMDEKGNLTTAGFACSQCGQPLFVYKLEQVSEKGKAYTNYFGRCNVAEHEKLILLAQLKPEKDSDEAVTYSLGKFGQRALDFYSIHVTKESTHPVKPLAQIAGNRYASGPVGKALSDACMGTIASFLSKYQDIIIEHQKVVKGNQKRLESLRELAGKENLEYPSVTLPPQPHTKEGVDAYNEVIARVRMWVNLNLWQKLKLSRDDAKPLLRLKGFPSFPLVERQANEVDWWDMVCNVKKLINEKKEDGKVFWQNLAGYKRQEALRPYLSSEEDRKKGKKFARYQLGDLLLHLEKKHGEDWGKVYDEAWERIDKKVEGLSKHIKLEEERRSEDAQSKAALTDWLRAKASFVIEGLKEADKDEFCRCELKLQKWYGDLRGKPFAIEAENSILDISGFSKQYNCAFIWQKDGVKKLNLYLIINYFKGGKLRFKKIKPEAFEANRFYTVINKKSGEIVPMEVNFNFDDPNLIILPLAFGKRQGREFIWNDLLSLETGSLKLANGRVIEKTLYNRRTRQDEPALFVALTFERREVLDSSNIKPMNLIGVDRGENIPAVIALTDPEGCPLSRFKDSLGNPTHILRIGESYKEKQRTIQAKKEVEQRRAGGYSRKYASKAKNLADDMVRNTARDLLYYAVTQDAMLIFENLSRGFGRQGKRTFMAERQYTRMEDWLTAKLAYEGLPSKTYLSKTLAQYTSKTCSNCGFTITSADYDRVLEKLKKTATGWMTTINGKELKVEGQITYYNRYKRQNVVKDLSVELDRLSEESVNNDISSWTKGRSGEALSLLKKRFSHRPVQEKFVCLNCGFETHADEQAALNIARSWLFLRSQEYKKYQTNKTTGNTDKRAFVETWQSFYRKKLKEVWKPAV

SEQ ID NO: 28008 - protein, 978 aa, synthetic construct
  REGION 1..978: note = engineered CasX variant
QEGKRINKIRRRLVKDSNTKKAGKTGPMKTLLVRVMTPDLRERLENLRKKPENIPQPISNTSRANLNKLLTDYTEMKKAILHVYWEEFQKDPVGLMSRVAQPASKKIDQNKLKPEMDEKGNLTTAGFACSQCGQPLFVYKLEQVSEKGKAYTNYFGRCNVAEHEKLIKLAQLKPEKDSDEAVTYSLGKFGQRALDFYSIHVTKESTHPVKPLAQIAGNRYASGPVGKALSDACMGTIASFLSKYQDIIIEHQKVVKGNQKRLESLRELAGKENLEYPSVTLPPQPHTKEGVDAYNEVIARVRMWVNLNLWQKLKLSRDDAKPLLRLKGFPSFPLVERQANEVDWWDMVCNVKKLINEKKEDGKVFWQNLAGYKRQEALRPYLSSEEDRKKGKKFARYQLGDLLLHLEKKHGEDWGKVYDEAWERIDKKVEGLSKHIKLEEERRSEDAQSKAALTDWLRAKASFVIEGLKEADKDEFCRCELKLQKWYGDLRGKPFAIEAENSILDISGFSKQYNCAFIWQKDGVKKLNLYLIINYFKGGKLRFKKIKPEAFEANRFYTVINKKSGEIVPMEVNFNFDDPNLIILPLAFGKRQGREFIWNDLLSLETGSLKLANGRVIEKTLYNRRTRQDEPALFVALTFERREVLDSSNIKPMNLIGVDRGENIPAVIALTDPEGCPLSRFKDSLGNPTHILRIGESYKEKQRTIQAKKEVEQRRAGGYSRKYASKAKNLADDMVRNTARDLLYYAVTQDAMLIFENLSRGFGRQGKRTFMAERQYTRMEDWLTAKLAYEGLPSKTYLSKTLAQYTSKTCSNCGFTITSADYDRVLEKLKKTATGWMTTINGKELKVEGQITYYNRYKRQNVVKDLSVELDRLSEESVNNDISSWTKGRSGEALSLLKKRFSHRPVQEKFVCLNCGFETHADEQAALNIARSWLFLRSQEYKKYQTNKTTGNTDKRAFVETWQSFYRKKLKEVWKPAV

SEQ ID NO: 28009 - protein, 978 aa, synthetic construct
  REGION 1..978: note = engineered CasX variant
QEGKRINKIRRRLVKDSNTKKAGKTGPMKTLLVRVMTPDLRERLENLRKKPENIPQPISNTSRANLNKLLTDYTEMKKAILHVYWEEFQKDPVGLMSRVAQPASKKIDQNKLKPEMDEKGNLTTAGFACSQCGQPLFVYKLEQVSEKGKAYTNYFGRCNVAEHEKLILLYQLKPEKDSDEAVTYSLGKFGQRALDFYSIHVTKESTHPVKPLAQIAGNRYASGPVGKALSDACMGTIASFLSKYQDIIIEHQKVVKGNQKRLESLRELAGKENLEYPSVTLPPQPHTKEGVDAYNEVIARVRMWVNLNLWQKLKLSRDDAKPLLRLKGFPSFPLVERQANEVDWWDMVCNVKKLINEKKEDGKVFWQNLAGYKRQEALRPYLSSEEDRKKGKKFARYQLGDLLLHLEKKHGEDWGKVYDEAWERIDKKVEGLSKHIKLEEERRSEDAQSKAALTDWLRAKASFVIEGLKEADKDEFCRCELKLQKWYGDLRGKPFAIEAENSILDISGFSKQYNCAFIWQKDGVKKLNLYLIINYFKGGKLRFKKIKPEAFEANRFYTVINKKSGEIVPMEVNFNFDDPNLIILPLAFGKRQGREFIWNDLLSLETGSLKLANGRVIEKTLYNRRTRQDEPALFVALTFERREVLDSSNIKPMNLIGVDRGENIPAVIALTDPEGCPLSRFKDSLGNPTHILRIGESYKEKQRTIQAKKEVEQRRAGGYSRKYASKAKNLADDMVRNTARDLLYYAVTQDAMLIFENLSRGFGRQGKRTFMAERQYTRMEDWLTAKLAYEGLPSKTYLSKTLAQYTSKTCSNCGFTITSADYDRVLEKLKKTATGWMTTINGKELKVEGQITYYNRYKRQNVVKDLSVELDRLSEESVNNDISSWTKGRSGEALSLLKKRFSHRPVQEKFVCLNCGFETHADEQAALNIARSWLFLRSQEYKKYQTNKTTGNTDKRAFVETWQSFYRKKLKEVWKPAV

SEQ ID NO: 28010 - protein, 978 aa, synthetic construct
  REGION 1..978: note = engineered CasX variant
QEGKRINKIRRRLVKDSNTKKAGKTGPMKTLLVRVMTPDLRERLENLRKKPENIPQPISNTSRANLNKLLTDYTEMKKAILHVYWEEFQKDPVGLMSRVAQPASKKIDQNKLKPEMDEKGNLTTAGFACSQCGQPLFVYKLEQVSEKGKAYTNYFGRCNVAEHEKLILLSQLKPEKDSDEAVTYSLGKFGQRALDFYSIHVTKESTHPVKPLAQIAGNRYASGPVGKALSDACMGTIASFLSKYQDIIIEHQKVVKGNQKRLESLRELAGKENLEYPSVTLPPQPHTKEGVDAYNEVIARVRMWVNLNLWQKLKLSRDDAKPLLRLKGFPSFPLVERQANEVDWWDMVCNVKKLINEKKEDGKVFWQNLAGYKRQEALRPYLSSEEDRKKGKKFARYQLGDLLLHLEKKHGEDWGKVYDEAWERIDKKVEGLSKHIKLEEERRSEDAQSKAALTDWLRAKASFVIEGLKEADKDEFCRCELKLQKWYGDLRGKPFAIEAENSILDISGFSKQYNCAFIWQKDGVKKLNLYLIINYFKGGKLRFKKIKPEAFEANRFYTVINKKSGEIVPMEVNFNFDDPNLIILPLAFGKRQGREFIWNDLLSLETGSLKLANGRVIEKTLYNRRTRQDEPALFVALTFERREVLDSSNIKPMNLIGVDRGENIPAVIALTDPEGCPLSRFKDSLGNPTHILRIGESYKEKQRTIQAKKEVEQRRAGGYSRKYASKAKNLADDMVRNTARDLLYYAVTQDAMLIFENLSRGFGRQGKRTFMAERQYTRMEDWLTAKLAYEGLPSKTYLSKTLAQYTSKTCSNCGFTITSADYDRVLEKLKKTATGWMTTINGKELKVEGQITYYNRYKRQNVVKDLSVELDRLSEESVNNDISSWTKGRSGEALSLLKKRFSHRPVQEKFVCLNCGFETHADEQAALNIARSWLFLRSQEYKKYQTNKTTGNTDKRAFVETWQSFYRKKLKEVWKPAV

SEQ ID NO: 28011 - protein, 977 aa, synthetic construct
  REGION 1..977: note = engineered CasX variant
QEGKRINKIRRRLVKDSNTKKAGKTGPMKTLLVRVMTPDLRERLENLRKKPENIPQPISNTSRANLNKLLTDYTEMKKAILHVYWEEFQKDPVGLMSRVAQPASKKIDQNKLKPEMDEKGNLTTAGFACSQCGQPLFVYKLEQVSEKGKAYTNYFGRCNVAEHEKLILLAQLKPEKDSDEAVTYSLGKFGQRALDFYSIHVTKESTHPVKPLAQIAGNRYASPVGKALSDACMGTIASFLSKYQDIIIEHQKVVKGNQKRLESLRELAGKENLEYPSVTLPPQPHTKEGVDAYNEVIARVRMWVNLNLWQKLKLSRDDAKPLLRLKGFPSFPLVERQANEVDWWDMVCNVKKLINEKKEDGKVFWQNLAGYKRQEALRPYLSSEEDRKKGKKFARYQLGDLLLHLEKKHGEDWGKVYDEAWERIDKKVEGLSKHIKLEEERRSEDAQSKAALTDWLRAKASFVIEGLKEADKDEFCRCELKLQKWYGDLRGKPFAIEAENSILDISGFSKQYNCAFIWQKDGVKKLNLYLIINYFKGGKLRFKKIKPEAFEANRFYTVINKKSGEIVPMEVNFNFDDPNLIILPLAFGKRQGREFIWNDLLSLETGSLKLANGRVIEKTLYNRRTRQDEPALFVALTFERREVLDSSNIKPMNLIGVDRGENIPAVIALTDPEGCPLSRFKDSLGNPTHILRIGESYKEKQRTIQAKKEVEQRRAGGYSRKYASKAKNLADDMVRNTARDLLYYAVTQDAMLIFENLSRGFGRQGKRTFMAERQYTRMEDWLTAKLAYEGLPSKTYLSKTLAQYTSKTCSNCGFTITSADYDRVLEKLKKTATGWMTTINGKELKVEGQITYYNRYKRQNVVKDLSVELDRLSEESVNNDISSWTKGRSGEALSLLKKRFSHRPVQEKFVCLNCGFETHADEQAALNIARSWLFLRSQEYKKYQTNKTTGNTDKRAFVETWQSFYRKKLKEVWKPAV

SEQ ID NO: 28012 - protein, 978 aa, synthetic construct
  REGION 1..978: note = engineered CasX variant
QEGKRINKIRRRLVKDSNTKKAGKTGPMKTLLVRVMTPDLRERLENLRKKPENIPQPISNTSRANLNKLLTDYTEMKKAILHVYWEEFQKDPVGLMSRVAQPASKKIDQNKLKPEMDEKGNLTTAGFACSQCGQPLFVYKLEQVSEKGKAYTNYFGRCNVAEHEKLILLAQLKPEKDSDEAVTYSLGKFGQRALDFYSIHVTKESTHPVKPLAQIAGNRYASGPVGKALSDACMGTIASFLSKYQDIIIEHQKVVKGNQKRLESLRELAGKENLEYPSVTLPPQPHTSEGVDAYNEVIARVRMWVNLNLWQKLKLSRDDAKPLLRLKGFPSFPLVERQANEVDWWDMVCNVKKLINEKKEDGKVFWQNLAGYKRQEALRPYLSSEEDRKKGKKFARYQLGDLLLHLEKKHGEDWGKVYDEAWERIDKKVEGLSKHIKLEEERRSEDAQSKAALTDWLRAKASFVIEGLKEADKDEFCRCELKLQKWYGDLRGKPFAIEAENSILDISGFSKQYNCAFIWQKDGVKKLNLYLIINYFKGGKLRFKKIKPEAFEANRFYTVINKKSGEIVPMEVNFNFDDPNLIILPLAFGKRQGREFIWNDLLSLETGSLKLANGRVIEKTLYNRRTRQDEPALFVALTFERREVLDSSNIKPMNLIGVDRGENIPAVIALTDPEGCPLSRFKDSLGNPTHILRIGESYKEKQRTIQAKKEVEQRRAGGYSRKYASKAKNLADDMVRNTARDLLYYAVTQDAMLIFENLSRGFGRQGKRTFMAERQYTRMEDWLTAKLAYEGLPSKTYLSKTLAQYTSKTCSNCGFTITSADYDRVLEKLKKTATGWMTTINGKELKVEGQITYYNRYKRQNVVKDLSVELDRLSEESVNNDISSWTKGRSGEALSLLKKRFSHRPVQEKFVCLNCGFETHADEQAALNIARSWLFLRSQEYKKYQTNKTTGNTDKRAFVETWQSFYRKKLKEVWKPAV

SEQ ID NO: 28013 - protein, 978 aa, synthetic construct
  REGION 1..978: note = engineered CasX variant
QEGKRINKIRRRLVKDSNTKKAGKTGPMKTLLVRVMTPDLRERLENLRKKPENIPQPISNTSRANLNKLLTDYTEMKKAILHVYWEEFQKDPVGLMSRVAQPASKKIDQNKLKPEMDEKGNLTTAGFACSQCGQPLFVYKLEQVSEKGKAYTNYFGRCNVAEHEKLILLAQLKPEKDSDEAVTYSLGKFGQRALDFYSIHVTKESTHPVKPLAQIAGNRYASGPVGKALSDACMGTIASFLSKYQDIIIEHQKVVKGNQKRLESLRELAGKENLEYPSVTLPPQPHTKEGLDAYNEVIARVRMWVNLNLWQKLKLSRDDAKPLLRLKGFPSFPLVERQANEVDWWDMVCNVKKLINEKKEDGKVFWQNLAGYKRQEALRPYLSSEEDRKKGKKFARYQLGDLLLHLEKKHGEDWGKVYDEAWERIDKKVEGLSKHIKLEEERRSEDAQSKAALTDWLRAKASFVIEGLKEADKDEFCRCELKLQKWYGDLRGKPFAIEAENSILDISGFSKQYNCAFIWQKDGVKKLNLYLIINYFKGGKLRFKKIKPEAFEANRFYTVINKKSGEIVPMEVNFNFDDPNLIILPLAFGKRQGREFIWNDLLSLETGSLKLANGRVIEKTLYNRRTRQDEPALFVALTFERREVLDSSNIKPMNLIGVDRGENIPAVIALTDPEGCPLSRFKDSLGNPTHILRIGESYKEKQRTIQAKKEVEQRRAGGYSRKYASKAKNLADDMVRNTARDLLYYAVTQDAMLIFENLSRGFGRQGKRTFMAERQYTRMEDWLTAKLAYEGLPSKTYLSKTLAQYTSKTCSNCGFTITSADYDRVLEKLKKTATGWMTTINGKELKVEGQITYYNRYKRQNVVKDLSVELDRLSEESVNNDISSWTKGRSGEALSLLKKRFSHRPVQEKFVCLNCGFETHADEQAALNIARSWLFLRSQEYKKYQTNKTTGNTDKRAFVETWQSFYRKKLKEVWKPAV

SEQ ID NO: 28014 - protein, 978 aa, synthetic construct
  REGION 1..978: note = engineered CasX variant
QEGKRINKIRRRLVKDSNTKKAGKTGPMKTLLVRVMTPDLRERLENLRKKPENIPQPISNTSRANLNKLLTDYTEMKKAILHVYWEEFQKDPVGLMSRVAQPASKKIDQNKLKPEMDEKGNLTTAGFACSQCGQPLFVYKLEQVSEKGKAYTNYFGRCNVAEHEKLILLAQLKPEKDSDEAVTYSLGKFGQRALDFYSIHVTKESTHPVKPLAQIAGNRYASGPVGKALSDACMGTIASFLSKYQDIIIEHQKVVKGNQKRLESLRELAGKENLEYPSVTLPPQPHTKEGVDAYNEVIARVRTWVNLNLWQKLKLSRDDAKPLLRLKGFPSFPLVERQANEVDWWDMVCNVKKLINEKKEDGKVFWQNLAGYKRQEALRPYLSSEEDRKKGKKFARYQLGDLLLHLEKKHGEDWGKVYDEAWERIDKKVEGLSKHIKLEEERRSEDAQSKAALTDWLRAKASFVIEGLKEADKDEFCRCELKLQKWYGDLRGKPFAIEAENSILDISGFSKQYNCAFIWQKDGVKKLNLYLIINYFKGGKLRFKKIKPEAFEANRFYTVINKKSGEIVPMEVNFNFDDPNLIILPLAFGKRQGREFIWNDLLSLETGSLKLANGRVIEKTLYNRRTRQDEPALFVALTFERREVLDSSNIKPMNLIGVDRGENIPAVIALTDPEGCPLSRFKDSLGNPTHILRIGESYKEKQRTIQAKKEVEQRRAGGYSRKYASKAKNLADDMVRNTARDLLYYAVTQDAMLIFENLSRGFGRQGKRTFMAERQYTRMEDWLTAKLAYEGLPSKTYLSKTLAQYTSKTCSNCGFTITSADYDRVLEKLKKTATGWMTTINGKELKVEGQITYYNRYKRQNVVKDLSVELDRLSEESVNNDISSWTKGRSGEALSLLKKRFSHRPVQEKFVCLNCGFETHADEQAALNIARSWLFLRSQEYKKYQTNKTTGNTDKRAFVETWQSFYRKKLKEVWKPAV

SEQ ID NO: 28015 - protein, 978 aa, synthetic construct
  REGION 1..978: note = engineered CasX variant
QEGKRINKIRRRLVKDSNTKKAGKTGPMKTLLVRVMTPDLRERLENLRKKPENIPQPISNTSRANLNKLLTDYTEMKKAILHVYWEEFQKDPVGLMSRVAQPASKKIDQNKLKPEMDEKGNLTTAGFACSQCGQPLFVYKLEQVSEKGKAYTNYFGRCNVAEHEKLILLAQLKPEKDSDEAVTYSLGKFGQRALDFYSIHVTKESTHPVKPLAQIAGNRYASGPVGKALSDACMGTIASFLSKYQDIIIEHQKVVKGNQKRLESLRELAGKENLEYPSVTLPPQPHTKEGVDAYNEVIARVRWWVNLNLWQKLKLSRDDAKPLLRLKGFPSFPLVERQANEVDWWDMVCNVKKLINEKKEDGKVFWQNLAGYKRQEALRPYLSSEEDRKKGKKFARYQLGDLLLHLEKKHGEDWGKVYDEAWERIDKKVEGLSKHIKLEEERRSEDAQSKAALTDWLRAKASFVIEGLKEADKDEFCRCELKLQKWYGDLRGKPFAIEAENSILDISGFSKQYNCAFIWQKDGVKKLNLYLIINYFKGGKLRFKKIKPEAFEANRFYTVINKKSGEIVPMEVNFNFDDPNLIILPLAFGKRQGREFIWNDLLSLETGSLKLANGRVIEKTLYNRRTRQDEPALFVALTFERREVLDSSNIKPMNLIGVDRGENIPAVIALTDPEGCPLSRFKDSLGNPTHILRIGESYKEKQRTIQAKKEVEQRRAGGYSRKYASKAKNLADDMVRNTARDLLYYAVTQDAMLIFENLSRGFGRQGKRTFMAERQYTRMEDWLTAKLAYEGLPSKTYLSKTLAQYTSKTCSNCGFTITSADYDRVLEKLKKTATGWMTTINGKELKVEGQITYYNRYKRQNVVKDLSVELDRLSEESVNNDISSWTKGRSGEALSLLKKRFSHRPVQEKFVCLNCGFETHADEQAALNIARSWLFLRSQEYKKYQTNKTTGNTDKRAFVETWQSFYRKKLKEVWKPAV

SEQ ID NO: 28016 - protein, 979 aa, synthetic construct
  REGION 1..979: note = engineered CasX variant
QEGKRINKIRRRLVKDSNTKKAGKTGPMKTLLVRVMTPDLRERLENLRKKPENIPQPISNTSRANLNKLLTDYTEMKKAILHVYWEEFQKDPVGLMSRVAQPASKKIDQNKLKPEMDEKGNLTTAGFACSQCGQPLFVYKLEQVSEKGKAYTNYFGRCNVAEHEKLILLAQLKPEKDSDEAVTYSLGKFGQRALDFYSIHVTKESTHPVKPLAQIAGNRYASGPVGKALSDACMGTIASFLSKYQDIIIEHQKVVKGNQKRLESLRELAGKENLEYPSVTLPPQPHTKEGVDAYNEVIARVRMWVNLNLWQKLKLSRDDAKPLLRLKGFPSFPLVERQQANEVDWWDMVCNVKKLINEKKEDGKVFWQNLAGYKRQEALRPYLSSEEDRKKGKKFARYQLGDLLLHLEKKHGEDWGKVYDEAWERIDKKVEGLSKHIKLEEERRSEDAQSKAALTDWLRAKASFVIEGLKEADKDEFCRCELKLQKWYGDLRGKPFAIEAENSILDISGFSKQYNCAFIWQKDGVKKLNLYLIINYFKGGKLRFKKIKPEAFEANRFYTVINKKSGEIVPMEVNFNFDDPNLIILPLAFGKRQGREFIWNDLLSLETGSLKLANGRVIEKTLYNRRTRQDEPALFVALTFERREVLDSSNIKPMNLIGVDRGENIPAVIALTDPEGCPLSRFKDSLGNPTHILRIGESYKEKQRTIQAKKEVEQRRAGGYSRKYASKAKNLADDMVRNTARDLLYYAVTQDAMLIFENLSRGFGRQGKRTFMAERQYTRMEDWLTAKLAYEGLPSKTYLSKTLAQYTSKTCSNCGFTITSADYDRVLEKLKKTATGWMTTINGKELKVEGQITYYNRYKRQNVVKDLSVELDRLSEESVNNDISSWTKGRSGEALSLLKKRFSHRPVQEKFVCLNCGFETHADEQAALNIARSWLFLRSQEYKKYQTNKTTGNTDKRAFVETWQSFYRKKLKEVWKPAV

SEQ ID NO: 28017 - protein, 979 aa, synthetic construct
  REGION 1..979: note = engineered CasX variant
QEGKRINKIRRRLVKDSNTKKAGKTGPMKTLLVRVMTPDLRERLENLRKKPENIPQPISNTSRANLNKLLTDYTEMKKAILHVYWEEFQKDPVGLMSRVAQPASKKIDQNKLKPEMDEKGNLTTAGFACSQCGQPLFVYKLEQVSEKGKAYTNYFGRCNVAEHEKLILLAQLKPEKDSDEAVTYSLGKFGQRALDFYSIHVTKESTHPVKPLAQIAGNRYASGPVGKALSDACMGTIASFLSKYQDIIIEHQKVVKGNQKRLESLRELAGKENLEYPSVTLPPQPHTKEGVDAYNEVIARVRMWVNLNLWQKLKLSRDDAKPLLRLKGFPSFPLVERQANAEVDWWDMVCNVKKLINEKKEDGKVFWQNLAGYKRQEALRPYLSSEEDRKKGKKFARYQLGDLLLHLEKKHGEDWGKVYDEAWERIDKKVEGLSKHIKLEEERRSEDAQSKAALTDWLRAKASFVIEGLKEADKDEFCRCELKLQKWYGDLRGKPFAIEAENSILDISGFSKQYNCAFIWQKDGVKKLNLYLIINYFKGGKLRFKKIKPEAFEANRFYTVINKKSGEIVPMEVNFNFDDPNLIILPLAFGKRQGREFIWNDLLSLETGSLKLANGRVIEKTLYNRRTRQDEPALFVALTFERREVLDSSNIKPMNLIGVDRGENIPAVIALTDPEGCPLSRFKDSLGNPTHILRIGESYKEKQRTIQAKKEVEQRRAGGYSRKYASKAKNLADDMVRNTARDLLYYAVTQDAMLIFENLSRGFGRQGKRTFMAERQYTRMEDWLTAKLAYEGLPSKTYLSKTLAQYTSKTCSNCGFTITSADYDRVLEKLKKTATGWMTTINGKELKVEGQITYYNRYKRQNVVKDLSVELDRLSEESVNNDISSWTKGRSGEALSLLKKRFSHRPVQEKFVCLNCGFETHADEQAALNIARSWLFLRSQEYKKYQTNKTTGNTDKRAFVETWQSFYRKKLKEVWKPAV

SEQ ID NO: 28018 - protein, 978 aa, synthetic construct
  REGION 1..978: note = engineered CasX variant
QEGKRINKIRRRLVKDSNTKKAGKTGPMKTLLVRVMTPDLRERLENLRKKPENIPQPISNTSRANLNKLLTDYTEMKKAILHVYWEEFQKDPVGLMSRVAQPASKKIDQNKLKPEMDEKGNLTTAGFACSQCGQPLFVYKLEQVSEKGKAYTNYFGRCNVAEHEKLILLAQLKPEKDSDEAVTYSLGKFGQRALDFYSIHVTKESTHPVKPLAQIAGNRYASGPVGKALSDACMGTIASFLSKYQDIIIEHQKVVKGNQKRLESLRELAGKENLEYPSVTLPPQPHTKEGVDAYNEVIARVRMWVNLNLWQKLKLSRDDAKPLLRLKGFPSFPLVERQANEVDWWDMVCNVKKLINEKKEDGKVFWQNLAGYKRQEALRPYLSSEEDRKKGKKFARTQLGDLLLHLEKKHGEDWGKVYDEAWERIDKKVEGLSKHIKLEEERRSEDAQSKAALTDWLRAKASFVIEGLKEADKDEFCRCELKLQKWYGDLRGKPFAIEAENSILDISGFSKQYNCAFIWQKDGVKKLNLYLIINYFKGGKLRFKKIKPEAFEANRFYTVINKKSGEIVPMEVNFNFDDPNLIILPLAFGKRQGREFIWNDLLSLETGSLKLANGRVIEKTLYNRRTRQDEPALFVALTFERREVLDSSNIKPMNLIGVDRGENIPAVIALTDPEGCPLSRFKDSLGNPTHILRIGESYKEKQRTIQAKKEVEQRRAGGYSRKYASKAKNLADDMVRNTARDLLYYAVTQDAMLIFENLSRGFGRQGKRTFMAERQYTRMEDWLTAKLAYEGLPSKTYLSKTLAQYTSKTCSNCGFTITSADYDRVLEKLKKTATGWMTTINGKELKVEGQITYYNRYKRQNVVKDLSVELDRLSEESVNNDISSWTKGRSGEALSLLKKRFSHRPVQEKFVCLNCGFETHADEQAALNIARSWLFLRSQEYKKYQTNKTTGNTDKRAFVETWQSFYRKKLKEVWKPAV

SEQ ID NO: 28019 - protein, 979 aa, synthetic construct
  REGION 1..979: note = engineered CasX variant
QEGKRINKIRRRLVKDSNTKKAGKTGPMKTLLVRVMTPDLRERLENLRKKPENIPQPISNTSRANLNKLLTDYTEMKKAILHVYWEEFQKDPVGLMSRVAQPASKKIDQNKLKPEMDEKGNLTTAGFACSQCGQPLFVYKLEQVSEKGKAYTNYFGRCNVAEHEKLILLAQLKPEKDSDEAVTYSLGKFGQRALDFYSIHVTKESTHPVKPLAQIAGNRYASGPVGKALSDACMGTIASFLSKYQDIIIEHQKVVKGNQKRLESLRELAGKENLEYPSVTLPPQPHTKEGVDAYNEVIARVRMWVNLNLWQKLKLSRDDAKPLLRLKGFPSFPLVERQANEVDWWDMVCNVKKLINEKKEDGKVFWQNLAGYKRQEALRPYLSSEEDRKKGKKFARYQLGDLLLHLEKKHEGEDWGKVYDEAWERIDKKVEGLSKHIKLEEERRSEDAQSKAALTDWLRAKASFVIEGLKEADKDEFCRCELKLQKWYGDLRGKPFAIEAENSILDISGFSKQYNCAFIWQKDGVKKLNLYLIINYFKGGKLRFKKIKPEAFEANRFYTVINKKSGEIVPMEVNFNFDDPNLIILPLAFGKRQGREFIWNDLLSLETGSLKLANGRVIEKTLYNRRTRQDEPALFVALTFERREVLDSSNIKPMNLIGVDRGENIPAVIALTDPEGCPLSRFKDSLGNPTHILRIGESYKEKQRTIQAKKEVEQRRAGGYSRKYASKAKNLADDMVRNTARDLLYYAVTQDAMLIFENLSRGFGRQGKRTFMAERQYTRMEDWLTAKLAYEGLPSKTYLSKTLAQYTSKTCSNCGFTITSADYDRVLEKLKKTATGWMTTINGKELKVEGQITYYNRYKRQNVVKDLSVELDRLSEESVNNDISSWTKGRSGEALSLLKKRFSHRPVQEKFVCLNCGFETHADEQAALNIARSWLFLRSQEYKKYQTNKTTGNTDKRAFVETWQSFYRKKLKEVWKPAV

SEQ ID NO: 28020 - protein, 978 aa, synthetic construct
  REGION 1..978: note = engineered CasX variant
QEGKRINKIRRRLVKDSNTKKAGKTGPMKTLLVRVMTPDLRERLENLRKKPENIPQPISNTSRANLNKLLTDYTEMKKAILHVYWEEFQKDPVGLMSRVAQPASKKIDQNKLKPEMDEKGNLTTAGFACSQCGQPLFVYKLEQVSEKGKAYTNYFGRCNVAEHEKLILLAQLKPEKDSDEAVTYSLGKFGQRALDFYSIHVTKESTHPVKPLAQIAGNRYASGPVGKALSDACMGTIASFLSKYQDIIIEHQKVVKGNQKRLESLRELAGKENLEYPSVTLPPQPHTKEGVDAYNEVIARVRMWVNLNLWQKLKLSRDDAKPLLRLKGFPSFPLVERQANEVDWWDMVCNVKKLINEKKEDGKVFWQNLAGYKRQEALRPYLSSEEDRKKGKKFARYQLGDLLLHLEKKHGEDWGKVYDEAWERIDKKVEGLSKHIKLEEERRSEDAQSKAALTDWLRAKASFVIEGLKEADKDEFCRCDLKLQKWYGDLRGKPFAIEAENSILDISGFSKQYNCAFIWQKDGVKKLNLYLIINYFKGGKLRFKKIKPEAFEANRFYTVINKKSGEIVPMEVNFNFDDPNLIILPLAFGKRQGREFIWNDLLSLETGSLKLANGRVIEKTLYNRRTRQDEPALFVALTFERREVLDSSNIKPMNLIGVDRGENIPAVIALTDPEGCPLSRFKDSLGNPTHILRIGESYKEKQRTIQAKKEVEQRRAGGYSRKYASKAKNLADDMVRNTARDLLYYAVTQDAMLIFENLSRGFGRQGKRTFMAERQYTRMEDWLTAKLAYEGLPSKTYLSKTLAQYTSKTCSNCGFTITSADYDRVLEKLKKTATGWMTTINGKELKVEGQITYYNRYKRQNVVKDLSVELDRLSEESVNNDISSWTKGRSGEALSLLKKRFSHRPVQEKFVCLNCGFETHADEQAALNIARSWLFLRSQEYKKYQTNKTTGNTDKRAFVETWQSFYRKKLKEVWKPAV

SEQ ID NO: 28021 - protein, 978 aa, synthetic construct
  REGION 1..978: note = engineered CasX variant
QEGKRINKIRRRLVKDSNTKKAGKTGPMKTLLVRVMTPDLRERLENLRKKPENIPQPISNTSRANLNKLLTDYTEMKKAILHVYWEEFQKDPVGLMSRVAQPASKKIDQNKLKPEMDEKGNLTTAGFACSQCGQPLFVYKLEQVSEKGKAYTNYFGRCNVAEHEKLILLAQLKPEKDSDEAVTYSLGKFGQRALDFYSIHVTKESTHPVKPLAQIAGNRYASGPVGKALSDACMGTIASFLSKYQDIIIEHQKVVKGNQKRLESLRELAGKENLEYPSVTLPPQPHTKEGVDAYNEVIARVRMWVNLNLWQKLKLSRDDAKPLLRLKGFPSFPLVERQANEVDWWDMVCNVKKLINEKKEDGKVFWQNLAGYKRQEALRPYLSSEEDRKKGKKFARYQLGDLLLHLEKKHGEDWGKVYDEAWERIDKKVEGLSKHIKLEEERRSEDAQSKAALTDWLRAKASFVIEGLKEADKDEFCRCELKLQKWYGDLRGKPFAIEAENSILDISGFSKQYNCAFIWQKDGVKKLNLYLIINYFKGGKLRFKKIKPEAFEANRFYTVINKKSGEIVPMEVNFNFDDPNLIILPLAFGKRFGREFIWNDLLSLETGSLKLANGRVIEKTLYNRRTRQDEPALFVALTFERREVLDSSNIKPMNLIGVDRGENIPAVIALTDPEGCPLSRFKDSLGNPTHILRIGESYKEKQRTIQAKKEVEQRRAGGYSRKYASKAKNLADDMVRNTARDLLYYAVTQDAMLIFENLSRGFGRQGKRTFMAERQYTRMEDWLTAKLAYEGLPSKTYLSKTLAQYTSKTCSNCGFTITSADYDRVLEKLKKTATGWMTTINGKELKVEGQITYYNRYKRQNVVKDLSVELDRLSEESVNNDISSWTKGRSGEALSLLKKRFSHRPVQEKFVCLNCGFETHADEQAALNIARSWLFLRSQEYKKYQTNKTTGNTDKRAFVETWQSFYRKKLKEVWKPAV

SEQ ID NO: 28022 - protein, 978 aa, synthetic construct
  REGION 1..978: note = engineered CasX variant
QEGKRINKIRRRLVKDSNTKKAGKTGPMKTLLVRVMTPDLRERLENLRKKPENIPQPISNTSRANLNKLLTDYTEMKKAILHVYWEEFQKDPVGLMSRVAQPASKKIDQNKLKPEMDEKGNLTTAGFACSQCGQPLFVYKLEQVSEKGKAYTNYFGRCNVAEHEKLILLAQLKPEKDSDEAVTYSLGKFGQRALDFYSIHVTKESTHPVKPLAQIAGNRYASGPVGKALSDACMGTIASFLSKYQDIIIEHQKVVKGNQKRLESLRELAGKENLEYPSVTLPPQPHTKEGVDAYNEVIARVRMWVNLNLWQKLKLSRDDAKPLLRLKGFPSFPLVERQANEVDWWDMVCNVKKLINEKKEDGKVFWQNLAGYKRQEALRPYLSSEEDRKKGKKFARYQLGDLLLHLEKKHGEDWGKVYDEAWERIDKKVEGLSKHIKLEEERRSEDAQSKAALTDWLRAKASFVIEGLKEADKDEFCRCELKLQKWYGDLRGKPFAIEAENSILDISGFSKQYNCAFIWQKDGVKKLNLYLIINYFKGGKLRFKKIKPEAFEANRFYTVINKKSGEIVPMEVNFNFDDPNLIILPLAFGKRVGREFIWNDLLSLETGSLKLANGRVIEKTLYNRRTRQDEPALFVALTFERREVLDSSNIKPMNLIGVDRGENIPAVIALTDPEGCPLSRFKDSLGNPTHILRIGESYKEKQRTIQAKKEVEQRRAGGYSRKYASKAKNLADDMVRNTARDLLYYAVTQDAMLIFENLSRGFGRQGKRTFMAERQYTRMEDWLTAKLAYEGLPSKTYLSKTLAQYTSKTCSNCGFTITSADYDRVLEKLKKTATGWMTTINGKELKVEGQITYYNRYKRQNVVKDLSVELDRLSEESVNNDISSWTKGRSGEALSLLKKRFSHRPVQEKFVCLNCGFETHADEQAALNIARSWLFLRSQEYKKYQTNKTTGNTDKRAFVETWQSFYRKKLKEVWKPAV

SEQ ID NO: 28023 - protein, 979 aa, synthetic construct
  REGION 1..979: note = engineered CasX variant
QEGKRINKIRRRLVKDSNTKKAGKTGPMKTLLVRVMTPDLRERLENLRKKPENIPQPISNTSRANLNKLLTDYTEMKKAILHVYWEEFQKDPVGLMSRVAQPASKKIDQNKLKPEMDEKGNLTTAGFACSQCGQPLFVYKLEQVSEKGKAYTNYFGRCNVAEHEKLILLAQLKPEKDSDEAVTYSLGKFGQRALDFYSIHVTKESTHPVKPLAQIAGNRYASGPVGKALSDACMGTIASFLSKYQDIIIEHQKVVKGNQKRLESLRELAGKENLEYPSVTLPPQPHTKEGVDAYNEVIARVRMWVNLNLWQKLKLSRDDAKPLLRLKGFPSFPLVERQANEVDWWDMVCNVKKLINEKKEDGKVFWQNLAGYKRQEALRPYLSSEEDRKKGKKFARYQLGDLLLHLEKKHGEDWGKVYDEAWERIDKKVEGLSKHIKLEEERRSEDAQSKAALTDWLRAKASFVIEGLKEADKDEFCRCELKLQKWYGDLRGKPFAIEAENSILDISGFSKQYNCAFIWQKDGVKKLNLYLIINYFKGGKLRFKKIKPEAFEANRFYTVINKKSGEIVPMEVNFNFDDPNLIILPLAFGKRQGREFIWNDLLSLETGSLKLANGRVIEKTLYNRRTRQDEPALFVALTFERREVLDSSNIKTPMNLIGVDRGENIPAVIALTDPEGCPLSRFKDSLGNPTHILRIGESYKEKQRTIQAKKEVEQRRAGGYSRKYASKAKNLADDMVRNTARDLLYYAVTQDAMLIFENLSRGFGRQGKRTFMAERQYTRMEDWLTAKLAYEGLPSKTYLSKTLAQYTSKTCSNCGFTITSADYDRVLEKLKKTATGWMTTINGKELKVEGQITYYNRYKRQNVVKDLSVELDRLSEESVNNDISSWTKGRSGEALSLLKKRFSHRPVQEKFVCLNCGFETHADEQAALNIARSWLFLRSQEYKKYQTNKTTGNTDKRAFVETWQSFYRKKLKEVWKPAV

SEQ ID NO: 28024 - protein, 979 aa, synthetic construct
  REGION 1..979: note = engineered CasX variant
QEGKRINKIRRRLVKDSNTKKAGKTGPMKTLLVRVMTPDLRERLENLRKKPENIPQPISNTSRANLNKLLTDYTEMKKAILHVYWEEFQKDPVGLMSRVAQPASKKIDQNKLKPEMDEKGNLTTAGFACSQCGQPLFVYKLEQVSEKGKAYTNYFGRCNVAEHEKLILLAQLKPEKDSDEAVTYSLGKFGQRALDFYSIHVTKESTHPVKPLAQIAGNRYASGPVGKALSDACMGTIASFLSKYQDIIIEHQKVVKGNQKRLESLRELAGKENLEYPSVTLPPQPHTKEGVDAYNEVIARVRMWVNLNLWQKLKLSRDDAKPLLRLKGFPSFPLVERQANEVDWWDMVCNVKKLINEKKEDGKVFWQNLAGYKRQEALRPYLSSEEDRKKGKKFARYQLGDLLLHLEKKHGEDWGKVYDEAWERIDKKVEGLSKHIKLEEERRSEDAQSKAALTDWLRAKASFVIEGLKEADKDEFCRCELKLQKWYGDLRGKPFAIEAENSILDISGFSKQYNCAFIWQKDGVKKLNLYLIINYFKGGKLRFKKIKPEAFEANRFYTVINKKSGEIVPMEVNFNFDDPNLIILPLAFGKRQGREFIWNDLLSLETGSLKLANGRVIEKTLYNRRTRQDEPALFVALTFERREVLDSSNIKPMSNLIGVDRGENIPAVIALTDPEGCPLSRFKDSLGNPTHILRIGESYKEKQRTIQAKKEVEQRRAGGYSRKYASKAKNLADDMVRNTARDLLYYAVTQDAMLIFENLSRGFGRQGKRTFMAERQYTRMEDWLTAKLAYEGLPSKTYLSKTLAQYTSKTCSNCGFTITSADYDRVLEKLKKTATGWMTTINGKELKVEGQITYYNRYKRQNVVKDLSVELDRLSEESVNNDISSWTKGRSGEALSLLKKRFSHRPVQEKFVCLNCGFETHADEQAALNIARSWLFLRSQEYKKYQTNKTTGNTDKRAFVETWQSFYRKKLKEVWKPAV

SEQ ID NO: 28025 - protein, 978 aa, synthetic construct
  REGION 1..978: note = engineered CasX variant
QEGKRINKIRRRLVKDSNTKKAGKTGPMKTLLVRVMTPDLRERLENLRKKPENIPQPISNTSRANLNKLLTDYTEMKKAILHVYWEEFQKDPVGLMSRVAQPASKKIDQNKLKPEMDEKGNLTTAGFACSQCGQPLFVYKLEQVSEKGKAYTNYFGRCNVAEHEKLILLAQLKPEKDSDEAVTYSLGKFGQRALDFYSIHVTKESTHPVKPLAQIAGNRYASGPVGKALSDACMGTIASFLSKYQDIIIEHQKVVKGNQKRLESLRELAGKENLEYPSVTLPPQPHTKEGVDAYNEVIARVRMWVNLNLWQKLKLSRDDAKPLLRLKGFPSFPLVERQANEVDWWDMVCNVKKLINEKKEDGKVFWQNLAGYKRQEALRPYLSSEEDRKKGKKFARYQLGDLLLHLEKKHGEDWGKVYDEAWERIDKKVEGLSKHIKLEEERRSEDAQSKAALTDWLRAKASFVIEGLKEADKDEFCRCELKLQKWYGDLRGKPFAIEAENSILDISGFSKQYNCAFIWQKDGVKKLNLYLIINYFKGGKLRFKKIKPEAFEANRFYTVINKKSGEIVPMEVNFNFDDPNLIILPLAFGKRQGREFIWNDLLSLETGSLKLANGRVIEKTLYNRRTRQDEPALFVALTFERREVLDSSNIKPMNLIGVDRGENIPAVIALTDPEGCPLSRFKDSLGNPTHILRIRESYKEKQRTIQAKKEVEQRRAGGYSRKYASKAKNLADDMVRNTARDLLYYAVTQDAMLIFENLSRGFGRQGKRTFMAERQYTRMEDWLTAKLAYEGLPSKTYLSKTLAQYTSKTCSNCGFTITSADYDRVLEKLKKTATGWMTTINGKELKVEGQITYYNRYKRQNVVKDLSVELDRLSEESVNNDISSWTKGRSGEALSLLKKRFSHRPVQEKFVCLNCGFETHADEQAALNIARSWLFLRSQEYKKYQTNKTTGNTDKRAFVETWQSFYRKKLKEVWKPAV

SEQ ID NO: 28026 - protein, 978 aa, synthetic construct
  REGION 1..978: note = engineered CasX variant
QEGKRINKIRRRLVKDSNTKKAGKTGPMKTLLVRVMTPDLRERLENLRKKPENIPQPISNTSRANLNKLLTDYTEMKKAILHVYWEEFQKDPVGLMSRVAQPASKKIDQNKLKPEMDEKGNLTTAGFACSQCGQPLFVYKLEQVSEKGKAYTNYFGRCNVAEHEKLILLAQLKPEKDSDEAVTYSLGKFGQRALDFYSIHVTKESTHPVKPLAQIAGNRYASGPVGKALSDACMGTIASFLSKYQDIIIEHQKVVKGNQKRLESLRELAGKENLEYPSVTLPPQPHTKEGVDAYNEVIARVRMWVNLNLWQKLKLSRDDAKPLLRLKGFPSFPLVERQANEVDWWDMVCNVKKLINEKKEDGKVFWQNLAGYKRQEALRPYLSSEEDRKKGKKFARYQLGDLLLHLEKKHGEDWGKVYDEAWERIDKKVEGLSKHIKLEEERRSEDAQSKAALTDWLRAKASFVIEGLKEADKDEFCRCELKLQKWYGDLRGKPFAIEAENSILDISGFSKQYNCAFIWQKDGVKKLNLYLIINYFKGGKLRFKKIKPEAFEANRFYTVINKKSGEIVPMEVNFNFDDPNLIILPLAFGKRQGREFIWNDLLSLETGSLKLANGRVIEKTLYNRRTRQDEPALFVALTFERREVLDSSNIKPMNLIGVDRGENIPAVIALTDPEGCPLSRFKDSLGNPTHILRIGESYKEKQRTIQAKKEVEQRRAGGYSRKYASKAKNLADDMVRNTARDLLYYAVTQDAMLIFENLSRGFGRQGKRTFSAERQYTRMEDWLTAKLAYEGLPSKTYLSKTLAQYTSKTCSNCGFTITSADYDRVLEKLKKTATGWMTTINGKELKVEGQITYYNRYKRQNVVKDLSVELDRLSEESVNNDISSWTKGRSGEALSLLKKRFSHRPVQEKFVCLNCGFETHADEQAALNIARSWLFLRSQEYKKYQTNKTTGNTDKRAFVETWQSFYRKKLKEVWKPAV

SEQ ID NO: 28027 - protein, 978 aa, synthetic construct
  REGION 1..978: note = engineered CasX variant
QEGKRINKIRRRLVKDSNTKKAGKTGPMKTLLVRVMTPDLRERLENLRKKPENIPQPISNTSRANLNKLLTDYTEMKKAILHVYWEEFQKDPVGLMSRVAQPASKKIDQNKLKPEMDEKGNLTTAGFACSQCGQPLFVYKLEQVSEKGKAYTNYFGRCNVAEHEKLILLAQLKPEKDSDEAVTYSLGKFGQRALDFYSIHVTKESTHPVKPLAQIAGNRYASGPVGKALSDACMGTIASFLSKYQDIIIEHQKVVKGNQKRLESLRELAGKENLEYPSVTLPPQPHTKEGVDAYNEVIARVRMWVNLNLWQKLKLSRDDAKPLLRLKGFPSFPLVERQANEVDWWDMVCNVKKLINEKKEDGKVFWQNLAGYKRQEALRPYLSSEEDRKKGKKFARYQLGDLLLHLEKKHGEDWGKVYDEAWERIDKKVEGLSKHIKLEEERRSEDAQSKAALTDWLRAKASFVIEGLKEADKDEFCRCELKLQKWYGDLRGKPFAIEAENSILDISGFSKQYNCAFIWQKDGVKKLNLYLIINYFKGGKLRFKKIKPEAFEANRFYTVINKKSGEIVPMEVNFNFDDPNLIILPLAFGKRQGREFIWNDLLSLETGSLKLANGRVIEKTLYNRRTRQDEPALFVALTFERREVLDSSNIKPMNLIGVDRGENIPAVIALTDPEGCPLSRFKDSLGNPTHILRIGESYKEKQRTIQAKKEVEQRRAGGYSRKYASKAKNLADDMVRNTARDLLYYAVTQDAMLIFENLSRGFGRQGKRTFMAERQYTRMEDWLTAKLAYEGLPSKTYLSKTLAQYTSKTCSNCGFTITSADYDRVLEKLKKTATGWMTTINGKELKVEGQITYYNRYKRQNVVKDLSVELDRLSEESVNNDISSWDKGRSGEALSLLKKRFSHRPVQEKFVCLNCGFETHADEQAALNIARSWLFLRSQEYKKYQTNKTTGNTDKRAFVETWQSFYRKKLKEVWKPAV

SEQ ID NO: 28028 - protein, 978 aa, synthetic construct
  REGION 1..978: note = engineered CasX variant
QEGKRINKIRRRLVKDSNTKKAGKTGPMKTLLVRVMTPDLRERLENLRKKPENIPQPISNTSRANLNKLLTDYTEMKKAILHVYWEEFQVDPVGLMSRVAQPASKKIDQNKLKPEMDEKGNLTTAGFACSQCGQPLFVYKLEQVSEKGKAYTNYFGRCNVAEHEKLILLAQLKPEKDSDEAVTYSLGKFGQRALDFYSIHVTKESTHPVKPLAQIAGNRYASGPVGKALSDACMGTIASFLSKYQDIIIEHQKVVKGNQKRLESLRELAGKENLEYPSVTLPPQPHTKEGVDAYNEVIARVRMWVNLNLWQKLKLSRDDAKPLLRLKGFPSFPLVERQANEVDWWDMVCNVKKLINEKKEDGKVFWQNLAGYKRQEALRPYLSSEEDRKKGKKFARYQLGDLLLHLEKKHGEDWGKVYDEAWERIDKKVEGLSKHIKLEEERRSEDAQSKAALTDWLRAKASFVIEGLKEADKDEFCRCELKLQKWYGDLRGKPFAIEAENSILDISGFSKQYNCAFIWQKDGVKKLNLYLIINYFKGGKLRFKKIKPEAFEANRFYTVINKKSGEIVPMEVNFNFDDPNLIILPLAFGKRQGREFIWNDLLSLETGSLKLANGRVIEKTLYNRRTRQDEPALFVALTFERREVLDSSNIKPMNLIGVDRGENIPAVIALTDPEGCPLSRFKDSLGNPTHILRIGESYKEKQRTIQAKKEVEQRRAGGYSRKYASKAKNLADDMVRNTARDLLYYAVTQDAMLIFENLSRGFGRQGKRTFMAERQYTRMEDWLTAKLAYEGLPSKTYLSKTLAQYTSKTCSNCGFTITSADYDRVLEKLKKTATGWMTTINGKELKVEGQITYYNRYKRQNVVKDLSVELDRLSEESVNNDISSWTKGRSGEALSLLKKRFSHRPVQEKFVCLNCGFETHADEQAALNIARSWLFLRSQEYKKYQTNKTTGNTDKRAFVETWQSFYRKKLKEVWKPAV

SEQ ID NO: 28029 - protein, 978 aa, synthetic construct
  REGION 1..978: note = engineered CasX variant
QEGKRLNKIRRRLVKDSNTKKAGKTGPMKTLLVRVMTPDLRERLENLRKKPENIPQPISNTSRANLNKLLTDYTEMKKAILHVYWEEFQKDPVGLMSRVAQPASKKIDQNKLKPEMDEKGNLTTAGFACSQCGQPLFVYKLEQVSEKGKAYTNYFGRCNVAEHEKLILLAQLKPEKDSDEAVTYSLGKFGQRALDFYSIHVTKESTHPVKPLAQIAGNRYASGPVGKALSDACMGTIASFLSKYQDIIIEHQKVVKGNQKRLESLRELAGKENLEYPSVTLPPQPHTKEGVDAYNEVIARVRMWVNLNLWQKLKLSRDDAKPLLRLKGFPSFPLVERQANEVDWWDMVCNVKKLINEKKEDGKVFWQNLAGYKRQEALRPYLSSEEDRKKGKKFARYQLGDLLLHLEKKHGEDWGKVYDEAWERIDKKVEGLSKHIKLEEERRSEDAQSKAALTDWLRAKASFVIEGLKEADKDEFCRCELKLQKWYGDLRGKPFAIEAENSILDISGFSKQYNCAFIWQKDGVKKLNLYLIINYFKGGKLRFKKIKPEAFEANRFYTVINKKSGEIVPMEVNFNFDDPNLIILPLAFGKRQGREFIWNDLLSLETGSLKLANGRVIEKTLYNRRTRQDEPALFVALTFERREVLDSSNIKPMNLIGVDRGENIPAVIALTDPEGCPLSRFKDSLGNPTHILRIGESYKEKQRTIQAKKEVEQRRAGGYSRKYASKAKNLADDMVRNTARDLLYYAVTQDAMLIFENLSRGFGRQGKRTFMAERQYTRMEDWLTAKLAYEGLPSKTYLSKTLAQYTSKTCSNCGFTITSADYDRVLEKLKKTATGWMTTINGKELKVEGQITYYNRYKRQNVVKDLSVELDRLSEESVNNDISSWTKGRSGEALSLLKKRFSHRPVQEKFVCLNCGFETHADEQAALNIARSWLFLRSQEYKKYQTNKTTGNTDKRAFVETWQSFYRKKLKEVWKPAV

SEQ ID NO: 28030 - protein, 978 aa, synthetic construct
  REGION 1..978: note = engineered CasX variant
QEGKRINKIRRRLVKDSNTKKAGKTGPMKTLLVRVMTPDLRERLENLRKKPENIPQPISNTSRANLNKLLTDYTEMKKAILHVYWEEFQKDPVGLMSRVAQPASKKIDQNKLKPEMDEKGNLTTAGFACSQCGQPLFVYKLEQVSEKGKAYTNYVGRCNVAEHEKLILLAQLKPEKDSDEAVTYSLGKFGQRALDFYSIHVTKESTHPVKPLAQIAGNRYASGPVGKALSDACMGTIASFLSKYQDIIIEHQKVVKGNQKRLESLRELAGKENLEYPSVTLPPQPHTKEGVDAYNEVIARVRMWVNLNLWQKLKLSRDDAKPLLRLKGFPSFPLVERQANEVDWWDMVCNVKKLINEKKEDGKVFWQNLAGYKRQEALRPYLSSEEDRKKGKKFARYQLGDLLLHLEKKHGEDWGKVYDEAWERIDKKVEGLSKHIKLEEERRSEDAQSKAALTDWLRAKASFVIEGLKEADKDEFCRCELKLQKWYGDLRGKPFAIEAENSILDISGFSKQYNCAFIWQKDGVKKLNLYLIINYFKGGKLRFKKIKPEAFEANRFYTVINKKSGEIVPMEVNFNFDDPNLIILPLAFGKRQGREFIWNDLLSLETGSLKLANGRVIEKTLYNRRTRQDEPALFVALTFERREVLDSSNIKPMNLIGVDRGENIPAVIALTDPEGCPLSRFKDSLGNPTHILRIGESYKEKQRTIQAKKEVEQRRAGGYSRKYASKAKNLADDMVRNTARDLLYYAVTQDAMLIFENLSRGFGRQGKRTFMAERQYTRMEDWLTAKLAYEGLPSKTYLSKTLAQYTSKTCSNCGFTITSADYDRVLEKLKKTATGWMTTINGKELKVEGQITYYNRYKRQNVVKDLSVELDRLSEESVNNDISSWTKGRSGEALSLLKKRFSHRPVQEKFVCLNCGFETHADEQAALNIARSWLFLRSQEYKKYQTNKTTGNTDKRAFVETWQSFYRKKLKEVWKPAV

SEQ ID NO: 28031 - protein, 978 aa, synthetic construct
  REGION 1..978: note = engineered CasX variant
QEGKRINKIRRRLVKDSNTKKAGKTGPMKTLLVRVMTPDLRERLENLRKKPENIPQPISNTSRANLNKLLTDYTEMKKAILHVYWEEFQKDPVGLMSRVAQPASKKIDQNKLKPEMDEKGNLTTAGFACSQCGQPLFVYKLEQVSEKGKAYTNYFGRCNVAEHEKLILLAQLKPEKDSDEAVTYSLGKFGQRALDFYSIHVTKESTHPVKPLAQIAGNRYASGPVGKALSDACMGTIASFLSKYQDIIIEHQKVVKGNQKRLESLRELAGKENLEYPSVTLPPQPHTKEGVDAYNEVIARVRMWVNLNLWQKLKLSRDDAKPLLRLKGFPSFPLVERQANEVDWWDMVCNVKKLINEKKEDGKVFWQNLAGYKRQEALRPYLSSEEDRKKGKKFARYQLGDLLLHLEKKHGEDWGKVYDEAWERIDKKVEGLSKHIKLEEERRSEDAQSKAALTDWLRAKASFVIEGLKEADKDEFCRCELKLQKWYGDLRGKPFAIEAENSILDISGFSKQYNCAFIWQKDGVKKLNLYLIINYFKGGKLRFKKIKPEAFEANRFYTVINKKSGEIVPMEVNFNFDDPNLIILPLAFGKRQGREFIWNDLLSLETGSLKLANGRVIEKTLYNRRTRQDEPALFVALTFERREVLDSSNIKPMNLIGVDRGENIPAVIALTDPEGCPLSRFKDSLGNPTHILRIGESYKEKQRTIQAKKEVEQRRAGGYSRKYASKAKNLADDMVRNTARDLLYYAVTQDAMLIFENLSRGFGRQGKRTFMAERQYTRMEDWLTAKLAYEGLASKTYLSKTLAQYTSKTCSNCGFTITSADYDRVLEKLKKTATGWMTTINGKELKVEGQITYYNRYKRQNVVKDLSVELDRLSEESVNNDISSWTKGRSGEALSLLKKRFSHRPVQEKFVCLNCGFETHADEQAALNIARSWLFLRSQEYKKYQTNKTTGNTDKRAFVETWQSFYRKKLKEVWKPAV

SEQ ID NO: 28032 - protein, 978 aa, synthetic construct
  REGION 1..978: note = engineered CasX variant
QEGKRINKIRRRLVKDSNTKKAGKTGPMKTLLVRVMTPDLRERLENLRKKPENIPQPISNTSRANLNKLLTDYTEMKKAILHVYWEEFQKDPVGLMSRVAQPASKKIDQNKLKPEMDEKGNLTTAGFACSQCGQPLFVYKLEQVSEKGKAYTNYFGRCNVAEHEKLILLAQLKPEKDSDEAVTYSLGKFGQRALDFYSIHVTKESTHPVKPLAQIAGNRYASGPVGKALSDACMGTIASFLSKYQDIIIEHQKVVKGNQKRLESLRELAGKENLEYPSVTLPPQPHTKEGVDAYNEVIARVRMWVNLNLWQKLKLSRDDAKPLLRLKGFPSFPLVERQANEVDWWDMVCNVKKLINEKKEDGKVFWQNLAGYKRQEALRPYLSSEEDRKKGKKFARYQLGDLLLHLEKKHGEDWGKVYDEAWERIDKKVEGLSKHIKLEEERRSEDAQSKAALTDWLRAKASFVIEGLKEADKDEFCRCELKLQKWYGDLRGKPFAIEAENSILDISGFSKQYNCAFIWQKDGVKKLNLYLIINYFKGGKLRFKKIKPEAFEANRFYTVINKKSGEIVPMEVNFNFDDPNLIILPLAFGKRQGREFIWNDLLSLETGSLKLANGRVIEKTLYNRRTRQDEPALFVALTFERREVLDSSNIKPMNLIGVDRGENIPAVIALTDPEGCPLSRFKDSLGNPTHILRIGESYKEKQRTIQAKKEVEQRRAGGYSRKYASKAKNLADDMVRNTARDLLYYAVTQDAMLIFENLSRGFGRQGKRTFMAERQYTRMEDWLTAKLAYEGLPSKVYLSKTLAQYTSKTCSNCGFTITSADYDRVLEKLKKTATGWMTTINGKELKVEGQITYYNRYKRQNVVKDLSVELDRLSEESVNNDISSWTKGRSGEALSLLKKRFSHRPVQEKFVCLNCGFETHADEQAALNIARSWLFLRSQEYKKYQTNKTTGNTDKRAFVETWQSFYRKKLKEVWKPAV

SEQ ID NO: 28033 - protein, 979 aa, synthetic construct
  REGION 1..979: note = engineered CasX variant
QEGKRINKIRRRLVKDSNTKKAGKTGPMKTLLVRVMTPDLRERLENLRKKPENIPQPISNTSRANLNKLLTDYTEMKKAILHVYWEEFQKDPVGLMSRVAQPASKKIDQNKLKPEMDEKGNLTTAGFACSQCGQPLFVYKLEQVSEKGKAYTNYFGRCNVAEHEKLILLAQLKPEKDSDEAVTYSLGKFGQRALDFYSIHVTKESTHPVKPLAQIAGNRYASGPVGKALSDACMGTIASFLSKYQDIIIEHQKVVKGNQKRLESLRELAGKENLEYPSVTLPPQPHTKEGVDAYNEVIARVRMWVNLNLWQKLKLSRDDAKPLLRLKGFPSFPLVERQANEVDWWDMVCNVKKLINEKKEDGKVFWQNLAGYKRQEALRPYLSSEEDRKKGKKFARYQLGDLLLHLEKKHGEDWGKVYDEAWERIDKKVEGLSKHIKLEEERRSEDAQSKAALTDWLRAKASFVIEGLKEADKDEFCRCELKLQKWYGDLRGKPFAIEAENSILDISGFSKQYNCAFIWQKDGVKKLNLYLIINYFKGGKLRFKKIKPEAFEANRFYTVINKKSGEIVPMEVNFNFDDPNLIILPLAFGKRQGREFIWNDLLSLETGSLKLANGRVIEKTLYNRRTRQDEPALFVALTFERREVLDSSNIKPMNLIGVDRGENIPAVIALTDPEGCPLSRFKDSLGNPTHILRIGESYKEKQRTIQAKKEVEQRRAGGYSRKYASKAKNLADDMVRNTARDLLYYAVTQDAMLIFENLSRGFGRQGKRTFMAERQYTRMEDWLTAKLAYEGPLPSKTYLSKTLAQYTSKTCSNCGFTITSADYDRVLEKLKKTATGWMTTINGKELKVEGQITYYNRYKRQNVVKDLSVELDRLSEESVNNDISSWTKGRSGEALSLLKKRFSHRPVQEKFVCLNCGFETHADEQAALNIARSWLFLRSQEYKKYQTNKTTGNTDKRAFVETWQSFYRKKLKEVWKPAV

SEQ ID NO: 28034 - protein, 979 aa, synthetic construct
  REGION 1..979: note = engineered CasX variant
QEGKRINKIRRRLVKDSNTKKAGKTGPMKTLLVRVMTPDLRERLENLRKKPENIPQPISNTSRANLNKLLTDYTEMKKAILHVYWEEFQKDPVGLMSRVAQPASKKIDQNKLKPEMDEKGNLTTAGFACSQCGQPLFVYKLEQVSEKGKAYTNYFGRCNVAEHEKLILLAQLKPEKDSDEAVTYSLGKFGQRALDFYSIHVTKESTHPVKPLAQIAGNRYASGPVGKALSDACMGTIASFLSKYQDIIIEHQKVVKGNQKRLESLRELAGKENLEYPSVTLPPQPHTKEGVDAYNEVIARVRMWVNLNLWQKLKLSRDDAKPLLRLKGFPSFPLVERQANEVDWWDMVCNVKKLINEKKEDGKVFWQNLAGYKRQEALRPYLSSEEDVRKKGKKFARYQLGDLLLHLEKKHGEDWGKVYDEAWERIDKKVEGLSKHIKLEEERRSEDAQSKAALTDWLRAKASFVIEGLKEADKDEFCRCELKLQKWYGDLRGKPFAIEAENSILDISGFSKQYNCAFIWQKDGVKKLNLYLIINYFKGGKLRFKKIKPEAFEANRFYTVINKKSGEIVPMEVNFNFDDPNLIILPLAFGKRQGREFIWNDLLSLETGSLKLANGRVIEKTLYNRRTRQDEPALFVALTFERREVLDSSNIKPMNLIGVDRGENIPAVIALTDPEGCPLSRFKDSLGNPTHILRIGESYKEKQRTIQAKKEVEQRRAGGYSRKYASKAKNLADDMVRNTARDLLYYAVTQDAMLIFENLSRGFGRQGKRTFMAERQYTRMEDWLTAKLAYEGLPSKTYLSKTLAQYTSKTCSNCGFTITSADYDRVLEKLKKTATGWMTTINGKELKVEGQITYYNRYKRQNVVKDLSVELDRLSEESVNNDISSWTKGRSGEALSLLKKRFSHRPVQEKFVCLNCGFETHADEQAALNIARSWLFLRSQEYKKYQTNKTTGNTDKRAFVETWQSFYRKKLKEVWKPAV

SEQ ID NO: 28035 - protein, 978 aa, synthetic construct
  REGION 1..978: note = engineered CasX variant
QEGKRINKIRRRLVKDSNTKKAGKTGPMKTLLVRVMTPDLRERLENLRKKPENIPQPISNTSRANLNKLLTDYTEMKKAILHVYWEEFQKDPVGLMSRVAQPASKKIDQNKLKPEMDEKGNLTTAGFACSQCGQPLFVYKLEQVSEKGKAYTNYFGRCNVAEHEKLILLAQLKPEKDSDEAVTYSLGKFGQRALDFYSIHVTKESTHPVKPLAQIAGNRYASGPVGKALSDACMGTIASFLSKYQDIIIEHQKVVKGNQKRLESLRELAGKENLEYPSVTLPPQPHTKEGVDAYNEVIARVRMWVNLNLWQKLKLSRDDAKPLLRLKGFPSFPLVERQANEVDWWDMVCNVKKLINEKKEDGKVFWQNLAGYKRQEALRPYLSSEEDRKKGKKFARYQLGDLLLHLEKKHGEDWGKVYDEAWERIDKKVEGLSKHIKLEEERRSEDAQSKAALTDWLRAKASFVIEGLKEADKDEFCRCELKLQKWYGDLRGKPFAIEAENSILDISGFSKQYNCAFIWQKDGVKKLNLYLIINYFKGGKLRFKKIKPEAFEANRFYTVINKKSGEIVPMEVNFNFDDPNLIILPLAFGKRQGREFIWNDLLSLETGSLKLANGRVIEKTLYNRRTRQDEPALFVALTFERREVLDSSNIKPMNLIGVDRGENIPAVIALTDPEGCPLSRFKDSLGNPTHILRIGESYKEKQRTIQAKKEVEQRRAGGYSRKYASKAKNLADDMVRNTARDLLYYAVTQDAMLIFENLSRGFGRQGKRTFMAERQYTRMEDWLTAKLAYEGLPSKTYLSKTLAQYTSKTCSNCGFTITSADYDRMLEKLKKTATGWMTTINGKELKVEGQITYYNRYKRQNVVKDLSVELDRLSEESVNNDISSWTKGRSGEALSLLKKRFSHRPVQEKFVCLNCGFETHADEQAALNIARSWLFLRSQEYKKYQTNKTTGNTDKRAFVETWQSFYRKKLKEVWKPAV

SEQ ID NO: 28036 - protein, 978 aa, synthetic construct
  REGION 1..978: note = engineered CasX variant
QEGKRINKIRRRLVKDSNTKKAGKTGPMKTLLVRVMTPDLRERLENLRKKPENIPQPISNTSRANLNKLLTDYTEMKKAILHVYWEEFQKDPVGLMSRVAQPASKKIDQNKLKPEMDEKGNLTTAGFACSQCGQPLFVYKLEQVSEKGKAYTNYFGRCNVAEHEKLILLAQLKPEKDSDEAVTYSLGKFGQRALDFYSIHVTKESTHPVKPLAQIAGNRYASGPVGKALSDACMGTIASFLSKYQDIIIEHQKVVKGNQKRLESLRELAGKENLEYPSVTLPPQPHTKEGVDAYNEVIARVRMWVNLNLWQKLKLSRDDAKPLLRLKGFPSFPLVERQANEVDWWDMVCNVKKLINEKKEDGKVFWQNLAGYKRQEALRPYLSSEEDRKKGKKFARYQLGDLLLHLEKKHGEDWGKVYDEAWERIDKKVEGLSKHIKLEEERRSEDAQSKAALTDWLRAKASFVIEGLKEADKDEFCRCELKLQKWYGDLRGKPFAIEAENSILDISGFSKQYNCAFIWQKDGVKKLNLYLIINYFKGGKLRFKKIKPEAFEANRFYTVINKKSGEIVPMEVNFNFDDPNLIILPLAFGKRQGREFIWNDLLSLETGSLKLANGRVIEKTLYNRRTRQDEPALFVALTFERREVLDSSNIKPMNLIGVDRGENIPAVIALTDPEGCPLSRFKDSLGNPTHILRIGESYKEKQRTIQAKKEVEQRRAGGYSRKYASKAKNLADDMVRNTARDLLYYAVTQDAMLIFENLSRGFGRQGKRTFMAERQYTRMEDWLTAKLAYEGLPSKTYLSKTLAQYTSKTCSNCGFTITSADYDRVLEKLKKTATGWMTTINGKELKVEGQITYYNRYKRQNVVKDLSVELDRLSEESVNNDISSWTKGRQGEALSLLKKRFSHRPVQEKFVCLNCGFETHADEQAALNIARSWLFLRSQEYKKYQTNKTTGNTDKRAFVETWQSFYRKKLKEVWKPAV

SEQ ID NO: 28037 - protein, 978 aa, synthetic construct
  REGION 1..978: note = engineered CasX variant
QEGKRINKIRRRLVKDSNTKKAGKTGPMKTLLVRVMTPDLRERLENLRKKPENIPQPISNTSRANLNKLLTDYTEMKKAILHVYWEEFQKDPVGLMSRVAQPASKKIDQNKLKPEMDEKGNLTTAGFACSQCGQPLFVYKLEQVSEKGKAYTNYFGRCNVAEHEKLILLAQLKPEKDSDEAVTYSLGKFGQRALDFYSIHVTKESTHPVKPLAQIAGNRYASGPVGKALSDACMGTIASFLSKYQDIIIEHQKVVKGNQKRLESLRELAGKENLEYPSVTLPPQPHTKEGVDAYNEVIARVRMWVNLNLWQKLKLSRDDAKPLLRLKGFPSFPLVERQANEVDWWDMVCNVKKLINEKKEDGKVFWQNLAGYKRQEALRPYLSSEEDRKKGKKFARYQLGDLLLHLEKKHGEDWGKVYDEAWERIDKKVEGLSKHIKLEEERRSEDAQSKAALTDWLRAKASFVIEGLKEADKDEFCRCELKLQKWYGDLRGKPFAIEAENSILDISGFSKQYNCAFIWQKDGVKKLNLYLIINYFKGGKLRFKKIKPEAFEANRFYTVINKKSGEIVPMEVNFNFDDPNLIILPLAFGKRQGREFIWNDLLSLETGSLKLANGRVIEKTLYNRRTRQDEPALFVALTFERREVLDSSNIKPMNLIGVDRGENIPAVIALTDPEGCPLSRFKDSLGNPTHILRIGESYKEKQRTIQAKKEVEQRRAGGYSRKYASKAKNLADDMVRNTARDLLYYAVTQDAMLIFENLSRGFGRQGKRTFMAERQYTRMEDWLTAKLAYEGLPSKTYLSKTLAQYTSKTCSNCGFTITSADYDRVLEKLKKTATGWMTTINGKELKVEGQITYYNRYKRQNVVKDLSVELDRLSEESVNNDISSWTKGRSGEALSLLKKRFSHRPVQEKFVCLNCEFETHADEQAALNIARSWLFLRSQEYKKYQTNKTTGNTDKRAFVETWQSFYRKKLKEVWKPAV

SEQ ID NO: 28038 - protein, 979 aa, synthetic construct
  REGION 1..979: note = engineered CasX variant
QEGKRINKIRRRLVKDSNTKKAGKTGPMKTLLVRVMTPDLRERLENLRKKPENIPQPISNTSRANLNKLLTDYTEMKKAILHVYWEEFQKDPVGLMSRVAQPASKKIDQNKLKPEMDEKGNLTTAGFACSQCGQPLFVYKLEQVSEKGKAYTNYFGRCNVAEHEKLILLAQLKPEKDSDEAVTYSLGKFGQRALDFYSIHVTKESTHPVKPLAQIAGNRYASGPVGKALSDACMGTIASFLSKYQDIIIEHQKVVKGNQKRLESLRELAGKENLEYPSVTLPPQPHTKEGVDAYNEVIARVRMWVNLNLWQKLKLSRDDAKPLLRLKGFPSFPLVERQANEVDWWDMVCNVKKLINEKKEDGKVFWQNLAGYKRQEALRPYLSSEEDRKKGKKFARYQLGDLLLHLEKKHGEDWGKVYDEAWERIDKKVEGLSKHIKLEEERRSEDAQSKAALTDWLRAKASFVIEGLKEADKDEFCRCELKLQKWYGDLRGKPFAIEAENSILDISGFSKQYNCAFIWQKDGVKKLNLYLIINYFKGGKLRFKKIKPEAFEANRFYTVINKKSGEIVPMEVNFNFDDPNLIILPLAFGKRQGREFIWNDLLSLETGSLKLANGRVIEKTLYNRRTRQDEPALFVALTFERREVLDSSNIKPMNLIGVDRGENIPAVIALTDPEGCPLSRFKDSLGNPTHILRIGESYKEKQRTIQAKKEVEQRRAGGYSRKYASKAKNLADDMVRNTARDLLYYAVTQDAMLIFENLSRGFGRQGKRTFMAERQYTRMEDWLTAKLAYEGLPSKTYLSKTLAQYTSKTCSNCGFTITSADYDRVLEKLKKTATGWMTTINGKELKVEGQITYYNRYKRQNVVKDLSVELDRLSEESVNNDISSWTKGRSGEALSLLKKRFSHRPVQEKFVCLNCGFETHADEQAALNIARSWLFLRSQEYKKYQTNKTSTGNTDKRAFVETWQSFYRKKLKEVWKPAV

SEQ ID NO: 28039 - protein, 979 aa, synthetic construct
  REGION 1..979: note = engineered CasX variant
QEGKRINKIRRRLVKDSNTKKAGKTGPMKTLLVRVMTPDLRERLENLRKKPENIPQPISNTSRANLNKLLTDYTEMKKAILHVYWEEFQKDPVGLMSRVAQPASKKIDQNKLKPEMDEKGNLTTAGFACSQCGQPLFVYKLEQVSEKGKAYTNYFGRCNVAEHEKLILLAQLKPEKDSDEAVTYSLGKFGQRALDFYSIHVTKESTHPVKPLAQIAGNRYASGPVGKALSDACMGTIASFLSKYQDIIIEHQKVVKGNQKRLESLRELAGKENLEYPSVTLPPQPHTKEGVDAYNEVIARVRMWVNLNLWQKLKLSRDDAKPLLRLKGFPSFPLVERQANEVDWWDMVCNVKKLINEKKEDGKVFWQNLAGYKRQEALRPYLSSEEDRKKGKKFARYQLGDLLLHLEKKHGEDWGKVYDEAWERIDKKVEGLSKHIKLEEERRSEDAQSKAALTDWLRAKASFVIEGLKEADKDEFCRCELKLQKWYGDLRGKPFAIEAENSILDISGFSKQYNCAFIWQKDGVKKLNLYLIINYFKGGKLRFKKIKPEAFEANRFYTVINKKSGEIVPMEVNFNFDDPNLIILPLAFGKRQGREFIWNDLLSLETGSLKLANGRVIEKTLYNRRTRQDEPALFVALTFERREVLDSSNIKPMNLIGVDRGENIPAVIALTDPEGCPLSRFKDSLGNPTHILRIGESYKEKQRTIQAKKEVEQRRAGGYSRKYASKAKNLADDMVRNTARDLLYYAVTQDAMLIFENLSRGFGRQGKRTFMAERQYTRMEDWLTAKLAYEGLPSKTYLSKTLAQYTSKTCSNCGFTITSADYDRVLEKLKKTATGWMTTINGKELKVEGQITYYNRYKRQNVVKDLSVELDRLSEESVNNDISSWTKGRSGEALSLLKKRFSHRPVQEKFVCLNCGFETHADEQAALNIARSWLFLRSQEYKKYQTNKTTGKNTDKRAFVETWQSFYRKKLKEVWKPAV

SEQ ID NO: 28040 - protein, 978 aa, synthetic construct
  REGION 1..978: note = engineered CasX variant
QEGKRINKIRRRLVKDSNTKKAGKTGPMKTLLVRVMTPDLRERLENLRKKPENIPQPISNTSRANLNKLLTDYTEMKKAILHVYWEEFQKDPVGLMSRVAQPASKKIDQNKLKPEMDEKGNLTTAGFACSQCGQPLFVYKLEQVSEKGKAYTNYFGRCNVAEHEKLILLAQLKPEKDSDEAVTYSLGKFGQRALDFYSIHVTKESTHPVKPLAQIAGNRYASGPVGKALSDACMGTIASFLSKYQDIIIEHQKVVKGNQKRLESLRELAGKENLEYPSVTLPPQPHTKEGVDAYNEVIARVRMWVNLNLWQKLKLSRDDAKPLLRLKKFPSFPLVERQANEVDWWDMVCNVKKLINEKKEDGKVFWQNLAGYKRQEALRPYLSSEEDRKKGKKFARYQLGDLLLHLEKKHGEDWGKVYDEAWERIDKKVEGLSKHIKLEEERRSEDAQSKAALTDWLRAKASFVIEGLKEADKDEFCRCELKLQKWYGDLRGKPFAIEAENSILDISGFSKQYNCAFIWQKDGVKKLNLYLIINYFKGGKLRFKKIKPEAFEANRFYTVINKKSGEIVPMEVNFNFDDPNLIILPLAFGKRQGREFIWNDLLSLETGSLKLANGRVIEKTLYNRRTRQDEPALFVALTFERREVLDSSNIKPMNLIGVDRGENIPAVIALTDPEGCPLSRFKDSLGNPTHILRIGESYKEKQRTIQAKKEVEQRRAGGYSRKYASKAKNLADDMVRNTARDLLYYAVTQDAMLIFENLSRGFGRQGKRTFMAERQYTRMEDWLTAKLAYEGLPSKTYLSKTLAQYTSKTCSNCGFTITSADYDRVLEKLKKTATGWMTTINGKELKVEGQITYYNRYKRQNVVKDLSVELDRLSEESVNNDISSWTKGRSGEALSLLKKRFSHRPVQEKFVCLNCGFETHADEQAALNIARSWLFLRSQEYKKYQTNKTTGNTDKRAFVETWQSFYRKKLKEVWKPAV

SEQ ID NO: 28041 - protein, 978 aa, synthetic construct
  REGION 1..978: note = engineered CasX variant
QEGKRINKIRRRLVKDSNTKKAGKTGPMKTLLVRVMTPDLRERLENLRKKPENIPQPISNTSRANLNKLLTDYTEMKKAILHVYWEEFQKDPVGLMSRVAQPASKKIDQNKLKPEMDEKGNLTTAGFACSQCGQPLFVYKLEQVSEKGKAYTNYFGRCNVAEHEKLILLAQLKPEKDSDEAVTYSLGKFGQRALDFYSIHVTKESTHPVKPLAQIAGNRYASGPVGKALSDACMGTIASFLSKYQDIIIEHQKVVKGNQKRLESLRELAGKENLEYPSVTLPPQPHTKEGVDAYNEVIARVRMWVNLNLWQKLKLSRDDAKPLLRLKGFPSFPLVERQANEVDWWDMVCNVKKLINEKKEDGKVFWQNLAGYKRQEALRPYLSSEEDRKKGKKFARYQLGDLLLHLEKKHGEDWGKVYDEAWERIDKKVEGLSKHIKLEEERRSEDAQSKAALTDWLRAKASFVIEGLKEADKDEFCRCELKLQKWYGDLRGKPFAIEAENSILDISGFSKQYNCAFIWQKDGVKKLNLYLIINYFKGGKLRFKKIKPEAFEANRFYTVINKKSGEIVPMEVNFNFDDPNLIILPLAFGKRQGREFIWNDLLSLETGSLKLANGRVIEKTLYNRRTRQDEPALFVALTFERREVLDSSNIKPMNLIGVDRGENIPAVIALTDPEGCPLSRFKDSLGNPTHILRIGERYKEKQRTIQAKKEVEQRRAGGYSRKYASKAKNLADDMVRNTARDLLYYAVTQDAMLIFENLSRGFGRQGKRTFMAERQYTRMEDWLTAKLAYEGLPSKTYLSKTLAQYTSKTCSNCGFTITSADYDRVLEKLKKTATGWMTTINGKELKVEGQITYYNRYKRQNVVKDLSVELDRLSEESVNNDISSWTKGRSGEALSLLKKRFSHRPVQEKFVCLNCGFETHADEQAALNIARSWLFLRSQEYKKYQTNKTTGNTDKRAFVETWQSFYRKKLKEVWKPAV

SEQ ID NO: 28042 - protein, 978 aa, synthetic construct
  REGION 1..978: note = engineered CasX variant
QEGKRINKIRRRLVKDSNTKKAGKTGPMKTLLVRVMTPDLRERLENLRKKPENIPQPISNTSRANLNKLLTDYTEMKKAILHVYWEEFQKDPVGLMSRVAQPASKKIDQNKLKPEMDEKGNLTTAGFACSQCGQPLFVYKLEQVSEKGKAYTNYFGRCNVAEHEKLILLAQLKPEKDSDEAVTYSLGKFGQRALDFYSIHVTKESTHPVKPLAQIAGNRYASGPVGKALSDACMGTIASFLSKYQDIIIEHQKVVKGNQKRLESLRELAGKENLEYPSVTLPPQPHTKEGVDAYNEVIARVRMWVNLNLWQKLKLSRDDAKPLLRLKGFPSFPLVERQANEVDWWDMVCNVKKLINEKKEDGKVFWQNLAGYKRQEALRPYLSSEEDRKKGKKFARYQLGDLLLHLEKKHGEDWGKVYDEAWERIDKKVEGLSKHIKLEEERRSEDAQSKAALTDWLRAKASFVIEGLKEADKDEFCRCELKLQKWYGDLRGKPFAIEAENSILDISGFSKQYNCAFIWQKDGVKKLNLYLIINYFKGGKLRFKKIKPEAFEANRFYTVINKKSGEIVPMEVNFNFDDPNLIILPLAFGKRQGREFIWNDLLSLETGSLQLANGRVIEKTLYNRRTRQDEPALFVALTFERREVLDSSNIKPMNLIGVDRGENIPAVIALTDPEGCPLSRFKDSLGNPTHILRIGESYKEKQRTIQAKKEVEQRRAGGYSRKYASKAKNLADDMVRNTARDLLYYAVTQDAMLIFENLSRGFGRQGKRTFMAERQYTRMEDWLTAKLAYEGLPSKTYLSKTLAQYTSKTCSNCGFTITSADYDRVLEKLKKTATGWMTTINGKELKVEGQITYYNRYKRQNVVKDLSVELDRLSEESVNNDISSWTKGRSGEALSLLKKRFSHRPVQEKFVCLNCGFETHADEQAALNIARSWLFLRSQEYKKYQTNKTTGNTDKRAFVETWQSFYRKKLKEVWKPAV

SEQ ID NO: 28043 - protein, 979 aa, synthetic construct
  REGION 1..979: note = engineered CasX variant
QEIGGRINKIRRRLVKDSNTKKAGKTGPMKTLLVRVMTPDLRERLENLRKKPENIPQPISNTSRANLNKLLTDYTEMKKAILHVYWEEFQKDPVGLMSRVAQPASKKIDQNKLKPEMDEKGNLTTAGFACSQCGQPLFVYKLEQVSEKGKAYTNYFGRCNVAEHEKLILLAQLKPEKDSDEAVTYSLGKFGQRALDFYSIHVTKESTHPVKPLAQIAGNRYASGPVGKALSDACMGTIASFLSKYQDIIIEHQKVVKGNQKRLESLRELAGKENLEYPSVTLPPQPHTKEGVDAYNEVIARVRMWVNLNLWQKLKLSRDDAKPLLRLKGFPSFPLVERQANEVDWWDMVCNVKKLINEKKEDGKVFWQNLAGYKRQEALRPYLSSEEDRKKGKKFARYQLGDLLLHLEKKHGEDWGKVYDEAWERIDKKVEGLSKHIKLEEERRSEDAQSKAALTDWLRAKASFVIEGLKEADKDEFCRCELKLQKWYGDLRGKPFAIEAENSILDISGFSKQYNCAFIWQKDGVKKLNLYLIINYFKGGKLRFKKIKPEAFEANRFYTVINKKSGEIVPMEVNFNFDDPNLIILPLAFGKRQGREFIWNDLLSLETGSLKLANGRVIEKTLYNRRTRQDEPALFVALTFERREVLDSSNIKPMNLIGVDRGENIPAVIALTDPEGCPLSRFKDSLGNPTHILRIGESYKEKQRTIQAKKEVEQRRAGGYSRKYASKAKNLADDMVRNTARDLLYYAVTQDAMLIFENLSRGFGRQGKRTFMAERQYTRMEDWLTAKLAYEGLPSKTYLSKTLAQYTSKTCSNCGFTITSADYDRVLEKLKKTATGWMTTINGKELKVEGQITYYNRYKRQNVVKDLSVELDRLSEESVNNDISSWTKGRSGEALSLLKKRFSHRPVQEKFVCLNCGFETHADEQAALNIARSWLFLRSQEYKKYQTNKTTGNTDKRAFVETWQSFYRKKLKEVWKPAV

SEQ ID NO: 28044 - protein, 980 aa, synthetic construct
  REGION 1..980: note = engineered CasX variant
QEIGKGRINKIRRRLVKDSNTKKAGKTGPMKTLLVRVMTPDLRERLENLRKKPENIPQPISNTSRANLNKLLTDYTEMKKAILHVYWEEFQKDPVGLMSRVAQPASKKIDQNKLKPEMDEKGNLTTAGFACSQCGQPLFVYKLEQVSEKGKAYTNYFGRCNVAEHEKLILLAQLKPEKDSDEAVTYSLGKFGQRALDFYSIHVTKESTHPVKPLAQIAGNRYASGPVGKALSDACMGTIASFLSKYQDIIIEHQKVVKGNQKRLESLRELAGKENLEYPSVTLPPQPHTKEGVDAYNEVIARVRMWVNLNLWQKLKLSRDDAKPLLRLKGFPSFPLVERQANEVDWWDMVCNVKKLINEKKEDGKVFWQNLAGYKRQEALRPYLSSEEDRKKGKKFARYQLGDLLLHLEKKHGEDWGKVYDEAWERIDKKVEGLSKHIKLEEERRSEDAQSKAALTDWLRAKASFVIEGLKEADKDEFCRCELKLQKWYGDLRGKPFAIEAENSILDISGFSKQYNCAFIWQKDGVKKLNLYLIINYFKGGKLRFKKIKPEAFEANRFYTVINKKSGEIVPMEVNFNFDDPNLIILPLAFGKRQGREFIWNDLLSLETGSLKLANGRVIEKTLYNRRTRQDEPALFVALTFERREVLDSSNIKPMNLIGVDRGENIPAVIALTDPEGCPLSRFKDSLGNPTHILRIGESYKEKQRTIQAKKEVEQRRAGGYSRKYASKAKNLADDMVRNTARDLLYYAVTQDAMLIFENLSRGFGRQGKRTFMAERQYTRMEDWLTAKLAYEGLPSKTYLSKTLAQYTSKTCSNCGFTITSADYDRVLEKLKKTATGWMTTINGKELKVEGQITYYNRYKRQNVVKDLSVELDRLSEESVNNDISSWTKGRSGEALSLLKKRFSHRPVQEKFVCLNCGFETHADEQAALNIARSWLFLRSQEYKKYQTNKTTGNTDKRAFVETWQSFYRKKLKEVWKPAV

SEQ ID NO: 28045 - protein, 979 aa, synthetic construct
  REGION 1..979: note = engineered CasX variant
QEIGKRANKIRRRLVKDSNTKKAGKTGPMKTLLVRVMTPDLRERLENLRKKPENIPQPISNTSRANLNKLLTDYTEMKKAILHVYWEEFQKDPVGLMSRVAQPASKKIDQNKLKPEMDEKGNLTTAGFACSQCGQPLFVYKLEQVSEKGKAYTNYFGRCNVAEHEKLILLAQLKPEKDSDEAVTYSLGKFGQRALDFYSIHVTKESTHPVKPLAQIAGNRYASGPVGKALSDACMGTIASFLSKYQDIIIEHQKVVKGNQKRLESLRELAGKENLEYPSVTLPPQPHTKEGVDAYNEVIARVRMWVNLNLWQKLKLSRDDAKPLLRLKGFPSFPLVERQANEVDWWDMVCNVKKLINEKKEDGKVFWQNLAGYKRQEALRPYLSSEEDRKKGKKFARYQLGDLLLHLEKKHGEDWGKVYDEAWERIDKKVEGLSKHIKLEEERRSEDAQSKAALTDWLRAKASFVIEGLKEADKDEFCRCELKLQKWYGDLRGKPFAIEAENSILDISGFSKQYNCAFIWQKDGVKKLNLYLIINYFKGGKLRFKKIKPEAFEANRFYTVINKKSGEIVPMEVNFNFDDPNLIILPLAFGKRQGREFIWNDLLSLETGSLKLANGRVIEKTLYNRRTRQDEPALFVALTFERREVLDSSNIKPMNLIGVDRGENIPAVIALTDPEGCPLSRFKDSLGNPTHILRIGESYKEKQRTIQAKKEVEQRRAGGYSRKYASKAKNLADDMVRNTARDLLYYAVTQDAMLIFENLSRGFGRQGKRTFMAERQYTRMEDWLTAKLAYEGLPSKTYLSKTLAQYTSKTCSNCGFTITSADYDRVLEKLKKTATGWMTTINGKELKVEGQITYYNRYKRQNVVKDLSVELDRLSEESVNNDISSWTKGRSGEALSLLKKRFSHRPVQEKFVCLNCGFETHADEQAALNIARSWLFLRSQEYKKYQTNKTTGNTDKRAFVETWQSFYRKKLKEVWKPAV

SEQ ID NO: 28046 - protein, 979 aa, synthetic construct
  REGION 1..979: note = engineered CasX variant
QEIGKRISKIRRRLVKDSNTKKAGKTGPMKTLLVRVMTPDLRERLENLRKKPENIPQPISNTSRANLNKLLTDYTEMKKAILHVYWEEFQKDPVGLMSRVAQPASKKIDQNKLKPEMDEKGNLTTAGFACSQCGQPLFVYKLEQVSEKGKAYTNYFGRCNVAEHEKLILLAQLKPEKDSDEAVTYSLGKFGQRALDFYSIHVTKESTHPVKPLAQIAGNRYASGPVGKALSDACMGTIASFLSKYQDIIIEHQKVVKGNQKRLESLRELAGKENLEYPSVTLPPQPHTKEGVDAYNEVIARVRMWVNLNLWQKLKLSRDDAKPLLRLKGFPSFPLVERQANEVDWWDMVCNVKKLINEKKEDGKVFWQNLAGYKRQEALRPYLSSEEDRKKGKKFARYQLGDLLLHLEKKHGEDWGKVYDEAWERIDKKVEGLSKHIKLEEERRSEDAQSKAALTDWLRAKASFVIEGLKEADKDEFCRCELKLQKWYGDLRGKPFAIEAENSILDISGFSKQYNCAFIWQKDGVKKLNLYLIINYFKGGKLRFKKIKPEAFEANRFYTVINKKSGEIVPMEVNFNFDDPNLIILPLAFGKRQGREFIWNDLLSLETGSLKLANGRVIEKTLYNRRTRQDEPALFVALTFERREVLDSSNIKPMNLIGVDRGENIPAVIALTDPEGCPLSRFKDSLGNPTHILRIGESYKEKQRTIQAKKEVEQRRAGGYSRKYASKAKNLADDMVRNTARDLLYYAVTQDAMLIFENLSRGFGRQGKRTFMAERQYTRMEDWLTAKLAYEGLPSKTYLSKTLAQYTSKTCSNCGFTITSADYDRVLEKLKKTATGWMTTINGKELKVEGQITYYNRYKRQNVVKDLSVELDRLSEESVNNDISSWTKGRSGEALSLLKKRFSHRPVQEKFVCLNCGFETHADEQAALNIARSWLFLRSQEYKKYQTNKTTGNTDKRAFVETWQSFYRKKLKEVWKPAV

SEQ ID NO: 28047 - protein, 979 aa, synthetic construct
  REGION 1..979: note = engineered CasX variant
QEIGKRINGIRRRLVKDSNTKKAGKTGPMKTLLVRVMTPDLRERLENLRKKPENIPQPISNTSRANLNKLLTDYTEMKKAILHVYWEEFQKDPVGLMSRVAQPASKKIDQNKLKPEMDEKGNLTTAGFACSQCGQPLFVYKLEQVSEKGKAYTNYFGRCNVAEHEKLILLAQLKPEKDSDEAVTYSLGKFGQRALDFYSIHVTKESTHPVKPLAQIAGNRYASGPVGKALSDACMGTIASFLSKYQDIIIEHQKVVKGNQKRLESLRELAGKENLEYPSVTLPPQPHTKEGVDAYNEVIARVRMWVNLNLWQKLKLSRDDAKPLLRLKGFPSFPLVERQANEVDWWDMVCNVKKLINEKKEDGKVFWQNLAGYKRQEALRPYLSSEEDRKKGKKFARYQLGDLLLHLEKKHGEDWGKVYDEAWERIDKKVEGLSKHIKLEEERRSEDAQSKAALTDWLRAKASFVIEGLKEADKDEFCRCELKLQKWYGDLRGKPFAIEAENSILDISGFSKQYNCAFIWQKDGVKKLNLYLIINYFKGGKLRFKKIKPEAFEANRFYTVINKKSGEIVPMEVNFNFDDPNLIILPLAFGKRQGREFIWNDLLSLETGSLKLANGRVIEKTLYNRRTRQDEPALFVALTFERREVLDSSNIKPMNLIGVDRGENIPAVIALTDPEGCPLSRFKDSLGNPTHILRIGESYKEKQRTIQAKKEVEQRRAGGYSRKYASKAKNLADDMVRNTARDLLYYAVTQDAMLIFENLSRGFGRQGKRTFMAERQYTRMEDWLTAKLAYEGLPSKTYLSKTLAQYTSKTCSNCGFTITSADYDRVLEKLKKTATGWMTTINGKELKVEGQITYYNRYKRQNVVKDLSVELDRLSEESVNNDISSWTKGRSGEALSLLKKRFSHRPVQEKFVCLNCGFETHADEQAALNIARSWLFLRSQEYKKYQTNKTTGNTDKRAFVETWQSFYRKKLKEVWKPAV

SEQ ID NO: 28048 - protein, 979 aa, synthetic construct
  REGION 1..979: note = engineered CasX variant
QEIGKRINKIRRRLVKDSNTKKAGKTGPMKTLLVPVMTPDLRERLENLRKKPENIPQPISNTSRANLNKLLTDYTEMKKAILHVYWEEFQKDPVGLMSRVAQPASKKIDQNKLKPEMDEKGNLTTAGFACSQCGQPLFVYKLEQVSEKGKAYTNYFGRCNVAEHEKLILLAQLKPEKDSDEAVTYSLGKFGQRALDFYSIHVTKESTHPVKPLAQIAGNRYASGPVGKALSDACMGTIASFLSKYQDIIIEHQKVVKGNQKRLESLRELAGKENLEYPSVTLPPQPHTKEGVDAYNEVIARVRMWVNLNLWQKLKLSRDDAKPLLRLKGFPSFPLVERQANEVDWWDMVCNVKKLINEKKEDGKVFWQNLAGYKRQEALRPYLSSEEDRKKGKKFARYQLGDLLLHLEKKHGEDWGKVYDEAWERIDKKVEGLSKHIKLEEERRSEDAQSKAALTDWLRAKASFVIEGLKEADKDEFCRCELKLQKWYGDLRGKPFAIEAENSILDISGFSKQYNCAFIWQKDGVKKLNLYLIINYFKGGKLRFKKIKPEAFEANRFYTVINKKSGEIVPMEVNFNFDDPNLIILPLAFGKRQGREFIWNDLLSLETGSLKLANGRVIEKTLYNRRTRQDEPALFVALTFERREVLDSSNIKPMNLIGVDRGENIPAVIALTDPEGCPLSRFKDSLGNPTHILRIGESYKEKQRTIQAKKEVEQRRAGGYSRKYASKAKNLADDMVRNTARDLLYYAVTQDAMLIFENLSRGFGRQGKRTFMAERQYTRMEDWLTAKLAYEGLPSKTYLSKTLAQYTSKTCSNCGFTITSADYDRVLEKLKKTATGWMTTINGKELKVEGQITYYNRYKRQNVVKDLSVELDRLSEESVNNDISSWTKGRSGEALSLLKKRFSHRPVQEKFVCLNCGFETHADEQAALNIARSWLFLRSQEYKKYQTNKTTGNTDKRAFVETWQSFYRKKLKEVWKPAV

SEQ ID NO: 28049 - protein, 979 aa, synthetic construct
  REGION 1..979: note = engineered CasX variant
QEIGKRINKIRRRLVKDSNTKKAGKTGPMKTLLVRVMTPDLRERLENLRKKPPNIPQPISNTSRANLNKLLTDYTEMKKAILHVYWEEFQKDPVGLMSRVAQPASKKIDQNKLKPEMDEKGNLTTAGFACSQCGQPLFVYKLEQVSEKGKAYTNYFGRCNVAEHEKLILLAQLKPEKDSDEAVTYSLGKFGQRALDFYSIHVTKESTHPVKPLAQIAGNRYASGPVGKALSDACMGTIASFLSKYQDIIIEHQKVVKGNQKRLESLRELAGKENLEYPSVTLPPQPHTKEGVDAYNEVIARVRMWVNLNLWQKLKLSRDDAKPLLRLKGFPSFPLVERQANEVDWWDMVCNVKKLINEKKEDGKVFWQNLAGYKRQEALRPYLSSEEDRKKGKKFARYQLGDLLLHLEKKHGEDWGKVYDEAWERIDKKVEGLSKHIKLEEERRSEDAQSKAALTDWLRAKASFVIEGLKEADKDEFCRCELKLQKWYGDLRGKPFAIEAENSILDISGFSKQYNCAFIWQKDGVKKLNLYLIINYFKGGKLRFKKIKPEAFEANRFYTVINKKSGEIVPMEVNFNFDDPNLIILPLAFGKRQGREFIWNDLLSLETGSLKLANGRVIEKTLYNRRTRQDEPALFVALTFERREVLDSSNIKPMNLIGVDRGENIPAVIALTDPEGCPLSRFKDSLGNPTHILRIGESYKEKQRTIQAKKEVEQRRAGGYSRKYASKAKNLADDMVRNTARDLLYYAVTQDAMLIFENLSRGFGRQGKRTFMAERQYTRMEDWLTAKLAYEGLPSKTYLSKTLAQYTSKTCSNCGFTITSADYDRVLEKLKKTATGWMTTINGKELKVEGQITYYNRYKRQNVVKDLSVELDRLSEESVNNDISSWTKGRSGEALSLLKKRFSHRPVQEKFVCLNCGFETHADEQAALNIARSWLFLRSQEYKKYQTNKTTGNTDKRAFVETWQSFYRKKLKEVWKPAV

SEQ ID NO: 28050 - protein, 979 aa, synthetic construct
  REGION 1..979: note = engineered CasX variant
QEIGKRINKIRRRLVKDSNTKKAGKTGPMKTLLVRVMTPDLRERLENLRKKPENIPQPISNTSQANLNKLLTDYTEMKKAILHVYWEEFQKDPVGLMSRVAQPASKKIDQNKLKPEMDEKGNLTTAGFACSQCGQPLFVYKLEQVSEKGKAYTNYFGRCNVAEHEKLILLAQLKPEKDSDEAVTYSLGKFGQRALDFYSIHVTKESTHPVKPLAQIAGNRYASGPVGKALSDACMGTIASFLSKYQDIIIEHQKVVKGNQKRLESLRELAGKENLEYPSVTLPPQPHTKEGVDAYNEVIARVRMWVNLNLWQKLKLSRDDAKPLLRLKGFPSFPLVERQANEVDWWDMVCNVKKLINEKKEDGKVFWQNLAGYKRQEALRPYLSSEEDRKKGKKFARYQLGDLLLHLEKKHGEDWGKVYDEAWERIDKKVEGLSKHIKLEEERRSEDAQSKAALTDWLRAKASFVIEGLKEADKDEFCRCELKLQKWYGDLRGKPFAIEAENSILDISGFSKQYNCAFIWQKDGVKKLNLYLIINYFKGGKLRFKKIKPEAFEANRFYTVINKKSGEIVPMEVNFNFDDPNLIILPLAFGKRQGREFIWNDLLSLETGSLKLANGRVIEKTLYNRRTRQDEPALFVALTFERREVLDSSNIKPMNLIGVDRGENIPAVIALTDPEGCPLSRFKDSLGNPTHILRIGESYKEKQRTIQAKKEVEQRRAGGYSRKYASKAKNLADDMVRNTARDLLYYAVTQDAMLIFENLSRGFGRQGKRTFMAERQYTRMEDWLTAKLAYEGLPSKTYLSKTLAQYTSKTCSNCGFTITSADYDRVLEKLKKTATGWMTTINGKELKVEGQITYYNRYKRQNVVKDLSVELDRLSEESVNNDISSWTKGRSGEALSLLKKRFSHRPVQEKFVCLNCGFETHADEQAALNIARSWLFLRSQEYKKYQTNKTTGNTDKRAFVETWQSFYRKKLKEVWKPAV

SEQ ID NO: 28051 - protein, 979 aa, synthetic construct
  REGION 1..979: note = engineered CasX variant
QEIGKRINKIRRRLVKDSNTKKAGKTGPMKTLLVRVMTPDLRERLENLRKKPENIPQPISNTSRANLNKLLTDYTEMKKAILHVYDEEFQKDPVGLMSRVAQPASKKIDQNKLKPEMDEKGNLTTAGFACSQCGQPLFVYKLEQVSEKGKAYTNYFGRCNVAEHEKLILLAQLKPEKDSDEAVTYSLGKFGQRALDFYSIHVTKESTHPVKPLAQIAGNRYASGPVGKALSDACMGTIASFLSKYQDIIIEHQKVVKGNQKRLESLRELAGKENLEYPSVTLPPQPHTKEGVDAYNEVIARVRMWVNLNLWQKLKLSRDDAKPLLRLKGFPSFPLVERQANEVDWWDMVCNVKKLINEKKEDGKVFWQNLAGYKRQEALRPYLSSEEDRKKGKKFARYQLGDLLLHLEKKHGEDWGKVYDEAWERIDKKVEGLSKHIKLEEERRSEDAQSKAALTDWLRAKASFVIEGLKEADKDEFCRCELKLQKWYGDLRGKPFAIEAENSILDISGFSKQYNCAFIWQKDGVKKLNLYLIINYFKGGKLRFKKIKPEAFEANRFYTVINKKSGEIVPMEVNFNFDDPNLIILPLAFGKRQGREFIWNDLLSLETGSLKLANGRVIEKTLYNRRTRQDEPALFVALTFERREVLDSSNIKPMNLIGVDRGENIPAVIALTDPEGCPLSRFKDSLGNPTHILRIGESYKEKQRTIQAKKEVEQRRAGGYSRKYASKAKNLADDMVRNTARDLLYYAVTQDAMLIFENLSRGFGRQGKRTFMAERQYTRMEDWLTAKLAYEGLPSKTYLSKTLAQYTSKTCSNCGFTITSADYDRVLEKLKKTATGWMTTINGKELKVEGQITYYNRYKRQNVVKDLSVELDRLSEESVNNDISSWTKGRSGEALSLLKKRFSHRPVQEKFVCLNCGFETHADEQAALNIARSWLFLRSQEYKKYQTNKTTGNTDKRAFVETWQSFYRKKLKEVWKPAV

SEQ ID NO: 28052 - protein, 979 aa, synthetic construct
  REGION 1..979: note = engineered CasX variant
QEIGKRINKIRRRLVKDSNTKKAGKTGPMKTLLVRVMTPDLRERLENLRKKPENIPQPISNTSRANLNKLLTDYTEMKKAILHVYWEEFQKDPVGLMSRVAQPASKKIDQNKLKPEMDEKGNLTTAGFACSQCGQPLFVYKLEQVSEKGKAYTNYFGRCNVAEHEKLIKLAQLKPEKDSDEAVTYSLGKFGQRALDFYSIHVTKESTHPVKPLAQIAGNRYASGPVGKALSDACMGTIASFLSKYQDIIIEHQKVVKGNQKRLESLRELAGKENLEYPSVTLPPQPHTKEGVDAYNEVIARVRMWVNLNLWQKLKLSRDDAKPLLRLKGFPSFPLVERQANEVDWWDMVCNVKKLINEKKEDGKVFWQNLAGYKRQEALRPYLSSEEDRKKGKKFARYQLGDLLLHLEKKHGEDWGKVYDEAWERIDKKVEGLSKHIKLEEERRSEDAQSKAALTDWLRAKASFVIEGLKEADKDEFCRCELKLQKWYGDLRGKPFAIEAENSILDISGFSKQYNCAFIWQKDGVKKLNLYLIINYFKGGKLRFKKIKPEAFEANRFYTVINKKSGEIVPMEVNFNFDDPNLIILPLAFGKRQGREFIWNDLLSLETGSLKLANGRVIEKTLYNRRTRQDEPALFVALTFERREVLDSSNIKPMNLIGVDRGENIPAVIALTDPEGCPLSRFKDSLGNPTHILRIGESYKEKQRTIQAKKEVEQRRAGGYSRKYASKAKNLADDMVRNTARDLLYYAVTQDAMLIFENLSRGFGRQGKRTFMAERQYTRMEDWLTAKLAYEGLPSKTYLSKTLAQYTSKTCSNCGFTITSADYDRVLEKLKKTATGWMTTINGKELKVEGQITYYNRYKRQNVVKDLSVELDRLSEESVNNDISSWTKGRSGEALSLLKKRFSHRPVQEKFVCLNCGFETHADEQAALNIARSWLFLRSQEYKKYQTNKTTGNTDKRAFVETWQSFYRKKLKEVWKPAV

SEQ ID NO: 28053 - protein, 979 aa, synthetic construct
  REGION 1..979: note = engineered CasX variant
QEIGKRINKIRRRLVKDSNTKKAGKTGPMKTLLVRVMTPDLRERLENLRKKPENIPQPISNTSRANLNKLLTDYTEMKKAILHVYWEEFQKDPVGLMSRVAQPASKKIDQNKLKPEMDEKGNLTTAGFACSQCGQPLFVYKLEQVSEKGKAYTNYFGRCNVAEHEKLILLYQLKPEKDSDEAVTYSLGKFGQRALDFYSIHVTKESTHPVKPLAQIAGNRYASGPVGKALSDACMGTIASFLSKYQDIIIEHQKVVKGNQKRLESLRELAGKENLEYPSVTLPPQPHTKEGVDAYNEVIARVRMWVNLNLWQKLKLSRDDAKPLLRLKGFPSFPLVERQANEVDWWDMVCNVKKLINEKKEDGKVFWQNLAGYKRQEALRPYLSSEEDRKKGKKFARYQLGDLLLHLEKKHGEDWGKVYDEAWERIDKKVEGLSKHIKLEEERRSEDAQSKAALTDWLRAKASFVIEGLKEADKDEFCRCELKLQKWYGDLRGKPFAIEAENSILDISGFSKQYNCAFIWQKDGVKKLNLYLIINYFKGGKLRFKKIKPEAFEANRFYTVINKKSGEIVPMEVNFNFDDPNLIILPLAFGKRQGREFIWNDLLSLETGSLKLANGRVIEKTLYNRRTRQDEPALFVALTFERREVLDSSNIKPMNLIGVDRGENIPAVIALTDPEGCPLSRFKDSLGNPTHILRIGESYKEKQRTIQAKKEVEQRRAGGYSRKYASKAKNLADDMVRNTARDLLYYAVTQDAMLIFENLSRGFGRQGKRTFMAERQYTRMEDWLTAKLAYEGLPSKTYLSKTLAQYTSKTCSNCGFTITSADYDRVLEKLKKTATGWMTTINGKELKVEGQITYYNRYKRQNVVKDLSVELDRLSEESVNNDISSWTKGRSGEALSLLKKRFSHRPVQEKFVCLNCGFETHADEQAALNIARSWLFLRSQEYKKYQTNKTTGNTDKRAFVETWQSFYRKKLKEVWKPAV

SEQ ID NO: 28054 - protein, 979 aa, synthetic construct
  REGION 1..979: note = engineered CasX variant
QEIGKRINKIRRRLVKDSNTKKAGKTGPMKTLLVRVMTPDLRERLENLRKKPENIPQPISNTSRANLNKLLTDYTEMKKAILHVYWEEFQKDPVGLMSRVAQPASKKIDQNKLKPEMDEKGNLTTAGFACSQCGQPLFVYKLEQVSEKGKAYTNYFGRCNVAEHEKLILLSQLKPEKDSDEAVTYSLGKFGQRALDFYSIHVTKESTHPVKPLAQIAGNRYASGPVGKALSDACMGTIASFLSKYQDIIIEHQKVVKGNQKRLESLRELAGKENLEYPSVTLPPQPHTKEGVDAYNEVIARVRMWVNLNLWQKLKLSRDDAKPLLRLKGFPSFPLVERQANEVDWWDMVCNVKKLINEKKEDGKVFWQNLAGYKRQEALRPYLSSEEDRKKGKKFARYQLGDLLLHLEKKHGEDWGKVYDEAWERIDKKVEGLSKHIKLEEERRSEDAQSKAALTDWLRAKASFVIEGLKEADKDEFCRCELKLQKWYGDLRGKPFAIEAENSILDISGFSKQYNCAFIWQKDGVKKLNLYLIINYFKGGKLRFKKIKPEAFEANRFYTVINKKSGEIVPMEVNFNFDDPNLIILPLAFGKRQGREFIWNDLLSLETGSLKLANGRVIEKTLYNRRTRQDEPALFVALTFERREVLDSSNIKPMNLIGVDRGENIPAVIALTDPEGCPLSRFKDSLGNPTHILRIGESYKEKQRTIQAKKEVEQRRAGGYSRKYASKAKNLADDMVRNTARDLLYYAVTQDAMLIFENLSRGFGRQGKRTFMAERQYTRMEDWLTAKLAYEGLPSKTYLSKTLAQYTSKTCSNCGFTITSADYDRVLEKLKKTATGWMTTINGKELKVEGQITYYNRYKRQNVVKDLSVELDRLSEESVNNDISSWTKGRSGEALSLLKKRFSHRPVQEKFVCLNCGFETHADEQAALNIARSWLFLRSQEYKKYQTNKTTGNTDKRAFVETWQSFYRKKLKEVWKPAV

SEQ ID NO: 28055 - protein, 978 aa, synthetic construct
  REGION 1..978: note = engineered CasX variant
QEIGKRINKIRRRLVKDSNTKKAGKTGPMKTLLVRVMTPDLRERLENLRKKPENIPQPISNTSRANLNKLLTDYTEMKKAILHVYWEEFQKDPVGLMSRVAQPASKKIDQNKLKPEMDEKGNLTTAGFACSQCGQPLFVYKLEQVSEKGKAYTNYFGRCNVAEHEKLILLAQLKPEKDSDEAVTYSLGKFGQRALDFYSIHVTKESTHPVKPLAQIAGNRYASPVGKALSDACMGTIASFLSKYQDIIIEHQKVVKGNQKRLESLRELAGKENLEYPSVTLPPQPHTKEGVDAYNEVIARVRMWVNLNLWQKLKLSRDDAKPLLRLKGFPSFPLVERQANEVDWWDMVCNVKKLINEKKEDGKVFWQNLAGYKRQEALRPYLSSEEDRKKGKKFARYQLGDLLLHLEKKHGEDWGKVYDEAWERIDKKVEGLSKHIKLEEERRSEDAQSKAALTDWLRAKASFVIEGLKEADKDEFCRCELKLQKWYGDLRGKPFAIEAENSILDISGFSKQYNCAFIWQKDGVKKLNLYLIINYFKGGKLRFKKIKPEAFEANRFYTVINKKSGEIVPMEVNFNFDDPNLIILPLAFGKRQGREFIWNDLLSLETGSLKLANGRVIEKTLYNRRTRQDEPALFVALTFERREVLDSSNIKPMNLIGVDRGENIPAVIALTDPEGCPLSRFKDSLGNPTHILRIGESYKEKQRTIQAKKEVEQRRAGGYSRKYASKAKNLADDMVRNTARDLLYYAVTQDAMLIFENLSRGFGRQGKRTFMAERQYTRMEDWLTAKLAYEGLPSKTYLSKTLAQYTSKTCSNCGFTITSADYDRVLEKLKKTATGWMTTINGKELKVEGQITYYNRYKRQNVVKDLSVELDRLSEESVNNDISSWTKGRSGEALSLLKKRFSHRPVQEKFVCLNCGFETHADEQAALNIARSWLFLRSQEYKKYQTNKTTGNTDKRAFVETWQSFYRKKLKEVWKPAV

SEQ ID NO: 28056 - protein, 979 aa, synthetic construct
  REGION 1..979: note = engineered CasX variant
QEIGKRINKIRRRLVKDSNTKKAGKTGPMKTLLVRVMTPDLRERLENLRKKPENIPQPISNTSRANLNKLLTDYTEMKKAILHVYWEEFQKDPVGLMSRVAQPASKKIDQNKLKPEMDEKGNLTTAGFACSQCGQPLFVYKLEQVSEKGKAYTNYFGRCNVAEHEKLILLAQLKPEKDSDEAVTYSLGKFGQRALDFYSIHVTKESTHPVKPLAQIAGNRYASGPVGKALSDACMGTIASFLSKYQDIIIEHQKVVKGNQKRLESLRELAGKENLEYPSVTLPPQPHTSEGVDAYNEVIARVRMWVNLNLWQKLKLSRDDAKPLLRLKGFPSFPLVERQANEVDWWDMVCNVKKLINEKKEDGKVFWQNLAGYKRQEALRPYLSSEEDRKKGKKFARYQLGDLLLHLEKKHGEDWGKVYDEAWERIDKKVEGLSKHIKLEEERRSEDAQSKAALTDWLRAKASFVIEGLKEADKDEFCRCELKLQKWYGDLRGKPFAIEAENSILDISGFSKQYNCAFIWQKDGVKKLNLYLIINYFKGGKLRFKKIKPEAFEANRFYTVINKKSGEIVPMEVNFNFDDPNLIILPLAFGKRQGREFIWNDLLSLETGSLKLANGRVIEKTLYNRRTRQDEPALFVALTFERREVLDSSNIKPMNLIGVDRGENIPAVIALTDPEGCPLSRFKDSLGNPTHILRIGESYKEKQRTIQAKKEVEQRRAGGYSRKYASKAKNLADDMVRNTARDLLYYAVTQDAMLIFENLSRGFGRQGKRTFMAERQYTRMEDWLTAKLAYEGLPSKTYLSKTLAQYTSKTCSNCGFTITSADYDRVLEKLKKTATGWMTTINGKELKVEGQITYYNRYKRQNVVKDLSVELDRLSEESVNNDISSWTKGRSGEALSLLKKRFSHRPVQEKFVCLNCGFETHADEQAALNIARSWLFLRSQEYKKYQTNKTTGNTDKRAFVETWQSFYRKKLKEVWKPAV

SEQ ID NO: 28057 - protein, 979 aa, synthetic construct
  REGION 1..979: note = engineered CasX variant
QEIGKRINKIRRRLVKDSNTKKAGKTGPMKTLLVRVMTPDLRERLENLRKKPENIPQPISNTSRANLNKLLTDYTEMKKAILHVYWEEFQKDPVGLMSRVAQPASKKIDQNKLKPEMDEKGNLTTAGFACSQCGQPLFVYKLEQVSEKGKAYTNYFGRCNVAEHEKLILLAQLKPEKDSDEAVTYSLGKFGQRALDFYSIHVTKESTHPVKPLAQIAGNRYASGPVGKALSDACMGTIASFLSKYQDIIIEHQKVVKGNQKRLESLRELAGKENLEYPSVTLPPQPHTKEGLDAYNEVIARVRMWVNLNLWQKLKLSRDDAKPLLRLKGFPSFPLVERQANEVDWWDMVCNVKKLINEKKEDGKVFWQNLAGYKRQEALRPYLSSEEDRKKGKKFARYQLGDLLLHLEKKHGEDWGKVYDEAWERIDKKVEGLSKHIKLEEERRSEDAQSKAALTDWLRAKASFVIEGLKEADKDEFCRCELKLQKWYGDLRGKPFAIEAENSILDISGFSKQYNCAFIWQKDGVKKLNLYLIINYFKGGKLRFKKIKPEAFEANRFYTVINKKSGEIVPMEVNFNFDDPNLIILPLAFGKRQGREFIWNDLLSLETGSLKLANGRVIEKTLYNRRTRQDEPALFVALTFERREVLDSSNIKPMNLIGVDRGENIPAVIALTDPEGCPLSRFKDSLGNPTHILRIGESYKEKQRTIQAKKEVEQRRAGGYSRKYASKAKNLADDMVRNTARDLLYYAVTQDAMLIFENLSRGFGRQGKRTFMAERQYTRMEDWLTAKLAYEGLPSKTYLSKTLAQYTSKTCSNCGFTITSADYDRVLEKLKKTATGWMTTINGKELKVEGQITYYNRYKRQNVVKDLSVELDRLSEESVNNDISSWTKGRSGEALSLLKKRFSHRPVQEKFVCLNCGFETHADEQAALNIARSWLFLRSQEYKKYQTNKTTGNTDKRAFVETWQSFYRKKLKEVWKPAV

SEQ ID NO: 28058 - protein, 979 aa, synthetic construct
  REGION 1..979: note = engineered CasX variant
QEIGKRINKIRRRLVKDSNTKKAGKTGPMKTLLVRVMTPDLRERLENLRKKPENIPQPISNTSRANLNKLLTDYTEMKKAILHVYWEEFQKDPVGLMSRVAQPASKKIDQNKLKPEMDEKGNLTTAGFACSQCGQPLFVYKLEQVSEKGKAYTNYFGRCNVAEHEKLILLAQLKPEKDSDEAVTYSLGKFGQRALDFYSIHVTKESTHPVKPLAQIAGNRYASGPVGKALSDACMGTIASFLSKYQDIIIEHQKVVKGNQKRLESLRELAGKENLEYPSVTLPPQPHTKEGVDAYNEVIARVRTWVNLNLWQKLKLSRDDAKPLLRLKGFPSFPLVERQANEVDWWDMVCNVKKLINEKKEDGKVFWQNLAGYKRQEALRPYLSSEEDRKKGKKFARYQLGDLLLHLEKKHGEDWGKVYDEAWERIDKKVEGLSKHIKLEEERRSEDAQSKAALTDWLRAKASFVIEGLKEADKDEFCRCELKLQKWYGDLRGKPFAIEAENSILDISGFSKQYNCAFIWQKDGVKKLNLYLIINYFKGGKLRFKKIKPEAFEANRFYTVINKKSGEIVPMEVNFNFDDPNLIILPLAFGKRQGREFIWNDLLSLETGSLKLANGRVIEKTLYNRRTRQDEPALFVALTFERREVLDSSNIKPMNLIGVDRGENIPAVIALTDPEGCPLSRFKDSLGNPTHILRIGESYKEKQRTIQAKKEVEQRRAGGYSRKYASKAKNLADDMVRNTARDLLYYAVTQDAMLIFENLSRGFGRQGKRTFMAERQYTRMEDWLTAKLAYEGLPSKTYLSKTLAQYTSKTCSNCGFTITSADYDRVLEKLKKTATGWMTTINGKELKVEGQITYYNRYKRQNVVKDLSVELDRLSEESVNNDISSWTKGRSGEALSLLKKRFSHRPVQEKFVCLNCGFETHADEQAALNIARSWLFLRSQEYKKYQTNKTTGNTDKRAFVETWQSFYRKKLKEVWKPAV

SEQ ID NO: 28059 - protein, 979 aa, synthetic construct
  REGION 1..979: note = engineered CasX variant
QEIGKRINKIRRRLVKDSNTKKAGKTGPMKTLLVRVMTPDLRERLENLRKKPENIPQPISNTSRANLNKLLTDYTEMKKAILHVYWEEFQKDPVGLMSRVAQPASKKIDQNKLKPEMDEKGNLTTAGFACSQCGQPLFVYKLEQVSEKGKAYTNYFGRCNVAEHEKLILLAQLKPEKDSDEAVTYSLGKFGQRALDFYSIHVTKESTHPVKPLAQIAGNRYASGPVGKALSDACMGTIASFLSKYQDIIIEHQKVVKGNQKRLESLRELAGKENLEYPSVTLPPQPHTKEGVDAYNEVIARVRWWVNLNLWQKLKLSRDDAKPLLRLKGFPSFPLVERQANEVDWWDMVCNVKKLINEKKEDGKVFWQNLAGYKRQEALRPYLSSEEDRKKGKKFARYQLGDLLLHLEKKHGEDWGKVYDEAWERIDKKVEGLSKHIKLEEERRSEDAQSKAALTDWLRAKASFVIEGLKEADKDEFCRCELKLQKWYGDLRGKPFAIEAENSILDISGFSKQYNCAFIWQKDGVKKLNLYLIINYFKGGKLRFKKIKPEAFEANRFYTVINKKSGEIVPMEVNFNFDDPNLIILPLAFGKRQGREFIWNDLLSLETGSLKLANGRVIEKTLYNRRTRQDEPALFVALTFERREVLDSSNIKPMNLIGVDRGENIPAVIALTDPEGCPLSRFKDSLGNPTHILRIGESYKEKQRTIQAKKEVEQRRAGGYSRKYASKAKNLADDMVRNTARDLLYYAVTQDAMLIFENLSRGFGRQGKRTFMAERQYTRMEDWLTAKLAYEGLPSKTYLSKTLAQYTSKTCSNCGFTITSADYDRVLEKLKKTATGWMTTINGKELKVEGQITYYNRYKRQNVVKDLSVELDRLSEESVNNDISSWTKGRSGEALSLLKKRFSHRPVQEKFVCLNCGFETHADEQAALNIARSWLFLRSQEYKKYQTNKTTGNTDKRAFVETWQSFYRKKLKEVWKPAV

SEQ ID NO: 28060 - protein, 980 aa, synthetic construct
  REGION 1..980: note = engineered CasX variant
QEIGKRINKIRRRLVKDSNTKKAGKTGPMKTLLVRVMTPDLRERLENLRKKPENIPQPISNTSRANLNKLLTDYTEMKKAILHVYWEEFQKDPVGLMSRVAQPASKKIDQNKLKPEMDEKGNLTTAGFACSQCGQPLFVYKLEQVSEKGKAYTNYFGRCNVAEHEKLILLAQLKPEKDSDEAVTYSLGKFGQRALDFYSIHVTKESTHPVKPLAQIAGNRYASGPVGKALSDACMGTIASFLSKYQDIIIEHQKVVKGNQKRLESLRELAGKENLEYPSVTLPPQPHTKEGVDAYNEVIARVRMWVNLNLWQKLKLSRDDAKPLLRLKGFPSFPLVERQQANEVDWWDMVCNVKKLINEKKEDGKVFWQNLAGYKRQEALRPYLSSEEDRKKGKKFARYQLGDLLLHLEKKHGEDWGKVYDEAWERIDKKVEGLSKHIKLEEERRSEDAQSKAALTDWLRAKASFVIEGLKEADKDEFCRCELKLQKWYGDLRGKPFAIEAENSILDISGFSKQYNCAFIWQKDGVKKLNLYLIINYFKGGKLRFKKIKPEAFEANRFYTVINKKSGEIVPMEVNFNFDDPNLIILPLAFGKRQGREFIWNDLLSLETGSLKLANGRVIEKTLYNRRTRQDEPALFVALTFERREVLDSSNIKPMNLIGVDRGENIPAVIALTDPEGCPLSRFKDSLGNPTHILRIGESYKEKQRTIQAKKEVEQRRAGGYSRKYASKAKNLADDMVRNTARDLLYYAVTQDAMLIFENLSRGFGRQGKRTFMAERQYTRMEDWLTAKLAYEGLPSKTYLSKTLAQYTSKTCSNCGFTITSADYDRVLEKLKKTATGWMTTINGKELKVEGQITYYNRYKRQNVVKDLSVELDRLSEESVNNDISSWTKGRSGEALSLLKKRFSHRPVQEKFVCLNCGFETHADEQAALNIARSWLFLRSQEYKKYQTNKTTGNTDKRAFVETWQSFYRKKLKEVWKPAV

SEQ ID NO: 28061 - protein, 980 aa, synthetic construct
  REGION 1..980: note = engineered CasX variant
QEIGKRINKIRRRLVKDSNTKKAGKTGPMKTLLVRVMTPDLRERLENLRKKPENIPQPISNTSRANLNKLLTDYTEMKKAILHVYWEEFQKDPVGLMSRVAQPASKKIDQNKLKPEMDEKGNLTTAGFACSQCGQPLFVYKLEQVSEKGKAYTNYFGRCNVAEHEKLILLAQLKPEKDSDEAVTYSLGKFGQRALDFYSIHVTKESTHPVKPLAQIAGNRYASGPVGKALSDACMGTIASFLSKYQDIIIEHQKVVKGNQKRLESLRELAGKENLEYPSVTLPPQPHTKEGVDAYNEVIARVRMWVNLNLWQKLKLSRDDAKPLLRLKGFPSFPLVERQANAEVDWWDMVCNVKKLINEKKEDGKVFWQNLAGYKRQEALRPYLSSEEDRKKGKKFARYQLGDLLLHLEKKHGEDWGKVYDEAWERIDKKVEGLSKHIKLEEERRSEDAQSKAALTDWLRAKASFVIEGLKEADKDEFCRCELKLQKWYGDLRGKPFAIEAENSILDISGFSKQYNCAFIWQKDGVKKLNLYLIINYFKGGKLRFKKIKPEAFEANRFYTVINKKSGEIVPMEVNFNFDDPNLIILPLAFGKRQGREFIWNDLLSLETGSLKLANGRVIEKTLYNRRTRQDEPALFVALTFERREVLDSSNIKPMNLIGVDRGENIPAVIALTDPEGCPLSRFKDSLGNPTHILRIGESYKEKQRTIQAKKEVEQRRAGGYSRKYASKAKNLADDMVRNTARDLLYYAVTQDAMLIFENLSRGFGRQGKRTFMAERQYTRMEDWLTAKLAYEGLPSKTYLSKTLAQYTSKTCSNCGFTITSADYDRVLEKLKKTATGWMTTINGKELKVEGQITYYNRYKRQNVVKDLSVELDRLSEESVNNDISSWTKGRSGEALSLLKKRFSHRPVQEKFVCLNCGFETHADEQAALNIARSWLFLRSQEYKKYQTNKTTGNTDKRAFVETWQSFYRKKLKEVWKPAV

SEQ ID NO: 28062 - protein, 979 aa, synthetic construct
  REGION 1..979: note = engineered CasX variant
QEIGKRINKIRRRLVKDSNTKKAGKTGPMKTLLVRVMTPDLRERLENLRKKPENIPQPISNTSRANLNKLLTDYTEMKKAILHVYWEEFQKDPVGLMSRVAQPASKKIDQNKLKPEMDEKGNLTTAGFACSQCGQPLFVYKLEQVSEKGKAYTNYFGRCNVAEHEKLILLAQLKPEKDSDEAVTYSLGKFGQRALDFYSIHVTKESTHPVKPLAQIAGNRYASGPVGKALSDACMGTIASFLSKYQDIIIEHQKVVKGNQKRLESLRELAGKENLEYPSVTLPPQPHTKEGVDAYNEVIARVRMWVNLNLWQKLKLSRDDAKPLLRLKGFPSFPLVERQANEVDWWDMVCNVKKLINEKKEDGKVFWQNLAGYKRQEALRPYLSSEEDRKKGKKFARTQLGDLLLHLEKKHGEDWGKVYDEAWERIDKKVEGLSKHIKLEEERRSEDAQSKAALTDWLRAKASFVIEGLKEADKDEFCRCELKLQKWYGDLRGKPFAIEAENSILDISGFSKQYNCAFIWQKDGVKKLNLYLIINYFKGGKLRFKKIKPEAFEANRFYTVINKKSGEIVPMEVNFNFDDPNLIILPLAFGKRQGREFIWNDLLSLETGSLKLANGRVIEKTLYNRRTRQDEPALFVALTFERREVLDSSNIKPMNLIGVDRGENIPAVIALTDPEGCPLSRFKDSLGNPTHILRIGESYKEKQRTIQAKKEVEQRRAGGYSRKYASKAKNLADDMVRNTARDLLYYAVTQDAMLIFENLSRGFGRQGKRTFMAERQYTRMEDWLTAKLAYEGLPSKTYLSKTLAQYTSKTCSNCGFTITSADYDRVLEKLKKTATGWMTTINGKELKVEGQITYYNRYKRQNVVKDLSVELDRLSEESVNNDISSWTKGRSGEALSLLKKRFSHRPVQEKFVCLNCGFETHADEQAALNIARSWLFLRSQEYKKYQTNKTTGNTDKRAFVETWQSFYRKKLKEVWKPAV

SEQ ID NO: 28063 - protein, 980 aa, synthetic construct
  REGION 1..980: note = engineered CasX variant
QEIGKRINKIRRRLVKDSNTKKAGKTGPMKTLLVRVMTPDLRERLENLRKKPENIPQPISNTSRANLNKLLTDYTEMKKAILHVYWEEFQKDPVGLMSRVAQPASKKIDQNKLKPEMDEKGNLTTAGFACSQCGQPLFVYKLEQVSEKGKAYTNYFGRCNVAEHEKLILLAQLKPEKDSDEAVTYSLGKFGQRALDFYSIHVTKESTHPVKPLAQIAGNRYASGPVGKALSDACMGTIASFLSKYQDIIIEHQKVVKGNQKRLESLRELAGKENLEYPSVTLPPQPHTKEGVDAYNEVIARVRMWVNLNLWQKLKLSRDDAKPLLRLKGFPSFPLVERQANEVDWWDMVCNVKKLINEKKEDGKVFWQNLAGYKRQEALRPYLSSEEDRKKGKKFARYQLGDLLLHLEKKHEGEDWGKVYDEAWERIDKKVEGLSKHIKLEEERRSEDAQSKAALTDWLRAKASFVIEGLKEADKDEFCRCELKLQKWYGDLRGKPFAIEAENSILDISGFSKQYNCAFIWQKDGVKKLNLYLIINYFKGGKLRFKKIKPEAFEANRFYTVINKKSGEIVPMEVNFNFDDPNLIILPLAFGKRQGREFIWNDLLSLETGSLKLANGRVIEKTLYNRRTRQDEPALFVALTFERREVLDSSNIKPMNLIGVDRGENIPAVIALTDPEGCPLSRFKDSLGNPTHILRIGESYKEKQRTIQAKKEVEQRRAGGYSRKYASKAKNLADDMVRNTARDLLYYAVTQDAMLIFENLSRGFGRQGKRTFMAERQYTRMEDWLTAKLAYEGLPSKTYLSKTLAQYTSKTCSNCGFTITSADYDRVLEKLKKTATGWMTTINGKELKVEGQITYYNRYKRQNVVKDLSVELDRLSEESVNNDISSWTKGRSGEALSLLKKRFSHRPVQEKFVCLNCGFETHADEQAALNIARSWLFLRSQEYKKYQTNKTTGNTDKRAFVETWQSFYRKKLKEVWKPAV

SEQ ID NO: 28064 - protein, 979 aa, synthetic construct
  REGION 1..979: note = engineered CasX variant
QEIGKRINKIRRRLVKDSNTKKAGKTGPMKTLLVRVMTPDLRERLENLRKKPENIPQPISNTSRANLNKLLTDYTEMKKAILHVYWEEFQKDPVGLMSRVAQPASKKIDQNKLKPEMDEKGNLTTAGFACSQCGQPLFVYKLEQVSEKGKAYTNYFGRCNVAEHEKLILLAQLKPEKDSDEAVTYSLGKFGQRALDFYSIHVTKESTHPVKPLAQIAGNRYASGPVGKALSDACMGTIASFLSKYQDIIIEHQKVVKGNQKRLESLRELAGKENLEYPSVTLPPQPHTKEGVDAYNEVIARVRMWVNLNLWQKLKLSRDDAKPLLRLKGFPSFPLVERQANEVDWWDMVCNVKKLINEKKEDGKVFWQNLAGYKRQEALRPYLSSEEDRKKGKKFARYQLGDLLLHLEKKHGEDWGKVYDEAWERIDKKVEGLSKHIKLEEERRSEDAQSKAALTDWLRAKASFVIEGLKEADKDEFCRCDLKLQKWYGDLRGKPFAIEAENSILDISGFSKQYNCAFIWQKDGVKKLNLYLIINYFKGGKLRFKKIKPEAFEANRFYTVINKKSGEIVPMEVNFNFDDPNLIILPLAFGKRQGREFIWNDLLSLETGSLKLANGRVIEKTLYNRRTRQDEPALFVALTFERREVLDSSNIKPMNLIGVDRGENIPAVIALTDPEGCPLSRFKDSLGNPTHILRIGESYKEKQRTIQAKKEVEQRRAGGYSRKYASKAKNLADDMVRNTARDLLYYAVTQDAMLIFENLSRGFGRQGKRTFMAERQYTRMEDWLTAKLAYEGLPSKTYLSKTLAQYTSKTCSNCGFTITSADYDRVLEKLKKTATGWMTTINGKELKVEGQITYYNRYKRQNVVKDLSVELDRLSEESVNNDISSWTKGRSGEALSLLKKRFSHRPVQEKFVCLNCGFETHADEQAALNIARSWLFLRSQEYKKYQTNKTTGNTDKRAFVETWQSFYRKKLKEVWKPAV

SEQ ID NO: 28065 - protein, 979 aa, synthetic construct
  REGION 1..979: note = engineered CasX variant
QEIGKRINKIRRRLVKDSNTKKAGKTGPMKTLLVRVMTPDLRERLENLRKKPENIPQPISNTSRANLNKLLTDYTEMKKAILHVYWEEFQKDPVGLMSRVAQPASKKIDQNKLKPEMDEKGNLTTAGFACSQCGQPLFVYKLEQVSEKGKAYTNYFGRCNVAEHEKLILLAQLKPEKDSDEAVTYSLGKFGQRALDFYSIHVTKESTHPVKPLAQIAGNRYASGPVGKALSDACMGTIASFLSKYQDIIIEHQKVVKGNQKRLESLRELAGKENLEYPSVTLPPQPHTKEGVDAYNEVIARVRMWVNLNLWQKLKLSRDDAKPLLRLKGFPSFPLVERQANEVDWWDMVCNVKKLINEKKEDGKVFWQNLAGYKRQEALRPYLSSEEDRKKGKKFARYQLGDLLLHLEKKHGEDWGKVYDEAWERIDKKVEGLSKHIKLEEERRSEDAQSKAALTDWLRAKASFVIEGLKEADKDEFCRCELKLQKWYGDLRGKPFAIEAENSILDISGFSKQYNCAFIWQKDGVKKLNLYLIINYFKGGKLRFKKIKPEAFEANRFYTVINKKSGEIVPMEVNFNFDDPNLIILPLAFGKRFGREFIWNDLLSLETGSLKLANGRVIEKTLYNRRTRQDEPALFVALTFERREVLDSSNIKPMNLIGVDRGENIPAVIALTDPEGCPLSRFKDSLGNPTHILRIGESYKEKQRTIQAKKEVEQRRAGGYSRKYASKAKNLADDMVRNTARDLLYYAVTQDAMLIFENLSRGFGRQGKRTFMAERQYTRMEDWLTAKLAYEGLPSKTYLSKTLAQYTSKTCSNCGFTITSADYDRVLEKLKKTATGWMTTINGKELKVEGQITYYNRYKRQNVVKDLSVELDRLSEESVNNDISSWTKGRSGEALSLLKKRFSHRPVQEKFVCLNCGFETHADEQAALNIARSWLFLRSQEYKKYQTNKTTGNTDKRAFVETWQSFYRKKLKEVWKPAV

SEQ ID NO: 28066 - protein, 979 aa, synthetic construct
  REGION 1..979: note = engineered CasX variant
QEIGKRINKIRRRLVKDSNTKKAGKTGPMKTLLVRVMTPDLRERLENLRKKPENIPQPISNTSRANLNKLLTDYTEMKKAILHVYWEEFQKDPVGLMSRVAQPASKKIDQNKLKPEMDEKGNLTTAGFACSQCGQPLFVYKLEQVSEKGKAYTNYFGRCNVAEHEKLILLAQLKPEKDSDEAVTYSLGKFGQRALDFYSIHVTKESTHPVKPLAQIAGNRYASGPVGKALSDACMGTIASFLSKYQDIIIEHQKVVKGNQKRLESLRELAGKENLEYPSVTLPPQPHTKEGVDAYNEVIARVRMWVNLNLWQKLKLSRDDAKPLLRLKGFPSFPLVERQANEVDWWDMVCNVKKLINEKKEDGKVFWQNLAGYKRQEALRPYLSSEEDRKKGKKFARYQLGDLLLHLEKKHGEDWGKVYDEAWERIDKKVEGLSKHIKLEEERRSEDAQSKAALTDWLRAKASFVIEGLKEADKDEFCRCELKLQKWYGDLRGKPFAIEAENSILDISGFSKQYNCAFIWQKDGVKKLNLYLIINYFKGGKLRFKKIKPEAFEANRFYTVINKKSGEIVPMEVNFNFDDPNLIILPLAFGKRVGREFIWNDLLSLETGSLKLANGRVIEKTLYNRRTRQDEPALFVALTFERREVLDSSNIKPMNLIGVDRGENIPAVIALTDPEGCPLSRFKDSLGNPTHILRIGESYKEKQRTIQAKKEVEQRRAGGYSRKYASKAKNLADDMVRNTARDLLYYAVTQDAMLIFENLSRGFGRQGKRTFMAERQYTRMEDWLTAKLAYEGLPSKTYLSKTLAQYTSKTCSNCGFTITSADYDRVLEKLKKTATGWMTTINGKELKVEGQITYYNRYKRQNVVKDLSVELDRLSEESVNNDISSWTKGRSGEALSLLKKRFSHRPVQEKFVCLNCGFETHADEQAALNIARSWLFLRSQEYKKYQTNKTTGNTDKRAFVETWQSFYRKKLKEVWKPAV

SEQ ID NO: 28067 - protein, 980 aa, synthetic construct
  REGION 1..980: note = engineered CasX variant
QEIGKRINKIRRRLVKDSNTKKAGKTGPMKTLLVRVMTPDLRERLENLRKKPENIPQPISNTSRANLNKLLTDYTEMKKAILHVYWEEFQKDPVGLMSRVAQPASKKIDQNKLKPEMDEKGNLTTAGFACSQCGQPLFVYKLEQVSEKGKAYTNYFGRCNVAEHEKLILLAQLKPEKDSDEAVTYSLGKFGQRALDFYSIHVTKESTHPVKPLAQIAGNRYASGPVGKALSDACMGTIASFLSKYQDIIIEHQKVVKGNQKRLESLRELAGKENLEYPSVTLPPQPHTKEGVDAYNEVIARVRMWVNLNLWQKLKLSRDDAKPLLRLKGFPSFPLVERQANEVDWWDMVCNVKKLINEKKEDGKVFWQNLAGYKRQEALRPYLSSEEDRKKGKKFARYQLGDLLLHLEKKHGEDWGKVYDEAWERIDKKVEGLSKHIKLEEERRSEDAQSKAALTDWLRAKASFVIEGLKEADKDEFCRCELKLQKWYGDLRGKPFAIEAENSILDISGFSKQYNCAFIWQKDGVKKLNLYLIINYFKGGKLRFKKIKPEAFEANRFYTVINKKSGEIVPMEVNFNFDDPNLIILPLAFGKRQGREFIWNDLLSLETGSLKLANGRVIEKTLYNRRTRQDEPALFVALTFERREVLDSSNIKTPMNLIGVDRGENIPAVIALTDPEGCPLSRFKDSLGNPTHILRIGESYKEKQRTIQAKKEVEQRRAGGYSRKYASKAKNLADDMVRNTARDLLYYAVTQDAMLIFENLSRGFGRQGKRTFMAERQYTRMEDWLTAKLAYEGLPSKTYLSKTLAQYTSKTCSNCGFTITSADYDRVLEKLKKTATGWMTTINGKELKVEGQITYYNRYKRQNVVKDLSVELDRLSEESVNNDISSWTKGRSGEALSLLKKRFSHRPVQEKFVCLNCGFETHADEQAALNIARSWLFLRSQEYKKYQTNKTTGNTDKRAFVETWQSFYRKKLKEVWKPAV

SEQ ID NO: 28068 - protein, 980 aa, synthetic construct
  REGION 1..980: note = engineered CasX variant
QEIGKRINKIRRRLVKDSNTKKAGKTGPMKTLLVRVMTPDLRERLENLRKKPENIPQPISNTSRANLNKLLTDYTEMKKAILHVYWEEFQKDPVGLMSRVAQPASKKIDQNKLKPEMDEKGNLTTAGFACSQCGQPLFVYKLEQVSEKGKAYTNYFGRCNVAEHEKLILLAQLKPEKDSDEAVTYSLGKFGQRALDFYSIHVTKESTHPVKPLAQIAGNRYASGPVGKALSDACMGTIASFLSKYQDIIIEHQKVVKGNQKRLESLRELAGKENLEYPSVTLPPQPHTKEGVDAYNEVIARVRMWVNLNLWQKLKLSRDDAKPLLRLKGFPSFPLVERQANEVDWWDMVCNVKKLINEKKEDGKVFWQNLAGYKRQEALRPYLSSEEDRKKGKKFARYQLGDLLLHLEKKHGEDWGKVYDEAWERIDKKVEGLSKHIKLEEERRSEDAQSKAALTDWLRAKASFVIEGLKEADKDEFCRCELKLQKWYGDLRGKPFAIEAENSILDISGFSKQYNCAFIWQKDGVKKLNLYLIINYFKGGKLRFKKIKPEAFEANRFYTVINKKSGEIVPMEVNFNFDDPNLIILPLAFGKRQGREFIWNDLLSLETGSLKLANGRVIEKTLYNRRTRQDEPALFVALTFERREVLDSSNIKPMSNLIGVDRGENIPAVIALTDPEGCPLSRFKDSLGNPTHILRIGESYKEKQRTIQAKKEVEQRRAGGYSRKYASKAKNLADDMVRNTARDLLYYAVTQDAMLIFENLSRGFGRQGKRTFMAERQYTRMEDWLTAKLAYEGLPSKTYLSKTLAQYTSKTCSNCGFTITSADYDRVLEKLKKTATGWMTTINGKELKVEGQITYYNRYKRQNVVKDLSVELDRLSEESVNNDISSWTKGRSGEALSLLKKRFSHRPVQEKFVCLNCGFETHADEQAALNIARSWLFLRSQEYKKYQTNKTTGNTDKRAFVETWQSFYRKKLKEVWKPAV

SEQ ID NO: 28069 - protein, 979 aa, synthetic construct
  REGION 1..979: note = engineered CasX variant
QEIGKRINKIRRRLVKDSNTKKAGKTGPMKTLLVRVMTPDLRERLENLRKKPENIPQPISNTSRANLNKLLTDYTEMKKAILHVYWEEFQKDPVGLMSRVAQPASKKIDQNKLKPEMDEKGNLTTAGFACSQCGQPLFVYKLEQVSEKGKAYTNYFGRCNVAEHEKLILLAQLKPEKDSDEAVTYSLGKFGQRALDFYSIHVTKESTHPVKPLAQIAGNRYASGPVGKALSDACMGTIASFLSKYQDIIIEHQKVVKGNQKRLESLRELAGKENLEYPSVTLPPQPHTKEGVDAYNEVIARVRMWVNLNLWQKLKLSRDDAKPLLRLKGFPSFPLVERQANEVDWWDMVCNVKKLINEKKEDGKVFWQNLAGYKRQEALRPYLSSEEDRKKGKKFARYQLGDLLLHLEKKHGEDWGKVYDEAWERIDKKVEGLSKHIKLEEERRSEDAQSKAALTDWLRAKASFVIEGLKEADKDEFCRCELKLQKWYGDLRGKPFAIEAENSILDISGFSKQYNCAFIWQKDGVKKLNLYLIINYFKGGKLRFKKIKPEAFEANRFYTVINKKSGEIVPMEVNFNFDDPNLIILPLAFGKRQGREFIWNDLLSLETGSLKLANGRVIEKTLYNRRTRQDEPALFVALTFERREVLDSSNIKPMNLIGVDRGENIPAVIALTDPEGCPLSRFKDSLGNPTHILRIRESYKEKQRTIQAKKEVEQRRAGGYSRKYASKAKNLADDMVRNTARDLLYYAVTQDAMLIFENLSRGFGRQGKRTFMAERQYTRMEDWLTAKLAYEGLPSKTYLSKTLAQYTSKTCSNCGFTITSADYDRVLEKLKKTATGWMTTINGKELKVEGQITYYNRYKRQNVVKDLSVELDRLSEESVNNDISSWTKGRSGEALSLLKKRFSHRPVQEKFVCLNCGFETHADEQAALNIARSWLFLRSQEYKKYQTNKTTGNTDKRAFVETWQSFYRKKLKEVWKPAV

SEQ ID NO: 28070 - protein, 979 aa, synthetic construct
  REGION 1..979: note = engineered CasX variant
QEIGKRINKIRRRLVKDSNTKKAGKTGPMKTLLVRVMTPDLRERLENLRKKPENIPQPISNTSRANLNKLLTDYTEMKKAILHVYWEEFQKDPVGLMSRVAQPASKKIDQNKLKPEMDEKGNLTTAGFACSQCGQPLFVYKLEQVSEKGKAYTNYFGRCNVAEHEKLILLAQLKPEKDSDEAVTYSLGKFGQRALDFYSIHVTKESTHPVKPLAQIAGNRYASGPVGKALSDACMGTIASFLSKYQDIIIEHQKVVKGNQKRLESLRELAGKENLEYPSVTLPPQPHTKEGVDAYNEVIARVRMWVNLNLWQKLKLSRDDAKPLLRLKGFPSFPLVERQANEVDWWDMVCNVKKLINEKKEDGKVFWQNLAGYKRQEALRPYLSSEEDRKKGKKFARYQLGDLLLHLEKKHGEDWGKVYDEAWERIDKKVEGLSKHIKLEEERRSEDAQSKAALTDWLRAKASFVIEGLKEADKDEFCRCELKLQKWYGDLRGKPFAIEAENSILDISGFSKQYNCAFIWQKDGVKKLNLYLIINYFKGGKLRFKKIKPEAFEANRFYTVINKKSGEIVPMEVNFNFDDPNLIILPLAFGKRQGREFIWNDLLSLETGSLKLANGRVIEKTLYNRRTRQDEPALFVALTFERREVLDSSNIKPMNLIGVDRGENIPAVIALTDPEGCPLSRFKDSLGNPTHILRIGESYKEKQRTIQAKKEVEQRRAGGYSRKYASKAKNLADDMVRNTARDLLYYAVTQDAMLIFENLSRGFGRQGKRTFSAERQYTRMEDWLTAKLAYEGLPSKTYLSKTLAQYTSKTCSNCGFTITSADYDRVLEKLKKTATGWMTTINGKELKVEGQITYYNRYKRQNVVKDLSVELDRLSEESVNNDISSWTKGRSGEALSLLKKRFSHRPVQEKFVCLNCGFETHADEQAALNIARSWLFLRSQEYKKYQTNKTTGNTDKRAFVETWQSFYRKKLKEVWKPAV

SEQ ID NO: 28071 - protein, 979 aa, synthetic construct
  REGION 1..979: note = engineered CasX variant
QEIGKRINKIRRRLVKDSNTKKAGKTGPMKTLLVRVMTPDLRERLENLRKKPENIPQPISNTSRANLNKLLTDYTEMKKAILHVYWEEFQKDPVGLMSRVAQPASKKIDQNKLKPEMDEKGNLTTAGFACSQCGQPLFVYKLEQVSEKGKAYTNYFGRCNVAEHEKLILLAQLKPEKDSDEAVTYSLGKFGQRALDFYSIHVTKESTHPVKPLAQIAGNRYASGPVGKALSDACMGTIASFLSKYQDIIIEHQKVVKGNQKRLESLRELAGKENLEYPSVTLPPQPHTKEGVDAYNEVIARVRMWVNLNLWQKLKLSRDDAKPLLRLKGFPSFPLVERQANEVDWWDMVCNVKKLINEKKEDGKVFWQNLAGYKRQEALRPYLSSEEDRKKGKKFARYQLGDLLLHLEKKHGEDWGKVYDEAWERIDKKVEGLSKHIKLEEERRSEDAQSKAALTDWLRAKASFVIEGLKEADKDEFCRCELKLQKWYGDLRGKPFAIEAENSILDISGFSKQYNCAFIWQKDGVKKLNLYLIINYFKGGKLRFKKIKPEAFEANRFYTVINKKSGEIVPMEVNFNFDDPNLIILPLAFGKRQGREFIWNDLLSLETGSLKLANGRVIEKTLYNRRTRQDEPALFVALTFERREVLDSSNIKPMNLIGVDRGENIPAVIALTDPEGCPLSRFKDSLGNPTHILRIGESYKEKQRTIQAKKEVEQRRAGGYSRKYASKAKNLADDMVRNTARDLLYYAVTQDAMLIFENLSRGFGRQGKRTFMAERQYTRMEDWLTAKLAYEGLPSKTYLSKTLAQYTSKTCSNCGFTITSADYDRVLEKLKKTATGWMTTINGKELKVEGQITYYNRYKRQNVVKDLSVELDRLSEESVNNDISSWDKGRSGEALSLLKKRFSHRPVQEKFVCLNCGFETHADEQAALNIARSWLFLRSQEYKKYQTNKTTGNTDKRAFVETWQSFYRKKLKEVWKPAV

SEQ ID NO: 28072 - protein, 979 aa, synthetic construct
  REGION 1..979: note = engineered CasX variant
QEIGKRINKIRRRLVKDSNTKKAGKTGPMKTLLVRVMTPDLRERLENLRKKPENIPQPISNTSRANLNKLLTDYTEMKKAILHVYWEEFQVDPVGLMSRVAQPASKKIDQNKLKPEMDEKGNLTTAGFACSQCGQPLFVYKLEQVSEKGKAYTNYFGRCNVAEHEKLILLAQLKPEKDSDEAVTYSLGKFGQRALDFYSIHVTKESTHPVKPLAQIAGNRYASGPVGKALSDACMGTIASFLSKYQDIIIEHQKVVKGNQKRLESLRELAGKENLEYPSVTLPPQPHTKEGVDAYNEVIARVRMWVNLNLWQKLKLSRDDAKPLLRLKGFPSFPLVERQANEVDWWDMVCNVKKLINEKKEDGKVFWQNLAGYKRQEALRPYLSSEEDRKKGKKFARYQLGDLLLHLEKKHGEDWGKVYDEAWERIDKKVEGLSKHIKLEEERRSEDAQSKAALTDWLRAKASFVIEGLKEADKDEFCRCELKLQKWYGDLRGKPFAIEAENSILDISGFSKQYNCAFIWQKDGVKKLNLYLIINYFKGGKLRFKKIKPEAFEANRFYTVINKKSGEIVPMEVNFNFDDPNLIILPLAFGKRQGREFIWNDLLSLETGSLKLANGRVIEKTLYNRRTRQDEPALFVALTFERREVLDSSNIKPMNLIGVDRGENIPAVIALTDPEGCPLSRFKDSLGNPTHILRIGESYKEKQRTIQAKKEVEQRRAGGYSRKYASKAKNLADDMVRNTARDLLYYAVTQDAMLIFENLSRGFGRQGKRTFMAERQYTRMEDWLTAKLAYEGLPSKTYLSKTLAQYTSKTCSNCGFTITSADYDRVLEKLKKTATGWMTTINGKELKVEGQITYYNRYKRQNVVKDLSVELDRLSEESVNNDISSWTKGRSGEALSLLKKRFSHRPVQEKFVCLNCGFETHADEQAALNIARSWLFLRSQEYKKYQTNKTTGNTDKRAFVETWQSFYRKKLKEVWKPAV

SEQ ID NO: 28073 - protein, 979 aa, synthetic construct
  REGION 1..979: note = engineered CasX variant
QEIGKRLNKIRRRLVKDSNTKKAGKTGPMKTLLVRVMTPDLRERLENLRKKPENIPQPISNTSRANLNKLLTDYTEMKKAILHVYWEEFQKDPVGLMSRVAQPASKKIDQNKLKPEMDEKGNLTTAGFACSQCGQPLFVYKLEQVSEKGKAYTNYFGRCNVAEHEKLILLAQLKPEKDSDEAVTYSLGKFGQRALDFYSIHVTKESTHPVKPLAQIAGNRYASGPVGKALSDACMGTIASFLSKYQDIIIEHQKVVKGNQKRLESLRELAGKENLEYPSVTLPPQPHTKEGVDAYNEVIARVRMWVNLNLWQKLKLSRDDAKPLLRLKGFPSFPLVERQANEVDWWDMVCNVKKLINEKKEDGKVFWQNLAGYKRQEALRPYLSSEEDRKKGKKFARYQLGDLLLHLEKKHGEDWGKVYDEAWERIDKKVEGLSKHIKLEEERRSEDAQSKAALTDWLRAKASFVIEGLKEADKDEFCRCELKLQKWYGDLRGKPFAIEAENSILDISGFSKQYNCAFIWQKDGVKKLNLYLIINYFKGGKLRFKKIKPEAFEANRFYTVINKKSGEIVPMEVNFNFDDPNLIILPLAFGKRQGREFIWNDLLSLETGSLKLANGRVIEKTLYNRRTRQDEPALFVALTFERREVLDSSNIKPMNLIGVDRGENIPAVIALTDPEGCPLSRFKDSLGNPTHILRIGESYKEKQRTIQAKKEVEQRRAGGYSRKYASKAKNLADDMVRNTARDLLYYAVTQDAMLIFENLSRGFGRQGKRTFMAERQYTRMEDWLTAKLAYEGLPSKTYLSKTLAQYTSKTCSNCGFTITSADYDRVLEKLKKTATGWMTTINGKELKVEGQITYYNRYKRQNVVKDLSVELDRLSEESVNNDISSWTKGRSGEALSLLKKRFSHRPVQEKFVCLNCGFETHADEQAALNIARSWLFLRSQEYKKYQTNKTTGNTDKRAFVETWQSFYRKKLKEVWKPAV

SEQ ID NO: 28074 - protein, 979 aa, synthetic construct
  REGION 1..979: note = engineered CasX variant
QEIGKRINKIRRRLVKDSNTKKAGKTGPMKTLLVRVMTPDLRERLENLRKKPENIPQPISNTSRANLNKLLTDYTEMKKAILHVYWEEFQKDPVGLMSRVAQPASKKIDQNKLKPEMDEKGNLTTAGFACSQCGQPLFVYKLEQVSEKGKAYTNYVGRCNVAEHEKLILLAQLKPEKDSDEAVTYSLGKFGQRALDFYSIHVTKESTHPVKPLAQIAGNRYASGPVGKALSDACMGTIASFLSKYQDIIIEHQKVVKGNQKRLESLRELAGKENLEYPSVTLPPQPHTKEGVDAYNEVIARVRMWVNLNLWQKLKLSRDDAKPLLRLKGFPSFPLVERQANEVDWWDMVCNVKKLINEKKEDGKVFWQNLAGYKRQEALRPYLSSEEDRKKGKKFARYQLGDLLLHLEKKHGEDWGKVYDEAWERIDKKVEGLSKHIKLEEERRSEDAQSKAALTDWLRAKASFVIEGLKEADKDEFCRCELKLQKWYGDLRGKPFAIEAENSILDISGFSKQYNCAFIWQKDGVKKLNLYLIINYFKGGKLRFKKIKPEAFEANRFYTVINKKSGEIVPMEVNFNFDDPNLIILPLAFGKRQGREFIWNDLLSLETGSLKLANGRVIEKTLYNRRTRQDEPALFVALTFERREVLDSSNIKPMNLIGVDRGENIPAVIALTDPEGCPLSRFKDSLGNPTHILRIGESYKEKQRTIQAKKEVEQRRAGGYSRKYASKAKNLADDMVRNTARDLLYYAVTQDAMLIFENLSRGFGRQGKRTFMAERQYTRMEDWLTAKLAYEGLPSKTYLSKTLAQYTSKTCSNCGFTITSADYDRVLEKLKKTATGWMTTINGKELKVEGQITYYNRYKRQNVVKDLSVELDRLSEESVNNDISSWTKGRSGEALSLLKKRFSHRPVQEKFVCLNCGFETHADEQAALNIARSWLFLRSQEYKKYQTNKTTGNTDKRAFVETWQSFYRKKLKEVWKPAV

SEQ ID NO: 28075 - protein, 979 aa, synthetic construct
  REGION 1..979: note = engineered CasX variant
QEIGKRINKIRRRLVKDSNTKKAGKTGPMKTLLVRVMTPDLRERLENLRKKPENIPQPISNTSRANLNKLLTDYTEMKKAILHVYWEEFQKDPVGLMSRVAQPASKKIDQNKLKPEMDEKGNLTTAGFACSQCGQPLFVYKLEQVSEKGKAYTNYFGRCNVAEHEKLILLAQLKPEKDSDEAVTYSLGKFGQRALDFYSIHVTKESTHPVKPLAQIAGNRYASGPVGKALSDACMGTIASFLSKYQDIIIEHQKVVKGNQKRLESLRELAGKENLEYPSVTLPPQPHTKEGVDAYNEVIARVRMWVNLNLWQKLKLSRDDAKPLLRLKGFPSFPLVERQANEVDWWDMVCNVKKLINEKKEDGKVFWQNLAGYKRQEALRPYLSSEEDRKKGKKFARYQLGDLLLHLEKKHGEDWGKVYDEAWERIDKKVEGLSKHIKLEEERRSEDAQSKAALTDWLRAKASFVIEGLKEADKDEFCRCELKLQKWYGDLRGKPFAIEAENSILDISGFSKQYNCAFIWQKDGVKKLNLYLIINYFKGGKLRFKKIKPEAFEANRFYTVINKKSGEIVPMEVNFNFDDPNLIILPLAFGKRQGREFIWNDLLSLETGSLKLANGRVIEKTLYNRRTRQDEPALFVALTFERREVLDSSNIKPMNLIGVDRGENIPAVIALTDPEGCPLSRFKDSLGNPTHILRIGESYKEKQRTIQAKKEVEQRRAGGYSRKYASKAKNLADDMVRNTARDLLYYAVTQDAMLIFENLSRGFGRQGKRTFMAERQYTRMEDWLTAKLAYEGLASKTYLSKTLAQYTSKTCSNCGFTITSADYDRVLEKLKKTATGWMTTINGKELKVEGQITYYNRYKRQNVVKDLSVELDRLSEESVNNDISSWTKGRSGEALSLLKKRFSHRPVQEKFVCLNCGFETHADEQAALNIARSWLFLRSQEYKKYQTNKTTGNTDKRAFVETWQSFYRKKLKEVWKPAV

SEQ ID NO: 28076 - protein, 979 aa, synthetic construct
  REGION 1..979: note = engineered CasX variant
QEIGKRINKIRRRLVKDSNTKKAGKTGPMKTLLVRVMTPDLRERLENLRKKPENIPQPISNTSRANLNKLLTDYTEMKKAILHVYWEEFQKDPVGLMSRVAQPASKKIDQNKLKPEMDEKGNLTTAGFACSQCGQPLFVYKLEQVSEKGKAYTNYFGRCNVAEHEKLILLAQLKPEKDSDEAVTYSLGKFGQRALDFYSIHVTKESTHPVKPLAQIAGNRYASGPVGKALSDACMGTIASFLSKYQDIIIEHQKVVKGNQKRLESLRELAGKENLEYPSVTLPPQPHTKEGVDAYNEVIARVRMWVNLNLWQKLKLSRDDAKPLLRLKGFPSFPLVERQANEVDWWDMVCNVKKLINEKKEDGKVFWQNLAGYKRQEALRPYLSSEEDRKKGKKFARYQLGDLLLHLEKKHGEDWGKVYDEAWERIDKKVEGLSKHIKLEEERRSEDAQSKAALTDWLRAKASFVIEGLKEADKDEFCRCELKLQKWYGDLRGKPFAIEAENSILDISGFSKQYNCAFIWQKDGVKKLNLYLIINYFKGGKLRFKKIKPEAFEANRFYTVINKKSGEIVPMEVNFNFDDPNLIILPLAFGKRQGREFIWNDLLSLETGSLKLANGRVIEKTLYNRRTRQDEPALFVALTFERREVLDSSNIKPMNLIGVDRGENIPAVIALTDPEGCPLSRFKDSLGNPTHILRIGESYKEKQRTIQAKKEVEQRRAGGYSRKYASKAKNLADDMVRNTARDLLYYAVTQDAMLIFENLSRGFGRQGKRTFMAERQYTRMEDWLTAKLAYEGLPSKVYLSKTLAQYTSKTCSNCGFTITSADYDRVLEKLKKTATGWMTTINGKELKVEGQITYYNRYKRQNVVKDLSVELDRLSEESVNNDISSWTKGRSGEALSLLKKRFSHRPVQEKFVCLNCGFETHADEQAALNIARSWLFLRSQEYKKYQTNKTTGNTDKRAFVETWQSFYRKKLKEVWKPAV

SEQ ID NO: 28077 - protein, 980 aa, synthetic construct
  REGION 1..980: note = engineered CasX variant
QEIGKRINKIRRRLVKDSNTKKAGKTGPMKTLLVRVMTPDLRERLENLRKKPENIPQPISNTSRANLNKLLTDYTEMKKAILHVYWEEFQKDPVGLMSRVAQPASKKIDQNKLKPEMDEKGNLTTAGFACSQCGQPLFVYKLEQVSEKGKAYTNYFGRCNVAEHEKLILLAQLKPEKDSDEAVTYSLGKFGQRALDFYSIHVTKESTHPVKPLAQIAGNRYASGPVGKALSDACMGTIASFLSKYQDIIIEHQKVVKGNQKRLESLRELAGKENLEYPSVTLPPQPHTKEGVDAYNEVIARVRMWVNLNLWQKLKLSRDDAKPLLRLKGFPSFPLVERQANEVDWWDMVCNVKKLINEKKEDGKVFWQNLAGYKRQEALRPYLSSEEDRKKGKKFARYQLGDLLLHLEKKHGEDWGKVYDEAWERIDKKVEGLSKHIKLEEERRSEDAQSKAALTDWLRAKASFVIEGLKEADKDEFCRCELKLQKWYGDLRGKPFAIEAENSILDISGFSKQYNCAFIWQKDGVKKLNLYLIINYFKGGKLRFKKIKPEAFEANRFYTVINKKSGEIVPMEVNFNFDDPNLIILPLAFGKRQGREFIWNDLLSLETGSLKLANGRVIEKTLYNRRTRQDEPALFVALTFERREVLDSSNIKPMNLIGVDRGENIPAVIALTDPEGCPLSRFKDSLGNPTHILRIGESYKEKQRTIQAKKEVEQRRAGGYSRKYASKAKNLADDMVRNTARDLLYYAVTQDAMLIFENLSRGFGRQGKRTFMAERQYTRMEDWLTAKLAYEGPLPSKTYLSKTLAQYTSKTCSNCGFTITSADYDRVLEKLKKTATGWMTTINGKELKVEGQITYYNRYKRQNVVKDLSVELDRLSEESVNNDISSWTKGRSGEALSLLKKRFSHRPVQEKFVCLNCGFETHADEQAALNIARSWLFLRSQEYKKYQTNKTTGNTDKRAFVETWQSFYRKKLKEVWKPAV

SEQ ID NO: 28078 - protein, 980 aa, synthetic construct
  REGION 1..980: note = engineered CasX variant
QEIGKRINKIRRRLVKDSNTKKAGKTGPMKTLLVRVMTPDLRERLENLRKKPENIPQPISNTSRANLNKLLTDYTEMKKAILHVYWEEFQKDPVGLMSRVAQPASKKIDQNKLKPEMDEKGNLTTAGFACSQCGQPLFVYKLEQVSEKGKAYTNYFGRCNVAEHEKLILLAQLKPEKDSDEAVTYSLGKFGQRALDFYSIHVTKESTHPVKPLAQIAGNRYASGPVGKALSDACMGTIASFLSKYQDIIIEHQKVVKGNQKRLESLRELAGKENLEYPSVTLPPQPHTKEGVDAYNEVIARVRMWVNLNLWQKLKLSRDDAKPLLRLKGFPSFPLVERQANEVDWWDMVCNVKKLINEKKEDGKVFWQNLAGYKRQEALRPYLSSEEDVRKKGKKFARYQLGDLLLHLEKKHGEDWGKVYDEAWERIDKKVEGLSKHIKLEEERRSEDAQSKAALTDWLRAKASFVIEGLKEADKDEFCRCELKLQKWYGDLRGKPFAIEAENSILDISGFSKQYNCAFIWQKDGVKKLNLYLIINYFKGGKLRFKKIKPEAFEANRFYTVINKKSGEIVPMEVNFNFDDPNLIILPLAFGKRQGREFIWNDLLSLETGSLKLANGRVIEKTLYNRRTRQDEPALFVALTFERREVLDSSNIKPMNLIGVDRGENIPAVIALTDPEGCPLSRFKDSLGNPTHILRIGESYKEKQRTIQAKKEVEQRRAGGYSRKYASKAKNLADDMVRNTARDLLYYAVTQDAMLIFENLSRGFGRQGKRTFMAERQYTRMEDWLTAKLAYEGLPSKTYLSKTLAQYTSKTCSNCGFTITSADYDRVLEKLKKTATGWMTTINGKELKVEGQITYYNRYKRQNVVKDLSVELDRLSEESVNNDISSWTKGRSGEALSLLKKRFSHRPVQEKFVCLNCGFETHADEQAALNIARSWLFLRSQEYKKYQTNKTTGNTDKRAFVETWQSFYRKKLKEVWKPAV

SEQ ID NO: 28079 - protein, 979 aa, synthetic construct
  REGION 1..979: note = engineered CasX variant
QEIGKRINKIRRRLVKDSNTKKAGKTGPMKTLLVRVMTPDLRERLENLRKKPENIPQPISNTSRANLNKLLTDYTEMKKAILHVYWEEFQKDPVGLMSRVAQPASKKIDQNKLKPEMDEKGNLTTAGFACSQCGQPLFVYKLEQVSEKGKAYTNYFGRCNVAEHEKLILLAQLKPEKDSDEAVTYSLGKFGQRALDFYSIHVTKESTHPVKPLAQIAGNRYASGPVGKALSDACMGTIASFLSKYQDIIIEHQKVVKGNQKRLESLRELAGKENLEYPSVTLPPQPHTKEGVDAYNEVIARVRMWVNLNLWQKLKLSRDDAKPLLRLKGFPSFPLVERQANEVDWWDMVCNVKKLINEKKEDGKVFWQNLAGYKRQEALRPYLSSEEDRKKGKKFARYQLGDLLLHLEKKHGEDWGKVYDEAWERIDKKVEGLSKHIKLEEERRSEDAQSKAALTDWLRAKASFVIEGLKEADKDEFCRCELKLQKWYGDLRGKPFAIEAENSILDISGFSKQYNCAFIWQKDGVKKLNLYLIINYFKGGKLRFKKIKPEAFEANRFYTVINKKSGEIVPMEVNFNFDDPNLIILPLAFGKRQGREFIWNDLLSLETGSLKLANGRVIEKTLYNRRTRQDEPALFVALTFERREVLDSSNIKPMNLIGVDRGENIPAVIALTDPEGCPLSRFKDSLGNPTHILRIGESYKEKQRTIQAKKEVEQRRAGGYSRKYASKAKNLADDMVRNTARDLLYYAVTQDAMLIFENLSRGFGRQGKRTFMAERQYTRMEDWLTAKLAYEGLPSKTYLSKTLAQYTSKTCSNCGFTITSADYDRMLEKLKKTATGWMTTINGKELKVEGQITYYNRYKRQNVVKDLSVELDRLSEESVNNDISSWTKGRSGEALSLLKKRFSHRPVQEKFVCLNCGFETHADEQAALNIARSWLFLRSQEYKKYQTNKTTGNTDKRAFVETWQSFYRKKLKEVWKPAV

SEQ ID NO: 28080 - protein, 979 aa, synthetic construct
  REGION 1..979: note = engineered CasX variant
QEIGKRINKIRRRLVKDSNTKKAGKTGPMKTLLVRVMTPDLRERLENLRKKPENIPQPISNTSRANLNKLLTDYTEMKKAILHVYWEEFQKDPVGLMSRVAQPASKKIDQNKLKPEMDEKGNLTTAGFACSQCGQPLFVYKLEQVSEKGKAYTNYFGRCNVAEHEKLILLAQLKPEKDSDEAVTYSLGKFGQRALDFYSIHVTKESTHPVKPLAQIAGNRYASGPVGKALSDACMGTIASFLSKYQDIIIEHQKVVKGNQKRLESLRELAGKENLEYPSVTLPPQPHTKEGVDAYNEVIARVRMWVNLNLWQKLKLSRDDAKPLLRLKGFPSFPLVERQANEVDWWDMVCNVKKLINEKKEDGKVFWQNLAGYKRQEALRPYLSSEEDRKKGKKFARYQLGDLLLHLEKKHGEDWGKVYDEAWERIDKKVEGLSKHIKLEEERRSEDAQSKAALTDWLRAKASFVIEGLKEADKDEFCRCELKLQKWYGDLRGKPFAIEAENSILDISGFSKQYNCAFIWQKDGVKKLNLYLIINYFKGGKLRFKKIKPEAFEANRFYTVINKKSGEIVPMEVNFNFDDPNLIILPLAFGKRQGREFIWNDLLSLETGSLKLANGRVIEKTLYNRRTRQDEPALFVALTFERREVLDSSNIKPMNLIGVDRGENIPAVIALTDPEGCPLSRFKDSLGNPTHILRIGESYKEKQRTIQAKKEVEQRRAGGYSRKYASKAKNLADDMVRNTARDLLYYAVTQDAMLIFENLSRGFGRQGKRTFMAERQYTRMEDWLTAKLAYEGLPSKTYLSKTLAQYTSKTCSNCGFTITSADYDRVLEKLKKTATGWMTTINGKELKVEGQITYYNRYKRQNVVKDLSVELDRLSEESVNNDISSWTKGRQGEALSLLKKRFSHRPVQEKFVCLNCGFETHADEQAALNIARSWLFLRSQEYKKYQTNKTTGNTDKRAFVETWQSFYRKKLKEVWKPAV

SEQ ID NO: 28081 - protein, 979 aa, synthetic construct
  REGION 1..979: note = engineered CasX variant
QEIGKRINKIRRRLVKDSNTKKAGKTGPMKTLLVRVMTPDLRERLENLRKKPENIPQPISNTSRANLNKLLTDYTEMKKAILHVYWEEFQKDPVGLMSRVAQPASKKIDQNKLKPEMDEKGNLTTAGFACSQCGQPLFVYKLEQVSEKGKAYTNYFGRCNVAEHEKLILLAQLKPEKDSDEAVTYSLGKFGQRALDFYSIHVTKESTHPVKPLAQIAGNRYASGPVGKALSDACMGTIASFLSKYQDIIIEHQKVVKGNQKRLESLRELAGKENLEYPSVTLPPQPHTKEGVDAYNEVIARVRMWVNLNLWQKLKLSRDDAKPLLRLKGFPSFPLVERQANEVDWWDMVCNVKKLINEKKEDGKVFWQNLAGYKRQEALRPYLSSEEDRKKGKKFARYQLGDLLLHLEKKHGEDWGKVYDEAWERIDKKVEGLSKHIKLEEERRSEDAQSKAALTDWLRAKASFVIEGLKEADKDEFCRCELKLQKWYGDLRGKPFAIEAENSILDISGFSKQYNCAFIWQKDGVKKLNLYLIINYFKGGKLRFKKIKPEAFEANRFYTVINKKSGEIVPMEVNFNFDDPNLIILPLAFGKRQGREFIWNDLLSLETGSLKLANGRVIEKTLYNRRTRQDEPALFVALTFERREVLDSSNIKPMNLIGVDRGENIPAVIALTDPEGCPLSRFKDSLGNPTHILRIGESYKEKQRTIQAKKEVEQRRAGGYSRKYASKAKNLADDMVRNTARDLLYYAVTQDAMLIFENLSRGFGRQGKRTFMAERQYTRMEDWLTAKLAYEGLPSKTYLSKTLAQYTSKTCSNCGFTITSADYDRVLEKLKKTATGWMTTINGKELKVEGQITYYNRYKRQNVVKDLSVELDRLSEESVNNDISSWTKGRSGEALSLLKKRFSHRPVQEKFVCLNCEFETHADEQAALNIARSWLFLRSQEYKKYQTNKTTGNTDKRAFVETWQSFYRKKLKEVWKPAV

SEQ ID NO: 28082 - protein, 980 aa, synthetic construct
  REGION 1..980: note = engineered CasX variant
QEIGKRINKIRRRLVKDSNTKKAGKTGPMKTLLVRVMTPDLRERLENLRKKPENIPQPISNTSRANLNKLLTDYTEMKKAILHVYWEEFQKDPVGLMSRVAQPASKKIDQNKLKPEMDEKGNLTTAGFACSQCGQPLFVYKLEQVSEKGKAYTNYFGRCNVAEHEKLILLAQLKPEKDSDEAVTYSLGKFGQRALDFYSIHVTKESTHPVKPLAQIAGNRYASGPVGKALSDACMGTIASFLSKYQDIIIEHQKVVKGNQKRLESLRELAGKENLEYPSVTLPPQPHTKEGVDAYNEVIARVRMWVNLNLWQKLKLSRDDAKPLLRLKGFPSFPLVERQANEVDWWDMVCNVKKLINEKKEDGKVFWQNLAGYKRQEALRPYLSSEEDRKKGKKFARYQLGDLLLHLEKKHGEDWGKVYDEAWERIDKKVEGLSKHIKLEEERRSEDAQSKAALTDWLRAKASFVIEGLKEADKDEFCRCELKLQKWYGDLRGKPFAIEAENSILDISGFSKQYNCAFIWQKDGVKKLNLYLIINYFKGGKLRFKKIKPEAFEANRFYTVINKKSGEIVPMEVNFNFDDPNLIILPLAFGKRQGREFIWNDLLSLETGSLKLANGRVIEKTLYNRRTRQDEPALFVALTFERREVLDSSNIKPMNLIGVDRGENIPAVIALTDPEGCPLSRFKDSLGNPTHILRIGESYKEKQRTIQAKKEVEQRRAGGYSRKYASKAKNLADDMVRNTARDLLYYAVTQDAMLIFENLSRGFGRQGKRTFMAERQYTRMEDWLTAKLAYEGLPSKTYLSKTLAQYTSKTCSNCGFTITSADYDRVLEKLKKTATGWMTTINGKELKVEGQITYYNRYKRQNVVKDLSVELDRLSEESVNNDISSWTKGRSGEALSLLKKRFSHRPVQEKFVCLNCGFETHADEQAALNIARSWLFLRSQEYKKYQTNKTSTGNTDKRAFVETWQSFYRKKLKEVWKPAV

SEQ ID NO: 28083 - protein, 980 aa, synthetic construct
  REGION 1..980: note = engineered CasX variant
QEIGKRINKIRRRLVKDSNTKKAGKTGPMKTLLVRVMTPDLRERLENLRKKPENIPQPISNTSRANLNKLLTDYTEMKKAILHVYWEEFQKDPVGLMSRVAQPASKKIDQNKLKPEMDEKGNLTTAGFACSQCGQPLFVYKLEQVSEKGKAYTNYFGRCNVAEHEKLILLAQLKPEKDSDEAVTYSLGKFGQRALDFYSIHVTKESTHPVKPLAQIAGNRYASGPVGKALSDACMGTIASFLSKYQDIIIEHQKVVKGNQKRLESLRELAGKENLEYPSVTLPPQPHTKEGVDAYNEVIARVRMWVNLNLWQKLKLSRDDAKPLLRLKGFPSFPLVERQANEVDWWDMVCNVKKLINEKKEDGKVFWQNLAGYKRQEALRPYLSSEEDRKKGKKFARYQLGDLLLHLEKKHGEDWGKVYDEAWERIDKKVEGLSKHIKLEEERRSEDAQSKAALTDWLRAKASFVIEGLKEADKDEFCRCELKLQKWYGDLRGKPFAIEAENSILDISGFSKQYNCAFIWQKDGVKKLNLYLIINYFKGGKLRFKKIKPEAFEANRFYTVINKKSGEIVPMEVNFNFDDPNLIILPLAFGKRQGREFIWNDLLSLETGSLKLANGRVIEKTLYNRRTRQDEPALFVALTFERREVLDSSNIKPMNLIGVDRGENIPAVIALTDPEGCPLSRFKDSLGNPTHILRIGESYKEKQRTIQAKKEVEQRRAGGYSRKYASKAKNLADDMVRNTARDLLYYAVTQDAMLIFENLSRGFGRQGKRTFMAERQYTRMEDWLTAKLAYEGLPSKTYLSKTLAQYTSKTCSNCGFTITSADYDRVLEKLKKTATGWMTTINGKELKVEGQITYYNRYKRQNVVKDLSVELDRLSEESVNNDISSWTKGRSGEALSLLKKRFSHRPVQEKFVCLNCGFETHADEQAALNIARSWLFLRSQEYKKYQTNKTTGKNTDKRAFVETWQSFYRKKLKEVWKPAV

SEQ ID NO: 28084 - protein, 979 aa, synthetic construct
  REGION 1..979: note = engineered CasX variant
QEIGKRINKIRRRLVKDSNTKKAGKTGPMKTLLVRVMTPDLRERLENLRKKPENIPQPISNTSRANLNKLLTDYTEMKKAILHVYWEEFQKDPVGLMSRVAQPASKKIDQNKLKPEMDEKGNLTTAGFACSQCGQPLFVYKLEQVSEKGKAYTNYFGRCNVAEHEKLILLAQLKPEKDSDEAVTYSLGKFGQRALDFYSIHVTKESTHPVKPLAQIAGNRYASGPVGKALSDACMGTIASFLSKYQDIIIEHQKVVKGNQKRLESLRELAGKENLEYPSVTLPPQPHTKEGVDAYNEVIARVRMWVNLNLWQKLKLSRDDAKPLLRLKKFPSFPLVERQANEVDWWDMVCNVKKLINEKKEDGKVFWQNLAGYKRQEALRPYLSSEEDRKKGKKFARYQLGDLLLHLEKKHGEDWGKVYDEAWERIDKKVEGLSKHIKLEEERRSEDAQSKAALTDWLRAKASFVIEGLKEADKDEFCRCELKLQKWYGDLRGKPFAIEAENSILDISGFSKQYNCAFIWQKDGVKKLNLYLIINYFKGGKLRFKKIKPEAFEANRFYTVINKKSGEIVPMEVNFNFDDPNLIILPLAFGKRQGREFIWNDLLSLETGSLKLANGRVIEKTLYNRRTRQDEPALFVALTFERREVLDSSNIKPMNLIGVDRGENIPAVIALTDPEGCPLSRFKDSLGNPTHILRIGESYKEKQRTIQAKKEVEQRRAGGYSRKYASKAKNLADDMVRNTARDLLYYAVTQDAMLIFENLSRGFGRQGKRTFMAERQYTRMEDWLTAKLAYEGLPSKTYLSKTLAQYTSKTCSNCGFTITSADYDRVLEKLKKTATGWMTTINGKELKVEGQITYYNRYKRQNVVKDLSVELDRLSEESVNNDISSWTKGRSGEALSLLKKRFSHRPVQEKFVCLNCGFETHADEQAALNIARSWLFLRSQEYKKYQTNKTTGNTDKRAFVETWQSFYRKKLKEVWKPAV

SEQ ID NO: 28085 - protein, 979 aa, synthetic construct
  REGION 1..979: note = engineered CasX variant
QEIGKRINKIRRRLVKDSNTKKAGKTGPMKTLLVRVMTPDLRERLENLRKKPENIPQPISNTSRANLNKLLTDYTEMKKAILHVYWEEFQKDPVGLMSRVAQPASKKIDQNKLKPEMDEKGNLTTAGFACSQCGQPLFVYKLEQVSEKGKAYTNYFGRCNVAEHEKLILLAQLKPEKDSDEAVTYSLGKFGQRALDFYSIHVTKESTHPVKPLAQIAGNRYASGPVGKALSDACMGTIASFLSKYQDIIIEHQKVVKGNQKRLESLRELAGKENLEYPSVTLPPQPHTKEGVDAYNEVIARVRMWVNLNLWQKLKLSRDDAKPLLRLKGFPSFPLVERQANEVDWWDMVCNVKKLINEKKEDGKVFWQNLAGYKRQEALRPYLSSEEDRKKGKKFARYQLGDLLLHLEKKHGEDWGKVYDEAWERIDKKVEGLSKHIKLEEERRSEDAQSKAALTDWLRAKASFVIEGLKEADKDEFCRCELKLQKWYGDLRGKPFAIEAENSILDISGFSKQYNCAFIWQKDGVKKLNLYLIINYFKGGKLRFKKIKPEAFEANRFYTVINKKSGEIVPMEVNFNFDDPNLIILPLAFGKRQGREFIWNDLLSLETGSLKLANGRVIEKTLYNRRTRQDEPALFVALTFERREVLDSSNIKPMNLIGVDRGENIPAVIALTDPEGCPLSRFKDSLGNPTHILRIGERYKEKQRTIQAKKEVEQRRAGGYSRKYASKAKNLADDMVRNTARDLLYYAVTQDAMLIFENLSRGFGRQGKRTFMAERQYTRMEDWLTAKLAYEGLPSKTYLSKTLAQYTSKTCSNCGFTITSADYDRVLEKLKKTATGWMTTINGKELKVEGQITYYNRYKRQNVVKDLSVELDRLSEESVNNDISSWTKGRSGEALSLLKKRFSHRPVQEKFVCLNCGFETHADEQAALNIARSWLFLRSQEYKKYQTNKTTGNTDKRAFVETWQSFYRKKLKEVWKPAV

SEQ ID NO: 28086 - protein, 979 aa, synthetic construct
  REGION 1..979: note = engineered CasX variant
QEIGKRINKIRRRLVKDSNTKKAGKTGPMKTLLVRVMTPDLRERLENLRKKPENIPQPISNTSRANLNKLLTDYTEMKKAILHVYWEEFQKDPVGLMSRVAQPASKKIDQNKLKPEMDEKGNLTTAGFACSQCGQPLFVYKLEQVSEKGKAYTNYFGRCNVAEHEKLILLAQLKPEKDSDEAVTYSLGKFGQRALDFYSIHVTKESTHPVKPLAQIAGNRYASGPVGKALSDACMGTIASFLSKYQDIIIEHQKVVKGNQKRLESLRELAGKENLEYPSVTLPPQPHTKEGVDAYNEVIARVRMWVNLNLWQKLKLSRDDAKPLLRLKGFPSFPLVERQANEVDWWDMVCNVKKLINEKKEDGKVFWQNLAGYKRQEALRPYLSSEEDRKKGKKFARYQLGDLLLHLEKKHGEDWGKVYDEAWERIDKKVEGLSKHIKLEEERRSEDAQSKAALTDWLRAKASFVIEGLKEADKDEFCRCELKLQKWYGDLRGKPFAIEAENSILDISGFSKQYNCAFIWQKDGVKKLNLYLIINYFKGGKLRFKKIKPEAFEANRFYTVINKKSGEIVPMEVNFNFDDPNLIILPLAFGKRQGREFIWNDLLSLETGSLQLANGRVIEKTLYNRRTRQDEPALFVALTFERREVLDSSNIKPMNLIGVDRGENIPAVIALTDPEGCPLSRFKDSLGNPTHILRIGESYKEKQRTIQAKKEVEQRRAGGYSRKYASKAKNLADDMVRNTARDLLYYAVTQDAMLIFENLSRGFGRQGKRTFMAERQYTRMEDWLTAKLAYEGLPSKTYLSKTLAQYTSKTCSNCGFTITSADYDRVLEKLKKTATGWMTTINGKELKVEGQITYYNRYKRQNVVKDLSVELDRLSEESVNNDISSWTKGRSGEALSLLKKRFSHRPVQEKFVCLNCGFETHADEQAALNIARSWLFLRSQEYKKYQTNKTTGNTDKRAFVETWQSFYRKKLKEVWKPAV

SEQ ID NO: 28087 - protein, 980 aa, synthetic construct
  REGION 1..980: note = engineered CasX variant
QEIGGKRINKIRRRLVKDSNTKKAGKTGPMKTLLVRVMTPDLRERLENLRKKPENIPQPISNTSRANLNKLLTDYTEMKKAILHVYWEEFQKDPVGLMSRVAQPASKKIDQNKLKPEMDEKGNLTTAGFACSQCGQPLFVYKLEQVSEKGKAYTNYFGRCNVAEHEKLILLAQLKPEKDSDEAVTYSLGKFGQRALDFYSIHVTKESTHPVKPLAQIAGNRYASGPVGKALSDACMGTIASFLSKYQDIIIEHQKVVKGNQKRLESLRELAGKENLEYPSVTLPPQPHTKEGVDAYNEVIARVRMWVNLNLWQKLKLSRDDAKPLLRLKGFPSFPLVERQANEVDWWDMVCNVKKLINEKKEDGKVFWQNLAGYKRQEALRPYLSSEEDRKKGKKFARYQLGDLLLHLEKKHGEDWGKVYDEAWERIDKKVEGLSKHIKLEEERRSEDAQSKAALTDWLRAKASFVIEGLKEADKDEFCRCELKLQKWYGDLRGKPFAIEAENSILDISGFSKQYNCAFIWQKDGVKKLNLYLIINYFKGGKLRFKKIKPEAFEANRFYTVINKKSGEIVPMEVNFNFDDPNLIILPLAFGKRQGREFIWNDLLSLETGSLKLANGRVIEKTLYNRRTRQDEPALFVALTFERREVLDSSNIKPMNLIGVDRGENIPAVIALTDPEGCPLSRFKDSLGNPTHILRIGESYKEKQRTIQAKKEVEQRRAGGYSRKYASKAKNLADDMVRNTARDLLYYAVTQDAMLIFENLSRGFGRQGKRTFMAERQYTRMEDWLTAKLAYEGLPSKTYLSKTLAQYTSKTCSNCGFTITSADYDRVLEKLKKTATGWMTTINGKELKVEGQITYYNRYKRQNVVKDLSVELDRLSEESVNNDISSWTKGRSGEALSLLKKRFSHRPVQEKFVCLNCGFETHADEQAALNIARSWLFLRSQEYKKYQTNKTTGNTDKRAFVETWQSFYRKKLKEVWKPAV

SEQ ID NO: 28088 - protein, 978 aa, synthetic construct
  REGION 1..978: note = engineered CasX variant
QEIGRANKIRRRLVKDSNTKKAGKTGPMKTLLVRVMTPDLRERLENLRKKPENIPQPISNTSRANLNKLLTDYTEMKKAILHVYWEEFQKDPVGLMSRVAQPASKKIDQNKLKPEMDEKGNLTTAGFACSQCGQPLFVYKLEQVSEKGKAYTNYFGRCNVAEHEKLILLAQLKPEKDSDEAVTYSLGKFGQRALDFYSIHVTKESTHPVKPLAQIAGNRYASGPVGKALSDACMGTIASFLSKYQDIIIEHQKVVKGNQKRLESLRELAGKENLEYPSVTLPPQPHTKEGVDAYNEVIARVRMWVNLNLWQKLKLSRDDAKPLLRLKGFPSFPLVERQANEVDWWDMVCNVKKLINEKKEDGKVFWQNLAGYKRQEALRPYLSSEEDRKKGKKFARYQLGDLLLHLEKKHGEDWGKVYDEAWERIDKKVEGLSKHIKLEEERRSEDAQSKAALTDWLRAKASFVIEGLKEADKDEFCRCELKLQKWYGDLRGKPFAIEAENSILDISGFSKQYNCAFIWQKDGVKKLNLYLIINYFKGGKLRFKKIKPEAFEANRFYTVINKKSGEIVPMEVNFNFDDPNLIILPLAFGKRQGREFIWNDLLSLETGSLKLANGRVIEKTLYNRRTRQDEPALFVALTFERREVLDSSNIKPMNLIGVDRGENIPAVIALTDPEGCPLSRFKDSLGNPTHILRIGESYKEKQRTIQAKKEVEQRRAGGYSRKYASKAKNLADDMVRNTARDLLYYAVTQDAMLIFENLSRGFGRQGKRTFMAERQYTRMEDWLTAKLAYEGLPSKTYLSKTLAQYTSKTCSNCGFTITSADYDRVLEKLKKTATGWMTTINGKELKVEGQITYYNRYKRQNVVKDLSVELDRLSEESVNNDISSWTKGRSGEALSLLKKRFSHRPVQEKFVCLNCGFETHADEQAALNIARSWLFLRSQEYKKYQTNKTTGNTDKRAFVETWQSFYRKKLKEVWKPAV

SEQ ID NO: 28089 - protein, 978 aa, synthetic construct
  REGION 1..978: note = engineered CasX variant
QEIGRISKIRRRLVKDSNTKKAGKTGPMKTLLVRVMTPDLRERLENLRKKPENIPQPISNTSRANLNKLLTDYTEMKKAILHVYWEEFQKDPVGLMSRVAQPASKKIDQNKLKPEMDEKGNLTTAGFACSQCGQPLFVYKLEQVSEKGKAYTNYFGRCNVAEHEKLILLAQLKPEKDSDEAVTYSLGKFGQRALDFYSIHVTKESTHPVKPLAQIAGNRYASGPVGKALSDACMGTIASFLSKYQDIIIEHQKVVKGNQKRLESLRELAGKENLEYPSVTLPPQPHTKEGVDAYNEVIARVRMWVNLNLWQKLKLSRDDAKPLLRLKGFPSFPLVERQANEVDWWDMVCNVKKLINEKKEDGKVFWQNLAGYKRQEALRPYLSSEEDRKKGKKFARYQLGDLLLHLEKKHGEDWGKVYDEAWERIDKKVEGLSKHIKLEEERRSEDAQSKAALTDWLRAKASFVIEGLKEADKDEFCRCELKLQKWYGDLRGKPFAIEAENSILDISGFSKQYNCAFIWQKDGVKKLNLYLIINYFKGGKLRFKKIKPEAFEANRFYTVINKKSGEIVPMEVNFNFDDPNLIILPLAFGKRQGREFIWNDLLSLETGSLKLANGRVIEKTLYNRRTRQDEPALFVALTFERREVLDSSNIKPMNLIGVDRGENIPAVIALTDPEGCPLSRFKDSLGNPTHILRIGESYKEKQRTIQAKKEVEQRRAGGYSRKYASKAKNLADDMVRNTARDLLYYAVTQDAMLIFENLSRGFGRQGKRTFMAERQYTRMEDWLTAKLAYEGLPSKTYLSKTLAQYTSKTCSNCGFTITSADYDRVLEKLKKTATGWMTTINGKELKVEGQITYYNRYKRQNVVKDLSVELDRLSEESVNNDISSWTKGRSGEALSLLKKRFSHRPVQEKFVCLNCGFETHADEQAALNIARSWLFLRSQEYKKYQTNKTTGNTDKRAFVETWQSFYRKKLKEVWKPAV

SEQ ID NO: 28090 - protein, 978 aa, synthetic construct
  REGION 1..978: note = engineered CasX variant
QEIGRINGIRRRLVKDSNTKKAGKTGPMKTLLVRVMTPDLRERLENLRKKPENIPQPISNTSRANLNKLLTDYTEMKKAILHVYWEEFQKDPVGLMSRVAQPASKKIDQNKLKPEMDEKGNLTTAGFACSQCGQPLFVYKLEQVSEKGKAYTNYFGRCNVAEHEKLILLAQLKPEKDSDEAVTYSLGKFGQRALDFYSIHVTKESTHPVKPLAQIAGNRYASGPVGKALSDACMGTIASFLSKYQDIIIEHQKVVKGNQKRLESLRELAGKENLEYPSVTLPPQPHTKEGVDAYNEVIARVRMWVNLNLWQKLKLSRDDAKPLLRLKGFPSFPLVERQANEVDWWDMVCNVKKLINEKKEDGKVFWQNLAGYKRQEALRPYLSSEEDRKKGKKFARYQLGDLLLHLEKKHGEDWGKVYDEAWERIDKKVEGLSKHIKLEEERRSEDAQSKAALTDWLRAKASFVIEGLKEADKDEFCRCELKLQKWYGDLRGKPFAIEAENSILDISGFSKQYNCAFIWQKDGVKKLNLYLIINYFKGGKLRFKKIKPEAFEANRFYTVINKKSGEIVPMEVNFNFDDPNLIILPLAFGKRQGREFIWNDLLSLETGSLKLANGRVIEKTLYNRRTRQDEPALFVALTFERREVLDSSNIKPMNLIGVDRGENIPAVIALTDPEGCPLSRFKDSLGNPTHILRIGESYKEKQRTIQAKKEVEQRRAGGYSRKYASKAKNLADDMVRNTARDLLYYAVTQDAMLIFENLSRGFGRQGKRTFMAERQYTRMEDWLTAKLAYEGLPSKTYLSKTLAQYTSKTCSNCGFTITSADYDRVLEKLKKTATGWMTTINGKELKVEGQITYYNRYKRQNVVKDLSVELDRLSEESVNNDISSWTKGRSGEALSLLKKRFSHRPVQEKFVCLNCGFETHADEQAALNIARSWLFLRSQEYKKYQTNKTTGNTDKRAFVETWQSFYRKKLKEVWKPAV

SEQ ID NO: 28091 - protein, 978 aa, synthetic construct
  REGION 1..978: note = engineered CasX variant
QEIGRINKIRRRLVKDSNTKKAGKTGPMKTLLVPVMTPDLRERLENLRKKPENIPQPISNTSRANLNKLLTDYTEMKKAILHVYWEEFQKDPVGLMSRVAQPASKKIDQNKLKPEMDEKGNLTTAGFACSQCGQPLFVYKLEQVSEKGKAYTNYFGRCNVAEHEKLILLAQLKPEKDSDEAVTYSLGKFGQRALDFYSIHVTKESTHPVKPLAQIAGNRYASGPVGKALSDACMGTIASFLSKYQDIIIEHQKVVKGNQKRLESLRELAGKENLEYPSVTLPPQPHTKEGVDAYNEVIARVRMWVNLNLWQKLKLSRDDAKPLLRLKGFPSFPLVERQANEVDWWDMVCNVKKLINEKKEDGKVFWQNLAGYKRQEALRPYLSSEEDRKKGKKFARYQLGDLLLHLEKKHGEDWGKVYDEAWERIDKKVEGLSKHIKLEEERRSEDAQSKAALTDWLRAKASFVIEGLKEADKDEFCRCELKLQKWYGDLRGKPFAIEAENSILDISGFSKQYNCAFIWQKDGVKKLNLYLIINYFKGGKLRFKKIKPEAFEANRFYTVINKKSGEIVPMEVNFNFDDPNLIILPLAFGKRQGREFIWNDLLSLETGSLKLANGRVIEKTLYNRRTRQDEPALFVALTFERREVLDSSNIKPMNLIGVDRGENIPAVIALTDPEGCPLSRFKDSLGNPTHILRIGESYKEKQRTIQAKKEVEQRRAGGYSRKYASKAKNLADDMVRNTARDLLYYAVTQDAMLIFENLSRGFGRQGKRTFMAERQYTRMEDWLTAKLAYEGLPSKTYLSKTLAQYTSKTCSNCGFTITSADYDRVLEKLKKTATGWMTTINGKELKVEGQITYYNRYKRQNVVKDLSVELDRLSEESVNNDISSWTKGRSGEALSLLKKRFSHRPVQEKFVCLNCGFETHADEQAALNIARSWLFLRSQEYKKYQTNKTTGNTDKRAFVETWQSFYRKKLKEVWKPAV

SEQ ID NO: 28092 - protein, 978 aa, synthetic construct
  REGION 1..978: note = engineered CasX variant
QEIGRINKIRRRLVKDSNTKKAGKTGPMKTLLVRVMTPDLRERLENLRKKPPNIPQPISNTSRANLNKLLTDYTEMKKAILHVYWEEFQKDPVGLMSRVAQPASKKIDQNKLKPEMDEKGNLTTAGFACSQCGQPLFVYKLEQVSEKGKAYTNYFGRCNVAEHEKLILLAQLKPEKDSDEAVTYSLGKFGQRALDFYSIHVTKESTHPVKPLAQIAGNRYASGPVGKALSDACMGTIASFLSKYQDIIIEHQKVVKGNQKRLESLRELAGKENLEYPSVTLPPQPHTKEGVDAYNEVIARVRMWVNLNLWQKLKLSRDDAKPLLRLKGFPSFPLVERQANEVDWWDMVCNVKKLINEKKEDGKVFWQNLAGYKRQEALRPYLSSEEDRKKGKKFARYQLGDLLLHLEKKHGEDWGKVYDEAWERIDKKVEGLSKHIKLEEERRSEDAQSKAALTDWLRAKASFVIEGLKEADKDEFCRCELKLQKWYGDLRGKPFAIEAENSILDISGFSKQYNCAFIWQKDGVKKLNLYLIINYFKGGKLRFKKIKPEAFEANRFYTVINKKSGEIVPMEVNFNFDDPNLIILPLAFGKRQGREFIWNDLLSLETGSLKLANGRVIEKTLYNRRTRQDEPALFVALTFERREVLDSSNIKPMNLIGVDRGENIPAVIALTDPEGCPLSRFKDSLGNPTHILRIGESYKEKQRTIQAKKEVEQRRAGGYSRKYASKAKNLADDMVRNTARDLLYYAVTQDAMLIFENLSRGFGRQGKRTFMAERQYTRMEDWLTAKLAYEGLPSKTYLSKTLAQYTSKTCSNCGFTITSADYDRVLEKLKKTATGWMTTINGKELKVEGQITYYNRYKRQNVVKDLSVELDRLSEESVNNDISSWTKGRSGEALSLLKKRFSHRPVQEKFVCLNCGFETHADEQAALNIARSWLFLRSQEYKKYQTNKTTGNTDKRAFVETWQSFYRKKLKEVWKPAV

SEQ ID NO: 28093 - protein, 978 aa, synthetic construct
  REGION 1..978: note = engineered CasX variant
QEIGRINKIRRRLVKDSNTKKAGKTGPMKTLLVRVMTPDLRERLENLRKKPENIPQPISNTSQANLNKLLTDYTEMKKAILHVYWEEFQKDPVGLMSRVAQPASKKIDQNKLKPEMDEKGNLTTAGFACSQCGQPLFVYKLEQVSEKGKAYTNYFGRCNVAEHEKLILLAQLKPEKDSDEAVTYSLGKFGQRALDFYSIHVTKESTHPVKPLAQIAGNRYASGPVGKALSDACMGTIASFLSKYQDIIIEHQKVVKGNQKRLESLRELAGKENLEYPSVTLPPQPHTKEGVDAYNEVIARVRMWVNLNLWQKLKLSRDDAKPLLRLKGFPSFPLVERQANEVDWWDMVCNVKKLINEKKEDGKVFWQNLAGYKRQEALRPYLSSEEDRKKGKKFARYQLGDLLLHLEKKHGEDWGKVYDEAWERIDKKVEGLSKHIKLEEERRSEDAQSKAALTDWLRAKASFVIEGLKEADKDEFCRCELKLQKWYGDLRGKPFAIEAENSILDISGFSKQYNCAFIWQKDGVKKLNLYLIINYFKGGKLRFKKIKPEAFEANRFYTVINKKSGEIVPMEVNFNFDDPNLIILPLAFGKRQGREFIWNDLLSLETGSLKLANGRVIEKTLYNRRTRQDEPALFVALTFERREVLDSSNIKPMNLIGVDRGENIPAVIALTDPEGCPLSRFKDSLGNPTHILRIGESYKEKQRTIQAKKEVEQRRAGGYSRKYASKAKNLADDMVRNTARDLLYYAVTQDAMLIFENLSRGFGRQGKRTFMAERQYTRMEDWLTAKLAYEGLPSKTYLSKTLAQYTSKTCSNCGFTITSADYDRVLEKLKKTATGWMTTINGKELKVEGQITYYNRYKRQNVVKDLSVELDRLSEESVNNDISSWTKGRSGEALSLLKKRFSHRPVQEKFVCLNCGFETHADEQAALNIARSWLFLRSQEYKKYQTNKTTGNTDKRAFVETWQSFYRKKLKEVWKPAV

SEQ ID NO: 28094 - protein, 978 aa, synthetic construct
  REGION 1..978: note = engineered CasX variant
QEIGRINKIRRRLVKDSNTKKAGKTGPMKTLLVRVMTPDLRERLENLRKKPENIPQPISNTSRANLNKLLTDYTEMKKAILHVYDEEFQKDPVGLMSRVAQPASKKIDQNKLKPEMDEKGNLTTAGFACSQCGQPLFVYKLEQVSEKGKAYTNYFGRCNVAEHEKLILLAQLKPEKDSDEAVTYSLGKFGQRALDFYSIHVTKESTHPVKPLAQIAGNRYASGPVGKALSDACMGTIASFLSKYQDIIIEHQKVVKGNQKRLESLRELAGKENLEYPSVTLPPQPHTKEGVDAYNEVIARVRMWVNLNLWQKLKLSRDDAKPLLRLKGFPSFPLVERQANEVDWWDMVCNVKKLINEKKEDGKVFWQNLAGYKRQEALRPYLSSEEDRKKGKKFARYQLGDLLLHLEKKHGEDWGKVYDEAWERIDKKVEGLSKHIKLEEERRSEDAQSKAALTDWLRAKASFVIEGLKEADKDEFCRCELKLQKWYGDLRGKPFAIEAENSILDISGFSKQYNCAFIWQKDGVKKLNLYLIINYFKGGKLRFKKIKPEAFEANRFYTVINKKSGEIVPMEVNFNFDDPNLIILPLAFGKRQGREFIWNDLLSLETGSLKLANGRVIEKTLYNRRTRQDEPALFVALTFERREVLDSSNIKPMNLIGVDRGENIPAVIALTDPEGCPLSRFKDSLGNPTHILRIGESYKEKQRTIQAKKEVEQRRAGGYSRKYASKAKNLADDMVRNTARDLLYYAVTQDAMLIFENLSRGFGRQGKRTFMAERQYTRMEDWLTAKLAYEGLPSKTYLSKTLAQYTSKTCSNCGFTITSADYDRVLEKLKKTATGWMTTINGKELKVEGQITYYNRYKRQNVVKDLSVELDRLSEESVNNDISSWTKGRSGEALSLLKKRFSHRPVQEKFVCLNCGFETHADEQAALNIARSWLFLRSQEYKKYQTNKTTGNTDKRAFVETWQSFYRKKLKEVWKPAV

SEQ ID NO: 28095 - protein, 978 aa, synthetic construct
  REGION 1..978: note = engineered CasX variant
QEIGRINKIRRRLVKDSNTKKAGKTGPMKTLLVRVMTPDLRERLENLRKKPENIPQPISNTSRANLNKLLTDYTEMKKAILHVYWEEFQKDPVGLMSRVAQPASKKIDQNKLKPEMDEKGNLTTAGFACSQCGQPLFVYKLEQVSEKGKAYTNYFGRCNVAEHEKLIKLAQLKPEKDSDEAVTYSLGKFGQRALDFYSIHVTKESTHPVKPLAQIAGNRYASGPVGKALSDACMGTIASFLSKYQDIIIEHQKVVKGNQKRLESLRELAGKENLEYPSVTLPPQPHTKEGVDAYNEVIARVRMWVNLNLWQKLKLSRDDAKPLLRLKGFPSFPLVERQANEVDWWDMVCNVKKLINEKKEDGKVFWQNLAGYKRQEALRPYLSSEEDRKKGKKFARYQLGDLLLHLEKKHGEDWGKVYDEAWERIDKKVEGLSKHIKLEEERRSEDAQSKAALTDWLRAKASFVIEGLKEADKDEFCRCELKLQKWYGDLRGKPFAIEAENSILDISGFSKQYNCAFIWQKDGVKKLNLYLIINYFKGGKLRFKKIKPEAFEANRFYTVINKKSGEIVPMEVNFNFDDPNLIILPLAFGKRQGREFIWNDLLSLETGSLKLANGRVIEKTLYNRRTRQDEPALFVALTFERREVLDSSNIKPMNLIGVDRGENIPAVIALTDPEGCPLSRFKDSLGNPTHILRIGESYKEKQRTIQAKKEVEQRRAGGYSRKYASKAKNLADDMVRNTARDLLYYAVTQDAMLIFENLSRGFGRQGKRTFMAERQYTRMEDWLTAKLAYEGLPSKTYLSKTLAQYTSKTCSNCGFTITSADYDRVLEKLKKTATGWMTTINGKELKVEGQITYYNRYKRQNVVKDLSVELDRLSEESVNNDISSWTKGRSGEALSLLKKRFSHRPVQEKFVCLNCGFETHADEQAALNIARSWLFLRSQEYKKYQTNKTTGNTDKRAFVETWQSFYRKKLKEVWKPAV

SEQ ID NO: 28096 - protein, 978 aa, synthetic construct
  REGION 1..978: note = engineered CasX variant
QEIGRINKIRRRLVKDSNTKKAGKTGPMKTLLVRVMTPDLRERLENLRKKPENIPQPISNTSRANLNKLLTDYTEMKKAILHVYWEEFQKDPVGLMSRVAQPASKKIDQNKLKPEMDEKGNLTTAGFACSQCGQPLFVYKLEQVSEKGKAYTNYFGRCNVAEHEKLILLYQLKPEKDSDEAVTYSLGKFGQRALDFYSIHVTKESTHPVKPLAQIAGNRYASGPVGKALSDACMGTIASFLSKYQDIIIEHQKVVKGNQKRLESLRELAGKENLEYPSVTLPPQPHTKEGVDAYNEVIARVRMWVNLNLWQKLKLSRDDAKPLLRLKGFPSFPLVERQANEVDWWDMVCNVKKLINEKKEDGKVFWQNLAGYKRQEALRPYLSSEEDRKKGKKFARYQLGDLLLHLEKKHGEDWGKVYDEAWERIDKKVEGLSKHIKLEEERRSEDAQSKAALTDWLRAKASFVIEGLKEADKDEFCRCELKLQKWYGDLRGKPFAIEAENSILDISGFSKQYNCAFIWQKDGVKKLNLYLIINYFKGGKLRFKKIKPEAFEANRFYTVINKKSGEIVPMEVNFNFDDPNLIILPLAFGKRQGREFIWNDLLSLETGSLKLANGRVIEKTLYNRRTRQDEPALFVALTFERREVLDSSNIKPMNLIGVDRGENIPAVIALTDPEGCPLSRFKDSLGNPTHILRIGESYKEKQRTIQAKKEVEQRRAGGYSRKYASKAKNLADDMVRNTARDLLYYAVTQDAMLIFENLSRGFGRQGKRTFMAERQYTRMEDWLTAKLAYEGLPSKTYLSKTLAQYTSKTCSNCGFTITSADYDRVLEKLKKTATGWMTTINGKELKVEGQITYYNRYKRQNVVKDLSVELDRLSEESVNNDISSWTKGRSGEALSLLKKRFSHRPVQEKFVCLNCGFETHADEQAALNIARSWLFLRSQEYKKYQTNKTTGNTDKRAFVETWQSFYRKKLKEVWKPAV

SEQ ID NO: 28097 - protein, 978 aa, synthetic construct
  REGION 1..978: note = engineered CasX variant
QEIGRINKIRRRLVKDSNTKKAGKTGPMKTLLVRVMTPDLRERLENLRKKPENIPQPISNTSRANLNKLLTDYTEMKKAILHVYWEEFQKDPVGLMSRVAQPASKKIDQNKLKPEMDEKGNLTTAGFACSQCGQPLFVYKLEQVSEKGKAYTNYFGRCNVAEHEKLILLSQLKPEKDSDEAVTYSLGKFGQRALDFYSIHVTKESTHPVKPLAQIAGNRYASGPVGKALSDACMGTIASFLSKYQDIIIEHQKVVKGNQKRLESLRELAGKENLEYPSVTLPPQPHTKEGVDAYNEVIARVRMWVNLNLWQKLKLSRDDAKPLLRLKGFPSFPLVERQANEVDWWDMVCNVKKLINEKKEDGKVFWQNLAGYKRQEALRPYLSSEEDRKKGKKFARYQLGDLLLHLEKKHGEDWGKVYDEAWERIDKKVEGLSKHIKLEEERRSEDAQSKAALTDWLRAKASFVIEGLKEADKDEFCRCELKLQKWYGDLRGKPFAIEAENSILDISGFSKQYNCAFIWQKDGVKKLNLYLIINYFKGGKLRFKKIKPEAFEANRFYTVINKKSGEIVPMEVNFNFDDPNLIILPLAFGKRQGREFIWNDLLSLETGSLKLANGRVIEKTLYNRRTRQDEPALFVALTFERREVLDSSNIKPMNLIGVDRGENIPAVIALTDPEGCPLSRFKDSLGNPTHILRIGESYKEKQRTIQAKKEVEQRRAGGYSRKYASKAKNLADDMVRNTARDLLYYAVTQDAMLIFENLSRGFGRQGKRTFMAERQYTRMEDWLTAKLAYEGLPSKTYLSKTLAQYTSKTCSNCGFTITSADYDRVLEKLKKTATGWMTTINGKELKVEGQITYYNRYKRQNVVKDLSVELDRLSEESVNNDISSWTKGRSGEALSLLKKRFSHRPVQEKFVCLNCGFETHADEQAALNIARSWLFLRSQEYKKYQTNKTTGNTDKRAFVETWQSFYRKKLKEVWKPAV

SEQ ID NO: 28098 - protein, 977 aa, synthetic construct
  REGION 1..977: note = engineered CasX variant
QEIGRINKIRRRLVKDSNTKKAGKTGPMKTLLVRVMTPDLRERLENLRKKPENIPQPISNTSRANLNKLLTDYTEMKKAILHVYWEEFQKDPVGLMSRVAQPASKKIDQNKLKPEMDEKGNLTTAGFACSQCGQPLFVYKLEQVSEKGKAYTNYFGRCNVAEHEKLILLAQLKPEKDSDEAVTYSLGKFGQRALDFYSIHVTKESTHPVKPLAQIAGNRYASPVGKALSDACMGTIASFLSKYQDIIIEHQKVVKGNQKRLESLRELAGKENLEYPSVTLPPQPHTKEGVDAYNEVIARVRMWVNLNLWQKLKLSRDDAKPLLRLKGFPSFPLVERQANEVDWWDMVCNVKKLINEKKEDGKVFWQNLAGYKRQEALRPYLSSEEDRKKGKKFARYQLGDLLLHLEKKHGEDWGKVYDEAWERIDKKVEGLSKHIKLEEERRSEDAQSKAALTDWLRAKASFVIEGLKEADKDEFCRCELKLQKWYGDLRGKPFAIEAENSILDISGFSKQYNCAFIWQKDGVKKLNLYLIINYFKGGKLRFKKIKPEAFEANRFYTVINKKSGEIVPMEVNFNFDDPNLIILPLAFGKRQGREFIWNDLLSLETGSLKLANGRVIEKTLYNRRTRQDEPALFVALTFERREVLDSSNIKPMNLIGVDRGENIPAVIALTDPEGCPLSRFKDSLGNPTHILRIGESYKEKQRTIQAKKEVEQRRAGGYSRKYASKAKNLADDMVRNTARDLLYYAVTQDAMLIFENLSRGFGRQGKRTFMAERQYTRMEDWLTAKLAYEGLPSKTYLSKTLAQYTSKTCSNCGFTITSADYDRVLEKLKKTATGWMTTINGKELKVEGQITYYNRYKRQNVVKDLSVELDRLSEESVNNDISSWTKGRSGEALSLLKKRFSHRPVQEKFVCLNCGFETHADEQAALNIARSWLFLRSQEYKKYQTNKTTGNTDKRAFVETWQSFYRKKLKEVWKPAV

SEQ ID NO: 28099 - protein, 978 aa, synthetic construct
  REGION 1..978: note = engineered CasX variant
QEIGRINKIRRRLVKDSNTKKAGKTGPMKTLLVRVMTPDLRERLENLRKKPENIPQPISNTSRANLNKLLTDYTEMKKAILHVYWEEFQKDPVGLMSRVAQPASKKIDQNKLKPEMDEKGNLTTAGFACSQCGQPLFVYKLEQVSEKGKAYTNYFGRCNVAEHEKLILLAQLKPEKDSDEAVTYSLGKFGQRALDFYSIHVTKESTHPVKPLAQIAGNRYASGPVGKALSDACMGTIASFLSKYQDIIIEHQKVVKGNQKRLESLRELAGKENLEYPSVTLPPQPHTSEGVDAYNEVIARVRMWVNLNLWQKLKLSRDDAKPLLRLKGFPSFPLVERQANEVDWWDMVCNVKKLINEKKEDGKVFWQNLAGYKRQEALRPYLSSEEDRKKGKKFARYQLGDLLLHLEKKHGEDWGKVYDEAWERIDKKVEGLSKHIKLEEERRSEDAQSKAALTDWLRAKASFVIEGLKEADKDEFCRCELKLQKWYGDLRGKPFAIEAENSILDISGFSKQYNCAFIWQKDGVKKLNLYLIINYFKGGKLRFKKIKPEAFEANRFYTVINKKSGEIVPMEVNFNFDDPNLIILPLAFGKRQGREFIWNDLLSLETGSLKLANGRVIEKTLYNRRTRQDEPALFVALTFERREVLDSSNIKPMNLIGVDRGENIPAVIALTDPEGCPLSRFKDSLGNPTHILRIGESYKEKQRTIQAKKEVEQRRAGGYSRKYASKAKNLADDMVRNTARDLLYYAVTQDAMLIFENLSRGFGRQGKRTFMAERQYTRMEDWLTAKLAYEGLPSKTYLSKTLAQYTSKTCSNCGFTITSADYDRVLEKLKKTATGWMTTINGKELKVEGQITYYNRYKRQNVVKDLSVELDRLSEESVNNDISSWTKGRSGEALSLLKKRFSHRPVQEKFVCLNCGFETHADEQAALNIARSWLFLRSQEYKKYQTNKTTGNTDKRAFVETWQSFYRKKLKEVWKPAV

SEQ ID NO: 28100 - protein, 978 aa, synthetic construct
  REGION 1..978: note = engineered CasX variant
QEIGRINKIRRRLVKDSNTKKAGKTGPMKTLLVRVMTPDLRERLENLRKKPENIPQPISNTSRANLNKLLTDYTEMKKAILHVYWEEFQKDPVGLMSRVAQPASKKIDQNKLKPEMDEKGNLTTAGFACSQCGQPLFVYKLEQVSEKGKAYTNYFGRCNVAEHEKLILLAQLKPEKDSDEAVTYSLGKFGQRALDFYSIHVTKESTHPVKPLAQIAGNRYASGPVGKALSDACMGTIASFLSKYQDIIIEHQKVVKGNQKRLESLRELAGKENLEYPSVTLPPQPHTKEGLDAYNEVIARVRMWVNLNLWQKLKLSRDDAKPLLRLKGFPSFPLVERQANEVDWWDMVCNVKKLINEKKEDGKVFWQNLAGYKRQEALRPYLSSEEDRKKGKKFARYQLGDLLLHLEKKHGEDWGKVYDEAWERIDKKVEGLSKHIKLEEERRSEDAQSKAALTDWLRAKASFVIEGLKEADKDEFCRCELKLQKWYGDLRGKPFAIEAENSILDISGFSKQYNCAFIWQKDGVKKLNLYLIINYFKGGKLRFKKIKPEAFEANRFYTVINKKSGEIVPMEVNFNFDDPNLIILPLAFGKRQGREFIWNDLLSLETGSLKLANGRVIEKTLYNRRTRQDEPALFVALTFERREVLDSSNIKPMNLIGVDRGENIPAVIALTDPEGCPLSRFKDSLGNPTHILRIGESYKEKQRTIQAKKEVEQRRAGGYSRKYASKAKNLADDMVRNTARDLLYYAVTQDAMLIFENLSRGFGRQGKRTFMAERQYTRMEDWLTAKLAYEGLPSKTYLSKTLAQYTSKTCSNCGFTITSADYDRVLEKLKKTATGWMTTINGKELKVEGQITYYNRYKRQNVVKDLSVELDRLSEESVNNDISSWTKGRSGEALSLLKKRFSHRPVQEKFVCLNCGFETHADEQAALNIARSWLFLRSQEYKKYQTNKTTGNTDKRAFVETWQSFYRKKLKEVWKPAV

SEQ ID NO: 28101 - protein, 978 aa, synthetic construct
  REGION 1..978: note = engineered CasX variant
QEIGRINKIRRRLVKDSNTKKAGKTGPMKTLLVRVMTPDLRERLENLRKKPENIPQPISNTSRANLNKLLTDYTEMKKAILHVYWEEFQKDPVGLMSRVAQPASKKIDQNKLKPEMDEKGNLTTAGFACSQCGQPLFVYKLEQVSEKGKAYTNYFGRCNVAEHEKLILLAQLKPEKDSDEAVTYSLGKFGQRALDFYSIHVTKESTHPVKPLAQIAGNRYASGPVGKALSDACMGTIASFLSKYQDIIIEHQKVVKGNQKRLESLRELAGKENLEYPSVTLPPQPHTKEGVDAYNEVIARVRTWVNLNLWQKLKLSRDDAKPLLRLKGFPSFPLVERQANEVDWWDMVCNVKKLINEKKEDGKVFWQNLAGYKRQEALRPYLSSEEDRKKGKKFARYQLGDLLLHLEKKHGEDWGKVYDEAWERIDKKVEGLSKHIKLEEERRSEDAQSKAALTDWLRAKASFVIEGLKEADKDEFCRCELKLQKWYGDLRGKPFAIEAENSILDISGFSKQYNCAFIWQKDGVKKLNLYLIINYFKGGKLRFKKIKPEAFEANRFYTVINKKSGEIVPMEVNFNFDDPNLIILPLAFGKRQGREFIWNDLLSLETGSLKLANGRVIEKTLYNRRTRQDEPALFVALTFERREVLDSSNIKPMNLIGVDRGENIPAVIALTDPEGCPLSRFKDSLGNPTHILRIGESYKEKQRTIQAKKEVEQRRAGGYSRKYASKAKNLADDMVRNTARDLLYYAVTQDAMLIFENLSRGFGRQGKRTFMAERQYTRMEDWLTAKLAYEGLPSKTYLSKTLAQYTSKTCSNCGFTITSADYDRVLEKLKKTATGWMTTINGKELKVEGQITYYNRYKRQNVVKDLSVELDRLSEESVNNDISSWTKGRSGEALSLLKKRFSHRPVQEKFVCLNCGFETHADEQAALNIARSWLFLRSQEYKKYQTNKTTGNTDKRAFVETWQSFYRKKLKEVWKPAV

SEQ ID NO: 28102 - protein, 978 aa, synthetic construct
  REGION 1..978: note = engineered CasX variant
QEIGRINKIRRRLVKDSNTKKAGKTGPMKTLLVRVMTPDLRERLENLRKKPENIPQPISNTSRANLNKLLTDYTEMKKAILHVYWEEFQKDPVGLMSRVAQPASKKIDQNKLKPEMDEKGNLTTAGFACSQCGQPLFVYKLEQVSEKGKAYTNYFGRCNVAEHEKLILLAQLKPEKDSDEAVTYSLGKFGQRALDFYSIHVTKESTHPVKPLAQIAGNRYASGPVGKALSDACMGTIASFLSKYQDIIIEHQKVVKGNQKRLESLRELAGKENLEYPSVTLPPQPHTKEGVDAYNEVIARVRWWVNLNLWQKLKLSRDDAKPLLRLKGFPSFPLVERQANEVDWWDMVCNVKKLINEKKEDGKVFWQNLAGYKRQEALRPYLSSEEDRKKGKKFARYQLGDLLLHLEKKHGEDWGKVYDEAWERIDKKVEGLSKHIKLEEERRSEDAQSKAALTDWLRAKASFVIEGLKEADKDEFCRCELKLQKWYGDLRGKPFAIEAENSILDISGFSKQYNCAFIWQKDGVKKLNLYLIINYFKGGKLRFKKIKPEAFEANRFYTVINKKSGEIVPMEVNFNFDDPNLIILPLAFGKRQGREFIWNDLLSLETGSLKLANGRVIEKTLYNRRTRQDEPALFVALTFERREVLDSSNIKPMNLIGVDRGENIPAVIALTDPEGCPLSRFKDSLGNPTHILRIGESYKEKQRTIQAKKEVEQRRAGGYSRKYASKAKNLADDMVRNTARDLLYYAVTQDAMLIFENLSRGFGRQGKRTFMAERQYTRMEDWLTAKLAYEGLPSKTYLSKTLAQYTSKTCSNCGFTITSADYDRVLEKLKKTATGWMTTINGKELKVEGQITYYNRYKRQNVVKDLSVELDRLSEESVNNDISSWTKGRSGEALSLLKKRFSHRPVQEKFVCLNCGFETHADEQAALNIARSWLFLRSQEYKKYQTNKTTGNTDKRAFVETWQSFYRKKLKEVWKPAV

SEQ ID NO: 28103 - protein, 979 aa, synthetic construct
  REGION 1..979: note = engineered CasX variant
QEIGRINKIRRRLVKDSNTKKAGKTGPMKTLLVRVMTPDLRERLENLRKKPENIPQPISNTSRANLNKLLTDYTEMKKAILHVYWEEFQKDPVGLMSRVAQPASKKIDQNKLKPEMDEKGNLTTAGFACSQCGQPLFVYKLEQVSEKGKAYTNYFGRCNVAEHEKLILLAQLKPEKDSDEAVTYSLGKFGQRALDFYSIHVTKESTHPVKPLAQIAGNRYASGPVGKALSDACMGTIASFLSKYQDIIIEHQKVVKGNQKRLESLRELAGKENLEYPSVTLPPQPHTKEGVDAYNEVIARVRMWVNLNLWQKLKLSRDDAKPLLRLKGFPSFPLVERQQANEVDWWDMVCNVKKLINEKKEDGKVFWQNLAGYKRQEALRPYLSSEEDRKKGKKFARYQLGDLLLHLEKKHGEDWGKVYDEAWERIDKKVEGLSKHIKLEEERRSEDAQSKAALTDWLRAKASFVIEGLKEADKDEFCRCELKLQKWYGDLRGKPFAIEAENSILDISGFSKQYNCAFIWQKDGVKKLNLYLIINYFKGGKLRFKKIKPEAFEANRFYTVINKKSGEIVPMEVNFNFDDPNLIILPLAFGKRQGREFIWNDLLSLETGSLKLANGRVIEKTLYNRRTRQDEPALFVALTFERREVLDSSNIKPMNLIGVDRGENIPAVIALTDPEGCPLSRFKDSLGNPTHILRIGESYKEKQRTIQAKKEVEQRRAGGYSRKYASKAKNLADDMVRNTARDLLYYAVTQDAMLIFENLSRGFGRQGKRTFMAERQYTRMEDWLTAKLAYEGLPSKTYLSKTLAQYTSKTCSNCGFTITSADYDRVLEKLKKTATGWMTTINGKELKVEGQITYYNRYKRQNVVKDLSVELDRLSEESVNNDISSWTKGRSGEALSLLKKRFSHRPVQEKFVCLNCGFETHADEQAALNIARSWLFLRSQEYKKYQTNKTTGNTDKRAFVETWQSFYRKKLKEVWKPAV

SEQ ID NO: 28104 - protein, 979 aa, synthetic construct
  REGION 1..979: note = engineered CasX variant
QEIGRINKIRRRLVKDSNTKKAGKTGPMKTLLVRVMTPDLRERLENLRKKPENIPQPISNTSRANLNKLLTDYTEMKKAILHVYWEEFQKDPVGLMSRVAQPASKKIDQNKLKPEMDEKGNLTTAGFACSQCGQPLFVYKLEQVSEKGKAYTNYFGRCNVAEHEKLILLAQLKPEKDSDEAVTYSLGKFGQRALDFYSIHVTKESTHPVKPLAQIAGNRYASGPVGKALSDACMGTIASFLSKYQDIIIEHQKVVKGNQKRLESLRELAGKENLEYPSVTLPPQPHTKEGVDAYNEVIARVRMWVNLNLWQKLKLSRDDAKPLLRLKGFPSFPLVERQANAEVDWWDMVCNVKKLINEKKEDGKVFWQNLAGYKRQEALRPYLSSEEDRKKGKKFARYQLGDLLLHLEKKHGEDWGKVYDEAWERIDKKVEGLSKHIKLEEERRSEDAQSKAALTDWLRAKASFVIEGLKEADKDEFCRCELKLQKWYGDLRGKPFAIEAENSILDISGFSKQYNCAFIWQKDGVKKLNLYLIINYFKGGKLRFKKIKPEAFEANRFYTVINKKSGEIVPMEVNFNFDDPNLIILPLAFGKRQGREFIWNDLLSLETGSLKLANGRVIEKTLYNRRTRQDEPALFVALTFERREVLDSSNIKPMNLIGVDRGENIPAVIALTDPEGCPLSRFKDSLGNPTHILRIGESYKEKQRTIQAKKEVEQRRAGGYSRKYASKAKNLADDMVRNTARDLLYYAVTQDAMLIFENLSRGFGRQGKRTFMAERQYTRMEDWLTAKLAYEGLPSKTYLSKTLAQYTSKTCSNCGFTITSADYDRVLEKLKKTATGWMTTINGKELKVEGQITYYNRYKRQNVVKDLSVELDRLSEESVNNDISSWTKGRSGEALSLLKKRFSHRPVQEKFVCLNCGFETHADEQAALNIARSWLFLRSQEYKKYQTNKTTGNTDKRAFVETWQSFYRKKLKEVWKPAV

SEQ ID NO: 28105 - protein, 978 aa, synthetic construct
  REGION 1..978: note = engineered CasX variant
QEIGRINKIRRRLVKDSNTKKAGKTGPMKTLLVRVMTPDLRERLENLRKKPENIPQPISNTSRANLNKLLTDYTEMKKAILHVYWEEFQKDPVGLMSRVAQPASKKIDQNKLKPEMDEKGNLTTAGFACSQCGQPLFVYKLEQVSEKGKAYTNYFGRCNVAEHEKLILLAQLKPEKDSDEAVTYSLGKFGQRALDFYSIHVTKESTHPVKPLAQIAGNRYASGPVGKALSDACMGTIASFLSKYQDIIIEHQKVVKGNQKRLESLRELAGKENLEYPSVTLPPQPHTKEGVDAYNEVIARVRMWVNLNLWQKLKLSRDDAKPLLRLKGFPSFPLVERQANEVDWWDMVCNVKKLINEKKEDGKVFWQNLAGYKRQEALRPYLSSEEDRKKGKKFARTQLGDLLLHLEKKHGEDWGKVYDEAWERIDKKVEGLSKHIKLEEERRSEDAQSKAALTDWLRAKASFVIEGLKEADKDEFCRCELKLQKWYGDLRGKPFAIEAENSILDISGFSKQYNCAFIWQKDGVKKLNLYLIINYFKGGKLRFKKIKPEAFEANRFYTVINKKSGEIVPMEVNFNFDDPNLIILPLAFGKRQGREFIWNDLLSLETGSLKLANGRVIEKTLYNRRTRQDEPALFVALTFERREVLDSSNIKPMNLIGVDRGENIPAVIALTDPEGCPLSRFKDSLGNPTHILRIGESYKEKQRTIQAKKEVEQRRAGGYSRKYASKAKNLADDMVRNTARDLLYYAVTQDAMLIFENLSRGFGRQGKRTFMAERQYTRMEDWLTAKLAYEGLPSKTYLSKTLAQYTSKTCSNCGFTITSADYDRVLEKLKKTATGWMTTINGKELKVEGQITYYNRYKRQNVVKDLSVELDRLSEESVNNDISSWTKGRSGEALSLLKKRFSHRPVQEKFVCLNCGFETHADEQAALNIARSWLFLRSQEYKKYQTNKTTGNTDKRAFVETWQSFYRKKLKEVWKPAV

SEQ ID NO: 28106 - protein, 979 aa, synthetic construct
  REGION 1..979: note = engineered CasX variant
QEIGRINKIRRRLVKDSNTKKAGKTGPMKTLLVRVMTPDLRERLENLRKKPENIPQPISNTSRANLNKLLTDYTEMKKAILHVYWEEFQKDPVGLMSRVAQPASKKIDQNKLKPEMDEKGNLTTAGFACSQCGQPLFVYKLEQVSEKGKAYTNYFGRCNVAEHEKLILLAQLKPEKDSDEAVTYSLGKFGQRALDFYSIHVTKESTHPVKPLAQIAGNRYASGPVGKALSDACMGTIASFLSKYQDIIIEHQKVVKGNQKRLESLRELAGKENLEYPSVTLPPQPHTKEGVDAYNEVIARVRMWVNLNLWQKLKLSRDDAKPLLRLKGFPSFPLVERQANEVDWWDMVCNVKKLINEKKEDGKVFWQNLAGYKRQEALRPYLSSEEDRKKGKKFARYQLGDLLLHLEKKHEGEDWGKVYDEAWERIDKKVEGLSKHIKLEEERRSEDAQSKAALTDWLRAKASFVIEGLKEADKDEFCRCELKLQKWYGDLRGKPFAIEAENSILDISGFSKQYNCAFIWQKDGVKKLNLYLIINYFKGGKLRFKKIKPEAFEANRFYTVINKKSGEIVPMEVNFNFDDPNLIILPLAFGKRQGREFIWNDLLSLETGSLKLANGRVIEKTLYNRRTRQDEPALFVALTFERREVLDSSNIKPMNLIGVDRGENIPAVIALTDPEGCPLSRFKDSLGNPTHILRIGESYKEKQRTIQAKKEVEQRRAGGYSRKYASKAKNLADDMVRNTARDLLYYAVTQDAMLIFENLSRGFGRQGKRTFMAERQYTRMEDWLTAKLAYEGLPSKTYLSKTLAQYTSKTCSNCGFTITSADYDRVLEKLKKTATGWMTTINGKELKVEGQITYYNRYKRQNVVKDLSVELDRLSEESVNNDISSWTKGRSGEALSLLKKRFSHRPVQEKFVCLNCGFETHADEQAALNIARSWLFLRSQEYKKYQTNKTTGNTDKRAFVETWQSFYRKKLKEVWKPAV

SEQ ID NO: 28107 - protein, 978 aa, synthetic construct
  REGION 1..978: note = engineered CasX variant
QEIGRINKIRRRLVKDSNTKKAGKTGPMKTLLVRVMTPDLRERLENLRKKPENIPQPISNTSRANLNKLLTDYTEMKKAILHVYWEEFQKDPVGLMSRVAQPASKKIDQNKLKPEMDEKGNLTTAGFACSQCGQPLFVYKLEQVSEKGKAYTNYFGRCNVAEHEKLILLAQLKPEKDSDEAVTYSLGKFGQRALDFYSIHVTKESTHPVKPLAQIAGNRYASGPVGKALSDACMGTIASFLSKYQDIIIEHQKVVKGNQKRLESLRELAGKENLEYPSVTLPPQPHTKEGVDAYNEVIARVRMWVNLNLWQKLKLSRDDAKPLLRLKGFPSFPLVERQANEVDWWDMVCNVKKLINEKKEDGKVFWQNLAGYKRQEALRPYLSSEEDRKKGKKFARYQLGDLLLHLEKKHGEDWGKVYDEAWERIDKKVEGLSKHIKLEEERRSEDAQSKAALTDWLRAKASFVIEGLKEADKDEFCRCDLKLQKWYGDLRGKPFAIEAENSILDISGFSKQYNCAFIWQKDGVKKLNLYLIINYFKGGKLRFKKIKPEAFEANRFYTVINKKSGEIVPMEVNFNFDDPNLIILPLAFGKRQGREFIWNDLLSLETGSLKLANGRVIEKTLYNRRTRQDEPALFVALTFERREVLDSSNIKPMNLIGVDRGENIPAVIALTDPEGCPLSRFKDSLGNPTHILRIGESYKEKQRTIQAKKEVEQRRAGGYSRKYASKAKNLADDMVRNTARDLLYYAVTQDAMLIFENLSRGFGRQGKRTFMAERQYTRMEDWLTAKLAYEGLPSKTYLSKTLAQYTSKTCSNCGFTITSADYDRVLEKLKKTATGWMTTINGKELKVEGQITYYNRYKRQNVVKDLSVELDRLSEESVNNDISSWTKGRSGEALSLLKKRFSHRPVQEKFVCLNCGFETHADEQAALNIARSWLFLRSQEYKKYQTNKTTGNTDKRAFVETWQSFYRKKLKEVWKPAV

SEQ ID NO: 28108 - protein, 978 aa, synthetic construct
  REGION 1..978: note = engineered CasX variant
QEIGRINKIRRRLVKDSNTKKAGKTGPMKTLLVRVMTPDLRERLENLRKKPENIPQPISNTSRANLNKLLTDYTEMKKAILHVYWEEFQKDPVGLMSRVAQPASKKIDQNKLKPEMDEKGNLTTAGFACSQCGQPLFVYKLEQVSEKGKAYTNYFGRCNVAEHEKLILLAQLKPEKDSDEAVTYSLGKFGQRALDFYSIHVTKESTHPVKPLAQIAGNRYASGPVGKALSDACMGTIASFLSKYQDIIIEHQKVVKGNQKRLESLRELAGKENLEYPSVTLPPQPHTKEGVDAYNEVIARVRMWVNLNLWQKLKLSRDDAKPLLRLKGFPSFPLVERQANEVDWWDMVCNVKKLINEKKEDGKVFWQNLAGYKRQEALRPYLSSEEDRKKGKKFARYQLGDLLLHLEKKHGEDWGKVYDEAWERIDKKVEGLSKHIKLEEERRSEDAQSKAALTDWLRAKASFVIEGLKEADKDEFCRCELKLQKWYGDLRGKPFAIEAENSILDISGFSKQYNCAFIWQKDGVKKLNLYLIINYFKGGKLRFKKIKPEAFEANRFYTVINKKSGEIVPMEVNFNFDDPNLIILPLAFGKRFGREFIWNDLLSLETGSLKLANGRVIEKTLYNRRTRQDEPALFVALTFERREVLDSSNIKPMNLIGVDRGENIPAVIALTDPEGCPLSRFKDSLGNPTHILRIGESYKEKQRTIQAKKEVEQRRAGGYSRKYASKAKNLADDMVRNTARDLLYYAVTQDAMLIFENLSRGFGRQGKRTFMAERQYTRMEDWLTAKLAYEGLPSKTYLSKTLAQYTSKTCSNCGFTITSADYDRVLEKLKKTATGWMTTINGKELKVEGQITYYNRYKRQNVVKDLSVELDRLSEESVNNDISSWTKGRSGEALSLLKKRFSHRPVQEKFVCLNCGFETHADEQAALNIARSWLFLRSQEYKKYQTNKTTGNTDKRAFVETWQSFYRKKLKEVWKPAV

SEQ ID NO: 28109 - protein, 978 aa, synthetic construct
  REGION 1..978: note = engineered CasX variant
QEIGRINKIRRRLVKDSNTKKAGKTGPMKTLLVRVMTPDLRERLENLRKKPENIPQPISNTSRANLNKLLTDYTEMKKAILHVYWEEFQKDPVGLMSRVAQPASKKIDQNKLKPEMDEKGNLTTAGFACSQCGQPLFVYKLEQVSEKGKAYTNYFGRCNVAEHEKLILLAQLKPEKDSDEAVTYSLGKFGQRALDFYSIHVTKESTHPVKPLAQIAGNRYASGPVGKALSDACMGTIASFLSKYQDIIIEHQKVVKGNQKRLESLRELAGKENLEYPSVTLPPQPHTKEGVDAYNEVIARVRMWVNLNLWQKLKLSRDDAKPLLRLKGFPSFPLVERQANEVDWWDMVCNVKKLINEKKEDGKVFWQNLAGYKRQEALRPYLSSEEDRKKGKKFARYQLGDLLLHLEKKHGEDWGKVYDEAWERIDKKVEGLSKHIKLEEERRSEDAQSKAALTDWLRAKASFVIEGLKEADKDEFCRCELKLQKWYGDLRGKPFAIEAENSILDISGFSKQYNCAFIWQKDGVKKLNLYLIINYFKGGKLRFKKIKPEAFEANRFYTVINKKSGEIVPMEVNFNFDDPNLIILPLAFGKRVGREFIWNDLLSLETGSLKLANGRVIEKTLYNRRTRQDEPALFVALTFERREVLDSSNIKPMNLIGVDRGENIPAVIALTDPEGCPLSRFKDSLGNPTHILRIGESYKEKQRTIQAKKEVEQRRAGGYSRKYASKAKNLADDMVRNTARDLLYYAVTQDAMLIFENLSRGFGRQGKRTFMAERQYTRMEDWLTAKLAYEGLPSKTYLSKTLAQYTSKTCSNCGFTITSADYDRVLEKLKKTATGWMTTINGKELKVEGQITYYNRYKRQNVVKDLSVELDRLSEESVNNDISSWTKGRSGEALSLLKKRFSHRPVQEKFVCLNCGFETHADEQAALNIARSWLFLRSQEYKKYQTNKTTGNTDKRAFVETWQSFYRKKLKEVWKPAV

SEQ ID NO: 28110 - protein, 979 aa, synthetic construct
  REGION 1..979: note = engineered CasX variant
QEIGRINKIRRRLVKDSNTKKAGKTGPMKTLLVRVMTPDLRERLENLRKKPENIPQPISNTSRANLNKLLTDYTEMKKAILHVYWEEFQKDPVGLMSRVAQPASKKIDQNKLKPEMDEKGNLTTAGFACSQCGQPLFVYKLEQVSEKGKAYTNYFGRCNVAEHEKLILLAQLKPEKDSDEAVTYSLGKFGQRALDFYSIHVTKESTHPVKPLAQIAGNRYASGPVGKALSDACMGTIASFLSKYQDIIIEHQKVVKGNQKRLESLRELAGKENLEYPSVTLPPQPHTKEGVDAYNEVIARVRMWVNLNLWQKLKLSRDDAKPLLRLKGFPSFPLVERQANEVDWWDMVCNVKKLINEKKEDGKVFWQNLAGYKRQEALRPYLSSEEDRKKGKKFARYQLGDLLLHLEKKHGEDWGKVYDEAWERIDKKVEGLSKHIKLEEERRSEDAQSKAALTDWLRAKASFVIEGLKEADKDEFCRCELKLQKWYGDLRGKPFAIEAENSILDISGFSKQYNCAFIWQKDGVKKLNLYLIINYFKGGKLRFKKIKPEAFEANRFYTVINKKSGEIVPMEVNFNFDDPNLIILPLAFGKRQGREFIWNDLLSLETGSLKLANGRVIEKTLYNRRTRQDEPALFVALTFERREVLDSSNIKTPMNLIGVDRGENIPAVIALTDPEGCPLSRFKDSLGNPTHILRIGESYKEKQRTIQAKKEVEQRRAGGYSRKYASKAKNLADDMVRNTARDLLYYAVTQDAMLIFENLSRGFGRQGKRTFMAERQYTRMEDWLTAKLAYEGLPSKTYLSKTLAQYTSKTCSNCGFTITSADYDRVLEKLKKTATGWMTTINGKELKVEGQITYYNRYKRQNVVKDLSVELDRLSEESVNNDISSWTKGRSGEALSLLKKRFSHRPVQEKFVCLNCGFETHADEQAALNIARSWLFLRSQEYKKYQTNKTTGNTDKRAFVETWQSFYRKKLKEVWKPAV

SEQ ID NO: 28111 - protein, 979 aa, synthetic construct
  REGION 1..979: note = engineered CasX variant
QEIGRINKIRRRLVKDSNTKKAGKTGPMKTLLVRVMTPDLRERLENLRKKPENIPQPISNTSRANLNKLLTDYTEMKKAILHVYWEEFQKDPVGLMSRVAQPASKKIDQNKLKPEMDEKGNLTTAGFACSQCGQPLFVYKLEQVSEKGKAYTNYFGRCNVAEHEKLILLAQLKPEKDSDEAVTYSLGKFGQRALDFYSIHVTKESTHPVKPLAQIAGNRYASGPVGKALSDACMGTIASFLSKYQDIIIEHQKVVKGNQKRLESLRELAGKENLEYPSVTLPPQPHTKEGVDAYNEVIARVRMWVNLNLWQKLKLSRDDAKPLLRLKGFPSFPLVERQANEVDWWDMVCNVKKLINEKKEDGKVFWQNLAGYKRQEALRPYLSSEEDRKKGKKFARYQLGDLLLHLEKKHGEDWGKVYDEAWERIDKKVEGLSKHIKLEEERRSEDAQSKAALTDWLRAKASFVIEGLKEADKDEFCRCELKLQKWYGDLRGKPFAIEAENSILDISGFSKQYNCAFIWQKDGVKKLNLYLIINYFKGGKLRFKKIKPEAFEANRFYTVINKKSGEIVPMEVNFNFDDPNLIILPLAFGKRQGREFIWNDLLSLETGSLKLANGRVIEKTLYNRRTRQDEPALFVALTFERREVLDSSNIKPMSNLIGVDRGENIPAVIALTDPEGCPLSRFKDSLGNPTHILRIGESYKEKQRTIQAKKEVEQRRAGGYSRKYASKAKNLADDMVRNTARDLLYYAVTQDAMLIFENLSRGFGRQGKRTFMAERQYTRMEDWLTAKLAYEGLPSKTYLSKTLAQYTSKTCSNCGFTITSADYDRVLEKLKKTATGWMTTINGKELKVEGQITYYNRYKRQNVVKDLSVELDRLSEESVNNDISSWTKGRSGEALSLLKKRFSHRPVQEKFVCLNCGFETHADEQAALNIARSWLFLRSQEYKKYQTNKTTGNTDKRAFVETWQSFYRKKLKEVWKPAV

SEQ ID NO: 28112 - protein, 978 aa, synthetic construct
  REGION 1..978: note = engineered CasX variant
QEIGRINKIRRRLVKDSNTKKAGKTGPMKTLLVRVMTPDLRERLENLRKKPENIPQPISNTSRANLNKLLTDYTEMKKAILHVYWEEFQKDPVGLMSRVAQPASKKIDQNKLKPEMDEKGNLTTAGFACSQCGQPLFVYKLEQVSEKGKAYTNYFGRCNVAEHEKLILLAQLKPEKDSDEAVTYSLGKFGQRALDFYSIHVTKESTHPVKPLAQIAGNRYASGPVGKALSDACMGTIASFLSKYQDIIIEHQKVVKGNQKRLESLRELAGKENLEYPSVTLPPQPHTKEGVDAYNEVIARVRMWVNLNLWQKLKLSRDDAKPLLRLKGFPSFPLVERQANEVDWWDMVCNVKKLINEKKEDGKVFWQNLAGYKRQEALRPYLSSEEDRKKGKKFARYQLGDLLLHLEKKHGEDWGKVYDEAWERIDKKVEGLSKHIKLEEERRSEDAQSKAALTDWLRAKASFVIEGLKEADKDEFCRCELKLQKWYGDLRGKPFAIEAENSILDISGFSKQYNCAFIWQKDGVKKLNLYLIINYFKGGKLRFKKIKPEAFEANRFYTVINKKSGEIVPMEVNFNFDDPNLIILPLAFGKRQGREFIWNDLLSLETGSLKLANGRVIEKTLYNRRTRQDEPALFVALTFERREVLDSSNIKPMNLIGVDRGENIPAVIALTDPEGCPLSRFKDSLGNPTHILRIRESYKEKQRTIQAKKEVEQRRAGGYSRKYASKAKNLADDMVRNTARDLLYYAVTQDAMLIFENLSRGFGRQGKRTFMAERQYTRMEDWLTAKLAYEGLPSKTYLSKTLAQYTSKTCSNCGFTITSADYDRVLEKLKKTATGWMTTINGKELKVEGQITYYNRYKRQNVVKDLSVELDRLSEESVNNDISSWTKGRSGEALSLLKKRFSHRPVQEKFVCLNCGFETHADEQAALNIARSWLFLRSQEYKKYQTNKTTGNTDKRAFVETWQSFYRKKLKEVWKPAV

SEQ ID NO: 28113 - protein, 978 aa, synthetic construct
  REGION 1..978: note = engineered CasX variant
QEIGRINKIRRRLVKDSNTKKAGKTGPMKTLLVRVMTPDLRERLENLRKKPENIPQPISNTSRANLNKLLTDYTEMKKAILHVYWEEFQKDPVGLMSRVAQPASKKIDQNKLKPEMDEKGNLTTAGFACSQCGQPLFVYKLEQVSEKGKAYTNYFGRCNVAEHEKLILLAQLKPEKDSDEAVTYSLGKFGQRALDFYSIHVTKESTHPVKPLAQIAGNRYASGPVGKALSDACMGTIASFLSKYQDIIIEHQKVVKGNQKRLESLRELAGKENLEYPSVTLPPQPHTKEGVDAYNEVIARVRMWVNLNLWQKLKLSRDDAKPLLRLKGFPSFPLVERQANEVDWWDMVCNVKKLINEKKEDGKVFWQNLAGYKRQEALRPYLSSEEDRKKGKKFARYQLGDLLLHLEKKHGEDWGKVYDEAWERIDKKVEGLSKHIKLEEERRSEDAQSKAALTDWLRAKASFVIEGLKEADKDEFCRCELKLQKWYGDLRGKPFAIEAENSILDISGFSKQYNCAFIWQKDGVKKLNLYLIINYFKGGKLRFKKIKPEAFEANRFYTVINKKSGEIVPMEVNFNFDDPNLIILPLAFGKRQGREFIWNDLLSLETGSLKLANGRVIEKTLYNRRTRQDEPALFVALTFERREVLDSSNIKPMNLIGVDRGENIPAVIALTDPEGCPLSRFKDSLGNPTHILRIGESYKEKQRTIQAKKEVEQRRAGGYSRKYASKAKNLADDMVRNTARDLLYYAVTQDAMLIFENLSRGFGRQGKRTFSAERQYTRMEDWLTAKLAYEGLPSKTYLSKTLAQYTSKTCSNCGFTITSADYDRVLEKLKKTATGWMTTINGKELKVEGQITYYNRYKRQNVVKDLSVELDRLSEESVNNDISSWTKGRSGEALSLLKKRFSHRPVQEKFVCLNCGFETHADEQAALNIARSWLFLRSQEYKKYQTNKTTGNTDKRAFVETWQSFYRKKLKEVWKPAV

SEQ ID NO: 28114 - protein, 978 aa, synthetic construct
  REGION 1..978: note = engineered CasX variant
QEIGRINKIRRRLVKDSNTKKAGKTGPMKTLLVRVMTPDLRERLENLRKKPENIPQPISNTSRANLNKLLTDYTEMKKAILHVYWEEFQKDPVGLMSRVAQPASKKIDQNKLKPEMDEKGNLTTAGFACSQCGQPLFVYKLEQVSEKGKAYTNYFGRCNVAEHEKLILLAQLKPEKDSDEAVTYSLGKFGQRALDFYSIHVTKESTHPVKPLAQIAGNRYASGPVGKALSDACMGTIASFLSKYQDIIIEHQKVVKGNQKRLESLRELAGKENLEYPSVTLPPQPHTKEGVDAYNEVIARVRMWVNLNLWQKLKLSRDDAKPLLRLKGFPSFPLVERQANEVDWWDMVCNVKKLINEKKEDGKVFWQNLAGYKRQEALRPYLSSEEDRKKGKKFARYQLGDLLLHLEKKHGEDWGKVYDEAWERIDKKVEGLSKHIKLEEERRSEDAQSKAALTDWLRAKASFVIEGLKEADKDEFCRCELKLQKWYGDLRGKPFAIEAENSILDISGFSKQYNCAFIWQKDGVKKLNLYLIINYFKGGKLRFKKIKPEAFEANRFYTVINKKSGEIVPMEVNFNFDDPNLIILPLAFGKRQGREFIWNDLLSLETGSLKLANGRVIEKTLYNRRTRQDEPALFVALTFERREVLDSSNIKPMNLIGVDRGENIPAVIALTDPEGCPLSRFKDSLGNPTHILRIGESYKEKQRTIQAKKEVEQRRAGGYSRKYASKAKNLADDMVRNTARDLLYYAVTQDAMLIFENLSRGFGRQGKRTFMAERQYTRMEDWLTAKLAYEGLPSKTYLSKTLAQYTSKTCSNCGFTITSADYDRVLEKLKKTATGWMTTINGKELKVEGQITYYNRYKRQNVVKDLSVELDRLSEESVNNDISSWDKGRSGEALSLLKKRFSHRPVQEKFVCLNCGFETHADEQAALNIARSWLFLRSQEYKKYQTNKTTGNTDKRAFVETWQSFYRKKLKEVWKPAV

SEQ ID NO: 28115 - protein, 978 aa, synthetic construct
  REGION 1..978: note = engineered CasX variant
QEIGRINKIRRRLVKDSNTKKAGKTGPMKTLLVRVMTPDLRERLENLRKKPENIPQPISNTSRANLNKLLTDYTEMKKAILHVYWEEFQVDPVGLMSRVAQPASKKIDQNKLKPEMDEKGNLTTAGFACSQCGQPLFVYKLEQVSEKGKAYTNYFGRCNVAEHEKLILLAQLKPEKDSDEAVTYSLGKFGQRALDFYSIHVTKESTHPVKPLAQIAGNRYASGPVGKALSDACMGTIASFLSKYQDIIIEHQKVVKGNQKRLESLRELAGKENLEYPSVTLPPQPHTKEGVDAYNEVIARVRMWVNLNLWQKLKLSRDDAKPLLRLKGFPSFPLVERQANEVDWWDMVCNVKKLINEKKEDGKVFWQNLAGYKRQEALRPYLSSEEDRKKGKKFARYQLGDLLLHLEKKHGEDWGKVYDEAWERIDKKVEGLSKHIKLEEERRSEDAQSKAALTDWLRAKASFVIEGLKEADKDEFCRCELKLQKWYGDLRGKPFAIEAENSILDISGFSKQYNCAFIWQKDGVKKLNLYLIINYFKGGKLRFKKIKPEAFEANRFYTVINKKSGEIVPMEVNFNFDDPNLIILPLAFGKRQGREFIWNDLLSLETGSLKLANGRVIEKTLYNRRTRQDEPALFVALTFERREVLDSSNIKPMNLIGVDRGENIPAVIALTDPEGCPLSRFKDSLGNPTHILRIGESYKEKQRTIQAKKEVEQRRAGGYSRKYASKAKNLADDMVRNTARDLLYYAVTQDAMLIFENLSRGFGRQGKRTFMAERQYTRMEDWLTAKLAYEGLPSKTYLSKTLAQYTSKTCSNCGFTITSADYDRVLEKLKKTATGWMTTINGKELKVEGQITYYNRYKRQNVVKDLSVELDRLSEESVNNDISSWTKGRSGEALSLLKKRFSHRPVQEKFVCLNCGFETHADEQAALNIARSWLFLRSQEYKKYQTNKTTGNTDKRAFVETWQSFYRKKLKEVWKPAV

SEQ ID NO: 28116 - protein, 978 aa, synthetic construct
  REGION 1..978: note = engineered CasX variant
QEIGRLNKIRRRLVKDSNTKKAGKTGPMKTLLVRVMTPDLRERLENLRKKPENIPQPISNTSRANLNKLLTDYTEMKKAILHVYWEEFQKDPVGLMSRVAQPASKKIDQNKLKPEMDEKGNLTTAGFACSQCGQPLFVYKLEQVSEKGKAYTNYFGRCNVAEHEKLILLAQLKPEKDSDEAVTYSLGKFGQRALDFYSIHVTKESTHPVKPLAQIAGNRYASGPVGKALSDACMGTIASFLSKYQDIIIEHQKVVKGNQKRLESLRELAGKENLEYPSVTLPPQPHTKEGVDAYNEVIARVRMWVNLNLWQKLKLSRDDAKPLLRLKGFPSFPLVERQANEVDWWDMVCNVKKLINEKKEDGKVFWQNLAGYKRQEALRPYLSSEEDRKKGKKFARYQLGDLLLHLEKKHGEDWGKVYDEAWERIDKKVEGLSKHIKLEEERRSEDAQSKAALTDWLRAKASFVIEGLKEADKDEFCRCELKLQKWYGDLRGKPFAIEAENSILDISGFSKQYNCAFIWQKDGVKKLNLYLIINYFKGGKLRFKKIKPEAFEANRFYTVINKKSGEIVPMEVNFNFDDPNLIILPLAFGKRQGREFIWNDLLSLETGSLKLANGRVIEKTLYNRRTRQDEPALFVALTFERREVLDSSNIKPMNLIGVDRGENIPAVIALTDPEGCPLSRFKDSLGNPTHILRIGESYKEKQRTIQAKKEVEQRRAGGYSRKYASKAKNLADDMVRNTARDLLYYAVTQDAMLIFENLSRGFGRQGKRTFMAERQYTRMEDWLTAKLAYEGLPSKTYLSKTLAQYTSKTCSNCGFTITSADYDRVLEKLKKTATGWMTTINGKELKVEGQITYYNRYKRQNVVKDLSVELDRLSEESVNNDISSWTKGRSGEALSLLKKRFSHRPVQEKFVCLNCGFETHADEQAALNIARSWLFLRSQEYKKYQTNKTTGNTDKRAFVETWQSFYRKKLKEVWKPAV

SEQ ID NO: 28117 - protein, 978 aa, synthetic construct
  REGION 1..978: note = engineered CasX variant
QEIGRINKIRRRLVKDSNTKKAGKTGPMKTLLVRVMTPDLRERLENLRKKPENIPQPISNTSRANLNKLLTDYTEMKKAILHVYWEEFQKDPVGLMSRVAQPASKKIDQNKLKPEMDEKGNLTTAGFACSQCGQPLFVYKLEQVSEKGKAYTNYVGRCNVAEHEKLILLAQLKPEKDSDEAVTYSLGKFGQRALDFYSIHVTKESTHPVKPLAQIAGNRYASGPVGKALSDACMGTIASFLSKYQDIIIEHQKVVKGNQKRLESLRELAGKENLEYPSVTLPPQPHTKEGVDAYNEVIARVRMWVNLNLWQKLKLSRDDAKPLLRLKGFPSFPLVERQANEVDWWDMVCNVKKLINEKKEDGKVFWQNLAGYKRQEALRPYLSSEEDRKKGKKFARYQLGDLLLHLEKKHGEDWGKVYDEAWERIDKKVEGLSKHIKLEEERRSEDAQSKAALTDWLRAKASFVIEGLKEADKDEFCRCELKLQKWYGDLRGKPFAIEAENSILDISGFSKQYNCAFIWQKDGVKKLNLYLIINYFKGGKLRFKKIKPEAFEANRFYTVINKKSGEIVPMEVNFNFDDPNLIILPLAFGKRQGREFIWNDLLSLETGSLKLANGRVIEKTLYNRRTRQDEPALFVALTFERREVLDSSNIKPMNLIGVDRGENIPAVIALTDPEGCPLSRFKDSLGNPTHILRIGESYKEKQRTIQAKKEVEQRRAGGYSRKYASKAKNLADDMVRNTARDLLYYAVTQDAMLIFENLSRGFGRQGKRTFMAERQYTRMEDWLTAKLAYEGLPSKTYLSKTLAQYTSKTCSNCGFTITSADYDRVLEKLKKTATGWMTTINGKELKVEGQITYYNRYKRQNVVKDLSVELDRLSEESVNNDISSWTKGRSGEALSLLKKRFSHRPVQEKFVCLNCGFETHADEQAALNIARSWLFLRSQEYKKYQTNKTTGNTDKRAFVETWQSFYRKKLKEVWKPAV

SEQ ID NO: 28118 - protein, 978 aa, synthetic construct
  REGION 1..978: note = engineered CasX variant
QEIGRINKIRRRLVKDSNTKKAGKTGPMKTLLVRVMTPDLRERLENLRKKPENIPQPISNTSRANLNKLLTDYTEMKKAILHVYWEEFQKDPVGLMSRVAQPASKKIDQNKLKPEMDEKGNLTTAGFACSQCGQPLFVYKLEQVSEKGKAYTNYFGRCNVAEHEKLILLAQLKPEKDSDEAVTYSLGKFGQRALDFYSIHVTKESTHPVKPLAQIAGNRYASGPVGKALSDACMGTIASFLSKYQDIIIEHQKVVKGNQKRLESLRELAGKENLEYPSVTLPPQPHTKEGVDAYNEVIARVRMWVNLNLWQKLKLSRDDAKPLLRLKGFPSFPLVERQANEVDWWDMVCNVKKLINEKKEDGKVFWQNLAGYKRQEALRPYLSSEEDRKKGKKFARYQLGDLLLHLEKKHGEDWGKVYDEAWERIDKKVEGLSKHIKLEEERRSEDAQSKAALTDWLRAKASFVIEGLKEADKDEFCRCELKLQKWYGDLRGKPFAIEAENSILDISGFSKQYNCAFIWQKDGVKKLNLYLIINYFKGGKLRFKKIKPEAFEANRFYTVINKKSGEIVPMEVNFNFDDPNLIILPLAFGKRQGREFIWNDLLSLETGSLKLANGRVIEKTLYNRRTRQDEPALFVALTFERREVLDSSNIKPMNLIGVDRGENIPAVIALTDPEGCPLSRFKDSLGNPTHILRIGESYKEKQRTIQAKKEVEQRRAGGYSRKYASKAKNLADDMVRNTARDLLYYAVTQDAMLIFENLSRGFGRQGKRTFMAERQYTRMEDWLTAKLAYEGLASKTYLSKTLAQYTSKTCSNCGFTITSADYDRVLEKLKKTATGWMTTINGKELKVEGQITYYNRYKRQNVVKDLSVELDRLSEESVNNDISSWTKGRSGEALSLLKKRFSHRPVQEKFVCLNCGFETHADEQAALNIARSWLFLRSQEYKKYQTNKTTGNTDKRAFVETWQSFYRKKLKEVWKPAV

SEQ ID NO: 28119 - protein, 978 aa, synthetic construct
  REGION 1..978: note = engineered CasX variant
QEIGRINKIRRRLVKDSNTKKAGKTGPMKTLLVRVMTPDLRERLENLRKKPENIPQPISNTSRANLNKLLTDYTEMKKAILHVYWEEFQKDPVGLMSRVAQPASKKIDQNKLKPEMDEKGNLTTAGFACSQCGQPLFVYKLEQVSEKGKAYTNYFGRCNVAEHEKLILLAQLKPEKDSDEAVTYSLGKFGQRALDFYSIHVTKESTHPVKPLAQIAGNRYASGPVGKALSDACMGTIASFLSKYQDIIIEHQKVVKGNQKRLESLRELAGKENLEYPSVTLPPQPHTKEGVDAYNEVIARVRMWVNLNLWQKLKLSRDDAKPLLRLKGFPSFPLVERQANEVDWWDMVCNVKKLINEKKEDGKVFWQNLAGYKRQEALRPYLSSEEDRKKGKKFARYQLGDLLLHLEKKHGEDWGKVYDEAWERIDKKVEGLSKHIKLEEERRSEDAQSKAALTDWLRAKASFVIEGLKEADKDEFCRCELKLQKWYGDLRGKPFAIEAENSILDISGFSKQYNCAFIWQKDGVKKLNLYLIINYFKGGKLRFKKIKPEAFEANRFYTVINKKSGEIVPMEVNFNFDDPNLIILPLAFGKRQGREFIWNDLLSLETGSLKLANGRVIEKTLYNRRTRQDEPALFVALTFERREVLDSSNIKPMNLIGVDRGENIPAVIALTDPEGCPLSRFKDSLGNPTHILRIGESYKEKQRTIQAKKEVEQRRAGGYSRKYASKAKNLADDMVRNTARDLLYYAVTQDAMLIFENLSRGFGRQGKRTFMAERQYTRMEDWLTAKLAYEGLPSKVYLSKTLAQYTSKTCSNCGFTITSADYDRVLEKLKKTATGWMTTINGKELKVEGQITYYNRYKRQNVVKDLSVELDRLSEESVNNDISSWTKGRSGEALSLLKKRFSHRPVQEKFVCLNCGFETHADEQAALNIARSWLFLRSQEYKKYQTNKTTGNTDKRAFVETWQSFYRKKLKEVWKPAV

SEQ ID NO: 28120 - protein, 979 aa, synthetic construct
  REGION 1..979: note = engineered CasX variant
QEIGRINKIRRRLVKDSNTKKAGKTGPMKTLLVRVMTPDLRERLENLRKKPENIPQPISNTSRANLNKLLTDYTEMKKAILHVYWEEFQKDPVGLMSRVAQPASKKIDQNKLKPEMDEKGNLTTAGFACSQCGQPLFVYKLEQVSEKGKAYTNYFGRCNVAEHEKLILLAQLKPEKDSDEAVTYSLGKFGQRALDFYSIHVTKESTHPVKPLAQIAGNRYASGPVGKALSDACMGTIASFLSKYQDIIIEHQKVVKGNQKRLESLRELAGKENLEYPSVTLPPQPHTKEGVDAYNEVIARVRMWVNLNLWQKLKLSRDDAKPLLRLKGFPSFPLVERQANEVDWWDMVCNVKKLINEKKEDGKVFWQNLAGYKRQEALRPYLSSEEDRKKGKKFARYQLGDLLLHLEKKHGEDWGKVYDEAWERIDKKVEGLSKHIKLEEERRSEDAQSKAALTDWLRAKASFVIEGLKEADKDEFCRCELKLQKWYGDLRGKPFAIEAENSILDISGFSKQYNCAFIWQKDGVKKLNLYLIINYFKGGKLRFKKIKPEAFEANRFYTVINKKSGEIVPMEVNFNFDDPNLIILPLAFGKRQGREFIWNDLLSLETGSLKLANGRVIEKTLYNRRTRQDEPALFVALTFERREVLDSSNIKPMNLIGVDRGENIPAVIALTDPEGCPLSRFKDSLGNPTHILRIGESYKEKQRTIQAKKEVEQRRAGGYSRKYASKAKNLADDMVRNTARDLLYYAVTQDAMLIFENLSRGFGRQGKRTFMAERQYTRMEDWLTAKLAYEGPLPSKTYLSKTLAQYTSKTCSNCGFTITSADYDRVLEKLKKTATGWMTTINGKELKVEGQITYYNRYKRQNVVKDLSVELDRLSEESVNNDISSWTKGRSGEALSLLKKRFSHRPVQEKFVCLNCGFETHADEQAALNIARSWLFLRSQEYKKYQTNKTTGNTDKRAFVETWQSFYRKKLKEVWKPAV

SEQ ID NO: 28121 - protein, 979 aa, synthetic construct
  REGION 1..979: note = engineered CasX variant
QEIGRINKIRRRLVKDSNTKKAGKTGPMKTLLVRVMTPDLRERLENLRKKPENIPQPISNTSRANLNKLLTDYTEMKKAILHVYWEEFQKDPVGLMSRVAQPASKKIDQNKLKPEMDEKGNLTTAGFACSQCGQPLFVYKLEQVSEKGKAYTNYFGRCNVAEHEKLILLAQLKPEKDSDEAVTYSLGKFGQRALDFYSIHVTKESTHPVKPLAQIAGNRYASGPVGKALSDACMGTIASFLSKYQDIIIEHQKVVKGNQKRLESLRELAGKENLEYPSVTLPPQPHTKEGVDAYNEVIARVRMWVNLNLWQKLKLSRDDAKPLLRLKGFPSFPLVERQANEVDWWDMVCNVKKLINEKKEDGKVFWQNLAGYKRQEALRPYLSSEEDVRKKGKKFARYQLGDLLLHLEKKHGEDWGKVYDEAWERIDKKVEGLSKHIKLEEERRSEDAQSKAALTDWLRAKASFVIEGLKEADKDEFCRCELKLQKWYGDLRGKPFAIEAENSILDISGFSKQYNCAFIWQKDGVKKLNLYLIINYFKGGKLRFKKIKPEAFEANRFYTVINKKSGEIVPMEVNFNFDDPNLIILPLAFGKRQGREFIWNDLLSLETGSLKLANGRVIEKTLYNRRTRQDEPALFVALTFERREVLDSSNIKPMNLIGVDRGENIPAVIALTDPEGCPLSRFKDSLGNPTHILRIGESYKEKQRTIQAKKEVEQRRAGGYSRKYASKAKNLADDMVRNTARDLLYYAVTQDAMLIFENLSRGFGRQGKRTFMAERQYTRMEDWLTAKLAYEGLPSKTYLSKTLAQYTSKTCSNCGFTITSADYDRVLEKLKKTATGWMTTINGKELKVEGQITYYNRYKRQNVVKDLSVELDRLSEESVNNDISSWTKGRSGEALSLLKKRFSHRPVQEKFVCLNCGFETHADEQAALNIARSWLFLRSQEYKKYQTNKTTGNTDKRAFVETWQSFYRKKLKEVWKPAV

SEQ ID NO: 28122 - protein, 978 aa, synthetic construct
  REGION 1..978: note = engineered CasX variant
QEIGRINKIRRRLVKDSNTKKAGKTGPMKTLLVRVMTPDLRERLENLRKKPENIPQPISNTSRANLNKLLTDYTEMKKAILHVYWEEFQKDPVGLMSRVAQPASKKIDQNKLKPEMDEKGNLTTAGFACSQCGQPLFVYKLEQVSEKGKAYTNYFGRCNVAEHEKLILLAQLKPEKDSDEAVTYSLGKFGQRALDFYSIHVTKESTHPVKPLAQIAGNRYASGPVGKALSDACMGTIASFLSKYQDIIIEHQKVVKGNQKRLESLRELAGKENLEYPSVTLPPQPHTKEGVDAYNEVIARVRMWVNLNLWQKLKLSRDDAKPLLRLKGFPSFPLVERQANEVDWWDMVCNVKKLINEKKEDGKVFWQNLAGYKRQEALRPYLSSEEDRKKGKKFARYQLGDLLLHLEKKHGEDWGKVYDEAWERIDKKVEGLSKHIKLEEERRSEDAQSKAALTDWLRAKASFVIEGLKEADKDEFCRCELKLQKWYGDLRGKPFAIEAENSILDISGFSKQYNCAFIWQKDGVKKLNLYLIINYFKGGKLRFKKIKPEAFEANRFYTVINKKSGEIVPMEVNFNFDDPNLIILPLAFGKRQGREFIWNDLLSLETGSLKLANGRVIEKTLYNRRTRQDEPALFVALTFERREVLDSSNIKPMNLIGVDRGENIPAVIALTDPEGCPLSRFKDSLGNPTHILRIGESYKEKQRTIQAKKEVEQRRAGGYSRKYASKAKNLADDMVRNTARDLLYYAVTQDAMLIFENLSRGFGRQGKRTFMAERQYTRMEDWLTAKLAYEGLPSKTYLSKTLAQYTSKTCSNCGFTITSADYDRMLEKLKKTATGWMTTINGKELKVEGQITYYNRYKRQNVVKDLSVELDRLSEESVNNDISSWTKGRSGEALSLLKKRFSHRPVQEKFVCLNCGFETHADEQAALNIARSWLFLRSQEYKKYQTNKTTGNTDKRAFVETWQSFYRKKLKEVWKPAV

SEQ ID NO: 28123 - protein, 978 aa, synthetic construct
  REGION 1..978: note = engineered CasX variant
QEIGRINKIRRRLVKDSNTKKAGKTGPMKTLLVRVMTPDLRERLENLRKKPENIPQPISNTSRANLNKLLTDYTEMKKAILHVYWEEFQKDPVGLMSRVAQPASKKIDQNKLKPEMDEKGNLTTAGFACSQCGQPLFVYKLEQVSEKGKAYTNYFGRCNVAEHEKLILLAQLKPEKDSDEAVTYSLGKFGQRALDFYSIHVTKESTHPVKPLAQIAGNRYASGPVGKALSDACMGTIASFLSKYQDIIIEHQKVVKGNQKRLESLRELAGKENLEYPSVTLPPQPHTKEGVDAYNEVIARVRMWVNLNLWQKLKLSRDDAKPLLRLKGFPSFPLVERQANEVDWWDMVCNVKKLINEKKEDGKVFWQNLAGYKRQEALRPYLSSEEDRKKGKKFARYQLGDLLLHLEKKHGEDWGKVYDEAWERIDKKVEGLSKHIKLEEERRSEDAQSKAALTDWLRAKASFVIEGLKEADKDEFCRCELKLQKWYGDLRGKPFAIEAENSILDISGFSKQYNCAFIWQKDGVKKLNLYLIINYFKGGKLRFKKIKPEAFEANRFYTVINKKSGEIVPMEVNFNFDDPNLIILPLAFGKRQGREFIWNDLLSLETGSLKLANGRVIEKTLYNRRTRQDEPALFVALTFERREVLDSSNIKPMNLIGVDRGENIPAVIALTDPEGCPLSRFKDSLGNPTHILRIGESYKEKQRTIQAKKEVEQRRAGGYSRKYASKAKNLADDMVRNTARDLLYYAVTQDAMLIFENLSRGFGRQGKRTFMAERQYTRMEDWLTAKLAYEGLPSKTYLSKTLAQYTSKTCSNCGFTITSADYDRVLEKLKKTATGWMTTINGKELKVEGQITYYNRYKRQNVVKDLSVELDRLSEESVNNDISSWTKGRQGEALSLLKKRFSHRPVQEKFVCLNCGFETHADEQAALNIARSWLFLRSQEYKKYQTNKTTGNTDKRAFVETWQSFYRKKLKEVWKPAV

SEQ ID NO: 28124 - protein, 978 aa, synthetic construct
  REGION 1..978: note = engineered CasX variant
QEIGRINKIRRRLVKDSNTKKAGKTGPMKTLLVRVMTPDLRERLENLRKKPENIPQPISNTSRANLNKLLTDYTEMKKAILHVYWEEFQKDPVGLMSRVAQPASKKIDQNKLKPEMDEKGNLTTAGFACSQCGQPLFVYKLEQVSEKGKAYTNYFGRCNVAEHEKLILLAQLKPEKDSDEAVTYSLGKFGQRALDFYSIHVTKESTHPVKPLAQIAGNRYASGPVGKALSDACMGTIASFLSKYQDIIIEHQKVVKGNQKRLESLRELAGKENLEYPSVTLPPQPHTKEGVDAYNEVIARVRMWVNLNLWQKLKLSRDDAKPLLRLKGFPSFPLVERQANEVDWWDMVCNVKKLINEKKEDGKVFWQNLAGYKRQEALRPYLSSEEDRKKGKKFARYQLGDLLLHLEKKHGEDWGKVYDEAWERIDKKVEGLSKHIKLEEERRSEDAQSKAALTDWLRAKASFVIEGLKEADKDEFCRCELKLQKWYGDLRGKPFAIEAENSILDISGFSKQYNCAFIWQKDGVKKLNLYLIINYFKGGKLRFKKIKPEAFEANRFYTVINKKSGEIVPMEVNFNFDDPNLIILPLAFGKRQGREFIWNDLLSLETGSLKLANGRVIEKTLYNRRTRQDEPALFVALTFERREVLDSSNIKPMNLIGVDRGENIPAVIALTDPEGCPLSRFKDSLGNPTHILRIGESYKEKQRTIQAKKEVEQRRAGGYSRKYASKAKNLADDMVRNTARDLLYYAVTQDAMLIFENLSRGFGRQGKRTFMAERQYTRMEDWLTAKLAYEGLPSKTYLSKTLAQYTSKTCSNCGFTITSADYDRVLEKLKKTATGWMTTINGKELKVEGQITYYNRYKRQNVVKDLSVELDRLSEESVNNDISSWTKGRSGEALSLLKKRFSHRPVQEKFVCLNCEFETHADEQAALNIARSWLFLRSQEYKKYQTNKTTGNTDKRAFVETWQSFYRKKLKEVWKPAV

SEQ ID NO: 28125 - protein, 979 aa, synthetic construct
  REGION 1..979: note = engineered CasX variant
QEIGRINKIRRRLVKDSNTKKAGKTGPMKTLLVRVMTPDLRERLENLRKKPENIPQPISNTSRANLNKLLTDYTEMKKAILHVYWEEFQKDPVGLMSRVAQPASKKIDQNKLKPEMDEKGNLTTAGFACSQCGQPLFVYKLEQVSEKGKAYTNYFGRCNVAEHEKLILLAQLKPEKDSDEAVTYSLGKFGQRALDFYSIHVTKESTHPVKPLAQIAGNRYASGPVGKALSDACMGTIASFLSKYQDIIIEHQKVVKGNQKRLESLRELAGKENLEYPSVTLPPQPHTKEGVDAYNEVIARVRMWVNLNLWQKLKLSRDDAKPLLRLKGFPSFPLVERQANEVDWWDMVCNVKKLINEKKEDGKVFWQNLAGYKRQEALRPYLSSEEDRKKGKKFARYQLGDLLLHLEKKHGEDWGKVYDEAWERIDKKVEGLSKHIKLEEERRSEDAQSKAALTDWLRAKASFVIEGLKEADKDEFCRCELKLQKWYGDLRGKPFAIEAENSILDISGFSKQYNCAFIWQKDGVKKLNLYLIINYFKGGKLRFKKIKPEAFEANRFYTVINKKSGEIVPMEVNFNFDDPNLIILPLAFGKRQGREFIWNDLLSLETGSLKLANGRVIEKTLYNRRTRQDEPALFVALTFERREVLDSSNIKPMNLIGVDRGENIPAVIALTDPEGCPLSRFKDSLGNPTHILRIGESYKEKQRTIQAKKEVEQRRAGGYSRKYASKAKNLADDMVRNTARDLLYYAVTQDAMLIFENLSRGFGRQGKRTFMAERQYTRMEDWLTAKLAYEGLPSKTYLSKTLAQYTSKTCSNCGFTITSADYDRVLEKLKKTATGWMTTINGKELKVEGQITYYNRYKRQNVVKDLSVELDRLSEESVNNDISSWTKGRSGEALSLLKKRFSHRPVQEKFVCLNCGFETHADEQAALNIARSWLFLRSQEYKKYQTNKTSTGNTDKRAFVETWQSFYRKKLKEVWKPAV

SEQ ID NO: 28126 - protein, 979 aa, synthetic construct
  REGION 1..979: note = engineered CasX variant
QEIGRINKIRRRLVKDSNTKKAGKTGPMKTLLVRVMTPDLRERLENLRKKPENIPQPISNTSRANLNKLLTDYTEMKKAILHVYWEEFQKDPVGLMSRVAQPASKKIDQNKLKPEMDEKGNLTTAGFACSQCGQPLFVYKLEQVSEKGKAYTNYFGRCNVAEHEKLILLAQLKPEKDSDEAVTYSLGKFGQRALDFYSIHVTKESTHPVKPLAQIAGNRYASGPVGKALSDACMGTIASFLSKYQDIIIEHQKVVKGNQKRLESLRELAGKENLEYPSVTLPPQPHTKEGVDAYNEVIARVRMWVNLNLWQKLKLSRDDAKPLLRLKGFPSFPLVERQANEVDWWDMVCNVKKLINEKKEDGKVFWQNLAGYKRQEALRPYLSSEEDRKKGKKFARYQLGDLLLHLEKKHGEDWGKVYDEAWERIDKKVEGLSKHIKLEEERRSEDAQSKAALTDWLRAKASFVIEGLKEADKDEFCRCELKLQKWYGDLRGKPFAIEAENSILDISGFSKQYNCAFIWQKDGVKKLNLYLIINYFKGGKLRFKKIKPEAFEANRFYTVINKKSGEIVPMEVNFNFDDPNLIILPLAFGKRQGREFIWNDLLSLETGSLKLANGRVIEKTLYNRRTRQDEPALFVALTFERREVLDSSNIKPMNLIGVDRGENIPAVIALTDPEGCPLSRFKDSLGNPTHILRIGESYKEKQRTIQAKKEVEQRRAGGYSRKYASKAKNLADDMVRNTARDLLYYAVTQDAMLIFENLSRGFGRQGKRTFMAERQYTRMEDWLTAKLAYEGLPSKTYLSKTLAQYTSKTCSNCGFTITSADYDRVLEKLKKTATGWMTTINGKELKVEGQITYYNRYKRQNVVKDLSVELDRLSEESVNNDISSWTKGRSGEALSLLKKRFSHRPVQEKFVCLNCGFETHADEQAALNIARSWLFLRSQEYKKYQTNKTTGKNTDKRAFVETWQSFYRKKLKEVWKPAV

SEQ ID NO: 28127 - protein, 978 aa, synthetic construct
  REGION 1..978: note = engineered CasX variant
QEIGRINKIRRRLVKDSNTKKAGKTGPMKTLLVRVMTPDLRERLENLRKKPENIPQPISNTSRANLNKLLTDYTEMKKAILHVYWEEFQKDPVGLMSRVAQPASKKIDQNKLKPEMDEKGNLTTAGFACSQCGQPLFVYKLEQVSEKGKAYTNYFGRCNVAEHEKLILLAQLKPEKDSDEAVTYSLGKFGQRALDFYSIHVTKESTHPVKPLAQIAGNRYASGPVGKALSDACMGTIASFLSKYQDIIIEHQKVVKGNQKRLESLRELAGKENLEYPSVTLPPQPHTKEGVDAYNEVIARVRMWVNLNLWQKLKLSRDDAKPLLRLKKFPSFPLVERQANEVDWWDMVCNVKKLINEKKEDGKVFWQNLAGYKRQEALRPYLSSEEDRKKGKKFARYQLGDLLLHLEKKHGEDWGKVYDEAWERIDKKVEGLSKHIKLEEERRSEDAQSKAALTDWLRAKASFVIEGLKEADKDEFCRCELKLQKWYGDLRGKPFAIEAENSILDISGFSKQYNCAFIWQKDGVKKLNLYLIINYFKGGKLRFKKIKPEAFEANRFYTVINKKSGEIVPMEVNFNFDDPNLIILPLAFGKRQGREFIWNDLLSLETGSLKLANGRVIEKTLYNRRTRQDEPALFVALTFERREVLDSSNIKPMNLIGVDRGENIPAVIALTDPEGCPLSRFKDSLGNPTHILRIGESYKEKQRTIQAKKEVEQRRAGGYSRKYASKAKNLADDMVRNTARDLLYYAVTQDAMLIFENLSRGFGRQGKRTFMAERQYTRMEDWLTAKLAYEGLPSKTYLSKTLAQYTSKTCSNCGFTITSADYDRVLEKLKKTATGWMTTINGKELKVEGQITYYNRYKRQNVVKDLSVELDRLSEESVNNDISSWTKGRSGEALSLLKKRFSHRPVQEKFVCLNCGFETHADEQAALNIARSWLFLRSQEYKKYQTNKTTGNTDKRAFVETWQSFYRKKLKEVWKPAV

SEQ ID NO: 28128 - protein, 978 aa, synthetic construct
  REGION 1..978: note = engineered CasX variant
QEIGRINKIRRRLVKDSNTKKAGKTGPMKTLLVRVMTPDLRERLENLRKKPENIPQPISNTSRANLNKLLTDYTEMKKAILHVYWEEFQKDPVGLMSRVAQPASKKIDQNKLKPEMDEKGNLTTAGFACSQCGQPLFVYKLEQVSEKGKAYTNYFGRCNVAEHEKLILLAQLKPEKDSDEAVTYSLGKFGQRALDFYSIHVTKESTHPVKPLAQIAGNRYASGPVGKALSDACMGTIASFLSKYQDIIIEHQKVVKGNQKRLESLRELAGKENLEYPSVTLPPQPHTKEGVDAYNEVIARVRMWVNLNLWQKLKLSRDDAKPLLRLKGFPSFPLVERQANEVDWWDMVCNVKKLINEKKEDGKVFWQNLAGYKRQEALRPYLSSEEDRKKGKKFARYQLGDLLLHLEKKHGEDWGKVYDEAWERIDKKVEGLSKHIKLEEERRSEDAQSKAALTDWLRAKASFVIEGLKEADKDEFCRCELKLQKWYGDLRGKPFAIEAENSILDISGFSKQYNCAFIWQKDGVKKLNLYLIINYFKGGKLRFKKIKPEAFEANRFYTVINKKSGEIVPMEVNFNFDDPNLIILPLAFGKRQGREFIWNDLLSLETGSLKLANGRVIEKTLYNRRTRQDEPALFVALTFERREVLDSSNIKPMNLIGVDRGENIPAVIALTDPEGCPLSRFKDSLGNPTHILRIGERYKEKQRTIQAKKEVEQRRAGGYSRKYASKAKNLADDMVRNTARDLLYYAVTQDAMLIFENLSRGFGRQGKRTFMAERQYTRMEDWLTAKLAYEGLPSKTYLSKTLAQYTSKTCSNCGFTITSADYDRVLEKLKKTATGWMTTINGKELKVEGQITYYNRYKRQNVVKDLSVELDRLSEESVNNDISSWTKGRSGEALSLLKKRFSHRPVQEKFVCLNCGFETHADEQAALNIARSWLFLRSQEYKKYQTNKTTGNTDKRAFVETWQSFYRKKLKEVWKPAV

SEQ ID NO: 28129 - protein, 978 aa, synthetic construct
  REGION 1..978: note = engineered CasX variant
QEIGRINKIRRRLVKDSNTKKAGKTGPMKTLLVRVMTPDLRERLENLRKKPENIPQPISNTSRANLNKLLTDYTEMKKAILHVYWEEFQKDPVGLMSRVAQPASKKIDQNKLKPEMDEKGNLTTAGFACSQCGQPLFVYKLEQVSEKGKAYTNYFGRCNVAEHEKLILLAQLKPEKDSDEAVTYSLGKFGQRALDFYSIHVTKESTHPVKPLAQIAGNRYASGPVGKALSDACMGTIASFLSKYQDIIIEHQKVVKGNQKRLESLRELAGKENLEYPSVTLPPQPHTKEGVDAYNEVIARVRMWVNLNLWQKLKLSRDDAKPLLRLKGFPSFPLVERQANEVDWWDMVCNVKKLINEKKEDGKVFWQNLAGYKRQEALRPYLSSEEDRKKGKKFARYQLGDLLLHLEKKHGEDWGKVYDEAWERIDKKVEGLSKHIKLEEERRSEDAQSKAALTDWLRAKASFVIEGLKEADKDEFCRCELKLQKWYGDLRGKPFAIEAENSILDISGFSKQYNCAFIWQKDGVKKLNLYLIINYFKGGKLRFKKIKPEAFEANRFYTVINKKSGEIVPMEVNFNFDDPNLIILPLAFGKRQGREFIWNDLLSLETGSLQLANGRVIEKTLYNRRTRQDEPALFVALTFERREVLDSSNIKPMNLIGVDRGENIPAVIALTDPEGCPLSRFKDSLGNPTHILRIGESYKEKQRTIQAKKEVEQRRAGGYSRKYASKAKNLADDMVRNTARDLLYYAVTQDAMLIFENLSRGFGRQGKRTFMAERQYTRMEDWLTAKLAYEGLPSKTYLSKTLAQYTSKTCSNCGFTITSADYDRVLEKLKKTATGWMTTINGKELKVEGQITYYNRYKRQNVVKDLSVELDRLSEESVNNDISSWTKGRSGEALSLLKKRFSHRPVQEKFVCLNCGFETHADEQAALNIARSWLFLRSQEYKKYQTNKTTGNTDKRAFVETWQSFYRKKLKEVWKPAV

SEQ ID NO: 28130 - protein, 979 aa, synthetic construct
  REGION 1..979: note = engineered CasX variant
QEIKGRANKIRRRLVKDSNTKKAGKTGPMKTLLVRVMTPDLRERLENLRKKPENIPQPISNTSRANLNKLLTDYTEMKKAILHVYWEEFQKDPVGLMSRVAQPASKKIDQNKLKPEMDEKGNLTTAGFACSQCGQPLFVYKLEQVSEKGKAYTNYFGRCNVAEHEKLILLAQLKPEKDSDEAVTYSLGKFGQRALDFYSIHVTKESTHPVKPLAQIAGNRYASGPVGKALSDACMGTIASFLSKYQDIIIEHQKVVKGNQKRLESLRELAGKENLEYPSVTLPPQPHTKEGVDAYNEVIARVRMWVNLNLWQKLKLSRDDAKPLLRLKGFPSFPLVERQANEVDWWDMVCNVKKLINEKKEDGKVFWQNLAGYKRQEALRPYLSSEEDRKKGKKFARYQLGDLLLHLEKKHGEDWGKVYDEAWERIDKKVEGLSKHIKLEEERRSEDAQSKAALTDWLRAKASFVIEGLKEADKDEFCRCELKLQKWYGDLRGKPFAIEAENSILDISGFSKQYNCAFIWQKDGVKKLNLYLIINYFKGGKLRFKKIKPEAFEANRFYTVINKKSGEIVPMEVNFNFDDPNLIILPLAFGKRQGREFIWNDLLSLETGSLKLANGRVIEKTLYNRRTRQDEPALFVALTFERREVLDSSNIKPMNLIGVDRGENIPAVIALTDPEGCPLSRFKDSLGNPTHILRIGESYKEKQRTIQAKKEVEQRRAGGYSRKYASKAKNLADDMVRNTARDLLYYAVTQDAMLIFENLSRGFGRQGKRTFMAERQYTRMEDWLTAKLAYEGLPSKTYLSKTLAQYTSKTCSNCGFTITSADYDRVLEKLKKTATGWMTTINGKELKVEGQITYYNRYKRQNVVKDLSVELDRLSEESVNNDISSWTKGRSGEALSLLKKRFSHRPVQEKFVCLNCGFETHADEQAALNIARSWLFLRSQEYKKYQTNKTTGNTDKRAFVETWQSFYRKKLKEVWKPAV

SEQ ID NO: 28131 - protein, 979 aa, synthetic construct
  REGION 1..979: note = engineered CasX variant
QEIKGRISKIRRRLVKDSNTKKAGKTGPMKTLLVRVMTPDLRERLENLRKKPENIPQPISNTSRANLNKLLTDYTEMKKAILHVYWEEFQKDPVGLMSRVAQPASKKIDQNKLKPEMDEKGNLTTAGFACSQCGQPLFVYKLEQVSEKGKAYTNYFGRCNVAEHEKLILLAQLKPEKDSDEAVTYSLGKFGQRALDFYSIHVTKESTHPVKPLAQIAGNRYASGPVGKALSDACMGTIASFLSKYQDIIIEHQKVVKGNQKRLESLRELAGKENLEYPSVTLPPQPHTKEGVDAYNEVIARVRMWVNLNLWQKLKLSRDDAKPLLRLKGFPSFPLVERQANEVDWWDMVCNVKKLINEKKEDGKVFWQNLAGYKRQEALRPYLSSEEDRKKGKKFARYQLGDLLLHLEKKHGEDWGKVYDEAWERIDKKVEGLSKHIKLEEERRSEDAQSKAALTDWLRAKASFVIEGLKEADKDEFCRCELKLQKWYGDLRGKPFAIEAENSILDISGFSKQYNCAFIWQKDGVKKLNLYLIINYFKGGKLRFKKIKPEAFEANRFYTVINKKSGEIVPMEVNFNFDDPNLIILPLAFGKRQGREFIWNDLLSLETGSLKLANGRVIEKTLYNRRTRQDEPALFVALTFERREVLDSSNIKPMNLIGVDRGENIPAVIALTDPEGCPLSRFKDSLGNPTHILRIGESYKEKQRTIQAKKEVEQRRAGGYSRKYASKAKNLADDMVRNTARDLLYYAVTQDAMLIFENLSRGFGRQGKRTFMAERQYTRMEDWLTAKLAYEGLPSKTYLSKTLAQYTSKTCSNCGFTITSADYDRVLEKLKKTATGWMTTINGKELKVEGQITYYNRYKRQNVVKDLSVELDRLSEESVNNDISSWTKGRSGEALSLLKKRFSHRPVQEKFVCLNCGFETHADEQAALNIARSWLFLRSQEYKKYQTNKTTGNTDKRAFVETWQSFYRKKLKEVWKPAV

SEQ ID NO: 28132 - protein, 979 aa, synthetic construct
  REGION 1..979: note = engineered CasX variant
QEIKGRINGIRRRLVKDSNTKKAGKTGPMKTLLVRVMTPDLRERLENLRKKPENIPQPISNTSRANLNKLLTDYTEMKKAILHVYWEEFQKDPVGLMSRVAQPASKKIDQNKLKPEMDEKGNLTTAGFACSQCGQPLFVYKLEQVSEKGKAYTNYFGRCNVAEHEKLILLAQLKPEKDSDEAVTYSLGKFGQRALDFYSIHVTKESTHPVKPLAQIAGNRYASGPVGKALSDACMGTIASFLSKYQDIIIEHQKVVKGNQKRLESLRELAGKENLEYPSVTLPPQPHTKEGVDAYNEVIARVRMWVNLNLWQKLKLSRDDAKPLLRLKGFPSFPLVERQANEVDWWDMVCNVKKLINEKKEDGKVFWQNLAGYKRQEALRPYLSSEEDRKKGKKFARYQLGDLLLHLEKKHGEDWGKVYDEAWERIDKKVEGLSKHIKLEEERRSEDAQSKAALTDWLRAKASFVIEGLKEADKDEFCRCELKLQKWYGDLRGKPFAIEAENSILDISGFSKQYNCAFIWQKDGVKKLNLYLIINYFKGGKLRFKKIKPEAFEANRFYTVINKKSGEIVPMEVNFNFDDPNLIILPLAFGKRQGREFIWNDLLSLETGSLKLANGRVIEKTLYNRRTRQDEPALFVALTFERREVLDSSNIKPMNLIGVDRGENIPAVIALTDPEGCPLSRFKDSLGNPTHILRIGESYKEKQRTIQAKKEVEQRRAGGYSRKYASKAKNLADDMVRNTARDLLYYAVTQDAMLIFENLSRGFGRQGKRTFMAERQYTRMEDWLTAKLAYEGLPSKTYLSKTLAQYTSKTCSNCGFTITSADYDRVLEKLKKTATGWMTTINGKELKVEGQITYYNRYKRQNVVKDLSVELDRLSEESVNNDISSWTKGRSGEALSLLKKRFSHRPVQEKFVCLNCGFETHADEQAALNIARSWLFLRSQEYKKYQTNKTTGNTDKRAFVETWQSFYRKKLKEVWKPAV

SEQ ID NO: 28133 - protein, 979 aa, synthetic construct
  REGION 1..979: note = engineered CasX variant
QEIKGRINKIRRRLVKDSNTKKAGKTGPMKTLLVPVMTPDLRERLENLRKKPENIPQPISNTSRANLNKLLTDYTEMKKAILHVYWEEFQKDPVGLMSRVAQPASKKIDQNKLKPEMDEKGNLTTAGFACSQCGQPLFVYKLEQVSEKGKAYTNYFGRCNVAEHEKLILLAQLKPEKDSDEAVTYSLGKFGQRALDFYSIHVTKESTHPVKPLAQIAGNRYASGPVGKALSDACMGTIASFLSKYQDIIIEHQKVVKGNQKRLESLRELAGKENLEYPSVTLPPQPHTKEGVDAYNEVIARVRMWVNLNLWQKLKLSRDDAKPLLRLKGFPSFPLVERQANEVDWWDMVCNVKKLINEKKEDGKVFWQNLAGYKRQEALRPYLSSEEDRKKGKKFARYQLGDLLLHLEKKHGEDWGKVYDEAWERIDKKVEGLSKHIKLEEERRSEDAQSKAALTDWLRAKASFVIEGLKEADKDEFCRCELKLQKWYGDLRGKPFAIEAENSILDISGFSKQYNCAFIWQKDGVKKLNLYLIINYFKGGKLRFKKIKPEAFEANRFYTVINKKSGEIVPMEVNFNFDDPNLIILPLAFGKRQGREFIWNDLLSLETGSLKLANGRVIEKTLYNRRTRQDEPALFVALTFERREVLDSSNIKPMNLIGVDRGENIPAVIALTDPEGCPLSRFKDSLGNPTHILRIGESYKEKQRTIQAKKEVEQRRAGGYSRKYASKAKNLADDMVRNTARDLLYYAVTQDAMLIFENLSRGFGRQGKRTFMAERQYTRMEDWLTAKLAYEGLPSKTYLSKTLAQYTSKTCSNCGFTITSADYDRVLEKLKKTATGWMTTINGKELKVEGQITYYNRYKRQNVVKDLSVELDRLSEESVNNDISSWTKGRSGEALSLLKKRFSHRPVQEKFVCLNCGFETHADEQAALNIARSWLFLRSQEYKKYQTNKTTGNTDKRAFVETWQSFYRKKLKEVWKPAV

SEQ ID NO: 28134 - protein, 979 aa, synthetic construct
  REGION 1..979: note = engineered CasX variant
QEIKGRINKIRRRLVKDSNTKKAGKTGPMKTLLVRVMTPDLRERLENLRKKPPNIPQPISNTSRANLNKLLTDYTEMKKAILHVYWEEFQKDPVGLMSRVAQPASKKIDQNKLKPEMDEKGNLTTAGFACSQCGQPLFVYKLEQVSEKGKAYTNYFGRCNVAEHEKLILLAQLKPEKDSDEAVTYSLGKFGQRALDFYSIHVTKESTHPVKPLAQIAGNRYASGPVGKALSDACMGTIASFLSKYQDIIIEHQKVVKGNQKRLESLRELAGKENLEYPSVTLPPQPHTKEGVDAYNEVIARVRMWVNLNLWQKLKLSRDDAKPLLRLKGFPSFPLVERQANEVDWWDMVCNVKKLINEKKEDGKVFWQNLAGYKRQEALRPYLSSEEDRKKGKKFARYQLGDLLLHLEKKHGEDWGKVYDEAWERIDKKVEGLSKHIKLEEERRSEDAQSKAALTDWLRAKASFVIEGLKEADKDEFCRCELKLQKWYGDLRGKPFAIEAENSILDISGFSKQYNCAFIWQKDGVKKLNLYLIINYFKGGKLRFKKIKPEAFEANRFYTVINKKSGEIVPMEVNFNFDDPNLIILPLAFGKRQGREFIWNDLLSLETGSLKLANGRVIEKTLYNRRTRQDEPALFVALTFERREVLDSSNIKPMNLIGVDRGENIPAVIALTDPEGCPLSRFKDSLGNPTHILRIGESYKEKQRTIQAKKEVEQRRAGGYSRKYASKAKNLADDMVRNTARDLLYYAVTQDAMLIFENLSRGFGRQGKRTFMAERQYTRMEDWLTAKLAYEGLPSKTYLSKTLAQYTSKTCSNCGFTITSADYDRVLEKLKKTATGWMTTINGKELKVEGQITYYNRYKRQNVVKDLSVELDRLSEESVNNDISSWTKGRSGEALSLLKKRFSHRPVQEKFVCLNCGFETHADEQAALNIARSWLFLRSQEYKKYQTNKTTGNTDKRAFVETWQSFYRKKLKEVWKPAV

SEQ ID NO: 28135 - protein, 979 aa, synthetic construct
  REGION 1..979: note = engineered CasX variant
QEIKGRINKIRRRLVKDSNTKKAGKTGPMKTLLVRVMTPDLRERLENLRKKPENIPQPISNTSQANLNKLLTDYTEMKKAILHVYWEEFQKDPVGLMSRVAQPASKKIDQNKLKPEMDEKGNLTTAGFACSQCGQPLFVYKLEQVSEKGKAYTNYFGRCNVAEHEKLILLAQLKPEKDSDEAVTYSLGKFGQRALDFYSIHVTKESTHPVKPLAQIAGNRYASGPVGKALSDACMGTIASFLSKYQDIIIEHQKVVKGNQKRLESLRELAGKENLEYPSVTLPPQPHTKEGVDAYNEVIARVRMWVNLNLWQKLKLSRDDAKPLLRLKGFPSFPLVERQANEVDWWDMVCNVKKLINEKKEDGKVFWQNLAGYKRQEALRPYLSSEEDRKKGKKFARYQLGDLLLHLEKKHGEDWGKVYDEAWERIDKKVEGLSKHIKLEEERRSEDAQSKAALTDWLRAKASFVIEGLKEADKDEFCRCELKLQKWYGDLRGKPFAIEAENSILDISGFSKQYNCAFIWQKDGVKKLNLYLIINYFKGGKLRFKKIKPEAFEANRFYTVINKKSGEIVPMEVNFNFDDPNLIILPLAFGKRQGREFIWNDLLSLETGSLKLANGRVIEKTLYNRRTRQDEPALFVALTFERREVLDSSNIKPMNLIGVDRGENIPAVIALTDPEGCPLSRFKDSLGNPTHILRIGESYKEKQRTIQAKKEVEQRRAGGYSRKYASKAKNLADDMVRNTARDLLYYAVTQDAMLIFENLSRGFGRQGKRTFMAERQYTRMEDWLTAKLAYEGLPSKTYLSKTLAQYTSKTCSNCGFTITSADYDRVLEKLKKTATGWMTTINGKELKVEGQITYYNRYKRQNVVKDLSVELDRLSEESVNNDISSWTKGRSGEALSLLKKRFSHRPVQEKFVCLNCGFETHADEQAALNIARSWLFLRSQEYKKYQTNKTTGNTDKRAFVETWQSFYRKKLKEVWKPAV

SEQ ID NO: 28136 - protein, 979 aa, synthetic construct
  REGION 1..979: note = engineered CasX variant
QEIKGRINKIRRRLVKDSNTKKAGKTGPMKTLLVRVMTPDLRERLENLRKKPENIPQPISNTSRANLNKLLTDYTEMKKAILHVYDEEFQKDPVGLMSRVAQPASKKIDQNKLKPEMDEKGNLTTAGFACSQCGQPLFVYKLEQVSEKGKAYTNYFGRCNVAEHEKLILLAQLKPEKDSDEAVTYSLGKFGQRALDFYSIHVTKESTHPVKPLAQIAGNRYASGPVGKALSDACMGTIASFLSKYQDIIIEHQKVVKGNQKRLESLRELAGKENLEYPSVTLPPQPHTKEGVDAYNEVIARVRMWVNLNLWQKLKLSRDDAKPLLRLKGFPSFPLVERQANEVDWWDMVCNVKKLINEKKEDGKVFWQNLAGYKRQEALRPYLSSEEDRKKGKKFARYQLGDLLLHLEKKHGEDWGKVYDEAWERIDKKVEGLSKHIKLEEERRSEDAQSKAALTDWLRAKASFVIEGLKEADKDEFCRCELKLQKWYGDLRGKPFAIEAENSILDISGFSKQYNCAFIWQKDGVKKLNLYLIINYFKGGKLRFKKIKPEAFEANRFYTVINKKSGEIVPMEVNFNFDDPNLIILPLAFGKRQGREFIWNDLLSLETGSLKLANGRVIEKTLYNRRTRQDEPALFVALTFERREVLDSSNIKPMNLIGVDRGENIPAVIALTDPEGCPLSRFKDSLGNPTHILRIGESYKEKQRTIQAKKEVEQRRAGGYSRKYASKAKNLADDMVRNTARDLLYYAVTQDAMLIFENLSRGFGRQGKRTFMAERQYTRMEDWLTAKLAYEGLPSKTYLSKTLAQYTSKTCSNCGFTITSADYDRVLEKLKKTATGWMTTINGKELKVEGQITYYNRYKRQNVVKDLSVELDRLSEESVNNDISSWTKGRSGEALSLLKKRFSHRPVQEKFVCLNCGFETHADEQAALNIARSWLFLRSQEYKKYQTNKTTGNTDKRAFVETWQSFYRKKLKEVWKPAV

SEQ ID NO: 28137 - protein, 979 aa, synthetic construct
  REGION 1..979: note = engineered CasX variant
QEIKGRINKIRRRLVKDSNTKKAGKTGPMKTLLVRVMTPDLRERLENLRKKPENIPQPISNTSRANLNKLLTDYTEMKKAILHVYWEEFQKDPVGLMSRVAQPASKKIDQNKLKPEMDEKGNLTTAGFACSQCGQPLFVYKLEQVSEKGKAYTNYFGRCNVAEHEKLIKLAQLKPEKDSDEAVTYSLGKFGQRALDFYSIHVTKESTHPVKPLAQIAGNRYASGPVGKALSDACMGTIASFLSKYQDIIIEHQKVVKGNQKRLESLRELAGKENLEYPSVTLPPQPHTKEGVDAYNEVIARVRMWVNLNLWQKLKLSRDDAKPLLRLKGFPSFPLVERQANEVDWWDMVCNVKKLINEKKEDGKVFWQNLAGYKRQEALRPYLSSEEDRKKGKKFARYQLGDLLLHLEKKHGEDWGKVYDEAWERIDKKVEGLSKHIKLEEERRSEDAQSKAALTDWLRAKASFVIEGLKEADKDEFCRCELKLQKWYGDLRGKPFAIEAENSILDISGFSKQYNCAFIWQKDGVKKLNLYLIINYFKGGKLRFKKIKPEAFEANRFYTVINKKSGEIVPMEVNFNFDDPNLIILPLAFGKRQGREFIWNDLLSLETGSLKLANGRVIEKTLYNRRTRQDEPALFVALTFERREVLDSSNIKPMNLIGVDRGENIPAVIALTDPEGCPLSRFKDSLGNPTHILRIGESYKEKQRTIQAKKEVEQRRAGGYSRKYASKAKNLADDMVRNTARDLLYYAVTQDAMLIFENLSRGFGRQGKRTFMAERQYTRMEDWLTAKLAYEGLPSKTYLSKTLAQYTSKTCSNCGFTITSADYDRVLEKLKKTATGWMTTINGKELKVEGQITYYNRYKRQNVVKDLSVELDRLSEESVNNDISSWTKGRSGEALSLLKKRFSHRPVQEKFVCLNCGFETHADEQAALNIARSWLFLRSQEYKKYQTNKTTGNTDKRAFVETWQSFYRKKLKEVWKPAV

SEQ ID NO: 28138 - protein, 979 aa, synthetic construct
  REGION 1..979: note = engineered CasX variant
QEIKGRINKIRRRLVKDSNTKKAGKTGPMKTLLVRVMTPDLRERLENLRKKPENIPQPISNTSRANLNKLLTDYTEMKKAILHVYWEEFQKDPVGLMSRVAQPASKKIDQNKLKPEMDEKGNLTTAGFACSQCGQPLFVYKLEQVSEKGKAYTNYFGRCNVAEHEKLILLYQLKPEKDSDEAVTYSLGKFGQRALDFYSIHVTKESTHPVKPLAQIAGNRYASGPVGKALSDACMGTIASFLSKYQDIIIEHQKVVKGNQKRLESLRELAGKENLEYPSVTLPPQPHTKEGVDAYNEVIARVRMWVNLNLWQKLKLSRDDAKPLLRLKGFPSFPLVERQANEVDWWDMVCNVKKLINEKKEDGKVFWQNLAGYKRQEALRPYLSSEEDRKKGKKFARYQLGDLLLHLEKKHGEDWGKVYDEAWERIDKKVEGLSKHIKLEEERRSEDAQSKAALTDWLRAKASFVIEGLKEADKDEFCRCELKLQKWYGDLRGKPFAIEAENSILDISGFSKQYNCAFIWQKDGVKKLNLYLIINYFKGGKLRFKKIKPEAFEANRFYTVINKKSGEIVPMEVNFNFDDPNLIILPLAFGKRQGREFIWNDLLSLETGSLKLANGRVIEKTLYNRRTRQDEPALFVALTFERREVLDSSNIKPMNLIGVDRGENIPAVIALTDPEGCPLSRFKDSLGNPTHILRIGESYKEKQRTIQAKKEVEQRRAGGYSRKYASKAKNLADDMVRNTARDLLYYAVTQDAMLIFENLSRGFGRQGKRTFMAERQYTRMEDWLTAKLAYEGLPSKTYLSKTLAQYTSKTCSNCGFTITSADYDRVLEKLKKTATGWMTTINGKELKVEGQITYYNRYKRQNVVKDLSVELDRLSEESVNNDISSWTKGRSGEALSLLKKRFSHRPVQEKFVCLNCGFETHADEQAALNIARSWLFLRSQEYKKYQTNKTTGNTDKRAFVETWQSFYRKKLKEVWKPAV

SEQ ID NO: 28139 - protein, 979 aa, synthetic construct
  REGION 1..979: note = engineered CasX variant
QEIKGRINKIRRRLVKDSNTKKAGKTGPMKTLLVRVMTPDLRERLENLRKKPENIPQPISNTSRANLNKLLTDYTEMKKAILHVYWEEFQKDPVGLMSRVAQPASKKIDQNKLKPEMDEKGNLTTAGFACSQCGQPLFVYKLEQVSEKGKAYTNYFGRCNVAEHEKLILLSQLKPEKDSDEAVTYSLGKFGQRALDFYSIHVTKESTHPVKPLAQIAGNRYASGPVGKALSDACMGTIASFLSKYQDIIIEHQKVVKGNQKRLESLRELAGKENLEYPSVTLPPQPHTKEGVDAYNEVIARVRMWVNLNLWQKLKLSRDDAKPLLRLKGFPSFPLVERQANEVDWWDMVCNVKKLINEKKEDGKVFWQNLAGYKRQEALRPYLSSEEDRKKGKKFARYQLGDLLLHLEKKHGEDWGKVYDEAWERIDKKVEGLSKHIKLEEERRSEDAQSKAALTDWLRAKASFVIEGLKEADKDEFCRCELKLQKWYGDLRGKPFAIEAENSILDISGFSKQYNCAFIWQKDGVKKLNLYLIINYFKGGKLRFKKIKPEAFEANRFYTVINKKSGEIVPMEVNFNFDDPNLIILPLAFGKRQGREFIWNDLLSLETGSLKLANGRVIEKTLYNRRTRQDEPALFVALTFERREVLDSSNIKPMNLIGVDRGENIPAVIALTDPEGCPLSRFKDSLGNPTHILRIGESYKEKQRTIQAKKEVEQRRAGGYSRKYASKAKNLADDMVRNTARDLLYYAVTQDAMLIFENLSRGFGRQGKRTFMAERQYTRMEDWLTAKLAYEGLPSKTYLSKTLAQYTSKTCSNCGFTITSADYDRVLEKLKKTATGWMTTINGKELKVEGQITYYNRYKRQNVVKDLSVELDRLSEESVNNDISSWTKGRSGEALSLLKKRFSHRPVQEKFVCLNCGFETHADEQAALNIARSWLFLRSQEYKKYQTNKTTGNTDKRAFVETWQSFYRKKLKEVWKPAV

SEQ ID NO: 28140 - protein, 978 aa, synthetic construct
  REGION 1..978: note = engineered CasX variant
QEIKGRINKIRRRLVKDSNTKKAGKTGPMKTLLVRVMTPDLRERLENLRKKPENIPQPISNTSRANLNKLLTDYTEMKKAILHVYWEEFQKDPVGLMSRVAQPASKKIDQNKLKPEMDEKGNLTTAGFACSQCGQPLFVYKLEQVSEKGKAYTNYFGRCNVAEHEKLILLAQLKPEKDSDEAVTYSLGKFGQRALDFYSIHVTKESTHPVKPLAQIAGNRYASPVGKALSDACMGTIASFLSKYQDIIIEHQKVVKGNQKRLESLRELAGKENLEYPSVTLPPQPHTKEGVDAYNEVIARVRMWVNLNLWQKLKLSRDDAKPLLRLKGFPSFPLVERQANEVDWWDMVCNVKKLINEKKEDGKVFWQNLAGYKRQEALRPYLSSEEDRKKGKKFARYQLGDLLLHLEKKHGEDWGKVYDEAWERIDKKVEGLSKHIKLEEERRSEDAQSKAALTDWLRAKASFVIEGLKEADKDEFCRCELKLQKWYGDLRGKPFAIEAENSILDISGFSKQYNCAFIWQKDGVKKLNLYLIINYFKGGKLRFKKIKPEAFEANRFYTVINKKSGEIVPMEVNFNFDDPNLIILPLAFGKRQGREFIWNDLLSLETGSLKLANGRVIEKTLYNRRTRQDEPALFVALTFERREVLDSSNIKPMNLIGVDRGENIPAVIALTDPEGCPLSRFKDSLGNPTHILRIGESYKEKQRTIQAKKEVEQRRAGGYSRKYASKAKNLADDMVRNTARDLLYYAVTQDAMLIFENLSRGFGRQGKRTFMAERQYTRMEDWLTAKLAYEGLPSKTYLSKTLAQYTSKTCSNCGFTITSADYDRVLEKLKKTATGWMTTINGKELKVEGQITYYNRYKRQNVVKDLSVELDRLSEESVNNDISSWTKGRSGEALSLLKKRFSHRPVQEKFVCLNCGFETHADEQAALNIARSWLFLRSQEYKKYQTNKTTGNTDKRAFVETWQSFYRKKLKEVWKPAV

SEQ ID NO: 28141 - protein, 979 aa, synthetic construct
  REGION 1..979: note = engineered CasX variant
QEIKGRINKIRRRLVKDSNTKKAGKTGPMKTLLVRVMTPDLRERLENLRKKPENIPQPISNTSRANLNKLLTDYTEMKKAILHVYWEEFQKDPVGLMSRVAQPASKKIDQNKLKPEMDEKGNLTTAGFACSQCGQPLFVYKLEQVSEKGKAYTNYFGRCNVAEHEKLILLAQLKPEKDSDEAVTYSLGKFGQRALDFYSIHVTKESTHPVKPLAQIAGNRYASGPVGKALSDACMGTIASFLSKYQDIIIEHQKVVKGNQKRLESLRELAGKENLEYPSVTLPPQPHTSEGVDAYNEVIARVRMWVNLNLWQKLKLSRDDAKPLLRLKGFPSFPLVERQANEVDWWDMVCNVKKLINEKKEDGKVFWQNLAGYKRQEALRPYLSSEEDRKKGKKFARYQLGDLLLHLEKKHGEDWGKVYDEAWERIDKKVEGLSKHIKLEEERRSEDAQSKAALTDWLRAKASFVIEGLKEADKDEFCRCELKLQKWYGDLRGKPFAIEAENSILDISGFSKQYNCAFIWQKDGVKKLNLYLIINYFKGGKLRFKKIKPEAFEANRFYTVINKKSGEIVPMEVNFNFDDPNLIILPLAFGKRQGREFIWNDLLSLETGSLKLANGRVIEKTLYNRRTRQDEPALFVALTFERREVLDSSNIKPMNLIGVDRGENIPAVIALTDPEGCPLSRFKDSLGNPTHILRIGESYKEKQRTIQAKKEVEQRRAGGYSRKYASKAKNLADDMVRNTARDLLYYAVTQDAMLIFENLSRGFGRQGKRTFMAERQYTRMEDWLTAKLAYEGLPSKTYLSKTLAQYTSKTCSNCGFTITSADYDRVLEKLKKTATGWMTTINGKELKVEGQITYYNRYKRQNVVKDLSVELDRLSEESVNNDISSWTKGRSGEALSLLKKRFSHRPVQEKFVCLNCGFETHADEQAALNIARSWLFLRSQEYKKYQTNKTTGNTDKRAFVETWQSFYRKKLKEVWKPAV

SEQ ID NO: 28142 - protein, 979 aa, synthetic construct
  REGION 1..979: note = engineered CasX variant
QEIKGRINKIRRRLVKDSNTKKAGKTGPMKTLLVRVMTPDLRERLENLRKKPENIPQPISNTSRANLNKLLTDYTEMKKAILHVYWEEFQKDPVGLMSRVAQPASKKIDQNKLKPEMDEKGNLTTAGFACSQCGQPLFVYKLEQVSEKGKAYTNYFGRCNVAEHEKLILLAQLKPEKDSDEAVTYSLGKFGQRALDFYSIHVTKESTHPVKPLAQIAGNRYASGPVGKALSDACMGTIASFLSKYQDIIIEHQKVVKGNQKRLESLRELAGKENLEYPSVTLPPQPHTKEGLDAYNEVIARVRMWVNLNLWQKLKLSRDDAKPLLRLKGFPSFPLVERQANEVDWWDMVCNVKKLINEKKEDGKVFWQNLAGYKRQEALRPYLSSEEDRKKGKKFARYQLGDLLLHLEKKHGEDWGKVYDEAWERIDKKVEGLSKHIKLEEERRSEDAQSKAALTDWLRAKASFVIEGLKEADKDEFCRCELKLQKWYGDLRGKPFAIEAENSILDISGFSKQYNCAFIWQKDGVKKLNLYLIINYFKGGKLRFKKIKPEAFEANRFYTVINKKSGEIVPMEVNFNFDDPNLIILPLAFGKRQGREFIWNDLLSLETGSLKLANGRVIEKTLYNRRTRQDEPALFVALTFERREVLDSSNIKPMNLIGVDRGENIPAVIALTDPEGCPLSRFKDSLGNPTHILRIGESYKEKQRTIQAKKEVEQRRAGGYSRKYASKAKNLADDMVRNTARDLLYYAVTQDAMLIFENLSRGFGRQGKRTFMAERQYTRMEDWLTAKLAYEGLPSKTYLSKTLAQYTSKTCSNCGFTITSADYDRVLEKLKKTATGWMTTINGKELKVEGQITYYNRYKRQNVVKDLSVELDRLSEESVNNDISSWTKGRSGEALSLLKKRFSHRPVQEKFVCLNCGFETHADEQAALNIARSWLFLRSQEYKKYQTNKTTGNTDKRAFVETWQSFYRKKLKEVWKPAV

SEQ ID NO: 28143 - protein, 979 aa, synthetic construct
  REGION 1..979: note = engineered CasX variant
QEIKGRINKIRRRLVKDSNTKKAGKTGPMKTLLVRVMTPDLRERLENLRKKPENIPQPISNTSRANLNKLLTDYTEMKKAILHVYWEEFQKDPVGLMSRVAQPASKKIDQNKLKPEMDEKGNLTTAGFACSQCGQPLFVYKLEQVSEKGKAYTNYFGRCNVAEHEKLILLAQLKPEKDSDEAVTYSLGKFGQRALDFYSIHVTKESTHPVKPLAQIAGNRYASGPVGKALSDACMGTIASFLSKYQDIIIEHQKVVKGNQKRLESLRELAGKENLEYPSVTLPPQPHTKEGVDAYNEVIARVRTWVNLNLWQKLKLSRDDAKPLLRLKGFPSFPLVERQANEVDWWDMVCNVKKLINEKKEDGKVFWQNLAGYKRQEALRPYLSSEEDRKKGKKFARYQLGDLLLHLEKKHGEDWGKVYDEAWERIDKKVEGLSKHIKLEEERRSEDAQSKAALTDWLRAKASFVIEGLKEADKDEFCRCELKLQKWYGDLRGKPFAIEAENSILDISGFSKQYNCAFIWQKDGVKKLNLYLIINYFKGGKLRFKKIKPEAFEANRFYTVINKKSGEIVPMEVNFNFDDPNLIILPLAFGKRQGREFIWNDLLSLETGSLKLANGRVIEKTLYNRRTRQDEPALFVALTFERREVLDSSNIKPMNLIGVDRGENIPAVIALTDPEGCPLSRFKDSLGNPTHILRIGESYKEKQRTIQAKKEVEQRRAGGYSRKYASKAKNLADDMVRNTARDLLYYAVTQDAMLIFENLSRGFGRQGKRTFMAERQYTRMEDWLTAKLAYEGLPSKTYLSKTLAQYTSKTCSNCGFTITSADYDRVLEKLKKTATGWMTTINGKELKVEGQITYYNRYKRQNVVKDLSVELDRLSEESVNNDISSWTKGRSGEALSLLKKRFSHRPVQEKFVCLNCGFETHADEQAALNIARSWLFLRSQEYKKYQTNKTTGNTDKRAFVETWQSFYRKKLKEVWKPAV

SEQ ID NO: 28144 - protein, 979 aa, synthetic construct
  REGION 1..979: note = engineered CasX variant
QEIKGRINKIRRRLVKDSNTKKAGKTGPMKTLLVRVMTPDLRERLENLRKKPENIPQPISNTSRANLNKLLTDYTEMKKAILHVYWEEFQKDPVGLMSRVAQPASKKIDQNKLKPEMDEKGNLTTAGFACSQCGQPLFVYKLEQVSEKGKAYTNYFGRCNVAEHEKLILLAQLKPEKDSDEAVTYSLGKFGQRALDFYSIHVTKESTHPVKPLAQIAGNRYASGPVGKALSDACMGTIASFLSKYQDIIIEHQKVVKGNQKRLESLRELAGKENLEYPSVTLPPQPHTKEGVDAYNEVIARVRWWVNLNLWQKLKLSRDDAKPLLRLKGFPSFPLVERQANEVDWWDMVCNVKKLINEKKEDGKVFWQNLAGYKRQEALRPYLSSEEDRKKGKKFARYQLGDLLLHLEKKHGEDWGKVYDEAWERIDKKVEGLSKHIKLEEERRSEDAQSKAALTDWLRAKASFVIEGLKEADKDEFCRCELKLQKWYGDLRGKPFAIEAENSILDISGFSKQYNCAFIWQKDGVKKLNLYLIINYFKGGKLRFKKIKPEAFEANRFYTVINKKSGEIVPMEVNFNFDDPNLIILPLAFGKRQGREFIWNDLLSLETGSLKLANGRVIEKTLYNRRTRQDEPALFVALTFERREVLDSSNIKPMNLIGVDRGENIPAVIALTDPEGCPLSRFKDSLGNPTHILRIGESYKEKQRTIQAKKEVEQRRAGGYSRKYASKAKNLADDMVRNTARDLLYYAVTQDAMLIFENLSRGFGRQGKRTFMAERQYTRMEDWLTAKLAYEGLPSKTYLSKTLAQYTSKTCSNCGFTITSADYDRVLEKLKKTATGWMTTINGKELKVEGQITYYNRYKRQNVVKDLSVELDRLSEESVNNDISSWTKGRSGEALSLLKKRFSHRPVQEKFVCLNCGFETHADEQAALNIARSWLFLRSQEYKKYQTNKTTGNTDKRAFVETWQSFYRKKLKEVWKPAV

SEQ ID NO: 28145 - protein, 980 aa, synthetic construct
  REGION 1..980: note = engineered CasX variant
QEIKGRINKIRRRLVKDSNTKKAGKTGPMKTLLVRVMTPDLRERLENLRKKPENIPQPISNTSRANLNKLLTDYTEMKKAILHVYWEEFQKDPVGLMSRVAQPASKKIDQNKLKPEMDEKGNLTTAGFACSQCGQPLFVYKLEQVSEKGKAYTNYFGRCNVAEHEKLILLAQLKPEKDSDEAVTYSLGKFGQRALDFYSIHVTKESTHPVKPLAQIAGNRYASGPVGKALSDACMGTIASFLSKYQDIIIEHQKVVKGNQKRLESLRELAGKENLEYPSVTLPPQPHTKEGVDAYNEVIARVRMWVNLNLWQKLKLSRDDAKPLLRLKGFPSFPLVERQQANEVDWWDMVCNVKKLINEKKEDGKVFWQNLAGYKRQEALRPYLSSEEDRKKGKKFARYQLGDLLLHLEKKHGEDWGKVYDEAWERIDKKVEGLSKHIKLEEERRSEDAQSKAALTDWLRAKASFVIEGLKEADKDEFCRCELKLQKWYGDLRGKPFAIEAENSILDISGFSKQYNCAFIWQKDGVKKLNLYLIINYFKGGKLRFKKIKPEAFEANRFYTVINKKSGEIVPMEVNFNFDDPNLIILPLAFGKRQGREFIWNDLLSLETGSLKLANGRVIEKTLYNRRTRQDEPALFVALTFERREVLDSSNIKPMNLIGVDRGENIPAVIALTDPEGCPLSRFKDSLGNPTHILRIGESYKEKQRTIQAKKEVEQRRAGGYSRKYASKAKNLADDMVRNTARDLLYYAVTQDAMLIFENLSRGFGRQGKRTFMAERQYTRMEDWLTAKLAYEGLPSKTYLSKTLAQYTSKTCSNCGFTITSADYDRVLEKLKKTATGWMTTINGKELKVEGQITYYNRYKRQNVVKDLSVELDRLSEESVNNDISSWTKGRSGEALSLLKKRFSHRPVQEKFVCLNCGFETHADEQAALNIARSWLFLRSQEYKKYQTNKTTGNTDKRAFVETWQSFYRKKLKEVWKPAV

SEQ ID NO: 28146 - protein, 980 aa, synthetic construct
  REGION 1..980: note = engineered CasX variant
QEIKGRINKIRRRLVKDSNTKKAGKTGPMKTLLVRVMTPDLRERLENLRKKPENIPQPISNTSRANLNKLLTDYTEMKKAILHVYWEEFQKDPVGLMSRVAQPASKKIDQNKLKPEMDEKGNLTTAGFACSQCGQPLFVYKLEQVSEKGKAYTNYFGRCNVAEHEKLILLAQLKPEKDSDEAVTYSLGKFGQRALDFYSIHVTKESTHPVKPLAQIAGNRYASGPVGKALSDACMGTIASFLSKYQDIIIEHQKVVKGNQKRLESLRELAGKENLEYPSVTLPPQPHTKEGVDAYNEVIARVRMWVNLNLWQKLKLSRDDAKPLLRLKGFPSFPLVERQANAEVDWWDMVCNVKKLINEKKEDGKVFWQNLAGYKRQEALRPYLSSEEDRKKGKKFARYQLGDLLLHLEKKHGEDWGKVYDEAWERIDKKVEGLSKHIKLEEERRSEDAQSKAALTDWLRAKASFVIEGLKEADKDEFCRCELKLQKWYGDLRGKPFAIEAENSILDISGFSKQYNCAFIWQKDGVKKLNLYLIINYFKGGKLRFKKIKPEAFEANRFYTVINKKSGEIVPMEVNFNFDDPNLIILPLAFGKRQGREFIWNDLLSLETGSLKLANGRVIEKTLYNRRTRQDEPALFVALTFERREVLDSSNIKPMNLIGVDRGENIPAVIALTDPEGCPLSRFKDSLGNPTHILRIGESYKEKQRTIQAKKEVEQRRAGGYSRKYASKAKNLADDMVRNTARDLLYYAVTQDAMLIFENLSRGFGRQGKRTFMAERQYTRMEDWLTAKLAYEGLPSKTYLSKTLAQYTSKTCSNCGFTITSADYDRVLEKLKKTATGWMTTINGKELKVEGQITYYNRYKRQNVVKDLSVELDRLSEESVNNDISSWTKGRSGEALSLLKKRFSHRPVQEKFVCLNCGFETHADEQAALNIARSWLFLRSQEYKKYQTNKTTGNTDKRAFVETWQSFYRKKLKEVWKPAV

SEQ ID NO: 28147 - protein, 979 aa, synthetic construct
  REGION 1..979: note = engineered CasX variant
QEIKGRINKIRRRLVKDSNTKKAGKTGPMKTLLVRVMTPDLRERLENLRKKPENIPQPISNTSRANLNKLLTDYTEMKKAILHVYWEEFQKDPVGLMSRVAQPASKKIDQNKLKPEMDEKGNLTTAGFACSQCGQPLFVYKLEQVSEKGKAYTNYFGRCNVAEHEKLILLAQLKPEKDSDEAVTYSLGKFGQRALDFYSIHVTKESTHPVKPLAQIAGNRYASGPVGKALSDACMGTIASFLSKYQDIIIEHQKVVKGNQKRLESLRELAGKENLEYPSVTLPPQPHTKEGVDAYNEVIARVRMWVNLNLWQKLKLSRDDAKPLLRLKGFPSFPLVERQANEVDWWDMVCNVKKLINEKKEDGKVFWQNLAGYKRQEALRPYLSSEEDRKKGKKFARTQLGDLLLHLEKKHGEDWGKVYDEAWERIDKKVEGLSKHIKLEEERRSEDAQSKAALTDWLRAKASFVIEGLKEADKDEFCRCELKLQKWYGDLRGKPFAIEAENSILDISGFSKQYNCAFIWQKDGVKKLNLYLIINYFKGGKLRFKKIKPEAFEANRFYTVINKKSGEIVPMEVNFNFDDPNLIILPLAFGKRQGREFIWNDLLSLETGSLKLANGRVIEKTLYNRRTRQDEPALFVALTFERREVLDSSNIKPMNLIGVDRGENIPAVIALTDPEGCPLSRFKDSLGNPTHILRIGESYKEKQRTIQAKKEVEQRRAGGYSRKYASKAKNLADDMVRNTARDLLYYAVTQDAMLIFENLSRGFGRQGKRTFMAERQYTRMEDWLTAKLAYEGLPSKTYLSKTLAQYTSKTCSNCGFTITSADYDRVLEKLKKTATGWMTTINGKELKVEGQITYYNRYKRQNVVKDLSVELDRLSEESVNNDISSWTKGRSGEALSLLKKRFSHRPVQEKFVCLNCGFETHADEQAALNIARSWLFLRSQEYKKYQTNKTTGNTDKRAFVETWQSFYRKKLKEVWKPAV

SEQ ID NO: 28148 - protein, 980 aa, synthetic construct
  REGION 1..980: note = engineered CasX variant
QEIKGRINKIRRRLVKDSNTKKAGKTGPMKTLLVRVMTPDLRERLENLRKKPENIPQPISNTSRANLNKLLTDYTEMKKAILHVYWEEFQKDPVGLMSRVAQPASKKIDQNKLKPEMDEKGNLTTAGFACSQCGQPLFVYKLEQVSEKGKAYTNYFGRCNVAEHEKLILLAQLKPEKDSDEAVTYSLGKFGQRALDFYSIHVTKESTHPVKPLAQIAGNRYASGPVGKALSDACMGTIASFLSKYQDIIIEHQKVVKGNQKRLESLRELAGKENLEYPSVTLPPQPHTKEGVDAYNEVIARVRMWVNLNLWQKLKLSRDDAKPLLRLKGFPSFPLVERQANEVDWWDMVCNVKKLINEKKEDGKVFWQNLAGYKRQEALRPYLSSEEDRKKGKKFARYQLGDLLLHLEKKHEGEDWGKVYDEAWERIDKKVEGLSKHIKLEEERRSEDAQSKAALTDWLRAKASFVIEGLKEADKDEFCRCELKLQKWYGDLRGKPFAIEAENSILDISGFSKQYNCAFIWQKDGVKKLNLYLIINYFKGGKLRFKKIKPEAFEANRFYTVINKKSGEIVPMEVNFNFDDPNLIILPLAFGKRQGREFIWNDLLSLETGSLKLANGRVIEKTLYNRRTRQDEPALFVALTFERREVLDSSNIKPMNLIGVDRGENIPAVIALTDPEGCPLSRFKDSLGNPTHILRIGESYKEKQRTIQAKKEVEQRRAGGYSRKYASKAKNLADDMVRNTARDLLYYAVTQDAMLIFENLSRGFGRQGKRTFMAERQYTRMEDWLTAKLAYEGLPSKTYLSKTLAQYTSKTCSNCGFTITSADYDRVLEKLKKTATGWMTTINGKELKVEGQITYYNRYKRQNVVKDLSVELDRLSEESVNNDISSWTKGRSGEALSLLKKRFSHRPVQEKFVCLNCGFETHADEQAALNIARSWLFLRSQEYKKYQTNKTTGNTDKRAFVETWQSFYRKKLKEVWKPAV

SEQ ID NO: 28149 - protein, 979 aa, synthetic construct
  REGION 1..979: note = engineered CasX variant
QEIKGRINKIRRRLVKDSNTKKAGKTGPMKTLLVRVMTPDLRERLENLRKKPENIPQPISNTSRANLNKLLTDYTEMKKAILHVYWEEFQKDPVGLMSRVAQPASKKIDQNKLKPEMDEKGNLTTAGFACSQCGQPLFVYKLEQVSEKGKAYTNYFGRCNVAEHEKLILLAQLKPEKDSDEAVTYSLGKFGQRALDFYSIHVTKESTHPVKPLAQIAGNRYASGPVGKALSDACMGTIASFLSKYQDIIIEHQKVVKGNQKRLESLRELAGKENLEYPSVTLPPQPHTKEGVDAYNEVIARVRMWVNLNLWQKLKLSRDDAKPLLRLKGFPSFPLVERQANEVDWWDMVCNVKKLINEKKEDGKVFWQNLAGYKRQEALRPYLSSEEDRKKGKKFARYQLGDLLLHLEKKHGEDWGKVYDEAWERIDKKVEGLSKHIKLEEERRSEDAQSKAALTDWLRAKASFVIEGLKEADKDEFCRCDLKLQKWYGDLRGKPFAIEAENSILDISGFSKQYNCAFIWQKDGVKKLNLYLIINYFKGGKLRFKKIKPEAFEANRFYTVINKKSGEIVPMEVNFNFDDPNLIILPLAFGKRQGREFIWNDLLSLETGSLKLANGRVIEKTLYNRRTRQDEPALFVALTFERREVLDSSNIKPMNLIGVDRGENIPAVIALTDPEGCPLSRFKDSLGNPTHILRIGESYKEKQRTIQAKKEVEQRRAGGYSRKYASKAKNLADDMVRNTARDLLYYAVTQDAMLIFENLSRGFGRQGKRTFMAERQYTRMEDWLTAKLAYEGLPSKTYLSKTLAQYTSKTCSNCGFTITSADYDRVLEKLKKTATGWMTTINGKELKVEGQITYYNRYKRQNVVKDLSVELDRLSEESVNNDISSWTKGRSGEALSLLKKRFSHRPVQEKFVCLNCGFETHADEQAALNIARSWLFLRSQEYKKYQTNKTTGNTDKRAFVETWQSFYRKKLKEVWKPAV

SEQ ID NO: 28150 - protein, 979 aa, synthetic construct
  REGION 1..979: note = engineered CasX variant
QEIKGRINKIRRRLVKDSNTKKAGKTGPMKTLLVRVMTPDLRERLENLRKKPENIPQPISNTSRANLNKLLTDYTEMKKAILHVYWEEFQKDPVGLMSRVAQPASKKIDQNKLKPEMDEKGNLTTAGFACSQCGQPLFVYKLEQVSEKGKAYTNYFGRCNVAEHEKLILLAQLKPEKDSDEAVTYSLGKFGQRALDFYSIHVTKESTHPVKPLAQIAGNRYASGPVGKALSDACMGTIASFLSKYQDIIIEHQKVVKGNQKRLESLRELAGKENLEYPSVTLPPQPHTKEGVDAYNEVIARVRMWVNLNLWQKLKLSRDDAKPLLRLKGFPSFPLVERQANEVDWWDMVCNVKKLINEKKEDGKVFWQNLAGYKRQEALRPYLSSEEDRKKGKKFARYQLGDLLLHLEKKHGEDWGKVYDEAWERIDKKVEGLSKHIKLEEERRSEDAQSKAALTDWLRAKASFVIEGLKEADKDEFCRCELKLQKWYGDLRGKPFAIEAENSILDISGFSKQYNCAFIWQKDGVKKLNLYLIINYFKGGKLRFKKIKPEAFEANRFYTVINKKSGEIVPMEVNFNFDDPNLIILPLAFGKRFGREFIWNDLLSLETGSLKLANGRVIEKTLYNRRTRQDEPALFVALTFERREVLDSSNIKPMNLIGVDRGENIPAVIALTDPEGCPLSRFKDSLGNPTHILRIGESYKEKQRTIQAKKEVEQRRAGGYSRKYASKAKNLADDMVRNTARDLLYYAVTQDAMLIFENLSRGFGRQGKRTFMAERQYTRMEDWLTAKLAYEGLPSKTYLSKTLAQYTSKTCSNCGFTITSADYDRVLEKLKKTATGWMTTINGKELKVEGQITYYNRYKRQNVVKDLSVELDRLSEESVNNDISSWTKGRSGEALSLLKKRFSHRPVQEKFVCLNCGFETHADEQAALNIARSWLFLRSQEYKKYQTNKTTGNTDKRAFVETWQSFYRKKLKEVWKPAV

SEQ ID NO: 28151 - protein, 979 aa, synthetic construct
  REGION 1..979: note = engineered CasX variant
QEIKGRINKIRRRLVKDSNTKKAGKTGPMKTLLVRVMTPDLRERLENLRKKPENIPQPISNTSRANLNKLLTDYTEMKKAILHVYWEEFQKDPVGLMSRVAQPASKKIDQNKLKPEMDEKGNLTTAGFACSQCGQPLFVYKLEQVSEKGKAYTNYFGRCNVAEHEKLILLAQLKPEKDSDEAVTYSLGKFGQRALDFYSIHVTKESTHPVKPLAQIAGNRYASGPVGKALSDACMGTIASFLSKYQDIIIEHQKVVKGNQKRLESLRELAGKENLEYPSVTLPPQPHTKEGVDAYNEVIARVRMWVNLNLWQKLKLSRDDAKPLLRLKGFPSFPLVERQANEVDWWDMVCNVKKLINEKKEDGKVFWQNLAGYKRQEALRPYLSSEEDRKKGKKFARYQLGDLLLHLEKKHGEDWGKVYDEAWERIDKKVEGLSKHIKLEEERRSEDAQSKAALTDWLRAKASFVIEGLKEADKDEFCRCELKLQKWYGDLRGKPFAIEAENSILDISGFSKQYNCAFIWQKDGVKKLNLYLIINYFKGGKLRFKKIKPEAFEANRFYTVINKKSGEIVPMEVNFNFDDPNLIILPLAFGKRVGREFIWNDLLSLETGSLKLANGRVIEKTLYNRRTRQDEPALFVALTFERREVLDSSNIKPMNLIGVDRGENIPAVIALTDPEGCPLSRFKDSLGNPTHILRIGESYKEKQRTIQAKKEVEQRRAGGYSRKYASKAKNLADDMVRNTARDLLYYAVTQDAMLIFENLSRGFGRQGKRTFMAERQYTRMEDWLTAKLAYEGLPSKTYLSKTLAQYTSKTCSNCGFTITSADYDRVLEKLKKTATGWMTTINGKELKVEGQITYYNRYKRQNVVKDLSVELDRLSEESVNNDISSWTKGRSGEALSLLKKRFSHRPVQEKFVCLNCGFETHADEQAALNIARSWLFLRSQEYKKYQTNKTTGNTDKRAFVETWQSFYRKKLKEVWKPAV

SEQ ID NO: 28152 - protein, 980 aa, synthetic construct
  REGION 1..980: note = engineered CasX variant
QEIKGRINKIRRRLVKDSNTKKAGKTGPMKTLLVRVMTPDLRERLENLRKKPENIPQPISNTSRANLNKLLTDYTEMKKAILHVYWEEFQKDPVGLMSRVAQPASKKIDQNKLKPEMDEKGNLTTAGFACSQCGQPLFVYKLEQVSEKGKAYTNYFGRCNVAEHEKLILLAQLKPEKDSDEAVTYSLGKFGQRALDFYSIHVTKESTHPVKPLAQIAGNRYASGPVGKALSDACMGTIASFLSKYQDIIIEHQKVVKGNQKRLESLRELAGKENLEYPSVTLPPQPHTKEGVDAYNEVIARVRMWVNLNLWQKLKLSRDDAKPLLRLKGFPSFPLVERQANEVDWWDMVCNVKKLINEKKEDGKVFWQNLAGYKRQEALRPYLSSEEDRKKGKKFARYQLGDLLLHLEKKHGEDWGKVYDEAWERIDKKVEGLSKHIKLEEERRSEDAQSKAALTDWLRAKASFVIEGLKEADKDEFCRCELKLQKWYGDLRGKPFAIEAENSILDISGFSKQYNCAFIWQKDGVKKLNLYLIINYFKGGKLRFKKIKPEAFEANRFYTVINKKSGEIVPMEVNFNFDDPNLIILPLAFGKRQGREFIWNDLLSLETGSLKLANGRVIEKTLYNRRTRQDEPALFVALTFERREVLDSSNIKTPMNLIGVDRGENIPAVIALTDPEGCPLSRFKDSLGNPTHILRIGESYKEKQRTIQAKKEVEQRRAGGYSRKYASKAKNLADDMVRNTARDLLYYAVTQDAMLIFENLSRGFGRQGKRTFMAERQYTRMEDWLTAKLAYEGLPSKTYLSKTLAQYTSKTCSNCGFTITSADYDRVLEKLKKTATGWMTTINGKELKVEGQITYYNRYKRQNVVKDLSVELDRLSEESVNNDISSWTKGRSGEALSLLKKRFSHRPVQEKFVCLNCGFETHADEQAALNIARSWLFLRSQEYKKYQTNKTTGNTDKRAFVETWQSFYRKKLKEVWKPAV

SEQ ID NO: 28153 - protein, 980 aa, synthetic construct
  REGION 1..980: note = engineered CasX variant
QEIKGRINKIRRRLVKDSNTKKAGKTGPMKTLLVRVMTPDLRERLENLRKKPENIPQPISNTSRANLNKLLTDYTEMKKAILHVYWEEFQKDPVGLMSRVAQPASKKIDQNKLKPEMDEKGNLTTAGFACSQCGQPLFVYKLEQVSEKGKAYTNYFGRCNVAEHEKLILLAQLKPEKDSDEAVTYSLGKFGQRALDFYSIHVTKESTHPVKPLAQIAGNRYASGPVGKALSDACMGTIASFLSKYQDIIIEHQKVVKGNQKRLESLRELAGKENLEYPSVTLPPQPHTKEGVDAYNEVIARVRMWVNLNLWQKLKLSRDDAKPLLRLKGFPSFPLVERQANEVDWWDMVCNVKKLINEKKEDGKVFWQNLAGYKRQEALRPYLSSEEDRKKGKKFARYQLGDLLLHLEKKHGEDWGKVYDEAWERIDKKVEGLSKHIKLEEERRSEDAQSKAALTDWLRAKASFVIEGLKEADKDEFCRCELKLQKWYGDLRGKPFAIEAENSILDISGFSKQYNCAFIWQKDGVKKLNLYLIINYFKGGKLRFKKIKPEAFEANRFYTVINKKSGEIVPMEVNFNFDDPNLIILPLAFGKRQGREFIWNDLLSLETGSLKLANGRVIEKTLYNRRTRQDEPALFVALTFERREVLDSSNIKPMSNLIGVDRGENIPAVIALTDPEGCPLSRFKDSLGNPTHILRIGESYKEKQRTIQAKKEVEQRRAGGYSRKYASKAKNLADDMVRNTARDLLYYAVTQDAMLIFENLSRGFGRQGKRTFMAERQYTRMEDWLTAKLAYEGLPSKTYLSKTLAQYTSKTCSNCGFTITSADYDRVLEKLKKTATGWMTTINGKELKVEGQITYYNRYKRQNVVKDLSVELDRLSEESVNNDISSWTKGRSGEALSLLKKRFSHRPVQEKFVCLNCGFETHADEQAALNIARSWLFLRSQEYKKYQTNKTTGNTDKRAFVETWQSFYRKKLKEVWKPAV

SEQ ID NO: 28154 - protein, 979 aa, synthetic construct
  REGION 1..979: note = engineered CasX variant
QEIKGRINKIRRRLVKDSNTKKAGKTGPMKTLLVRVMTPDLRERLENLRKKPENIPQPISNTSRANLNKLLTDYTEMKKAILHVYWEEFQKDPVGLMSRVAQPASKKIDQNKLKPEMDEKGNLTTAGFACSQCGQPLFVYKLEQVSEKGKAYTNYFGRCNVAEHEKLILLAQLKPEKDSDEAVTYSLGKFGQRALDFYSIHVTKESTHPVKPLAQIAGNRYASGPVGKALSDACMGTIASFLSKYQDIIIEHQKVVKGNQKRLESLRELAGKENLEYPSVTLPPQPHTKEGVDAYNEVIARVRMWVNLNLWQKLKLSRDDAKPLLRLKGFPSFPLVERQANEVDWWDMVCNVKKLINEKKEDGKVFWQNLAGYKRQEALRPYLSSEEDRKKGKKFARYQLGDLLLHLEKKHGEDWGKVYDEAWERIDKKVEGLSKHIKLEEERRSEDAQSKAALTDWLRAKASFVIEGLKEADKDEFCRCELKLQKWYGDLRGKPFAIEAENSILDISGFSKQYNCAFIWQKDGVKKLNLYLIINYFKGGKLRFKKIKPEAFEANRFYTVINKKSGEIVPMEVNFNFDDPNLIILPLAFGKRQGREFIWNDLLSLETGSLKLANGRVIEKTLYNRRTRQDEPALFVALTFERREVLDSSNIKPMNLIGVDRGENIPAVIALTDPEGCPLSRFKDSLGNPTHILRIRESYKEKQRTIQAKKEVEQRRAGGYSRKYASKAKNLADDMVRNTARDLLYYAVTQDAMLIFENLSRGFGRQGKRTFMAERQYTRMEDWLTAKLAYEGLPSKTYLSKTLAQYTSKTCSNCGFTITSADYDRVLEKLKKTATGWMTTINGKELKVEGQITYYNRYKRQNVVKDLSVELDRLSEESVNNDISSWTKGRSGEALSLLKKRFSHRPVQEKFVCLNCGFETHADEQAALNIARSWLFLRSQEYKKYQTNKTTGNTDKRAFVETWQSFYRKKLKEVWKPAV

SEQ ID NO: 28155 - protein, 979 aa, synthetic construct
  REGION 1..979: note = engineered CasX variant
QEIKGRINKIRRRLVKDSNTKKAGKTGPMKTLLVRVMTPDLRERLENLRKKPENIPQPISNTSRANLNKLLTDYTEMKKAILHVYWEEFQKDPVGLMSRVAQPASKKIDQNKLKPEMDEKGNLTTAGFACSQCGQPLFVYKLEQVSEKGKAYTNYFGRCNVAEHEKLILLAQLKPEKDSDEAVTYSLGKFGQRALDFYSIHVTKESTHPVKPLAQIAGNRYASGPVGKALSDACMGTIASFLSKYQDIIIEHQKVVKGNQKRLESLRELAGKENLEYPSVTLPPQPHTKEGVDAYNEVIARVRMWVNLNLWQKLKLSRDDAKPLLRLKGFPSFPLVERQANEVDWWDMVCNVKKLINEKKEDGKVFWQNLAGYKRQEALRPYLSSEEDRKKGKKFARYQLGDLLLHLEKKHGEDWGKVYDEAWERIDKKVEGLSKHIKLEEERRSEDAQSKAALTDWLRAKASFVIEGLKEADKDEFCRCELKLQKWYGDLRGKPFAIEAENSILDISGFSKQYNCAFIWQKDGVKKLNLYLIINYFKGGKLRFKKIKPEAFEANRFYTVINKKSGEIVPMEVNFNFDDPNLIILPLAFGKRQGREFIWNDLLSLETGSLKLANGRVIEKTLYNRRTRQDEPALFVALTFERREVLDSSNIKPMNLIGVDRGENIPAVIALTDPEGCPLSRFKDSLGNPTHILRIGESYKEKQRTIQAKKEVEQRRAGGYSRKYASKAKNLADDMVRNTARDLLYYAVTQDAMLIFENLSRGFGRQGKRTFSAERQYTRMEDWLTAKLAYEGLPSKTYLSKTLAQYTSKTCSNCGFTITSADYDRVLEKLKKTATGWMTTINGKELKVEGQITYYNRYKRQNVVKDLSVELDRLSEESVNNDISSWTKGRSGEALSLLKKRFSHRPVQEKFVCLNCGFETHADEQAALNIARSWLFLRSQEYKKYQTNKTTGNTDKRAFVETWQSFYRKKLKEVWKPAV

SEQ ID NO: 28156 - protein, 979 aa, synthetic construct
  REGION 1..979: note = engineered CasX variant
QEIKGRINKIRRRLVKDSNTKKAGKTGPMKTLLVRVMTPDLRERLENLRKKPENIPQPISNTSRANLNKLLTDYTEMKKAILHVYWEEFQKDPVGLMSRVAQPASKKIDQNKLKPEMDEKGNLTTAGFACSQCGQPLFVYKLEQVSEKGKAYTNYFGRCNVAEHEKLILLAQLKPEKDSDEAVTYSLGKFGQRALDFYSIHVTKESTHPVKPLAQIAGNRYASGPVGKALSDACMGTIASFLSKYQDIIIEHQKVVKGNQKRLESLRELAGKENLEYPSVTLPPQPHTKEGVDAYNEVIARVRMWVNLNLWQKLKLSRDDAKPLLRLKGFPSFPLVERQANEVDWWDMVCNVKKLINEKKEDGKVFWQNLAGYKRQEALRPYLSSEEDRKKGKKFARYQLGDLLLHLEKKHGEDWGKVYDEAWERIDKKVEGLSKHIKLEEERRSEDAQSKAALTDWLRAKASFVIEGLKEADKDEFCRCELKLQKWYGDLRGKPFAIEAENSILDISGFSKQYNCAFIWQKDGVKKLNLYLIINYFKGGKLRFKKIKPEAFEANRFYTVINKKSGEIVPMEVNFNFDDPNLIILPLAFGKRQGREFIWNDLLSLETGSLKLANGRVIEKTLYNRRTRQDEPALFVALTFERREVLDSSNIKPMNLIGVDRGENIPAVIALTDPEGCPLSRFKDSLGNPTHILRIGESYKEKQRTIQAKKEVEQRRAGGYSRKYASKAKNLADDMVRNTARDLLYYAVTQDAMLIFENLSRGFGRQGKRTFMAERQYTRMEDWLTAKLAYEGLPSKTYLSKTLAQYTSKTCSNCGFTITSADYDRVLEKLKKTATGWMTTINGKELKVEGQITYYNRYKRQNVVKDLSVELDRLSEESVNNDISSWDKGRSGEALSLLKKRFSHRPVQEKFVCLNCGFETHADEQAALNIARSWLFLRSQEYKKYQTNKTTGNTDKRAFVETWQSFYRKKLKEVWKPAV

SEQ ID NO: 28157 - protein, 979 aa, synthetic construct
  REGION 1..979: note = engineered CasX variant
QEIKGRINKIRRRLVKDSNTKKAGKTGPMKTLLVRVMTPDLRERLENLRKKPENIPQPISNTSRANLNKLLTDYTEMKKAILHVYWEEFQVDPVGLMSRVAQPASKKIDQNKLKPEMDEKGNLTTAGFACSQCGQPLFVYKLEQVSEKGKAYTNYFGRCNVAEHEKLILLAQLKPEKDSDEAVTYSLGKFGQRALDFYSIHVTKESTHPVKPLAQIAGNRYASGPVGKALSDACMGTIASFLSKYQDIIIEHQKVVKGNQKRLESLRELAGKENLEYPSVTLPPQPHTKEGVDAYNEVIARVRMWVNLNLWQKLKLSRDDAKPLLRLKGFPSFPLVERQANEVDWWDMVCNVKKLINEKKEDGKVFWQNLAGYKRQEALRPYLSSEEDRKKGKKFARYQLGDLLLHLEKKHGEDWGKVYDEAWERIDKKVEGLSKHIKLEEERRSEDAQSKAALTDWLRAKASFVIEGLKEADKDEFCRCELKLQKWYGDLRGKPFAIEAENSILDISGFSKQYNCAFIWQKDGVKKLNLYLIINYFKGGKLRFKKIKPEAFEANRFYTVINKKSGEIVPMEVNFNFDDPNLIILPLAFGKRQGREFIWNDLLSLETGSLKLANGRVIEKTLYNRRTRQDEPALFVALTFERREVLDSSNIKPMNLIGVDRGENIPAVIALTDPEGCPLSRFKDSLGNPTHILRIGESYKEKQRTIQAKKEVEQRRAGGYSRKYASKAKNLADDMVRNTARDLLYYAVTQDAMLIFENLSRGFGRQGKRTFMAERQYTRMEDWLTAKLAYEGLPSKTYLSKTLAQYTSKTCSNCGFTITSADYDRVLEKLKKTATGWMTTINGKELKVEGQITYYNRYKRQNVVKDLSVELDRLSEESVNNDISSWTKGRSGEALSLLKKRFSHRPVQEKFVCLNCGFETHADEQAALNIARSWLFLRSQEYKKYQTNKTTGNTDKRAFVETWQSFYRKKLKEVWKPAV

SEQ ID NO: 28158 - protein, 979 aa, synthetic construct
  REGION 1..979: note = engineered CasX variant
QEIKGRLNKIRRRLVKDSNTKKAGKTGPMKTLLVRVMTPDLRERLENLRKKPENIPQPISNTSRANLNKLLTDYTEMKKAILHVYWEEFQKDPVGLMSRVAQPASKKIDQNKLKPEMDEKGNLTTAGFACSQCGQPLFVYKLEQVSEKGKAYTNYFGRCNVAEHEKLILLAQLKPEKDSDEAVTYSLGKFGQRALDFYSIHVTKESTHPVKPLAQIAGNRYASGPVGKALSDACMGTIASFLSKYQDIIIEHQKVVKGNQKRLESLRELAGKENLEYPSVTLPPQPHTKEGVDAYNEVIARVRMWVNLNLWQKLKLSRDDAKPLLRLKGFPSFPLVERQANEVDWWDMVCNVKKLINEKKEDGKVFWQNLAGYKRQEALRPYLSSEEDRKKGKKFARYQLGDLLLHLEKKHGEDWGKVYDEAWERIDKKVEGLSKHIKLEEERRSEDAQSKAALTDWLRAKASFVIEGLKEADKDEFCRCELKLQKWYGDLRGKPFAIEAENSILDISGFSKQYNCAFIWQKDGVKKLNLYLIINYFKGGKLRFKKIKPEAFEANRFYTVINKKSGEIVPMEVNFNFDDPNLIILPLAFGKRQGREFIWNDLLSLETGSLKLANGRVIEKTLYNRRTRQDEPALFVALTFERREVLDSSNIKPMNLIGVDRGENIPAVIALTDPEGCPLSRFKDSLGNPTHILRIGESYKEKQRTIQAKKEVEQRRAGGYSRKYASKAKNLADDMVRNTARDLLYYAVTQDAMLIFENLSRGFGRQGKRTFMAERQYTRMEDWLTAKLAYEGLPSKTYLSKTLAQYTSKTCSNCGFTITSADYDRVLEKLKKTATGWMTTINGKELKVEGQITYYNRYKRQNVVKDLSVELDRLSEESVNNDISSWTKGRSGEALSLLKKRFSHRPVQEKFVCLNCGFETHADEQAALNIARSWLFLRSQEYKKYQTNKTTGNTDKRAFVETWQSFYRKKLKEVWKPAV

SEQ ID NO: 28159 - protein, 979 aa, synthetic construct
  REGION 1..979: note = engineered CasX variant
QEIKGRINKIRRRLVKDSNTKKAGKTGPMKTLLVRVMTPDLRERLENLRKKPENIPQPISNTSRANLNKLLTDYTEMKKAILHVYWEEFQKDPVGLMSRVAQPASKKIDQNKLKPEMDEKGNLTTAGFACSQCGQPLFVYKLEQVSEKGKAYTNYVGRCNVAEHEKLILLAQLKPEKDSDEAVTYSLGKFGQRALDFYSIHVTKESTHPVKPLAQIAGNRYASGPVGKALSDACMGTIASFLSKYQDIIIEHQKVVKGNQKRLESLRELAGKENLEYPSVTLPPQPHTKEGVDAYNEVIARVRMWVNLNLWQKLKLSRDDAKPLLRLKGFPSFPLVERQANEVDWWDMVCNVKKLINEKKEDGKVFWQNLAGYKRQEALRPYLSSEEDRKKGKKFARYQLGDLLLHLEKKHGEDWGKVYDEAWERIDKKVEGLSKHIKLEEERRSEDAQSKAALTDWLRAKASFVIEGLKEADKDEFCRCELKLQKWYGDLRGKPFAIEAENSILDISGFSKQYNCAFIWQKDGVKKLNLYLIINYFKGGKLRFKKIKPEAFEANRFYTVINKKSGEIVPMEVNFNFDDPNLIILPLAFGKRQGREFIWNDLLSLETGSLKLANGRVIEKTLYNRRTRQDEPALFVALTFERREVLDSSNIKPMNLIGVDRGENIPAVIALTDPEGCPLSRFKDSLGNPTHILRIGESYKEKQRTIQAKKEVEQRRAGGYSRKYASKAKNLADDMVRNTARDLLYYAVTQDAMLIFENLSRGFGRQGKRTFMAERQYTRMEDWLTAKLAYEGLPSKTYLSKTLAQYTSKTCSNCGFTITSADYDRVLEKLKKTATGWMTTINGKELKVEGQITYYNRYKRQNVVKDLSVELDRLSEESVNNDISSWTKGRSGEALSLLKKRFSHRPVQEKFVCLNCGFETHADEQAALNIARSWLFLRSQEYKKYQTNKTTGNTDKRAFVETWQSFYRKKLKEVWKPAV

SEQ ID NO: 28160 - protein, 979 aa, synthetic construct
  REGION 1..979: note = engineered CasX variant
QEIKGRINKIRRRLVKDSNTKKAGKTGPMKTLLVRVMTPDLRERLENLRKKPENIPQPISNTSRANLNKLLTDYTEMKKAILHVYWEEFQKDPVGLMSRVAQPASKKIDQNKLKPEMDEKGNLTTAGFACSQCGQPLFVYKLEQVSEKGKAYTNYFGRCNVAEHEKLILLAQLKPEKDSDEAVTYSLGKFGQRALDFYSIHVTKESTHPVKPLAQIAGNRYASGPVGKALSDACMGTIASFLSKYQDIIIEHQKVVKGNQKRLESLRELAGKENLEYPSVTLPPQPHTKEGVDAYNEVIARVRMWVNLNLWQKLKLSRDDAKPLLRLKGFPSFPLVERQANEVDWWDMVCNVKKLINEKKEDGKVFWQNLAGYKRQEALRPYLSSEEDRKKGKKFARYQLGDLLLHLEKKHGEDWGKVYDEAWERIDKKVEGLSKHIKLEEERRSEDAQSKAALTDWLRAKASFVIEGLKEADKDEFCRCELKLQKWYGDLRGKPFAIEAENSILDISGFSKQYNCAFIWQKDGVKKLNLYLIINYFKGGKLRFKKIKPEAFEANRFYTVINKKSGEIVPMEVNFNFDDPNLIILPLAFGKRQGREFIWNDLLSLETGSLKLANGRVIEKTLYNRRTRQDEPALFVALTFERREVLDSSNIKPMNLIGVDRGENIPAVIALTDPEGCPLSRFKDSLGNPTHILRIGESYKEKQRTIQAKKEVEQRRAGGYSRKYASKAKNLADDMVRNTARDLLYYAVTQDAMLIFENLSRGFGRQGKRTFMAERQYTRMEDWLTAKLAYEGLASKTYLSKTLAQYTSKTCSNCGFTITSADYDRVLEKLKKTATGWMTTINGKELKVEGQITYYNRYKRQNVVKDLSVELDRLSEESVNNDISSWTKGRSGEALSLLKKRFSHRPVQEKFVCLNCGFETHADEQAALNIARSWLFLRSQEYKKYQTNKTTGNTDKRAFVETWQSFYRKKLKEVWKPAV

SEQ ID NO: 28161 - protein, 979 aa, synthetic construct
  REGION 1..979: note = engineered CasX variant
QEIKGRINKIRRRLVKDSNTKKAGKTGPMKTLLVRVMTPDLRERLENLRKKPENIPQPISNTSRANLNKLLTDYTEMKKAILHVYWEEFQKDPVGLMSRVAQPASKKIDQNKLKPEMDEKGNLTTAGFACSQCGQPLFVYKLEQVSEKGKAYTNYFGRCNVAEHEKLILLAQLKPEKDSDEAVTYSLGKFGQRALDFYSIHVTKESTHPVKPLAQIAGNRYASGPVGKALSDACMGTIASFLSKYQDIIIEHQKVVKGNQKRLESLRELAGKENLEYPSVTLPPQPHTKEGVDAYNEVIARVRMWVNLNLWQKLKLSRDDAKPLLRLKGFPSFPLVERQANEVDWWDMVCNVKKLINEKKEDGKVFWQNLAGYKRQEALRPYLSSEEDRKKGKKFARYQLGDLLLHLEKKHGEDWGKVYDEAWERIDKKVEGLSKHIKLEEERRSEDAQSKAALTDWLRAKASFVIEGLKEADKDEFCRCELKLQKWYGDLRGKPFAIEAENSILDISGFSKQYNCAFIWQKDGVKKLNLYLIINYFKGGKLRFKKIKPEAFEANRFYTVINKKSGEIVPMEVNFNFDDPNLIILPLAFGKRQGREFIWNDLLSLETGSLKLANGRVIEKTLYNRRTRQDEPALFVALTFERREVLDSSNIKPMNLIGVDRGENIPAVIALTDPEGCPLSRFKDSLGNPTHILRIGESYKEKQRTIQAKKEVEQRRAGGYSRKYASKAKNLADDMVRNTARDLLYYAVTQDAMLIFENLSRGFGRQGKRTFMAERQYTRMEDWLTAKLAYEGLPSKVYLSKTLAQYTSKTCSNCGFTITSADYDRVLEKLKKTATGWMTTINGKELKVEGQITYYNRYKRQNVVKDLSVELDRLSEESVNNDISSWTKGRSGEALSLLKKRFSHRPVQEKFVCLNCGFETHADEQAALNIARSWLFLRSQEYKKYQTNKTTGNTDKRAFVETWQSFYRKKLKEVWKPAV

SEQ ID NO: 28162 - protein, 980 aa, synthetic construct
  REGION 1..980: note = engineered CasX variant
QEIKGRINKIRRRLVKDSNTKKAGKTGPMKTLLVRVMTPDLRERLENLRKKPENIPQPISNTSRANLNKLLTDYTEMKKAILHVYWEEFQKDPVGLMSRVAQPASKKIDQNKLKPEMDEKGNLTTAGFACSQCGQPLFVYKLEQVSEKGKAYTNYFGRCNVAEHEKLILLAQLKPEKDSDEAVTYSLGKFGQRALDFYSIHVTKESTHPVKPLAQIAGNRYASGPVGKALSDACMGTIASFLSKYQDIIIEHQKVVKGNQKRLESLRELAGKENLEYPSVTLPPQPHTKEGVDAYNEVIARVRMWVNLNLWQKLKLSRDDAKPLLRLKGFPSFPLVERQANEVDWWDMVCNVKKLINEKKEDGKVFWQNLAGYKRQEALRPYLSSEEDRKKGKKFARYQLGDLLLHLEKKHGEDWGKVYDEAWERIDKKVEGLSKHIKLEEERRSEDAQSKAALTDWLRAKASFVIEGLKEADKDEFCRCELKLQKWYGDLRGKPFAIEAENSILDISGFSKQYNCAFIWQKDGVKKLNLYLIINYFKGGKLRFKKIKPEAFEANRFYTVINKKSGEIVPMEVNFNFDDPNLIILPLAFGKRQGREFIWNDLLSLETGSLKLANGRVIEKTLYNRRTRQDEPALFVALTFERREVLDSSNIKPMNLIGVDRGENIPAVIALTDPEGCPLSRFKDSLGNPTHILRIGESYKEKQRTIQAKKEVEQRRAGGYSRKYASKAKNLADDMVRNTARDLLYYAVTQDAMLIFENLSRGFGRQGKRTFMAERQYTRMEDWLTAKLAYEGPLPSKTYLSKTLAQYTSKTCSNCGFTITSADYDRVLEKLKKTATGWMTTINGKELKVEGQITYYNRYKRQNVVKDLSVELDRLSEESVNNDISSWTKGRSGEALSLLKKRFSHRPVQEKFVCLNCGFETHADEQAALNIARSWLFLRSQEYKKYQTNKTTGNTDKRAFVETWQSFYRKKLKEVWKPAV

SEQ ID NO: 28163 - protein, 980 aa, synthetic construct
  REGION 1..980: note = engineered CasX variant
QEIKGRINKIRRRLVKDSNTKKAGKTGPMKTLLVRVMTPDLRERLENLRKKPENIPQPISNTSRANLNKLLTDYTEMKKAILHVYWEEFQKDPVGLMSRVAQPASKKIDQNKLKPEMDEKGNLTTAGFACSQCGQPLFVYKLEQVSEKGKAYTNYFGRCNVAEHEKLILLAQLKPEKDSDEAVTYSLGKFGQRALDFYSIHVTKESTHPVKPLAQIAGNRYASGPVGKALSDACMGTIASFLSKYQDIIIEHQKVVKGNQKRLESLRELAGKENLEYPSVTLPPQPHTKEGVDAYNEVIARVRMWVNLNLWQKLKLSRDDAKPLLRLKGFPSFPLVERQANEVDWWDMVCNVKKLINEKKEDGKVFWQNLAGYKRQEALRPYLSSEEDVRKKGKKFARYQLGDLLLHLEKKHGEDWGKVYDEAWERIDKKVEGLSKHIKLEEERRSEDAQSKAALTDWLRAKASFVIEGLKEADKDEFCRCELKLQKWYGDLRGKPFAIEAENSILDISGFSKQYNCAFIWQKDGVKKLNLYLIINYFKGGKLRFKKIKPEAFEANRFYTVINKKSGEIVPMEVNFNFDDPNLIILPLAFGKRQGREFIWNDLLSLETGSLKLANGRVIEKTLYNRRTRQDEPALFVALTFERREVLDSSNIKPMNLIGVDRGENIPAVIALTDPEGCPLSRFKDSLGNPTHILRIGESYKEKQRTIQAKKEVEQRRAGGYSRKYASKAKNLADDMVRNTARDLLYYAVTQDAMLIFENLSRGFGRQGKRTFMAERQYTRMEDWLTAKLAYEGLPSKTYLSKTLAQYTSKTCSNCGFTITSADYDRVLEKLKKTATGWMTTINGKELKVEGQITYYNRYKRQNVVKDLSVELDRLSEESVNNDISSWTKGRSGEALSLLKKRFSHRPVQEKFVCLNCGFETHADEQAALNIARSWLFLRSQEYKKYQTNKTTGNTDKRAFVETWQSFYRKKLKEVWKPAV

SEQ ID NO: 28164 - protein, 979 aa, synthetic construct
  REGION 1..979: note = engineered CasX variant
QEIKGRINKIRRRLVKDSNTKKAGKTGPMKTLLVRVMTPDLRERLENLRKKPENIPQPISNTSRANLNKLLTDYTEMKKAILHVYWEEFQKDPVGLMSRVAQPASKKIDQNKLKPEMDEKGNLTTAGFACSQCGQPLFVYKLEQVSEKGKAYTNYFGRCNVAEHEKLILLAQLKPEKDSDEAVTYSLGKFGQRALDFYSIHVTKESTHPVKPLAQIAGNRYASGPVGKALSDACMGTIASFLSKYQDIIIEHQKVVKGNQKRLESLRELAGKENLEYPSVTLPPQPHTKEGVDAYNEVIARVRMWVNLNLWQKLKLSRDDAKPLLRLKGFPSFPLVERQANEVDWWDMVCNVKKLINEKKEDGKVFWQNLAGYKRQEALRPYLSSEEDRKKGKKFARYQLGDLLLHLEKKHGEDWGKVYDEAWERIDKKVEGLSKHIKLEEERRSEDAQSKAALTDWLRAKASFVIEGLKEADKDEFCRCELKLQKWYGDLRGKPFAIEAENSILDISGFSKQYNCAFIWQKDGVKKLNLYLIINYFKGGKLRFKKIKPEAFEANRFYTVINKKSGEIVPMEVNFNFDDPNLIILPLAFGKRQGREFIWNDLLSLETGSLKLANGRVIEKTLYNRRTRQDEPALFVALTFERREVLDSSNIKPMNLIGVDRGENIPAVIALTDPEGCPLSRFKDSLGNPTHILRIGESYKEKQRTIQAKKEVEQRRAGGYSRKYASKAKNLADDMVRNTARDLLYYAVTQDAMLIFENLSRGFGRQGKRTFMAERQYTRMEDWLTAKLAYEGLPSKTYLSKTLAQYTSKTCSNCGFTITSADYDRMLEKLKKTATGWMTTINGKELKVEGQITYYNRYKRQNVVKDLSVELDRLSEESVNNDISSWTKGRSGEALSLLKKRFSHRPVQEKFVCLNCGFETHADEQAALNIARSWLFLRSQEYKKYQTNKTTGNTDKRAFVETWQSFYRKKLKEVWKPAV

SEQ ID NO: 28165 - protein, 979 aa, synthetic construct
  REGION 1..979: note = engineered CasX variant
QEIKGRINKIRRRLVKDSNTKKAGKTGPMKTLLVRVMTPDLRERLENLRKKPENIPQPISNTSRANLNKLLTDYTEMKKAILHVYWEEFQKDPVGLMSRVAQPASKKIDQNKLKPEMDEKGNLTTAGFACSQCGQPLFVYKLEQVSEKGKAYTNYFGRCNVAEHEKLILLAQLKPEKDSDEAVTYSLGKFGQRALDFYSIHVTKESTHPVKPLAQIAGNRYASGPVGKALSDACMGTIASFLSKYQDIIIEHQKVVKGNQKRLESLRELAGKENLEYPSVTLPPQPHTKEGVDAYNEVIARVRMWVNLNLWQKLKLSRDDAKPLLRLKGFPSFPLVERQANEVDWWDMVCNVKKLINEKKEDGKVFWQNLAGYKRQEALRPYLSSEEDRKKGKKFARYQLGDLLLHLEKKHGEDWGKVYDEAWERIDKKVEGLSKHIKLEEERRSEDAQSKAALTDWLRAKASFVIEGLKEADKDEFCRCELKLQKWYGDLRGKPFAIEAENSILDISGFSKQYNCAFIWQKDGVKKLNLYLIINYFKGGKLRFKKIKPEAFEANRFYTVINKKSGEIVPMEVNFNFDDPNLIILPLAFGKRQGREFIWNDLLSLETGSLKLANGRVIEKTLYNRRTRQDEPALFVALTFERREVLDSSNIKPMNLIGVDRGENIPAVIALTDPEGCPLSRFKDSLGNPTHILRIGESYKEKQRTIQAKKEVEQRRAGGYSRKYASKAKNLADDMVRNTARDLLYYAVTQDAMLIFENLSRGFGRQGKRTFMAERQYTRMEDWLTAKLAYEGLPSKTYLSKTLAQYTSKTCSNCGFTITSADYDRVLEKLKKTATGWMTTINGKELKVEGQITYYNRYKRQNVVKDLSVELDRLSEESVNNDISSWTKGRQGEALSLLKKRFSHRPVQEKFVCLNCGFETHADEQAALNIARSWLFLRSQEYKKYQTNKTTGNTDKRAFVETWQSFYRKKLKEVWKPAV

SEQ ID NO: 28166 - protein, 979 aa, synthetic construct
  REGION 1..979: note = engineered CasX variant
QEIKGRINKIRRRLVKDSNTKKAGKTGPMKTLLVRVMTPDLRERLENLRKKPENIPQPISNTSRANLNKLLTDYTEMKKAILHVYWEEFQKDPVGLMSRVAQPASKKIDQNKLKPEMDEKGNLTTAGFACSQCGQPLFVYKLEQVSEKGKAYTNYFGRCNVAEHEKLILLAQLKPEKDSDEAVTYSLGKFGQRALDFYSIHVTKESTHPVKPLAQIAGNRYASGPVGKALSDACMGTIASFLSKYQDIIIEHQKVVKGNQKRLESLRELAGKENLEYPSVTLPPQPHTKEGVDAYNEVIARVRMWVNLNLWQKLKLSRDDAKPLLRLKGFPSFPLVERQANEVDWWDMVCNVKKLINEKKEDGKVFWQNLAGYKRQEALRPYLSSEEDRKKGKKFARYQLGDLLLHLEKKHGEDWGKVYDEAWERIDKKVEGLSKHIKLEEERRSEDAQSKAALTDWLRAKASFVIEGLKEADKDEFCRCELKLQKWYGDLRGKPFAIEAENSILDISGFSKQYNCAFIWQKDGVKKLNLYLIINYFKGGKLRFKKIKPEAFEANRFYTVINKKSGEIVPMEVNFNFDDPNLIILPLAFGKRQGREFIWNDLLSLETGSLKLANGRVIEKTLYNRRTRQDEPALFVALTFERREVLDSSNIKPMNLIGVDRGENIPAVIALTDPEGCPLSRFKDSLGNPTHILRIGESYKEKQRTIQAKKEVEQRRAGGYSRKYASKAKNLADDMVRNTARDLLYYAVTQDAMLIFENLSRGFGRQGKRTFMAERQYTRMEDWLTAKLAYEGLPSKTYLSKTLAQYTSKTCSNCGFTITSADYDRVLEKLKKTATGWMTTINGKELKVEGQITYYNRYKRQNVVKDLSVELDRLSEESVNNDISSWTKGRSGEALSLLKKRFSHRPVQEKFVCLNCEFETHADEQAALNIARSWLFLRSQEYKKYQTNKTTGNTDKRAFVETWQSFYRKKLKEVWKPAV

SEQ ID NO: 28167 - protein, 980 aa, synthetic construct
  REGION 1..980: note = engineered CasX variant
QEIKGRINKIRRRLVKDSNTKKAGKTGPMKTLLVRVMTPDLRERLENLRKKPENIPQPISNTSRANLNKLLTDYTEMKKAILHVYWEEFQKDPVGLMSRVAQPASKKIDQNKLKPEMDEKGNLTTAGFACSQCGQPLFVYKLEQVSEKGKAYTNYFGRCNVAEHEKLILLAQLKPEKDSDEAVTYSLGKFGQRALDFYSIHVTKESTHPVKPLAQIAGNRYASGPVGKALSDACMGTIASFLSKYQDIIIEHQKVVKGNQKRLESLRELAGKENLEYPSVTLPPQPHTKEGVDAYNEVIARVRMWVNLNLWQKLKLSRDDAKPLLRLKGFPSFPLVERQANEVDWWDMVCNVKKLINEKKEDGKVFWQNLAGYKRQEALRPYLSSEEDRKKGKKFARYQLGDLLLHLEKKHGEDWGKVYDEAWERIDKKVEGLSKHIKLEEERRSEDAQSKAALTDWLRAKASFVIEGLKEADKDEFCRCELKLQKWYGDLRGKPFAIEAENSILDISGFSKQYNCAFIWQKDGVKKLNLYLIINYFKGGKLRFKKIKPEAFEANRFYTVINKKSGEIVPMEVNFNFDDPNLIILPLAFGKRQGREFIWNDLLSLETGSLKLANGRVIEKTLYNRRTRQDEPALFVALTFERREVLDSSNIKPMNLIGVDRGENIPAVIALTDPEGCPLSRFKDSLGNPTHILRIGESYKEKQRTIQAKKEVEQRRAGGYSRKYASKAKNLADDMVRNTARDLLYYAVTQDAMLIFENLSRGFGRQGKRTFMAERQYTRMEDWLTAKLAYEGLPSKTYLSKTLAQYTSKTCSNCGFTITSADYDRVLEKLKKTATGWMTTINGKELKVEGQITYYNRYKRQNVVKDLSVELDRLSEESVNNDISSWTKGRSGEALSLLKKRFSHRPVQEKFVCLNCGFETHADEQAALNIARSWLFLRSQEYKKYQTNKTSTGNTDKRAFVETWQSFYRKKLKEVWKPAV

SEQ ID NO: 28168 - protein, 980 aa, synthetic construct
  REGION 1..980: note = engineered CasX variant
QEIKGRINKIRRRLVKDSNTKKAGKTGPMKTLLVRVMTPDLRERLENLRKKPENIPQPISNTSRANLNKLLTDYTEMKKAILHVYWEEFQKDPVGLMSRVAQPASKKIDQNKLKPEMDEKGNLTTAGFACSQCGQPLFVYKLEQVSEKGKAYTNYFGRCNVAEHEKLILLAQLKPEKDSDEAVTYSLGKFGQRALDFYSIHVTKESTHPVKPLAQIAGNRYASGPVGKALSDACMGTIASFLSKYQDIIIEHQKVVKGNQKRLESLRELAGKENLEYPSVTLPPQPHTKEGVDAYNEVIARVRMWVNLNLWQKLKLSRDDAKPLLRLKGFPSFPLVERQANEVDWWDMVCNVKKLINEKKEDGKVFWQNLAGYKRQEALRPYLSSEEDRKKGKKFARYQLGDLLLHLEKKHGEDWGKVYDEAWERIDKKVEGLSKHIKLEEERRSEDAQSKAALTDWLRAKASFVIEGLKEADKDEFCRCELKLQKWYGDLRGKPFAIEAENSILDISGFSKQYNCAFIWQKDGVKKLNLYLIINYFKGGKLRFKKIKPEAFEANRFYTVINKKSGEIVPMEVNFNFDDPNLIILPLAFGKRQGREFIWNDLLSLETGSLKLANGRVIEKTLYNRRTRQDEPALFVALTFERREVLDSSNIKPMNLIGVDRGENIPAVIALTDPEGCPLSRFKDSLGNPTHILRIGESYKEKQRTIQAKKEVEQRRAGGYSRKYASKAKNLADDMVRNTARDLLYYAVTQDAMLIFENLSRGFGRQGKRTFMAERQYTRMEDWLTAKLAYEGLPSKTYLSKTLAQYTSKTCSNCGFTITSADYDRVLEKLKKTATGWMTTINGKELKVEGQITYYNRYKRQNVVKDLSVELDRLSEESVNNDISSWTKGRSGEALSLLKKRFSHRPVQEKFVCLNCGFETHADEQAALNIARSWLFLRSQEYKKYQTNKTTGKNTDKRAFVETWQSFYRKKLKEVWKPAV

SEQ ID NO: 28169 - protein, 979 aa, synthetic construct
  REGION 1..979: note = engineered CasX variant
QEIKGRINKIRRRLVKDSNTKKAGKTGPMKTLLVRVMTPDLRERLENLRKKPENIPQPISNTSRANLNKLLTDYTEMKKAILHVYWEEFQKDPVGLMSRVAQPASKKIDQNKLKPEMDEKGNLTTAGFACSQCGQPLFVYKLEQVSEKGKAYTNYFGRCNVAEHEKLILLAQLKPEKDSDEAVTYSLGKFGQRALDFYSIHVTKESTHPVKPLAQIAGNRYASGPVGKALSDACMGTIASFLSKYQDIIIEHQKVVKGNQKRLESLRELAGKENLEYPSVTLPPQPHTKEGVDAYNEVIARVRMWVNLNLWQKLKLSRDDAKPLLRLKKFPSFPLVERQANEVDWWDMVCNVKKLINEKKEDGKVFWQNLAGYKRQEALRPYLSSEEDRKKGKKFARYQLGDLLLHLEKKHGEDWGKVYDEAWERIDKKVEGLSKHIKLEEERRSEDAQSKAALTDWLRAKASFVIEGLKEADKDEFCRCELKLQKWYGDLRGKPFAIEAENSILDISGFSKQYNCAFIWQKDGVKKLNLYLIINYFKGGKLRFKKIKPEAFEANRFYTVINKKSGEIVPMEVNFNFDDPNLIILPLAFGKRQGREFIWNDLLSLETGSLKLANGRVIEKTLYNRRTRQDEPALFVALTFERREVLDSSNIKPMNLIGVDRGENIPAVIALTDPEGCPLSRFKDSLGNPTHILRIGESYKEKQRTIQAKKEVEQRRAGGYSRKYASKAKNLADDMVRNTARDLLYYAVTQDAMLIFENLSRGFGRQGKRTFMAERQYTRMEDWLTAKLAYEGLPSKTYLSKTLAQYTSKTCSNCGFTITSADYDRVLEKLKKTATGWMTTINGKELKVEGQITYYNRYKRQNVVKDLSVELDRLSEESVNNDISSWTKGRSGEALSLLKKRFSHRPVQEKFVCLNCGFETHADEQAALNIARSWLFLRSQEYKKYQTNKTTGNTDKRAFVETWQSFYRKKLKEVWKPAV

SEQ ID NO: 28170 - protein, 979 aa, synthetic construct
  REGION 1..979: note = engineered CasX variant
QEIKGRINKIRRRLVKDSNTKKAGKTGPMKTLLVRVMTPDLRERLENLRKKPENIPQPISNTSRANLNKLLTDYTEMKKAILHVYWEEFQKDPVGLMSRVAQPASKKIDQNKLKPEMDEKGNLTTAGFACSQCGQPLFVYKLEQVSEKGKAYTNYFGRCNVAEHEKLILLAQLKPEKDSDEAVTYSLGKFGQRALDFYSIHVTKESTHPVKPLAQIAGNRYASGPVGKALSDACMGTIASFLSKYQDIIIEHQKVVKGNQKRLESLRELAGKENLEYPSVTLPPQPHTKEGVDAYNEVIARVRMWVNLNLWQKLKLSRDDAKPLLRLKGFPSFPLVERQANEVDWWDMVCNVKKLINEKKEDGKVFWQNLAGYKRQEALRPYLSSEEDRKKGKKFARYQLGDLLLHLEKKHGEDWGKVYDEAWERIDKKVEGLSKHIKLEEERRSEDAQSKAALTDWLRAKASFVIEGLKEADKDEFCRCELKLQKWYGDLRGKPFAIEAENSILDISGFSKQYNCAFIWQKDGVKKLNLYLIINYFKGGKLRFKKIKPEAFEANRFYTVINKKSGEIVPMEVNFNFDDPNLIILPLAFGKRQGREFIWNDLLSLETGSLKLANGRVIEKTLYNRRTRQDEPALFVALTFERREVLDSSNIKPMNLIGVDRGENIPAVIALTDPEGCPLSRFKDSLGNPTHILRIGERYKEKQRTIQAKKEVEQRRAGGYSRKYASKAKNLADDMVRNTARDLLYYAVTQDAMLIFENLSRGFGRQGKRTFMAERQYTRMEDWLTAKLAYEGLPSKTYLSKTLAQYTSKTCSNCGFTITSADYDRVLEKLKKTATGWMTTINGKELKVEGQITYYNRYKRQNVVKDLSVELDRLSEESVNNDISSWTKGRSGEALSLLKKRFSHRPVQEKFVCLNCGFETHADEQAALNIARSWLFLRSQEYKKYQTNKTTGNTDKRAFVETWQSFYRKKLKEVWKPAV

SEQ ID NO: 28171 - protein, 979 aa, synthetic construct
  REGION 1..979: note = engineered CasX variant
QEIKGRINKIRRRLVKDSNTKKAGKTGPMKTLLVRVMTPDLRERLENLRKKPENIPQPISNTSRANLNKLLTDYTEMKKAILHVYWEEFQKDPVGLMSRVAQPASKKIDQNKLKPEMDEKGNLTTAGFACSQCGQPLFVYKLEQVSEKGKAYTNYFGRCNVAEHEKLILLAQLKPEKDSDEAVTYSLGKFGQRALDFYSIHVTKESTHPVKPLAQIAGNRYASGPVGKALSDACMGTIASFLSKYQDIIIEHQKVVKGNQKRLESLRELAGKENLEYPSVTLPPQPHTKEGVDAYNEVIARVRMWVNLNLWQKLKLSRDDAKPLLRLKGFPSFPLVERQANEVDWWDMVCNVKKLINEKKEDGKVFWQNLAGYKRQEALRPYLSSEEDRKKGKKFARYQLGDLLLHLEKKHGEDWGKVYDEAWERIDKKVEGLSKHIKLEEERRSEDAQSKAALTDWLRAKASFVIEGLKEADKDEFCRCELKLQKWYGDLRGKPFAIEAENSILDISGFSKQYNCAFIWQKDGVKKLNLYLIINYFKGGKLRFKKIKPEAFEANRFYTVINKKSGEIVPMEVNFNFDDPNLIILPLAFGKRQGREFIWNDLLSLETGSLQLANGRVIEKTLYNRRTRQDEPALFVALTFERREVLDSSNIKPMNLIGVDRGENIPAVIALTDPEGCPLSRFKDSLGNPTHILRIGESYKEKQRTIQAKKEVEQRRAGGYSRKYASKAKNLADDMVRNTARDLLYYAVTQDAMLIFENLSRGFGRQGKRTFMAERQYTRMEDWLTAKLAYEGLPSKTYLSKTLAQYTSKTCSNCGFTITSADYDRVLEKLKKTATGWMTTINGKELKVEGQITYYNRYKRQNVVKDLSVELDRLSEESVNNDISSWTKGRSGEALSLLKKRFSHRPVQEKFVCLNCGFETHADEQAALNIARSWLFLRSQEYKKYQTNKTTGNTDKRAFVETWQSFYRKKLKEVWKPAV

SEQ ID NO: 28172 - protein, 978 aa, synthetic construct
  REGION 1..978: note = engineered CasX variant
QEIKRASKIRRRLVKDSNTKKAGKTGPMKTLLVRVMTPDLRERLENLRKKPENIPQPISNTSRANLNKLLTDYTEMKKAILHVYWEEFQKDPVGLMSRVAQPASKKIDQNKLKPEMDEKGNLTTAGFACSQCGQPLFVYKLEQVSEKGKAYTNYFGRCNVAEHEKLILLAQLKPEKDSDEAVTYSLGKFGQRALDFYSIHVTKESTHPVKPLAQIAGNRYASGPVGKALSDACMGTIASFLSKYQDIIIEHQKVVKGNQKRLESLRELAGKENLEYPSVTLPPQPHTKEGVDAYNEVIARVRMWVNLNLWQKLKLSRDDAKPLLRLKGFPSFPLVERQANEVDWWDMVCNVKKLINEKKEDGKVFWQNLAGYKRQEALRPYLSSEEDRKKGKKFARYQLGDLLLHLEKKHGEDWGKVYDEAWERIDKKVEGLSKHIKLEEERRSEDAQSKAALTDWLRAKASFVIEGLKEADKDEFCRCELKLQKWYGDLRGKPFAIEAENSILDISGFSKQYNCAFIWQKDGVKKLNLYLIINYFKGGKLRFKKIKPEAFEANRFYTVINKKSGEIVPMEVNFNFDDPNLIILPLAFGKRQGREFIWNDLLSLETGSLKLANGRVIEKTLYNRRTRQDEPALFVALTFERREVLDSSNIKPMNLIGVDRGENIPAVIALTDPEGCPLSRFKDSLGNPTHILRIGESYKEKQRTIQAKKEVEQRRAGGYSRKYASKAKNLADDMVRNTARDLLYYAVTQDAMLIFENLSRGFGRQGKRTFMAERQYTRMEDWLTAKLAYEGLPSKTYLSKTLAQYTSKTCSNCGFTITSADYDRVLEKLKKTATGWMTTINGKELKVEGQITYYNRYKRQNVVKDLSVELDRLSEESVNNDISSWTKGRSGEALSLLKKRFSHRPVQEKFVCLNCGFETHADEQAALNIARSWLFLRSQEYKKYQTNKTTGNTDKRAFVETWQSFYRKKLKEVWKPAV

SEQ ID NO: 28173 - protein, 978 aa, synthetic construct
  REGION 1..978: note = engineered CasX variant
QEIKRANGIRRRLVKDSNTKKAGKTGPMKTLLVRVMTPDLRERLENLRKKPENIPQPISNTSRANLNKLLTDYTEMKKAILHVYWEEFQKDPVGLMSRVAQPASKKIDQNKLKPEMDEKGNLTTAGFACSQCGQPLFVYKLEQVSEKGKAYTNYFGRCNVAEHEKLILLAQLKPEKDSDEAVTYSLGKFGQRALDFYSIHVTKESTHPVKPLAQIAGNRYASGPVGKALSDACMGTIASFLSKYQDIIIEHQKVVKGNQKRLESLRELAGKENLEYPSVTLPPQPHTKEGVDAYNEVIARVRMWVNLNLWQKLKLSRDDAKPLLRLKGFPSFPLVERQANEVDWWDMVCNVKKLINEKKEDGKVFWQNLAGYKRQEALRPYLSSEEDRKKGKKFARYQLGDLLLHLEKKHGEDWGKVYDEAWERIDKKVEGLSKHIKLEEERRSEDAQSKAALTDWLRAKASFVIEGLKEADKDEFCRCELKLQKWYGDLRGKPFAIEAENSILDISGFSKQYNCAFIWQKDGVKKLNLYLIINYFKGGKLRFKKIKPEAFEANRFYTVINKKSGEIVPMEVNFNFDDPNLIILPLAFGKRQGREFIWNDLLSLETGSLKLANGRVIEKTLYNRRTRQDEPALFVALTFERREVLDSSNIKPMNLIGVDRGENIPAVIALTDPEGCPLSRFKDSLGNPTHILRIGESYKEKQRTIQAKKEVEQRRAGGYSRKYASKAKNLADDMVRNTARDLLYYAVTQDAMLIFENLSRGFGRQGKRTFMAERQYTRMEDWLTAKLAYEGLPSKTYLSKTLAQYTSKTCSNCGFTITSADYDRVLEKLKKTATGWMTTINGKELKVEGQITYYNRYKRQNVVKDLSVELDRLSEESVNNDISSWTKGRSGEALSLLKKRFSHRPVQEKFVCLNCGFETHADEQAALNIARSWLFLRSQEYKKYQTNKTTGNTDKRAFVETWQSFYRKKLKEVWKPAV

SEQ ID NO: 28174 - protein, 978 aa, synthetic construct
  REGION 1..978: note = engineered CasX variant
QEIKRANKIRRRLVKDSNTKKAGKTGPMKTLLVPVMTPDLRERLENLRKKPENIPQPISNTSRANLNKLLTDYTEMKKAILHVYWEEFQKDPVGLMSRVAQPASKKIDQNKLKPEMDEKGNLTTAGFACSQCGQPLFVYKLEQVSEKGKAYTNYFGRCNVAEHEKLILLAQLKPEKDSDEAVTYSLGKFGQRALDFYSIHVTKESTHPVKPLAQIAGNRYASGPVGKALSDACMGTIASFLSKYQDIIIEHQKVVKGNQKRLESLRELAGKENLEYPSVTLPPQPHTKEGVDAYNEVIARVRMWVNLNLWQKLKLSRDDAKPLLRLKGFPSFPLVERQANEVDWWDMVCNVKKLINEKKEDGKVFWQNLAGYKRQEALRPYLSSEEDRKKGKKFARYQLGDLLLHLEKKHGEDWGKVYDEAWERIDKKVEGLSKHIKLEEERRSEDAQSKAALTDWLRAKASFVIEGLKEADKDEFCRCELKLQKWYGDLRGKPFAIEAENSILDISGFSKQYNCAFIWQKDGVKKLNLYLIINYFKGGKLRFKKIKPEAFEANRFYTVINKKSGEIVPMEVNFNFDDPNLIILPLAFGKRQGREFIWNDLLSLETGSLKLANGRVIEKTLYNRRTRQDEPALFVALTFERREVLDSSNIKPMNLIGVDRGENIPAVIALTDPEGCPLSRFKDSLGNPTHILRIGESYKEKQRTIQAKKEVEQRRAGGYSRKYASKAKNLADDMVRNTARDLLYYAVTQDAMLIFENLSRGFGRQGKRTFMAERQYTRMEDWLTAKLAYEGLPSKTYLSKTLAQYTSKTCSNCGFTITSADYDRVLEKLKKTATGWMTTINGKELKVEGQITYYNRYKRQNVVKDLSVELDRLSEESVNNDISSWTKGRSGEALSLLKKRFSHRPVQEKFVCLNCGFETHADEQAALNIARSWLFLRSQEYKKYQTNKTTGNTDKRAFVETWQSFYRKKLKEVWKPAV

SEQ ID NO: 28175 - protein, 978 aa, synthetic construct
  REGION 1..978: note = engineered CasX variant
QEIKRANKIRRRLVKDSNTKKAGKTGPMKTLLVRVMTPDLRERLENLRKKPPNIPQPISNTSRANLNKLLTDYTEMKKAILHVYWEEFQKDPVGLMSRVAQPASKKIDQNKLKPEMDEKGNLTTAGFACSQCGQPLFVYKLEQVSEKGKAYTNYFGRCNVAEHEKLILLAQLKPEKDSDEAVTYSLGKFGQRALDFYSIHVTKESTHPVKPLAQIAGNRYASGPVGKALSDACMGTIASFLSKYQDIIIEHQKVVKGNQKRLESLRELAGKENLEYPSVTLPPQPHTKEGVDAYNEVIARVRMWVNLNLWQKLKLSRDDAKPLLRLKGFPSFPLVERQANEVDWWDMVCNVKKLINEKKEDGKVFWQNLAGYKRQEALRPYLSSEEDRKKGKKFARYQLGDLLLHLEKKHGEDWGKVYDEAWERIDKKVEGLSKHIKLEEERRSEDAQSKAALTDWLRAKASFVIEGLKEADKDEFCRCELKLQKWYGDLRGKPFAIEAENSILDISGFSKQYNCAFIWQKDGVKKLNLYLIINYFKGGKLRFKKIKPEAFEANRFYTVINKKSGEIVPMEVNFNFDDPNLIILPLAFGKRQGREFIWNDLLSLETGSLKLANGRVIEKTLYNRRTRQDEPALFVALTFERREVLDSSNIKPMNLIGVDRGENIPAVIALTDPEGCPLSRFKDSLGNPTHILRIGESYKEKQRTIQAKKEVEQRRAGGYSRKYASKAKNLADDMVRNTARDLLYYAVTQDAMLIFENLSRGFGRQGKRTFMAERQYTRMEDWLTAKLAYEGLPSKTYLSKTLAQYTSKTCSNCGFTITSADYDRVLEKLKKTATGWMTTINGKELKVEGQITYYNRYKRQNVVKDLSVELDRLSEESVNNDISSWTKGRSGEALSLLKKRFSHRPVQEKFVCLNCGFETHADEQAALNIARSWLFLRSQEYKKYQTNKTTGNTDKRAFVETWQSFYRKKLKEVWKPAV

SEQ ID NO: 28176 - protein, 978 aa, synthetic construct
  REGION 1..978: note = engineered CasX variant
QEIKRANKIRRRLVKDSNTKKAGKTGPMKTLLVRVMTPDLRERLENLRKKPENIPQPISNTSQANLNKLLTDYTEMKKAILHVYWEEFQKDPVGLMSRVAQPASKKIDQNKLKPEMDEKGNLTTAGFACSQCGQPLFVYKLEQVSEKGKAYTNYFGRCNVAEHEKLILLAQLKPEKDSDEAVTYSLGKFGQRALDFYSIHVTKESTHPVKPLAQIAGNRYASGPVGKALSDACMGTIASFLSKYQDIIIEHQKVVKGNQKRLESLRELAGKENLEYPSVTLPPQPHTKEGVDAYNEVIARVRMWVNLNLWQKLKLSRDDAKPLLRLKGFPSFPLVERQANEVDWWDMVCNVKKLINEKKEDGKVFWQNLAGYKRQEALRPYLSSEEDRKKGKKFARYQLGDLLLHLEKKHGEDWGKVYDEAWERIDKKVEGLSKHIKLEEERRSEDAQSKAALTDWLRAKASFVIEGLKEADKDEFCRCELKLQKWYGDLRGKPFAIEAENSILDISGFSKQYNCAFIWQKDGVKKLNLYLIINYFKGGKLRFKKIKPEAFEANRFYTVINKKSGEIVPMEVNFNFDDPNLIILPLAFGKRQGREFIWNDLLSLETGSLKLANGRVIEKTLYNRRTRQDEPALFVALTFERREVLDSSNIKPMNLIGVDRGENIPAVIALTDPEGCPLSRFKDSLGNPTHILRIGESYKEKQRTIQAKKEVEQRRAGGYSRKYASKAKNLADDMVRNTARDLLYYAVTQDAMLIFENLSRGFGRQGKRTFMAERQYTRMEDWLTAKLAYEGLPSKTYLSKTLAQYTSKTCSNCGFTITSADYDRVLEKLKKTATGWMTTINGKELKVEGQITYYNRYKRQNVVKDLSVELDRLSEESVNNDISSWTKGRSGEALSLLKKRFSHRPVQEKFVCLNCGFETHADEQAALNIARSWLFLRSQEYKKYQTNKTTGNTDKRAFVETWQSFYRKKLKEVWKPAV

SEQ ID NO: 28177 - protein, 978 aa, synthetic construct
  REGION 1..978: note = engineered CasX variant
QEIKRANKIRRRLVKDSNTKKAGKTGPMKTLLVRVMTPDLRERLENLRKKPENIPQPISNTSRANLNKLLTDYTEMKKAILHVYDEEFQKDPVGLMSRVAQPASKKIDQNKLKPEMDEKGNLTTAGFACSQCGQPLFVYKLEQVSEKGKAYTNYFGRCNVAEHEKLILLAQLKPEKDSDEAVTYSLGKFGQRALDFYSIHVTKESTHPVKPLAQIAGNRYASGPVGKALSDACMGTIASFLSKYQDIIIEHQKVVKGNQKRLESLRELAGKENLEYPSVTLPPQPHTKEGVDAYNEVIARVRMWVNLNLWQKLKLSRDDAKPLLRLKGFPSFPLVERQANEVDWWDMVCNVKKLINEKKEDGKVFWQNLAGYKRQEALRPYLSSEEDRKKGKKFARYQLGDLLLHLEKKHGEDWGKVYDEAWERIDKKVEGLSKHIKLEEERRSEDAQSKAALTDWLRAKASFVIEGLKEADKDEFCRCELKLQKWYGDLRGKPFAIEAENSILDISGFSKQYNCAFIWQKDGVKKLNLYLIINYFKGGKLRFKKIKPEAFEANRFYTVINKKSGEIVPMEVNFNFDDPNLIILPLAFGKRQGREFIWNDLLSLETGSLKLANGRVIEKTLYNRRTRQDEPALFVALTFERREVLDSSNIKPMNLIGVDRGENIPAVIALTDPEGCPLSRFKDSLGNPTHILRIGESYKEKQRTIQAKKEVEQRRAGGYSRKYASKAKNLADDMVRNTARDLLYYAVTQDAMLIFENLSRGFGRQGKRTFMAERQYTRMEDWLTAKLAYEGLPSKTYLSKTLAQYTSKTCSNCGFTITSADYDRVLEKLKKTATGWMTTINGKELKVEGQITYYNRYKRQNVVKDLSVELDRLSEESVNNDISSWTKGRSGEALSLLKKRFSHRPVQEKFVCLNCGFETHADEQAALNIARSWLFLRSQEYKKYQTNKTTGNTDKRAFVETWQSFYRKKLKEVWKPAV

SEQ ID NO: 28178 - protein, 978 aa, synthetic construct
  REGION 1..978: note = engineered CasX variant
QEIKRANKIRRRLVKDSNTKKAGKTGPMKTLLVRVMTPDLRERLENLRKKPENIPQPISNTSRANLNKLLTDYTEMKKAILHVYWEEFQKDPVGLMSRVAQPASKKIDQNKLKPEMDEKGNLTTAGFACSQCGQPLFVYKLEQVSEKGKAYTNYFGRCNVAEHEKLIKLAQLKPEKDSDEAVTYSLGKFGQRALDFYSIHVTKESTHPVKPLAQIAGNRYASGPVGKALSDACMGTIASFLSKYQDIIIEHQKVVKGNQKRLESLRELAGKENLEYPSVTLPPQPHTKEGVDAYNEVIARVRMWVNLNLWQKLKLSRDDAKPLLRLKGFPSFPLVERQANEVDWWDMVCNVKKLINEKKEDGKVFWQNLAGYKRQEALRPYLSSEEDRKKGKKFARYQLGDLLLHLEKKHGEDWGKVYDEAWERIDKKVEGLSKHIKLEEERRSEDAQSKAALTDWLRAKASFVIEGLKEADKDEFCRCELKLQKWYGDLRGKPFAIEAENSILDISGFSKQYNCAFIWQKDGVKKLNLYLIINYFKGGKLRFKKIKPEAFEANRFYTVINKKSGEIVPMEVNFNFDDPNLIILPLAFGKRQGREFIWNDLLSLETGSLKLANGRVIEKTLYNRRTRQDEPALFVALTFERREVLDSSNIKPMNLIGVDRGENIPAVIALTDPEGCPLSRFKDSLGNPTHILRIGESYKEKQRTIQAKKEVEQRRAGGYSRKYASKAKNLADDMVRNTARDLLYYAVTQDAMLIFENLSRGFGRQGKRTFMAERQYTRMEDWLTAKLAYEGLPSKTYLSKTLAQYTSKTCSNCGFTITSADYDRVLEKLKKTATGWMTTINGKELKVEGQITYYNRYKRQNVVKDLSVELDRLSEESVNNDISSWTKGRSGEALSLLKKRFSHRPVQEKFVCLNCGFETHADEQAALNIARSWLFLRSQEYKKYQTNKTTGNTDKRAFVETWQSFYRKKLKEVWKPAV

SEQ ID NO: 28179 - protein, 978 aa, synthetic construct
  REGION 1..978: note = engineered CasX variant
QEIKRANKIRRRLVKDSNTKKAGKTGPMKTLLVRVMTPDLRERLENLRKKPENIPQPISNTSRANLNKLLTDYTEMKKAILHVYWEEFQKDPVGLMSRVAQPASKKIDQNKLKPEMDEKGNLTTAGFACSQCGQPLFVYKLEQVSEKGKAYTNYFGRCNVAEHEKLILLYQLKPEKDSDEAVTYSLGKFGQRALDFYSIHVTKESTHPVKPLAQIAGNRYASGPVGKALSDACMGTIASFLSKYQDIIIEHQKVVKGNQKRLESLRELAGKENLEYPSVTLPPQPHTKEGVDAYNEVIARVRMWVNLNLWQKLKLSRDDAKPLLRLKGFPSFPLVERQANEVDWWDMVCNVKKLINEKKEDGKVFWQNLAGYKRQEALRPYLSSEEDRKKGKKFARYQLGDLLLHLEKKHGEDWGKVYDEAWERIDKKVEGLSKHIKLEEERRSEDAQSKAALTDWLRAKASFVIEGLKEADKDEFCRCELKLQKWYGDLRGKPFAIEAENSILDISGFSKQYNCAFIWQKDGVKKLNLYLIINYFKGGKLRFKKIKPEAFEANRFYTVINKKSGEIVPMEVNFNFDDPNLIILPLAFGKRQGREFIWNDLLSLETGSLKLANGRVIEKTLYNRRTRQDEPALFVALTFERREVLDSSNIKPMNLIGVDRGENIPAVIALTDPEGCPLSRFKDSLGNPTHILRIGESYKEKQRTIQAKKEVEQRRAGGYSRKYASKAKNLADDMVRNTARDLLYYAVTQDAMLIFENLSRGFGRQGKRTFMAERQYTRMEDWLTAKLAYEGLPSKTYLSKTLAQYTSKTCSNCGFTITSADYDRVLEKLKKTATGWMTTINGKELKVEGQITYYNRYKRQNVVKDLSVELDRLSEESVNNDISSWTKGRSGEALSLLKKRFSHRPVQEKFVCLNCGFETHADEQAALNIARSWLFLRSQEYKKYQTNKTTGNTDKRAFVETWQSFYRKKLKEVWKPAV

SEQ ID NO: 28180 - protein, 978 aa, synthetic construct
  REGION 1..978: note = engineered CasX variant
QEIKRANKIRRRLVKDSNTKKAGKTGPMKTLLVRVMTPDLRERLENLRKKPENIPQPISNTSRANLNKLLTDYTEMKKAILHVYWEEFQKDPVGLMSRVAQPASKKIDQNKLKPEMDEKGNLTTAGFACSQCGQPLFVYKLEQVSEKGKAYTNYFGRCNVAEHEKLILLSQLKPEKDSDEAVTYSLGKFGQRALDFYSIHVTKESTHPVKPLAQIAGNRYASGPVGKALSDACMGTIASFLSKYQDIIIEHQKVVKGNQKRLESLRELAGKENLEYPSVTLPPQPHTKEGVDAYNEVIARVRMWVNLNLWQKLKLSRDDAKPLLRLKGFPSFPLVERQANEVDWWDMVCNVKKLINEKKEDGKVFWQNLAGYKRQEALRPYLSSEEDRKKGKKFARYQLGDLLLHLEKKHGEDWGKVYDEAWERIDKKVEGLSKHIKLEEERRSEDAQSKAALTDWLRAKASFVIEGLKEADKDEFCRCELKLQKWYGDLRGKPFAIEAENSILDISGFSKQYNCAFIWQKDGVKKLNLYLIINYFKGGKLRFKKIKPEAFEANRFYTVINKKSGEIVPMEVNFNFDDPNLIILPLAFGKRQGREFIWNDLLSLETGSLKLANGRVIEKTLYNRRTRQDEPALFVALTFERREVLDSSNIKPMNLIGVDRGENIPAVIALTDPEGCPLSRFKDSLGNPTHILRIGESYKEKQRTIQAKKEVEQRRAGGYSRKYASKAKNLADDMVRNTARDLLYYAVTQDAMLIFENLSRGFGRQGKRTFMAERQYTRMEDWLTAKLAYEGLPSKTYLSKTLAQYTSKTCSNCGFTITSADYDRVLEKLKKTATGWMTTINGKELKVEGQITYYNRYKRQNVVKDLSVELDRLSEESVNNDISSWTKGRSGEALSLLKKRFSHRPVQEKFVCLNCGFETHADEQAALNIARSWLFLRSQEYKKYQTNKTTGNTDKRAFVETWQSFYRKKLKEVWKPAV

SEQ ID NO: 28181 - protein, 977 aa, synthetic construct
  REGION 1..977: note = engineered CasX variant
QEIKRANKIRRRLVKDSNTKKAGKTGPMKTLLVRVMTPDLRERLENLRKKPENIPQPISNTSRANLNKLLTDYTEMKKAILHVYWEEFQKDPVGLMSRVAQPASKKIDQNKLKPEMDEKGNLTTAGFACSQCGQPLFVYKLEQVSEKGKAYTNYFGRCNVAEHEKLILLAQLKPEKDSDEAVTYSLGKFGQRALDFYSIHVTKESTHPVKPLAQIAGNRYASPVGKALSDACMGTIASFLSKYQDIIIEHQKVVKGNQKRLESLRELAGKENLEYPSVTLPPQPHTKEGVDAYNEVIARVRMWVNLNLWQKLKLSRDDAKPLLRLKGFPSFPLVERQANEVDWWDMVCNVKKLINEKKEDGKVFWQNLAGYKRQEALRPYLSSEEDRKKGKKFARYQLGDLLLHLEKKHGEDWGKVYDEAWERIDKKVEGLSKHIKLEEERRSEDAQSKAALTDWLRAKASFVIEGLKEADKDEFCRCELKLQKWYGDLRGKPFAIEAENSILDISGFSKQYNCAFIWQKDGVKKLNLYLIINYFKGGKLRFKKIKPEAFEANRFYTVINKKSGEIVPMEVNFNFDDPNLIILPLAFGKRQGREFIWNDLLSLETGSLKLANGRVIEKTLYNRRTRQDEPALFVALTFERREVLDSSNIKPMNLIGVDRGENIPAVIALTDPEGCPLSRFKDSLGNPTHILRIGESYKEKQRTIQAKKEVEQRRAGGYSRKYASKAKNLADDMVRNTARDLLYYAVTQDAMLIFENLSRGFGRQGKRTFMAERQYTRMEDWLTAKLAYEGLPSKTYLSKTLAQYTSKTCSNCGFTITSADYDRVLEKLKKTATGWMTTINGKELKVEGQITYYNRYKRQNVVKDLSVELDRLSEESVNNDISSWTKGRSGEALSLLKKRFSHRPVQEKFVCLNCGFETHADEQAALNIARSWLFLRSQEYKKYQTNKTTGNTDKRAFVETWQSFYRKKLKEVWKPAV

SEQ ID NO: 28182 - protein, 978 aa, synthetic construct
  REGION 1..978: note = engineered CasX variant
QEIKRANKIRRRLVKDSNTKKAGKTGPMKTLLVRVMTPDLRERLENLRKKPENIPQPISNTSRANLNKLLTDYTEMKKAILHVYWEEFQKDPVGLMSRVAQPASKKIDQNKLKPEMDEKGNLTTAGFACSQCGQPLFVYKLEQVSEKGKAYTNYFGRCNVAEHEKLILLAQLKPEKDSDEAVTYSLGKFGQRALDFYSIHVTKESTHPVKPLAQIAGNRYASGPVGKALSDACMGTIASFLSKYQDIIIEHQKVVKGNQKRLESLRELAGKENLEYPSVTLPPQPHTSEGVDAYNEVIARVRMWVNLNLWQKLKLSRDDAKPLLRLKGFPSFPLVERQANEVDWWDMVCNVKKLINEKKEDGKVFWQNLAGYKRQEALRPYLSSEEDRKKGKKFARYQLGDLLLHLEKKHGEDWGKVYDEAWERIDKKVEGLSKHIKLEEERRSEDAQSKAALTDWLRAKASFVIEGLKEADKDEFCRCELKLQKWYGDLRGKPFAIEAENSILDISGFSKQYNCAFIWQKDGVKKLNLYLIINYFKGGKLRFKKIKPEAFEANRFYTVINKKSGEIVPMEVNFNFDDPNLIILPLAFGKRQGREFIWNDLLSLETGSLKLANGRVIEKTLYNRRTRQDEPALFVALTFERREVLDSSNIKPMNLIGVDRGENIPAVIALTDPEGCPLSRFKDSLGNPTHILRIGESYKEKQRTIQAKKEVEQRRAGGYSRKYASKAKNLADDMVRNTARDLLYYAVTQDAMLIFENLSRGFGRQGKRTFMAERQYTRMEDWLTAKLAYEGLPSKTYLSKTLAQYTSKTCSNCGFTITSADYDRVLEKLKKTATGWMTTINGKELKVEGQITYYNRYKRQNVVKDLSVELDRLSEESVNNDISSWTKGRSGEALSLLKKRFSHRPVQEKFVCLNCGFETHADEQAALNIARSWLFLRSQEYKKYQTNKTTGNTDKRAFVETWQSFYRKKLKEVWKPAV

SEQ ID NO: 28183 - protein, 978 aa, synthetic construct
  REGION 1..978: note = engineered CasX variant
QEIKRANKIRRRLVKDSNTKKAGKTGPMKTLLVRVMTPDLRERLENLRKKPENIPQPISNTSRANLNKLLTDYTEMKKAILHVYWEEFQKDPVGLMSRVAQPASKKIDQNKLKPEMDEKGNLTTAGFACSQCGQPLFVYKLEQVSEKGKAYTNYFGRCNVAEHEKLILLAQLKPEKDSDEAVTYSLGKFGQRALDFYSIHVTKESTHPVKPLAQIAGNRYASGPVGKALSDACMGTIASFLSKYQDIIIEHQKVVKGNQKRLESLRELAGKENLEYPSVTLPPQPHTKEGLDAYNEVIARVRMWVNLNLWQKLKLSRDDAKPLLRLKGFPSFPLVERQANEVDWWDMVCNVKKLINEKKEDGKVFWQNLAGYKRQEALRPYLSSEEDRKKGKKFARYQLGDLLLHLEKKHGEDWGKVYDEAWERIDKKVEGLSKHIKLEEERRSEDAQSKAALTDWLRAKASFVIEGLKEADKDEFCRCELKLQKWYGDLRGKPFAIEAENSILDISGFSKQYNCAFIWQKDGVKKLNLYLIINYFKGGKLRFKKIKPEAFEANRFYTVINKKSGEIVPMEVNFNFDDPNLIILPLAFGKRQGREFIWNDLLSLETGSLKLANGRVIEKTLYNRRTRQDEPALFVALTFERREVLDSSNIKPMNLIGVDRGENIPAVIALTDPEGCPLSRFKDSLGNPTHILRIGESYKEKQRTIQAKKEVEQRRAGGYSRKYASKAKNLADDMVRNTARDLLYYAVTQDAMLIFENLSRGFGRQGKRTFMAERQYTRMEDWLTAKLAYEGLPSKTYLSKTLAQYTSKTCSNCGFTITSADYDRVLEKLKKTATGWMTTINGKELKVEGQITYYNRYKRQNVVKDLSVELDRLSEESVNNDISSWTKGRSGEALSLLKKRFSHRPVQEKFVCLNCGFETHADEQAALNIARSWLFLRSQEYKKYQTNKTTGNTDKRAFVETWQSFYRKKLKEVWKPAV

SEQ ID NO: 28184 - protein, 978 aa, synthetic construct
  REGION 1..978: note = engineered CasX variant
QEIKRANKIRRRLVKDSNTKKAGKTGPMKTLLVRVMTPDLRERLENLRKKPENIPQPISNTSRANLNKLLTDYTEMKKAILHVYWEEFQKDPVGLMSRVAQPASKKIDQNKLKPEMDEKGNLTTAGFACSQCGQPLFVYKLEQVSEKGKAYTNYFGRCNVAEHEKLILLAQLKPEKDSDEAVTYSLGKFGQRALDFYSIHVTKESTHPVKPLAQIAGNRYASGPVGKALSDACMGTIASFLSKYQDIIIEHQKVVKGNQKRLESLRELAGKENLEYPSVTLPPQPHTKEGVDAYNEVIARVRTWVNLNLWQKLKLSRDDAKPLLRLKGFPSFPLVERQANEVDWWDMVCNVKKLINEKKEDGKVFWQNLAGYKRQEALRPYLSSEEDRKKGKKFARYQLGDLLLHLEKKHGEDWGKVYDEAWERIDKKVEGLSKHIKLEEERRSEDAQSKAALTDWLRAKASFVIEGLKEADKDEFCRCELKLQKWYGDLRGKPFAIEAENSILDISGFSKQYNCAFIWQKDGVKKLNLYLIINYFKGGKLRFKKIKPEAFEANRFYTVINKKSGEIVPMEVNFNFDDPNLIILPLAFGKRQGREFIWNDLLSLETGSLKLANGRVIEKTLYNRRTRQDEPALFVALTFERREVLDSSNIKPMNLIGVDRGENIPAVIALTDPEGCPLSRFKDSLGNPTHILRIGESYKEKQRTIQAKKEVEQRRAGGYSRKYASKAKNLADDMVRNTARDLLYYAVTQDAMLIFENLSRGFGRQGKRTFMAERQYTRMEDWLTAKLAYEGLPSKTYLSKTLAQYTSKTCSNCGFTITSADYDRVLEKLKKTATGWMTTINGKELKVEGQITYYNRYKRQNVVKDLSVELDRLSEESVNNDISSWTKGRSGEALSLLKKRFSHRPVQEKFVCLNCGFETHADEQAALNIARSWLFLRSQEYKKYQTNKTTGNTDKRAFVETWQSFYRKKLKEVWKPAV

SEQ ID NO: 28185 - protein, 978 aa, synthetic construct
  REGION 1..978: note = engineered CasX variant
QEIKRANKIRRRLVKDSNTKKAGKTGPMKTLLVRVMTPDLRERLENLRKKPENIPQPISNTSRANLNKLLTDYTEMKKAILHVYWEEFQKDPVGLMSRVAQPASKKIDQNKLKPEMDEKGNLTTAGFACSQCGQPLFVYKLEQVSEKGKAYTNYFGRCNVAEHEKLILLAQLKPEKDSDEAVTYSLGKFGQRALDFYSIHVTKESTHPVKPLAQIAGNRYASGPVGKALSDACMGTIASFLSKYQDIIIEHQKVVKGNQKRLESLRELAGKENLEYPSVTLPPQPHTKEGVDAYNEVIARVRWWVNLNLWQKLKLSRDDAKPLLRLKGFPSFPLVERQANEVDWWDMVCNVKKLINEKKEDGKVFWQNLAGYKRQEALRPYLSSEEDRKKGKKFARYQLGDLLLHLEKKHGEDWGKVYDEAWERIDKKVEGLSKHIKLEEERRSEDAQSKAALTDWLRAKASFVIEGLKEADKDEFCRCELKLQKWYGDLRGKPFAIEAENSILDISGFSKQYNCAFIWQKDGVKKLNLYLIINYFKGGKLRFKKIKPEAFEANRFYTVINKKSGEIVPMEVNFNFDDPNLIILPLAFGKRQGREFIWNDLLSLETGSLKLANGRVIEKTLYNRRTRQDEPALFVALTFERREVLDSSNIKPMNLIGVDRGENIPAVIALTDPEGCPLSRFKDSLGNPTHILRIGESYKEKQRTIQAKKEVEQRRAGGYSRKYASKAKNLADDMVRNTARDLLYYAVTQDAMLIFENLSRGFGRQGKRTFMAERQYTRMEDWLTAKLAYEGLPSKTYLSKTLAQYTSKTCSNCGFTITSADYDRVLEKLKKTATGWMTTINGKELKVEGQITYYNRYKRQNVVKDLSVELDRLSEESVNNDISSWTKGRSGEALSLLKKRFSHRPVQEKFVCLNCGFETHADEQAALNIARSWLFLRSQEYKKYQTNKTTGNTDKRAFVETWQSFYRKKLKEVWKPAV

SEQ ID NO: 28186 - protein, 979 aa, synthetic construct
  REGION 1..979: note = engineered CasX variant
QEIKRANKIRRRLVKDSNTKKAGKTGPMKTLLVRVMTPDLRERLENLRKKPENIPQPISNTSRANLNKLLTDYTEMKKAILHVYWEEFQKDPVGLMSRVAQPASKKIDQNKLKPEMDEKGNLTTAGFACSQCGQPLFVYKLEQVSEKGKAYTNYFGRCNVAEHEKLILLAQLKPEKDSDEAVTYSLGKFGQRALDFYSIHVTKESTHPVKPLAQIAGNRYASGPVGKALSDACMGTIASFLSKYQDIIIEHQKVVKGNQKRLESLRELAGKENLEYPSVTLPPQPHTKEGVDAYNEVIARVRMWVNLNLWQKLKLSRDDAKPLLRLKGFPSFPLVERQQANEVDWWDMVCNVKKLINEKKEDGKVFWQNLAGYKRQEALRPYLSSEEDRKKGKKFARYQLGDLLLHLEKKHGEDWGKVYDEAWERIDKKVEGLSKHIKLEEERRSEDAQSKAALTDWLRAKASFVIEGLKEADKDEFCRCELKLQKWYGDLRGKPFAIEAENSILDISGFSKQYNCAFIWQKDGVKKLNLYLIINYFKGGKLRFKKIKPEAFEANRFYTVINKKSGEIVPMEVNFNFDDPNLIILPLAFGKRQGREFIWNDLLSLETGSLKLANGRVIEKTLYNRRTRQDEPALFVALTFERREVLDSSNIKPMNLIGVDRGENIPAVIALTDPEGCPLSRFKDSLGNPTHILRIGESYKEKQRTIQAKKEVEQRRAGGYSRKYASKAKNLADDMVRNTARDLLYYAVTQDAMLIFENLSRGFGRQGKRTFMAERQYTRMEDWLTAKLAYEGLPSKTYLSKTLAQYTSKTCSNCGFTITSADYDRVLEKLKKTATGWMTTINGKELKVEGQITYYNRYKRQNVVKDLSVELDRLSEESVNNDISSWTKGRSGEALSLLKKRFSHRPVQEKFVCLNCGFETHADEQAALNIARSWLFLRSQEYKKYQTNKTTGNTDKRAFVETWQSFYRKKLKEVWKPAV

SEQ ID NO: 28187 - protein, 979 aa, synthetic construct
  REGION 1..979: note = engineered CasX variant
QEIKRANKIRRRLVKDSNTKKAGKTGPMKTLLVRVMTPDLRERLENLRKKPENIPQPISNTSRANLNKLLTDYTEMKKAILHVYWEEFQKDPVGLMSRVAQPASKKIDQNKLKPEMDEKGNLTTAGFACSQCGQPLFVYKLEQVSEKGKAYTNYFGRCNVAEHEKLILLAQLKPEKDSDEAVTYSLGKFGQRALDFYSIHVTKESTHPVKPLAQIAGNRYASGPVGKALSDACMGTIASFLSKYQDIIIEHQKVVKGNQKRLESLRELAGKENLEYPSVTLPPQPHTKEGVDAYNEVIARVRMWVNLNLWQKLKLSRDDAKPLLRLKGFPSFPLVERQANAEVDWWDMVCNVKKLINEKKEDGKVFWQNLAGYKRQEALRPYLSSEEDRKKGKKFARYQLGDLLLHLEKKHGEDWGKVYDEAWERIDKKVEGLSKHIKLEEERRSEDAQSKAALTDWLRAKASFVIEGLKEADKDEFCRCELKLQKWYGDLRGKPFAIEAENSILDISGFSKQYNCAFIWQKDGVKKLNLYLIINYFKGGKLRFKKIKPEAFEANRFYTVINKKSGEIVPMEVNFNFDDPNLIILPLAFGKRQGREFIWNDLLSLETGSLKLANGRVIEKTLYNRRTRQDEPALFVALTFERREVLDSSNIKPMNLIGVDRGENIPAVIALTDPEGCPLSRFKDSLGNPTHILRIGESYKEKQRTIQAKKEVEQRRAGGYSRKYASKAKNLADDMVRNTARDLLYYAVTQDAMLIFENLSRGFGRQGKRTFMAERQYTRMEDWLTAKLAYEGLPSKTYLSKTLAQYTSKTCSNCGFTITSADYDRVLEKLKKTATGWMTTINGKELKVEGQITYYNRYKRQNVVKDLSVELDRLSEESVNNDISSWTKGRSGEALSLLKKRFSHRPVQEKFVCLNCGFETHADEQAALNIARSWLFLRSQEYKKYQTNKTTGNTDKRAFVETWQSFYRKKLKEVWKPAV

SEQ ID NO: 28188 - protein, 978 aa, synthetic construct
  REGION 1..978: note = engineered CasX variant
QEIKRANKIRRRLVKDSNTKKAGKTGPMKTLLVRVMTPDLRERLENLRKKPENIPQPISNTSRANLNKLLTDYTEMKKAILHVYWEEFQKDPVGLMSRVAQPASKKIDQNKLKPEMDEKGNLTTAGFACSQCGQPLFVYKLEQVSEKGKAYTNYFGRCNVAEHEKLILLAQLKPEKDSDEAVTYSLGKFGQRALDFYSIHVTKESTHPVKPLAQIAGNRYASGPVGKALSDACMGTIASFLSKYQDIIIEHQKVVKGNQKRLESLRELAGKENLEYPSVTLPPQPHTKEGVDAYNEVIARVRMWVNLNLWQKLKLSRDDAKPLLRLKGFPSFPLVERQANEVDWWDMVCNVKKLINEKKEDGKVFWQNLAGYKRQEALRPYLSSEEDRKKGKKFARTQLGDLLLHLEKKHGEDWGKVYDEAWERIDKKVEGLSKHIKLEEERRSEDAQSKAALTDWLRAKASFVIEGLKEADKDEFCRCELKLQKWYGDLRGKPFAIEAENSILDISGFSKQYNCAFIWQKDGVKKLNLYLIINYFKGGKLRFKKIKPEAFEANRFYTVINKKSGEIVPMEVNFNFDDPNLIILPLAFGKRQGREFIWNDLLSLETGSLKLANGRVIEKTLYNRRTRQDEPALFVALTFERREVLDSSNIKPMNLIGVDRGENIPAVIALTDPEGCPLSRFKDSLGNPTHILRIGESYKEKQRTIQAKKEVEQRRAGGYSRKYASKAKNLADDMVRNTARDLLYYAVTQDAMLIFENLSRGFGRQGKRTFMAERQYTRMEDWLTAKLAYEGLPSKTYLSKTLAQYTSKTCSNCGFTITSADYDRVLEKLKKTATGWMTTINGKELKVEGQITYYNRYKRQNVVKDLSVELDRLSEESVNNDISSWTKGRSGEALSLLKKRFSHRPVQEKFVCLNCGFETHADEQAALNIARSWLFLRSQEYKKYQTNKTTGNTDKRAFVETWQSFYRKKLKEVWKPAV

SEQ ID NO: 28189 - protein, 979 aa, synthetic construct
  REGION 1..979: note = engineered CasX variant
QEIKRANKIRRRLVKDSNTKKAGKTGPMKTLLVRVMTPDLRERLENLRKKPENIPQPISNTSRANLNKLLTDYTEMKKAILHVYWEEFQKDPVGLMSRVAQPASKKIDQNKLKPEMDEKGNLTTAGFACSQCGQPLFVYKLEQVSEKGKAYTNYFGRCNVAEHEKLILLAQLKPEKDSDEAVTYSLGKFGQRALDFYSIHVTKESTHPVKPLAQIAGNRYASGPVGKALSDACMGTIASFLSKYQDIIIEHQKVVKGNQKRLESLRELAGKENLEYPSVTLPPQPHTKEGVDAYNEVIARVRMWVNLNLWQKLKLSRDDAKPLLRLKGFPSFPLVERQANEVDWWDMVCNVKKLINEKKEDGKVFWQNLAGYKRQEALRPYLSSEEDRKKGKKFARYQLGDLLLHLEKKHEGEDWGKVYDEAWERIDKKVEGLSKHIKLEEERRSEDAQSKAALTDWLRAKASFVIEGLKEADKDEFCRCELKLQKWYGDLRGKPFAIEAENSILDISGFSKQYNCAFIWQKDGVKKLNLYLIINYFKGGKLRFKKIKPEAFEANRFYTVINKKSGEIVPMEVNFNFDDPNLIILPLAFGKRQGREFIWNDLLSLETGSLKLANGRVIEKTLYNRRTRQDEPALFVALTFERREVLDSSNIKPMNLIGVDRGENIPAVIALTDPEGCPLSRFKDSLGNPTHILRIGESYKEKQRTIQAKKEVEQRRAGGYSRKYASKAKNLADDMVRNTARDLLYYAVTQDAMLIFENLSRGFGRQGKRTFMAERQYTRMEDWLTAKLAYEGLPSKTYLSKTLAQYTSKTCSNCGFTITSADYDRVLEKLKKTATGWMTTINGKELKVEGQITYYNRYKRQNVVKDLSVELDRLSEESVNNDISSWTKGRSGEALSLLKKRFSHRPVQEKFVCLNCGFETHADEQAALNIARSWLFLRSQEYKKYQTNKTTGNTDKRAFVETWQSFYRKKLKEVWKPAV

SEQ ID NO: 28190 - protein, 978 aa, synthetic construct
  REGION 1..978: note = engineered CasX variant
QEIKRANKIRRRLVKDSNTKKAGKTGPMKTLLVRVMTPDLRERLENLRKKPENIPQPISNTSRANLNKLLTDYTEMKKAILHVYWEEFQKDPVGLMSRVAQPASKKIDQNKLKPEMDEKGNLTTAGFACSQCGQPLFVYKLEQVSEKGKAYTNYFGRCNVAEHEKLILLAQLKPEKDSDEAVTYSLGKFGQRALDFYSIHVTKESTHPVKPLAQIAGNRYASGPVGKALSDACMGTIASFLSKYQDIIIEHQKVVKGNQKRLESLRELAGKENLEYPSVTLPPQPHTKEGVDAYNEVIARVRMWVNLNLWQKLKLSRDDAKPLLRLKGFPSFPLVERQANEVDWWDMVCNVKKLINEKKEDGKVFWQNLAGYKRQEALRPYLSSEEDRKKGKKFARYQLGDLLLHLEKKHGEDWGKVYDEAWERIDKKVEGLSKHIKLEEERRSEDAQSKAALTDWLRAKASFVIEGLKEADKDEFCRCDLKLQKWYGDLRGKPFAIEAENSILDISGFSKQYNCAFIWQKDGVKKLNLYLIINYFKGGKLRFKKIKPEAFEANRFYTVINKKSGEIVPMEVNFNFDDPNLIILPLAFGKRQGREFIWNDLLSLETGSLKLANGRVIEKTLYNRRTRQDEPALFVALTFERREVLDSSNIKPMNLIGVDRGENIPAVIALTDPEGCPLSRFKDSLGNPTHILRIGESYKEKQRTIQAKKEVEQRRAGGYSRKYASKAKNLADDMVRNTARDLLYYAVTQDAMLIFENLSRGFGRQGKRTFMAERQYTRMEDWLTAKLAYEGLPSKTYLSKTLAQYTSKTCSNCGFTITSADYDRVLEKLKKTATGWMTTINGKELKVEGQITYYNRYKRQNVVKDLSVELDRLSEESVNNDISSWTKGRSGEALSLLKKRFSHRPVQEKFVCLNCGFETHADEQAALNIARSWLFLRSQEYKKYQTNKTTGNTDKRAFVETWQSFYRKKLKEVWKPAV

SEQ ID NO: 28191 - protein, 978 aa, synthetic construct
  REGION 1..978: note = engineered CasX variant
QEIKRANKIRRRLVKDSNTKKAGKTGPMKTLLVRVMTPDLRERLENLRKKPENIPQPISNTSRANLNKLLTDYTEMKKAILHVYWEEFQKDPVGLMSRVAQPASKKIDQNKLKPEMDEKGNLTTAGFACSQCGQPLFVYKLEQVSEKGKAYTNYFGRCNVAEHEKLILLAQLKPEKDSDEAVTYSLGKFGQRALDFYSIHVTKESTHPVKPLAQIAGNRYASGPVGKALSDACMGTIASFLSKYQDIIIEHQKVVKGNQKRLESLRELAGKENLEYPSVTLPPQPHTKEGVDAYNEVIARVRMWVNLNLWQKLKLSRDDAKPLLRLKGFPSFPLVERQANEVDWWDMVCNVKKLINEKKEDGKVFWQNLAGYKRQEALRPYLSSEEDRKKGKKFARYQLGDLLLHLEKKHGEDWGKVYDEAWERIDKKVEGLSKHIKLEEERRSEDAQSKAALTDWLRAKASFVIEGLKEADKDEFCRCELKLQKWYGDLRGKPFAIEAENSILDISGFSKQYNCAFIWQKDGVKKLNLYLIINYFKGGKLRFKKIKPEAFEANRFYTVINKKSGEIVPMEVNFNFDDPNLIILPLAFGKRFGREFIWNDLLSLETGSLKLANGRVIEKTLYNRRTRQDEPALFVALTFERREVLDSSNIKPMNLIGVDRGENIPAVIALTDPEGCPLSRFKDSLGNPTHILRIGESYKEKQRTIQAKKEVEQRRAGGYSRKYASKAKNLADDMVRNTARDLLYYAVTQDAMLIFENLSRGFGRQGKRTFMAERQYTRMEDWLTAKLAYEGLPSKTYLSKTLAQYTSKTCSNCGFTITSADYDRVLEKLKKTATGWMTTINGKELKVEGQITYYNRYKRQNVVKDLSVELDRLSEESVNNDISSWTKGRSGEALSLLKKRFSHRPVQEKFVCLNCGFETHADEQAALNIARSWLFLRSQEYKKYQTNKTTGNTDKRAFVETWQSFYRKKLKEVWKPAV

SEQ ID NO: 28192 - protein, 978 aa, synthetic construct
  REGION 1..978: note = engineered CasX variant
QEIKRANKIRRRLVKDSNTKKAGKTGPMKTLLVRVMTPDLRERLENLRKKPENIPQPISNTSRANLNKLLTDYTEMKKAILHVYWEEFQKDPVGLMSRVAQPASKKIDQNKLKPEMDEKGNLTTAGFACSQCGQPLFVYKLEQVSEKGKAYTNYFGRCNVAEHEKLILLAQLKPEKDSDEAVTYSLGKFGQRALDFYSIHVTKESTHPVKPLAQIAGNRYASGPVGKALSDACMGTIASFLSKYQDIIIEHQKVVKGNQKRLESLRELAGKENLEYPSVTLPPQPHTKEGVDAYNEVIARVRMWVNLNLWQKLKLSRDDAKPLLRLKGFPSFPLVERQANEVDWWDMVCNVKKLINEKKEDGKVFWQNLAGYKRQEALRPYLSSEEDRKKGKKFARYQLGDLLLHLEKKHGEDWGKVYDEAWERIDKKVEGLSKHIKLEEERRSEDAQSKAALTDWLRAKASFVIEGLKEADKDEFCRCELKLQKWYGDLRGKPFAIEAENSILDISGFSKQYNCAFIWQKDGVKKLNLYLIINYFKGGKLRFKKIKPEAFEANRFYTVINKKSGEIVPMEVNFNFDDPNLIILPLAFGKRVGREFIWNDLLSLETGSLKLANGRVIEKTLYNRRTRQDEPALFVALTFERREVLDSSNIKPMNLIGVDRGENIPAVIALTDPEGCPLSRFKDSLGNPTHILRIGESYKEKQRTIQAKKEVEQRRAGGYSRKYASKAKNLADDMVRNTARDLLYYAVTQDAMLIFENLSRGFGRQGKRTFMAERQYTRMEDWLTAKLAYEGLPSKTYLSKTLAQYTSKTCSNCGFTITSADYDRVLEKLKKTATGWMTTINGKELKVEGQITYYNRYKRQNVVKDLSVELDRLSEESVNNDISSWTKGRSGEALSLLKKRFSHRPVQEKFVCLNCGFETHADEQAALNIARSWLFLRSQEYKKYQTNKTTGNTDKRAFVETWQSFYRKKLKEVWKPAV

SEQ ID NO: 28193 - protein, 979 aa, synthetic construct
  REGION 1..979: note = engineered CasX variant
QEIKRANKIRRRLVKDSNTKKAGKTGPMKTLLVRVMTPDLRERLENLRKKPENIPQPISNTSRANLNKLLTDYTEMKKAILHVYWEEFQKDPVGLMSRVAQPASKKIDQNKLKPEMDEKGNLTTAGFACSQCGQPLFVYKLEQVSEKGKAYTNYFGRCNVAEHEKLILLAQLKPEKDSDEAVTYSLGKFGQRALDFYSIHVTKESTHPVKPLAQIAGNRYASGPVGKALSDACMGTIASFLSKYQDIIIEHQKVVKGNQKRLESLRELAGKENLEYPSVTLPPQPHTKEGVDAYNEVIARVRMWVNLNLWQKLKLSRDDAKPLLRLKGFPSFPLVERQANEVDWWDMVCNVKKLINEKKEDGKVFWQNLAGYKRQEALRPYLSSEEDRKKGKKFARYQLGDLLLHLEKKHGEDWGKVYDEAWERIDKKVEGLSKHIKLEEERRSEDAQSKAALTDWLRAKASFVIEGLKEADKDEFCRCELKLQKWYGDLRGKPFAIEAENSILDISGFSKQYNCAFIWQKDGVKKLNLYLIINYFKGGKLRFKKIKPEAFEANRFYTVINKKSGEIVPMEVNFNFDDPNLIILPLAFGKRQGREFIWNDLLSLETGSLKLANGRVIEKTLYNRRTRQDEPALFVALTFERREVLDSSNIKTPMNLIGVDRGENIPAVIALTDPEGCPLSRFKDSLGNPTHILRIGESYKEKQRTIQAKKEVEQRRAGGYSRKYASKAKNLADDMVRNTARDLLYYAVTQDAMLIFENLSRGFGRQGKRTFMAERQYTRMEDWLTAKLAYEGLPSKTYLSKTLAQYTSKTCSNCGFTITSADYDRVLEKLKKTATGWMTTINGKELKVEGQITYYNRYKRQNVVKDLSVELDRLSEESVNNDISSWTKGRSGEALSLLKKRFSHRPVQEKFVCLNCGFETHADEQAALNIARSWLFLRSQEYKKYQTNKTTGNTDKRAFVETWQSFYRKKLKEVWKPAV

SEQ ID NO: 28194 - protein, 979 aa, synthetic construct
  REGION 1..979: note = engineered CasX variant
QEIKRANKIRRRLVKDSNTKKAGKTGPMKTLLVRVMTPDLRERLENLRKKPENIPQPISNTSRANLNKLLTDYTEMKKAILHVYWEEFQKDPVGLMSRVAQPASKKIDQNKLKPEMDEKGNLTTAGFACSQCGQPLFVYKLEQVSEKGKAYTNYFGRCNVAEHEKLILLAQLKPEKDSDEAVTYSLGKFGQRALDFYSIHVTKESTHPVKPLAQIAGNRYASGPVGKALSDACMGTIASFLSKYQDIIIEHQKVVKGNQKRLESLRELAGKENLEYPSVTLPPQPHTKEGVDAYNEVIARVRMWVNLNLWQKLKLSRDDAKPLLRLKGFPSFPLVERQANEVDWWDMVCNVKKLINEKKEDGKVFWQNLAGYKRQEALRPYLSSEEDRKKGKKFARYQLGDLLLHLEKKHGEDWGKVYDEAWERIDKKVEGLSKHIKLEEERRSEDAQSKAALTDWLRAKASFVIEGLKEADKDEFCRCELKLQKWYGDLRGKPFAIEAENSILDISGFSKQYNCAFIWQKDGVKKLNLYLIINYFKGGKLRFKKIKPEAFEANRFYTVINKKSGEIVPMEVNFNFDDPNLIILPLAFGKRQGREFIWNDLLSLETGSLKLANGRVIEKTLYNRRTRQDEPALFVALTFERREVLDSSNIKPMSNLIGVDRGENIPAVIALTDPEGCPLSRFKDSLGNPTHILRIGESYKEKQRTIQAKKEVEQRRAGGYSRKYASKAKNLADDMVRNTARDLLYYAVTQDAMLIFENLSRGFGRQGKRTFMAERQYTRMEDWLTAKLAYEGLPSKTYLSKTLAQYTSKTCSNCGFTITSADYDRVLEKLKKTATGWMTTINGKELKVEGQITYYNRYKRQNVVKDLSVELDRLSEESVNNDISSWTKGRSGEALSLLKKRFSHRPVQEKFVCLNCGFETHADEQAALNIARSWLFLRSQEYKKYQTNKTTGNTDKRAFVETWQSFYRKKLKEVWKPAV

SEQ ID NO: 28195 - protein, 978 aa, synthetic construct
  REGION 1..978: note = engineered CasX variant
QEIKRANKIRRRLVKDSNTKKAGKTGPMKTLLVRVMTPDLRERLENLRKKPENIPQPISNTSRANLNKLLTDYTEMKKAILHVYWEEFQKDPVGLMSRVAQPASKKIDQNKLKPEMDEKGNLTTAGFACSQCGQPLFVYKLEQVSEKGKAYTNYFGRCNVAEHEKLILLAQLKPEKDSDEAVTYSLGKFGQRALDFYSIHVTKESTHPVKPLAQIAGNRYASGPVGKALSDACMGTIASFLSKYQDIIIEHQKVVKGNQKRLESLRELAGKENLEYPSVTLPPQPHTKEGVDAYNEVIARVRMWVNLNLWQKLKLSRDDAKPLLRLKGFPSFPLVERQANEVDWWDMVCNVKKLINEKKEDGKVFWQNLAGYKRQEALRPYLSSEEDRKKGKKFARYQLGDLLLHLEKKHGEDWGKVYDEAWERIDKKVEGLSKHIKLEEERRSEDAQSKAALTDWLRAKASFVIEGLKEADKDEFCRCELKLQKWYGDLRGKPFAIEAENSILDISGFSKQYNCAFIWQKDGVKKLNLYLIINYFKGGKLRFKKIKPEAFEANRFYTVINKKSGEIVPMEVNFNFDDPNLIILPLAFGKRQGREFIWNDLLSLETGSLKLANGRVIEKTLYNRRTRQDEPALFVALTFERREVLDSSNIKPMNLIGVDRGENIPAVIALTDPEGCPLSRFKDSLGNPTHILRIRESYKEKQRTIQAKKEVEQRRAGGYSRKYASKAKNLADDMVRNTARDLLYYAVTQDAMLIFENLSRGFGRQGKRTFMAERQYTRMEDWLTAKLAYEGLPSKTYLSKTLAQYTSKTCSNCGFTITSADYDRVLEKLKKTATGWMTTINGKELKVEGQITYYNRYKRQNVVKDLSVELDRLSEESVNNDISSWTKGRSGEALSLLKKRFSHRPVQEKFVCLNCGFETHADEQAALNIARSWLFLRSQEYKKYQTNKTTGNTDKRAFVETWQSFYRKKLKEVWKPAV

SEQ ID NO: 28196 - protein, 978 aa, synthetic construct
  REGION 1..978: note = engineered CasX variant
QEIKRANKIRRRLVKDSNTKKAGKTGPMKTLLVRVMTPDLRERLENLRKKPENIPQPISNTSRANLNKLLTDYTEMKKAILHVYWEEFQKDPVGLMSRVAQPASKKIDQNKLKPEMDEKGNLTTAGFACSQCGQPLFVYKLEQVSEKGKAYTNYFGRCNVAEHEKLILLAQLKPEKDSDEAVTYSLGKFGQRALDFYSIHVTKESTHPVKPLAQIAGNRYASGPVGKALSDACMGTIASFLSKYQDIIIEHQKVVKGNQKRLESLRELAGKENLEYPSVTLPPQPHTKEGVDAYNEVIARVRMWVNLNLWQKLKLSRDDAKPLLRLKGFPSFPLVERQANEVDWWDMVCNVKKLINEKKEDGKVFWQNLAGYKRQEALRPYLSSEEDRKKGKKFARYQLGDLLLHLEKKHGEDWGKVYDEAWERIDKKVEGLSKHIKLEEERRSEDAQSKAALTDWLRAKASFVIEGLKEADKDEFCRCELKLQKWYGDLRGKPFAIEAENSILDISGFSKQYNCAFIWQKDGVKKLNLYLIINYFKGGKLRFKKIKPEAFEANRFYTVINKKSGEIVPMEVNFNFDDPNLIILPLAFGKRQGREFIWNDLLSLETGSLKLANGRVIEKTLYNRRTRQDEPALFVALTFERREVLDSSNIKPMNLIGVDRGENIPAVIALTDPEGCPLSRFKDSLGNPTHILRIGESYKEKQRTIQAKKEVEQRRAGGYSRKYASKAKNLADDMVRNTARDLLYYAVTQDAMLIFENLSRGFGRQGKRTFSAERQYTRMEDWLTAKLAYEGLPSKTYLSKTLAQYTSKTCSNCGFTITSADYDRVLEKLKKTATGWMTTINGKELKVEGQITYYNRYKRQNVVKDLSVELDRLSEESVNNDISSWTKGRSGEALSLLKKRFSHRPVQEKFVCLNCGFETHADEQAALNIARSWLFLRSQEYKKYQTNKTTGNTDKRAFVETWQSFYRKKLKEVWKPAV

SEQ ID NO: 28197 - protein, 978 aa, synthetic construct
  REGION 1..978: note = engineered CasX variant
QEIKRANKIRRRLVKDSNTKKAGKTGPMKTLLVRVMTPDLRERLENLRKKPENIPQPISNTSRANLNKLLTDYTEMKKAILHVYWEEFQKDPVGLMSRVAQPASKKIDQNKLKPEMDEKGNLTTAGFACSQCGQPLFVYKLEQVSEKGKAYTNYFGRCNVAEHEKLILLAQLKPEKDSDEAVTYSLGKFGQRALDFYSIHVTKESTHPVKPLAQIAGNRYASGPVGKALSDACMGTIASFLSKYQDIIIEHQKVVKGNQKRLESLRELAGKENLEYPSVTLPPQPHTKEGVDAYNEVIARVRMWVNLNLWQKLKLSRDDAKPLLRLKGFPSFPLVERQANEVDWWDMVCNVKKLINEKKEDGKVFWQNLAGYKRQEALRPYLSSEEDRKKGKKFARYQLGDLLLHLEKKHGEDWGKVYDEAWERIDKKVEGLSKHIKLEEERRSEDAQSKAALTDWLRAKASFVIEGLKEADKDEFCRCELKLQKWYGDLRGKPFAIEAENSILDISGFSKQYNCAFIWQKDGVKKLNLYLIINYFKGGKLRFKKIKPEAFEANRFYTVINKKSGEIVPMEVNFNFDDPNLIILPLAFGKRQGREFIWNDLLSLETGSLKLANGRVIEKTLYNRRTRQDEPALFVALTFERREVLDSSNIKPMNLIGVDRGENIPAVIALTDPEGCPLSRFKDSLGNPTHILRIGESYKEKQRTIQAKKEVEQRRAGGYSRKYASKAKNLADDMVRNTARDLLYYAVTQDAMLIFENLSRGFGRQGKRTFMAERQYTRMEDWLTAKLAYEGLPSKTYLSKTLAQYTSKTCSNCGFTITSADYDRVLEKLKKTATGWMTTINGKELKVEGQITYYNRYKRQNVVKDLSVELDRLSEESVNNDISSWDKGRSGEALSLLKKRFSHRPVQEKFVCLNCGFETHADEQAALNIARSWLFLRSQEYKKYQTNKTTGNTDKRAFVETWQSFYRKKLKEVWKPAV

SEQ ID NO: 28198 - protein, 978 aa, synthetic construct
  REGION 1..978: note = engineered CasX variant
QEIKRANKIRRRLVKDSNTKKAGKTGPMKTLLVRVMTPDLRERLENLRKKPENIPQPISNTSRANLNKLLTDYTEMKKAILHVYWEEFQVDPVGLMSRVAQPASKKIDQNKLKPEMDEKGNLTTAGFACSQCGQPLFVYKLEQVSEKGKAYTNYFGRCNVAEHEKLILLAQLKPEKDSDEAVTYSLGKFGQRALDFYSIHVTKESTHPVKPLAQIAGNRYASGPVGKALSDACMGTIASFLSKYQDIIIEHQKVVKGNQKRLESLRELAGKENLEYPSVTLPPQPHTKEGVDAYNEVIARVRMWVNLNLWQKLKLSRDDAKPLLRLKGFPSFPLVERQANEVDWWDMVCNVKKLINEKKEDGKVFWQNLAGYKRQEALRPYLSSEEDRKKGKKFARYQLGDLLLHLEKKHGEDWGKVYDEAWERIDKKVEGLSKHIKLEEERRSEDAQSKAALTDWLRAKASFVIEGLKEADKDEFCRCELKLQKWYGDLRGKPFAIEAENSILDISGFSKQYNCAFIWQKDGVKKLNLYLIINYFKGGKLRFKKIKPEAFEANRFYTVINKKSGEIVPMEVNFNFDDPNLIILPLAFGKRQGREFIWNDLLSLETGSLKLANGRVIEKTLYNRRTRQDEPALFVALTFERREVLDSSNIKPMNLIGVDRGENIPAVIALTDPEGCPLSRFKDSLGNPTHILRIGESYKEKQRTIQAKKEVEQRRAGGYSRKYASKAKNLADDMVRNTARDLLYYAVTQDAMLIFENLSRGFGRQGKRTFMAERQYTRMEDWLTAKLAYEGLPSKTYLSKTLAQYTSKTCSNCGFTITSADYDRVLEKLKKTATGWMTTINGKELKVEGQITYYNRYKRQNVVKDLSVELDRLSEESVNNDISSWTKGRSGEALSLLKKRFSHRPVQEKFVCLNCGFETHADEQAALNIARSWLFLRSQEYKKYQTNKTTGNTDKRAFVETWQSFYRKKLKEVWKPAV

SEQ ID NO: 28199 - protein, 979 aa, synthetic construct
  REGION 1..979: note = engineered CasX variant
QEIKRALNKIRRRLVKDSNTKKAGKTGPMKTLLVRVMTPDLRERLENLRKKPENIPQPISNTSRANLNKLLTDYTEMKKAILHVYWEEFQKDPVGLMSRVAQPASKKIDQNKLKPEMDEKGNLTTAGFACSQCGQPLFVYKLEQVSEKGKAYTNYFGRCNVAEHEKLILLAQLKPEKDSDEAVTYSLGKFGQRALDFYSIHVTKESTHPVKPLAQIAGNRYASGPVGKALSDACMGTIASFLSKYQDIIIEHQKVVKGNQKRLESLRELAGKENLEYPSVTLPPQPHTKEGVDAYNEVIARVRMWVNLNLWQKLKLSRDDAKPLLRLKGFPSFPLVERQANEVDWWDMVCNVKKLINEKKEDGKVFWQNLAGYKRQEALRPYLSSEEDRKKGKKFARYQLGDLLLHLEKKHGEDWGKVYDEAWERIDKKVEGLSKHIKLEEERRSEDAQSKAALTDWLRAKASFVIEGLKEADKDEFCRCELKLQKWYGDLRGKPFAIEAENSILDISGFSKQYNCAFIWQKDGVKKLNLYLIINYFKGGKLRFKKIKPEAFEANRFYTVINKKSGEIVPMEVNFNFDDPNLIILPLAFGKRQGREFIWNDLLSLETGSLKLANGRVIEKTLYNRRTRQDEPALFVALTFERREVLDSSNIKPMNLIGVDRGENIPAVIALTDPEGCPLSRFKDSLGNPTHILRIGESYKEKQRTIQAKKEVEQRRAGGYSRKYASKAKNLADDMVRNTARDLLYYAVTQDAMLIFENLSRGFGRQGKRTFMAERQYTRMEDWLTAKLAYEGLPSKTYLSKTLAQYTSKTCSNCGFTITSADYDRVLEKLKKTATGWMTTINGKELKVEGQITYYNRYKRQNVVKDLSVELDRLSEESVNNDISSWTKGRSGEALSLLKKRFSHRPVQEKFVCLNCGFETHADEQAALNIARSWLFLRSQEYKKYQTNKTTGNTDKRAFVETWQSFYRKKLKEVWKPAV

SEQ ID NO: 28200 - protein, 978 aa, synthetic construct
  REGION 1..978: note = engineered CasX variant
QEIKRANKIRRRLVKDSNTKKAGKTGPMKTLLVRVMTPDLRERLENLRKKPENIPQPISNTSRANLNKLLTDYTEMKKAILHVYWEEFQKDPVGLMSRVAQPASKKIDQNKLKPEMDEKGNLTTAGFACSQCGQPLFVYKLEQVSEKGKAYTNYVGRCNVAEHEKLILLAQLKPEKDSDEAVTYSLGKFGQRALDFYSIHVTKESTHPVKPLAQIAGNRYASGPVGKALSDACMGTIASFLSKYQDIIIEHQKVVKGNQKRLESLRELAGKENLEYPSVTLPPQPHTKEGVDAYNEVIARVRMWVNLNLWQKLKLSRDDAKPLLRLKGFPSFPLVERQANEVDWWDMVCNVKKLINEKKEDGKVFWQNLAGYKRQEALRPYLSSEEDRKKGKKFARYQLGDLLLHLEKKHGEDWGKVYDEAWERIDKKVEGLSKHIKLEEERRSEDAQSKAALTDWLRAKASFVIEGLKEADKDEFCRCELKLQKWYGDLRGKPFAIEAENSILDISGFSKQYNCAFIWQKDGVKKLNLYLIINYFKGGKLRFKKIKPEAFEANRFYTVINKKSGEIVPMEVNFNFDDPNLIILPLAFGKRQGREFIWNDLLSLETGSLKLANGRVIEKTLYNRRTRQDEPALFVALTFERREVLDSSNIKPMNLIGVDRGENIPAVIALTDPEGCPLSRFKDSLGNPTHILRIGESYKEKQRTIQAKKEVEQRRAGGYSRKYASKAKNLADDMVRNTARDLLYYAVTQDAMLIFENLSRGFGRQGKRTFMAERQYTRMEDWLTAKLAYEGLPSKTYLSKTLAQYTSKTCSNCGFTITSADYDRVLEKLKKTATGWMTTINGKELKVEGQITYYNRYKRQNVVKDLSVELDRLSEESVNNDISSWTKGRSGEALSLLKKRFSHRPVQEKFVCLNCGFETHADEQAALNIARSWLFLRSQEYKKYQTNKTTGNTDKRAFVETWQSFYRKKLKEVWKPAV

SEQ ID NO: 28201 - protein, 978 aa, synthetic construct
  REGION 1..978: note = engineered CasX variant
QEIKRANKIRRRLVKDSNTKKAGKTGPMKTLLVRVMTPDLRERLENLRKKPENIPQPISNTSRANLNKLLTDYTEMKKAILHVYWEEFQKDPVGLMSRVAQPASKKIDQNKLKPEMDEKGNLTTAGFACSQCGQPLFVYKLEQVSEKGKAYTNYFGRCNVAEHEKLILLAQLKPEKDSDEAVTYSLGKFGQRALDFYSIHVTKESTHPVKPLAQIAGNRYASGPVGKALSDACMGTIASFLSKYQDIIIEHQKVVKGNQKRLESLRELAGKENLEYPSVTLPPQPHTKEGVDAYNEVIARVRMWVNLNLWQKLKLSRDDAKPLLRLKGFPSFPLVERQANEVDWWDMVCNVKKLINEKKEDGKVFWQNLAGYKRQEALRPYLSSEEDRKKGKKFARYQLGDLLLHLEKKHGEDWGKVYDEAWERIDKKVEGLSKHIKLEEERRSEDAQSKAALTDWLRAKASFVIEGLKEADKDEFCRCELKLQKWYGDLRGKPFAIEAENSILDISGFSKQYNCAFIWQKDGVKKLNLYLIINYFKGGKLRFKKIKPEAFEANRFYTVINKKSGEIVPMEVNFNFDDPNLIILPLAFGKRQGREFIWNDLLSLETGSLKLANGRVIEKTLYNRRTRQDEPALFVALTFERREVLDSSNIKPMNLIGVDRGENIPAVIALTDPEGCPLSRFKDSLGNPTHILRIGESYKEKQRTIQAKKEVEQRRAGGYSRKYASKAKNLADDMVRNTARDLLYYAVTQDAMLIFENLSRGFGRQGKRTFMAERQYTRMEDWLTAKLAYEGLASKTYLSKTLAQYTSKTCSNCGFTITSADYDRVLEKLKKTATGWMTTINGKELKVEGQITYYNRYKRQNVVKDLSVELDRLSEESVNNDISSWTKGRSGEALSLLKKRFSHRPVQEKFVCLNCGFETHADEQAALNIARSWLFLRSQEYKKYQTNKTTGNTDKRAFVETWQSFYRKKLKEVWKPAV

SEQ ID NO: 28202 - protein, 978 aa, synthetic construct
  REGION 1..978: note = engineered CasX variant
QEIKRANKIRRRLVKDSNTKKAGKTGPMKTLLVRVMTPDLRERLENLRKKPENIPQPISNTSRANLNKLLTDYTEMKKAILHVYWEEFQKDPVGLMSRVAQPASKKIDQNKLKPEMDEKGNLTTAGFACSQCGQPLFVYKLEQVSEKGKAYTNYFGRCNVAEHEKLILLAQLKPEKDSDEAVTYSLGKFGQRALDFYSIHVTKESTHPVKPLAQIAGNRYASGPVGKALSDACMGTIASFLSKYQDIIIEHQKVVKGNQKRLESLRELAGKENLEYPSVTLPPQPHTKEGVDAYNEVIARVRMWVNLNLWQKLKLSRDDAKPLLRLKGFPSFPLVERQANEVDWWDMVCNVKKLINEKKEDGKVFWQNLAGYKRQEALRPYLSSEEDRKKGKKFARYQLGDLLLHLEKKHGEDWGKVYDEAWERIDKKVEGLSKHIKLEEERRSEDAQSKAALTDWLRAKASFVIEGLKEADKDEFCRCELKLQKWYGDLRGKPFAIEAENSILDISGFSKQYNCAFIWQKDGVKKLNLYLIINYFKGGKLRFKKIKPEAFEANRFYTVINKKSGEIVPMEVNFNFDDPNLIILPLAFGKRQGREFIWNDLLSLETGSLKLANGRVIEKTLYNRRTRQDEPALFVALTFERREVLDSSNIKPMNLIGVDRGENIPAVIALTDPEGCPLSRFKDSLGNPTHILRIGESYKEKQRTIQAKKEVEQRRAGGYSRKYASKAKNLADDMVRNTARDLLYYAVTQDAMLIFENLSRGFGRQGKRTFMAERQYTRMEDWLTAKLAYEGLPSKVYLSKTLAQYTSKTCSNCGFTITSADYDRVLEKLKKTATGWMTTINGKELKVEGQITYYNRYKRQNVVKDLSVELDRLSEESVNNDISSWTKGRSGEALSLLKKRFSHRPVQEKFVCLNCGFETHADEQAALNIARSWLFLRSQEYKKYQTNKTTGNTDKRAFVETWQSFYRKKLKEVWKPAV

SEQ ID NO: 28203 - protein, 979 aa, synthetic construct
  REGION 1..979: note = engineered CasX variant
QEIKRANKIRRRLVKDSNTKKAGKTGPMKTLLVRVMTPDLRERLENLRKKPENIPQPISNTSRANLNKLLTDYTEMKKAILHVYWEEFQKDPVGLMSRVAQPASKKIDQNKLKPEMDEKGNLTTAGFACSQCGQPLFVYKLEQVSEKGKAYTNYFGRCNVAEHEKLILLAQLKPEKDSDEAVTYSLGKFGQRALDFYSIHVTKESTHPVKPLAQIAGNRYASGPVGKALSDACMGTIASFLSKYQDIIIEHQKVVKGNQKRLESLRELAGKENLEYPSVTLPPQPHTKEGVDAYNEVIARVRMWVNLNLWQKLKLSRDDAKPLLRLKGFPSFPLVERQANEVDWWDMVCNVKKLINEKKEDGKVFWQNLAGYKRQEALRPYLSSEEDRKKGKKFARYQLGDLLLHLEKKHGEDWGKVYDEAWERIDKKVEGLSKHIKLEEERRSEDAQSKAALTDWLRAKASFVIEGLKEADKDEFCRCELKLQKWYGDLRGKPFAIEAENSILDISGFSKQYNCAFIWQKDGVKKLNLYLIINYFKGGKLRFKKIKPEAFEANRFYTVINKKSGEIVPMEVNFNFDDPNLIILPLAFGKRQGREFIWNDLLSLETGSLKLANGRVIEKTLYNRRTRQDEPALFVALTFERREVLDSSNIKPMNLIGVDRGENIPAVIALTDPEGCPLSRFKDSLGNPTHILRIGESYKEKQRTIQAKKEVEQRRAGGYSRKYASKAKNLADDMVRNTARDLLYYAVTQDAMLIFENLSRGFGRQGKRTFMAERQYTRMEDWLTAKLAYEGPLPSKTYLSKTLAQYTSKTCSNCGFTITSADYDRVLEKLKKTATGWMTTINGKELKVEGQITYYNRYKRQNVVKDLSVELDRLSEESVNNDISSWTKGRSGEALSLLKKRFSHRPVQEKFVCLNCGFETHADEQAALNIARSWLFLRSQEYKKYQTNKTTGNTDKRAFVETWQSFYRKKLKEVWKPAV

SEQ ID NO: 28204 - protein, 979 aa, synthetic construct
  REGION 1..979: note = engineered CasX variant
QEIKRANKIRRRLVKDSNTKKAGKTGPMKTLLVRVMTPDLRERLENLRKKPENIPQPISNTSRANLNKLLTDYTEMKKAILHVYWEEFQKDPVGLMSRVAQPASKKIDQNKLKPEMDEKGNLTTAGFACSQCGQPLFVYKLEQVSEKGKAYTNYFGRCNVAEHEKLILLAQLKPEKDSDEAVTYSLGKFGQRALDFYSIHVTKESTHPVKPLAQIAGNRYASGPVGKALSDACMGTIASFLSKYQDIIIEHQKVVKGNQKRLESLRELAGKENLEYPSVTLPPQPHTKEGVDAYNEVIARVRMWVNLNLWQKLKLSRDDAKPLLRLKGFPSFPLVERQANEVDWWDMVCNVKKLINEKKEDGKVFWQNLAGYKRQEALRPYLSSEEDVRKKGKKFARYQLGDLLLHLEKKHGEDWGKVYDEAWERIDKKVEGLSKHIKLEEERRSEDAQSKAALTDWLRAKASFVIEGLKEADKDEFCRCELKLQKWYGDLRGKPFAIEAENSILDISGFSKQYNCAFIWQKDGVKKLNLYLIINYFKGGKLRFKKIKPEAFEANRFYTVINKKSGEIVPMEVNFNFDDPNLIILPLAFGKRQGREFIWNDLLSLETGSLKLANGRVIEKTLYNRRTRQDEPALFVALTFERREVLDSSNIKPMNLIGVDRGENIPAVIALTDPEGCPLSRFKDSLGNPTHILRIGESYKEKQRTIQAKKEVEQRRAGGYSRKYASKAKNLADDMVRNTARDLLYYAVTQDAMLIFENLSRGFGRQGKRTFMAERQYTRMEDWLTAKLAYEGLPSKTYLSKTLAQYTSKTCSNCGFTITSADYDRVLEKLKKTATGWMTTINGKELKVEGQITYYNRYKRQNVVKDLSVELDRLSEESVNNDISSWTKGRSGEALSLLKKRFSHRPVQEKFVCLNCGFETHADEQAALNIARSWLFLRSQEYKKYQTNKTTGNTDKRAFVETWQSFYRKKLKEVWKPAV

SEQ ID NO: 28205 - protein, 978 aa, synthetic construct
  REGION 1..978: note = engineered CasX variant
QEIKRANKIRRRLVKDSNTKKAGKTGPMKTLLVRVMTPDLRERLENLRKKPENIPQPISNTSRANLNKLLTDYTEMKKAILHVYWEEFQKDPVGLMSRVAQPASKKIDQNKLKPEMDEKGNLTTAGFACSQCGQPLFVYKLEQVSEKGKAYTNYFGRCNVAEHEKLILLAQLKPEKDSDEAVTYSLGKFGQRALDFYSIHVTKESTHPVKPLAQIAGNRYASGPVGKALSDACMGTIASFLSKYQDIIIEHQKVVKGNQKRLESLRELAGKENLEYPSVTLPPQPHTKEGVDAYNEVIARVRMWVNLNLWQKLKLSRDDAKPLLRLKGFPSFPLVERQANEVDWWDMVCNVKKLINEKKEDGKVFWQNLAGYKRQEALRPYLSSEEDRKKGKKFARYQLGDLLLHLEKKHGEDWGKVYDEAWERIDKKVEGLSKHIKLEEERRSEDAQSKAALTDWLRAKASFVIEGLKEADKDEFCRCELKLQKWYGDLRGKPFAIEAENSILDISGFSKQYNCAFIWQKDGVKKLNLYLIINYFKGGKLRFKKIKPEAFEANRFYTVINKKSGEIVPMEVNFNFDDPNLIILPLAFGKRQGREFIWNDLLSLETGSLKLANGRVIEKTLYNRRTRQDEPALFVALTFERREVLDSSNIKPMNLIGVDRGENIPAVIALTDPEGCPLSRFKDSLGNPTHILRIGESYKEKQRTIQAKKEVEQRRAGGYSRKYASKAKNLADDMVRNTARDLLYYAVTQDAMLIFENLSRGFGRQGKRTFMAERQYTRMEDWLTAKLAYEGLPSKTYLSKTLAQYTSKTCSNCGFTITSADYDRMLEKLKKTATGWMTTINGKELKVEGQITYYNRYKRQNVVKDLSVELDRLSEESVNNDISSWTKGRSGEALSLLKKRFSHRPVQEKFVCLNCGFETHADEQAALNIARSWLFLRSQEYKKYQTNKTTGNTDKRAFVETWQSFYRKKLKEVWKPAV

SEQ ID NO: 28206 - protein, 978 aa, synthetic construct
  REGION 1..978: note = engineered CasX variant
QEIKRANKIRRRLVKDSNTKKAGKTGPMKTLLVRVMTPDLRERLENLRKKPENIPQPISNTSRANLNKLLTDYTEMKKAILHVYWEEFQKDPVGLMSRVAQPASKKIDQNKLKPEMDEKGNLTTAGFACSQCGQPLFVYKLEQVSEKGKAYTNYFGRCNVAEHEKLILLAQLKPEKDSDEAVTYSLGKFGQRALDFYSIHVTKESTHPVKPLAQIAGNRYASGPVGKALSDACMGTIASFLSKYQDIIIEHQKVVKGNQKRLESLRELAGKENLEYPSVTLPPQPHTKEGVDAYNEVIARVRMWVNLNLWQKLKLSRDDAKPLLRLKGFPSFPLVERQANEVDWWDMVCNVKKLINEKKEDGKVFWQNLAGYKRQEALRPYLSSEEDRKKGKKFARYQLGDLLLHLEKKHGEDWGKVYDEAWERIDKKVEGLSKHIKLEEERRSEDAQSKAALTDWLRAKASFVIEGLKEADKDEFCRCELKLQKWYGDLRGKPFAIEAENSILDISGFSKQYNCAFIWQKDGVKKLNLYLIINYFKGGKLRFKKIKPEAFEANRFYTVINKKSGEIVPMEVNFNFDDPNLIILPLAFGKRQGREFIWNDLLSLETGSLKLANGRVIEKTLYNRRTRQDEPALFVALTFERREVLDSSNIKPMNLIGVDRGENIPAVIALTDPEGCPLSRFKDSLGNPTHILRIGESYKEKQRTIQAKKEVEQRRAGGYSRKYASKAKNLADDMVRNTARDLLYYAVTQDAMLIFENLSRGFGRQGKRTFMAERQYTRMEDWLTAKLAYEGLPSKTYLSKTLAQYTSKTCSNCGFTITSADYDRVLEKLKKTATGWMTTINGKELKVEGQITYYNRYKRQNVVKDLSVELDRLSEESVNNDISSWTKGRQGEALSLLKKRFSHRPVQEKFVCLNCGFETHADEQAALNIARSWLFLRSQEYKKYQTNKTTGNTDKRAFVETWQSFYRKKLKEVWKPAV

SEQ ID NO: 28207 - protein, 978 aa, synthetic construct
  REGION 1..978: note = engineered CasX variant
QEIKRANKIRRRLVKDSNTKKAGKTGPMKTLLVRVMTPDLRERLENLRKKPENIPQPISNTSRANLNKLLTDYTEMKKAILHVYWEEFQKDPVGLMSRVAQPASKKIDQNKLKPEMDEKGNLTTAGFACSQCGQPLFVYKLEQVSEKGKAYTNYFGRCNVAEHEKLILLAQLKPEKDSDEAVTYSLGKFGQRALDFYSIHVTKESTHPVKPLAQIAGNRYASGPVGKALSDACMGTIASFLSKYQDIIIEHQKVVKGNQKRLESLRELAGKENLEYPSVTLPPQPHTKEGVDAYNEVIARVRMWVNLNLWQKLKLSRDDAKPLLRLKGFPSFPLVERQANEVDWWDMVCNVKKLINEKKEDGKVFWQNLAGYKRQEALRPYLSSEEDRKKGKKFARYQLGDLLLHLEKKHGEDWGKVYDEAWERIDKKVEGLSKHIKLEEERRSEDAQSKAALTDWLRAKASFVIEGLKEADKDEFCRCELKLQKWYGDLRGKPFAIEAENSILDISGFSKQYNCAFIWQKDGVKKLNLYLIINYFKGGKLRFKKIKPEAFEANRFYTVINKKSGEIVPMEVNFNFDDPNLIILPLAFGKRQGREFIWNDLLSLETGSLKLANGRVIEKTLYNRRTRQDEPALFVALTFERREVLDSSNIKPMNLIGVDRGENIPAVIALTDPEGCPLSRFKDSLGNPTHILRIGESYKEKQRTIQAKKEVEQRRAGGYSRKYASKAKNLADDMVRNTARDLLYYAVTQDAMLIFENLSRGFGRQGKRTFMAERQYTRMEDWLTAKLAYEGLPSKTYLSKTLAQYTSKTCSNCGFTITSADYDRVLEKLKKTATGWMTTINGKELKVEGQITYYNRYKRQNVVKDLSVELDRLSEESVNNDISSWTKGRSGEALSLLKKRFSHRPVQEKFVCLNCEFETHADEQAALNIARSWLFLRSQEYKKYQTNKTTGNTDKRAFVETWQSFYRKKLKEVWKPAV

SEQ ID NO: 28208 - protein, 979 aa, synthetic construct
  REGION 1..979: note = engineered CasX variant
QEIKRANKIRRRLVKDSNTKKAGKTGPMKTLLVRVMTPDLRERLENLRKKPENIPQPISNTSRANLNKLLTDYTEMKKAILHVYWEEFQKDPVGLMSRVAQPASKKIDQNKLKPEMDEKGNLTTAGFACSQCGQPLFVYKLEQVSEKGKAYTNYFGRCNVAEHEKLILLAQLKPEKDSDEAVTYSLGKFGQRALDFYSIHVTKESTHPVKPLAQIAGNRYASGPVGKALSDACMGTIASFLSKYQDIIIEHQKVVKGNQKRLESLRELAGKENLEYPSVTLPPQPHTKEGVDAYNEVIARVRMWVNLNLWQKLKLSRDDAKPLLRLKGFPSFPLVERQANEVDWWDMVCNVKKLINEKKEDGKVFWQNLAGYKRQEALRPYLSSEEDRKKGKKFARYQLGDLLLHLEKKHGEDWGKVYDEAWERIDKKVEGLSKHIKLEEERRSEDAQSKAALTDWLRAKASFVIEGLKEADKDEFCRCELKLQKWYGDLRGKPFAIEAENSILDISGFSKQYNCAFIWQKDGVKKLNLYLIINYFKGGKLRFKKIKPEAFEANRFYTVINKKSGEIVPMEVNFNFDDPNLIILPLAFGKRQGREFIWNDLLSLETGSLKLANGRVIEKTLYNRRTRQDEPALFVALTFERREVLDSSNIKPMNLIGVDRGENIPAVIALTDPEGCPLSRFKDSLGNPTHILRIGESYKEKQRTIQAKKEVEQRRAGGYSRKYASKAKNLADDMVRNTARDLLYYAVTQDAMLIFENLSRGFGRQGKRTFMAERQYTRMEDWLTAKLAYEGLPSKTYLSKTLAQYTSKTCSNCGFTITSADYDRVLEKLKKTATGWMTTINGKELKVEGQITYYNRYKRQNVVKDLSVELDRLSEESVNNDISSWTKGRSGEALSLLKKRFSHRPVQEKFVCLNCGFETHADEQAALNIARSWLFLRSQEYKKYQTNKTSTGNTDKRAFVETWQSFYRKKLKEVWKPAV

SEQ ID NO: 28209 - protein, 979 aa, synthetic construct
  REGION 1..979: note = engineered CasX variant
QEIKRANKIRRRLVKDSNTKKAGKTGPMKTLLVRVMTPDLRERLENLRKKPENIPQPISNTSRANLNKLLTDYTEMKKAILHVYWEEFQKDPVGLMSRVAQPASKKIDQNKLKPEMDEKGNLTTAGFACSQCGQPLFVYKLEQVSEKGKAYTNYFGRCNVAEHEKLILLAQLKPEKDSDEAVTYSLGKFGQRALDFYSIHVTKESTHPVKPLAQIAGNRYASGPVGKALSDACMGTIASFLSKYQDIIIEHQKVVKGNQKRLESLRELAGKENLEYPSVTLPPQPHTKEGVDAYNEVIARVRMWVNLNLWQKLKLSRDDAKPLLRLKGFPSFPLVERQANEVDWWDMVCNVKKLINEKKEDGKVFWQNLAGYKRQEALRPYLSSEEDRKKGKKFARYQLGDLLLHLEKKHGEDWGKVYDEAWERIDKKVEGLSKHIKLEEERRSEDAQSKAALTDWLRAKASFVIEGLKEADKDEFCRCELKLQKWYGDLRGKPFAIEAENSILDISGFSKQYNCAFIWQKDGVKKLNLYLIINYFKGGKLRFKKIKPEAFEANRFYTVINKKSGEIVPMEVNFNFDDPNLIILPLAFGKRQGREFIWNDLLSLETGSLKLANGRVIEKTLYNRRTRQDEPALFVALTFERREVLDSSNIKPMNLIGVDRGENIPAVIALTDPEGCPLSRFKDSLGNPTHILRIGESYKEKQRTIQAKKEVEQRRAGGYSRKYASKAKNLADDMVRNTARDLLYYAVTQDAMLIFENLSRGFGRQGKRTFMAERQYTRMEDWLTAKLAYEGLPSKTYLSKTLAQYTSKTCSNCGFTITSADYDRVLEKLKKTATGWMTTINGKELKVEGQITYYNRYKRQNVVKDLSVELDRLSEESVNNDISSWTKGRSGEALSLLKKRFSHRPVQEKFVCLNCGFETHADEQAALNIARSWLFLRSQEYKKYQTNKTTGKNTDKRAFVETWQSFYRKKLKEVWKPAV

SEQ ID NO: 28210 - protein, 978 aa, synthetic construct
  REGION 1..978: note = engineered CasX variant
QEIKRANKIRRRLVKDSNTKKAGKTGPMKTLLVRVMTPDLRERLENLRKKPENIPQPISNTSRANLNKLLTDYTEMKKAILHVYWEEFQKDPVGLMSRVAQPASKKIDQNKLKPEMDEKGNLTTAGFACSQCGQPLFVYKLEQVSEKGKAYTNYFGRCNVAEHEKLILLAQLKPEKDSDEAVTYSLGKFGQRALDFYSIHVTKESTHPVKPLAQIAGNRYASGPVGKALSDACMGTIASFLSKYQDIIIEHQKVVKGNQKRLESLRELAGKENLEYPSVTLPPQPHTKEGVDAYNEVIARVRMWVNLNLWQKLKLSRDDAKPLLRLKKFPSFPLVERQANEVDWWDMVCNVKKLINEKKEDGKVFWQNLAGYKRQEALRPYLSSEEDRKKGKKFARYQLGDLLLHLEKKHGEDWGKVYDEAWERIDKKVEGLSKHIKLEEERRSEDAQSKAALTDWLRAKASFVIEGLKEADKDEFCRCELKLQKWYGDLRGKPFAIEAENSILDISGFSKQYNCAFIWQKDGVKKLNLYLIINYFKGGKLRFKKIKPEAFEANRFYTVINKKSGEIVPMEVNFNFDDPNLIILPLAFGKRQGREFIWNDLLSLETGSLKLANGRVIEKTLYNRRTRQDEPALFVALTFERREVLDSSNIKPMNLIGVDRGENIPAVIALTDPEGCPLSRFKDSLGNPTHILRIGESYKEKQRTIQAKKEVEQRRAGGYSRKYASKAKNLADDMVRNTARDLLYYAVTQDAMLIFENLSRGFGRQGKRTFMAERQYTRMEDWLTAKLAYEGLPSKTYLSKTLAQYTSKTCSNCGFTITSADYDRVLEKLKKTATGWMTTINGKELKVEGQITYYNRYKRQNVVKDLSVELDRLSEESVNNDISSWTKGRSGEALSLLKKRFSHRPVQEKFVCLNCGFETHADEQAALNIARSWLFLRSQEYKKYQTNKTTGNTDKRAFVETWQSFYRKKLKEVWKPAV

SEQ ID NO: 28211 - protein, 978 aa, synthetic construct
  REGION 1..978: note = engineered CasX variant
QEIKRANKIRRRLVKDSNTKKAGKTGPMKTLLVRVMTPDLRERLENLRKKPENIPQPISNTSRANLNKLLTDYTEMKKAILHVYWEEFQKDPVGLMSRVAQPASKKIDQNKLKPEMDEKGNLTTAGFACSQCGQPLFVYKLEQVSEKGKAYTNYFGRCNVAEHEKLILLAQLKPEKDSDEAVTYSLGKFGQRALDFYSIHVTKESTHPVKPLAQIAGNRYASGPVGKALSDACMGTIASFLSKYQDIIIEHQKVVKGNQKRLESLRELAGKENLEYPSVTLPPQPHTKEGVDAYNEVIARVRMWVNLNLWQKLKLSRDDAKPLLRLKGFPSFPLVERQANEVDWWDMVCNVKKLINEKKEDGKVFWQNLAGYKRQEALRPYLSSEEDRKKGKKFARYQLGDLLLHLEKKHGEDWGKVYDEAWERIDKKVEGLSKHIKLEEERRSEDAQSKAALTDWLRAKASFVIEGLKEADKDEFCRCELKLQKWYGDLRGKPFAIEAENSILDISGFSKQYNCAFIWQKDGVKKLNLYLIINYFKGGKLRFKKIKPEAFEANRFYTVINKKSGEIVPMEVNFNFDDPNLIILPLAFGKRQGREFIWNDLLSLETGSLKLANGRVIEKTLYNRRTRQDEPALFVALTFERREVLDSSNIKPMNLIGVDRGENIPAVIALTDPEGCPLSRFKDSLGNPTHILRIGERYKEKQRTIQAKKEVEQRRAGGYSRKYASKAKNLADDMVRNTARDLLYYAVTQDAMLIFENLSRGFGRQGKRTFMAERQYTRMEDWLTAKLAYEGLPSKTYLSKTLAQYTSKTCSNCGFTITSADYDRVLEKLKKTATGWMTTINGKELKVEGQITYYNRYKRQNVVKDLSVELDRLSEESVNNDISSWTKGRSGEALSLLKKRFSHRPVQEKFVCLNCGFETHADEQAALNIARSWLFLRSQEYKKYQTNKTTGNTDKRAFVETWQSFYRKKLKEVWKPAV

SEQ ID NO: 28212 - protein, 978 aa, synthetic construct
  REGION 1..978: note = engineered CasX variant
QEIKRANKIRRRLVKDSNTKKAGKTGPMKTLLVRVMTPDLRERLENLRKKPENIPQPISNTSRANLNKLLTDYTEMKKAILHVYWEEFQKDPVGLMSRVAQPASKKIDQNKLKPEMDEKGNLTTAGFACSQCGQPLFVYKLEQVSEKGKAYTNYFGRCNVAEHEKLILLAQLKPEKDSDEAVTYSLGKFGQRALDFYSIHVTKESTHPVKPLAQIAGNRYASGPVGKALSDACMGTIASFLSKYQDIIIEHQKVVKGNQKRLESLRELAGKENLEYPSVTLPPQPHTKEGVDAYNEVIARVRMWVNLNLWQKLKLSRDDAKPLLRLKGFPSFPLVERQANEVDWWDMVCNVKKLINEKKEDGKVFWQNLAGYKRQEALRPYLSSEEDRKKGKKFARYQLGDLLLHLEKKHGEDWGKVYDEAWERIDKKVEGLSKHIKLEEERRSEDAQSKAALTDWLRAKASFVIEGLKEADKDEFCRCELKLQKWYGDLRGKPFAIEAENSILDISGFSKQYNCAFIWQKDGVKKLNLYLIINYFKGGKLRFKKIKPEAFEANRFYTVINKKSGEIVPMEVNFNFDDPNLIILPLAFGKRQGREFIWNDLLSLETGSLQLANGRVIEKTLYNRRTRQDEPALFVALTFERREVLDSSNIKPMNLIGVDRGENIPAVIALTDPEGCPLSRFKDSLGNPTHILRIGESYKEKQRTIQAKKEVEQRRAGGYSRKYASKAKNLADDMVRNTARDLLYYAVTQDAMLIFENLSRGFGRQGKRTFMAERQYTRMEDWLTAKLAYEGLPSKTYLSKTLAQYTSKTCSNCGFTITSADYDRVLEKLKKTATGWMTTINGKELKVEGQITYYNRYKRQNVVKDLSVELDRLSEESVNNDISSWTKGRSGEALSLLKKRFSHRPVQEKFVCLNCGFETHADEQAALNIARSWLFLRSQEYKKYQTNKTTGNTDKRAFVETWQSFYRKKLKEVWKPAV

SEQ ID NO: 28213 - protein, 978 aa, synthetic construct
  REGION 1..978: note = engineered CasX variant
QEIKRISGIRRRLVKDSNTKKAGKTGPMKTLLVRVMTPDLRERLENLRKKPENIPQPISNTSRANLNKLLTDYTEMKKAILHVYWEEFQKDPVGLMSRVAQPASKKIDQNKLKPEMDEKGNLTTAGFACSQCGQPLFVYKLEQVSEKGKAYTNYFGRCNVAEHEKLILLAQLKPEKDSDEAVTYSLGKFGQRALDFYSIHVTKESTHPVKPLAQIAGNRYASGPVGKALSDACMGTIASFLSKYQDIIIEHQKVVKGNQKRLESLRELAGKENLEYPSVTLPPQPHTKEGVDAYNEVIARVRMWVNLNLWQKLKLSRDDAKPLLRLKGFPSFPLVERQANEVDWWDMVCNVKKLINEKKEDGKVFWQNLAGYKRQEALRPYLSSEEDRKKGKKFARYQLGDLLLHLEKKHGEDWGKVYDEAWERIDKKVEGLSKHIKLEEERRSEDAQSKAALTDWLRAKASFVIEGLKEADKDEFCRCELKLQKWYGDLRGKPFAIEAENSILDISGFSKQYNCAFIWQKDGVKKLNLYLIINYFKGGKLRFKKIKPEAFEANRFYTVINKKSGEIVPMEVNFNFDDPNLIILPLAFGKRQGREFIWNDLLSLETGSLKLANGRVIEKTLYNRRTRQDEPALFVALTFERREVLDSSNIKPMNLIGVDRGENIPAVIALTDPEGCPLSRFKDSLGNPTHILRIGESYKEKQRTIQAKKEVEQRRAGGYSRKYASKAKNLADDMVRNTARDLLYYAVTQDAMLIFENLSRGFGRQGKRTFMAERQYTRMEDWLTAKLAYEGLPSKTYLSKTLAQYTSKTCSNCGFTITSADYDRVLEKLKKTATGWMTTINGKELKVEGQITYYNRYKRQNVVKDLSVELDRLSEESVNNDISSWTKGRSGEALSLLKKRFSHRPVQEKFVCLNCGFETHADEQAALNIARSWLFLRSQEYKKYQTNKTTGNTDKRAFVETWQSFYRKKLKEVWKPAV

SEQ ID NO: 28214 - protein, 978 aa, synthetic construct
  REGION 1..978: note = engineered CasX variant
QEIKRISKIRRRLVKDSNTKKAGKTGPMKTLLVPVMTPDLRERLENLRKKPENIPQPISNTSRANLNKLLTDYTEMKKAILHVYWEEFQKDPVGLMSRVAQPASKKIDQNKLKPEMDEKGNLTTAGFACSQCGQPLFVYKLEQVSEKGKAYTNYFGRCNVAEHEKLILLAQLKPEKDSDEAVTYSLGKFGQRALDFYSIHVTKESTHPVKPLAQIAGNRYASGPVGKALSDACMGTIASFLSKYQDIIIEHQKVVKGNQKRLESLRELAGKENLEYPSVTLPPQPHTKEGVDAYNEVIARVRMWVNLNLWQKLKLSRDDAKPLLRLKGFPSFPLVERQANEVDWWDMVCNVKKLINEKKEDGKVFWQNLAGYKRQEALRPYLSSEEDRKKGKKFARYQLGDLLLHLEKKHGEDWGKVYDEAWERIDKKVEGLSKHIKLEEERRSEDAQSKAALTDWLRAKASFVIEGLKEADKDEFCRCELKLQKWYGDLRGKPFAIEAENSILDISGFSKQYNCAFIWQKDGVKKLNLYLIINYFKGGKLRFKKIKPEAFEANRFYTVINKKSGEIVPMEVNFNFDDPNLIILPLAFGKRQGREFIWNDLLSLETGSLKLANGRVIEKTLYNRRTRQDEPALFVALTFERREVLDSSNIKPMNLIGVDRGENIPAVIALTDPEGCPLSRFKDSLGNPTHILRIGESYKEKQRTIQAKKEVEQRRAGGYSRKYASKAKNLADDMVRNTARDLLYYAVTQDAMLIFENLSRGFGRQGKRTFMAERQYTRMEDWLTAKLAYEGLPSKTYLSKTLAQYTSKTCSNCGFTITSADYDRVLEKLKKTATGWMTTINGKELKVEGQITYYNRYKRQNVVKDLSVELDRLSEESVNNDISSWTKGRSGEALSLLKKRFSHRPVQEKFVCLNCGFETHADEQAALNIARSWLFLRSQEYKKYQTNKTTGNTDKRAFVETWQSFYRKKLKEVWKPAV

SEQ ID NO: 28215 - protein, 978 aa, synthetic construct
  REGION 1..978: note = engineered CasX variant
QEIKRISKIRRRLVKDSNTKKAGKTGPMKTLLVRVMTPDLRERLENLRKKPPNIPQPISNTSRANLNKLLTDYTEMKKAILHVYWEEFQKDPVGLMSRVAQPASKKIDQNKLKPEMDEKGNLTTAGFACSQCGQPLFVYKLEQVSEKGKAYTNYFGRCNVAEHEKLILLAQLKPEKDSDEAVTYSLGKFGQRALDFYSIHVTKESTHPVKPLAQIAGNRYASGPVGKALSDACMGTIASFLSKYQDIIIEHQKVVKGNQKRLESLRELAGKENLEYPSVTLPPQPHTKEGVDAYNEVIARVRMWVNLNLWQKLKLSRDDAKPLLRLKGFPSFPLVERQANEVDWWDMVCNVKKLINEKKEDGKVFWQNLAGYKRQEALRPYLSSEEDRKKGKKFARYQLGDLLLHLEKKHGEDWGKVYDEAWERIDKKVEGLSKHIKLEEERRSEDAQSKAALTDWLRAKASFVIEGLKEADKDEFCRCELKLQKWYGDLRGKPFAIEAENSILDISGFSKQYNCAFIWQKDGVKKLNLYLIINYFKGGKLRFKKIKPEAFEANRFYTVINKKSGEIVPMEVNFNFDDPNLIILPLAFGKRQGREFIWNDLLSLETGSLKLANGRVIEKTLYNRRTRQDEPALFVALTFERREVLDSSNIKPMNLIGVDRGENIPAVIALTDPEGCPLSRFKDSLGNPTHILRIGESYKEKQRTIQAKKEVEQRRAGGYSRKYASKAKNLADDMVRNTARDLLYYAVTQDAMLIFENLSRGFGRQGKRTFMAERQYTRMEDWLTAKLAYEGLPSKTYLSKTLAQYTSKTCSNCGFTITSADYDRVLEKLKKTATGWMTTINGKELKVEGQITYYNRYKRQNVVKDLSVELDRLSEESVNNDISSWTKGRSGEALSLLKKRFSHRPVQEKFVCLNCGFETHADEQAALNIARSWLFLRSQEYKKYQTNKTTGNTDKRAFVETWQSFYRKKLKEVWKPAV

SEQ ID NO: 28216 - protein, 978 aa, synthetic construct
  REGION 1..978: note = engineered CasX variant
QEIKRISKIRRRLVKDSNTKKAGKTGPMKTLLVRVMTPDLRERLENLRKKPENIPQPISNTSQANLNKLLTDYTEMKKAILHVYWEEFQKDPVGLMSRVAQPASKKIDQNKLKPEMDEKGNLTTAGFACSQCGQPLFVYKLEQVSEKGKAYTNYFGRCNVAEHEKLILLAQLKPEKDSDEAVTYSLGKFGQRALDFYSIHVTKESTHPVKPLAQIAGNRYASGPVGKALSDACMGTIASFLSKYQDIIIEHQKVVKGNQKRLESLRELAGKENLEYPSVTLPPQPHTKEGVDAYNEVIARVRMWVNLNLWQKLKLSRDDAKPLLRLKGFPSFPLVERQANEVDWWDMVCNVKKLINEKKEDGKVFWQNLAGYKRQEALRPYLSSEEDRKKGKKFARYQLGDLLLHLEKKHGEDWGKVYDEAWERIDKKVEGLSKHIKLEEERRSEDAQSKAALTDWLRAKASFVIEGLKEADKDEFCRCELKLQKWYGDLRGKPFAIEAENSILDISGFSKQYNCAFIWQKDGVKKLNLYLIINYFKGGKLRFKKIKPEAFEANRFYTVINKKSGEIVPMEVNFNFDDPNLIILPLAFGKRQGREFIWNDLLSLETGSLKLANGRVIEKTLYNRRTRQDEPALFVALTFERREVLDSSNIKPMNLIGVDRGENIPAVIALTDPEGCPLSRFKDSLGNPTHILRIGESYKEKQRTIQAKKEVEQRRAGGYSRKYASKAKNLADDMVRNTARDLLYYAVTQDAMLIFENLSRGFGRQGKRTFMAERQYTRMEDWLTAKLAYEGLPSKTYLSKTLAQYTSKTCSNCGFTITSADYDRVLEKLKKTATGWMTTINGKELKVEGQITYYNRYKRQNVVKDLSVELDRLSEESVNNDISSWTKGRSGEALSLLKKRFSHRPVQEKFVCLNCGFETHADEQAALNIARSWLFLRSQEYKKYQTNKTTGNTDKRAFVETWQSFYRKKLKEVWKPAV

SEQ ID NO: 28217 - protein, 978 aa, synthetic construct
  REGION 1..978: note = engineered CasX variant
QEIKRISKIRRRLVKDSNTKKAGKTGPMKTLLVRVMTPDLRERLENLRKKPENIPQPISNTSRANLNKLLTDYTEMKKAILHVYDEEFQKDPVGLMSRVAQPASKKIDQNKLKPEMDEKGNLTTAGFACSQCGQPLFVYKLEQVSEKGKAYTNYFGRCNVAEHEKLILLAQLKPEKDSDEAVTYSLGKFGQRALDFYSIHVTKESTHPVKPLAQIAGNRYASGPVGKALSDACMGTIASFLSKYQDIIIEHQKVVKGNQKRLESLRELAGKENLEYPSVTLPPQPHTKEGVDAYNEVIARVRMWVNLNLWQKLKLSRDDAKPLLRLKGFPSFPLVERQANEVDWWDMVCNVKKLINEKKEDGKVFWQNLAGYKRQEALRPYLSSEEDRKKGKKFARYQLGDLLLHLEKKHGEDWGKVYDEAWERIDKKVEGLSKHIKLEEERRSEDAQSKAALTDWLRAKASFVIEGLKEADKDEFCRCELKLQKWYGDLRGKPFAIEAENSILDISGFSKQYNCAFIWQKDGVKKLNLYLIINYFKGGKLRFKKIKPEAFEANRFYTVINKKSGEIVPMEVNFNFDDPNLIILPLAFGKRQGREFIWNDLLSLETGSLKLANGRVIEKTLYNRRTRQDEPALFVALTFERREVLDSSNIKPMNLIGVDRGENIPAVIALTDPEGCPLSRFKDSLGNPTHILRIGESYKEKQRTIQAKKEVEQRRAGGYSRKYASKAKNLADDMVRNTARDLLYYAVTQDAMLIFENLSRGFGRQGKRTFMAERQYTRMEDWLTAKLAYEGLPSKTYLSKTLAQYTSKTCSNCGFTITSADYDRVLEKLKKTATGWMTTINGKELKVEGQITYYNRYKRQNVVKDLSVELDRLSEESVNNDISSWTKGRSGEALSLLKKRFSHRPVQEKFVCLNCGFETHADEQAALNIARSWLFLRSQEYKKYQTNKTTGNTDKRAFVETWQSFYRKKLKEVWKPAV

SEQ ID NO: 28218 - protein, 978 aa, synthetic construct
  REGION 1..978: note = engineered CasX variant
QEIKRISKIRRRLVKDSNTKKAGKTGPMKTLLVRVMTPDLRERLENLRKKPENIPQPISNTSRANLNKLLTDYTEMKKAILHVYWEEFQKDPVGLMSRVAQPASKKIDQNKLKPEMDEKGNLTTAGFACSQCGQPLFVYKLEQVSEKGKAYTNYFGRCNVAEHEKLIKLAQLKPEKDSDEAVTYSLGKFGQRALDFYSIHVTKESTHPVKPLAQIAGNRYASGPVGKALSDACMGTIASFLSKYQDIIIEHQKVVKGNQKRLESLRELAGKENLEYPSVTLPPQPHTKEGVDAYNEVIARVRMWVNLNLWQKLKLSRDDAKPLLRLKGFPSFPLVERQANEVDWWDMVCNVKKLINEKKEDGKVFWQNLAGYKRQEALRPYLSSEEDRKKGKKFARYQLGDLLLHLEKKHGEDWGKVYDEAWERIDKKVEGLSKHIKLEEERRSEDAQSKAALTDWLRAKASFVIEGLKEADKDEFCRCELKLQKWYGDLRGKPFAIEAENSILDISGFSKQYNCAFIWQKDGVKKLNLYLIINYFKGGKLRFKKIKPEAFEANRFYTVINKKSGEIVPMEVNFNFDDPNLIILPLAFGKRQGREFIWNDLLSLETGSLKLANGRVIEKTLYNRRTRQDEPALFVALTFERREVLDSSNIKPMNLIGVDRGENIPAVIALTDPEGCPLSRFKDSLGNPTHILRIGESYKEKQRTIQAKKEVEQRRAGGYSRKYASKAKNLADDMVRNTARDLLYYAVTQDAMLIFENLSRGFGRQGKRTFMAERQYTRMEDWLTAKLAYEGLPSKTYLSKTLAQYTSKTCSNCGFTITSADYDRVLEKLKKTATGWMTTINGKELKVEGQITYYNRYKRQNVVKDLSVELDRLSEESVNNDISSWTKGRSGEALSLLKKRFSHRPVQEKFVCLNCGFETHADEQAALNIARSWLFLRSQEYKKYQTNKTTGNTDKRAFVETWQSFYRKKLKEVWKPAV

SEQ ID NO: 28219 - protein, 978 aa, synthetic construct
  REGION 1..978: note = engineered CasX variant
QEIKRISKIRRRLVKDSNTKKAGKTGPMKTLLVRVMTPDLRERLENLRKKPENIPQPISNTSRANLNKLLTDYTEMKKAILHVYWEEFQKDPVGLMSRVAQPASKKIDQNKLKPEMDEKGNLTTAGFACSQCGQPLFVYKLEQVSEKGKAYTNYFGRCNVAEHEKLILLYQLKPEKDSDEAVTYSLGKFGQRALDFYSIHVTKESTHPVKPLAQIAGNRYASGPVGKALSDACMGTIASFLSKYQDIIIEHQKVVKGNQKRLESLRELAGKENLEYPSVTLPPQPHTKEGVDAYNEVIARVRMWVNLNLWQKLKLSRDDAKPLLRLKGFPSFPLVERQANEVDWWDMVCNVKKLINEKKEDGKVFWQNLAGYKRQEALRPYLSSEEDRKKGKKFARYQLGDLLLHLEKKHGEDWGKVYDEAWERIDKKVEGLSKHIKLEEERRSEDAQSKAALTDWLRAKASFVIEGLKEADKDEFCRCELKLQKWYGDLRGKPFAIEAENSILDISGFSKQYNCAFIWQKDGVKKLNLYLIINYFKGGKLRFKKIKPEAFEANRFYTVINKKSGEIVPMEVNFNFDDPNLIILPLAFGKRQGREFIWNDLLSLETGSLKLANGRVIEKTLYNRRTRQDEPALFVALTFERREVLDSSNIKPMNLIGVDRGENIPAVIALTDPEGCPLSRFKDSLGNPTHILRIGESYKEKQRTIQAKKEVEQRRAGGYSRKYASKAKNLADDMVRNTARDLLYYAVTQDAMLIFENLSRGFGRQGKRTFMAERQYTRMEDWLTAKLAYEGLPSKTYLSKTLAQYTSKTCSNCGFTITSADYDRVLEKLKKTATGWMTTINGKELKVEGQITYYNRYKRQNVVKDLSVELDRLSEESVNNDISSWTKGRSGEALSLLKKRFSHRPVQEKFVCLNCGFETHADEQAALNIARSWLFLRSQEYKKYQTNKTTGNTDKRAFVETWQSFYRKKLKEVWKPAV

SEQ ID NO: 28220 - protein, 978 aa, synthetic construct
  REGION 1..978: note = engineered CasX variant
QEIKRISKIRRRLVKDSNTKKAGKTGPMKTLLVRVMTPDLRERLENLRKKPENIPQPISNTSRANLNKLLTDYTEMKKAILHVYWEEFQKDPVGLMSRVAQPASKKIDQNKLKPEMDEKGNLTTAGFACSQCGQPLFVYKLEQVSEKGKAYTNYFGRCNVAEHEKLILLSQLKPEKDSDEAVTYSLGKFGQRALDFYSIHVTKESTHPVKPLAQIAGNRYASGPVGKALSDACMGTIASFLSKYQDIIIEHQKVVKGNQKRLESLRELAGKENLEYPSVTLPPQPHTKEGVDAYNEVIARVRMWVNLNLWQKLKLSRDDAKPLLRLKGFPSFPLVERQANEVDWWDMVCNVKKLINEKKEDGKVFWQNLAGYKRQEALRPYLSSEEDRKKGKKFARYQLGDLLLHLEKKHGEDWGKVYDEAWERIDKKVEGLSKHIKLEEERRSEDAQSKAALTDWLRAKASFVIEGLKEADKDEFCRCELKLQKWYGDLRGKPFAIEAENSILDISGFSKQYNCAFIWQKDGVKKLNLYLIINYFKGGKLRFKKIKPEAFEANRFYTVINKKSGEIVPMEVNFNFDDPNLIILPLAFGKRQGREFIWNDLLSLETGSLKLANGRVIEKTLYNRRTRQDEPALFVALTFERREVLDSSNIKPMNLIGVDRGENIPAVIALTDPEGCPLSRFKDSLGNPTHILRIGESYKEKQRTIQAKKEVEQRRAGGYSRKYASKAKNLADDMVRNTARDLLYYAVTQDAMLIFENLSRGFGRQGKRTFMAERQYTRMEDWLTAKLAYEGLPSKTYLSKTLAQYTSKTCSNCGFTITSADYDRVLEKLKKTATGWMTTINGKELKVEGQITYYNRYKRQNVVKDLSVELDRLSEESVNNDISSWTKGRSGEALSLLKKRFSHRPVQEKFVCLNCGFETHADEQAALNIARSWLFLRSQEYKKYQTNKTTGNTDKRAFVETWQSFYRKKLKEVWKPAV

SEQ ID NO: 28221 - protein, 977 aa, synthetic construct
  REGION 1..977: note = engineered CasX variant
QEIKRISKIRRRLVKDSNTKKAGKTGPMKTLLVRVMTPDLRERLENLRKKPENIPQPISNTSRANLNKLLTDYTEMKKAILHVYWEEFQKDPVGLMSRVAQPASKKIDQNKLKPEMDEKGNLTTAGFACSQCGQPLFVYKLEQVSEKGKAYTNYFGRCNVAEHEKLILLAQLKPEKDSDEAVTYSLGKFGQRALDFYSIHVTKESTHPVKPLAQIAGNRYASPVGKALSDACMGTIASFLSKYQDIIIEHQKVVKGNQKRLESLRELAGKENLEYPSVTLPPQPHTKEGVDAYNEVIARVRMWVNLNLWQKLKLSRDDAKPLLRLKGFPSFPLVERQANEVDWWDMVCNVKKLINEKKEDGKVFWQNLAGYKRQEALRPYLSSEEDRKKGKKFARYQLGDLLLHLEKKHGEDWGKVYDEAWERIDKKVEGLSKHIKLEEERRSEDAQSKAALTDWLRAKASFVIEGLKEADKDEFCRCELKLQKWYGDLRGKPFAIEAENSILDISGFSKQYNCAFIWQKDGVKKLNLYLIINYFKGGKLRFKKIKPEAFEANRFYTVINKKSGEIVPMEVNFNFDDPNLIILPLAFGKRQGREFIWNDLLSLETGSLKLANGRVIEKTLYNRRTRQDEPALFVALTFERREVLDSSNIKPMNLIGVDRGENIPAVIALTDPEGCPLSRFKDSLGNPTHILRIGESYKEKQRTIQAKKEVEQRRAGGYSRKYASKAKNLADDMVRNTARDLLYYAVTQDAMLIFENLSRGFGRQGKRTFMAERQYTRMEDWLTAKLAYEGLPSKTYLSKTLAQYTSKTCSNCGFTITSADYDRVLEKLKKTATGWMTTINGKELKVEGQITYYNRYKRQNVVKDLSVELDRLSEESVNNDISSWTKGRSGEALSLLKKRFSHRPVQEKFVCLNCGFETHADEQAALNIARSWLFLRSQEYKKYQTNKTTGNTDKRAFVETWQSFYRKKLKEVWKPAV

SEQ ID NO: 28222 - protein, 978 aa, synthetic construct
  REGION 1..978: note = engineered CasX variant
QEIKRISKIRRRLVKDSNTKKAGKTGPMKTLLVRVMTPDLRERLENLRKKPENIPQPISNTSRANLNKLLTDYTEMKKAILHVYWEEFQKDPVGLMSRVAQPASKKIDQNKLKPEMDEKGNLTTAGFACSQCGQPLFVYKLEQVSEKGKAYTNYFGRCNVAEHEKLILLAQLKPEKDSDEAVTYSLGKFGQRALDFYSIHVTKESTHPVKPLAQIAGNRYASGPVGKALSDACMGTIASFLSKYQDIIIEHQKVVKGNQKRLESLRELAGKENLEYPSVTLPPQPHTSEGVDAYNEVIARVRMWVNLNLWQKLKLSRDDAKPLLRLKGFPSFPLVERQANEVDWWDMVCNVKKLINEKKEDGKVFWQNLAGYKRQEALRPYLSSEEDRKKGKKFARYQLGDLLLHLEKKHGEDWGKVYDEAWERIDKKVEGLSKHIKLEEERRSEDAQSKAALTDWLRAKASFVIEGLKEADKDEFCRCELKLQKWYGDLRGKPFAIEAENSILDISGFSKQYNCAFIWQKDGVKKLNLYLIINYFKGGKLRFKKIKPEAFEANRFYTVINKKSGEIVPMEVNFNFDDPNLIILPLAFGKRQGREFIWNDLLSLETGSLKLANGRVIEKTLYNRRTRQDEPALFVALTFERREVLDSSNIKPMNLIGVDRGENIPAVIALTDPEGCPLSRFKDSLGNPTHILRIGESYKEKQRTIQAKKEVEQRRAGGYSRKYASKAKNLADDMVRNTARDLLYYAVTQDAMLIFENLSRGFGRQGKRTFMAERQYTRMEDWLTAKLAYEGLPSKTYLSKTLAQYTSKTCSNCGFTITSADYDRVLEKLKKTATGWMTTINGKELKVEGQITYYNRYKRQNVVKDLSVELDRLSEESVNNDISSWTKGRSGEALSLLKKRFSHRPVQEKFVCLNCGFETHADEQAALNIARSWLFLRSQEYKKYQTNKTTGNTDKRAFVETWQSFYRKKLKEVWKPAV

SEQ ID NO: 28223 - protein, 978 aa, synthetic construct
  REGION 1..978: note = engineered CasX variant
QEIKRISKIRRRLVKDSNTKKAGKTGPMKTLLVRVMTPDLRERLENLRKKPENIPQPISNTSRANLNKLLTDYTEMKKAILHVYWEEFQKDPVGLMSRVAQPASKKIDQNKLKPEMDEKGNLTTAGFACSQCGQPLFVYKLEQVSEKGKAYTNYFGRCNVAEHEKLILLAQLKPEKDSDEAVTYSLGKFGQRALDFYSIHVTKESTHPVKPLAQIAGNRYASGPVGKALSDACMGTIASFLSKYQDIIIEHQKVVKGNQKRLESLRELAGKENLEYPSVTLPPQPHTKEGLDAYNEVIARVRMWVNLNLWQKLKLSRDDAKPLLRLKGFPSFPLVERQANEVDWWDMVCNVKKLINEKKEDGKVFWQNLAGYKRQEALRPYLSSEEDRKKGKKFARYQLGDLLLHLEKKHGEDWGKVYDEAWERIDKKVEGLSKHIKLEEERRSEDAQSKAALTDWLRAKASFVIEGLKEADKDEFCRCELKLQKWYGDLRGKPFAIEAENSILDISGFSKQYNCAFIWQKDGVKKLNLYLIINYFKGGKLRFKKIKPEAFEANRFYTVINKKSGEIVPMEVNFNFDDPNLIILPLAFGKRQGREFIWNDLLSLETGSLKLANGRVIEKTLYNRRTRQDEPALFVALTFERREVLDSSNIKPMNLIGVDRGENIPAVIALTDPEGCPLSRFKDSLGNPTHILRIGESYKEKQRTIQAKKEVEQRRAGGYSRKYASKAKNLADDMVRNTARDLLYYAVTQDAMLIFENLSRGFGRQGKRTFMAERQYTRMEDWLTAKLAYEGLPSKTYLSKTLAQYTSKTCSNCGFTITSADYDRVLEKLKKTATGWMTTINGKELKVEGQITYYNRYKRQNVVKDLSVELDRLSEESVNNDISSWTKGRSGEALSLLKKRFSHRPVQEKFVCLNCGFETHADEQAALNIARSWLFLRSQEYKKYQTNKTTGNTDKRAFVETWQSFYRKKLKEVWKPAV

SEQ ID NO: 28224 - protein, 978 aa, synthetic construct
  REGION 1..978: note = engineered CasX variant
QEIKRISKIRRRLVKDSNTKKAGKTGPMKTLLVRVMTPDLRERLENLRKKPENIPQPISNTSRANLNKLLTDYTEMKKAILHVYWEEFQKDPVGLMSRVAQPASKKIDQNKLKPEMDEKGNLTTAGFACSQCGQPLFVYKLEQVSEKGKAYTNYFGRCNVAEHEKLILLAQLKPEKDSDEAVTYSLGKFGQRALDFYSIHVTKESTHPVKPLAQIAGNRYASGPVGKALSDACMGTIASFLSKYQDIIIEHQKVVKGNQKRLESLRELAGKENLEYPSVTLPPQPHTKEGVDAYNEVIARVRTWVNLNLWQKLKLSRDDAKPLLRLKGFPSFPLVERQANEVDWWDMVCNVKKLINEKKEDGKVFWQNLAGYKRQEALRPYLSSEEDRKKGKKFARYQLGDLLLHLEKKHGEDWGKVYDEAWERIDKKVEGLSKHIKLEEERRSEDAQSKAALTDWLRAKASFVIEGLKEADKDEFCRCELKLQKWYGDLRGKPFAIEAENSILDISGFSKQYNCAFIWQKDGVKKLNLYLIINYFKGGKLRFKKIKPEAFEANRFYTVINKKSGEIVPMEVNFNFDDPNLIILPLAFGKRQGREFIWNDLLSLETGSLKLANGRVIEKTLYNRRTRQDEPALFVALTFERREVLDSSNIKPMNLIGVDRGENIPAVIALTDPEGCPLSRFKDSLGNPTHILRIGESYKEKQRTIQAKKEVEQRRAGGYSRKYASKAKNLADDMVRNTARDLLYYAVTQDAMLIFENLSRGFGRQGKRTFMAERQYTRMEDWLTAKLAYEGLPSKTYLSKTLAQYTSKTCSNCGFTITSADYDRVLEKLKKTATGWMTTINGKELKVEGQITYYNRYKRQNVVKDLSVELDRLSEESVNNDISSWTKGRSGEALSLLKKRFSHRPVQEKFVCLNCGFETHADEQAALNIARSWLFLRSQEYKKYQTNKTTGNTDKRAFVETWQSFYRKKLKEVWKPAV

SEQ ID NO: 28225 - protein, 978 aa, synthetic construct
  REGION 1..978: note = engineered CasX variant
QEIKRISKIRRRLVKDSNTKKAGKTGPMKTLLVRVMTPDLRERLENLRKKPENIPQPISNTSRANLNKLLTDYTEMKKAILHVYWEEFQKDPVGLMSRVAQPASKKIDQNKLKPEMDEKGNLTTAGFACSQCGQPLFVYKLEQVSEKGKAYTNYFGRCNVAEHEKLILLAQLKPEKDSDEAVTYSLGKFGQRALDFYSIHVTKESTHPVKPLAQIAGNRYASGPVGKALSDACMGTIASFLSKYQDIIIEHQKVVKGNQKRLESLRELAGKENLEYPSVTLPPQPHTKEGVDAYNEVIARVRWWVNLNLWQKLKLSRDDAKPLLRLKGFPSFPLVERQANEVDWWDMVCNVKKLINEKKEDGKVFWQNLAGYKRQEALRPYLSSEEDRKKGKKFARYQLGDLLLHLEKKHGEDWGKVYDEAWERIDKKVEGLSKHIKLEEERRSEDAQSKAALTDWLRAKASFVIEGLKEADKDEFCRCELKLQKWYGDLRGKPFAIEAENSILDISGFSKQYNCAFIWQKDGVKKLNLYLIINYFKGGKLRFKKIKPEAFEANRFYTVINKKSGEIVPMEVNFNFDDPNLIILPLAFGKRQGREFIWNDLLSLETGSLKLANGRVIEKTLYNRRTRQDEPALFVALTFERREVLDSSNIKPMNLIGVDRGENIPAVIALTDPEGCPLSRFKDSLGNPTHILRIGESYKEKQRTIQAKKEVEQRRAGGYSRKYASKAKNLADDMVRNTARDLLYYAVTQDAMLIFENLSRGFGRQGKRTFMAERQYTRMEDWLTAKLAYEGLPSKTYLSKTLAQYTSKTCSNCGFTITSADYDRVLEKLKKTATGWMTTINGKELKVEGQITYYNRYKRQNVVKDLSVELDRLSEESVNNDISSWTKGRSGEALSLLKKRFSHRPVQEKFVCLNCGFETHADEQAALNIARSWLFLRSQEYKKYQTNKTTGNTDKRAFVETWQSFYRKKLKEVWKPAV

SEQ ID NO: 28226 - protein, 979 aa, synthetic construct
  REGION 1..979: note = engineered CasX variant
QEIKRISKIRRRLVKDSNTKKAGKTGPMKTLLVRVMTPDLRERLENLRKKPENIPQPISNTSRANLNKLLTDYTEMKKAILHVYWEEFQKDPVGLMSRVAQPASKKIDQNKLKPEMDEKGNLTTAGFACSQCGQPLFVYKLEQVSEKGKAYTNYFGRCNVAEHEKLILLAQLKPEKDSDEAVTYSLGKFGQRALDFYSIHVTKESTHPVKPLAQIAGNRYASGPVGKALSDACMGTIASFLSKYQDIIIEHQKVVKGNQKRLESLRELAGKENLEYPSVTLPPQPHTKEGVDAYNEVIARVRMWVNLNLWQKLKLSRDDAKPLLRLKGFPSFPLVERQQANEVDWWDMVCNVKKLINEKKEDGKVFWQNLAGYKRQEALRPYLSSEEDRKKGKKFARYQLGDLLLHLEKKHGEDWGKVYDEAWERIDKKVEGLSKHIKLEEERRSEDAQSKAALTDWLRAKASFVIEGLKEADKDEFCRCELKLQKWYGDLRGKPFAIEAENSILDISGFSKQYNCAFIWQKDGVKKLNLYLIINYFKGGKLRFKKIKPEAFEANRFYTVINKKSGEIVPMEVNFNFDDPNLIILPLAFGKRQGREFIWNDLLSLETGSLKLANGRVIEKTLYNRRTRQDEPALFVALTFERREVLDSSNIKPMNLIGVDRGENIPAVIALTDPEGCPLSRFKDSLGNPTHILRIGESYKEKQRTIQAKKEVEQRRAGGYSRKYASKAKNLADDMVRNTARDLLYYAVTQDAMLIFENLSRGFGRQGKRTFMAERQYTRMEDWLTAKLAYEGLPSKTYLSKTLAQYTSKTCSNCGFTITSADYDRVLEKLKKTATGWMTTINGKELKVEGQITYYNRYKRQNVVKDLSVELDRLSEESVNNDISSWTKGRSGEALSLLKKRFSHRPVQEKFVCLNCGFETHADEQAALNIARSWLFLRSQEYKKYQTNKTTGNTDKRAFVETWQSFYRKKLKEVWKPAV

SEQ ID NO: 28227 - protein, 979 aa, synthetic construct
  REGION 1..979: note = engineered CasX variant
QEIKRISKIRRRLVKDSNTKKAGKTGPMKTLLVRVMTPDLRERLENLRKKPENIPQPISNTSRANLNKLLTDYTEMKKAILHVYWEEFQKDPVGLMSRVAQPASKKIDQNKLKPEMDEKGNLTTAGFACSQCGQPLFVYKLEQVSEKGKAYTNYFGRCNVAEHEKLILLAQLKPEKDSDEAVTYSLGKFGQRALDFYSIHVTKESTHPVKPLAQIAGNRYASGPVGKALSDACMGTIASFLSKYQDIIIEHQKVVKGNQKRLESLRELAGKENLEYPSVTLPPQPHTKEGVDAYNEVIARVRMWVNLNLWQKLKLSRDDAKPLLRLKGFPSFPLVERQANAEVDWWDMVCNVKKLINEKKEDGKVFWQNLAGYKRQEALRPYLSSEEDRKKGKKFARYQLGDLLLHLEKKHGEDWGKVYDEAWERIDKKVEGLSKHIKLEEERRSEDAQSKAALTDWLRAKASFVIEGLKEADKDEFCRCELKLQKWYGDLRGKPFAIEAENSILDISGFSKQYNCAFIWQKDGVKKLNLYLIINYFKGGKLRFKKIKPEAFEANRFYTVINKKSGEIVPMEVNFNFDDPNLIILPLAFGKRQGREFIWNDLLSLETGSLKLANGRVIEKTLYNRRTRQDEPALFVALTFERREVLDSSNIKPMNLIGVDRGENIPAVIALTDPEGCPLSRFKDSLGNPTHILRIGESYKEKQRTIQAKKEVEQRRAGGYSRKYASKAKNLADDMVRNTARDLLYYAVTQDAMLIFENLSRGFGRQGKRTFMAERQYTRMEDWLTAKLAYEGLPSKTYLSKTLAQYTSKTCSNCGFTITSADYDRVLEKLKKTATGWMTTINGKELKVEGQITYYNRYKRQNVVKDLSVELDRLSEESVNNDISSWTKGRSGEALSLLKKRFSHRPVQEKFVCLNCGFETHADEQAALNIARSWLFLRSQEYKKYQTNKTTGNTDKRAFVETWQSFYRKKLKEVWKPAV

SEQ ID NO: 28228 - protein, 978 aa, synthetic construct
  REGION 1..978: note = engineered CasX variant
QEIKRISKIRRRLVKDSNTKKAGKTGPMKTLLVRVMTPDLRERLENLRKKPENIPQPISNTSRANLNKLLTDYTEMKKAILHVYWEEFQKDPVGLMSRVAQPASKKIDQNKLKPEMDEKGNLTTAGFACSQCGQPLFVYKLEQVSEKGKAYTNYFGRCNVAEHEKLILLAQLKPEKDSDEAVTYSLGKFGQRALDFYSIHVTKESTHPVKPLAQIAGNRYASGPVGKALSDACMGTIASFLSKYQDIIIEHQKVVKGNQKRLESLRELAGKENLEYPSVTLPPQPHTKEGVDAYNEVIARVRMWVNLNLWQKLKLSRDDAKPLLRLKGFPSFPLVERQANEVDWWDMVCNVKKLINEKKEDGKVFWQNLAGYKRQEALRPYLSSEEDRKKGKKFARTQLGDLLLHLEKKHGEDWGKVYDEAWERIDKKVEGLSKHIKLEEERRSEDAQSKAALTDWLRAKASFVIEGLKEADKDEFCRCELKLQKWYGDLRGKPFAIEAENSILDISGFSKQYNCAFIWQKDGVKKLNLYLIINYFKGGKLRFKKIKPEAFEANRFYTVINKKSGEIVPMEVNFNFDDPNLIILPLAFGKRQGREFIWNDLLSLETGSLKLANGRVIEKTLYNRRTRQDEPALFVALTFERREVLDSSNIKPMNLIGVDRGENIPAVIALTDPEGCPLSRFKDSLGNPTHILRIGESYKEKQRTIQAKKEVEQRRAGGYSRKYASKAKNLADDMVRNTARDLLYYAVTQDAMLIFENLSRGFGRQGKRTFMAERQYTRMEDWLTAKLAYEGLPSKTYLSKTLAQYTSKTCSNCGFTITSADYDRVLEKLKKTATGWMTTINGKELKVEGQITYYNRYKRQNVVKDLSVELDRLSEESVNNDISSWTKGRSGEALSLLKKRFSHRPVQEKFVCLNCGFETHADEQAALNIARSWLFLRSQEYKKYQTNKTTGNTDKRAFVETWQSFYRKKLKEVWKPAV

SEQ ID NO: 28229 - protein, 979 aa, synthetic construct
  REGION 1..979: note = engineered CasX variant
QEIKRISKIRRRLVKDSNTKKAGKTGPMKTLLVRVMTPDLRERLENLRKKPENIPQPISNTSRANLNKLLTDYTEMKKAILHVYWEEFQKDPVGLMSRVAQPASKKIDQNKLKPEMDEKGNLTTAGFACSQCGQPLFVYKLEQVSEKGKAYTNYFGRCNVAEHEKLILLAQLKPEKDSDEAVTYSLGKFGQRALDFYSIHVTKESTHPVKPLAQIAGNRYASGPVGKALSDACMGTIASFLSKYQDIIIEHQKVVKGNQKRLESLRELAGKENLEYPSVTLPPQPHTKEGVDAYNEVIARVRMWVNLNLWQKLKLSRDDAKPLLRLKGFPSFPLVERQANEVDWWDMVCNVKKLINEKKEDGKVFWQNLAGYKRQEALRPYLSSEEDRKKGKKFARYQLGDLLLHLEKKHEGEDWGKVYDEAWERIDKKVEGLSKHIKLEEERRSEDAQSKAALTDWLRAKASFVIEGLKEADKDEFCRCELKLQKWYGDLRGKPFAIEAENSILDISGFSKQYNCAFIWQKDGVKKLNLYLIINYFKGGKLRFKKIKPEAFEANRFYTVINKKSGEIVPMEVNFNFDDPNLIILPLAFGKRQGREFIWNDLLSLETGSLKLANGRVIEKTLYNRRTRQDEPALFVALTFERREVLDSSNIKPMNLIGVDRGENIPAVIALTDPEGCPLSRFKDSLGNPTHILRIGESYKEKQRTIQAKKEVEQRRAGGYSRKYASKAKNLADDMVRNTARDLLYYAVTQDAMLIFENLSRGFGRQGKRTFMAERQYTRMEDWLTAKLAYEGLPSKTYLSKTLAQYTSKTCSNCGFTITSADYDRVLEKLKKTATGWMTTINGKELKVEGQITYYNRYKRQNVVKDLSVELDRLSEESVNNDISSWTKGRSGEALSLLKKRFSHRPVQEKFVCLNCGFETHADEQAALNIARSWLFLRSQEYKKYQTNKTTGNTDKRAFVETWQSFYRKKLKEVWKPAV

SEQ ID NO: 28230 - protein, 978 aa, synthetic construct
  REGION 1..978: note = engineered CasX variant
QEIKRISKIRRRLVKDSNTKKAGKTGPMKTLLVRVMTPDLRERLENLRKKPENIPQPISNTSRANLNKLLTDYTEMKKAILHVYWEEFQKDPVGLMSRVAQPASKKIDQNKLKPEMDEKGNLTTAGFACSQCGQPLFVYKLEQVSEKGKAYTNYFGRCNVAEHEKLILLAQLKPEKDSDEAVTYSLGKFGQRALDFYSIHVTKESTHPVKPLAQIAGNRYASGPVGKALSDACMGTIASFLSKYQDIIIEHQKVVKGNQKRLESLRELAGKENLEYPSVTLPPQPHTKEGVDAYNEVIARVRMWVNLNLWQKLKLSRDDAKPLLRLKGFPSFPLVERQANEVDWWDMVCNVKKLINEKKEDGKVFWQNLAGYKRQEALRPYLSSEEDRKKGKKFARYQLGDLLLHLEKKHGEDWGKVYDEAWERIDKKVEGLSKHIKLEEERRSEDAQSKAALTDWLRAKASFVIEGLKEADKDEFCRCDLKLQKWYGDLRGKPFAIEAENSILDISGFSKQYNCAFIWQKDGVKKLNLYLIINYFKGGKLRFKKIKPEAFEANRFYTVINKKSGEIVPMEVNFNFDDPNLIILPLAFGKRQGREFIWNDLLSLETGSLKLANGRVIEKTLYNRRTRQDEPALFVALTFERREVLDSSNIKPMNLIGVDRGENIPAVIALTDPEGCPLSRFKDSLGNPTHILRIGESYKEKQRTIQAKKEVEQRRAGGYSRKYASKAKNLADDMVRNTARDLLYYAVTQDAMLIFENLSRGFGRQGKRTFMAERQYTRMEDWLTAKLAYEGLPSKTYLSKTLAQYTSKTCSNCGFTITSADYDRVLEKLKKTATGWMTTINGKELKVEGQITYYNRYKRQNVVKDLSVELDRLSEESVNNDISSWTKGRSGEALSLLKKRFSHRPVQEKFVCLNCGFETHADEQAALNIARSWLFLRSQEYKKYQTNKTTGNTDKRAFVETWQSFYRKKLKEVWKPAV

SEQ ID NO: 28231 - protein, 978 aa, synthetic construct
  REGION 1..978: note = engineered CasX variant
QEIKRISKIRRRLVKDSNTKKAGKTGPMKTLLVRVMTPDLRERLENLRKKPENIPQPISNTSRANLNKLLTDYTEMKKAILHVYWEEFQKDPVGLMSRVAQPASKKIDQNKLKPEMDEKGNLTTAGFACSQCGQPLFVYKLEQVSEKGKAYTNYFGRCNVAEHEKLILLAQLKPEKDSDEAVTYSLGKFGQRALDFYSIHVTKESTHPVKPLAQIAGNRYASGPVGKALSDACMGTIASFLSKYQDIIIEHQKVVKGNQKRLESLRELAGKENLEYPSVTLPPQPHTKEGVDAYNEVIARVRMWVNLNLWQKLKLSRDDAKPLLRLKGFPSFPLVERQANEVDWWDMVCNVKKLINEKKEDGKVFWQNLAGYKRQEALRPYLSSEEDRKKGKKFARYQLGDLLLHLEKKHGEDWGKVYDEAWERIDKKVEGLSKHIKLEEERRSEDAQSKAALTDWLRAKASFVIEGLKEADKDEFCRCELKLQKWYGDLRGKPFAIEAENSILDISGFSKQYNCAFIWQKDGVKKLNLYLIINYFKGGKLRFKKIKPEAFEANRFYTVINKKSGEIVPMEVNFNFDDPNLIILPLAFGKRFGREFIWNDLLSLETGSLKLANGRVIEKTLYNRRTRQDEPALFVALTFERREVLDSSNIKPMNLIGVDRGENIPAVIALTDPEGCPLSRFKDSLGNPTHILRIGESYKEKQRTIQAKKEVEQRRAGGYSRKYASKAKNLADDMVRNTARDLLYYAVTQDAMLIFENLSRGFGRQGKRTFMAERQYTRMEDWLTAKLAYEGLPSKTYLSKTLAQYTSKTCSNCGFTITSADYDRVLEKLKKTATGWMTTINGKELKVEGQITYYNRYKRQNVVKDLSVELDRLSEESVNNDISSWTKGRSGEALSLLKKRFSHRPVQEKFVCLNCGFETHADEQAALNIARSWLFLRSQEYKKYQTNKTTGNTDKRAFVETWQSFYRKKLKEVWKPAV

SEQ ID NO: 28232 - protein, 978 aa, synthetic construct
  REGION 1..978: note = engineered CasX variant
QEIKRISKIRRRLVKDSNTKKAGKTGPMKTLLVRVMTPDLRERLENLRKKPENIPQPISNTSRANLNKLLTDYTEMKKAILHVYWEEFQKDPVGLMSRVAQPASKKIDQNKLKPEMDEKGNLTTAGFACSQCGQPLFVYKLEQVSEKGKAYTNYFGRCNVAEHEKLILLAQLKPEKDSDEAVTYSLGKFGQRALDFYSIHVTKESTHPVKPLAQIAGNRYASGPVGKALSDACMGTIASFLSKYQDIIIEHQKVVKGNQKRLESLRELAGKENLEYPSVTLPPQPHTKEGVDAYNEVIARVRMWVNLNLWQKLKLSRDDAKPLLRLKGFPSFPLVERQANEVDWWDMVCNVKKLINEKKEDGKVFWQNLAGYKRQEALRPYLSSEEDRKKGKKFARYQLGDLLLHLEKKHGEDWGKVYDEAWERIDKKVEGLSKHIKLEEERRSEDAQSKAALTDWLRAKASFVIEGLKEADKDEFCRCELKLQKWYGDLRGKPFAIEAENSILDISGFSKQYNCAFIWQKDGVKKLNLYLIINYFKGGKLRFKKIKPEAFEANRFYTVINKKSGEIVPMEVNFNFDDPNLIILPLAFGKRVGREFIWNDLLSLETGSLKLANGRVIEKTLYNRRTRQDEPALFVALTFERREVLDSSNIKPMNLIGVDRGENIPAVIALTDPEGCPLSRFKDSLGNPTHILRIGESYKEKQRTIQAKKEVEQRRAGGYSRKYASKAKNLADDMVRNTARDLLYYAVTQDAMLIFENLSRGFGRQGKRTFMAERQYTRMEDWLTAKLAYEGLPSKTYLSKTLAQYTSKTCSNCGFTITSADYDRVLEKLKKTATGWMTTINGKELKVEGQITYYNRYKRQNVVKDLSVELDRLSEESVNNDISSWTKGRSGEALSLLKKRFSHRPVQEKFVCLNCGFETHADEQAALNIARSWLFLRSQEYKKYQTNKTTGNTDKRAFVETWQSFYRKKLKEVWKPAV

SEQ ID NO: 28233 - protein, 979 aa, synthetic construct
  REGION 1..979: note = engineered CasX variant
QEIKRISKIRRRLVKDSNTKKAGKTGPMKTLLVRVMTPDLRERLENLRKKPENIPQPISNTSRANLNKLLTDYTEMKKAILHVYWEEFQKDPVGLMSRVAQPASKKIDQNKLKPEMDEKGNLTTAGFACSQCGQPLFVYKLEQVSEKGKAYTNYFGRCNVAEHEKLILLAQLKPEKDSDEAVTYSLGKFGQRALDFYSIHVTKESTHPVKPLAQIAGNRYASGPVGKALSDACMGTIASFLSKYQDIIIEHQKVVKGNQKRLESLRELAGKENLEYPSVTLPPQPHTKEGVDAYNEVIARVRMWVNLNLWQKLKLSRDDAKPLLRLKGFPSFPLVERQANEVDWWDMVCNVKKLINEKKEDGKVFWQNLAGYKRQEALRPYLSSEEDRKKGKKFARYQLGDLLLHLEKKHGEDWGKVYDEAWERIDKKVEGLSKHIKLEEERRSEDAQSKAALTDWLRAKASFVIEGLKEADKDEFCRCELKLQKWYGDLRGKPFAIEAENSILDISGFSKQYNCAFIWQKDGVKKLNLYLIINYFKGGKLRFKKIKPEAFEANRFYTVINKKSGEIVPMEVNFNFDDPNLIILPLAFGKRQGREFIWNDLLSLETGSLKLANGRVIEKTLYNRRTRQDEPALFVALTFERREVLDSSNIKTPMNLIGVDRGENIPAVIALTDPEGCPLSRFKDSLGNPTHILRIGESYKEKQRTIQAKKEVEQRRAGGYSRKYASKAKNLADDMVRNTARDLLYYAVTQDAMLIFENLSRGFGRQGKRTFMAERQYTRMEDWLTAKLAYEGLPSKTYLSKTLAQYTSKTCSNCGFTITSADYDRVLEKLKKTATGWMTTINGKELKVEGQITYYNRYKRQNVVKDLSVELDRLSEESVNNDISSWTKGRSGEALSLLKKRFSHRPVQEKFVCLNCGFETHADEQAALNIARSWLFLRSQEYKKYQTNKTTGNTDKRAFVETWQSFYRKKLKEVWKPAV

SEQ ID NO: 28234 - protein, 979 aa, synthetic construct
  REGION 1..979: note = engineered CasX variant
QEIKRISKIRRRLVKDSNTKKAGKTGPMKTLLVRVMTPDLRERLENLRKKPENIPQPISNTSRANLNKLLTDYTEMKKAILHVYWEEFQKDPVGLMSRVAQPASKKIDQNKLKPEMDEKGNLTTAGFACSQCGQPLFVYKLEQVSEKGKAYTNYFGRCNVAEHEKLILLAQLKPEKDSDEAVTYSLGKFGQRALDFYSIHVTKESTHPVKPLAQIAGNRYASGPVGKALSDACMGTIASFLSKYQDIIIEHQKVVKGNQKRLESLRELAGKENLEYPSVTLPPQPHTKEGVDAYNEVIARVRMWVNLNLWQKLKLSRDDAKPLLRLKGFPSFPLVERQANEVDWWDMVCNVKKLINEKKEDGKVFWQNLAGYKRQEALRPYLSSEEDRKKGKKFARYQLGDLLLHLEKKHGEDWGKVYDEAWERIDKKVEGLSKHIKLEEERRSEDAQSKAALTDWLRAKASFVIEGLKEADKDEFCRCELKLQKWYGDLRGKPFAIEAENSILDISGFSKQYNCAFIWQKDGVKKLNLYLIINYFKGGKLRFKKIKPEAFEANRFYTVINKKSGEIVPMEVNFNFDDPNLIILPLAFGKRQGREFIWNDLLSLETGSLKLANGRVIEKTLYNRRTRQDEPALFVALTFERREVLDSSNIKPMSNLIGVDRGENIPAVIALTDPEGCPLSRFKDSLGNPTHILRIGESYKEKQRTIQAKKEVEQRRAGGYSRKYASKAKNLADDMVRNTARDLLYYAVTQDAMLIFENLSRGFGRQGKRTFMAERQYTRMEDWLTAKLAYEGLPSKTYLSKTLAQYTSKTCSNCGFTITSADYDRVLEKLKKTATGWMTTINGKELKVEGQITYYNRYKRQNVVKDLSVELDRLSEESVNNDISSWTKGRSGEALSLLKKRFSHRPVQEKFVCLNCGFETHADEQAALNIARSWLFLRSQEYKKYQTNKTTGNTDKRAFVETWQSFYRKKLKEVWKPAV

SEQ ID NO: 28235 - protein, 978 aa, synthetic construct
  REGION 1..978: note = engineered CasX variant
QEIKRISKIRRRLVKDSNTKKAGKTGPMKTLLVRVMTPDLRERLENLRKKPENIPQPISNTSRANLNKLLTDYTEMKKAILHVYWEEFQKDPVGLMSRVAQPASKKIDQNKLKPEMDEKGNLTTAGFACSQCGQPLFVYKLEQVSEKGKAYTNYFGRCNVAEHEKLILLAQLKPEKDSDEAVTYSLGKFGQRALDFYSIHVTKESTHPVKPLAQIAGNRYASGPVGKALSDACMGTIASFLSKYQDIIIEHQKVVKGNQKRLESLRELAGKENLEYPSVTLPPQPHTKEGVDAYNEVIARVRMWVNLNLWQKLKLSRDDAKPLLRLKGFPSFPLVERQANEVDWWDMVCNVKKLINEKKEDGKVFWQNLAGYKRQEALRPYLSSEEDRKKGKKFARYQLGDLLLHLEKKHGEDWGKVYDEAWERIDKKVEGLSKHIKLEEERRSEDAQSKAALTDWLRAKASFVIEGLKEADKDEFCRCELKLQKWYGDLRGKPFAIEAENSILDISGFSKQYNCAFIWQKDGVKKLNLYLIINYFKGGKLRFKKIKPEAFEANRFYTVINKKSGEIVPMEVNFNFDDPNLIILPLAFGKRQGREFIWNDLLSLETGSLKLANGRVIEKTLYNRRTRQDEPALFVALTFERREVLDSSNIKPMNLIGVDRGENIPAVIALTDPEGCPLSRFKDSLGNPTHILRIRESYKEKQRTIQAKKEVEQRRAGGYSRKYASKAKNLADDMVRNTARDLLYYAVTQDAMLIFENLSRGFGRQGKRTFMAERQYTRMEDWLTAKLAYEGLPSKTYLSKTLAQYTSKTCSNCGFTITSADYDRVLEKLKKTATGWMTTINGKELKVEGQITYYNRYKRQNVVKDLSVELDRLSEESVNNDISSWTKGRSGEALSLLKKRFSHRPVQEKFVCLNCGFETHADEQAALNIARSWLFLRSQEYKKYQTNKTTGNTDKRAFVETWQSFYRKKLKEVWKPAV

SEQ ID NO: 28236 - protein, 978 aa, synthetic construct
  REGION 1..978: note = engineered CasX variant
QEIKRISKIRRRLVKDSNTKKAGKTGPMKTLLVRVMTPDLRERLENLRKKPENIPQPISNTSRANLNKLLTDYTEMKKAILHVYWEEFQKDPVGLMSRVAQPASKKIDQNKLKPEMDEKGNLTTAGFACSQCGQPLFVYKLEQVSEKGKAYTNYFGRCNVAEHEKLILLAQLKPEKDSDEAVTYSLGKFGQRALDFYSIHVTKESTHPVKPLAQIAGNRYASGPVGKALSDACMGTIASFLSKYQDIIIEHQKVVKGNQKRLESLRELAGKENLEYPSVTLPPQPHTKEGVDAYNEVIARVRMWVNLNLWQKLKLSRDDAKPLLRLKGFPSFPLVERQANEVDWWDMVCNVKKLINEKKEDGKVFWQNLAGYKRQEALRPYLSSEEDRKKGKKFARYQLGDLLLHLEKKHGEDWGKVYDEAWERIDKKVEGLSKHIKLEEERRSEDAQSKAALTDWLRAKASFVIEGLKEADKDEFCRCELKLQKWYGDLRGKPFAIEAENSILDISGFSKQYNCAFIWQKDGVKKLNLYLIINYFKGGKLRFKKIKPEAFEANRFYTVINKKSGEIVPMEVNFNFDDPNLIILPLAFGKRQGREFIWNDLLSLETGSLKLANGRVIEKTLYNRRTRQDEPALFVALTFERREVLDSSNIKPMNLIGVDRGENIPAVIALTDPEGCPLSRFKDSLGNPTHILRIGESYKEKQRTIQAKKEVEQRRAGGYSRKYASKAKNLADDMVRNTARDLLYYAVTQDAMLIFENLSRGFGRQGKRTFSAERQYTRMEDWLTAKLAYEGLPSKTYLSKTLAQYTSKTCSNCGFTITSADYDRVLEKLKKTATGWMTTINGKELKVEGQITYYNRYKRQNVVKDLSVELDRLSEESVNNDISSWTKGRSGEALSLLKKRFSHRPVQEKFVCLNCGFETHADEQAALNIARSWLFLRSQEYKKYQTNKTTGNTDKRAFVETWQSFYRKKLKEVWKPAV

SEQ ID NO: 28237 - protein, 978 aa, synthetic construct
  REGION 1..978: note = engineered CasX variant
QEIKRISKIRRRLVKDSNTKKAGKTGPMKTLLVRVMTPDLRERLENLRKKPENIPQPISNTSRANLNKLLTDYTEMKKAILHVYWEEFQKDPVGLMSRVAQPASKKIDQNKLKPEMDEKGNLTTAGFACSQCGQPLFVYKLEQVSEKGKAYTNYFGRCNVAEHEKLILLAQLKPEKDSDEAVTYSLGKFGQRALDFYSIHVTKESTHPVKPLAQIAGNRYASGPVGKALSDACMGTIASFLSKYQDIIIEHQKVVKGNQKRLESLRELAGKENLEYPSVTLPPQPHTKEGVDAYNEVIARVRMWVNLNLWQKLKLSRDDAKPLLRLKGFPSFPLVERQANEVDWWDMVCNVKKLINEKKEDGKVFWQNLAGYKRQEALRPYLSSEEDRKKGKKFARYQLGDLLLHLEKKHGEDWGKVYDEAWERIDKKVEGLSKHIKLEEERRSEDAQSKAALTDWLRAKASFVIEGLKEADKDEFCRCELKLQKWYGDLRGKPFAIEAENSILDISGFSKQYNCAFIWQKDGVKKLNLYLIINYFKGGKLRFKKIKPEAFEANRFYTVINKKSGEIVPMEVNFNFDDPNLIILPLAFGKRQGREFIWNDLLSLETGSLKLANGRVIEKTLYNRRTRQDEPALFVALTFERREVLDSSNIKPMNLIGVDRGENIPAVIALTDPEGCPLSRFKDSLGNPTHILRIGESYKEKQRTIQAKKEVEQRRAGGYSRKYASKAKNLADDMVRNTARDLLYYAVTQDAMLIFENLSRGFGRQGKRTFMAERQYTRMEDWLTAKLAYEGLPSKTYLSKTLAQYTSKTCSNCGFTITSADYDRVLEKLKKTATGWMTTINGKELKVEGQITYYNRYKRQNVVKDLSVELDRLSEESVNNDISSWDKGRSGEALSLLKKRFSHRPVQEKFVCLNCGFETHADEQAALNIARSWLFLRSQEYKKYQTNKTTGNTDKRAFVETWQSFYRKKLKEVWKPAV

SEQ ID NO: 28238 - protein, 978 aa, synthetic construct
  REGION 1..978: note = engineered CasX variant
QEIKRISKIRRRLVKDSNTKKAGKTGPMKTLLVRVMTPDLRERLENLRKKPENIPQPISNTSRANLNKLLTDYTEMKKAILHVYWEEFQVDPVGLMSRVAQPASKKIDQNKLKPEMDEKGNLTTAGFACSQCGQPLFVYKLEQVSEKGKAYTNYFGRCNVAEHEKLILLAQLKPEKDSDEAVTYSLGKFGQRALDFYSIHVTKESTHPVKPLAQIAGNRYASGPVGKALSDACMGTIASFLSKYQDIIIEHQKVVKGNQKRLESLRELAGKENLEYPSVTLPPQPHTKEGVDAYNEVIARVRMWVNLNLWQKLKLSRDDAKPLLRLKGFPSFPLVERQANEVDWWDMVCNVKKLINEKKEDGKVFWQNLAGYKRQEALRPYLSSEEDRKKGKKFARYQLGDLLLHLEKKHGEDWGKVYDEAWERIDKKVEGLSKHIKLEEERRSEDAQSKAALTDWLRAKASFVIEGLKEADKDEFCRCELKLQKWYGDLRGKPFAIEAENSILDISGFSKQYNCAFIWQKDGVKKLNLYLIINYFKGGKLRFKKIKPEAFEANRFYTVINKKSGEIVPMEVNFNFDDPNLIILPLAFGKRQGREFIWNDLLSLETGSLKLANGRVIEKTLYNRRTRQDEPALFVALTFERREVLDSSNIKPMNLIGVDRGENIPAVIALTDPEGCPLSRFKDSLGNPTHILRIGESYKEKQRTIQAKKEVEQRRAGGYSRKYASKAKNLADDMVRNTARDLLYYAVTQDAMLIFENLSRGFGRQGKRTFMAERQYTRMEDWLTAKLAYEGLPSKTYLSKTLAQYTSKTCSNCGFTITSADYDRVLEKLKKTATGWMTTINGKELKVEGQITYYNRYKRQNVVKDLSVELDRLSEESVNNDISSWTKGRSGEALSLLKKRFSHRPVQEKFVCLNCGFETHADEQAALNIARSWLFLRSQEYKKYQTNKTTGNTDKRAFVETWQSFYRKKLKEVWKPAV

SEQ ID NO: 28239 - protein, 978 aa, synthetic construct
  REGION 1..978: note = engineered CasX variant
QEIKRLSKIRRRLVKDSNTKKAGKTGPMKTLLVRVMTPDLRERLENLRKKPENIPQPISNTSRANLNKLLTDYTEMKKAILHVYWEEFQKDPVGLMSRVAQPASKKIDQNKLKPEMDEKGNLTTAGFACSQCGQPLFVYKLEQVSEKGKAYTNYFGRCNVAEHEKLILLAQLKPEKDSDEAVTYSLGKFGQRALDFYSIHVTKESTHPVKPLAQIAGNRYASGPVGKALSDACMGTIASFLSKYQDIIIEHQKVVKGNQKRLESLRELAGKENLEYPSVTLPPQPHTKEGVDAYNEVIARVRMWVNLNLWQKLKLSRDDAKPLLRLKGFPSFPLVERQANEVDWWDMVCNVKKLINEKKEDGKVFWQNLAGYKRQEALRPYLSSEEDRKKGKKFARYQLGDLLLHLEKKHGEDWGKVYDEAWERIDKKVEGLSKHIKLEEERRSEDAQSKAALTDWLRAKASFVIEGLKEADKDEFCRCELKLQKWYGDLRGKPFAIEAENSILDISGFSKQYNCAFIWQKDGVKKLNLYLIINYFKGGKLRFKKIKPEAFEANRFYTVINKKSGEIVPMEVNFNFDDPNLIILPLAFGKRQGREFIWNDLLSLETGSLKLANGRVIEKTLYNRRTRQDEPALFVALTFERREVLDSSNIKPMNLIGVDRGENIPAVIALTDPEGCPLSRFKDSLGNPTHILRIGESYKEKQRTIQAKKEVEQRRAGGYSRKYASKAKNLADDMVRNTARDLLYYAVTQDAMLIFENLSRGFGRQGKRTFMAERQYTRMEDWLTAKLAYEGLPSKTYLSKTLAQYTSKTCSNCGFTITSADYDRVLEKLKKTATGWMTTINGKELKVEGQITYYNRYKRQNVVKDLSVELDRLSEESVNNDISSWTKGRSGEALSLLKKRFSHRPVQEKFVCLNCGFETHADEQAALNIARSWLFLRSQEYKKYQTNKTTGNTDKRAFVETWQSFYRKKLKEVWKPAV

SEQ ID NO: 28240 - protein, 978 aa, synthetic construct
  REGION 1..978: note = engineered CasX variant
QEIKRISKIRRRLVKDSNTKKAGKTGPMKTLLVRVMTPDLRERLENLRKKPENIPQPISNTSRANLNKLLTDYTEMKKAILHVYWEEFQKDPVGLMSRVAQPASKKIDQNKLKPEMDEKGNLTTAGFACSQCGQPLFVYKLEQVSEKGKAYTNYVGRCNVAEHEKLILLAQLKPEKDSDEAVTYSLGKFGQRALDFYSIHVTKESTHPVKPLAQIAGNRYASGPVGKALSDACMGTIASFLSKYQDIIIEHQKVVKGNQKRLESLRELAGKENLEYPSVTLPPQPHTKEGVDAYNEVIARVRMWVNLNLWQKLKLSRDDAKPLLRLKGFPSFPLVERQANEVDWWDMVCNVKKLINEKKEDGKVFWQNLAGYKRQEALRPYLSSEEDRKKGKKFARYQLGDLLLHLEKKHGEDWGKVYDEAWERIDKKVEGLSKHIKLEEERRSEDAQSKAALTDWLRAKASFVIEGLKEADKDEFCRCELKLQKWYGDLRGKPFAIEAENSILDISGFSKQYNCAFIWQKDGVKKLNLYLIINYFKGGKLRFKKIKPEAFEANRFYTVINKKSGEIVPMEVNFNFDDPNLIILPLAFGKRQGREFIWNDLLSLETGSLKLANGRVIEKTLYNRRTRQDEPALFVALTFERREVLDSSNIKPMNLIGVDRGENIPAVIALTDPEGCPLSRFKDSLGNPTHILRIGESYKEKQRTIQAKKEVEQRRAGGYSRKYASKAKNLADDMVRNTARDLLYYAVTQDAMLIFENLSRGFGRQGKRTFMAERQYTRMEDWLTAKLAYEGLPSKTYLSKTLAQYTSKTCSNCGFTITSADYDRVLEKLKKTATGWMTTINGKELKVEGQITYYNRYKRQNVVKDLSVELDRLSEESVNNDISSWTKGRSGEALSLLKKRFSHRPVQEKFVCLNCGFETHADEQAALNIARSWLFLRSQEYKKYQTNKTTGNTDKRAFVETWQSFYRKKLKEVWKPAV

SEQ ID NO: 28241 - protein, 978 aa, synthetic construct
  REGION 1..978: note = engineered CasX variant
QEIKRISKIRRRLVKDSNTKKAGKTGPMKTLLVRVMTPDLRERLENLRKKPENIPQPISNTSRANLNKLLTDYTEMKKAILHVYWEEFQKDPVGLMSRVAQPASKKIDQNKLKPEMDEKGNLTTAGFACSQCGQPLFVYKLEQVSEKGKAYTNYFGRCNVAEHEKLILLAQLKPEKDSDEAVTYSLGKFGQRALDFYSIHVTKESTHPVKPLAQIAGNRYASGPVGKALSDACMGTIASFLSKYQDIIIEHQKVVKGNQKRLESLRELAGKENLEYPSVTLPPQPHTKEGVDAYNEVIARVRMWVNLNLWQKLKLSRDDAKPLLRLKGFPSFPLVERQANEVDWWDMVCNVKKLINEKKEDGKVFWQNLAGYKRQEALRPYLSSEEDRKKGKKFARYQLGDLLLHLEKKHGEDWGKVYDEAWERIDKKVEGLSKHIKLEEERRSEDAQSKAALTDWLRAKASFVIEGLKEADKDEFCRCELKLQKWYGDLRGKPFAIEAENSILDISGFSKQYNCAFIWQKDGVKKLNLYLIINYFKGGKLRFKKIKPEAFEANRFYTVINKKSGEIVPMEVNFNFDDPNLIILPLAFGKRQGREFIWNDLLSLETGSLKLANGRVIEKTLYNRRTRQDEPALFVALTFERREVLDSSNIKPMNLIGVDRGENIPAVIALTDPEGCPLSRFKDSLGNPTHILRIGESYKEKQRTIQAKKEVEQRRAGGYSRKYASKAKNLADDMVRNTARDLLYYAVTQDAMLIFENLSRGFGRQGKRTFMAERQYTRMEDWLTAKLAYEGLASKTYLSKTLAQYTSKTCSNCGFTITSADYDRVLEKLKKTATGWMTTINGKELKVEGQITYYNRYKRQNVVKDLSVELDRLSEESVNNDISSWTKGRSGEALSLLKKRFSHRPVQEKFVCLNCGFETHADEQAALNIARSWLFLRSQEYKKYQTNKTTGNTDKRAFVETWQSFYRKKLKEVWKPAV

SEQ ID NO: 28242 - protein, 978 aa, synthetic construct
  REGION 1..978: note = engineered CasX variant
QEIKRISKIRRRLVKDSNTKKAGKTGPMKTLLVRVMTPDLRERLENLRKKPENIPQPISNTSRANLNKLLTDYTEMKKAILHVYWEEFQKDPVGLMSRVAQPASKKIDQNKLKPEMDEKGNLTTAGFACSQCGQPLFVYKLEQVSEKGKAYTNYFGRCNVAEHEKLILLAQLKPEKDSDEAVTYSLGKFGQRALDFYSIHVTKESTHPVKPLAQIAGNRYASGPVGKALSDACMGTIASFLSKYQDIIIEHQKVVKGNQKRLESLRELAGKENLEYPSVTLPPQPHTKEGVDAYNEVIARVRMWVNLNLWQKLKLSRDDAKPLLRLKGFPSFPLVERQANEVDWWDMVCNVKKLINEKKEDGKVFWQNLAGYKRQEALRPYLSSEEDRKKGKKFARYQLGDLLLHLEKKHGEDWGKVYDEAWERIDKKVEGLSKHIKLEEERRSEDAQSKAALTDWLRAKASFVIEGLKEADKDEFCRCELKLQKWYGDLRGKPFAIEAENSILDISGFSKQYNCAFIWQKDGVKKLNLYLIINYFKGGKLRFKKIKPEAFEANRFYTVINKKSGEIVPMEVNFNFDDPNLIILPLAFGKRQGREFIWNDLLSLETGSLKLANGRVIEKTLYNRRTRQDEPALFVALTFERREVLDSSNIKPMNLIGVDRGENIPAVIALTDPEGCPLSRFKDSLGNPTHILRIGESYKEKQRTIQAKKEVEQRRAGGYSRKYASKAKNLADDMVRNTARDLLYYAVTQDAMLIFENLSRGFGRQGKRTFMAERQYTRMEDWLTAKLAYEGLPSKVYLSKTLAQYTSKTCSNCGFTITSADYDRVLEKLKKTATGWMTTINGKELKVEGQITYYNRYKRQNVVKDLSVELDRLSEESVNNDISSWTKGRSGEALSLLKKRFSHRPVQEKFVCLNCGFETHADEQAALNIARSWLFLRSQEYKKYQTNKTTGNTDKRAFVETWQSFYRKKLKEVWKPAV

SEQ ID NO: 28243 - protein, 979 aa, synthetic construct
  REGION 1..979: note = engineered CasX variant
QEIKRISKIRRRLVKDSNTKKAGKTGPMKTLLVRVMTPDLRERLENLRKKPENIPQPISNTSRANLNKLLTDYTEMKKAILHVYWEEFQKDPVGLMSRVAQPASKKIDQNKLKPEMDEKGNLTTAGFACSQCGQPLFVYKLEQVSEKGKAYTNYFGRCNVAEHEKLILLAQLKPEKDSDEAVTYSLGKFGQRALDFYSIHVTKESTHPVKPLAQIAGNRYASGPVGKALSDACMGTIASFLSKYQDIIIEHQKVVKGNQKRLESLRELAGKENLEYPSVTLPPQPHTKEGVDAYNEVIARVRMWVNLNLWQKLKLSRDDAKPLLRLKGFPSFPLVERQANEVDWWDMVCNVKKLINEKKEDGKVFWQNLAGYKRQEALRPYLSSEEDRKKGKKFARYQLGDLLLHLEKKHGEDWGKVYDEAWERIDKKVEGLSKHIKLEEERRSEDAQSKAALTDWLRAKASFVIEGLKEADKDEFCRCELKLQKWYGDLRGKPFAIEAENSILDISGFSKQYNCAFIWQKDGVKKLNLYLIINYFKGGKLRFKKIKPEAFEANRFYTVINKKSGEIVPMEVNFNFDDPNLIILPLAFGKRQGREFIWNDLLSLETGSLKLANGRVIEKTLYNRRTRQDEPALFVALTFERREVLDSSNIKPMNLIGVDRGENIPAVIALTDPEGCPLSRFKDSLGNPTHILRIGESYKEKQRTIQAKKEVEQRRAGGYSRKYASKAKNLADDMVRNTARDLLYYAVTQDAMLIFENLSRGFGRQGKRTFMAERQYTRMEDWLTAKLAYEGPLPSKTYLSKTLAQYTSKTCSNCGFTITSADYDRVLEKLKKTATGWMTTINGKELKVEGQITYYNRYKRQNVVKDLSVELDRLSEESVNNDISSWTKGRSGEALSLLKKRFSHRPVQEKFVCLNCGFETHADEQAALNIARSWLFLRSQEYKKYQTNKTTGNTDKRAFVETWQSFYRKKLKEVWKPAV

SEQ ID NO: 28244 - protein, 979 aa, synthetic construct
  REGION 1..979: note = engineered CasX variant
QEIKRISKIRRRLVKDSNTKKAGKTGPMKTLLVRVMTPDLRERLENLRKKPENIPQPISNTSRANLNKLLTDYTEMKKAILHVYWEEFQKDPVGLMSRVAQPASKKIDQNKLKPEMDEKGNLTTAGFACSQCGQPLFVYKLEQVSEKGKAYTNYFGRCNVAEHEKLILLAQLKPEKDSDEAVTYSLGKFGQRALDFYSIHVTKESTHPVKPLAQIAGNRYASGPVGKALSDACMGTIASFLSKYQDIIIEHQKVVKGNQKRLESLRELAGKENLEYPSVTLPPQPHTKEGVDAYNEVIARVRMWVNLNLWQKLKLSRDDAKPLLRLKGFPSFPLVERQANEVDWWDMVCNVKKLINEKKEDGKVFWQNLAGYKRQEALRPYLSSEEDVRKKGKKFARYQLGDLLLHLEKKHGEDWGKVYDEAWERIDKKVEGLSKHIKLEEERRSEDAQSKAALTDWLRAKASFVIEGLKEADKDEFCRCELKLQKWYGDLRGKPFAIEAENSILDISGFSKQYNCAFIWQKDGVKKLNLYLIINYFKGGKLRFKKIKPEAFEANRFYTVINKKSGEIVPMEVNFNFDDPNLIILPLAFGKRQGREFIWNDLLSLETGSLKLANGRVIEKTLYNRRTRQDEPALFVALTFERREVLDSSNIKPMNLIGVDRGENIPAVIALTDPEGCPLSRFKDSLGNPTHILRIGESYKEKQRTIQAKKEVEQRRAGGYSRKYASKAKNLADDMVRNTARDLLYYAVTQDAMLIFENLSRGFGRQGKRTFMAERQYTRMEDWLTAKLAYEGLPSKTYLSKTLAQYTSKTCSNCGFTITSADYDRVLEKLKKTATGWMTTINGKELKVEGQITYYNRYKRQNVVKDLSVELDRLSEESVNNDISSWTKGRSGEALSLLKKRFSHRPVQEKFVCLNCGFETHADEQAALNIARSWLFLRSQEYKKYQTNKTTGNTDKRAFVETWQSFYRKKLKEVWKPAV

SEQ ID NO: 28245 - protein, 978 aa, synthetic construct
  REGION 1..978: note = engineered CasX variant
QEIKRISKIRRRLVKDSNTKKAGKTGPMKTLLVRVMTPDLRERLENLRKKPENIPQPISNTSRANLNKLLTDYTEMKKAILHVYWEEFQKDPVGLMSRVAQPASKKIDQNKLKPEMDEKGNLTTAGFACSQCGQPLFVYKLEQVSEKGKAYTNYFGRCNVAEHEKLILLAQLKPEKDSDEAVTYSLGKFGQRALDFYSIHVTKESTHPVKPLAQIAGNRYASGPVGKALSDACMGTIASFLSKYQDIIIEHQKVVKGNQKRLESLRELAGKENLEYPSVTLPPQPHTKEGVDAYNEVIARVRMWVNLNLWQKLKLSRDDAKPLLRLKGFPSFPLVERQANEVDWWDMVCNVKKLINEKKEDGKVFWQNLAGYKRQEALRPYLSSEEDRKKGKKFARYQLGDLLLHLEKKHGEDWGKVYDEAWERIDKKVEGLSKHIKLEEERRSEDAQSKAALTDWLRAKASFVIEGLKEADKDEFCRCELKLQKWYGDLRGKPFAIEAENSILDISGFSKQYNCAFIWQKDGVKKLNLYLIINYFKGGKLRFKKIKPEAFEANRFYTVINKKSGEIVPMEVNFNFDDPNLIILPLAFGKRQGREFIWNDLLSLETGSLKLANGRVIEKTLYNRRTRQDEPALFVALTFERREVLDSSNIKPMNLIGVDRGENIPAVIALTDPEGCPLSRFKDSLGNPTHILRIGESYKEKQRTIQAKKEVEQRRAGGYSRKYASKAKNLADDMVRNTARDLLYYAVTQDAMLIFENLSRGFGRQGKRTFMAERQYTRMEDWLTAKLAYEGLPSKTYLSKTLAQYTSKTCSNCGFTITSADYDRMLEKLKKTATGWMTTINGKELKVEGQITYYNRYKRQNVVKDLSVELDRLSEESVNNDISSWTKGRSGEALSLLKKRFSHRPVQEKFVCLNCGFETHADEQAALNIARSWLFLRSQEYKKYQTNKTTGNTDKRAFVETWQSFYRKKLKEVWKPAV

SEQ ID NO: 28246 - protein, 978 aa, synthetic construct
  REGION 1..978: note = engineered CasX variant
QEIKRISKIRRRLVKDSNTKKAGKTGPMKTLLVRVMTPDLRERLENLRKKPENIPQPISNTSRANLNKLLTDYTEMKKAILHVYWEEFQKDPVGLMSRVAQPASKKIDQNKLKPEMDEKGNLTTAGFACSQCGQPLFVYKLEQVSEKGKAYTNYFGRCNVAEHEKLILLAQLKPEKDSDEAVTYSLGKFGQRALDFYSIHVTKESTHPVKPLAQIAGNRYASGPVGKALSDACMGTIASFLSKYQDIIIEHQKVVKGNQKRLESLRELAGKENLEYPSVTLPPQPHTKEGVDAYNEVIARVRMWVNLNLWQKLKLSRDDAKPLLRLKGFPSFPLVERQANEVDWWDMVCNVKKLINEKKEDGKVFWQNLAGYKRQEALRPYLSSEEDRKKGKKFARYQLGDLLLHLEKKHGEDWGKVYDEAWERIDKKVEGLSKHIKLEEERRSEDAQSKAALTDWLRAKASFVIEGLKEADKDEFCRCELKLQKWYGDLRGKPFAIEAENSILDISGFSKQYNCAFIWQKDGVKKLNLYLIINYFKGGKLRFKKIKPEAFEANRFYTVINKKSGEIVPMEVNFNFDDPNLIILPLAFGKRQGREFIWNDLLSLETGSLKLANGRVIEKTLYNRRTRQDEPALFVALTFERREVLDSSNIKPMNLIGVDRGENIPAVIALTDPEGCPLSRFKDSLGNPTHILRIGESYKEKQRTIQAKKEVEQRRAGGYSRKYASKAKNLADDMVRNTARDLLYYAVTQDAMLIFENLSRGFGRQGKRTFMAERQYTRMEDWLTAKLAYEGLPSKTYLSKTLAQYTSKTCSNCGFTITSADYDRVLEKLKKTATGWMTTINGKELKVEGQITYYNRYKRQNVVKDLSVELDRLSEESVNNDISSWTKGRQGEALSLLKKRFSHRPVQEKFVCLNCGFETHADEQAALNIARSWLFLRSQEYKKYQTNKTTGNTDKRAFVETWQSFYRKKLKEVWKPAV

SEQ ID NO: 28247 - protein, 978 aa, synthetic construct
  REGION 1..978: note = engineered CasX variant
QEIKRISKIRRRLVKDSNTKKAGKTGPMKTLLVRVMTPDLRERLENLRKKPENIPQPISNTSRANLNKLLTDYTEMKKAILHVYWEEFQKDPVGLMSRVAQPASKKIDQNKLKPEMDEKGNLTTAGFACSQCGQPLFVYKLEQVSEKGKAYTNYFGRCNVAEHEKLILLAQLKPEKDSDEAVTYSLGKFGQRALDFYSIHVTKESTHPVKPLAQIAGNRYASGPVGKALSDACMGTIASFLSKYQDIIIEHQKVVKGNQKRLESLRELAGKENLEYPSVTLPPQPHTKEGVDAYNEVIARVRMWVNLNLWQKLKLSRDDAKPLLRLKGFPSFPLVERQANEVDWWDMVCNVKKLINEKKEDGKVFWQNLAGYKRQEALRPYLSSEEDRKKGKKFARYQLGDLLLHLEKKHGEDWGKVYDEAWERIDKKVEGLSKHIKLEEERRSEDAQSKAALTDWLRAKASFVIEGLKEADKDEFCRCELKLQKWYGDLRGKPFAIEAENSILDISGFSKQYNCAFIWQKDGVKKLNLYLIINYFKGGKLRFKKIKPEAFEANRFYTVINKKSGEIVPMEVNFNFDDPNLIILPLAFGKRQGREFIWNDLLSLETGSLKLANGRVIEKTLYNRRTRQDEPALFVALTFERREVLDSSNIKPMNLIGVDRGENIPAVIALTDPEGCPLSRFKDSLGNPTHILRIGESYKEKQRTIQAKKEVEQRRAGGYSRKYASKAKNLADDMVRNTARDLLYYAVTQDAMLIFENLSRGFGRQGKRTFMAERQYTRMEDWLTAKLAYEGLPSKTYLSKTLAQYTSKTCSNCGFTITSADYDRVLEKLKKTATGWMTTINGKELKVEGQITYYNRYKRQNVVKDLSVELDRLSEESVNNDISSWTKGRSGEALSLLKKRFSHRPVQEKFVCLNCEFETHADEQAALNIARSWLFLRSQEYKKYQTNKTTGNTDKRAFVETWQSFYRKKLKEVWKPAV

SEQ ID NO: 28248 - protein, 979 aa, synthetic construct
  REGION 1..979: note = engineered CasX variant
QEIKRISKIRRRLVKDSNTKKAGKTGPMKTLLVRVMTPDLRERLENLRKKPENIPQPISNTSRANLNKLLTDYTEMKKAILHVYWEEFQKDPVGLMSRVAQPASKKIDQNKLKPEMDEKGNLTTAGFACSQCGQPLFVYKLEQVSEKGKAYTNYFGRCNVAEHEKLILLAQLKPEKDSDEAVTYSLGKFGQRALDFYSIHVTKESTHPVKPLAQIAGNRYASGPVGKALSDACMGTIASFLSKYQDIIIEHQKVVKGNQKRLESLRELAGKENLEYPSVTLPPQPHTKEGVDAYNEVIARVRMWVNLNLWQKLKLSRDDAKPLLRLKGFPSFPLVERQANEVDWWDMVCNVKKLINEKKEDGKVFWQNLAGYKRQEALRPYLSSEEDRKKGKKFARYQLGDLLLHLEKKHGEDWGKVYDEAWERIDKKVEGLSKHIKLEEERRSEDAQSKAALTDWLRAKASFVIEGLKEADKDEFCRCELKLQKWYGDLRGKPFAIEAENSILDISGFSKQYNCAFIWQKDGVKKLNLYLIINYFKGGKLRFKKIKPEAFEANRFYTVINKKSGEIVPMEVNFNFDDPNLIILPLAFGKRQGREFIWNDLLSLETGSLKLANGRVIEKTLYNRRTRQDEPALFVALTFERREVLDSSNIKPMNLIGVDRGENIPAVIALTDPEGCPLSRFKDSLGNPTHILRIGESYKEKQRTIQAKKEVEQRRAGGYSRKYASKAKNLADDMVRNTARDLLYYAVTQDAMLIFENLSRGFGRQGKRTFMAERQYTRMEDWLTAKLAYEGLPSKTYLSKTLAQYTSKTCSNCGFTITSADYDRVLEKLKKTATGWMTTINGKELKVEGQITYYNRYKRQNVVKDLSVELDRLSEESVNNDISSWTKGRSGEALSLLKKRFSHRPVQEKFVCLNCGFETHADEQAALNIARSWLFLRSQEYKKYQTNKTSTGNTDKRAFVETWQSFYRKKLKEVWKPAV

SEQ ID NO: 28249 - protein, 979 aa, synthetic construct
  REGION 1..979: note = engineered CasX variant
QEIKRISKIRRRLVKDSNTKKAGKTGPMKTLLVRVMTPDLRERLENLRKKPENIPQPISNTSRANLNKLLTDYTEMKKAILHVYWEEFQKDPVGLMSRVAQPASKKIDQNKLKPEMDEKGNLTTAGFACSQCGQPLFVYKLEQVSEKGKAYTNYFGRCNVAEHEKLILLAQLKPEKDSDEAVTYSLGKFGQRALDFYSIHVTKESTHPVKPLAQIAGNRYASGPVGKALSDACMGTIASFLSKYQDIIIEHQKVVKGNQKRLESLRELAGKENLEYPSVTLPPQPHTKEGVDAYNEVIARVRMWVNLNLWQKLKLSRDDAKPLLRLKGFPSFPLVERQANEVDWWDMVCNVKKLINEKKEDGKVFWQNLAGYKRQEALRPYLSSEEDRKKGKKFARYQLGDLLLHLEKKHGEDWGKVYDEAWERIDKKVEGLSKHIKLEEERRSEDAQSKAALTDWLRAKASFVIEGLKEADKDEFCRCELKLQKWYGDLRGKPFAIEAENSILDISGFSKQYNCAFIWQKDGVKKLNLYLIINYFKGGKLRFKKIKPEAFEANRFYTVINKKSGEIVPMEVNFNFDDPNLIILPLAFGKRQGREFIWNDLLSLETGSLKLANGRVIEKTLYNRRTRQDEPALFVALTFERREVLDSSNIKPMNLIGVDRGENIPAVIALTDPEGCPLSRFKDSLGNPTHILRIGESYKEKQRTIQAKKEVEQRRAGGYSRKYASKAKNLADDMVRNTARDLLYYAVTQDAMLIFENLSRGFGRQGKRTFMAERQYTRMEDWLTAKLAYEGLPSKTYLSKTLAQYTSKTCSNCGFTITSADYDRVLEKLKKTATGWMTTINGKELKVEGQITYYNRYKRQNVVKDLSVELDRLSEESVNNDISSWTKGRSGEALSLLKKRFSHRPVQEKFVCLNCGFETHADEQAALNIARSWLFLRSQEYKKYQTNKTTGKNTDKRAFVETWQSFYRKKLKEVWKPAV

SEQ ID NO: 28250 - protein, 978 aa, synthetic construct
  REGION 1..978: note = engineered CasX variant
QEIKRISKIRRRLVKDSNTKKAGKTGPMKTLLVRVMTPDLRERLENLRKKPENIPQPISNTSRANLNKLLTDYTEMKKAILHVYWEEFQKDPVGLMSRVAQPASKKIDQNKLKPEMDEKGNLTTAGFACSQCGQPLFVYKLEQVSEKGKAYTNYFGRCNVAEHEKLILLAQLKPEKDSDEAVTYSLGKFGQRALDFYSIHVTKESTHPVKPLAQIAGNRYASGPVGKALSDACMGTIASFLSKYQDIIIEHQKVVKGNQKRLESLRELAGKENLEYPSVTLPPQPHTKEGVDAYNEVIARVRMWVNLNLWQKLKLSRDDAKPLLRLKKFPSFPLVERQANEVDWWDMVCNVKKLINEKKEDGKVFWQNLAGYKRQEALRPYLSSEEDRKKGKKFARYQLGDLLLHLEKKHGEDWGKVYDEAWERIDKKVEGLSKHIKLEEERRSEDAQSKAALTDWLRAKASFVIEGLKEADKDEFCRCELKLQKWYGDLRGKPFAIEAENSILDISGFSKQYNCAFIWQKDGVKKLNLYLIINYFKGGKLRFKKIKPEAFEANRFYTVINKKSGEIVPMEVNFNFDDPNLIILPLAFGKRQGREFIWNDLLSLETGSLKLANGRVIEKTLYNRRTRQDEPALFVALTFERREVLDSSNIKPMNLIGVDRGENIPAVIALTDPEGCPLSRFKDSLGNPTHILRIGESYKEKQRTIQAKKEVEQRRAGGYSRKYASKAKNLADDMVRNTARDLLYYAVTQDAMLIFENLSRGFGRQGKRTFMAERQYTRMEDWLTAKLAYEGLPSKTYLSKTLAQYTSKTCSNCGFTITSADYDRVLEKLKKTATGWMTTINGKELKVEGQITYYNRYKRQNVVKDLSVELDRLSEESVNNDISSWTKGRSGEALSLLKKRFSHRPVQEKFVCLNCGFETHADEQAALNIARSWLFLRSQEYKKYQTNKTTGNTDKRAFVETWQSFYRKKLKEVWKPAV

SEQ ID NO: 28251 - protein, 978 aa, synthetic construct
  REGION 1..978: note = engineered CasX variant
QEIKRISKIRRRLVKDSNTKKAGKTGPMKTLLVRVMTPDLRERLENLRKKPENIPQPISNTSRANLNKLLTDYTEMKKAILHVYWEEFQKDPVGLMSRVAQPASKKIDQNKLKPEMDEKGNLTTAGFACSQCGQPLFVYKLEQVSEKGKAYTNYFGRCNVAEHEKLILLAQLKPEKDSDEAVTYSLGKFGQRALDFYSIHVTKESTHPVKPLAQIAGNRYASGPVGKALSDACMGTIASFLSKYQDIIIEHQKVVKGNQKRLESLRELAGKENLEYPSVTLPPQPHTKEGVDAYNEVIARVRMWVNLNLWQKLKLSRDDAKPLLRLKGFPSFPLVERQANEVDWWDMVCNVKKLINEKKEDGKVFWQNLAGYKRQEALRPYLSSEEDRKKGKKFARYQLGDLLLHLEKKHGEDWGKVYDEAWERIDKKVEGLSKHIKLEEERRSEDAQSKAALTDWLRAKASFVIEGLKEADKDEFCRCELKLQKWYGDLRGKPFAIEAENSILDISGFSKQYNCAFIWQKDGVKKLNLYLIINYFKGGKLRFKKIKPEAFEANRFYTVINKKSGEIVPMEVNFNFDDPNLIILPLAFGKRQGREFIWNDLLSLETGSLKLANGRVIEKTLYNRRTRQDEPALFVALTFERREVLDSSNIKPMNLIGVDRGENIPAVIALTDPEGCPLSRFKDSLGNPTHILRIGERYKEKQRTIQAKKEVEQRRAGGYSRKYASKAKNLADDMVRNTARDLLYYAVTQDAMLIFENLSRGFGRQGKRTFMAERQYTRMEDWLTAKLAYEGLPSKTYLSKTLAQYTSKTCSNCGFTITSADYDRVLEKLKKTATGWMTTINGKELKVEGQITYYNRYKRQNVVKDLSVELDRLSEESVNNDISSWTKGRSGEALSLLKKRFSHRPVQEKFVCLNCGFETHADEQAALNIARSWLFLRSQEYKKYQTNKTTGNTDKRAFVETWQSFYRKKLKEVWKPAV

SEQ ID NO: 28252 - protein, 978 aa, synthetic construct
  REGION 1..978: note = engineered CasX variant
QEIKRISKIRRRLVKDSNTKKAGKTGPMKTLLVRVMTPDLRERLENLRKKPENIPQPISNTSRANLNKLLTDYTEMKKAILHVYWEEFQKDPVGLMSRVAQPASKKIDQNKLKPEMDEKGNLTTAGFACSQCGQPLFVYKLEQVSEKGKAYTNYFGRCNVAEHEKLILLAQLKPEKDSDEAVTYSLGKFGQRALDFYSIHVTKESTHPVKPLAQIAGNRYASGPVGKALSDACMGTIASFLSKYQDIIIEHQKVVKGNQKRLESLRELAGKENLEYPSVTLPPQPHTKEGVDAYNEVIARVRMWVNLNLWQKLKLSRDDAKPLLRLKGFPSFPLVERQANEVDWWDMVCNVKKLINEKKEDGKVFWQNLAGYKRQEALRPYLSSEEDRKKGKKFARYQLGDLLLHLEKKHGEDWGKVYDEAWERIDKKVEGLSKHIKLEEERRSEDAQSKAALTDWLRAKASFVIEGLKEADKDEFCRCELKLQKWYGDLRGKPFAIEAENSILDISGFSKQYNCAFIWQKDGVKKLNLYLIINYFKGGKLRFKKIKPEAFEANRFYTVINKKSGEIVPMEVNFNFDDPNLIILPLAFGKRQGREFIWNDLLSLETGSLQLANGRVIEKTLYNRRTRQDEPALFVALTFERREVLDSSNIKPMNLIGVDRGENIPAVIALTDPEGCPLSRFKDSLGNPTHILRIGESYKEKQRTIQAKKEVEQRRAGGYSRKYASKAKNLADDMVRNTARDLLYYAVTQDAMLIFENLSRGFGRQGKRTFMAERQYTRMEDWLTAKLAYEGLPSKTYLSKTLAQYTSKTCSNCGFTITSADYDRVLEKLKKTATGWMTTINGKELKVEGQITYYNRYKRQNVVKDLSVELDRLSEESVNNDISSWTKGRSGEALSLLKKRFSHRPVQEKFVCLNCGFETHADEQAALNIARSWLFLRSQEYKKYQTNKTTGNTDKRAFVETWQSFYRKKLKEVWKPAV

SEQ ID NO: 28253 - protein, 978 aa, synthetic construct
  REGION 1..978: note = engineered CasX variant
QEIKRINGIRRRLVKDSNTKKAGKTGPMKTLLVPVMTPDLRERLENLRKKPENIPQPISNTSRANLNKLLTDYTEMKKAILHVYWEEFQKDPVGLMSRVAQPASKKIDQNKLKPEMDEKGNLTTAGFACSQCGQPLFVYKLEQVSEKGKAYTNYFGRCNVAEHEKLILLAQLKPEKDSDEAVTYSLGKFGQRALDFYSIHVTKESTHPVKPLAQIAGNRYASGPVGKALSDACMGTIASFLSKYQDIIIEHQKVVKGNQKRLESLRELAGKENLEYPSVTLPPQPHTKEGVDAYNEVIARVRMWVNLNLWQKLKLSRDDAKPLLRLKGFPSFPLVERQANEVDWWDMVCNVKKLINEKKEDGKVFWQNLAGYKRQEALRPYLSSEEDRKKGKKFARYQLGDLLLHLEKKHGEDWGKVYDEAWERIDKKVEGLSKHIKLEEERRSEDAQSKAALTDWLRAKASFVIEGLKEADKDEFCRCELKLQKWYGDLRGKPFAIEAENSILDISGFSKQYNCAFIWQKDGVKKLNLYLIINYFKGGKLRFKKIKPEAFEANRFYTVINKKSGEIVPMEVNFNFDDPNLIILPLAFGKRQGREFIWNDLLSLETGSLKLANGRVIEKTLYNRRTRQDEPALFVALTFERREVLDSSNIKPMNLIGVDRGENIPAVIALTDPEGCPLSRFKDSLGNPTHILRIGESYKEKQRTIQAKKEVEQRRAGGYSRKYASKAKNLADDMVRNTARDLLYYAVTQDAMLIFENLSRGFGRQGKRTFMAERQYTRMEDWLTAKLAYEGLPSKTYLSKTLAQYTSKTCSNCGFTITSADYDRVLEKLKKTATGWMTTINGKELKVEGQITYYNRYKRQNVVKDLSVELDRLSEESVNNDISSWTKGRSGEALSLLKKRFSHRPVQEKFVCLNCGFETHADEQAALNIARSWLFLRSQEYKKYQTNKTTGNTDKRAFVETWQSFYRKKLKEVWKPAV

SEQ ID NO: 28254 - protein, 978 aa, synthetic construct
  REGION 1..978: note = engineered CasX variant
QEIKRINGIRRRLVKDSNTKKAGKTGPMKTLLVRVMTPDLRERLENLRKKPPNIPQPISNTSRANLNKLLTDYTEMKKAILHVYWEEFQKDPVGLMSRVAQPASKKIDQNKLKPEMDEKGNLTTAGFACSQCGQPLFVYKLEQVSEKGKAYTNYFGRCNVAEHEKLILLAQLKPEKDSDEAVTYSLGKFGQRALDFYSIHVTKESTHPVKPLAQIAGNRYASGPVGKALSDACMGTIASFLSKYQDIIIEHQKVVKGNQKRLESLRELAGKENLEYPSVTLPPQPHTKEGVDAYNEVIARVRMWVNLNLWQKLKLSRDDAKPLLRLKGFPSFPLVERQANEVDWWDMVCNVKKLINEKKEDGKVFWQNLAGYKRQEALRPYLSSEEDRKKGKKFARYQLGDLLLHLEKKHGEDWGKVYDEAWERIDKKVEGLSKHIKLEEERRSEDAQSKAALTDWLRAKASFVIEGLKEADKDEFCRCELKLQKWYGDLRGKPFAIEAENSILDISGFSKQYNCAFIWQKDGVKKLNLYLIINYFKGGKLRFKKIKPEAFEANRFYTVINKKSGEIVPMEVNFNFDDPNLIILPLAFGKRQGREFIWNDLLSLETGSLKLANGRVIEKTLYNRRTRQDEPALFVALTFERREVLDSSNIKPMNLIGVDRGENIPAVIALTDPEGCPLSRFKDSLGNPTHILRIGESYKEKQRTIQAKKEVEQRRAGGYSRKYASKAKNLADDMVRNTARDLLYYAVTQDAMLIFENLSRGFGRQGKRTFMAERQYTRMEDWLTAKLAYEGLPSKTYLSKTLAQYTSKTCSNCGFTITSADYDRVLEKLKKTATGWMTTINGKELKVEGQITYYNRYKRQNVVKDLSVELDRLSEESVNNDISSWTKGRSGEALSLLKKRFSHRPVQEKFVCLNCGFETHADEQAALNIARSWLFLRSQEYKKYQTNKTTGNTDKRAFVETWQSFYRKKLKEVWKPAV

SEQ ID NO: 28255 - protein, 978 aa, synthetic construct
  REGION 1..978: note = engineered CasX variant
QEIKRINGIRRRLVKDSNTKKAGKTGPMKTLLVRVMTPDLRERLENLRKKPENIPQPISNTSQANLNKLLTDYTEMKKAILHVYWEEFQKDPVGLMSRVAQPASKKIDQNKLKPEMDEKGNLTTAGFACSQCGQPLFVYKLEQVSEKGKAYTNYFGRCNVAEHEKLILLAQLKPEKDSDEAVTYSLGKFGQRALDFYSIHVTKESTHPVKPLAQIAGNRYASGPVGKALSDACMGTIASFLSKYQDIIIEHQKVVKGNQKRLESLRELAGKENLEYPSVTLPPQPHTKEGVDAYNEVIARVRMWVNLNLWQKLKLSRDDAKPLLRLKGFPSFPLVERQANEVDWWDMVCNVKKLINEKKEDGKVFWQNLAGYKRQEALRPYLSSEEDRKKGKKFARYQLGDLLLHLEKKHGEDWGKVYDEAWERIDKKVEGLSKHIKLEEERRSEDAQSKAALTDWLRAKASFVIEGLKEADKDEFCRCELKLQKWYGDLRGKPFAIEAENSILDISGFSKQYNCAFIWQKDGVKKLNLYLIINYFKGGKLRFKKIKPEAFEANRFYTVINKKSGEIVPMEVNFNFDDPNLIILPLAFGKRQGREFIWNDLLSLETGSLKLANGRVIEKTLYNRRTRQDEPALFVALTFERREVLDSSNIKPMNLIGVDRGENIPAVIALTDPEGCPLSRFKDSLGNPTHILRIGESYKEKQRTIQAKKEVEQRRAGGYSRKYASKAKNLADDMVRNTARDLLYYAVTQDAMLIFENLSRGFGRQGKRTFMAERQYTRMEDWLTAKLAYEGLPSKTYLSKTLAQYTSKTCSNCGFTITSADYDRVLEKLKKTATGWMTTINGKELKVEGQITYYNRYKRQNVVKDLSVELDRLSEESVNNDISSWTKGRSGEALSLLKKRFSHRPVQEKFVCLNCGFETHADEQAALNIARSWLFLRSQEYKKYQTNKTTGNTDKRAFVETWQSFYRKKLKEVWKPAV

SEQ ID NO: 28256 - protein, 978 aa, synthetic construct
  REGION 1..978: note = engineered CasX variant
QEIKRINGIRRRLVKDSNTKKAGKTGPMKTLLVRVMTPDLRERLENLRKKPENIPQPISNTSRANLNKLLTDYTEMKKAILHVYDEEFQKDPVGLMSRVAQPASKKIDQNKLKPEMDEKGNLTTAGFACSQCGQPLFVYKLEQVSEKGKAYTNYFGRCNVAEHEKLILLAQLKPEKDSDEAVTYSLGKFGQRALDFYSIHVTKESTHPVKPLAQIAGNRYASGPVGKALSDACMGTIASFLSKYQDIIIEHQKVVKGNQKRLESLRELAGKENLEYPSVTLPPQPHTKEGVDAYNEVIARVRMWVNLNLWQKLKLSRDDAKPLLRLKGFPSFPLVERQANEVDWWDMVCNVKKLINEKKEDGKVFWQNLAGYKRQEALRPYLSSEEDRKKGKKFARYQLGDLLLHLEKKHGEDWGKVYDEAWERIDKKVEGLSKHIKLEEERRSEDAQSKAALTDWLRAKASFVIEGLKEADKDEFCRCELKLQKWYGDLRGKPFAIEAENSILDISGFSKQYNCAFIWQKDGVKKLNLYLIINYFKGGKLRFKKIKPEAFEANRFYTVINKKSGEIVPMEVNFNFDDPNLIILPLAFGKRQGREFIWNDLLSLETGSLKLANGRVIEKTLYNRRTRQDEPALFVALTFERREVLDSSNIKPMNLIGVDRGENIPAVIALTDPEGCPLSRFKDSLGNPTHILRIGESYKEKQRTIQAKKEVEQRRAGGYSRKYASKAKNLADDMVRNTARDLLYYAVTQDAMLIFENLSRGFGRQGKRTFMAERQYTRMEDWLTAKLAYEGLPSKTYLSKTLAQYTSKTCSNCGFTITSADYDRVLEKLKKTATGWMTTINGKELKVEGQITYYNRYKRQNVVKDLSVELDRLSEESVNNDISSWTKGRSGEALSLLKKRFSHRPVQEKFVCLNCGFETHADEQAALNIARSWLFLRSQEYKKYQTNKTTGNTDKRAFVETWQSFYRKKLKEVWKPAV

SEQ ID NO: 28257 - protein, 978 aa, synthetic construct
  REGION 1..978: note = engineered CasX variant
QEIKRINGIRRRLVKDSNTKKAGKTGPMKTLLVRVMTPDLRERLENLRKKPENIPQPISNTSRANLNKLLTDYTEMKKAILHVYWEEFQKDPVGLMSRVAQPASKKIDQNKLKPEMDEKGNLTTAGFACSQCGQPLFVYKLEQVSEKGKAYTNYFGRCNVAEHEKLIKLAQLKPEKDSDEAVTYSLGKFGQRALDFYSIHVTKESTHPVKPLAQIAGNRYASGPVGKALSDACMGTIASFLSKYQDIIIEHQKVVKGNQKRLESLRELAGKENLEYPSVTLPPQPHTKEGVDAYNEVIARVRMWVNLNLWQKLKLSRDDAKPLLRLKGFPSFPLVERQANEVDWWDMVCNVKKLINEKKEDGKVFWQNLAGYKRQEALRPYLSSEEDRKKGKKFARYQLGDLLLHLEKKHGEDWGKVYDEAWERIDKKVEGLSKHIKLEEERRSEDAQSKAALTDWLRAKASFVIEGLKEADKDEFCRCELKLQKWYGDLRGKPFAIEAENSILDISGFSKQYNCAFIWQKDGVKKLNLYLIINYFKGGKLRFKKIKPEAFEANRFYTVINKKSGEIVPMEVNFNFDDPNLIILPLAFGKRQGREFIWNDLLSLETGSLKLANGRVIEKTLYNRRTRQDEPALFVALTFERREVLDSSNIKPMNLIGVDRGENIPAVIALTDPEGCPLSRFKDSLGNPTHILRIGESYKEKQRTIQAKKEVEQRRAGGYSRKYASKAKNLADDMVRNTARDLLYYAVTQDAMLIFENLSRGFGRQGKRTFMAERQYTRMEDWLTAKLAYEGLPSKTYLSKTLAQYTSKTCSNCGFTITSADYDRVLEKLKKTATGWMTTINGKELKVEGQITYYNRYKRQNVVKDLSVELDRLSEESVNNDISSWTKGRSGEALSLLKKRFSHRPVQEKFVCLNCGFETHADEQAALNIARSWLFLRSQEYKKYQTNKTTGNTDKRAFVETWQSFYRKKLKEVWKPAV

SEQ ID NO: 28258 - protein, 978 aa, synthetic construct
  REGION 1..978: note = engineered CasX variant
QEIKRINGIRRRLVKDSNTKKAGKTGPMKTLLVRVMTPDLRERLENLRKKPENIPQPISNTSRANLNKLLTDYTEMKKAILHVYWEEFQKDPVGLMSRVAQPASKKIDQNKLKPEMDEKGNLTTAGFACSQCGQPLFVYKLEQVSEKGKAYTNYFGRCNVAEHEKLILLYQLKPEKDSDEAVTYSLGKFGQRALDFYSIHVTKESTHPVKPLAQIAGNRYASGPVGKALSDACMGTIASFLSKYQDIIIEHQKVVKGNQKRLESLRELAGKENLEYPSVTLPPQPHTKEGVDAYNEVIARVRMWVNLNLWQKLKLSRDDAKPLLRLKGFPSFPLVERQANEVDWWDMVCNVKKLINEKKEDGKVFWQNLAGYKRQEALRPYLSSEEDRKKGKKFARYQLGDLLLHLEKKHGEDWGKVYDEAWERIDKKVEGLSKHIKLEEERRSEDAQSKAALTDWLRAKASFVIEGLKEADKDEFCRCELKLQKWYGDLRGKPFAIEAENSILDISGFSKQYNCAFIWQKDGVKKLNLYLIINYFKGGKLRFKKIKPEAFEANRFYTVINKKSGEIVPMEVNFNFDDPNLIILPLAFGKRQGREFIWNDLLSLETGSLKLANGRVIEKTLYNRRTRQDEPALFVALTFERREVLDSSNIKPMNLIGVDRGENIPAVIALTDPEGCPLSRFKDSLGNPTHILRIGESYKEKQRTIQAKKEVEQRRAGGYSRKYASKAKNLADDMVRNTARDLLYYAVTQDAMLIFENLSRGFGRQGKRTFMAERQYTRMEDWLTAKLAYEGLPSKTYLSKTLAQYTSKTCSNCGFTITSADYDRVLEKLKKTATGWMTTINGKELKVEGQITYYNRYKRQNVVKDLSVELDRLSEESVNNDISSWTKGRSGEALSLLKKRFSHRPVQEKFVCLNCGFETHADEQAALNIARSWLFLRSQEYKKYQTNKTTGNTDKRAFVETWQSFYRKKLKEVWKPAV

SEQ ID NO: 28259 - protein, 978 aa, synthetic construct
  REGION 1..978: note = engineered CasX variant
QEIKRINGIRRRLVKDSNTKKAGKTGPMKTLLVRVMTPDLRERLENLRKKPENIPQPISNTSRANLNKLLTDYTEMKKAILHVYWEEFQKDPVGLMSRVAQPASKKIDQNKLKPEMDEKGNLTTAGFACSQCGQPLFVYKLEQVSEKGKAYTNYFGRCNVAEHEKLILLSQLKPEKDSDEAVTYSLGKFGQRALDFYSIHVTKESTHPVKPLAQIAGNRYASGPVGKALSDACMGTIASFLSKYQDIIIEHQKVVKGNQKRLESLRELAGKENLEYPSVTLPPQPHTKEGVDAYNEVIARVRMWVNLNLWQKLKLSRDDAKPLLRLKGFPSFPLVERQANEVDWWDMVCNVKKLINEKKEDGKVFWQNLAGYKRQEALRPYLSSEEDRKKGKKFARYQLGDLLLHLEKKHGEDWGKVYDEAWERIDKKVEGLSKHIKLEEERRSEDAQSKAALTDWLRAKASFVIEGLKEADKDEFCRCELKLQKWYGDLRGKPFAIEAENSILDISGFSKQYNCAFIWQKDGVKKLNLYLIINYFKGGKLRFKKIKPEAFEANRFYTVINKKSGEIVPMEVNFNFDDPNLIILPLAFGKRQGREFIWNDLLSLETGSLKLANGRVIEKTLYNRRTRQDEPALFVALTFERREVLDSSNIKPMNLIGVDRGENIPAVIALTDPEGCPLSRFKDSLGNPTHILRIGESYKEKQRTIQAKKEVEQRRAGGYSRKYASKAKNLADDMVRNTARDLLYYAVTQDAMLIFENLSRGFGRQGKRTFMAERQYTRMEDWLTAKLAYEGLPSKTYLSKTLAQYTSKTCSNCGFTITSADYDRVLEKLKKTATGWMTTINGKELKVEGQITYYNRYKRQNVVKDLSVELDRLSEESVNNDISSWTKGRSGEALSLLKKRFSHRPVQEKFVCLNCGFETHADEQAALNIARSWLFLRSQEYKKYQTNKTTGNTDKRAFVETWQSFYRKKLKEVWKPAV

SEQ ID NO: 28260 - protein, 977 aa, synthetic construct
  REGION 1..977: note = engineered CasX variant
QEIKRINGIRRRLVKDSNTKKAGKTGPMKTLLVRVMTPDLRERLENLRKKPENIPQPISNTSRANLNKLLTDYTEMKKAILHVYWEEFQKDPVGLMSRVAQPASKKIDQNKLKPEMDEKGNLTTAGFACSQCGQPLFVYKLEQVSEKGKAYTNYFGRCNVAEHEKLILLAQLKPEKDSDEAVTYSLGKFGQRALDFYSIHVTKESTHPVKPLAQIAGNRYASPVGKALSDACMGTIASFLSKYQDIIIEHQKVVKGNQKRLESLRELAGKENLEYPSVTLPPQPHTKEGVDAYNEVIARVRMWVNLNLWQKLKLSRDDAKPLLRLKGFPSFPLVERQANEVDWWDMVCNVKKLINEKKEDGKVFWQNLAGYKRQEALRPYLSSEEDRKKGKKFARYQLGDLLLHLEKKHGEDWGKVYDEAWERIDKKVEGLSKHIKLEEERRSEDAQSKAALTDWLRAKASFVIEGLKEADKDEFCRCELKLQKWYGDLRGKPFAIEAENSILDISGFSKQYNCAFIWQKDGVKKLNLYLIINYFKGGKLRFKKIKPEAFEANRFYTVINKKSGEIVPMEVNFNFDDPNLIILPLAFGKRQGREFIWNDLLSLETGSLKLANGRVIEKTLYNRRTRQDEPALFVALTFERREVLDSSNIKPMNLIGVDRGENIPAVIALTDPEGCPLSRFKDSLGNPTHILRIGESYKEKQRTIQAKKEVEQRRAGGYSRKYASKAKNLADDMVRNTARDLLYYAVTQDAMLIFENLSRGFGRQGKRTFMAERQYTRMEDWLTAKLAYEGLPSKTYLSKTLAQYTSKTCSNCGFTITSADYDRVLEKLKKTATGWMTTINGKELKVEGQITYYNRYKRQNVVKDLSVELDRLSEESVNNDISSWTKGRSGEALSLLKKRFSHRPVQEKFVCLNCGFETHADEQAALNIARSWLFLRSQEYKKYQTNKTTGNTDKRAFVETWQSFYRKKLKEVWKPAV

SEQ ID NO: 28261 - protein, 978 aa, synthetic construct
  REGION 1..978: note = engineered CasX variant
QEIKRINGIRRRLVKDSNTKKAGKTGPMKTLLVRVMTPDLRERLENLRKKPENIPQPISNTSRANLNKLLTDYTEMKKAILHVYWEEFQKDPVGLMSRVAQPASKKIDQNKLKPEMDEKGNLTTAGFACSQCGQPLFVYKLEQVSEKGKAYTNYFGRCNVAEHEKLILLAQLKPEKDSDEAVTYSLGKFGQRALDFYSIHVTKESTHPVKPLAQIAGNRYASGPVGKALSDACMGTIASFLSKYQDIIIEHQKVVKGNQKRLESLRELAGKENLEYPSVTLPPQPHTSEGVDAYNEVIARVRMWVNLNLWQKLKLSRDDAKPLLRLKGFPSFPLVERQANEVDWWDMVCNVKKLINEKKEDGKVFWQNLAGYKRQEALRPYLSSEEDRKKGKKFARYQLGDLLLHLEKKHGEDWGKVYDEAWERIDKKVEGLSKHIKLEEERRSEDAQSKAALTDWLRAKASFVIEGLKEADKDEFCRCELKLQKWYGDLRGKPFAIEAENSILDISGFSKQYNCAFIWQKDGVKKLNLYLIINYFKGGKLRFKKIKPEAFEANRFYTVINKKSGEIVPMEVNFNFDDPNLIILPLAFGKRQGREFIWNDLLSLETGSLKLANGRVIEKTLYNRRTRQDEPALFVALTFERREVLDSSNIKPMNLIGVDRGENIPAVIALTDPEGCPLSRFKDSLGNPTHILRIGESYKEKQRTIQAKKEVEQRRAGGYSRKYASKAKNLADDMVRNTARDLLYYAVTQDAMLIFENLSRGFGRQGKRTFMAERQYTRMEDWLTAKLAYEGLPSKTYLSKTLAQYTSKTCSNCGFTITSADYDRVLEKLKKTATGWMTTINGKELKVEGQITYYNRYKRQNVVKDLSVELDRLSEESVNNDISSWTKGRSGEALSLLKKRFSHRPVQEKFVCLNCGFETHADEQAALNIARSWLFLRSQEYKKYQTNKTTGNTDKRAFVETWQSFYRKKLKEVWKPAV

SEQ ID NO: 28262 - protein, 978 aa, synthetic construct
  REGION 1..978: note = engineered CasX variant
QEIKRINGIRRRLVKDSNTKKAGKTGPMKTLLVRVMTPDLRERLENLRKKPENIPQPISNTSRANLNKLLTDYTEMKKAILHVYWEEFQKDPVGLMSRVAQPASKKIDQNKLKPEMDEKGNLTTAGFACSQCGQPLFVYKLEQVSEKGKAYTNYFGRCNVAEHEKLILLAQLKPEKDSDEAVTYSLGKFGQRALDFYSIHVTKESTHPVKPLAQIAGNRYASGPVGKALSDACMGTIASFLSKYQDIIIEHQKVVKGNQKRLESLRELAGKENLEYPSVTLPPQPHTKEGLDAYNEVIARVRMWVNLNLWQKLKLSRDDAKPLLRLKGFPSFPLVERQANEVDWWDMVCNVKKLINEKKEDGKVFWQNLAGYKRQEALRPYLSSEEDRKKGKKFARYQLGDLLLHLEKKHGEDWGKVYDEAWERIDKKVEGLSKHIKLEEERRSEDAQSKAALTDWLRAKASFVIEGLKEADKDEFCRCELKLQKWYGDLRGKPFAIEAENSILDISGFSKQYNCAFIWQKDGVKKLNLYLIINYFKGGKLRFKKIKPEAFEANRFYTVINKKSGEIVPMEVNFNFDDPNLIILPLAFGKRQGREFIWNDLLSLETGSLKLANGRVIEKTLYNRRTRQDEPALFVALTFERREVLDSSNIKPMNLIGVDRGENIPAVIALTDPEGCPLSRFKDSLGNPTHILRIGESYKEKQRTIQAKKEVEQRRAGGYSRKYASKAKNLADDMVRNTARDLLYYAVTQDAMLIFENLSRGFGRQGKRTFMAERQYTRMEDWLTAKLAYEGLPSKTYLSKTLAQYTSKTCSNCGFTITSADYDRVLEKLKKTATGWMTTINGKELKVEGQITYYNRYKRQNVVKDLSVELDRLSEESVNNDISSWTKGRSGEALSLLKKRFSHRPVQEKFVCLNCGFETHADEQAALNIARSWLFLRSQEYKKYQTNKTTGNTDKRAFVETWQSFYRKKLKEVWKPAV

SEQ ID NO: 28263 - protein, 978 aa, synthetic construct
  REGION 1..978: note = engineered CasX variant
QEIKRINGIRRRLVKDSNTKKAGKTGPMKTLLVRVMTPDLRERLENLRKKPENIPQPISNTSRANLNKLLTDYTEMKKAILHVYWEEFQKDPVGLMSRVAQPASKKIDQNKLKPEMDEKGNLTTAGFACSQCGQPLFVYKLEQVSEKGKAYTNYFGRCNVAEHEKLILLAQLKPEKDSDEAVTYSLGKFGQRALDFYSIHVTKESTHPVKPLAQIAGNRYASGPVGKALSDACMGTIASFLSKYQDIIIEHQKVVKGNQKRLESLRELAGKENLEYPSVTLPPQPHTKEGVDAYNEVIARVRTWVNLNLWQKLKLSRDDAKPLLRLKGFPSFPLVERQANEVDWWDMVCNVKKLINEKKEDGKVFWQNLAGYKRQEALRPYLSSEEDRKKGKKFARYQLGDLLLHLEKKHGEDWGKVYDEAWERIDKKVEGLSKHIKLEEERRSEDAQSKAALTDWLRAKASFVIEGLKEADKDEFCRCELKLQKWYGDLRGKPFAIEAENSILDISGFSKQYNCAFIWQKDGVKKLNLYLIINYFKGGKLRFKKIKPEAFEANRFYTVINKKSGEIVPMEVNFNFDDPNLIILPLAFGKRQGREFIWNDLLSLETGSLKLANGRVIEKTLYNRRTRQDEPALFVALTFERREVLDSSNIKPMNLIGVDRGENIPAVIALTDPEGCPLSRFKDSLGNPTHILRIGESYKEKQRTIQAKKEVEQRRAGGYSRKYASKAKNLADDMVRNTARDLLYYAVTQDAMLIFENLSRGFGRQGKRTFMAERQYTRMEDWLTAKLAYEGLPSKTYLSKTLAQYTSKTCSNCGFTITSADYDRVLEKLKKTATGWMTTINGKELKVEGQITYYNRYKRQNVVKDLSVELDRLSEESVNNDISSWTKGRSGEALSLLKKRFSHRPVQEKFVCLNCGFETHADEQAALNIARSWLFLRSQEYKKYQTNKTTGNTDKRAFVETWQSFYRKKLKEVWKPAV

SEQ ID NO: 28264 - protein, 978 aa, synthetic construct
  REGION 1..978: note = engineered CasX variant
QEIKRINGIRRRLVKDSNTKKAGKTGPMKTLLVRVMTPDLRERLENLRKKPENIPQPISNTSRANLNKLLTDYTEMKKAILHVYWEEFQKDPVGLMSRVAQPASKKIDQNKLKPEMDEKGNLTTAGFACSQCGQPLFVYKLEQVSEKGKAYTNYFGRCNVAEHEKLILLAQLKPEKDSDEAVTYSLGKFGQRALDFYSIHVTKESTHPVKPLAQIAGNRYASGPVGKALSDACMGTIASFLSKYQDIIIEHQKVVKGNQKRLESLRELAGKENLEYPSVTLPPQPHTKEGVDAYNEVIARVRWWVNLNLWQKLKLSRDDAKPLLRLKGFPSFPLVERQANEVDWWDMVCNVKKLINEKKEDGKVFWQNLAGYKRQEALRPYLSSEEDRKKGKKFARYQLGDLLLHLEKKHGEDWGKVYDEAWERIDKKVEGLSKHIKLEEERRSEDAQSKAALTDWLRAKASFVIEGLKEADKDEFCRCELKLQKWYGDLRGKPFAIEAENSILDISGFSKQYNCAFIWQKDGVKKLNLYLIINYFKGGKLRFKKIKPEAFEANRFYTVINKKSGEIVPMEVNFNFDDPNLIILPLAFGKRQGREFIWNDLLSLETGSLKLANGRVIEKTLYNRRTRQDEPALFVALTFERREVLDSSNIKPMNLIGVDRGENIPAVIALTDPEGCPLSRFKDSLGNPTHILRIGESYKEKQRTIQAKKEVEQRRAGGYSRKYASKAKNLADDMVRNTARDLLYYAVTQDAMLIFENLSRGFGRQGKRTFMAERQYTRMEDWLTAKLAYEGLPSKTYLSKTLAQYTSKTCSNCGFTITSADYDRVLEKLKKTATGWMTTINGKELKVEGQITYYNRYKRQNVVKDLSVELDRLSEESVNNDISSWTKGRSGEALSLLKKRFSHRPVQEKFVCLNCGFETHADEQAALNIARSWLFLRSQEYKKYQTNKTTGNTDKRAFVETWQSFYRKKLKEVWKPAV

SEQ ID NO: 28265 - protein, 979 aa, synthetic construct
  REGION 1..979: note = engineered CasX variant
QEIKRINGIRRRLVKDSNTKKAGKTGPMKTLLVRVMTPDLRERLENLRKKPENIPQPISNTSRANLNKLLTDYTEMKKAILHVYWEEFQKDPVGLMSRVAQPASKKIDQNKLKPEMDEKGNLTTAGFACSQCGQPLFVYKLEQVSEKGKAYTNYFGRCNVAEHEKLILLAQLKPEKDSDEAVTYSLGKFGQRALDFYSIHVTKESTHPVKPLAQIAGNRYASGPVGKALSDACMGTIASFLSKYQDIIIEHQKVVKGNQKRLESLRELAGKENLEYPSVTLPPQPHTKEGVDAYNEVIARVRMWVNLNLWQKLKLSRDDAKPLLRLKGFPSFPLVERQQANEVDWWDMVCNVKKLINEKKEDGKVFWQNLAGYKRQEALRPYLSSEEDRKKGKKFARYQLGDLLLHLEKKHGEDWGKVYDEAWERIDKKVEGLSKHIKLEEERRSEDAQSKAALTDWLRAKASFVIEGLKEADKDEFCRCELKLQKWYGDLRGKPFAIEAENSILDISGFSKQYNCAFIWQKDGVKKLNLYLIINYFKGGKLRFKKIKPEAFEANRFYTVINKKSGEIVPMEVNFNFDDPNLIILPLAFGKRQGREFIWNDLLSLETGSLKLANGRVIEKTLYNRRTRQDEPALFVALTFERREVLDSSNIKPMNLIGVDRGENIPAVIALTDPEGCPLSRFKDSLGNPTHILRIGESYKEKQRTIQAKKEVEQRRAGGYSRKYASKAKNLADDMVRNTARDLLYYAVTQDAMLIFENLSRGFGRQGKRTFMAERQYTRMEDWLTAKLAYEGLPSKTYLSKTLAQYTSKTCSNCGFTITSADYDRVLEKLKKTATGWMTTINGKELKVEGQITYYNRYKRQNVVKDLSVELDRLSEESVNNDISSWTKGRSGEALSLLKKRFSHRPVQEKFVCLNCGFETHADEQAALNIARSWLFLRSQEYKKYQTNKTTGNTDKRAFVETWQSFYRKKLKEVWKPAV

SEQ ID NO: 28266 - protein, 979 aa, synthetic construct
  REGION 1..979: note = engineered CasX variant
QEIKRINGIRRRLVKDSNTKKAGKTGPMKTLLVRVMTPDLRERLENLRKKPENIPQPISNTSRANLNKLLTDYTEMKKAILHVYWEEFQKDPVGLMSRVAQPASKKIDQNKLKPEMDEKGNLTTAGFACSQCGQPLFVYKLEQVSEKGKAYTNYFGRCNVAEHEKLILLAQLKPEKDSDEAVTYSLGKFGQRALDFYSIHVTKESTHPVKPLAQIAGNRYASGPVGKALSDACMGTIASFLSKYQDIIIEHQKVVKGNQKRLESLRELAGKENLEYPSVTLPPQPHTKEGVDAYNEVIARVRMWVNLNLWQKLKLSRDDAKPLLRLKGFPSFPLVERQANAEVDWWDMVCNVKKLINEKKEDGKVFWQNLAGYKRQEALRPYLSSEEDRKKGKKFARYQLGDLLLHLEKKHGEDWGKVYDEAWERIDKKVEGLSKHIKLEEERRSEDAQSKAALTDWLRAKASFVIEGLKEADKDEFCRCELKLQKWYGDLRGKPFAIEAENSILDISGFSKQYNCAFIWQKDGVKKLNLYLIINYFKGGKLRFKKIKPEAFEANRFYTVINKKSGEIVPMEVNFNFDDPNLIILPLAFGKRQGREFIWNDLLSLETGSLKLANGRVIEKTLYNRRTRQDEPALFVALTFERREVLDSSNIKPMNLIGVDRGENIPAVIALTDPEGCPLSRFKDSLGNPTHILRIGESYKEKQRTIQAKKEVEQRRAGGYSRKYASKAKNLADDMVRNTARDLLYYAVTQDAMLIFENLSRGFGRQGKRTFMAERQYTRMEDWLTAKLAYEGLPSKTYLSKTLAQYTSKTCSNCGFTITSADYDRVLEKLKKTATGWMTTINGKELKVEGQITYYNRYKRQNVVKDLSVELDRLSEESVNNDISSWTKGRSGEALSLLKKRFSHRPVQEKFVCLNCGFETHADEQAALNIARSWLFLRSQEYKKYQTNKTTGNTDKRAFVETWQSFYRKKLKEVWKPAV

SEQ ID NO: 28267 - protein, 978 aa, synthetic construct
  REGION 1..978: note = engineered CasX variant
QEIKRINGIRRRLVKDSNTKKAGKTGPMKTLLVRVMTPDLRERLENLRKKPENIPQPISNTSRANLNKLLTDYTEMKKAILHVYWEEFQKDPVGLMSRVAQPASKKIDQNKLKPEMDEKGNLTTAGFACSQCGQPLFVYKLEQVSEKGKAYTNYFGRCNVAEHEKLILLAQLKPEKDSDEAVTYSLGKFGQRALDFYSIHVTKESTHPVKPLAQIAGNRYASGPVGKALSDACMGTIASFLSKYQDIIIEHQKVVKGNQKRLESLRELAGKENLEYPSVTLPPQPHTKEGVDAYNEVIARVRMWVNLNLWQKLKLSRDDAKPLLRLKGFPSFPLVERQANEVDWWDMVCNVKKLINEKKEDGKVFWQNLAGYKRQEALRPYLSSEEDRKKGKKFARTQLGDLLLHLEKKHGEDWGKVYDEAWERIDKKVEGLSKHIKLEEERRSEDAQSKAALTDWLRAKASFVIEGLKEADKDEFCRCELKLQKWYGDLRGKPFAIEAENSILDISGFSKQYNCAFIWQKDGVKKLNLYLIINYFKGGKLRFKKIKPEAFEANRFYTVINKKSGEIVPMEVNFNFDDPNLIILPLAFGKRQGREFIWNDLLSLETGSLKLANGRVIEKTLYNRRTRQDEPALFVALTFERREVLDSSNIKPMNLIGVDRGENIPAVIALTDPEGCPLSRFKDSLGNPTHILRIGESYKEKQRTIQAKKEVEQRRAGGYSRKYASKAKNLADDMVRNTARDLLYYAVTQDAMLIFENLSRGFGRQGKRTFMAERQYTRMEDWLTAKLAYEGLPSKTYLSKTLAQYTSKTCSNCGFTITSADYDRVLEKLKKTATGWMTTINGKELKVEGQITYYNRYKRQNVVKDLSVELDRLSEESVNNDISSWTKGRSGEALSLLKKRFSHRPVQEKFVCLNCGFETHADEQAALNIARSWLFLRSQEYKKYQTNKTTGNTDKRAFVETWQSFYRKKLKEVWKPAV

SEQ ID NO: 28268 - protein, 979 aa, synthetic construct
  REGION 1..979: note = engineered CasX variant
QEIKRINGIRRRLVKDSNTKKAGKTGPMKTLLVRVMTPDLRERLENLRKKPENIPQPISNTSRANLNKLLTDYTEMKKAILHVYWEEFQKDPVGLMSRVAQPASKKIDQNKLKPEMDEKGNLTTAGFACSQCGQPLFVYKLEQVSEKGKAYTNYFGRCNVAEHEKLILLAQLKPEKDSDEAVTYSLGKFGQRALDFYSIHVTKESTHPVKPLAQIAGNRYASGPVGKALSDACMGTIASFLSKYQDIIIEHQKVVKGNQKRLESLRELAGKENLEYPSVTLPPQPHTKEGVDAYNEVIARVRMWVNLNLWQKLKLSRDDAKPLLRLKGFPSFPLVERQANEVDWWDMVCNVKKLINEKKEDGKVFWQNLAGYKRQEALRPYLSSEEDRKKGKKFARYQLGDLLLHLEKKHEGEDWGKVYDEAWERIDKKVEGLSKHIKLEEERRSEDAQSKAALTDWLRAKASFVIEGLKEADKDEFCRCELKLQKWYGDLRGKPFAIEAENSILDISGFSKQYNCAFIWQKDGVKKLNLYLIINYFKGGKLRFKKIKPEAFEANRFYTVINKKSGEIVPMEVNFNFDDPNLIILPLAFGKRQGREFIWNDLLSLETGSLKLANGRVIEKTLYNRRTRQDEPALFVALTFERREVLDSSNIKPMNLIGVDRGENIPAVIALTDPEGCPLSRFKDSLGNPTHILRIGESYKEKQRTIQAKKEVEQRRAGGYSRKYASKAKNLADDMVRNTARDLLYYAVTQDAMLIFENLSRGFGRQGKRTFMAERQYTRMEDWLTAKLAYEGLPSKTYLSKTLAQYTSKTCSNCGFTITSADYDRVLEKLKKTATGWMTTINGKELKVEGQITYYNRYKRQNVVKDLSVELDRLSEESVNNDISSWTKGRSGEALSLLKKRFSHRPVQEKFVCLNCGFETHADEQAALNIARSWLFLRSQEYKKYQTNKTTGNTDKRAFVETWQSFYRKKLKEVWKPAV

SEQ ID NO: 28269 - protein, 978 aa, synthetic construct
  REGION 1..978: note = engineered CasX variant
QEIKRINGIRRRLVKDSNTKKAGKTGPMKTLLVRVMTPDLRERLENLRKKPENIPQPISNTSRANLNKLLTDYTEMKKAILHVYWEEFQKDPVGLMSRVAQPASKKIDQNKLKPEMDEKGNLTTAGFACSQCGQPLFVYKLEQVSEKGKAYTNYFGRCNVAEHEKLILLAQLKPEKDSDEAVTYSLGKFGQRALDFYSIHVTKESTHPVKPLAQIAGNRYASGPVGKALSDACMGTIASFLSKYQDIIIEHQKVVKGNQKRLESLRELAGKENLEYPSVTLPPQPHTKEGVDAYNEVIARVRMWVNLNLWQKLKLSRDDAKPLLRLKGFPSFPLVERQANEVDWWDMVCNVKKLINEKKEDGKVFWQNLAGYKRQEALRPYLSSEEDRKKGKKFARYQLGDLLLHLEKKHGEDWGKVYDEAWERIDKKVEGLSKHIKLEEERRSEDAQSKAALTDWLRAKASFVIEGLKEADKDEFCRCDLKLQKWYGDLRGKPFAIEAENSILDISGFSKQYNCAFIWQKDGVKKLNLYLIINYFKGGKLRFKKIKPEAFEANRFYTVINKKSGEIVPMEVNFNFDDPNLIILPLAFGKRQGREFIWNDLLSLETGSLKLANGRVIEKTLYNRRTRQDEPALFVALTFERREVLDSSNIKPMNLIGVDRGENIPAVIALTDPEGCPLSRFKDSLGNPTHILRIGESYKEKQRTIQAKKEVEQRRAGGYSRKYASKAKNLADDMVRNTARDLLYYAVTQDAMLIFENLSRGFGRQGKRTFMAERQYTRMEDWLTAKLAYEGLPSKTYLSKTLAQYTSKTCSNCGFTITSADYDRVLEKLKKTATGWMTTINGKELKVEGQITYYNRYKRQNVVKDLSVELDRLSEESVNNDISSWTKGRSGEALSLLKKRFSHRPVQEKFVCLNCGFETHADEQAALNIARSWLFLRSQEYKKYQTNKTTGNTDKRAFVETWQSFYRKKLKEVWKPAV

SEQ ID NO: 28270 - protein, 978 aa, synthetic construct
  REGION 1..978: note = engineered CasX variant
QEIKRINGIRRRLVKDSNTKKAGKTGPMKTLLVRVMTPDLRERLENLRKKPENIPQPISNTSRANLNKLLTDYTEMKKAILHVYWEEFQKDPVGLMSRVAQPASKKIDQNKLKPEMDEKGNLTTAGFACSQCGQPLFVYKLEQVSEKGKAYTNYFGRCNVAEHEKLILLAQLKPEKDSDEAVTYSLGKFGQRALDFYSIHVTKESTHPVKPLAQIAGNRYASGPVGKALSDACMGTIASFLSKYQDIIIEHQKVVKGNQKRLESLRELAGKENLEYPSVTLPPQPHTKEGVDAYNEVIARVRMWVNLNLWQKLKLSRDDAKPLLRLKGFPSFPLVERQANEVDWWDMVCNVKKLINEKKEDGKVFWQNLAGYKRQEALRPYLSSEEDRKKGKKFARYQLGDLLLHLEKKHGEDWGKVYDEAWERIDKKVEGLSKHIKLEEERRSEDAQSKAALTDWLRAKASFVIEGLKEADKDEFCRCELKLQKWYGDLRGKPFAIEAENSILDISGFSKQYNCAFIWQKDGVKKLNLYLIINYFKGGKLRFKKIKPEAFEANRFYTVINKKSGEIVPMEVNFNFDDPNLIILPLAFGKRFGREFIWNDLLSLETGSLKLANGRVIEKTLYNRRTRQDEPALFVALTFERREVLDSSNIKPMNLIGVDRGENIPAVIALTDPEGCPLSRFKDSLGNPTHILRIGESYKEKQRTIQAKKEVEQRRAGGYSRKYASKAKNLADDMVRNTARDLLYYAVTQDAMLIFENLSRGFGRQGKRTFMAERQYTRMEDWLTAKLAYEGLPSKTYLSKTLAQYTSKTCSNCGFTITSADYDRVLEKLKKTATGWMTTINGKELKVEGQITYYNRYKRQNVVKDLSVELDRLSEESVNNDISSWTKGRSGEALSLLKKRFSHRPVQEKFVCLNCGFETHADEQAALNIARSWLFLRSQEYKKYQTNKTTGNTDKRAFVETWQSFYRKKLKEVWKPAV

SEQ ID NO: 28271 - protein, 978 aa, synthetic construct
  REGION 1..978: note = engineered CasX variant
QEIKRINGIRRRLVKDSNTKKAGKTGPMKTLLVRVMTPDLRERLENLRKKPENIPQPISNTSRANLNKLLTDYTEMKKAILHVYWEEFQKDPVGLMSRVAQPASKKIDQNKLKPEMDEKGNLTTAGFACSQCGQPLFVYKLEQVSEKGKAYTNYFGRCNVAEHEKLILLAQLKPEKDSDEAVTYSLGKFGQRALDFYSIHVTKESTHPVKPLAQIAGNRYASGPVGKALSDACMGTIASFLSKYQDIIIEHQKVVKGNQKRLESLRELAGKENLEYPSVTLPPQPHTKEGVDAYNEVIARVRMWVNLNLWQKLKLSRDDAKPLLRLKGFPSFPLVERQANEVDWWDMVCNVKKLINEKKEDGKVFWQNLAGYKRQEALRPYLSSEEDRKKGKKFARYQLGDLLLHLEKKHGEDWGKVYDEAWERIDKKVEGLSKHIKLEEERRSEDAQSKAALTDWLRAKASFVIEGLKEADKDEFCRCELKLQKWYGDLRGKPFAIEAENSILDISGFSKQYNCAFIWQKDGVKKLNLYLIINYFKGGKLRFKKIKPEAFEANRFYTVINKKSGEIVPMEVNFNFDDPNLIILPLAFGKRVGREFIWNDLLSLETGSLKLANGRVIEKTLYNRRTRQDEPALFVALTFERREVLDSSNIKPMNLIGVDRGENIPAVIALTDPEGCPLSRFKDSLGNPTHILRIGESYKEKQRTIQAKKEVEQRRAGGYSRKYASKAKNLADDMVRNTARDLLYYAVTQDAMLIFENLSRGFGRQGKRTFMAERQYTRMEDWLTAKLAYEGLPSKTYLSKTLAQYTSKTCSNCGFTITSADYDRVLEKLKKTATGWMTTINGKELKVEGQITYYNRYKRQNVVKDLSVELDRLSEESVNNDISSWTKGRSGEALSLLKKRFSHRPVQEKFVCLNCGFETHADEQAALNIARSWLFLRSQEYKKYQTNKTTGNTDKRAFVETWQSFYRKKLKEVWKPAV

SEQ ID NO: 28272 - protein, 979 aa, synthetic construct
  REGION 1..979: note = engineered CasX variant
QEIKRINGIRRRLVKDSNTKKAGKTGPMKTLLVRVMTPDLRERLENLRKKPENIPQPISNTSRANLNKLLTDYTEMKKAILHVYWEEFQKDPVGLMSRVAQPASKKIDQNKLKPEMDEKGNLTTAGFACSQCGQPLFVYKLEQVSEKGKAYTNYFGRCNVAEHEKLILLAQLKPEKDSDEAVTYSLGKFGQRALDFYSIHVTKESTHPVKPLAQIAGNRYASGPVGKALSDACMGTIASFLSKYQDIIIEHQKVVKGNQKRLESLRELAGKENLEYPSVTLPPQPHTKEGVDAYNEVIARVRMWVNLNLWQKLKLSRDDAKPLLRLKGFPSFPLVERQANEVDWWDMVCNVKKLINEKKEDGKVFWQNLAGYKRQEALRPYLSSEEDRKKGKKFARYQLGDLLLHLEKKHGEDWGKVYDEAWERIDKKVEGLSKHIKLEEERRSEDAQSKAALTDWLRAKASFVIEGLKEADKDEFCRCELKLQKWYGDLRGKPFAIEAENSILDISGFSKQYNCAFIWQKDGVKKLNLYLIINYFKGGKLRFKKIKPEAFEANRFYTVINKKSGEIVPMEVNFNFDDPNLIILPLAFGKRQGREFIWNDLLSLETGSLKLANGRVIEKTLYNRRTRQDEPALFVALTFERREVLDSSNIKTPMNLIGVDRGENIPAVIALTDPEGCPLSRFKDSLGNPTHILRIGESYKEKQRTIQAKKEVEQRRAGGYSRKYASKAKNLADDMVRNTARDLLYYAVTQDAMLIFENLSRGFGRQGKRTFMAERQYTRMEDWLTAKLAYEGLPSKTYLSKTLAQYTSKTCSNCGFTITSADYDRVLEKLKKTATGWMTTINGKELKVEGQITYYNRYKRQNVVKDLSVELDRLSEESVNNDISSWTKGRSGEALSLLKKRFSHRPVQEKFVCLNCGFETHADEQAALNIARSWLFLRSQEYKKYQTNKTTGNTDKRAFVETWQSFYRKKLKEVWKPAV

SEQ ID NO: 28273 - protein, 979 aa, synthetic construct
  REGION 1..979: note = engineered CasX variant
QEIKRINGIRRRLVKDSNTKKAGKTGPMKTLLVRVMTPDLRERLENLRKKPENIPQPISNTSRANLNKLLTDYTEMKKAILHVYWEEFQKDPVGLMSRVAQPASKKIDQNKLKPEMDEKGNLTTAGFACSQCGQPLFVYKLEQVSEKGKAYTNYFGRCNVAEHEKLILLAQLKPEKDSDEAVTYSLGKFGQRALDFYSIHVTKESTHPVKPLAQIAGNRYASGPVGKALSDACMGTIASFLSKYQDIIIEHQKVVKGNQKRLESLRELAGKENLEYPSVTLPPQPHTKEGVDAYNEVIARVRMWVNLNLWQKLKLSRDDAKPLLRLKGFPSFPLVERQANEVDWWDMVCNVKKLINEKKEDGKVFWQNLAGYKRQEALRPYLSSEEDRKKGKKFARYQLGDLLLHLEKKHGEDWGKVYDEAWERIDKKVEGLSKHIKLEEERRSEDAQSKAALTDWLRAKASFVIEGLKEADKDEFCRCELKLQKWYGDLRGKPFAIEAENSILDISGFSKQYNCAFIWQKDGVKKLNLYLIINYFKGGKLRFKKIKPEAFEANRFYTVINKKSGEIVPMEVNFNFDDPNLIILPLAFGKRQGREFIWNDLLSLETGSLKLANGRVIEKTLYNRRTRQDEPALFVALTFERREVLDSSNIKPMSNLIGVDRGENIPAVIALTDPEGCPLSRFKDSLGNPTHILRIGESYKEKQRTIQAKKEVEQRRAGGYSRKYASKAKNLADDMVRNTARDLLYYAVTQDAMLIFENLSRGFGRQGKRTFMAERQYTRMEDWLTAKLAYEGLPSKTYLSKTLAQYTSKTCSNCGFTITSADYDRVLEKLKKTATGWMTTINGKELKVEGQITYYNRYKRQNVVKDLSVELDRLSEESVNNDISSWTKGRSGEALSLLKKRFSHRPVQEKFVCLNCGFETHADEQAALNIARSWLFLRSQEYKKYQTNKTTGNTDKRAFVETWQSFYRKKLKEVWKPAV

SEQ ID NO: 28274 - protein, 978 aa, synthetic construct
  REGION 1..978: note = engineered CasX variant
QEIKRINGIRRRLVKDSNTKKAGKTGPMKTLLVRVMTPDLRERLENLRKKPENIPQPISNTSRANLNKLLTDYTEMKKAILHVYWEEFQKDPVGLMSRVAQPASKKIDQNKLKPEMDEKGNLTTAGFACSQCGQPLFVYKLEQVSEKGKAYTNYFGRCNVAEHEKLILLAQLKPEKDSDEAVTYSLGKFGQRALDFYSIHVTKESTHPVKPLAQIAGNRYASGPVGKALSDACMGTIASFLSKYQDIIIEHQKVVKGNQKRLESLRELAGKENLEYPSVTLPPQPHTKEGVDAYNEVIARVRMWVNLNLWQKLKLSRDDAKPLLRLKGFPSFPLVERQANEVDWWDMVCNVKKLINEKKEDGKVFWQNLAGYKRQEALRPYLSSEEDRKKGKKFARYQLGDLLLHLEKKHGEDWGKVYDEAWERIDKKVEGLSKHIKLEEERRSEDAQSKAALTDWLRAKASFVIEGLKEADKDEFCRCELKLQKWYGDLRGKPFAIEAENSILDISGFSKQYNCAFIWQKDGVKKLNLYLIINYFKGGKLRFKKIKPEAFEANRFYTVINKKSGEIVPMEVNFNFDDPNLIILPLAFGKRQGREFIWNDLLSLETGSLKLANGRVIEKTLYNRRTRQDEPALFVALTFERREVLDSSNIKPMNLIGVDRGENIPAVIALTDPEGCPLSRFKDSLGNPTHILRIRESYKEKQRTIQAKKEVEQRRAGGYSRKYASKAKNLADDMVRNTARDLLYYAVTQDAMLIFENLSRGFGRQGKRTFMAERQYTRMEDWLTAKLAYEGLPSKTYLSKTLAQYTSKTCSNCGFTITSADYDRVLEKLKKTATGWMTTINGKELKVEGQITYYNRYKRQNVVKDLSVELDRLSEESVNNDISSWTKGRSGEALSLLKKRFSHRPVQEKFVCLNCGFETHADEQAALNIARSWLFLRSQEYKKYQTNKTTGNTDKRAFVETWQSFYRKKLKEVWKPAV

SEQ ID NO: 28275 - protein, 978 aa, synthetic construct
  REGION 1..978: note = engineered CasX variant
QEIKRINGIRRRLVKDSNTKKAGKTGPMKTLLVRVMTPDLRERLENLRKKPENIPQPISNTSRANLNKLLTDYTEMKKAILHVYWEEFQKDPVGLMSRVAQPASKKIDQNKLKPEMDEKGNLTTAGFACSQCGQPLFVYKLEQVSEKGKAYTNYFGRCNVAEHEKLILLAQLKPEKDSDEAVTYSLGKFGQRALDFYSIHVTKESTHPVKPLAQIAGNRYASGPVGKALSDACMGTIASFLSKYQDIIIEHQKVVKGNQKRLESLRELAGKENLEYPSVTLPPQPHTKEGVDAYNEVIARVRMWVNLNLWQKLKLSRDDAKPLLRLKGFPSFPLVERQANEVDWWDMVCNVKKLINEKKEDGKVFWQNLAGYKRQEALRPYLSSEEDRKKGKKFARYQLGDLLLHLEKKHGEDWGKVYDEAWERIDKKVEGLSKHIKLEEERRSEDAQSKAALTDWLRAKASFVIEGLKEADKDEFCRCELKLQKWYGDLRGKPFAIEAENSILDISGFSKQYNCAFIWQKDGVKKLNLYLIINYFKGGKLRFKKIKPEAFEANRFYTVINKKSGEIVPMEVNFNFDDPNLIILPLAFGKRQGREFIWNDLLSLETGSLKLANGRVIEKTLYNRRTRQDEPALFVALTFERREVLDSSNIKPMNLIGVDRGENIPAVIALTDPEGCPLSRFKDSLGNPTHILRIGESYKEKQRTIQAKKEVEQRRAGGYSRKYASKAKNLADDMVRNTARDLLYYAVTQDAMLIFENLSRGFGRQGKRTFSAERQYTRMEDWLTAKLAYEGLPSKTYLSKTLAQYTSKTCSNCGFTITSADYDRVLEKLKKTATGWMTTINGKELKVEGQITYYNRYKRQNVVKDLSVELDRLSEESVNNDISSWTKGRSGEALSLLKKRFSHRPVQEKFVCLNCGFETHADEQAALNIARSWLFLRSQEYKKYQTNKTTGNTDKRAFVETWQSFYRKKLKEVWKPAV

SEQ ID NO: 28276 - protein, 978 aa, synthetic construct
  REGION 1..978: note = engineered CasX variant
QEIKRINGIRRRLVKDSNTKKAGKTGPMKTLLVRVMTPDLRERLENLRKKPENIPQPISNTSRANLNKLLTDYTEMKKAILHVYWEEFQKDPVGLMSRVAQPASKKIDQNKLKPEMDEKGNLTTAGFACSQCGQPLFVYKLEQVSEKGKAYTNYFGRCNVAEHEKLILLAQLKPEKDSDEAVTYSLGKFGQRALDFYSIHVTKESTHPVKPLAQIAGNRYASGPVGKALSDACMGTIASFLSKYQDIIIEHQKVVKGNQKRLESLRELAGKENLEYPSVTLPPQPHTKEGVDAYNEVIARVRMWVNLNLWQKLKLSRDDAKPLLRLKGFPSFPLVERQANEVDWWDMVCNVKKLINEKKEDGKVFWQNLAGYKRQEALRPYLSSEEDRKKGKKFARYQLGDLLLHLEKKHGEDWGKVYDEAWERIDKKVEGLSKHIKLEEERRSEDAQSKAALTDWLRAKASFVIEGLKEADKDEFCRCELKLQKWYGDLRGKPFAIEAENSILDISGFSKQYNCAFIWQKDGVKKLNLYLIINYFKGGKLRFKKIKPEAFEANRFYTVINKKSGEIVPMEVNFNFDDPNLIILPLAFGKRQGREFIWNDLLSLETGSLKLANGRVIEKTLYNRRTRQDEPALFVALTFERREVLDSSNIKPMNLIGVDRGENIPAVIALTDPEGCPLSRFKDSLGNPTHILRIGESYKEKQRTIQAKKEVEQRRAGGYSRKYASKAKNLADDMVRNTARDLLYYAVTQDAMLIFENLSRGFGRQGKRTFMAERQYTRMEDWLTAKLAYEGLPSKTYLSKTLAQYTSKTCSNCGFTITSADYDRVLEKLKKTATGWMTTINGKELKVEGQITYYNRYKRQNVVKDLSVELDRLSEESVNNDISSWDKGRSGEALSLLKKRFSHRPVQEKFVCLNCGFETHADEQAALNIARSWLFLRSQEYKKYQTNKTTGNTDKRAFVETWQSFYRKKLKEVWKPAV

SEQ ID NO: 28277 - protein, 978 aa, synthetic construct
  REGION 1..978: note = engineered CasX variant
QEIKRINGIRRRLVKDSNTKKAGKTGPMKTLLVRVMTPDLRERLENLRKKPENIPQPISNTSRANLNKLLTDYTEMKKAILHVYWEEFQVDPVGLMSRVAQPASKKIDQNKLKPEMDEKGNLTTAGFACSQCGQPLFVYKLEQVSEKGKAYTNYFGRCNVAEHEKLILLAQLKPEKDSDEAVTYSLGKFGQRALDFYSIHVTKESTHPVKPLAQIAGNRYASGPVGKALSDACMGTIASFLSKYQDIIIEHQKVVKGNQKRLESLRELAGKENLEYPSVTLPPQPHTKEGVDAYNEVIARVRMWVNLNLWQKLKLSRDDAKPLLRLKGFPSFPLVERQANEVDWWDMVCNVKKLINEKKEDGKVFWQNLAGYKRQEALRPYLSSEEDRKKGKKFARYQLGDLLLHLEKKHGEDWGKVYDEAWERIDKKVEGLSKHIKLEEERRSEDAQSKAALTDWLRAKASFVIEGLKEADKDEFCRCELKLQKWYGDLRGKPFAIEAENSILDISGFSKQYNCAFIWQKDGVKKLNLYLIINYFKGGKLRFKKIKPEAFEANRFYTVINKKSGEIVPMEVNFNFDDPNLIILPLAFGKRQGREFIWNDLLSLETGSLKLANGRVIEKTLYNRRTRQDEPALFVALTFERREVLDSSNIKPMNLIGVDRGENIPAVIALTDPEGCPLSRFKDSLGNPTHILRIGESYKEKQRTIQAKKEVEQRRAGGYSRKYASKAKNLADDMVRNTARDLLYYAVTQDAMLIFENLSRGFGRQGKRTFMAERQYTRMEDWLTAKLAYEGLPSKTYLSKTLAQYTSKTCSNCGFTITSADYDRVLEKLKKTATGWMTTINGKELKVEGQITYYNRYKRQNVVKDLSVELDRLSEESVNNDISSWTKGRSGEALSLLKKRFSHRPVQEKFVCLNCGFETHADEQAALNIARSWLFLRSQEYKKYQTNKTTGNTDKRAFVETWQSFYRKKLKEVWKPAV

SEQ ID NO: 28278 - protein, 978 aa, synthetic construct
  REGION 1..978: note = engineered CasX variant
QEIKRLNGIRRRLVKDSNTKKAGKTGPMKTLLVRVMTPDLRERLENLRKKPENIPQPISNTSRANLNKLLTDYTEMKKAILHVYWEEFQKDPVGLMSRVAQPASKKIDQNKLKPEMDEKGNLTTAGFACSQCGQPLFVYKLEQVSEKGKAYTNYFGRCNVAEHEKLILLAQLKPEKDSDEAVTYSLGKFGQRALDFYSIHVTKESTHPVKPLAQIAGNRYASGPVGKALSDACMGTIASFLSKYQDIIIEHQKVVKGNQKRLESLRELAGKENLEYPSVTLPPQPHTKEGVDAYNEVIARVRMWVNLNLWQKLKLSRDDAKPLLRLKGFPSFPLVERQANEVDWWDMVCNVKKLINEKKEDGKVFWQNLAGYKRQEALRPYLSSEEDRKKGKKFARYQLGDLLLHLEKKHGEDWGKVYDEAWERIDKKVEGLSKHIKLEEERRSEDAQSKAALTDWLRAKASFVIEGLKEADKDEFCRCELKLQKWYGDLRGKPFAIEAENSILDISGFSKQYNCAFIWQKDGVKKLNLYLIINYFKGGKLRFKKIKPEAFEANRFYTVINKKSGEIVPMEVNFNFDDPNLIILPLAFGKRQGREFIWNDLLSLETGSLKLANGRVIEKTLYNRRTRQDEPALFVALTFERREVLDSSNIKPMNLIGVDRGENIPAVIALTDPEGCPLSRFKDSLGNPTHILRIGESYKEKQRTIQAKKEVEQRRAGGYSRKYASKAKNLADDMVRNTARDLLYYAVTQDAMLIFENLSRGFGRQGKRTFMAERQYTRMEDWLTAKLAYEGLPSKTYLSKTLAQYTSKTCSNCGFTITSADYDRVLEKLKKTATGWMTTINGKELKVEGQITYYNRYKRQNVVKDLSVELDRLSEESVNNDISSWTKGRSGEALSLLKKRFSHRPVQEKFVCLNCGFETHADEQAALNIARSWLFLRSQEYKKYQTNKTTGNTDKRAFVETWQSFYRKKLKEVWKPAV

SEQ ID NO: 28279 - protein, 978 aa, synthetic construct
  REGION 1..978: note = engineered CasX variant
QEIKRINGIRRRLVKDSNTKKAGKTGPMKTLLVRVMTPDLRERLENLRKKPENIPQPISNTSRANLNKLLTDYTEMKKAILHVYWEEFQKDPVGLMSRVAQPASKKIDQNKLKPEMDEKGNLTTAGFACSQCGQPLFVYKLEQVSEKGKAYTNYVGRCNVAEHEKLILLAQLKPEKDSDEAVTYSLGKFGQRALDFYSIHVTKESTHPVKPLAQIAGNRYASGPVGKALSDACMGTIASFLSKYQDIIIEHQKVVKGNQKRLESLRELAGKENLEYPSVTLPPQPHTKEGVDAYNEVIARVRMWVNLNLWQKLKLSRDDAKPLLRLKGFPSFPLVERQANEVDWWDMVCNVKKLINEKKEDGKVFWQNLAGYKRQEALRPYLSSEEDRKKGKKFARYQLGDLLLHLEKKHGEDWGKVYDEAWERIDKKVEGLSKHIKLEEERRSEDAQSKAALTDWLRAKASFVIEGLKEADKDEFCRCELKLQKWYGDLRGKPFAIEAENSILDISGFSKQYNCAFIWQKDGVKKLNLYLIINYFKGGKLRFKKIKPEAFEANRFYTVINKKSGEIVPMEVNFNFDDPNLIILPLAFGKRQGREFIWNDLLSLETGSLKLANGRVIEKTLYNRRTRQDEPALFVALTFERREVLDSSNIKPMNLIGVDRGENIPAVIALTDPEGCPLSRFKDSLGNPTHILRIGESYKEKQRTIQAKKEVEQRRAGGYSRKYASKAKNLADDMVRNTARDLLYYAVTQDAMLIFENLSRGFGRQGKRTFMAERQYTRMEDWLTAKLAYEGLPSKTYLSKTLAQYTSKTCSNCGFTITSADYDRVLEKLKKTATGWMTTINGKELKVEGQITYYNRYKRQNVVKDLSVELDRLSEESVNNDISSWTKGRSGEALSLLKKRFSHRPVQEKFVCLNCGFETHADEQAALNIARSWLFLRSQEYKKYQTNKTTGNTDKRAFVETWQSFYRKKLKEVWKPAV

SEQ ID NO: 28280 - protein, 978 aa, synthetic construct
  REGION 1..978: note = engineered CasX variant
QEIKRINGIRRRLVKDSNTKKAGKTGPMKTLLVRVMTPDLRERLENLRKKPENIPQPISNTSRANLNKLLTDYTEMKKAILHVYWEEFQKDPVGLMSRVAQPASKKIDQNKLKPEMDEKGNLTTAGFACSQCGQPLFVYKLEQVSEKGKAYTNYFGRCNVAEHEKLILLAQLKPEKDSDEAVTYSLGKFGQRALDFYSIHVTKESTHPVKPLAQIAGNRYASGPVGKALSDACMGTIASFLSKYQDIIIEHQKVVKGNQKRLESLRELAGKENLEYPSVTLPPQPHTKEGVDAYNEVIARVRMWVNLNLWQKLKLSRDDAKPLLRLKGFPSFPLVERQANEVDWWDMVCNVKKLINEKKEDGKVFWQNLAGYKRQEALRPYLSSEEDRKKGKKFARYQLGDLLLHLEKKHGEDWGKVYDEAWERIDKKVEGLSKHIKLEEERRSEDAQSKAALTDWLRAKASFVIEGLKEADKDEFCRCELKLQKWYGDLRGKPFAIEAENSILDISGFSKQYNCAFIWQKDGVKKLNLYLIINYFKGGKLRFKKIKPEAFEANRFYTVINKKSGEIVPMEVNFNFDDPNLIILPLAFGKRQGREFIWNDLLSLETGSLKLANGRVIEKTLYNRRTRQDEPALFVALTFERREVLDSSNIKPMNLIGVDRGENIPAVIALTDPEGCPLSRFKDSLGNPTHILRIGESYKEKQRTIQAKKEVEQRRAGGYSRKYASKAKNLADDMVRNTARDLLYYAVTQDAMLIFENLSRGFGRQGKRTFMAERQYTRMEDWLTAKLAYEGLASKTYLSKTLAQYTSKTCSNCGFTITSADYDRVLEKLKKTATGWMTTINGKELKVEGQITYYNRYKRQNVVKDLSVELDRLSEESVNNDISSWTKGRSGEALSLLKKRFSHRPVQEKFVCLNCGFETHADEQAALNIARSWLFLRSQEYKKYQTNKTTGNTDKRAFVETWQSFYRKKLKEVWKPAV

SEQ ID NO: 28281 - protein, 978 aa, synthetic construct
  REGION 1..978: note = engineered CasX variant
QEIKRINGIRRRLVKDSNTKKAGKTGPMKTLLVRVMTPDLRERLENLRKKPENIPQPISNTSRANLNKLLTDYTEMKKAILHVYWEEFQKDPVGLMSRVAQPASKKIDQNKLKPEMDEKGNLTTAGFACSQCGQPLFVYKLEQVSEKGKAYTNYFGRCNVAEHEKLILLAQLKPEKDSDEAVTYSLGKFGQRALDFYSIHVTKESTHPVKPLAQIAGNRYASGPVGKALSDACMGTIASFLSKYQDIIIEHQKVVKGNQKRLESLRELAGKENLEYPSVTLPPQPHTKEGVDAYNEVIARVRMWVNLNLWQKLKLSRDDAKPLLRLKGFPSFPLVERQANEVDWWDMVCNVKKLINEKKEDGKVFWQNLAGYKRQEALRPYLSSEEDRKKGKKFARYQLGDLLLHLEKKHGEDWGKVYDEAWERIDKKVEGLSKHIKLEEERRSEDAQSKAALTDWLRAKASFVIEGLKEADKDEFCRCELKLQKWYGDLRGKPFAIEAENSILDISGFSKQYNCAFIWQKDGVKKLNLYLIINYFKGGKLRFKKIKPEAFEANRFYTVINKKSGEIVPMEVNFNFDDPNLIILPLAFGKRQGREFIWNDLLSLETGSLKLANGRVIEKTLYNRRTRQDEPALFVALTFERREVLDSSNIKPMNLIGVDRGENIPAVIALTDPEGCPLSRFKDSLGNPTHILRIGESYKEKQRTIQAKKEVEQRRAGGYSRKYASKAKNLADDMVRNTARDLLYYAVTQDAMLIFENLSRGFGRQGKRTFMAERQYTRMEDWLTAKLAYEGLPSKVYLSKTLAQYTSKTCSNCGFTITSADYDRVLEKLKKTATGWMTTINGKELKVEGQITYYNRYKRQNVVKDLSVELDRLSEESVNNDISSWTKGRSGEALSLLKKRFSHRPVQEKFVCLNCGFETHADEQAALNIARSWLFLRSQEYKKYQTNKTTGNTDKRAFVETWQSFYRKKLKEVWKPAV

SEQ ID NO: 28282 - protein, 979 aa, synthetic construct
  REGION 1..979: note = engineered CasX variant
QEIKRINGIRRRLVKDSNTKKAGKTGPMKTLLVRVMTPDLRERLENLRKKPENIPQPISNTSRANLNKLLTDYTEMKKAILHVYWEEFQKDPVGLMSRVAQPASKKIDQNKLKPEMDEKGNLTTAGFACSQCGQPLFVYKLEQVSEKGKAYTNYFGRCNVAEHEKLILLAQLKPEKDSDEAVTYSLGKFGQRALDFYSIHVTKESTHPVKPLAQIAGNRYASGPVGKALSDACMGTIASFLSKYQDIIIEHQKVVKGNQKRLESLRELAGKENLEYPSVTLPPQPHTKEGVDAYNEVIARVRMWVNLNLWQKLKLSRDDAKPLLRLKGFPSFPLVERQANEVDWWDMVCNVKKLINEKKEDGKVFWQNLAGYKRQEALRPYLSSEEDRKKGKKFARYQLGDLLLHLEKKHGEDWGKVYDEAWERIDKKVEGLSKHIKLEEERRSEDAQSKAALTDWLRAKASFVIEGLKEADKDEFCRCELKLQKWYGDLRGKPFAIEAENSILDISGFSKQYNCAFIWQKDGVKKLNLYLIINYFKGGKLRFKKIKPEAFEANRFYTVINKKSGEIVPMEVNFNFDDPNLIILPLAFGKRQGREFIWNDLLSLETGSLKLANGRVIEKTLYNRRTRQDEPALFVALTFERREVLDSSNIKPMNLIGVDRGENIPAVIALTDPEGCPLSRFKDSLGNPTHILRIGESYKEKQRTIQAKKEVEQRRAGGYSRKYASKAKNLADDMVRNTARDLLYYAVTQDAMLIFENLSRGFGRQGKRTFMAERQYTRMEDWLTAKLAYEGPLPSKTYLSKTLAQYTSKTCSNCGFTITSADYDRVLEKLKKTATGWMTTINGKELKVEGQITYYNRYKRQNVVKDLSVELDRLSEESVNNDISSWTKGRSGEALSLLKKRFSHRPVQEKFVCLNCGFETHADEQAALNIARSWLFLRSQEYKKYQTNKTTGNTDKRAFVETWQSFYRKKLKEVWKPAV

SEQ ID NO: 28283 - protein, 979 aa, synthetic construct
  REGION 1..979: note = engineered CasX variant
QEIKRINGIRRRLVKDSNTKKAGKTGPMKTLLVRVMTPDLRERLENLRKKPENIPQPISNTSRANLNKLLTDYTEMKKAILHVYWEEFQKDPVGLMSRVAQPASKKIDQNKLKPEMDEKGNLTTAGFACSQCGQPLFVYKLEQVSEKGKAYTNYFGRCNVAEHEKLILLAQLKPEKDSDEAVTYSLGKFGQRALDFYSIHVTKESTHPVKPLAQIAGNRYASGPVGKALSDACMGTIASFLSKYQDIIIEHQKVVKGNQKRLESLRELAGKENLEYPSVTLPPQPHTKEGVDAYNEVIARVRMWVNLNLWQKLKLSRDDAKPLLRLKGFPSFPLVERQANEVDWWDMVCNVKKLINEKKEDGKVFWQNLAGYKRQEALRPYLSSEEDVRKKGKKFARYQLGDLLLHLEKKHGEDWGKVYDEAWERIDKKVEGLSKHIKLEEERRSEDAQSKAALTDWLRAKASFVIEGLKEADKDEFCRCELKLQKWYGDLRGKPFAIEAENSILDISGFSKQYNCAFIWQKDGVKKLNLYLIINYFKGGKLRFKKIKPEAFEANRFYTVINKKSGEIVPMEVNFNFDDPNLIILPLAFGKRQGREFIWNDLLSLETGSLKLANGRVIEKTLYNRRTRQDEPALFVALTFERREVLDSSNIKPMNLIGVDRGENIPAVIALTDPEGCPLSRFKDSLGNPTHILRIGESYKEKQRTIQAKKEVEQRRAGGYSRKYASKAKNLADDMVRNTARDLLYYAVTQDAMLIFENLSRGFGRQGKRTFMAERQYTRMEDWLTAKLAYEGLPSKTYLSKTLAQYTSKTCSNCGFTITSADYDRVLEKLKKTATGWMTTINGKELKVEGQITYYNRYKRQNVVKDLSVELDRLSEESVNNDISSWTKGRSGEALSLLKKRFSHRPVQEKFVCLNCGFETHADEQAALNIARSWLFLRSQEYKKYQTNKTTGNTDKRAFVETWQSFYRKKLKEVWKPAV

SEQ ID NO: 28284 - protein, 978 aa, synthetic construct
  REGION 1..978: note = engineered CasX variant
QEIKRINGIRRRLVKDSNTKKAGKTGPMKTLLVRVMTPDLRERLENLRKKPENIPQPISNTSRANLNKLLTDYTEMKKAILHVYWEEFQKDPVGLMSRVAQPASKKIDQNKLKPEMDEKGNLTTAGFACSQCGQPLFVYKLEQVSEKGKAYTNYFGRCNVAEHEKLILLAQLKPEKDSDEAVTYSLGKFGQRALDFYSIHVTKESTHPVKPLAQIAGNRYASGPVGKALSDACMGTIASFLSKYQDIIIEHQKVVKGNQKRLESLRELAGKENLEYPSVTLPPQPHTKEGVDAYNEVIARVRMWVNLNLWQKLKLSRDDAKPLLRLKGFPSFPLVERQANEVDWWDMVCNVKKLINEKKEDGKVFWQNLAGYKRQEALRPYLSSEEDRKKGKKFARYQLGDLLLHLEKKHGEDWGKVYDEAWERIDKKVEGLSKHIKLEEERRSEDAQSKAALTDWLRAKASFVIEGLKEADKDEFCRCELKLQKWYGDLRGKPFAIEAENSILDISGFSKQYNCAFIWQKDGVKKLNLYLIINYFKGGKLRFKKIKPEAFEANRFYTVINKKSGEIVPMEVNFNFDDPNLIILPLAFGKRQGREFIWNDLLSLETGSLKLANGRVIEKTLYNRRTRQDEPALFVALTFERREVLDSSNIKPMNLIGVDRGENIPAVIALTDPEGCPLSRFKDSLGNPTHILRIGESYKEKQRTIQAKKEVEQRRAGGYSRKYASKAKNLADDMVRNTARDLLYYAVTQDAMLIFENLSRGFGRQGKRTFMAERQYTRMEDWLTAKLAYEGLPSKTYLSKTLAQYTSKTCSNCGFTITSADYDRMLEKLKKTATGWMTTINGKELKVEGQITYYNRYKRQNVVKDLSVELDRLSEESVNNDISSWTKGRSGEALSLLKKRFSHRPVQEKFVCLNCGFETHADEQAALNIARSWLFLRSQEYKKYQTNKTTGNTDKRAFVETWQSFYRKKLKEVWKPAV

SEQ ID NO: 28285 - protein, 978 aa, synthetic construct
  REGION 1..978: note = engineered CasX variant
QEIKRINGIRRRLVKDSNTKKAGKTGPMKTLLVRVMTPDLRERLENLRKKPENIPQPISNTSRANLNKLLTDYTEMKKAILHVYWEEFQKDPVGLMSRVAQPASKKIDQNKLKPEMDEKGNLTTAGFACSQCGQPLFVYKLEQVSEKGKAYTNYFGRCNVAEHEKLILLAQLKPEKDSDEAVTYSLGKFGQRALDFYSIHVTKESTHPVKPLAQIAGNRYASGPVGKALSDACMGTIASFLSKYQDIIIEHQKVVKGNQKRLESLRELAGKENLEYPSVTLPPQPHTKEGVDAYNEVIARVRMWVNLNLWQKLKLSRDDAKPLLRLKGFPSFPLVERQANEVDWWDMVCNVKKLINEKKEDGKVFWQNLAGYKRQEALRPYLSSEEDRKKGKKFARYQLGDLLLHLEKKHGEDWGKVYDEAWERIDKKVEGLSKHIKLEEERRSEDAQSKAALTDWLRAKASFVIEGLKEADKDEFCRCELKLQKWYGDLRGKPFAIEAENSILDISGFSKQYNCAFIWQKDGVKKLNLYLIINYFKGGKLRFKKIKPEAFEANRFYTVINKKSGEIVPMEVNFNFDDPNLIILPLAFGKRQGREFIWNDLLSLETGSLKLANGRVIEKTLYNRRTRQDEPALFVALTFERREVLDSSNIKPMNLIGVDRGENIPAVIALTDPEGCPLSRFKDSLGNPTHILRIGESYKEKQRTIQAKKEVEQRRAGGYSRKYASKAKNLADDMVRNTARDLLYYAVTQDAMLIFENLSRGFGRQGKRTFMAERQYTRMEDWLTAKLAYEGLPSKTYLSKTLAQYTSKTCSNCGFTITSADYDRVLEKLKKTATGWMTTINGKELKVEGQITYYNRYKRQNVVKDLSVELDRLSEESVNNDISSWTKGRQGEALSLLKKRFSHRPVQEKFVCLNCGFETHADEQAALNIARSWLFLRSQEYKKYQTNKTTGNTDKRAFVETWQSFYRKKLKEVWKPAV

SEQ ID NO: 28286 - protein, 978 aa, synthetic construct
  REGION 1..978: note = engineered CasX variant
QEIKRINGIRRRLVKDSNTKKAGKTGPMKTLLVRVMTPDLRERLENLRKKPENIPQPISNTSRANLNKLLTDYTEMKKAILHVYWEEFQKDPVGLMSRVAQPASKKIDQNKLKPEMDEKGNLTTAGFACSQCGQPLFVYKLEQVSEKGKAYTNYFGRCNVAEHEKLILLAQLKPEKDSDEAVTYSLGKFGQRALDFYSIHVTKESTHPVKPLAQIAGNRYASGPVGKALSDACMGTIASFLSKYQDIIIEHQKVVKGNQKRLESLRELAGKENLEYPSVTLPPQPHTKEGVDAYNEVIARVRMWVNLNLWQKLKLSRDDAKPLLRLKGFPSFPLVERQANEVDWWDMVCNVKKLINEKKEDGKVFWQNLAGYKRQEALRPYLSSEEDRKKGKKFARYQLGDLLLHLEKKHGEDWGKVYDEAWERIDKKVEGLSKHIKLEEERRSEDAQSKAALTDWLRAKASFVIEGLKEADKDEFCRCELKLQKWYGDLRGKPFAIEAENSILDISGFSKQYNCAFIWQKDGVKKLNLYLIINYFKGGKLRFKKIKPEAFEANRFYTVINKKSGEIVPMEVNFNFDDPNLIILPLAFGKRQGREFIWNDLLSLETGSLKLANGRVIEKTLYNRRTRQDEPALFVALTFERREVLDSSNIKPMNLIGVDRGENIPAVIALTDPEGCPLSRFKDSLGNPTHILRIGESYKEKQRTIQAKKEVEQRRAGGYSRKYASKAKNLADDMVRNTARDLLYYAVTQDAMLIFENLSRGFGRQGKRTFMAERQYTRMEDWLTAKLAYEGLPSKTYLSKTLAQYTSKTCSNCGFTITSADYDRVLEKLKKTATGWMTTINGKELKVEGQITYYNRYKRQNVVKDLSVELDRLSEESVNNDISSWTKGRSGEALSLLKKRFSHRPVQEKFVCLNCEFETHADEQAALNIARSWLFLRSQEYKKYQTNKTTGNTDKRAFVETWQSFYRKKLKEVWKPAV

SEQ ID NO: 28287 - protein, 979 aa, synthetic construct
  REGION 1..979: note = engineered CasX variant
QEIKRINGIRRRLVKDSNTKKAGKTGPMKTLLVRVMTPDLRERLENLRKKPENIPQPISNTSRANLNKLLTDYTEMKKAILHVYWEEFQKDPVGLMSRVAQPASKKIDQNKLKPEMDEKGNLTTAGFACSQCGQPLFVYKLEQVSEKGKAYTNYFGRCNVAEHEKLILLAQLKPEKDSDEAVTYSLGKFGQRALDFYSIHVTKESTHPVKPLAQIAGNRYASGPVGKALSDACMGTIASFLSKYQDIIIEHQKVVKGNQKRLESLRELAGKENLEYPSVTLPPQPHTKEGVDAYNEVIARVRMWVNLNLWQKLKLSRDDAKPLLRLKGFPSFPLVERQANEVDWWDMVCNVKKLINEKKEDGKVFWQNLAGYKRQEALRPYLSSEEDRKKGKKFARYQLGDLLLHLEKKHGEDWGKVYDEAWERIDKKVEGLSKHIKLEEERRSEDAQSKAALTDWLRAKASFVIEGLKEADKDEFCRCELKLQKWYGDLRGKPFAIEAENSILDISGFSKQYNCAFIWQKDGVKKLNLYLIINYFKGGKLRFKKIKPEAFEANRFYTVINKKSGEIVPMEVNFNFDDPNLIILPLAFGKRQGREFIWNDLLSLETGSLKLANGRVIEKTLYNRRTRQDEPALFVALTFERREVLDSSNIKPMNLIGVDRGENIPAVIALTDPEGCPLSRFKDSLGNPTHILRIGESYKEKQRTIQAKKEVEQRRAGGYSRKYASKAKNLADDMVRNTARDLLYYAVTQDAMLIFENLSRGFGRQGKRTFMAERQYTRMEDWLTAKLAYEGLPSKTYLSKTLAQYTSKTCSNCGFTITSADYDRVLEKLKKTATGWMTTINGKELKVEGQITYYNRYKRQNVVKDLSVELDRLSEESVNNDISSWTKGRSGEALSLLKKRFSHRPVQEKFVCLNCGFETHADEQAALNIARSWLFLRSQEYKKYQTNKTSTGNTDKRAFVETWQSFYRKKLKEVWKPAV

SEQ ID NO: 28288 - protein, 979 aa, synthetic construct
  REGION 1..979: note = engineered CasX variant
QEIKRINGIRRRLVKDSNTKKAGKTGPMKTLLVRVMTPDLRERLENLRKKPENIPQPISNTSRANLNKLLTDYTEMKKAILHVYWEEFQKDPVGLMSRVAQPASKKIDQNKLKPEMDEKGNLTTAGFACSQCGQPLFVYKLEQVSEKGKAYTNYFGRCNVAEHEKLILLAQLKPEKDSDEAVTYSLGKFGQRALDFYSIHVTKESTHPVKPLAQIAGNRYASGPVGKALSDACMGTIASFLSKYQDIIIEHQKVVKGNQKRLESLRELAGKENLEYPSVTLPPQPHTKEGVDAYNEVIARVRMWVNLNLWQKLKLSRDDAKPLLRLKGFPSFPLVERQANEVDWWDMVCNVKKLINEKKEDGKVFWQNLAGYKRQEALRPYLSSEEDRKKGKKFARYQLGDLLLHLEKKHGEDWGKVYDEAWERIDKKVEGLSKHIKLEEERRSEDAQSKAALTDWLRAKASFVIEGLKEADKDEFCRCELKLQKWYGDLRGKPFAIEAENSILDISGFSKQYNCAFIWQKDGVKKLNLYLIINYFKGGKLRFKKIKPEAFEANRFYTVINKKSGEIVPMEVNFNFDDPNLIILPLAFGKRQGREFIWNDLLSLETGSLKLANGRVIEKTLYNRRTRQDEPALFVALTFERREVLDSSNIKPMNLIGVDRGENIPAVIALTDPEGCPLSRFKDSLGNPTHILRIGESYKEKQRTIQAKKEVEQRRAGGYSRKYASKAKNLADDMVRNTARDLLYYAVTQDAMLIFENLSRGFGRQGKRTFMAERQYTRMEDWLTAKLAYEGLPSKTYLSKTLAQYTSKTCSNCGFTITSADYDRVLEKLKKTATGWMTTINGKELKVEGQITYYNRYKRQNVVKDLSVELDRLSEESVNNDISSWTKGRSGEALSLLKKRFSHRPVQEKFVCLNCGFETHADEQAALNIARSWLFLRSQEYKKYQTNKTTGKNTDKRAFVETWQSFYRKKLKEVWKPAV

SEQ ID NO: 28289 - protein, 978 aa, synthetic construct
  REGION 1..978: note = engineered CasX variant
QEIKRINGIRRRLVKDSNTKKAGKTGPMKTLLVRVMTPDLRERLENLRKKPENIPQPISNTSRANLNKLLTDYTEMKKAILHVYWEEFQKDPVGLMSRVAQPASKKIDQNKLKPEMDEKGNLTTAGFACSQCGQPLFVYKLEQVSEKGKAYTNYFGRCNVAEHEKLILLAQLKPEKDSDEAVTYSLGKFGQRALDFYSIHVTKESTHPVKPLAQIAGNRYASGPVGKALSDACMGTIASFLSKYQDIIIEHQKVVKGNQKRLESLRELAGKENLEYPSVTLPPQPHTKEGVDAYNEVIARVRMWVNLNLWQKLKLSRDDAKPLLRLKKFPSFPLVERQANEVDWWDMVCNVKKLINEKKEDGKVFWQNLAGYKRQEALRPYLSSEEDRKKGKKFARYQLGDLLLHLEKKHGEDWGKVYDEAWERIDKKVEGLSKHIKLEEERRSEDAQSKAALTDWLRAKASFVIEGLKEADKDEFCRCELKLQKWYGDLRGKPFAIEAENSILDISGFSKQYNCAFIWQKDGVKKLNLYLIINYFKGGKLRFKKIKPEAFEANRFYTVINKKSGEIVPMEVNFNFDDPNLIILPLAFGKRQGREFIWNDLLSLETGSLKLANGRVIEKTLYNRRTRQDEPALFVALTFERREVLDSSNIKPMNLIGVDRGENIPAVIALTDPEGCPLSRFKDSLGNPTHILRIGESYKEKQRTIQAKKEVEQRRAGGYSRKYASKAKNLADDMVRNTARDLLYYAVTQDAMLIFENLSRGFGRQGKRTFMAERQYTRMEDWLTAKLAYEGLPSKTYLSKTLAQYTSKTCSNCGFTITSADYDRVLEKLKKTATGWMTTINGKELKVEGQITYYNRYKRQNVVKDLSVELDRLSEESVNNDISSWTKGRSGEALSLLKKRFSHRPVQEKFVCLNCGFETHADEQAALNIARSWLFLRSQEYKKYQTNKTTGNTDKRAFVETWQSFYRKKLKEVWKPAV

SEQ ID NO: 28290 - protein, 978 aa, synthetic construct
  REGION 1..978: note = engineered CasX variant
QEIKRINGIRRRLVKDSNTKKAGKTGPMKTLLVRVMTPDLRERLENLRKKPENIPQPISNTSRANLNKLLTDYTEMKKAILHVYWEEFQKDPVGLMSRVAQPASKKIDQNKLKPEMDEKGNLTTAGFACSQCGQPLFVYKLEQVSEKGKAYTNYFGRCNVAEHEKLILLAQLKPEKDSDEAVTYSLGKFGQRALDFYSIHVTKESTHPVKPLAQIAGNRYASGPVGKALSDACMGTIASFLSKYQDIIIEHQKVVKGNQKRLESLRELAGKENLEYPSVTLPPQPHTKEGVDAYNEVIARVRMWVNLNLWQKLKLSRDDAKPLLRLKGFPSFPLVERQANEVDWWDMVCNVKKLINEKKEDGKVFWQNLAGYKRQEALRPYLSSEEDRKKGKKFARYQLGDLLLHLEKKHGEDWGKVYDEAWERIDKKVEGLSKHIKLEEERRSEDAQSKAALTDWLRAKASFVIEGLKEADKDEFCRCELKLQKWYGDLRGKPFAIEAENSILDISGFSKQYNCAFIWQKDGVKKLNLYLIINYFKGGKLRFKKIKPEAFEANRFYTVINKKSGEIVPMEVNFNFDDPNLIILPLAFGKRQGREFIWNDLLSLETGSLKLANGRVIEKTLYNRRTRQDEPALFVALTFERREVLDSSNIKPMNLIGVDRGENIPAVIALTDPEGCPLSRFKDSLGNPTHILRIGERYKEKQRTIQAKKEVEQRRAGGYSRKYASKAKNLADDMVRNTARDLLYYAVTQDAMLIFENLSRGFGRQGKRTFMAERQYTRMEDWLTAKLAYEGLPSKTYLSKTLAQYTSKTCSNCGFTITSADYDRVLEKLKKTATGWMTTINGKELKVEGQITYYNRYKRQNVVKDLSVELDRLSEESVNNDISSWTKGRSGEALSLLKKRFSHRPVQEKFVCLNCGFETHADEQAALNIARSWLFLRSQEYKKYQTNKTTGNTDKRAFVETWQSFYRKKLKEVWKPAV

SEQ ID NO: 28291 - protein, 978 aa, synthetic construct
  REGION 1..978: note = engineered CasX variant
QEIKRINGIRRRLVKDSNTKKAGKTGPMKTLLVRVMTPDLRERLENLRKKPENIPQPISNTSRANLNKLLTDYTEMKKAILHVYWEEFQKDPVGLMSRVAQPASKKIDQNKLKPEMDEKGNLTTAGFACSQCGQPLFVYKLEQVSEKGKAYTNYFGRCNVAEHEKLILLAQLKPEKDSDEAVTYSLGKFGQRALDFYSIHVTKESTHPVKPLAQIAGNRYASGPVGKALSDACMGTIASFLSKYQDIIIEHQKVVKGNQKRLESLRELAGKENLEYPSVTLPPQPHTKEGVDAYNEVIARVRMWVNLNLWQKLKLSRDDAKPLLRLKGFPSFPLVERQANEVDWWDMVCNVKKLINEKKEDGKVFWQNLAGYKRQEALRPYLSSEEDRKKGKKFARYQLGDLLLHLEKKHGEDWGKVYDEAWERIDKKVEGLSKHIKLEEERRSEDAQSKAALTDWLRAKASFVIEGLKEADKDEFCRCELKLQKWYGDLRGKPFAIEAENSILDISGFSKQYNCAFIWQKDGVKKLNLYLIINYFKGGKLRFKKIKPEAFEANRFYTVINKKSGEIVPMEVNFNFDDPNLIILPLAFGKRQGREFIWNDLLSLETGSLQLANGRVIEKTLYNRRTRQDEPALFVALTFERREVLDSSNIKPMNLIGVDRGENIPAVIALTDPEGCPLSRFKDSLGNPTHILRIGESYKEKQRTIQAKKEVEQRRAGGYSRKYASKAKNLADDMVRNTARDLLYYAVTQDAMLIFENLSRGFGRQGKRTFMAERQYTRMEDWLTAKLAYEGLPSKTYLSKTLAQYTSKTCSNCGFTITSADYDRVLEKLKKTATGWMTTINGKELKVEGQITYYNRYKRQNVVKDLSVELDRLSEESVNNDISSWTKGRSGEALSLLKKRFSHRPVQEKFVCLNCGFETHADEQAALNIARSWLFLRSQEYKKYQTNKTTGNTDKRAFVETWQSFYRKKLKEVWKPAV

SEQ ID NO: 28292 - protein, 978 aa, synthetic construct
  REGION 1..978: note = engineered CasX variant
QEIKRINKIRRRLVKDSNTKKAGKTGPMKTLLVPVMTPDLRERLENLRKKPPNIPQPISNTSRANLNKLLTDYTEMKKAILHVYWEEFQKDPVGLMSRVAQPASKKIDQNKLKPEMDEKGNLTTAGFACSQCGQPLFVYKLEQVSEKGKAYTNYFGRCNVAEHEKLILLAQLKPEKDSDEAVTYSLGKFGQRALDFYSIHVTKESTHPVKPLAQIAGNRYASGPVGKALSDACMGTIASFLSKYQDIIIEHQKVVKGNQKRLESLRELAGKENLEYPSVTLPPQPHTKEGVDAYNEVIARVRMWVNLNLWQKLKLSRDDAKPLLRLKGFPSFPLVERQANEVDWWDMVCNVKKLINEKKEDGKVFWQNLAGYKRQEALRPYLSSEEDRKKGKKFARYQLGDLLLHLEKKHGEDWGKVYDEAWERIDKKVEGLSKHIKLEEERRSEDAQSKAALTDWLRAKASFVIEGLKEADKDEFCRCELKLQKWYGDLRGKPFAIEAENSILDISGFSKQYNCAFIWQKDGVKKLNLYLIINYFKGGKLRFKKIKPEAFEANRFYTVINKKSGEIVPMEVNFNFDDPNLIILPLAFGKRQGREFIWNDLLSLETGSLKLANGRVIEKTLYNRRTRQDEPALFVALTFERREVLDSSNIKPMNLIGVDRGENIPAVIALTDPEGCPLSRFKDSLGNPTHILRIGESYKEKQRTIQAKKEVEQRRAGGYSRKYASKAKNLADDMVRNTARDLLYYAVTQDAMLIFENLSRGFGRQGKRTFMAERQYTRMEDWLTAKLAYEGLPSKTYLSKTLAQYTSKTCSNCGFTITSADYDRVLEKLKKTATGWMTTINGKELKVEGQITYYNRYKRQNVVKDLSVELDRLSEESVNNDISSWTKGRSGEALSLLKKRFSHRPVQEKFVCLNCGFETHADEQAALNIARSWLFLRSQEYKKYQTNKTTGNTDKRAFVETWQSFYRKKLKEVWKPAV

SEQ ID NO: 28293 - protein, 978 aa, synthetic construct
  REGION 1..978: note = engineered CasX variant
QEIKRINKIRRRLVKDSNTKKAGKTGPMKTLLVPVMTPDLRERLENLRKKPENIPQPISNTSQANLNKLLTDYTEMKKAILHVYWEEFQKDPVGLMSRVAQPASKKIDQNKLKPEMDEKGNLTTAGFACSQCGQPLFVYKLEQVSEKGKAYTNYFGRCNVAEHEKLILLAQLKPEKDSDEAVTYSLGKFGQRALDFYSIHVTKESTHPVKPLAQIAGNRYASGPVGKALSDACMGTIASFLSKYQDIIIEHQKVVKGNQKRLESLRELAGKENLEYPSVTLPPQPHTKEGVDAYNEVIARVRMWVNLNLWQKLKLSRDDAKPLLRLKGFPSFPLVERQANEVDWWDMVCNVKKLINEKKEDGKVFWQNLAGYKRQEALRPYLSSEEDRKKGKKFARYQLGDLLLHLEKKHGEDWGKVYDEAWERIDKKVEGLSKHIKLEEERRSEDAQSKAALTDWLRAKASFVIEGLKEADKDEFCRCELKLQKWYGDLRGKPFAIEAENSILDISGFSKQYNCAFIWQKDGVKKLNLYLIINYFKGGKLRFKKIKPEAFEANRFYTVINKKSGEIVPMEVNFNFDDPNLIILPLAFGKRQGREFIWNDLLSLETGSLKLANGRVIEKTLYNRRTRQDEPALFVALTFERREVLDSSNIKPMNLIGVDRGENIPAVIALTDPEGCPLSRFKDSLGNPTHILRIGESYKEKQRTIQAKKEVEQRRAGGYSRKYASKAKNLADDMVRNTARDLLYYAVTQDAMLIFENLSRGFGRQGKRTFMAERQYTRMEDWLTAKLAYEGLPSKTYLSKTLAQYTSKTCSNCGFTITSADYDRVLEKLKKTATGWMTTINGKELKVEGQITYYNRYKRQNVVKDLSVELDRLSEESVNNDISSWTKGRSGEALSLLKKRFSHRPVQEKFVCLNCGFETHADEQAALNIARSWLFLRSQEYKKYQTNKTTGNTDKRAFVETWQSFYRKKLKEVWKPAV

SEQ ID NO: 28294 - protein, 978 aa, synthetic construct
  REGION 1..978: note = engineered CasX variant
QEIKRINKIRRRLVKDSNTKKAGKTGPMKTLLVPVMTPDLRERLENLRKKPENIPQPISNTSRANLNKLLTDYTEMKKAILHVYDEEFQKDPVGLMSRVAQPASKKIDQNKLKPEMDEKGNLTTAGFACSQCGQPLFVYKLEQVSEKGKAYTNYFGRCNVAEHEKLILLAQLKPEKDSDEAVTYSLGKFGQRALDFYSIHVTKESTHPVKPLAQIAGNRYASGPVGKALSDACMGTIASFLSKYQDIIIEHQKVVKGNQKRLESLRELAGKENLEYPSVTLPPQPHTKEGVDAYNEVIARVRMWVNLNLWQKLKLSRDDAKPLLRLKGFPSFPLVERQANEVDWWDMVCNVKKLINEKKEDGKVFWQNLAGYKRQEALRPYLSSEEDRKKGKKFARYQLGDLLLHLEKKHGEDWGKVYDEAWERIDKKVEGLSKHIKLEEERRSEDAQSKAALTDWLRAKASFVIEGLKEADKDEFCRCELKLQKWYGDLRGKPFAIEAENSILDISGFSKQYNCAFIWQKDGVKKLNLYLIINYFKGGKLRFKKIKPEAFEANRFYTVINKKSGEIVPMEVNFNFDDPNLIILPLAFGKRQGREFIWNDLLSLETGSLKLANGRVIEKTLYNRRTRQDEPALFVALTFERREVLDSSNIKPMNLIGVDRGENIPAVIALTDPEGCPLSRFKDSLGNPTHILRIGESYKEKQRTIQAKKEVEQRRAGGYSRKYASKAKNLADDMVRNTARDLLYYAVTQDAMLIFENLSRGFGRQGKRTFMAERQYTRMEDWLTAKLAYEGLPSKTYLSKTLAQYTSKTCSNCGFTITSADYDRVLEKLKKTATGWMTTINGKELKVEGQITYYNRYKRQNVVKDLSVELDRLSEESVNNDISSWTKGRSGEALSLLKKRFSHRPVQEKFVCLNCGFETHADEQAALNIARSWLFLRSQEYKKYQTNKTTGNTDKRAFVETWQSFYRKKLKEVWKPAV

SEQ ID NO: 28295 - protein, 978 aa, synthetic construct
  REGION 1..978: note = engineered CasX variant
QEIKRINKIRRRLVKDSNTKKAGKTGPMKTLLVPVMTPDLRERLENLRKKPENIPQPISNTSRANLNKLLTDYTEMKKAILHVYWEEFQKDPVGLMSRVAQPASKKIDQNKLKPEMDEKGNLTTAGFACSQCGQPLFVYKLEQVSEKGKAYTNYFGRCNVAEHEKLIKLAQLKPEKDSDEAVTYSLGKFGQRALDFYSIHVTKESTHPVKPLAQIAGNRYASGPVGKALSDACMGTIASFLSKYQDIIIEHQKVVKGNQKRLESLRELAGKENLEYPSVTLPPQPHTKEGVDAYNEVIARVRMWVNLNLWQKLKLSRDDAKPLLRLKGFPSFPLVERQANEVDWWDMVCNVKKLINEKKEDGKVFWQNLAGYKRQEALRPYLSSEEDRKKGKKFARYQLGDLLLHLEKKHGEDWGKVYDEAWERIDKKVEGLSKHIKLEEERRSEDAQSKAALTDWLRAKASFVIEGLKEADKDEFCRCELKLQKWYGDLRGKPFAIEAENSILDISGFSKQYNCAFIWQKDGVKKLNLYLIINYFKGGKLRFKKIKPEAFEANRFYTVINKKSGEIVPMEVNFNFDDPNLIILPLAFGKRQGREFIWNDLLSLETGSLKLANGRVIEKTLYNRRTRQDEPALFVALTFERREVLDSSNIKPMNLIGVDRGENIPAVIALTDPEGCPLSRFKDSLGNPTHILRIGESYKEKQRTIQAKKEVEQRRAGGYSRKYASKAKNLADDMVRNTARDLLYYAVTQDAMLIFENLSRGFGRQGKRTFMAERQYTRMEDWLTAKLAYEGLPSKTYLSKTLAQYTSKTCSNCGFTITSADYDRVLEKLKKTATGWMTTINGKELKVEGQITYYNRYKRQNVVKDLSVELDRLSEESVNNDISSWTKGRSGEALSLLKKRFSHRPVQEKFVCLNCGFETHADEQAALNIARSWLFLRSQEYKKYQTNKTTGNTDKRAFVETWQSFYRKKLKEVWKPAV

SEQ ID NO: 28296 - protein, 978 aa, synthetic construct
  REGION 1..978: note = engineered CasX variant
QEIKRINKIRRRLVKDSNTKKAGKTGPMKTLLVPVMTPDLRERLENLRKKPENIPQPISNTSRANLNKLLTDYTEMKKAILHVYWEEFQKDPVGLMSRVAQPASKKIDQNKLKPEMDEKGNLTTAGFACSQCGQPLFVYKLEQVSEKGKAYTNYFGRCNVAEHEKLILLYQLKPEKDSDEAVTYSLGKFGQRALDFYSIHVTKESTHPVKPLAQIAGNRYASGPVGKALSDACMGTIASFLSKYQDIIIEHQKVVKGNQKRLESLRELAGKENLEYPSVTLPPQPHTKEGVDAYNEVIARVRMWVNLNLWQKLKLSRDDAKPLLRLKGFPSFPLVERQANEVDWWDMVCNVKKLINEKKEDGKVFWQNLAGYKRQEALRPYLSSEEDRKKGKKFARYQLGDLLLHLEKKHGEDWGKVYDEAWERIDKKVEGLSKHIKLEEERRSEDAQSKAALTDWLRAKASFVIEGLKEADKDEFCRCELKLQKWYGDLRGKPFAIEAENSILDISGFSKQYNCAFIWQKDGVKKLNLYLIINYFKGGKLRFKKIKPEAFEANRFYTVINKKSGEIVPMEVNFNFDDPNLIILPLAFGKRQGREFIWNDLLSLETGSLKLANGRVIEKTLYNRRTRQDEPALFVALTFERREVLDSSNIKPMNLIGVDRGENIPAVIALTDPEGCPLSRFKDSLGNPTHILRIGESYKEKQRTIQAKKEVEQRRAGGYSRKYASKAKNLADDMVRNTARDLLYYAVTQDAMLIFENLSRGFGRQGKRTFMAERQYTRMEDWLTAKLAYEGLPSKTYLSKTLAQYTSKTCSNCGFTITSADYDRVLEKLKKTATGWMTTINGKELKVEGQITYYNRYKRQNVVKDLSVELDRLSEESVNNDISSWTKGRSGEALSLLKKRFSHRPVQEKFVCLNCGFETHADEQAALNIARSWLFLRSQEYKKYQTNKTTGNTDKRAFVETWQSFYRKKLKEVWKPAV

SEQ ID NO: 28297 - protein, 978 aa, synthetic construct
  REGION 1..978: note = engineered CasX variant
QEIKRINKIRRRLVKDSNTKKAGKTGPMKTLLVPVMTPDLRERLENLRKKPENIPQPISNTSRANLNKLLTDYTEMKKAILHVYWEEFQKDPVGLMSRVAQPASKKIDQNKLKPEMDEKGNLTTAGFACSQCGQPLFVYKLEQVSEKGKAYTNYFGRCNVAEHEKLILLSQLKPEKDSDEAVTYSLGKFGQRALDFYSIHVTKESTHPVKPLAQIAGNRYASGPVGKALSDACMGTIASFLSKYQDIIIEHQKVVKGNQKRLESLRELAGKENLEYPSVTLPPQPHTKEGVDAYNEVIARVRMWVNLNLWQKLKLSRDDAKPLLRLKGFPSFPLVERQANEVDWWDMVCNVKKLINEKKEDGKVFWQNLAGYKRQEALRPYLSSEEDRKKGKKFARYQLGDLLLHLEKKHGEDWGKVYDEAWERIDKKVEGLSKHIKLEEERRSEDAQSKAALTDWLRAKASFVIEGLKEADKDEFCRCELKLQKWYGDLRGKPFAIEAENSILDISGFSKQYNCAFIWQKDGVKKLNLYLIINYFKGGKLRFKKIKPEAFEANRFYTVINKKSGEIVPMEVNFNFDDPNLIILPLAFGKRQGREFIWNDLLSLETGSLKLANGRVIEKTLYNRRTRQDEPALFVALTFERREVLDSSNIKPMNLIGVDRGENIPAVIALTDPEGCPLSRFKDSLGNPTHILRIGESYKEKQRTIQAKKEVEQRRAGGYSRKYASKAKNLADDMVRNTARDLLYYAVTQDAMLIFENLSRGFGRQGKRTFMAERQYTRMEDWLTAKLAYEGLPSKTYLSKTLAQYTSKTCSNCGFTITSADYDRVLEKLKKTATGWMTTINGKELKVEGQITYYNRYKRQNVVKDLSVELDRLSEESVNNDISSWTKGRSGEALSLLKKRFSHRPVQEKFVCLNCGFETHADEQAALNIARSWLFLRSQEYKKYQTNKTTGNTDKRAFVETWQSFYRKKLKEVWKPAV

SEQ ID NO: 28298 - protein, 977 aa, synthetic construct
  REGION 1..977: note = engineered CasX variant
QEIKRINKIRRRLVKDSNTKKAGKTGPMKTLLVPVMTPDLRERLENLRKKPENIPQPISNTSRANLNKLLTDYTEMKKAILHVYWEEFQKDPVGLMSRVAQPASKKIDQNKLKPEMDEKGNLTTAGFACSQCGQPLFVYKLEQVSEKGKAYTNYFGRCNVAEHEKLILLAQLKPEKDSDEAVTYSLGKFGQRALDFYSIHVTKESTHPVKPLAQIAGNRYASPVGKALSDACMGTIASFLSKYQDIIIEHQKVVKGNQKRLESLRELAGKENLEYPSVTLPPQPHTKEGVDAYNEVIARVRMWVNLNLWQKLKLSRDDAKPLLRLKGFPSFPLVERQANEVDWWDMVCNVKKLINEKKEDGKVFWQNLAGYKRQEALRPYLSSEEDRKKGKKFARYQLGDLLLHLEKKHGEDWGKVYDEAWERIDKKVEGLSKHIKLEEERRSEDAQSKAALTDWLRAKASFVIEGLKEADKDEFCRCELKLQKWYGDLRGKPFAIEAENSILDISGFSKQYNCAFIWQKDGVKKLNLYLIINYFKGGKLRFKKIKPEAFEANRFYTVINKKSGEIVPMEVNFNFDDPNLIILPLAFGKRQGREFIWNDLLSLETGSLKLANGRVIEKTLYNRRTRQDEPALFVALTFERREVLDSSNIKPMNLIGVDRGENIPAVIALTDPEGCPLSRFKDSLGNPTHILRIGESYKEKQRTIQAKKEVEQRRAGGYSRKYASKAKNLADDMVRNTARDLLYYAVTQDAMLIFENLSRGFGRQGKRTFMAERQYTRMEDWLTAKLAYEGLPSKTYLSKTLAQYTSKTCSNCGFTITSADYDRVLEKLKKTATGWMTTINGKELKVEGQITYYNRYKRQNVVKDLSVELDRLSEESVNNDISSWTKGRSGEALSLLKKRFSHRPVQEKFVCLNCGFETHADEQAALNIARSWLFLRSQEYKKYQTNKTTGNTDKRAFVETWQSFYRKKLKEVWKPAV

SEQ ID NO: 28299 - protein, 978 aa, synthetic construct
  REGION 1..978: note = engineered CasX variant
QEIKRINKIRRRLVKDSNTKKAGKTGPMKTLLVPVMTPDLRERLENLRKKPENIPQPISNTSRANLNKLLTDYTEMKKAILHVYWEEFQKDPVGLMSRVAQPASKKIDQNKLKPEMDEKGNLTTAGFACSQCGQPLFVYKLEQVSEKGKAYTNYFGRCNVAEHEKLILLAQLKPEKDSDEAVTYSLGKFGQRALDFYSIHVTKESTHPVKPLAQIAGNRYASGPVGKALSDACMGTIASFLSKYQDIIIEHQKVVKGNQKRLESLRELAGKENLEYPSVTLPPQPHTSEGVDAYNEVIARVRMWVNLNLWQKLKLSRDDAKPLLRLKGFPSFPLVERQANEVDWWDMVCNVKKLINEKKEDGKVFWQNLAGYKRQEALRPYLSSEEDRKKGKKFARYQLGDLLLHLEKKHGEDWGKVYDEAWERIDKKVEGLSKHIKLEEERRSEDAQSKAALTDWLRAKASFVIEGLKEADKDEFCRCELKLQKWYGDLRGKPFAIEAENSILDISGFSKQYNCAFIWQKDGVKKLNLYLIINYFKGGKLRFKKIKPEAFEANRFYTVINKKSGEIVPMEVNFNFDDPNLIILPLAFGKRQGREFIWNDLLSLETGSLKLANGRVIEKTLYNRRTRQDEPALFVALTFERREVLDSSNIKPMNLIGVDRGENIPAVIALTDPEGCPLSRFKDSLGNPTHILRIGESYKEKQRTIQAKKEVEQRRAGGYSRKYASKAKNLADDMVRNTARDLLYYAVTQDAMLIFENLSRGFGRQGKRTFMAERQYTRMEDWLTAKLAYEGLPSKTYLSKTLAQYTSKTCSNCGFTITSADYDRVLEKLKKTATGWMTTINGKELKVEGQITYYNRYKRQNVVKDLSVELDRLSEESVNNDISSWTKGRSGEALSLLKKRFSHRPVQEKFVCLNCGFETHADEQAALNIARSWLFLRSQEYKKYQTNKTTGNTDKRAFVETWQSFYRKKLKEVWKPAV

SEQ ID NO: 28300 - protein, 978 aa, synthetic construct
  REGION 1..978: note = engineered CasX variant
QEIKRINKIRRRLVKDSNTKKAGKTGPMKTLLVPVMTPDLRERLENLRKKPENIPQPISNTSRANLNKLLTDYTEMKKAILHVYWEEFQKDPVGLMSRVAQPASKKIDQNKLKPEMDEKGNLTTAGFACSQCGQPLFVYKLEQVSEKGKAYTNYFGRCNVAEHEKLILLAQLKPEKDSDEAVTYSLGKFGQRALDFYSIHVTKESTHPVKPLAQIAGNRYASGPVGKALSDACMGTIASFLSKYQDIIIEHQKVVKGNQKRLESLRELAGKENLEYPSVTLPPQPHTKEGLDAYNEVIARVRMWVNLNLWQKLKLSRDDAKPLLRLKGFPSFPLVERQANEVDWWDMVCNVKKLINEKKEDGKVFWQNLAGYKRQEALRPYLSSEEDRKKGKKFARYQLGDLLLHLEKKHGEDWGKVYDEAWERIDKKVEGLSKHIKLEEERRSEDAQSKAALTDWLRAKASFVIEGLKEADKDEFCRCELKLQKWYGDLRGKPFAIEAENSILDISGFSKQYNCAFIWQKDGVKKLNLYLIINYFKGGKLRFKKIKPEAFEANRFYTVINKKSGEIVPMEVNFNFDDPNLIILPLAFGKRQGREFIWNDLLSLETGSLKLANGRVIEKTLYNRRTRQDEPALFVALTFERREVLDSSNIKPMNLIGVDRGENIPAVIALTDPEGCPLSRFKDSLGNPTHILRIGESYKEKQRTIQAKKEVEQRRAGGYSRKYASKAKNLADDMVRNTARDLLYYAVTQDAMLIFENLSRGFGRQGKRTFMAERQYTRMEDWLTAKLAYEGLPSKTYLSKTLAQYTSKTCSNCGFTITSADYDRVLEKLKKTATGWMTTINGKELKVEGQITYYNRYKRQNVVKDLSVELDRLSEESVNNDISSWTKGRSGEALSLLKKRFSHRPVQEKFVCLNCGFETHADEQAALNIARSWLFLRSQEYKKYQTNKTTGNTDKRAFVETWQSFYRKKLKEVWKPAV

SEQ ID NO: 28301 - protein, 978 aa, synthetic construct
  REGION 1..978: note = engineered CasX variant
QEIKRINKIRRRLVKDSNTKKAGKTGPMKTLLVPVMTPDLRERLENLRKKPENIPQPISNTSRANLNKLLTDYTEMKKAILHVYWEEFQKDPVGLMSRVAQPASKKIDQNKLKPEMDEKGNLTTAGFACSQCGQPLFVYKLEQVSEKGKAYTNYFGRCNVAEHEKLILLAQLKPEKDSDEAVTYSLGKFGQRALDFYSIHVTKESTHPVKPLAQIAGNRYASGPVGKALSDACMGTIASFLSKYQDIIIEHQKVVKGNQKRLESLRELAGKENLEYPSVTLPPQPHTKEGVDAYNEVIARVRTWVNLNLWQKLKLSRDDAKPLLRLKGFPSFPLVERQANEVDWWDMVCNVKKLINEKKEDGKVFWQNLAGYKRQEALRPYLSSEEDRKKGKKFARYQLGDLLLHLEKKHGEDWGKVYDEAWERIDKKVEGLSKHIKLEEERRSEDAQSKAALTDWLRAKASFVIEGLKEADKDEFCRCELKLQKWYGDLRGKPFAIEAENSILDISGFSKQYNCAFIWQKDGVKKLNLYLIINYFKGGKLRFKKIKPEAFEANRFYTVINKKSGEIVPMEVNFNFDDPNLIILPLAFGKRQGREFIWNDLLSLETGSLKLANGRVIEKTLYNRRTRQDEPALFVALTFERREVLDSSNIKPMNLIGVDRGENIPAVIALTDPEGCPLSRFKDSLGNPTHILRIGESYKEKQRTIQAKKEVEQRRAGGYSRKYASKAKNLADDMVRNTARDLLYYAVTQDAMLIFENLSRGFGRQGKRTFMAERQYTRMEDWLTAKLAYEGLPSKTYLSKTLAQYTSKTCSNCGFTITSADYDRVLEKLKKTATGWMTTINGKELKVEGQITYYNRYKRQNVVKDLSVELDRLSEESVNNDISSWTKGRSGEALSLLKKRFSHRPVQEKFVCLNCGFETHADEQAALNIARSWLFLRSQEYKKYQTNKTTGNTDKRAFVETWQSFYRKKLKEVWKPAV

SEQ ID NO: 28302 - protein, 978 aa, synthetic construct
  REGION 1..978: note = engineered CasX variant
QEIKRINKIRRRLVKDSNTKKAGKTGPMKTLLVPVMTPDLRERLENLRKKPENIPQPISNTSRANLNKLLTDYTEMKKAILHVYWEEFQKDPVGLMSRVAQPASKKIDQNKLKPEMDEKGNLTTAGFACSQCGQPLFVYKLEQVSEKGKAYTNYFGRCNVAEHEKLILLAQLKPEKDSDEAVTYSLGKFGQRALDFYSIHVTKESTHPVKPLAQIAGNRYASGPVGKALSDACMGTIASFLSKYQDIIIEHQKVVKGNQKRLESLRELAGKENLEYPSVTLPPQPHTKEGVDAYNEVIARVRWWVNLNLWQKLKLSRDDAKPLLRLKGFPSFPLVERQANEVDWWDMVCNVKKLINEKKEDGKVFWQNLAGYKRQEALRPYLSSEEDRKKGKKFARYQLGDLLLHLEKKHGEDWGKVYDEAWERIDKKVEGLSKHIKLEEERRSEDAQSKAALTDWLRAKASFVIEGLKEADKDEFCRCELKLQKWYGDLRGKPFAIEAENSILDISGFSKQYNCAFIWQKDGVKKLNLYLIINYFKGGKLRFKKIKPEAFEANRFYTVINKKSGEIVPMEVNFNFDDPNLIILPLAFGKRQGREFIWNDLLSLETGSLKLANGRVIEKTLYNRRTRQDEPALFVALTFERREVLDSSNIKPMNLIGVDRGENIPAVIALTDPEGCPLSRFKDSLGNPTHILRIGESYKEKQRTIQAKKEVEQRRAGGYSRKYASKAKNLADDMVRNTARDLLYYAVTQDAMLIFENLSRGFGRQGKRTFMAERQYTRMEDWLTAKLAYEGLPSKTYLSKTLAQYTSKTCSNCGFTITSADYDRVLEKLKKTATGWMTTINGKELKVEGQITYYNRYKRQNVVKDLSVELDRLSEESVNNDISSWTKGRSGEALSLLKKRFSHRPVQEKFVCLNCGFETHADEQAALNIARSWLFLRSQEYKKYQTNKTTGNTDKRAFVETWQSFYRKKLKEVWKPAV

SEQ ID NO: 28303 - protein, 979 aa, synthetic construct
  REGION 1..979: note = engineered CasX variant
QEIKRINKIRRRLVKDSNTKKAGKTGPMKTLLVPVMTPDLRERLENLRKKPENIPQPISNTSRANLNKLLTDYTEMKKAILHVYWEEFQKDPVGLMSRVAQPASKKIDQNKLKPEMDEKGNLTTAGFACSQCGQPLFVYKLEQVSEKGKAYTNYFGRCNVAEHEKLILLAQLKPEKDSDEAVTYSLGKFGQRALDFYSIHVTKESTHPVKPLAQIAGNRYASGPVGKALSDACMGTIASFLSKYQDIIIEHQKVVKGNQKRLESLRELAGKENLEYPSVTLPPQPHTKEGVDAYNEVIARVRMWVNLNLWQKLKLSRDDAKPLLRLKGFPSFPLVERQQANEVDWWDMVCNVKKLINEKKEDGKVFWQNLAGYKRQEALRPYLSSEEDRKKGKKFARYQLGDLLLHLEKKHGEDWGKVYDEAWERIDKKVEGLSKHIKLEEERRSEDAQSKAALTDWLRAKASFVIEGLKEADKDEFCRCELKLQKWYGDLRGKPFAIEAENSILDISGFSKQYNCAFIWQKDGVKKLNLYLIINYFKGGKLRFKKIKPEAFEANRFYTVINKKSGEIVPMEVNFNFDDPNLIILPLAFGKRQGREFIWNDLLSLETGSLKLANGRVIEKTLYNRRTRQDEPALFVALTFERREVLDSSNIKPMNLIGVDRGENIPAVIALTDPEGCPLSRFKDSLGNPTHILRIGESYKEKQRTIQAKKEVEQRRAGGYSRKYASKAKNLADDMVRNTARDLLYYAVTQDAMLIFENLSRGFGRQGKRTFMAERQYTRMEDWLTAKLAYEGLPSKTYLSKTLAQYTSKTCSNCGFTITSADYDRVLEKLKKTATGWMTTINGKELKVEGQITYYNRYKRQNVVKDLSVELDRLSEESVNNDISSWTKGRSGEALSLLKKRFSHRPVQEKFVCLNCGFETHADEQAALNIARSWLFLRSQEYKKYQTNKTTGNTDKRAFVETWQSFYRKKLKEVWKPAV

SEQ ID NO: 28304 - protein, 979 aa, synthetic construct
  REGION 1..979: note = engineered CasX variant
QEIKRINKIRRRLVKDSNTKKAGKTGPMKTLLVPVMTPDLRERLENLRKKPENIPQPISNTSRANLNKLLTDYTEMKKAILHVYWEEFQKDPVGLMSRVAQPASKKIDQNKLKPEMDEKGNLTTAGFACSQCGQPLFVYKLEQVSEKGKAYTNYFGRCNVAEHEKLILLAQLKPEKDSDEAVTYSLGKFGQRALDFYSIHVTKESTHPVKPLAQIAGNRYASGPVGKALSDACMGTIASFLSKYQDIIIEHQKVVKGNQKRLESLRELAGKENLEYPSVTLPPQPHTKEGVDAYNEVIARVRMWVNLNLWQKLKLSRDDAKPLLRLKGFPSFPLVERQANAEVDWWDMVCNVKKLINEKKEDGKVFWQNLAGYKRQEALRPYLSSEEDRKKGKKFARYQLGDLLLHLEKKHGEDWGKVYDEAWERIDKKVEGLSKHIKLEEERRSEDAQSKAALTDWLRAKASFVIEGLKEADKDEFCRCELKLQKWYGDLRGKPFAIEAENSILDISGFSKQYNCAFIWQKDGVKKLNLYLIINYFKGGKLRFKKIKPEAFEANRFYTVINKKSGEIVPMEVNFNFDDPNLIILPLAFGKRQGREFIWNDLLSLETGSLKLANGRVIEKTLYNRRTRQDEPALFVALTFERREVLDSSNIKPMNLIGVDRGENIPAVIALTDPEGCPLSRFKDSLGNPTHILRIGESYKEKQRTIQAKKEVEQRRAGGYSRKYASKAKNLADDMVRNTARDLLYYAVTQDAMLIFENLSRGFGRQGKRTFMAERQYTRMEDWLTAKLAYEGLPSKTYLSKTLAQYTSKTCSNCGFTITSADYDRVLEKLKKTATGWMTTINGKELKVEGQITYYNRYKRQNVVKDLSVELDRLSEESVNNDISSWTKGRSGEALSLLKKRFSHRPVQEKFVCLNCGFETHADEQAALNIARSWLFLRSQEYKKYQTNKTTGNTDKRAFVETWQSFYRKKLKEVWKPAV

SEQ ID NO: 28305 - protein, 978 aa, synthetic construct
  REGION 1..978: note = engineered CasX variant
QEIKRINKIRRRLVKDSNTKKAGKTGPMKTLLVPVMTPDLRERLENLRKKPENIPQPISNTSRANLNKLLTDYTEMKKAILHVYWEEFQKDPVGLMSRVAQPASKKIDQNKLKPEMDEKGNLTTAGFACSQCGQPLFVYKLEQVSEKGKAYTNYFGRCNVAEHEKLILLAQLKPEKDSDEAVTYSLGKFGQRALDFYSIHVTKESTHPVKPLAQIAGNRYASGPVGKALSDACMGTIASFLSKYQDIIIEHQKVVKGNQKRLESLRELAGKENLEYPSVTLPPQPHTKEGVDAYNEVIARVRMWVNLNLWQKLKLSRDDAKPLLRLKGFPSFPLVERQANEVDWWDMVCNVKKLINEKKEDGKVFWQNLAGYKRQEALRPYLSSEEDRKKGKKFARTQLGDLLLHLEKKHGEDWGKVYDEAWERIDKKVEGLSKHIKLEEERRSEDAQSKAALTDWLRAKASFVIEGLKEADKDEFCRCELKLQKWYGDLRGKPFAIEAENSILDISGFSKQYNCAFIWQKDGVKKLNLYLIINYFKGGKLRFKKIKPEAFEANRFYTVINKKSGEIVPMEVNFNFDDPNLIILPLAFGKRQGREFIWNDLLSLETGSLKLANGRVIEKTLYNRRTRQDEPALFVALTFERREVLDSSNIKPMNLIGVDRGENIPAVIALTDPEGCPLSRFKDSLGNPTHILRIGESYKEKQRTIQAKKEVEQRRAGGYSRKYASKAKNLADDMVRNTARDLLYYAVTQDAMLIFENLSRGFGRQGKRTFMAERQYTRMEDWLTAKLAYEGLPSKTYLSKTLAQYTSKTCSNCGFTITSADYDRVLEKLKKTATGWMTTINGKELKVEGQITYYNRYKRQNVVKDLSVELDRLSEESVNNDISSWTKGRSGEALSLLKKRFSHRPVQEKFVCLNCGFETHADEQAALNIARSWLFLRSQEYKKYQTNKTTGNTDKRAFVETWQSFYRKKLKEVWKPAV

SEQ ID NO: 28306 - protein, 979 aa, synthetic construct
  REGION 1..979: note = engineered CasX variant
QEIKRINKIRRRLVKDSNTKKAGKTGPMKTLLVPVMTPDLRERLENLRKKPENIPQPISNTSRANLNKLLTDYTEMKKAILHVYWEEFQKDPVGLMSRVAQPASKKIDQNKLKPEMDEKGNLTTAGFACSQCGQPLFVYKLEQVSEKGKAYTNYFGRCNVAEHEKLILLAQLKPEKDSDEAVTYSLGKFGQRALDFYSIHVTKESTHPVKPLAQIAGNRYASGPVGKALSDACMGTIASFLSKYQDIIIEHQKVVKGNQKRLESLRELAGKENLEYPSVTLPPQPHTKEGVDAYNEVIARVRMWVNLNLWQKLKLSRDDAKPLLRLKGFPSFPLVERQANEVDWWDMVCNVKKLINEKKEDGKVFWQNLAGYKRQEALRPYLSSEEDRKKGKKFARYQLGDLLLHLEKKHEGEDWGKVYDEAWERIDKKVEGLSKHIKLEEERRSEDAQSKAALTDWLRAKASFVIEGLKEADKDEFCRCELKLQKWYGDLRGKPFAIEAENSILDISGFSKQYNCAFIWQKDGVKKLNLYLIINYFKGGKLRFKKIKPEAFEANRFYTVINKKSGEIVPMEVNFNFDDPNLIILPLAFGKRQGREFIWNDLLSLETGSLKLANGRVIEKTLYNRRTRQDEPALFVALTFERREVLDSSNIKPMNLIGVDRGENIPAVIALTDPEGCPLSRFKDSLGNPTHILRIGESYKEKQRTIQAKKEVEQRRAGGYSRKYASKAKNLADDMVRNTARDLLYYAVTQDAMLIFENLSRGFGRQGKRTFMAERQYTRMEDWLTAKLAYEGLPSKTYLSKTLAQYTSKTCSNCGFTITSADYDRVLEKLKKTATGWMTTINGKELKVEGQITYYNRYKRQNVVKDLSVELDRLSEESVNNDISSWTKGRSGEALSLLKKRFSHRPVQEKFVCLNCGFETHADEQAALNIARSWLFLRSQEYKKYQTNKTTGNTDKRAFVETWQSFYRKKLKEVWKPAV

SEQ ID NO: 28307 - protein, 978 aa, synthetic construct
  REGION 1..978: note = engineered CasX variant
QEIKRINKIRRRLVKDSNTKKAGKTGPMKTLLVPVMTPDLRERLENLRKKPENIPQPISNTSRANLNKLLTDYTEMKKAILHVYWEEFQKDPVGLMSRVAQPASKKIDQNKLKPEMDEKGNLTTAGFACSQCGQPLFVYKLEQVSEKGKAYTNYFGRCNVAEHEKLILLAQLKPEKDSDEAVTYSLGKFGQRALDFYSIHVTKESTHPVKPLAQIAGNRYASGPVGKALSDACMGTIASFLSKYQDIIIEHQKVVKGNQKRLESLRELAGKENLEYPSVTLPPQPHTKEGVDAYNEVIARVRMWVNLNLWQKLKLSRDDAKPLLRLKGFPSFPLVERQANEVDWWDMVCNVKKLINEKKEDGKVFWQNLAGYKRQEALRPYLSSEEDRKKGKKFARYQLGDLLLHLEKKHGEDWGKVYDEAWERIDKKVEGLSKHIKLEEERRSEDAQSKAALTDWLRAKASFVIEGLKEADKDEFCRCDLKLQKWYGDLRGKPFAIEAENSILDISGFSKQYNCAFIWQKDGVKKLNLYLIINYFKGGKLRFKKIKPEAFEANRFYTVINKKSGEIVPMEVNFNFDDPNLIILPLAFGKRQGREFIWNDLLSLETGSLKLANGRVIEKTLYNRRTRQDEPALFVALTFERREVLDSSNIKPMNLIGVDRGENIPAVIALTDPEGCPLSRFKDSLGNPTHILRIGESYKEKQRTIQAKKEVEQRRAGGYSRKYASKAKNLADDMVRNTARDLLYYAVTQDAMLIFENLSRGFGRQGKRTFMAERQYTRMEDWLTAKLAYEGLPSKTYLSKTLAQYTSKTCSNCGFTITSADYDRVLEKLKKTATGWMTTINGKELKVEGQITYYNRYKRQNVVKDLSVELDRLSEESVNNDISSWTKGRSGEALSLLKKRFSHRPVQEKFVCLNCGFETHADEQAALNIARSWLFLRSQEYKKYQTNKTTGNTDKRAFVETWQSFYRKKLKEVWKPAV

SEQ ID NO: 28308 - protein, 978 aa, synthetic construct
  REGION 1..978: note = engineered CasX variant
QEIKRINKIRRRLVKDSNTKKAGKTGPMKTLLVPVMTPDLRERLENLRKKPENIPQPISNTSRANLNKLLTDYTEMKKAILHVYWEEFQKDPVGLMSRVAQPASKKIDQNKLKPEMDEKGNLTTAGFACSQCGQPLFVYKLEQVSEKGKAYTNYFGRCNVAEHEKLILLAQLKPEKDSDEAVTYSLGKFGQRALDFYSIHVTKESTHPVKPLAQIAGNRYASGPVGKALSDACMGTIASFLSKYQDIIIEHQKVVKGNQKRLESLRELAGKENLEYPSVTLPPQPHTKEGVDAYNEVIARVRMWVNLNLWQKLKLSRDDAKPLLRLKGFPSFPLVERQANEVDWWDMVCNVKKLINEKKEDGKVFWQNLAGYKRQEALRPYLSSEEDRKKGKKFARYQLGDLLLHLEKKHGEDWGKVYDEAWERIDKKVEGLSKHIKLEEERRSEDAQSKAALTDWLRAKASFVIEGLKEADKDEFCRCELKLQKWYGDLRGKPFAIEAENSILDISGFSKQYNCAFIWQKDGVKKLNLYLIINYFKGGKLRFKKIKPEAFEANRFYTVINKKSGEIVPMEVNFNFDDPNLIILPLAFGKRFGREFIWNDLLSLETGSLKLANGRVIEKTLYNRRTRQDEPALFVALTFERREVLDSSNIKPMNLIGVDRGENIPAVIALTDPEGCPLSRFKDSLGNPTHILRIGESYKEKQRTIQAKKEVEQRRAGGYSRKYASKAKNLADDMVRNTARDLLYYAVTQDAMLIFENLSRGFGRQGKRTFMAERQYTRMEDWLTAKLAYEGLPSKTYLSKTLAQYTSKTCSNCGFTITSADYDRVLEKLKKTATGWMTTINGKELKVEGQITYYNRYKRQNVVKDLSVELDRLSEESVNNDISSWTKGRSGEALSLLKKRFSHRPVQEKFVCLNCGFETHADEQAALNIARSWLFLRSQEYKKYQTNKTTGNTDKRAFVETWQSFYRKKLKEVWKPAV

SEQ ID NO: 28309 - protein, 978 aa, synthetic construct
  REGION 1..978: note = engineered CasX variant
QEIKRINKIRRRLVKDSNTKKAGKTGPMKTLLVPVMTPDLRERLENLRKKPENIPQPISNTSRANLNKLLTDYTEMKKAILHVYWEEFQKDPVGLMSRVAQPASKKIDQNKLKPEMDEKGNLTTAGFACSQCGQPLFVYKLEQVSEKGKAYTNYFGRCNVAEHEKLILLAQLKPEKDSDEAVTYSLGKFGQRALDFYSIHVTKESTHPVKPLAQIAGNRYASGPVGKALSDACMGTIASFLSKYQDIIIEHQKVVKGNQKRLESLRELAGKENLEYPSVTLPPQPHTKEGVDAYNEVIARVRMWVNLNLWQKLKLSRDDAKPLLRLKGFPSFPLVERQANEVDWWDMVCNVKKLINEKKEDGKVFWQNLAGYKRQEALRPYLSSEEDRKKGKKFARYQLGDLLLHLEKKHGEDWGKVYDEAWERIDKKVEGLSKHIKLEEERRSEDAQSKAALTDWLRAKASFVIEGLKEADKDEFCRCELKLQKWYGDLRGKPFAIEAENSILDISGFSKQYNCAFIWQKDGVKKLNLYLIINYFKGGKLRFKKIKPEAFEANRFYTVINKKSGEIVPMEVNFNFDDPNLIILPLAFGKRVGREFIWNDLLSLETGSLKLANGRVIEKTLYNRRTRQDEPALFVALTFERREVLDSSNIKPMNLIGVDRGENIPAVIALTDPEGCPLSRFKDSLGNPTHILRIGESYKEKQRTIQAKKEVEQRRAGGYSRKYASKAKNLADDMVRNTARDLLYYAVTQDAMLIFENLSRGFGRQGKRTFMAERQYTRMEDWLTAKLAYEGLPSKTYLSKTLAQYTSKTCSNCGFTITSADYDRVLEKLKKTATGWMTTINGKELKVEGQITYYNRYKRQNVVKDLSVELDRLSEESVNNDISSWTKGRSGEALSLLKKRFSHRPVQEKFVCLNCGFETHADEQAALNIARSWLFLRSQEYKKYQTNKTTGNTDKRAFVETWQSFYRKKLKEVWKPAV

SEQ ID NO: 28310 - protein, 979 aa, synthetic construct
  REGION 1..979: note = engineered CasX variant
QEIKRINKIRRRLVKDSNTKKAGKTGPMKTLLVPVMTPDLRERLENLRKKPENIPQPISNTSRANLNKLLTDYTEMKKAILHVYWEEFQKDPVGLMSRVAQPASKKIDQNKLKPEMDEKGNLTTAGFACSQCGQPLFVYKLEQVSEKGKAYTNYFGRCNVAEHEKLILLAQLKPEKDSDEAVTYSLGKFGQRALDFYSIHVTKESTHPVKPLAQIAGNRYASGPVGKALSDACMGTIASFLSKYQDIIIEHQKVVKGNQKRLESLRELAGKENLEYPSVTLPPQPHTKEGVDAYNEVIARVRMWVNLNLWQKLKLSRDDAKPLLRLKGFPSFPLVERQANEVDWWDMVCNVKKLINEKKEDGKVFWQNLAGYKRQEALRPYLSSEEDRKKGKKFARYQLGDLLLHLEKKHGEDWGKVYDEAWERIDKKVEGLSKHIKLEEERRSEDAQSKAALTDWLRAKASFVIEGLKEADKDEFCRCELKLQKWYGDLRGKPFAIEAENSILDISGFSKQYNCAFIWQKDGVKKLNLYLIINYFKGGKLRFKKIKPEAFEANRFYTVINKKSGEIVPMEVNFNFDDPNLIILPLAFGKRQGREFIWNDLLSLETGSLKLANGRVIEKTLYNRRTRQDEPALFVALTFERREVLDSSNIKTPMNLIGVDRGENIPAVIALTDPEGCPLSRFKDSLGNPTHILRIGESYKEKQRTIQAKKEVEQRRAGGYSRKYASKAKNLADDMVRNTARDLLYYAVTQDAMLIFENLSRGFGRQGKRTFMAERQYTRMEDWLTAKLAYEGLPSKTYLSKTLAQYTSKTCSNCGFTITSADYDRVLEKLKKTATGWMTTINGKELKVEGQITYYNRYKRQNVVKDLSVELDRLSEESVNNDISSWTKGRSGEALSLLKKRFSHRPVQEKFVCLNCGFETHADEQAALNIARSWLFLRSQEYKKYQTNKTTGNTDKRAFVETWQSFYRKKLKEVWKPAV

SEQ ID NO: 28311 - protein, 979 aa, synthetic construct
  REGION 1..979: note = engineered CasX variant
QEIKRINKIRRRLVKDSNTKKAGKTGPMKTLLVPVMTPDLRERLENLRKKPENIPQPISNTSRANLNKLLTDYTEMKKAILHVYWEEFQKDPVGLMSRVAQPASKKIDQNKLKPEMDEKGNLTTAGFACSQCGQPLFVYKLEQVSEKGKAYTNYFGRCNVAEHEKLILLAQLKPEKDSDEAVTYSLGKFGQRALDFYSIHVTKESTHPVKPLAQIAGNRYASGPVGKALSDACMGTIASFLSKYQDIIIEHQKVVKGNQKRLESLRELAGKENLEYPSVTLPPQPHTKEGVDAYNEVIARVRMWVNLNLWQKLKLSRDDAKPLLRLKGFPSFPLVERQANEVDWWDMVCNVKKLINEKKEDGKVFWQNLAGYKRQEALRPYLSSEEDRKKGKKFARYQLGDLLLHLEKKHGEDWGKVYDEAWERIDKKVEGLSKHIKLEEERRSEDAQSKAALTDWLRAKASFVIEGLKEADKDEFCRCELKLQKWYGDLRGKPFAIEAENSILDISGFSKQYNCAFIWQKDGVKKLNLYLIINYFKGGKLRFKKIKPEAFEANRFYTVINKKSGEIVPMEVNFNFDDPNLIILPLAFGKRQGREFIWNDLLSLETGSLKLANGRVIEKTLYNRRTRQDEPALFVALTFERREVLDSSNIKPMSNLIGVDRGENIPAVIALTDPEGCPLSRFKDSLGNPTHILRIGESYKEKQRTIQAKKEVEQRRAGGYSRKYASKAKNLADDMVRNTARDLLYYAVTQDAMLIFENLSRGFGRQGKRTFMAERQYTRMEDWLTAKLAYEGLPSKTYLSKTLAQYTSKTCSNCGFTITSADYDRVLEKLKKTATGWMTTINGKELKVEGQITYYNRYKRQNVVKDLSVELDRLSEESVNNDISSWTKGRSGEALSLLKKRFSHRPVQEKFVCLNCGFETHADEQAALNIARSWLFLRSQEYKKYQTNKTTGNTDKRAFVETWQSFYRKKLKEVWKPAV

SEQ ID NO: 28312 - protein, 978 aa, synthetic construct
  REGION 1..978: note = engineered CasX variant
QEIKRINKIRRRLVKDSNTKKAGKTGPMKTLLVPVMTPDLRERLENLRKKPENIPQPISNTSRANLNKLLTDYTEMKKAILHVYWEEFQKDPVGLMSRVAQPASKKIDQNKLKPEMDEKGNLTTAGFACSQCGQPLFVYKLEQVSEKGKAYTNYFGRCNVAEHEKLILLAQLKPEKDSDEAVTYSLGKFGQRALDFYSIHVTKESTHPVKPLAQIAGNRYASGPVGKALSDACMGTIASFLSKYQDIIIEHQKVVKGNQKRLESLRELAGKENLEYPSVTLPPQPHTKEGVDAYNEVIARVRMWVNLNLWQKLKLSRDDAKPLLRLKGFPSFPLVERQANEVDWWDMVCNVKKLINEKKEDGKVFWQNLAGYKRQEALRPYLSSEEDRKKGKKFARYQLGDLLLHLEKKHGEDWGKVYDEAWERIDKKVEGLSKHIKLEEERRSEDAQSKAALTDWLRAKASFVIEGLKEADKDEFCRCELKLQKWYGDLRGKPFAIEAENSILDISGFSKQYNCAFIWQKDGVKKLNLYLIINYFKGGKLRFKKIKPEAFEANRFYTVINKKSGEIVPMEVNFNFDDPNLIILPLAFGKRQGREFIWNDLLSLETGSLKLANGRVIEKTLYNRRTRQDEPALFVALTFERREVLDSSNIKPMNLIGVDRGENIPAVIALTDPEGCPLSRFKDSLGNPTHILRIRESYKEKQRTIQAKKEVEQRRAGGYSRKYASKAKNLADDMVRNTARDLLYYAVTQDAMLIFENLSRGFGRQGKRTFMAERQYTRMEDWLTAKLAYEGLPSKTYLSKTLAQYTSKTCSNCGFTITSADYDRVLEKLKKTATGWMTTINGKELKVEGQITYYNRYKRQNVVKDLSVELDRLSEESVNNDISSWTKGRSGEALSLLKKRFSHRPVQEKFVCLNCGFETHADEQAALNIARSWLFLRSQEYKKYQTNKTTGNTDKRAFVETWQSFYRKKLKEVWKPAV

SEQ ID NO: 28313 - protein, 978 aa, synthetic construct
  REGION 1..978: note = engineered CasX variant
QEIKRINKIRRRLVKDSNTKKAGKTGPMKTLLVPVMTPDLRERLENLRKKPENIPQPISNTSRANLNKLLTDYTEMKKAILHVYWEEFQKDPVGLMSRVAQPASKKIDQNKLKPEMDEKGNLTTAGFACSQCGQPLFVYKLEQVSEKGKAYTNYFGRCNVAEHEKLILLAQLKPEKDSDEAVTYSLGKFGQRALDFYSIHVTKESTHPVKPLAQIAGNRYASGPVGKALSDACMGTIASFLSKYQDIIIEHQKVVKGNQKRLESLRELAGKENLEYPSVTLPPQPHTKEGVDAYNEVIARVRMWVNLNLWQKLKLSRDDAKPLLRLKGFPSFPLVERQANEVDWWDMVCNVKKLINEKKEDGKVFWQNLAGYKRQEALRPYLSSEEDRKKGKKFARYQLGDLLLHLEKKHGEDWGKVYDEAWERIDKKVEGLSKHIKLEEERRSEDAQSKAALTDWLRAKASFVIEGLKEADKDEFCRCELKLQKWYGDLRGKPFAIEAENSILDISGFSKQYNCAFIWQKDGVKKLNLYLIINYFKGGKLRFKKIKPEAFEANRFYTVINKKSGEIVPMEVNFNFDDPNLIILPLAFGKRQGREFIWNDLLSLETGSLKLANGRVIEKTLYNRRTRQDEPALFVALTFERREVLDSSNIKPMNLIGVDRGENIPAVIALTDPEGCPLSRFKDSLGNPTHILRIGESYKEKQRTIQAKKEVEQRRAGGYSRKYASKAKNLADDMVRNTARDLLYYAVTQDAMLIFENLSRGFGRQGKRTFSAERQYTRMEDWLTAKLAYEGLPSKTYLSKTLAQYTSKTCSNCGFTITSADYDRVLEKLKKTATGWMTTINGKELKVEGQITYYNRYKRQNVVKDLSVELDRLSEESVNNDISSWTKGRSGEALSLLKKRFSHRPVQEKFVCLNCGFETHADEQAALNIARSWLFLRSQEYKKYQTNKTTGNTDKRAFVETWQSFYRKKLKEVWKPAV

SEQ ID NO: 28314 - protein, 978 aa, synthetic construct
  REGION 1..978: note = engineered CasX variant
QEIKRINKIRRRLVKDSNTKKAGKTGPMKTLLVPVMTPDLRERLENLRKKPENIPQPISNTSRANLNKLLTDYTEMKKAILHVYWEEFQKDPVGLMSRVAQPASKKIDQNKLKPEMDEKGNLTTAGFACSQCGQPLFVYKLEQVSEKGKAYTNYFGRCNVAEHEKLILLAQLKPEKDSDEAVTYSLGKFGQRALDFYSIHVTKESTHPVKPLAQIAGNRYASGPVGKALSDACMGTIASFLSKYQDIIIEHQKVVKGNQKRLESLRELAGKENLEYPSVTLPPQPHTKEGVDAYNEVIARVRMWVNLNLWQKLKLSRDDAKPLLRLKGFPSFPLVERQANEVDWWDMVCNVKKLINEKKEDGKVFWQNLAGYKRQEALRPYLSSEEDRKKGKKFARYQLGDLLLHLEKKHGEDWGKVYDEAWERIDKKVEGLSKHIKLEEERRSEDAQSKAALTDWLRAKASFVIEGLKEADKDEFCRCELKLQKWYGDLRGKPFAIEAENSILDISGFSKQYNCAFIWQKDGVKKLNLYLIINYFKGGKLRFKKIKPEAFEANRFYTVINKKSGEIVPMEVNFNFDDPNLIILPLAFGKRQGREFIWNDLLSLETGSLKLANGRVIEKTLYNRRTRQDEPALFVALTFERREVLDSSNIKPMNLIGVDRGENIPAVIALTDPEGCPLSRFKDSLGNPTHILRIGESYKEKQRTIQAKKEVEQRRAGGYSRKYASKAKNLADDMVRNTARDLLYYAVTQDAMLIFENLSRGFGRQGKRTFMAERQYTRMEDWLTAKLAYEGLPSKTYLSKTLAQYTSKTCSNCGFTITSADYDRVLEKLKKTATGWMTTINGKELKVEGQITYYNRYKRQNVVKDLSVELDRLSEESVNNDISSWDKGRSGEALSLLKKRFSHRPVQEKFVCLNCGFETHADEQAALNIARSWLFLRSQEYKKYQTNKTTGNTDKRAFVETWQSFYRKKLKEVWKPAV

SEQ ID NO: 28315 - protein, 978 aa, synthetic construct
  REGION 1..978: note = engineered CasX variant
QEIKRINKIRRRLVKDSNTKKAGKTGPMKTLLVPVMTPDLRERLENLRKKPENIPQPISNTSRANLNKLLTDYTEMKKAILHVYWEEFQVDPVGLMSRVAQPASKKIDQNKLKPEMDEKGNLTTAGFACSQCGQPLFVYKLEQVSEKGKAYTNYFGRCNVAEHEKLILLAQLKPEKDSDEAVTYSLGKFGQRALDFYSIHVTKESTHPVKPLAQIAGNRYASGPVGKALSDACMGTIASFLSKYQDIIIEHQKVVKGNQKRLESLRELAGKENLEYPSVTLPPQPHTKEGVDAYNEVIARVRMWVNLNLWQKLKLSRDDAKPLLRLKGFPSFPLVERQANEVDWWDMVCNVKKLINEKKEDGKVFWQNLAGYKRQEALRPYLSSEEDRKKGKKFARYQLGDLLLHLEKKHGEDWGKVYDEAWERIDKKVEGLSKHIKLEEERRSEDAQSKAALTDWLRAKASFVIEGLKEADKDEFCRCELKLQKWYGDLRGKPFAIEAENSILDISGFSKQYNCAFIWQKDGVKKLNLYLIINYFKGGKLRFKKIKPEAFEANRFYTVINKKSGEIVPMEVNFNFDDPNLIILPLAFGKRQGREFIWNDLLSLETGSLKLANGRVIEKTLYNRRTRQDEPALFVALTFERREVLDSSNIKPMNLIGVDRGENIPAVIALTDPEGCPLSRFKDSLGNPTHILRIGESYKEKQRTIQAKKEVEQRRAGGYSRKYASKAKNLADDMVRNTARDLLYYAVTQDAMLIFENLSRGFGRQGKRTFMAERQYTRMEDWLTAKLAYEGLPSKTYLSKTLAQYTSKTCSNCGFTITSADYDRVLEKLKKTATGWMTTINGKELKVEGQITYYNRYKRQNVVKDLSVELDRLSEESVNNDISSWTKGRSGEALSLLKKRFSHRPVQEKFVCLNCGFETHADEQAALNIARSWLFLRSQEYKKYQTNKTTGNTDKRAFVETWQSFYRKKLKEVWKPAV

SEQ ID NO: 28316 - protein, 978 aa, synthetic construct
  REGION 1..978: note = engineered CasX variant
QEIKRLNKIRRRLVKDSNTKKAGKTGPMKTLLVPVMTPDLRERLENLRKKPENIPQPISNTSRANLNKLLTDYTEMKKAILHVYWEEFQKDPVGLMSRVAQPASKKIDQNKLKPEMDEKGNLTTAGFACSQCGQPLFVYKLEQVSEKGKAYTNYFGRCNVAEHEKLILLAQLKPEKDSDEAVTYSLGKFGQRALDFYSIHVTKESTHPVKPLAQIAGNRYASGPVGKALSDACMGTIASFLSKYQDIIIEHQKVVKGNQKRLESLRELAGKENLEYPSVTLPPQPHTKEGVDAYNEVIARVRMWVNLNLWQKLKLSRDDAKPLLRLKGFPSFPLVERQANEVDWWDMVCNVKKLINEKKEDGKVFWQNLAGYKRQEALRPYLSSEEDRKKGKKFARYQLGDLLLHLEKKHGEDWGKVYDEAWERIDKKVEGLSKHIKLEEERRSEDAQSKAALTDWLRAKASFVIEGLKEADKDEFCRCELKLQKWYGDLRGKPFAIEAENSILDISGFSKQYNCAFIWQKDGVKKLNLYLIINYFKGGKLRFKKIKPEAFEANRFYTVINKKSGEIVPMEVNFNFDDPNLIILPLAFGKRQGREFIWNDLLSLETGSLKLANGRVIEKTLYNRRTRQDEPALFVALTFERREVLDSSNIKPMNLIGVDRGENIPAVIALTDPEGCPLSRFKDSLGNPTHILRIGESYKEKQRTIQAKKEVEQRRAGGYSRKYASKAKNLADDMVRNTARDLLYYAVTQDAMLIFENLSRGFGRQGKRTFMAERQYTRMEDWLTAKLAYEGLPSKTYLSKTLAQYTSKTCSNCGFTITSADYDRVLEKLKKTATGWMTTINGKELKVEGQITYYNRYKRQNVVKDLSVELDRLSEESVNNDISSWTKGRSGEALSLLKKRFSHRPVQEKFVCLNCGFETHADEQAALNIARSWLFLRSQEYKKYQTNKTTGNTDKRAFVETWQSFYRKKLKEVWKPAV

SEQ ID NO: 28317 - protein, 978 aa, synthetic construct
  REGION 1..978: note = engineered CasX variant
QEIKRINKIRRRLVKDSNTKKAGKTGPMKTLLVPVMTPDLRERLENLRKKPENIPQPISNTSRANLNKLLTDYTEMKKAILHVYWEEFQKDPVGLMSRVAQPASKKIDQNKLKPEMDEKGNLTTAGFACSQCGQPLFVYKLEQVSEKGKAYTNYVGRCNVAEHEKLILLAQLKPEKDSDEAVTYSLGKFGQRALDFYSIHVTKESTHPVKPLAQIAGNRYASGPVGKALSDACMGTIASFLSKYQDIIIEHQKVVKGNQKRLESLRELAGKENLEYPSVTLPPQPHTKEGVDAYNEVIARVRMWVNLNLWQKLKLSRDDAKPLLRLKGFPSFPLVERQANEVDWWDMVCNVKKLINEKKEDGKVFWQNLAGYKRQEALRPYLSSEEDRKKGKKFARYQLGDLLLHLEKKHGEDWGKVYDEAWERIDKKVEGLSKHIKLEEERRSEDAQSKAALTDWLRAKASFVIEGLKEADKDEFCRCELKLQKWYGDLRGKPFAIEAENSILDISGFSKQYNCAFIWQKDGVKKLNLYLIINYFKGGKLRFKKIKPEAFEANRFYTVINKKSGEIVPMEVNFNFDDPNLIILPLAFGKRQGREFIWNDLLSLETGSLKLANGRVIEKTLYNRRTRQDEPALFVALTFERREVLDSSNIKPMNLIGVDRGENIPAVIALTDPEGCPLSRFKDSLGNPTHILRIGESYKEKQRTIQAKKEVEQRRAGGYSRKYASKAKNLADDMVRNTARDLLYYAVTQDAMLIFENLSRGFGRQGKRTFMAERQYTRMEDWLTAKLAYEGLPSKTYLSKTLAQYTSKTCSNCGFTITSADYDRVLEKLKKTATGWMTTINGKELKVEGQITYYNRYKRQNVVKDLSVELDRLSEESVNNDISSWTKGRSGEALSLLKKRFSHRPVQEKFVCLNCGFETHADEQAALNIARSWLFLRSQEYKKYQTNKTTGNTDKRAFVETWQSFYRKKLKEVWKPAV

SEQ ID NO: 28318 - protein, 978 aa, synthetic construct
  REGION 1..978: note = engineered CasX variant
QEIKRINKIRRRLVKDSNTKKAGKTGPMKTLLVPVMTPDLRERLENLRKKPENIPQPISNTSRANLNKLLTDYTEMKKAILHVYWEEFQKDPVGLMSRVAQPASKKIDQNKLKPEMDEKGNLTTAGFACSQCGQPLFVYKLEQVSEKGKAYTNYFGRCNVAEHEKLILLAQLKPEKDSDEAVTYSLGKFGQRALDFYSIHVTKESTHPVKPLAQIAGNRYASGPVGKALSDACMGTIASFLSKYQDIIIEHQKVVKGNQKRLESLRELAGKENLEYPSVTLPPQPHTKEGVDAYNEVIARVRMWVNLNLWQKLKLSRDDAKPLLRLKGFPSFPLVERQANEVDWWDMVCNVKKLINEKKEDGKVFWQNLAGYKRQEALRPYLSSEEDRKKGKKFARYQLGDLLLHLEKKHGEDWGKVYDEAWERIDKKVEGLSKHIKLEEERRSEDAQSKAALTDWLRAKASFVIEGLKEADKDEFCRCELKLQKWYGDLRGKPFAIEAENSILDISGFSKQYNCAFIWQKDGVKKLNLYLIINYFKGGKLRFKKIKPEAFEANRFYTVINKKSGEIVPMEVNFNFDDPNLIILPLAFGKRQGREFIWNDLLSLETGSLKLANGRVIEKTLYNRRTRQDEPALFVALTFERREVLDSSNIKPMNLIGVDRGENIPAVIALTDPEGCPLSRFKDSLGNPTHILRIGESYKEKQRTIQAKKEVEQRRAGGYSRKYASKAKNLADDMVRNTARDLLYYAVTQDAMLIFENLSRGFGRQGKRTFMAERQYTRMEDWLTAKLAYEGLASKTYLSKTLAQYTSKTCSNCGFTITSADYDRVLEKLKKTATGWMTTINGKELKVEGQITYYNRYKRQNVVKDLSVELDRLSEESVNNDISSWTKGRSGEALSLLKKRFSHRPVQEKFVCLNCGFETHADEQAALNIARSWLFLRSQEYKKYQTNKTTGNTDKRAFVETWQSFYRKKLKEVWKPAV

SEQ ID NO: 28319 - protein, 978 aa, synthetic construct
  REGION 1..978: note = engineered CasX variant
QEIKRINKIRRRLVKDSNTKKAGKTGPMKTLLVPVMTPDLRERLENLRKKPENIPQPISNTSRANLNKLLTDYTEMKKAILHVYWEEFQKDPVGLMSRVAQPASKKIDQNKLKPEMDEKGNLTTAGFACSQCGQPLFVYKLEQVSEKGKAYTNYFGRCNVAEHEKLILLAQLKPEKDSDEAVTYSLGKFGQRALDFYSIHVTKESTHPVKPLAQIAGNRYASGPVGKALSDACMGTIASFLSKYQDIIIEHQKVVKGNQKRLESLRELAGKENLEYPSVTLPPQPHTKEGVDAYNEVIARVRMWVNLNLWQKLKLSRDDAKPLLRLKGFPSFPLVERQANEVDWWDMVCNVKKLINEKKEDGKVFWQNLAGYKRQEALRPYLSSEEDRKKGKKFARYQLGDLLLHLEKKHGEDWGKVYDEAWERIDKKVEGLSKHIKLEEERRSEDAQSKAALTDWLRAKASFVIEGLKEADKDEFCRCELKLQKWYGDLRGKPFAIEAENSILDISGFSKQYNCAFIWQKDGVKKLNLYLIINYFKGGKLRFKKIKPEAFEANRFYTVINKKSGEIVPMEVNFNFDDPNLIILPLAFGKRQGREFIWNDLLSLETGSLKLANGRVIEKTLYNRRTRQDEPALFVALTFERREVLDSSNIKPMNLIGVDRGENIPAVIALTDPEGCPLSRFKDSLGNPTHILRIGESYKEKQRTIQAKKEVEQRRAGGYSRKYASKAKNLADDMVRNTARDLLYYAVTQDAMLIFENLSRGFGRQGKRTFMAERQYTRMEDWLTAKLAYEGLPSKVYLSKTLAQYTSKTCSNCGFTITSADYDRVLEKLKKTATGWMTTINGKELKVEGQITYYNRYKRQNVVKDLSVELDRLSEESVNNDISSWTKGRSGEALSLLKKRFSHRPVQEKFVCLNCGFETHADEQAALNIARSWLFLRSQEYKKYQTNKTTGNTDKRAFVETWQSFYRKKLKEVWKPAV

SEQ ID NO: 28320 - protein, 979 aa, synthetic construct
  REGION 1..979: note = engineered CasX variant
QEIKRINKIRRRLVKDSNTKKAGKTGPMKTLLVPVMTPDLRERLENLRKKPENIPQPISNTSRANLNKLLTDYTEMKKAILHVYWEEFQKDPVGLMSRVAQPASKKIDQNKLKPEMDEKGNLTTAGFACSQCGQPLFVYKLEQVSEKGKAYTNYFGRCNVAEHEKLILLAQLKPEKDSDEAVTYSLGKFGQRALDFYSIHVTKESTHPVKPLAQIAGNRYASGPVGKALSDACMGTIASFLSKYQDIIIEHQKVVKGNQKRLESLRELAGKENLEYPSVTLPPQPHTKEGVDAYNEVIARVRMWVNLNLWQKLKLSRDDAKPLLRLKGFPSFPLVERQANEVDWWDMVCNVKKLINEKKEDGKVFWQNLAGYKRQEALRPYLSSEEDRKKGKKFARYQLGDLLLHLEKKHGEDWGKVYDEAWERIDKKVEGLSKHIKLEEERRSEDAQSKAALTDWLRAKASFVIEGLKEADKDEFCRCELKLQKWYGDLRGKPFAIEAENSILDISGFSKQYNCAFIWQKDGVKKLNLYLIINYFKGGKLRFKKIKPEAFEANRFYTVINKKSGEIVPMEVNFNFDDPNLIILPLAFGKRQGREFIWNDLLSLETGSLKLANGRVIEKTLYNRRTRQDEPALFVALTFERREVLDSSNIKPMNLIGVDRGENIPAVIALTDPEGCPLSRFKDSLGNPTHILRIGESYKEKQRTIQAKKEVEQRRAGGYSRKYASKAKNLADDMVRNTARDLLYYAVTQDAMLIFENLSRGFGRQGKRTFMAERQYTRMEDWLTAKLAYEGPLPSKTYLSKTLAQYTSKTCSNCGFTITSADYDRVLEKLKKTATGWMTTINGKELKVEGQITYYNRYKRQNVVKDLSVELDRLSEESVNNDISSWTKGRSGEALSLLKKRFSHRPVQEKFVCLNCGFETHADEQAALNIARSWLFLRSQEYKKYQTNKTTGNTDKRAFVETWQSFYRKKLKEVWKPAV

SEQ ID NO: 28321 - protein, 979 aa, synthetic construct
  REGION 1..979: note = engineered CasX variant
QEIKRINKIRRRLVKDSNTKKAGKTGPMKTLLVPVMTPDLRERLENLRKKPENIPQPISNTSRANLNKLLTDYTEMKKAILHVYWEEFQKDPVGLMSRVAQPASKKIDQNKLKPEMDEKGNLTTAGFACSQCGQPLFVYKLEQVSEKGKAYTNYFGRCNVAEHEKLILLAQLKPEKDSDEAVTYSLGKFGQRALDFYSIHVTKESTHPVKPLAQIAGNRYASGPVGKALSDACMGTIASFLSKYQDIIIEHQKVVKGNQKRLESLRELAGKENLEYPSVTLPPQPHTKEGVDAYNEVIARVRMWVNLNLWQKLKLSRDDAKPLLRLKGFPSFPLVERQANEVDWWDMVCNVKKLINEKKEDGKVFWQNLAGYKRQEALRPYLSSEEDVRKKGKKFARYQLGDLLLHLEKKHGEDWGKVYDEAWERIDKKVEGLSKHIKLEEERRSEDAQSKAALTDWLRAKASFVIEGLKEADKDEFCRCELKLQKWYGDLRGKPFAIEAENSILDISGFSKQYNCAFIWQKDGVKKLNLYLIINYFKGGKLRFKKIKPEAFEANRFYTVINKKSGEIVPMEVNFNFDDPNLIILPLAFGKRQGREFIWNDLLSLETGSLKLANGRVIEKTLYNRRTRQDEPALFVALTFERREVLDSSNIKPMNLIGVDRGENIPAVIALTDPEGCPLSRFKDSLGNPTHILRIGESYKEKQRTIQAKKEVEQRRAGGYSRKYASKAKNLADDMVRNTARDLLYYAVTQDAMLIFENLSRGFGRQGKRTFMAERQYTRMEDWLTAKLAYEGLPSKTYLSKTLAQYTSKTCSNCGFTITSADYDRVLEKLKKTATGWMTTINGKELKVEGQITYYNRYKRQNVVKDLSVELDRLSEESVNNDISSWTKGRSGEALSLLKKRFSHRPVQEKFVCLNCGFETHADEQAALNIARSWLFLRSQEYKKYQTNKTTGNTDKRAFVETWQSFYRKKLKEVWKPAV

SEQ ID NO: 28322 - protein, 978 aa, synthetic construct
  REGION 1..978: note = engineered CasX variant
QEIKRINKIRRRLVKDSNTKKAGKTGPMKTLLVPVMTPDLRERLENLRKKPENIPQPISNTSRANLNKLLTDYTEMKKAILHVYWEEFQKDPVGLMSRVAQPASKKIDQNKLKPEMDEKGNLTTAGFACSQCGQPLFVYKLEQVSEKGKAYTNYFGRCNVAEHEKLILLAQLKPEKDSDEAVTYSLGKFGQRALDFYSIHVTKESTHPVKPLAQIAGNRYASGPVGKALSDACMGTIASFLSKYQDIIIEHQKVVKGNQKRLESLRELAGKENLEYPSVTLPPQPHTKEGVDAYNEVIARVRMWVNLNLWQKLKLSRDDAKPLLRLKGFPSFPLVERQANEVDWWDMVCNVKKLINEKKEDGKVFWQNLAGYKRQEALRPYLSSEEDRKKGKKFARYQLGDLLLHLEKKHGEDWGKVYDEAWERIDKKVEGLSKHIKLEEERRSEDAQSKAALTDWLRAKASFVIEGLKEADKDEFCRCELKLQKWYGDLRGKPFAIEAENSILDISGFSKQYNCAFIWQKDGVKKLNLYLIINYFKGGKLRFKKIKPEAFEANRFYTVINKKSGEIVPMEVNFNFDDPNLIILPLAFGKRQGREFIWNDLLSLETGSLKLANGRVIEKTLYNRRTRQDEPALFVALTFERREVLDSSNIKPMNLIGVDRGENIPAVIALTDPEGCPLSRFKDSLGNPTHILRIGESYKEKQRTIQAKKEVEQRRAGGYSRKYASKAKNLADDMVRNTARDLLYYAVTQDAMLIFENLSRGFGRQGKRTFMAERQYTRMEDWLTAKLAYEGLPSKTYLSKTLAQYTSKTCSNCGFTITSADYDRMLEKLKKTATGWMTTINGKELKVEGQITYYNRYKRQNVVKDLSVELDRLSEESVNNDISSWTKGRSGEALSLLKKRFSHRPVQEKFVCLNCGFETHADEQAALNIARSWLFLRSQEYKKYQTNKTTGNTDKRAFVETWQSFYRKKLKEVWKPAV

SEQ ID NO: 28323 - protein, 978 aa, synthetic construct
  REGION 1..978: note = engineered CasX variant
QEIKRINKIRRRLVKDSNTKKAGKTGPMKTLLVPVMTPDLRERLENLRKKPENIPQPISNTSRANLNKLLTDYTEMKKAILHVYWEEFQKDPVGLMSRVAQPASKKIDQNKLKPEMDEKGNLTTAGFACSQCGQPLFVYKLEQVSEKGKAYTNYFGRCNVAEHEKLILLAQLKPEKDSDEAVTYSLGKFGQRALDFYSIHVTKESTHPVKPLAQIAGNRYASGPVGKALSDACMGTIASFLSKYQDIIIEHQKVVKGNQKRLESLRELAGKENLEYPSVTLPPQPHTKEGVDAYNEVIARVRMWVNLNLWQKLKLSRDDAKPLLRLKGFPSFPLVERQANEVDWWDMVCNVKKLINEKKEDGKVFWQNLAGYKRQEALRPYLSSEEDRKKGKKFARYQLGDLLLHLEKKHGEDWGKVYDEAWERIDKKVEGLSKHIKLEEERRSEDAQSKAALTDWLRAKASFVIEGLKEADKDEFCRCELKLQKWYGDLRGKPFAIEAENSILDISGFSKQYNCAFIWQKDGVKKLNLYLIINYFKGGKLRFKKIKPEAFEANRFYTVINKKSGEIVPMEVNFNFDDPNLIILPLAFGKRQGREFIWNDLLSLETGSLKLANGRVIEKTLYNRRTRQDEPALFVALTFERREVLDSSNIKPMNLIGVDRGENIPAVIALTDPEGCPLSRFKDSLGNPTHILRIGESYKEKQRTIQAKKEVEQRRAGGYSRKYASKAKNLADDMVRNTARDLLYYAVTQDAMLIFENLSRGFGRQGKRTFMAERQYTRMEDWLTAKLAYEGLPSKTYLSKTLAQYTSKTCSNCGFTITSADYDRVLEKLKKTATGWMTTINGKELKVEGQITYYNRYKRQNVVKDLSVELDRLSEESVNNDISSWTKGRQGEALSLLKKRFSHRPVQEKFVCLNCGFETHADEQAALNIARSWLFLRSQEYKKYQTNKTTGNTDKRAFVETWQSFYRKKLKEVWKPAV

SEQ ID NO: 28324 - protein, 978 aa, synthetic construct
  REGION 1..978: note = engineered CasX variant
QEIKRINKIRRRLVKDSNTKKAGKTGPMKTLLVPVMTPDLRERLENLRKKPENIPQPISNTSRANLNKLLTDYTEMKKAILHVYWEEFQKDPVGLMSRVAQPASKKIDQNKLKPEMDEKGNLTTAGFACSQCGQPLFVYKLEQVSEKGKAYTNYFGRCNVAEHEKLILLAQLKPEKDSDEAVTYSLGKFGQRALDFYSIHVTKESTHPVKPLAQIAGNRYASGPVGKALSDACMGTIASFLSKYQDIIIEHQKVVKGNQKRLESLRELAGKENLEYPSVTLPPQPHTKEGVDAYNEVIARVRMWVNLNLWQKLKLSRDDAKPLLRLKGFPSFPLVERQANEVDWWDMVCNVKKLINEKKEDGKVFWQNLAGYKRQEALRPYLSSEEDRKKGKKFARYQLGDLLLHLEKKHGEDWGKVYDEAWERIDKKVEGLSKHIKLEEERRSEDAQSKAALTDWLRAKASFVIEGLKEADKDEFCRCELKLQKWYGDLRGKPFAIEAENSILDISGFSKQYNCAFIWQKDGVKKLNLYLIINYFKGGKLRFKKIKPEAFEANRFYTVINKKSGEIVPMEVNFNFDDPNLIILPLAFGKRQGREFIWNDLLSLETGSLKLANGRVIEKTLYNRRTRQDEPALFVALTFERREVLDSSNIKPMNLIGVDRGENIPAVIALTDPEGCPLSRFKDSLGNPTHILRIGESYKEKQRTIQAKKEVEQRRAGGYSRKYASKAKNLADDMVRNTARDLLYYAVTQDAMLIFENLSRGFGRQGKRTFMAERQYTRMEDWLTAKLAYEGLPSKTYLSKTLAQYTSKTCSNCGFTITSADYDRVLEKLKKTATGWMTTINGKELKVEGQITYYNRYKRQNVVKDLSVELDRLSEESVNNDISSWTKGRSGEALSLLKKRFSHRPVQEKFVCLNCEFETHADEQAALNIARSWLFLRSQEYKKYQTNKTTGNTDKRAFVETWQSFYRKKLKEVWKPAV

SEQ ID NO: 28325 - protein, 979 aa, synthetic construct
  REGION 1..979: note = engineered CasX variant
QEIKRINKIRRRLVKDSNTKKAGKTGPMKTLLVPVMTPDLRERLENLRKKPENIPQPISNTSRANLNKLLTDYTEMKKAILHVYWEEFQKDPVGLMSRVAQPASKKIDQNKLKPEMDEKGNLTTAGFACSQCGQPLFVYKLEQVSEKGKAYTNYFGRCNVAEHEKLILLAQLKPEKDSDEAVTYSLGKFGQRALDFYSIHVTKESTHPVKPLAQIAGNRYASGPVGKALSDACMGTIASFLSKYQDIIIEHQKVVKGNQKRLESLRELAGKENLEYPSVTLPPQPHTKEGVDAYNEVIARVRMWVNLNLWQKLKLSRDDAKPLLRLKGFPSFPLVERQANEVDWWDMVCNVKKLINEKKEDGKVFWQNLAGYKRQEALRPYLSSEEDRKKGKKFARYQLGDLLLHLEKKHGEDWGKVYDEAWERIDKKVEGLSKHIKLEEERRSEDAQSKAALTDWLRAKASFVIEGLKEADKDEFCRCELKLQKWYGDLRGKPFAIEAENSILDISGFSKQYNCAFIWQKDGVKKLNLYLIINYFKGGKLRFKKIKPEAFEANRFYTVINKKSGEIVPMEVNFNFDDPNLIILPLAFGKRQGREFIWNDLLSLETGSLKLANGRVIEKTLYNRRTRQDEPALFVALTFERREVLDSSNIKPMNLIGVDRGENIPAVIALTDPEGCPLSRFKDSLGNPTHILRIGESYKEKQRTIQAKKEVEQRRAGGYSRKYASKAKNLADDMVRNTARDLLYYAVTQDAMLIFENLSRGFGRQGKRTFMAERQYTRMEDWLTAKLAYEGLPSKTYLSKTLAQYTSKTCSNCGFTITSADYDRVLEKLKKTATGWMTTINGKELKVEGQITYYNRYKRQNVVKDLSVELDRLSEESVNNDISSWTKGRSGEALSLLKKRFSHRPVQEKFVCLNCGFETHADEQAALNIARSWLFLRSQEYKKYQTNKTSTGNTDKRAFVETWQSFYRKKLKEVWKPAV

SEQ ID NO: 28326 - protein, 979 aa, synthetic construct
  REGION 1..979: note = engineered CasX variant
QEIKRINKIRRRLVKDSNTKKAGKTGPMKTLLVPVMTPDLRERLENLRKKPENIPQPISNTSRANLNKLLTDYTEMKKAILHVYWEEFQKDPVGLMSRVAQPASKKIDQNKLKPEMDEKGNLTTAGFACSQCGQPLFVYKLEQVSEKGKAYTNYFGRCNVAEHEKLILLAQLKPEKDSDEAVTYSLGKFGQRALDFYSIHVTKESTHPVKPLAQIAGNRYASGPVGKALSDACMGTIASFLSKYQDIIIEHQKVVKGNQKRLESLRELAGKENLEYPSVTLPPQPHTKEGVDAYNEVIARVRMWVNLNLWQKLKLSRDDAKPLLRLKGFPSFPLVERQANEVDWWDMVCNVKKLINEKKEDGKVFWQNLAGYKRQEALRPYLSSEEDRKKGKKFARYQLGDLLLHLEKKHGEDWGKVYDEAWERIDKKVEGLSKHIKLEEERRSEDAQSKAALTDWLRAKASFVIEGLKEADKDEFCRCELKLQKWYGDLRGKPFAIEAENSILDISGFSKQYNCAFIWQKDGVKKLNLYLIINYFKGGKLRFKKIKPEAFEANRFYTVINKKSGEIVPMEVNFNFDDPNLIILPLAFGKRQGREFIWNDLLSLETGSLKLANGRVIEKTLYNRRTRQDEPALFVALTFERREVLDSSNIKPMNLIGVDRGENIPAVIALTDPEGCPLSRFKDSLGNPTHILRIGESYKEKQRTIQAKKEVEQRRAGGYSRKYASKAKNLADDMVRNTARDLLYYAVTQDAMLIFENLSRGFGRQGKRTFMAERQYTRMEDWLTAKLAYEGLPSKTYLSKTLAQYTSKTCSNCGFTITSADYDRVLEKLKKTATGWMTTINGKELKVEGQITYYNRYKRQNVVKDLSVELDRLSEESVNNDISSWTKGRSGEALSLLKKRFSHRPVQEKFVCLNCGFETHADEQAALNIARSWLFLRSQEYKKYQTNKTTGKNTDKRAFVETWQSFYRKKLKEVWKPAV

SEQ ID NO: 28327 - protein, 978 aa, synthetic construct
  REGION 1..978: note = engineered CasX variant
QEIKRINKIRRRLVKDSNTKKAGKTGPMKTLLVPVMTPDLRERLENLRKKPENIPQPISNTSRANLNKLLTDYTEMKKAILHVYWEEFQKDPVGLMSRVAQPASKKIDQNKLKPEMDEKGNLTTAGFACSQCGQPLFVYKLEQVSEKGKAYTNYFGRCNVAEHEKLILLAQLKPEKDSDEAVTYSLGKFGQRALDFYSIHVTKESTHPVKPLAQIAGNRYASGPVGKALSDACMGTIASFLSKYQDIIIEHQKVVKGNQKRLESLRELAGKENLEYPSVTLPPQPHTKEGVDAYNEVIARVRMWVNLNLWQKLKLSRDDAKPLLRLKKFPSFPLVERQANEVDWWDMVCNVKKLINEKKEDGKVFWQNLAGYKRQEALRPYLSSEEDRKKGKKFARYQLGDLLLHLEKKHGEDWGKVYDEAWERIDKKVEGLSKHIKLEEERRSEDAQSKAALTDWLRAKASFVIEGLKEADKDEFCRCELKLQKWYGDLRGKPFAIEAENSILDISGFSKQYNCAFIWQKDGVKKLNLYLIINYFKGGKLRFKKIKPEAFEANRFYTVINKKSGEIVPMEVNFNFDDPNLIILPLAFGKRQGREFIWNDLLSLETGSLKLANGRVIEKTLYNRRTRQDEPALFVALTFERREVLDSSNIKPMNLIGVDRGENIPAVIALTDPEGCPLSRFKDSLGNPTHILRIGESYKEKQRTIQAKKEVEQRRAGGYSRKYASKAKNLADDMVRNTARDLLYYAVTQDAMLIFENLSRGFGRQGKRTFMAERQYTRMEDWLTAKLAYEGLPSKTYLSKTLAQYTSKTCSNCGFTITSADYDRVLEKLKKTATGWMTTINGKELKVEGQITYYNRYKRQNVVKDLSVELDRLSEESVNNDISSWTKGRSGEALSLLKKRFSHRPVQEKFVCLNCGFETHADEQAALNIARSWLFLRSQEYKKYQTNKTTGNTDKRAFVETWQSFYRKKLKEVWKPAV

SEQ ID NO: 28328 - protein, 978 aa, synthetic construct
  REGION 1..978: note = engineered CasX variant
QEIKRINKIRRRLVKDSNTKKAGKTGPMKTLLVPVMTPDLRERLENLRKKPENIPQPISNTSRANLNKLLTDYTEMKKAILHVYWEEFQKDPVGLMSRVAQPASKKIDQNKLKPEMDEKGNLTTAGFACSQCGQPLFVYKLEQVSEKGKAYTNYFGRCNVAEHEKLILLAQLKPEKDSDEAVTYSLGKFGQRALDFYSIHVTKESTHPVKPLAQIAGNRYASGPVGKALSDACMGTIASFLSKYQDIIIEHQKVVKGNQKRLESLRELAGKENLEYPSVTLPPQPHTKEGVDAYNEVIARVRMWVNLNLWQKLKLSRDDAKPLLRLKGFPSFPLVERQANEVDWWDMVCNVKKLINEKKEDGKVFWQNLAGYKRQEALRPYLSSEEDRKKGKKFARYQLGDLLLHLEKKHGEDWGKVYDEAWERIDKKVEGLSKHIKLEEERRSEDAQSKAALTDWLRAKASFVIEGLKEADKDEFCRCELKLQKWYGDLRGKPFAIEAENSILDISGFSKQYNCAFIWQKDGVKKLNLYLIINYFKGGKLRFKKIKPEAFEANRFYTVINKKSGEIVPMEVNFNFDDPNLIILPLAFGKRQGREFIWNDLLSLETGSLKLANGRVIEKTLYNRRTRQDEPALFVALTFERREVLDSSNIKPMNLIGVDRGENIPAVIALTDPEGCPLSRFKDSLGNPTHILRIGERYKEKQRTIQAKKEVEQRRAGGYSRKYASKAKNLADDMVRNTARDLLYYAVTQDAMLIFENLSRGFGRQGKRTFMAERQYTRMEDWLTAKLAYEGLPSKTYLSKTLAQYTSKTCSNCGFTITSADYDRVLEKLKKTATGWMTTINGKELKVEGQITYYNRYKRQNVVKDLSVELDRLSEESVNNDISSWTKGRSGEALSLLKKRFSHRPVQEKFVCLNCGFETHADEQAALNIARSWLFLRSQEYKKYQTNKTTGNTDKRAFVETWQSFYRKKLKEVWKPAV

SEQ ID NO: 28329 - protein, 978 aa, synthetic construct
  REGION 1..978: note = engineered CasX variant
QEIKRINKIRRRLVKDSNTKKAGKTGPMKTLLVPVMTPDLRERLENLRKKPENIPQPISNTSRANLNKLLTDYTEMKKAILHVYWEEFQKDPVGLMSRVAQPASKKIDQNKLKPEMDEKGNLTTAGFACSQCGQPLFVYKLEQVSEKGKAYTNYFGRCNVAEHEKLILLAQLKPEKDSDEAVTYSLGKFGQRALDFYSIHVTKESTHPVKPLAQIAGNRYASGPVGKALSDACMGTIASFLSKYQDIIIEHQKVVKGNQKRLESLRELAGKENLEYPSVTLPPQPHTKEGVDAYNEVIARVRMWVNLNLWQKLKLSRDDAKPLLRLKGFPSFPLVERQANEVDWWDMVCNVKKLINEKKEDGKVFWQNLAGYKRQEALRPYLSSEEDRKKGKKFARYQLGDLLLHLEKKHGEDWGKVYDEAWERIDKKVEGLSKHIKLEEERRSEDAQSKAALTDWLRAKASFVIEGLKEADKDEFCRCELKLQKWYGDLRGKPFAIEAENSILDISGFSKQYNCAFIWQKDGVKKLNLYLIINYFKGGKLRFKKIKPEAFEANRFYTVINKKSGEIVPMEVNFNFDDPNLIILPLAFGKRQGREFIWNDLLSLETGSLQLANGRVIEKTLYNRRTRQDEPALFVALTFERREVLDSSNIKPMNLIGVDRGENIPAVIALTDPEGCPLSRFKDSLGNPTHILRIGESYKEKQRTIQAKKEVEQRRAGGYSRKYASKAKNLADDMVRNTARDLLYYAVTQDAMLIFENLSRGFGRQGKRTFMAERQYTRMEDWLTAKLAYEGLPSKTYLSKTLAQYTSKTCSNCGFTITSADYDRVLEKLKKTATGWMTTINGKELKVEGQITYYNRYKRQNVVKDLSVELDRLSEESVNNDISSWTKGRSGEALSLLKKRFSHRPVQEKFVCLNCGFETHADEQAALNIARSWLFLRSQEYKKYQTNKTTGNTDKRAFVETWQSFYRKKLKEVWKPAV

SEQ ID NO: 28330 - protein, 978 aa, synthetic construct
  REGION 1..978: note = engineered CasX variant
QEIKRINKIRRRLVKDSNTKKAGKTGPMKTLLVRVMTPDLRERLENLRKKPPNIPQPISNTSQANLNKLLTDYTEMKKAILHVYWEEFQKDPVGLMSRVAQPASKKIDQNKLKPEMDEKGNLTTAGFACSQCGQPLFVYKLEQVSEKGKAYTNYFGRCNVAEHEKLILLAQLKPEKDSDEAVTYSLGKFGQRALDFYSIHVTKESTHPVKPLAQIAGNRYASGPVGKALSDACMGTIASFLSKYQDIIIEHQKVVKGNQKRLESLRELAGKENLEYPSVTLPPQPHTKEGVDAYNEVIARVRMWVNLNLWQKLKLSRDDAKPLLRLKGFPSFPLVERQANEVDWWDMVCNVKKLINEKKEDGKVFWQNLAGYKRQEALRPYLSSEEDRKKGKKFARYQLGDLLLHLEKKHGEDWGKVYDEAWERIDKKVEGLSKHIKLEEERRSEDAQSKAALTDWLRAKASFVIEGLKEADKDEFCRCELKLQKWYGDLRGKPFAIEAENSILDISGFSKQYNCAFIWQKDGVKKLNLYLIINYFKGGKLRFKKIKPEAFEANRFYTVINKKSGEIVPMEVNFNFDDPNLIILPLAFGKRQGREFIWNDLLSLETGSLKLANGRVIEKTLYNRRTRQDEPALFVALTFERREVLDSSNIKPMNLIGVDRGENIPAVIALTDPEGCPLSRFKDSLGNPTHILRIGESYKEKQRTIQAKKEVEQRRAGGYSRKYASKAKNLADDMVRNTARDLLYYAVTQDAMLIFENLSRGFGRQGKRTFMAERQYTRMEDWLTAKLAYEGLPSKTYLSKTLAQYTSKTCSNCGFTITSADYDRVLEKLKKTATGWMTTINGKELKVEGQITYYNRYKRQNVVKDLSVELDRLSEESVNNDISSWTKGRSGEALSLLKKRFSHRPVQEKFVCLNCGFETHADEQAALNIARSWLFLRSQEYKKYQTNKTTGNTDKRAFVETWQSFYRKKLKEVWKPAV

SEQ ID NO: 28331 - protein, 978 aa, synthetic construct
  REGION 1..978: note = engineered CasX variant
QEIKRINKIRRRLVKDSNTKKAGKTGPMKTLLVRVMTPDLRERLENLRKKPPNIPQPISNTSRANLNKLLTDYTEMKKAILHVYDEEFQKDPVGLMSRVAQPASKKIDQNKLKPEMDEKGNLTTAGFACSQCGQPLFVYKLEQVSEKGKAYTNYFGRCNVAEHEKLILLAQLKPEKDSDEAVTYSLGKFGQRALDFYSIHVTKESTHPVKPLAQIAGNRYASGPVGKALSDACMGTIASFLSKYQDIIIEHQKVVKGNQKRLESLRELAGKENLEYPSVTLPPQPHTKEGVDAYNEVIARVRMWVNLNLWQKLKLSRDDAKPLLRLKGFPSFPLVERQANEVDWWDMVCNVKKLINEKKEDGKVFWQNLAGYKRQEALRPYLSSEEDRKKGKKFARYQLGDLLLHLEKKHGEDWGKVYDEAWERIDKKVEGLSKHIKLEEERRSEDAQSKAALTDWLRAKASFVIEGLKEADKDEFCRCELKLQKWYGDLRGKPFAIEAENSILDISGFSKQYNCAFIWQKDGVKKLNLYLIINYFKGGKLRFKKIKPEAFEANRFYTVINKKSGEIVPMEVNFNFDDPNLIILPLAFGKRQGREFIWNDLLSLETGSLKLANGRVIEKTLYNRRTRQDEPALFVALTFERREVLDSSNIKPMNLIGVDRGENIPAVIALTDPEGCPLSRFKDSLGNPTHILRIGESYKEKQRTIQAKKEVEQRRAGGYSRKYASKAKNLADDMVRNTARDLLYYAVTQDAMLIFENLSRGFGRQGKRTFMAERQYTRMEDWLTAKLAYEGLPSKTYLSKTLAQYTSKTCSNCGFTITSADYDRVLEKLKKTATGWMTTINGKELKVEGQITYYNRYKRQNVVKDLSVELDRLSEESVNNDISSWTKGRSGEALSLLKKRFSHRPVQEKFVCLNCGFETHADEQAALNIARSWLFLRSQEYKKYQTNKTTGNTDKRAFVETWQSFYRKKLKEVWKPAV

SEQ ID NO: 28332 - protein, 978 aa, synthetic construct
  REGION 1..978: note = engineered CasX variant
QEIKRINKIRRRLVKDSNTKKAGKTGPMKTLLVRVMTPDLRERLENLRKKPPNIPQPISNTSRANLNKLLTDYTEMKKAILHVYWEEFQKDPVGLMSRVAQPASKKIDQNKLKPEMDEKGNLTTAGFACSQCGQPLFVYKLEQVSEKGKAYTNYFGRCNVAEHEKLIKLAQLKPEKDSDEAVTYSLGKFGQRALDFYSIHVTKESTHPVKPLAQIAGNRYASGPVGKALSDACMGTIASFLSKYQDIIIEHQKVVKGNQKRLESLRELAGKENLEYPSVTLPPQPHTKEGVDAYNEVIARVRMWVNLNLWQKLKLSRDDAKPLLRLKGFPSFPLVERQANEVDWWDMVCNVKKLINEKKEDGKVFWQNLAGYKRQEALRPYLSSEEDRKKGKKFARYQLGDLLLHLEKKHGEDWGKVYDEAWERIDKKVEGLSKHIKLEEERRSEDAQSKAALTDWLRAKASFVIEGLKEADKDEFCRCELKLQKWYGDLRGKPFAIEAENSILDISGFSKQYNCAFIWQKDGVKKLNLYLIINYFKGGKLRFKKIKPEAFEANRFYTVINKKSGEIVPMEVNFNFDDPNLIILPLAFGKRQGREFIWNDLLSLETGSLKLANGRVIEKTLYNRRTRQDEPALFVALTFERREVLDSSNIKPMNLIGVDRGENIPAVIALTDPEGCPLSRFKDSLGNPTHILRIGESYKEKQRTIQAKKEVEQRRAGGYSRKYASKAKNLADDMVRNTARDLLYYAVTQDAMLIFENLSRGFGRQGKRTFMAERQYTRMEDWLTAKLAYEGLPSKTYLSKTLAQYTSKTCSNCGFTITSADYDRVLEKLKKTATGWMTTINGKELKVEGQITYYNRYKRQNVVKDLSVELDRLSEESVNNDISSWTKGRSGEALSLLKKRFSHRPVQEKFVCLNCGFETHADEQAALNIARSWLFLRSQEYKKYQTNKTTGNTDKRAFVETWQSFYRKKLKEVWKPAV

SEQ ID NO: 28333 - protein, 978 aa, synthetic construct
  REGION 1..978: note = engineered CasX variant
QEIKRINKIRRRLVKDSNTKKAGKTGPMKTLLVRVMTPDLRERLENLRKKPPNIPQPISNTSRANLNKLLTDYTEMKKAILHVYWEEFQKDPVGLMSRVAQPASKKIDQNKLKPEMDEKGNLTTAGFACSQCGQPLFVYKLEQVSEKGKAYTNYFGRCNVAEHEKLILLYQLKPEKDSDEAVTYSLGKFGQRALDFYSIHVTKESTHPVKPLAQIAGNRYASGPVGKALSDACMGTIASFLSKYQDIIIEHQKVVKGNQKRLESLRELAGKENLEYPSVTLPPQPHTKEGVDAYNEVIARVRMWVNLNLWQKLKLSRDDAKPLLRLKGFPSFPLVERQANEVDWWDMVCNVKKLINEKKEDGKVFWQNLAGYKRQEALRPYLSSEEDRKKGKKFARYQLGDLLLHLEKKHGEDWGKVYDEAWERIDKKVEGLSKHIKLEEERRSEDAQSKAALTDWLRAKASFVIEGLKEADKDEFCRCELKLQKWYGDLRGKPFAIEAENSILDISGFSKQYNCAFIWQKDGVKKLNLYLIINYFKGGKLRFKKIKPEAFEANRFYTVINKKSGEIVPMEVNFNFDDPNLIILPLAFGKRQGREFIWNDLLSLETGSLKLANGRVIEKTLYNRRTRQDEPALFVALTFERREVLDSSNIKPMNLIGVDRGENIPAVIALTDPEGCPLSRFKDSLGNPTHILRIGESYKEKQRTIQAKKEVEQRRAGGYSRKYASKAKNLADDMVRNTARDLLYYAVTQDAMLIFENLSRGFGRQGKRTFMAERQYTRMEDWLTAKLAYEGLPSKTYLSKTLAQYTSKTCSNCGFTITSADYDRVLEKLKKTATGWMTTINGKELKVEGQITYYNRYKRQNVVKDLSVELDRLSEESVNNDISSWTKGRSGEALSLLKKRFSHRPVQEKFVCLNCGFETHADEQAALNIARSWLFLRSQEYKKYQTNKTTGNTDKRAFVETWQSFYRKKLKEVWKPAV

SEQ ID NO: 28334 - protein, 978 aa, synthetic construct
  REGION 1..978: note = engineered CasX variant
QEIKRINKIRRRLVKDSNTKKAGKTGPMKTLLVRVMTPDLRERLENLRKKPPNIPQPISNTSRANLNKLLTDYTEMKKAILHVYWEEFQKDPVGLMSRVAQPASKKIDQNKLKPEMDEKGNLTTAGFACSQCGQPLFVYKLEQVSEKGKAYTNYFGRCNVAEHEKLILLSQLKPEKDSDEAVTYSLGKFGQRALDFYSIHVTKESTHPVKPLAQIAGNRYASGPVGKALSDACMGTIASFLSKYQDIIIEHQKVVKGNQKRLESLRELAGKENLEYPSVTLPPQPHTKEGVDAYNEVIARVRMWVNLNLWQKLKLSRDDAKPLLRLKGFPSFPLVERQANEVDWWDMVCNVKKLINEKKEDGKVFWQNLAGYKRQEALRPYLSSEEDRKKGKKFARYQLGDLLLHLEKKHGEDWGKVYDEAWERIDKKVEGLSKHIKLEEERRSEDAQSKAALTDWLRAKASFVIEGLKEADKDEFCRCELKLQKWYGDLRGKPFAIEAENSILDISGFSKQYNCAFIWQKDGVKKLNLYLIINYFKGGKLRFKKIKPEAFEANRFYTVINKKSGEIVPMEVNFNFDDPNLIILPLAFGKRQGREFIWNDLLSLETGSLKLANGRVIEKTLYNRRTRQDEPALFVALTFERREVLDSSNIKPMNLIGVDRGENIPAVIALTDPEGCPLSRFKDSLGNPTHILRIGESYKEKQRTIQAKKEVEQRRAGGYSRKYASKAKNLADDMVRNTARDLLYYAVTQDAMLIFENLSRGFGRQGKRTFMAERQYTRMEDWLTAKLAYEGLPSKTYLSKTLAQYTSKTCSNCGFTITSADYDRVLEKLKKTATGWMTTINGKELKVEGQITYYNRYKRQNVVKDLSVELDRLSEESVNNDISSWTKGRSGEALSLLKKRFSHRPVQEKFVCLNCGFETHADEQAALNIARSWLFLRSQEYKKYQTNKTTGNTDKRAFVETWQSFYRKKLKEVWKPAV

SEQ ID NO: 28335 - protein, 977 aa, synthetic construct
  REGION 1..977: note = engineered CasX variant
QEIKRINKIRRRLVKDSNTKKAGKTGPMKTLLVRVMTPDLRERLENLRKKPPNIPQPISNTSRANLNKLLTDYTEMKKAILHVYWEEFQKDPVGLMSRVAQPASKKIDQNKLKPEMDEKGNLTTAGFACSQCGQPLFVYKLEQVSEKGKAYTNYFGRCNVAEHEKLILLAQLKPEKDSDEAVTYSLGKFGQRALDFYSIHVTKESTHPVKPLAQIAGNRYASPVGKALSDACMGTIASFLSKYQDIIIEHQKVVKGNQKRLESLRELAGKENLEYPSVTLPPQPHTKEGVDAYNEVIARVRMWVNLNLWQKLKLSRDDAKPLLRLKGFPSFPLVERQANEVDWWDMVCNVKKLINEKKEDGKVFWQNLAGYKRQEALRPYLSSEEDRKKGKKFARYQLGDLLLHLEKKHGEDWGKVYDEAWERIDKKVEGLSKHIKLEEERRSEDAQSKAALTDWLRAKASFVIEGLKEADKDEFCRCELKLQKWYGDLRGKPFAIEAENSILDISGFSKQYNCAFIWQKDGVKKLNLYLIINYFKGGKLRFKKIKPEAFEANRFYTVINKKSGEIVPMEVNFNFDDPNLIILPLAFGKRQGREFIWNDLLSLETGSLKLANGRVIEKTLYNRRTRQDEPALFVALTFERREVLDSSNIKPMNLIGVDRGENIPAVIALTDPEGCPLSRFKDSLGNPTHILRIGESYKEKQRTIQAKKEVEQRRAGGYSRKYASKAKNLADDMVRNTARDLLYYAVTQDAMLIFENLSRGFGRQGKRTFMAERQYTRMEDWLTAKLAYEGLPSKTYLSKTLAQYTSKTCSNCGFTITSADYDRVLEKLKKTATGWMTTINGKELKVEGQITYYNRYKRQNVVKDLSVELDRLSEESVNNDISSWTKGRSGEALSLLKKRFSHRPVQEKFVCLNCGFETHADEQAALNIARSWLFLRSQEYKKYQTNKTTGNTDKRAFVETWQSFYRKKLKEVWKPAV

SEQ ID NO: 28336 - protein, 978 aa, synthetic construct
  REGION 1..978: note = engineered CasX variant
QEIKRINKIRRRLVKDSNTKKAGKTGPMKTLLVRVMTPDLRERLENLRKKPPNIPQPISNTSRANLNKLLTDYTEMKKAILHVYWEEFQKDPVGLMSRVAQPASKKIDQNKLKPEMDEKGNLTTAGFACSQCGQPLFVYKLEQVSEKGKAYTNYFGRCNVAEHEKLILLAQLKPEKDSDEAVTYSLGKFGQRALDFYSIHVTKESTHPVKPLAQIAGNRYASGPVGKALSDACMGTIASFLSKYQDIIIEHQKVVKGNQKRLESLRELAGKENLEYPSVTLPPQPHTSEGVDAYNEVIARVRMWVNLNLWQKLKLSRDDAKPLLRLKGFPSFPLVERQANEVDWWDMVCNVKKLINEKKEDGKVFWQNLAGYKRQEALRPYLSSEEDRKKGKKFARYQLGDLLLHLEKKHGEDWGKVYDEAWERIDKKVEGLSKHIKLEEERRSEDAQSKAALTDWLRAKASFVIEGLKEADKDEFCRCELKLQKWYGDLRGKPFAIEAENSILDISGFSKQYNCAFIWQKDGVKKLNLYLIINYFKGGKLRFKKIKPEAFEANRFYTVINKKSGEIVPMEVNFNFDDPNLIILPLAFGKRQGREFIWNDLLSLETGSLKLANGRVIEKTLYNRRTRQDEPALFVALTFERREVLDSSNIKPMNLIGVDRGENIPAVIALTDPEGCPLSRFKDSLGNPTHILRIGESYKEKQRTIQAKKEVEQRRAGGYSRKYASKAKNLADDMVRNTARDLLYYAVTQDAMLIFENLSRGFGRQGKRTFMAERQYTRMEDWLTAKLAYEGLPSKTYLSKTLAQYTSKTCSNCGFTITSADYDRVLEKLKKTATGWMTTINGKELKVEGQITYYNRYKRQNVVKDLSVELDRLSEESVNNDISSWTKGRSGEALSLLKKRFSHRPVQEKFVCLNCGFETHADEQAALNIARSWLFLRSQEYKKYQTNKTTGNTDKRAFVETWQSFYRKKLKEVWKPAV

SEQ ID NO: 28337 - protein, 978 aa, synthetic construct
  REGION 1..978: note = engineered CasX variant
QEIKRINKIRRRLVKDSNTKKAGKTGPMKTLLVRVMTPDLRERLENLRKKPPNIPQPISNTSRANLNKLLTDYTEMKKAILHVYWEEFQKDPVGLMSRVAQPASKKIDQNKLKPEMDEKGNLTTAGFACSQCGQPLFVYKLEQVSEKGKAYTNYFGRCNVAEHEKLILLAQLKPEKDSDEAVTYSLGKFGQRALDFYSIHVTKESTHPVKPLAQIAGNRYASGPVGKALSDACMGTIASFLSKYQDIIIEHQKVVKGNQKRLESLRELAGKENLEYPSVTLPPQPHTKEGLDAYNEVIARVRMWVNLNLWQKLKLSRDDAKPLLRLKGFPSFPLVERQANEVDWWDMVCNVKKLINEKKEDGKVFWQNLAGYKRQEALRPYLSSEEDRKKGKKFARYQLGDLLLHLEKKHGEDWGKVYDEAWERIDKKVEGLSKHIKLEEERRSEDAQSKAALTDWLRAKASFVIEGLKEADKDEFCRCELKLQKWYGDLRGKPFAIEAENSILDISGFSKQYNCAFIWQKDGVKKLNLYLIINYFKGGKLRFKKIKPEAFEANRFYTVINKKSGEIVPMEVNFNFDDPNLIILPLAFGKRQGREFIWNDLLSLETGSLKLANGRVIEKTLYNRRTRQDEPALFVALTFERREVLDSSNIKPMNLIGVDRGENIPAVIALTDPEGCPLSRFKDSLGNPTHILRIGESYKEKQRTIQAKKEVEQRRAGGYSRKYASKAKNLADDMVRNTARDLLYYAVTQDAMLIFENLSRGFGRQGKRTFMAERQYTRMEDWLTAKLAYEGLPSKTYLSKTLAQYTSKTCSNCGFTITSADYDRVLEKLKKTATGWMTTINGKELKVEGQITYYNRYKRQNVVKDLSVELDRLSEESVNNDISSWTKGRSGEALSLLKKRFSHRPVQEKFVCLNCGFETHADEQAALNIARSWLFLRSQEYKKYQTNKTTGNTDKRAFVETWQSFYRKKLKEVWKPAV

SEQ ID NO: 28338 - protein, 978 aa, synthetic construct
  REGION 1..978: note = engineered CasX variant
QEIKRINKIRRRLVKDSNTKKAGKTGPMKTLLVRVMTPDLRERLENLRKKPPNIPQPISNTSRANLNKLLTDYTEMKKAILHVYWEEFQKDPVGLMSRVAQPASKKIDQNKLKPEMDEKGNLTTAGFACSQCGQPLFVYKLEQVSEKGKAYTNYFGRCNVAEHEKLILLAQLKPEKDSDEAVTYSLGKFGQRALDFYSIHVTKESTHPVKPLAQIAGNRYASGPVGKALSDACMGTIASFLSKYQDIIIEHQKVVKGNQKRLESLRELAGKENLEYPSVTLPPQPHTKEGVDAYNEVIARVRTWVNLNLWQKLKLSRDDAKPLLRLKGFPSFPLVERQANEVDWWDMVCNVKKLINEKKEDGKVFWQNLAGYKRQEALRPYLSSEEDRKKGKKFARYQLGDLLLHLEKKHGEDWGKVYDEAWERIDKKVEGLSKHIKLEEERRSEDAQSKAALTDWLRAKASFVIEGLKEADKDEFCRCELKLQKWYGDLRGKPFAIEAENSILDISGFSKQYNCAFIWQKDGVKKLNLYLIINYFKGGKLRFKKIKPEAFEANRFYTVINKKSGEIVPMEVNFNFDDPNLIILPLAFGKRQGREFIWNDLLSLETGSLKLANGRVIEKTLYNRRTRQDEPALFVALTFERREVLDSSNIKPMNLIGVDRGENIPAVIALTDPEGCPLSRFKDSLGNPTHILRIGESYKEKQRTIQAKKEVEQRRAGGYSRKYASKAKNLADDMVRNTARDLLYYAVTQDAMLIFENLSRGFGRQGKRTFMAERQYTRMEDWLTAKLAYEGLPSKTYLSKTLAQYTSKTCSNCGFTITSADYDRVLEKLKKTATGWMTTINGKELKVEGQITYYNRYKRQNVVKDLSVELDRLSEESVNNDISSWTKGRSGEALSLLKKRFSHRPVQEKFVCLNCGFETHADEQAALNIARSWLFLRSQEYKKYQTNKTTGNTDKRAFVETWQSFYRKKLKEVWKPAV

SEQ ID NO: 28339 - protein, 978 aa, synthetic construct
  REGION 1..978: note = engineered CasX variant
QEIKRINKIRRRLVKDSNTKKAGKTGPMKTLLVRVMTPDLRERLENLRKKPPNIPQPISNTSRANLNKLLTDYTEMKKAILHVYWEEFQKDPVGLMSRVAQPASKKIDQNKLKPEMDEKGNLTTAGFACSQCGQPLFVYKLEQVSEKGKAYTNYFGRCNVAEHEKLILLAQLKPEKDSDEAVTYSLGKFGQRALDFYSIHVTKESTHPVKPLAQIAGNRYASGPVGKALSDACMGTIASFLSKYQDIIIEHQKVVKGNQKRLESLRELAGKENLEYPSVTLPPQPHTKEGVDAYNEVIARVRWWVNLNLWQKLKLSRDDAKPLLRLKGFPSFPLVERQANEVDWWDMVCNVKKLINEKKEDGKVFWQNLAGYKRQEALRPYLSSEEDRKKGKKFARYQLGDLLLHLEKKHGEDWGKVYDEAWERIDKKVEGLSKHIKLEEERRSEDAQSKAALTDWLRAKASFVIEGLKEADKDEFCRCELKLQKWYGDLRGKPFAIEAENSILDISGFSKQYNCAFIWQKDGVKKLNLYLIINYFKGGKLRFKKIKPEAFEANRFYTVINKKSGEIVPMEVNFNFDDPNLIILPLAFGKRQGREFIWNDLLSLETGSLKLANGRVIEKTLYNRRTRQDEPALFVALTFERREVLDSSNIKPMNLIGVDRGENIPAVIALTDPEGCPLSRFKDSLGNPTHILRIGESYKEKQRTIQAKKEVEQRRAGGYSRKYASKAKNLADDMVRNTARDLLYYAVTQDAMLIFENLSRGFGRQGKRTFMAERQYTRMEDWLTAKLAYEGLPSKTYLSKTLAQYTSKTCSNCGFTITSADYDRVLEKLKKTATGWMTTINGKELKVEGQITYYNRYKRQNVVKDLSVELDRLSEESVNNDISSWTKGRSGEALSLLKKRFSHRPVQEKFVCLNCGFETHADEQAALNIARSWLFLRSQEYKKYQTNKTTGNTDKRAFVETWQSFYRKKLKEVWKPAV

SEQ ID NO: 28340 - protein, 979 aa, synthetic construct
  REGION 1..979: note = engineered CasX variant
QEIKRINKIRRRLVKDSNTKKAGKTGPMKTLLVRVMTPDLRERLENLRKKPPNIPQPISNTSRANLNKLLTDYTEMKKAILHVYWEEFQKDPVGLMSRVAQPASKKIDQNKLKPEMDEKGNLTTAGFACSQCGQPLFVYKLEQVSEKGKAYTNYFGRCNVAEHEKLILLAQLKPEKDSDEAVTYSLGKFGQRALDFYSIHVTKESTHPVKPLAQIAGNRYASGPVGKALSDACMGTIASFLSKYQDIIIEHQKVVKGNQKRLESLRELAGKENLEYPSVTLPPQPHTKEGVDAYNEVIARVRMWVNLNLWQKLKLSRDDAKPLLRLKGFPSFPLVERQQANEVDWWDMVCNVKKLINEKKEDGKVFWQNLAGYKRQEALRPYLSSEEDRKKGKKFARYQLGDLLLHLEKKHGEDWGKVYDEAWERIDKKVEGLSKHIKLEEERRSEDAQSKAALTDWLRAKASFVIEGLKEADKDEFCRCELKLQKWYGDLRGKPFAIEAENSILDISGFSKQYNCAFIWQKDGVKKLNLYLIINYFKGGKLRFKKIKPEAFEANRFYTVINKKSGEIVPMEVNFNFDDPNLIILPLAFGKRQGREFIWNDLLSLETGSLKLANGRVIEKTLYNRRTRQDEPALFVALTFERREVLDSSNIKPMNLIGVDRGENIPAVIALTDPEGCPLSRFKDSLGNPTHILRIGESYKEKQRTIQAKKEVEQRRAGGYSRKYASKAKNLADDMVRNTARDLLYYAVTQDAMLIFENLSRGFGRQGKRTFMAERQYTRMEDWLTAKLAYEGLPSKTYLSKTLAQYTSKTCSNCGFTITSADYDRVLEKLKKTATGWMTTINGKELKVEGQITYYNRYKRQNVVKDLSVELDRLSEESVNNDISSWTKGRSGEALSLLKKRFSHRPVQEKFVCLNCGFETHADEQAALNIARSWLFLRSQEYKKYQTNKTTGNTDKRAFVETWQSFYRKKLKEVWKPAV

SEQ ID NO: 28341 - protein, 979 aa, synthetic construct
  REGION 1..979: note = engineered CasX variant
QEIKRINKIRRRLVKDSNTKKAGKTGPMKTLLVRVMTPDLRERLENLRKKPPNIPQPISNTSRANLNKLLTDYTEMKKAILHVYWEEFQKDPVGLMSRVAQPASKKIDQNKLKPEMDEKGNLTTAGFACSQCGQPLFVYKLEQVSEKGKAYTNYFGRCNVAEHEKLILLAQLKPEKDSDEAVTYSLGKFGQRALDFYSIHVTKESTHPVKPLAQIAGNRYASGPVGKALSDACMGTIASFLSKYQDIIIEHQKVVKGNQKRLESLRELAGKENLEYPSVTLPPQPHTKEGVDAYNEVIARVRMWVNLNLWQKLKLSRDDAKPLLRLKGFPSFPLVERQANAEVDWWDMVCNVKKLINEKKEDGKVFWQNLAGYKRQEALRPYLSSEEDRKKGKKFARYQLGDLLLHLEKKHGEDWGKVYDEAWERIDKKVEGLSKHIKLEEERRSEDAQSKAALTDWLRAKASFVIEGLKEADKDEFCRCELKLQKWYGDLRGKPFAIEAENSILDISGFSKQYNCAFIWQKDGVKKLNLYLIINYFKGGKLRFKKIKPEAFEANRFYTVINKKSGEIVPMEVNFNFDDPNLIILPLAFGKRQGREFIWNDLLSLETGSLKLANGRVIEKTLYNRRTRQDEPALFVALTFERREVLDSSNIKPMNLIGVDRGENIPAVIALTDPEGCPLSRFKDSLGNPTHILRIGESYKEKQRTIQAKKEVEQRRAGGYSRKYASKAKNLADDMVRNTARDLLYYAVTQDAMLIFENLSRGFGRQGKRTFMAERQYTRMEDWLTAKLAYEGLPSKTYLSKTLAQYTSKTCSNCGFTITSADYDRVLEKLKKTATGWMTTINGKELKVEGQITYYNRYKRQNVVKDLSVELDRLSEESVNNDISSWTKGRSGEALSLLKKRFSHRPVQEKFVCLNCGFETHADEQAALNIARSWLFLRSQEYKKYQTNKTTGNTDKRAFVETWQSFYRKKLKEVWKPAV

SEQ ID NO: 28342 - protein, 978 aa, synthetic construct
  REGION 1..978: note = engineered CasX variant
QEIKRINKIRRRLVKDSNTKKAGKTGPMKTLLVRVMTPDLRERLENLRKKPPNIPQPISNTSRANLNKLLTDYTEMKKAILHVYWEEFQKDPVGLMSRVAQPASKKIDQNKLKPEMDEKGNLTTAGFACSQCGQPLFVYKLEQVSEKGKAYTNYFGRCNVAEHEKLILLAQLKPEKDSDEAVTYSLGKFGQRALDFYSIHVTKESTHPVKPLAQIAGNRYASGPVGKALSDACMGTIASFLSKYQDIIIEHQKVVKGNQKRLESLRELAGKENLEYPSVTLPPQPHTKEGVDAYNEVIARVRMWVNLNLWQKLKLSRDDAKPLLRLKGFPSFPLVERQANEVDWWDMVCNVKKLINEKKEDGKVFWQNLAGYKRQEALRPYLSSEEDRKKGKKFARTQLGDLLLHLEKKHGEDWGKVYDEAWERIDKKVEGLSKHIKLEEERRSEDAQSKAALTDWLRAKASFVIEGLKEADKDEFCRCELKLQKWYGDLRGKPFAIEAENSILDISGFSKQYNCAFIWQKDGVKKLNLYLIINYFKGGKLRFKKIKPEAFEANRFYTVINKKSGEIVPMEVNFNFDDPNLIILPLAFGKRQGREFIWNDLLSLETGSLKLANGRVIEKTLYNRRTRQDEPALFVALTFERREVLDSSNIKPMNLIGVDRGENIPAVIALTDPEGCPLSRFKDSLGNPTHILRIGESYKEKQRTIQAKKEVEQRRAGGYSRKYASKAKNLADDMVRNTARDLLYYAVTQDAMLIFENLSRGFGRQGKRTFMAERQYTRMEDWLTAKLAYEGLPSKTYLSKTLAQYTSKTCSNCGFTITSADYDRVLEKLKKTATGWMTTINGKELKVEGQITYYNRYKRQNVVKDLSVELDRLSEESVNNDISSWTKGRSGEALSLLKKRFSHRPVQEKFVCLNCGFETHADEQAALNIARSWLFLRSQEYKKYQTNKTTGNTDKRAFVETWQSFYRKKLKEVWKPAV

SEQ ID NO: 28343 - protein, 979 aa, synthetic construct
  REGION 1..979: note = engineered CasX variant
QEIKRINKIRRRLVKDSNTKKAGKTGPMKTLLVRVMTPDLRERLENLRKKPPNIPQPISNTSRANLNKLLTDYTEMKKAILHVYWEEFQKDPVGLMSRVAQPASKKIDQNKLKPEMDEKGNLTTAGFACSQCGQPLFVYKLEQVSEKGKAYTNYFGRCNVAEHEKLILLAQLKPEKDSDEAVTYSLGKFGQRALDFYSIHVTKESTHPVKPLAQIAGNRYASGPVGKALSDACMGTIASFLSKYQDIIIEHQKVVKGNQKRLESLRELAGKENLEYPSVTLPPQPHTKEGVDAYNEVIARVRMWVNLNLWQKLKLSRDDAKPLLRLKGFPSFPLVERQANEVDWWDMVCNVKKLINEKKEDGKVFWQNLAGYKRQEALRPYLSSEEDRKKGKKFARYQLGDLLLHLEKKHEGEDWGKVYDEAWERIDKKVEGLSKHIKLEEERRSEDAQSKAALTDWLRAKASFVIEGLKEADKDEFCRCELKLQKWYGDLRGKPFAIEAENSILDISGFSKQYNCAFIWQKDGVKKLNLYLIINYFKGGKLRFKKIKPEAFEANRFYTVINKKSGEIVPMEVNFNFDDPNLIILPLAFGKRQGREFIWNDLLSLETGSLKLANGRVIEKTLYNRRTRQDEPALFVALTFERREVLDSSNIKPMNLIGVDRGENIPAVIALTDPEGCPLSRFKDSLGNPTHILRIGESYKEKQRTIQAKKEVEQRRAGGYSRKYASKAKNLADDMVRNTARDLLYYAVTQDAMLIFENLSRGFGRQGKRTFMAERQYTRMEDWLTAKLAYEGLPSKTYLSKTLAQYTSKTCSNCGFTITSADYDRVLEKLKKTATGWMTTINGKELKVEGQITYYNRYKRQNVVKDLSVELDRLSEESVNNDISSWTKGRSGEALSLLKKRFSHRPVQEKFVCLNCGFETHADEQAALNIARSWLFLRSQEYKKYQTNKTTGNTDKRAFVETWQSFYRKKLKEVWKPAV

SEQ ID NO: 28344 - protein, 978 aa, synthetic construct
  REGION 1..978: note = engineered CasX variant
QEIKRINKIRRRLVKDSNTKKAGKTGPMKTLLVRVMTPDLRERLENLRKKPPNIPQPISNTSRANLNKLLTDYTEMKKAILHVYWEEFQKDPVGLMSRVAQPASKKIDQNKLKPEMDEKGNLTTAGFACSQCGQPLFVYKLEQVSEKGKAYTNYFGRCNVAEHEKLILLAQLKPEKDSDEAVTYSLGKFGQRALDFYSIHVTKESTHPVKPLAQIAGNRYASGPVGKALSDACMGTIASFLSKYQDIIIEHQKVVKGNQKRLESLRELAGKENLEYPSVTLPPQPHTKEGVDAYNEVIARVRMWVNLNLWQKLKLSRDDAKPLLRLKGFPSFPLVERQANEVDWWDMVCNVKKLINEKKEDGKVFWQNLAGYKRQEALRPYLSSEEDRKKGKKFARYQLGDLLLHLEKKHGEDWGKVYDEAWERIDKKVEGLSKHIKLEEERRSEDAQSKAALTDWLRAKASFVIEGLKEADKDEFCRCDLKLQKWYGDLRGKPFAIEAENSILDISGFSKQYNCAFIWQKDGVKKLNLYLIINYFKGGKLRFKKIKPEAFEANRFYTVINKKSGEIVPMEVNFNFDDPNLIILPLAFGKRQGREFIWNDLLSLETGSLKLANGRVIEKTLYNRRTRQDEPALFVALTFERREVLDSSNIKPMNLIGVDRGENIPAVIALTDPEGCPLSRFKDSLGNPTHILRIGESYKEKQRTIQAKKEVEQRRAGGYSRKYASKAKNLADDMVRNTARDLLYYAVTQDAMLIFENLSRGFGRQGKRTFMAERQYTRMEDWLTAKLAYEGLPSKTYLSKTLAQYTSKTCSNCGFTITSADYDRVLEKLKKTATGWMTTINGKELKVEGQITYYNRYKRQNVVKDLSVELDRLSEESVNNDISSWTKGRSGEALSLLKKRFSHRPVQEKFVCLNCGFETHADEQAALNIARSWLFLRSQEYKKYQTNKTTGNTDKRAFVETWQSFYRKKLKEVWKPAV

SEQ ID NO: 28345 - protein, 978 aa, synthetic construct
  REGION 1..978: note = engineered CasX variant
QEIKRINKIRRRLVKDSNTKKAGKTGPMKTLLVRVMTPDLRERLENLRKKPPNIPQPISNTSRANLNKLLTDYTEMKKAILHVYWEEFQKDPVGLMSRVAQPASKKIDQNKLKPEMDEKGNLTTAGFACSQCGQPLFVYKLEQVSEKGKAYTNYFGRCNVAEHEKLILLAQLKPEKDSDEAVTYSLGKFGQRALDFYSIHVTKESTHPVKPLAQIAGNRYASGPVGKALSDACMGTIASFLSKYQDIIIEHQKVVKGNQKRLESLRELAGKENLEYPSVTLPPQPHTKEGVDAYNEVIARVRMWVNLNLWQKLKLSRDDAKPLLRLKGFPSFPLVERQANEVDWWDMVCNVKKLINEKKEDGKVFWQNLAGYKRQEALRPYLSSEEDRKKGKKFARYQLGDLLLHLEKKHGEDWGKVYDEAWERIDKKVEGLSKHIKLEEERRSEDAQSKAALTDWLRAKASFVIEGLKEADKDEFCRCELKLQKWYGDLRGKPFAIEAENSILDISGFSKQYNCAFIWQKDGVKKLNLYLIINYFKGGKLRFKKIKPEAFEANRFYTVINKKSGEIVPMEVNFNFDDPNLIILPLAFGKRFGREFIWNDLLSLETGSLKLANGRVIEKTLYNRRTRQDEPALFVALTFERREVLDSSNIKPMNLIGVDRGENIPAVIALTDPEGCPLSRFKDSLGNPTHILRIGESYKEKQRTIQAKKEVEQRRAGGYSRKYASKAKNLADDMVRNTARDLLYYAVTQDAMLIFENLSRGFGRQGKRTFMAERQYTRMEDWLTAKLAYEGLPSKTYLSKTLAQYTSKTCSNCGFTITSADYDRVLEKLKKTATGWMTTINGKELKVEGQITYYNRYKRQNVVKDLSVELDRLSEESVNNDISSWTKGRSGEALSLLKKRFSHRPVQEKFVCLNCGFETHADEQAALNIARSWLFLRSQEYKKYQTNKTTGNTDKRAFVETWQSFYRKKLKEVWKPAV

SEQ ID NO: 28346 - protein, 978 aa, synthetic construct
  REGION 1..978: note = engineered CasX variant
QEIKRINKIRRRLVKDSNTKKAGKTGPMKTLLVRVMTPDLRERLENLRKKPPNIPQPISNTSRANLNKLLTDYTEMKKAILHVYWEEFQKDPVGLMSRVAQPASKKIDQNKLKPEMDEKGNLTTAGFACSQCGQPLFVYKLEQVSEKGKAYTNYFGRCNVAEHEKLILLAQLKPEKDSDEAVTYSLGKFGQRALDFYSIHVTKESTHPVKPLAQIAGNRYASGPVGKALSDACMGTIASFLSKYQDIIIEHQKVVKGNQKRLESLRELAGKENLEYPSVTLPPQPHTKEGVDAYNEVIARVRMWVNLNLWQKLKLSRDDAKPLLRLKGFPSFPLVERQANEVDWWDMVCNVKKLINEKKEDGKVFWQNLAGYKRQEALRPYLSSEEDRKKGKKFARYQLGDLLLHLEKKHGEDWGKVYDEAWERIDKKVEGLSKHIKLEEERRSEDAQSKAALTDWLRAKASFVIEGLKEADKDEFCRCELKLQKWYGDLRGKPFAIEAENSILDISGFSKQYNCAFIWQKDGVKKLNLYLIINYFKGGKLRFKKIKPEAFEANRFYTVINKKSGEIVPMEVNFNFDDPNLIILPLAFGKRVGREFIWNDLLSLETGSLKLANGRVIEKTLYNRRTRQDEPALFVALTFERREVLDSSNIKPMNLIGVDRGENIPAVIALTDPEGCPLSRFKDSLGNPTHILRIGESYKEKQRTIQAKKEVEQRRAGGYSRKYASKAKNLADDMVRNTARDLLYYAVTQDAMLIFENLSRGFGRQGKRTFMAERQYTRMEDWLTAKLAYEGLPSKTYLSKTLAQYTSKTCSNCGFTITSADYDRVLEKLKKTATGWMTTINGKELKVEGQITYYNRYKRQNVVKDLSVELDRLSEESVNNDISSWTKGRSGEALSLLKKRFSHRPVQEKFVCLNCGFETHADEQAALNIARSWLFLRSQEYKKYQTNKTTGNTDKRAFVETWQSFYRKKLKEVWKPAV

SEQ ID NO: 28347 - protein, 979 aa, synthetic construct
  REGION 1..979: note = engineered CasX variant
QEIKRINKIRRRLVKDSNTKKAGKTGPMKTLLVRVMTPDLRERLENLRKKPPNIPQPISNTSRANLNKLLTDYTEMKKAILHVYWEEFQKDPVGLMSRVAQPASKKIDQNKLKPEMDEKGNLTTAGFACSQCGQPLFVYKLEQVSEKGKAYTNYFGRCNVAEHEKLILLAQLKPEKDSDEAVTYSLGKFGQRALDFYSIHVTKESTHPVKPLAQIAGNRYASGPVGKALSDACMGTIASFLSKYQDIIIEHQKVVKGNQKRLESLRELAGKENLEYPSVTLPPQPHTKEGVDAYNEVIARVRMWVNLNLWQKLKLSRDDAKPLLRLKGFPSFPLVERQANEVDWWDMVCNVKKLINEKKEDGKVFWQNLAGYKRQEALRPYLSSEEDRKKGKKFARYQLGDLLLHLEKKHGEDWGKVYDEAWERIDKKVEGLSKHIKLEEERRSEDAQSKAALTDWLRAKASFVIEGLKEADKDEFCRCELKLQKWYGDLRGKPFAIEAENSILDISGFSKQYNCAFIWQKDGVKKLNLYLIINYFKGGKLRFKKIKPEAFEANRFYTVINKKSGEIVPMEVNFNFDDPNLIILPLAFGKRQGREFIWNDLLSLETGSLKLANGRVIEKTLYNRRTRQDEPALFVALTFERREVLDSSNIKTPMNLIGVDRGENIPAVIALTDPEGCPLSRFKDSLGNPTHILRIGESYKEKQRTIQAKKEVEQRRAGGYSRKYASKAKNLADDMVRNTARDLLYYAVTQDAMLIFENLSRGFGRQGKRTFMAERQYTRMEDWLTAKLAYEGLPSKTYLSKTLAQYTSKTCSNCGFTITSADYDRVLEKLKKTATGWMTTINGKELKVEGQITYYNRYKRQNVVKDLSVELDRLSEESVNNDISSWTKGRSGEALSLLKKRFSHRPVQEKFVCLNCGFETHADEQAALNIARSWLFLRSQEYKKYQTNKTTGNTDKRAFVETWQSFYRKKLKEVWKPAV

SEQ ID NO: 28348 - protein, 979 aa, synthetic construct
  REGION 1..979: note = engineered CasX variant
QEIKRINKIRRRLVKDSNTKKAGKTGPMKTLLVRVMTPDLRERLENLRKKPPNIPQPISNTSRANLNKLLTDYTEMKKAILHVYWEEFQKDPVGLMSRVAQPASKKIDQNKLKPEMDEKGNLTTAGFACSQCGQPLFVYKLEQVSEKGKAYTNYFGRCNVAEHEKLILLAQLKPEKDSDEAVTYSLGKFGQRALDFYSIHVTKESTHPVKPLAQIAGNRYASGPVGKALSDACMGTIASFLSKYQDIIIEHQKVVKGNQKRLESLRELAGKENLEYPSVTLPPQPHTKEGVDAYNEVIARVRMWVNLNLWQKLKLSRDDAKPLLRLKGFPSFPLVERQANEVDWWDMVCNVKKLINEKKEDGKVFWQNLAGYKRQEALRPYLSSEEDRKKGKKFARYQLGDLLLHLEKKHGEDWGKVYDEAWERIDKKVEGLSKHIKLEEERRSEDAQSKAALTDWLRAKASFVIEGLKEADKDEFCRCELKLQKWYGDLRGKPFAIEAENSILDISGFSKQYNCAFIWQKDGVKKLNLYLIINYFKGGKLRFKKIKPEAFEANRFYTVINKKSGEIVPMEVNFNFDDPNLIILPLAFGKRQGREFIWNDLLSLETGSLKLANGRVIEKTLYNRRTRQDEPALFVALTFERREVLDSSNIKPMSNLIGVDRGENIPAVIALTDPEGCPLSRFKDSLGNPTHILRIGESYKEKQRTIQAKKEVEQRRAGGYSRKYASKAKNLADDMVRNTARDLLYYAVTQDAMLIFENLSRGFGRQGKRTFMAERQYTRMEDWLTAKLAYEGLPSKTYLSKTLAQYTSKTCSNCGFTITSADYDRVLEKLKKTATGWMTTINGKELKVEGQITYYNRYKRQNVVKDLSVELDRLSEESVNNDISSWTKGRSGEALSLLKKRFSHRPVQEKFVCLNCGFETHADEQAALNIARSWLFLRSQEYKKYQTNKTTGNTDKRAFVETWQSFYRKKLKEVWKPAV

SEQ ID NO: 28349 - protein, 978 aa, synthetic construct
  REGION 1..978: note = engineered CasX variant
QEIKRINKIRRRLVKDSNTKKAGKTGPMKTLLVRVMTPDLRERLENLRKKPPNIPQPISNTSRANLNKLLTDYTEMKKAILHVYWEEFQKDPVGLMSRVAQPASKKIDQNKLKPEMDEKGNLTTAGFACSQCGQPLFVYKLEQVSEKGKAYTNYFGRCNVAEHEKLILLAQLKPEKDSDEAVTYSLGKFGQRALDFYSIHVTKESTHPVKPLAQIAGNRYASGPVGKALSDACMGTIASFLSKYQDIIIEHQKVVKGNQKRLESLRELAGKENLEYPSVTLPPQPHTKEGVDAYNEVIARVRMWVNLNLWQKLKLSRDDAKPLLRLKGFPSFPLVERQANEVDWWDMVCNVKKLINEKKEDGKVFWQNLAGYKRQEALRPYLSSEEDRKKGKKFARYQLGDLLLHLEKKHGEDWGKVYDEAWERIDKKVEGLSKHIKLEEERRSEDAQSKAALTDWLRAKASFVIEGLKEADKDEFCRCELKLQKWYGDLRGKPFAIEAENSILDISGFSKQYNCAFIWQKDGVKKLNLYLIINYFKGGKLRFKKIKPEAFEANRFYTVINKKSGEIVPMEVNFNFDDPNLIILPLAFGKRQGREFIWNDLLSLETGSLKLANGRVIEKTLYNRRTRQDEPALFVALTFERREVLDSSNIKPMNLIGVDRGENIPAVIALTDPEGCPLSRFKDSLGNPTHILRIRESYKEKQRTIQAKKEVEQRRAGGYSRKYASKAKNLADDMVRNTARDLLYYAVTQDAMLIFENLSRGFGRQGKRTFMAERQYTRMEDWLTAKLAYEGLPSKTYLSKTLAQYTSKTCSNCGFTITSADYDRVLEKLKKTATGWMTTINGKELKVEGQITYYNRYKRQNVVKDLSVELDRLSEESVNNDISSWTKGRSGEALSLLKKRFSHRPVQEKFVCLNCGFETHADEQAALNIARSWLFLRSQEYKKYQTNKTTGNTDKRAFVETWQSFYRKKLKEVWKPAV

SEQ ID NO: 28350 - protein, 978 aa, synthetic construct
  REGION 1..978: note = engineered CasX variant
QEIKRINKIRRRLVKDSNTKKAGKTGPMKTLLVRVMTPDLRERLENLRKKPPNIPQPISNTSRANLNKLLTDYTEMKKAILHVYWEEFQKDPVGLMSRVAQPASKKIDQNKLKPEMDEKGNLTTAGFACSQCGQPLFVYKLEQVSEKGKAYTNYFGRCNVAEHEKLILLAQLKPEKDSDEAVTYSLGKFGQRALDFYSIHVTKESTHPVKPLAQIAGNRYASGPVGKALSDACMGTIASFLSKYQDIIIEHQKVVKGNQKRLESLRELAGKENLEYPSVTLPPQPHTKEGVDAYNEVIARVRMWVNLNLWQKLKLSRDDAKPLLRLKGFPSFPLVERQANEVDWWDMVCNVKKLINEKKEDGKVFWQNLAGYKRQEALRPYLSSEEDRKKGKKFARYQLGDLLLHLEKKHGEDWGKVYDEAWERIDKKVEGLSKHIKLEEERRSEDAQSKAALTDWLRAKASFVIEGLKEADKDEFCRCELKLQKWYGDLRGKPFAIEAENSILDISGFSKQYNCAFIWQKDGVKKLNLYLIINYFKGGKLRFKKIKPEAFEANRFYTVINKKSGEIVPMEVNFNFDDPNLIILPLAFGKRQGREFIWNDLLSLETGSLKLANGRVIEKTLYNRRTRQDEPALFVALTFERREVLDSSNIKPMNLIGVDRGENIPAVIALTDPEGCPLSRFKDSLGNPTHILRIGESYKEKQRTIQAKKEVEQRRAGGYSRKYASKAKNLADDMVRNTARDLLYYAVTQDAMLIFENLSRGFGRQGKRTFSAERQYTRMEDWLTAKLAYEGLPSKTYLSKTLAQYTSKTCSNCGFTITSADYDRVLEKLKKTATGWMTTINGKELKVEGQITYYNRYKRQNVVKDLSVELDRLSEESVNNDISSWTKGRSGEALSLLKKRFSHRPVQEKFVCLNCGFETHADEQAALNIARSWLFLRSQEYKKYQTNKTTGNTDKRAFVETWQSFYRKKLKEVWKPAV

SEQ ID NO: 28351 - protein, 978 aa, synthetic construct
  REGION 1..978: note = engineered CasX variant
QEIKRINKIRRRLVKDSNTKKAGKTGPMKTLLVRVMTPDLRERLENLRKKPPNIPQPISNTSRANLNKLLTDYTEMKKAILHVYWEEFQKDPVGLMSRVAQPASKKIDQNKLKPEMDEKGNLTTAGFACSQCGQPLFVYKLEQVSEKGKAYTNYFGRCNVAEHEKLILLAQLKPEKDSDEAVTYSLGKFGQRALDFYSIHVTKESTHPVKPLAQIAGNRYASGPVGKALSDACMGTIASFLSKYQDIIIEHQKVVKGNQKRLESLRELAGKENLEYPSVTLPPQPHTKEGVDAYNEVIARVRMWVNLNLWQKLKLSRDDAKPLLRLKGFPSFPLVERQANEVDWWDMVCNVKKLINEKKEDGKVFWQNLAGYKRQEALRPYLSSEEDRKKGKKFARYQLGDLLLHLEKKHGEDWGKVYDEAWERIDKKVEGLSKHIKLEEERRSEDAQSKAALTDWLRAKASFVIEGLKEADKDEFCRCELKLQKWYGDLRGKPFAIEAENSILDISGFSKQYNCAFIWQKDGVKKLNLYLIINYFKGGKLRFKKIKPEAFEANRFYTVINKKSGEIVPMEVNFNFDDPNLIILPLAFGKRQGREFIWNDLLSLETGSLKLANGRVIEKTLYNRRTRQDEPALFVALTFERREVLDSSNIKPMNLIGVDRGENIPAVIALTDPEGCPLSRFKDSLGNPTHILRIGESYKEKQRTIQAKKEVEQRRAGGYSRKYASKAKNLADDMVRNTARDLLYYAVTQDAMLIFENLSRGFGRQGKRTFMAERQYTRMEDWLTAKLAYEGLPSKTYLSKTLAQYTSKTCSNCGFTITSADYDRVLEKLKKTATGWMTTINGKELKVEGQITYYNRYKRQNVVKDLSVELDRLSEESVNNDISSWDKGRSGEALSLLKKRFSHRPVQEKFVCLNCGFETHADEQAALNIARSWLFLRSQEYKKYQTNKTTGNTDKRAFVETWQSFYRKKLKEVWKPAV

SEQ ID NO: 28352 - protein, 978 aa, synthetic construct
  REGION 1..978: note = engineered CasX variant
QEIKRINKIRRRLVKDSNTKKAGKTGPMKTLLVRVMTPDLRERLENLRKKPPNIPQPISNTSRANLNKLLTDYTEMKKAILHVYWEEFQVDPVGLMSRVAQPASKKIDQNKLKPEMDEKGNLTTAGFACSQCGQPLFVYKLEQVSEKGKAYTNYFGRCNVAEHEKLILLAQLKPEKDSDEAVTYSLGKFGQRALDFYSIHVTKESTHPVKPLAQIAGNRYASGPVGKALSDACMGTIASFLSKYQDIIIEHQKVVKGNQKRLESLRELAGKENLEYPSVTLPPQPHTKEGVDAYNEVIARVRMWVNLNLWQKLKLSRDDAKPLLRLKGFPSFPLVERQANEVDWWDMVCNVKKLINEKKEDGKVFWQNLAGYKRQEALRPYLSSEEDRKKGKKFARYQLGDLLLHLEKKHGEDWGKVYDEAWERIDKKVEGLSKHIKLEEERRSEDAQSKAALTDWLRAKASFVIEGLKEADKDEFCRCELKLQKWYGDLRGKPFAIEAENSILDISGFSKQYNCAFIWQKDGVKKLNLYLIINYFKGGKLRFKKIKPEAFEANRFYTVINKKSGEIVPMEVNFNFDDPNLIILPLAFGKRQGREFIWNDLLSLETGSLKLANGRVIEKTLYNRRTRQDEPALFVALTFERREVLDSSNIKPMNLIGVDRGENIPAVIALTDPEGCPLSRFKDSLGNPTHILRIGESYKEKQRTIQAKKEVEQRRAGGYSRKYASKAKNLADDMVRNTARDLLYYAVTQDAMLIFENLSRGFGRQGKRTFMAERQYTRMEDWLTAKLAYEGLPSKTYLSKTLAQYTSKTCSNCGFTITSADYDRVLEKLKKTATGWMTTINGKELKVEGQITYYNRYKRQNVVKDLSVELDRLSEESVNNDISSWTKGRSGEALSLLKKRFSHRPVQEKFVCLNCGFETHADEQAALNIARSWLFLRSQEYKKYQTNKTTGNTDKRAFVETWQSFYRKKLKEVWKPAV

SEQ ID NO: 28353 - protein, 978 aa, synthetic construct
  REGION 1..978: note = engineered CasX variant
QEIKRLNKIRRRLVKDSNTKKAGKTGPMKTLLVRVMTPDLRERLENLRKKPPNIPQPISNTSRANLNKLLTDYTEMKKAILHVYWEEFQKDPVGLMSRVAQPASKKIDQNKLKPEMDEKGNLTTAGFACSQCGQPLFVYKLEQVSEKGKAYTNYFGRCNVAEHEKLILLAQLKPEKDSDEAVTYSLGKFGQRALDFYSIHVTKESTHPVKPLAQIAGNRYASGPVGKALSDACMGTIASFLSKYQDIIIEHQKVVKGNQKRLESLRELAGKENLEYPSVTLPPQPHTKEGVDAYNEVIARVRMWVNLNLWQKLKLSRDDAKPLLRLKGFPSFPLVERQANEVDWWDMVCNVKKLINEKKEDGKVFWQNLAGYKRQEALRPYLSSEEDRKKGKKFARYQLGDLLLHLEKKHGEDWGKVYDEAWERIDKKVEGLSKHIKLEEERRSEDAQSKAALTDWLRAKASFVIEGLKEADKDEFCRCELKLQKWYGDLRGKPFAIEAENSILDISGFSKQYNCAFIWQKDGVKKLNLYLIINYFKGGKLRFKKIKPEAFEANRFYTVINKKSGEIVPMEVNFNFDDPNLIILPLAFGKRQGREFIWNDLLSLETGSLKLANGRVIEKTLYNRRTRQDEPALFVALTFERREVLDSSNIKPMNLIGVDRGENIPAVIALTDPEGCPLSRFKDSLGNPTHILRIGESYKEKQRTIQAKKEVEQRRAGGYSRKYASKAKNLADDMVRNTARDLLYYAVTQDAMLIFENLSRGFGRQGKRTFMAERQYTRMEDWLTAKLAYEGLPSKTYLSKTLAQYTSKTCSNCGFTITSADYDRVLEKLKKTATGWMTTINGKELKVEGQITYYNRYKRQNVVKDLSVELDRLSEESVNNDISSWTKGRSGEALSLLKKRFSHRPVQEKFVCLNCGFETHADEQAALNIARSWLFLRSQEYKKYQTNKTTGNTDKRAFVETWQSFYRKKLKEVWKPAV

SEQ ID NO: 28354 - protein, 978 aa, synthetic construct
  REGION 1..978: note = engineered CasX variant
QEIKRINKIRRRLVKDSNTKKAGKTGPMKTLLVRVMTPDLRERLENLRKKPPNIPQPISNTSRANLNKLLTDYTEMKKAILHVYWEEFQKDPVGLMSRVAQPASKKIDQNKLKPEMDEKGNLTTAGFACSQCGQPLFVYKLEQVSEKGKAYTNYVGRCNVAEHEKLILLAQLKPEKDSDEAVTYSLGKFGQRALDFYSIHVTKESTHPVKPLAQIAGNRYASGPVGKALSDACMGTIASFLSKYQDIIIEHQKVVKGNQKRLESLRELAGKENLEYPSVTLPPQPHTKEGVDAYNEVIARVRMWVNLNLWQKLKLSRDDAKPLLRLKGFPSFPLVERQANEVDWWDMVCNVKKLINEKKEDGKVFWQNLAGYKRQEALRPYLSSEEDRKKGKKFARYQLGDLLLHLEKKHGEDWGKVYDEAWERIDKKVEGLSKHIKLEEERRSEDAQSKAALTDWLRAKASFVIEGLKEADKDEFCRCELKLQKWYGDLRGKPFAIEAENSILDISGFSKQYNCAFIWQKDGVKKLNLYLIINYFKGGKLRFKKIKPEAFEANRFYTVINKKSGEIVPMEVNFNFDDPNLIILPLAFGKRQGREFIWNDLLSLETGSLKLANGRVIEKTLYNRRTRQDEPALFVALTFERREVLDSSNIKPMNLIGVDRGENIPAVIALTDPEGCPLSRFKDSLGNPTHILRIGESYKEKQRTIQAKKEVEQRRAGGYSRKYASKAKNLADDMVRNTARDLLYYAVTQDAMLIFENLSRGFGRQGKRTFMAERQYTRMEDWLTAKLAYEGLPSKTYLSKTLAQYTSKTCSNCGFTITSADYDRVLEKLKKTATGWMTTINGKELKVEGQITYYNRYKRQNVVKDLSVELDRLSEESVNNDISSWTKGRSGEALSLLKKRFSHRPVQEKFVCLNCGFETHADEQAALNIARSWLFLRSQEYKKYQTNKTTGNTDKRAFVETWQSFYRKKLKEVWKPAV

SEQ ID NO: 28355 - protein, 978 aa, synthetic construct
  REGION 1..978: note = engineered CasX variant
QEIKRINKIRRRLVKDSNTKKAGKTGPMKTLLVRVMTPDLRERLENLRKKPPNIPQPISNTSRANLNKLLTDYTEMKKAILHVYWEEFQKDPVGLMSRVAQPASKKIDQNKLKPEMDEKGNLTTAGFACSQCGQPLFVYKLEQVSEKGKAYTNYFGRCNVAEHEKLILLAQLKPEKDSDEAVTYSLGKFGQRALDFYSIHVTKESTHPVKPLAQIAGNRYASGPVGKALSDACMGTIASFLSKYQDIIIEHQKVVKGNQKRLESLRELAGKENLEYPSVTLPPQPHTKEGVDAYNEVIARVRMWVNLNLWQKLKLSRDDAKPLLRLKGFPSFPLVERQANEVDWWDMVCNVKKLINEKKEDGKVFWQNLAGYKRQEALRPYLSSEEDRKKGKKFARYQLGDLLLHLEKKHGEDWGKVYDEAWERIDKKVEGLSKHIKLEEERRSEDAQSKAALTDWLRAKASFVIEGLKEADKDEFCRCELKLQKWYGDLRGKPFAIEAENSILDISGFSKQYNCAFIWQKDGVKKLNLYLIINYFKGGKLRFKKIKPEAFEANRFYTVINKKSGEIVPMEVNFNFDDPNLIILPLAFGKRQGREFIWNDLLSLETGSLKLANGRVIEKTLYNRRTRQDEPALFVALTFERREVLDSSNIKPMNLIGVDRGENIPAVIALTDPEGCPLSRFKDSLGNPTHILRIGESYKEKQRTIQAKKEVEQRRAGGYSRKYASKAKNLADDMVRNTARDLLYYAVTQDAMLIFENLSRGFGRQGKRTFMAERQYTRMEDWLTAKLAYEGLASKTYLSKTLAQYTSKTCSNCGFTITSADYDRVLEKLKKTATGWMTTINGKELKVEGQITYYNRYKRQNVVKDLSVELDRLSEESVNNDISSWTKGRSGEALSLLKKRFSHRPVQEKFVCLNCGFETHADEQAALNIARSWLFLRSQEYKKYQTNKTTGNTDKRAFVETWQSFYRKKLKEVWKPAV

SEQ ID NO: 28356 - protein, 978 aa, synthetic construct
  REGION 1..978: note = engineered CasX variant
QEIKRINKIRRRLVKDSNTKKAGKTGPMKTLLVRVMTPDLRERLENLRKKPPNIPQPISNTSRANLNKLLTDYTEMKKAILHVYWEEFQKDPVGLMSRVAQPASKKIDQNKLKPEMDEKGNLTTAGFACSQCGQPLFVYKLEQVSEKGKAYTNYFGRCNVAEHEKLILLAQLKPEKDSDEAVTYSLGKFGQRALDFYSIHVTKESTHPVKPLAQIAGNRYASGPVGKALSDACMGTIASFLSKYQDIIIEHQKVVKGNQKRLESLRELAGKENLEYPSVTLPPQPHTKEGVDAYNEVIARVRMWVNLNLWQKLKLSRDDAKPLLRLKGFPSFPLVERQANEVDWWDMVCNVKKLINEKKEDGKVFWQNLAGYKRQEALRPYLSSEEDRKKGKKFARYQLGDLLLHLEKKHGEDWGKVYDEAWERIDKKVEGLSKHIKLEEERRSEDAQSKAALTDWLRAKASFVIEGLKEADKDEFCRCELKLQKWYGDLRGKPFAIEAENSILDISGFSKQYNCAFIWQKDGVKKLNLYLIINYFKGGKLRFKKIKPEAFEANRFYTVINKKSGEIVPMEVNFNFDDPNLIILPLAFGKRQGREFIWNDLLSLETGSLKLANGRVIEKTLYNRRTRQDEPALFVALTFERREVLDSSNIKPMNLIGVDRGENIPAVIALTDPEGCPLSRFKDSLGNPTHILRIGESYKEKQRTIQAKKEVEQRRAGGYSRKYASKAKNLADDMVRNTARDLLYYAVTQDAMLIFENLSRGFGRQGKRTFMAERQYTRMEDWLTAKLAYEGLPSKVYLSKTLAQYTSKTCSNCGFTITSADYDRVLEKLKKTATGWMTTINGKELKVEGQITYYNRYKRQNVVKDLSVELDRLSEESVNNDISSWTKGRSGEALSLLKKRFSHRPVQEKFVCLNCGFETHADEQAALNIARSWLFLRSQEYKKYQTNKTTGNTDKRAFVETWQSFYRKKLKEVWKPAV

SEQ ID NO: 28357 - protein, 979 aa, synthetic construct
  REGION 1..979: note = engineered CasX variant
QEIKRINKIRRRLVKDSNTKKAGKTGPMKTLLVRVMTPDLRERLENLRKKPPNIPQPISNTSRANLNKLLTDYTEMKKAILHVYWEEFQKDPVGLMSRVAQPASKKIDQNKLKPEMDEKGNLTTAGFACSQCGQPLFVYKLEQVSEKGKAYTNYFGRCNVAEHEKLILLAQLKPEKDSDEAVTYSLGKFGQRALDFYSIHVTKESTHPVKPLAQIAGNRYASGPVGKALSDACMGTIASFLSKYQDIIIEHQKVVKGNQKRLESLRELAGKENLEYPSVTLPPQPHTKEGVDAYNEVIARVRMWVNLNLWQKLKLSRDDAKPLLRLKGFPSFPLVERQANEVDWWDMVCNVKKLINEKKEDGKVFWQNLAGYKRQEALRPYLSSEEDRKKGKKFARYQLGDLLLHLEKKHGEDWGKVYDEAWERIDKKVEGLSKHIKLEEERRSEDAQSKAALTDWLRAKASFVIEGLKEADKDEFCRCELKLQKWYGDLRGKPFAIEAENSILDISGFSKQYNCAFIWQKDGVKKLNLYLIINYFKGGKLRFKKIKPEAFEANRFYTVINKKSGEIVPMEVNFNFDDPNLIILPLAFGKRQGREFIWNDLLSLETGSLKLANGRVIEKTLYNRRTRQDEPALFVALTFERREVLDSSNIKPMNLIGVDRGENIPAVIALTDPEGCPLSRFKDSLGNPTHILRIGESYKEKQRTIQAKKEVEQRRAGGYSRKYASKAKNLADDMVRNTARDLLYYAVTQDAMLIFENLSRGFGRQGKRTFMAERQYTRMEDWLTAKLAYEGPLPSKTYLSKTLAQYTSKTCSNCGFTITSADYDRVLEKLKKTATGWMTTINGKELKVEGQITYYNRYKRQNVVKDLSVELDRLSEESVNNDISSWTKGRSGEALSLLKKRFSHRPVQEKFVCLNCGFETHADEQAALNIARSWLFLRSQEYKKYQTNKTTGNTDKRAFVETWQSFYRKKLKEVWKPAV

SEQ ID NO: 28358 - protein, 979 aa, synthetic construct
  REGION 1..979: note = engineered CasX variant
QEIKRINKIRRRLVKDSNTKKAGKTGPMKTLLVRVMTPDLRERLENLRKKPPNIPQPISNTSRANLNKLLTDYTEMKKAILHVYWEEFQKDPVGLMSRVAQPASKKIDQNKLKPEMDEKGNLTTAGFACSQCGQPLFVYKLEQVSEKGKAYTNYFGRCNVAEHEKLILLAQLKPEKDSDEAVTYSLGKFGQRALDFYSIHVTKESTHPVKPLAQIAGNRYASGPVGKALSDACMGTIASFLSKYQDIIIEHQKVVKGNQKRLESLRELAGKENLEYPSVTLPPQPHTKEGVDAYNEVIARVRMWVNLNLWQKLKLSRDDAKPLLRLKGFPSFPLVERQANEVDWWDMVCNVKKLINEKKEDGKVFWQNLAGYKRQEALRPYLSSEEDVRKKGKKFARYQLGDLLLHLEKKHGEDWGKVYDEAWERIDKKVEGLSKHIKLEEERRSEDAQSKAALTDWLRAKASFVIEGLKEADKDEFCRCELKLQKWYGDLRGKPFAIEAENSILDISGFSKQYNCAFIWQKDGVKKLNLYLIINYFKGGKLRFKKIKPEAFEANRFYTVINKKSGEIVPMEVNFNFDDPNLIILPLAFGKRQGREFIWNDLLSLETGSLKLANGRVIEKTLYNRRTRQDEPALFVALTFERREVLDSSNIKPMNLIGVDRGENIPAVIALTDPEGCPLSRFKDSLGNPTHILRIGESYKEKQRTIQAKKEVEQRRAGGYSRKYASKAKNLADDMVRNTARDLLYYAVTQDAMLIFENLSRGFGRQGKRTFMAERQYTRMEDWLTAKLAYEGLPSKTYLSKTLAQYTSKTCSNCGFTITSADYDRVLEKLKKTATGWMTTINGKELKVEGQITYYNRYKRQNVVKDLSVELDRLSEESVNNDISSWTKGRSGEALSLLKKRFSHRPVQEKFVCLNCGFETHADEQAALNIARSWLFLRSQEYKKYQTNKTTGNTDKRAFVETWQSFYRKKLKEVWKPAV

SEQ ID NO: 28359 - protein, 978 aa, synthetic construct
  REGION 1..978: note = engineered CasX variant
QEIKRINKIRRRLVKDSNTKKAGKTGPMKTLLVRVMTPDLRERLENLRKKPPNIPQPISNTSRANLNKLLTDYTEMKKAILHVYWEEFQKDPVGLMSRVAQPASKKIDQNKLKPEMDEKGNLTTAGFACSQCGQPLFVYKLEQVSEKGKAYTNYFGRCNVAEHEKLILLAQLKPEKDSDEAVTYSLGKFGQRALDFYSIHVTKESTHPVKPLAQIAGNRYASGPVGKALSDACMGTIASFLSKYQDIIIEHQKVVKGNQKRLESLRELAGKENLEYPSVTLPPQPHTKEGVDAYNEVIARVRMWVNLNLWQKLKLSRDDAKPLLRLKGFPSFPLVERQANEVDWWDMVCNVKKLINEKKEDGKVFWQNLAGYKRQEALRPYLSSEEDRKKGKKFARYQLGDLLLHLEKKHGEDWGKVYDEAWERIDKKVEGLSKHIKLEEERRSEDAQSKAALTDWLRAKASFVIEGLKEADKDEFCRCELKLQKWYGDLRGKPFAIEAENSILDISGFSKQYNCAFIWQKDGVKKLNLYLIINYFKGGKLRFKKIKPEAFEANRFYTVINKKSGEIVPMEVNFNFDDPNLIILPLAFGKRQGREFIWNDLLSLETGSLKLANGRVIEKTLYNRRTRQDEPALFVALTFERREVLDSSNIKPMNLIGVDRGENIPAVIALTDPEGCPLSRFKDSLGNPTHILRIGESYKEKQRTIQAKKEVEQRRAGGYSRKYASKAKNLADDMVRNTARDLLYYAVTQDAMLIFENLSRGFGRQGKRTFMAERQYTRMEDWLTAKLAYEGLPSKTYLSKTLAQYTSKTCSNCGFTITSADYDRMLEKLKKTATGWMTTINGKELKVEGQITYYNRYKRQNVVKDLSVELDRLSEESVNNDISSWTKGRSGEALSLLKKRFSHRPVQEKFVCLNCGFETHADEQAALNIARSWLFLRSQEYKKYQTNKTTGNTDKRAFVETWQSFYRKKLKEVWKPAV

SEQ ID NO: 28360 - protein, 978 aa, synthetic construct
  REGION 1..978: note = engineered CasX variant
QEIKRINKIRRRLVKDSNTKKAGKTGPMKTLLVRVMTPDLRERLENLRKKPPNIPQPISNTSRANLNKLLTDYTEMKKAILHVYWEEFQKDPVGLMSRVAQPASKKIDQNKLKPEMDEKGNLTTAGFACSQCGQPLFVYKLEQVSEKGKAYTNYFGRCNVAEHEKLILLAQLKPEKDSDEAVTYSLGKFGQRALDFYSIHVTKESTHPVKPLAQIAGNRYASGPVGKALSDACMGTIASFLSKYQDIIIEHQKVVKGNQKRLESLRELAGKENLEYPSVTLPPQPHTKEGVDAYNEVIARVRMWVNLNLWQKLKLSRDDAKPLLRLKGFPSFPLVERQANEVDWWDMVCNVKKLINEKKEDGKVFWQNLAGYKRQEALRPYLSSEEDRKKGKKFARYQLGDLLLHLEKKHGEDWGKVYDEAWERIDKKVEGLSKHIKLEEERRSEDAQSKAALTDWLRAKASFVIEGLKEADKDEFCRCELKLQKWYGDLRGKPFAIEAENSILDISGFSKQYNCAFIWQKDGVKKLNLYLIINYFKGGKLRFKKIKPEAFEANRFYTVINKKSGEIVPMEVNFNFDDPNLIILPLAFGKRQGREFIWNDLLSLETGSLKLANGRVIEKTLYNRRTRQDEPALFVALTFERREVLDSSNIKPMNLIGVDRGENIPAVIALTDPEGCPLSRFKDSLGNPTHILRIGESYKEKQRTIQAKKEVEQRRAGGYSRKYASKAKNLADDMVRNTARDLLYYAVTQDAMLIFENLSRGFGRQGKRTFMAERQYTRMEDWLTAKLAYEGLPSKTYLSKTLAQYTSKTCSNCGFTITSADYDRVLEKLKKTATGWMTTINGKELKVEGQITYYNRYKRQNVVKDLSVELDRLSEESVNNDISSWTKGRQGEALSLLKKRFSHRPVQEKFVCLNCGFETHADEQAALNIARSWLFLRSQEYKKYQTNKTTGNTDKRAFVETWQSFYRKKLKEVWKPAV

SEQ ID NO: 28361 - protein, 978 aa, synthetic construct
  REGION 1..978: note = engineered CasX variant
QEIKRINKIRRRLVKDSNTKKAGKTGPMKTLLVRVMTPDLRERLENLRKKPPNIPQPISNTSRANLNKLLTDYTEMKKAILHVYWEEFQKDPVGLMSRVAQPASKKIDQNKLKPEMDEKGNLTTAGFACSQCGQPLFVYKLEQVSEKGKAYTNYFGRCNVAEHEKLILLAQLKPEKDSDEAVTYSLGKFGQRALDFYSIHVTKESTHPVKPLAQIAGNRYASGPVGKALSDACMGTIASFLSKYQDIIIEHQKVVKGNQKRLESLRELAGKENLEYPSVTLPPQPHTKEGVDAYNEVIARVRMWVNLNLWQKLKLSRDDAKPLLRLKGFPSFPLVERQANEVDWWDMVCNVKKLINEKKEDGKVFWQNLAGYKRQEALRPYLSSEEDRKKGKKFARYQLGDLLLHLEKKHGEDWGKVYDEAWERIDKKVEGLSKHIKLEEERRSEDAQSKAALTDWLRAKASFVIEGLKEADKDEFCRCELKLQKWYGDLRGKPFAIEAENSILDISGFSKQYNCAFIWQKDGVKKLNLYLIINYFKGGKLRFKKIKPEAFEANRFYTVINKKSGEIVPMEVNFNFDDPNLIILPLAFGKRQGREFIWNDLLSLETGSLKLANGRVIEKTLYNRRTRQDEPALFVALTFERREVLDSSNIKPMNLIGVDRGENIPAVIALTDPEGCPLSRFKDSLGNPTHILRIGESYKEKQRTIQAKKEVEQRRAGGYSRKYASKAKNLADDMVRNTARDLLYYAVTQDAMLIFENLSRGFGRQGKRTFMAERQYTRMEDWLTAKLAYEGLPSKTYLSKTLAQYTSKTCSNCGFTITSADYDRVLEKLKKTATGWMTTINGKELKVEGQITYYNRYKRQNVVKDLSVELDRLSEESVNNDISSWTKGRSGEALSLLKKRFSHRPVQEKFVCLNCEFETHADEQAALNIARSWLFLRSQEYKKYQTNKTTGNTDKRAFVETWQSFYRKKLKEVWKPAV

SEQ ID NO: 28362 - protein, 979 aa, synthetic construct
  REGION 1..979: note = engineered CasX variant
QEIKRINKIRRRLVKDSNTKKAGKTGPMKTLLVRVMTPDLRERLENLRKKPPNIPQPISNTSRANLNKLLTDYTEMKKAILHVYWEEFQKDPVGLMSRVAQPASKKIDQNKLKPEMDEKGNLTTAGFACSQCGQPLFVYKLEQVSEKGKAYTNYFGRCNVAEHEKLILLAQLKPEKDSDEAVTYSLGKFGQRALDFYSIHVTKESTHPVKPLAQIAGNRYASGPVGKALSDACMGTIASFLSKYQDIIIEHQKVVKGNQKRLESLRELAGKENLEYPSVTLPPQPHTKEGVDAYNEVIARVRMWVNLNLWQKLKLSRDDAKPLLRLKGFPSFPLVERQANEVDWWDMVCNVKKLINEKKEDGKVFWQNLAGYKRQEALRPYLSSEEDRKKGKKFARYQLGDLLLHLEKKHGEDWGKVYDEAWERIDKKVEGLSKHIKLEEERRSEDAQSKAALTDWLRAKASFVIEGLKEADKDEFCRCELKLQKWYGDLRGKPFAIEAENSILDISGFSKQYNCAFIWQKDGVKKLNLYLIINYFKGGKLRFKKIKPEAFEANRFYTVINKKSGEIVPMEVNFNFDDPNLIILPLAFGKRQGREFIWNDLLSLETGSLKLANGRVIEKTLYNRRTRQDEPALFVALTFERREVLDSSNIKPMNLIGVDRGENIPAVIALTDPEGCPLSRFKDSLGNPTHILRIGESYKEKQRTIQAKKEVEQRRAGGYSRKYASKAKNLADDMVRNTARDLLYYAVTQDAMLIFENLSRGFGRQGKRTFMAERQYTRMEDWLTAKLAYEGLPSKTYLSKTLAQYTSKTCSNCGFTITSADYDRVLEKLKKTATGWMTTINGKELKVEGQITYYNRYKRQNVVKDLSVELDRLSEESVNNDISSWTKGRSGEALSLLKKRFSHRPVQEKFVCLNCGFETHADEQAALNIARSWLFLRSQEYKKYQTNKTSTGNTDKRAFVETWQSFYRKKLKEVWKPAV

SEQ ID NO: 28363 - protein, 979 aa, synthetic construct
  REGION 1..979: note = engineered CasX variant
QEIKRINKIRRRLVKDSNTKKAGKTGPMKTLLVRVMTPDLRERLENLRKKPPNIPQPISNTSRANLNKLLTDYTEMKKAILHVYWEEFQKDPVGLMSRVAQPASKKIDQNKLKPEMDEKGNLTTAGFACSQCGQPLFVYKLEQVSEKGKAYTNYFGRCNVAEHEKLILLAQLKPEKDSDEAVTYSLGKFGQRALDFYSIHVTKESTHPVKPLAQIAGNRYASGPVGKALSDACMGTIASFLSKYQDIIIEHQKVVKGNQKRLESLRELAGKENLEYPSVTLPPQPHTKEGVDAYNEVIARVRMWVNLNLWQKLKLSRDDAKPLLRLKGFPSFPLVERQANEVDWWDMVCNVKKLINEKKEDGKVFWQNLAGYKRQEALRPYLSSEEDRKKGKKFARYQLGDLLLHLEKKHGEDWGKVYDEAWERIDKKVEGLSKHIKLEEERRSEDAQSKAALTDWLRAKASFVIEGLKEADKDEFCRCELKLQKWYGDLRGKPFAIEAENSILDISGFSKQYNCAFIWQKDGVKKLNLYLIINYFKGGKLRFKKIKPEAFEANRFYTVINKKSGEIVPMEVNFNFDDPNLIILPLAFGKRQGREFIWNDLLSLETGSLKLANGRVIEKTLYNRRTRQDEPALFVALTFERREVLDSSNIKPMNLIGVDRGENIPAVIALTDPEGCPLSRFKDSLGNPTHILRIGESYKEKQRTIQAKKEVEQRRAGGYSRKYASKAKNLADDMVRNTARDLLYYAVTQDAMLIFENLSRGFGRQGKRTFMAERQYTRMEDWLTAKLAYEGLPSKTYLSKTLAQYTSKTCSNCGFTITSADYDRVLEKLKKTATGWMTTINGKELKVEGQITYYNRYKRQNVVKDLSVELDRLSEESVNNDISSWTKGRSGEALSLLKKRFSHRPVQEKFVCLNCGFETHADEQAALNIARSWLFLRSQEYKKYQTNKTTGKNTDKRAFVETWQSFYRKKLKEVWKPAV

SEQ ID NO: 28364 - protein, 978 aa, synthetic construct
  REGION 1..978: note = engineered CasX variant
QEIKRINKIRRRLVKDSNTKKAGKTGPMKTLLVRVMTPDLRERLENLRKKPPNIPQPISNTSRANLNKLLTDYTEMKKAILHVYWEEFQKDPVGLMSRVAQPASKKIDQNKLKPEMDEKGNLTTAGFACSQCGQPLFVYKLEQVSEKGKAYTNYFGRCNVAEHEKLILLAQLKPEKDSDEAVTYSLGKFGQRALDFYSIHVTKESTHPVKPLAQIAGNRYASGPVGKALSDACMGTIASFLSKYQDIIIEHQKVVKGNQKRLESLRELAGKENLEYPSVTLPPQPHTKEGVDAYNEVIARVRMWVNLNLWQKLKLSRDDAKPLLRLKKFPSFPLVERQANEVDWWDMVCNVKKLINEKKEDGKVFWQNLAGYKRQEALRPYLSSEEDRKKGKKFARYQLGDLLLHLEKKHGEDWGKVYDEAWERIDKKVEGLSKHIKLEEERRSEDAQSKAALTDWLRAKASFVIEGLKEADKDEFCRCELKLQKWYGDLRGKPFAIEAENSILDISGFSKQYNCAFIWQKDGVKKLNLYLIINYFKGGKLRFKKIKPEAFEANRFYTVINKKSGEIVPMEVNFNFDDPNLIILPLAFGKRQGREFIWNDLLSLETGSLKLANGRVIEKTLYNRRTRQDEPALFVALTFERREVLDSSNIKPMNLIGVDRGENIPAVIALTDPEGCPLSRFKDSLGNPTHILRIGESYKEKQRTIQAKKEVEQRRAGGYSRKYASKAKNLADDMVRNTARDLLYYAVTQDAMLIFENLSRGFGRQGKRTFMAERQYTRMEDWLTAKLAYEGLPSKTYLSKTLAQYTSKTCSNCGFTITSADYDRVLEKLKKTATGWMTTINGKELKVEGQITYYNRYKRQNVVKDLSVELDRLSEESVNNDISSWTKGRSGEALSLLKKRFSHRPVQEKFVCLNCGFETHADEQAALNIARSWLFLRSQEYKKYQTNKTTGNTDKRAFVETWQSFYRKKLKEVWKPAV

SEQ ID NO: 28365 - protein, 978 aa, synthetic construct
  REGION 1..978: note = engineered CasX variant
QEIKRINKIRRRLVKDSNTKKAGKTGPMKTLLVRVMTPDLRERLENLRKKPPNIPQPISNTSRANLNKLLTDYTEMKKAILHVYWEEFQKDPVGLMSRVAQPASKKIDQNKLKPEMDEKGNLTTAGFACSQCGQPLFVYKLEQVSEKGKAYTNYFGRCNVAEHEKLILLAQLKPEKDSDEAVTYSLGKFGQRALDFYSIHVTKESTHPVKPLAQIAGNRYASGPVGKALSDACMGTIASFLSKYQDIIIEHQKVVKGNQKRLESLRELAGKENLEYPSVTLPPQPHTKEGVDAYNEVIARVRMWVNLNLWQKLKLSRDDAKPLLRLKGFPSFPLVERQANEVDWWDMVCNVKKLINEKKEDGKVFWQNLAGYKRQEALRPYLSSEEDRKKGKKFARYQLGDLLLHLEKKHGEDWGKVYDEAWERIDKKVEGLSKHIKLEEERRSEDAQSKAALTDWLRAKASFVIEGLKEADKDEFCRCELKLQKWYGDLRGKPFAIEAENSILDISGFSKQYNCAFIWQKDGVKKLNLYLIINYFKGGKLRFKKIKPEAFEANRFYTVINKKSGEIVPMEVNFNFDDPNLIILPLAFGKRQGREFIWNDLLSLETGSLKLANGRVIEKTLYNRRTRQDEPALFVALTFERREVLDSSNIKPMNLIGVDRGENIPAVIALTDPEGCPLSRFKDSLGNPTHILRIGERYKEKQRTIQAKKEVEQRRAGGYSRKYASKAKNLADDMVRNTARDLLYYAVTQDAMLIFENLSRGFGRQGKRTFMAERQYTRMEDWLTAKLAYEGLPSKTYLSKTLAQYTSKTCSNCGFTITSADYDRVLEKLKKTATGWMTTINGKELKVEGQITYYNRYKRQNVVKDLSVELDRLSEESVNNDISSWTKGRSGEALSLLKKRFSHRPVQEKFVCLNCGFETHADEQAALNIARSWLFLRSQEYKKYQTNKTTGNTDKRAFVETWQSFYRKKLKEVWKPAV

SEQ ID NO: 28366 - protein, 978 aa, synthetic construct
  REGION 1..978: note = engineered CasX variant
QEIKRINKIRRRLVKDSNTKKAGKTGPMKTLLVRVMTPDLRERLENLRKKPPNIPQPISNTSRANLNKLLTDYTEMKKAILHVYWEEFQKDPVGLMSRVAQPASKKIDQNKLKPEMDEKGNLTTAGFACSQCGQPLFVYKLEQVSEKGKAYTNYFGRCNVAEHEKLILLAQLKPEKDSDEAVTYSLGKFGQRALDFYSIHVTKESTHPVKPLAQIAGNRYASGPVGKALSDACMGTIASFLSKYQDIIIEHQKVVKGNQKRLESLRELAGKENLEYPSVTLPPQPHTKEGVDAYNEVIARVRMWVNLNLWQKLKLSRDDAKPLLRLKGFPSFPLVERQANEVDWWDMVCNVKKLINEKKEDGKVFWQNLAGYKRQEALRPYLSSEEDRKKGKKFARYQLGDLLLHLEKKHGEDWGKVYDEAWERIDKKVEGLSKHIKLEEERRSEDAQSKAALTDWLRAKASFVIEGLKEADKDEFCRCELKLQKWYGDLRGKPFAIEAENSILDISGFSKQYNCAFIWQKDGVKKLNLYLIINYFKGGKLRFKKIKPEAFEANRFYTVINKKSGEIVPMEVNFNFDDPNLIILPLAFGKRQGREFIWNDLLSLETGSLQLANGRVIEKTLYNRRTRQDEPALFVALTFERREVLDSSNIKPMNLIGVDRGENIPAVIALTDPEGCPLSRFKDSLGNPTHILRIGESYKEKQRTIQAKKEVEQRRAGGYSRKYASKAKNLADDMVRNTARDLLYYAVTQDAMLIFENLSRGFGRQGKRTFMAERQYTRMEDWLTAKLAYEGLPSKTYLSKTLAQYTSKTCSNCGFTITSADYDRVLEKLKKTATGWMTTINGKELKVEGQITYYNRYKRQNVVKDLSVELDRLSEESVNNDISSWTKGRSGEALSLLKKRFSHRPVQEKFVCLNCGFETHADEQAALNIARSWLFLRSQEYKKYQTNKTTGNTDKRAFVETWQSFYRKKLKEVWKPAV

SEQ ID NO: 28367 - protein, 978 aa, synthetic construct
  REGION 1..978: note = engineered CasX variant
QEIKRINKIRRRLVKDSNTKKAGKTGPMKTLLVRVMTPDLRERLENLRKKPENIPQPISNTSQANLNKLLTDYTEMKKAILHVYDEEFQKDPVGLMSRVAQPASKKIDQNKLKPEMDEKGNLTTAGFACSQCGQPLFVYKLEQVSEKGKAYTNYFGRCNVAEHEKLILLAQLKPEKDSDEAVTYSLGKFGQRALDFYSIHVTKESTHPVKPLAQIAGNRYASGPVGKALSDACMGTIASFLSKYQDIIIEHQKVVKGNQKRLESLRELAGKENLEYPSVTLPPQPHTKEGVDAYNEVIARVRMWVNLNLWQKLKLSRDDAKPLLRLKGFPSFPLVERQANEVDWWDMVCNVKKLINEKKEDGKVFWQNLAGYKRQEALRPYLSSEEDRKKGKKFARYQLGDLLLHLEKKHGEDWGKVYDEAWERIDKKVEGLSKHIKLEEERRSEDAQSKAALTDWLRAKASFVIEGLKEADKDEFCRCELKLQKWYGDLRGKPFAIEAENSILDISGFSKQYNCAFIWQKDGVKKLNLYLIINYFKGGKLRFKKIKPEAFEANRFYTVINKKSGEIVPMEVNFNFDDPNLIILPLAFGKRQGREFIWNDLLSLETGSLKLANGRVIEKTLYNRRTRQDEPALFVALTFERREVLDSSNIKPMNLIGVDRGENIPAVIALTDPEGCPLSRFKDSLGNPTHILRIGESYKEKQRTIQAKKEVEQRRAGGYSRKYASKAKNLADDMVRNTARDLLYYAVTQDAMLIFENLSRGFGRQGKRTFMAERQYTRMEDWLTAKLAYEGLPSKTYLSKTLAQYTSKTCSNCGFTITSADYDRVLEKLKKTATGWMTTINGKELKVEGQITYYNRYKRQNVVKDLSVELDRLSEESVNNDISSWTKGRSGEALSLLKKRFSHRPVQEKFVCLNCGFETHADEQAALNIARSWLFLRSQEYKKYQTNKTTGNTDKRAFVETWQSFYRKKLKEVWKPAV

SEQ ID NO: 28368 - protein, 978 aa, synthetic construct
  REGION 1..978: note = engineered CasX variant
QEIKRINKIRRRLVKDSNTKKAGKTGPMKTLLVRVMTPDLRERLENLRKKPENIPQPISNTSQANLNKLLTDYTEMKKAILHVYWEEFQKDPVGLMSRVAQPASKKIDQNKLKPEMDEKGNLTTAGFACSQCGQPLFVYKLEQVSEKGKAYTNYFGRCNVAEHEKLIKLAQLKPEKDSDEAVTYSLGKFGQRALDFYSIHVTKESTHPVKPLAQIAGNRYASGPVGKALSDACMGTIASFLSKYQDIIIEHQKVVKGNQKRLESLRELAGKENLEYPSVTLPPQPHTKEGVDAYNEVIARVRMWVNLNLWQKLKLSRDDAKPLLRLKGFPSFPLVERQANEVDWWDMVCNVKKLINEKKEDGKVFWQNLAGYKRQEALRPYLSSEEDRKKGKKFARYQLGDLLLHLEKKHGEDWGKVYDEAWERIDKKVEGLSKHIKLEEERRSEDAQSKAALTDWLRAKASFVIEGLKEADKDEFCRCELKLQKWYGDLRGKPFAIEAENSILDISGFSKQYNCAFIWQKDGVKKLNLYLIINYFKGGKLRFKKIKPEAFEANRFYTVINKKSGEIVPMEVNFNFDDPNLIILPLAFGKRQGREFIWNDLLSLETGSLKLANGRVIEKTLYNRRTRQDEPALFVALTFERREVLDSSNIKPMNLIGVDRGENIPAVIALTDPEGCPLSRFKDSLGNPTHILRIGESYKEKQRTIQAKKEVEQRRAGGYSRKYASKAKNLADDMVRNTARDLLYYAVTQDAMLIFENLSRGFGRQGKRTFMAERQYTRMEDWLTAKLAYEGLPSKTYLSKTLAQYTSKTCSNCGFTITSADYDRVLEKLKKTATGWMTTINGKELKVEGQITYYNRYKRQNVVKDLSVELDRLSEESVNNDISSWTKGRSGEALSLLKKRFSHRPVQEKFVCLNCGFETHADEQAALNIARSWLFLRSQEYKKYQTNKTTGNTDKRAFVETWQSFYRKKLKEVWKPAV

SEQ ID NO: 28369 - protein, 978 aa, synthetic construct
  REGION 1..978: note = engineered CasX variant
QEIKRINKIRRRLVKDSNTKKAGKTGPMKTLLVRVMTPDLRERLENLRKKPENIPQPISNTSQANLNKLLTDYTEMKKAILHVYWEEFQKDPVGLMSRVAQPASKKIDQNKLKPEMDEKGNLTTAGFACSQCGQPLFVYKLEQVSEKGKAYTNYFGRCNVAEHEKLILLYQLKPEKDSDEAVTYSLGKFGQRALDFYSIHVTKESTHPVKPLAQIAGNRYASGPVGKALSDACMGTIASFLSKYQDIIIEHQKVVKGNQKRLESLRELAGKENLEYPSVTLPPQPHTKEGVDAYNEVIARVRMWVNLNLWQKLKLSRDDAKPLLRLKGFPSFPLVERQANEVDWWDMVCNVKKLINEKKEDGKVFWQNLAGYKRQEALRPYLSSEEDRKKGKKFARYQLGDLLLHLEKKHGEDWGKVYDEAWERIDKKVEGLSKHIKLEEERRSEDAQSKAALTDWLRAKASFVIEGLKEADKDEFCRCELKLQKWYGDLRGKPFAIEAENSILDISGFSKQYNCAFIWQKDGVKKLNLYLIINYFKGGKLRFKKIKPEAFEANRFYTVINKKSGEIVPMEVNFNFDDPNLIILPLAFGKRQGREFIWNDLLSLETGSLKLANGRVIEKTLYNRRTRQDEPALFVALTFERREVLDSSNIKPMNLIGVDRGENIPAVIALTDPEGCPLSRFKDSLGNPTHILRIGESYKEKQRTIQAKKEVEQRRAGGYSRKYASKAKNLADDMVRNTARDLLYYAVTQDAMLIFENLSRGFGRQGKRTFMAERQYTRMEDWLTAKLAYEGLPSKTYLSKTLAQYTSKTCSNCGFTITSADYDRVLEKLKKTATGWMTTINGKELKVEGQITYYNRYKRQNVVKDLSVELDRLSEESVNNDISSWTKGRSGEALSLLKKRFSHRPVQEKFVCLNCGFETHADEQAALNIARSWLFLRSQEYKKYQTNKTTGNTDKRAFVETWQSFYRKKLKEVWKPAV

SEQ ID NO: 28370 - protein, 978 aa, synthetic construct
  REGION 1..978: note = engineered CasX variant
QEIKRINKIRRRLVKDSNTKKAGKTGPMKTLLVRVMTPDLRERLENLRKKPENIPQPISNTSQANLNKLLTDYTEMKKAILHVYWEEFQKDPVGLMSRVAQPASKKIDQNKLKPEMDEKGNLTTAGFACSQCGQPLFVYKLEQVSEKGKAYTNYFGRCNVAEHEKLILLSQLKPEKDSDEAVTYSLGKFGQRALDFYSIHVTKESTHPVKPLAQIAGNRYASGPVGKALSDACMGTIASFLSKYQDIIIEHQKVVKGNQKRLESLRELAGKENLEYPSVTLPPQPHTKEGVDAYNEVIARVRMWVNLNLWQKLKLSRDDAKPLLRLKGFPSFPLVERQANEVDWWDMVCNVKKLINEKKEDGKVFWQNLAGYKRQEALRPYLSSEEDRKKGKKFARYQLGDLLLHLEKKHGEDWGKVYDEAWERIDKKVEGLSKHIKLEEERRSEDAQSKAALTDWLRAKASFVIEGLKEADKDEFCRCELKLQKWYGDLRGKPFAIEAENSILDISGFSKQYNCAFIWQKDGVKKLNLYLIINYFKGGKLRFKKIKPEAFEANRFYTVINKKSGEIVPMEVNFNFDDPNLIILPLAFGKRQGREFIWNDLLSLETGSLKLANGRVIEKTLYNRRTRQDEPALFVALTFERREVLDSSNIKPMNLIGVDRGENIPAVIALTDPEGCPLSRFKDSLGNPTHILRIGESYKEKQRTIQAKKEVEQRRAGGYSRKYASKAKNLADDMVRNTARDLLYYAVTQDAMLIFENLSRGFGRQGKRTFMAERQYTRMEDWLTAKLAYEGLPSKTYLSKTLAQYTSKTCSNCGFTITSADYDRVLEKLKKTATGWMTTINGKELKVEGQITYYNRYKRQNVVKDLSVELDRLSEESVNNDISSWTKGRSGEALSLLKKRFSHRPVQEKFVCLNCGFETHADEQAALNIARSWLFLRSQEYKKYQTNKTTGNTDKRAFVETWQSFYRKKLKEVWKPAV

SEQ ID NO: 28371 - protein, 977 aa, synthetic construct
  REGION 1..977: note = engineered CasX variant
QEIKRINKIRRRLVKDSNTKKAGKTGPMKTLLVRVMTPDLRERLENLRKKPENIPQPISNTSQANLNKLLTDYTEMKKAILHVYWEEFQKDPVGLMSRVAQPASKKIDQNKLKPEMDEKGNLTTAGFACSQCGQPLFVYKLEQVSEKGKAYTNYFGRCNVAEHEKLILLAQLKPEKDSDEAVTYSLGKFGQRALDFYSIHVTKESTHPVKPLAQIAGNRYASPVGKALSDACMGTIASFLSKYQDIIIEHQKVVKGNQKRLESLRELAGKENLEYPSVTLPPQPHTKEGVDAYNEVIARVRMWVNLNLWQKLKLSRDDAKPLLRLKGFPSFPLVERQANEVDWWDMVCNVKKLINEKKEDGKVFWQNLAGYKRQEALRPYLSSEEDRKKGKKFARYQLGDLLLHLEKKHGEDWGKVYDEAWERIDKKVEGLSKHIKLEEERRSEDAQSKAALTDWLRAKASFVIEGLKEADKDEFCRCELKLQKWYGDLRGKPFAIEAENSILDISGFSKQYNCAFIWQKDGVKKLNLYLIINYFKGGKLRFKKIKPEAFEANRFYTVINKKSGEIVPMEVNFNFDDPNLIILPLAFGKRQGREFIWNDLLSLETGSLKLANGRVIEKTLYNRRTRQDEPALFVALTFERREVLDSSNIKPMNLIGVDRGENIPAVIALTDPEGCPLSRFKDSLGNPTHILRIGESYKEKQRTIQAKKEVEQRRAGGYSRKYASKAKNLADDMVRNTARDLLYYAVTQDAMLIFENLSRGFGRQGKRTFMAERQYTRMEDWLTAKLAYEGLPSKTYLSKTLAQYTSKTCSNCGFTITSADYDRVLEKLKKTATGWMTTINGKELKVEGQITYYNRYKRQNVVKDLSVELDRLSEESVNNDISSWTKGRSGEALSLLKKRFSHRPVQEKFVCLNCGFETHADEQAALNIARSWLFLRSQEYKKYQTNKTTGNTDKRAFVETWQSFYRKKLKEVWKPAV

SEQ ID NO: 28372 - protein, 978 aa, synthetic construct
  REGION 1..978: note = engineered CasX variant
QEIKRINKIRRRLVKDSNTKKAGKTGPMKTLLVRVMTPDLRERLENLRKKPENIPQPISNTSQANLNKLLTDYTEMKKAILHVYWEEFQKDPVGLMSRVAQPASKKIDQNKLKPEMDEKGNLTTAGFACSQCGQPLFVYKLEQVSEKGKAYTNYFGRCNVAEHEKLILLAQLKPEKDSDEAVTYSLGKFGQRALDFYSIHVTKESTHPVKPLAQIAGNRYASGPVGKALSDACMGTIASFLSKYQDIIIEHQKVVKGNQKRLESLRELAGKENLEYPSVTLPPQPHTSEGVDAYNEVIARVRMWVNLNLWQKLKLSRDDAKPLLRLKGFPSFPLVERQANEVDWWDMVCNVKKLINEKKEDGKVFWQNLAGYKRQEALRPYLSSEEDRKKGKKFARYQLGDLLLHLEKKHGEDWGKVYDEAWERIDKKVEGLSKHIKLEEERRSEDAQSKAALTDWLRAKASFVIEGLKEADKDEFCRCELKLQKWYGDLRGKPFAIEAENSILDISGFSKQYNCAFIWQKDGVKKLNLYLIINYFKGGKLRFKKIKPEAFEANRFYTVINKKSGEIVPMEVNFNFDDPNLIILPLAFGKRQGREFIWNDLLSLETGSLKLANGRVIEKTLYNRRTRQDEPALFVALTFERREVLDSSNIKPMNLIGVDRGENIPAVIALTDPEGCPLSRFKDSLGNPTHILRIGESYKEKQRTIQAKKEVEQRRAGGYSRKYASKAKNLADDMVRNTARDLLYYAVTQDAMLIFENLSRGFGRQGKRTFMAERQYTRMEDWLTAKLAYEGLPSKTYLSKTLAQYTSKTCSNCGFTITSADYDRVLEKLKKTATGWMTTINGKELKVEGQITYYNRYKRQNVVKDLSVELDRLSEESVNNDISSWTKGRSGEALSLLKKRFSHRPVQEKFVCLNCGFETHADEQAALNIARSWLFLRSQEYKKYQTNKTTGNTDKRAFVETWQSFYRKKLKEVWKPAV

SEQ ID NO: 28373 - protein, 978 aa, synthetic construct
  REGION 1..978: note = engineered CasX variant
QEIKRINKIRRRLVKDSNTKKAGKTGPMKTLLVRVMTPDLRERLENLRKKPENIPQPISNTSQANLNKLLTDYTEMKKAILHVYWEEFQKDPVGLMSRVAQPASKKIDQNKLKPEMDEKGNLTTAGFACSQCGQPLFVYKLEQVSEKGKAYTNYFGRCNVAEHEKLILLAQLKPEKDSDEAVTYSLGKFGQRALDFYSIHVTKESTHPVKPLAQIAGNRYASGPVGKALSDACMGTIASFLSKYQDIIIEHQKVVKGNQKRLESLRELAGKENLEYPSVTLPPQPHTKEGLDAYNEVIARVRMWVNLNLWQKLKLSRDDAKPLLRLKGFPSFPLVERQANEVDWWDMVCNVKKLINEKKEDGKVFWQNLAGYKRQEALRPYLSSEEDRKKGKKFARYQLGDLLLHLEKKHGEDWGKVYDEAWERIDKKVEGLSKHIKLEEERRSEDAQSKAALTDWLRAKASFVIEGLKEADKDEFCRCELKLQKWYGDLRGKPFAIEAENSILDISGFSKQYNCAFIWQKDGVKKLNLYLIINYFKGGKLRFKKIKPEAFEANRFYTVINKKSGEIVPMEVNFNFDDPNLIILPLAFGKRQGREFIWNDLLSLETGSLKLANGRVIEKTLYNRRTRQDEPALFVALTFERREVLDSSNIKPMNLIGVDRGENIPAVIALTDPEGCPLSRFKDSLGNPTHILRIGESYKEKQRTIQAKKEVEQRRAGGYSRKYASKAKNLADDMVRNTARDLLYYAVTQDAMLIFENLSRGFGRQGKRTFMAERQYTRMEDWLTAKLAYEGLPSKTYLSKTLAQYTSKTCSNCGFTITSADYDRVLEKLKKTATGWMTTINGKELKVEGQITYYNRYKRQNVVKDLSVELDRLSEESVNNDISSWTKGRSGEALSLLKKRFSHRPVQEKFVCLNCGFETHADEQAALNIARSWLFLRSQEYKKYQTNKTTGNTDKRAFVETWQSFYRKKLKEVWKPAV

SEQ ID NO: 28374 - protein, 978 aa, synthetic construct
  REGION 1..978: note = engineered CasX variant
QEIKRINKIRRRLVKDSNTKKAGKTGPMKTLLVRVMTPDLRERLENLRKKPENIPQPISNTSQANLNKLLTDYTEMKKAILHVYWEEFQKDPVGLMSRVAQPASKKIDQNKLKPEMDEKGNLTTAGFACSQCGQPLFVYKLEQVSEKGKAYTNYFGRCNVAEHEKLILLAQLKPEKDSDEAVTYSLGKFGQRALDFYSIHVTKESTHPVKPLAQIAGNRYASGPVGKALSDACMGTIASFLSKYQDIIIEHQKVVKGNQKRLESLRELAGKENLEYPSVTLPPQPHTKEGVDAYNEVIARVRTWVNLNLWQKLKLSRDDAKPLLRLKGFPSFPLVERQANEVDWWDMVCNVKKLINEKKEDGKVFWQNLAGYKRQEALRPYLSSEEDRKKGKKFARYQLGDLLLHLEKKHGEDWGKVYDEAWERIDKKVEGLSKHIKLEEERRSEDAQSKAALTDWLRAKASFVIEGLKEADKDEFCRCELKLQKWYGDLRGKPFAIEAENSILDISGFSKQYNCAFIWQKDGVKKLNLYLIINYFKGGKLRFKKIKPEAFEANRFYTVINKKSGEIVPMEVNFNFDDPNLIILPLAFGKRQGREFIWNDLLSLETGSLKLANGRVIEKTLYNRRTRQDEPALFVALTFERREVLDSSNIKPMNLIGVDRGENIPAVIALTDPEGCPLSRFKDSLGNPTHILRIGESYKEKQRTIQAKKEVEQRRAGGYSRKYASKAKNLADDMVRNTARDLLYYAVTQDAMLIFENLSRGFGRQGKRTFMAERQYTRMEDWLTAKLAYEGLPSKTYLSKTLAQYTSKTCSNCGFTITSADYDRVLEKLKKTATGWMTTINGKELKVEGQITYYNRYKRQNVVKDLSVELDRLSEESVNNDISSWTKGRSGEALSLLKKRFSHRPVQEKFVCLNCGFETHADEQAALNIARSWLFLRSQEYKKYQTNKTTGNTDKRAFVETWQSFYRKKLKEVWKPAV

SEQ ID NO: 28375 - protein, 978 aa, synthetic construct
  REGION 1..978: note = engineered CasX variant
QEIKRINKIRRRLVKDSNTKKAGKTGPMKTLLVRVMTPDLRERLENLRKKPENIPQPISNTSQANLNKLLTDYTEMKKAILHVYWEEFQKDPVGLMSRVAQPASKKIDQNKLKPEMDEKGNLTTAGFACSQCGQPLFVYKLEQVSEKGKAYTNYFGRCNVAEHEKLILLAQLKPEKDSDEAVTYSLGKFGQRALDFYSIHVTKESTHPVKPLAQIAGNRYASGPVGKALSDACMGTIASFLSKYQDIIIEHQKVVKGNQKRLESLRELAGKENLEYPSVTLPPQPHTKEGVDAYNEVIARVRWWVNLNLWQKLKLSRDDAKPLLRLKGFPSFPLVERQANEVDWWDMVCNVKKLINEKKEDGKVFWQNLAGYKRQEALRPYLSSEEDRKKGKKFARYQLGDLLLHLEKKHGEDWGKVYDEAWERIDKKVEGLSKHIKLEEERRSEDAQSKAALTDWLRAKASFVIEGLKEADKDEFCRCELKLQKWYGDLRGKPFAIEAENSILDISGFSKQYNCAFIWQKDGVKKLNLYLIINYFKGGKLRFKKIKPEAFEANRFYTVINKKSGEIVPMEVNFNFDDPNLIILPLAFGKRQGREFIWNDLLSLETGSLKLANGRVIEKTLYNRRTRQDEPALFVALTFERREVLDSSNIKPMNLIGVDRGENIPAVIALTDPEGCPLSRFKDSLGNPTHILRIGESYKEKQRTIQAKKEVEQRRAGGYSRKYASKAKNLADDMVRNTARDLLYYAVTQDAMLIFENLSRGFGRQGKRTFMAERQYTRMEDWLTAKLAYEGLPSKTYLSKTLAQYTSKTCSNCGFTITSADYDRVLEKLKKTATGWMTTINGKELKVEGQITYYNRYKRQNVVKDLSVELDRLSEESVNNDISSWTKGRSGEALSLLKKRFSHRPVQEKFVCLNCGFETHADEQAALNIARSWLFLRSQEYKKYQTNKTTGNTDKRAFVETWQSFYRKKLKEVWKPAV

SEQ ID NO: 28376 - protein, 979 aa, synthetic construct
  REGION 1..979: note = engineered CasX variant
QEIKRINKIRRRLVKDSNTKKAGKTGPMKTLLVRVMTPDLRERLENLRKKPENIPQPISNTSQANLNKLLTDYTEMKKAILHVYWEEFQKDPVGLMSRVAQPASKKIDQNKLKPEMDEKGNLTTAGFACSQCGQPLFVYKLEQVSEKGKAYTNYFGRCNVAEHEKLILLAQLKPEKDSDEAVTYSLGKFGQRALDFYSIHVTKESTHPVKPLAQIAGNRYASGPVGKALSDACMGTIASFLSKYQDIIIEHQKVVKGNQKRLESLRELAGKENLEYPSVTLPPQPHTKEGVDAYNEVIARVRMWVNLNLWQKLKLSRDDAKPLLRLKGFPSFPLVERQQANEVDWWDMVCNVKKLINEKKEDGKVFWQNLAGYKRQEALRPYLSSEEDRKKGKKFARYQLGDLLLHLEKKHGEDWGKVYDEAWERIDKKVEGLSKHIKLEEERRSEDAQSKAALTDWLRAKASFVIEGLKEADKDEFCRCELKLQKWYGDLRGKPFAIEAENSILDISGFSKQYNCAFIWQKDGVKKLNLYLIINYFKGGKLRFKKIKPEAFEANRFYTVINKKSGEIVPMEVNFNFDDPNLIILPLAFGKRQGREFIWNDLLSLETGSLKLANGRVIEKTLYNRRTRQDEPALFVALTFERREVLDSSNIKPMNLIGVDRGENIPAVIALTDPEGCPLSRFKDSLGNPTHILRIGESYKEKQRTIQAKKEVEQRRAGGYSRKYASKAKNLADDMVRNTARDLLYYAVTQDAMLIFENLSRGFGRQGKRTFMAERQYTRMEDWLTAKLAYEGLPSKTYLSKTLAQYTSKTCSNCGFTITSADYDRVLEKLKKTATGWMTTINGKELKVEGQITYYNRYKRQNVVKDLSVELDRLSEESVNNDISSWTKGRSGEALSLLKKRFSHRPVQEKFVCLNCGFETHADEQAALNIARSWLFLRSQEYKKYQTNKTTGNTDKRAFVETWQSFYRKKLKEVWKPAV

SEQ ID NO: 28377 - protein, 979 aa, synthetic construct
  REGION 1..979: note = engineered CasX variant
QEIKRINKIRRRLVKDSNTKKAGKTGPMKTLLVRVMTPDLRERLENLRKKPENIPQPISNTSQANLNKLLTDYTEMKKAILHVYWEEFQKDPVGLMSRVAQPASKKIDQNKLKPEMDEKGNLTTAGFACSQCGQPLFVYKLEQVSEKGKAYTNYFGRCNVAEHEKLILLAQLKPEKDSDEAVTYSLGKFGQRALDFYSIHVTKESTHPVKPLAQIAGNRYASGPVGKALSDACMGTIASFLSKYQDIIIEHQKVVKGNQKRLESLRELAGKENLEYPSVTLPPQPHTKEGVDAYNEVIARVRMWVNLNLWQKLKLSRDDAKPLLRLKGFPSFPLVERQANAEVDWWDMVCNVKKLINEKKEDGKVFWQNLAGYKRQEALRPYLSSEEDRKKGKKFARYQLGDLLLHLEKKHGEDWGKVYDEAWERIDKKVEGLSKHIKLEEERRSEDAQSKAALTDWLRAKASFVIEGLKEADKDEFCRCELKLQKWYGDLRGKPFAIEAENSILDISGFSKQYNCAFIWQKDGVKKLNLYLIINYFKGGKLRFKKIKPEAFEANRFYTVINKKSGEIVPMEVNFNFDDPNLIILPLAFGKRQGREFIWNDLLSLETGSLKLANGRVIEKTLYNRRTRQDEPALFVALTFERREVLDSSNIKPMNLIGVDRGENIPAVIALTDPEGCPLSRFKDSLGNPTHILRIGESYKEKQRTIQAKKEVEQRRAGGYSRKYASKAKNLADDMVRNTARDLLYYAVTQDAMLIFENLSRGFGRQGKRTFMAERQYTRMEDWLTAKLAYEGLPSKTYLSKTLAQYTSKTCSNCGFTITSADYDRVLEKLKKTATGWMTTINGKELKVEGQITYYNRYKRQNVVKDLSVELDRLSEESVNNDISSWTKGRSGEALSLLKKRFSHRPVQEKFVCLNCGFETHADEQAALNIARSWLFLRSQEYKKYQTNKTTGNTDKRAFVETWQSFYRKKLKEVWKPAV

SEQ ID NO: 28378 - protein, 978 aa, synthetic construct
  REGION 1..978: note = engineered CasX variant
QEIKRINKIRRRLVKDSNTKKAGKTGPMKTLLVRVMTPDLRERLENLRKKPENIPQPISNTSQANLNKLLTDYTEMKKAILHVYWEEFQKDPVGLMSRVAQPASKKIDQNKLKPEMDEKGNLTTAGFACSQCGQPLFVYKLEQVSEKGKAYTNYFGRCNVAEHEKLILLAQLKPEKDSDEAVTYSLGKFGQRALDFYSIHVTKESTHPVKPLAQIAGNRYASGPVGKALSDACMGTIASFLSKYQDIIIEHQKVVKGNQKRLESLRELAGKENLEYPSVTLPPQPHTKEGVDAYNEVIARVRMWVNLNLWQKLKLSRDDAKPLLRLKGFPSFPLVERQANEVDWWDMVCNVKKLINEKKEDGKVFWQNLAGYKRQEALRPYLSSEEDRKKGKKFARTQLGDLLLHLEKKHGEDWGKVYDEAWERIDKKVEGLSKHIKLEEERRSEDAQSKAALTDWLRAKASFVIEGLKEADKDEFCRCELKLQKWYGDLRGKPFAIEAENSILDISGFSKQYNCAFIWQKDGVKKLNLYLIINYFKGGKLRFKKIKPEAFEANRFYTVINKKSGEIVPMEVNFNFDDPNLIILPLAFGKRQGREFIWNDLLSLETGSLKLANGRVIEKTLYNRRTRQDEPALFVALTFERREVLDSSNIKPMNLIGVDRGENIPAVIALTDPEGCPLSRFKDSLGNPTHILRIGESYKEKQRTIQAKKEVEQRRAGGYSRKYASKAKNLADDMVRNTARDLLYYAVTQDAMLIFENLSRGFGRQGKRTFMAERQYTRMEDWLTAKLAYEGLPSKTYLSKTLAQYTSKTCSNCGFTITSADYDRVLEKLKKTATGWMTTINGKELKVEGQITYYNRYKRQNVVKDLSVELDRLSEESVNNDISSWTKGRSGEALSLLKKRFSHRPVQEKFVCLNCGFETHADEQAALNIARSWLFLRSQEYKKYQTNKTTGNTDKRAFVETWQSFYRKKLKEVWKPAV

SEQ ID NO: 28379 - protein, 979 aa, synthetic construct
  REGION 1..979: note = engineered CasX variant
QEIKRINKIRRRLVKDSNTKKAGKTGPMKTLLVRVMTPDLRERLENLRKKPENIPQPISNTSQANLNKLLTDYTEMKKAILHVYWEEFQKDPVGLMSRVAQPASKKIDQNKLKPEMDEKGNLTTAGFACSQCGQPLFVYKLEQVSEKGKAYTNYFGRCNVAEHEKLILLAQLKPEKDSDEAVTYSLGKFGQRALDFYSIHVTKESTHPVKPLAQIAGNRYASGPVGKALSDACMGTIASFLSKYQDIIIEHQKVVKGNQKRLESLRELAGKENLEYPSVTLPPQPHTKEGVDAYNEVIARVRMWVNLNLWQKLKLSRDDAKPLLRLKGFPSFPLVERQANEVDWWDMVCNVKKLINEKKEDGKVFWQNLAGYKRQEALRPYLSSEEDRKKGKKFARYQLGDLLLHLEKKHEGEDWGKVYDEAWERIDKKVEGLSKHIKLEEERRSEDAQSKAALTDWLRAKASFVIEGLKEADKDEFCRCELKLQKWYGDLRGKPFAIEAENSILDISGFSKQYNCAFIWQKDGVKKLNLYLIINYFKGGKLRFKKIKPEAFEANRFYTVINKKSGEIVPMEVNFNFDDPNLIILPLAFGKRQGREFIWNDLLSLETGSLKLANGRVIEKTLYNRRTRQDEPALFVALTFERREVLDSSNIKPMNLIGVDRGENIPAVIALTDPEGCPLSRFKDSLGNPTHILRIGESYKEKQRTIQAKKEVEQRRAGGYSRKYASKAKNLADDMVRNTARDLLYYAVTQDAMLIFENLSRGFGRQGKRTFMAERQYTRMEDWLTAKLAYEGLPSKTYLSKTLAQYTSKTCSNCGFTITSADYDRVLEKLKKTATGWMTTINGKELKVEGQITYYNRYKRQNVVKDLSVELDRLSEESVNNDISSWTKGRSGEALSLLKKRFSHRPVQEKFVCLNCGFETHADEQAALNIARSWLFLRSQEYKKYQTNKTTGNTDKRAFVETWQSFYRKKLKEVWKPAV

SEQ ID NO: 28380 - protein, 978 aa, synthetic construct
  REGION 1..978: note = engineered CasX variant
QEIKRINKIRRRLVKDSNTKKAGKTGPMKTLLVRVMTPDLRERLENLRKKPENIPQPISNTSQANLNKLLTDYTEMKKAILHVYWEEFQKDPVGLMSRVAQPASKKIDQNKLKPEMDEKGNLTTAGFACSQCGQPLFVYKLEQVSEKGKAYTNYFGRCNVAEHEKLILLAQLKPEKDSDEAVTYSLGKFGQRALDFYSIHVTKESTHPVKPLAQIAGNRYASGPVGKALSDACMGTIASFLSKYQDIIIEHQKVVKGNQKRLESLRELAGKENLEYPSVTLPPQPHTKEGVDAYNEVIARVRMWVNLNLWQKLKLSRDDAKPLLRLKGFPSFPLVERQANEVDWWDMVCNVKKLINEKKEDGKVFWQNLAGYKRQEALRPYLSSEEDRKKGKKFARYQLGDLLLHLEKKHGEDWGKVYDEAWERIDKKVEGLSKHIKLEEERRSEDAQSKAALTDWLRAKASFVIEGLKEADKDEFCRCDLKLQKWYGDLRGKPFAIEAENSILDISGFSKQYNCAFIWQKDGVKKLNLYLIINYFKGGKLRFKKIKPEAFEANRFYTVINKKSGEIVPMEVNFNFDDPNLIILPLAFGKRQGREFIWNDLLSLETGSLKLANGRVIEKTLYNRRTRQDEPALFVALTFERREVLDSSNIKPMNLIGVDRGENIPAVIALTDPEGCPLSRFKDSLGNPTHILRIGESYKEKQRTIQAKKEVEQRRAGGYSRKYASKAKNLADDMVRNTARDLLYYAVTQDAMLIFENLSRGFGRQGKRTFMAERQYTRMEDWLTAKLAYEGLPSKTYLSKTLAQYTSKTCSNCGFTITSADYDRVLEKLKKTATGWMTTINGKELKVEGQITYYNRYKRQNVVKDLSVELDRLSEESVNNDISSWTKGRSGEALSLLKKRFSHRPVQEKFVCLNCGFETHADEQAALNIARSWLFLRSQEYKKYQTNKTTGNTDKRAFVETWQSFYRKKLKEVWKPAV

SEQ ID NO: 28381 - protein, 978 aa, synthetic construct
  REGION 1..978: note = engineered CasX variant
QEIKRINKIRRRLVKDSNTKKAGKTGPMKTLLVRVMTPDLRERLENLRKKPENIPQPISNTSQANLNKLLTDYTEMKKAILHVYWEEFQKDPVGLMSRVAQPASKKIDQNKLKPEMDEKGNLTTAGFACSQCGQPLFVYKLEQVSEKGKAYTNYFGRCNVAEHEKLILLAQLKPEKDSDEAVTYSLGKFGQRALDFYSIHVTKESTHPVKPLAQIAGNRYASGPVGKALSDACMGTIASFLSKYQDIIIEHQKVVKGNQKRLESLRELAGKENLEYPSVTLPPQPHTKEGVDAYNEVIARVRMWVNLNLWQKLKLSRDDAKPLLRLKGFPSFPLVERQANEVDWWDMVCNVKKLINEKKEDGKVFWQNLAGYKRQEALRPYLSSEEDRKKGKKFARYQLGDLLLHLEKKHGEDWGKVYDEAWERIDKKVEGLSKHIKLEEERRSEDAQSKAALTDWLRAKASFVIEGLKEADKDEFCRCELKLQKWYGDLRGKPFAIEAENSILDISGFSKQYNCAFIWQKDGVKKLNLYLIINYFKGGKLRFKKIKPEAFEANRFYTVINKKSGEIVPMEVNFNFDDPNLIILPLAFGKRFGREFIWNDLLSLETGSLKLANGRVIEKTLYNRRTRQDEPALFVALTFERREVLDSSNIKPMNLIGVDRGENIPAVIALTDPEGCPLSRFKDSLGNPTHILRIGESYKEKQRTIQAKKEVEQRRAGGYSRKYASKAKNLADDMVRNTARDLLYYAVTQDAMLIFENLSRGFGRQGKRTFMAERQYTRMEDWLTAKLAYEGLPSKTYLSKTLAQYTSKTCSNCGFTITSADYDRVLEKLKKTATGWMTTINGKELKVEGQITYYNRYKRQNVVKDLSVELDRLSEESVNNDISSWTKGRSGEALSLLKKRFSHRPVQEKFVCLNCGFETHADEQAALNIARSWLFLRSQEYKKYQTNKTTGNTDKRAFVETWQSFYRKKLKEVWKPAV

SEQ ID NO: 28382 - protein, 978 aa, synthetic construct
  REGION 1..978: note = engineered CasX variant
QEIKRINKIRRRLVKDSNTKKAGKTGPMKTLLVRVMTPDLRERLENLRKKPENIPQPISNTSQANLNKLLTDYTEMKKAILHVYWEEFQKDPVGLMSRVAQPASKKIDQNKLKPEMDEKGNLTTAGFACSQCGQPLFVYKLEQVSEKGKAYTNYFGRCNVAEHEKLILLAQLKPEKDSDEAVTYSLGKFGQRALDFYSIHVTKESTHPVKPLAQIAGNRYASGPVGKALSDACMGTIASFLSKYQDIIIEHQKVVKGNQKRLESLRELAGKENLEYPSVTLPPQPHTKEGVDAYNEVIARVRMWVNLNLWQKLKLSRDDAKPLLRLKGFPSFPLVERQANEVDWWDMVCNVKKLINEKKEDGKVFWQNLAGYKRQEALRPYLSSEEDRKKGKKFARYQLGDLLLHLEKKHGEDWGKVYDEAWERIDKKVEGLSKHIKLEEERRSEDAQSKAALTDWLRAKASFVIEGLKEADKDEFCRCELKLQKWYGDLRGKPFAIEAENSILDISGFSKQYNCAFIWQKDGVKKLNLYLIINYFKGGKLRFKKIKPEAFEANRFYTVINKKSGEIVPMEVNFNFDDPNLIILPLAFGKRVGREFIWNDLLSLETGSLKLANGRVIEKTLYNRRTRQDEPALFVALTFERREVLDSSNIKPMNLIGVDRGENIPAVIALTDPEGCPLSRFKDSLGNPTHILRIGESYKEKQRTIQAKKEVEQRRAGGYSRKYASKAKNLADDMVRNTARDLLYYAVTQDAMLIFENLSRGFGRQGKRTFMAERQYTRMEDWLTAKLAYEGLPSKTYLSKTLAQYTSKTCSNCGFTITSADYDRVLEKLKKTATGWMTTINGKELKVEGQITYYNRYKRQNVVKDLSVELDRLSEESVNNDISSWTKGRSGEALSLLKKRFSHRPVQEKFVCLNCGFETHADEQAALNIARSWLFLRSQEYKKYQTNKTTGNTDKRAFVETWQSFYRKKLKEVWKPAV

SEQ ID NO: 28383 - protein, 979 aa, synthetic construct
  REGION 1..979: note = engineered CasX variant
QEIKRINKIRRRLVKDSNTKKAGKTGPMKTLLVRVMTPDLRERLENLRKKPENIPQPISNTSQANLNKLLTDYTEMKKAILHVYWEEFQKDPVGLMSRVAQPASKKIDQNKLKPEMDEKGNLTTAGFACSQCGQPLFVYKLEQVSEKGKAYTNYFGRCNVAEHEKLILLAQLKPEKDSDEAVTYSLGKFGQRALDFYSIHVTKESTHPVKPLAQIAGNRYASGPVGKALSDACMGTIASFLSKYQDIIIEHQKVVKGNQKRLESLRELAGKENLEYPSVTLPPQPHTKEGVDAYNEVIARVRMWVNLNLWQKLKLSRDDAKPLLRLKGFPSFPLVERQANEVDWWDMVCNVKKLINEKKEDGKVFWQNLAGYKRQEALRPYLSSEEDRKKGKKFARYQLGDLLLHLEKKHGEDWGKVYDEAWERIDKKVEGLSKHIKLEEERRSEDAQSKAALTDWLRAKASFVIEGLKEADKDEFCRCELKLQKWYGDLRGKPFAIEAENSILDISGFSKQYNCAFIWQKDGVKKLNLYLIINYFKGGKLRFKKIKPEAFEANRFYTVINKKSGEIVPMEVNFNFDDPNLIILPLAFGKRQGREFIWNDLLSLETGSLKLANGRVIEKTLYNRRTRQDEPALFVALTFERREVLDSSNIKTPMNLIGVDRGENIPAVIALTDPEGCPLSRFKDSLGNPTHILRIGESYKEKQRTIQAKKEVEQRRAGGYSRKYASKAKNLADDMVRNTARDLLYYAVTQDAMLIFENLSRGFGRQGKRTFMAERQYTRMEDWLTAKLAYEGLPSKTYLSKTLAQYTSKTCSNCGFTITSADYDRVLEKLKKTATGWMTTINGKELKVEGQITYYNRYKRQNVVKDLSVELDRLSEESVNNDISSWTKGRSGEALSLLKKRFSHRPVQEKFVCLNCGFETHADEQAALNIARSWLFLRSQEYKKYQTNKTTGNTDKRAFVETWQSFYRKKLKEVWKPAV

SEQ ID NO: 28384 - protein, 979 aa, synthetic construct
  REGION 1..979: note = engineered CasX variant
QEIKRINKIRRRLVKDSNTKKAGKTGPMKTLLVRVMTPDLRERLENLRKKPENIPQPISNTSQANLNKLLTDYTEMKKAILHVYWEEFQKDPVGLMSRVAQPASKKIDQNKLKPEMDEKGNLTTAGFACSQCGQPLFVYKLEQVSEKGKAYTNYFGRCNVAEHEKLILLAQLKPEKDSDEAVTYSLGKFGQRALDFYSIHVTKESTHPVKPLAQIAGNRYASGPVGKALSDACMGTIASFLSKYQDIIIEHQKVVKGNQKRLESLRELAGKENLEYPSVTLPPQPHTKEGVDAYNEVIARVRMWVNLNLWQKLKLSRDDAKPLLRLKGFPSFPLVERQANEVDWWDMVCNVKKLINEKKEDGKVFWQNLAGYKRQEALRPYLSSEEDRKKGKKFARYQLGDLLLHLEKKHGEDWGKVYDEAWERIDKKVEGLSKHIKLEEERRSEDAQSKAALTDWLRAKASFVIEGLKEADKDEFCRCELKLQKWYGDLRGKPFAIEAENSILDISGFSKQYNCAFIWQKDGVKKLNLYLIINYFKGGKLRFKKIKPEAFEANRFYTVINKKSGEIVPMEVNFNFDDPNLIILPLAFGKRQGREFIWNDLLSLETGSLKLANGRVIEKTLYNRRTRQDEPALFVALTFERREVLDSSNIKPMSNLIGVDRGENIPAVIALTDPEGCPLSRFKDSLGNPTHILRIGESYKEKQRTIQAKKEVEQRRAGGYSRKYASKAKNLADDMVRNTARDLLYYAVTQDAMLIFENLSRGFGRQGKRTFMAERQYTRMEDWLTAKLAYEGLPSKTYLSKTLAQYTSKTCSNCGFTITSADYDRVLEKLKKTATGWMTTINGKELKVEGQITYYNRYKRQNVVKDLSVELDRLSEESVNNDISSWTKGRSGEALSLLKKRFSHRPVQEKFVCLNCGFETHADEQAALNIARSWLFLRSQEYKKYQTNKTTGNTDKRAFVETWQSFYRKKLKEVWKPAV

SEQ ID NO: 28385 - protein, 978 aa, synthetic construct
  REGION 1..978: note = engineered CasX variant
QEIKRINKIRRRLVKDSNTKKAGKTGPMKTLLVRVMTPDLRERLENLRKKPENIPQPISNTSQANLNKLLTDYTEMKKAILHVYWEEFQKDPVGLMSRVAQPASKKIDQNKLKPEMDEKGNLTTAGFACSQCGQPLFVYKLEQVSEKGKAYTNYFGRCNVAEHEKLILLAQLKPEKDSDEAVTYSLGKFGQRALDFYSIHVTKESTHPVKPLAQIAGNRYASGPVGKALSDACMGTIASFLSKYQDIIIEHQKVVKGNQKRLESLRELAGKENLEYPSVTLPPQPHTKEGVDAYNEVIARVRMWVNLNLWQKLKLSRDDAKPLLRLKGFPSFPLVERQANEVDWWDMVCNVKKLINEKKEDGKVFWQNLAGYKRQEALRPYLSSEEDRKKGKKFARYQLGDLLLHLEKKHGEDWGKVYDEAWERIDKKVEGLSKHIKLEEERRSEDAQSKAALTDWLRAKASFVIEGLKEADKDEFCRCELKLQKWYGDLRGKPFAIEAENSILDISGFSKQYNCAFIWQKDGVKKLNLYLIINYFKGGKLRFKKIKPEAFEANRFYTVINKKSGEIVPMEVNFNFDDPNLIILPLAFGKRQGREFIWNDLLSLETGSLKLANGRVIEKTLYNRRTRQDEPALFVALTFERREVLDSSNIKPMNLIGVDRGENIPAVIALTDPEGCPLSRFKDSLGNPTHILRIRESYKEKQRTIQAKKEVEQRRAGGYSRKYASKAKNLADDMVRNTARDLLYYAVTQDAMLIFENLSRGFGRQGKRTFMAERQYTRMEDWLTAKLAYEGLPSKTYLSKTLAQYTSKTCSNCGFTITSADYDRVLEKLKKTATGWMTTINGKELKVEGQITYYNRYKRQNVVKDLSVELDRLSEESVNNDISSWTKGRSGEALSLLKKRFSHRPVQEKFVCLNCGFETHADEQAALNIARSWLFLRSQEYKKYQTNKTTGNTDKRAFVETWQSFYRKKLKEVWKPAV

SEQ ID NO: 28386 - protein, 978 aa, synthetic construct
  REGION 1..978: note = engineered CasX variant
QEIKRINKIRRRLVKDSNTKKAGKTGPMKTLLVRVMTPDLRERLENLRKKPENIPQPISNTSQANLNKLLTDYTEMKKAILHVYWEEFQKDPVGLMSRVAQPASKKIDQNKLKPEMDEKGNLTTAGFACSQCGQPLFVYKLEQVSEKGKAYTNYFGRCNVAEHEKLILLAQLKPEKDSDEAVTYSLGKFGQRALDFYSIHVTKESTHPVKPLAQIAGNRYASGPVGKALSDACMGTIASFLSKYQDIIIEHQKVVKGNQKRLESLRELAGKENLEYPSVTLPPQPHTKEGVDAYNEVIARVRMWVNLNLWQKLKLSRDDAKPLLRLKGFPSFPLVERQANEVDWWDMVCNVKKLINEKKEDGKVFWQNLAGYKRQEALRPYLSSEEDRKKGKKFARYQLGDLLLHLEKKHGEDWGKVYDEAWERIDKKVEGLSKHIKLEEERRSEDAQSKAALTDWLRAKASFVIEGLKEADKDEFCRCELKLQKWYGDLRGKPFAIEAENSILDISGFSKQYNCAFIWQKDGVKKLNLYLIINYFKGGKLRFKKIKPEAFEANRFYTVINKKSGEIVPMEVNFNFDDPNLIILPLAFGKRQGREFIWNDLLSLETGSLKLANGRVIEKTLYNRRTRQDEPALFVALTFERREVLDSSNIKPMNLIGVDRGENIPAVIALTDPEGCPLSRFKDSLGNPTHILRIGESYKEKQRTIQAKKEVEQRRAGGYSRKYASKAKNLADDMVRNTARDLLYYAVTQDAMLIFENLSRGFGRQGKRTFSAERQYTRMEDWLTAKLAYEGLPSKTYLSKTLAQYTSKTCSNCGFTITSADYDRVLEKLKKTATGWMTTINGKELKVEGQITYYNRYKRQNVVKDLSVELDRLSEESVNNDISSWTKGRSGEALSLLKKRFSHRPVQEKFVCLNCGFETHADEQAALNIARSWLFLRSQEYKKYQTNKTTGNTDKRAFVETWQSFYRKKLKEVWKPAV

SEQ ID NO: 28387 - protein, 978 aa, synthetic construct
  REGION 1..978: note = engineered CasX variant
QEIKRINKIRRRLVKDSNTKKAGKTGPMKTLLVRVMTPDLRERLENLRKKPENIPQPISNTSQANLNKLLTDYTEMKKAILHVYWEEFQKDPVGLMSRVAQPASKKIDQNKLKPEMDEKGNLTTAGFACSQCGQPLFVYKLEQVSEKGKAYTNYFGRCNVAEHEKLILLAQLKPEKDSDEAVTYSLGKFGQRALDFYSIHVTKESTHPVKPLAQIAGNRYASGPVGKALSDACMGTIASFLSKYQDIIIEHQKVVKGNQKRLESLRELAGKENLEYPSVTLPPQPHTKEGVDAYNEVIARVRMWVNLNLWQKLKLSRDDAKPLLRLKGFPSFPLVERQANEVDWWDMVCNVKKLINEKKEDGKVFWQNLAGYKRQEALRPYLSSEEDRKKGKKFARYQLGDLLLHLEKKHGEDWGKVYDEAWERIDKKVEGLSKHIKLEEERRSEDAQSKAALTDWLRAKASFVIEGLKEADKDEFCRCELKLQKWYGDLRGKPFAIEAENSILDISGFSKQYNCAFIWQKDGVKKLNLYLIINYFKGGKLRFKKIKPEAFEANRFYTVINKKSGEIVPMEVNFNFDDPNLIILPLAFGKRQGREFIWNDLLSLETGSLKLANGRVIEKTLYNRRTRQDEPALFVALTFERREVLDSSNIKPMNLIGVDRGENIPAVIALTDPEGCPLSRFKDSLGNPTHILRIGESYKEKQRTIQAKKEVEQRRAGGYSRKYASKAKNLADDMVRNTARDLLYYAVTQDAMLIFENLSRGFGRQGKRTFMAERQYTRMEDWLTAKLAYEGLPSKTYLSKTLAQYTSKTCSNCGFTITSADYDRVLEKLKKTATGWMTTINGKELKVEGQITYYNRYKRQNVVKDLSVELDRLSEESVNNDISSWDKGRSGEALSLLKKRFSHRPVQEKFVCLNCGFETHADEQAALNIARSWLFLRSQEYKKYQTNKTTGNTDKRAFVETWQSFYRKKLKEVWKPAV

SEQ ID NO: 28388 - protein, 978 aa, synthetic construct
  REGION 1..978: note = engineered CasX variant
QEIKRINKIRRRLVKDSNTKKAGKTGPMKTLLVRVMTPDLRERLENLRKKPENIPQPISNTSQANLNKLLTDYTEMKKAILHVYWEEFQVDPVGLMSRVAQPASKKIDQNKLKPEMDEKGNLTTAGFACSQCGQPLFVYKLEQVSEKGKAYTNYFGRCNVAEHEKLILLAQLKPEKDSDEAVTYSLGKFGQRALDFYSIHVTKESTHPVKPLAQIAGNRYASGPVGKALSDACMGTIASFLSKYQDIIIEHQKVVKGNQKRLESLRELAGKENLEYPSVTLPPQPHTKEGVDAYNEVIARVRMWVNLNLWQKLKLSRDDAKPLLRLKGFPSFPLVERQANEVDWWDMVCNVKKLINEKKEDGKVFWQNLAGYKRQEALRPYLSSEEDRKKGKKFARYQLGDLLLHLEKKHGEDWGKVYDEAWERIDKKVEGLSKHIKLEEERRSEDAQSKAALTDWLRAKASFVIEGLKEADKDEFCRCELKLQKWYGDLRGKPFAIEAENSILDISGFSKQYNCAFIWQKDGVKKLNLYLIINYFKGGKLRFKKIKPEAFEANRFYTVINKKSGEIVPMEVNFNFDDPNLIILPLAFGKRQGREFIWNDLLSLETGSLKLANGRVIEKTLYNRRTRQDEPALFVALTFERREVLDSSNIKPMNLIGVDRGENIPAVIALTDPEGCPLSRFKDSLGNPTHILRIGESYKEKQRTIQAKKEVEQRRAGGYSRKYASKAKNLADDMVRNTARDLLYYAVTQDAMLIFENLSRGFGRQGKRTFMAERQYTRMEDWLTAKLAYEGLPSKTYLSKTLAQYTSKTCSNCGFTITSADYDRVLEKLKKTATGWMTTINGKELKVEGQITYYNRYKRQNVVKDLSVELDRLSEESVNNDISSWTKGRSGEALSLLKKRFSHRPVQEKFVCLNCGFETHADEQAALNIARSWLFLRSQEYKKYQTNKTTGNTDKRAFVETWQSFYRKKLKEVWKPAV

SEQ ID NO: 28389 - protein, 978 aa, synthetic construct
  REGION 1..978: note = engineered CasX variant
QEIKRLNKIRRRLVKDSNTKKAGKTGPMKTLLVRVMTPDLRERLENLRKKPENIPQPISNTSQANLNKLLTDYTEMKKAILHVYWEEFQKDPVGLMSRVAQPASKKIDQNKLKPEMDEKGNLTTAGFACSQCGQPLFVYKLEQVSEKGKAYTNYFGRCNVAEHEKLILLAQLKPEKDSDEAVTYSLGKFGQRALDFYSIHVTKESTHPVKPLAQIAGNRYASGPVGKALSDACMGTIASFLSKYQDIIIEHQKVVKGNQKRLESLRELAGKENLEYPSVTLPPQPHTKEGVDAYNEVIARVRMWVNLNLWQKLKLSRDDAKPLLRLKGFPSFPLVERQANEVDWWDMVCNVKKLINEKKEDGKVFWQNLAGYKRQEALRPYLSSEEDRKKGKKFARYQLGDLLLHLEKKHGEDWGKVYDEAWERIDKKVEGLSKHIKLEEERRSEDAQSKAALTDWLRAKASFVIEGLKEADKDEFCRCELKLQKWYGDLRGKPFAIEAENSILDISGFSKQYNCAFIWQKDGVKKLNLYLIINYFKGGKLRFKKIKPEAFEANRFYTVINKKSGEIVPMEVNFNFDDPNLIILPLAFGKRQGREFIWNDLLSLETGSLKLANGRVIEKTLYNRRTRQDEPALFVALTFERREVLDSSNIKPMNLIGVDRGENIPAVIALTDPEGCPLSRFKDSLGNPTHILRIGESYKEKQRTIQAKKEVEQRRAGGYSRKYASKAKNLADDMVRNTARDLLYYAVTQDAMLIFENLSRGFGRQGKRTFMAERQYTRMEDWLTAKLAYEGLPSKTYLSKTLAQYTSKTCSNCGFTITSADYDRVLEKLKKTATGWMTTINGKELKVEGQITYYNRYKRQNVVKDLSVELDRLSEESVNNDISSWTKGRSGEALSLLKKRFSHRPVQEKFVCLNCGFETHADEQAALNIARSWLFLRSQEYKKYQTNKTTGNTDKRAFVETWQSFYRKKLKEVWKPAV

SEQ ID NO: 28390 - protein, 978 aa, synthetic construct
  REGION 1..978: note = engineered CasX variant
QEIKRINKIRRRLVKDSNTKKAGKTGPMKTLLVRVMTPDLRERLENLRKKPENIPQPISNTSQANLNKLLTDYTEMKKAILHVYWEEFQKDPVGLMSRVAQPASKKIDQNKLKPEMDEKGNLTTAGFACSQCGQPLFVYKLEQVSEKGKAYTNYVGRCNVAEHEKLILLAQLKPEKDSDEAVTYSLGKFGQRALDFYSIHVTKESTHPVKPLAQIAGNRYASGPVGKALSDACMGTIASFLSKYQDIIIEHQKVVKGNQKRLESLRELAGKENLEYPSVTLPPQPHTKEGVDAYNEVIARVRMWVNLNLWQKLKLSRDDAKPLLRLKGFPSFPLVERQANEVDWWDMVCNVKKLINEKKEDGKVFWQNLAGYKRQEALRPYLSSEEDRKKGKKFARYQLGDLLLHLEKKHGEDWGKVYDEAWERIDKKVEGLSKHIKLEEERRSEDAQSKAALTDWLRAKASFVIEGLKEADKDEFCRCELKLQKWYGDLRGKPFAIEAENSILDISGFSKQYNCAFIWQKDGVKKLNLYLIINYFKGGKLRFKKIKPEAFEANRFYTVINKKSGEIVPMEVNFNFDDPNLIILPLAFGKRQGREFIWNDLLSLETGSLKLANGRVIEKTLYNRRTRQDEPALFVALTFERREVLDSSNIKPMNLIGVDRGENIPAVIALTDPEGCPLSRFKDSLGNPTHILRIGESYKEKQRTIQAKKEVEQRRAGGYSRKYASKAKNLADDMVRNTARDLLYYAVTQDAMLIFENLSRGFGRQGKRTFMAERQYTRMEDWLTAKLAYEGLPSKTYLSKTLAQYTSKTCSNCGFTITSADYDRVLEKLKKTATGWMTTINGKELKVEGQITYYNRYKRQNVVKDLSVELDRLSEESVNNDISSWTKGRSGEALSLLKKRFSHRPVQEKFVCLNCGFETHADEQAALNIARSWLFLRSQEYKKYQTNKTTGNTDKRAFVETWQSFYRKKLKEVWKPAV

SEQ ID NO: 28391 - protein, 978 aa, synthetic construct
  REGION 1..978: note = engineered CasX variant
QEIKRINKIRRRLVKDSNTKKAGKTGPMKTLLVRVMTPDLRERLENLRKKPENIPQPISNTSQANLNKLLTDYTEMKKAILHVYWEEFQKDPVGLMSRVAQPASKKIDQNKLKPEMDEKGNLTTAGFACSQCGQPLFVYKLEQVSEKGKAYTNYFGRCNVAEHEKLILLAQLKPEKDSDEAVTYSLGKFGQRALDFYSIHVTKESTHPVKPLAQIAGNRYASGPVGKALSDACMGTIASFLSKYQDIIIEHQKVVKGNQKRLESLRELAGKENLEYPSVTLPPQPHTKEGVDAYNEVIARVRMWVNLNLWQKLKLSRDDAKPLLRLKGFPSFPLVERQANEVDWWDMVCNVKKLINEKKEDGKVFWQNLAGYKRQEALRPYLSSEEDRKKGKKFARYQLGDLLLHLEKKHGEDWGKVYDEAWERIDKKVEGLSKHIKLEEERRSEDAQSKAALTDWLRAKASFVIEGLKEADKDEFCRCELKLQKWYGDLRGKPFAIEAENSILDISGFSKQYNCAFIWQKDGVKKLNLYLIINYFKGGKLRFKKIKPEAFEANRFYTVINKKSGEIVPMEVNFNFDDPNLIILPLAFGKRQGREFIWNDLLSLETGSLKLANGRVIEKTLYNRRTRQDEPALFVALTFERREVLDSSNIKPMNLIGVDRGENIPAVIALTDPEGCPLSRFKDSLGNPTHILRIGESYKEKQRTIQAKKEVEQRRAGGYSRKYASKAKNLADDMVRNTARDLLYYAVTQDAMLIFENLSRGFGRQGKRTFMAERQYTRMEDWLTAKLAYEGLASKTYLSKTLAQYTSKTCSNCGFTITSADYDRVLEKLKKTATGWMTTINGKELKVEGQITYYNRYKRQNVVKDLSVELDRLSEESVNNDISSWTKGRSGEALSLLKKRFSHRPVQEKFVCLNCGFETHADEQAALNIARSWLFLRSQEYKKYQTNKTTGNTDKRAFVETWQSFYRKKLKEVWKPAV

SEQ ID NO: 28392 - protein, 978 aa, synthetic construct
  REGION 1..978: note = engineered CasX variant
QEIKRINKIRRRLVKDSNTKKAGKTGPMKTLLVRVMTPDLRERLENLRKKPENIPQPISNTSQANLNKLLTDYTEMKKAILHVYWEEFQKDPVGLMSRVAQPASKKIDQNKLKPEMDEKGNLTTAGFACSQCGQPLFVYKLEQVSEKGKAYTNYFGRCNVAEHEKLILLAQLKPEKDSDEAVTYSLGKFGQRALDFYSIHVTKESTHPVKPLAQIAGNRYASGPVGKALSDACMGTIASFLSKYQDIIIEHQKVVKGNQKRLESLRELAGKENLEYPSVTLPPQPHTKEGVDAYNEVIARVRMWVNLNLWQKLKLSRDDAKPLLRLKGFPSFPLVERQANEVDWWDMVCNVKKLINEKKEDGKVFWQNLAGYKRQEALRPYLSSEEDRKKGKKFARYQLGDLLLHLEKKHGEDWGKVYDEAWERIDKKVEGLSKHIKLEEERRSEDAQSKAALTDWLRAKASFVIEGLKEADKDEFCRCELKLQKWYGDLRGKPFAIEAENSILDISGFSKQYNCAFIWQKDGVKKLNLYLIINYFKGGKLRFKKIKPEAFEANRFYTVINKKSGEIVPMEVNFNFDDPNLIILPLAFGKRQGREFIWNDLLSLETGSLKLANGRVIEKTLYNRRTRQDEPALFVALTFERREVLDSSNIKPMNLIGVDRGENIPAVIALTDPEGCPLSRFKDSLGNPTHILRIGESYKEKQRTIQAKKEVEQRRAGGYSRKYASKAKNLADDMVRNTARDLLYYAVTQDAMLIFENLSRGFGRQGKRTFMAERQYTRMEDWLTAKLAYEGLPSKVYLSKTLAQYTSKTCSNCGFTITSADYDRVLEKLKKTATGWMTTINGKELKVEGQITYYNRYKRQNVVKDLSVELDRLSEESVNNDISSWTKGRSGEALSLLKKRFSHRPVQEKFVCLNCGFETHADEQAALNIARSWLFLRSQEYKKYQTNKTTGNTDKRAFVETWQSFYRKKLKEVWKPAV

SEQ ID NO: 28393 - protein, 979 aa, synthetic construct
  REGION 1..979: note = engineered CasX variant
QEIKRINKIRRRLVKDSNTKKAGKTGPMKTLLVRVMTPDLRERLENLRKKPENIPQPISNTSQANLNKLLTDYTEMKKAILHVYWEEFQKDPVGLMSRVAQPASKKIDQNKLKPEMDEKGNLTTAGFACSQCGQPLFVYKLEQVSEKGKAYTNYFGRCNVAEHEKLILLAQLKPEKDSDEAVTYSLGKFGQRALDFYSIHVTKESTHPVKPLAQIAGNRYASGPVGKALSDACMGTIASFLSKYQDIIIEHQKVVKGNQKRLESLRELAGKENLEYPSVTLPPQPHTKEGVDAYNEVIARVRMWVNLNLWQKLKLSRDDAKPLLRLKGFPSFPLVERQANEVDWWDMVCNVKKLINEKKEDGKVFWQNLAGYKRQEALRPYLSSEEDRKKGKKFARYQLGDLLLHLEKKHGEDWGKVYDEAWERIDKKVEGLSKHIKLEEERRSEDAQSKAALTDWLRAKASFVIEGLKEADKDEFCRCELKLQKWYGDLRGKPFAIEAENSILDISGFSKQYNCAFIWQKDGVKKLNLYLIINYFKGGKLRFKKIKPEAFEANRFYTVINKKSGEIVPMEVNFNFDDPNLIILPLAFGKRQGREFIWNDLLSLETGSLKLANGRVIEKTLYNRRTRQDEPALFVALTFERREVLDSSNIKPMNLIGVDRGENIPAVIALTDPEGCPLSRFKDSLGNPTHILRIGESYKEKQRTIQAKKEVEQRRAGGYSRKYASKAKNLADDMVRNTARDLLYYAVTQDAMLIFENLSRGFGRQGKRTFMAERQYTRMEDWLTAKLAYEGPLPSKTYLSKTLAQYTSKTCSNCGFTITSADYDRVLEKLKKTATGWMTTINGKELKVEGQITYYNRYKRQNVVKDLSVELDRLSEESVNNDISSWTKGRSGEALSLLKKRFSHRPVQEKFVCLNCGFETHADEQAALNIARSWLFLRSQEYKKYQTNKTTGNTDKRAFVETWQSFYRKKLKEVWKPAV

SEQ ID NO: 28394 - protein, 979 aa, synthetic construct
  REGION 1..979: note = engineered CasX variant
QEIKRINKIRRRLVKDSNTKKAGKTGPMKTLLVRVMTPDLRERLENLRKKPENIPQPISNTSQANLNKLLTDYTEMKKAILHVYWEEFQKDPVGLMSRVAQPASKKIDQNKLKPEMDEKGNLTTAGFACSQCGQPLFVYKLEQVSEKGKAYTNYFGRCNVAEHEKLILLAQLKPEKDSDEAVTYSLGKFGQRALDFYSIHVTKESTHPVKPLAQIAGNRYASGPVGKALSDACMGTIASFLSKYQDIIIEHQKVVKGNQKRLESLRELAGKENLEYPSVTLPPQPHTKEGVDAYNEVIARVRMWVNLNLWQKLKLSRDDAKPLLRLKGFPSFPLVERQANEVDWWDMVCNVKKLINEKKEDGKVFWQNLAGYKRQEALRPYLSSEEDVRKKGKKFARYQLGDLLLHLEKKHGEDWGKVYDEAWERIDKKVEGLSKHIKLEEERRSEDAQSKAALTDWLRAKASFVIEGLKEADKDEFCRCELKLQKWYGDLRGKPFAIEAENSILDISGFSKQYNCAFIWQKDGVKKLNLYLIINYFKGGKLRFKKIKPEAFEANRFYTVINKKSGEIVPMEVNFNFDDPNLIILPLAFGKRQGREFIWNDLLSLETGSLKLANGRVIEKTLYNRRTRQDEPALFVALTFERREVLDSSNIKPMNLIGVDRGENIPAVIALTDPEGCPLSRFKDSLGNPTHILRIGESYKEKQRTIQAKKEVEQRRAGGYSRKYASKAKNLADDMVRNTARDLLYYAVTQDAMLIFENLSRGFGRQGKRTFMAERQYTRMEDWLTAKLAYEGLPSKTYLSKTLAQYTSKTCSNCGFTITSADYDRVLEKLKKTATGWMTTINGKELKVEGQITYYNRYKRQNVVKDLSVELDRLSEESVNNDISSWTKGRSGEALSLLKKRFSHRPVQEKFVCLNCGFETHADEQAALNIARSWLFLRSQEYKKYQTNKTTGNTDKRAFVETWQSFYRKKLKEVWKPAV

SEQ ID NO: 28395 - protein, 978 aa, synthetic construct
  REGION 1..978: note = engineered CasX variant
QEIKRINKIRRRLVKDSNTKKAGKTGPMKTLLVRVMTPDLRERLENLRKKPENIPQPISNTSQANLNKLLTDYTEMKKAILHVYWEEFQKDPVGLMSRVAQPASKKIDQNKLKPEMDEKGNLTTAGFACSQCGQPLFVYKLEQVSEKGKAYTNYFGRCNVAEHEKLILLAQLKPEKDSDEAVTYSLGKFGQRALDFYSIHVTKESTHPVKPLAQIAGNRYASGPVGKALSDACMGTIASFLSKYQDIIIEHQKVVKGNQKRLESLRELAGKENLEYPSVTLPPQPHTKEGVDAYNEVIARVRMWVNLNLWQKLKLSRDDAKPLLRLKGFPSFPLVERQANEVDWWDMVCNVKKLINEKKEDGKVFWQNLAGYKRQEALRPYLSSEEDRKKGKKFARYQLGDLLLHLEKKHGEDWGKVYDEAWERIDKKVEGLSKHIKLEEERRSEDAQSKAALTDWLRAKASFVIEGLKEADKDEFCRCELKLQKWYGDLRGKPFAIEAENSILDISGFSKQYNCAFIWQKDGVKKLNLYLIINYFKGGKLRFKKIKPEAFEANRFYTVINKKSGEIVPMEVNFNFDDPNLIILPLAFGKRQGREFIWNDLLSLETGSLKLANGRVIEKTLYNRRTRQDEPALFVALTFERREVLDSSNIKPMNLIGVDRGENIPAVIALTDPEGCPLSRFKDSLGNPTHILRIGESYKEKQRTIQAKKEVEQRRAGGYSRKYASKAKNLADDMVRNTARDLLYYAVTQDAMLIFENLSRGFGRQGKRTFMAERQYTRMEDWLTAKLAYEGLPSKTYLSKTLAQYTSKTCSNCGFTITSADYDRMLEKLKKTATGWMTTINGKELKVEGQITYYNRYKRQNVVKDLSVELDRLSEESVNNDISSWTKGRSGEALSLLKKRFSHRPVQEKFVCLNCGFETHADEQAALNIARSWLFLRSQEYKKYQTNKTTGNTDKRAFVETWQSFYRKKLKEVWKPAV

SEQ ID NO: 28396 - protein, 978 aa, synthetic construct
  REGION 1..978: note = engineered CasX variant
QEIKRINKIRRRLVKDSNTKKAGKTGPMKTLLVRVMTPDLRERLENLRKKPENIPQPISNTSQANLNKLLTDYTEMKKAILHVYWEEFQKDPVGLMSRVAQPASKKIDQNKLKPEMDEKGNLTTAGFACSQCGQPLFVYKLEQVSEKGKAYTNYFGRCNVAEHEKLILLAQLKPEKDSDEAVTYSLGKFGQRALDFYSIHVTKESTHPVKPLAQIAGNRYASGPVGKALSDACMGTIASFLSKYQDIIIEHQKVVKGNQKRLESLRELAGKENLEYPSVTLPPQPHTKEGVDAYNEVIARVRMWVNLNLWQKLKLSRDDAKPLLRLKGFPSFPLVERQANEVDWWDMVCNVKKLINEKKEDGKVFWQNLAGYKRQEALRPYLSSEEDRKKGKKFARYQLGDLLLHLEKKHGEDWGKVYDEAWERIDKKVEGLSKHIKLEEERRSEDAQSKAALTDWLRAKASFVIEGLKEADKDEFCRCELKLQKWYGDLRGKPFAIEAENSILDISGFSKQYNCAFIWQKDGVKKLNLYLIINYFKGGKLRFKKIKPEAFEANRFYTVINKKSGEIVPMEVNFNFDDPNLIILPLAFGKRQGREFIWNDLLSLETGSLKLANGRVIEKTLYNRRTRQDEPALFVALTFERREVLDSSNIKPMNLIGVDRGENIPAVIALTDPEGCPLSRFKDSLGNPTHILRIGESYKEKQRTIQAKKEVEQRRAGGYSRKYASKAKNLADDMVRNTARDLLYYAVTQDAMLIFENLSRGFGRQGKRTFMAERQYTRMEDWLTAKLAYEGLPSKTYLSKTLAQYTSKTCSNCGFTITSADYDRVLEKLKKTATGWMTTINGKELKVEGQITYYNRYKRQNVVKDLSVELDRLSEESVNNDISSWTKGRQGEALSLLKKRFSHRPVQEKFVCLNCGFETHADEQAALNIARSWLFLRSQEYKKYQTNKTTGNTDKRAFVETWQSFYRKKLKEVWKPAV

SEQ ID NO: 28397 - protein, 978 aa, synthetic construct
  REGION 1..978: note = engineered CasX variant
QEIKRINKIRRRLVKDSNTKKAGKTGPMKTLLVRVMTPDLRERLENLRKKPENIPQPISNTSQANLNKLLTDYTEMKKAILHVYWEEFQKDPVGLMSRVAQPASKKIDQNKLKPEMDEKGNLTTAGFACSQCGQPLFVYKLEQVSEKGKAYTNYFGRCNVAEHEKLILLAQLKPEKDSDEAVTYSLGKFGQRALDFYSIHVTKESTHPVKPLAQIAGNRYASGPVGKALSDACMGTIASFLSKYQDIIIEHQKVVKGNQKRLESLRELAGKENLEYPSVTLPPQPHTKEGVDAYNEVIARVRMWVNLNLWQKLKLSRDDAKPLLRLKGFPSFPLVERQANEVDWWDMVCNVKKLINEKKEDGKVFWQNLAGYKRQEALRPYLSSEEDRKKGKKFARYQLGDLLLHLEKKHGEDWGKVYDEAWERIDKKVEGLSKHIKLEEERRSEDAQSKAALTDWLRAKASFVIEGLKEADKDEFCRCELKLQKWYGDLRGKPFAIEAENSILDISGFSKQYNCAFIWQKDGVKKLNLYLIINYFKGGKLRFKKIKPEAFEANRFYTVINKKSGEIVPMEVNFNFDDPNLIILPLAFGKRQGREFIWNDLLSLETGSLKLANGRVIEKTLYNRRTRQDEPALFVALTFERREVLDSSNIKPMNLIGVDRGENIPAVIALTDPEGCPLSRFKDSLGNPTHILRIGESYKEKQRTIQAKKEVEQRRAGGYSRKYASKAKNLADDMVRNTARDLLYYAVTQDAMLIFENLSRGFGRQGKRTFMAERQYTRMEDWLTAKLAYEGLPSKTYLSKTLAQYTSKTCSNCGFTITSADYDRVLEKLKKTATGWMTTINGKELKVEGQITYYNRYKRQNVVKDLSVELDRLSEESVNNDISSWTKGRSGEALSLLKKRFSHRPVQEKFVCLNCEFETHADEQAALNIARSWLFLRSQEYKKYQTNKTTGNTDKRAFVETWQSFYRKKLKEVWKPAV

SEQ ID NO: 28398 - protein, 979 aa, synthetic construct
  REGION 1..979: note = engineered CasX variant
QEIKRINKIRRRLVKDSNTKKAGKTGPMKTLLVRVMTPDLRERLENLRKKPENIPQPISNTSQANLNKLLTDYTEMKKAILHVYWEEFQKDPVGLMSRVAQPASKKIDQNKLKPEMDEKGNLTTAGFACSQCGQPLFVYKLEQVSEKGKAYTNYFGRCNVAEHEKLILLAQLKPEKDSDEAVTYSLGKFGQRALDFYSIHVTKESTHPVKPLAQIAGNRYASGPVGKALSDACMGTIASFLSKYQDIIIEHQKVVKGNQKRLESLRELAGKENLEYPSVTLPPQPHTKEGVDAYNEVIARVRMWVNLNLWQKLKLSRDDAKPLLRLKGFPSFPLVERQANEVDWWDMVCNVKKLINEKKEDGKVFWQNLAGYKRQEALRPYLSSEEDRKKGKKFARYQLGDLLLHLEKKHGEDWGKVYDEAWERIDKKVEGLSKHIKLEEERRSEDAQSKAALTDWLRAKASFVIEGLKEADKDEFCRCELKLQKWYGDLRGKPFAIEAENSILDISGFSKQYNCAFIWQKDGVKKLNLYLIINYFKGGKLRFKKIKPEAFEANRFYTVINKKSGEIVPMEVNFNFDDPNLIILPLAFGKRQGREFIWNDLLSLETGSLKLANGRVIEKTLYNRRTRQDEPALFVALTFERREVLDSSNIKPMNLIGVDRGENIPAVIALTDPEGCPLSRFKDSLGNPTHILRIGESYKEKQRTIQAKKEVEQRRAGGYSRKYASKAKNLADDMVRNTARDLLYYAVTQDAMLIFENLSRGFGRQGKRTFMAERQYTRMEDWLTAKLAYEGLPSKTYLSKTLAQYTSKTCSNCGFTITSADYDRVLEKLKKTATGWMTTINGKELKVEGQITYYNRYKRQNVVKDLSVELDRLSEESVNNDISSWTKGRSGEALSLLKKRFSHRPVQEKFVCLNCGFETHADEQAALNIARSWLFLRSQEYKKYQTNKTSTGNTDKRAFVETWQSFYRKKLKEVWKPAV

SEQ ID NO: 28399 - protein, 979 aa, synthetic construct
  REGION 1..979: note = engineered CasX variant
QEIKRINKIRRRLVKDSNTKKAGKTGPMKTLLVRVMTPDLRERLENLRKKPENIPQPISNTSQANLNKLLTDYTEMKKAILHVYWEEFQKDPVGLMSRVAQPASKKIDQNKLKPEMDEKGNLTTAGFACSQCGQPLFVYKLEQVSEKGKAYTNYFGRCNVAEHEKLILLAQLKPEKDSDEAVTYSLGKFGQRALDFYSIHVTKESTHPVKPLAQIAGNRYASGPVGKALSDACMGTIASFLSKYQDIIIEHQKVVKGNQKRLESLRELAGKENLEYPSVTLPPQPHTKEGVDAYNEVIARVRMWVNLNLWQKLKLSRDDAKPLLRLKGFPSFPLVERQANEVDWWDMVCNVKKLINEKKEDGKVFWQNLAGYKRQEALRPYLSSEEDRKKGKKFARYQLGDLLLHLEKKHGEDWGKVYDEAWERIDKKVEGLSKHIKLEEERRSEDAQSKAALTDWLRAKASFVIEGLKEADKDEFCRCELKLQKWYGDLRGKPFAIEAENSILDISGFSKQYNCAFIWQKDGVKKLNLYLIINYFKGGKLRFKKIKPEAFEANRFYTVINKKSGEIVPMEVNFNFDDPNLIILPLAFGKRQGREFIWNDLLSLETGSLKLANGRVIEKTLYNRRTRQDEPALFVALTFERREVLDSSNIKPMNLIGVDRGENIPAVIALTDPEGCPLSRFKDSLGNPTHILRIGESYKEKQRTIQAKKEVEQRRAGGYSRKYASKAKNLADDMVRNTARDLLYYAVTQDAMLIFENLSRGFGRQGKRTFMAERQYTRMEDWLTAKLAYEGLPSKTYLSKTLAQYTSKTCSNCGFTITSADYDRVLEKLKKTATGWMTTINGKELKVEGQITYYNRYKRQNVVKDLSVELDRLSEESVNNDISSWTKGRSGEALSLLKKRFSHRPVQEKFVCLNCGFETHADEQAALNIARSWLFLRSQEYKKYQTNKTTGKNTDKRAFVETWQSFYRKKLKEVWKPAV

SEQ ID NO: 28400 - protein, 978 aa, synthetic construct
  REGION 1..978: note = engineered CasX variant
QEIKRINKIRRRLVKDSNTKKAGKTGPMKTLLVRVMTPDLRERLENLRKKPENIPQPISNTSQANLNKLLTDYTEMKKAILHVYWEEFQKDPVGLMSRVAQPASKKIDQNKLKPEMDEKGNLTTAGFACSQCGQPLFVYKLEQVSEKGKAYTNYFGRCNVAEHEKLILLAQLKPEKDSDEAVTYSLGKFGQRALDFYSIHVTKESTHPVKPLAQIAGNRYASGPVGKALSDACMGTIASFLSKYQDIIIEHQKVVKGNQKRLESLRELAGKENLEYPSVTLPPQPHTKEGVDAYNEVIARVRMWVNLNLWQKLKLSRDDAKPLLRLKKFPSFPLVERQANEVDWWDMVCNVKKLINEKKEDGKVFWQNLAGYKRQEALRPYLSSEEDRKKGKKFARYQLGDLLLHLEKKHGEDWGKVYDEAWERIDKKVEGLSKHIKLEEERRSEDAQSKAALTDWLRAKASFVIEGLKEADKDEFCRCELKLQKWYGDLRGKPFAIEAENSILDISGFSKQYNCAFIWQKDGVKKLNLYLIINYFKGGKLRFKKIKPEAFEANRFYTVINKKSGEIVPMEVNFNFDDPNLIILPLAFGKRQGREFIWNDLLSLETGSLKLANGRVIEKTLYNRRTRQDEPALFVALTFERREVLDSSNIKPMNLIGVDRGENIPAVIALTDPEGCPLSRFKDSLGNPTHILRIGESYKEKQRTIQAKKEVEQRRAGGYSRKYASKAKNLADDMVRNTARDLLYYAVTQDAMLIFENLSRGFGRQGKRTFMAERQYTRMEDWLTAKLAYEGLPSKTYLSKTLAQYTSKTCSNCGFTITSADYDRVLEKLKKTATGWMTTINGKELKVEGQITYYNRYKRQNVVKDLSVELDRLSEESVNNDISSWTKGRSGEALSLLKKRFSHRPVQEKFVCLNCGFETHADEQAALNIARSWLFLRSQEYKKYQTNKTTGNTDKRAFVETWQSFYRKKLKEVWKPAV

SEQ ID NO: 28401 - protein, 978 aa, synthetic construct
  REGION 1..978: note = engineered CasX variant
QEIKRINKIRRRLVKDSNTKKAGKTGPMKTLLVRVMTPDLRERLENLRKKPENIPQPISNTSQANLNKLLTDYTEMKKAILHVYWEEFQKDPVGLMSRVAQPASKKIDQNKLKPEMDEKGNLTTAGFACSQCGQPLFVYKLEQVSEKGKAYTNYFGRCNVAEHEKLILLAQLKPEKDSDEAVTYSLGKFGQRALDFYSIHVTKESTHPVKPLAQIAGNRYASGPVGKALSDACMGTIASFLSKYQDIIIEHQKVVKGNQKRLESLRELAGKENLEYPSVTLPPQPHTKEGVDAYNEVIARVRMWVNLNLWQKLKLSRDDAKPLLRLKGFPSFPLVERQANEVDWWDMVCNVKKLINEKKEDGKVFWQNLAGYKRQEALRPYLSSEEDRKKGKKFARYQLGDLLLHLEKKHGEDWGKVYDEAWERIDKKVEGLSKHIKLEEERRSEDAQSKAALTDWLRAKASFVIEGLKEADKDEFCRCELKLQKWYGDLRGKPFAIEAENSILDISGFSKQYNCAFIWQKDGVKKLNLYLIINYFKGGKLRFKKIKPEAFEANRFYTVINKKSGEIVPMEVNFNFDDPNLIILPLAFGKRQGREFIWNDLLSLETGSLKLANGRVIEKTLYNRRTRQDEPALFVALTFERREVLDSSNIKPMNLIGVDRGENIPAVIALTDPEGCPLSRFKDSLGNPTHILRIGERYKEKQRTIQAKKEVEQRRAGGYSRKYASKAKNLADDMVRNTARDLLYYAVTQDAMLIFENLSRGFGRQGKRTFMAERQYTRMEDWLTAKLAYEGLPSKTYLSKTLAQYTSKTCSNCGFTITSADYDRVLEKLKKTATGWMTTINGKELKVEGQITYYNRYKRQNVVKDLSVELDRLSEESVNNDISSWTKGRSGEALSLLKKRFSHRPVQEKFVCLNCGFETHADEQAALNIARSWLFLRSQEYKKYQTNKTTGNTDKRAFVETWQSFYRKKLKEVWKPAV

SEQ ID NO: 28402 - protein, 978 aa, synthetic construct
  REGION 1..978: note = engineered CasX variant
QEIKRINKIRRRLVKDSNTKKAGKTGPMKTLLVRVMTPDLRERLENLRKKPENIPQPISNTSQANLNKLLTDYTEMKKAILHVYWEEFQKDPVGLMSRVAQPASKKIDQNKLKPEMDEKGNLTTAGFACSQCGQPLFVYKLEQVSEKGKAYTNYFGRCNVAEHEKLILLAQLKPEKDSDEAVTYSLGKFGQRALDFYSIHVTKESTHPVKPLAQIAGNRYASGPVGKALSDACMGTIASFLSKYQDIIIEHQKVVKGNQKRLESLRELAGKENLEYPSVTLPPQPHTKEGVDAYNEVIARVRMWVNLNLWQKLKLSRDDAKPLLRLKGFPSFPLVERQANEVDWWDMVCNVKKLINEKKEDGKVFWQNLAGYKRQEALRPYLSSEEDRKKGKKFARYQLGDLLLHLEKKHGEDWGKVYDEAWERIDKKVEGLSKHIKLEEERRSEDAQSKAALTDWLRAKASFVIEGLKEADKDEFCRCELKLQKWYGDLRGKPFAIEAENSILDISGFSKQYNCAFIWQKDGVKKLNLYLIINYFKGGKLRFKKIKPEAFEANRFYTVINKKSGEIVPMEVNFNFDDPNLIILPLAFGKRQGREFIWNDLLSLETGSLQLANGRVIEKTLYNRRTRQDEPALFVALTFERREVLDSSNIKPMNLIGVDRGENIPAVIALTDPEGCPLSRFKDSLGNPTHILRIGESYKEKQRTIQAKKEVEQRRAGGYSRKYASKAKNLADDMVRNTARDLLYYAVTQDAMLIFENLSRGFGRQGKRTFMAERQYTRMEDWLTAKLAYEGLPSKTYLSKTLAQYTSKTCSNCGFTITSADYDRVLEKLKKTATGWMTTINGKELKVEGQITYYNRYKRQNVVKDLSVELDRLSEESVNNDISSWTKGRSGEALSLLKKRFSHRPVQEKFVCLNCGFETHADEQAALNIARSWLFLRSQEYKKYQTNKTTGNTDKRAFVETWQSFYRKKLKEVWKPAV

SEQ ID NO: 28403 - protein, 978 aa, synthetic construct
  REGION 1..978: note = engineered CasX variant
QEIKRINKIRRRLVKDSNTKKAGKTGPMKTLLVRVMTPDLRERLENLRKKPENIPQPISNTSRANLNKLLTDYTEMKKAILHVYDEEFQKDPVGLMSRVAQPASKKIDQNKLKPEMDEKGNLTTAGFACSQCGQPLFVYKLEQVSEKGKAYTNYFGRCNVAEHEKLIKLAQLKPEKDSDEAVTYSLGKFGQRALDFYSIHVTKESTHPVKPLAQIAGNRYASGPVGKALSDACMGTIASFLSKYQDIIIEHQKVVKGNQKRLESLRELAGKENLEYPSVTLPPQPHTKEGVDAYNEVIARVRMWVNLNLWQKLKLSRDDAKPLLRLKGFPSFPLVERQANEVDWWDMVCNVKKLINEKKEDGKVFWQNLAGYKRQEALRPYLSSEEDRKKGKKFARYQLGDLLLHLEKKHGEDWGKVYDEAWERIDKKVEGLSKHIKLEEERRSEDAQSKAALTDWLRAKASFVIEGLKEADKDEFCRCELKLQKWYGDLRGKPFAIEAENSILDISGFSKQYNCAFIWQKDGVKKLNLYLIINYFKGGKLRFKKIKPEAFEANRFYTVINKKSGEIVPMEVNFNFDDPNLIILPLAFGKRQGREFIWNDLLSLETGSLKLANGRVIEKTLYNRRTRQDEPALFVALTFERREVLDSSNIKPMNLIGVDRGENIPAVIALTDPEGCPLSRFKDSLGNPTHILRIGESYKEKQRTIQAKKEVEQRRAGGYSRKYASKAKNLADDMVRNTARDLLYYAVTQDAMLIFENLSRGFGRQGKRTFMAERQYTRMEDWLTAKLAYEGLPSKTYLSKTLAQYTSKTCSNCGFTITSADYDRVLEKLKKTATGWMTTINGKELKVEGQITYYNRYKRQNVVKDLSVELDRLSEESVNNDISSWTKGRSGEALSLLKKRFSHRPVQEKFVCLNCGFETHADEQAALNIARSWLFLRSQEYKKYQTNKTTGNTDKRAFVETWQSFYRKKLKEVWKPAV

SEQ ID NO: 28404 - protein, 978 aa, synthetic construct
  REGION 1..978: note = engineered CasX variant
QEIKRINKIRRRLVKDSNTKKAGKTGPMKTLLVRVMTPDLRERLENLRKKPENIPQPISNTSRANLNKLLTDYTEMKKAILHVYDEEFQKDPVGLMSRVAQPASKKIDQNKLKPEMDEKGNLTTAGFACSQCGQPLFVYKLEQVSEKGKAYTNYFGRCNVAEHEKLILLYQLKPEKDSDEAVTYSLGKFGQRALDFYSIHVTKESTHPVKPLAQIAGNRYASGPVGKALSDACMGTIASFLSKYQDIIIEHQKVVKGNQKRLESLRELAGKENLEYPSVTLPPQPHTKEGVDAYNEVIARVRMWVNLNLWQKLKLSRDDAKPLLRLKGFPSFPLVERQANEVDWWDMVCNVKKLINEKKEDGKVFWQNLAGYKRQEALRPYLSSEEDRKKGKKFARYQLGDLLLHLEKKHGEDWGKVYDEAWERIDKKVEGLSKHIKLEEERRSEDAQSKAALTDWLRAKASFVIEGLKEADKDEFCRCELKLQKWYGDLRGKPFAIEAENSILDISGFSKQYNCAFIWQKDGVKKLNLYLIINYFKGGKLRFKKIKPEAFEANRFYTVINKKSGEIVPMEVNFNFDDPNLIILPLAFGKRQGREFIWNDLLSLETGSLKLANGRVIEKTLYNRRTRQDEPALFVALTFERREVLDSSNIKPMNLIGVDRGENIPAVIALTDPEGCPLSRFKDSLGNPTHILRIGESYKEKQRTIQAKKEVEQRRAGGYSRKYASKAKNLADDMVRNTARDLLYYAVTQDAMLIFENLSRGFGRQGKRTFMAERQYTRMEDWLTAKLAYEGLPSKTYLSKTLAQYTSKTCSNCGFTITSADYDRVLEKLKKTATGWMTTINGKELKVEGQITYYNRYKRQNVVKDLSVELDRLSEESVNNDISSWTKGRSGEALSLLKKRFSHRPVQEKFVCLNCGFETHADEQAALNIARSWLFLRSQEYKKYQTNKTTGNTDKRAFVETWQSFYRKKLKEVWKPAV

SEQ ID NO: 28405 - protein, 978 aa, synthetic construct
  REGION 1..978: note = engineered CasX variant
QEIKRINKIRRRLVKDSNTKKAGKTGPMKTLLVRVMTPDLRERLENLRKKPENIPQPISNTSRANLNKLLTDYTEMKKAILHVYDEEFQKDPVGLMSRVAQPASKKIDQNKLKPEMDEKGNLTTAGFACSQCGQPLFVYKLEQVSEKGKAYTNYFGRCNVAEHEKLILLSQLKPEKDSDEAVTYSLGKFGQRALDFYSIHVTKESTHPVKPLAQIAGNRYASGPVGKALSDACMGTIASFLSKYQDIIIEHQKVVKGNQKRLESLRELAGKENLEYPSVTLPPQPHTKEGVDAYNEVIARVRMWVNLNLWQKLKLSRDDAKPLLRLKGFPSFPLVERQANEVDWWDMVCNVKKLINEKKEDGKVFWQNLAGYKRQEALRPYLSSEEDRKKGKKFARYQLGDLLLHLEKKHGEDWGKVYDEAWERIDKKVEGLSKHIKLEEERRSEDAQSKAALTDWLRAKASFVIEGLKEADKDEFCRCELKLQKWYGDLRGKPFAIEAENSILDISGFSKQYNCAFIWQKDGVKKLNLYLIINYFKGGKLRFKKIKPEAFEANRFYTVINKKSGEIVPMEVNFNFDDPNLIILPLAFGKRQGREFIWNDLLSLETGSLKLANGRVIEKTLYNRRTRQDEPALFVALTFERREVLDSSNIKPMNLIGVDRGENIPAVIALTDPEGCPLSRFKDSLGNPTHILRIGESYKEKQRTIQAKKEVEQRRAGGYSRKYASKAKNLADDMVRNTARDLLYYAVTQDAMLIFENLSRGFGRQGKRTFMAERQYTRMEDWLTAKLAYEGLPSKTYLSKTLAQYTSKTCSNCGFTITSADYDRVLEKLKKTATGWMTTINGKELKVEGQITYYNRYKRQNVVKDLSVELDRLSEESVNNDISSWTKGRSGEALSLLKKRFSHRPVQEKFVCLNCGFETHADEQAALNIARSWLFLRSQEYKKYQTNKTTGNTDKRAFVETWQSFYRKKLKEVWKPAV

SEQ ID NO: 28406 - protein, 977 aa, synthetic construct
  REGION 1..977: note = engineered CasX variant
QEIKRINKIRRRLVKDSNTKKAGKTGPMKTLLVRVMTPDLRERLENLRKKPENIPQPISNTSRANLNKLLTDYTEMKKAILHVYDEEFQKDPVGLMSRVAQPASKKIDQNKLKPEMDEKGNLTTAGFACSQCGQPLFVYKLEQVSEKGKAYTNYFGRCNVAEHEKLILLAQLKPEKDSDEAVTYSLGKFGQRALDFYSIHVTKESTHPVKPLAQIAGNRYASPVGKALSDACMGTIASFLSKYQDIIIEHQKVVKGNQKRLESLRELAGKENLEYPSVTLPPQPHTKEGVDAYNEVIARVRMWVNLNLWQKLKLSRDDAKPLLRLKGFPSFPLVERQANEVDWWDMVCNVKKLINEKKEDGKVFWQNLAGYKRQEALRPYLSSEEDRKKGKKFARYQLGDLLLHLEKKHGEDWGKVYDEAWERIDKKVEGLSKHIKLEEERRSEDAQSKAALTDWLRAKASFVIEGLKEADKDEFCRCELKLQKWYGDLRGKPFAIEAENSILDISGFSKQYNCAFIWQKDGVKKLNLYLIINYFKGGKLRFKKIKPEAFEANRFYTVINKKSGEIVPMEVNFNFDDPNLIILPLAFGKRQGREFIWNDLLSLETGSLKLANGRVIEKTLYNRRTRQDEPALFVALTFERREVLDSSNIKPMNLIGVDRGENIPAVIALTDPEGCPLSRFKDSLGNPTHILRIGESYKEKQRTIQAKKEVEQRRAGGYSRKYASKAKNLADDMVRNTARDLLYYAVTQDAMLIFENLSRGFGRQGKRTFMAERQYTRMEDWLTAKLAYEGLPSKTYLSKTLAQYTSKTCSNCGFTITSADYDRVLEKLKKTATGWMTTINGKELKVEGQITYYNRYKRQNVVKDLSVELDRLSEESVNNDISSWTKGRSGEALSLLKKRFSHRPVQEKFVCLNCGFETHADEQAALNIARSWLFLRSQEYKKYQTNKTTGNTDKRAFVETWQSFYRKKLKEVWKPAV

SEQ ID NO: 28407 - protein, 978 aa, synthetic construct
  REGION 1..978: note = engineered CasX variant
QEIKRINKIRRRLVKDSNTKKAGKTGPMKTLLVRVMTPDLRERLENLRKKPENIPQPISNTSRANLNKLLTDYTEMKKAILHVYDEEFQKDPVGLMSRVAQPASKKIDQNKLKPEMDEKGNLTTAGFACSQCGQPLFVYKLEQVSEKGKAYTNYFGRCNVAEHEKLILLAQLKPEKDSDEAVTYSLGKFGQRALDFYSIHVTKESTHPVKPLAQIAGNRYASGPVGKALSDACMGTIASFLSKYQDIIIEHQKVVKGNQKRLESLRELAGKENLEYPSVTLPPQPHTSEGVDAYNEVIARVRMWVNLNLWQKLKLSRDDAKPLLRLKGFPSFPLVERQANEVDWWDMVCNVKKLINEKKEDGKVFWQNLAGYKRQEALRPYLSSEEDRKKGKKFARYQLGDLLLHLEKKHGEDWGKVYDEAWERIDKKVEGLSKHIKLEEERRSEDAQSKAALTDWLRAKASFVIEGLKEADKDEFCRCELKLQKWYGDLRGKPFAIEAENSILDISGFSKQYNCAFIWQKDGVKKLNLYLIINYFKGGKLRFKKIKPEAFEANRFYTVINKKSGEIVPMEVNFNFDDPNLIILPLAFGKRQGREFIWNDLLSLETGSLKLANGRVIEKTLYNRRTRQDEPALFVALTFERREVLDSSNIKPMNLIGVDRGENIPAVIALTDPEGCPLSRFKDSLGNPTHILRIGESYKEKQRTIQAKKEVEQRRAGGYSRKYASKAKNLADDMVRNTARDLLYYAVTQDAMLIFENLSRGFGRQGKRTFMAERQYTRMEDWLTAKLAYEGLPSKTYLSKTLAQYTSKTCSNCGFTITSADYDRVLEKLKKTATGWMTTINGKELKVEGQITYYNRYKRQNVVKDLSVELDRLSEESVNNDISSWTKGRSGEALSLLKKRFSHRPVQEKFVCLNCGFETHADEQAALNIARSWLFLRSQEYKKYQTNKTTGNTDKRAFVETWQSFYRKKLKEVWKPAV

SEQ ID NO: 28408 - protein, 978 aa, synthetic construct
  REGION 1..978: note = engineered CasX variant
QEIKRINKIRRRLVKDSNTKKAGKTGPMKTLLVRVMTPDLRERLENLRKKPENIPQPISNTSRANLNKLLTDYTEMKKAILHVYDEEFQKDPVGLMSRVAQPASKKIDQNKLKPEMDEKGNLTTAGFACSQCGQPLFVYKLEQVSEKGKAYTNYFGRCNVAEHEKLILLAQLKPEKDSDEAVTYSLGKFGQRALDFYSIHVTKESTHPVKPLAQIAGNRYASGPVGKALSDACMGTIASFLSKYQDIIIEHQKVVKGNQKRLESLRELAGKENLEYPSVTLPPQPHTKEGLDAYNEVIARVRMWVNLNLWQKLKLSRDDAKPLLRLKGFPSFPLVERQANEVDWWDMVCNVKKLINEKKEDGKVFWQNLAGYKRQEALRPYLSSEEDRKKGKKFARYQLGDLLLHLEKKHGEDWGKVYDEAWERIDKKVEGLSKHIKLEEERRSEDAQSKAALTDWLRAKASFVIEGLKEADKDEFCRCELKLQKWYGDLRGKPFAIEAENSILDISGFSKQYNCAFIWQKDGVKKLNLYLIINYFKGGKLRFKKIKPEAFEANRFYTVINKKSGEIVPMEVNFNFDDPNLIILPLAFGKRQGREFIWNDLLSLETGSLKLANGRVIEKTLYNRRTRQDEPALFVALTFERREVLDSSNIKPMNLIGVDRGENIPAVIALTDPEGCPLSRFKDSLGNPTHILRIGESYKEKQRTIQAKKEVEQRRAGGYSRKYASKAKNLADDMVRNTARDLLYYAVTQDAMLIFENLSRGFGRQGKRTFMAERQYTRMEDWLTAKLAYEGLPSKTYLSKTLAQYTSKTCSNCGFTITSADYDRVLEKLKKTATGWMTTINGKELKVEGQITYYNRYKRQNVVKDLSVELDRLSEESVNNDISSWTKGRSGEALSLLKKRFSHRPVQEKFVCLNCGFETHADEQAALNIARSWLFLRSQEYKKYQTNKTTGNTDKRAFVETWQSFYRKKLKEVWKPAV

SEQ ID NO: 28409 - protein, 978 aa, synthetic construct
  REGION 1..978: note = engineered CasX variant
QEIKRINKIRRRLVKDSNTKKAGKTGPMKTLLVRVMTPDLRERLENLRKKPENIPQPISNTSRANLNKLLTDYTEMKKAILHVYDEEFQKDPVGLMSRVAQPASKKIDQNKLKPEMDEKGNLTTAGFACSQCGQPLFVYKLEQVSEKGKAYTNYFGRCNVAEHEKLILLAQLKPEKDSDEAVTYSLGKFGQRALDFYSIHVTKESTHPVKPLAQIAGNRYASGPVGKALSDACMGTIASFLSKYQDIIIEHQKVVKGNQKRLESLRELAGKENLEYPSVTLPPQPHTKEGVDAYNEVIARVRTWVNLNLWQKLKLSRDDAKPLLRLKGFPSFPLVERQANEVDWWDMVCNVKKLINEKKEDGKVFWQNLAGYKRQEALRPYLSSEEDRKKGKKFARYQLGDLLLHLEKKHGEDWGKVYDEAWERIDKKVEGLSKHIKLEEERRSEDAQSKAALTDWLRAKASFVIEGLKEADKDEFCRCELKLQKWYGDLRGKPFAIEAENSILDISGFSKQYNCAFIWQKDGVKKLNLYLIINYFKGGKLRFKKIKPEAFEANRFYTVINKKSGEIVPMEVNFNFDDPNLIILPLAFGKRQGREFIWNDLLSLETGSLKLANGRVIEKTLYNRRTRQDEPALFVALTFERREVLDSSNIKPMNLIGVDRGENIPAVIALTDPEGCPLSRFKDSLGNPTHILRIGESYKEKQRTIQAKKEVEQRRAGGYSRKYASKAKNLADDMVRNTARDLLYYAVTQDAMLIFENLSRGFGRQGKRTFMAERQYTRMEDWLTAKLAYEGLPSKTYLSKTLAQYTSKTCSNCGFTITSADYDRVLEKLKKTATGWMTTINGKELKVEGQITYYNRYKRQNVVKDLSVELDRLSEESVNNDISSWTKGRSGEALSLLKKRFSHRPVQEKFVCLNCGFETHADEQAALNIARSWLFLRSQEYKKYQTNKTTGNTDKRAFVETWQSFYRKKLKEVWKPAV

SEQ ID NO: 28410 - protein, 978 aa, synthetic construct
  REGION 1..978: note = engineered CasX variant
QEIKRINKIRRRLVKDSNTKKAGKTGPMKTLLVRVMTPDLRERLENLRKKPENIPQPISNTSRANLNKLLTDYTEMKKAILHVYDEEFQKDPVGLMSRVAQPASKKIDQNKLKPEMDEKGNLTTAGFACSQCGQPLFVYKLEQVSEKGKAYTNYFGRCNVAEHEKLILLAQLKPEKDSDEAVTYSLGKFGQRALDFYSIHVTKESTHPVKPLAQIAGNRYASGPVGKALSDACMGTIASFLSKYQDIIIEHQKVVKGNQKRLESLRELAGKENLEYPSVTLPPQPHTKEGVDAYNEVIARVRWWVNLNLWQKLKLSRDDAKPLLRLKGFPSFPLVERQANEVDWWDMVCNVKKLINEKKEDGKVFWQNLAGYKRQEALRPYLSSEEDRKKGKKFARYQLGDLLLHLEKKHGEDWGKVYDEAWERIDKKVEGLSKHIKLEEERRSEDAQSKAALTDWLRAKASFVIEGLKEADKDEFCRCELKLQKWYGDLRGKPFAIEAENSILDISGFSKQYNCAFIWQKDGVKKLNLYLIINYFKGGKLRFKKIKPEAFEANRFYTVINKKSGEIVPMEVNFNFDDPNLIILPLAFGKRQGREFIWNDLLSLETGSLKLANGRVIEKTLYNRRTRQDEPALFVALTFERREVLDSSNIKPMNLIGVDRGENIPAVIALTDPEGCPLSRFKDSLGNPTHILRIGESYKEKQRTIQAKKEVEQRRAGGYSRKYASKAKNLADDMVRNTARDLLYYAVTQDAMLIFENLSRGFGRQGKRTFMAERQYTRMEDWLTAKLAYEGLPSKTYLSKTLAQYTSKTCSNCGFTITSADYDRVLEKLKKTATGWMTTINGKELKVEGQITYYNRYKRQNVVKDLSVELDRLSEESVNNDISSWTKGRSGEALSLLKKRFSHRPVQEKFVCLNCGFETHADEQAALNIARSWLFLRSQEYKKYQTNKTTGNTDKRAFVETWQSFYRKKLKEVWKPAV

SEQ ID NO: 28411 - protein, 979 aa, synthetic construct
  REGION 1..979: note = engineered CasX variant
QEIKRINKIRRRLVKDSNTKKAGKTGPMKTLLVRVMTPDLRERLENLRKKPENIPQPISNTSRANLNKLLTDYTEMKKAILHVYDEEFQKDPVGLMSRVAQPASKKIDQNKLKPEMDEKGNLTTAGFACSQCGQPLFVYKLEQVSEKGKAYTNYFGRCNVAEHEKLILLAQLKPEKDSDEAVTYSLGKFGQRALDFYSIHVTKESTHPVKPLAQIAGNRYASGPVGKALSDACMGTIASFLSKYQDIIIEHQKVVKGNQKRLESLRELAGKENLEYPSVTLPPQPHTKEGVDAYNEVIARVRMWVNLNLWQKLKLSRDDAKPLLRLKGFPSFPLVERQQANEVDWWDMVCNVKKLINEKKEDGKVFWQNLAGYKRQEALRPYLSSEEDRKKGKKFARYQLGDLLLHLEKKHGEDWGKVYDEAWERIDKKVEGLSKHIKLEEERRSEDAQSKAALTDWLRAKASFVIEGLKEADKDEFCRCELKLQKWYGDLRGKPFAIEAENSILDISGFSKQYNCAFIWQKDGVKKLNLYLIINYFKGGKLRFKKIKPEAFEANRFYTVINKKSGEIVPMEVNFNFDDPNLIILPLAFGKRQGREFIWNDLLSLETGSLKLANGRVIEKTLYNRRTRQDEPALFVALTFERREVLDSSNIKPMNLIGVDRGENIPAVIALTDPEGCPLSRFKDSLGNPTHILRIGESYKEKQRTIQAKKEVEQRRAGGYSRKYASKAKNLADDMVRNTARDLLYYAVTQDAMLIFENLSRGFGRQGKRTFMAERQYTRMEDWLTAKLAYEGLPSKTYLSKTLAQYTSKTCSNCGFTITSADYDRVLEKLKKTATGWMTTINGKELKVEGQITYYNRYKRQNVVKDLSVELDRLSEESVNNDISSWTKGRSGEALSLLKKRFSHRPVQEKFVCLNCGFETHADEQAALNIARSWLFLRSQEYKKYQTNKTTGNTDKRAFVETWQSFYRKKLKEVWKPAV

SEQ ID NO: 28412 - protein, 979 aa, synthetic construct
  REGION 1..979: note = engineered CasX variant
QEIKRINKIRRRLVKDSNTKKAGKTGPMKTLLVRVMTPDLRERLENLRKKPENIPQPISNTSRANLNKLLTDYTEMKKAILHVYDEEFQKDPVGLMSRVAQPASKKIDQNKLKPEMDEKGNLTTAGFACSQCGQPLFVYKLEQVSEKGKAYTNYFGRCNVAEHEKLILLAQLKPEKDSDEAVTYSLGKFGQRALDFYSIHVTKESTHPVKPLAQIAGNRYASGPVGKALSDACMGTIASFLSKYQDIIIEHQKVVKGNQKRLESLRELAGKENLEYPSVTLPPQPHTKEGVDAYNEVIARVRMWVNLNLWQKLKLSRDDAKPLLRLKGFPSFPLVERQANAEVDWWDMVCNVKKLINEKKEDGKVFWQNLAGYKRQEALRPYLSSEEDRKKGKKFARYQLGDLLLHLEKKHGEDWGKVYDEAWERIDKKVEGLSKHIKLEEERRSEDAQSKAALTDWLRAKASFVIEGLKEADKDEFCRCELKLQKWYGDLRGKPFAIEAENSILDISGFSKQYNCAFIWQKDGVKKLNLYLIINYFKGGKLRFKKIKPEAFEANRFYTVINKKSGEIVPMEVNFNFDDPNLIILPLAFGKRQGREFIWNDLLSLETGSLKLANGRVIEKTLYNRRTRQDEPALFVALTFERREVLDSSNIKPMNLIGVDRGENIPAVIALTDPEGCPLSRFKDSLGNPTHILRIGESYKEKQRTIQAKKEVEQRRAGGYSRKYASKAKNLADDMVRNTARDLLYYAVTQDAMLIFENLSRGFGRQGKRTFMAERQYTRMEDWLTAKLAYEGLPSKTYLSKTLAQYTSKTCSNCGFTITSADYDRVLEKLKKTATGWMTTINGKELKVEGQITYYNRYKRQNVVKDLSVELDRLSEESVNNDISSWTKGRSGEALSLLKKRFSHRPVQEKFVCLNCGFETHADEQAALNIARSWLFLRSQEYKKYQTNKTTGNTDKRAFVETWQSFYRKKLKEVWKPAV

SEQ ID NO: 28413 - protein, 978 aa, synthetic construct
  REGION 1..978: note = engineered CasX variant
QEIKRINKIRRRLVKDSNTKKAGKTGPMKTLLVRVMTPDLRERLENLRKKPENIPQPISNTSRANLNKLLTDYTEMKKAILHVYDEEFQKDPVGLMSRVAQPASKKIDQNKLKPEMDEKGNLTTAGFACSQCGQPLFVYKLEQVSEKGKAYTNYFGRCNVAEHEKLILLAQLKPEKDSDEAVTYSLGKFGQRALDFYSIHVTKESTHPVKPLAQIAGNRYASGPVGKALSDACMGTIASFLSKYQDIIIEHQKVVKGNQKRLESLRELAGKENLEYPSVTLPPQPHTKEGVDAYNEVIARVRMWVNLNLWQKLKLSRDDAKPLLRLKGFPSFPLVERQANEVDWWDMVCNVKKLINEKKEDGKVFWQNLAGYKRQEALRPYLSSEEDRKKGKKFARTQLGDLLLHLEKKHGEDWGKVYDEAWERIDKKVEGLSKHIKLEEERRSEDAQSKAALTDWLRAKASFVIEGLKEADKDEFCRCELKLQKWYGDLRGKPFAIEAENSILDISGFSKQYNCAFIWQKDGVKKLNLYLIINYFKGGKLRFKKIKPEAFEANRFYTVINKKSGEIVPMEVNFNFDDPNLIILPLAFGKRQGREFIWNDLLSLETGSLKLANGRVIEKTLYNRRTRQDEPALFVALTFERREVLDSSNIKPMNLIGVDRGENIPAVIALTDPEGCPLSRFKDSLGNPTHILRIGESYKEKQRTIQAKKEVEQRRAGGYSRKYASKAKNLADDMVRNTARDLLYYAVTQDAMLIFENLSRGFGRQGKRTFMAERQYTRMEDWLTAKLAYEGLPSKTYLSKTLAQYTSKTCSNCGFTITSADYDRVLEKLKKTATGWMTTINGKELKVEGQITYYNRYKRQNVVKDLSVELDRLSEESVNNDISSWTKGRSGEALSLLKKRFSHRPVQEKFVCLNCGFETHADEQAALNIARSWLFLRSQEYKKYQTNKTTGNTDKRAFVETWQSFYRKKLKEVWKPAV

SEQ ID NO: 28414 - protein, 979 aa, synthetic construct
  REGION 1..979: note = engineered CasX variant
QEIKRINKIRRRLVKDSNTKKAGKTGPMKTLLVRVMTPDLRERLENLRKKPENIPQPISNTSRANLNKLLTDYTEMKKAILHVYDEEFQKDPVGLMSRVAQPASKKIDQNKLKPEMDEKGNLTTAGFACSQCGQPLFVYKLEQVSEKGKAYTNYFGRCNVAEHEKLILLAQLKPEKDSDEAVTYSLGKFGQRALDFYSIHVTKESTHPVKPLAQIAGNRYASGPVGKALSDACMGTIASFLSKYQDIIIEHQKVVKGNQKRLESLRELAGKENLEYPSVTLPPQPHTKEGVDAYNEVIARVRMWVNLNLWQKLKLSRDDAKPLLRLKGFPSFPLVERQANEVDWWDMVCNVKKLINEKKEDGKVFWQNLAGYKRQEALRPYLSSEEDRKKGKKFARYQLGDLLLHLEKKHEGEDWGKVYDEAWERIDKKVEGLSKHIKLEEERRSEDAQSKAALTDWLRAKASFVIEGLKEADKDEFCRCELKLQKWYGDLRGKPFAIEAENSILDISGFSKQYNCAFIWQKDGVKKLNLYLIINYFKGGKLRFKKIKPEAFEANRFYTVINKKSGEIVPMEVNFNFDDPNLIILPLAFGKRQGREFIWNDLLSLETGSLKLANGRVIEKTLYNRRTRQDEPALFVALTFERREVLDSSNIKPMNLIGVDRGENIPAVIALTDPEGCPLSRFKDSLGNPTHILRIGESYKEKQRTIQAKKEVEQRRAGGYSRKYASKAKNLADDMVRNTARDLLYYAVTQDAMLIFENLSRGFGRQGKRTFMAERQYTRMEDWLTAKLAYEGLPSKTYLSKTLAQYTSKTCSNCGFTITSADYDRVLEKLKKTATGWMTTINGKELKVEGQITYYNRYKRQNVVKDLSVELDRLSEESVNNDISSWTKGRSGEALSLLKKRFSHRPVQEKFVCLNCGFETHADEQAALNIARSWLFLRSQEYKKYQTNKTTGNTDKRAFVETWQSFYRKKLKEVWKPAV

SEQ ID NO: 28415 - protein, 978 aa, synthetic construct
  REGION 1..978: note = engineered CasX variant
QEIKRINKIRRRLVKDSNTKKAGKTGPMKTLLVRVMTPDLRERLENLRKKPENIPQPISNTSRANLNKLLTDYTEMKKAILHVYDEEFQKDPVGLMSRVAQPASKKIDQNKLKPEMDEKGNLTTAGFACSQCGQPLFVYKLEQVSEKGKAYTNYFGRCNVAEHEKLILLAQLKPEKDSDEAVTYSLGKFGQRALDFYSIHVTKESTHPVKPLAQIAGNRYASGPVGKALSDACMGTIASFLSKYQDIIIEHQKVVKGNQKRLESLRELAGKENLEYPSVTLPPQPHTKEGVDAYNEVIARVRMWVNLNLWQKLKLSRDDAKPLLRLKGFPSFPLVERQANEVDWWDMVCNVKKLINEKKEDGKVFWQNLAGYKRQEALRPYLSSEEDRKKGKKFARYQLGDLLLHLEKKHGEDWGKVYDEAWERIDKKVEGLSKHIKLEEERRSEDAQSKAALTDWLRAKASFVIEGLKEADKDEFCRCDLKLQKWYGDLRGKPFAIEAENSILDISGFSKQYNCAFIWQKDGVKKLNLYLIINYFKGGKLRFKKIKPEAFEANRFYTVINKKSGEIVPMEVNFNFDDPNLIILPLAFGKRQGREFIWNDLLSLETGSLKLANGRVIEKTLYNRRTRQDEPALFVALTFERREVLDSSNIKPMNLIGVDRGENIPAVIALTDPEGCPLSRFKDSLGNPTHILRIGESYKEKQRTIQAKKEVEQRRAGGYSRKYASKAKNLADDMVRNTARDLLYYAVTQDAMLIFENLSRGFGRQGKRTFMAERQYTRMEDWLTAKLAYEGLPSKTYLSKTLAQYTSKTCSNCGFTITSADYDRVLEKLKKTATGWMTTINGKELKVEGQITYYNRYKRQNVVKDLSVELDRLSEESVNNDISSWTKGRSGEALSLLKKRFSHRPVQEKFVCLNCGFETHADEQAALNIARSWLFLRSQEYKKYQTNKTTGNTDKRAFVETWQSFYRKKLKEVWKPAV

SEQ ID NO: 28416 - protein, 978 aa, synthetic construct
  REGION 1..978: note = engineered CasX variant
QEIKRINKIRRRLVKDSNTKKAGKTGPMKTLLVRVMTPDLRERLENLRKKPENIPQPISNTSRANLNKLLTDYTEMKKAILHVYDEEFQKDPVGLMSRVAQPASKKIDQNKLKPEMDEKGNLTTAGFACSQCGQPLFVYKLEQVSEKGKAYTNYFGRCNVAEHEKLILLAQLKPEKDSDEAVTYSLGKFGQRALDFYSIHVTKESTHPVKPLAQIAGNRYASGPVGKALSDACMGTIASFLSKYQDIIIEHQKVVKGNQKRLESLRELAGKENLEYPSVTLPPQPHTKEGVDAYNEVIARVRMWVNLNLWQKLKLSRDDAKPLLRLKGFPSFPLVERQANEVDWWDMVCNVKKLINEKKEDGKVFWQNLAGYKRQEALRPYLSSEEDRKKGKKFARYQLGDLLLHLEKKHGEDWGKVYDEAWERIDKKVEGLSKHIKLEEERRSEDAQSKAALTDWLRAKASFVIEGLKEADKDEFCRCELKLQKWYGDLRGKPFAIEAENSILDISGFSKQYNCAFIWQKDGVKKLNLYLIINYFKGGKLRFKKIKPEAFEANRFYTVINKKSGEIVPMEVNFNFDDPNLIILPLAFGKRFGREFIWNDLLSLETGSLKLANGRVIEKTLYNRRTRQDEPALFVALTFERREVLDSSNIKPMNLIGVDRGENIPAVIALTDPEGCPLSRFKDSLGNPTHILRIGESYKEKQRTIQAKKEVEQRRAGGYSRKYASKAKNLADDMVRNTARDLLYYAVTQDAMLIFENLSRGFGRQGKRTFMAERQYTRMEDWLTAKLAYEGLPSKTYLSKTLAQYTSKTCSNCGFTITSADYDRVLEKLKKTATGWMTTINGKELKVEGQITYYNRYKRQNVVKDLSVELDRLSEESVNNDISSWTKGRSGEALSLLKKRFSHRPVQEKFVCLNCGFETHADEQAALNIARSWLFLRSQEYKKYQTNKTTGNTDKRAFVETWQSFYRKKLKEVWKPAV

SEQ ID NO: 28417 - protein, 978 aa, synthetic construct
  REGION 1..978: note = engineered CasX variant
QEIKRINKIRRRLVKDSNTKKAGKTGPMKTLLVRVMTPDLRERLENLRKKPENIPQPISNTSRANLNKLLTDYTEMKKAILHVYDEEFQKDPVGLMSRVAQPASKKIDQNKLKPEMDEKGNLTTAGFACSQCGQPLFVYKLEQVSEKGKAYTNYFGRCNVAEHEKLILLAQLKPEKDSDEAVTYSLGKFGQRALDFYSIHVTKESTHPVKPLAQIAGNRYASGPVGKALSDACMGTIASFLSKYQDIIIEHQKVVKGNQKRLESLRELAGKENLEYPSVTLPPQPHTKEGVDAYNEVIARVRMWVNLNLWQKLKLSRDDAKPLLRLKGFPSFPLVERQANEVDWWDMVCNVKKLINEKKEDGKVFWQNLAGYKRQEALRPYLSSEEDRKKGKKFARYQLGDLLLHLEKKHGEDWGKVYDEAWERIDKKVEGLSKHIKLEEERRSEDAQSKAALTDWLRAKASFVIEGLKEADKDEFCRCELKLQKWYGDLRGKPFAIEAENSILDISGFSKQYNCAFIWQKDGVKKLNLYLIINYFKGGKLRFKKIKPEAFEANRFYTVINKKSGEIVPMEVNFNFDDPNLIILPLAFGKRVGREFIWNDLLSLETGSLKLANGRVIEKTLYNRRTRQDEPALFVALTFERREVLDSSNIKPMNLIGVDRGENIPAVIALTDPEGCPLSRFKDSLGNPTHILRIGESYKEKQRTIQAKKEVEQRRAGGYSRKYASKAKNLADDMVRNTARDLLYYAVTQDAMLIFENLSRGFGRQGKRTFMAERQYTRMEDWLTAKLAYEGLPSKTYLSKTLAQYTSKTCSNCGFTITSADYDRVLEKLKKTATGWMTTINGKELKVEGQITYYNRYKRQNVVKDLSVELDRLSEESVNNDISSWTKGRSGEALSLLKKRFSHRPVQEKFVCLNCGFETHADEQAALNIARSWLFLRSQEYKKYQTNKTTGNTDKRAFVETWQSFYRKKLKEVWKPAV

SEQ ID NO: 28418 - protein, 979 aa, synthetic construct
  REGION 1..979: note = engineered CasX variant
QEIKRINKIRRRLVKDSNTKKAGKTGPMKTLLVRVMTPDLRERLENLRKKPENIPQPISNTSRANLNKLLTDYTEMKKAILHVYDEEFQKDPVGLMSRVAQPASKKIDQNKLKPEMDEKGNLTTAGFACSQCGQPLFVYKLEQVSEKGKAYTNYFGRCNVAEHEKLILLAQLKPEKDSDEAVTYSLGKFGQRALDFYSIHVTKESTHPVKPLAQIAGNRYASGPVGKALSDACMGTIASFLSKYQDIIIEHQKVVKGNQKRLESLRELAGKENLEYPSVTLPPQPHTKEGVDAYNEVIARVRMWVNLNLWQKLKLSRDDAKPLLRLKGFPSFPLVERQANEVDWWDMVCNVKKLINEKKEDGKVFWQNLAGYKRQEALRPYLSSEEDRKKGKKFARYQLGDLLLHLEKKHGEDWGKVYDEAWERIDKKVEGLSKHIKLEEERRSEDAQSKAALTDWLRAKASFVIEGLKEADKDEFCRCELKLQKWYGDLRGKPFAIEAENSILDISGFSKQYNCAFIWQKDGVKKLNLYLIINYFKGGKLRFKKIKPEAFEANRFYTVINKKSGEIVPMEVNFNFDDPNLIILPLAFGKRQGREFIWNDLLSLETGSLKLANGRVIEKTLYNRRTRQDEPALFVALTFERREVLDSSNIKTPMNLIGVDRGENIPAVIALTDPEGCPLSRFKDSLGNPTHILRIGESYKEKQRTIQAKKEVEQRRAGGYSRKYASKAKNLADDMVRNTARDLLYYAVTQDAMLIFENLSRGFGRQGKRTFMAERQYTRMEDWLTAKLAYEGLPSKTYLSKTLAQYTSKTCSNCGFTITSADYDRVLEKLKKTATGWMTTINGKELKVEGQITYYNRYKRQNVVKDLSVELDRLSEESVNNDISSWTKGRSGEALSLLKKRFSHRPVQEKFVCLNCGFETHADEQAALNIARSWLFLRSQEYKKYQTNKTTGNTDKRAFVETWQSFYRKKLKEVWKPAV

SEQ ID NO: 28419 - protein, 979 aa, synthetic construct
  REGION 1..979: note = engineered CasX variant
QEIKRINKIRRRLVKDSNTKKAGKTGPMKTLLVRVMTPDLRERLENLRKKPENIPQPISNTSRANLNKLLTDYTEMKKAILHVYDEEFQKDPVGLMSRVAQPASKKIDQNKLKPEMDEKGNLTTAGFACSQCGQPLFVYKLEQVSEKGKAYTNYFGRCNVAEHEKLILLAQLKPEKDSDEAVTYSLGKFGQRALDFYSIHVTKESTHPVKPLAQIAGNRYASGPVGKALSDACMGTIASFLSKYQDIIIEHQKVVKGNQKRLESLRELAGKENLEYPSVTLPPQPHTKEGVDAYNEVIARVRMWVNLNLWQKLKLSRDDAKPLLRLKGFPSFPLVERQANEVDWWDMVCNVKKLINEKKEDGKVFWQNLAGYKRQEALRPYLSSEEDRKKGKKFARYQLGDLLLHLEKKHGEDWGKVYDEAWERIDKKVEGLSKHIKLEEERRSEDAQSKAALTDWLRAKASFVIEGLKEADKDEFCRCELKLQKWYGDLRGKPFAIEAENSILDISGFSKQYNCAFIWQKDGVKKLNLYLIINYFKGGKLRFKKIKPEAFEANRFYTVINKKSGEIVPMEVNFNFDDPNLIILPLAFGKRQGREFIWNDLLSLETGSLKLANGRVIEKTLYNRRTRQDEPALFVALTFERREVLDSSNIKPMSNLIGVDRGENIPAVIALTDPEGCPLSRFKDSLGNPTHILRIGESYKEKQRTIQAKKEVEQRRAGGYSRKYASKAKNLADDMVRNTARDLLYYAVTQDAMLIFENLSRGFGRQGKRTFMAERQYTRMEDWLTAKLAYEGLPSKTYLSKTLAQYTSKTCSNCGFTITSADYDRVLEKLKKTATGWMTTINGKELKVEGQITYYNRYKRQNVVKDLSVELDRLSEESVNNDISSWTKGRSGEALSLLKKRFSHRPVQEKFVCLNCGFETHADEQAALNIARSWLFLRSQEYKKYQTNKTTGNTDKRAFVETWQSFYRKKLKEVWKPAV

SEQ ID NO: 28420 - protein, 978 aa, synthetic construct
  REGION 1..978: note = engineered CasX variant
QEIKRINKIRRRLVKDSNTKKAGKTGPMKTLLVRVMTPDLRERLENLRKKPENIPQPISNTSRANLNKLLTDYTEMKKAILHVYDEEFQKDPVGLMSRVAQPASKKIDQNKLKPEMDEKGNLTTAGFACSQCGQPLFVYKLEQVSEKGKAYTNYFGRCNVAEHEKLILLAQLKPEKDSDEAVTYSLGKFGQRALDFYSIHVTKESTHPVKPLAQIAGNRYASGPVGKALSDACMGTIASFLSKYQDIIIEHQKVVKGNQKRLESLRELAGKENLEYPSVTLPPQPHTKEGVDAYNEVIARVRMWVNLNLWQKLKLSRDDAKPLLRLKGFPSFPLVERQANEVDWWDMVCNVKKLINEKKEDGKVFWQNLAGYKRQEALRPYLSSEEDRKKGKKFARYQLGDLLLHLEKKHGEDWGKVYDEAWERIDKKVEGLSKHIKLEEERRSEDAQSKAALTDWLRAKASFVIEGLKEADKDEFCRCELKLQKWYGDLRGKPFAIEAENSILDISGFSKQYNCAFIWQKDGVKKLNLYLIINYFKGGKLRFKKIKPEAFEANRFYTVINKKSGEIVPMEVNFNFDDPNLIILPLAFGKRQGREFIWNDLLSLETGSLKLANGRVIEKTLYNRRTRQDEPALFVALTFERREVLDSSNIKPMNLIGVDRGENIPAVIALTDPEGCPLSRFKDSLGNPTHILRIRESYKEKQRTIQAKKEVEQRRAGGYSRKYASKAKNLADDMVRNTARDLLYYAVTQDAMLIFENLSRGFGRQGKRTFMAERQYTRMEDWLTAKLAYEGLPSKTYLSKTLAQYTSKTCSNCGFTITSADYDRVLEKLKKTATGWMTTINGKELKVEGQITYYNRYKRQNVVKDLSVELDRLSEESVNNDISSWTKGRSGEALSLLKKRFSHRPVQEKFVCLNCGFETHADEQAALNIARSWLFLRSQEYKKYQTNKTTGNTDKRAFVETWQSFYRKKLKEVWKPAV

SEQ ID NO: 28421 - protein, 978 aa, synthetic construct
  REGION 1..978: note = engineered CasX variant
QEIKRINKIRRRLVKDSNTKKAGKTGPMKTLLVRVMTPDLRERLENLRKKPENIPQPISNTSRANLNKLLTDYTEMKKAILHVYDEEFQKDPVGLMSRVAQPASKKIDQNKLKPEMDEKGNLTTAGFACSQCGQPLFVYKLEQVSEKGKAYTNYFGRCNVAEHEKLILLAQLKPEKDSDEAVTYSLGKFGQRALDFYSIHVTKESTHPVKPLAQIAGNRYASGPVGKALSDACMGTIASFLSKYQDIIIEHQKVVKGNQKRLESLRELAGKENLEYPSVTLPPQPHTKEGVDAYNEVIARVRMWVNLNLWQKLKLSRDDAKPLLRLKGFPSFPLVERQANEVDWWDMVCNVKKLINEKKEDGKVFWQNLAGYKRQEALRPYLSSEEDRKKGKKFARYQLGDLLLHLEKKHGEDWGKVYDEAWERIDKKVEGLSKHIKLEEERRSEDAQSKAALTDWLRAKASFVIEGLKEADKDEFCRCELKLQKWYGDLRGKPFAIEAENSILDISGFSKQYNCAFIWQKDGVKKLNLYLIINYFKGGKLRFKKIKPEAFEANRFYTVINKKSGEIVPMEVNFNFDDPNLIILPLAFGKRQGREFIWNDLLSLETGSLKLANGRVIEKTLYNRRTRQDEPALFVALTFERREVLDSSNIKPMNLIGVDRGENIPAVIALTDPEGCPLSRFKDSLGNPTHILRIGESYKEKQRTIQAKKEVEQRRAGGYSRKYASKAKNLADDMVRNTARDLLYYAVTQDAMLIFENLSRGFGRQGKRTFSAERQYTRMEDWLTAKLAYEGLPSKTYLSKTLAQYTSKTCSNCGFTITSADYDRVLEKLKKTATGWMTTINGKELKVEGQITYYNRYKRQNVVKDLSVELDRLSEESVNNDISSWTKGRSGEALSLLKKRFSHRPVQEKFVCLNCGFETHADEQAALNIARSWLFLRSQEYKKYQTNKTTGNTDKRAFVETWQSFYRKKLKEVWKPAV

SEQ ID NO: 28422 - protein, 978 aa, synthetic construct
  REGION 1..978: note = engineered CasX variant
QEIKRINKIRRRLVKDSNTKKAGKTGPMKTLLVRVMTPDLRERLENLRKKPENIPQPISNTSRANLNKLLTDYTEMKKAILHVYDEEFQKDPVGLMSRVAQPASKKIDQNKLKPEMDEKGNLTTAGFACSQCGQPLFVYKLEQVSEKGKAYTNYFGRCNVAEHEKLILLAQLKPEKDSDEAVTYSLGKFGQRALDFYSIHVTKESTHPVKPLAQIAGNRYASGPVGKALSDACMGTIASFLSKYQDIIIEHQKVVKGNQKRLESLRELAGKENLEYPSVTLPPQPHTKEGVDAYNEVIARVRMWVNLNLWQKLKLSRDDAKPLLRLKGFPSFPLVERQANEVDWWDMVCNVKKLINEKKEDGKVFWQNLAGYKRQEALRPYLSSEEDRKKGKKFARYQLGDLLLHLEKKHGEDWGKVYDEAWERIDKKVEGLSKHIKLEEERRSEDAQSKAALTDWLRAKASFVIEGLKEADKDEFCRCELKLQKWYGDLRGKPFAIEAENSILDISGFSKQYNCAFIWQKDGVKKLNLYLIINYFKGGKLRFKKIKPEAFEANRFYTVINKKSGEIVPMEVNFNFDDPNLIILPLAFGKRQGREFIWNDLLSLETGSLKLANGRVIEKTLYNRRTRQDEPALFVALTFERREVLDSSNIKPMNLIGVDRGENIPAVIALTDPEGCPLSRFKDSLGNPTHILRIGESYKEKQRTIQAKKEVEQRRAGGYSRKYASKAKNLADDMVRNTARDLLYYAVTQDAMLIFENLSRGFGRQGKRTFMAERQYTRMEDWLTAKLAYEGLPSKTYLSKTLAQYTSKTCSNCGFTITSADYDRVLEKLKKTATGWMTTINGKELKVEGQITYYNRYKRQNVVKDLSVELDRLSEESVNNDISSWDKGRSGEALSLLKKRFSHRPVQEKFVCLNCGFETHADEQAALNIARSWLFLRSQEYKKYQTNKTTGNTDKRAFVETWQSFYRKKLKEVWKPAV

SEQ ID NO: 28423 - protein, 978 aa, synthetic construct
  REGION 1..978: note = engineered CasX variant
QEIKRINKIRRRLVKDSNTKKAGKTGPMKTLLVRVMTPDLRERLENLRKKPENIPQPISNTSRANLNKLLTDYTEMKKAILHVYDEEFQVDPVGLMSRVAQPASKKIDQNKLKPEMDEKGNLTTAGFACSQCGQPLFVYKLEQVSEKGKAYTNYFGRCNVAEHEKLILLAQLKPEKDSDEAVTYSLGKFGQRALDFYSIHVTKESTHPVKPLAQIAGNRYASGPVGKALSDACMGTIASFLSKYQDIIIEHQKVVKGNQKRLESLRELAGKENLEYPSVTLPPQPHTKEGVDAYNEVIARVRMWVNLNLWQKLKLSRDDAKPLLRLKGFPSFPLVERQANEVDWWDMVCNVKKLINEKKEDGKVFWQNLAGYKRQEALRPYLSSEEDRKKGKKFARYQLGDLLLHLEKKHGEDWGKVYDEAWERIDKKVEGLSKHIKLEEERRSEDAQSKAALTDWLRAKASFVIEGLKEADKDEFCRCELKLQKWYGDLRGKPFAIEAENSILDISGFSKQYNCAFIWQKDGVKKLNLYLIINYFKGGKLRFKKIKPEAFEANRFYTVINKKSGEIVPMEVNFNFDDPNLIILPLAFGKRQGREFIWNDLLSLETGSLKLANGRVIEKTLYNRRTRQDEPALFVALTFERREVLDSSNIKPMNLIGVDRGENIPAVIALTDPEGCPLSRFKDSLGNPTHILRIGESYKEKQRTIQAKKEVEQRRAGGYSRKYASKAKNLADDMVRNTARDLLYYAVTQDAMLIFENLSRGFGRQGKRTFMAERQYTRMEDWLTAKLAYEGLPSKTYLSKTLAQYTSKTCSNCGFTITSADYDRVLEKLKKTATGWMTTINGKELKVEGQITYYNRYKRQNVVKDLSVELDRLSEESVNNDISSWTKGRSGEALSLLKKRFSHRPVQEKFVCLNCGFETHADEQAALNIARSWLFLRSQEYKKYQTNKTTGNTDKRAFVETWQSFYRKKLKEVWKPAV

SEQ ID NO: 28424 - protein, 978 aa, synthetic construct
  REGION 1..978: note = engineered CasX variant
QEIKRLNKIRRRLVKDSNTKKAGKTGPMKTLLVRVMTPDLRERLENLRKKPENIPQPISNTSRANLNKLLTDYTEMKKAILHVYDEEFQKDPVGLMSRVAQPASKKIDQNKLKPEMDEKGNLTTAGFACSQCGQPLFVYKLEQVSEKGKAYTNYFGRCNVAEHEKLILLAQLKPEKDSDEAVTYSLGKFGQRALDFYSIHVTKESTHPVKPLAQIAGNRYASGPVGKALSDACMGTIASFLSKYQDIIIEHQKVVKGNQKRLESLRELAGKENLEYPSVTLPPQPHTKEGVDAYNEVIARVRMWVNLNLWQKLKLSRDDAKPLLRLKGFPSFPLVERQANEVDWWDMVCNVKKLINEKKEDGKVFWQNLAGYKRQEALRPYLSSEEDRKKGKKFARYQLGDLLLHLEKKHGEDWGKVYDEAWERIDKKVEGLSKHIKLEEERRSEDAQSKAALTDWLRAKASFVIEGLKEADKDEFCRCELKLQKWYGDLRGKPFAIEAENSILDISGFSKQYNCAFIWQKDGVKKLNLYLIINYFKGGKLRFKKIKPEAFEANRFYTVINKKSGEIVPMEVNFNFDDPNLIILPLAFGKRQGREFIWNDLLSLETGSLKLANGRVIEKTLYNRRTRQDEPALFVALTFERREVLDSSNIKPMNLIGVDRGENIPAVIALTDPEGCPLSRFKDSLGNPTHILRIGESYKEKQRTIQAKKEVEQRRAGGYSRKYASKAKNLADDMVRNTARDLLYYAVTQDAMLIFENLSRGFGRQGKRTFMAERQYTRMEDWLTAKLAYEGLPSKTYLSKTLAQYTSKTCSNCGFTITSADYDRVLEKLKKTATGWMTTINGKELKVEGQITYYNRYKRQNVVKDLSVELDRLSEESVNNDISSWTKGRSGEALSLLKKRFSHRPVQEKFVCLNCGFETHADEQAALNIARSWLFLRSQEYKKYQTNKTTGNTDKRAFVETWQSFYRKKLKEVWKPAV

SEQ ID NO: 28425 - protein, 978 aa, synthetic construct
  REGION 1..978: note = engineered CasX variant
QEIKRINKIRRRLVKDSNTKKAGKTGPMKTLLVRVMTPDLRERLENLRKKPENIPQPISNTSRANLNKLLTDYTEMKKAILHVYDEEFQKDPVGLMSRVAQPASKKIDQNKLKPEMDEKGNLTTAGFACSQCGQPLFVYKLEQVSEKGKAYTNYVGRCNVAEHEKLILLAQLKPEKDSDEAVTYSLGKFGQRALDFYSIHVTKESTHPVKPLAQIAGNRYASGPVGKALSDACMGTIASFLSKYQDIIIEHQKVVKGNQKRLESLRELAGKENLEYPSVTLPPQPHTKEGVDAYNEVIARVRMWVNLNLWQKLKLSRDDAKPLLRLKGFPSFPLVERQANEVDWWDMVCNVKKLINEKKEDGKVFWQNLAGYKRQEALRPYLSSEEDRKKGKKFARYQLGDLLLHLEKKHGEDWGKVYDEAWERIDKKVEGLSKHIKLEEERRSEDAQSKAALTDWLRAKASFVIEGLKEADKDEFCRCELKLQKWYGDLRGKPFAIEAENSILDISGFSKQYNCAFIWQKDGVKKLNLYLIINYFKGGKLRFKKIKPEAFEANRFYTVINKKSGEIVPMEVNFNFDDPNLIILPLAFGKRQGREFIWNDLLSLETGSLKLANGRVIEKTLYNRRTRQDEPALFVALTFERREVLDSSNIKPMNLIGVDRGENIPAVIALTDPEGCPLSRFKDSLGNPTHILRIGESYKEKQRTIQAKKEVEQRRAGGYSRKYASKAKNLADDMVRNTARDLLYYAVTQDAMLIFENLSRGFGRQGKRTFMAERQYTRMEDWLTAKLAYEGLPSKTYLSKTLAQYTSKTCSNCGFTITSADYDRVLEKLKKTATGWMTTINGKELKVEGQITYYNRYKRQNVVKDLSVELDRLSEESVNNDISSWTKGRSGEALSLLKKRFSHRPVQEKFVCLNCGFETHADEQAALNIARSWLFLRSQEYKKYQTNKTTGNTDKRAFVETWQSFYRKKLKEVWKPAV

SEQ ID NO: 28426 - protein, 978 aa, synthetic construct
  REGION 1..978: note = engineered CasX variant
QEIKRINKIRRRLVKDSNTKKAGKTGPMKTLLVRVMTPDLRERLENLRKKPENIPQPISNTSRANLNKLLTDYTEMKKAILHVYDEEFQKDPVGLMSRVAQPASKKIDQNKLKPEMDEKGNLTTAGFACSQCGQPLFVYKLEQVSEKGKAYTNYFGRCNVAEHEKLILLAQLKPEKDSDEAVTYSLGKFGQRALDFYSIHVTKESTHPVKPLAQIAGNRYASGPVGKALSDACMGTIASFLSKYQDIIIEHQKVVKGNQKRLESLRELAGKENLEYPSVTLPPQPHTKEGVDAYNEVIARVRMWVNLNLWQKLKLSRDDAKPLLRLKGFPSFPLVERQANEVDWWDMVCNVKKLINEKKEDGKVFWQNLAGYKRQEALRPYLSSEEDRKKGKKFARYQLGDLLLHLEKKHGEDWGKVYDEAWERIDKKVEGLSKHIKLEEERRSEDAQSKAALTDWLRAKASFVIEGLKEADKDEFCRCELKLQKWYGDLRGKPFAIEAENSILDISGFSKQYNCAFIWQKDGVKKLNLYLIINYFKGGKLRFKKIKPEAFEANRFYTVINKKSGEIVPMEVNFNFDDPNLIILPLAFGKRQGREFIWNDLLSLETGSLKLANGRVIEKTLYNRRTRQDEPALFVALTFERREVLDSSNIKPMNLIGVDRGENIPAVIALTDPEGCPLSRFKDSLGNPTHILRIGESYKEKQRTIQAKKEVEQRRAGGYSRKYASKAKNLADDMVRNTARDLLYYAVTQDAMLIFENLSRGFGRQGKRTFMAERQYTRMEDWLTAKLAYEGLASKTYLSKTLAQYTSKTCSNCGFTITSADYDRVLEKLKKTATGWMTTINGKELKVEGQITYYNRYKRQNVVKDLSVELDRLSEESVNNDISSWTKGRSGEALSLLKKRFSHRPVQEKFVCLNCGFETHADEQAALNIARSWLFLRSQEYKKYQTNKTTGNTDKRAFVETWQSFYRKKLKEVWKPAV

SEQ ID NO: 28427 - protein, 978 aa, synthetic construct
  REGION 1..978: note = engineered CasX variant
QEIKRINKIRRRLVKDSNTKKAGKTGPMKTLLVRVMTPDLRERLENLRKKPENIPQPISNTSRANLNKLLTDYTEMKKAILHVYDEEFQKDPVGLMSRVAQPASKKIDQNKLKPEMDEKGNLTTAGFACSQCGQPLFVYKLEQVSEKGKAYTNYFGRCNVAEHEKLILLAQLKPEKDSDEAVTYSLGKFGQRALDFYSIHVTKESTHPVKPLAQIAGNRYASGPVGKALSDACMGTIASFLSKYQDIIIEHQKVVKGNQKRLESLRELAGKENLEYPSVTLPPQPHTKEGVDAYNEVIARVRMWVNLNLWQKLKLSRDDAKPLLRLKGFPSFPLVERQANEVDWWDMVCNVKKLINEKKEDGKVFWQNLAGYKRQEALRPYLSSEEDRKKGKKFARYQLGDLLLHLEKKHGEDWGKVYDEAWERIDKKVEGLSKHIKLEEERRSEDAQSKAALTDWLRAKASFVIEGLKEADKDEFCRCELKLQKWYGDLRGKPFAIEAENSILDISGFSKQYNCAFIWQKDGVKKLNLYLIINYFKGGKLRFKKIKPEAFEANRFYTVINKKSGEIVPMEVNFNFDDPNLIILPLAFGKRQGREFIWNDLLSLETGSLKLANGRVIEKTLYNRRTRQDEPALFVALTFERREVLDSSNIKPMNLIGVDRGENIPAVIALTDPEGCPLSRFKDSLGNPTHILRIGESYKEKQRTIQAKKEVEQRRAGGYSRKYASKAKNLADDMVRNTARDLLYYAVTQDAMLIFENLSRGFGRQGKRTFMAERQYTRMEDWLTAKLAYEGLPSKVYLSKTLAQYTSKTCSNCGFTITSADYDRVLEKLKKTATGWMTTINGKELKVEGQITYYNRYKRQNVVKDLSVELDRLSEESVNNDISSWTKGRSGEALSLLKKRFSHRPVQEKFVCLNCGFETHADEQAALNIARSWLFLRSQEYKKYQTNKTTGNTDKRAFVETWQSFYRKKLKEVWKPAV

SEQ ID NO: 28428 - protein, 979 aa, synthetic construct
  REGION 1..979: note = engineered CasX variant
QEIKRINKIRRRLVKDSNTKKAGKTGPMKTLLVRVMTPDLRERLENLRKKPENIPQPISNTSRANLNKLLTDYTEMKKAILHVYDEEFQKDPVGLMSRVAQPASKKIDQNKLKPEMDEKGNLTTAGFACSQCGQPLFVYKLEQVSEKGKAYTNYFGRCNVAEHEKLILLAQLKPEKDSDEAVTYSLGKFGQRALDFYSIHVTKESTHPVKPLAQIAGNRYASGPVGKALSDACMGTIASFLSKYQDIIIEHQKVVKGNQKRLESLRELAGKENLEYPSVTLPPQPHTKEGVDAYNEVIARVRMWVNLNLWQKLKLSRDDAKPLLRLKGFPSFPLVERQANEVDWWDMVCNVKKLINEKKEDGKVFWQNLAGYKRQEALRPYLSSEEDRKKGKKFARYQLGDLLLHLEKKHGEDWGKVYDEAWERIDKKVEGLSKHIKLEEERRSEDAQSKAALTDWLRAKASFVIEGLKEADKDEFCRCELKLQKWYGDLRGKPFAIEAENSILDISGFSKQYNCAFIWQKDGVKKLNLYLIINYFKGGKLRFKKIKPEAFEANRFYTVINKKSGEIVPMEVNFNFDDPNLIILPLAFGKRQGREFIWNDLLSLETGSLKLANGRVIEKTLYNRRTRQDEPALFVALTFERREVLDSSNIKPMNLIGVDRGENIPAVIALTDPEGCPLSRFKDSLGNPTHILRIGESYKEKQRTIQAKKEVEQRRAGGYSRKYASKAKNLADDMVRNTARDLLYYAVTQDAMLIFENLSRGFGRQGKRTFMAERQYTRMEDWLTAKLAYEGPLPSKTYLSKTLAQYTSKTCSNCGFTITSADYDRVLEKLKKTATGWMTTINGKELKVEGQITYYNRYKRQNVVKDLSVELDRLSEESVNNDISSWTKGRSGEALSLLKKRFSHRPVQEKFVCLNCGFETHADEQAALNIARSWLFLRSQEYKKYQTNKTTGNTDKRAFVETWQSFYRKKLKEVWKPAV

SEQ ID NO: 28429 - protein, 979 aa, synthetic construct
  REGION 1..979: note = engineered CasX variant
QEIKRINKIRRRLVKDSNTKKAGKTGPMKTLLVRVMTPDLRERLENLRKKPENIPQPISNTSRANLNKLLTDYTEMKKAILHVYDEEFQKDPVGLMSRVAQPASKKIDQNKLKPEMDEKGNLTTAGFACSQCGQPLFVYKLEQVSEKGKAYTNYFGRCNVAEHEKLILLAQLKPEKDSDEAVTYSLGKFGQRALDFYSIHVTKESTHPVKPLAQIAGNRYASGPVGKALSDACMGTIASFLSKYQDIIIEHQKVVKGNQKRLESLRELAGKENLEYPSVTLPPQPHTKEGVDAYNEVIARVRMWVNLNLWQKLKLSRDDAKPLLRLKGFPSFPLVERQANEVDWWDMVCNVKKLINEKKEDGKVFWQNLAGYKRQEALRPYLSSEEDVRKKGKKFARYQLGDLLLHLEKKHGEDWGKVYDEAWERIDKKVEGLSKHIKLEEERRSEDAQSKAALTDWLRAKASFVIEGLKEADKDEFCRCELKLQKWYGDLRGKPFAIEAENSILDISGFSKQYNCAFIWQKDGVKKLNLYLIINYFKGGKLRFKKIKPEAFEANRFYTVINKKSGEIVPMEVNFNFDDPNLIILPLAFGKRQGREFIWNDLLSLETGSLKLANGRVIEKTLYNRRTRQDEPALFVALTFERREVLDSSNIKPMNLIGVDRGENIPAVIALTDPEGCPLSRFKDSLGNPTHILRIGESYKEKQRTIQAKKEVEQRRAGGYSRKYASKAKNLADDMVRNTARDLLYYAVTQDAMLIFENLSRGFGRQGKRTFMAERQYTRMEDWLTAKLAYEGLPSKTYLSKTLAQYTSKTCSNCGFTITSADYDRVLEKLKKTATGWMTTINGKELKVEGQITYYNRYKRQNVVKDLSVELDRLSEESVNNDISSWTKGRSGEALSLLKKRFSHRPVQEKFVCLNCGFETHADEQAALNIARSWLFLRSQEYKKYQTNKTTGNTDKRAFVETWQSFYRKKLKEVWKPAV

SEQ ID NO: 28430 - protein, 978 aa, synthetic construct
  REGION 1..978: note = engineered CasX variant
QEIKRINKIRRRLVKDSNTKKAGKTGPMKTLLVRVMTPDLRERLENLRKKPENIPQPISNTSRANLNKLLTDYTEMKKAILHVYDEEFQKDPVGLMSRVAQPASKKIDQNKLKPEMDEKGNLTTAGFACSQCGQPLFVYKLEQVSEKGKAYTNYFGRCNVAEHEKLILLAQLKPEKDSDEAVTYSLGKFGQRALDFYSIHVTKESTHPVKPLAQIAGNRYASGPVGKALSDACMGTIASFLSKYQDIIIEHQKVVKGNQKRLESLRELAGKENLEYPSVTLPPQPHTKEGVDAYNEVIARVRMWVNLNLWQKLKLSRDDAKPLLRLKGFPSFPLVERQANEVDWWDMVCNVKKLINEKKEDGKVFWQNLAGYKRQEALRPYLSSEEDRKKGKKFARYQLGDLLLHLEKKHGEDWGKVYDEAWERIDKKVEGLSKHIKLEEERRSEDAQSKAALTDWLRAKASFVIEGLKEADKDEFCRCELKLQKWYGDLRGKPFAIEAENSILDISGFSKQYNCAFIWQKDGVKKLNLYLIINYFKGGKLRFKKIKPEAFEANRFYTVINKKSGEIVPMEVNFNFDDPNLIILPLAFGKRQGREFIWNDLLSLETGSLKLANGRVIEKTLYNRRTRQDEPALFVALTFERREVLDSSNIKPMNLIGVDRGENIPAVIALTDPEGCPLSRFKDSLGNPTHILRIGESYKEKQRTIQAKKEVEQRRAGGYSRKYASKAKNLADDMVRNTARDLLYYAVTQDAMLIFENLSRGFGRQGKRTFMAERQYTRMEDWLTAKLAYEGLPSKTYLSKTLAQYTSKTCSNCGFTITSADYDRMLEKLKKTATGWMTTINGKELKVEGQITYYNRYKRQNVVKDLSVELDRLSEESVNNDISSWTKGRSGEALSLLKKRFSHRPVQEKFVCLNCGFETHADEQAALNIARSWLFLRSQEYKKYQTNKTTGNTDKRAFVETWQSFYRKKLKEVWKPAV

SEQ ID NO: 28431 - protein, 978 aa, synthetic construct
  REGION 1..978: note = engineered CasX variant
QEIKRINKIRRRLVKDSNTKKAGKTGPMKTLLVRVMTPDLRERLENLRKKPENIPQPISNTSRANLNKLLTDYTEMKKAILHVYDEEFQKDPVGLMSRVAQPASKKIDQNKLKPEMDEKGNLTTAGFACSQCGQPLFVYKLEQVSEKGKAYTNYFGRCNVAEHEKLILLAQLKPEKDSDEAVTYSLGKFGQRALDFYSIHVTKESTHPVKPLAQIAGNRYASGPVGKALSDACMGTIASFLSKYQDIIIEHQKVVKGNQKRLESLRELAGKENLEYPSVTLPPQPHTKEGVDAYNEVIARVRMWVNLNLWQKLKLSRDDAKPLLRLKGFPSFPLVERQANEVDWWDMVCNVKKLINEKKEDGKVFWQNLAGYKRQEALRPYLSSEEDRKKGKKFARYQLGDLLLHLEKKHGEDWGKVYDEAWERIDKKVEGLSKHIKLEEERRSEDAQSKAALTDWLRAKASFVIEGLKEADKDEFCRCELKLQKWYGDLRGKPFAIEAENSILDISGFSKQYNCAFIWQKDGVKKLNLYLIINYFKGGKLRFKKIKPEAFEANRFYTVINKKSGEIVPMEVNFNFDDPNLIILPLAFGKRQGREFIWNDLLSLETGSLKLANGRVIEKTLYNRRTRQDEPALFVALTFERREVLDSSNIKPMNLIGVDRGENIPAVIALTDPEGCPLSRFKDSLGNPTHILRIGESYKEKQRTIQAKKEVEQRRAGGYSRKYASKAKNLADDMVRNTARDLLYYAVTQDAMLIFENLSRGFGRQGKRTFMAERQYTRMEDWLTAKLAYEGLPSKTYLSKTLAQYTSKTCSNCGFTITSADYDRVLEKLKKTATGWMTTINGKELKVEGQITYYNRYKRQNVVKDLSVELDRLSEESVNNDISSWTKGRQGEALSLLKKRFSHRPVQEKFVCLNCGFETHADEQAALNIARSWLFLRSQEYKKYQTNKTTGNTDKRAFVETWQSFYRKKLKEVWKPAV

SEQ ID NO: 28432 - protein, 978 aa, synthetic construct
  REGION 1..978: note = engineered CasX variant
QEIKRINKIRRRLVKDSNTKKAGKTGPMKTLLVRVMTPDLRERLENLRKKPENIPQPISNTSRANLNKLLTDYTEMKKAILHVYDEEFQKDPVGLMSRVAQPASKKIDQNKLKPEMDEKGNLTTAGFACSQCGQPLFVYKLEQVSEKGKAYTNYFGRCNVAEHEKLILLAQLKPEKDSDEAVTYSLGKFGQRALDFYSIHVTKESTHPVKPLAQIAGNRYASGPVGKALSDACMGTIASFLSKYQDIIIEHQKVVKGNQKRLESLRELAGKENLEYPSVTLPPQPHTKEGVDAYNEVIARVRMWVNLNLWQKLKLSRDDAKPLLRLKGFPSFPLVERQANEVDWWDMVCNVKKLINEKKEDGKVFWQNLAGYKRQEALRPYLSSEEDRKKGKKFARYQLGDLLLHLEKKHGEDWGKVYDEAWERIDKKVEGLSKHIKLEEERRSEDAQSKAALTDWLRAKASFVIEGLKEADKDEFCRCELKLQKWYGDLRGKPFAIEAENSILDISGFSKQYNCAFIWQKDGVKKLNLYLIINYFKGGKLRFKKIKPEAFEANRFYTVINKKSGEIVPMEVNFNFDDPNLIILPLAFGKRQGREFIWNDLLSLETGSLKLANGRVIEKTLYNRRTRQDEPALFVALTFERREVLDSSNIKPMNLIGVDRGENIPAVIALTDPEGCPLSRFKDSLGNPTHILRIGESYKEKQRTIQAKKEVEQRRAGGYSRKYASKAKNLADDMVRNTARDLLYYAVTQDAMLIFENLSRGFGRQGKRTFMAERQYTRMEDWLTAKLAYEGLPSKTYLSKTLAQYTSKTCSNCGFTITSADYDRVLEKLKKTATGWMTTINGKELKVEGQITYYNRYKRQNVVKDLSVELDRLSEESVNNDISSWTKGRSGEALSLLKKRFSHRPVQEKFVCLNCEFETHADEQAALNIARSWLFLRSQEYKKYQTNKTTGNTDKRAFVETWQSFYRKKLKEVWKPAV

SEQ ID NO: 28433 - protein, 979 aa, synthetic construct
  REGION 1..979: note = engineered CasX variant
QEIKRINKIRRRLVKDSNTKKAGKTGPMKTLLVRVMTPDLRERLENLRKKPENIPQPISNTSRANLNKLLTDYTEMKKAILHVYDEEFQKDPVGLMSRVAQPASKKIDQNKLKPEMDEKGNLTTAGFACSQCGQPLFVYKLEQVSEKGKAYTNYFGRCNVAEHEKLILLAQLKPEKDSDEAVTYSLGKFGQRALDFYSIHVTKESTHPVKPLAQIAGNRYASGPVGKALSDACMGTIASFLSKYQDIIIEHQKVVKGNQKRLESLRELAGKENLEYPSVTLPPQPHTKEGVDAYNEVIARVRMWVNLNLWQKLKLSRDDAKPLLRLKGFPSFPLVERQANEVDWWDMVCNVKKLINEKKEDGKVFWQNLAGYKRQEALRPYLSSEEDRKKGKKFARYQLGDLLLHLEKKHGEDWGKVYDEAWERIDKKVEGLSKHIKLEEERRSEDAQSKAALTDWLRAKASFVIEGLKEADKDEFCRCELKLQKWYGDLRGKPFAIEAENSILDISGFSKQYNCAFIWQKDGVKKLNLYLIINYFKGGKLRFKKIKPEAFEANRFYTVINKKSGEIVPMEVNFNFDDPNLIILPLAFGKRQGREFIWNDLLSLETGSLKLANGRVIEKTLYNRRTRQDEPALFVALTFERREVLDSSNIKPMNLIGVDRGENIPAVIALTDPEGCPLSRFKDSLGNPTHILRIGESYKEKQRTIQAKKEVEQRRAGGYSRKYASKAKNLADDMVRNTARDLLYYAVTQDAMLIFENLSRGFGRQGKRTFMAERQYTRMEDWLTAKLAYEGLPSKTYLSKTLAQYTSKTCSNCGFTITSADYDRVLEKLKKTATGWMTTINGKELKVEGQITYYNRYKRQNVVKDLSVELDRLSEESVNNDISSWTKGRSGEALSLLKKRFSHRPVQEKFVCLNCGFETHADEQAALNIARSWLFLRSQEYKKYQTNKTSTGNTDKRAFVETWQSFYRKKLKEVWKPAV

SEQ ID NO: 28434 - protein, 979 aa, synthetic construct
  REGION 1..979: note = engineered CasX variant
QEIKRINKIRRRLVKDSNTKKAGKTGPMKTLLVRVMTPDLRERLENLRKKPENIPQPISNTSRANLNKLLTDYTEMKKAILHVYDEEFQKDPVGLMSRVAQPASKKIDQNKLKPEMDEKGNLTTAGFACSQCGQPLFVYKLEQVSEKGKAYTNYFGRCNVAEHEKLILLAQLKPEKDSDEAVTYSLGKFGQRALDFYSIHVTKESTHPVKPLAQIAGNRYASGPVGKALSDACMGTIASFLSKYQDIIIEHQKVVKGNQKRLESLRELAGKENLEYPSVTLPPQPHTKEGVDAYNEVIARVRMWVNLNLWQKLKLSRDDAKPLLRLKGFPSFPLVERQANEVDWWDMVCNVKKLINEKKEDGKVFWQNLAGYKRQEALRPYLSSEEDRKKGKKFARYQLGDLLLHLEKKHGEDWGKVYDEAWERIDKKVEGLSKHIKLEEERRSEDAQSKAALTDWLRAKASFVIEGLKEADKDEFCRCELKLQKWYGDLRGKPFAIEAENSILDISGFSKQYNCAFIWQKDGVKKLNLYLIINYFKGGKLRFKKIKPEAFEANRFYTVINKKSGEIVPMEVNFNFDDPNLIILPLAFGKRQGREFIWNDLLSLETGSLKLANGRVIEKTLYNRRTRQDEPALFVALTFERREVLDSSNIKPMNLIGVDRGENIPAVIALTDPEGCPLSRFKDSLGNPTHILRIGESYKEKQRTIQAKKEVEQRRAGGYSRKYASKAKNLADDMVRNTARDLLYYAVTQDAMLIFENLSRGFGRQGKRTFMAERQYTRMEDWLTAKLAYEGLPSKTYLSKTLAQYTSKTCSNCGFTITSADYDRVLEKLKKTATGWMTTINGKELKVEGQITYYNRYKRQNVVKDLSVELDRLSEESVNNDISSWTKGRSGEALSLLKKRFSHRPVQEKFVCLNCGFETHADEQAALNIARSWLFLRSQEYKKYQTNKTTGKNTDKRAFVETWQSFYRKKLKEVWKPAV

SEQ ID NO: 28435 - protein, 978 aa, synthetic construct
  REGION 1..978: note = engineered CasX variant
QEIKRINKIRRRLVKDSNTKKAGKTGPMKTLLVRVMTPDLRERLENLRKKPENIPQPISNTSRANLNKLLTDYTEMKKAILHVYDEEFQKDPVGLMSRVAQPASKKIDQNKLKPEMDEKGNLTTAGFACSQCGQPLFVYKLEQVSEKGKAYTNYFGRCNVAEHEKLILLAQLKPEKDSDEAVTYSLGKFGQRALDFYSIHVTKESTHPVKPLAQIAGNRYASGPVGKALSDACMGTIASFLSKYQDIIIEHQKVVKGNQKRLESLRELAGKENLEYPSVTLPPQPHTKEGVDAYNEVIARVRMWVNLNLWQKLKLSRDDAKPLLRLKKFPSFPLVERQANEVDWWDMVCNVKKLINEKKEDGKVFWQNLAGYKRQEALRPYLSSEEDRKKGKKFARYQLGDLLLHLEKKHGEDWGKVYDEAWERIDKKVEGLSKHIKLEEERRSEDAQSKAALTDWLRAKASFVIEGLKEADKDEFCRCELKLQKWYGDLRGKPFAIEAENSILDISGFSKQYNCAFIWQKDGVKKLNLYLIINYFKGGKLRFKKIKPEAFEANRFYTVINKKSGEIVPMEVNFNFDDPNLIILPLAFGKRQGREFIWNDLLSLETGSLKLANGRVIEKTLYNRRTRQDEPALFVALTFERREVLDSSNIKPMNLIGVDRGENIPAVIALTDPEGCPLSRFKDSLGNPTHILRIGESYKEKQRTIQAKKEVEQRRAGGYSRKYASKAKNLADDMVRNTARDLLYYAVTQDAMLIFENLSRGFGRQGKRTFMAERQYTRMEDWLTAKLAYEGLPSKTYLSKTLAQYTSKTCSNCGFTITSADYDRVLEKLKKTATGWMTTINGKELKVEGQITYYNRYKRQNVVKDLSVELDRLSEESVNNDISSWTKGRSGEALSLLKKRFSHRPVQEKFVCLNCGFETHADEQAALNIARSWLFLRSQEYKKYQTNKTTGNTDKRAFVETWQSFYRKKLKEVWKPAV

SEQ ID NO: 28436 - protein, 978 aa, synthetic construct
  REGION 1..978: note = engineered CasX variant
QEIKRINKIRRRLVKDSNTKKAGKTGPMKTLLVRVMTPDLRERLENLRKKPENIPQPISNTSRANLNKLLTDYTEMKKAILHVYDEEFQKDPVGLMSRVAQPASKKIDQNKLKPEMDEKGNLTTAGFACSQCGQPLFVYKLEQVSEKGKAYTNYFGRCNVAEHEKLILLAQLKPEKDSDEAVTYSLGKFGQRALDFYSIHVTKESTHPVKPLAQIAGNRYASGPVGKALSDACMGTIASFLSKYQDIIIEHQKVVKGNQKRLESLRELAGKENLEYPSVTLPPQPHTKEGVDAYNEVIARVRMWVNLNLWQKLKLSRDDAKPLLRLKGFPSFPLVERQANEVDWWDMVCNVKKLINEKKEDGKVFWQNLAGYKRQEALRPYLSSEEDRKKGKKFARYQLGDLLLHLEKKHGEDWGKVYDEAWERIDKKVEGLSKHIKLEEERRSEDAQSKAALTDWLRAKASFVIEGLKEADKDEFCRCELKLQKWYGDLRGKPFAIEAENSILDISGFSKQYNCAFIWQKDGVKKLNLYLIINYFKGGKLRFKKIKPEAFEANRFYTVINKKSGEIVPMEVNFNFDDPNLIILPLAFGKRQGREFIWNDLLSLETGSLKLANGRVIEKTLYNRRTRQDEPALFVALTFERREVLDSSNIKPMNLIGVDRGENIPAVIALTDPEGCPLSRFKDSLGNPTHILRIGERYKEKQRTIQAKKEVEQRRAGGYSRKYASKAKNLADDMVRNTARDLLYYAVTQDAMLIFENLSRGFGRQGKRTFMAERQYTRMEDWLTAKLAYEGLPSKTYLSKTLAQYTSKTCSNCGFTITSADYDRVLEKLKKTATGWMTTINGKELKVEGQITYYNRYKRQNVVKDLSVELDRLSEESVNNDISSWTKGRSGEALSLLKKRFSHRPVQEKFVCLNCGFETHADEQAALNIARSWLFLRSQEYKKYQTNKTTGNTDKRAFVETWQSFYRKKLKEVWKPAV

SEQ ID NO: 28437 - protein, 978 aa, synthetic construct
  REGION 1..978: note = engineered CasX variant
QEIKRINKIRRRLVKDSNTKKAGKTGPMKTLLVRVMTPDLRERLENLRKKPENIPQPISNTSRANLNKLLTDYTEMKKAILHVYDEEFQKDPVGLMSRVAQPASKKIDQNKLKPEMDEKGNLTTAGFACSQCGQPLFVYKLEQVSEKGKAYTNYFGRCNVAEHEKLILLAQLKPEKDSDEAVTYSLGKFGQRALDFYSIHVTKESTHPVKPLAQIAGNRYASGPVGKALSDACMGTIASFLSKYQDIIIEHQKVVKGNQKRLESLRELAGKENLEYPSVTLPPQPHTKEGVDAYNEVIARVRMWVNLNLWQKLKLSRDDAKPLLRLKGFPSFPLVERQANEVDWWDMVCNVKKLINEKKEDGKVFWQNLAGYKRQEALRPYLSSEEDRKKGKKFARYQLGDLLLHLEKKHGEDWGKVYDEAWERIDKKVEGLSKHIKLEEERRSEDAQSKAALTDWLRAKASFVIEGLKEADKDEFCRCELKLQKWYGDLRGKPFAIEAENSILDISGFSKQYNCAFIWQKDGVKKLNLYLIINYFKGGKLRFKKIKPEAFEANRFYTVINKKSGEIVPMEVNFNFDDPNLIILPLAFGKRQGREFIWNDLLSLETGSLQLANGRVIEKTLYNRRTRQDEPALFVALTFERREVLDSSNIKPMNLIGVDRGENIPAVIALTDPEGCPLSRFKDSLGNPTHILRIGESYKEKQRTIQAKKEVEQRRAGGYSRKYASKAKNLADDMVRNTARDLLYYAVTQDAMLIFENLSRGFGRQGKRTFMAERQYTRMEDWLTAKLAYEGLPSKTYLSKTLAQYTSKTCSNCGFTITSADYDRVLEKLKKTATGWMTTINGKELKVEGQITYYNRYKRQNVVKDLSVELDRLSEESVNNDISSWTKGRSGEALSLLKKRFSHRPVQEKFVCLNCGFETHADEQAALNIARSWLFLRSQEYKKYQTNKTTGNTDKRAFVETWQSFYRKKLKEVWKPAV

SEQ ID NO: 28438 - protein, 978 aa, synthetic construct
  REGION 1..978: note = engineered CasX variant
QEIKRINKIRRRLVKDSNTKKAGKTGPMKTLLVRVMTPDLRERLENLRKKPENIPQPISNTSRANLNKLLTDYTEMKKAILHVYWEEFQKDPVGLMSRVAQPASKKIDQNKLKPEMDEKGNLTTAGFACSQCGQPLFVYKLEQVSEKGKAYTNYFGRCNVAEHEKLIKLYQLKPEKDSDEAVTYSLGKFGQRALDFYSIHVTKESTHPVKPLAQIAGNRYASGPVGKALSDACMGTIASFLSKYQDIIIEHQKVVKGNQKRLESLRELAGKENLEYPSVTLPPQPHTKEGVDAYNEVIARVRMWVNLNLWQKLKLSRDDAKPLLRLKGFPSFPLVERQANEVDWWDMVCNVKKLINEKKEDGKVFWQNLAGYKRQEALRPYLSSEEDRKKGKKFARYQLGDLLLHLEKKHGEDWGKVYDEAWERIDKKVEGLSKHIKLEEERRSEDAQSKAALTDWLRAKASFVIEGLKEADKDEFCRCELKLQKWYGDLRGKPFAIEAENSILDISGFSKQYNCAFIWQKDGVKKLNLYLIINYFKGGKLRFKKIKPEAFEANRFYTVINKKSGEIVPMEVNFNFDDPNLIILPLAFGKRQGREFIWNDLLSLETGSLKLANGRVIEKTLYNRRTRQDEPALFVALTFERREVLDSSNIKPMNLIGVDRGENIPAVIALTDPEGCPLSRFKDSLGNPTHILRIGESYKEKQRTIQAKKEVEQRRAGGYSRKYASKAKNLADDMVRNTARDLLYYAVTQDAMLIFENLSRGFGRQGKRTFMAERQYTRMEDWLTAKLAYEGLPSKTYLSKTLAQYTSKTCSNCGFTITSADYDRVLEKLKKTATGWMTTINGKELKVEGQITYYNRYKRQNVVKDLSVELDRLSEESVNNDISSWTKGRSGEALSLLKKRFSHRPVQEKFVCLNCGFETHADEQAALNIARSWLFLRSQEYKKYQTNKTTGNTDKRAFVETWQSFYRKKLKEVWKPAV

SEQ ID NO: 28439 - protein, 978 aa, synthetic construct
  REGION 1..978: note = engineered CasX variant
QEIKRINKIRRRLVKDSNTKKAGKTGPMKTLLVRVMTPDLRERLENLRKKPENIPQPISNTSRANLNKLLTDYTEMKKAILHVYWEEFQKDPVGLMSRVAQPASKKIDQNKLKPEMDEKGNLTTAGFACSQCGQPLFVYKLEQVSEKGKAYTNYFGRCNVAEHEKLIKLSQLKPEKDSDEAVTYSLGKFGQRALDFYSIHVTKESTHPVKPLAQIAGNRYASGPVGKALSDACMGTIASFLSKYQDIIIEHQKVVKGNQKRLESLRELAGKENLEYPSVTLPPQPHTKEGVDAYNEVIARVRMWVNLNLWQKLKLSRDDAKPLLRLKGFPSFPLVERQANEVDWWDMVCNVKKLINEKKEDGKVFWQNLAGYKRQEALRPYLSSEEDRKKGKKFARYQLGDLLLHLEKKHGEDWGKVYDEAWERIDKKVEGLSKHIKLEEERRSEDAQSKAALTDWLRAKASFVIEGLKEADKDEFCRCELKLQKWYGDLRGKPFAIEAENSILDISGFSKQYNCAFIWQKDGVKKLNLYLIINYFKGGKLRFKKIKPEAFEANRFYTVINKKSGEIVPMEVNFNFDDPNLIILPLAFGKRQGREFIWNDLLSLETGSLKLANGRVIEKTLYNRRTRQDEPALFVALTFERREVLDSSNIKPMNLIGVDRGENIPAVIALTDPEGCPLSRFKDSLGNPTHILRIGESYKEKQRTIQAKKEVEQRRAGGYSRKYASKAKNLADDMVRNTARDLLYYAVTQDAMLIFENLSRGFGRQGKRTFMAERQYTRMEDWLTAKLAYEGLPSKTYLSKTLAQYTSKTCSNCGFTITSADYDRVLEKLKKTATGWMTTINGKELKVEGQITYYNRYKRQNVVKDLSVELDRLSEESVNNDISSWTKGRSGEALSLLKKRFSHRPVQEKFVCLNCGFETHADEQAALNIARSWLFLRSQEYKKYQTNKTTGNTDKRAFVETWQSFYRKKLKEVWKPAV

SEQ ID NO: 28440 - protein, 977 aa, synthetic construct
  REGION 1..977: note = engineered CasX variant
QEIKRINKIRRRLVKDSNTKKAGKTGPMKTLLVRVMTPDLRERLENLRKKPENIPQPISNTSRANLNKLLTDYTEMKKAILHVYWEEFQKDPVGLMSRVAQPASKKIDQNKLKPEMDEKGNLTTAGFACSQCGQPLFVYKLEQVSEKGKAYTNYFGRCNVAEHEKLIKLAQLKPEKDSDEAVTYSLGKFGQRALDFYSIHVTKESTHPVKPLAQIAGNRYASPVGKALSDACMGTIASFLSKYQDIIIEHQKVVKGNQKRLESLRELAGKENLEYPSVTLPPQPHTKEGVDAYNEVIARVRMWVNLNLWQKLKLSRDDAKPLLRLKGFPSFPLVERQANEVDWWDMVCNVKKLINEKKEDGKVFWQNLAGYKRQEALRPYLSSEEDRKKGKKFARYQLGDLLLHLEKKHGEDWGKVYDEAWERIDKKVEGLSKHIKLEEERRSEDAQSKAALTDWLRAKASFVIEGLKEADKDEFCRCELKLQKWYGDLRGKPFAIEAENSILDISGFSKQYNCAFIWQKDGVKKLNLYLIINYFKGGKLRFKKIKPEAFEANRFYTVINKKSGEIVPMEVNFNFDDPNLIILPLAFGKRQGREFIWNDLLSLETGSLKLANGRVIEKTLYNRRTRQDEPALFVALTFERREVLDSSNIKPMNLIGVDRGENIPAVIALTDPEGCPLSRFKDSLGNPTHILRIGESYKEKQRTIQAKKEVEQRRAGGYSRKYASKAKNLADDMVRNTARDLLYYAVTQDAMLIFENLSRGFGRQGKRTFMAERQYTRMEDWLTAKLAYEGLPSKTYLSKTLAQYTSKTCSNCGFTITSADYDRVLEKLKKTATGWMTTINGKELKVEGQITYYNRYKRQNVVKDLSVELDRLSEESVNNDISSWTKGRSGEALSLLKKRFSHRPVQEKFVCLNCGFETHADEQAALNIARSWLFLRSQEYKKYQTNKTTGNTDKRAFVETWQSFYRKKLKEVWKPAV

SEQ ID NO: 28441 - protein, 978 aa, synthetic construct
  REGION 1..978: note = engineered CasX variant
QEIKRINKIRRRLVKDSNTKKAGKTGPMKTLLVRVMTPDLRERLENLRKKPENIPQPISNTSRANLNKLLTDYTEMKKAILHVYWEEFQKDPVGLMSRVAQPASKKIDQNKLKPEMDEKGNLTTAGFACSQCGQPLFVYKLEQVSEKGKAYTNYFGRCNVAEHEKLIKLAQLKPEKDSDEAVTYSLGKFGQRALDFYSIHVTKESTHPVKPLAQIAGNRYASGPVGKALSDACMGTIASFLSKYQDIIIEHQKVVKGNQKRLESLRELAGKENLEYPSVTLPPQPHTSEGVDAYNEVIARVRMWVNLNLWQKLKLSRDDAKPLLRLKGFPSFPLVERQANEVDWWDMVCNVKKLINEKKEDGKVFWQNLAGYKRQEALRPYLSSEEDRKKGKKFARYQLGDLLLHLEKKHGEDWGKVYDEAWERIDKKVEGLSKHIKLEEERRSEDAQSKAALTDWLRAKASFVIEGLKEADKDEFCRCELKLQKWYGDLRGKPFAIEAENSILDISGFSKQYNCAFIWQKDGVKKLNLYLIINYFKGGKLRFKKIKPEAFEANRFYTVINKKSGEIVPMEVNFNFDDPNLIILPLAFGKRQGREFIWNDLLSLETGSLKLANGRVIEKTLYNRRTRQDEPALFVALTFERREVLDSSNIKPMNLIGVDRGENIPAVIALTDPEGCPLSRFKDSLGNPTHILRIGESYKEKQRTIQAKKEVEQRRAGGYSRKYASKAKNLADDMVRNTARDLLYYAVTQDAMLIFENLSRGFGRQGKRTFMAERQYTRMEDWLTAKLAYEGLPSKTYLSKTLAQYTSKTCSNCGFTITSADYDRVLEKLKKTATGWMTTINGKELKVEGQITYYNRYKRQNVVKDLSVELDRLSEESVNNDISSWTKGRSGEALSLLKKRFSHRPVQEKFVCLNCGFETHADEQAALNIARSWLFLRSQEYKKYQTNKTTGNTDKRAFVETWQSFYRKKLKEVWKPAV

SEQ ID NO: 28442 - protein, 978 aa, synthetic construct
  REGION 1..978: note = engineered CasX variant
QEIKRINKIRRRLVKDSNTKKAGKTGPMKTLLVRVMTPDLRERLENLRKKPENIPQPISNTSRANLNKLLTDYTEMKKAILHVYWEEFQKDPVGLMSRVAQPASKKIDQNKLKPEMDEKGNLTTAGFACSQCGQPLFVYKLEQVSEKGKAYTNYFGRCNVAEHEKLIKLAQLKPEKDSDEAVTYSLGKFGQRALDFYSIHVTKESTHPVKPLAQIAGNRYASGPVGKALSDACMGTIASFLSKYQDIIIEHQKVVKGNQKRLESLRELAGKENLEYPSVTLPPQPHTKEGLDAYNEVIARVRMWVNLNLWQKLKLSRDDAKPLLRLKGFPSFPLVERQANEVDWWDMVCNVKKLINEKKEDGKVFWQNLAGYKRQEALRPYLSSEEDRKKGKKFARYQLGDLLLHLEKKHGEDWGKVYDEAWERIDKKVEGLSKHIKLEEERRSEDAQSKAALTDWLRAKASFVIEGLKEADKDEFCRCELKLQKWYGDLRGKPFAIEAENSILDISGFSKQYNCAFIWQKDGVKKLNLYLIINYFKGGKLRFKKIKPEAFEANRFYTVINKKSGEIVPMEVNFNFDDPNLIILPLAFGKRQGREFIWNDLLSLETGSLKLANGRVIEKTLYNRRTRQDEPALFVALTFERREVLDSSNIKPMNLIGVDRGENIPAVIALTDPEGCPLSRFKDSLGNPTHILRIGESYKEKQRTIQAKKEVEQRRAGGYSRKYASKAKNLADDMVRNTARDLLYYAVTQDAMLIFENLSRGFGRQGKRTFMAERQYTRMEDWLTAKLAYEGLPSKTYLSKTLAQYTSKTCSNCGFTITSADYDRVLEKLKKTATGWMTTINGKELKVEGQITYYNRYKRQNVVKDLSVELDRLSEESVNNDISSWTKGRSGEALSLLKKRFSHRPVQEKFVCLNCGFETHADEQAALNIARSWLFLRSQEYKKYQTNKTTGNTDKRAFVETWQSFYRKKLKEVWKPAV

SEQ ID NO: 28443 - protein, 978 aa, synthetic construct
  REGION 1..978: note = engineered CasX variant
QEIKRINKIRRRLVKDSNTKKAGKTGPMKTLLVRVMTPDLRERLENLRKKPENIPQPISNTSRANLNKLLTDYTEMKKAILHVYWEEFQKDPVGLMSRVAQPASKKIDQNKLKPEMDEKGNLTTAGFACSQCGQPLFVYKLEQVSEKGKAYTNYFGRCNVAEHEKLIKLAQLKPEKDSDEAVTYSLGKFGQRALDFYSIHVTKESTHPVKPLAQIAGNRYASGPVGKALSDACMGTIASFLSKYQDIIIEHQKVVKGNQKRLESLRELAGKENLEYPSVTLPPQPHTKEGVDAYNEVIARVRTWVNLNLWQKLKLSRDDAKPLLRLKGFPSFPLVERQANEVDWWDMVCNVKKLINEKKEDGKVFWQNLAGYKRQEALRPYLSSEEDRKKGKKFARYQLGDLLLHLEKKHGEDWGKVYDEAWERIDKKVEGLSKHIKLEEERRSEDAQSKAALTDWLRAKASFVIEGLKEADKDEFCRCELKLQKWYGDLRGKPFAIEAENSILDISGFSKQYNCAFIWQKDGVKKLNLYLIINYFKGGKLRFKKIKPEAFEANRFYTVINKKSGEIVPMEVNFNFDDPNLIILPLAFGKRQGREFIWNDLLSLETGSLKLANGRVIEKTLYNRRTRQDEPALFVALTFERREVLDSSNIKPMNLIGVDRGENIPAVIALTDPEGCPLSRFKDSLGNPTHILRIGESYKEKQRTIQAKKEVEQRRAGGYSRKYASKAKNLADDMVRNTARDLLYYAVTQDAMLIFENLSRGFGRQGKRTFMAERQYTRMEDWLTAKLAYEGLPSKTYLSKTLAQYTSKTCSNCGFTITSADYDRVLEKLKKTATGWMTTINGKELKVEGQITYYNRYKRQNVVKDLSVELDRLSEESVNNDISSWTKGRSGEALSLLKKRFSHRPVQEKFVCLNCGFETHADEQAALNIARSWLFLRSQEYKKYQTNKTTGNTDKRAFVETWQSFYRKKLKEVWKPAV

SEQ ID NO: 28444 - protein, 978 aa, synthetic construct
  REGION 1..978: note = engineered CasX variant
QEIKRINKIRRRLVKDSNTKKAGKTGPMKTLLVRVMTPDLRERLENLRKKPENIPQPISNTSRANLNKLLTDYTEMKKAILHVYWEEFQKDPVGLMSRVAQPASKKIDQNKLKPEMDEKGNLTTAGFACSQCGQPLFVYKLEQVSEKGKAYTNYFGRCNVAEHEKLIKLAQLKPEKDSDEAVTYSLGKFGQRALDFYSIHVTKESTHPVKPLAQIAGNRYASGPVGKALSDACMGTIASFLSKYQDIIIEHQKVVKGNQKRLESLRELAGKENLEYPSVTLPPQPHTKEGVDAYNEVIARVRWWVNLNLWQKLKLSRDDAKPLLRLKGFPSFPLVERQANEVDWWDMVCNVKKLINEKKEDGKVFWQNLAGYKRQEALRPYLSSEEDRKKGKKFARYQLGDLLLHLEKKHGEDWGKVYDEAWERIDKKVEGLSKHIKLEEERRSEDAQSKAALTDWLRAKASFVIEGLKEADKDEFCRCELKLQKWYGDLRGKPFAIEAENSILDISGFSKQYNCAFIWQKDGVKKLNLYLIINYFKGGKLRFKKIKPEAFEANRFYTVINKKSGEIVPMEVNFNFDDPNLIILPLAFGKRQGREFIWNDLLSLETGSLKLANGRVIEKTLYNRRTRQDEPALFVALTFERREVLDSSNIKPMNLIGVDRGENIPAVIALTDPEGCPLSRFKDSLGNPTHILRIGESYKEKQRTIQAKKEVEQRRAGGYSRKYASKAKNLADDMVRNTARDLLYYAVTQDAMLIFENLSRGFGRQGKRTFMAERQYTRMEDWLTAKLAYEGLPSKTYLSKTLAQYTSKTCSNCGFTITSADYDRVLEKLKKTATGWMTTINGKELKVEGQITYYNRYKRQNVVKDLSVELDRLSEESVNNDISSWTKGRSGEALSLLKKRFSHRPVQEKFVCLNCGFETHADEQAALNIARSWLFLRSQEYKKYQTNKTTGNTDKRAFVETWQSFYRKKLKEVWKPAV

SEQ ID NO: 28445 - protein, 979 aa, synthetic construct
  REGION 1..979: note = engineered CasX variant
QEIKRINKIRRRLVKDSNTKKAGKTGPMKTLLVRVMTPDLRERLENLRKKPENIPQPISNTSRANLNKLLTDYTEMKKAILHVYWEEFQKDPVGLMSRVAQPASKKIDQNKLKPEMDEKGNLTTAGFACSQCGQPLFVYKLEQVSEKGKAYTNYFGRCNVAEHEKLIKLAQLKPEKDSDEAVTYSLGKFGQRALDFYSIHVTKESTHPVKPLAQIAGNRYASGPVGKALSDACMGTIASFLSKYQDIIIEHQKVVKGNQKRLESLRELAGKENLEYPSVTLPPQPHTKEGVDAYNEVIARVRMWVNLNLWQKLKLSRDDAKPLLRLKGFPSFPLVERQQANEVDWWDMVCNVKKLINEKKEDGKVFWQNLAGYKRQEALRPYLSSEEDRKKGKKFARYQLGDLLLHLEKKHGEDWGKVYDEAWERIDKKVEGLSKHIKLEEERRSEDAQSKAALTDWLRAKASFVIEGLKEADKDEFCRCELKLQKWYGDLRGKPFAIEAENSILDISGFSKQYNCAFIWQKDGVKKLNLYLIINYFKGGKLRFKKIKPEAFEANRFYTVINKKSGEIVPMEVNFNFDDPNLIILPLAFGKRQGREFIWNDLLSLETGSLKLANGRVIEKTLYNRRTRQDEPALFVALTFERREVLDSSNIKPMNLIGVDRGENIPAVIALTDPEGCPLSRFKDSLGNPTHILRIGESYKEKQRTIQAKKEVEQRRAGGYSRKYASKAKNLADDMVRNTARDLLYYAVTQDAMLIFENLSRGFGRQGKRTFMAERQYTRMEDWLTAKLAYEGLPSKTYLSKTLAQYTSKTCSNCGFTITSADYDRVLEKLKKTATGWMTTINGKELKVEGQITYYNRYKRQNVVKDLSVELDRLSEESVNNDISSWTKGRSGEALSLLKKRFSHRPVQEKFVCLNCGFETHADEQAALNIARSWLFLRSQEYKKYQTNKTTGNTDKRAFVETWQSFYRKKLKEVWKPAV

SEQ ID NO: 28446 - protein, 979 aa, synthetic construct
  REGION 1..979: note = engineered CasX variant
QEIKRINKIRRRLVKDSNTKKAGKTGPMKTLLVRVMTPDLRERLENLRKKPENIPQPISNTSRANLNKLLTDYTEMKKAILHVYWEEFQKDPVGLMSRVAQPASKKIDQNKLKPEMDEKGNLTTAGFACSQCGQPLFVYKLEQVSEKGKAYTNYFGRCNVAEHEKLIKLAQLKPEKDSDEAVTYSLGKFGQRALDFYSIHVTKESTHPVKPLAQIAGNRYASGPVGKALSDACMGTIASFLSKYQDIIIEHQKVVKGNQKRLESLRELAGKENLEYPSVTLPPQPHTKEGVDAYNEVIARVRMWVNLNLWQKLKLSRDDAKPLLRLKGFPSFPLVERQANAEVDWWDMVCNVKKLINEKKEDGKVFWQNLAGYKRQEALRPYLSSEEDRKKGKKFARYQLGDLLLHLEKKHGEDWGKVYDEAWERIDKKVEGLSKHIKLEEERRSEDAQSKAALTDWLRAKASFVIEGLKEADKDEFCRCELKLQKWYGDLRGKPFAIEAENSILDISGFSKQYNCAFIWQKDGVKKLNLYLIINYFKGGKLRFKKIKPEAFEANRFYTVINKKSGEIVPMEVNFNFDDPNLIILPLAFGKRQGREFIWNDLLSLETGSLKLANGRVIEKTLYNRRTRQDEPALFVALTFERREVLDSSNIKPMNLIGVDRGENIPAVIALTDPEGCPLSRFKDSLGNPTHILRIGESYKEKQRTIQAKKEVEQRRAGGYSRKYASKAKNLADDMVRNTARDLLYYAVTQDAMLIFENLSRGFGRQGKRTFMAERQYTRMEDWLTAKLAYEGLPSKTYLSKTLAQYTSKTCSNCGFTITSADYDRVLEKLKKTATGWMTTINGKELKVEGQITYYNRYKRQNVVKDLSVELDRLSEESVNNDISSWTKGRSGEALSLLKKRFSHRPVQEKFVCLNCGFETHADEQAALNIARSWLFLRSQEYKKYQTNKTTGNTDKRAFVETWQSFYRKKLKEVWKPAV

SEQ ID NO: 28447 - protein, 978 aa, synthetic construct
  REGION 1..978: note = engineered CasX variant
QEIKRINKIRRRLVKDSNTKKAGKTGPMKTLLVRVMTPDLRERLENLRKKPENIPQPISNTSRANLNKLLTDYTEMKKAILHVYWEEFQKDPVGLMSRVAQPASKKIDQNKLKPEMDEKGNLTTAGFACSQCGQPLFVYKLEQVSEKGKAYTNYFGRCNVAEHEKLIKLAQLKPEKDSDEAVTYSLGKFGQRALDFYSIHVTKESTHPVKPLAQIAGNRYASGPVGKALSDACMGTIASFLSKYQDIIIEHQKVVKGNQKRLESLRELAGKENLEYPSVTLPPQPHTKEGVDAYNEVIARVRMWVNLNLWQKLKLSRDDAKPLLRLKGFPSFPLVERQANEVDWWDMVCNVKKLINEKKEDGKVFWQNLAGYKRQEALRPYLSSEEDRKKGKKFARTQLGDLLLHLEKKHGEDWGKVYDEAWERIDKKVEGLSKHIKLEEERRSEDAQSKAALTDWLRAKASFVIEGLKEADKDEFCRCELKLQKWYGDLRGKPFAIEAENSILDISGFSKQYNCAFIWQKDGVKKLNLYLIINYFKGGKLRFKKIKPEAFEANRFYTVINKKSGEIVPMEVNFNFDDPNLIILPLAFGKRQGREFIWNDLLSLETGSLKLANGRVIEKTLYNRRTRQDEPALFVALTFERREVLDSSNIKPMNLIGVDRGENIPAVIALTDPEGCPLSRFKDSLGNPTHILRIGESYKEKQRTIQAKKEVEQRRAGGYSRKYASKAKNLADDMVRNTARDLLYYAVTQDAMLIFENLSRGFGRQGKRTFMAERQYTRMEDWLTAKLAYEGLPSKTYLSKTLAQYTSKTCSNCGFTITSADYDRVLEKLKKTATGWMTTINGKELKVEGQITYYNRYKRQNVVKDLSVELDRLSEESVNNDISSWTKGRSGEALSLLKKRFSHRPVQEKFVCLNCGFETHADEQAALNIARSWLFLRSQEYKKYQTNKTTGNTDKRAFVETWQSFYRKKLKEVWKPAV

SEQ ID NO: 28448 - protein, 979 aa, synthetic construct
  REGION 1..979: note = engineered CasX variant
QEIKRINKIRRRLVKDSNTKKAGKTGPMKTLLVRVMTPDLRERLENLRKKPENIPQPISNTSRANLNKLLTDYTEMKKAILHVYWEEFQKDPVGLMSRVAQPASKKIDQNKLKPEMDEKGNLTTAGFACSQCGQPLFVYKLEQVSEKGKAYTNYFGRCNVAEHEKLIKLAQLKPEKDSDEAVTYSLGKFGQRALDFYSIHVTKESTHPVKPLAQIAGNRYASGPVGKALSDACMGTIASFLSKYQDIIIEHQKVVKGNQKRLESLRELAGKENLEYPSVTLPPQPHTKEGVDAYNEVIARVRMWVNLNLWQKLKLSRDDAKPLLRLKGFPSFPLVERQANEVDWWDMVCNVKKLINEKKEDGKVFWQNLAGYKRQEALRPYLSSEEDRKKGKKFARYQLGDLLLHLEKKHEGEDWGKVYDEAWERIDKKVEGLSKHIKLEEERRSEDAQSKAALTDWLRAKASFVIEGLKEADKDEFCRCELKLQKWYGDLRGKPFAIEAENSILDISGFSKQYNCAFIWQKDGVKKLNLYLIINYFKGGKLRFKKIKPEAFEANRFYTVINKKSGEIVPMEVNFNFDDPNLIILPLAFGKRQGREFIWNDLLSLETGSLKLANGRVIEKTLYNRRTRQDEPALFVALTFERREVLDSSNIKPMNLIGVDRGENIPAVIALTDPEGCPLSRFKDSLGNPTHILRIGESYKEKQRTIQAKKEVEQRRAGGYSRKYASKAKNLADDMVRNTARDLLYYAVTQDAMLIFENLSRGFGRQGKRTFMAERQYTRMEDWLTAKLAYEGLPSKTYLSKTLAQYTSKTCSNCGFTITSADYDRVLEKLKKTATGWMTTINGKELKVEGQITYYNRYKRQNVVKDLSVELDRLSEESVNNDISSWTKGRSGEALSLLKKRFSHRPVQEKFVCLNCGFETHADEQAALNIARSWLFLRSQEYKKYQTNKTTGNTDKRAFVETWQSFYRKKLKEVWKPAV

SEQ ID NO: 28449 - protein, 978 aa, synthetic construct
  REGION 1..978: note = engineered CasX variant
QEIKRINKIRRRLVKDSNTKKAGKTGPMKTLLVRVMTPDLRERLENLRKKPENIPQPISNTSRANLNKLLTDYTEMKKAILHVYWEEFQKDPVGLMSRVAQPASKKIDQNKLKPEMDEKGNLTTAGFACSQCGQPLFVYKLEQVSEKGKAYTNYFGRCNVAEHEKLIKLAQLKPEKDSDEAVTYSLGKFGQRALDFYSIHVTKESTHPVKPLAQIAGNRYASGPVGKALSDACMGTIASFLSKYQDIIIEHQKVVKGNQKRLESLRELAGKENLEYPSVTLPPQPHTKEGVDAYNEVIARVRMWVNLNLWQKLKLSRDDAKPLLRLKGFPSFPLVERQANEVDWWDMVCNVKKLINEKKEDGKVFWQNLAGYKRQEALRPYLSSEEDRKKGKKFARYQLGDLLLHLEKKHGEDWGKVYDEAWERIDKKVEGLSKHIKLEEERRSEDAQSKAALTDWLRAKASFVIEGLKEADKDEFCRCDLKLQKWYGDLRGKPFAIEAENSILDISGFSKQYNCAFIWQKDGVKKLNLYLIINYFKGGKLRFKKIKPEAFEANRFYTVINKKSGEIVPMEVNFNFDDPNLIILPLAFGKRQGREFIWNDLLSLETGSLKLANGRVIEKTLYNRRTRQDEPALFVALTFERREVLDSSNIKPMNLIGVDRGENIPAVIALTDPEGCPLSRFKDSLGNPTHILRIGESYKEKQRTIQAKKEVEQRRAGGYSRKYASKAKNLADDMVRNTARDLLYYAVTQDAMLIFENLSRGFGRQGKRTFMAERQYTRMEDWLTAKLAYEGLPSKTYLSKTLAQYTSKTCSNCGFTITSADYDRVLEKLKKTATGWMTTINGKELKVEGQITYYNRYKRQNVVKDLSVELDRLSEESVNNDISSWTKGRSGEALSLLKKRFSHRPVQEKFVCLNCGFETHADEQAALNIARSWLFLRSQEYKKYQTNKTTGNTDKRAFVETWQSFYRKKLKEVWKPAV

SEQ ID NO: 28450 - protein, 978 aa, synthetic construct
  REGION 1..978: note = engineered CasX variant
QEIKRINKIRRRLVKDSNTKKAGKTGPMKTLLVRVMTPDLRERLENLRKKPENIPQPISNTSRANLNKLLTDYTEMKKAILHVYWEEFQKDPVGLMSRVAQPASKKIDQNKLKPEMDEKGNLTTAGFACSQCGQPLFVYKLEQVSEKGKAYTNYFGRCNVAEHEKLIKLAQLKPEKDSDEAVTYSLGKFGQRALDFYSIHVTKESTHPVKPLAQIAGNRYASGPVGKALSDACMGTIASFLSKYQDIIIEHQKVVKGNQKRLESLRELAGKENLEYPSVTLPPQPHTKEGVDAYNEVIARVRMWVNLNLWQKLKLSRDDAKPLLRLKGFPSFPLVERQANEVDWWDMVCNVKKLINEKKEDGKVFWQNLAGYKRQEALRPYLSSEEDRKKGKKFARYQLGDLLLHLEKKHGEDWGKVYDEAWERIDKKVEGLSKHIKLEEERRSEDAQSKAALTDWLRAKASFVIEGLKEADKDEFCRCELKLQKWYGDLRGKPFAIEAENSILDISGFSKQYNCAFIWQKDGVKKLNLYLIINYFKGGKLRFKKIKPEAFEANRFYTVINKKSGEIVPMEVNFNFDDPNLIILPLAFGKRFGREFIWNDLLSLETGSLKLANGRVIEKTLYNRRTRQDEPALFVALTFERREVLDSSNIKPMNLIGVDRGENIPAVIALTDPEGCPLSRFKDSLGNPTHILRIGESYKEKQRTIQAKKEVEQRRAGGYSRKYASKAKNLADDMVRNTARDLLYYAVTQDAMLIFENLSRGFGRQGKRTFMAERQYTRMEDWLTAKLAYEGLPSKTYLSKTLAQYTSKTCSNCGFTITSADYDRVLEKLKKTATGWMTTINGKELKVEGQITYYNRYKRQNVVKDLSVELDRLSEESVNNDISSWTKGRSGEALSLLKKRFSHRPVQEKFVCLNCGFETHADEQAALNIARSWLFLRSQEYKKYQTNKTTGNTDKRAFVETWQSFYRKKLKEVWKPAV

SEQ ID NO: 28451 - protein, 978 aa, synthetic construct
  REGION 1..978: note = engineered CasX variant
QEIKRINKIRRRLVKDSNTKKAGKTGPMKTLLVRVMTPDLRERLENLRKKPENIPQPISNTSRANLNKLLTDYTEMKKAILHVYWEEFQKDPVGLMSRVAQPASKKIDQNKLKPEMDEKGNLTTAGFACSQCGQPLFVYKLEQVSEKGKAYTNYFGRCNVAEHEKLIKLAQLKPEKDSDEAVTYSLGKFGQRALDFYSIHVTKESTHPVKPLAQIAGNRYASGPVGKALSDACMGTIASFLSKYQDIIIEHQKVVKGNQKRLESLRELAGKENLEYPSVTLPPQPHTKEGVDAYNEVIARVRMWVNLNLWQKLKLSRDDAKPLLRLKGFPSFPLVERQANEVDWWDMVCNVKKLINEKKEDGKVFWQNLAGYKRQEALRPYLSSEEDRKKGKKFARYQLGDLLLHLEKKHGEDWGKVYDEAWERIDKKVEGLSKHIKLEEERRSEDAQSKAALTDWLRAKASFVIEGLKEADKDEFCRCELKLQKWYGDLRGKPFAIEAENSILDISGFSKQYNCAFIWQKDGVKKLNLYLIINYFKGGKLRFKKIKPEAFEANRFYTVINKKSGEIVPMEVNFNFDDPNLIILPLAFGKRVGREFIWNDLLSLETGSLKLANGRVIEKTLYNRRTRQDEPALFVALTFERREVLDSSNIKPMNLIGVDRGENIPAVIALTDPEGCPLSRFKDSLGNPTHILRIGESYKEKQRTIQAKKEVEQRRAGGYSRKYASKAKNLADDMVRNTARDLLYYAVTQDAMLIFENLSRGFGRQGKRTFMAERQYTRMEDWLTAKLAYEGLPSKTYLSKTLAQYTSKTCSNCGFTITSADYDRVLEKLKKTATGWMTTINGKELKVEGQITYYNRYKRQNVVKDLSVELDRLSEESVNNDISSWTKGRSGEALSLLKKRFSHRPVQEKFVCLNCGFETHADEQAALNIARSWLFLRSQEYKKYQTNKTTGNTDKRAFVETWQSFYRKKLKEVWKPAV

SEQ ID NO: 28452 - protein, 979 aa, synthetic construct
  REGION 1..979: note = engineered CasX variant
QEIKRINKIRRRLVKDSNTKKAGKTGPMKTLLVRVMTPDLRERLENLRKKPENIPQPISNTSRANLNKLLTDYTEMKKAILHVYWEEFQKDPVGLMSRVAQPASKKIDQNKLKPEMDEKGNLTTAGFACSQCGQPLFVYKLEQVSEKGKAYTNYFGRCNVAEHEKLIKLAQLKPEKDSDEAVTYSLGKFGQRALDFYSIHVTKESTHPVKPLAQIAGNRYASGPVGKALSDACMGTIASFLSKYQDIIIEHQKVVKGNQKRLESLRELAGKENLEYPSVTLPPQPHTKEGVDAYNEVIARVRMWVNLNLWQKLKLSRDDAKPLLRLKGFPSFPLVERQANEVDWWDMVCNVKKLINEKKEDGKVFWQNLAGYKRQEALRPYLSSEEDRKKGKKFARYQLGDLLLHLEKKHGEDWGKVYDEAWERIDKKVEGLSKHIKLEEERRSEDAQSKAALTDWLRAKASFVIEGLKEADKDEFCRCELKLQKWYGDLRGKPFAIEAENSILDISGFSKQYNCAFIWQKDGVKKLNLYLIINYFKGGKLRFKKIKPEAFEANRFYTVINKKSGEIVPMEVNFNFDDPNLIILPLAFGKRQGREFIWNDLLSLETGSLKLANGRVIEKTLYNRRTRQDEPALFVALTFERREVLDSSNIKTPMNLIGVDRGENIPAVIALTDPEGCPLSRFKDSLGNPTHILRIGESYKEKQRTIQAKKEVEQRRAGGYSRKYASKAKNLADDMVRNTARDLLYYAVTQDAMLIFENLSRGFGRQGKRTFMAERQYTRMEDWLTAKLAYEGLPSKTYLSKTLAQYTSKTCSNCGFTITSADYDRVLEKLKKTATGWMTTINGKELKVEGQITYYNRYKRQNVVKDLSVELDRLSEESVNNDISSWTKGRSGEALSLLKKRFSHRPVQEKFVCLNCGFETHADEQAALNIARSWLFLRSQEYKKYQTNKTTGNTDKRAFVETWQSFYRKKLKEVWKPAV

SEQ ID NO: 28453 - protein, 979 aa, synthetic construct
  REGION 1..979: note = engineered CasX variant
QEIKRINKIRRRLVKDSNTKKAGKTGPMKTLLVRVMTPDLRERLENLRKKPENIPQPISNTSRANLNKLLTDYTEMKKAILHVYWEEFQKDPVGLMSRVAQPASKKIDQNKLKPEMDEKGNLTTAGFACSQCGQPLFVYKLEQVSEKGKAYTNYFGRCNVAEHEKLIKLAQLKPEKDSDEAVTYSLGKFGQRALDFYSIHVTKESTHPVKPLAQIAGNRYASGPVGKALSDACMGTIASFLSKYQDIIIEHQKVVKGNQKRLESLRELAGKENLEYPSVTLPPQPHTKEGVDAYNEVIARVRMWVNLNLWQKLKLSRDDAKPLLRLKGFPSFPLVERQANEVDWWDMVCNVKKLINEKKEDGKVFWQNLAGYKRQEALRPYLSSEEDRKKGKKFARYQLGDLLLHLEKKHGEDWGKVYDEAWERIDKKVEGLSKHIKLEEERRSEDAQSKAALTDWLRAKASFVIEGLKEADKDEFCRCELKLQKWYGDLRGKPFAIEAENSILDISGFSKQYNCAFIWQKDGVKKLNLYLIINYFKGGKLRFKKIKPEAFEANRFYTVINKKSGEIVPMEVNFNFDDPNLIILPLAFGKRQGREFIWNDLLSLETGSLKLANGRVIEKTLYNRRTRQDEPALFVALTFERREVLDSSNIKPMSNLIGVDRGENIPAVIALTDPEGCPLSRFKDSLGNPTHILRIGESYKEKQRTIQAKKEVEQRRAGGYSRKYASKAKNLADDMVRNTARDLLYYAVTQDAMLIFENLSRGFGRQGKRTFMAERQYTRMEDWLTAKLAYEGLPSKTYLSKTLAQYTSKTCSNCGFTITSADYDRVLEKLKKTATGWMTTINGKELKVEGQITYYNRYKRQNVVKDLSVELDRLSEESVNNDISSWTKGRSGEALSLLKKRFSHRPVQEKFVCLNCGFETHADEQAALNIARSWLFLRSQEYKKYQTNKTTGNTDKRAFVETWQSFYRKKLKEVWKPAV

SEQ ID NO: 28454 - protein, 978 aa, synthetic construct
  REGION 1..978: note = engineered CasX variant
QEIKRINKIRRRLVKDSNTKKAGKTGPMKTLLVRVMTPDLRERLENLRKKPENIPQPISNTSRANLNKLLTDYTEMKKAILHVYWEEFQKDPVGLMSRVAQPASKKIDQNKLKPEMDEKGNLTTAGFACSQCGQPLFVYKLEQVSEKGKAYTNYFGRCNVAEHEKLIKLAQLKPEKDSDEAVTYSLGKFGQRALDFYSIHVTKESTHPVKPLAQIAGNRYASGPVGKALSDACMGTIASFLSKYQDIIIEHQKVVKGNQKRLESLRELAGKENLEYPSVTLPPQPHTKEGVDAYNEVIARVRMWVNLNLWQKLKLSRDDAKPLLRLKGFPSFPLVERQANEVDWWDMVCNVKKLINEKKEDGKVFWQNLAGYKRQEALRPYLSSEEDRKKGKKFARYQLGDLLLHLEKKHGEDWGKVYDEAWERIDKKVEGLSKHIKLEEERRSEDAQSKAALTDWLRAKASFVIEGLKEADKDEFCRCELKLQKWYGDLRGKPFAIEAENSILDISGFSKQYNCAFIWQKDGVKKLNLYLIINYFKGGKLRFKKIKPEAFEANRFYTVINKKSGEIVPMEVNFNFDDPNLIILPLAFGKRQGREFIWNDLLSLETGSLKLANGRVIEKTLYNRRTRQDEPALFVALTFERREVLDSSNIKPMNLIGVDRGENIPAVIALTDPEGCPLSRFKDSLGNPTHILRIRESYKEKQRTIQAKKEVEQRRAGGYSRKYASKAKNLADDMVRNTARDLLYYAVTQDAMLIFENLSRGFGRQGKRTFMAERQYTRMEDWLTAKLAYEGLPSKTYLSKTLAQYTSKTCSNCGFTITSADYDRVLEKLKKTATGWMTTINGKELKVEGQITYYNRYKRQNVVKDLSVELDRLSEESVNNDISSWTKGRSGEALSLLKKRFSHRPVQEKFVCLNCGFETHADEQAALNIARSWLFLRSQEYKKYQTNKTTGNTDKRAFVETWQSFYRKKLKEVWKPAV

SEQ ID NO: 28455 - protein, 978 aa, synthetic construct
  REGION 1..978: note = engineered CasX variant
QEIKRINKIRRRLVKDSNTKKAGKTGPMKTLLVRVMTPDLRERLENLRKKPENIPQPISNTSRANLNKLLTDYTEMKKAILHVYWEEFQKDPVGLMSRVAQPASKKIDQNKLKPEMDEKGNLTTAGFACSQCGQPLFVYKLEQVSEKGKAYTNYFGRCNVAEHEKLIKLAQLKPEKDSDEAVTYSLGKFGQRALDFYSIHVTKESTHPVKPLAQIAGNRYASGPVGKALSDACMGTIASFLSKYQDIIIEHQKVVKGNQKRLESLRELAGKENLEYPSVTLPPQPHTKEGVDAYNEVIARVRMWVNLNLWQKLKLSRDDAKPLLRLKGFPSFPLVERQANEVDWWDMVCNVKKLINEKKEDGKVFWQNLAGYKRQEALRPYLSSEEDRKKGKKFARYQLGDLLLHLEKKHGEDWGKVYDEAWERIDKKVEGLSKHIKLEEERRSEDAQSKAALTDWLRAKASFVIEGLKEADKDEFCRCELKLQKWYGDLRGKPFAIEAENSILDISGFSKQYNCAFIWQKDGVKKLNLYLIINYFKGGKLRFKKIKPEAFEANRFYTVINKKSGEIVPMEVNFNFDDPNLIILPLAFGKRQGREFIWNDLLSLETGSLKLANGRVIEKTLYNRRTRQDEPALFVALTFERREVLDSSNIKPMNLIGVDRGENIPAVIALTDPEGCPLSRFKDSLGNPTHILRIGESYKEKQRTIQAKKEVEQRRAGGYSRKYASKAKNLADDMVRNTARDLLYYAVTQDAMLIFENLSRGFGRQGKRTFSAERQYTRMEDWLTAKLAYEGLPSKTYLSKTLAQYTSKTCSNCGFTITSADYDRVLEKLKKTATGWMTTINGKELKVEGQITYYNRYKRQNVVKDLSVELDRLSEESVNNDISSWTKGRSGEALSLLKKRFSHRPVQEKFVCLNCGFETHADEQAALNIARSWLFLRSQEYKKYQTNKTTGNTDKRAFVETWQSFYRKKLKEVWKPAV

SEQ ID NO: 28456 - protein, 978 aa, synthetic construct
  REGION 1..978: note = engineered CasX variant
QEIKRINKIRRRLVKDSNTKKAGKTGPMKTLLVRVMTPDLRERLENLRKKPENIPQPISNTSRANLNKLLTDYTEMKKAILHVYWEEFQKDPVGLMSRVAQPASKKIDQNKLKPEMDEKGNLTTAGFACSQCGQPLFVYKLEQVSEKGKAYTNYFGRCNVAEHEKLIKLAQLKPEKDSDEAVTYSLGKFGQRALDFYSIHVTKESTHPVKPLAQIAGNRYASGPVGKALSDACMGTIASFLSKYQDIIIEHQKVVKGNQKRLESLRELAGKENLEYPSVTLPPQPHTKEGVDAYNEVIARVRMWVNLNLWQKLKLSRDDAKPLLRLKGFPSFPLVERQANEVDWWDMVCNVKKLINEKKEDGKVFWQNLAGYKRQEALRPYLSSEEDRKKGKKFARYQLGDLLLHLEKKHGEDWGKVYDEAWERIDKKVEGLSKHIKLEEERRSEDAQSKAALTDWLRAKASFVIEGLKEADKDEFCRCELKLQKWYGDLRGKPFAIEAENSILDISGFSKQYNCAFIWQKDGVKKLNLYLIINYFKGGKLRFKKIKPEAFEANRFYTVINKKSGEIVPMEVNFNFDDPNLIILPLAFGKRQGREFIWNDLLSLETGSLKLANGRVIEKTLYNRRTRQDEPALFVALTFERREVLDSSNIKPMNLIGVDRGENIPAVIALTDPEGCPLSRFKDSLGNPTHILRIGESYKEKQRTIQAKKEVEQRRAGGYSRKYASKAKNLADDMVRNTARDLLYYAVTQDAMLIFENLSRGFGRQGKRTFMAERQYTRMEDWLTAKLAYEGLPSKTYLSKTLAQYTSKTCSNCGFTITSADYDRVLEKLKKTATGWMTTINGKELKVEGQITYYNRYKRQNVVKDLSVELDRLSEESVNNDISSWDKGRSGEALSLLKKRFSHRPVQEKFVCLNCGFETHADEQAALNIARSWLFLRSQEYKKYQTNKTTGNTDKRAFVETWQSFYRKKLKEVWKPAV

SEQ ID NO: 28457 - protein, 978 aa, synthetic construct
  REGION 1..978: note = engineered CasX variant
QEIKRINKIRRRLVKDSNTKKAGKTGPMKTLLVRVMTPDLRERLENLRKKPENIPQPISNTSRANLNKLLTDYTEMKKAILHVYWEEFQVDPVGLMSRVAQPASKKIDQNKLKPEMDEKGNLTTAGFACSQCGQPLFVYKLEQVSEKGKAYTNYFGRCNVAEHEKLIKLAQLKPEKDSDEAVTYSLGKFGQRALDFYSIHVTKESTHPVKPLAQIAGNRYASGPVGKALSDACMGTIASFLSKYQDIIIEHQKVVKGNQKRLESLRELAGKENLEYPSVTLPPQPHTKEGVDAYNEVIARVRMWVNLNLWQKLKLSRDDAKPLLRLKGFPSFPLVERQANEVDWWDMVCNVKKLINEKKEDGKVFWQNLAGYKRQEALRPYLSSEEDRKKGKKFARYQLGDLLLHLEKKHGEDWGKVYDEAWERIDKKVEGLSKHIKLEEERRSEDAQSKAALTDWLRAKASFVIEGLKEADKDEFCRCELKLQKWYGDLRGKPFAIEAENSILDISGFSKQYNCAFIWQKDGVKKLNLYLIINYFKGGKLRFKKIKPEAFEANRFYTVINKKSGEIVPMEVNFNFDDPNLIILPLAFGKRQGREFIWNDLLSLETGSLKLANGRVIEKTLYNRRTRQDEPALFVALTFERREVLDSSNIKPMNLIGVDRGENIPAVIALTDPEGCPLSRFKDSLGNPTHILRIGESYKEKQRTIQAKKEVEQRRAGGYSRKYASKAKNLADDMVRNTARDLLYYAVTQDAMLIFENLSRGFGRQGKRTFMAERQYTRMEDWLTAKLAYEGLPSKTYLSKTLAQYTSKTCSNCGFTITSADYDRVLEKLKKTATGWMTTINGKELKVEGQITYYNRYKRQNVVKDLSVELDRLSEESVNNDISSWTKGRSGEALSLLKKRFSHRPVQEKFVCLNCGFETHADEQAALNIARSWLFLRSQEYKKYQTNKTTGNTDKRAFVETWQSFYRKKLKEVWKPAV

SEQ ID NO: 28458 - protein, 978 aa, synthetic construct
  REGION 1..978: note = engineered CasX variant
QEIKRLNKIRRRLVKDSNTKKAGKTGPMKTLLVRVMTPDLRERLENLRKKPENIPQPISNTSRANLNKLLTDYTEMKKAILHVYWEEFQKDPVGLMSRVAQPASKKIDQNKLKPEMDEKGNLTTAGFACSQCGQPLFVYKLEQVSEKGKAYTNYFGRCNVAEHEKLIKLAQLKPEKDSDEAVTYSLGKFGQRALDFYSIHVTKESTHPVKPLAQIAGNRYASGPVGKALSDACMGTIASFLSKYQDIIIEHQKVVKGNQKRLESLRELAGKENLEYPSVTLPPQPHTKEGVDAYNEVIARVRMWVNLNLWQKLKLSRDDAKPLLRLKGFPSFPLVERQANEVDWWDMVCNVKKLINEKKEDGKVFWQNLAGYKRQEALRPYLSSEEDRKKGKKFARYQLGDLLLHLEKKHGEDWGKVYDEAWERIDKKVEGLSKHIKLEEERRSEDAQSKAALTDWLRAKASFVIEGLKEADKDEFCRCELKLQKWYGDLRGKPFAIEAENSILDISGFSKQYNCAFIWQKDGVKKLNLYLIINYFKGGKLRFKKIKPEAFEANRFYTVINKKSGEIVPMEVNFNFDDPNLIILPLAFGKRQGREFIWNDLLSLETGSLKLANGRVIEKTLYNRRTRQDEPALFVALTFERREVLDSSNIKPMNLIGVDRGENIPAVIALTDPEGCPLSRFKDSLGNPTHILRIGESYKEKQRTIQAKKEVEQRRAGGYSRKYASKAKNLADDMVRNTARDLLYYAVTQDAMLIFENLSRGFGRQGKRTFMAERQYTRMEDWLTAKLAYEGLPSKTYLSKTLAQYTSKTCSNCGFTITSADYDRVLEKLKKTATGWMTTINGKELKVEGQITYYNRYKRQNVVKDLSVELDRLSEESVNNDISSWTKGRSGEALSLLKKRFSHRPVQEKFVCLNCGFETHADEQAALNIARSWLFLRSQEYKKYQTNKTTGNTDKRAFVETWQSFYRKKLKEVWKPAV

SEQ ID NO: 28459 - protein, 978 aa, synthetic construct
  REGION 1..978: note = engineered CasX variant
QEIKRINKIRRRLVKDSNTKKAGKTGPMKTLLVRVMTPDLRERLENLRKKPENIPQPISNTSRANLNKLLTDYTEMKKAILHVYWEEFQKDPVGLMSRVAQPASKKIDQNKLKPEMDEKGNLTTAGFACSQCGQPLFVYKLEQVSEKGKAYTNYVGRCNVAEHEKLIKLAQLKPEKDSDEAVTYSLGKFGQRALDFYSIHVTKESTHPVKPLAQIAGNRYASGPVGKALSDACMGTIASFLSKYQDIIIEHQKVVKGNQKRLESLRELAGKENLEYPSVTLPPQPHTKEGVDAYNEVIARVRMWVNLNLWQKLKLSRDDAKPLLRLKGFPSFPLVERQANEVDWWDMVCNVKKLINEKKEDGKVFWQNLAGYKRQEALRPYLSSEEDRKKGKKFARYQLGDLLLHLEKKHGEDWGKVYDEAWERIDKKVEGLSKHIKLEEERRSEDAQSKAALTDWLRAKASFVIEGLKEADKDEFCRCELKLQKWYGDLRGKPFAIEAENSILDISGFSKQYNCAFIWQKDGVKKLNLYLIINYFKGGKLRFKKIKPEAFEANRFYTVINKKSGEIVPMEVNFNFDDPNLIILPLAFGKRQGREFIWNDLLSLETGSLKLANGRVIEKTLYNRRTRQDEPALFVALTFERREVLDSSNIKPMNLIGVDRGENIPAVIALTDPEGCPLSRFKDSLGNPTHILRIGESYKEKQRTIQAKKEVEQRRAGGYSRKYASKAKNLADDMVRNTARDLLYYAVTQDAMLIFENLSRGFGRQGKRTFMAERQYTRMEDWLTAKLAYEGLPSKTYLSKTLAQYTSKTCSNCGFTITSADYDRVLEKLKKTATGWMTTINGKELKVEGQITYYNRYKRQNVVKDLSVELDRLSEESVNNDISSWTKGRSGEALSLLKKRFSHRPVQEKFVCLNCGFETHADEQAALNIARSWLFLRSQEYKKYQTNKTTGNTDKRAFVETWQSFYRKKLKEVWKPAV

SEQ ID NO: 28460 - protein, 978 aa, synthetic construct
  REGION 1..978: note = engineered CasX variant
QEIKRINKIRRRLVKDSNTKKAGKTGPMKTLLVRVMTPDLRERLENLRKKPENIPQPISNTSRANLNKLLTDYTEMKKAILHVYWEEFQKDPVGLMSRVAQPASKKIDQNKLKPEMDEKGNLTTAGFACSQCGQPLFVYKLEQVSEKGKAYTNYFGRCNVAEHEKLIKLAQLKPEKDSDEAVTYSLGKFGQRALDFYSIHVTKESTHPVKPLAQIAGNRYASGPVGKALSDACMGTIASFLSKYQDIIIEHQKVVKGNQKRLESLRELAGKENLEYPSVTLPPQPHTKEGVDAYNEVIARVRMWVNLNLWQKLKLSRDDAKPLLRLKGFPSFPLVERQANEVDWWDMVCNVKKLINEKKEDGKVFWQNLAGYKRQEALRPYLSSEEDRKKGKKFARYQLGDLLLHLEKKHGEDWGKVYDEAWERIDKKVEGLSKHIKLEEERRSEDAQSKAALTDWLRAKASFVIEGLKEADKDEFCRCELKLQKWYGDLRGKPFAIEAENSILDISGFSKQYNCAFIWQKDGVKKLNLYLIINYFKGGKLRFKKIKPEAFEANRFYTVINKKSGEIVPMEVNFNFDDPNLIILPLAFGKRQGREFIWNDLLSLETGSLKLANGRVIEKTLYNRRTRQDEPALFVALTFERREVLDSSNIKPMNLIGVDRGENIPAVIALTDPEGCPLSRFKDSLGNPTHILRIGESYKEKQRTIQAKKEVEQRRAGGYSRKYASKAKNLADDMVRNTARDLLYYAVTQDAMLIFENLSRGFGRQGKRTFMAERQYTRMEDWLTAKLAYEGLASKTYLSKTLAQYTSKTCSNCGFTITSADYDRVLEKLKKTATGWMTTINGKELKVEGQITYYNRYKRQNVVKDLSVELDRLSEESVNNDISSWTKGRSGEALSLLKKRFSHRPVQEKFVCLNCGFETHADEQAALNIARSWLFLRSQEYKKYQTNKTTGNTDKRAFVETWQSFYRKKLKEVWKPAV

SEQ ID NO: 28461 - protein, 978 aa, synthetic construct
  REGION 1..978: note = engineered CasX variant
QEIKRINKIRRRLVKDSNTKKAGKTGPMKTLLVRVMTPDLRERLENLRKKPENIPQPISNTSRANLNKLLTDYTEMKKAILHVYWEEFQKDPVGLMSRVAQPASKKIDQNKLKPEMDEKGNLTTAGFACSQCGQPLFVYKLEQVSEKGKAYTNYFGRCNVAEHEKLIKLAQLKPEKDSDEAVTYSLGKFGQRALDFYSIHVTKESTHPVKPLAQIAGNRYASGPVGKALSDACMGTIASFLSKYQDIIIEHQKVVKGNQKRLESLRELAGKENLEYPSVTLPPQPHTKEGVDAYNEVIARVRMWVNLNLWQKLKLSRDDAKPLLRLKGFPSFPLVERQANEVDWWDMVCNVKKLINEKKEDGKVFWQNLAGYKRQEALRPYLSSEEDRKKGKKFARYQLGDLLLHLEKKHGEDWGKVYDEAWERIDKKVEGLSKHIKLEEERRSEDAQSKAALTDWLRAKASFVIEGLKEADKDEFCRCELKLQKWYGDLRGKPFAIEAENSILDISGFSKQYNCAFIWQKDGVKKLNLYLIINYFKGGKLRFKKIKPEAFEANRFYTVINKKSGEIVPMEVNFNFDDPNLIILPLAFGKRQGREFIWNDLLSLETGSLKLANGRVIEKTLYNRRTRQDEPALFVALTFERREVLDSSNIKPMNLIGVDRGENIPAVIALTDPEGCPLSRFKDSLGNPTHILRIGESYKEKQRTIQAKKEVEQRRAGGYSRKYASKAKNLADDMVRNTARDLLYYAVTQDAMLIFENLSRGFGRQGKRTFMAERQYTRMEDWLTAKLAYEGLPSKVYLSKTLAQYTSKTCSNCGFTITSADYDRVLEKLKKTATGWMTTINGKELKVEGQITYYNRYKRQNVVKDLSVELDRLSEESVNNDISSWTKGRSGEALSLLKKRFSHRPVQEKFVCLNCGFETHADEQAALNIARSWLFLRSQEYKKYQTNKTTGNTDKRAFVETWQSFYRKKLKEVWKPAV

SEQ ID NO: 28462 - protein, 979 aa, synthetic construct
  REGION 1..979: note = engineered CasX variant
QEIKRINKIRRRLVKDSNTKKAGKTGPMKTLLVRVMTPDLRERLENLRKKPENIPQPISNTSRANLNKLLTDYTEMKKAILHVYWEEFQKDPVGLMSRVAQPASKKIDQNKLKPEMDEKGNLTTAGFACSQCGQPLFVYKLEQVSEKGKAYTNYFGRCNVAEHEKLIKLAQLKPEKDSDEAVTYSLGKFGQRALDFYSIHVTKESTHPVKPLAQIAGNRYASGPVGKALSDACMGTIASFLSKYQDIIIEHQKVVKGNQKRLESLRELAGKENLEYPSVTLPPQPHTKEGVDAYNEVIARVRMWVNLNLWQKLKLSRDDAKPLLRLKGFPSFPLVERQANEVDWWDMVCNVKKLINEKKEDGKVFWQNLAGYKRQEALRPYLSSEEDRKKGKKFARYQLGDLLLHLEKKHGEDWGKVYDEAWERIDKKVEGLSKHIKLEEERRSEDAQSKAALTDWLRAKASFVIEGLKEADKDEFCRCELKLQKWYGDLRGKPFAIEAENSILDISGFSKQYNCAFIWQKDGVKKLNLYLIINYFKGGKLRFKKIKPEAFEANRFYTVINKKSGEIVPMEVNFNFDDPNLIILPLAFGKRQGREFIWNDLLSLETGSLKLANGRVIEKTLYNRRTRQDEPALFVALTFERREVLDSSNIKPMNLIGVDRGENIPAVIALTDPEGCPLSRFKDSLGNPTHILRIGESYKEKQRTIQAKKEVEQRRAGGYSRKYASKAKNLADDMVRNTARDLLYYAVTQDAMLIFENLSRGFGRQGKRTFMAERQYTRMEDWLTAKLAYEGPLPSKTYLSKTLAQYTSKTCSNCGFTITSADYDRVLEKLKKTATGWMTTINGKELKVEGQITYYNRYKRQNVVKDLSVELDRLSEESVNNDISSWTKGRSGEALSLLKKRFSHRPVQEKFVCLNCGFETHADEQAALNIARSWLFLRSQEYKKYQTNKTTGNTDKRAFVETWQSFYRKKLKEVWKPAV

SEQ ID NO: 28463 - protein, 979 aa, synthetic construct
  REGION 1..979: note = engineered CasX variant
QEIKRINKIRRRLVKDSNTKKAGKTGPMKTLLVRVMTPDLRERLENLRKKPENIPQPISNTSRANLNKLLTDYTEMKKAILHVYWEEFQKDPVGLMSRVAQPASKKIDQNKLKPEMDEKGNLTTAGFACSQCGQPLFVYKLEQVSEKGKAYTNYFGRCNVAEHEKLIKLAQLKPEKDSDEAVTYSLGKFGQRALDFYSIHVTKESTHPVKPLAQIAGNRYASGPVGKALSDACMGTIASFLSKYQDIIIEHQKVVKGNQKRLESLRELAGKENLEYPSVTLPPQPHTKEGVDAYNEVIARVRMWVNLNLWQKLKLSRDDAKPLLRLKGFPSFPLVERQANEVDWWDMVCNVKKLINEKKEDGKVFWQNLAGYKRQEALRPYLSSEEDVRKKGKKFARYQLGDLLLHLEKKHGEDWGKVYDEAWERIDKKVEGLSKHIKLEEERRSEDAQSKAALTDWLRAKASFVIEGLKEADKDEFCRCELKLQKWYGDLRGKPFAIEAENSILDISGFSKQYNCAFIWQKDGVKKLNLYLIINYFKGGKLRFKKIKPEAFEANRFYTVINKKSGEIVPMEVNFNFDDPNLIILPLAFGKRQGREFIWNDLLSLETGSLKLANGRVIEKTLYNRRTRQDEPALFVALTFERREVLDSSNIKPMNLIGVDRGENIPAVIALTDPEGCPLSRFKDSLGNPTHILRIGESYKEKQRTIQAKKEVEQRRAGGYSRKYASKAKNLADDMVRNTARDLLYYAVTQDAMLIFENLSRGFGRQGKRTFMAERQYTRMEDWLTAKLAYEGLPSKTYLSKTLAQYTSKTCSNCGFTITSADYDRVLEKLKKTATGWMTTINGKELKVEGQITYYNRYKRQNVVKDLSVELDRLSEESVNNDISSWTKGRSGEALSLLKKRFSHRPVQEKFVCLNCGFETHADEQAALNIARSWLFLRSQEYKKYQTNKTTGNTDKRAFVETWQSFYRKKLKEVWKPAV

SEQ ID NO: 28464 - protein, 978 aa, synthetic construct
  REGION 1..978: note = engineered CasX variant
QEIKRINKIRRRLVKDSNTKKAGKTGPMKTLLVRVMTPDLRERLENLRKKPENIPQPISNTSRANLNKLLTDYTEMKKAILHVYWEEFQKDPVGLMSRVAQPASKKIDQNKLKPEMDEKGNLTTAGFACSQCGQPLFVYKLEQVSEKGKAYTNYFGRCNVAEHEKLIKLAQLKPEKDSDEAVTYSLGKFGQRALDFYSIHVTKESTHPVKPLAQIAGNRYASGPVGKALSDACMGTIASFLSKYQDIIIEHQKVVKGNQKRLESLRELAGKENLEYPSVTLPPQPHTKEGVDAYNEVIARVRMWVNLNLWQKLKLSRDDAKPLLRLKGFPSFPLVERQANEVDWWDMVCNVKKLINEKKEDGKVFWQNLAGYKRQEALRPYLSSEEDRKKGKKFARYQLGDLLLHLEKKHGEDWGKVYDEAWERIDKKVEGLSKHIKLEEERRSEDAQSKAALTDWLRAKASFVIEGLKEADKDEFCRCELKLQKWYGDLRGKPFAIEAENSILDISGFSKQYNCAFIWQKDGVKKLNLYLIINYFKGGKLRFKKIKPEAFEANRFYTVINKKSGEIVPMEVNFNFDDPNLIILPLAFGKRQGREFIWNDLLSLETGSLKLANGRVIEKTLYNRRTRQDEPALFVALTFERREVLDSSNIKPMNLIGVDRGENIPAVIALTDPEGCPLSRFKDSLGNPTHILRIGESYKEKQRTIQAKKEVEQRRAGGYSRKYASKAKNLADDMVRNTARDLLYYAVTQDAMLIFENLSRGFGRQGKRTFMAERQYTRMEDWLTAKLAYEGLPSKTYLSKTLAQYTSKTCSNCGFTITSADYDRMLEKLKKTATGWMTTINGKELKVEGQITYYNRYKRQNVVKDLSVELDRLSEESVNNDISSWTKGRSGEALSLLKKRFSHRPVQEKFVCLNCGFETHADEQAALNIARSWLFLRSQEYKKYQTNKTTGNTDKRAFVETWQSFYRKKLKEVWKPAV

SEQ ID NO: 28465 - protein, 978 aa, synthetic construct
  REGION 1..978: note = engineered CasX variant
QEIKRINKIRRRLVKDSNTKKAGKTGPMKTLLVRVMTPDLRERLENLRKKPENIPQPISNTSRANLNKLLTDYTEMKKAILHVYWEEFQKDPVGLMSRVAQPASKKIDQNKLKPEMDEKGNLTTAGFACSQCGQPLFVYKLEQVSEKGKAYTNYFGRCNVAEHEKLIKLAQLKPEKDSDEAVTYSLGKFGQRALDFYSIHVTKESTHPVKPLAQIAGNRYASGPVGKALSDACMGTIASFLSKYQDIIIEHQKVVKGNQKRLESLRELAGKENLEYPSVTLPPQPHTKEGVDAYNEVIARVRMWVNLNLWQKLKLSRDDAKPLLRLKGFPSFPLVERQANEVDWWDMVCNVKKLINEKKEDGKVFWQNLAGYKRQEALRPYLSSEEDRKKGKKFARYQLGDLLLHLEKKHGEDWGKVYDEAWERIDKKVEGLSKHIKLEEERRSEDAQSKAALTDWLRAKASFVIEGLKEADKDEFCRCELKLQKWYGDLRGKPFAIEAENSILDISGFSKQYNCAFIWQKDGVKKLNLYLIINYFKGGKLRFKKIKPEAFEANRFYTVINKKSGEIVPMEVNFNFDDPNLIILPLAFGKRQGREFIWNDLLSLETGSLKLANGRVIEKTLYNRRTRQDEPALFVALTFERREVLDSSNIKPMNLIGVDRGENIPAVIALTDPEGCPLSRFKDSLGNPTHILRIGESYKEKQRTIQAKKEVEQRRAGGYSRKYASKAKNLADDMVRNTARDLLYYAVTQDAMLIFENLSRGFGRQGKRTFMAERQYTRMEDWLTAKLAYEGLPSKTYLSKTLAQYTSKTCSNCGFTITSADYDRVLEKLKKTATGWMTTINGKELKVEGQITYYNRYKRQNVVKDLSVELDRLSEESVNNDISSWTKGRQGEALSLLKKRFSHRPVQEKFVCLNCGFETHADEQAALNIARSWLFLRSQEYKKYQTNKTTGNTDKRAFVETWQSFYRKKLKEVWKPAV

SEQ ID NO: 28466 - protein, 978 aa, synthetic construct
  REGION 1..978: note = engineered CasX variant
QEIKRINKIRRRLVKDSNTKKAGKTGPMKTLLVRVMTPDLRERLENLRKKPENIPQPISNTSRANLNKLLTDYTEMKKAILHVYWEEFQKDPVGLMSRVAQPASKKIDQNKLKPEMDEKGNLTTAGFACSQCGQPLFVYKLEQVSEKGKAYTNYFGRCNVAEHEKLIKLAQLKPEKDSDEAVTYSLGKFGQRALDFYSIHVTKESTHPVKPLAQIAGNRYASGPVGKALSDACMGTIASFLSKYQDIIIEHQKVVKGNQKRLESLRELAGKENLEYPSVTLPPQPHTKEGVDAYNEVIARVRMWVNLNLWQKLKLSRDDAKPLLRLKGFPSFPLVERQANEVDWWDMVCNVKKLINEKKEDGKVFWQNLAGYKRQEALRPYLSSEEDRKKGKKFARYQLGDLLLHLEKKHGEDWGKVYDEAWERIDKKVEGLSKHIKLEEERRSEDAQSKAALTDWLRAKASFVIEGLKEADKDEFCRCELKLQKWYGDLRGKPFAIEAENSILDISGFSKQYNCAFIWQKDGVKKLNLYLIINYFKGGKLRFKKIKPEAFEANRFYTVINKKSGEIVPMEVNFNFDDPNLIILPLAFGKRQGREFIWNDLLSLETGSLKLANGRVIEKTLYNRRTRQDEPALFVALTFERREVLDSSNIKPMNLIGVDRGENIPAVIALTDPEGCPLSRFKDSLGNPTHILRIGESYKEKQRTIQAKKEVEQRRAGGYSRKYASKAKNLADDMVRNTARDLLYYAVTQDAMLIFENLSRGFGRQGKRTFMAERQYTRMEDWLTAKLAYEGLPSKTYLSKTLAQYTSKTCSNCGFTITSADYDRVLEKLKKTATGWMTTINGKELKVEGQITYYNRYKRQNVVKDLSVELDRLSEESVNNDISSWTKGRSGEALSLLKKRFSHRPVQEKFVCLNCEFETHADEQAALNIARSWLFLRSQEYKKYQTNKTTGNTDKRAFVETWQSFYRKKLKEVWKPAV

SEQ ID NO: 28467 - protein, 979 aa, synthetic construct
  REGION 1..979: note = engineered CasX variant
QEIKRINKIRRRLVKDSNTKKAGKTGPMKTLLVRVMTPDLRERLENLRKKPENIPQPISNTSRANLNKLLTDYTEMKKAILHVYWEEFQKDPVGLMSRVAQPASKKIDQNKLKPEMDEKGNLTTAGFACSQCGQPLFVYKLEQVSEKGKAYTNYFGRCNVAEHEKLIKLAQLKPEKDSDEAVTYSLGKFGQRALDFYSIHVTKESTHPVKPLAQIAGNRYASGPVGKALSDACMGTIASFLSKYQDIIIEHQKVVKGNQKRLESLRELAGKENLEYPSVTLPPQPHTKEGVDAYNEVIARVRMWVNLNLWQKLKLSRDDAKPLLRLKGFPSFPLVERQANEVDWWDMVCNVKKLINEKKEDGKVFWQNLAGYKRQEALRPYLSSEEDRKKGKKFARYQLGDLLLHLEKKHGEDWGKVYDEAWERIDKKVEGLSKHIKLEEERRSEDAQSKAALTDWLRAKASFVIEGLKEADKDEFCRCELKLQKWYGDLRGKPFAIEAENSILDISGFSKQYNCAFIWQKDGVKKLNLYLIINYFKGGKLRFKKIKPEAFEANRFYTVINKKSGEIVPMEVNFNFDDPNLIILPLAFGKRQGREFIWNDLLSLETGSLKLANGRVIEKTLYNRRTRQDEPALFVALTFERREVLDSSNIKPMNLIGVDRGENIPAVIALTDPEGCPLSRFKDSLGNPTHILRIGESYKEKQRTIQAKKEVEQRRAGGYSRKYASKAKNLADDMVRNTARDLLYYAVTQDAMLIFENLSRGFGRQGKRTFMAERQYTRMEDWLTAKLAYEGLPSKTYLSKTLAQYTSKTCSNCGFTITSADYDRVLEKLKKTATGWMTTINGKELKVEGQITYYNRYKRQNVVKDLSVELDRLSEESVNNDISSWTKGRSGEALSLLKKRFSHRPVQEKFVCLNCGFETHADEQAALNIARSWLFLRSQEYKKYQTNKTSTGNTDKRAFVETWQSFYRKKLKEVWKPAV

SEQ ID NO: 28468 - protein, 979 aa, synthetic construct
  REGION 1..979: note = engineered CasX variant
QEIKRINKIRRRLVKDSNTKKAGKTGPMKTLLVRVMTPDLRERLENLRKKPENIPQPISNTSRANLNKLLTDYTEMKKAILHVYWEEFQKDPVGLMSRVAQPASKKIDQNKLKPEMDEKGNLTTAGFACSQCGQPLFVYKLEQVSEKGKAYTNYFGRCNVAEHEKLIKLAQLKPEKDSDEAVTYSLGKFGQRALDFYSIHVTKESTHPVKPLAQIAGNRYASGPVGKALSDACMGTIASFLSKYQDIIIEHQKVVKGNQKRLESLRELAGKENLEYPSVTLPPQPHTKEGVDAYNEVIARVRMWVNLNLWQKLKLSRDDAKPLLRLKGFPSFPLVERQANEVDWWDMVCNVKKLINEKKEDGKVFWQNLAGYKRQEALRPYLSSEEDRKKGKKFARYQLGDLLLHLEKKHGEDWGKVYDEAWERIDKKVEGLSKHIKLEEERRSEDAQSKAALTDWLRAKASFVIEGLKEADKDEFCRCELKLQKWYGDLRGKPFAIEAENSILDISGFSKQYNCAFIWQKDGVKKLNLYLIINYFKGGKLRFKKIKPEAFEANRFYTVINKKSGEIVPMEVNFNFDDPNLIILPLAFGKRQGREFIWNDLLSLETGSLKLANGRVIEKTLYNRRTRQDEPALFVALTFERREVLDSSNIKPMNLIGVDRGENIPAVIALTDPEGCPLSRFKDSLGNPTHILRIGESYKEKQRTIQAKKEVEQRRAGGYSRKYASKAKNLADDMVRNTARDLLYYAVTQDAMLIFENLSRGFGRQGKRTFMAERQYTRMEDWLTAKLAYEGLPSKTYLSKTLAQYTSKTCSNCGFTITSADYDRVLEKLKKTATGWMTTINGKELKVEGQITYYNRYKRQNVVKDLSVELDRLSEESVNNDISSWTKGRSGEALSLLKKRFSHRPVQEKFVCLNCGFETHADEQAALNIARSWLFLRSQEYKKYQTNKTTGKNTDKRAFVETWQSFYRKKLKEVWKPAV

SEQ ID NO: 28469 - protein, 978 aa, synthetic construct
  REGION 1..978: note = engineered CasX variant
QEIKRINKIRRRLVKDSNTKKAGKTGPMKTLLVRVMTPDLRERLENLRKKPENIPQPISNTSRANLNKLLTDYTEMKKAILHVYWEEFQKDPVGLMSRVAQPASKKIDQNKLKPEMDEKGNLTTAGFACSQCGQPLFVYKLEQVSEKGKAYTNYFGRCNVAEHEKLIKLAQLKPEKDSDEAVTYSLGKFGQRALDFYSIHVTKESTHPVKPLAQIAGNRYASGPVGKALSDACMGTIASFLSKYQDIIIEHQKVVKGNQKRLESLRELAGKENLEYPSVTLPPQPHTKEGVDAYNEVIARVRMWVNLNLWQKLKLSRDDAKPLLRLKKFPSFPLVERQANEVDWWDMVCNVKKLINEKKEDGKVFWQNLAGYKRQEALRPYLSSEEDRKKGKKFARYQLGDLLLHLEKKHGEDWGKVYDEAWERIDKKVEGLSKHIKLEEERRSEDAQSKAALTDWLRAKASFVIEGLKEADKDEFCRCELKLQKWYGDLRGKPFAIEAENSILDISGFSKQYNCAFIWQKDGVKKLNLYLIINYFKGGKLRFKKIKPEAFEANRFYTVINKKSGEIVPMEVNFNFDDPNLIILPLAFGKRQGREFIWNDLLSLETGSLKLANGRVIEKTLYNRRTRQDEPALFVALTFERREVLDSSNIKPMNLIGVDRGENIPAVIALTDPEGCPLSRFKDSLGNPTHILRIGESYKEKQRTIQAKKEVEQRRAGGYSRKYASKAKNLADDMVRNTARDLLYYAVTQDAMLIFENLSRGFGRQGKRTFMAERQYTRMEDWLTAKLAYEGLPSKTYLSKTLAQYTSKTCSNCGFTITSADYDRVLEKLKKTATGWMTTINGKELKVEGQITYYNRYKRQNVVKDLSVELDRLSEESVNNDISSWTKGRSGEALSLLKKRFSHRPVQEKFVCLNCGFETHADEQAALNIARSWLFLRSQEYKKYQTNKTTGNTDKRAFVETWQSFYRKKLKEVWKPAV

SEQ ID NO: 28470 - protein, 978 aa, synthetic construct
  REGION 1..978: note = engineered CasX variant
QEIKRINKIRRRLVKDSNTKKAGKTGPMKTLLVRVMTPDLRERLENLRKKPENIPQPISNTSRANLNKLLTDYTEMKKAILHVYWEEFQKDPVGLMSRVAQPASKKIDQNKLKPEMDEKGNLTTAGFACSQCGQPLFVYKLEQVSEKGKAYTNYFGRCNVAEHEKLIKLAQLKPEKDSDEAVTYSLGKFGQRALDFYSIHVTKESTHPVKPLAQIAGNRYASGPVGKALSDACMGTIASFLSKYQDIIIEHQKVVKGNQKRLESLRELAGKENLEYPSVTLPPQPHTKEGVDAYNEVIARVRMWVNLNLWQKLKLSRDDAKPLLRLKGFPSFPLVERQANEVDWWDMVCNVKKLINEKKEDGKVFWQNLAGYKRQEALRPYLSSEEDRKKGKKFARYQLGDLLLHLEKKHGEDWGKVYDEAWERIDKKVEGLSKHIKLEEERRSEDAQSKAALTDWLRAKASFVIEGLKEADKDEFCRCELKLQKWYGDLRGKPFAIEAENSILDISGFSKQYNCAFIWQKDGVKKLNLYLIINYFKGGKLRFKKIKPEAFEANRFYTVINKKSGEIVPMEVNFNFDDPNLIILPLAFGKRQGREFIWNDLLSLETGSLKLANGRVIEKTLYNRRTRQDEPALFVALTFERREVLDSSNIKPMNLIGVDRGENIPAVIALTDPEGCPLSRFKDSLGNPTHILRIGERYKEKQRTIQAKKEVEQRRAGGYSRKYASKAKNLADDMVRNTARDLLYYAVTQDAMLIFENLSRGFGRQGKRTFMAERQYTRMEDWLTAKLAYEGLPSKTYLSKTLAQYTSKTCSNCGFTITSADYDRVLEKLKKTATGWMTTINGKELKVEGQITYYNRYKRQNVVKDLSVELDRLSEESVNNDISSWTKGRSGEALSLLKKRFSHRPVQEKFVCLNCGFETHADEQAALNIARSWLFLRSQEYKKYQTNKTTGNTDKRAFVETWQSFYRKKLKEVWKPAV

SEQ ID NO: 28471 - protein, 978 aa, synthetic construct
  REGION 1..978: note = engineered CasX variant
QEIKRINKIRRRLVKDSNTKKAGKTGPMKTLLVRVMTPDLRERLENLRKKPENIPQPISNTSRANLNKLLTDYTEMKKAILHVYWEEFQKDPVGLMSRVAQPASKKIDQNKLKPEMDEKGNLTTAGFACSQCGQPLFVYKLEQVSEKGKAYTNYFGRCNVAEHEKLIKLAQLKPEKDSDEAVTYSLGKFGQRALDFYSIHVTKESTHPVKPLAQIAGNRYASGPVGKALSDACMGTIASFLSKYQDIIIEHQKVVKGNQKRLESLRELAGKENLEYPSVTLPPQPHTKEGVDAYNEVIARVRMWVNLNLWQKLKLSRDDAKPLLRLKGFPSFPLVERQANEVDWWDMVCNVKKLINEKKEDGKVFWQNLAGYKRQEALRPYLSSEEDRKKGKKFARYQLGDLLLHLEKKHGEDWGKVYDEAWERIDKKVEGLSKHIKLEEERRSEDAQSKAALTDWLRAKASFVIEGLKEADKDEFCRCELKLQKWYGDLRGKPFAIEAENSILDISGFSKQYNCAFIWQKDGVKKLNLYLIINYFKGGKLRFKKIKPEAFEANRFYTVINKKSGEIVPMEVNFNFDDPNLIILPLAFGKRQGREFIWNDLLSLETGSLQLANGRVIEKTLYNRRTRQDEPALFVALTFERREVLDSSNIKPMNLIGVDRGENIPAVIALTDPEGCPLSRFKDSLGNPTHILRIGESYKEKQRTIQAKKEVEQRRAGGYSRKYASKAKNLADDMVRNTARDLLYYAVTQDAMLIFENLSRGFGRQGKRTFMAERQYTRMEDWLTAKLAYEGLPSKTYLSKTLAQYTSKTCSNCGFTITSADYDRVLEKLKKTATGWMTTINGKELKVEGQITYYNRYKRQNVVKDLSVELDRLSEESVNNDISSWTKGRSGEALSLLKKRFSHRPVQEKFVCLNCGFETHADEQAALNIARSWLFLRSQEYKKYQTNKTTGNTDKRAFVETWQSFYRKKLKEVWKPAV

SEQ ID NO: 28472 - protein, 979 aa, synthetic construct
  REGION 1..979: note = engineered CasX variant
QEIKRINKIRRRLVKDSNTKKAGKTGPMKTLLVRVMTPDLRERLENLRKKPENIPQPISNTSRANLNKLLTDYTEMKKAILHVYWEEFQKDPVGLMSRVAQPASKKIDQNKLKPEMDEKGNLTTAGFACSQCGQPLFVYKLEQVSEKGKAYTNYFGRCNVAEHEKLILLYDQLKPEKDSDEAVTYSLGKFGQRALDFYSIHVTKESTHPVKPLAQIAGNRYASGPVGKALSDACMGTIASFLSKYQDIIIEHQKVVKGNQKRLESLRELAGKENLEYPSVTLPPQPHTKEGVDAYNEVIARVRMWVNLNLWQKLKLSRDDAKPLLRLKGFPSFPLVERQANEVDWWDMVCNVKKLINEKKEDGKVFWQNLAGYKRQEALRPYLSSEEDRKKGKKFARYQLGDLLLHLEKKHGEDWGKVYDEAWERIDKKVEGLSKHIKLEEERRSEDAQSKAALTDWLRAKASFVIEGLKEADKDEFCRCELKLQKWYGDLRGKPFAIEAENSILDISGFSKQYNCAFIWQKDGVKKLNLYLIINYFKGGKLRFKKIKPEAFEANRFYTVINKKSGEIVPMEVNFNFDDPNLIILPLAFGKRQGREFIWNDLLSLETGSLKLANGRVIEKTLYNRRTRQDEPALFVALTFERREVLDSSNIKPMNLIGVDRGENIPAVIALTDPEGCPLSRFKDSLGNPTHILRIGESYKEKQRTIQAKKEVEQRRAGGYSRKYASKAKNLADDMVRNTARDLLYYAVTQDAMLIFENLSRGFGRQGKRTFMAERQYTRMEDWLTAKLAYEGLPSKTYLSKTLAQYTSKTCSNCGFTITSADYDRVLEKLKKTATGWMTTINGKELKVEGQITYYNRYKRQNVVKDLSVELDRLSEESVNNDISSWTKGRSGEALSLLKKRFSHRPVQEKFVCLNCGFETHADEQAALNIARSWLFLRSQEYKKYQTNKTTGNTDKRAFVETWQSFYRKKLKEVWKPAV

SEQ ID NO: 28473 - protein, 979 aa, synthetic construct
  REGION 1..979: note = engineered CasX variant
QEIKRINKIRRRLVKDSNTKKAGKTGPMKTLLVRVMTPDLRERLENLRKKPENIPQPISNTSRANLNKLLTDYTEMKKAILHVYWEEFQKDPVGLMSRVAQPASKKIDQNKLKPEMDEKGNLTTAGFACSQCGQPLFVYKLEQVSEKGKAYTNYFGRCNVAEHEKLILLYSQLKPEKDSDEAVTYSLGKFGQRALDFYSIHVTKESTHPVKPLAQIAGNRYASGPVGKALSDACMGTIASFLSKYQDIIIEHQKVVKGNQKRLESLRELAGKENLEYPSVTLPPQPHTKEGVDAYNEVIARVRMWVNLNLWQKLKLSRDDAKPLLRLKGFPSFPLVERQANEVDWWDMVCNVKKLINEKKEDGKVFWQNLAGYKRQEALRPYLSSEEDRKKGKKFARYQLGDLLLHLEKKHGEDWGKVYDEAWERIDKKVEGLSKHIKLEEERRSEDAQSKAALTDWLRAKASFVIEGLKEADKDEFCRCELKLQKWYGDLRGKPFAIEAENSILDISGFSKQYNCAFIWQKDGVKKLNLYLIINYFKGGKLRFKKIKPEAFEANRFYTVINKKSGEIVPMEVNFNFDDPNLIILPLAFGKRQGREFIWNDLLSLETGSLKLANGRVIEKTLYNRRTRQDEPALFVALTFERREVLDSSNIKPMNLIGVDRGENIPAVIALTDPEGCPLSRFKDSLGNPTHILRIGESYKEKQRTIQAKKEVEQRRAGGYSRKYASKAKNLADDMVRNTARDLLYYAVTQDAMLIFENLSRGFGRQGKRTFMAERQYTRMEDWLTAKLAYEGLPSKTYLSKTLAQYTSKTCSNCGFTITSADYDRVLEKLKKTATGWMTTINGKELKVEGQITYYNRYKRQNVVKDLSVELDRLSEESVNNDISSWTKGRSGEALSLLKKRFSHRPVQEKFVCLNCGFETHADEQAALNIARSWLFLRSQEYKKYQTNKTTGNTDKRAFVETWQSFYRKKLKEVWKPAV

SEQ ID NO: 28474 - protein, 977 aa, synthetic construct
  REGION 1..977: note = engineered CasX variant
QEIKRINKIRRRLVKDSNTKKAGKTGPMKTLLVRVMTPDLRERLENLRKKPENIPQPISNTSRANLNKLLTDYTEMKKAILHVYWEEFQKDPVGLMSRVAQPASKKIDQNKLKPEMDEKGNLTTAGFACSQCGQPLFVYKLEQVSEKGKAYTNYFGRCNVAEHEKLILLYQLKPEKDSDEAVTYSLGKFGQRALDFYSIHVTKESTHPVKPLAQIAGNRYASPVGKALSDACMGTIASFLSKYQDIIIEHQKVVKGNQKRLESLRELAGKENLEYPSVTLPPQPHTKEGVDAYNEVIARVRMWVNLNLWQKLKLSRDDAKPLLRLKGFPSFPLVERQANEVDWWDMVCNVKKLINEKKEDGKVFWQNLAGYKRQEALRPYLSSEEDRKKGKKFARYQLGDLLLHLEKKHGEDWGKVYDEAWERIDKKVEGLSKHIKLEEERRSEDAQSKAALTDWLRAKASFVIEGLKEADKDEFCRCELKLQKWYGDLRGKPFAIEAENSILDISGFSKQYNCAFIWQKDGVKKLNLYLIINYFKGGKLRFKKIKPEAFEANRFYTVINKKSGEIVPMEVNFNFDDPNLIILPLAFGKRQGREFIWNDLLSLETGSLKLANGRVIEKTLYNRRTRQDEPALFVALTFERREVLDSSNIKPMNLIGVDRGENIPAVIALTDPEGCPLSRFKDSLGNPTHILRIGESYKEKQRTIQAKKEVEQRRAGGYSRKYASKAKNLADDMVRNTARDLLYYAVTQDAMLIFENLSRGFGRQGKRTFMAERQYTRMEDWLTAKLAYEGLPSKTYLSKTLAQYTSKTCSNCGFTITSADYDRVLEKLKKTATGWMTTINGKELKVEGQITYYNRYKRQNVVKDLSVELDRLSEESVNNDISSWTKGRSGEALSLLKKRFSHRPVQEKFVCLNCGFETHADEQAALNIARSWLFLRSQEYKKYQTNKTTGNTDKRAFVETWQSFYRKKLKEVWKPAV

SEQ ID NO: 28475 - protein, 978 aa, synthetic construct
  REGION 1..978: note = engineered CasX variant
QEIKRINKIRRRLVKDSNTKKAGKTGPMKTLLVRVMTPDLRERLENLRKKPENIPQPISNTSRANLNKLLTDYTEMKKAILHVYWEEFQKDPVGLMSRVAQPASKKIDQNKLKPEMDEKGNLTTAGFACSQCGQPLFVYKLEQVSEKGKAYTNYFGRCNVAEHEKLILLYQLKPEKDSDEAVTYSLGKFGQRALDFYSIHVTKESTHPVKPLAQIAGNRYASGPVGKALSDACMGTIASFLSKYQDIIIEHQKVVKGNQKRLESLRELAGKENLEYPSVTLPPQPHTSEGVDAYNEVIARVRMWVNLNLWQKLKLSRDDAKPLLRLKGFPSFPLVERQANEVDWWDMVCNVKKLINEKKEDGKVFWQNLAGYKRQEALRPYLSSEEDRKKGKKFARYQLGDLLLHLEKKHGEDWGKVYDEAWERIDKKVEGLSKHIKLEEERRSEDAQSKAALTDWLRAKASFVIEGLKEADKDEFCRCELKLQKWYGDLRGKPFAIEAENSILDISGFSKQYNCAFIWQKDGVKKLNLYLIINYFKGGKLRFKKIKPEAFEANRFYTVINKKSGEIVPMEVNFNFDDPNLIILPLAFGKRQGREFIWNDLLSLETGSLKLANGRVIEKTLYNRRTRQDEPALFVALTFERREVLDSSNIKPMNLIGVDRGENIPAVIALTDPEGCPLSRFKDSLGNPTHILRIGESYKEKQRTIQAKKEVEQRRAGGYSRKYASKAKNLADDMVRNTARDLLYYAVTQDAMLIFENLSRGFGRQGKRTFMAERQYTRMEDWLTAKLAYEGLPSKTYLSKTLAQYTSKTCSNCGFTITSADYDRVLEKLKKTATGWMTTINGKELKVEGQITYYNRYKRQNVVKDLSVELDRLSEESVNNDISSWTKGRSGEALSLLKKRFSHRPVQEKFVCLNCGFETHADEQAALNIARSWLFLRSQEYKKYQTNKTTGNTDKRAFVETWQSFYRKKLKEVWKPAV

SEQ ID NO: 28476 - protein, 978 aa, synthetic construct
  REGION 1..978: note = engineered CasX variant
QEIKRINKIRRRLVKDSNTKKAGKTGPMKTLLVRVMTPDLRERLENLRKKPENIPQPISNTSRANLNKLLTDYTEMKKAILHVYWEEFQKDPVGLMSRVAQPASKKIDQNKLKPEMDEKGNLTTAGFACSQCGQPLFVYKLEQVSEKGKAYTNYFGRCNVAEHEKLILLYQLKPEKDSDEAVTYSLGKFGQRALDFYSIHVTKESTHPVKPLAQIAGNRYASGPVGKALSDACMGTIASFLSKYQDIIIEHQKVVKGNQKRLESLRELAGKENLEYPSVTLPPQPHTKEGLDAYNEVIARVRMWVNLNLWQKLKLSRDDAKPLLRLKGFPSFPLVERQANEVDWWDMVCNVKKLINEKKEDGKVFWQNLAGYKRQEALRPYLSSEEDRKKGKKFARYQLGDLLLHLEKKHGEDWGKVYDEAWERIDKKVEGLSKHIKLEEERRSEDAQSKAALTDWLRAKASFVIEGLKEADKDEFCRCELKLQKWYGDLRGKPFAIEAENSILDISGFSKQYNCAFIWQKDGVKKLNLYLIINYFKGGKLRFKKIKPEAFEANRFYTVINKKSGEIVPMEVNFNFDDPNLIILPLAFGKRQGREFIWNDLLSLETGSLKLANGRVIEKTLYNRRTRQDEPALFVALTFERREVLDSSNIKPMNLIGVDRGENIPAVIALTDPEGCPLSRFKDSLGNPTHILRIGESYKEKQRTIQAKKEVEQRRAGGYSRKYASKAKNLADDMVRNTARDLLYYAVTQDAMLIFENLSRGFGRQGKRTFMAERQYTRMEDWLTAKLAYEGLPSKTYLSKTLAQYTSKTCSNCGFTITSADYDRVLEKLKKTATGWMTTINGKELKVEGQITYYNRYKRQNVVKDLSVELDRLSEESVNNDISSWTKGRSGEALSLLKKRFSHRPVQEKFVCLNCGFETHADEQAALNIARSWLFLRSQEYKKYQTNKTTGNTDKRAFVETWQSFYRKKLKEVWKPAV

SEQ ID NO: 28477 - protein, 978 aa, synthetic construct
  REGION 1..978: note = engineered CasX variant
QEIKRINKIRRRLVKDSNTKKAGKTGPMKTLLVRVMTPDLRERLENLRKKPENIPQPISNTSRANLNKLLTDYTEMKKAILHVYWEEFQKDPVGLMSRVAQPASKKIDQNKLKPEMDEKGNLTTAGFACSQCGQPLFVYKLEQVSEKGKAYTNYFGRCNVAEHEKLILLYQLKPEKDSDEAVTYSLGKFGQRALDFYSIHVTKESTHPVKPLAQIAGNRYASGPVGKALSDACMGTIASFLSKYQDIIIEHQKVVKGNQKRLESLRELAGKENLEYPSVTLPPQPHTKEGVDAYNEVIARVRTWVNLNLWQKLKLSRDDAKPLLRLKGFPSFPLVERQANEVDWWDMVCNVKKLINEKKEDGKVFWQNLAGYKRQEALRPYLSSEEDRKKGKKFARYQLGDLLLHLEKKHGEDWGKVYDEAWERIDKKVEGLSKHIKLEEERRSEDAQSKAALTDWLRAKASFVIEGLKEADKDEFCRCELKLQKWYGDLRGKPFAIEAENSILDISGFSKQYNCAFIWQKDGVKKLNLYLIINYFKGGKLRFKKIKPEAFEANRFYTVINKKSGEIVPMEVNFNFDDPNLIILPLAFGKRQGREFIWNDLLSLETGSLKLANGRVIEKTLYNRRTRQDEPALFVALTFERREVLDSSNIKPMNLIGVDRGENIPAVIALTDPEGCPLSRFKDSLGNPTHILRIGESYKEKQRTIQAKKEVEQRRAGGYSRKYASKAKNLADDMVRNTARDLLYYAVTQDAMLIFENLSRGFGRQGKRTFMAERQYTRMEDWLTAKLAYEGLPSKTYLSKTLAQYTSKTCSNCGFTITSADYDRVLEKLKKTATGWMTTINGKELKVEGQITYYNRYKRQNVVKDLSVELDRLSEESVNNDISSWTKGRSGEALSLLKKRFSHRPVQEKFVCLNCGFETHADEQAALNIARSWLFLRSQEYKKYQTNKTTGNTDKRAFVETWQSFYRKKLKEVWKPAV

SEQ ID NO: 28478 - protein, 978 aa, synthetic construct
  REGION 1..978: note = engineered CasX variant
QEIKRINKIRRRLVKDSNTKKAGKTGPMKTLLVRVMTPDLRERLENLRKKPENIPQPISNTSRANLNKLLTDYTEMKKAILHVYWEEFQKDPVGLMSRVAQPASKKIDQNKLKPEMDEKGNLTTAGFACSQCGQPLFVYKLEQVSEKGKAYTNYFGRCNVAEHEKLILLYQLKPEKDSDEAVTYSLGKFGQRALDFYSIHVTKESTHPVKPLAQIAGNRYASGPVGKALSDACMGTIASFLSKYQDIIIEHQKVVKGNQKRLESLRELAGKENLEYPSVTLPPQPHTKEGVDAYNEVIARVRWWVNLNLWQKLKLSRDDAKPLLRLKGFPSFPLVERQANEVDWWDMVCNVKKLINEKKEDGKVFWQNLAGYKRQEALRPYLSSEEDRKKGKKFARYQLGDLLLHLEKKHGEDWGKVYDEAWERIDKKVEGLSKHIKLEEERRSEDAQSKAALTDWLRAKASFVIEGLKEADKDEFCRCELKLQKWYGDLRGKPFAIEAENSILDISGFSKQYNCAFIWQKDGVKKLNLYLIINYFKGGKLRFKKIKPEAFEANRFYTVINKKSGEIVPMEVNFNFDDPNLIILPLAFGKRQGREFIWNDLLSLETGSLKLANGRVIEKTLYNRRTRQDEPALFVALTFERREVLDSSNIKPMNLIGVDRGENIPAVIALTDPEGCPLSRFKDSLGNPTHILRIGESYKEKQRTIQAKKEVEQRRAGGYSRKYASKAKNLADDMVRNTARDLLYYAVTQDAMLIFENLSRGFGRQGKRTFMAERQYTRMEDWLTAKLAYEGLPSKTYLSKTLAQYTSKTCSNCGFTITSADYDRVLEKLKKTATGWMTTINGKELKVEGQITYYNRYKRQNVVKDLSVELDRLSEESVNNDISSWTKGRSGEALSLLKKRFSHRPVQEKFVCLNCGFETHADEQAALNIARSWLFLRSQEYKKYQTNKTTGNTDKRAFVETWQSFYRKKLKEVWKPAV

SEQ ID NO: 28479 - protein, 979 aa, synthetic construct
  REGION 1..979: note = engineered CasX variant
QEIKRINKIRRRLVKDSNTKKAGKTGPMKTLLVRVMTPDLRERLENLRKKPENIPQPISNTSRANLNKLLTDYTEMKKAILHVYWEEFQKDPVGLMSRVAQPASKKIDQNKLKPEMDEKGNLTTAGFACSQCGQPLFVYKLEQVSEKGKAYTNYFGRCNVAEHEKLILLYQLKPEKDSDEAVTYSLGKFGQRALDFYSIHVTKESTHPVKPLAQIAGNRYASGPVGKALSDACMGTIASFLSKYQDIIIEHQKVVKGNQKRLESLRELAGKENLEYPSVTLPPQPHTKEGVDAYNEVIARVRMWVNLNLWQKLKLSRDDAKPLLRLKGFPSFPLVERQQANEVDWWDMVCNVKKLINEKKEDGKVFWQNLAGYKRQEALRPYLSSEEDRKKGKKFARYQLGDLLLHLEKKHGEDWGKVYDEAWERIDKKVEGLSKHIKLEEERRSEDAQSKAALTDWLRAKASFVIEGLKEADKDEFCRCELKLQKWYGDLRGKPFAIEAENSILDISGFSKQYNCAFIWQKDGVKKLNLYLIINYFKGGKLRFKKIKPEAFEANRFYTVINKKSGEIVPMEVNFNFDDPNLIILPLAFGKRQGREFIWNDLLSLETGSLKLANGRVIEKTLYNRRTRQDEPALFVALTFERREVLDSSNIKPMNLIGVDRGENIPAVIALTDPEGCPLSRFKDSLGNPTHILRIGESYKEKQRTIQAKKEVEQRRAGGYSRKYASKAKNLADDMVRNTARDLLYYAVTQDAMLIFENLSRGFGRQGKRTFMAERQYTRMEDWLTAKLAYEGLPSKTYLSKTLAQYTSKTCSNCGFTITSADYDRVLEKLKKTATGWMTTINGKELKVEGQITYYNRYKRQNVVKDLSVELDRLSEESVNNDISSWTKGRSGEALSLLKKRFSHRPVQEKFVCLNCGFETHADEQAALNIARSWLFLRSQEYKKYQTNKTTGNTDKRAFVETWQSFYRKKLKEVWKPAV

SEQ ID NO: 28480 - protein, 979 aa, synthetic construct
  REGION 1..979: note = engineered CasX variant
QEIKRINKIRRRLVKDSNTKKAGKTGPMKTLLVRVMTPDLRERLENLRKKPENIPQPISNTSRANLNKLLTDYTEMKKAILHVYWEEFQKDPVGLMSRVAQPASKKIDQNKLKPEMDEKGNLTTAGFACSQCGQPLFVYKLEQVSEKGKAYTNYFGRCNVAEHEKLILLYQLKPEKDSDEAVTYSLGKFGQRALDFYSIHVTKESTHPVKPLAQIAGNRYASGPVGKALSDACMGTIASFLSKYQDIIIEHQKVVKGNQKRLESLRELAGKENLEYPSVTLPPQPHTKEGVDAYNEVIARVRMWVNLNLWQKLKLSRDDAKPLLRLKGFPSFPLVERQANAEVDWWDMVCNVKKLINEKKEDGKVFWQNLAGYKRQEALRPYLSSEEDRKKGKKFARYQLGDLLLHLEKKHGEDWGKVYDEAWERIDKKVEGLSKHIKLEEERRSEDAQSKAALTDWLRAKASFVIEGLKEADKDEFCRCELKLQKWYGDLRGKPFAIEAENSILDISGFSKQYNCAFIWQKDGVKKLNLYLIINYFKGGKLRFKKIKPEAFEANRFYTVINKKSGEIVPMEVNFNFDDPNLIILPLAFGKRQGREFIWNDLLSLETGSLKLANGRVIEKTLYNRRTRQDEPALFVALTFERREVLDSSNIKPMNLIGVDRGENIPAVIALTDPEGCPLSRFKDSLGNPTHILRIGESYKEKQRTIQAKKEVEQRRAGGYSRKYASKAKNLADDMVRNTARDLLYYAVTQDAMLIFENLSRGFGRQGKRTFMAERQYTRMEDWLTAKLAYEGLPSKTYLSKTLAQYTSKTCSNCGFTITSADYDRVLEKLKKTATGWMTTINGKELKVEGQITYYNRYKRQNVVKDLSVELDRLSEESVNNDISSWTKGRSGEALSLLKKRFSHRPVQEKFVCLNCGFETHADEQAALNIARSWLFLRSQEYKKYQTNKTTGNTDKRAFVETWQSFYRKKLKEVWKPAV

SEQ ID NO: 28481 - protein, 978 aa, synthetic construct
  REGION 1..978: note = engineered CasX variant
QEIKRINKIRRRLVKDSNTKKAGKTGPMKTLLVRVMTPDLRERLENLRKKPENIPQPISNTSRANLNKLLTDYTEMKKAILHVYWEEFQKDPVGLMSRVAQPASKKIDQNKLKPEMDEKGNLTTAGFACSQCGQPLFVYKLEQVSEKGKAYTNYFGRCNVAEHEKLILLYQLKPEKDSDEAVTYSLGKFGQRALDFYSIHVTKESTHPVKPLAQIAGNRYASGPVGKALSDACMGTIASFLSKYQDIIIEHQKVVKGNQKRLESLRELAGKENLEYPSVTLPPQPHTKEGVDAYNEVIARVRMWVNLNLWQKLKLSRDDAKPLLRLKGFPSFPLVERQANEVDWWDMVCNVKKLINEKKEDGKVFWQNLAGYKRQEALRPYLSSEEDRKKGKKFARTQLGDLLLHLEKKHGEDWGKVYDEAWERIDKKVEGLSKHIKLEEERRSEDAQSKAALTDWLRAKASFVIEGLKEADKDEFCRCELKLQKWYGDLRGKPFAIEAENSILDISGFSKQYNCAFIWQKDGVKKLNLYLIINYFKGGKLRFKKIKPEAFEANRFYTVINKKSGEIVPMEVNFNFDDPNLIILPLAFGKRQGREFIWNDLLSLETGSLKLANGRVIEKTLYNRRTRQDEPALFVALTFERREVLDSSNIKPMNLIGVDRGENIPAVIALTDPEGCPLSRFKDSLGNPTHILRIGESYKEKQRTIQAKKEVEQRRAGGYSRKYASKAKNLADDMVRNTARDLLYYAVTQDAMLIFENLSRGFGRQGKRTFMAERQYTRMEDWLTAKLAYEGLPSKTYLSKTLAQYTSKTCSNCGFTITSADYDRVLEKLKKTATGWMTTINGKELKVEGQITYYNRYKRQNVVKDLSVELDRLSEESVNNDISSWTKGRSGEALSLLKKRFSHRPVQEKFVCLNCGFETHADEQAALNIARSWLFLRSQEYKKYQTNKTTGNTDKRAFVETWQSFYRKKLKEVWKPAV

SEQ ID NO: 28482 - protein, 979 aa, synthetic construct
  REGION 1..979: note = engineered CasX variant
QEIKRINKIRRRLVKDSNTKKAGKTGPMKTLLVRVMTPDLRERLENLRKKPENIPQPISNTSRANLNKLLTDYTEMKKAILHVYWEEFQKDPVGLMSRVAQPASKKIDQNKLKPEMDEKGNLTTAGFACSQCGQPLFVYKLEQVSEKGKAYTNYFGRCNVAEHEKLILLYQLKPEKDSDEAVTYSLGKFGQRALDFYSIHVTKESTHPVKPLAQIAGNRYASGPVGKALSDACMGTIASFLSKYQDIIIEHQKVVKGNQKRLESLRELAGKENLEYPSVTLPPQPHTKEGVDAYNEVIARVRMWVNLNLWQKLKLSRDDAKPLLRLKGFPSFPLVERQANEVDWWDMVCNVKKLINEKKEDGKVFWQNLAGYKRQEALRPYLSSEEDRKKGKKFARYQLGDLLLHLEKKHEGEDWGKVYDEAWERIDKKVEGLSKHIKLEEERRSEDAQSKAALTDWLRAKASFVIEGLKEADKDEFCRCELKLQKWYGDLRGKPFAIEAENSILDISGFSKQYNCAFIWQKDGVKKLNLYLIINYFKGGKLRFKKIKPEAFEANRFYTVINKKSGEIVPMEVNFNFDDPNLIILPLAFGKRQGREFIWNDLLSLETGSLKLANGRVIEKTLYNRRTRQDEPALFVALTFERREVLDSSNIKPMNLIGVDRGENIPAVIALTDPEGCPLSRFKDSLGNPTHILRIGESYKEKQRTIQAKKEVEQRRAGGYSRKYASKAKNLADDMVRNTARDLLYYAVTQDAMLIFENLSRGFGRQGKRTFMAERQYTRMEDWLTAKLAYEGLPSKTYLSKTLAQYTSKTCSNCGFTITSADYDRVLEKLKKTATGWMTTINGKELKVEGQITYYNRYKRQNVVKDLSVELDRLSEESVNNDISSWTKGRSGEALSLLKKRFSHRPVQEKFVCLNCGFETHADEQAALNIARSWLFLRSQEYKKYQTNKTTGNTDKRAFVETWQSFYRKKLKEVWKPAV

SEQ ID NO: 28483 - protein, 978 aa, synthetic construct
  REGION 1..978: note = engineered CasX variant
QEIKRINKIRRRLVKDSNTKKAGKTGPMKTLLVRVMTPDLRERLENLRKKPENIPQPISNTSRANLNKLLTDYTEMKKAILHVYWEEFQKDPVGLMSRVAQPASKKIDQNKLKPEMDEKGNLTTAGFACSQCGQPLFVYKLEQVSEKGKAYTNYFGRCNVAEHEKLILLYQLKPEKDSDEAVTYSLGKFGQRALDFYSIHVTKESTHPVKPLAQIAGNRYASGPVGKALSDACMGTIASFLSKYQDIIIEHQKVVKGNQKRLESLRELAGKENLEYPSVTLPPQPHTKEGVDAYNEVIARVRMWVNLNLWQKLKLSRDDAKPLLRLKGFPSFPLVERQANEVDWWDMVCNVKKLINEKKEDGKVFWQNLAGYKRQEALRPYLSSEEDRKKGKKFARYQLGDLLLHLEKKHGEDWGKVYDEAWERIDKKVEGLSKHIKLEEERRSEDAQSKAALTDWLRAKASFVIEGLKEADKDEFCRCDLKLQKWYGDLRGKPFAIEAENSILDISGFSKQYNCAFIWQKDGVKKLNLYLIINYFKGGKLRFKKIKPEAFEANRFYTVINKKSGEIVPMEVNFNFDDPNLIILPLAFGKRQGREFIWNDLLSLETGSLKLANGRVIEKTLYNRRTRQDEPALFVALTFERREVLDSSNIKPMNLIGVDRGENIPAVIALTDPEGCPLSRFKDSLGNPTHILRIGESYKEKQRTIQAKKEVEQRRAGGYSRKYASKAKNLADDMVRNTARDLLYYAVTQDAMLIFENLSRGFGRQGKRTFMAERQYTRMEDWLTAKLAYEGLPSKTYLSKTLAQYTSKTCSNCGFTITSADYDRVLEKLKKTATGWMTTINGKELKVEGQITYYNRYKRQNVVKDLSVELDRLSEESVNNDISSWTKGRSGEALSLLKKRFSHRPVQEKFVCLNCGFETHADEQAALNIARSWLFLRSQEYKKYQTNKTTGNTDKRAFVETWQSFYRKKLKEVWKPAV

SEQ ID NO: 28484 - protein, 978 aa, synthetic construct
  REGION 1..978: note = engineered CasX variant
QEIKRINKIRRRLVKDSNTKKAGKTGPMKTLLVRVMTPDLRERLENLRKKPENIPQPISNTSRANLNKLLTDYTEMKKAILHVYWEEFQKDPVGLMSRVAQPASKKIDQNKLKPEMDEKGNLTTAGFACSQCGQPLFVYKLEQVSEKGKAYTNYFGRCNVAEHEKLILLYQLKPEKDSDEAVTYSLGKFGQRALDFYSIHVTKESTHPVKPLAQIAGNRYASGPVGKALSDACMGTIASFLSKYQDIIIEHQKVVKGNQKRLESLRELAGKENLEYPSVTLPPQPHTKEGVDAYNEVIARVRMWVNLNLWQKLKLSRDDAKPLLRLKGFPSFPLVERQANEVDWWDMVCNVKKLINEKKEDGKVFWQNLAGYKRQEALRPYLSSEEDRKKGKKFARYQLGDLLLHLEKKHGEDWGKVYDEAWERIDKKVEGLSKHIKLEEERRSEDAQSKAALTDWLRAKASFVIEGLKEADKDEFCRCELKLQKWYGDLRGKPFAIEAENSILDISGFSKQYNCAFIWQKDGVKKLNLYLIINYFKGGKLRFKKIKPEAFEANRFYTVINKKSGEIVPMEVNFNFDDPNLIILPLAFGKRFGREFIWNDLLSLETGSLKLANGRVIEKTLYNRRTRQDEPALFVALTFERREVLDSSNIKPMNLIGVDRGENIPAVIALTDPEGCPLSRFKDSLGNPTHILRIGESYKEKQRTIQAKKEVEQRRAGGYSRKYASKAKNLADDMVRNTARDLLYYAVTQDAMLIFENLSRGFGRQGKRTFMAERQYTRMEDWLTAKLAYEGLPSKTYLSKTLAQYTSKTCSNCGFTITSADYDRVLEKLKKTATGWMTTINGKELKVEGQITYYNRYKRQNVVKDLSVELDRLSEESVNNDISSWTKGRSGEALSLLKKRFSHRPVQEKFVCLNCGFETHADEQAALNIARSWLFLRSQEYKKYQTNKTTGNTDKRAFVETWQSFYRKKLKEVWKPAV

SEQ ID NO: 28485 - protein, 978 aa, synthetic construct
  REGION 1..978: note = engineered CasX variant
QEIKRINKIRRRLVKDSNTKKAGKTGPMKTLLVRVMTPDLRERLENLRKKPENIPQPISNTSRANLNKLLTDYTEMKKAILHVYWEEFQKDPVGLMSRVAQPASKKIDQNKLKPEMDEKGNLTTAGFACSQCGQPLFVYKLEQVSEKGKAYTNYFGRCNVAEHEKLILLYQLKPEKDSDEAVTYSLGKFGQRALDFYSIHVTKESTHPVKPLAQIAGNRYASGPVGKALSDACMGTIASFLSKYQDIIIEHQKVVKGNQKRLESLRELAGKENLEYPSVTLPPQPHTKEGVDAYNEVIARVRMWVNLNLWQKLKLSRDDAKPLLRLKGFPSFPLVERQANEVDWWDMVCNVKKLINEKKEDGKVFWQNLAGYKRQEALRPYLSSEEDRKKGKKFARYQLGDLLLHLEKKHGEDWGKVYDEAWERIDKKVEGLSKHIKLEEERRSEDAQSKAALTDWLRAKASFVIEGLKEADKDEFCRCELKLQKWYGDLRGKPFAIEAENSILDISGFSKQYNCAFIWQKDGVKKLNLYLIINYFKGGKLRFKKIKPEAFEANRFYTVINKKSGEIVPMEVNFNFDDPNLIILPLAFGKRVGREFIWNDLLSLETGSLKLANGRVIEKTLYNRRTRQDEPALFVALTFERREVLDSSNIKPMNLIGVDRGENIPAVIALTDPEGCPLSRFKDSLGNPTHILRIGESYKEKQRTIQAKKEVEQRRAGGYSRKYASKAKNLADDMVRNTARDLLYYAVTQDAMLIFENLSRGFGRQGKRTFMAERQYTRMEDWLTAKLAYEGLPSKTYLSKTLAQYTSKTCSNCGFTITSADYDRVLEKLKKTATGWMTTINGKELKVEGQITYYNRYKRQNVVKDLSVELDRLSEESVNNDISSWTKGRSGEALSLLKKRFSHRPVQEKFVCLNCGFETHADEQAALNIARSWLFLRSQEYKKYQTNKTTGNTDKRAFVETWQSFYRKKLKEVWKPAV

SEQ ID NO: 28486 - protein, 979 aa, synthetic construct
  REGION 1..979: note = engineered CasX variant
QEIKRINKIRRRLVKDSNTKKAGKTGPMKTLLVRVMTPDLRERLENLRKKPENIPQPISNTSRANLNKLLTDYTEMKKAILHVYWEEFQKDPVGLMSRVAQPASKKIDQNKLKPEMDEKGNLTTAGFACSQCGQPLFVYKLEQVSEKGKAYTNYFGRCNVAEHEKLILLYQLKPEKDSDEAVTYSLGKFGQRALDFYSIHVTKESTHPVKPLAQIAGNRYASGPVGKALSDACMGTIASFLSKYQDIIIEHQKVVKGNQKRLESLRELAGKENLEYPSVTLPPQPHTKEGVDAYNEVIARVRMWVNLNLWQKLKLSRDDAKPLLRLKGFPSFPLVERQANEVDWWDMVCNVKKLINEKKEDGKVFWQNLAGYKRQEALRPYLSSEEDRKKGKKFARYQLGDLLLHLEKKHGEDWGKVYDEAWERIDKKVEGLSKHIKLEEERRSEDAQSKAALTDWLRAKASFVIEGLKEADKDEFCRCELKLQKWYGDLRGKPFAIEAENSILDISGFSKQYNCAFIWQKDGVKKLNLYLIINYFKGGKLRFKKIKPEAFEANRFYTVINKKSGEIVPMEVNFNFDDPNLIILPLAFGKRQGREFIWNDLLSLETGSLKLANGRVIEKTLYNRRTRQDEPALFVALTFERREVLDSSNIKTPMNLIGVDRGENIPAVIALTDPEGCPLSRFKDSLGNPTHILRIGESYKEKQRTIQAKKEVEQRRAGGYSRKYASKAKNLADDMVRNTARDLLYYAVTQDAMLIFENLSRGFGRQGKRTFMAERQYTRMEDWLTAKLAYEGLPSKTYLSKTLAQYTSKTCSNCGFTITSADYDRVLEKLKKTATGWMTTINGKELKVEGQITYYNRYKRQNVVKDLSVELDRLSEESVNNDISSWTKGRSGEALSLLKKRFSHRPVQEKFVCLNCGFETHADEQAALNIARSWLFLRSQEYKKYQTNKTTGNTDKRAFVETWQSFYRKKLKEVWKPAV

SEQ ID NO: 28487 - protein, 979 aa, synthetic construct
  REGION 1..979: note = engineered CasX variant
QEIKRINKIRRRLVKDSNTKKAGKTGPMKTLLVRVMTPDLRERLENLRKKPENIPQPISNTSRANLNKLLTDYTEMKKAILHVYWEEFQKDPVGLMSRVAQPASKKIDQNKLKPEMDEKGNLTTAGFACSQCGQPLFVYKLEQVSEKGKAYTNYFGRCNVAEHEKLILLYQLKPEKDSDEAVTYSLGKFGQRALDFYSIHVTKESTHPVKPLAQIAGNRYASGPVGKALSDACMGTIASFLSKYQDIIIEHQKVVKGNQKRLESLRELAGKENLEYPSVTLPPQPHTKEGVDAYNEVIARVRMWVNLNLWQKLKLSRDDAKPLLRLKGFPSFPLVERQANEVDWWDMVCNVKKLINEKKEDGKVFWQNLAGYKRQEALRPYLSSEEDRKKGKKFARYQLGDLLLHLEKKHGEDWGKVYDEAWERIDKKVEGLSKHIKLEEERRSEDAQSKAALTDWLRAKASFVIEGLKEADKDEFCRCELKLQKWYGDLRGKPFAIEAENSILDISGFSKQYNCAFIWQKDGVKKLNLYLIINYFKGGKLRFKKIKPEAFEANRFYTVINKKSGEIVPMEVNFNFDDPNLIILPLAFGKRQGREFIWNDLLSLETGSLKLANGRVIEKTLYNRRTRQDEPALFVALTFERREVLDSSNIKPMSNLIGVDRGENIPAVIALTDPEGCPLSRFKDSLGNPTHILRIGESYKEKQRTIQAKKEVEQRRAGGYSRKYASKAKNLADDMVRNTARDLLYYAVTQDAMLIFENLSRGFGRQGKRTFMAERQYTRMEDWLTAKLAYEGLPSKTYLSKTLAQYTSKTCSNCGFTITSADYDRVLEKLKKTATGWMTTINGKELKVEGQITYYNRYKRQNVVKDLSVELDRLSEESVNNDISSWTKGRSGEALSLLKKRFSHRPVQEKFVCLNCGFETHADEQAALNIARSWLFLRSQEYKKYQTNKTTGNTDKRAFVETWQSFYRKKLKEVWKPAV

SEQ ID NO: 28488 - protein, 978 aa, synthetic construct
  REGION 1..978: note = engineered CasX variant
QEIKRINKIRRRLVKDSNTKKAGKTGPMKTLLVRVMTPDLRERLENLRKKPENIPQPISNTSRANLNKLLTDYTEMKKAILHVYWEEFQKDPVGLMSRVAQPASKKIDQNKLKPEMDEKGNLTTAGFACSQCGQPLFVYKLEQVSEKGKAYTNYFGRCNVAEHEKLILLYQLKPEKDSDEAVTYSLGKFGQRALDFYSIHVTKESTHPVKPLAQIAGNRYASGPVGKALSDACMGTIASFLSKYQDIIIEHQKVVKGNQKRLESLRELAGKENLEYPSVTLPPQPHTKEGVDAYNEVIARVRMWVNLNLWQKLKLSRDDAKPLLRLKGFPSFPLVERQANEVDWWDMVCNVKKLINEKKEDGKVFWQNLAGYKRQEALRPYLSSEEDRKKGKKFARYQLGDLLLHLEKKHGEDWGKVYDEAWERIDKKVEGLSKHIKLEEERRSEDAQSKAALTDWLRAKASFVIEGLKEADKDEFCRCELKLQKWYGDLRGKPFAIEAENSILDISGFSKQYNCAFIWQKDGVKKLNLYLIINYFKGGKLRFKKIKPEAFEANRFYTVINKKSGEIVPMEVNFNFDDPNLIILPLAFGKRQGREFIWNDLLSLETGSLKLANGRVIEKTLYNRRTRQDEPALFVALTFERREVLDSSNIKPMNLIGVDRGENIPAVIALTDPEGCPLSRFKDSLGNPTHILRIRESYKEKQRTIQAKKEVEQRRAGGYSRKYASKAKNLADDMVRNTARDLLYYAVTQDAMLIFENLSRGFGRQGKRTFMAERQYTRMEDWLTAKLAYEGLPSKTYLSKTLAQYTSKTCSNCGFTITSADYDRVLEKLKKTATGWMTTINGKELKVEGQITYYNRYKRQNVVKDLSVELDRLSEESVNNDISSWTKGRSGEALSLLKKRFSHRPVQEKFVCLNCGFETHADEQAALNIARSWLFLRSQEYKKYQTNKTTGNTDKRAFVETWQSFYRKKLKEVWKPAV

SEQ ID NO: 28489 - protein, 978 aa, synthetic construct
  REGION 1..978: note = engineered CasX variant
QEIKRINKIRRRLVKDSNTKKAGKTGPMKTLLVRVMTPDLRERLENLRKKPENIPQPISNTSRANLNKLLTDYTEMKKAILHVYWEEFQKDPVGLMSRVAQPASKKIDQNKLKPEMDEKGNLTTAGFACSQCGQPLFVYKLEQVSEKGKAYTNYFGRCNVAEHEKLILLYQLKPEKDSDEAVTYSLGKFGQRALDFYSIHVTKESTHPVKPLAQIAGNRYASGPVGKALSDACMGTIASFLSKYQDIIIEHQKVVKGNQKRLESLRELAGKENLEYPSVTLPPQPHTKEGVDAYNEVIARVRMWVNLNLWQKLKLSRDDAKPLLRLKGFPSFPLVERQANEVDWWDMVCNVKKLINEKKEDGKVFWQNLAGYKRQEALRPYLSSEEDRKKGKKFARYQLGDLLLHLEKKHGEDWGKVYDEAWERIDKKVEGLSKHIKLEEERRSEDAQSKAALTDWLRAKASFVIEGLKEADKDEFCRCELKLQKWYGDLRGKPFAIEAENSILDISGFSKQYNCAFIWQKDGVKKLNLYLIINYFKGGKLRFKKIKPEAFEANRFYTVINKKSGEIVPMEVNFNFDDPNLIILPLAFGKRQGREFIWNDLLSLETGSLKLANGRVIEKTLYNRRTRQDEPALFVALTFERREVLDSSNIKPMNLIGVDRGENIPAVIALTDPEGCPLSRFKDSLGNPTHILRIGESYKEKQRTIQAKKEVEQRRAGGYSRKYASKAKNLADDMVRNTARDLLYYAVTQDAMLIFENLSRGFGRQGKRTFSAERQYTRMEDWLTAKLAYEGLPSKTYLSKTLAQYTSKTCSNCGFTITSADYDRVLEKLKKTATGWMTTINGKELKVEGQITYYNRYKRQNVVKDLSVELDRLSEESVNNDISSWTKGRSGEALSLLKKRFSHRPVQEKFVCLNCGFETHADEQAALNIARSWLFLRSQEYKKYQTNKTTGNTDKRAFVETWQSFYRKKLKEVWKPAV

SEQ ID NO: 28490 - protein, 978 aa, synthetic construct
  REGION 1..978: note = engineered CasX variant
QEIKRINKIRRRLVKDSNTKKAGKTGPMKTLLVRVMTPDLRERLENLRKKPENIPQPISNTSRANLNKLLTDYTEMKKAILHVYWEEFQKDPVGLMSRVAQPASKKIDQNKLKPEMDEKGNLTTAGFACSQCGQPLFVYKLEQVSEKGKAYTNYFGRCNVAEHEKLILLYQLKPEKDSDEAVTYSLGKFGQRALDFYSIHVTKESTHPVKPLAQIAGNRYASGPVGKALSDACMGTIASFLSKYQDIIIEHQKVVKGNQKRLESLRELAGKENLEYPSVTLPPQPHTKEGVDAYNEVIARVRMWVNLNLWQKLKLSRDDAKPLLRLKGFPSFPLVERQANEVDWWDMVCNVKKLINEKKEDGKVFWQNLAGYKRQEALRPYLSSEEDRKKGKKFARYQLGDLLLHLEKKHGEDWGKVYDEAWERIDKKVEGLSKHIKLEEERRSEDAQSKAALTDWLRAKASFVIEGLKEADKDEFCRCELKLQKWYGDLRGKPFAIEAENSILDISGFSKQYNCAFIWQKDGVKKLNLYLIINYFKGGKLRFKKIKPEAFEANRFYTVINKKSGEIVPMEVNFNFDDPNLIILPLAFGKRQGREFIWNDLLSLETGSLKLANGRVIEKTLYNRRTRQDEPALFVALTFERREVLDSSNIKPMNLIGVDRGENIPAVIALTDPEGCPLSRFKDSLGNPTHILRIGESYKEKQRTIQAKKEVEQRRAGGYSRKYASKAKNLADDMVRNTARDLLYYAVTQDAMLIFENLSRGFGRQGKRTFMAERQYTRMEDWLTAKLAYEGLPSKTYLSKTLAQYTSKTCSNCGFTITSADYDRVLEKLKKTATGWMTTINGKELKVEGQITYYNRYKRQNVVKDLSVELDRLSEESVNNDISSWDKGRSGEALSLLKKRFSHRPVQEKFVCLNCGFETHADEQAALNIARSWLFLRSQEYKKYQTNKTTGNTDKRAFVETWQSFYRKKLKEVWKPAV

SEQ ID NO: 28491 - protein, 978 aa, synthetic construct
  REGION 1..978: note = engineered CasX variant
QEIKRINKIRRRLVKDSNTKKAGKTGPMKTLLVRVMTPDLRERLENLRKKPENIPQPISNTSRANLNKLLTDYTEMKKAILHVYWEEFQVDPVGLMSRVAQPASKKIDQNKLKPEMDEKGNLTTAGFACSQCGQPLFVYKLEQVSEKGKAYTNYFGRCNVAEHEKLILLYQLKPEKDSDEAVTYSLGKFGQRALDFYSIHVTKESTHPVKPLAQIAGNRYASGPVGKALSDACMGTIASFLSKYQDIIIEHQKVVKGNQKRLESLRELAGKENLEYPSVTLPPQPHTKEGVDAYNEVIARVRMWVNLNLWQKLKLSRDDAKPLLRLKGFPSFPLVERQANEVDWWDMVCNVKKLINEKKEDGKVFWQNLAGYKRQEALRPYLSSEEDRKKGKKFARYQLGDLLLHLEKKHGEDWGKVYDEAWERIDKKVEGLSKHIKLEEERRSEDAQSKAALTDWLRAKASFVIEGLKEADKDEFCRCELKLQKWYGDLRGKPFAIEAENSILDISGFSKQYNCAFIWQKDGVKKLNLYLIINYFKGGKLRFKKIKPEAFEANRFYTVINKKSGEIVPMEVNFNFDDPNLIILPLAFGKRQGREFIWNDLLSLETGSLKLANGRVIEKTLYNRRTRQDEPALFVALTFERREVLDSSNIKPMNLIGVDRGENIPAVIALTDPEGCPLSRFKDSLGNPTHILRIGESYKEKQRTIQAKKEVEQRRAGGYSRKYASKAKNLADDMVRNTARDLLYYAVTQDAMLIFENLSRGFGRQGKRTFMAERQYTRMEDWLTAKLAYEGLPSKTYLSKTLAQYTSKTCSNCGFTITSADYDRVLEKLKKTATGWMTTINGKELKVEGQITYYNRYKRQNVVKDLSVELDRLSEESVNNDISSWTKGRSGEALSLLKKRFSHRPVQEKFVCLNCGFETHADEQAALNIARSWLFLRSQEYKKYQTNKTTGNTDKRAFVETWQSFYRKKLKEVWKPAV

SEQ ID NO: 28492 - protein, 978 aa, synthetic construct
  REGION 1..978: note = engineered CasX variant
QEIKRLNKIRRRLVKDSNTKKAGKTGPMKTLLVRVMTPDLRERLENLRKKPENIPQPISNTSRANLNKLLTDYTEMKKAILHVYWEEFQKDPVGLMSRVAQPASKKIDQNKLKPEMDEKGNLTTAGFACSQCGQPLFVYKLEQVSEKGKAYTNYFGRCNVAEHEKLILLYQLKPEKDSDEAVTYSLGKFGQRALDFYSIHVTKESTHPVKPLAQIAGNRYASGPVGKALSDACMGTIASFLSKYQDIIIEHQKVVKGNQKRLESLRELAGKENLEYPSVTLPPQPHTKEGVDAYNEVIARVRMWVNLNLWQKLKLSRDDAKPLLRLKGFPSFPLVERQANEVDWWDMVCNVKKLINEKKEDGKVFWQNLAGYKRQEALRPYLSSEEDRKKGKKFARYQLGDLLLHLEKKHGEDWGKVYDEAWERIDKKVEGLSKHIKLEEERRSEDAQSKAALTDWLRAKASFVIEGLKEADKDEFCRCELKLQKWYGDLRGKPFAIEAENSILDISGFSKQYNCAFIWQKDGVKKLNLYLIINYFKGGKLRFKKIKPEAFEANRFYTVINKKSGEIVPMEVNFNFDDPNLIILPLAFGKRQGREFIWNDLLSLETGSLKLANGRVIEKTLYNRRTRQDEPALFVALTFERREVLDSSNIKPMNLIGVDRGENIPAVIALTDPEGCPLSRFKDSLGNPTHILRIGESYKEKQRTIQAKKEVEQRRAGGYSRKYASKAKNLADDMVRNTARDLLYYAVTQDAMLIFENLSRGFGRQGKRTFMAERQYTRMEDWLTAKLAYEGLPSKTYLSKTLAQYTSKTCSNCGFTITSADYDRVLEKLKKTATGWMTTINGKELKVEGQITYYNRYKRQNVVKDLSVELDRLSEESVNNDISSWTKGRSGEALSLLKKRFSHRPVQEKFVCLNCGFETHADEQAALNIARSWLFLRSQEYKKYQTNKTTGNTDKRAFVETWQSFYRKKLKEVWKPAV

SEQ ID NO: 28493 - protein, 978 aa, synthetic construct
  REGION 1..978: note = engineered CasX variant
QEIKRINKIRRRLVKDSNTKKAGKTGPMKTLLVRVMTPDLRERLENLRKKPENIPQPISNTSRANLNKLLTDYTEMKKAILHVYWEEFQKDPVGLMSRVAQPASKKIDQNKLKPEMDEKGNLTTAGFACSQCGQPLFVYKLEQVSEKGKAYTNYVGRCNVAEHEKLILLYQLKPEKDSDEAVTYSLGKFGQRALDFYSIHVTKESTHPVKPLAQIAGNRYASGPVGKALSDACMGTIASFLSKYQDIIIEHQKVVKGNQKRLESLRELAGKENLEYPSVTLPPQPHTKEGVDAYNEVIARVRMWVNLNLWQKLKLSRDDAKPLLRLKGFPSFPLVERQANEVDWWDMVCNVKKLINEKKEDGKVFWQNLAGYKRQEALRPYLSSEEDRKKGKKFARYQLGDLLLHLEKKHGEDWGKVYDEAWERIDKKVEGLSKHIKLEEERRSEDAQSKAALTDWLRAKASFVIEGLKEADKDEFCRCELKLQKWYGDLRGKPFAIEAENSILDISGFSKQYNCAFIWQKDGVKKLNLYLIINYFKGGKLRFKKIKPEAFEANRFYTVINKKSGEIVPMEVNFNFDDPNLIILPLAFGKRQGREFIWNDLLSLETGSLKLANGRVIEKTLYNRRTRQDEPALFVALTFERREVLDSSNIKPMNLIGVDRGENIPAVIALTDPEGCPLSRFKDSLGNPTHILRIGESYKEKQRTIQAKKEVEQRRAGGYSRKYASKAKNLADDMVRNTARDLLYYAVTQDAMLIFENLSRGFGRQGKRTFMAERQYTRMEDWLTAKLAYEGLPSKTYLSKTLAQYTSKTCSNCGFTITSADYDRVLEKLKKTATGWMTTINGKELKVEGQITYYNRYKRQNVVKDLSVELDRLSEESVNNDISSWTKGRSGEALSLLKKRFSHRPVQEKFVCLNCGFETHADEQAALNIARSWLFLRSQEYKKYQTNKTTGNTDKRAFVETWQSFYRKKLKEVWKPAV

SEQ ID NO: 28494 - protein, 978 aa, synthetic construct
  REGION 1..978: note = engineered CasX variant
QEIKRINKIRRRLVKDSNTKKAGKTGPMKTLLVRVMTPDLRERLENLRKKPENIPQPISNTSRANLNKLLTDYTEMKKAILHVYWEEFQKDPVGLMSRVAQPASKKIDQNKLKPEMDEKGNLTTAGFACSQCGQPLFVYKLEQVSEKGKAYTNYFGRCNVAEHEKLILLYQLKPEKDSDEAVTYSLGKFGQRALDFYSIHVTKESTHPVKPLAQIAGNRYASGPVGKALSDACMGTIASFLSKYQDIIIEHQKVVKGNQKRLESLRELAGKENLEYPSVTLPPQPHTKEGVDAYNEVIARVRMWVNLNLWQKLKLSRDDAKPLLRLKGFPSFPLVERQANEVDWWDMVCNVKKLINEKKEDGKVFWQNLAGYKRQEALRPYLSSEEDRKKGKKFARYQLGDLLLHLEKKHGEDWGKVYDEAWERIDKKVEGLSKHIKLEEERRSEDAQSKAALTDWLRAKASFVIEGLKEADKDEFCRCELKLQKWYGDLRGKPFAIEAENSILDISGFSKQYNCAFIWQKDGVKKLNLYLIINYFKGGKLRFKKIKPEAFEANRFYTVINKKSGEIVPMEVNFNFDDPNLIILPLAFGKRQGREFIWNDLLSLETGSLKLANGRVIEKTLYNRRTRQDEPALFVALTFERREVLDSSNIKPMNLIGVDRGENIPAVIALTDPEGCPLSRFKDSLGNPTHILRIGESYKEKQRTIQAKKEVEQRRAGGYSRKYASKAKNLADDMVRNTARDLLYYAVTQDAMLIFENLSRGFGRQGKRTFMAERQYTRMEDWLTAKLAYEGLASKTYLSKTLAQYTSKTCSNCGFTITSADYDRVLEKLKKTATGWMTTINGKELKVEGQITYYNRYKRQNVVKDLSVELDRLSEESVNNDISSWTKGRSGEALSLLKKRFSHRPVQEKFVCLNCGFETHADEQAALNIARSWLFLRSQEYKKYQTNKTTGNTDKRAFVETWQSFYRKKLKEVWKPAV

SEQ ID NO: 28495 - protein, 978 aa, synthetic construct
  REGION 1..978: note = engineered CasX variant
QEIKRINKIRRRLVKDSNTKKAGKTGPMKTLLVRVMTPDLRERLENLRKKPENIPQPISNTSRANLNKLLTDYTEMKKAILHVYWEEFQKDPVGLMSRVAQPASKKIDQNKLKPEMDEKGNLTTAGFACSQCGQPLFVYKLEQVSEKGKAYTNYFGRCNVAEHEKLILLYQLKPEKDSDEAVTYSLGKFGQRALDFYSIHVTKESTHPVKPLAQIAGNRYASGPVGKALSDACMGTIASFLSKYQDIIIEHQKVVKGNQKRLESLRELAGKENLEYPSVTLPPQPHTKEGVDAYNEVIARVRMWVNLNLWQKLKLSRDDAKPLLRLKGFPSFPLVERQANEVDWWDMVCNVKKLINEKKEDGKVFWQNLAGYKRQEALRPYLSSEEDRKKGKKFARYQLGDLLLHLEKKHGEDWGKVYDEAWERIDKKVEGLSKHIKLEEERRSEDAQSKAALTDWLRAKASFVIEGLKEADKDEFCRCELKLQKWYGDLRGKPFAIEAENSILDISGFSKQYNCAFIWQKDGVKKLNLYLIINYFKGGKLRFKKIKPEAFEANRFYTVINKKSGEIVPMEVNFNFDDPNLIILPLAFGKRQGREFIWNDLLSLETGSLKLANGRVIEKTLYNRRTRQDEPALFVALTFERREVLDSSNIKPMNLIGVDRGENIPAVIALTDPEGCPLSRFKDSLGNPTHILRIGESYKEKQRTIQAKKEVEQRRAGGYSRKYASKAKNLADDMVRNTARDLLYYAVTQDAMLIFENLSRGFGRQGKRTFMAERQYTRMEDWLTAKLAYEGLPSKVYLSKTLAQYTSKTCSNCGFTITSADYDRVLEKLKKTATGWMTTINGKELKVEGQITYYNRYKRQNVVKDLSVELDRLSEESVNNDISSWTKGRSGEALSLLKKRFSHRPVQEKFVCLNCGFETHADEQAALNIARSWLFLRSQEYKKYQTNKTTGNTDKRAFVETWQSFYRKKLKEVWKPAV

SEQ ID NO: 28496 - protein, 979 aa, synthetic construct
  REGION 1..979: note = engineered CasX variant
QEIKRINKIRRRLVKDSNTKKAGKTGPMKTLLVRVMTPDLRERLENLRKKPENIPQPISNTSRANLNKLLTDYTEMKKAILHVYWEEFQKDPVGLMSRVAQPASKKIDQNKLKPEMDEKGNLTTAGFACSQCGQPLFVYKLEQVSEKGKAYTNYFGRCNVAEHEKLILLYQLKPEKDSDEAVTYSLGKFGQRALDFYSIHVTKESTHPVKPLAQIAGNRYASGPVGKALSDACMGTIASFLSKYQDIIIEHQKVVKGNQKRLESLRELAGKENLEYPSVTLPPQPHTKEGVDAYNEVIARVRMWVNLNLWQKLKLSRDDAKPLLRLKGFPSFPLVERQANEVDWWDMVCNVKKLINEKKEDGKVFWQNLAGYKRQEALRPYLSSEEDRKKGKKFARYQLGDLLLHLEKKHGEDWGKVYDEAWERIDKKVEGLSKHIKLEEERRSEDAQSKAALTDWLRAKASFVIEGLKEADKDEFCRCELKLQKWYGDLRGKPFAIEAENSILDISGFSKQYNCAFIWQKDGVKKLNLYLIINYFKGGKLRFKKIKPEAFEANRFYTVINKKSGEIVPMEVNFNFDDPNLIILPLAFGKRQGREFIWNDLLSLETGSLKLANGRVIEKTLYNRRTRQDEPALFVALTFERREVLDSSNIKPMNLIGVDRGENIPAVIALTDPEGCPLSRFKDSLGNPTHILRIGESYKEKQRTIQAKKEVEQRRAGGYSRKYASKAKNLADDMVRNTARDLLYYAVTQDAMLIFENLSRGFGRQGKRTFMAERQYTRMEDWLTAKLAYEGPLPSKTYLSKTLAQYTSKTCSNCGFTITSADYDRVLEKLKKTATGWMTTINGKELKVEGQITYYNRYKRQNVVKDLSVELDRLSEESVNNDISSWTKGRSGEALSLLKKRFSHRPVQEKFVCLNCGFETHADEQAALNIARSWLFLRSQEYKKYQTNKTTGNTDKRAFVETWQSFYRKKLKEVWKPAV

SEQ ID NO: 28497 - protein, 979 aa, synthetic construct
  REGION 1..979: note = engineered CasX variant
QEIKRINKIRRRLVKDSNTKKAGKTGPMKTLLVRVMTPDLRERLENLRKKPENIPQPISNTSRANLNKLLTDYTEMKKAILHVYWEEFQKDPVGLMSRVAQPASKKIDQNKLKPEMDEKGNLTTAGFACSQCGQPLFVYKLEQVSEKGKAYTNYFGRCNVAEHEKLILLYQLKPEKDSDEAVTYSLGKFGQRALDFYSIHVTKESTHPVKPLAQIAGNRYASGPVGKALSDACMGTIASFLSKYQDIIIEHQKVVKGNQKRLESLRELAGKENLEYPSVTLPPQPHTKEGVDAYNEVIARVRMWVNLNLWQKLKLSRDDAKPLLRLKGFPSFPLVERQANEVDWWDMVCNVKKLINEKKEDGKVFWQNLAGYKRQEALRPYLSSEEDVRKKGKKFARYQLGDLLLHLEKKHGEDWGKVYDEAWERIDKKVEGLSKHIKLEEERRSEDAQSKAALTDWLRAKASFVIEGLKEADKDEFCRCELKLQKWYGDLRGKPFAIEAENSILDISGFSKQYNCAFIWQKDGVKKLNLYLIINYFKGGKLRFKKIKPEAFEANRFYTVINKKSGEIVPMEVNFNFDDPNLIILPLAFGKRQGREFIWNDLLSLETGSLKLANGRVIEKTLYNRRTRQDEPALFVALTFERREVLDSSNIKPMNLIGVDRGENIPAVIALTDPEGCPLSRFKDSLGNPTHILRIGESYKEKQRTIQAKKEVEQRRAGGYSRKYASKAKNLADDMVRNTARDLLYYAVTQDAMLIFENLSRGFGRQGKRTFMAERQYTRMEDWLTAKLAYEGLPSKTYLSKTLAQYTSKTCSNCGFTITSADYDRVLEKLKKTATGWMTTINGKELKVEGQITYYNRYKRQNVVKDLSVELDRLSEESVNNDISSWTKGRSGEALSLLKKRFSHRPVQEKFVCLNCGFETHADEQAALNIARSWLFLRSQEYKKYQTNKTTGNTDKRAFVETWQSFYRKKLKEVWKPAV

SEQ ID NO: 28498 - protein, 978 aa, synthetic construct
  REGION 1..978: note = engineered CasX variant
QEIKRINKIRRRLVKDSNTKKAGKTGPMKTLLVRVMTPDLRERLENLRKKPENIPQPISNTSRANLNKLLTDYTEMKKAILHVYWEEFQKDPVGLMSRVAQPASKKIDQNKLKPEMDEKGNLTTAGFACSQCGQPLFVYKLEQVSEKGKAYTNYFGRCNVAEHEKLILLYQLKPEKDSDEAVTYSLGKFGQRALDFYSIHVTKESTHPVKPLAQIAGNRYASGPVGKALSDACMGTIASFLSKYQDIIIEHQKVVKGNQKRLESLRELAGKENLEYPSVTLPPQPHTKEGVDAYNEVIARVRMWVNLNLWQKLKLSRDDAKPLLRLKGFPSFPLVERQANEVDWWDMVCNVKKLINEKKEDGKVFWQNLAGYKRQEALRPYLSSEEDRKKGKKFARYQLGDLLLHLEKKHGEDWGKVYDEAWERIDKKVEGLSKHIKLEEERRSEDAQSKAALTDWLRAKASFVIEGLKEADKDEFCRCELKLQKWYGDLRGKPFAIEAENSILDISGFSKQYNCAFIWQKDGVKKLNLYLIINYFKGGKLRFKKIKPEAFEANRFYTVINKKSGEIVPMEVNFNFDDPNLIILPLAFGKRQGREFIWNDLLSLETGSLKLANGRVIEKTLYNRRTRQDEPALFVALTFERREVLDSSNIKPMNLIGVDRGENIPAVIALTDPEGCPLSRFKDSLGNPTHILRIGESYKEKQRTIQAKKEVEQRRAGGYSRKYASKAKNLADDMVRNTARDLLYYAVTQDAMLIFENLSRGFGRQGKRTFMAERQYTRMEDWLTAKLAYEGLPSKTYLSKTLAQYTSKTCSNCGFTITSADYDRMLEKLKKTATGWMTTINGKELKVEGQITYYNRYKRQNVVKDLSVELDRLSEESVNNDISSWTKGRSGEALSLLKKRFSHRPVQEKFVCLNCGFETHADEQAALNIARSWLFLRSQEYKKYQTNKTTGNTDKRAFVETWQSFYRKKLKEVWKPAV

SEQ ID NO: 28499 - protein, 978 aa, synthetic construct
  REGION 1..978: note = engineered CasX variant
QEIKRINKIRRRLVKDSNTKKAGKTGPMKTLLVRVMTPDLRERLENLRKKPENIPQPISNTSRANLNKLLTDYTEMKKAILHVYWEEFQKDPVGLMSRVAQPASKKIDQNKLKPEMDEKGNLTTAGFACSQCGQPLFVYKLEQVSEKGKAYTNYFGRCNVAEHEKLILLYQLKPEKDSDEAVTYSLGKFGQRALDFYSIHVTKESTHPVKPLAQIAGNRYASGPVGKALSDACMGTIASFLSKYQDIIIEHQKVVKGNQKRLESLRELAGKENLEYPSVTLPPQPHTKEGVDAYNEVIARVRMWVNLNLWQKLKLSRDDAKPLLRLKGFPSFPLVERQANEVDWWDMVCNVKKLINEKKEDGKVFWQNLAGYKRQEALRPYLSSEEDRKKGKKFARYQLGDLLLHLEKKHGEDWGKVYDEAWERIDKKVEGLSKHIKLEEERRSEDAQSKAALTDWLRAKASFVIEGLKEADKDEFCRCELKLQKWYGDLRGKPFAIEAENSILDISGFSKQYNCAFIWQKDGVKKLNLYLIINYFKGGKLRFKKIKPEAFEANRFYTVINKKSGEIVPMEVNFNFDDPNLIILPLAFGKRQGREFIWNDLLSLETGSLKLANGRVIEKTLYNRRTRQDEPALFVALTFERREVLDSSNIKPMNLIGVDRGENIPAVIALTDPEGCPLSRFKDSLGNPTHILRIGESYKEKQRTIQAKKEVEQRRAGGYSRKYASKAKNLADDMVRNTARDLLYYAVTQDAMLIFENLSRGFGRQGKRTFMAERQYTRMEDWLTAKLAYEGLPSKTYLSKTLAQYTSKTCSNCGFTITSADYDRVLEKLKKTATGWMTTINGKELKVEGQITYYNRYKRQNVVKDLSVELDRLSEESVNNDISSWTKGRQGEALSLLKKRFSHRPVQEKFVCLNCGFETHADEQAALNIARSWLFLRSQEYKKYQTNKTTGNTDKRAFVETWQSFYRKKLKEVWKPAV

SEQ ID NO: 28500 - protein, 978 aa, synthetic construct
  REGION 1..978: note = engineered CasX variant
QEIKRINKIRRRLVKDSNTKKAGKTGPMKTLLVRVMTPDLRERLENLRKKPENIPQPISNTSRANLNKLLTDYTEMKKAILHVYWEEFQKDPVGLMSRVAQPASKKIDQNKLKPEMDEKGNLTTAGFACSQCGQPLFVYKLEQVSEKGKAYTNYFGRCNVAEHEKLILLYQLKPEKDSDEAVTYSLGKFGQRALDFYSIHVTKESTHPVKPLAQIAGNRYASGPVGKALSDACMGTIASFLSKYQDIIIEHQKVVKGNQKRLESLRELAGKENLEYPSVTLPPQPHTKEGVDAYNEVIARVRMWVNLNLWQKLKLSRDDAKPLLRLKGFPSFPLVERQANEVDWWDMVCNVKKLINEKKEDGKVFWQNLAGYKRQEALRPYLSSEEDRKKGKKFARYQLGDLLLHLEKKHGEDWGKVYDEAWERIDKKVEGLSKHIKLEEERRSEDAQSKAALTDWLRAKASFVIEGLKEADKDEFCRCELKLQKWYGDLRGKPFAIEAENSILDISGFSKQYNCAFIWQKDGVKKLNLYLIINYFKGGKLRFKKIKPEAFEANRFYTVINKKSGEIVPMEVNFNFDDPNLIILPLAFGKRQGREFIWNDLLSLETGSLKLANGRVIEKTLYNRRTRQDEPALFVALTFERREVLDSSNIKPMNLIGVDRGENIPAVIALTDPEGCPLSRFKDSLGNPTHILRIGESYKEKQRTIQAKKEVEQRRAGGYSRKYASKAKNLADDMVRNTARDLLYYAVTQDAMLIFENLSRGFGRQGKRTFMAERQYTRMEDWLTAKLAYEGLPSKTYLSKTLAQYTSKTCSNCGFTITSADYDRVLEKLKKTATGWMTTINGKELKVEGQITYYNRYKRQNVVKDLSVELDRLSEESVNNDISSWTKGRSGEALSLLKKRFSHRPVQEKFVCLNCEFETHADEQAALNIARSWLFLRSQEYKKYQTNKTTGNTDKRAFVETWQSFYRKKLKEVWKPAV

SEQ ID NO: 28501 - protein, 979 aa, synthetic construct
  REGION 1..979: note = engineered CasX variant
QEIKRINKIRRRLVKDSNTKKAGKTGPMKTLLVRVMTPDLRERLENLRKKPENIPQPISNTSRANLNKLLTDYTEMKKAILHVYWEEFQKDPVGLMSRVAQPASKKIDQNKLKPEMDEKGNLTTAGFACSQCGQPLFVYKLEQVSEKGKAYTNYFGRCNVAEHEKLILLYQLKPEKDSDEAVTYSLGKFGQRALDFYSIHVTKESTHPVKPLAQIAGNRYASGPVGKALSDACMGTIASFLSKYQDIIIEHQKVVKGNQKRLESLRELAGKENLEYPSVTLPPQPHTKEGVDAYNEVIARVRMWVNLNLWQKLKLSRDDAKPLLRLKGFPSFPLVERQANEVDWWDMVCNVKKLINEKKEDGKVFWQNLAGYKRQEALRPYLSSEEDRKKGKKFARYQLGDLLLHLEKKHGEDWGKVYDEAWERIDKKVEGLSKHIKLEEERRSEDAQSKAALTDWLRAKASFVIEGLKEADKDEFCRCELKLQKWYGDLRGKPFAIEAENSILDISGFSKQYNCAFIWQKDGVKKLNLYLIINYFKGGKLRFKKIKPEAFEANRFYTVINKKSGEIVPMEVNFNFDDPNLIILPLAFGKRQGREFIWNDLLSLETGSLKLANGRVIEKTLYNRRTRQDEPALFVALTFERREVLDSSNIKPMNLIGVDRGENIPAVIALTDPEGCPLSRFKDSLGNPTHILRIGESYKEKQRTIQAKKEVEQRRAGGYSRKYASKAKNLADDMVRNTARDLLYYAVTQDAMLIFENLSRGFGRQGKRTFMAERQYTRMEDWLTAKLAYEGLPSKTYLSKTLAQYTSKTCSNCGFTITSADYDRVLEKLKKTATGWMTTINGKELKVEGQITYYNRYKRQNVVKDLSVELDRLSEESVNNDISSWTKGRSGEALSLLKKRFSHRPVQEKFVCLNCGFETHADEQAALNIARSWLFLRSQEYKKYQTNKTSTGNTDKRAFVETWQSFYRKKLKEVWKPAV

SEQ ID NO: 28502 - protein, 979 aa, synthetic construct
  REGION 1..979: note = engineered CasX variant
QEIKRINKIRRRLVKDSNTKKAGKTGPMKTLLVRVMTPDLRERLENLRKKPENIPQPISNTSRANLNKLLTDYTEMKKAILHVYWEEFQKDPVGLMSRVAQPASKKIDQNKLKPEMDEKGNLTTAGFACSQCGQPLFVYKLEQVSEKGKAYTNYFGRCNVAEHEKLILLYQLKPEKDSDEAVTYSLGKFGQRALDFYSIHVTKESTHPVKPLAQIAGNRYASGPVGKALSDACMGTIASFLSKYQDIIIEHQKVVKGNQKRLESLRELAGKENLEYPSVTLPPQPHTKEGVDAYNEVIARVRMWVNLNLWQKLKLSRDDAKPLLRLKGFPSFPLVERQANEVDWWDMVCNVKKLINEKKEDGKVFWQNLAGYKRQEALRPYLSSEEDRKKGKKFARYQLGDLLLHLEKKHGEDWGKVYDEAWERIDKKVEGLSKHIKLEEERRSEDAQSKAALTDWLRAKASFVIEGLKEADKDEFCRCELKLQKWYGDLRGKPFAIEAENSILDISGFSKQYNCAFIWQKDGVKKLNLYLIINYFKGGKLRFKKIKPEAFEANRFYTVINKKSGEIVPMEVNFNFDDPNLIILPLAFGKRQGREFIWNDLLSLETGSLKLANGRVIEKTLYNRRTRQDEPALFVALTFERREVLDSSNIKPMNLIGVDRGENIPAVIALTDPEGCPLSRFKDSLGNPTHILRIGESYKEKQRTIQAKKEVEQRRAGGYSRKYASKAKNLADDMVRNTARDLLYYAVTQDAMLIFENLSRGFGRQGKRTFMAERQYTRMEDWLTAKLAYEGLPSKTYLSKTLAQYTSKTCSNCGFTITSADYDRVLEKLKKTATGWMTTINGKELKVEGQITYYNRYKRQNVVKDLSVELDRLSEESVNNDISSWTKGRSGEALSLLKKRFSHRPVQEKFVCLNCGFETHADEQAALNIARSWLFLRSQEYKKYQTNKTTGKNTDKRAFVETWQSFYRKKLKEVWKPAV

SEQ ID NO: 28503 - protein, 978 aa, synthetic construct
  REGION 1..978: note = engineered CasX variant
QEIKRINKIRRRLVKDSNTKKAGKTGPMKTLLVRVMTPDLRERLENLRKKPENIPQPISNTSRANLNKLLTDYTEMKKAILHVYWEEFQKDPVGLMSRVAQPASKKIDQNKLKPEMDEKGNLTTAGFACSQCGQPLFVYKLEQVSEKGKAYTNYFGRCNVAEHEKLILLYQLKPEKDSDEAVTYSLGKFGQRALDFYSIHVTKESTHPVKPLAQIAGNRYASGPVGKALSDACMGTIASFLSKYQDIIIEHQKVVKGNQKRLESLRELAGKENLEYPSVTLPPQPHTKEGVDAYNEVIARVRMWVNLNLWQKLKLSRDDAKPLLRLKKFPSFPLVERQANEVDWWDMVCNVKKLINEKKEDGKVFWQNLAGYKRQEALRPYLSSEEDRKKGKKFARYQLGDLLLHLEKKHGEDWGKVYDEAWERIDKKVEGLSKHIKLEEERRSEDAQSKAALTDWLRAKASFVIEGLKEADKDEFCRCELKLQKWYGDLRGKPFAIEAENSILDISGFSKQYNCAFIWQKDGVKKLNLYLIINYFKGGKLRFKKIKPEAFEANRFYTVINKKSGEIVPMEVNFNFDDPNLIILPLAFGKRQGREFIWNDLLSLETGSLKLANGRVIEKTLYNRRTRQDEPALFVALTFERREVLDSSNIKPMNLIGVDRGENIPAVIALTDPEGCPLSRFKDSLGNPTHILRIGESYKEKQRTIQAKKEVEQRRAGGYSRKYASKAKNLADDMVRNTARDLLYYAVTQDAMLIFENLSRGFGRQGKRTFMAERQYTRMEDWLTAKLAYEGLPSKTYLSKTLAQYTSKTCSNCGFTITSADYDRVLEKLKKTATGWMTTINGKELKVEGQITYYNRYKRQNVVKDLSVELDRLSEESVNNDISSWTKGRSGEALSLLKKRFSHRPVQEKFVCLNCGFETHADEQAALNIARSWLFLRSQEYKKYQTNKTTGNTDKRAFVETWQSFYRKKLKEVWKPAV

SEQ ID NO: 28504 - protein, 978 aa, synthetic construct
  REGION 1..978: note = engineered CasX variant
QEIKRINKIRRRLVKDSNTKKAGKTGPMKTLLVRVMTPDLRERLENLRKKPENIPQPISNTSRANLNKLLTDYTEMKKAILHVYWEEFQKDPVGLMSRVAQPASKKIDQNKLKPEMDEKGNLTTAGFACSQCGQPLFVYKLEQVSEKGKAYTNYFGRCNVAEHEKLILLYQLKPEKDSDEAVTYSLGKFGQRALDFYSIHVTKESTHPVKPLAQIAGNRYASGPVGKALSDACMGTIASFLSKYQDIIIEHQKVVKGNQKRLESLRELAGKENLEYPSVTLPPQPHTKEGVDAYNEVIARVRMWVNLNLWQKLKLSRDDAKPLLRLKGFPSFPLVERQANEVDWWDMVCNVKKLINEKKEDGKVFWQNLAGYKRQEALRPYLSSEEDRKKGKKFARYQLGDLLLHLEKKHGEDWGKVYDEAWERIDKKVEGLSKHIKLEEERRSEDAQSKAALTDWLRAKASFVIEGLKEADKDEFCRCELKLQKWYGDLRGKPFAIEAENSILDISGFSKQYNCAFIWQKDGVKKLNLYLIINYFKGGKLRFKKIKPEAFEANRFYTVINKKSGEIVPMEVNFNFDDPNLIILPLAFGKRQGREFIWNDLLSLETGSLKLANGRVIEKTLYNRRTRQDEPALFVALTFERREVLDSSNIKPMNLIGVDRGENIPAVIALTDPEGCPLSRFKDSLGNPTHILRIGERYKEKQRTIQAKKEVEQRRAGGYSRKYASKAKNLADDMVRNTARDLLYYAVTQDAMLIFENLSRGFGRQGKRTFMAERQYTRMEDWLTAKLAYEGLPSKTYLSKTLAQYTSKTCSNCGFTITSADYDRVLEKLKKTATGWMTTINGKELKVEGQITYYNRYKRQNVVKDLSVELDRLSEESVNNDISSWTKGRSGEALSLLKKRFSHRPVQEKFVCLNCGFETHADEQAALNIARSWLFLRSQEYKKYQTNKTTGNTDKRAFVETWQSFYRKKLKEVWKPAV

SEQ ID NO: 28505 - protein, 978 aa, synthetic construct
  REGION 1..978: note = engineered CasX variant
QEIKRINKIRRRLVKDSNTKKAGKTGPMKTLLVRVMTPDLRERLENLRKKPENIPQPISNTSRANLNKLLTDYTEMKKAILHVYWEEFQKDPVGLMSRVAQPASKKIDQNKLKPEMDEKGNLTTAGFACSQCGQPLFVYKLEQVSEKGKAYTNYFGRCNVAEHEKLILLYQLKPEKDSDEAVTYSLGKFGQRALDFYSIHVTKESTHPVKPLAQIAGNRYASGPVGKALSDACMGTIASFLSKYQDIIIEHQKVVKGNQKRLESLRELAGKENLEYPSVTLPPQPHTKEGVDAYNEVIARVRMWVNLNLWQKLKLSRDDAKPLLRLKGFPSFPLVERQANEVDWWDMVCNVKKLINEKKEDGKVFWQNLAGYKRQEALRPYLSSEEDRKKGKKFARYQLGDLLLHLEKKHGEDWGKVYDEAWERIDKKVEGLSKHIKLEEERRSEDAQSKAALTDWLRAKASFVIEGLKEADKDEFCRCELKLQKWYGDLRGKPFAIEAENSILDISGFSKQYNCAFIWQKDGVKKLNLYLIINYFKGGKLRFKKIKPEAFEANRFYTVINKKSGEIVPMEVNFNFDDPNLIILPLAFGKRQGREFIWNDLLSLETGSLQLANGRVIEKTLYNRRTRQDEPALFVALTFERREVLDSSNIKPMNLIGVDRGENIPAVIALTDPEGCPLSRFKDSLGNPTHILRIGESYKEKQRTIQAKKEVEQRRAGGYSRKYASKAKNLADDMVRNTARDLLYYAVTQDAMLIFENLSRGFGRQGKRTFMAERQYTRMEDWLTAKLAYEGLPSKTYLSKTLAQYTSKTCSNCGFTITSADYDRVLEKLKKTATGWMTTINGKELKVEGQITYYNRYKRQNVVKDLSVELDRLSEESVNNDISSWTKGRSGEALSLLKKRFSHRPVQEKFVCLNCGFETHADEQAALNIARSWLFLRSQEYKKYQTNKTTGNTDKRAFVETWQSFYRKKLKEVWKPAV

SEQ ID NO: 28506 - protein, 979 aa, synthetic construct
  REGION 1..979: note = engineered CasX variant
QEIKRINKIRRRLVKDSNTKKAGKTGPMKTLLVRVMTPDLRERLENLRKKPENIPQPISNTSRANLNKLLTDYTEMKKAILHVYWEEFQKDPVGLMSRVAQPASKKIDQNKLKPEMDEKGNLTTAGFACSQCGQPLFVYKLEQVSEKGKAYTNYFGRCNVAEHEKLILLSDQLKPEKDSDEAVTYSLGKFGQRALDFYSIHVTKESTHPVKPLAQIAGNRYASGPVGKALSDACMGTIASFLSKYQDIIIEHQKVVKGNQKRLESLRELAGKENLEYPSVTLPPQPHTKEGVDAYNEVIARVRMWVNLNLWQKLKLSRDDAKPLLRLKGFPSFPLVERQANEVDWWDMVCNVKKLINEKKEDGKVFWQNLAGYKRQEALRPYLSSEEDRKKGKKFARYQLGDLLLHLEKKHGEDWGKVYDEAWERIDKKVEGLSKHIKLEEERRSEDAQSKAALTDWLRAKASFVIEGLKEADKDEFCRCELKLQKWYGDLRGKPFAIEAENSILDISGFSKQYNCAFIWQKDGVKKLNLYLIINYFKGGKLRFKKIKPEAFEANRFYTVINKKSGEIVPMEVNFNFDDPNLIILPLAFGKRQGREFIWNDLLSLETGSLKLANGRVIEKTLYNRRTRQDEPALFVALTFERREVLDSSNIKPMNLIGVDRGENIPAVIALTDPEGCPLSRFKDSLGNPTHILRIGESYKEKQRTIQAKKEVEQRRAGGYSRKYASKAKNLADDMVRNTARDLLYYAVTQDAMLIFENLSRGFGRQGKRTFMAERQYTRMEDWLTAKLAYEGLPSKTYLSKTLAQYTSKTCSNCGFTITSADYDRVLEKLKKTATGWMTTINGKELKVEGQITYYNRYKRQNVVKDLSVELDRLSEESVNNDISSWTKGRSGEALSLLKKRFSHRPVQEKFVCLNCGFETHADEQAALNIARSWLFLRSQEYKKYQTNKTTGNTDKRAFVETWQSFYRKKLKEVWKPAV

SEQ ID NO: 28507 - protein, 979 aa, synthetic construct
  REGION 1..979: note = engineered CasX variant
QEIKRINKIRRRLVKDSNTKKAGKTGPMKTLLVRVMTPDLRERLENLRKKPENIPQPISNTSRANLNKLLTDYTEMKKAILHVYWEEFQKDPVGLMSRVAQPASKKIDQNKLKPEMDEKGNLTTAGFACSQCGQPLFVYKLEQVSEKGKAYTNYFGRCNVAEHEKLILLSYQLKPEKDSDEAVTYSLGKFGQRALDFYSIHVTKESTHPVKPLAQIAGNRYASGPVGKALSDACMGTIASFLSKYQDIIIEHQKVVKGNQKRLESLRELAGKENLEYPSVTLPPQPHTKEGVDAYNEVIARVRMWVNLNLWQKLKLSRDDAKPLLRLKGFPSFPLVERQANEVDWWDMVCNVKKLINEKKEDGKVFWQNLAGYKRQEALRPYLSSEEDRKKGKKFARYQLGDLLLHLEKKHGEDWGKVYDEAWERIDKKVEGLSKHIKLEEERRSEDAQSKAALTDWLRAKASFVIEGLKEADKDEFCRCELKLQKWYGDLRGKPFAIEAENSILDISGFSKQYNCAFIWQKDGVKKLNLYLIINYFKGGKLRFKKIKPEAFEANRFYTVINKKSGEIVPMEVNFNFDDPNLIILPLAFGKRQGREFIWNDLLSLETGSLKLANGRVIEKTLYNRRTRQDEPALFVALTFERREVLDSSNIKPMNLIGVDRGENIPAVIALTDPEGCPLSRFKDSLGNPTHILRIGESYKEKQRTIQAKKEVEQRRAGGYSRKYASKAKNLADDMVRNTARDLLYYAVTQDAMLIFENLSRGFGRQGKRTFMAERQYTRMEDWLTAKLAYEGLPSKTYLSKTLAQYTSKTCSNCGFTITSADYDRVLEKLKKTATGWMTTINGKELKVEGQITYYNRYKRQNVVKDLSVELDRLSEESVNNDISSWTKGRSGEALSLLKKRFSHRPVQEKFVCLNCGFETHADEQAALNIARSWLFLRSQEYKKYQTNKTTGNTDKRAFVETWQSFYRKKLKEVWKPAV

SEQ ID NO: 28508 - protein, 977 aa, synthetic construct
  REGION 1..977: note = engineered CasX variant
QEIKRINKIRRRLVKDSNTKKAGKTGPMKTLLVRVMTPDLRERLENLRKKPENIPQPISNTSRANLNKLLTDYTEMKKAILHVYWEEFQKDPVGLMSRVAQPASKKIDQNKLKPEMDEKGNLTTAGFACSQCGQPLFVYKLEQVSEKGKAYTNYFGRCNVAEHEKLILLSQLKPEKDSDEAVTYSLGKFGQRALDFYSIHVTKESTHPVKPLAQIAGNRYASPVGKALSDACMGTIASFLSKYQDIIIEHQKVVKGNQKRLESLRELAGKENLEYPSVTLPPQPHTKEGVDAYNEVIARVRMWVNLNLWQKLKLSRDDAKPLLRLKGFPSFPLVERQANEVDWWDMVCNVKKLINEKKEDGKVFWQNLAGYKRQEALRPYLSSEEDRKKGKKFARYQLGDLLLHLEKKHGEDWGKVYDEAWERIDKKVEGLSKHIKLEEERRSEDAQSKAALTDWLRAKASFVIEGLKEADKDEFCRCELKLQKWYGDLRGKPFAIEAENSILDISGFSKQYNCAFIWQKDGVKKLNLYLIINYFKGGKLRFKKIKPEAFEANRFYTVINKKSGEIVPMEVNFNFDDPNLIILPLAFGKRQGREFIWNDLLSLETGSLKLANGRVIEKTLYNRRTRQDEPALFVALTFERREVLDSSNIKPMNLIGVDRGENIPAVIALTDPEGCPLSRFKDSLGNPTHILRIGESYKEKQRTIQAKKEVEQRRAGGYSRKYASKAKNLADDMVRNTARDLLYYAVTQDAMLIFENLSRGFGRQGKRTFMAERQYTRMEDWLTAKLAYEGLPSKTYLSKTLAQYTSKTCSNCGFTITSADYDRVLEKLKKTATGWMTTINGKELKVEGQITYYNRYKRQNVVKDLSVELDRLSEESVNNDISSWTKGRSGEALSLLKKRFSHRPVQEKFVCLNCGFETHADEQAALNIARSWLFLRSQEYKKYQTNKTTGNTDKRAFVETWQSFYRKKLKEVWKPAV

SEQ ID NO: 28509 - protein, 978 aa, synthetic construct
  REGION 1..978: note = engineered CasX variant
QEIKRINKIRRRLVKDSNTKKAGKTGPMKTLLVRVMTPDLRERLENLRKKPENIPQPISNTSRANLNKLLTDYTEMKKAILHVYWEEFQKDPVGLMSRVAQPASKKIDQNKLKPEMDEKGNLTTAGFACSQCGQPLFVYKLEQVSEKGKAYTNYFGRCNVAEHEKLILLSQLKPEKDSDEAVTYSLGKFGQRALDFYSIHVTKESTHPVKPLAQIAGNRYASGPVGKALSDACMGTIASFLSKYQDIIIEHQKVVKGNQKRLESLRELAGKENLEYPSVTLPPQPHTSEGVDAYNEVIARVRMWVNLNLWQKLKLSRDDAKPLLRLKGFPSFPLVERQANEVDWWDMVCNVKKLINEKKEDGKVFWQNLAGYKRQEALRPYLSSEEDRKKGKKFARYQLGDLLLHLEKKHGEDWGKVYDEAWERIDKKVEGLSKHIKLEEERRSEDAQSKAALTDWLRAKASFVIEGLKEADKDEFCRCELKLQKWYGDLRGKPFAIEAENSILDISGFSKQYNCAFIWQKDGVKKLNLYLIINYFKGGKLRFKKIKPEAFEANRFYTVINKKSGEIVPMEVNFNFDDPNLIILPLAFGKRQGREFIWNDLLSLETGSLKLANGRVIEKTLYNRRTRQDEPALFVALTFERREVLDSSNIKPMNLIGVDRGENIPAVIALTDPEGCPLSRFKDSLGNPTHILRIGESYKEKQRTIQAKKEVEQRRAGGYSRKYASKAKNLADDMVRNTARDLLYYAVTQDAMLIFENLSRGFGRQGKRTFMAERQYTRMEDWLTAKLAYEGLPSKTYLSKTLAQYTSKTCSNCGFTITSADYDRVLEKLKKTATGWMTTINGKELKVEGQITYYNRYKRQNVVKDLSVELDRLSEESVNNDISSWTKGRSGEALSLLKKRFSHRPVQEKFVCLNCGFETHADEQAALNIARSWLFLRSQEYKKYQTNKTTGNTDKRAFVETWQSFYRKKLKEVWKPAV

SEQ ID NO: 28510 - protein, 978 aa, synthetic construct
  REGION 1..978: note = engineered CasX variant
QEIKRINKIRRRLVKDSNTKKAGKTGPMKTLLVRVMTPDLRERLENLRKKPENIPQPISNTSRANLNKLLTDYTEMKKAILHVYWEEFQKDPVGLMSRVAQPASKKIDQNKLKPEMDEKGNLTTAGFACSQCGQPLFVYKLEQVSEKGKAYTNYFGRCNVAEHEKLILLSQLKPEKDSDEAVTYSLGKFGQRALDFYSIHVTKESTHPVKPLAQIAGNRYASGPVGKALSDACMGTIASFLSKYQDIIIEHQKVVKGNQKRLESLRELAGKENLEYPSVTLPPQPHTKEGLDAYNEVIARVRMWVNLNLWQKLKLSRDDAKPLLRLKGFPSFPLVERQANEVDWWDMVCNVKKLINEKKEDGKVFWQNLAGYKRQEALRPYLSSEEDRKKGKKFARYQLGDLLLHLEKKHGEDWGKVYDEAWERIDKKVEGLSKHIKLEEERRSEDAQSKAALTDWLRAKASFVIEGLKEADKDEFCRCELKLQKWYGDLRGKPFAIEAENSILDISGFSKQYNCAFIWQKDGVKKLNLYLIINYFKGGKLRFKKIKPEAFEANRFYTVINKKSGEIVPMEVNFNFDDPNLIILPLAFGKRQGREFIWNDLLSLETGSLKLANGRVIEKTLYNRRTRQDEPALFVALTFERREVLDSSNIKPMNLIGVDRGENIPAVIALTDPEGCPLSRFKDSLGNPTHILRIGESYKEKQRTIQAKKEVEQRRAGGYSRKYASKAKNLADDMVRNTARDLLYYAVTQDAMLIFENLSRGFGRQGKRTFMAERQYTRMEDWLTAKLAYEGLPSKTYLSKTLAQYTSKTCSNCGFTITSADYDRVLEKLKKTATGWMTTINGKELKVEGQITYYNRYKRQNVVKDLSVELDRLSEESVNNDISSWTKGRSGEALSLLKKRFSHRPVQEKFVCLNCGFETHADEQAALNIARSWLFLRSQEYKKYQTNKTTGNTDKRAFVETWQSFYRKKLKEVWKPAV

SEQ ID NO: 28511 - protein, 978 aa, synthetic construct
  REGION 1..978: note = engineered CasX variant
QEIKRINKIRRRLVKDSNTKKAGKTGPMKTLLVRVMTPDLRERLENLRKKPENIPQPISNTSRANLNKLLTDYTEMKKAILHVYWEEFQKDPVGLMSRVAQPASKKIDQNKLKPEMDEKGNLTTAGFACSQCGQPLFVYKLEQVSEKGKAYTNYFGRCNVAEHEKLILLSQLKPEKDSDEAVTYSLGKFGQRALDFYSIHVTKESTHPVKPLAQIAGNRYASGPVGKALSDACMGTIASFLSKYQDIIIEHQKVVKGNQKRLESLRELAGKENLEYPSVTLPPQPHTKEGVDAYNEVIARVRTWVNLNLWQKLKLSRDDAKPLLRLKGFPSFPLVERQANEVDWWDMVCNVKKLINEKKEDGKVFWQNLAGYKRQEALRPYLSSEEDRKKGKKFARYQLGDLLLHLEKKHGEDWGKVYDEAWERIDKKVEGLSKHIKLEEERRSEDAQSKAALTDWLRAKASFVIEGLKEADKDEFCRCELKLQKWYGDLRGKPFAIEAENSILDISGFSKQYNCAFIWQKDGVKKLNLYLIINYFKGGKLRFKKIKPEAFEANRFYTVINKKSGEIVPMEVNFNFDDPNLIILPLAFGKRQGREFIWNDLLSLETGSLKLANGRVIEKTLYNRRTRQDEPALFVALTFERREVLDSSNIKPMNLIGVDRGENIPAVIALTDPEGCPLSRFKDSLGNPTHILRIGESYKEKQRTIQAKKEVEQRRAGGYSRKYASKAKNLADDMVRNTARDLLYYAVTQDAMLIFENLSRGFGRQGKRTFMAERQYTRMEDWLTAKLAYEGLPSKTYLSKTLAQYTSKTCSNCGFTITSADYDRVLEKLKKTATGWMTTINGKELKVEGQITYYNRYKRQNVVKDLSVELDRLSEESVNNDISSWTKGRSGEALSLLKKRFSHRPVQEKFVCLNCGFETHADEQAALNIARSWLFLRSQEYKKYQTNKTTGNTDKRAFVETWQSFYRKKLKEVWKPAV

SEQ ID NO: 28512 - protein, 978 aa, synthetic construct
  REGION 1..978: note = engineered CasX variant
QEIKRINKIRRRLVKDSNTKKAGKTGPMKTLLVRVMTPDLRERLENLRKKPENIPQPISNTSRANLNKLLTDYTEMKKAILHVYWEEFQKDPVGLMSRVAQPASKKIDQNKLKPEMDEKGNLTTAGFACSQCGQPLFVYKLEQVSEKGKAYTNYFGRCNVAEHEKLILLSQLKPEKDSDEAVTYSLGKFGQRALDFYSIHVTKESTHPVKPLAQIAGNRYASGPVGKALSDACMGTIASFLSKYQDIIIEHQKVVKGNQKRLESLRELAGKENLEYPSVTLPPQPHTKEGVDAYNEVIARVRWWVNLNLWQKLKLSRDDAKPLLRLKGFPSFPLVERQANEVDWWDMVCNVKKLINEKKEDGKVFWQNLAGYKRQEALRPYLSSEEDRKKGKKFARYQLGDLLLHLEKKHGEDWGKVYDEAWERIDKKVEGLSKHIKLEEERRSEDAQSKAALTDWLRAKASFVIEGLKEADKDEFCRCELKLQKWYGDLRGKPFAIEAENSILDISGFSKQYNCAFIWQKDGVKKLNLYLIINYFKGGKLRFKKIKPEAFEANRFYTVINKKSGEIVPMEVNFNFDDPNLIILPLAFGKRQGREFIWNDLLSLETGSLKLANGRVIEKTLYNRRTRQDEPALFVALTFERREVLDSSNIKPMNLIGVDRGENIPAVIALTDPEGCPLSRFKDSLGNPTHILRIGESYKEKQRTIQAKKEVEQRRAGGYSRKYASKAKNLADDMVRNTARDLLYYAVTQDAMLIFENLSRGFGRQGKRTFMAERQYTRMEDWLTAKLAYEGLPSKTYLSKTLAQYTSKTCSNCGFTITSADYDRVLEKLKKTATGWMTTINGKELKVEGQITYYNRYKRQNVVKDLSVELDRLSEESVNNDISSWTKGRSGEALSLLKKRFSHRPVQEKFVCLNCGFETHADEQAALNIARSWLFLRSQEYKKYQTNKTTGNTDKRAFVETWQSFYRKKLKEVWKPAV

SEQ ID NO: 28513 - protein, 979 aa, synthetic construct
  REGION 1..979: note = engineered CasX variant
QEIKRINKIRRRLVKDSNTKKAGKTGPMKTLLVRVMTPDLRERLENLRKKPENIPQPISNTSRANLNKLLTDYTEMKKAILHVYWEEFQKDPVGLMSRVAQPASKKIDQNKLKPEMDEKGNLTTAGFACSQCGQPLFVYKLEQVSEKGKAYTNYFGRCNVAEHEKLILLSQLKPEKDSDEAVTYSLGKFGQRALDFYSIHVTKESTHPVKPLAQIAGNRYASGPVGKALSDACMGTIASFLSKYQDIIIEHQKVVKGNQKRLESLRELAGKENLEYPSVTLPPQPHTKEGVDAYNEVIARVRMWVNLNLWQKLKLSRDDAKPLLRLKGFPSFPLVERQQANEVDWWDMVCNVKKLINEKKEDGKVFWQNLAGYKRQEALRPYLSSEEDRKKGKKFARYQLGDLLLHLEKKHGEDWGKVYDEAWERIDKKVEGLSKHIKLEEERRSEDAQSKAALTDWLRAKASFVIEGLKEADKDEFCRCELKLQKWYGDLRGKPFAIEAENSILDISGFSKQYNCAFIWQKDGVKKLNLYLIINYFKGGKLRFKKIKPEAFEANRFYTVINKKSGEIVPMEVNFNFDDPNLIILPLAFGKRQGREFIWNDLLSLETGSLKLANGRVIEKTLYNRRTRQDEPALFVALTFERREVLDSSNIKPMNLIGVDRGENIPAVIALTDPEGCPLSRFKDSLGNPTHILRIGESYKEKQRTIQAKKEVEQRRAGGYSRKYASKAKNLADDMVRNTARDLLYYAVTQDAMLIFENLSRGFGRQGKRTFMAERQYTRMEDWLTAKLAYEGLPSKTYLSKTLAQYTSKTCSNCGFTITSADYDRVLEKLKKTATGWMTTINGKELKVEGQITYYNRYKRQNVVKDLSVELDRLSEESVNNDISSWTKGRSGEALSLLKKRFSHRPVQEKFVCLNCGFETHADEQAALNIARSWLFLRSQEYKKYQTNKTTGNTDKRAFVETWQSFYRKKLKEVWKPAV

SEQ ID NO: 28514 - protein, 979 aa, synthetic construct
  REGION 1..979: note = engineered CasX variant
QEIKRINKIRRRLVKDSNTKKAGKTGPMKTLLVRVMTPDLRERLENLRKKPENIPQPISNTSRANLNKLLTDYTEMKKAILHVYWEEFQKDPVGLMSRVAQPASKKIDQNKLKPEMDEKGNLTTAGFACSQCGQPLFVYKLEQVSEKGKAYTNYFGRCNVAEHEKLILLSQLKPEKDSDEAVTYSLGKFGQRALDFYSIHVTKESTHPVKPLAQIAGNRYASGPVGKALSDACMGTIASFLSKYQDIIIEHQKVVKGNQKRLESLRELAGKENLEYPSVTLPPQPHTKEGVDAYNEVIARVRMWVNLNLWQKLKLSRDDAKPLLRLKGFPSFPLVERQANAEVDWWDMVCNVKKLINEKKEDGKVFWQNLAGYKRQEALRPYLSSEEDRKKGKKFARYQLGDLLLHLEKKHGEDWGKVYDEAWERIDKKVEGLSKHIKLEEERRSEDAQSKAALTDWLRAKASFVIEGLKEADKDEFCRCELKLQKWYGDLRGKPFAIEAENSILDISGFSKQYNCAFIWQKDGVKKLNLYLIINYFKGGKLRFKKIKPEAFEANRFYTVINKKSGEIVPMEVNFNFDDPNLIILPLAFGKRQGREFIWNDLLSLETGSLKLANGRVIEKTLYNRRTRQDEPALFVALTFERREVLDSSNIKPMNLIGVDRGENIPAVIALTDPEGCPLSRFKDSLGNPTHILRIGESYKEKQRTIQAKKEVEQRRAGGYSRKYASKAKNLADDMVRNTARDLLYYAVTQDAMLIFENLSRGFGRQGKRTFMAERQYTRMEDWLTAKLAYEGLPSKTYLSKTLAQYTSKTCSNCGFTITSADYDRVLEKLKKTATGWMTTINGKELKVEGQITYYNRYKRQNVVKDLSVELDRLSEESVNNDISSWTKGRSGEALSLLKKRFSHRPVQEKFVCLNCGFETHADEQAALNIARSWLFLRSQEYKKYQTNKTTGNTDKRAFVETWQSFYRKKLKEVWKPAV

SEQ ID NO: 28515 - protein, 978 aa, synthetic construct
  REGION 1..978: note = engineered CasX variant
QEIKRINKIRRRLVKDSNTKKAGKTGPMKTLLVRVMTPDLRERLENLRKKPENIPQPISNTSRANLNKLLTDYTEMKKAILHVYWEEFQKDPVGLMSRVAQPASKKIDQNKLKPEMDEKGNLTTAGFACSQCGQPLFVYKLEQVSEKGKAYTNYFGRCNVAEHEKLILLSQLKPEKDSDEAVTYSLGKFGQRALDFYSIHVTKESTHPVKPLAQIAGNRYASGPVGKALSDACMGTIASFLSKYQDIIIEHQKVVKGNQKRLESLRELAGKENLEYPSVTLPPQPHTKEGVDAYNEVIARVRMWVNLNLWQKLKLSRDDAKPLLRLKGFPSFPLVERQANEVDWWDMVCNVKKLINEKKEDGKVFWQNLAGYKRQEALRPYLSSEEDRKKGKKFARTQLGDLLLHLEKKHGEDWGKVYDEAWERIDKKVEGLSKHIKLEEERRSEDAQSKAALTDWLRAKASFVIEGLKEADKDEFCRCELKLQKWYGDLRGKPFAIEAENSILDISGFSKQYNCAFIWQKDGVKKLNLYLIINYFKGGKLRFKKIKPEAFEANRFYTVINKKSGEIVPMEVNFNFDDPNLIILPLAFGKRQGREFIWNDLLSLETGSLKLANGRVIEKTLYNRRTRQDEPALFVALTFERREVLDSSNIKPMNLIGVDRGENIPAVIALTDPEGCPLSRFKDSLGNPTHILRIGESYKEKQRTIQAKKEVEQRRAGGYSRKYASKAKNLADDMVRNTARDLLYYAVTQDAMLIFENLSRGFGRQGKRTFMAERQYTRMEDWLTAKLAYEGLPSKTYLSKTLAQYTSKTCSNCGFTITSADYDRVLEKLKKTATGWMTTINGKELKVEGQITYYNRYKRQNVVKDLSVELDRLSEESVNNDISSWTKGRSGEALSLLKKRFSHRPVQEKFVCLNCGFETHADEQAALNIARSWLFLRSQEYKKYQTNKTTGNTDKRAFVETWQSFYRKKLKEVWKPAV

SEQ ID NO: 28516 - protein, 979 aa, synthetic construct
  REGION 1..979: note = engineered CasX variant
QEIKRINKIRRRLVKDSNTKKAGKTGPMKTLLVRVMTPDLRERLENLRKKPENIPQPISNTSRANLNKLLTDYTEMKKAILHVYWEEFQKDPVGLMSRVAQPASKKIDQNKLKPEMDEKGNLTTAGFACSQCGQPLFVYKLEQVSEKGKAYTNYFGRCNVAEHEKLILLSQLKPEKDSDEAVTYSLGKFGQRALDFYSIHVTKESTHPVKPLAQIAGNRYASGPVGKALSDACMGTIASFLSKYQDIIIEHQKVVKGNQKRLESLRELAGKENLEYPSVTLPPQPHTKEGVDAYNEVIARVRMWVNLNLWQKLKLSRDDAKPLLRLKGFPSFPLVERQANEVDWWDMVCNVKKLINEKKEDGKVFWQNLAGYKRQEALRPYLSSEEDRKKGKKFARYQLGDLLLHLEKKHEGEDWGKVYDEAWERIDKKVEGLSKHIKLEEERRSEDAQSKAALTDWLRAKASFVIEGLKEADKDEFCRCELKLQKWYGDLRGKPFAIEAENSILDISGFSKQYNCAFIWQKDGVKKLNLYLIINYFKGGKLRFKKIKPEAFEANRFYTVINKKSGEIVPMEVNFNFDDPNLIILPLAFGKRQGREFIWNDLLSLETGSLKLANGRVIEKTLYNRRTRQDEPALFVALTFERREVLDSSNIKPMNLIGVDRGENIPAVIALTDPEGCPLSRFKDSLGNPTHILRIGESYKEKQRTIQAKKEVEQRRAGGYSRKYASKAKNLADDMVRNTARDLLYYAVTQDAMLIFENLSRGFGRQGKRTFMAERQYTRMEDWLTAKLAYEGLPSKTYLSKTLAQYTSKTCSNCGFTITSADYDRVLEKLKKTATGWMTTINGKELKVEGQITYYNRYKRQNVVKDLSVELDRLSEESVNNDISSWTKGRSGEALSLLKKRFSHRPVQEKFVCLNCGFETHADEQAALNIARSWLFLRSQEYKKYQTNKTTGNTDKRAFVETWQSFYRKKLKEVWKPAV

SEQ ID NO: 28517 - protein, 978 aa, synthetic construct
  REGION 1..978: note = engineered CasX variant
QEIKRINKIRRRLVKDSNTKKAGKTGPMKTLLVRVMTPDLRERLENLRKKPENIPQPISNTSRANLNKLLTDYTEMKKAILHVYWEEFQKDPVGLMSRVAQPASKKIDQNKLKPEMDEKGNLTTAGFACSQCGQPLFVYKLEQVSEKGKAYTNYFGRCNVAEHEKLILLSQLKPEKDSDEAVTYSLGKFGQRALDFYSIHVTKESTHPVKPLAQIAGNRYASGPVGKALSDACMGTIASFLSKYQDIIIEHQKVVKGNQKRLESLRELAGKENLEYPSVTLPPQPHTKEGVDAYNEVIARVRMWVNLNLWQKLKLSRDDAKPLLRLKGFPSFPLVERQANEVDWWDMVCNVKKLINEKKEDGKVFWQNLAGYKRQEALRPYLSSEEDRKKGKKFARYQLGDLLLHLEKKHGEDWGKVYDEAWERIDKKVEGLSKHIKLEEERRSEDAQSKAALTDWLRAKASFVIEGLKEADKDEFCRCDLKLQKWYGDLRGKPFAIEAENSILDISGFSKQYNCAFIWQKDGVKKLNLYLIINYFKGGKLRFKKIKPEAFEANRFYTVINKKSGEIVPMEVNFNFDDPNLIILPLAFGKRQGREFIWNDLLSLETGSLKLANGRVIEKTLYNRRTRQDEPALFVALTFERREVLDSSNIKPMNLIGVDRGENIPAVIALTDPEGCPLSRFKDSLGNPTHILRIGESYKEKQRTIQAKKEVEQRRAGGYSRKYASKAKNLADDMVRNTARDLLYYAVTQDAMLIFENLSRGFGRQGKRTFMAERQYTRMEDWLTAKLAYEGLPSKTYLSKTLAQYTSKTCSNCGFTITSADYDRVLEKLKKTATGWMTTINGKELKVEGQITYYNRYKRQNVVKDLSVELDRLSEESVNNDISSWTKGRSGEALSLLKKRFSHRPVQEKFVCLNCGFETHADEQAALNIARSWLFLRSQEYKKYQTNKTTGNTDKRAFVETWQSFYRKKLKEVWKPAV

SEQ ID NO: 28518 - protein, 978 aa, synthetic construct
  REGION 1..978: note = engineered CasX variant
QEIKRINKIRRRLVKDSNTKKAGKTGPMKTLLVRVMTPDLRERLENLRKKPENIPQPISNTSRANLNKLLTDYTEMKKAILHVYWEEFQKDPVGLMSRVAQPASKKIDQNKLKPEMDEKGNLTTAGFACSQCGQPLFVYKLEQVSEKGKAYTNYFGRCNVAEHEKLILLSQLKPEKDSDEAVTYSLGKFGQRALDFYSIHVTKESTHPVKPLAQIAGNRYASGPVGKALSDACMGTIASFLSKYQDIIIEHQKVVKGNQKRLESLRELAGKENLEYPSVTLPPQPHTKEGVDAYNEVIARVRMWVNLNLWQKLKLSRDDAKPLLRLKGFPSFPLVERQANEVDWWDMVCNVKKLINEKKEDGKVFWQNLAGYKRQEALRPYLSSEEDRKKGKKFARYQLGDLLLHLEKKHGEDWGKVYDEAWERIDKKVEGLSKHIKLEEERRSEDAQSKAALTDWLRAKASFVIEGLKEADKDEFCRCELKLQKWYGDLRGKPFAIEAENSILDISGFSKQYNCAFIWQKDGVKKLNLYLIINYFKGGKLRFKKIKPEAFEANRFYTVINKKSGEIVPMEVNFNFDDPNLIILPLAFGKRFGREFIWNDLLSLETGSLKLANGRVIEKTLYNRRTRQDEPALFVALTFERREVLDSSNIKPMNLIGVDRGENIPAVIALTDPEGCPLSRFKDSLGNPTHILRIGESYKEKQRTIQAKKEVEQRRAGGYSRKYASKAKNLADDMVRNTARDLLYYAVTQDAMLIFENLSRGFGRQGKRTFMAERQYTRMEDWLTAKLAYEGLPSKTYLSKTLAQYTSKTCSNCGFTITSADYDRVLEKLKKTATGWMTTINGKELKVEGQITYYNRYKRQNVVKDLSVELDRLSEESVNNDISSWTKGRSGEALSLLKKRFSHRPVQEKFVCLNCGFETHADEQAALNIARSWLFLRSQEYKKYQTNKTTGNTDKRAFVETWQSFYRKKLKEVWKPAV

SEQ ID NO: 28519 - protein, 978 aa, synthetic construct
  REGION 1..978: note = engineered CasX variant
QEIKRINKIRRRLVKDSNTKKAGKTGPMKTLLVRVMTPDLRERLENLRKKPENIPQPISNTSRANLNKLLTDYTEMKKAILHVYWEEFQKDPVGLMSRVAQPASKKIDQNKLKPEMDEKGNLTTAGFACSQCGQPLFVYKLEQVSEKGKAYTNYFGRCNVAEHEKLILLSQLKPEKDSDEAVTYSLGKFGQRALDFYSIHVTKESTHPVKPLAQIAGNRYASGPVGKALSDACMGTIASFLSKYQDIIIEHQKVVKGNQKRLESLRELAGKENLEYPSVTLPPQPHTKEGVDAYNEVIARVRMWVNLNLWQKLKLSRDDAKPLLRLKGFPSFPLVERQANEVDWWDMVCNVKKLINEKKEDGKVFWQNLAGYKRQEALRPYLSSEEDRKKGKKFARYQLGDLLLHLEKKHGEDWGKVYDEAWERIDKKVEGLSKHIKLEEERRSEDAQSKAALTDWLRAKASFVIEGLKEADKDEFCRCELKLQKWYGDLRGKPFAIEAENSILDISGFSKQYNCAFIWQKDGVKKLNLYLIINYFKGGKLRFKKIKPEAFEANRFYTVINKKSGEIVPMEVNFNFDDPNLIILPLAFGKRVGREFIWNDLLSLETGSLKLANGRVIEKTLYNRRTRQDEPALFVALTFERREVLDSSNIKPMNLIGVDRGENIPAVIALTDPEGCPLSRFKDSLGNPTHILRIGESYKEKQRTIQAKKEVEQRRAGGYSRKYASKAKNLADDMVRNTARDLLYYAVTQDAMLIFENLSRGFGRQGKRTFMAERQYTRMEDWLTAKLAYEGLPSKTYLSKTLAQYTSKTCSNCGFTITSADYDRVLEKLKKTATGWMTTINGKELKVEGQITYYNRYKRQNVVKDLSVELDRLSEESVNNDISSWTKGRSGEALSLLKKRFSHRPVQEKFVCLNCGFETHADEQAALNIARSWLFLRSQEYKKYQTNKTTGNTDKRAFVETWQSFYRKKLKEVWKPAV

SEQ ID NO: 28520 - protein, 979 aa, synthetic construct
  REGION 1..979: note = engineered CasX variant
QEIKRINKIRRRLVKDSNTKKAGKTGPMKTLLVRVMTPDLRERLENLRKKPENIPQPISNTSRANLNKLLTDYTEMKKAILHVYWEEFQKDPVGLMSRVAQPASKKIDQNKLKPEMDEKGNLTTAGFACSQCGQPLFVYKLEQVSEKGKAYTNYFGRCNVAEHEKLILLSQLKPEKDSDEAVTYSLGKFGQRALDFYSIHVTKESTHPVKPLAQIAGNRYASGPVGKALSDACMGTIASFLSKYQDIIIEHQKVVKGNQKRLESLRELAGKENLEYPSVTLPPQPHTKEGVDAYNEVIARVRMWVNLNLWQKLKLSRDDAKPLLRLKGFPSFPLVERQANEVDWWDMVCNVKKLINEKKEDGKVFWQNLAGYKRQEALRPYLSSEEDRKKGKKFARYQLGDLLLHLEKKHGEDWGKVYDEAWERIDKKVEGLSKHIKLEEERRSEDAQSKAALTDWLRAKASFVIEGLKEADKDEFCRCELKLQKWYGDLRGKPFAIEAENSILDISGFSKQYNCAFIWQKDGVKKLNLYLIINYFKGGKLRFKKIKPEAFEANRFYTVINKKSGEIVPMEVNFNFDDPNLIILPLAFGKRQGREFIWNDLLSLETGSLKLANGRVIEKTLYNRRTRQDEPALFVALTFERREVLDSSNIKTPMNLIGVDRGENIPAVIALTDPEGCPLSRFKDSLGNPTHILRIGESYKEKQRTIQAKKEVEQRRAGGYSRKYASKAKNLADDMVRNTARDLLYYAVTQDAMLIFENLSRGFGRQGKRTFMAERQYTRMEDWLTAKLAYEGLPSKTYLSKTLAQYTSKTCSNCGFTITSADYDRVLEKLKKTATGWMTTINGKELKVEGQITYYNRYKRQNVVKDLSVELDRLSEESVNNDISSWTKGRSGEALSLLKKRFSHRPVQEKFVCLNCGFETHADEQAALNIARSWLFLRSQEYKKYQTNKTTGNTDKRAFVETWQSFYRKKLKEVWKPAV

SEQ ID NO: 28521 - protein, 979 aa, synthetic construct
  REGION 1..979: note = engineered CasX variant
QEIKRINKIRRRLVKDSNTKKAGKTGPMKTLLVRVMTPDLRERLENLRKKPENIPQPISNTSRANLNKLLTDYTEMKKAILHVYWEEFQKDPVGLMSRVAQPASKKIDQNKLKPEMDEKGNLTTAGFACSQCGQPLFVYKLEQVSEKGKAYTNYFGRCNVAEHEKLILLSQLKPEKDSDEAVTYSLGKFGQRALDFYSIHVTKESTHPVKPLAQIAGNRYASGPVGKALSDACMGTIASFLSKYQDIIIEHQKVVKGNQKRLESLRELAGKENLEYPSVTLPPQPHTKEGVDAYNEVIARVRMWVNLNLWQKLKLSRDDAKPLLRLKGFPSFPLVERQANEVDWWDMVCNVKKLINEKKEDGKVFWQNLAGYKRQEALRPYLSSEEDRKKGKKFARYQLGDLLLHLEKKHGEDWGKVYDEAWERIDKKVEGLSKHIKLEEERRSEDAQSKAALTDWLRAKASFVIEGLKEADKDEFCRCELKLQKWYGDLRGKPFAIEAENSILDISGFSKQYNCAFIWQKDGVKKLNLYLIINYFKGGKLRFKKIKPEAFEANRFYTVINKKSGEIVPMEVNFNFDDPNLIILPLAFGKRQGREFIWNDLLSLETGSLKLANGRVIEKTLYNRRTRQDEPALFVALTFERREVLDSSNIKPMSNLIGVDRGENIPAVIALTDPEGCPLSRFKDSLGNPTHILRIGESYKEKQRTIQAKKEVEQRRAGGYSRKYASKAKNLADDMVRNTARDLLYYAVTQDAMLIFENLSRGFGRQGKRTFMAERQYTRMEDWLTAKLAYEGLPSKTYLSKTLAQYTSKTCSNCGFTITSADYDRVLEKLKKTATGWMTTINGKELKVEGQITYYNRYKRQNVVKDLSVELDRLSEESVNNDISSWTKGRSGEALSLLKKRFSHRPVQEKFVCLNCGFETHADEQAALNIARSWLFLRSQEYKKYQTNKTTGNTDKRAFVETWQSFYRKKLKEVWKPAV

SEQ ID NO: 28522 - protein, 978 aa, synthetic construct
  REGION 1..978: note = engineered CasX variant
QEIKRINKIRRRLVKDSNTKKAGKTGPMKTLLVRVMTPDLRERLENLRKKPENIPQPISNTSRANLNKLLTDYTEMKKAILHVYWEEFQKDPVGLMSRVAQPASKKIDQNKLKPEMDEKGNLTTAGFACSQCGQPLFVYKLEQVSEKGKAYTNYFGRCNVAEHEKLILLSQLKPEKDSDEAVTYSLGKFGQRALDFYSIHVTKESTHPVKPLAQIAGNRYASGPVGKALSDACMGTIASFLSKYQDIIIEHQKVVKGNQKRLESLRELAGKENLEYPSVTLPPQPHTKEGVDAYNEVIARVRMWVNLNLWQKLKLSRDDAKPLLRLKGFPSFPLVERQANEVDWWDMVCNVKKLINEKKEDGKVFWQNLAGYKRQEALRPYLSSEEDRKKGKKFARYQLGDLLLHLEKKHGEDWGKVYDEAWERIDKKVEGLSKHIKLEEERRSEDAQSKAALTDWLRAKASFVIEGLKEADKDEFCRCELKLQKWYGDLRGKPFAIEAENSILDISGFSKQYNCAFIWQKDGVKKLNLYLIINYFKGGKLRFKKIKPEAFEANRFYTVINKKSGEIVPMEVNFNFDDPNLIILPLAFGKRQGREFIWNDLLSLETGSLKLANGRVIEKTLYNRRTRQDEPALFVALTFERREVLDSSNIKPMNLIGVDRGENIPAVIALTDPEGCPLSRFKDSLGNPTHILRIRESYKEKQRTIQAKKEVEQRRAGGYSRKYASKAKNLADDMVRNTARDLLYYAVTQDAMLIFENLSRGFGRQGKRTFMAERQYTRMEDWLTAKLAYEGLPSKTYLSKTLAQYTSKTCSNCGFTITSADYDRVLEKLKKTATGWMTTINGKELKVEGQITYYNRYKRQNVVKDLSVELDRLSEESVNNDISSWTKGRSGEALSLLKKRFSHRPVQEKFVCLNCGFETHADEQAALNIARSWLFLRSQEYKKYQTNKTTGNTDKRAFVETWQSFYRKKLKEVWKPAV

SEQ ID NO: 28523 - protein, 978 aa, synthetic construct
  REGION 1..978: note = engineered CasX variant
QEIKRINKIRRRLVKDSNTKKAGKTGPMKTLLVRVMTPDLRERLENLRKKPENIPQPISNTSRANLNKLLTDYTEMKKAILHVYWEEFQKDPVGLMSRVAQPASKKIDQNKLKPEMDEKGNLTTAGFACSQCGQPLFVYKLEQVSEKGKAYTNYFGRCNVAEHEKLILLSQLKPEKDSDEAVTYSLGKFGQRALDFYSIHVTKESTHPVKPLAQIAGNRYASGPVGKALSDACMGTIASFLSKYQDIIIEHQKVVKGNQKRLESLRELAGKENLEYPSVTLPPQPHTKEGVDAYNEVIARVRMWVNLNLWQKLKLSRDDAKPLLRLKGFPSFPLVERQANEVDWWDMVCNVKKLINEKKEDGKVFWQNLAGYKRQEALRPYLSSEEDRKKGKKFARYQLGDLLLHLEKKHGEDWGKVYDEAWERIDKKVEGLSKHIKLEEERRSEDAQSKAALTDWLRAKASFVIEGLKEADKDEFCRCELKLQKWYGDLRGKPFAIEAENSILDISGFSKQYNCAFIWQKDGVKKLNLYLIINYFKGGKLRFKKIKPEAFEANRFYTVINKKSGEIVPMEVNFNFDDPNLIILPLAFGKRQGREFIWNDLLSLETGSLKLANGRVIEKTLYNRRTRQDEPALFVALTFERREVLDSSNIKPMNLIGVDRGENIPAVIALTDPEGCPLSRFKDSLGNPTHILRIGESYKEKQRTIQAKKEVEQRRAGGYSRKYASKAKNLADDMVRNTARDLLYYAVTQDAMLIFENLSRGFGRQGKRTFSAERQYTRMEDWLTAKLAYEGLPSKTYLSKTLAQYTSKTCSNCGFTITSADYDRVLEKLKKTATGWMTTINGKELKVEGQITYYNRYKRQNVVKDLSVELDRLSEESVNNDISSWTKGRSGEALSLLKKRFSHRPVQEKFVCLNCGFETHADEQAALNIARSWLFLRSQEYKKYQTNKTTGNTDKRAFVETWQSFYRKKLKEVWKPAV

SEQ ID NO: 28524 - protein, 978 aa, synthetic construct
  REGION 1..978: note = engineered CasX variant
QEIKRINKIRRRLVKDSNTKKAGKTGPMKTLLVRVMTPDLRERLENLRKKPENIPQPISNTSRANLNKLLTDYTEMKKAILHVYWEEFQKDPVGLMSRVAQPASKKIDQNKLKPEMDEKGNLTTAGFACSQCGQPLFVYKLEQVSEKGKAYTNYFGRCNVAEHEKLILLSQLKPEKDSDEAVTYSLGKFGQRALDFYSIHVTKESTHPVKPLAQIAGNRYASGPVGKALSDACMGTIASFLSKYQDIIIEHQKVVKGNQKRLESLRELAGKENLEYPSVTLPPQPHTKEGVDAYNEVIARVRMWVNLNLWQKLKLSRDDAKPLLRLKGFPSFPLVERQANEVDWWDMVCNVKKLINEKKEDGKVFWQNLAGYKRQEALRPYLSSEEDRKKGKKFARYQLGDLLLHLEKKHGEDWGKVYDEAWERIDKKVEGLSKHIKLEEERRSEDAQSKAALTDWLRAKASFVIEGLKEADKDEFCRCELKLQKWYGDLRGKPFAIEAENSILDISGFSKQYNCAFIWQKDGVKKLNLYLIINYFKGGKLRFKKIKPEAFEANRFYTVINKKSGEIVPMEVNFNFDDPNLIILPLAFGKRQGREFIWNDLLSLETGSLKLANGRVIEKTLYNRRTRQDEPALFVALTFERREVLDSSNIKPMNLIGVDRGENIPAVIALTDPEGCPLSRFKDSLGNPTHILRIGESYKEKQRTIQAKKEVEQRRAGGYSRKYASKAKNLADDMVRNTARDLLYYAVTQDAMLIFENLSRGFGRQGKRTFMAERQYTRMEDWLTAKLAYEGLPSKTYLSKTLAQYTSKTCSNCGFTITSADYDRVLEKLKKTATGWMTTINGKELKVEGQITYYNRYKRQNVVKDLSVELDRLSEESVNNDISSWDKGRSGEALSLLKKRFSHRPVQEKFVCLNCGFETHADEQAALNIARSWLFLRSQEYKKYQTNKTTGNTDKRAFVETWQSFYRKKLKEVWKPAV

SEQ ID NO: 28525 - protein, 978 aa, synthetic construct
  REGION 1..978: note = engineered CasX variant
QEIKRINKIRRRLVKDSNTKKAGKTGPMKTLLVRVMTPDLRERLENLRKKPENIPQPISNTSRANLNKLLTDYTEMKKAILHVYWEEFQVDPVGLMSRVAQPASKKIDQNKLKPEMDEKGNLTTAGFACSQCGQPLFVYKLEQVSEKGKAYTNYFGRCNVAEHEKLILLSQLKPEKDSDEAVTYSLGKFGQRALDFYSIHVTKESTHPVKPLAQIAGNRYASGPVGKALSDACMGTIASFLSKYQDIIIEHQKVVKGNQKRLESLRELAGKENLEYPSVTLPPQPHTKEGVDAYNEVIARVRMWVNLNLWQKLKLSRDDAKPLLRLKGFPSFPLVERQANEVDWWDMVCNVKKLINEKKEDGKVFWQNLAGYKRQEALRPYLSSEEDRKKGKKFARYQLGDLLLHLEKKHGEDWGKVYDEAWERIDKKVEGLSKHIKLEEERRSEDAQSKAALTDWLRAKASFVIEGLKEADKDEFCRCELKLQKWYGDLRGKPFAIEAENSILDISGFSKQYNCAFIWQKDGVKKLNLYLIINYFKGGKLRFKKIKPEAFEANRFYTVINKKSGEIVPMEVNFNFDDPNLIILPLAFGKRQGREFIWNDLLSLETGSLKLANGRVIEKTLYNRRTRQDEPALFVALTFERREVLDSSNIKPMNLIGVDRGENIPAVIALTDPEGCPLSRFKDSLGNPTHILRIGESYKEKQRTIQAKKEVEQRRAGGYSRKYASKAKNLADDMVRNTARDLLYYAVTQDAMLIFENLSRGFGRQGKRTFMAERQYTRMEDWLTAKLAYEGLPSKTYLSKTLAQYTSKTCSNCGFTITSADYDRVLEKLKKTATGWMTTINGKELKVEGQITYYNRYKRQNVVKDLSVELDRLSEESVNNDISSWTKGRSGEALSLLKKRFSHRPVQEKFVCLNCGFETHADEQAALNIARSWLFLRSQEYKKYQTNKTTGNTDKRAFVETWQSFYRKKLKEVWKPAV

SEQ ID NO: 28526 - protein, 978 aa, synthetic construct
  REGION 1..978: note = engineered CasX variant
QEIKRLNKIRRRLVKDSNTKKAGKTGPMKTLLVRVMTPDLRERLENLRKKPENIPQPISNTSRANLNKLLTDYTEMKKAILHVYWEEFQKDPVGLMSRVAQPASKKIDQNKLKPEMDEKGNLTTAGFACSQCGQPLFVYKLEQVSEKGKAYTNYFGRCNVAEHEKLILLSQLKPEKDSDEAVTYSLGKFGQRALDFYSIHVTKESTHPVKPLAQIAGNRYASGPVGKALSDACMGTIASFLSKYQDIIIEHQKVVKGNQKRLESLRELAGKENLEYPSVTLPPQPHTKEGVDAYNEVIARVRMWVNLNLWQKLKLSRDDAKPLLRLKGFPSFPLVERQANEVDWWDMVCNVKKLINEKKEDGKVFWQNLAGYKRQEALRPYLSSEEDRKKGKKFARYQLGDLLLHLEKKHGEDWGKVYDEAWERIDKKVEGLSKHIKLEEERRSEDAQSKAALTDWLRAKASFVIEGLKEADKDEFCRCELKLQKWYGDLRGKPFAIEAENSILDISGFSKQYNCAFIWQKDGVKKLNLYLIINYFKGGKLRFKKIKPEAFEANRFYTVINKKSGEIVPMEVNFNFDDPNLIILPLAFGKRQGREFIWNDLLSLETGSLKLANGRVIEKTLYNRRTRQDEPALFVALTFERREVLDSSNIKPMNLIGVDRGENIPAVIALTDPEGCPLSRFKDSLGNPTHILRIGESYKEKQRTIQAKKEVEQRRAGGYSRKYASKAKNLADDMVRNTARDLLYYAVTQDAMLIFENLSRGFGRQGKRTFMAERQYTRMEDWLTAKLAYEGLPSKTYLSKTLAQYTSKTCSNCGFTITSADYDRVLEKLKKTATGWMTTINGKELKVEGQITYYNRYKRQNVVKDLSVELDRLSEESVNNDISSWTKGRSGEALSLLKKRFSHRPVQEKFVCLNCGFETHADEQAALNIARSWLFLRSQEYKKYQTNKTTGNTDKRAFVETWQSFYRKKLKEVWKPAV

SEQ ID NO: 28527 - protein, 978 aa, synthetic construct
  REGION 1..978: note = engineered CasX variant
QEIKRINKIRRRLVKDSNTKKAGKTGPMKTLLVRVMTPDLRERLENLRKKPENIPQPISNTSRANLNKLLTDYTEMKKAILHVYWEEFQKDPVGLMSRVAQPASKKIDQNKLKPEMDEKGNLTTAGFACSQCGQPLFVYKLEQVSEKGKAYTNYVGRCNVAEHEKLILLSQLKPEKDSDEAVTYSLGKFGQRALDFYSIHVTKESTHPVKPLAQIAGNRYASGPVGKALSDACMGTIASFLSKYQDIIIEHQKVVKGNQKRLESLRELAGKENLEYPSVTLPPQPHTKEGVDAYNEVIARVRMWVNLNLWQKLKLSRDDAKPLLRLKGFPSFPLVERQANEVDWWDMVCNVKKLINEKKEDGKVFWQNLAGYKRQEALRPYLSSEEDRKKGKKFARYQLGDLLLHLEKKHGEDWGKVYDEAWERIDKKVEGLSKHIKLEEERRSEDAQSKAALTDWLRAKASFVIEGLKEADKDEFCRCELKLQKWYGDLRGKPFAIEAENSILDISGFSKQYNCAFIWQKDGVKKLNLYLIINYFKGGKLRFKKIKPEAFEANRFYTVINKKSGEIVPMEVNFNFDDPNLIILPLAFGKRQGREFIWNDLLSLETGSLKLANGRVIEKTLYNRRTRQDEPALFVALTFERREVLDSSNIKPMNLIGVDRGENIPAVIALTDPEGCPLSRFKDSLGNPTHILRIGESYKEKQRTIQAKKEVEQRRAGGYSRKYASKAKNLADDMVRNTARDLLYYAVTQDAMLIFENLSRGFGRQGKRTFMAERQYTRMEDWLTAKLAYEGLPSKTYLSKTLAQYTSKTCSNCGFTITSADYDRVLEKLKKTATGWMTTINGKELKVEGQITYYNRYKRQNVVKDLSVELDRLSEESVNNDISSWTKGRSGEALSLLKKRFSHRPVQEKFVCLNCGFETHADEQAALNIARSWLFLRSQEYKKYQTNKTTGNTDKRAFVETWQSFYRKKLKEVWKPAV

SEQ ID NO: 28528 - protein, 978 aa, synthetic construct
  REGION 1..978: note = engineered CasX variant
QEIKRINKIRRRLVKDSNTKKAGKTGPMKTLLVRVMTPDLRERLENLRKKPENIPQPISNTSRANLNKLLTDYTEMKKAILHVYWEEFQKDPVGLMSRVAQPASKKIDQNKLKPEMDEKGNLTTAGFACSQCGQPLFVYKLEQVSEKGKAYTNYFGRCNVAEHEKLILLSQLKPEKDSDEAVTYSLGKFGQRALDFYSIHVTKESTHPVKPLAQIAGNRYASGPVGKALSDACMGTIASFLSKYQDIIIEHQKVVKGNQKRLESLRELAGKENLEYPSVTLPPQPHTKEGVDAYNEVIARVRMWVNLNLWQKLKLSRDDAKPLLRLKGFPSFPLVERQANEVDWWDMVCNVKKLINEKKEDGKVFWQNLAGYKRQEALRPYLSSEEDRKKGKKFARYQLGDLLLHLEKKHGEDWGKVYDEAWERIDKKVEGLSKHIKLEEERRSEDAQSKAALTDWLRAKASFVIEGLKEADKDEFCRCELKLQKWYGDLRGKPFAIEAENSILDISGFSKQYNCAFIWQKDGVKKLNLYLIINYFKGGKLRFKKIKPEAFEANRFYTVINKKSGEIVPMEVNFNFDDPNLIILPLAFGKRQGREFIWNDLLSLETGSLKLANGRVIEKTLYNRRTRQDEPALFVALTFERREVLDSSNIKPMNLIGVDRGENIPAVIALTDPEGCPLSRFKDSLGNPTHILRIGESYKEKQRTIQAKKEVEQRRAGGYSRKYASKAKNLADDMVRNTARDLLYYAVTQDAMLIFENLSRGFGRQGKRTFMAERQYTRMEDWLTAKLAYEGLASKTYLSKTLAQYTSKTCSNCGFTITSADYDRVLEKLKKTATGWMTTINGKELKVEGQITYYNRYKRQNVVKDLSVELDRLSEESVNNDISSWTKGRSGEALSLLKKRFSHRPVQEKFVCLNCGFETHADEQAALNIARSWLFLRSQEYKKYQTNKTTGNTDKRAFVETWQSFYRKKLKEVWKPAV

SEQ ID NO: 28529 - protein, 978 aa, synthetic construct
  REGION 1..978: note = engineered CasX variant
QEIKRINKIRRRLVKDSNTKKAGKTGPMKTLLVRVMTPDLRERLENLRKKPENIPQPISNTSRANLNKLLTDYTEMKKAILHVYWEEFQKDPVGLMSRVAQPASKKIDQNKLKPEMDEKGNLTTAGFACSQCGQPLFVYKLEQVSEKGKAYTNYFGRCNVAEHEKLILLSQLKPEKDSDEAVTYSLGKFGQRALDFYSIHVTKESTHPVKPLAQIAGNRYASGPVGKALSDACMGTIASFLSKYQDIIIEHQKVVKGNQKRLESLRELAGKENLEYPSVTLPPQPHTKEGVDAYNEVIARVRMWVNLNLWQKLKLSRDDAKPLLRLKGFPSFPLVERQANEVDWWDMVCNVKKLINEKKEDGKVFWQNLAGYKRQEALRPYLSSEEDRKKGKKFARYQLGDLLLHLEKKHGEDWGKVYDEAWERIDKKVEGLSKHIKLEEERRSEDAQSKAALTDWLRAKASFVIEGLKEADKDEFCRCELKLQKWYGDLRGKPFAIEAENSILDISGFSKQYNCAFIWQKDGVKKLNLYLIINYFKGGKLRFKKIKPEAFEANRFYTVINKKSGEIVPMEVNFNFDDPNLIILPLAFGKRQGREFIWNDLLSLETGSLKLANGRVIEKTLYNRRTRQDEPALFVALTFERREVLDSSNIKPMNLIGVDRGENIPAVIALTDPEGCPLSRFKDSLGNPTHILRIGESYKEKQRTIQAKKEVEQRRAGGYSRKYASKAKNLADDMVRNTARDLLYYAVTQDAMLIFENLSRGFGRQGKRTFMAERQYTRMEDWLTAKLAYEGLPSKVYLSKTLAQYTSKTCSNCGFTITSADYDRVLEKLKKTATGWMTTINGKELKVEGQITYYNRYKRQNVVKDLSVELDRLSEESVNNDISSWTKGRSGEALSLLKKRFSHRPVQEKFVCLNCGFETHADEQAALNIARSWLFLRSQEYKKYQTNKTTGNTDKRAFVETWQSFYRKKLKEVWKPAV

SEQ ID NO: 28530 - protein, 979 aa, synthetic construct
  REGION 1..979: note = engineered CasX variant
QEIKRINKIRRRLVKDSNTKKAGKTGPMKTLLVRVMTPDLRERLENLRKKPENIPQPISNTSRANLNKLLTDYTEMKKAILHVYWEEFQKDPVGLMSRVAQPASKKIDQNKLKPEMDEKGNLTTAGFACSQCGQPLFVYKLEQVSEKGKAYTNYFGRCNVAEHEKLILLSQLKPEKDSDEAVTYSLGKFGQRALDFYSIHVTKESTHPVKPLAQIAGNRYASGPVGKALSDACMGTIASFLSKYQDIIIEHQKVVKGNQKRLESLRELAGKENLEYPSVTLPPQPHTKEGVDAYNEVIARVRMWVNLNLWQKLKLSRDDAKPLLRLKGFPSFPLVERQANEVDWWDMVCNVKKLINEKKEDGKVFWQNLAGYKRQEALRPYLSSEEDRKKGKKFARYQLGDLLLHLEKKHGEDWGKVYDEAWERIDKKVEGLSKHIKLEEERRSEDAQSKAALTDWLRAKASFVIEGLKEADKDEFCRCELKLQKWYGDLRGKPFAIEAENSILDISGFSKQYNCAFIWQKDGVKKLNLYLIINYFKGGKLRFKKIKPEAFEANRFYTVINKKSGEIVPMEVNFNFDDPNLIILPLAFGKRQGREFIWNDLLSLETGSLKLANGRVIEKTLYNRRTRQDEPALFVALTFERREVLDSSNIKPMNLIGVDRGENIPAVIALTDPEGCPLSRFKDSLGNPTHILRIGESYKEKQRTIQAKKEVEQRRAGGYSRKYASKAKNLADDMVRNTARDLLYYAVTQDAMLIFENLSRGFGRQGKRTFMAERQYTRMEDWLTAKLAYEGPLPSKTYLSKTLAQYTSKTCSNCGFTITSADYDRVLEKLKKTATGWMTTINGKELKVEGQITYYNRYKRQNVVKDLSVELDRLSEESVNNDISSWTKGRSGEALSLLKKRFSHRPVQEKFVCLNCGFETHADEQAALNIARSWLFLRSQEYKKYQTNKTTGNTDKRAFVETWQSFYRKKLKEVWKPAV

SEQ ID NO: 28531 - protein, 979 aa, synthetic construct
  REGION 1..979: note = engineered CasX variant
QEIKRINKIRRRLVKDSNTKKAGKTGPMKTLLVRVMTPDLRERLENLRKKPENIPQPISNTSRANLNKLLTDYTEMKKAILHVYWEEFQKDPVGLMSRVAQPASKKIDQNKLKPEMDEKGNLTTAGFACSQCGQPLFVYKLEQVSEKGKAYTNYFGRCNVAEHEKLILLSQLKPEKDSDEAVTYSLGKFGQRALDFYSIHVTKESTHPVKPLAQIAGNRYASGPVGKALSDACMGTIASFLSKYQDIIIEHQKVVKGNQKRLESLRELAGKENLEYPSVTLPPQPHTKEGVDAYNEVIARVRMWVNLNLWQKLKLSRDDAKPLLRLKGFPSFPLVERQANEVDWWDMVCNVKKLINEKKEDGKVFWQNLAGYKRQEALRPYLSSEEDVRKKGKKFARYQLGDLLLHLEKKHGEDWGKVYDEAWERIDKKVEGLSKHIKLEEERRSEDAQSKAALTDWLRAKASFVIEGLKEADKDEFCRCELKLQKWYGDLRGKPFAIEAENSILDISGFSKQYNCAFIWQKDGVKKLNLYLIINYFKGGKLRFKKIKPEAFEANRFYTVINKKSGEIVPMEVNFNFDDPNLIILPLAFGKRQGREFIWNDLLSLETGSLKLANGRVIEKTLYNRRTRQDEPALFVALTFERREVLDSSNIKPMNLIGVDRGENIPAVIALTDPEGCPLSRFKDSLGNPTHILRIGESYKEKQRTIQAKKEVEQRRAGGYSRKYASKAKNLADDMVRNTARDLLYYAVTQDAMLIFENLSRGFGRQGKRTFMAERQYTRMEDWLTAKLAYEGLPSKTYLSKTLAQYTSKTCSNCGFTITSADYDRVLEKLKKTATGWMTTINGKELKVEGQITYYNRYKRQNVVKDLSVELDRLSEESVNNDISSWTKGRSGEALSLLKKRFSHRPVQEKFVCLNCGFETHADEQAALNIARSWLFLRSQEYKKYQTNKTTGNTDKRAFVETWQSFYRKKLKEVWKPAV

SEQ ID NO: 28532 - protein, 978 aa, synthetic construct
  REGION 1..978: note = engineered CasX variant
QEIKRINKIRRRLVKDSNTKKAGKTGPMKTLLVRVMTPDLRERLENLRKKPENIPQPISNTSRANLNKLLTDYTEMKKAILHVYWEEFQKDPVGLMSRVAQPASKKIDQNKLKPEMDEKGNLTTAGFACSQCGQPLFVYKLEQVSEKGKAYTNYFGRCNVAEHEKLILLSQLKPEKDSDEAVTYSLGKFGQRALDFYSIHVTKESTHPVKPLAQIAGNRYASGPVGKALSDACMGTIASFLSKYQDIIIEHQKVVKGNQKRLESLRELAGKENLEYPSVTLPPQPHTKEGVDAYNEVIARVRMWVNLNLWQKLKLSRDDAKPLLRLKGFPSFPLVERQANEVDWWDMVCNVKKLINEKKEDGKVFWQNLAGYKRQEALRPYLSSEEDRKKGKKFARYQLGDLLLHLEKKHGEDWGKVYDEAWERIDKKVEGLSKHIKLEEERRSEDAQSKAALTDWLRAKASFVIEGLKEADKDEFCRCELKLQKWYGDLRGKPFAIEAENSILDISGFSKQYNCAFIWQKDGVKKLNLYLIINYFKGGKLRFKKIKPEAFEANRFYTVINKKSGEIVPMEVNFNFDDPNLIILPLAFGKRQGREFIWNDLLSLETGSLKLANGRVIEKTLYNRRTRQDEPALFVALTFERREVLDSSNIKPMNLIGVDRGENIPAVIALTDPEGCPLSRFKDSLGNPTHILRIGESYKEKQRTIQAKKEVEQRRAGGYSRKYASKAKNLADDMVRNTARDLLYYAVTQDAMLIFENLSRGFGRQGKRTFMAERQYTRMEDWLTAKLAYEGLPSKTYLSKTLAQYTSKTCSNCGFTITSADYDRMLEKLKKTATGWMTTINGKELKVEGQITYYNRYKRQNVVKDLSVELDRLSEESVNNDISSWTKGRSGEALSLLKKRFSHRPVQEKFVCLNCGFETHADEQAALNIARSWLFLRSQEYKKYQTNKTTGNTDKRAFVETWQSFYRKKLKEVWKPAV

SEQ ID NO: 28533 - protein, 978 aa, synthetic construct
  REGION 1..978: note = engineered CasX variant
QEIKRINKIRRRLVKDSNTKKAGKTGPMKTLLVRVMTPDLRERLENLRKKPENIPQPISNTSRANLNKLLTDYTEMKKAILHVYWEEFQKDPVGLMSRVAQPASKKIDQNKLKPEMDEKGNLTTAGFACSQCGQPLFVYKLEQVSEKGKAYTNYFGRCNVAEHEKLILLSQLKPEKDSDEAVTYSLGKFGQRALDFYSIHVTKESTHPVKPLAQIAGNRYASGPVGKALSDACMGTIASFLSKYQDIIIEHQKVVKGNQKRLESLRELAGKENLEYPSVTLPPQPHTKEGVDAYNEVIARVRMWVNLNLWQKLKLSRDDAKPLLRLKGFPSFPLVERQANEVDWWDMVCNVKKLINEKKEDGKVFWQNLAGYKRQEALRPYLSSEEDRKKGKKFARYQLGDLLLHLEKKHGEDWGKVYDEAWERIDKKVEGLSKHIKLEEERRSEDAQSKAALTDWLRAKASFVIEGLKEADKDEFCRCELKLQKWYGDLRGKPFAIEAENSILDISGFSKQYNCAFIWQKDGVKKLNLYLIINYFKGGKLRFKKIKPEAFEANRFYTVINKKSGEIVPMEVNFNFDDPNLIILPLAFGKRQGREFIWNDLLSLETGSLKLANGRVIEKTLYNRRTRQDEPALFVALTFERREVLDSSNIKPMNLIGVDRGENIPAVIALTDPEGCPLSRFKDSLGNPTHILRIGESYKEKQRTIQAKKEVEQRRAGGYSRKYASKAKNLADDMVRNTARDLLYYAVTQDAMLIFENLSRGFGRQGKRTFMAERQYTRMEDWLTAKLAYEGLPSKTYLSKTLAQYTSKTCSNCGFTITSADYDRVLEKLKKTATGWMTTINGKELKVEGQITYYNRYKRQNVVKDLSVELDRLSEESVNNDISSWTKGRQGEALSLLKKRFSHRPVQEKFVCLNCGFETHADEQAALNIARSWLFLRSQEYKKYQTNKTTGNTDKRAFVETWQSFYRKKLKEVWKPAV

SEQ ID NO: 28534 - protein, 978 aa, synthetic construct
  REGION 1..978: note = engineered CasX variant
QEIKRINKIRRRLVKDSNTKKAGKTGPMKTLLVRVMTPDLRERLENLRKKPENIPQPISNTSRANLNKLLTDYTEMKKAILHVYWEEFQKDPVGLMSRVAQPASKKIDQNKLKPEMDEKGNLTTAGFACSQCGQPLFVYKLEQVSEKGKAYTNYFGRCNVAEHEKLILLSQLKPEKDSDEAVTYSLGKFGQRALDFYSIHVTKESTHPVKPLAQIAGNRYASGPVGKALSDACMGTIASFLSKYQDIIIEHQKVVKGNQKRLESLRELAGKENLEYPSVTLPPQPHTKEGVDAYNEVIARVRMWVNLNLWQKLKLSRDDAKPLLRLKGFPSFPLVERQANEVDWWDMVCNVKKLINEKKEDGKVFWQNLAGYKRQEALRPYLSSEEDRKKGKKFARYQLGDLLLHLEKKHGEDWGKVYDEAWERIDKKVEGLSKHIKLEEERRSEDAQSKAALTDWLRAKASFVIEGLKEADKDEFCRCELKLQKWYGDLRGKPFAIEAENSILDISGFSKQYNCAFIWQKDGVKKLNLYLIINYFKGGKLRFKKIKPEAFEANRFYTVINKKSGEIVPMEVNFNFDDPNLIILPLAFGKRQGREFIWNDLLSLETGSLKLANGRVIEKTLYNRRTRQDEPALFVALTFERREVLDSSNIKPMNLIGVDRGENIPAVIALTDPEGCPLSRFKDSLGNPTHILRIGESYKEKQRTIQAKKEVEQRRAGGYSRKYASKAKNLADDMVRNTARDLLYYAVTQDAMLIFENLSRGFGRQGKRTFMAERQYTRMEDWLTAKLAYEGLPSKTYLSKTLAQYTSKTCSNCGFTITSADYDRVLEKLKKTATGWMTTINGKELKVEGQITYYNRYKRQNVVKDLSVELDRLSEESVNNDISSWTKGRSGEALSLLKKRFSHRPVQEKFVCLNCEFETHADEQAALNIARSWLFLRSQEYKKYQTNKTTGNTDKRAFVETWQSFYRKKLKEVWKPAV

SEQ ID NO: 28535 - protein, 979 aa, synthetic construct
  REGION 1..979: note = engineered CasX variant
QEIKRINKIRRRLVKDSNTKKAGKTGPMKTLLVRVMTPDLRERLENLRKKPENIPQPISNTSRANLNKLLTDYTEMKKAILHVYWEEFQKDPVGLMSRVAQPASKKIDQNKLKPEMDEKGNLTTAGFACSQCGQPLFVYKLEQVSEKGKAYTNYFGRCNVAEHEKLILLSQLKPEKDSDEAVTYSLGKFGQRALDFYSIHVTKESTHPVKPLAQIAGNRYASGPVGKALSDACMGTIASFLSKYQDIIIEHQKVVKGNQKRLESLRELAGKENLEYPSVTLPPQPHTKEGVDAYNEVIARVRMWVNLNLWQKLKLSRDDAKPLLRLKGFPSFPLVERQANEVDWWDMVCNVKKLINEKKEDGKVFWQNLAGYKRQEALRPYLSSEEDRKKGKKFARYQLGDLLLHLEKKHGEDWGKVYDEAWERIDKKVEGLSKHIKLEEERRSEDAQSKAALTDWLRAKASFVIEGLKEADKDEFCRCELKLQKWYGDLRGKPFAIEAENSILDISGFSKQYNCAFIWQKDGVKKLNLYLIINYFKGGKLRFKKIKPEAFEANRFYTVINKKSGEIVPMEVNFNFDDPNLIILPLAFGKRQGREFIWNDLLSLETGSLKLANGRVIEKTLYNRRTRQDEPALFVALTFERREVLDSSNIKPMNLIGVDRGENIPAVIALTDPEGCPLSRFKDSLGNPTHILRIGESYKEKQRTIQAKKEVEQRRAGGYSRKYASKAKNLADDMVRNTARDLLYYAVTQDAMLIFENLSRGFGRQGKRTFMAERQYTRMEDWLTAKLAYEGLPSKTYLSKTLAQYTSKTCSNCGFTITSADYDRVLEKLKKTATGWMTTINGKELKVEGQITYYNRYKRQNVVKDLSVELDRLSEESVNNDISSWTKGRSGEALSLLKKRFSHRPVQEKFVCLNCGFETHADEQAALNIARSWLFLRSQEYKKYQTNKTSTGNTDKRAFVETWQSFYRKKLKEVWKPAV

SEQ ID NO: 28536 - protein, 979 aa, synthetic construct
  REGION 1..979: note = engineered CasX variant
QEIKRINKIRRRLVKDSNTKKAGKTGPMKTLLVRVMTPDLRERLENLRKKPENIPQPISNTSRANLNKLLTDYTEMKKAILHVYWEEFQKDPVGLMSRVAQPASKKIDQNKLKPEMDEKGNLTTAGFACSQCGQPLFVYKLEQVSEKGKAYTNYFGRCNVAEHEKLILLSQLKPEKDSDEAVTYSLGKFGQRALDFYSIHVTKESTHPVKPLAQIAGNRYASGPVGKALSDACMGTIASFLSKYQDIIIEHQKVVKGNQKRLESLRELAGKENLEYPSVTLPPQPHTKEGVDAYNEVIARVRMWVNLNLWQKLKLSRDDAKPLLRLKGFPSFPLVERQANEVDWWDMVCNVKKLINEKKEDGKVFWQNLAGYKRQEALRPYLSSEEDRKKGKKFARYQLGDLLLHLEKKHGEDWGKVYDEAWERIDKKVEGLSKHIKLEEERRSEDAQSKAALTDWLRAKASFVIEGLKEADKDEFCRCELKLQKWYGDLRGKPFAIEAENSILDISGFSKQYNCAFIWQKDGVKKLNLYLIINYFKGGKLRFKKIKPEAFEANRFYTVINKKSGEIVPMEVNFNFDDPNLIILPLAFGKRQGREFIWNDLLSLETGSLKLANGRVIEKTLYNRRTRQDEPALFVALTFERREVLDSSNIKPMNLIGVDRGENIPAVIALTDPEGCPLSRFKDSLGNPTHILRIGESYKEKQRTIQAKKEVEQRRAGGYSRKYASKAKNLADDMVRNTARDLLYYAVTQDAMLIFENLSRGFGRQGKRTFMAERQYTRMEDWLTAKLAYEGLPSKTYLSKTLAQYTSKTCSNCGFTITSADYDRVLEKLKKTATGWMTTINGKELKVEGQITYYNRYKRQNVVKDLSVELDRLSEESVNNDISSWTKGRSGEALSLLKKRFSHRPVQEKFVCLNCGFETHADEQAALNIARSWLFLRSQEYKKYQTNKTTGKNTDKRAFVETWQSFYRKKLKEVWKPAV

SEQ ID NO: 28537 - protein, 978 aa, synthetic construct
  REGION 1..978: note = engineered CasX variant
QEIKRINKIRRRLVKDSNTKKAGKTGPMKTLLVRVMTPDLRERLENLRKKPENIPQPISNTSRANLNKLLTDYTEMKKAILHVYWEEFQKDPVGLMSRVAQPASKKIDQNKLKPEMDEKGNLTTAGFACSQCGQPLFVYKLEQVSEKGKAYTNYFGRCNVAEHEKLILLSQLKPEKDSDEAVTYSLGKFGQRALDFYSIHVTKESTHPVKPLAQIAGNRYASGPVGKALSDACMGTIASFLSKYQDIIIEHQKVVKGNQKRLESLRELAGKENLEYPSVTLPPQPHTKEGVDAYNEVIARVRMWVNLNLWQKLKLSRDDAKPLLRLKKFPSFPLVERQANEVDWWDMVCNVKKLINEKKEDGKVFWQNLAGYKRQEALRPYLSSEEDRKKGKKFARYQLGDLLLHLEKKHGEDWGKVYDEAWERIDKKVEGLSKHIKLEEERRSEDAQSKAALTDWLRAKASFVIEGLKEADKDEFCRCELKLQKWYGDLRGKPFAIEAENSILDISGFSKQYNCAFIWQKDGVKKLNLYLIINYFKGGKLRFKKIKPEAFEANRFYTVINKKSGEIVPMEVNFNFDDPNLIILPLAFGKRQGREFIWNDLLSLETGSLKLANGRVIEKTLYNRRTRQDEPALFVALTFERREVLDSSNIKPMNLIGVDRGENIPAVIALTDPEGCPLSRFKDSLGNPTHILRIGESYKEKQRTIQAKKEVEQRRAGGYSRKYASKAKNLADDMVRNTARDLLYYAVTQDAMLIFENLSRGFGRQGKRTFMAERQYTRMEDWLTAKLAYEGLPSKTYLSKTLAQYTSKTCSNCGFTITSADYDRVLEKLKKTATGWMTTINGKELKVEGQITYYNRYKRQNVVKDLSVELDRLSEESVNNDISSWTKGRSGEALSLLKKRFSHRPVQEKFVCLNCGFETHADEQAALNIARSWLFLRSQEYKKYQTNKTTGNTDKRAFVETWQSFYRKKLKEVWKPAV

SEQ ID NO: 28538 - protein, 978 aa, synthetic construct
  REGION 1..978: note = engineered CasX variant
QEIKRINKIRRRLVKDSNTKKAGKTGPMKTLLVRVMTPDLRERLENLRKKPENIPQPISNTSRANLNKLLTDYTEMKKAILHVYWEEFQKDPVGLMSRVAQPASKKIDQNKLKPEMDEKGNLTTAGFACSQCGQPLFVYKLEQVSEKGKAYTNYFGRCNVAEHEKLILLSQLKPEKDSDEAVTYSLGKFGQRALDFYSIHVTKESTHPVKPLAQIAGNRYASGPVGKALSDACMGTIASFLSKYQDIIIEHQKVVKGNQKRLESLRELAGKENLEYPSVTLPPQPHTKEGVDAYNEVIARVRMWVNLNLWQKLKLSRDDAKPLLRLKGFPSFPLVERQANEVDWWDMVCNVKKLINEKKEDGKVFWQNLAGYKRQEALRPYLSSEEDRKKGKKFARYQLGDLLLHLEKKHGEDWGKVYDEAWERIDKKVEGLSKHIKLEEERRSEDAQSKAALTDWLRAKASFVIEGLKEADKDEFCRCELKLQKWYGDLRGKPFAIEAENSILDISGFSKQYNCAFIWQKDGVKKLNLYLIINYFKGGKLRFKKIKPEAFEANRFYTVINKKSGEIVPMEVNFNFDDPNLIILPLAFGKRQGREFIWNDLLSLETGSLKLANGRVIEKTLYNRRTRQDEPALFVALTFERREVLDSSNIKPMNLIGVDRGENIPAVIALTDPEGCPLSRFKDSLGNPTHILRIGERYKEKQRTIQAKKEVEQRRAGGYSRKYASKAKNLADDMVRNTARDLLYYAVTQDAMLIFENLSRGFGRQGKRTFMAERQYTRMEDWLTAKLAYEGLPSKTYLSKTLAQYTSKTCSNCGFTITSADYDRVLEKLKKTATGWMTTINGKELKVEGQITYYNRYKRQNVVKDLSVELDRLSEESVNNDISSWTKGRSGEALSLLKKRFSHRPVQEKFVCLNCGFETHADEQAALNIARSWLFLRSQEYKKYQTNKTTGNTDKRAFVETWQSFYRKKLKEVWKPAV

SEQ ID NO: 28539 - protein, 978 aa, synthetic construct
  REGION 1..978: note = engineered CasX variant
QEIKRINKIRRRLVKDSNTKKAGKTGPMKTLLVRVMTPDLRERLENLRKKPENIPQPISNTSRANLNKLLTDYTEMKKAILHVYWEEFQKDPVGLMSRVAQPASKKIDQNKLKPEMDEKGNLTTAGFACSQCGQPLFVYKLEQVSEKGKAYTNYFGRCNVAEHEKLILLSQLKPEKDSDEAVTYSLGKFGQRALDFYSIHVTKESTHPVKPLAQIAGNRYASGPVGKALSDACMGTIASFLSKYQDIIIEHQKVVKGNQKRLESLRELAGKENLEYPSVTLPPQPHTKEGVDAYNEVIARVRMWVNLNLWQKLKLSRDDAKPLLRLKGFPSFPLVERQANEVDWWDMVCNVKKLINEKKEDGKVFWQNLAGYKRQEALRPYLSSEEDRKKGKKFARYQLGDLLLHLEKKHGEDWGKVYDEAWERIDKKVEGLSKHIKLEEERRSEDAQSKAALTDWLRAKASFVIEGLKEADKDEFCRCELKLQKWYGDLRGKPFAIEAENSILDISGFSKQYNCAFIWQKDGVKKLNLYLIINYFKGGKLRFKKIKPEAFEANRFYTVINKKSGEIVPMEVNFNFDDPNLIILPLAFGKRQGREFIWNDLLSLETGSLQLANGRVIEKTLYNRRTRQDEPALFVALTFERREVLDSSNIKPMNLIGVDRGENIPAVIALTDPEGCPLSRFKDSLGNPTHILRIGESYKEKQRTIQAKKEVEQRRAGGYSRKYASKAKNLADDMVRNTARDLLYYAVTQDAMLIFENLSRGFGRQGKRTFMAERQYTRMEDWLTAKLAYEGLPSKTYLSKTLAQYTSKTCSNCGFTITSADYDRVLEKLKKTATGWMTTINGKELKVEGQITYYNRYKRQNVVKDLSVELDRLSEESVNNDISSWTKGRSGEALSLLKKRFSHRPVQEKFVCLNCGFETHADEQAALNIARSWLFLRSQEYKKYQTNKTTGNTDKRAFVETWQSFYRKKLKEVWKPAV

SEQ ID NO: 28540 - protein, 977 aa, synthetic construct
  REGION 1..977: note = engineered CasX variant
QEIKRINKIRRRLVKDSNTKKAGKTGPMKTLLVRVMTPDLRERLENLRKKPENIPQPISNTSRANLNKLLTDYTEMKKAILHVYWEEFQKDPVGLMSRVAQPASKKIDQNKLKPEMDEKGNLTTAGFACSQCGQPLFVYKLEQVSEKGKAYTNYFGRCNVAEHEKLILLAQLKPEKDSDEAVTYSLGKFGQRALDFYSIHVTKESTHPVKPLAQIAGNRYASPVGKALSDACMGTIASFLSKYQDIIIEHQKVVKGNQKRLESLRELAGKENLEYPSVTLPPQPHTSEGVDAYNEVIARVRMWVNLNLWQKLKLSRDDAKPLLRLKGFPSFPLVERQANEVDWWDMVCNVKKLINEKKEDGKVFWQNLAGYKRQEALRPYLSSEEDRKKGKKFARYQLGDLLLHLEKKHGEDWGKVYDEAWERIDKKVEGLSKHIKLEEERRSEDAQSKAALTDWLRAKASFVIEGLKEADKDEFCRCELKLQKWYGDLRGKPFAIEAENSILDISGFSKQYNCAFIWQKDGVKKLNLYLIINYFKGGKLRFKKIKPEAFEANRFYTVINKKSGEIVPMEVNFNFDDPNLIILPLAFGKRQGREFIWNDLLSLETGSLKLANGRVIEKTLYNRRTRQDEPALFVALTFERREVLDSSNIKPMNLIGVDRGENIPAVIALTDPEGCPLSRFKDSLGNPTHILRIGESYKEKQRTIQAKKEVEQRRAGGYSRKYASKAKNLADDMVRNTARDLLYYAVTQDAMLIFENLSRGFGRQGKRTFMAERQYTRMEDWLTAKLAYEGLPSKTYLSKTLAQYTSKTCSNCGFTITSADYDRVLEKLKKTATGWMTTINGKELKVEGQITYYNRYKRQNVVKDLSVELDRLSEESVNNDISSWTKGRSGEALSLLKKRFSHRPVQEKFVCLNCGFETHADEQAALNIARSWLFLRSQEYKKYQTNKTTGNTDKRAFVETWQSFYRKKLKEVWKPAV

SEQ ID NO: 28541 - protein, 977 aa, synthetic construct
  REGION 1..977: note = engineered CasX variant
QEIKRINKIRRRLVKDSNTKKAGKTGPMKTLLVRVMTPDLRERLENLRKKPENIPQPISNTSRANLNKLLTDYTEMKKAILHVYWEEFQKDPVGLMSRVAQPASKKIDQNKLKPEMDEKGNLTTAGFACSQCGQPLFVYKLEQVSEKGKAYTNYFGRCNVAEHEKLILLAQLKPEKDSDEAVTYSLGKFGQRALDFYSIHVTKESTHPVKPLAQIAGNRYASPVGKALSDACMGTIASFLSKYQDIIIEHQKVVKGNQKRLESLRELAGKENLEYPSVTLPPQPHTKEGLDAYNEVIARVRMWVNLNLWQKLKLSRDDAKPLLRLKGFPSFPLVERQANEVDWWDMVCNVKKLINEKKEDGKVFWQNLAGYKRQEALRPYLSSEEDRKKGKKFARYQLGDLLLHLEKKHGEDWGKVYDEAWERIDKKVEGLSKHIKLEEERRSEDAQSKAALTDWLRAKASFVIEGLKEADKDEFCRCELKLQKWYGDLRGKPFAIEAENSILDISGFSKQYNCAFIWQKDGVKKLNLYLIINYFKGGKLRFKKIKPEAFEANRFYTVINKKSGEIVPMEVNFNFDDPNLIILPLAFGKRQGREFIWNDLLSLETGSLKLANGRVIEKTLYNRRTRQDEPALFVALTFERREVLDSSNIKPMNLIGVDRGENIPAVIALTDPEGCPLSRFKDSLGNPTHILRIGESYKEKQRTIQAKKEVEQRRAGGYSRKYASKAKNLADDMVRNTARDLLYYAVTQDAMLIFENLSRGFGRQGKRTFMAERQYTRMEDWLTAKLAYEGLPSKTYLSKTLAQYTSKTCSNCGFTITSADYDRVLEKLKKTATGWMTTINGKELKVEGQITYYNRYKRQNVVKDLSVELDRLSEESVNNDISSWTKGRSGEALSLLKKRFSHRPVQEKFVCLNCGFETHADEQAALNIARSWLFLRSQEYKKYQTNKTTGNTDKRAFVETWQSFYRKKLKEVWKPAV

SEQ ID NO: 28542 - protein, 977 aa, synthetic construct
  REGION 1..977: note = engineered CasX variant
QEIKRINKIRRRLVKDSNTKKAGKTGPMKTLLVRVMTPDLRERLENLRKKPENIPQPISNTSRANLNKLLTDYTEMKKAILHVYWEEFQKDPVGLMSRVAQPASKKIDQNKLKPEMDEKGNLTTAGFACSQCGQPLFVYKLEQVSEKGKAYTNYFGRCNVAEHEKLILLAQLKPEKDSDEAVTYSLGKFGQRALDFYSIHVTKESTHPVKPLAQIAGNRYASPVGKALSDACMGTIASFLSKYQDIIIEHQKVVKGNQKRLESLRELAGKENLEYPSVTLPPQPHTKEGVDAYNEVIARVRTWVNLNLWQKLKLSRDDAKPLLRLKGFPSFPLVERQANEVDWWDMVCNVKKLINEKKEDGKVFWQNLAGYKRQEALRPYLSSEEDRKKGKKFARYQLGDLLLHLEKKHGEDWGKVYDEAWERIDKKVEGLSKHIKLEEERRSEDAQSKAALTDWLRAKASFVIEGLKEADKDEFCRCELKLQKWYGDLRGKPFAIEAENSILDISGFSKQYNCAFIWQKDGVKKLNLYLIINYFKGGKLRFKKIKPEAFEANRFYTVINKKSGEIVPMEVNFNFDDPNLIILPLAFGKRQGREFIWNDLLSLETGSLKLANGRVIEKTLYNRRTRQDEPALFVALTFERREVLDSSNIKPMNLIGVDRGENIPAVIALTDPEGCPLSRFKDSLGNPTHILRIGESYKEKQRTIQAKKEVEQRRAGGYSRKYASKAKNLADDMVRNTARDLLYYAVTQDAMLIFENLSRGFGRQGKRTFMAERQYTRMEDWLTAKLAYEGLPSKTYLSKTLAQYTSKTCSNCGFTITSADYDRVLEKLKKTATGWMTTINGKELKVEGQITYYNRYKRQNVVKDLSVELDRLSEESVNNDISSWTKGRSGEALSLLKKRFSHRPVQEKFVCLNCGFETHADEQAALNIARSWLFLRSQEYKKYQTNKTTGNTDKRAFVETWQSFYRKKLKEVWKPAV

SEQ ID NO: 28543 - protein, 977 aa, synthetic construct
  REGION 1..977: note = engineered CasX variant
QEIKRINKIRRRLVKDSNTKKAGKTGPMKTLLVRVMTPDLRERLENLRKKPENIPQPISNTSRANLNKLLTDYTEMKKAILHVYWEEFQKDPVGLMSRVAQPASKKIDQNKLKPEMDEKGNLTTAGFACSQCGQPLFVYKLEQVSEKGKAYTNYFGRCNVAEHEKLILLAQLKPEKDSDEAVTYSLGKFGQRALDFYSIHVTKESTHPVKPLAQIAGNRYASPVGKALSDACMGTIASFLSKYQDIIIEHQKVVKGNQKRLESLRELAGKENLEYPSVTLPPQPHTKEGVDAYNEVIARVRWWVNLNLWQKLKLSRDDAKPLLRLKGFPSFPLVERQANEVDWWDMVCNVKKLINEKKEDGKVFWQNLAGYKRQEALRPYLSSEEDRKKGKKFARYQLGDLLLHLEKKHGEDWGKVYDEAWERIDKKVEGLSKHIKLEEERRSEDAQSKAALTDWLRAKASFVIEGLKEADKDEFCRCELKLQKWYGDLRGKPFAIEAENSILDISGFSKQYNCAFIWQKDGVKKLNLYLIINYFKGGKLRFKKIKPEAFEANRFYTVINKKSGEIVPMEVNFNFDDPNLIILPLAFGKRQGREFIWNDLLSLETGSLKLANGRVIEKTLYNRRTRQDEPALFVALTFERREVLDSSNIKPMNLIGVDRGENIPAVIALTDPEGCPLSRFKDSLGNPTHILRIGESYKEKQRTIQAKKEVEQRRAGGYSRKYASKAKNLADDMVRNTARDLLYYAVTQDAMLIFENLSRGFGRQGKRTFMAERQYTRMEDWLTAKLAYEGLPSKTYLSKTLAQYTSKTCSNCGFTITSADYDRVLEKLKKTATGWMTTINGKELKVEGQITYYNRYKRQNVVKDLSVELDRLSEESVNNDISSWTKGRSGEALSLLKKRFSHRPVQEKFVCLNCGFETHADEQAALNIARSWLFLRSQEYKKYQTNKTTGNTDKRAFVETWQSFYRKKLKEVWKPAV

SEQ ID NO: 28544 - protein, 978 aa, synthetic construct
  REGION 1..978: note = engineered CasX variant
QEIKRINKIRRRLVKDSNTKKAGKTGPMKTLLVRVMTPDLRERLENLRKKPENIPQPISNTSRANLNKLLTDYTEMKKAILHVYWEEFQKDPVGLMSRVAQPASKKIDQNKLKPEMDEKGNLTTAGFACSQCGQPLFVYKLEQVSEKGKAYTNYFGRCNVAEHEKLILLAQLKPEKDSDEAVTYSLGKFGQRALDFYSIHVTKESTHPVKPLAQIAGNRYASPVGKALSDACMGTIASFLSKYQDIIIEHQKVVKGNQKRLESLRELAGKENLEYPSVTLPPQPHTKEGVDAYNEVIARVRMWVNLNLWQKLKLSRDDAKPLLRLKGFPSFPLVERQQANEVDWWDMVCNVKKLINEKKEDGKVFWQNLAGYKRQEALRPYLSSEEDRKKGKKFARYQLGDLLLHLEKKHGEDWGKVYDEAWERIDKKVEGLSKHIKLEEERRSEDAQSKAALTDWLRAKASFVIEGLKEADKDEFCRCELKLQKWYGDLRGKPFAIEAENSILDISGFSKQYNCAFIWQKDGVKKLNLYLIINYFKGGKLRFKKIKPEAFEANRFYTVINKKSGEIVPMEVNFNFDDPNLIILPLAFGKRQGREFIWNDLLSLETGSLKLANGRVIEKTLYNRRTRQDEPALFVALTFERREVLDSSNIKPMNLIGVDRGENIPAVIALTDPEGCPLSRFKDSLGNPTHILRIGESYKEKQRTIQAKKEVEQRRAGGYSRKYASKAKNLADDMVRNTARDLLYYAVTQDAMLIFENLSRGFGRQGKRTFMAERQYTRMEDWLTAKLAYEGLPSKTYLSKTLAQYTSKTCSNCGFTITSADYDRVLEKLKKTATGWMTTINGKELKVEGQITYYNRYKRQNVVKDLSVELDRLSEESVNNDISSWTKGRSGEALSLLKKRFSHRPVQEKFVCLNCGFETHADEQAALNIARSWLFLRSQEYKKYQTNKTTGNTDKRAFVETWQSFYRKKLKEVWKPAV

SEQ ID NO: 28545 - protein, 978 aa, synthetic construct
  REGION 1..978: note = engineered CasX variant
QEIKRINKIRRRLVKDSNTKKAGKTGPMKTLLVRVMTPDLRERLENLRKKPENIPQPISNTSRANLNKLLTDYTEMKKAILHVYWEEFQKDPVGLMSRVAQPASKKIDQNKLKPEMDEKGNLTTAGFACSQCGQPLFVYKLEQVSEKGKAYTNYFGRCNVAEHEKLILLAQLKPEKDSDEAVTYSLGKFGQRALDFYSIHVTKESTHPVKPLAQIAGNRYASPVGKALSDACMGTIASFLSKYQDIIIEHQKVVKGNQKRLESLRELAGKENLEYPSVTLPPQPHTKEGVDAYNEVIARVRMWVNLNLWQKLKLSRDDAKPLLRLKGFPSFPLVERQANAEVDWWDMVCNVKKLINEKKEDGKVFWQNLAGYKRQEALRPYLSSEEDRKKGKKFARYQLGDLLLHLEKKHGEDWGKVYDEAWERIDKKVEGLSKHIKLEEERRSEDAQSKAALTDWLRAKASFVIEGLKEADKDEFCRCELKLQKWYGDLRGKPFAIEAENSILDISGFSKQYNCAFIWQKDGVKKLNLYLIINYFKGGKLRFKKIKPEAFEANRFYTVINKKSGEIVPMEVNFNFDDPNLIILPLAFGKRQGREFIWNDLLSLETGSLKLANGRVIEKTLYNRRTRQDEPALFVALTFERREVLDSSNIKPMNLIGVDRGENIPAVIALTDPEGCPLSRFKDSLGNPTHILRIGESYKEKQRTIQAKKEVEQRRAGGYSRKYASKAKNLADDMVRNTARDLLYYAVTQDAMLIFENLSRGFGRQGKRTFMAERQYTRMEDWLTAKLAYEGLPSKTYLSKTLAQYTSKTCSNCGFTITSADYDRVLEKLKKTATGWMTTINGKELKVEGQITYYNRYKRQNVVKDLSVELDRLSEESVNNDISSWTKGRSGEALSLLKKRFSHRPVQEKFVCLNCGFETHADEQAALNIARSWLFLRSQEYKKYQTNKTTGNTDKRAFVETWQSFYRKKLKEVWKPAV

SEQ ID NO: 28546 - protein, 977 aa, synthetic construct
  REGION 1..977: note = engineered CasX variant
QEIKRINKIRRRLVKDSNTKKAGKTGPMKTLLVRVMTPDLRERLENLRKKPENIPQPISNTSRANLNKLLTDYTEMKKAILHVYWEEFQKDPVGLMSRVAQPASKKIDQNKLKPEMDEKGNLTTAGFACSQCGQPLFVYKLEQVSEKGKAYTNYFGRCNVAEHEKLILLAQLKPEKDSDEAVTYSLGKFGQRALDFYSIHVTKESTHPVKPLAQIAGNRYASPVGKALSDACMGTIASFLSKYQDIIIEHQKVVKGNQKRLESLRELAGKENLEYPSVTLPPQPHTKEGVDAYNEVIARVRMWVNLNLWQKLKLSRDDAKPLLRLKGFPSFPLVERQANEVDWWDMVCNVKKLINEKKEDGKVFWQNLAGYKRQEALRPYLSSEEDRKKGKKFARTQLGDLLLHLEKKHGEDWGKVYDEAWERIDKKVEGLSKHIKLEEERRSEDAQSKAALTDWLRAKASFVIEGLKEADKDEFCRCELKLQKWYGDLRGKPFAIEAENSILDISGFSKQYNCAFIWQKDGVKKLNLYLIINYFKGGKLRFKKIKPEAFEANRFYTVINKKSGEIVPMEVNFNFDDPNLIILPLAFGKRQGREFIWNDLLSLETGSLKLANGRVIEKTLYNRRTRQDEPALFVALTFERREVLDSSNIKPMNLIGVDRGENIPAVIALTDPEGCPLSRFKDSLGNPTHILRIGESYKEKQRTIQAKKEVEQRRAGGYSRKYASKAKNLADDMVRNTARDLLYYAVTQDAMLIFENLSRGFGRQGKRTFMAERQYTRMEDWLTAKLAYEGLPSKTYLSKTLAQYTSKTCSNCGFTITSADYDRVLEKLKKTATGWMTTINGKELKVEGQITYYNRYKRQNVVKDLSVELDRLSEESVNNDISSWTKGRSGEALSLLKKRFSHRPVQEKFVCLNCGFETHADEQAALNIARSWLFLRSQEYKKYQTNKTTGNTDKRAFVETWQSFYRKKLKEVWKPAV

SEQ ID NO: 28547 - protein, 978 aa, synthetic construct
  REGION 1..978: note = engineered CasX variant
QEIKRINKIRRRLVKDSNTKKAGKTGPMKTLLVRVMTPDLRERLENLRKKPENIPQPISNTSRANLNKLLTDYTEMKKAILHVYWEEFQKDPVGLMSRVAQPASKKIDQNKLKPEMDEKGNLTTAGFACSQCGQPLFVYKLEQVSEKGKAYTNYFGRCNVAEHEKLILLAQLKPEKDSDEAVTYSLGKFGQRALDFYSIHVTKESTHPVKPLAQIAGNRYASPVGKALSDACMGTIASFLSKYQDIIIEHQKVVKGNQKRLESLRELAGKENLEYPSVTLPPQPHTKEGVDAYNEVIARVRMWVNLNLWQKLKLSRDDAKPLLRLKGFPSFPLVERQANEVDWWDMVCNVKKLINEKKEDGKVFWQNLAGYKRQEALRPYLSSEEDRKKGKKFARYQLGDLLLHLEKKHEGEDWGKVYDEAWERIDKKVEGLSKHIKLEEERRSEDAQSKAALTDWLRAKASFVIEGLKEADKDEFCRCELKLQKWYGDLRGKPFAIEAENSILDISGFSKQYNCAFIWQKDGVKKLNLYLIINYFKGGKLRFKKIKPEAFEANRFYTVINKKSGEIVPMEVNFNFDDPNLIILPLAFGKRQGREFIWNDLLSLETGSLKLANGRVIEKTLYNRRTRQDEPALFVALTFERREVLDSSNIKPMNLIGVDRGENIPAVIALTDPEGCPLSRFKDSLGNPTHILRIGESYKEKQRTIQAKKEVEQRRAGGYSRKYASKAKNLADDMVRNTARDLLYYAVTQDAMLIFENLSRGFGRQGKRTFMAERQYTRMEDWLTAKLAYEGLPSKTYLSKTLAQYTSKTCSNCGFTITSADYDRVLEKLKKTATGWMTTINGKELKVEGQITYYNRYKRQNVVKDLSVELDRLSEESVNNDISSWTKGRSGEALSLLKKRFSHRPVQEKFVCLNCGFETHADEQAALNIARSWLFLRSQEYKKYQTNKTTGNTDKRAFVETWQSFYRKKLKEVWKPAV

SEQ ID NO: 28548 - protein, 977 aa, synthetic construct
  REGION 1..977: note = engineered CasX variant
QEIKRINKIRRRLVKDSNTKKAGKTGPMKTLLVRVMTPDLRERLENLRKKPENIPQPISNTSRANLNKLLTDYTEMKKAILHVYWEEFQKDPVGLMSRVAQPASKKIDQNKLKPEMDEKGNLTTAGFACSQCGQPLFVYKLEQVSEKGKAYTNYFGRCNVAEHEKLILLAQLKPEKDSDEAVTYSLGKFGQRALDFYSIHVTKESTHPVKPLAQIAGNRYASPVGKALSDACMGTIASFLSKYQDIIIEHQKVVKGNQKRLESLRELAGKENLEYPSVTLPPQPHTKEGVDAYNEVIARVRMWVNLNLWQKLKLSRDDAKPLLRLKGFPSFPLVERQANEVDWWDMVCNVKKLINEKKEDGKVFWQNLAGYKRQEALRPYLSSEEDRKKGKKFARYQLGDLLLHLEKKHGEDWGKVYDEAWERIDKKVEGLSKHIKLEEERRSEDAQSKAALTDWLRAKASFVIEGLKEADKDEFCRCDLKLQKWYGDLRGKPFAIEAENSILDISGFSKQYNCAFIWQKDGVKKLNLYLIINYFKGGKLRFKKIKPEAFEANRFYTVINKKSGEIVPMEVNFNFDDPNLIILPLAFGKRQGREFIWNDLLSLETGSLKLANGRVIEKTLYNRRTRQDEPALFVALTFERREVLDSSNIKPMNLIGVDRGENIPAVIALTDPEGCPLSRFKDSLGNPTHILRIGESYKEKQRTIQAKKEVEQRRAGGYSRKYASKAKNLADDMVRNTARDLLYYAVTQDAMLIFENLSRGFGRQGKRTFMAERQYTRMEDWLTAKLAYEGLPSKTYLSKTLAQYTSKTCSNCGFTITSADYDRVLEKLKKTATGWMTTINGKELKVEGQITYYNRYKRQNVVKDLSVELDRLSEESVNNDISSWTKGRSGEALSLLKKRFSHRPVQEKFVCLNCGFETHADEQAALNIARSWLFLRSQEYKKYQTNKTTGNTDKRAFVETWQSFYRKKLKEVWKPAV

SEQ ID NO: 28549 - protein, 977 aa, synthetic construct
  REGION 1..977: note = engineered CasX variant
QEIKRINKIRRRLVKDSNTKKAGKTGPMKTLLVRVMTPDLRERLENLRKKPENIPQPISNTSRANLNKLLTDYTEMKKAILHVYWEEFQKDPVGLMSRVAQPASKKIDQNKLKPEMDEKGNLTTAGFACSQCGQPLFVYKLEQVSEKGKAYTNYFGRCNVAEHEKLILLAQLKPEKDSDEAVTYSLGKFGQRALDFYSIHVTKESTHPVKPLAQIAGNRYASPVGKALSDACMGTIASFLSKYQDIIIEHQKVVKGNQKRLESLRELAGKENLEYPSVTLPPQPHTKEGVDAYNEVIARVRMWVNLNLWQKLKLSRDDAKPLLRLKGFPSFPLVERQANEVDWWDMVCNVKKLINEKKEDGKVFWQNLAGYKRQEALRPYLSSEEDRKKGKKFARYQLGDLLLHLEKKHGEDWGKVYDEAWERIDKKVEGLSKHIKLEEERRSEDAQSKAALTDWLRAKASFVIEGLKEADKDEFCRCELKLQKWYGDLRGKPFAIEAENSILDISGFSKQYNCAFIWQKDGVKKLNLYLIINYFKGGKLRFKKIKPEAFEANRFYTVINKKSGEIVPMEVNFNFDDPNLIILPLAFGKRFGREFIWNDLLSLETGSLKLANGRVIEKTLYNRRTRQDEPALFVALTFERREVLDSSNIKPMNLIGVDRGENIPAVIALTDPEGCPLSRFKDSLGNPTHILRIGESYKEKQRTIQAKKEVEQRRAGGYSRKYASKAKNLADDMVRNTARDLLYYAVTQDAMLIFENLSRGFGRQGKRTFMAERQYTRMEDWLTAKLAYEGLPSKTYLSKTLAQYTSKTCSNCGFTITSADYDRVLEKLKKTATGWMTTINGKELKVEGQITYYNRYKRQNVVKDLSVELDRLSEESVNNDISSWTKGRSGEALSLLKKRFSHRPVQEKFVCLNCGFETHADEQAALNIARSWLFLRSQEYKKYQTNKTTGNTDKRAFVETWQSFYRKKLKEVWKPAV

SEQ ID NO: 28550 - protein, 977 aa, synthetic construct
  REGION 1..977: note = engineered CasX variant
QEIKRINKIRRRLVKDSNTKKAGKTGPMKTLLVRVMTPDLRERLENLRKKPENIPQPISNTSRANLNKLLTDYTEMKKAILHVYWEEFQKDPVGLMSRVAQPASKKIDQNKLKPEMDEKGNLTTAGFACSQCGQPLFVYKLEQVSEKGKAYTNYFGRCNVAEHEKLILLAQLKPEKDSDEAVTYSLGKFGQRALDFYSIHVTKESTHPVKPLAQIAGNRYASPVGKALSDACMGTIASFLSKYQDIIIEHQKVVKGNQKRLESLRELAGKENLEYPSVTLPPQPHTKEGVDAYNEVIARVRMWVNLNLWQKLKLSRDDAKPLLRLKGFPSFPLVERQANEVDWWDMVCNVKKLINEKKEDGKVFWQNLAGYKRQEALRPYLSSEEDRKKGKKFARYQLGDLLLHLEKKHGEDWGKVYDEAWERIDKKVEGLSKHIKLEEERRSEDAQSKAALTDWLRAKASFVIEGLKEADKDEFCRCELKLQKWYGDLRGKPFAIEAENSILDISGFSKQYNCAFIWQKDGVKKLNLYLIINYFKGGKLRFKKIKPEAFEANRFYTVINKKSGEIVPMEVNFNFDDPNLIILPLAFGKRVGREFIWNDLLSLETGSLKLANGRVIEKTLYNRRTRQDEPALFVALTFERREVLDSSNIKPMNLIGVDRGENIPAVIALTDPEGCPLSRFKDSLGNPTHILRIGESYKEKQRTIQAKKEVEQRRAGGYSRKYASKAKNLADDMVRNTARDLLYYAVTQDAMLIFENLSRGFGRQGKRTFMAERQYTRMEDWLTAKLAYEGLPSKTYLSKTLAQYTSKTCSNCGFTITSADYDRVLEKLKKTATGWMTTINGKELKVEGQITYYNRYKRQNVVKDLSVELDRLSEESVNNDISSWTKGRSGEALSLLKKRFSHRPVQEKFVCLNCGFETHADEQAALNIARSWLFLRSQEYKKYQTNKTTGNTDKRAFVETWQSFYRKKLKEVWKPAV

SEQ ID NO: 28551 - protein, 978 aa, synthetic construct
  REGION 1..978: note = engineered CasX variant
QEIKRINKIRRRLVKDSNTKKAGKTGPMKTLLVRVMTPDLRERLENLRKKPENIPQPISNTSRANLNKLLTDYTEMKKAILHVYWEEFQKDPVGLMSRVAQPASKKIDQNKLKPEMDEKGNLTTAGFACSQCGQPLFVYKLEQVSEKGKAYTNYFGRCNVAEHEKLILLAQLKPEKDSDEAVTYSLGKFGQRALDFYSIHVTKESTHPVKPLAQIAGNRYASPVGKALSDACMGTIASFLSKYQDIIIEHQKVVKGNQKRLESLRELAGKENLEYPSVTLPPQPHTKEGVDAYNEVIARVRMWVNLNLWQKLKLSRDDAKPLLRLKGFPSFPLVERQANEVDWWDMVCNVKKLINEKKEDGKVFWQNLAGYKRQEALRPYLSSEEDRKKGKKFARYQLGDLLLHLEKKHGEDWGKVYDEAWERIDKKVEGLSKHIKLEEERRSEDAQSKAALTDWLRAKASFVIEGLKEADKDEFCRCELKLQKWYGDLRGKPFAIEAENSILDISGFSKQYNCAFIWQKDGVKKLNLYLIINYFKGGKLRFKKIKPEAFEANRFYTVINKKSGEIVPMEVNFNFDDPNLIILPLAFGKRQGREFIWNDLLSLETGSLKLANGRVIEKTLYNRRTRQDEPALFVALTFERREVLDSSNIKTPMNLIGVDRGENIPAVIALTDPEGCPLSRFKDSLGNPTHILRIGESYKEKQRTIQAKKEVEQRRAGGYSRKYASKAKNLADDMVRNTARDLLYYAVTQDAMLIFENLSRGFGRQGKRTFMAERQYTRMEDWLTAKLAYEGLPSKTYLSKTLAQYTSKTCSNCGFTITSADYDRVLEKLKKTATGWMTTINGKELKVEGQITYYNRYKRQNVVKDLSVELDRLSEESVNNDISSWTKGRSGEALSLLKKRFSHRPVQEKFVCLNCGFETHADEQAALNIARSWLFLRSQEYKKYQTNKTTGNTDKRAFVETWQSFYRKKLKEVWKPAV

SEQ ID NO: 28552 - protein, 978 aa, synthetic construct
  REGION 1..978: note = engineered CasX variant
QEIKRINKIRRRLVKDSNTKKAGKTGPMKTLLVRVMTPDLRERLENLRKKPENIPQPISNTSRANLNKLLTDYTEMKKAILHVYWEEFQKDPVGLMSRVAQPASKKIDQNKLKPEMDEKGNLTTAGFACSQCGQPLFVYKLEQVSEKGKAYTNYFGRCNVAEHEKLILLAQLKPEKDSDEAVTYSLGKFGQRALDFYSIHVTKESTHPVKPLAQIAGNRYASPVGKALSDACMGTIASFLSKYQDIIIEHQKVVKGNQKRLESLRELAGKENLEYPSVTLPPQPHTKEGVDAYNEVIARVRMWVNLNLWQKLKLSRDDAKPLLRLKGFPSFPLVERQANEVDWWDMVCNVKKLINEKKEDGKVFWQNLAGYKRQEALRPYLSSEEDRKKGKKFARYQLGDLLLHLEKKHGEDWGKVYDEAWERIDKKVEGLSKHIKLEEERRSEDAQSKAALTDWLRAKASFVIEGLKEADKDEFCRCELKLQKWYGDLRGKPFAIEAENSILDISGFSKQYNCAFIWQKDGVKKLNLYLIINYFKGGKLRFKKIKPEAFEANRFYTVINKKSGEIVPMEVNFNFDDPNLIILPLAFGKRQGREFIWNDLLSLETGSLKLANGRVIEKTLYNRRTRQDEPALFVALTFERREVLDSSNIKPMSNLIGVDRGENIPAVIALTDPEGCPLSRFKDSLGNPTHILRIGESYKEKQRTIQAKKEVEQRRAGGYSRKYASKAKNLADDMVRNTARDLLYYAVTQDAMLIFENLSRGFGRQGKRTFMAERQYTRMEDWLTAKLAYEGLPSKTYLSKTLAQYTSKTCSNCGFTITSADYDRVLEKLKKTATGWMTTINGKELKVEGQITYYNRYKRQNVVKDLSVELDRLSEESVNNDISSWTKGRSGEALSLLKKRFSHRPVQEKFVCLNCGFETHADEQAALNIARSWLFLRSQEYKKYQTNKTTGNTDKRAFVETWQSFYRKKLKEVWKPAV

SEQ ID NO: 28553 - protein, 977 aa, synthetic construct
  REGION 1..977: note = engineered CasX variant
QEIKRINKIRRRLVKDSNTKKAGKTGPMKTLLVRVMTPDLRERLENLRKKPENIPQPISNTSRANLNKLLTDYTEMKKAILHVYWEEFQKDPVGLMSRVAQPASKKIDQNKLKPEMDEKGNLTTAGFACSQCGQPLFVYKLEQVSEKGKAYTNYFGRCNVAEHEKLILLAQLKPEKDSDEAVTYSLGKFGQRALDFYSIHVTKESTHPVKPLAQIAGNRYASPVGKALSDACMGTIASFLSKYQDIIIEHQKVVKGNQKRLESLRELAGKENLEYPSVTLPPQPHTKEGVDAYNEVIARVRMWVNLNLWQKLKLSRDDAKPLLRLKGFPSFPLVERQANEVDWWDMVCNVKKLINEKKEDGKVFWQNLAGYKRQEALRPYLSSEEDRKKGKKFARYQLGDLLLHLEKKHGEDWGKVYDEAWERIDKKVEGLSKHIKLEEERRSEDAQSKAALTDWLRAKASFVIEGLKEADKDEFCRCELKLQKWYGDLRGKPFAIEAENSILDISGFSKQYNCAFIWQKDGVKKLNLYLIINYFKGGKLRFKKIKPEAFEANRFYTVINKKSGEIVPMEVNFNFDDPNLIILPLAFGKRQGREFIWNDLLSLETGSLKLANGRVIEKTLYNRRTRQDEPALFVALTFERREVLDSSNIKPMNLIGVDRGENIPAVIALTDPEGCPLSRFKDSLGNPTHILRIRESYKEKQRTIQAKKEVEQRRAGGYSRKYASKAKNLADDMVRNTARDLLYYAVTQDAMLIFENLSRGFGRQGKRTFMAERQYTRMEDWLTAKLAYEGLPSKTYLSKTLAQYTSKTCSNCGFTITSADYDRVLEKLKKTATGWMTTINGKELKVEGQITYYNRYKRQNVVKDLSVELDRLSEESVNNDISSWTKGRSGEALSLLKKRFSHRPVQEKFVCLNCGFETHADEQAALNIARSWLFLRSQEYKKYQTNKTTGNTDKRAFVETWQSFYRKKLKEVWKPAV

SEQ ID NO: 28554 - protein, 977 aa, synthetic construct
  REGION 1..977: note = engineered CasX variant
QEIKRINKIRRRLVKDSNTKKAGKTGPMKTLLVRVMTPDLRERLENLRKKPENIPQPISNTSRANLNKLLTDYTEMKKAILHVYWEEFQKDPVGLMSRVAQPASKKIDQNKLKPEMDEKGNLTTAGFACSQCGQPLFVYKLEQVSEKGKAYTNYFGRCNVAEHEKLILLAQLKPEKDSDEAVTYSLGKFGQRALDFYSIHVTKESTHPVKPLAQIAGNRYASPVGKALSDACMGTIASFLSKYQDIIIEHQKVVKGNQKRLESLRELAGKENLEYPSVTLPPQPHTKEGVDAYNEVIARVRMWVNLNLWQKLKLSRDDAKPLLRLKGFPSFPLVERQANEVDWWDMVCNVKKLINEKKEDGKVFWQNLAGYKRQEALRPYLSSEEDRKKGKKFARYQLGDLLLHLEKKHGEDWGKVYDEAWERIDKKVEGLSKHIKLEEERRSEDAQSKAALTDWLRAKASFVIEGLKEADKDEFCRCELKLQKWYGDLRGKPFAIEAENSILDISGFSKQYNCAFIWQKDGVKKLNLYLIINYFKGGKLRFKKIKPEAFEANRFYTVINKKSGEIVPMEVNFNFDDPNLIILPLAFGKRQGREFIWNDLLSLETGSLKLANGRVIEKTLYNRRTRQDEPALFVALTFERREVLDSSNIKPMNLIGVDRGENIPAVIALTDPEGCPLSRFKDSLGNPTHILRIGESYKEKQRTIQAKKEVEQRRAGGYSRKYASKAKNLADDMVRNTARDLLYYAVTQDAMLIFENLSRGFGRQGKRTFSAERQYTRMEDWLTAKLAYEGLPSKTYLSKTLAQYTSKTCSNCGFTITSADYDRVLEKLKKTATGWMTTINGKELKVEGQITYYNRYKRQNVVKDLSVELDRLSEESVNNDISSWTKGRSGEALSLLKKRFSHRPVQEKFVCLNCGFETHADEQAALNIARSWLFLRSQEYKKYQTNKTTGNTDKRAFVETWQSFYRKKLKEVWKPAV

SEQ ID NO: 28555 - protein, 977 aa, synthetic construct
  REGION 1..977: note = engineered CasX variant
QEIKRINKIRRRLVKDSNTKKAGKTGPMKTLLVRVMTPDLRERLENLRKKPENIPQPISNTSRANLNKLLTDYTEMKKAILHVYWEEFQKDPVGLMSRVAQPASKKIDQNKLKPEMDEKGNLTTAGFACSQCGQPLFVYKLEQVSEKGKAYTNYFGRCNVAEHEKLILLAQLKPEKDSDEAVTYSLGKFGQRALDFYSIHVTKESTHPVKPLAQIAGNRYASPVGKALSDACMGTIASFLSKYQDIIIEHQKVVKGNQKRLESLRELAGKENLEYPSVTLPPQPHTKEGVDAYNEVIARVRMWVNLNLWQKLKLSRDDAKPLLRLKGFPSFPLVERQANEVDWWDMVCNVKKLINEKKEDGKVFWQNLAGYKRQEALRPYLSSEEDRKKGKKFARYQLGDLLLHLEKKHGEDWGKVYDEAWERIDKKVEGLSKHIKLEEERRSEDAQSKAALTDWLRAKASFVIEGLKEADKDEFCRCELKLQKWYGDLRGKPFAIEAENSILDISGFSKQYNCAFIWQKDGVKKLNLYLIINYFKGGKLRFKKIKPEAFEANRFYTVINKKSGEIVPMEVNFNFDDPNLIILPLAFGKRQGREFIWNDLLSLETGSLKLANGRVIEKTLYNRRTRQDEPALFVALTFERREVLDSSNIKPMNLIGVDRGENIPAVIALTDPEGCPLSRFKDSLGNPTHILRIGESYKEKQRTIQAKKEVEQRRAGGYSRKYASKAKNLADDMVRNTARDLLYYAVTQDAMLIFENLSRGFGRQGKRTFMAERQYTRMEDWLTAKLAYEGLPSKTYLSKTLAQYTSKTCSNCGFTITSADYDRVLEKLKKTATGWMTTINGKELKVEGQITYYNRYKRQNVVKDLSVELDRLSEESVNNDISSWDKGRSGEALSLLKKRFSHRPVQEKFVCLNCGFETHADEQAALNIARSWLFLRSQEYKKYQTNKTTGNTDKRAFVETWQSFYRKKLKEVWKPAV

SEQ ID NO: 28556 - protein, 977 aa, synthetic construct
  REGION 1..977: note = engineered CasX variant
QEIKRINKIRRRLVKDSNTKKAGKTGPMKTLLVRVMTPDLRERLENLRKKPENIPQPISNTSRANLNKLLTDYTEMKKAILHVYWEEFQVDPVGLMSRVAQPASKKIDQNKLKPEMDEKGNLTTAGFACSQCGQPLFVYKLEQVSEKGKAYTNYFGRCNVAEHEKLILLAQLKPEKDSDEAVTYSLGKFGQRALDFYSIHVTKESTHPVKPLAQIAGNRYASPVGKALSDACMGTIASFLSKYQDIIIEHQKVVKGNQKRLESLRELAGKENLEYPSVTLPPQPHTKEGVDAYNEVIARVRMWVNLNLWQKLKLSRDDAKPLLRLKGFPSFPLVERQANEVDWWDMVCNVKKLINEKKEDGKVFWQNLAGYKRQEALRPYLSSEEDRKKGKKFARYQLGDLLLHLEKKHGEDWGKVYDEAWERIDKKVEGLSKHIKLEEERRSEDAQSKAALTDWLRAKASFVIEGLKEADKDEFCRCELKLQKWYGDLRGKPFAIEAENSILDISGFSKQYNCAFIWQKDGVKKLNLYLIINYFKGGKLRFKKIKPEAFEANRFYTVINKKSGEIVPMEVNFNFDDPNLIILPLAFGKRQGREFIWNDLLSLETGSLKLANGRVIEKTLYNRRTRQDEPALFVALTFERREVLDSSNIKPMNLIGVDRGENIPAVIALTDPEGCPLSRFKDSLGNPTHILRIGESYKEKQRTIQAKKEVEQRRAGGYSRKYASKAKNLADDMVRNTARDLLYYAVTQDAMLIFENLSRGFGRQGKRTFMAERQYTRMEDWLTAKLAYEGLPSKTYLSKTLAQYTSKTCSNCGFTITSADYDRVLEKLKKTATGWMTTINGKELKVEGQITYYNRYKRQNVVKDLSVELDRLSEESVNNDISSWTKGRSGEALSLLKKRFSHRPVQEKFVCLNCGFETHADEQAALNIARSWLFLRSQEYKKYQTNKTTGNTDKRAFVETWQSFYRKKLKEVWKPAV

SEQ ID NO: 28557 - protein, 977 aa, synthetic construct
  REGION 1..977: note = engineered CasX variant
QEIKRLNKIRRRLVKDSNTKKAGKTGPMKTLLVRVMTPDLRERLENLRKKPENIPQPISNTSRANLNKLLTDYTEMKKAILHVYWEEFQKDPVGLMSRVAQPASKKIDQNKLKPEMDEKGNLTTAGFACSQCGQPLFVYKLEQVSEKGKAYTNYFGRCNVAEHEKLILLAQLKPEKDSDEAVTYSLGKFGQRALDFYSIHVTKESTHPVKPLAQIAGNRYASPVGKALSDACMGTIASFLSKYQDIIIEHQKVVKGNQKRLESLRELAGKENLEYPSVTLPPQPHTKEGVDAYNEVIARVRMWVNLNLWQKLKLSRDDAKPLLRLKGFPSFPLVERQANEVDWWDMVCNVKKLINEKKEDGKVFWQNLAGYKRQEALRPYLSSEEDRKKGKKFARYQLGDLLLHLEKKHGEDWGKVYDEAWERIDKKVEGLSKHIKLEEERRSEDAQSKAALTDWLRAKASFVIEGLKEADKDEFCRCELKLQKWYGDLRGKPFAIEAENSILDISGFSKQYNCAFIWQKDGVKKLNLYLIINYFKGGKLRFKKIKPEAFEANRFYTVINKKSGEIVPMEVNFNFDDPNLIILPLAFGKRQGREFIWNDLLSLETGSLKLANGRVIEKTLYNRRTRQDEPALFVALTFERREVLDSSNIKPMNLIGVDRGENIPAVIALTDPEGCPLSRFKDSLGNPTHILRIGESYKEKQRTIQAKKEVEQRRAGGYSRKYASKAKNLADDMVRNTARDLLYYAVTQDAMLIFENLSRGFGRQGKRTFMAERQYTRMEDWLTAKLAYEGLPSKTYLSKTLAQYTSKTCSNCGFTITSADYDRVLEKLKKTATGWMTTINGKELKVEGQITYYNRYKRQNVVKDLSVELDRLSEESVNNDISSWTKGRSGEALSLLKKRFSHRPVQEKFVCLNCGFETHADEQAALNIARSWLFLRSQEYKKYQTNKTTGNTDKRAFVETWQSFYRKKLKEVWKPAV

SEQ ID NO: 28558 - protein, 977 aa, synthetic construct
  REGION 1..977: note = engineered CasX variant
QEIKRINKIRRRLVKDSNTKKAGKTGPMKTLLVRVMTPDLRERLENLRKKPENIPQPISNTSRANLNKLLTDYTEMKKAILHVYWEEFQKDPVGLMSRVAQPASKKIDQNKLKPEMDEKGNLTTAGFACSQCGQPLFVYKLEQVSEKGKAYTNYVGRCNVAEHEKLILLAQLKPEKDSDEAVTYSLGKFGQRALDFYSIHVTKESTHPVKPLAQIAGNRYASPVGKALSDACMGTIASFLSKYQDIIIEHQKVVKGNQKRLESLRELAGKENLEYPSVTLPPQPHTKEGVDAYNEVIARVRMWVNLNLWQKLKLSRDDAKPLLRLKGFPSFPLVERQANEVDWWDMVCNVKKLINEKKEDGKVFWQNLAGYKRQEALRPYLSSEEDRKKGKKFARYQLGDLLLHLEKKHGEDWGKVYDEAWERIDKKVEGLSKHIKLEEERRSEDAQSKAALTDWLRAKASFVIEGLKEADKDEFCRCELKLQKWYGDLRGKPFAIEAENSILDISGFSKQYNCAFIWQKDGVKKLNLYLIINYFKGGKLRFKKIKPEAFEANRFYTVINKKSGEIVPMEVNFNFDDPNLIILPLAFGKRQGREFIWNDLLSLETGSLKLANGRVIEKTLYNRRTRQDEPALFVALTFERREVLDSSNIKPMNLIGVDRGENIPAVIALTDPEGCPLSRFKDSLGNPTHILRIGESYKEKQRTIQAKKEVEQRRAGGYSRKYASKAKNLADDMVRNTARDLLYYAVTQDAMLIFENLSRGFGRQGKRTFMAERQYTRMEDWLTAKLAYEGLPSKTYLSKTLAQYTSKTCSNCGFTITSADYDRVLEKLKKTATGWMTTINGKELKVEGQITYYNRYKRQNVVKDLSVELDRLSEESVNNDISSWTKGRSGEALSLLKKRFSHRPVQEKFVCLNCGFETHADEQAALNIARSWLFLRSQEYKKYQTNKTTGNTDKRAFVETWQSFYRKKLKEVWKPAV

SEQ ID NO: 28559 - protein, 977 aa, synthetic construct
  REGION 1..977: note = engineered CasX variant
QEIKRINKIRRRLVKDSNTKKAGKTGPMKTLLVRVMTPDLRERLENLRKKPENIPQPISNTSRANLNKLLTDYTEMKKAILHVYWEEFQKDPVGLMSRVAQPASKKIDQNKLKPEMDEKGNLTTAGFACSQCGQPLFVYKLEQVSEKGKAYTNYFGRCNVAEHEKLILLAQLKPEKDSDEAVTYSLGKFGQRALDFYSIHVTKESTHPVKPLAQIAGNRYASPVGKALSDACMGTIASFLSKYQDIIIEHQKVVKGNQKRLESLRELAGKENLEYPSVTLPPQPHTKEGVDAYNEVIARVRMWVNLNLWQKLKLSRDDAKPLLRLKGFPSFPLVERQANEVDWWDMVCNVKKLINEKKEDGKVFWQNLAGYKRQEALRPYLSSEEDRKKGKKFARYQLGDLLLHLEKKHGEDWGKVYDEAWERIDKKVEGLSKHIKLEEERRSEDAQSKAALTDWLRAKASFVIEGLKEADKDEFCRCELKLQKWYGDLRGKPFAIEAENSILDISGFSKQYNCAFIWQKDGVKKLNLYLIINYFKGGKLRFKKIKPEAFEANRFYTVINKKSGEIVPMEVNFNFDDPNLIILPLAFGKRQGREFIWNDLLSLETGSLKLANGRVIEKTLYNRRTRQDEPALFVALTFERREVLDSSNIKPMNLIGVDRGENIPAVIALTDPEGCPLSRFKDSLGNPTHILRIGESYKEKQRTIQAKKEVEQRRAGGYSRKYASKAKNLADDMVRNTARDLLYYAVTQDAMLIFENLSRGFGRQGKRTFMAERQYTRMEDWLTAKLAYEGLASKTYLSKTLAQYTSKTCSNCGFTITSADYDRVLEKLKKTATGWMTTINGKELKVEGQITYYNRYKRQNVVKDLSVELDRLSEESVNNDISSWTKGRSGEALSLLKKRFSHRPVQEKFVCLNCGFETHADEQAALNIARSWLFLRSQEYKKYQTNKTTGNTDKRAFVETWQSFYRKKLKEVWKPAV

SEQ ID NO: 28560 - protein, 977 aa, synthetic construct
  REGION 1..977: note = engineered CasX variant
QEIKRINKIRRRLVKDSNTKKAGKTGPMKTLLVRVMTPDLRERLENLRKKPENIPQPISNTSRANLNKLLTDYTEMKKAILHVYWEEFQKDPVGLMSRVAQPASKKIDQNKLKPEMDEKGNLTTAGFACSQCGQPLFVYKLEQVSEKGKAYTNYFGRCNVAEHEKLILLAQLKPEKDSDEAVTYSLGKFGQRALDFYSIHVTKESTHPVKPLAQIAGNRYASPVGKALSDACMGTIASFLSKYQDIIIEHQKVVKGNQKRLESLRELAGKENLEYPSVTLPPQPHTKEGVDAYNEVIARVRMWVNLNLWQKLKLSRDDAKPLLRLKGFPSFPLVERQANEVDWWDMVCNVKKLINEKKEDGKVFWQNLAGYKRQEALRPYLSSEEDRKKGKKFARYQLGDLLLHLEKKHGEDWGKVYDEAWERIDKKVEGLSKHIKLEEERRSEDAQSKAALTDWLRAKASFVIEGLKEADKDEFCRCELKLQKWYGDLRGKPFAIEAENSILDISGFSKQYNCAFIWQKDGVKKLNLYLIINYFKGGKLRFKKIKPEAFEANRFYTVINKKSGEIVPMEVNFNFDDPNLIILPLAFGKRQGREFIWNDLLSLETGSLKLANGRVIEKTLYNRRTRQDEPALFVALTFERREVLDSSNIKPMNLIGVDRGENIPAVIALTDPEGCPLSRFKDSLGNPTHILRIGESYKEKQRTIQAKKEVEQRRAGGYSRKYASKAKNLADDMVRNTARDLLYYAVTQDAMLIFENLSRGFGRQGKRTFMAERQYTRMEDWLTAKLAYEGLPSKVYLSKTLAQYTSKTCSNCGFTITSADYDRVLEKLKKTATGWMTTINGKELKVEGQITYYNRYKRQNVVKDLSVELDRLSEESVNNDISSWTKGRSGEALSLLKKRFSHRPVQEKFVCLNCGFETHADEQAALNIARSWLFLRSQEYKKYQTNKTTGNTDKRAFVETWQSFYRKKLKEVWKPAV

SEQ ID NO: 28561 - protein, 978 aa, synthetic construct
  REGION 1..978: note = engineered CasX variant
QEIKRINKIRRRLVKDSNTKKAGKTGPMKTLLVRVMTPDLRERLENLRKKPENIPQPISNTSRANLNKLLTDYTEMKKAILHVYWEEFQKDPVGLMSRVAQPASKKIDQNKLKPEMDEKGNLTTAGFACSQCGQPLFVYKLEQVSEKGKAYTNYFGRCNVAEHEKLILLAQLKPEKDSDEAVTYSLGKFGQRALDFYSIHVTKESTHPVKPLAQIAGNRYASPVGKALSDACMGTIASFLSKYQDIIIEHQKVVKGNQKRLESLRELAGKENLEYPSVTLPPQPHTKEGVDAYNEVIARVRMWVNLNLWQKLKLSRDDAKPLLRLKGFPSFPLVERQANEVDWWDMVCNVKKLINEKKEDGKVFWQNLAGYKRQEALRPYLSSEEDRKKGKKFARYQLGDLLLHLEKKHGEDWGKVYDEAWERIDKKVEGLSKHIKLEEERRSEDAQSKAALTDWLRAKASFVIEGLKEADKDEFCRCELKLQKWYGDLRGKPFAIEAENSILDISGFSKQYNCAFIWQKDGVKKLNLYLIINYFKGGKLRFKKIKPEAFEANRFYTVINKKSGEIVPMEVNFNFDDPNLIILPLAFGKRQGREFIWNDLLSLETGSLKLANGRVIEKTLYNRRTRQDEPALFVALTFERREVLDSSNIKPMNLIGVDRGENIPAVIALTDPEGCPLSRFKDSLGNPTHILRIGESYKEKQRTIQAKKEVEQRRAGGYSRKYASKAKNLADDMVRNTARDLLYYAVTQDAMLIFENLSRGFGRQGKRTFMAERQYTRMEDWLTAKLAYEGPLPSKTYLSKTLAQYTSKTCSNCGFTITSADYDRVLEKLKKTATGWMTTINGKELKVEGQITYYNRYKRQNVVKDLSVELDRLSEESVNNDISSWTKGRSGEALSLLKKRFSHRPVQEKFVCLNCGFETHADEQAALNIARSWLFLRSQEYKKYQTNKTTGNTDKRAFVETWQSFYRKKLKEVWKPAV

SEQ ID NO: 28562 - protein, 978 aa, synthetic construct
  REGION 1..978: note = engineered CasX variant
QEIKRINKIRRRLVKDSNTKKAGKTGPMKTLLVRVMTPDLRERLENLRKKPENIPQPISNTSRANLNKLLTDYTEMKKAILHVYWEEFQKDPVGLMSRVAQPASKKIDQNKLKPEMDEKGNLTTAGFACSQCGQPLFVYKLEQVSEKGKAYTNYFGRCNVAEHEKLILLAQLKPEKDSDEAVTYSLGKFGQRALDFYSIHVTKESTHPVKPLAQIAGNRYASPVGKALSDACMGTIASFLSKYQDIIIEHQKVVKGNQKRLESLRELAGKENLEYPSVTLPPQPHTKEGVDAYNEVIARVRMWVNLNLWQKLKLSRDDAKPLLRLKGFPSFPLVERQANEVDWWDMVCNVKKLINEKKEDGKVFWQNLAGYKRQEALRPYLSSEEDVRKKGKKFARYQLGDLLLHLEKKHGEDWGKVYDEAWERIDKKVEGLSKHIKLEEERRSEDAQSKAALTDWLRAKASFVIEGLKEADKDEFCRCELKLQKWYGDLRGKPFAIEAENSILDISGFSKQYNCAFIWQKDGVKKLNLYLIINYFKGGKLRFKKIKPEAFEANRFYTVINKKSGEIVPMEVNFNFDDPNLIILPLAFGKRQGREFIWNDLLSLETGSLKLANGRVIEKTLYNRRTRQDEPALFVALTFERREVLDSSNIKPMNLIGVDRGENIPAVIALTDPEGCPLSRFKDSLGNPTHILRIGESYKEKQRTIQAKKEVEQRRAGGYSRKYASKAKNLADDMVRNTARDLLYYAVTQDAMLIFENLSRGFGRQGKRTFMAERQYTRMEDWLTAKLAYEGLPSKTYLSKTLAQYTSKTCSNCGFTITSADYDRVLEKLKKTATGWMTTINGKELKVEGQITYYNRYKRQNVVKDLSVELDRLSEESVNNDISSWTKGRSGEALSLLKKRFSHRPVQEKFVCLNCGFETHADEQAALNIARSWLFLRSQEYKKYQTNKTTGNTDKRAFVETWQSFYRKKLKEVWKPAV

SEQ ID NO: 28563 - protein, 977 aa, synthetic construct
  REGION 1..977: note = engineered CasX variant
QEIKRINKIRRRLVKDSNTKKAGKTGPMKTLLVRVMTPDLRERLENLRKKPENIPQPISNTSRANLNKLLTDYTEMKKAILHVYWEEFQKDPVGLMSRVAQPASKKIDQNKLKPEMDEKGNLTTAGFACSQCGQPLFVYKLEQVSEKGKAYTNYFGRCNVAEHEKLILLAQLKPEKDSDEAVTYSLGKFGQRALDFYSIHVTKESTHPVKPLAQIAGNRYASPVGKALSDACMGTIASFLSKYQDIIIEHQKVVKGNQKRLESLRELAGKENLEYPSVTLPPQPHTKEGVDAYNEVIARVRMWVNLNLWQKLKLSRDDAKPLLRLKGFPSFPLVERQANEVDWWDMVCNVKKLINEKKEDGKVFWQNLAGYKRQEALRPYLSSEEDRKKGKKFARYQLGDLLLHLEKKHGEDWGKVYDEAWERIDKKVEGLSKHIKLEEERRSEDAQSKAALTDWLRAKASFVIEGLKEADKDEFCRCELKLQKWYGDLRGKPFAIEAENSILDISGFSKQYNCAFIWQKDGVKKLNLYLIINYFKGGKLRFKKIKPEAFEANRFYTVINKKSGEIVPMEVNFNFDDPNLIILPLAFGKRQGREFIWNDLLSLETGSLKLANGRVIEKTLYNRRTRQDEPALFVALTFERREVLDSSNIKPMNLIGVDRGENIPAVIALTDPEGCPLSRFKDSLGNPTHILRIGESYKEKQRTIQAKKEVEQRRAGGYSRKYASKAKNLADDMVRNTARDLLYYAVTQDAMLIFENLSRGFGRQGKRTFMAERQYTRMEDWLTAKLAYEGLPSKTYLSKTLAQYTSKTCSNCGFTITSADYDRMLEKLKKTATGWMTTINGKELKVEGQITYYNRYKRQNVVKDLSVELDRLSEESVNNDISSWTKGRSGEALSLLKKRFSHRPVQEKFVCLNCGFETHADEQAALNIARSWLFLRSQEYKKYQTNKTTGNTDKRAFVETWQSFYRKKLKEVWKPAV

SEQ ID NO: 28564 - protein, 977 aa, synthetic construct
  REGION 1..977: note = engineered CasX variant
QEIKRINKIRRRLVKDSNTKKAGKTGPMKTLLVRVMTPDLRERLENLRKKPENIPQPISNTSRANLNKLLTDYTEMKKAILHVYWEEFQKDPVGLMSRVAQPASKKIDQNKLKPEMDEKGNLTTAGFACSQCGQPLFVYKLEQVSEKGKAYTNYFGRCNVAEHEKLILLAQLKPEKDSDEAVTYSLGKFGQRALDFYSIHVTKESTHPVKPLAQIAGNRYASPVGKALSDACMGTIASFLSKYQDIIIEHQKVVKGNQKRLESLRELAGKENLEYPSVTLPPQPHTKEGVDAYNEVIARVRMWVNLNLWQKLKLSRDDAKPLLRLKGFPSFPLVERQANEVDWWDMVCNVKKLINEKKEDGKVFWQNLAGYKRQEALRPYLSSEEDRKKGKKFARYQLGDLLLHLEKKHGEDWGKVYDEAWERIDKKVEGLSKHIKLEEERRSEDAQSKAALTDWLRAKASFVIEGLKEADKDEFCRCELKLQKWYGDLRGKPFAIEAENSILDISGFSKQYNCAFIWQKDGVKKLNLYLIINYFKGGKLRFKKIKPEAFEANRFYTVINKKSGEIVPMEVNFNFDDPNLIILPLAFGKRQGREFIWNDLLSLETGSLKLANGRVIEKTLYNRRTRQDEPALFVALTFERREVLDSSNIKPMNLIGVDRGENIPAVIALTDPEGCPLSRFKDSLGNPTHILRIGESYKEKQRTIQAKKEVEQRRAGGYSRKYASKAKNLADDMVRNTARDLLYYAVTQDAMLIFENLSRGFGRQGKRTFMAERQYTRMEDWLTAKLAYEGLPSKTYLSKTLAQYTSKTCSNCGFTITSADYDRVLEKLKKTATGWMTTINGKELKVEGQITYYNRYKRQNVVKDLSVELDRLSEESVNNDISSWTKGRQGEALSLLKKRFSHRPVQEKFVCLNCGFETHADEQAALNIARSWLFLRSQEYKKYQTNKTTGNTDKRAFVETWQSFYRKKLKEVWKPAV

SEQ ID NO: 28565 - protein, 977 aa, synthetic construct
  REGION 1..977: note = engineered CasX variant
QEIKRINKIRRRLVKDSNTKKAGKTGPMKTLLVRVMTPDLRERLENLRKKPENIPQPISNTSRANLNKLLTDYTEMKKAILHVYWEEFQKDPVGLMSRVAQPASKKIDQNKLKPEMDEKGNLTTAGFACSQCGQPLFVYKLEQVSEKGKAYTNYFGRCNVAEHEKLILLAQLKPEKDSDEAVTYSLGKFGQRALDFYSIHVTKESTHPVKPLAQIAGNRYASPVGKALSDACMGTIASFLSKYQDIIIEHQKVVKGNQKRLESLRELAGKENLEYPSVTLPPQPHTKEGVDAYNEVIARVRMWVNLNLWQKLKLSRDDAKPLLRLKGFPSFPLVERQANEVDWWDMVCNVKKLINEKKEDGKVFWQNLAGYKRQEALRPYLSSEEDRKKGKKFARYQLGDLLLHLEKKHGEDWGKVYDEAWERIDKKVEGLSKHIKLEEERRSEDAQSKAALTDWLRAKASFVIEGLKEADKDEFCRCELKLQKWYGDLRGKPFAIEAENSILDISGFSKQYNCAFIWQKDGVKKLNLYLIINYFKGGKLRFKKIKPEAFEANRFYTVINKKSGEIVPMEVNFNFDDPNLIILPLAFGKRQGREFIWNDLLSLETGSLKLANGRVIEKTLYNRRTRQDEPALFVALTFERREVLDSSNIKPMNLIGVDRGENIPAVIALTDPEGCPLSRFKDSLGNPTHILRIGESYKEKQRTIQAKKEVEQRRAGGYSRKYASKAKNLADDMVRNTARDLLYYAVTQDAMLIFENLSRGFGRQGKRTFMAERQYTRMEDWLTAKLAYEGLPSKTYLSKTLAQYTSKTCSNCGFTITSADYDRVLEKLKKTATGWMTTINGKELKVEGQITYYNRYKRQNVVKDLSVELDRLSEESVNNDISSWTKGRSGEALSLLKKRFSHRPVQEKFVCLNCEFETHADEQAALNIARSWLFLRSQEYKKYQTNKTTGNTDKRAFVETWQSFYRKKLKEVWKPAV

SEQ ID NO: 28566 - protein, 978 aa, synthetic construct
  REGION 1..978: note = engineered CasX variant
QEIKRINKIRRRLVKDSNTKKAGKTGPMKTLLVRVMTPDLRERLENLRKKPENIPQPISNTSRANLNKLLTDYTEMKKAILHVYWEEFQKDPVGLMSRVAQPASKKIDQNKLKPEMDEKGNLTTAGFACSQCGQPLFVYKLEQVSEKGKAYTNYFGRCNVAEHEKLILLAQLKPEKDSDEAVTYSLGKFGQRALDFYSIHVTKESTHPVKPLAQIAGNRYASPVGKALSDACMGTIASFLSKYQDIIIEHQKVVKGNQKRLESLRELAGKENLEYPSVTLPPQPHTKEGVDAYNEVIARVRMWVNLNLWQKLKLSRDDAKPLLRLKGFPSFPLVERQANEVDWWDMVCNVKKLINEKKEDGKVFWQNLAGYKRQEALRPYLSSEEDRKKGKKFARYQLGDLLLHLEKKHGEDWGKVYDEAWERIDKKVEGLSKHIKLEEERRSEDAQSKAALTDWLRAKASFVIEGLKEADKDEFCRCELKLQKWYGDLRGKPFAIEAENSILDISGFSKQYNCAFIWQKDGVKKLNLYLIINYFKGGKLRFKKIKPEAFEANRFYTVINKKSGEIVPMEVNFNFDDPNLIILPLAFGKRQGREFIWNDLLSLETGSLKLANGRVIEKTLYNRRTRQDEPALFVALTFERREVLDSSNIKPMNLIGVDRGENIPAVIALTDPEGCPLSRFKDSLGNPTHILRIGESYKEKQRTIQAKKEVEQRRAGGYSRKYASKAKNLADDMVRNTARDLLYYAVTQDAMLIFENLSRGFGRQGKRTFMAERQYTRMEDWLTAKLAYEGLPSKTYLSKTLAQYTSKTCSNCGFTITSADYDRVLEKLKKTATGWMTTINGKELKVEGQITYYNRYKRQNVVKDLSVELDRLSEESVNNDISSWTKGRSGEALSLLKKRFSHRPVQEKFVCLNCGFETHADEQAALNIARSWLFLRSQEYKKYQTNKTSTGNTDKRAFVETWQSFYRKKLKEVWKPAV

SEQ ID NO: 28567 - protein, 978 aa, synthetic construct
  REGION 1..978: note = engineered CasX variant
QEIKRINKIRRRLVKDSNTKKAGKTGPMKTLLVRVMTPDLRERLENLRKKPENIPQPISNTSRANLNKLLTDYTEMKKAILHVYWEEFQKDPVGLMSRVAQPASKKIDQNKLKPEMDEKGNLTTAGFACSQCGQPLFVYKLEQVSEKGKAYTNYFGRCNVAEHEKLILLAQLKPEKDSDEAVTYSLGKFGQRALDFYSIHVTKESTHPVKPLAQIAGNRYASPVGKALSDACMGTIASFLSKYQDIIIEHQKVVKGNQKRLESLRELAGKENLEYPSVTLPPQPHTKEGVDAYNEVIARVRMWVNLNLWQKLKLSRDDAKPLLRLKGFPSFPLVERQANEVDWWDMVCNVKKLINEKKEDGKVFWQNLAGYKRQEALRPYLSSEEDRKKGKKFARYQLGDLLLHLEKKHGEDWGKVYDEAWERIDKKVEGLSKHIKLEEERRSEDAQSKAALTDWLRAKASFVIEGLKEADKDEFCRCELKLQKWYGDLRGKPFAIEAENSILDISGFSKQYNCAFIWQKDGVKKLNLYLIINYFKGGKLRFKKIKPEAFEANRFYTVINKKSGEIVPMEVNFNFDDPNLIILPLAFGKRQGREFIWNDLLSLETGSLKLANGRVIEKTLYNRRTRQDEPALFVALTFERREVLDSSNIKPMNLIGVDRGENIPAVIALTDPEGCPLSRFKDSLGNPTHILRIGESYKEKQRTIQAKKEVEQRRAGGYSRKYASKAKNLADDMVRNTARDLLYYAVTQDAMLIFENLSRGFGRQGKRTFMAERQYTRMEDWLTAKLAYEGLPSKTYLSKTLAQYTSKTCSNCGFTITSADYDRVLEKLKKTATGWMTTINGKELKVEGQITYYNRYKRQNVVKDLSVELDRLSEESVNNDISSWTKGRSGEALSLLKKRFSHRPVQEKFVCLNCGFETHADEQAALNIARSWLFLRSQEYKKYQTNKTTGKNTDKRAFVETWQSFYRKKLKEVWKPAV

SEQ ID NO: 28568 - protein, 977 aa, synthetic construct
  REGION 1..977: note = engineered CasX variant
QEIKRINKIRRRLVKDSNTKKAGKTGPMKTLLVRVMTPDLRERLENLRKKPENIPQPISNTSRANLNKLLTDYTEMKKAILHVYWEEFQKDPVGLMSRVAQPASKKIDQNKLKPEMDEKGNLTTAGFACSQCGQPLFVYKLEQVSEKGKAYTNYFGRCNVAEHEKLILLAQLKPEKDSDEAVTYSLGKFGQRALDFYSIHVTKESTHPVKPLAQIAGNRYASPVGKALSDACMGTIASFLSKYQDIIIEHQKVVKGNQKRLESLRELAGKENLEYPSVTLPPQPHTKEGVDAYNEVIARVRMWVNLNLWQKLKLSRDDAKPLLRLKKFPSFPLVERQANEVDWWDMVCNVKKLINEKKEDGKVFWQNLAGYKRQEALRPYLSSEEDRKKGKKFARYQLGDLLLHLEKKHGEDWGKVYDEAWERIDKKVEGLSKHIKLEEERRSEDAQSKAALTDWLRAKASFVIEGLKEADKDEFCRCELKLQKWYGDLRGKPFAIEAENSILDISGFSKQYNCAFIWQKDGVKKLNLYLIINYFKGGKLRFKKIKPEAFEANRFYTVINKKSGEIVPMEVNFNFDDPNLIILPLAFGKRQGREFIWNDLLSLETGSLKLANGRVIEKTLYNRRTRQDEPALFVALTFERREVLDSSNIKPMNLIGVDRGENIPAVIALTDPEGCPLSRFKDSLGNPTHILRIGESYKEKQRTIQAKKEVEQRRAGGYSRKYASKAKNLADDMVRNTARDLLYYAVTQDAMLIFENLSRGFGRQGKRTFMAERQYTRMEDWLTAKLAYEGLPSKTYLSKTLAQYTSKTCSNCGFTITSADYDRVLEKLKKTATGWMTTINGKELKVEGQITYYNRYKRQNVVKDLSVELDRLSEESVNNDISSWTKGRSGEALSLLKKRFSHRPVQEKFVCLNCGFETHADEQAALNIARSWLFLRSQEYKKYQTNKTTGNTDKRAFVETWQSFYRKKLKEVWKPAV

SEQ ID NO: 28569 - protein, 977 aa, synthetic construct
  REGION 1..977: note = engineered CasX variant
QEIKRINKIRRRLVKDSNTKKAGKTGPMKTLLVRVMTPDLRERLENLRKKPENIPQPISNTSRANLNKLLTDYTEMKKAILHVYWEEFQKDPVGLMSRVAQPASKKIDQNKLKPEMDEKGNLTTAGFACSQCGQPLFVYKLEQVSEKGKAYTNYFGRCNVAEHEKLILLAQLKPEKDSDEAVTYSLGKFGQRALDFYSIHVTKESTHPVKPLAQIAGNRYASPVGKALSDACMGTIASFLSKYQDIIIEHQKVVKGNQKRLESLRELAGKENLEYPSVTLPPQPHTKEGVDAYNEVIARVRMWVNLNLWQKLKLSRDDAKPLLRLKGFPSFPLVERQANEVDWWDMVCNVKKLINEKKEDGKVFWQNLAGYKRQEALRPYLSSEEDRKKGKKFARYQLGDLLLHLEKKHGEDWGKVYDEAWERIDKKVEGLSKHIKLEEERRSEDAQSKAALTDWLRAKASFVIEGLKEADKDEFCRCELKLQKWYGDLRGKPFAIEAENSILDISGFSKQYNCAFIWQKDGVKKLNLYLIINYFKGGKLRFKKIKPEAFEANRFYTVINKKSGEIVPMEVNFNFDDPNLIILPLAFGKRQGREFIWNDLLSLETGSLKLANGRVIEKTLYNRRTRQDEPALFVALTFERREVLDSSNIKPMNLIGVDRGENIPAVIALTDPEGCPLSRFKDSLGNPTHILRIGERYKEKQRTIQAKKEVEQRRAGGYSRKYASKAKNLADDMVRNTARDLLYYAVTQDAMLIFENLSRGFGRQGKRTFMAERQYTRMEDWLTAKLAYEGLPSKTYLSKTLAQYTSKTCSNCGFTITSADYDRVLEKLKKTATGWMTTINGKELKVEGQITYYNRYKRQNVVKDLSVELDRLSEESVNNDISSWTKGRSGEALSLLKKRFSHRPVQEKFVCLNCGFETHADEQAALNIARSWLFLRSQEYKKYQTNKTTGNTDKRAFVETWQSFYRKKLKEVWKPAV

SEQ ID NO: 28570 - protein, 977 aa, synthetic construct
  REGION 1..977: note = engineered CasX variant
QEIKRINKIRRRLVKDSNTKKAGKTGPMKTLLVRVMTPDLRERLENLRKKPENIPQPISNTSRANLNKLLTDYTEMKKAILHVYWEEFQKDPVGLMSRVAQPASKKIDQNKLKPEMDEKGNLTTAGFACSQCGQPLFVYKLEQVSEKGKAYTNYFGRCNVAEHEKLILLAQLKPEKDSDEAVTYSLGKFGQRALDFYSIHVTKESTHPVKPLAQIAGNRYASPVGKALSDACMGTIASFLSKYQDIIIEHQKVVKGNQKRLESLRELAGKENLEYPSVTLPPQPHTKEGVDAYNEVIARVRMWVNLNLWQKLKLSRDDAKPLLRLKGFPSFPLVERQANEVDWWDMVCNVKKLINEKKEDGKVFWQNLAGYKRQEALRPYLSSEEDRKKGKKFARYQLGDLLLHLEKKHGEDWGKVYDEAWERIDKKVEGLSKHIKLEEERRSEDAQSKAALTDWLRAKASFVIEGLKEADKDEFCRCELKLQKWYGDLRGKPFAIEAENSILDISGFSKQYNCAFIWQKDGVKKLNLYLIINYFKGGKLRFKKIKPEAFEANRFYTVINKKSGEIVPMEVNFNFDDPNLIILPLAFGKRQGREFIWNDLLSLETGSLQLANGRVIEKTLYNRRTRQDEPALFVALTFERREVLDSSNIKPMNLIGVDRGENIPAVIALTDPEGCPLSRFKDSLGNPTHILRIGESYKEKQRTIQAKKEVEQRRAGGYSRKYASKAKNLADDMVRNTARDLLYYAVTQDAMLIFENLSRGFGRQGKRTFMAERQYTRMEDWLTAKLAYEGLPSKTYLSKTLAQYTSKTCSNCGFTITSADYDRVLEKLKKTATGWMTTINGKELKVEGQITYYNRYKRQNVVKDLSVELDRLSEESVNNDISSWTKGRSGEALSLLKKRFSHRPVQEKFVCLNCGFETHADEQAALNIARSWLFLRSQEYKKYQTNKTTGNTDKRAFVETWQSFYRKKLKEVWKPAV

SEQ ID NO: 28571 - protein, 978 aa, synthetic construct
  REGION 1..978: note = engineered CasX variant
QEIKRINKIRRRLVKDSNTKKAGKTGPMKTLLVRVMTPDLRERLENLRKKPENIPQPISNTSRANLNKLLTDYTEMKKAILHVYWEEFQKDPVGLMSRVAQPASKKIDQNKLKPEMDEKGNLTTAGFACSQCGQPLFVYKLEQVSEKGKAYTNYFGRCNVAEHEKLILLAQLKPEKDSDEAVTYSLGKFGQRALDFYSIHVTKESTHPVKPLAQIAGNRYASGPVGKALSDACMGTIASFLSKYQDIIIEHQKVVKGNQKRLESLRELAGKENLEYPSVTLPPQPHTSEGLDAYNEVIARVRMWVNLNLWQKLKLSRDDAKPLLRLKGFPSFPLVERQANEVDWWDMVCNVKKLINEKKEDGKVFWQNLAGYKRQEALRPYLSSEEDRKKGKKFARYQLGDLLLHLEKKHGEDWGKVYDEAWERIDKKVEGLSKHIKLEEERRSEDAQSKAALTDWLRAKASFVIEGLKEADKDEFCRCELKLQKWYGDLRGKPFAIEAENSILDISGFSKQYNCAFIWQKDGVKKLNLYLIINYFKGGKLRFKKIKPEAFEANRFYTVINKKSGEIVPMEVNFNFDDPNLIILPLAFGKRQGREFIWNDLLSLETGSLKLANGRVIEKTLYNRRTRQDEPALFVALTFERREVLDSSNIKPMNLIGVDRGENIPAVIALTDPEGCPLSRFKDSLGNPTHILRIGESYKEKQRTIQAKKEVEQRRAGGYSRKYASKAKNLADDMVRNTARDLLYYAVTQDAMLIFENLSRGFGRQGKRTFMAERQYTRMEDWLTAKLAYEGLPSKTYLSKTLAQYTSKTCSNCGFTITSADYDRVLEKLKKTATGWMTTINGKELKVEGQITYYNRYKRQNVVKDLSVELDRLSEESVNNDISSWTKGRSGEALSLLKKRFSHRPVQEKFVCLNCGFETHADEQAALNIARSWLFLRSQEYKKYQTNKTTGNTDKRAFVETWQSFYRKKLKEVWKPAV

SEQ ID NO: 28572 - protein, 978 aa, synthetic construct
  REGION 1..978: note = engineered CasX variant
QEIKRINKIRRRLVKDSNTKKAGKTGPMKTLLVRVMTPDLRERLENLRKKPENIPQPISNTSRANLNKLLTDYTEMKKAILHVYWEEFQKDPVGLMSRVAQPASKKIDQNKLKPEMDEKGNLTTAGFACSQCGQPLFVYKLEQVSEKGKAYTNYFGRCNVAEHEKLILLAQLKPEKDSDEAVTYSLGKFGQRALDFYSIHVTKESTHPVKPLAQIAGNRYASGPVGKALSDACMGTIASFLSKYQDIIIEHQKVVKGNQKRLESLRELAGKENLEYPSVTLPPQPHTSEGVDAYNEVIARVRTWVNLNLWQKLKLSRDDAKPLLRLKGFPSFPLVERQANEVDWWDMVCNVKKLINEKKEDGKVFWQNLAGYKRQEALRPYLSSEEDRKKGKKFARYQLGDLLLHLEKKHGEDWGKVYDEAWERIDKKVEGLSKHIKLEEERRSEDAQSKAALTDWLRAKASFVIEGLKEADKDEFCRCELKLQKWYGDLRGKPFAIEAENSILDISGFSKQYNCAFIWQKDGVKKLNLYLIINYFKGGKLRFKKIKPEAFEANRFYTVINKKSGEIVPMEVNFNFDDPNLIILPLAFGKRQGREFIWNDLLSLETGSLKLANGRVIEKTLYNRRTRQDEPALFVALTFERREVLDSSNIKPMNLIGVDRGENIPAVIALTDPEGCPLSRFKDSLGNPTHILRIGESYKEKQRTIQAKKEVEQRRAGGYSRKYASKAKNLADDMVRNTARDLLYYAVTQDAMLIFENLSRGFGRQGKRTFMAERQYTRMEDWLTAKLAYEGLPSKTYLSKTLAQYTSKTCSNCGFTITSADYDRVLEKLKKTATGWMTTINGKELKVEGQITYYNRYKRQNVVKDLSVELDRLSEESVNNDISSWTKGRSGEALSLLKKRFSHRPVQEKFVCLNCGFETHADEQAALNIARSWLFLRSQEYKKYQTNKTTGNTDKRAFVETWQSFYRKKLKEVWKPAV

SEQ ID NO: 28573 - protein, 978 aa, synthetic construct
  REGION 1..978: note = engineered CasX variant
QEIKRINKIRRRLVKDSNTKKAGKTGPMKTLLVRVMTPDLRERLENLRKKPENIPQPISNTSRANLNKLLTDYTEMKKAILHVYWEEFQKDPVGLMSRVAQPASKKIDQNKLKPEMDEKGNLTTAGFACSQCGQPLFVYKLEQVSEKGKAYTNYFGRCNVAEHEKLILLAQLKPEKDSDEAVTYSLGKFGQRALDFYSIHVTKESTHPVKPLAQIAGNRYASGPVGKALSDACMGTIASFLSKYQDIIIEHQKVVKGNQKRLESLRELAGKENLEYPSVTLPPQPHTSEGVDAYNEVIARVRWWVNLNLWQKLKLSRDDAKPLLRLKGFPSFPLVERQANEVDWWDMVCNVKKLINEKKEDGKVFWQNLAGYKRQEALRPYLSSEEDRKKGKKFARYQLGDLLLHLEKKHGEDWGKVYDEAWERIDKKVEGLSKHIKLEEERRSEDAQSKAALTDWLRAKASFVIEGLKEADKDEFCRCELKLQKWYGDLRGKPFAIEAENSILDISGFSKQYNCAFIWQKDGVKKLNLYLIINYFKGGKLRFKKIKPEAFEANRFYTVINKKSGEIVPMEVNFNFDDPNLIILPLAFGKRQGREFIWNDLLSLETGSLKLANGRVIEKTLYNRRTRQDEPALFVALTFERREVLDSSNIKPMNLIGVDRGENIPAVIALTDPEGCPLSRFKDSLGNPTHILRIGESYKEKQRTIQAKKEVEQRRAGGYSRKYASKAKNLADDMVRNTARDLLYYAVTQDAMLIFENLSRGFGRQGKRTFMAERQYTRMEDWLTAKLAYEGLPSKTYLSKTLAQYTSKTCSNCGFTITSADYDRVLEKLKKTATGWMTTINGKELKVEGQITYYNRYKRQNVVKDLSVELDRLSEESVNNDISSWTKGRSGEALSLLKKRFSHRPVQEKFVCLNCGFETHADEQAALNIARSWLFLRSQEYKKYQTNKTTGNTDKRAFVETWQSFYRKKLKEVWKPAV

SEQ ID NO: 28574 - protein, 979 aa, synthetic construct
  REGION 1..979: note = engineered CasX variant
QEIKRINKIRRRLVKDSNTKKAGKTGPMKTLLVRVMTPDLRERLENLRKKPENIPQPISNTSRANLNKLLTDYTEMKKAILHVYWEEFQKDPVGLMSRVAQPASKKIDQNKLKPEMDEKGNLTTAGFACSQCGQPLFVYKLEQVSEKGKAYTNYFGRCNVAEHEKLILLAQLKPEKDSDEAVTYSLGKFGQRALDFYSIHVTKESTHPVKPLAQIAGNRYASGPVGKALSDACMGTIASFLSKYQDIIIEHQKVVKGNQKRLESLRELAGKENLEYPSVTLPPQPHTSEGVDAYNEVIARVRMWVNLNLWQKLKLSRDDAKPLLRLKGFPSFPLVERQQANEVDWWDMVCNVKKLINEKKEDGKVFWQNLAGYKRQEALRPYLSSEEDRKKGKKFARYQLGDLLLHLEKKHGEDWGKVYDEAWERIDKKVEGLSKHIKLEEERRSEDAQSKAALTDWLRAKASFVIEGLKEADKDEFCRCELKLQKWYGDLRGKPFAIEAENSILDISGFSKQYNCAFIWQKDGVKKLNLYLIINYFKGGKLRFKKIKPEAFEANRFYTVINKKSGEIVPMEVNFNFDDPNLIILPLAFGKRQGREFIWNDLLSLETGSLKLANGRVIEKTLYNRRTRQDEPALFVALTFERREVLDSSNIKPMNLIGVDRGENIPAVIALTDPEGCPLSRFKDSLGNPTHILRIGESYKEKQRTIQAKKEVEQRRAGGYSRKYASKAKNLADDMVRNTARDLLYYAVTQDAMLIFENLSRGFGRQGKRTFMAERQYTRMEDWLTAKLAYEGLPSKTYLSKTLAQYTSKTCSNCGFTITSADYDRVLEKLKKTATGWMTTINGKELKVEGQITYYNRYKRQNVVKDLSVELDRLSEESVNNDISSWTKGRSGEALSLLKKRFSHRPVQEKFVCLNCGFETHADEQAALNIARSWLFLRSQEYKKYQTNKTTGNTDKRAFVETWQSFYRKKLKEVWKPAV

SEQ ID NO: 28575 - protein, 979 aa, synthetic construct
  REGION 1..979: note = engineered CasX variant
QEIKRINKIRRRLVKDSNTKKAGKTGPMKTLLVRVMTPDLRERLENLRKKPENIPQPISNTSRANLNKLLTDYTEMKKAILHVYWEEFQKDPVGLMSRVAQPASKKIDQNKLKPEMDEKGNLTTAGFACSQCGQPLFVYKLEQVSEKGKAYTNYFGRCNVAEHEKLILLAQLKPEKDSDEAVTYSLGKFGQRALDFYSIHVTKESTHPVKPLAQIAGNRYASGPVGKALSDACMGTIASFLSKYQDIIIEHQKVVKGNQKRLESLRELAGKENLEYPSVTLPPQPHTSEGVDAYNEVIARVRMWVNLNLWQKLKLSRDDAKPLLRLKGFPSFPLVERQANAEVDWWDMVCNVKKLINEKKEDGKVFWQNLAGYKRQEALRPYLSSEEDRKKGKKFARYQLGDLLLHLEKKHGEDWGKVYDEAWERIDKKVEGLSKHIKLEEERRSEDAQSKAALTDWLRAKASFVIEGLKEADKDEFCRCELKLQKWYGDLRGKPFAIEAENSILDISGFSKQYNCAFIWQKDGVKKLNLYLIINYFKGGKLRFKKIKPEAFEANRFYTVINKKSGEIVPMEVNFNFDDPNLIILPLAFGKRQGREFIWNDLLSLETGSLKLANGRVIEKTLYNRRTRQDEPALFVALTFERREVLDSSNIKPMNLIGVDRGENIPAVIALTDPEGCPLSRFKDSLGNPTHILRIGESYKEKQRTIQAKKEVEQRRAGGYSRKYASKAKNLADDMVRNTARDLLYYAVTQDAMLIFENLSRGFGRQGKRTFMAERQYTRMEDWLTAKLAYEGLPSKTYLSKTLAQYTSKTCSNCGFTITSADYDRVLEKLKKTATGWMTTINGKELKVEGQITYYNRYKRQNVVKDLSVELDRLSEESVNNDISSWTKGRSGEALSLLKKRFSHRPVQEKFVCLNCGFETHADEQAALNIARSWLFLRSQEYKKYQTNKTTGNTDKRAFVETWQSFYRKKLKEVWKPAV

SEQ ID NO: 28576 - protein, 978 aa, synthetic construct
  REGION 1..978: note = engineered CasX variant
QEIKRINKIRRRLVKDSNTKKAGKTGPMKTLLVRVMTPDLRERLENLRKKPENIPQPISNTSRANLNKLLTDYTEMKKAILHVYWEEFQKDPVGLMSRVAQPASKKIDQNKLKPEMDEKGNLTTAGFACSQCGQPLFVYKLEQVSEKGKAYTNYFGRCNVAEHEKLILLAQLKPEKDSDEAVTYSLGKFGQRALDFYSIHVTKESTHPVKPLAQIAGNRYASGPVGKALSDACMGTIASFLSKYQDIIIEHQKVVKGNQKRLESLRELAGKENLEYPSVTLPPQPHTSEGVDAYNEVIARVRMWVNLNLWQKLKLSRDDAKPLLRLKGFPSFPLVERQANEVDWWDMVCNVKKLINEKKEDGKVFWQNLAGYKRQEALRPYLSSEEDRKKGKKFARTQLGDLLLHLEKKHGEDWGKVYDEAWERIDKKVEGLSKHIKLEEERRSEDAQSKAALTDWLRAKASFVIEGLKEADKDEFCRCELKLQKWYGDLRGKPFAIEAENSILDISGFSKQYNCAFIWQKDGVKKLNLYLIINYFKGGKLRFKKIKPEAFEANRFYTVINKKSGEIVPMEVNFNFDDPNLIILPLAFGKRQGREFIWNDLLSLETGSLKLANGRVIEKTLYNRRTRQDEPALFVALTFERREVLDSSNIKPMNLIGVDRGENIPAVIALTDPEGCPLSRFKDSLGNPTHILRIGESYKEKQRTIQAKKEVEQRRAGGYSRKYASKAKNLADDMVRNTARDLLYYAVTQDAMLIFENLSRGFGRQGKRTFMAERQYTRMEDWLTAKLAYEGLPSKTYLSKTLAQYTSKTCSNCGFTITSADYDRVLEKLKKTATGWMTTINGKELKVEGQITYYNRYKRQNVVKDLSVELDRLSEESVNNDISSWTKGRSGEALSLLKKRFSHRPVQEKFVCLNCGFETHADEQAALNIARSWLFLRSQEYKKYQTNKTTGNTDKRAFVETWQSFYRKKLKEVWKPAV

SEQ ID NO: 28577 - protein, 979 aa, synthetic construct
  REGION 1..979: note = engineered CasX variant
QEIKRINKIRRRLVKDSNTKKAGKTGPMKTLLVRVMTPDLRERLENLRKKPENIPQPISNTSRANLNKLLTDYTEMKKAILHVYWEEFQKDPVGLMSRVAQPASKKIDQNKLKPEMDEKGNLTTAGFACSQCGQPLFVYKLEQVSEKGKAYTNYFGRCNVAEHEKLILLAQLKPEKDSDEAVTYSLGKFGQRALDFYSIHVTKESTHPVKPLAQIAGNRYASGPVGKALSDACMGTIASFLSKYQDIIIEHQKVVKGNQKRLESLRELAGKENLEYPSVTLPPQPHTSEGVDAYNEVIARVRMWVNLNLWQKLKLSRDDAKPLLRLKGFPSFPLVERQANEVDWWDMVCNVKKLINEKKEDGKVFWQNLAGYKRQEALRPYLSSEEDRKKGKKFARYQLGDLLLHLEKKHEGEDWGKVYDEAWERIDKKVEGLSKHIKLEEERRSEDAQSKAALTDWLRAKASFVIEGLKEADKDEFCRCELKLQKWYGDLRGKPFAIEAENSILDISGFSKQYNCAFIWQKDGVKKLNLYLIINYFKGGKLRFKKIKPEAFEANRFYTVINKKSGEIVPMEVNFNFDDPNLIILPLAFGKRQGREFIWNDLLSLETGSLKLANGRVIEKTLYNRRTRQDEPALFVALTFERREVLDSSNIKPMNLIGVDRGENIPAVIALTDPEGCPLSRFKDSLGNPTHILRIGESYKEKQRTIQAKKEVEQRRAGGYSRKYASKAKNLADDMVRNTARDLLYYAVTQDAMLIFENLSRGFGRQGKRTFMAERQYTRMEDWLTAKLAYEGLPSKTYLSKTLAQYTSKTCSNCGFTITSADYDRVLEKLKKTATGWMTTINGKELKVEGQITYYNRYKRQNVVKDLSVELDRLSEESVNNDISSWTKGRSGEALSLLKKRFSHRPVQEKFVCLNCGFETHADEQAALNIARSWLFLRSQEYKKYQTNKTTGNTDKRAFVETWQSFYRKKLKEVWKPAV

SEQ ID NO: 28578 - protein, 978 aa, synthetic construct
  REGION 1..978: note = engineered CasX variant
QEIKRINKIRRRLVKDSNTKKAGKTGPMKTLLVRVMTPDLRERLENLRKKPENIPQPISNTSRANLNKLLTDYTEMKKAILHVYWEEFQKDPVGLMSRVAQPASKKIDQNKLKPEMDEKGNLTTAGFACSQCGQPLFVYKLEQVSEKGKAYTNYFGRCNVAEHEKLILLAQLKPEKDSDEAVTYSLGKFGQRALDFYSIHVTKESTHPVKPLAQIAGNRYASGPVGKALSDACMGTIASFLSKYQDIIIEHQKVVKGNQKRLESLRELAGKENLEYPSVTLPPQPHTSEGVDAYNEVIARVRMWVNLNLWQKLKLSRDDAKPLLRLKGFPSFPLVERQANEVDWWDMVCNVKKLINEKKEDGKVFWQNLAGYKRQEALRPYLSSEEDRKKGKKFARYQLGDLLLHLEKKHGEDWGKVYDEAWERIDKKVEGLSKHIKLEEERRSEDAQSKAALTDWLRAKASFVIEGLKEADKDEFCRCDLKLQKWYGDLRGKPFAIEAENSILDISGFSKQYNCAFIWQKDGVKKLNLYLIINYFKGGKLRFKKIKPEAFEANRFYTVINKKSGEIVPMEVNFNFDDPNLIILPLAFGKRQGREFIWNDLLSLETGSLKLANGRVIEKTLYNRRTRQDEPALFVALTFERREVLDSSNIKPMNLIGVDRGENIPAVIALTDPEGCPLSRFKDSLGNPTHILRIGESYKEKQRTIQAKKEVEQRRAGGYSRKYASKAKNLADDMVRNTARDLLYYAVTQDAMLIFENLSRGFGRQGKRTFMAERQYTRMEDWLTAKLAYEGLPSKTYLSKTLAQYTSKTCSNCGFTITSADYDRVLEKLKKTATGWMTTINGKELKVEGQITYYNRYKRQNVVKDLSVELDRLSEESVNNDISSWTKGRSGEALSLLKKRFSHRPVQEKFVCLNCGFETHADEQAALNIARSWLFLRSQEYKKYQTNKTTGNTDKRAFVETWQSFYRKKLKEVWKPAV

SEQ ID NO: 28579 - protein, 978 aa, synthetic construct
  REGION 1..978: note = engineered CasX variant
QEIKRINKIRRRLVKDSNTKKAGKTGPMKTLLVRVMTPDLRERLENLRKKPENIPQPISNTSRANLNKLLTDYTEMKKAILHVYWEEFQKDPVGLMSRVAQPASKKIDQNKLKPEMDEKGNLTTAGFACSQCGQPLFVYKLEQVSEKGKAYTNYFGRCNVAEHEKLILLAQLKPEKDSDEAVTYSLGKFGQRALDFYSIHVTKESTHPVKPLAQIAGNRYASGPVGKALSDACMGTIASFLSKYQDIIIEHQKVVKGNQKRLESLRELAGKENLEYPSVTLPPQPHTSEGVDAYNEVIARVRMWVNLNLWQKLKLSRDDAKPLLRLKGFPSFPLVERQANEVDWWDMVCNVKKLINEKKEDGKVFWQNLAGYKRQEALRPYLSSEEDRKKGKKFARYQLGDLLLHLEKKHGEDWGKVYDEAWERIDKKVEGLSKHIKLEEERRSEDAQSKAALTDWLRAKASFVIEGLKEADKDEFCRCELKLQKWYGDLRGKPFAIEAENSILDISGFSKQYNCAFIWQKDGVKKLNLYLIINYFKGGKLRFKKIKPEAFEANRFYTVINKKSGEIVPMEVNFNFDDPNLIILPLAFGKRFGREFIWNDLLSLETGSLKLANGRVIEKTLYNRRTRQDEPALFVALTFERREVLDSSNIKPMNLIGVDRGENIPAVIALTDPEGCPLSRFKDSLGNPTHILRIGESYKEKQRTIQAKKEVEQRRAGGYSRKYASKAKNLADDMVRNTARDLLYYAVTQDAMLIFENLSRGFGRQGKRTFMAERQYTRMEDWLTAKLAYEGLPSKTYLSKTLAQYTSKTCSNCGFTITSADYDRVLEKLKKTATGWMTTINGKELKVEGQITYYNRYKRQNVVKDLSVELDRLSEESVNNDISSWTKGRSGEALSLLKKRFSHRPVQEKFVCLNCGFETHADEQAALNIARSWLFLRSQEYKKYQTNKTTGNTDKRAFVETWQSFYRKKLKEVWKPAV

SEQ ID NO: 28580 - protein, 978 aa, synthetic construct
  REGION 1..978: note = engineered CasX variant
QEIKRINKIRRRLVKDSNTKKAGKTGPMKTLLVRVMTPDLRERLENLRKKPENIPQPISNTSRANLNKLLTDYTEMKKAILHVYWEEFQKDPVGLMSRVAQPASKKIDQNKLKPEMDEKGNLTTAGFACSQCGQPLFVYKLEQVSEKGKAYTNYFGRCNVAEHEKLILLAQLKPEKDSDEAVTYSLGKFGQRALDFYSIHVTKESTHPVKPLAQIAGNRYASGPVGKALSDACMGTIASFLSKYQDIIIEHQKVVKGNQKRLESLRELAGKENLEYPSVTLPPQPHTSEGVDAYNEVIARVRMWVNLNLWQKLKLSRDDAKPLLRLKGFPSFPLVERQANEVDWWDMVCNVKKLINEKKEDGKVFWQNLAGYKRQEALRPYLSSEEDRKKGKKFARYQLGDLLLHLEKKHGEDWGKVYDEAWERIDKKVEGLSKHIKLEEERRSEDAQSKAALTDWLRAKASFVIEGLKEADKDEFCRCELKLQKWYGDLRGKPFAIEAENSILDISGFSKQYNCAFIWQKDGVKKLNLYLIINYFKGGKLRFKKIKPEAFEANRFYTVINKKSGEIVPMEVNFNFDDPNLIILPLAFGKRVGREFIWNDLLSLETGSLKLANGRVIEKTLYNRRTRQDEPALFVALTFERREVLDSSNIKPMNLIGVDRGENIPAVIALTDPEGCPLSRFKDSLGNPTHILRIGESYKEKQRTIQAKKEVEQRRAGGYSRKYASKAKNLADDMVRNTARDLLYYAVTQDAMLIFENLSRGFGRQGKRTFMAERQYTRMEDWLTAKLAYEGLPSKTYLSKTLAQYTSKTCSNCGFTITSADYDRVLEKLKKTATGWMTTINGKELKVEGQITYYNRYKRQNVVKDLSVELDRLSEESVNNDISSWTKGRSGEALSLLKKRFSHRPVQEKFVCLNCGFETHADEQAALNIARSWLFLRSQEYKKYQTNKTTGNTDKRAFVETWQSFYRKKLKEVWKPAV

SEQ ID NO: 28581 - protein, 979 aa, synthetic construct
  REGION 1..979: note = engineered CasX variant
QEIKRINKIRRRLVKDSNTKKAGKTGPMKTLLVRVMTPDLRERLENLRKKPENIPQPISNTSRANLNKLLTDYTEMKKAILHVYWEEFQKDPVGLMSRVAQPASKKIDQNKLKPEMDEKGNLTTAGFACSQCGQPLFVYKLEQVSEKGKAYTNYFGRCNVAEHEKLILLAQLKPEKDSDEAVTYSLGKFGQRALDFYSIHVTKESTHPVKPLAQIAGNRYASGPVGKALSDACMGTIASFLSKYQDIIIEHQKVVKGNQKRLESLRELAGKENLEYPSVTLPPQPHTSEGVDAYNEVIARVRMWVNLNLWQKLKLSRDDAKPLLRLKGFPSFPLVERQANEVDWWDMVCNVKKLINEKKEDGKVFWQNLAGYKRQEALRPYLSSEEDRKKGKKFARYQLGDLLLHLEKKHGEDWGKVYDEAWERIDKKVEGLSKHIKLEEERRSEDAQSKAALTDWLRAKASFVIEGLKEADKDEFCRCELKLQKWYGDLRGKPFAIEAENSILDISGFSKQYNCAFIWQKDGVKKLNLYLIINYFKGGKLRFKKIKPEAFEANRFYTVINKKSGEIVPMEVNFNFDDPNLIILPLAFGKRQGREFIWNDLLSLETGSLKLANGRVIEKTLYNRRTRQDEPALFVALTFERREVLDSSNIKTPMNLIGVDRGENIPAVIALTDPEGCPLSRFKDSLGNPTHILRIGESYKEKQRTIQAKKEVEQRRAGGYSRKYASKAKNLADDMVRNTARDLLYYAVTQDAMLIFENLSRGFGRQGKRTFMAERQYTRMEDWLTAKLAYEGLPSKTYLSKTLAQYTSKTCSNCGFTITSADYDRVLEKLKKTATGWMTTINGKELKVEGQITYYNRYKRQNVVKDLSVELDRLSEESVNNDISSWTKGRSGEALSLLKKRFSHRPVQEKFVCLNCGFETHADEQAALNIARSWLFLRSQEYKKYQTNKTTGNTDKRAFVETWQSFYRKKLKEVWKPAV

SEQ ID NO: 28582 - protein, 979 aa, synthetic construct
  REGION 1..979: note = engineered CasX variant
QEIKRINKIRRRLVKDSNTKKAGKTGPMKTLLVRVMTPDLRERLENLRKKPENIPQPISNTSRANLNKLLTDYTEMKKAILHVYWEEFQKDPVGLMSRVAQPASKKIDQNKLKPEMDEKGNLTTAGFACSQCGQPLFVYKLEQVSEKGKAYTNYFGRCNVAEHEKLILLAQLKPEKDSDEAVTYSLGKFGQRALDFYSIHVTKESTHPVKPLAQIAGNRYASGPVGKALSDACMGTIASFLSKYQDIIIEHQKVVKGNQKRLESLRELAGKENLEYPSVTLPPQPHTSEGVDAYNEVIARVRMWVNLNLWQKLKLSRDDAKPLLRLKGFPSFPLVERQANEVDWWDMVCNVKKLINEKKEDGKVFWQNLAGYKRQEALRPYLSSEEDRKKGKKFARYQLGDLLLHLEKKHGEDWGKVYDEAWERIDKKVEGLSKHIKLEEERRSEDAQSKAALTDWLRAKASFVIEGLKEADKDEFCRCELKLQKWYGDLRGKPFAIEAENSILDISGFSKQYNCAFIWQKDGVKKLNLYLIINYFKGGKLRFKKIKPEAFEANRFYTVINKKSGEIVPMEVNFNFDDPNLIILPLAFGKRQGREFIWNDLLSLETGSLKLANGRVIEKTLYNRRTRQDEPALFVALTFERREVLDSSNIKPMSNLIGVDRGENIPAVIALTDPEGCPLSRFKDSLGNPTHILRIGESYKEKQRTIQAKKEVEQRRAGGYSRKYASKAKNLADDMVRNTARDLLYYAVTQDAMLIFENLSRGFGRQGKRTFMAERQYTRMEDWLTAKLAYEGLPSKTYLSKTLAQYTSKTCSNCGFTITSADYDRVLEKLKKTATGWMTTINGKELKVEGQITYYNRYKRQNVVKDLSVELDRLSEESVNNDISSWTKGRSGEALSLLKKRFSHRPVQEKFVCLNCGFETHADEQAALNIARSWLFLRSQEYKKYQTNKTTGNTDKRAFVETWQSFYRKKLKEVWKPAV

SEQ ID NO: 28583 - protein, 978 aa, synthetic construct
  REGION 1..978: note = engineered CasX variant
QEIKRINKIRRRLVKDSNTKKAGKTGPMKTLLVRVMTPDLRERLENLRKKPENIPQPISNTSRANLNKLLTDYTEMKKAILHVYWEEFQKDPVGLMSRVAQPASKKIDQNKLKPEMDEKGNLTTAGFACSQCGQPLFVYKLEQVSEKGKAYTNYFGRCNVAEHEKLILLAQLKPEKDSDEAVTYSLGKFGQRALDFYSIHVTKESTHPVKPLAQIAGNRYASGPVGKALSDACMGTIASFLSKYQDIIIEHQKVVKGNQKRLESLRELAGKENLEYPSVTLPPQPHTSEGVDAYNEVIARVRMWVNLNLWQKLKLSRDDAKPLLRLKGFPSFPLVERQANEVDWWDMVCNVKKLINEKKEDGKVFWQNLAGYKRQEALRPYLSSEEDRKKGKKFARYQLGDLLLHLEKKHGEDWGKVYDEAWERIDKKVEGLSKHIKLEEERRSEDAQSKAALTDWLRAKASFVIEGLKEADKDEFCRCELKLQKWYGDLRGKPFAIEAENSILDISGFSKQYNCAFIWQKDGVKKLNLYLIINYFKGGKLRFKKIKPEAFEANRFYTVINKKSGEIVPMEVNFNFDDPNLIILPLAFGKRQGREFIWNDLLSLETGSLKLANGRVIEKTLYNRRTRQDEPALFVALTFERREVLDSSNIKPMNLIGVDRGENIPAVIALTDPEGCPLSRFKDSLGNPTHILRIRESYKEKQRTIQAKKEVEQRRAGGYSRKYASKAKNLADDMVRNTARDLLYYAVTQDAMLIFENLSRGFGRQGKRTFMAERQYTRMEDWLTAKLAYEGLPSKTYLSKTLAQYTSKTCSNCGFTITSADYDRVLEKLKKTATGWMTTINGKELKVEGQITYYNRYKRQNVVKDLSVELDRLSEESVNNDISSWTKGRSGEALSLLKKRFSHRPVQEKFVCLNCGFETHADEQAALNIARSWLFLRSQEYKKYQTNKTTGNTDKRAFVETWQSFYRKKLKEVWKPAV

SEQ ID NO: 28584 - protein, 978 aa, synthetic construct
  REGION 1..978: note = engineered CasX variant
QEIKRINKIRRRLVKDSNTKKAGKTGPMKTLLVRVMTPDLRERLENLRKKPENIPQPISNTSRANLNKLLTDYTEMKKAILHVYWEEFQKDPVGLMSRVAQPASKKIDQNKLKPEMDEKGNLTTAGFACSQCGQPLFVYKLEQVSEKGKAYTNYFGRCNVAEHEKLILLAQLKPEKDSDEAVTYSLGKFGQRALDFYSIHVTKESTHPVKPLAQIAGNRYASGPVGKALSDACMGTIASFLSKYQDIIIEHQKVVKGNQKRLESLRELAGKENLEYPSVTLPPQPHTSEGVDAYNEVIARVRMWVNLNLWQKLKLSRDDAKPLLRLKGFPSFPLVERQANEVDWWDMVCNVKKLINEKKEDGKVFWQNLAGYKRQEALRPYLSSEEDRKKGKKFARYQLGDLLLHLEKKHGEDWGKVYDEAWERIDKKVEGLSKHIKLEEERRSEDAQSKAALTDWLRAKASFVIEGLKEADKDEFCRCELKLQKWYGDLRGKPFAIEAENSILDISGFSKQYNCAFIWQKDGVKKLNLYLIINYFKGGKLRFKKIKPEAFEANRFYTVINKKSGEIVPMEVNFNFDDPNLIILPLAFGKRQGREFIWNDLLSLETGSLKLANGRVIEKTLYNRRTRQDEPALFVALTFERREVLDSSNIKPMNLIGVDRGENIPAVIALTDPEGCPLSRFKDSLGNPTHILRIGESYKEKQRTIQAKKEVEQRRAGGYSRKYASKAKNLADDMVRNTARDLLYYAVTQDAMLIFENLSRGFGRQGKRTFSAERQYTRMEDWLTAKLAYEGLPSKTYLSKTLAQYTSKTCSNCGFTITSADYDRVLEKLKKTATGWMTTINGKELKVEGQITYYNRYKRQNVVKDLSVELDRLSEESVNNDISSWTKGRSGEALSLLKKRFSHRPVQEKFVCLNCGFETHADEQAALNIARSWLFLRSQEYKKYQTNKTTGNTDKRAFVETWQSFYRKKLKEVWKPAV

SEQ ID NO: 28585 - protein, 978 aa, synthetic construct
  REGION 1..978: note = engineered CasX variant
QEIKRINKIRRRLVKDSNTKKAGKTGPMKTLLVRVMTPDLRERLENLRKKPENIPQPISNTSRANLNKLLTDYTEMKKAILHVYWEEFQKDPVGLMSRVAQPASKKIDQNKLKPEMDEKGNLTTAGFACSQCGQPLFVYKLEQVSEKGKAYTNYFGRCNVAEHEKLILLAQLKPEKDSDEAVTYSLGKFGQRALDFYSIHVTKESTHPVKPLAQIAGNRYASGPVGKALSDACMGTIASFLSKYQDIIIEHQKVVKGNQKRLESLRELAGKENLEYPSVTLPPQPHTSEGVDAYNEVIARVRMWVNLNLWQKLKLSRDDAKPLLRLKGFPSFPLVERQANEVDWWDMVCNVKKLINEKKEDGKVFWQNLAGYKRQEALRPYLSSEEDRKKGKKFARYQLGDLLLHLEKKHGEDWGKVYDEAWERIDKKVEGLSKHIKLEEERRSEDAQSKAALTDWLRAKASFVIEGLKEADKDEFCRCELKLQKWYGDLRGKPFAIEAENSILDISGFSKQYNCAFIWQKDGVKKLNLYLIINYFKGGKLRFKKIKPEAFEANRFYTVINKKSGEIVPMEVNFNFDDPNLIILPLAFGKRQGREFIWNDLLSLETGSLKLANGRVIEKTLYNRRTRQDEPALFVALTFERREVLDSSNIKPMNLIGVDRGENIPAVIALTDPEGCPLSRFKDSLGNPTHILRIGESYKEKQRTIQAKKEVEQRRAGGYSRKYASKAKNLADDMVRNTARDLLYYAVTQDAMLIFENLSRGFGRQGKRTFMAERQYTRMEDWLTAKLAYEGLPSKTYLSKTLAQYTSKTCSNCGFTITSADYDRVLEKLKKTATGWMTTINGKELKVEGQITYYNRYKRQNVVKDLSVELDRLSEESVNNDISSWDKGRSGEALSLLKKRFSHRPVQEKFVCLNCGFETHADEQAALNIARSWLFLRSQEYKKYQTNKTTGNTDKRAFVETWQSFYRKKLKEVWKPAV

SEQ ID NO: 28586 - protein, 978 aa, synthetic construct
  REGION 1..978: note = engineered CasX variant
QEIKRINKIRRRLVKDSNTKKAGKTGPMKTLLVRVMTPDLRERLENLRKKPENIPQPISNTSRANLNKLLTDYTEMKKAILHVYWEEFQVDPVGLMSRVAQPASKKIDQNKLKPEMDEKGNLTTAGFACSQCGQPLFVYKLEQVSEKGKAYTNYFGRCNVAEHEKLILLAQLKPEKDSDEAVTYSLGKFGQRALDFYSIHVTKESTHPVKPLAQIAGNRYASGPVGKALSDACMGTIASFLSKYQDIIIEHQKVVKGNQKRLESLRELAGKENLEYPSVTLPPQPHTSEGVDAYNEVIARVRMWVNLNLWQKLKLSRDDAKPLLRLKGFPSFPLVERQANEVDWWDMVCNVKKLINEKKEDGKVFWQNLAGYKRQEALRPYLSSEEDRKKGKKFARYQLGDLLLHLEKKHGEDWGKVYDEAWERIDKKVEGLSKHIKLEEERRSEDAQSKAALTDWLRAKASFVIEGLKEADKDEFCRCELKLQKWYGDLRGKPFAIEAENSILDISGFSKQYNCAFIWQKDGVKKLNLYLIINYFKGGKLRFKKIKPEAFEANRFYTVINKKSGEIVPMEVNFNFDDPNLIILPLAFGKRQGREFIWNDLLSLETGSLKLANGRVIEKTLYNRRTRQDEPALFVALTFERREVLDSSNIKPMNLIGVDRGENIPAVIALTDPEGCPLSRFKDSLGNPTHILRIGESYKEKQRTIQAKKEVEQRRAGGYSRKYASKAKNLADDMVRNTARDLLYYAVTQDAMLIFENLSRGFGRQGKRTFMAERQYTRMEDWLTAKLAYEGLPSKTYLSKTLAQYTSKTCSNCGFTITSADYDRVLEKLKKTATGWMTTINGKELKVEGQITYYNRYKRQNVVKDLSVELDRLSEESVNNDISSWTKGRSGEALSLLKKRFSHRPVQEKFVCLNCGFETHADEQAALNIARSWLFLRSQEYKKYQTNKTTGNTDKRAFVETWQSFYRKKLKEVWKPAV

SEQ ID NO: 28587 - protein, 978 aa, synthetic construct
  REGION 1..978: note = engineered CasX variant
QEIKRLNKIRRRLVKDSNTKKAGKTGPMKTLLVRVMTPDLRERLENLRKKPENIPQPISNTSRANLNKLLTDYTEMKKAILHVYWEEFQKDPVGLMSRVAQPASKKIDQNKLKPEMDEKGNLTTAGFACSQCGQPLFVYKLEQVSEKGKAYTNYFGRCNVAEHEKLILLAQLKPEKDSDEAVTYSLGKFGQRALDFYSIHVTKESTHPVKPLAQIAGNRYASGPVGKALSDACMGTIASFLSKYQDIIIEHQKVVKGNQKRLESLRELAGKENLEYPSVTLPPQPHTSEGVDAYNEVIARVRMWVNLNLWQKLKLSRDDAKPLLRLKGFPSFPLVERQANEVDWWDMVCNVKKLINEKKEDGKVFWQNLAGYKRQEALRPYLSSEEDRKKGKKFARYQLGDLLLHLEKKHGEDWGKVYDEAWERIDKKVEGLSKHIKLEEERRSEDAQSKAALTDWLRAKASFVIEGLKEADKDEFCRCELKLQKWYGDLRGKPFAIEAENSILDISGFSKQYNCAFIWQKDGVKKLNLYLIINYFKGGKLRFKKIKPEAFEANRFYTVINKKSGEIVPMEVNFNFDDPNLIILPLAFGKRQGREFIWNDLLSLETGSLKLANGRVIEKTLYNRRTRQDEPALFVALTFERREVLDSSNIKPMNLIGVDRGENIPAVIALTDPEGCPLSRFKDSLGNPTHILRIGESYKEKQRTIQAKKEVEQRRAGGYSRKYASKAKNLADDMVRNTARDLLYYAVTQDAMLIFENLSRGFGRQGKRTFMAERQYTRMEDWLTAKLAYEGLPSKTYLSKTLAQYTSKTCSNCGFTITSADYDRVLEKLKKTATGWMTTINGKELKVEGQITYYNRYKRQNVVKDLSVELDRLSEESVNNDISSWTKGRSGEALSLLKKRFSHRPVQEKFVCLNCGFETHADEQAALNIARSWLFLRSQEYKKYQTNKTTGNTDKRAFVETWQSFYRKKLKEVWKPAV

SEQ ID NO: 28588 - protein, 978 aa, synthetic construct
  REGION 1..978: note = engineered CasX variant
QEIKRINKIRRRLVKDSNTKKAGKTGPMKTLLVRVMTPDLRERLENLRKKPENIPQPISNTSRANLNKLLTDYTEMKKAILHVYWEEFQKDPVGLMSRVAQPASKKIDQNKLKPEMDEKGNLTTAGFACSQCGQPLFVYKLEQVSEKGKAYTNYVGRCNVAEHEKLILLAQLKPEKDSDEAVTYSLGKFGQRALDFYSIHVTKESTHPVKPLAQIAGNRYASGPVGKALSDACMGTIASFLSKYQDIIIEHQKVVKGNQKRLESLRELAGKENLEYPSVTLPPQPHTSEGVDAYNEVIARVRMWVNLNLWQKLKLSRDDAKPLLRLKGFPSFPLVERQANEVDWWDMVCNVKKLINEKKEDGKVFWQNLAGYKRQEALRPYLSSEEDRKKGKKFARYQLGDLLLHLEKKHGEDWGKVYDEAWERIDKKVEGLSKHIKLEEERRSEDAQSKAALTDWLRAKASFVIEGLKEADKDEFCRCELKLQKWYGDLRGKPFAIEAENSILDISGFSKQYNCAFIWQKDGVKKLNLYLIINYFKGGKLRFKKIKPEAFEANRFYTVINKKSGEIVPMEVNFNFDDPNLIILPLAFGKRQGREFIWNDLLSLETGSLKLANGRVIEKTLYNRRTRQDEPALFVALTFERREVLDSSNIKPMNLIGVDRGENIPAVIALTDPEGCPLSRFKDSLGNPTHILRIGESYKEKQRTIQAKKEVEQRRAGGYSRKYASKAKNLADDMVRNTARDLLYYAVTQDAMLIFENLSRGFGRQGKRTFMAERQYTRMEDWLTAKLAYEGLPSKTYLSKTLAQYTSKTCSNCGFTITSADYDRVLEKLKKTATGWMTTINGKELKVEGQITYYNRYKRQNVVKDLSVELDRLSEESVNNDISSWTKGRSGEALSLLKKRFSHRPVQEKFVCLNCGFETHADEQAALNIARSWLFLRSQEYKKYQTNKTTGNTDKRAFVETWQSFYRKKLKEVWKPAV

SEQ ID NO: 28589 - protein, 978 aa, synthetic construct
  REGION 1..978: note = engineered CasX variant
QEIKRINKIRRRLVKDSNTKKAGKTGPMKTLLVRVMTPDLRERLENLRKKPENIPQPISNTSRANLNKLLTDYTEMKKAILHVYWEEFQKDPVGLMSRVAQPASKKIDQNKLKPEMDEKGNLTTAGFACSQCGQPLFVYKLEQVSEKGKAYTNYFGRCNVAEHEKLILLAQLKPEKDSDEAVTYSLGKFGQRALDFYSIHVTKESTHPVKPLAQIAGNRYASGPVGKALSDACMGTIASFLSKYQDIIIEHQKVVKGNQKRLESLRELAGKENLEYPSVTLPPQPHTSEGVDAYNEVIARVRMWVNLNLWQKLKLSRDDAKPLLRLKGFPSFPLVERQANEVDWWDMVCNVKKLINEKKEDGKVFWQNLAGYKRQEALRPYLSSEEDRKKGKKFARYQLGDLLLHLEKKHGEDWGKVYDEAWERIDKKVEGLSKHIKLEEERRSEDAQSKAALTDWLRAKASFVIEGLKEADKDEFCRCELKLQKWYGDLRGKPFAIEAENSILDISGFSKQYNCAFIWQKDGVKKLNLYLIINYFKGGKLRFKKIKPEAFEANRFYTVINKKSGEIVPMEVNFNFDDPNLIILPLAFGKRQGREFIWNDLLSLETGSLKLANGRVIEKTLYNRRTRQDEPALFVALTFERREVLDSSNIKPMNLIGVDRGENIPAVIALTDPEGCPLSRFKDSLGNPTHILRIGESYKEKQRTIQAKKEVEQRRAGGYSRKYASKAKNLADDMVRNTARDLLYYAVTQDAMLIFENLSRGFGRQGKRTFMAERQYTRMEDWLTAKLAYEGLASKTYLSKTLAQYTSKTCSNCGFTITSADYDRVLEKLKKTATGWMTTINGKELKVEGQITYYNRYKRQNVVKDLSVELDRLSEESVNNDISSWTKGRSGEALSLLKKRFSHRPVQEKFVCLNCGFETHADEQAALNIARSWLFLRSQEYKKYQTNKTTGNTDKRAFVETWQSFYRKKLKEVWKPAV

SEQ ID NO: 28590 - protein, 978 aa, synthetic construct
  REGION 1..978: note = engineered CasX variant
QEIKRINKIRRRLVKDSNTKKAGKTGPMKTLLVRVMTPDLRERLENLRKKPENIPQPISNTSRANLNKLLTDYTEMKKAILHVYWEEFQKDPVGLMSRVAQPASKKIDQNKLKPEMDEKGNLTTAGFACSQCGQPLFVYKLEQVSEKGKAYTNYFGRCNVAEHEKLILLAQLKPEKDSDEAVTYSLGKFGQRALDFYSIHVTKESTHPVKPLAQIAGNRYASGPVGKALSDACMGTIASFLSKYQDIIIEHQKVVKGNQKRLESLRELAGKENLEYPSVTLPPQPHTSEGVDAYNEVIARVRMWVNLNLWQKLKLSRDDAKPLLRLKGFPSFPLVERQANEVDWWDMVCNVKKLINEKKEDGKVFWQNLAGYKRQEALRPYLSSEEDRKKGKKFARYQLGDLLLHLEKKHGEDWGKVYDEAWERIDKKVEGLSKHIKLEEERRSEDAQSKAALTDWLRAKASFVIEGLKEADKDEFCRCELKLQKWYGDLRGKPFAIEAENSILDISGFSKQYNCAFIWQKDGVKKLNLYLIINYFKGGKLRFKKIKPEAFEANRFYTVINKKSGEIVPMEVNFNFDDPNLIILPLAFGKRQGREFIWNDLLSLETGSLKLANGRVIEKTLYNRRTRQDEPALFVALTFERREVLDSSNIKPMNLIGVDRGENIPAVIALTDPEGCPLSRFKDSLGNPTHILRIGESYKEKQRTIQAKKEVEQRRAGGYSRKYASKAKNLADDMVRNTARDLLYYAVTQDAMLIFENLSRGFGRQGKRTFMAERQYTRMEDWLTAKLAYEGLPSKVYLSKTLAQYTSKTCSNCGFTITSADYDRVLEKLKKTATGWMTTINGKELKVEGQITYYNRYKRQNVVKDLSVELDRLSEESVNNDISSWTKGRSGEALSLLKKRFSHRPVQEKFVCLNCGFETHADEQAALNIARSWLFLRSQEYKKYQTNKTTGNTDKRAFVETWQSFYRKKLKEVWKPAV

SEQ ID NO: 28591 - protein, 979 aa, synthetic construct
  REGION 1..979: note = engineered CasX variant
QEIKRINKIRRRLVKDSNTKKAGKTGPMKTLLVRVMTPDLRERLENLRKKPENIPQPISNTSRANLNKLLTDYTEMKKAILHVYWEEFQKDPVGLMSRVAQPASKKIDQNKLKPEMDEKGNLTTAGFACSQCGQPLFVYKLEQVSEKGKAYTNYFGRCNVAEHEKLILLAQLKPEKDSDEAVTYSLGKFGQRALDFYSIHVTKESTHPVKPLAQIAGNRYASGPVGKALSDACMGTIASFLSKYQDIIIEHQKVVKGNQKRLESLRELAGKENLEYPSVTLPPQPHTSEGVDAYNEVIARVRMWVNLNLWQKLKLSRDDAKPLLRLKGFPSFPLVERQANEVDWWDMVCNVKKLINEKKEDGKVFWQNLAGYKRQEALRPYLSSEEDRKKGKKFARYQLGDLLLHLEKKHGEDWGKVYDEAWERIDKKVEGLSKHIKLEEERRSEDAQSKAALTDWLRAKASFVIEGLKEADKDEFCRCELKLQKWYGDLRGKPFAIEAENSILDISGFSKQYNCAFIWQKDGVKKLNLYLIINYFKGGKLRFKKIKPEAFEANRFYTVINKKSGEIVPMEVNFNFDDPNLIILPLAFGKRQGREFIWNDLLSLETGSLKLANGRVIEKTLYNRRTRQDEPALFVALTFERREVLDSSNIKPMNLIGVDRGENIPAVIALTDPEGCPLSRFKDSLGNPTHILRIGESYKEKQRTIQAKKEVEQRRAGGYSRKYASKAKNLADDMVRNTARDLLYYAVTQDAMLIFENLSRGFGRQGKRTFMAERQYTRMEDWLTAKLAYEGPLPSKTYLSKTLAQYTSKTCSNCGFTITSADYDRVLEKLKKTATGWMTTINGKELKVEGQITYYNRYKRQNVVKDLSVELDRLSEESVNNDISSWTKGRSGEALSLLKKRFSHRPVQEKFVCLNCGFETHADEQAALNIARSWLFLRSQEYKKYQTNKTTGNTDKRAFVETWQSFYRKKLKEVWKPAV

SEQ ID NO: 28592 - protein, 979 aa, synthetic construct
  REGION 1..979: note = engineered CasX variant
QEIKRINKIRRRLVKDSNTKKAGKTGPMKTLLVRVMTPDLRERLENLRKKPENIPQPISNTSRANLNKLLTDYTEMKKAILHVYWEEFQKDPVGLMSRVAQPASKKIDQNKLKPEMDEKGNLTTAGFACSQCGQPLFVYKLEQVSEKGKAYTNYFGRCNVAEHEKLILLAQLKPEKDSDEAVTYSLGKFGQRALDFYSIHVTKESTHPVKPLAQIAGNRYASGPVGKALSDACMGTIASFLSKYQDIIIEHQKVVKGNQKRLESLRELAGKENLEYPSVTLPPQPHTSEGVDAYNEVIARVRMWVNLNLWQKLKLSRDDAKPLLRLKGFPSFPLVERQANEVDWWDMVCNVKKLINEKKEDGKVFWQNLAGYKRQEALRPYLSSEEDVRKKGKKFARYQLGDLLLHLEKKHGEDWGKVYDEAWERIDKKVEGLSKHIKLEEERRSEDAQSKAALTDWLRAKASFVIEGLKEADKDEFCRCELKLQKWYGDLRGKPFAIEAENSILDISGFSKQYNCAFIWQKDGVKKLNLYLIINYFKGGKLRFKKIKPEAFEANRFYTVINKKSGEIVPMEVNFNFDDPNLIILPLAFGKRQGREFIWNDLLSLETGSLKLANGRVIEKTLYNRRTRQDEPALFVALTFERREVLDSSNIKPMNLIGVDRGENIPAVIALTDPEGCPLSRFKDSLGNPTHILRIGESYKEKQRTIQAKKEVEQRRAGGYSRKYASKAKNLADDMVRNTARDLLYYAVTQDAMLIFENLSRGFGRQGKRTFMAERQYTRMEDWLTAKLAYEGLPSKTYLSKTLAQYTSKTCSNCGFTITSADYDRVLEKLKKTATGWMTTINGKELKVEGQITYYNRYKRQNVVKDLSVELDRLSEESVNNDISSWTKGRSGEALSLLKKRFSHRPVQEKFVCLNCGFETHADEQAALNIARSWLFLRSQEYKKYQTNKTTGNTDKRAFVETWQSFYRKKLKEVWKPAV

SEQ ID NO: 28593 - protein, 978 aa, synthetic construct
  REGION 1..978: note = engineered CasX variant
QEIKRINKIRRRLVKDSNTKKAGKTGPMKTLLVRVMTPDLRERLENLRKKPENIPQPISNTSRANLNKLLTDYTEMKKAILHVYWEEFQKDPVGLMSRVAQPASKKIDQNKLKPEMDEKGNLTTAGFACSQCGQPLFVYKLEQVSEKGKAYTNYFGRCNVAEHEKLILLAQLKPEKDSDEAVTYSLGKFGQRALDFYSIHVTKESTHPVKPLAQIAGNRYASGPVGKALSDACMGTIASFLSKYQDIIIEHQKVVKGNQKRLESLRELAGKENLEYPSVTLPPQPHTSEGVDAYNEVIARVRMWVNLNLWQKLKLSRDDAKPLLRLKGFPSFPLVERQANEVDWWDMVCNVKKLINEKKEDGKVFWQNLAGYKRQEALRPYLSSEEDRKKGKKFARYQLGDLLLHLEKKHGEDWGKVYDEAWERIDKKVEGLSKHIKLEEERRSEDAQSKAALTDWLRAKASFVIEGLKEADKDEFCRCELKLQKWYGDLRGKPFAIEAENSILDISGFSKQYNCAFIWQKDGVKKLNLYLIINYFKGGKLRFKKIKPEAFEANRFYTVINKKSGEIVPMEVNFNFDDPNLIILPLAFGKRQGREFIWNDLLSLETGSLKLANGRVIEKTLYNRRTRQDEPALFVALTFERREVLDSSNIKPMNLIGVDRGENIPAVIALTDPEGCPLSRFKDSLGNPTHILRIGESYKEKQRTIQAKKEVEQRRAGGYSRKYASKAKNLADDMVRNTARDLLYYAVTQDAMLIFENLSRGFGRQGKRTFMAERQYTRMEDWLTAKLAYEGLPSKTYLSKTLAQYTSKTCSNCGFTITSADYDRMLEKLKKTATGWMTTINGKELKVEGQITYYNRYKRQNVVKDLSVELDRLSEESVNNDISSWTKGRSGEALSLLKKRFSHRPVQEKFVCLNCGFETHADEQAALNIARSWLFLRSQEYKKYQTNKTTGNTDKRAFVETWQSFYRKKLKEVWKPAV

SEQ ID NO: 28594 - protein, 978 aa, synthetic construct
  REGION 1..978: note = engineered CasX variant
QEIKRINKIRRRLVKDSNTKKAGKTGPMKTLLVRVMTPDLRERLENLRKKPENIPQPISNTSRANLNKLLTDYTEMKKAILHVYWEEFQKDPVGLMSRVAQPASKKIDQNKLKPEMDEKGNLTTAGFACSQCGQPLFVYKLEQVSEKGKAYTNYFGRCNVAEHEKLILLAQLKPEKDSDEAVTYSLGKFGQRALDFYSIHVTKESTHPVKPLAQIAGNRYASGPVGKALSDACMGTIASFLSKYQDIIIEHQKVVKGNQKRLESLRELAGKENLEYPSVTLPPQPHTSEGVDAYNEVIARVRMWVNLNLWQKLKLSRDDAKPLLRLKGFPSFPLVERQANEVDWWDMVCNVKKLINEKKEDGKVFWQNLAGYKRQEALRPYLSSEEDRKKGKKFARYQLGDLLLHLEKKHGEDWGKVYDEAWERIDKKVEGLSKHIKLEEERRSEDAQSKAALTDWLRAKASFVIEGLKEADKDEFCRCELKLQKWYGDLRGKPFAIEAENSILDISGFSKQYNCAFIWQKDGVKKLNLYLIINYFKGGKLRFKKIKPEAFEANRFYTVINKKSGEIVPMEVNFNFDDPNLIILPLAFGKRQGREFIWNDLLSLETGSLKLANGRVIEKTLYNRRTRQDEPALFVALTFERREVLDSSNIKPMNLIGVDRGENIPAVIALTDPEGCPLSRFKDSLGNPTHILRIGESYKEKQRTIQAKKEVEQRRAGGYSRKYASKAKNLADDMVRNTARDLLYYAVTQDAMLIFENLSRGFGRQGKRTFMAERQYTRMEDWLTAKLAYEGLPSKTYLSKTLAQYTSKTCSNCGFTITSADYDRVLEKLKKTATGWMTTINGKELKVEGQITYYNRYKRQNVVKDLSVELDRLSEESVNNDISSWTKGRQGEALSLLKKRFSHRPVQEKFVCLNCGFETHADEQAALNIARSWLFLRSQEYKKYQTNKTTGNTDKRAFVETWQSFYRKKLKEVWKPAV

SEQ ID NO: 28595 - protein, 978 aa, synthetic construct
  REGION 1..978: note = engineered CasX variant
QEIKRINKIRRRLVKDSNTKKAGKTGPMKTLLVRVMTPDLRERLENLRKKPENIPQPISNTSRANLNKLLTDYTEMKKAILHVYWEEFQKDPVGLMSRVAQPASKKIDQNKLKPEMDEKGNLTTAGFACSQCGQPLFVYKLEQVSEKGKAYTNYFGRCNVAEHEKLILLAQLKPEKDSDEAVTYSLGKFGQRALDFYSIHVTKESTHPVKPLAQIAGNRYASGPVGKALSDACMGTIASFLSKYQDIIIEHQKVVKGNQKRLESLRELAGKENLEYPSVTLPPQPHTSEGVDAYNEVIARVRMWVNLNLWQKLKLSRDDAKPLLRLKGFPSFPLVERQANEVDWWDMVCNVKKLINEKKEDGKVFWQNLAGYKRQEALRPYLSSEEDRKKGKKFARYQLGDLLLHLEKKHGEDWGKVYDEAWERIDKKVEGLSKHIKLEEERRSEDAQSKAALTDWLRAKASFVIEGLKEADKDEFCRCELKLQKWYGDLRGKPFAIEAENSILDISGFSKQYNCAFIWQKDGVKKLNLYLIINYFKGGKLRFKKIKPEAFEANRFYTVINKKSGEIVPMEVNFNFDDPNLIILPLAFGKRQGREFIWNDLLSLETGSLKLANGRVIEKTLYNRRTRQDEPALFVALTFERREVLDSSNIKPMNLIGVDRGENIPAVIALTDPEGCPLSRFKDSLGNPTHILRIGESYKEKQRTIQAKKEVEQRRAGGYSRKYASKAKNLADDMVRNTARDLLYYAVTQDAMLIFENLSRGFGRQGKRTFMAERQYTRMEDWLTAKLAYEGLPSKTYLSKTLAQYTSKTCSNCGFTITSADYDRVLEKLKKTATGWMTTINGKELKVEGQITYYNRYKRQNVVKDLSVELDRLSEESVNNDISSWTKGRSGEALSLLKKRFSHRPVQEKFVCLNCEFETHADEQAALNIARSWLFLRSQEYKKYQTNKTTGNTDKRAFVETWQSFYRKKLKEVWKPAV

SEQ ID NO: 28596 - protein, 979 aa, synthetic construct
  REGION 1..979: note = engineered CasX variant
QEIKRINKIRRRLVKDSNTKKAGKTGPMKTLLVRVMTPDLRERLENLRKKPENIPQPISNTSRANLNKLLTDYTEMKKAILHVYWEEFQKDPVGLMSRVAQPASKKIDQNKLKPEMDEKGNLTTAGFACSQCGQPLFVYKLEQVSEKGKAYTNYFGRCNVAEHEKLILLAQLKPEKDSDEAVTYSLGKFGQRALDFYSIHVTKESTHPVKPLAQIAGNRYASGPVGKALSDACMGTIASFLSKYQDIIIEHQKVVKGNQKRLESLRELAGKENLEYPSVTLPPQPHTSEGVDAYNEVIARVRMWVNLNLWQKLKLSRDDAKPLLRLKGFPSFPLVERQANEVDWWDMVCNVKKLINEKKEDGKVFWQNLAGYKRQEALRPYLSSEEDRKKGKKFARYQLGDLLLHLEKKHGEDWGKVYDEAWERIDKKVEGLSKHIKLEEERRSEDAQSKAALTDWLRAKASFVIEGLKEADKDEFCRCELKLQKWYGDLRGKPFAIEAENSILDISGFSKQYNCAFIWQKDGVKKLNLYLIINYFKGGKLRFKKIKPEAFEANRFYTVINKKSGEIVPMEVNFNFDDPNLIILPLAFGKRQGREFIWNDLLSLETGSLKLANGRVIEKTLYNRRTRQDEPALFVALTFERREVLDSSNIKPMNLIGVDRGENIPAVIALTDPEGCPLSRFKDSLGNPTHILRIGESYKEKQRTIQAKKEVEQRRAGGYSRKYASKAKNLADDMVRNTARDLLYYAVTQDAMLIFENLSRGFGRQGKRTFMAERQYTRMEDWLTAKLAYEGLPSKTYLSKTLAQYTSKTCSNCGFTITSADYDRVLEKLKKTATGWMTTINGKELKVEGQITYYNRYKRQNVVKDLSVELDRLSEESVNNDISSWTKGRSGEALSLLKKRFSHRPVQEKFVCLNCGFETHADEQAALNIARSWLFLRSQEYKKYQTNKTSTGNTDKRAFVETWQSFYRKKLKEVWKPAV

SEQ ID NO: 28597 - protein, 979 aa, synthetic construct
  REGION 1..979: note = engineered CasX variant
QEIKRINKIRRRLVKDSNTKKAGKTGPMKTLLVRVMTPDLRERLENLRKKPENIPQPISNTSRANLNKLLTDYTEMKKAILHVYWEEFQKDPVGLMSRVAQPASKKIDQNKLKPEMDEKGNLTTAGFACSQCGQPLFVYKLEQVSEKGKAYTNYFGRCNVAEHEKLILLAQLKPEKDSDEAVTYSLGKFGQRALDFYSIHVTKESTHPVKPLAQIAGNRYASGPVGKALSDACMGTIASFLSKYQDIIIEHQKVVKGNQKRLESLRELAGKENLEYPSVTLPPQPHTSEGVDAYNEVIARVRMWVNLNLWQKLKLSRDDAKPLLRLKGFPSFPLVERQANEVDWWDMVCNVKKLINEKKEDGKVFWQNLAGYKRQEALRPYLSSEEDRKKGKKFARYQLGDLLLHLEKKHGEDWGKVYDEAWERIDKKVEGLSKHIKLEEERRSEDAQSKAALTDWLRAKASFVIEGLKEADKDEFCRCELKLQKWYGDLRGKPFAIEAENSILDISGFSKQYNCAFIWQKDGVKKLNLYLIINYFKGGKLRFKKIKPEAFEANRFYTVINKKSGEIVPMEVNFNFDDPNLIILPLAFGKRQGREFIWNDLLSLETGSLKLANGRVIEKTLYNRRTRQDEPALFVALTFERREVLDSSNIKPMNLIGVDRGENIPAVIALTDPEGCPLSRFKDSLGNPTHILRIGESYKEKQRTIQAKKEVEQRRAGGYSRKYASKAKNLADDMVRNTARDLLYYAVTQDAMLIFENLSRGFGRQGKRTFMAERQYTRMEDWLTAKLAYEGLPSKTYLSKTLAQYTSKTCSNCGFTITSADYDRVLEKLKKTATGWMTTINGKELKVEGQITYYNRYKRQNVVKDLSVELDRLSEESVNNDISSWTKGRSGEALSLLKKRFSHRPVQEKFVCLNCGFETHADEQAALNIARSWLFLRSQEYKKYQTNKTTGKNTDKRAFVETWQSFYRKKLKEVWKPAV

SEQ ID NO: 28598 - protein, 978 aa, synthetic construct
  REGION 1..978: note = engineered CasX variant
QEIKRINKIRRRLVKDSNTKKAGKTGPMKTLLVRVMTPDLRERLENLRKKPENIPQPISNTSRANLNKLLTDYTEMKKAILHVYWEEFQKDPVGLMSRVAQPASKKIDQNKLKPEMDEKGNLTTAGFACSQCGQPLFVYKLEQVSEKGKAYTNYFGRCNVAEHEKLILLAQLKPEKDSDEAVTYSLGKFGQRALDFYSIHVTKESTHPVKPLAQIAGNRYASGPVGKALSDACMGTIASFLSKYQDIIIEHQKVVKGNQKRLESLRELAGKENLEYPSVTLPPQPHTSEGVDAYNEVIARVRMWVNLNLWQKLKLSRDDAKPLLRLKKFPSFPLVERQANEVDWWDMVCNVKKLINEKKEDGKVFWQNLAGYKRQEALRPYLSSEEDRKKGKKFARYQLGDLLLHLEKKHGEDWGKVYDEAWERIDKKVEGLSKHIKLEEERRSEDAQSKAALTDWLRAKASFVIEGLKEADKDEFCRCELKLQKWYGDLRGKPFAIEAENSILDISGFSKQYNCAFIWQKDGVKKLNLYLIINYFKGGKLRFKKIKPEAFEANRFYTVINKKSGEIVPMEVNFNFDDPNLIILPLAFGKRQGREFIWNDLLSLETGSLKLANGRVIEKTLYNRRTRQDEPALFVALTFERREVLDSSNIKPMNLIGVDRGENIPAVIALTDPEGCPLSRFKDSLGNPTHILRIGESYKEKQRTIQAKKEVEQRRAGGYSRKYASKAKNLADDMVRNTARDLLYYAVTQDAMLIFENLSRGFGRQGKRTFMAERQYTRMEDWLTAKLAYEGLPSKTYLSKTLAQYTSKTCSNCGFTITSADYDRVLEKLKKTATGWMTTINGKELKVEGQITYYNRYKRQNVVKDLSVELDRLSEESVNNDISSWTKGRSGEALSLLKKRFSHRPVQEKFVCLNCGFETHADEQAALNIARSWLFLRSQEYKKYQTNKTTGNTDKRAFVETWQSFYRKKLKEVWKPAV

SEQ ID NO: 28599 - protein, 978 aa, synthetic construct
  REGION 1..978: note = engineered CasX variant
QEIKRINKIRRRLVKDSNTKKAGKTGPMKTLLVRVMTPDLRERLENLRKKPENIPQPISNTSRANLNKLLTDYTEMKKAILHVYWEEFQKDPVGLMSRVAQPASKKIDQNKLKPEMDEKGNLTTAGFACSQCGQPLFVYKLEQVSEKGKAYTNYFGRCNVAEHEKLILLAQLKPEKDSDEAVTYSLGKFGQRALDFYSIHVTKESTHPVKPLAQIAGNRYASGPVGKALSDACMGTIASFLSKYQDIIIEHQKVVKGNQKRLESLRELAGKENLEYPSVTLPPQPHTSEGVDAYNEVIARVRMWVNLNLWQKLKLSRDDAKPLLRLKGFPSFPLVERQANEVDWWDMVCNVKKLINEKKEDGKVFWQNLAGYKRQEALRPYLSSEEDRKKGKKFARYQLGDLLLHLEKKHGEDWGKVYDEAWERIDKKVEGLSKHIKLEEERRSEDAQSKAALTDWLRAKASFVIEGLKEADKDEFCRCELKLQKWYGDLRGKPFAIEAENSILDISGFSKQYNCAFIWQKDGVKKLNLYLIINYFKGGKLRFKKIKPEAFEANRFYTVINKKSGEIVPMEVNFNFDDPNLIILPLAFGKRQGREFIWNDLLSLETGSLKLANGRVIEKTLYNRRTRQDEPALFVALTFERREVLDSSNIKPMNLIGVDRGENIPAVIALTDPEGCPLSRFKDSLGNPTHILRIGERYKEKQRTIQAKKEVEQRRAGGYSRKYASKAKNLADDMVRNTARDLLYYAVTQDAMLIFENLSRGFGRQGKRTFMAERQYTRMEDWLTAKLAYEGLPSKTYLSKTLAQYTSKTCSNCGFTITSADYDRVLEKLKKTATGWMTTINGKELKVEGQITYYNRYKRQNVVKDLSVELDRLSEESVNNDISSWTKGRSGEALSLLKKRFSHRPVQEKFVCLNCGFETHADEQAALNIARSWLFLRSQEYKKYQTNKTTGNTDKRAFVETWQSFYRKKLKEVWKPAV

SEQ ID NO: 28600 - protein, 978 aa, synthetic construct
  REGION 1..978: note = engineered CasX variant
QEIKRINKIRRRLVKDSNTKKAGKTGPMKTLLVRVMTPDLRERLENLRKKPENIPQPISNTSRANLNKLLTDYTEMKKAILHVYWEEFQKDPVGLMSRVAQPASKKIDQNKLKPEMDEKGNLTTAGFACSQCGQPLFVYKLEQVSEKGKAYTNYFGRCNVAEHEKLILLAQLKPEKDSDEAVTYSLGKFGQRALDFYSIHVTKESTHPVKPLAQIAGNRYASGPVGKALSDACMGTIASFLSKYQDIIIEHQKVVKGNQKRLESLRELAGKENLEYPSVTLPPQPHTSEGVDAYNEVIARVRMWVNLNLWQKLKLSRDDAKPLLRLKGFPSFPLVERQANEVDWWDMVCNVKKLINEKKEDGKVFWQNLAGYKRQEALRPYLSSEEDRKKGKKFARYQLGDLLLHLEKKHGEDWGKVYDEAWERIDKKVEGLSKHIKLEEERRSEDAQSKAALTDWLRAKASFVIEGLKEADKDEFCRCELKLQKWYGDLRGKPFAIEAENSILDISGFSKQYNCAFIWQKDGVKKLNLYLIINYFKGGKLRFKKIKPEAFEANRFYTVINKKSGEIVPMEVNFNFDDPNLIILPLAFGKRQGREFIWNDLLSLETGSLQLANGRVIEKTLYNRRTRQDEPALFVALTFERREVLDSSNIKPMNLIGVDRGENIPAVIALTDPEGCPLSRFKDSLGNPTHILRIGESYKEKQRTIQAKKEVEQRRAGGYSRKYASKAKNLADDMVRNTARDLLYYAVTQDAMLIFENLSRGFGRQGKRTFMAERQYTRMEDWLTAKLAYEGLPSKTYLSKTLAQYTSKTCSNCGFTITSADYDRVLEKLKKTATGWMTTINGKELKVEGQITYYNRYKRQNVVKDLSVELDRLSEESVNNDISSWTKGRSGEALSLLKKRFSHRPVQEKFVCLNCGFETHADEQAALNIARSWLFLRSQEYKKYQTNKTTGNTDKRAFVETWQSFYRKKLKEVWKPAV

SEQ ID NO: 28601 - protein, 978 aa, synthetic construct
  REGION 1..978: note = engineered CasX variant
QEIKRINKIRRRLVKDSNTKKAGKTGPMKTLLVRVMTPDLRERLENLRKKPENIPQPISNTSRANLNKLLTDYTEMKKAILHVYWEEFQKDPVGLMSRVAQPASKKIDQNKLKPEMDEKGNLTTAGFACSQCGQPLFVYKLEQVSEKGKAYTNYFGRCNVAEHEKLILLAQLKPEKDSDEAVTYSLGKFGQRALDFYSIHVTKESTHPVKPLAQIAGNRYASGPVGKALSDACMGTIASFLSKYQDIIIEHQKVVKGNQKRLESLRELAGKENLEYPSVTLPPQPHTKEGLDAYNEVIARVRTWVNLNLWQKLKLSRDDAKPLLRLKGFPSFPLVERQANEVDWWDMVCNVKKLINEKKEDGKVFWQNLAGYKRQEALRPYLSSEEDRKKGKKFARYQLGDLLLHLEKKHGEDWGKVYDEAWERIDKKVEGLSKHIKLEEERRSEDAQSKAALTDWLRAKASFVIEGLKEADKDEFCRCELKLQKWYGDLRGKPFAIEAENSILDISGFSKQYNCAFIWQKDGVKKLNLYLIINYFKGGKLRFKKIKPEAFEANRFYTVINKKSGEIVPMEVNFNFDDPNLIILPLAFGKRQGREFIWNDLLSLETGSLKLANGRVIEKTLYNRRTRQDEPALFVALTFERREVLDSSNIKPMNLIGVDRGENIPAVIALTDPEGCPLSRFKDSLGNPTHILRIGESYKEKQRTIQAKKEVEQRRAGGYSRKYASKAKNLADDMVRNTARDLLYYAVTQDAMLIFENLSRGFGRQGKRTFMAERQYTRMEDWLTAKLAYEGLPSKTYLSKTLAQYTSKTCSNCGFTITSADYDRVLEKLKKTATGWMTTINGKELKVEGQITYYNRYKRQNVVKDLSVELDRLSEESVNNDISSWTKGRSGEALSLLKKRFSHRPVQEKFVCLNCGFETHADEQAALNIARSWLFLRSQEYKKYQTNKTTGNTDKRAFVETWQSFYRKKLKEVWKPAV

SEQ ID NO: 28602 - protein, 978 aa, synthetic construct; identical to SEQ ID NO: 494
  REGION 1..978: note = engineered CasX variant

SEQ ID NO: 28603 - protein, 979 aa, synthetic construct
  REGION 1..979: note = engineered CasX variant
QEIKRINKIRRRLVKDSNTKKAGKTGPMKTLLVRVMTPDLRERLENLRKKPENIPQPISNTSRANLNKLLTDYTEMKKAILHVYWEEFQKDPVGLMSRVAQPASKKIDQNKLKPEMDEKGNLTTAGFACSQCGQPLFVYKLEQVSEKGKAYTNYFGRCNVAEHEKLILLAQLKPEKDSDEAVTYSLGKFGQRALDFYSIHVTKESTHPVKPLAQIAGNRYASGPVGKALSDACMGTIASFLSKYQDIIIEHQKVVKGNQKRLESLRELAGKENLEYPSVTLPPQPHTKEGLDAYNEVIARVRMWVNLNLWQKLKLSRDDAKPLLRLKGFPSFPLVERQQANEVDWWDMVCNVKKLINEKKEDGKVFWQNLAGYKRQEALRPYLSSEEDRKKGKKFARYQLGDLLLHLEKKHGEDWGKVYDEAWERIDKKVEGLSKHIKLEEERRSEDAQSKAALTDWLRAKASFVIEGLKEADKDEFCRCELKLQKWYGDLRGKPFAIEAENSILDISGFSKQYNCAFIWQKDGVKKLNLYLIINYFKGGKLRFKKIKPEAFEANRFYTVINKKSGEIVPMEVNFNFDDPNLIILPLAFGKRQGREFIWNDLLSLETGSLKLANGRVIEKTLYNRRTRQDEPALFVALTFERREVLDSSNIKPMNLIGVDRGENIPAVIALTDPEGCPLSRFKDSLGNPTHILRIGESYKEKQRTIQAKKEVEQRRAGGYSRKYASKAKNLADDMVRNTARDLLYYAVTQDAMLIFENLSRGFGRQGKRTFMAERQYTRMEDWLTAKLAYEGLPSKTYLSKTLAQYTSKTCSNCGFTITSADYDRVLEKLKKTATGWMTTINGKELKVEGQITYYNRYKRQNVVKDLSVELDRLSEESVNNDISSWTKGRSGEALSLLKKRFSHRPVQEKFVCLNCGFETHADEQAALNIARSWLFLRSQEYKKYQTNKTTGNTDKRAFVETWQSFYRKKLKEVWKPAV

SEQ ID NO: 28604 - protein, 979 aa, synthetic construct
  REGION 1..979: note = engineered CasX variant
QEIKRINKIRRRLVKDSNTKKAGKTGPMKTLLVRVMTPDLRERLENLRKKPENIPQPISNTSRANLNKLLTDYTEMKKAILHVYWEEFQKDPVGLMSRVAQPASKKIDQNKLKPEMDEKGNLTTAGFACSQCGQPLFVYKLEQVSEKGKAYTNYFGRCNVAEHEKLILLAQLKPEKDSDEAVTYSLGKFGQRALDFYSIHVTKESTHPVKPLAQIAGNRYASGPVGKALSDACMGTIASFLSKYQDIIIEHQKVVKGNQKRLESLRELAGKENLEYPSVTLPPQPHTKEGLDAYNEVIARVRMWVNLNLWQKLKLSRDDAKPLLRLKGFPSFPLVERQANAEVDWWDMVCNVKKLINEKKEDGKVFWQNLAGYKRQEALRPYLSSEEDRKKGKKFARYQLGDLLLHLEKKHGEDWGKVYDEAWERIDKKVEGLSKHIKLEEERRSEDAQSKAALTDWLRAKASFVIEGLKEADKDEFCRCELKLQKWYGDLRGKPFAIEAENSILDISGFSKQYNCAFIWQKDGVKKLNLYLIINYFKGGKLRFKKIKPEAFEANRFYTVINKKSGEIVPMEVNFNFDDPNLIILPLAFGKRQGREFIWNDLLSLETGSLKLANGRVIEKTLYNRRTRQDEPALFVALTFERREVLDSSNIKPMNLIGVDRGENIPAVIALTDPEGCPLSRFKDSLGNPTHILRIGESYKEKQRTIQAKKEVEQRRAGGYSRKYASKAKNLADDMVRNTARDLLYYAVTQDAMLIFENLSRGFGRQGKRTFMAERQYTRMEDWLTAKLAYEGLPSKTYLSKTLAQYTSKTCSNCGFTITSADYDRVLEKLKKTATGWMTTINGKELKVEGQITYYNRYKRQNVVKDLSVELDRLSEESVNNDISSWTKGRSGEALSLLKKRFSHRPVQEKFVCLNCGFETHADEQAALNIARSWLFLRSQEYKKYQTNKTTGNTDKRAFVETWQSFYRKKLKEVWKPAV

SEQ ID NO: 28605 - protein, 978 aa, synthetic construct
  REGION 1..978: note = engineered CasX variant
QEIKRINKIRRRLVKDSNTKKAGKTGPMKTLLVRVMTPDLRERLENLRKKPENIPQPISNTSRANLNKLLTDYTEMKKAILHVYWEEFQKDPVGLMSRVAQPASKKIDQNKLKPEMDEKGNLTTAGFACSQCGQPLFVYKLEQVSEKGKAYTNYFGRCNVAEHEKLILLAQLKPEKDSDEAVTYSLGKFGQRALDFYSIHVTKESTHPVKPLAQIAGNRYASGPVGKALSDACMGTIASFLSKYQDIIIEHQKVVKGNQKRLESLRELAGKENLEYPSVTLPPQPHTKEGLDAYNEVIARVRMWVNLNLWQKLKLSRDDAKPLLRLKGFPSFPLVERQANEVDWWDMVCNVKKLINEKKEDGKVFWQNLAGYKRQEALRPYLSSEEDRKKGKKFARTQLGDLLLHLEKKHGEDWGKVYDEAWERIDKKVEGLSKHIKLEEERRSEDAQSKAALTDWLRAKASFVIEGLKEADKDEFCRCELKLQKWYGDLRGKPFAIEAENSILDISGFSKQYNCAFIWQKDGVKKLNLYLIINYFKGGKLRFKKIKPEAFEANRFYTVINKKSGEIVPMEVNFNFDDPNLIILPLAFGKRQGREFIWNDLLSLETGSLKLANGRVIEKTLYNRRTRQDEPALFVALTFERREVLDSSNIKPMNLIGVDRGENIPAVIALTDPEGCPLSRFKDSLGNPTHILRIGESYKEKQRTIQAKKEVEQRRAGGYSRKYASKAKNLADDMVRNTARDLLYYAVTQDAMLIFENLSRGFGRQGKRTFMAERQYTRMEDWLTAKLAYEGLPSKTYLSKTLAQYTSKTCSNCGFTITSADYDRVLEKLKKTATGWMTTINGKELKVEGQITYYNRYKRQNVVKDLSVELDRLSEESVNNDISSWTKGRSGEALSLLKKRFSHRPVQEKFVCLNCGFETHADEQAALNIARSWLFLRSQEYKKYQTNKTTGNTDKRAFVETWQSFYRKKLKEVWKPAV

SEQ ID NO: 28606 - protein, 979 aa, synthetic construct
  REGION 1..979: note = engineered CasX variant
QEIKRINKIRRRLVKDSNTKKAGKTGPMKTLLVRVMTPDLRERLENLRKKPENIPQPISNTSRANLNKLLTDYTEMKKAILHVYWEEFQKDPVGLMSRVAQPASKKIDQNKLKPEMDEKGNLTTAGFACSQCGQPLFVYKLEQVSEKGKAYTNYFGRCNVAEHEKLILLAQLKPEKDSDEAVTYSLGKFGQRALDFYSIHVTKESTHPVKPLAQIAGNRYASGPVGKALSDACMGTIASFLSKYQDIIIEHQKVVKGNQKRLESLRELAGKENLEYPSVTLPPQPHTKEGLDAYNEVIARVRMWVNLNLWQKLKLSRDDAKPLLRLKGFPSFPLVERQANEVDWWDMVCNVKKLINEKKEDGKVFWQNLAGYKRQEALRPYLSSEEDRKKGKKFARYQLGDLLLHLEKKHEGEDWGKVYDEAWERIDKKVEGLSKHIKLEEERRSEDAQSKAALTDWLRAKASFVIEGLKEADKDEFCRCELKLQKWYGDLRGKPFAIEAENSILDISGFSKQYNCAFIWQKDGVKKLNLYLIINYFKGGKLRFKKIKPEAFEANRFYTVINKKSGEIVPMEVNFNFDDPNLIILPLAFGKRQGREFIWNDLLSLETGSLKLANGRVIEKTLYNRRTRQDEPALFVALTFERREVLDSSNIKPMNLIGVDRGENIPAVIALTDPEGCPLSRFKDSLGNPTHILRIGESYKEKQRTIQAKKEVEQRRAGGYSRKYASKAKNLADDMVRNTARDLLYYAVTQDAMLIFENLSRGFGRQGKRTFMAERQYTRMEDWLTAKLAYEGLPSKTYLSKTLAQYTSKTCSNCGFTITSADYDRVLEKLKKTATGWMTTINGKELKVEGQITYYNRYKRQNVVKDLSVELDRLSEESVNNDISSWTKGRSGEALSLLKKRFSHRPVQEKFVCLNCGFETHADEQAALNIARSWLFLRSQEYKKYQTNKTTGNTDKRAFVETWQSFYRKKLKEVWKPAV

SEQ ID NO: 28607 - protein, 978 aa, synthetic construct
  REGION 1..978: note = engineered CasX variant
QEIKRINKIRRRLVKDSNTKKAGKTGPMKTLLVRVMTPDLRERLENLRKKPENIPQPISNTSRANLNKLLTDYTEMKKAILHVYWEEFQKDPVGLMSRVAQPASKKIDQNKLKPEMDEKGNLTTAGFACSQCGQPLFVYKLEQVSEKGKAYTNYFGRCNVAEHEKLILLAQLKPEKDSDEAVTYSLGKFGQRALDFYSIHVTKESTHPVKPLAQIAGNRYASGPVGKALSDACMGTIASFLSKYQDIIIEHQKVVKGNQKRLESLRELAGKENLEYPSVTLPPQPHTKEGLDAYNEVIARVRMWVNLNLWQKLKLSRDDAKPLLRLKGFPSFPLVERQANEVDWWDMVCNVKKLINEKKEDGKVFWQNLAGYKRQEALRPYLSSEEDRKKGKKFARYQLGDLLLHLEKKHGEDWGKVYDEAWERIDKKVEGLSKHIKLEEERRSEDAQSKAALTDWLRAKASFVIEGLKEADKDEFCRCDLKLQKWYGDLRGKPFAIEAENSILDISGFSKQYNCAFIWQKDGVKKLNLYLIINYFKGGKLRFKKIKPEAFEANRFYTVINKKSGEIVPMEVNFNFDDPNLIILPLAFGKRQGREFIWNDLLSLETGSLKLANGRVIEKTLYNRRTRQDEPALFVALTFERREVLDSSNIKPMNLIGVDRGENIPAVIALTDPEGCPLSRFKDSLGNPTHILRIGESYKEKQRTIQAKKEVEQRRAGGYSRKYASKAKNLADDMVRNTARDLLYYAVTQDAMLIFENLSRGFGRQGKRTFMAERQYTRMEDWLTAKLAYEGLPSKTYLSKTLAQYTSKTCSNCGFTITSADYDRVLEKLKKTATGWMTTINGKELKVEGQITYYNRYKRQNVVKDLSVELDRLSEESVNNDISSWTKGRSGEALSLLKKRFSHRPVQEKFVCLNCGFETHADEQAALNIARSWLFLRSQEYKKYQTNKTTGNTDKRAFVETWQSFYRKKLKEVWKPAV

SEQ ID NO: 28608 - protein, 978 aa, synthetic construct
  REGION 1..978: note = engineered CasX variant
QEIKRINKIRRRLVKDSNTKKAGKTGPMKTLLVRVMTPDLRERLENLRKKPENIPQPISNTSRANLNKLLTDYTEMKKAILHVYWEEFQKDPVGLMSRVAQPASKKIDQNKLKPEMDEKGNLTTAGFACSQCGQPLFVYKLEQVSEKGKAYTNYFGRCNVAEHEKLILLAQLKPEKDSDEAVTYSLGKFGQRALDFYSIHVTKESTHPVKPLAQIAGNRYASGPVGKALSDACMGTIASFLSKYQDIIIEHQKVVKGNQKRLESLRELAGKENLEYPSVTLPPQPHTKEGLDAYNEVIARVRMWVNLNLWQKLKLSRDDAKPLLRLKGFPSFPLVERQANEVDWWDMVCNVKKLINEKKEDGKVFWQNLAGYKRQEALRPYLSSEEDRKKGKKFARYQLGDLLLHLEKKHGEDWGKVYDEAWERIDKKVEGLSKHIKLEEERRSEDAQSKAALTDWLRAKASFVIEGLKEADKDEFCRCELKLQKWYGDLRGKPFAIEAENSILDISGFSKQYNCAFIWQKDGVKKLNLYLIINYFKGGKLRFKKIKPEAFEANRFYTVINKKSGEIVPMEVNFNFDDPNLIILPLAFGKRFGREFIWNDLLSLETGSLKLANGRVIEKTLYNRRTRQDEPALFVALTFERREVLDSSNIKPMNLIGVDRGENIPAVIALTDPEGCPLSRFKDSLGNPTHILRIGESYKEKQRTIQAKKEVEQRRAGGYSRKYASKAKNLADDMVRNTARDLLYYAVTQDAMLIFENLSRGFGRQGKRTFMAERQYTRMEDWLTAKLAYEGLPSKTYLSKTLAQYTSKTCSNCGFTITSADYDRVLEKLKKTATGWMTTINGKELKVEGQITYYNRYKRQNVVKDLSVELDRLSEESVNNDISSWTKGRSGEALSLLKKRFSHRPVQEKFVCLNCGFETHADEQAALNIARSWLFLRSQEYKKYQTNKTTGNTDKRAFVETWQSFYRKKLKEVWKPAV

SEQ ID NO: 28609 - protein, 978 aa, synthetic construct
  REGION 1..978: note = engineered CasX variant
QEIKRINKIRRRLVKDSNTKKAGKTGPMKTLLVRVMTPDLRERLENLRKKPENIPQPISNTSRANLNKLLTDYTEMKKAILHVYWEEFQKDPVGLMSRVAQPASKKIDQNKLKPEMDEKGNLTTAGFACSQCGQPLFVYKLEQVSEKGKAYTNYFGRCNVAEHEKLILLAQLKPEKDSDEAVTYSLGKFGQRALDFYSIHVTKESTHPVKPLAQIAGNRYASGPVGKALSDACMGTIASFLSKYQDIIIEHQKVVKGNQKRLESLRELAGKENLEYPSVTLPPQPHTKEGLDAYNEVIARVRMWVNLNLWQKLKLSRDDAKPLLRLKGFPSFPLVERQANEVDWWDMVCNVKKLINEKKEDGKVFWQNLAGYKRQEALRPYLSSEEDRKKGKKFARYQLGDLLLHLEKKHGEDWGKVYDEAWERIDKKVEGLSKHIKLEEERRSEDAQSKAALTDWLRAKASFVIEGLKEADKDEFCRCELKLQKWYGDLRGKPFAIEAENSILDISGFSKQYNCAFIWQKDGVKKLNLYLIINYFKGGKLRFKKIKPEAFEANRFYTVINKKSGEIVPMEVNFNFDDPNLIILPLAFGKRVGREFIWNDLLSLETGSLKLANGRVIEKTLYNRRTRQDEPALFVALTFERREVLDSSNIKPMNLIGVDRGENIPAVIALTDPEGCPLSRFKDSLGNPTHILRIGESYKEKQRTIQAKKEVEQRRAGGYSRKYASKAKNLADDMVRNTARDLLYYAVTQDAMLIFENLSRGFGRQGKRTFMAERQYTRMEDWLTAKLAYEGLPSKTYLSKTLAQYTSKTCSNCGFTITSADYDRVLEKLKKTATGWMTTINGKELKVEGQITYYNRYKRQNVVKDLSVELDRLSEESVNNDISSWTKGRSGEALSLLKKRFSHRPVQEKFVCLNCGFETHADEQAALNIARSWLFLRSQEYKKYQTNKTTGNTDKRAFVETWQSFYRKKLKEVWKPAV

SEQ ID NO: 28610 - protein, 979 aa, synthetic construct
  REGION 1..979: note = engineered CasX variant
QEIKRINKIRRRLVKDSNTKKAGKTGPMKTLLVRVMTPDLRERLENLRKKPENIPQPISNTSRANLNKLLTDYTEMKKAILHVYWEEFQKDPVGLMSRVAQPASKKIDQNKLKPEMDEKGNLTTAGFACSQCGQPLFVYKLEQVSEKGKAYTNYFGRCNVAEHEKLILLAQLKPEKDSDEAVTYSLGKFGQRALDFYSIHVTKESTHPVKPLAQIAGNRYASGPVGKALSDACMGTIASFLSKYQDIIIEHQKVVKGNQKRLESLRELAGKENLEYPSVTLPPQPHTKEGLDAYNEVIARVRMWVNLNLWQKLKLSRDDAKPLLRLKGFPSFPLVERQANEVDWWDMVCNVKKLINEKKEDGKVFWQNLAGYKRQEALRPYLSSEEDRKKGKKFARYQLGDLLLHLEKKHGEDWGKVYDEAWERIDKKVEGLSKHIKLEEERRSEDAQSKAALTDWLRAKASFVIEGLKEADKDEFCRCELKLQKWYGDLRGKPFAIEAENSILDISGFSKQYNCAFIWQKDGVKKLNLYLIINYFKGGKLRFKKIKPEAFEANRFYTVINKKSGEIVPMEVNFNFDDPNLIILPLAFGKRQGREFIWNDLLSLETGSLKLANGRVIEKTLYNRRTRQDEPALFVALTFERREVLDSSNIKTPMNLIGVDRGENIPAVIALTDPEGCPLSRFKDSLGNPTHILRIGESYKEKQRTIQAKKEVEQRRAGGYSRKYASKAKNLADDMVRNTARDLLYYAVTQDAMLIFENLSRGFGRQGKRTFMAERQYTRMEDWLTAKLAYEGLPSKTYLSKTLAQYTSKTCSNCGFTITSADYDRVLEKLKKTATGWMTTINGKELKVEGQITYYNRYKRQNVVKDLSVELDRLSEESVNNDISSWTKGRSGEALSLLKKRFSHRPVQEKFVCLNCGFETHADEQAALNIARSWLFLRSQEYKKYQTNKTTGNTDKRAFVETWQSFYRKKLKEVWKPAV

SEQ ID NO: 28611 - protein, 979 aa, synthetic construct
  REGION 1..979: note = engineered CasX variant
QEIKRINKIRRRLVKDSNTKKAGKTGPMKTLLVRVMTPDLRERLENLRKKPENIPQPISNTSRANLNKLLTDYTEMKKAILHVYWEEFQKDPVGLMSRVAQPASKKIDQNKLKPEMDEKGNLTTAGFACSQCGQPLFVYKLEQVSEKGKAYTNYFGRCNVAEHEKLILLAQLKPEKDSDEAVTYSLGKFGQRALDFYSIHVTKESTHPVKPLAQIAGNRYASGPVGKALSDACMGTIASFLSKYQDIIIEHQKVVKGNQKRLESLRELAGKENLEYPSVTLPPQPHTKEGLDAYNEVIARVRMWVNLNLWQKLKLSRDDAKPLLRLKGFPSFPLVERQANEVDWWDMVCNVKKLINEKKEDGKVFWQNLAGYKRQEALRPYLSSEEDRKKGKKFARYQLGDLLLHLEKKHGEDWGKVYDEAWERIDKKVEGLSKHIKLEEERRSEDAQSKAALTDWLRAKASFVIEGLKEADKDEFCRCELKLQKWYGDLRGKPFAIEAENSILDISGFSKQYNCAFIWQKDGVKKLNLYLIINYFKGGKLRFKKIKPEAFEANRFYTVINKKSGEIVPMEVNFNFDDPNLIILPLAFGKRQGREFIWNDLLSLETGSLKLANGRVIEKTLYNRRTRQDEPALFVALTFERREVLDSSNIKPMSNLIGVDRGENIPAVIALTDPEGCPLSRFKDSLGNPTHILRIGESYKEKQRTIQAKKEVEQRRAGGYSRKYASKAKNLADDMVRNTARDLLYYAVTQDAMLIFENLSRGFGRQGKRTFMAERQYTRMEDWLTAKLAYEGLPSKTYLSKTLAQYTSKTCSNCGFTITSADYDRVLEKLKKTATGWMTTINGKELKVEGQITYYNRYKRQNVVKDLSVELDRLSEESVNNDISSWTKGRSGEALSLLKKRFSHRPVQEKFVCLNCGFETHADEQAALNIARSWLFLRSQEYKKYQTNKTTGNTDKRAFVETWQSFYRKKLKEVWKPAV

SEQ ID NO: 28612 - protein, 978 aa, synthetic construct
  REGION 1..978: note = engineered CasX variant
QEIKRINKIRRRLVKDSNTKKAGKTGPMKTLLVRVMTPDLRERLENLRKKPENIPQPISNTSRANLNKLLTDYTEMKKAILHVYWEEFQKDPVGLMSRVAQPASKKIDQNKLKPEMDEKGNLTTAGFACSQCGQPLFVYKLEQVSEKGKAYTNYFGRCNVAEHEKLILLAQLKPEKDSDEAVTYSLGKFGQRALDFYSIHVTKESTHPVKPLAQIAGNRYASGPVGKALSDACMGTIASFLSKYQDIIIEHQKVVKGNQKRLESLRELAGKENLEYPSVTLPPQPHTKEGLDAYNEVIARVRMWVNLNLWQKLKLSRDDAKPLLRLKGFPSFPLVERQANEVDWWDMVCNVKKLINEKKEDGKVFWQNLAGYKRQEALRPYLSSEEDRKKGKKFARYQLGDLLLHLEKKHGEDWGKVYDEAWERIDKKVEGLSKHIKLEEERRSEDAQSKAALTDWLRAKASFVIEGLKEADKDEFCRCELKLQKWYGDLRGKPFAIEAENSILDISGFSKQYNCAFIWQKDGVKKLNLYLIINYFKGGKLRFKKIKPEAFEANRFYTVINKKSGEIVPMEVNFNFDDPNLIILPLAFGKRQGREFIWNDLLSLETGSLKLANGRVIEKTLYNRRTRQDEPALFVALTFERREVLDSSNIKPMNLIGVDRGENIPAVIALTDPEGCPLSRFKDSLGNPTHILRIRESYKEKQRTIQAKKEVEQRRAGGYSRKYASKAKNLADDMVRNTARDLLYYAVTQDAMLIFENLSRGFGRQGKRTFMAERQYTRMEDWLTAKLAYEGLPSKTYLSKTLAQYTSKTCSNCGFTITSADYDRVLEKLKKTATGWMTTINGKELKVEGQITYYNRYKRQNVVKDLSVELDRLSEESVNNDISSWTKGRSGEALSLLKKRFSHRPVQEKFVCLNCGFETHADEQAALNIARSWLFLRSQEYKKYQTNKTTGNTDKRAFVETWQSFYRKKLKEVWKPAV

SEQ ID NO: 28613 - protein, 978 aa, synthetic construct
  REGION 1..978: note = engineered CasX variant
QEIKRINKIRRRLVKDSNTKKAGKTGPMKTLLVRVMTPDLRERLENLRKKPENIPQPISNTSRANLNKLLTDYTEMKKAILHVYWEEFQKDPVGLMSRVAQPASKKIDQNKLKPEMDEKGNLTTAGFACSQCGQPLFVYKLEQVSEKGKAYTNYFGRCNVAEHEKLILLAQLKPEKDSDEAVTYSLGKFGQRALDFYSIHVTKESTHPVKPLAQIAGNRYASGPVGKALSDACMGTIASFLSKYQDIIIEHQKVVKGNQKRLESLRELAGKENLEYPSVTLPPQPHTKEGLDAYNEVIARVRMWVNLNLWQKLKLSRDDAKPLLRLKGFPSFPLVERQANEVDWWDMVCNVKKLINEKKEDGKVFWQNLAGYKRQEALRPYLSSEEDRKKGKKFARYQLGDLLLHLEKKHGEDWGKVYDEAWERIDKKVEGLSKHIKLEEERRSEDAQSKAALTDWLRAKASFVIEGLKEADKDEFCRCELKLQKWYGDLRGKPFAIEAENSILDISGFSKQYNCAFIWQKDGVKKLNLYLIINYFKGGKLRFKKIKPEAFEANRFYTVINKKSGEIVPMEVNFNFDDPNLIILPLAFGKRQGREFIWNDLLSLETGSLKLANGRVIEKTLYNRRTRQDEPALFVALTFERREVLDSSNIKPMNLIGVDRGENIPAVIALTDPEGCPLSRFKDSLGNPTHILRIGESYKEKQRTIQAKKEVEQRRAGGYSRKYASKAKNLADDMVRNTARDLLYYAVTQDAMLIFENLSRGFGRQGKRTFSAERQYTRMEDWLTAKLAYEGLPSKTYLSKTLAQYTSKTCSNCGFTITSADYDRVLEKLKKTATGWMTTINGKELKVEGQITYYNRYKRQNVVKDLSVELDRLSEESVNNDISSWTKGRSGEALSLLKKRFSHRPVQEKFVCLNCGFETHADEQAALNIARSWLFLRSQEYKKYQTNKTTGNTDKRAFVETWQSFYRKKLKEVWKPAV

SEQ ID NO: 28614 - protein, 978 aa, synthetic construct
  REGION 1..978: note = engineered CasX variant
QEIKRINKIRRRLVKDSNTKKAGKTGPMKTLLVRVMTPDLRERLENLRKKPENIPQPISNTSRANLNKLLTDYTEMKKAILHVYWEEFQKDPVGLMSRVAQPASKKIDQNKLKPEMDEKGNLTTAGFACSQCGQPLFVYKLEQVSEKGKAYTNYFGRCNVAEHEKLILLAQLKPEKDSDEAVTYSLGKFGQRALDFYSIHVTKESTHPVKPLAQIAGNRYASGPVGKALSDACMGTIASFLSKYQDIIIEHQKVVKGNQKRLESLRELAGKENLEYPSVTLPPQPHTKEGLDAYNEVIARVRMWVNLNLWQKLKLSRDDAKPLLRLKGFPSFPLVERQANEVDWWDMVCNVKKLINEKKEDGKVFWQNLAGYKRQEALRPYLSSEEDRKKGKKFARYQLGDLLLHLEKKHGEDWGKVYDEAWERIDKKVEGLSKHIKLEEERRSEDAQSKAALTDWLRAKASFVIEGLKEADKDEFCRCELKLQKWYGDLRGKPFAIEAENSILDISGFSKQYNCAFIWQKDGVKKLNLYLIINYFKGGKLRFKKIKPEAFEANRFYTVINKKSGEIVPMEVNFNFDDPNLIILPLAFGKRQGREFIWNDLLSLETGSLKLANGRVIEKTLYNRRTRQDEPALFVALTFERREVLDSSNIKPMNLIGVDRGENIPAVIALTDPEGCPLSRFKDSLGNPTHILRIGESYKEKQRTIQAKKEVEQRRAGGYSRKYASKAKNLADDMVRNTARDLLYYAVTQDAMLIFENLSRGFGRQGKRTFMAERQYTRMEDWLTAKLAYEGLPSKTYLSKTLAQYTSKTCSNCGFTITSADYDRVLEKLKKTATGWMTTINGKELKVEGQITYYNRYKRQNVVKDLSVELDRLSEESVNNDISSWDKGRSGEALSLLKKRFSHRPVQEKFVCLNCGFETHADEQAALNIARSWLFLRSQEYKKYQTNKTTGNTDKRAFVETWQSFYRKKLKEVWKPAV

SEQ ID NO: 28615 - protein, 978 aa, synthetic construct
  REGION 1..978: note = engineered CasX variant
QEIKRINKIRRRLVKDSNTKKAGKTGPMKTLLVRVMTPDLRERLENLRKKPENIPQPISNTSRANLNKLLTDYTEMKKAILHVYWEEFQVDPVGLMSRVAQPASKKIDQNKLKPEMDEKGNLTTAGFACSQCGQPLFVYKLEQVSEKGKAYTNYFGRCNVAEHEKLILLAQLKPEKDSDEAVTYSLGKFGQRALDFYSIHVTKESTHPVKPLAQIAGNRYASGPVGKALSDACMGTIASFLSKYQDIIIEHQKVVKGNQKRLESLRELAGKENLEYPSVTLPPQPHTKEGLDAYNEVIARVRMWVNLNLWQKLKLSRDDAKPLLRLKGFPSFPLVERQANEVDWWDMVCNVKKLINEKKEDGKVFWQNLAGYKRQEALRPYLSSEEDRKKGKKFARYQLGDLLLHLEKKHGEDWGKVYDEAWERIDKKVEGLSKHIKLEEERRSEDAQSKAALTDWLRAKASFVIEGLKEADKDEFCRCELKLQKWYGDLRGKPFAIEAENSILDISGFSKQYNCAFIWQKDGVKKLNLYLIINYFKGGKLRFKKIKPEAFEANRFYTVINKKSGEIVPMEVNFNFDDPNLIILPLAFGKRQGREFIWNDLLSLETGSLKLANGRVIEKTLYNRRTRQDEPALFVALTFERREVLDSSNIKPMNLIGVDRGENIPAVIALTDPEGCPLSRFKDSLGNPTHILRIGESYKEKQRTIQAKKEVEQRRAGGYSRKYASKAKNLADDMVRNTARDLLYYAVTQDAMLIFENLSRGFGRQGKRTFMAERQYTRMEDWLTAKLAYEGLPSKTYLSKTLAQYTSKTCSNCGFTITSADYDRVLEKLKKTATGWMTTINGKELKVEGQITYYNRYKRQNVVKDLSVELDRLSEESVNNDISSWTKGRSGEALSLLKKRFSHRPVQEKFVCLNCGFETHADEQAALNIARSWLFLRSQEYKKYQTNKTTGNTDKRAFVETWQSFYRKKLKEVWKPAV

SEQ ID NO: 28616 - protein, 978 aa, synthetic construct
  REGION 1..978: note = engineered CasX variant
QEIKRLNKIRRRLVKDSNTKKAGKTGPMKTLLVRVMTPDLRERLENLRKKPENIPQPISNTSRANLNKLLTDYTEMKKAILHVYWEEFQKDPVGLMSRVAQPASKKIDQNKLKPEMDEKGNLTTAGFACSQCGQPLFVYKLEQVSEKGKAYTNYFGRCNVAEHEKLILLAQLKPEKDSDEAVTYSLGKFGQRALDFYSIHVTKESTHPVKPLAQIAGNRYASGPVGKALSDACMGTIASFLSKYQDIIIEHQKVVKGNQKRLESLRELAGKENLEYPSVTLPPQPHTKEGLDAYNEVIARVRMWVNLNLWQKLKLSRDDAKPLLRLKGFPSFPLVERQANEVDWWDMVCNVKKLINEKKEDGKVFWQNLAGYKRQEALRPYLSSEEDRKKGKKFARYQLGDLLLHLEKKHGEDWGKVYDEAWERIDKKVEGLSKHIKLEEERRSEDAQSKAALTDWLRAKASFVIEGLKEADKDEFCRCELKLQKWYGDLRGKPFAIEAENSILDISGFSKQYNCAFIWQKDGVKKLNLYLIINYFKGGKLRFKKIKPEAFEANRFYTVINKKSGEIVPMEVNFNFDDPNLIILPLAFGKRQGREFIWNDLLSLETGSLKLANGRVIEKTLYNRRTRQDEPALFVALTFERREVLDSSNIKPMNLIGVDRGENIPAVIALTDPEGCPLSRFKDSLGNPTHILRIGESYKEKQRTIQAKKEVEQRRAGGYSRKYASKAKNLADDMVRNTARDLLYYAVTQDAMLIFENLSRGFGRQGKRTFMAERQYTRMEDWLTAKLAYEGLPSKTYLSKTLAQYTSKTCSNCGFTITSADYDRVLEKLKKTATGWMTTINGKELKVEGQITYYNRYKRQNVVKDLSVELDRLSEESVNNDISSWTKGRSGEALSLLKKRFSHRPVQEKFVCLNCGFETHADEQAALNIARSWLFLRSQEYKKYQTNKTTGNTDKRAFVETWQSFYRKKLKEVWKPAV

SEQ ID NO: 28617 - protein, 978 aa, synthetic construct
  REGION 1..978: note = engineered CasX variant
QEIKRINKIRRRLVKDSNTKKAGKTGPMKTLLVRVMTPDLRERLENLRKKPENIPQPISNTSRANLNKLLTDYTEMKKAILHVYWEEFQKDPVGLMSRVAQPASKKIDQNKLKPEMDEKGNLTTAGFACSQCGQPLFVYKLEQVSEKGKAYTNYVGRCNVAEHEKLILLAQLKPEKDSDEAVTYSLGKFGQRALDFYSIHVTKESTHPVKPLAQIAGNRYASGPVGKALSDACMGTIASFLSKYQDIIIEHQKVVKGNQKRLESLRELAGKENLEYPSVTLPPQPHTKEGLDAYNEVIARVRMWVNLNLWQKLKLSRDDAKPLLRLKGFPSFPLVERQANEVDWWDMVCNVKKLINEKKEDGKVFWQNLAGYKRQEALRPYLSSEEDRKKGKKFARYQLGDLLLHLEKKHGEDWGKVYDEAWERIDKKVEGLSKHIKLEEERRSEDAQSKAALTDWLRAKASFVIEGLKEADKDEFCRCELKLQKWYGDLRGKPFAIEAENSILDISGFSKQYNCAFIWQKDGVKKLNLYLIINYFKGGKLRFKKIKPEAFEANRFYTVINKKSGEIVPMEVNFNFDDPNLIILPLAFGKRQGREFIWNDLLSLETGSLKLANGRVIEKTLYNRRTRQDEPALFVALTFERREVLDSSNIKPMNLIGVDRGENIPAVIALTDPEGCPLSRFKDSLGNPTHILRIGESYKEKQRTIQAKKEVEQRRAGGYSRKYASKAKNLADDMVRNTARDLLYYAVTQDAMLIFENLSRGFGRQGKRTFMAERQYTRMEDWLTAKLAYEGLPSKTYLSKTLAQYTSKTCSNCGFTITSADYDRVLEKLKKTATGWMTTINGKELKVEGQITYYNRYKRQNVVKDLSVELDRLSEESVNNDISSWTKGRSGEALSLLKKRFSHRPVQEKFVCLNCGFETHADEQAALNIARSWLFLRSQEYKKYQTNKTTGNTDKRAFVETWQSFYRKKLKEVWKPAV

SEQ ID NO: 28618 - protein, 978 aa, synthetic construct
  REGION 1..978: note = engineered CasX variant
QEIKRINKIRRRLVKDSNTKKAGKTGPMKTLLVRVMTPDLRERLENLRKKPENIPQPISNTSRANLNKLLTDYTEMKKAILHVYWEEFQKDPVGLMSRVAQPASKKIDQNKLKPEMDEKGNLTTAGFACSQCGQPLFVYKLEQVSEKGKAYTNYFGRCNVAEHEKLILLAQLKPEKDSDEAVTYSLGKFGQRALDFYSIHVTKESTHPVKPLAQIAGNRYASGPVGKALSDACMGTIASFLSKYQDIIIEHQKVVKGNQKRLESLRELAGKENLEYPSVTLPPQPHTKEGLDAYNEVIARVRMWVNLNLWQKLKLSRDDAKPLLRLKGFPSFPLVERQANEVDWWDMVCNVKKLINEKKEDGKVFWQNLAGYKRQEALRPYLSSEEDRKKGKKFARYQLGDLLLHLEKKHGEDWGKVYDEAWERIDKKVEGLSKHIKLEEERRSEDAQSKAALTDWLRAKASFVIEGLKEADKDEFCRCELKLQKWYGDLRGKPFAIEAENSILDISGFSKQYNCAFIWQKDGVKKLNLYLIINYFKGGKLRFKKIKPEAFEANRFYTVINKKSGEIVPMEVNFNFDDPNLIILPLAFGKRQGREFIWNDLLSLETGSLKLANGRVIEKTLYNRRTRQDEPALFVALTFERREVLDSSNIKPMNLIGVDRGENIPAVIALTDPEGCPLSRFKDSLGNPTHILRIGESYKEKQRTIQAKKEVEQRRAGGYSRKYASKAKNLADDMVRNTARDLLYYAVTQDAMLIFENLSRGFGRQGKRTFMAERQYTRMEDWLTAKLAYEGLASKTYLSKTLAQYTSKTCSNCGFTITSADYDRVLEKLKKTATGWMTTINGKELKVEGQITYYNRYKRQNVVKDLSVELDRLSEESVNNDISSWTKGRSGEALSLLKKRFSHRPVQEKFVCLNCGFETHADEQAALNIARSWLFLRSQEYKKYQTNKTTGNTDKRAFVETWQSFYRKKLKEVWKPAV

SEQ ID NO: 28619 - protein, 978 aa, synthetic construct
  REGION 1..978: note = engineered CasX variant
QEIKRINKIRRRLVKDSNTKKAGKTGPMKTLLVRVMTPDLRERLENLRKKPENIPQPISNTSRANLNKLLTDYTEMKKAILHVYWEEFQKDPVGLMSRVAQPASKKIDQNKLKPEMDEKGNLTTAGFACSQCGQPLFVYKLEQVSEKGKAYTNYFGRCNVAEHEKLILLAQLKPEKDSDEAVTYSLGKFGQRALDFYSIHVTKESTHPVKPLAQIAGNRYASGPVGKALSDACMGTIASFLSKYQDIIIEHQKVVKGNQKRLESLRELAGKENLEYPSVTLPPQPHTKEGLDAYNEVIARVRMWVNLNLWQKLKLSRDDAKPLLRLKGFPSFPLVERQANEVDWWDMVCNVKKLINEKKEDGKVFWQNLAGYKRQEALRPYLSSEEDRKKGKKFARYQLGDLLLHLEKKHGEDWGKVYDEAWERIDKKVEGLSKHIKLEEERRSEDAQSKAALTDWLRAKASFVIEGLKEADKDEFCRCELKLQKWYGDLRGKPFAIEAENSILDISGFSKQYNCAFIWQKDGVKKLNLYLIINYFKGGKLRFKKIKPEAFEANRFYTVINKKSGEIVPMEVNFNFDDPNLIILPLAFGKRQGREFIWNDLLSLETGSLKLANGRVIEKTLYNRRTRQDEPALFVALTFERREVLDSSNIKPMNLIGVDRGENIPAVIALTDPEGCPLSRFKDSLGNPTHILRIGESYKEKQRTIQAKKEVEQRRAGGYSRKYASKAKNLADDMVRNTARDLLYYAVTQDAMLIFENLSRGFGRQGKRTFMAERQYTRMEDWLTAKLAYEGLPSKVYLSKTLAQYTSKTCSNCGFTITSADYDRVLEKLKKTATGWMTTINGKELKVEGQITYYNRYKRQNVVKDLSVELDRLSEESVNNDISSWTKGRSGEALSLLKKRFSHRPVQEKFVCLNCGFETHADEQAALNIARSWLFLRSQEYKKYQTNKTTGNTDKRAFVETWQSFYRKKLKEVWKPAV

SEQ ID NO: 28620 - protein, 979 aa, synthetic construct
  REGION 1..979: note = engineered CasX variant
QEIKRINKIRRRLVKDSNTKKAGKTGPMKTLLVRVMTPDLRERLENLRKKPENIPQPISNTSRANLNKLLTDYTEMKKAILHVYWEEFQKDPVGLMSRVAQPASKKIDQNKLKPEMDEKGNLTTAGFACSQCGQPLFVYKLEQVSEKGKAYTNYFGRCNVAEHEKLILLAQLKPEKDSDEAVTYSLGKFGQRALDFYSIHVTKESTHPVKPLAQIAGNRYASGPVGKALSDACMGTIASFLSKYQDIIIEHQKVVKGNQKRLESLRELAGKENLEYPSVTLPPQPHTKEGLDAYNEVIARVRMWVNLNLWQKLKLSRDDAKPLLRLKGFPSFPLVERQANEVDWWDMVCNVKKLINEKKEDGKVFWQNLAGYKRQEALRPYLSSEEDRKKGKKFARYQLGDLLLHLEKKHGEDWGKVYDEAWERIDKKVEGLSKHIKLEEERRSEDAQSKAALTDWLRAKASFVIEGLKEADKDEFCRCELKLQKWYGDLRGKPFAIEAENSILDISGFSKQYNCAFIWQKDGVKKLNLYLIINYFKGGKLRFKKIKPEAFEANRFYTVINKKSGEIVPMEVNFNFDDPNLIILPLAFGKRQGREFIWNDLLSLETGSLKLANGRVIEKTLYNRRTRQDEPALFVALTFERREVLDSSNIKPMNLIGVDRGENIPAVIALTDPEGCPLSRFKDSLGNPTHILRIGESYKEKQRTIQAKKEVEQRRAGGYSRKYASKAKNLADDMVRNTARDLLYYAVTQDAMLIFENLSRGFGRQGKRTFMAERQYTRMEDWLTAKLAYEGPLPSKTYLSKTLAQYTSKTCSNCGFTITSADYDRVLEKLKKTATGWMTTINGKELKVEGQITYYNRYKRQNVVKDLSVELDRLSEESVNNDISSWTKGRSGEALSLLKKRFSHRPVQEKFVCLNCGFETHADEQAALNIARSWLFLRSQEYKKYQTNKTTGNTDKRAFVETWQSFYRKKLKEVWKPAV

SEQ ID NO: 28621 - protein, 979 aa, synthetic construct
  REGION 1..979: note = engineered CasX variant
QEIKRINKIRRRLVKDSNTKKAGKTGPMKTLLVRVMTPDLRERLENLRKKPENIPQPISNTSRANLNKLLTDYTEMKKAILHVYWEEFQKDPVGLMSRVAQPASKKIDQNKLKPEMDEKGNLTTAGFACSQCGQPLFVYKLEQVSEKGKAYTNYFGRCNVAEHEKLILLAQLKPEKDSDEAVTYSLGKFGQRALDFYSIHVTKESTHPVKPLAQIAGNRYASGPVGKALSDACMGTIASFLSKYQDIIIEHQKVVKGNQKRLESLRELAGKENLEYPSVTLPPQPHTKEGLDAYNEVIARVRMWVNLNLWQKLKLSRDDAKPLLRLKGFPSFPLVERQANEVDWWDMVCNVKKLINEKKEDGKVFWQNLAGYKRQEALRPYLSSEEDVRKKGKKFARYQLGDLLLHLEKKHGEDWGKVYDEAWERIDKKVEGLSKHIKLEEERRSEDAQSKAALTDWLRAKASFVIEGLKEADKDEFCRCELKLQKWYGDLRGKPFAIEAENSILDISGFSKQYNCAFIWQKDGVKKLNLYLIINYFKGGKLRFKKIKPEAFEANRFYTVINKKSGEIVPMEVNFNFDDPNLIILPLAFGKRQGREFIWNDLLSLETGSLKLANGRVIEKTLYNRRTRQDEPALFVALTFERREVLDSSNIKPMNLIGVDRGENIPAVIALTDPEGCPLSRFKDSLGNPTHILRIGESYKEKQRTIQAKKEVEQRRAGGYSRKYASKAKNLADDMVRNTARDLLYYAVTQDAMLIFENLSRGFGRQGKRTFMAERQYTRMEDWLTAKLAYEGLPSKTYLSKTLAQYTSKTCSNCGFTITSADYDRVLEKLKKTATGWMTTINGKELKVEGQITYYNRYKRQNVVKDLSVELDRLSEESVNNDISSWTKGRSGEALSLLKKRFSHRPVQEKFVCLNCGFETHADEQAALNIARSWLFLRSQEYKKYQTNKTTGNTDKRAFVETWQSFYRKKLKEVWKPAV

SEQ ID NO: 28622 - protein, 978 aa, synthetic construct
  REGION 1..978: note = engineered CasX variant
QEIKRINKIRRRLVKDSNTKKAGKTGPMKTLLVRVMTPDLRERLENLRKKPENIPQPISNTSRANLNKLLTDYTEMKKAILHVYWEEFQKDPVGLMSRVAQPASKKIDQNKLKPEMDEKGNLTTAGFACSQCGQPLFVYKLEQVSEKGKAYTNYFGRCNVAEHEKLILLAQLKPEKDSDEAVTYSLGKFGQRALDFYSIHVTKESTHPVKPLAQIAGNRYASGPVGKALSDACMGTIASFLSKYQDIIIEHQKVVKGNQKRLESLRELAGKENLEYPSVTLPPQPHTKEGLDAYNEVIARVRMWVNLNLWQKLKLSRDDAKPLLRLKGFPSFPLVERQANEVDWWDMVCNVKKLINEKKEDGKVFWQNLAGYKRQEALRPYLSSEEDRKKGKKFARYQLGDLLLHLEKKHGEDWGKVYDEAWERIDKKVEGLSKHIKLEEERRSEDAQSKAALTDWLRAKASFVIEGLKEADKDEFCRCELKLQKWYGDLRGKPFAIEAENSILDISGFSKQYNCAFIWQKDGVKKLNLYLIINYFKGGKLRFKKIKPEAFEANRFYTVINKKSGEIVPMEVNFNFDDPNLIILPLAFGKRQGREFIWNDLLSLETGSLKLANGRVIEKTLYNRRTRQDEPALFVALTFERREVLDSSNIKPMNLIGVDRGENIPAVIALTDPEGCPLSRFKDSLGNPTHILRIGESYKEKQRTIQAKKEVEQRRAGGYSRKYASKAKNLADDMVRNTARDLLYYAVTQDAMLIFENLSRGFGRQGKRTFMAERQYTRMEDWLTAKLAYEGLPSKTYLSKTLAQYTSKTCSNCGFTITSADYDRMLEKLKKTATGWMTTINGKELKVEGQITYYNRYKRQNVVKDLSVELDRLSEESVNNDISSWTKGRSGEALSLLKKRFSHRPVQEKFVCLNCGFETHADEQAALNIARSWLFLRSQEYKKYQTNKTTGNTDKRAFVETWQSFYRKKLKEVWKPAV

SEQ ID NO: 28623 - protein, 978 aa, synthetic construct
  REGION 1..978: note = engineered CasX variant
QEIKRINKIRRRLVKDSNTKKAGKTGPMKTLLVRVMTPDLRERLENLRKKPENIPQPISNTSRANLNKLLTDYTEMKKAILHVYWEEFQKDPVGLMSRVAQPASKKIDQNKLKPEMDEKGNLTTAGFACSQCGQPLFVYKLEQVSEKGKAYTNYFGRCNVAEHEKLILLAQLKPEKDSDEAVTYSLGKFGQRALDFYSIHVTKESTHPVKPLAQIAGNRYASGPVGKALSDACMGTIASFLSKYQDIIIEHQKVVKGNQKRLESLRELAGKENLEYPSVTLPPQPHTKEGLDAYNEVIARVRMWVNLNLWQKLKLSRDDAKPLLRLKGFPSFPLVERQANEVDWWDMVCNVKKLINEKKEDGKVFWQNLAGYKRQEALRPYLSSEEDRKKGKKFARYQLGDLLLHLEKKHGEDWGKVYDEAWERIDKKVEGLSKHIKLEEERRSEDAQSKAALTDWLRAKASFVIEGLKEADKDEFCRCELKLQKWYGDLRGKPFAIEAENSILDISGFSKQYNCAFIWQKDGVKKLNLYLIINYFKGGKLRFKKIKPEAFEANRFYTVINKKSGEIVPMEVNFNFDDPNLIILPLAFGKRQGREFIWNDLLSLETGSLKLANGRVIEKTLYNRRTRQDEPALFVALTFERREVLDSSNIKPMNLIGVDRGENIPAVIALTDPEGCPLSRFKDSLGNPTHILRIGESYKEKQRTIQAKKEVEQRRAGGYSRKYASKAKNLADDMVRNTARDLLYYAVTQDAMLIFENLSRGFGRQGKRTFMAERQYTRMEDWLTAKLAYEGLPSKTYLSKTLAQYTSKTCSNCGFTITSADYDRVLEKLKKTATGWMTTINGKELKVEGQITYYNRYKRQNVVKDLSVELDRLSEESVNNDISSWTKGRQGEALSLLKKRFSHRPVQEKFVCLNCGFETHADEQAALNIARSWLFLRSQEYKKYQTNKTTGNTDKRAFVETWQSFYRKKLKEVWKPAV

SEQ ID NO: 28624 - protein, 978 aa, synthetic construct
  REGION 1..978: note = engineered CasX variant
QEIKRINKIRRRLVKDSNTKKAGKTGPMKTLLVRVMTPDLRERLENLRKKPENIPQPISNTSRANLNKLLTDYTEMKKAILHVYWEEFQKDPVGLMSRVAQPASKKIDQNKLKPEMDEKGNLTTAGFACSQCGQPLFVYKLEQVSEKGKAYTNYFGRCNVAEHEKLILLAQLKPEKDSDEAVTYSLGKFGQRALDFYSIHVTKESTHPVKPLAQIAGNRYASGPVGKALSDACMGTIASFLSKYQDIIIEHQKVVKGNQKRLESLRELAGKENLEYPSVTLPPQPHTKEGLDAYNEVIARVRMWVNLNLWQKLKLSRDDAKPLLRLKGFPSFPLVERQANEVDWWDMVCNVKKLINEKKEDGKVFWQNLAGYKRQEALRPYLSSEEDRKKGKKFARYQLGDLLLHLEKKHGEDWGKVYDEAWERIDKKVEGLSKHIKLEEERRSEDAQSKAALTDWLRAKASFVIEGLKEADKDEFCRCELKLQKWYGDLRGKPFAIEAENSILDISGFSKQYNCAFIWQKDGVKKLNLYLIINYFKGGKLRFKKIKPEAFEANRFYTVINKKSGEIVPMEVNFNFDDPNLIILPLAFGKRQGREFIWNDLLSLETGSLKLANGRVIEKTLYNRRTRQDEPALFVALTFERREVLDSSNIKPMNLIGVDRGENIPAVIALTDPEGCPLSRFKDSLGNPTHILRIGESYKEKQRTIQAKKEVEQRRAGGYSRKYASKAKNLADDMVRNTARDLLYYAVTQDAMLIFENLSRGFGRQGKRTFMAERQYTRMEDWLTAKLAYEGLPSKTYLSKTLAQYTSKTCSNCGFTITSADYDRVLEKLKKTATGWMTTINGKELKVEGQITYYNRYKRQNVVKDLSVELDRLSEESVNNDISSWTKGRSGEALSLLKKRFSHRPVQEKFVCLNCEFETHADEQAALNIARSWLFLRSQEYKKYQTNKTTGNTDKRAFVETWQSFYRKKLKEVWKPAV

SEQ ID NO: 28625 - protein, 979 aa, synthetic construct
  REGION 1..979: note = engineered CasX variant
QEIKRINKIRRRLVKDSNTKKAGKTGPMKTLLVRVMTPDLRERLENLRKKPENIPQPISNTSRANLNKLLTDYTEMKKAILHVYWEEFQKDPVGLMSRVAQPASKKIDQNKLKPEMDEKGNLTTAGFACSQCGQPLFVYKLEQVSEKGKAYTNYFGRCNVAEHEKLILLAQLKPEKDSDEAVTYSLGKFGQRALDFYSIHVTKESTHPVKPLAQIAGNRYASGPVGKALSDACMGTIASFLSKYQDIIIEHQKVVKGNQKRLESLRELAGKENLEYPSVTLPPQPHTKEGLDAYNEVIARVRMWVNLNLWQKLKLSRDDAKPLLRLKGFPSFPLVERQANEVDWWDMVCNVKKLINEKKEDGKVFWQNLAGYKRQEALRPYLSSEEDRKKGKKFARYQLGDLLLHLEKKHGEDWGKVYDEAWERIDKKVEGLSKHIKLEEERRSEDAQSKAALTDWLRAKASFVIEGLKEADKDEFCRCELKLQKWYGDLRGKPFAIEAENSILDISGFSKQYNCAFIWQKDGVKKLNLYLIINYFKGGKLRFKKIKPEAFEANRFYTVINKKSGEIVPMEVNFNFDDPNLIILPLAFGKRQGREFIWNDLLSLETGSLKLANGRVIEKTLYNRRTRQDEPALFVALTFERREVLDSSNIKPMNLIGVDRGENIPAVIALTDPEGCPLSRFKDSLGNPTHILRIGESYKEKQRTIQAKKEVEQRRAGGYSRKYASKAKNLADDMVRNTARDLLYYAVTQDAMLIFENLSRGFGRQGKRTFMAERQYTRMEDWLTAKLAYEGLPSKTYLSKTLAQYTSKTCSNCGFTITSADYDRVLEKLKKTATGWMTTINGKELKVEGQITYYNRYKRQNVVKDLSVELDRLSEESVNNDISSWTKGRSGEALSLLKKRFSHRPVQEKFVCLNCGFETHADEQAALNIARSWLFLRSQEYKKYQTNKTSTGNTDKRAFVETWQSFYRKKLKEVWKPAV

SEQ ID NO: 28626 - protein, 979 aa, synthetic construct
  REGION 1..979: note = engineered CasX variant
QEIKRINKIRRRLVKDSNTKKAGKTGPMKTLLVRVMTPDLRERLENLRKKPENIPQPISNTSRANLNKLLTDYTEMKKAILHVYWEEFQKDPVGLMSRVAQPASKKIDQNKLKPEMDEKGNLTTAGFACSQCGQPLFVYKLEQVSEKGKAYTNYFGRCNVAEHEKLILLAQLKPEKDSDEAVTYSLGKFGQRALDFYSIHVTKESTHPVKPLAQIAGNRYASGPVGKALSDACMGTIASFLSKYQDIIIEHQKVVKGNQKRLESLRELAGKENLEYPSVTLPPQPHTKEGLDAYNEVIARVRMWVNLNLWQKLKLSRDDAKPLLRLKGFPSFPLVERQANEVDWWDMVCNVKKLINEKKEDGKVFWQNLAGYKRQEALRPYLSSEEDRKKGKKFARYQLGDLLLHLEKKHGEDWGKVYDEAWERIDKKVEGLSKHIKLEEERRSEDAQSKAALTDWLRAKASFVIEGLKEADKDEFCRCELKLQKWYGDLRGKPFAIEAENSILDISGFSKQYNCAFIWQKDGVKKLNLYLIINYFKGGKLRFKKIKPEAFEANRFYTVINKKSGEIVPMEVNFNFDDPNLIILPLAFGKRQGREFIWNDLLSLETGSLKLANGRVIEKTLYNRRTRQDEPALFVALTFERREVLDSSNIKPMNLIGVDRGENIPAVIALTDPEGCPLSRFKDSLGNPTHILRIGESYKEKQRTIQAKKEVEQRRAGGYSRKYASKAKNLADDMVRNTARDLLYYAVTQDAMLIFENLSRGFGRQGKRTFMAERQYTRMEDWLTAKLAYEGLPSKTYLSKTLAQYTSKTCSNCGFTITSADYDRVLEKLKKTATGWMTTINGKELKVEGQITYYNRYKRQNVVKDLSVELDRLSEESVNNDISSWTKGRSGEALSLLKKRFSHRPVQEKFVCLNCGFETHADEQAALNIARSWLFLRSQEYKKYQTNKTTGKNTDKRAFVETWQSFYRKKLKEVWKPAV

SEQ ID NO: 28627 - protein, 978 aa, synthetic construct
  REGION 1..978: note = engineered CasX variant
QEIKRINKIRRRLVKDSNTKKAGKTGPMKTLLVRVMTPDLRERLENLRKKPENIPQPISNTSRANLNKLLTDYTEMKKAILHVYWEEFQKDPVGLMSRVAQPASKKIDQNKLKPEMDEKGNLTTAGFACSQCGQPLFVYKLEQVSEKGKAYTNYFGRCNVAEHEKLILLAQLKPEKDSDEAVTYSLGKFGQRALDFYSIHVTKESTHPVKPLAQIAGNRYASGPVGKALSDACMGTIASFLSKYQDIIIEHQKVVKGNQKRLESLRELAGKENLEYPSVTLPPQPHTKEGLDAYNEVIARVRMWVNLNLWQKLKLSRDDAKPLLRLKKFPSFPLVERQANEVDWWDMVCNVKKLINEKKEDGKVFWQNLAGYKRQEALRPYLSSEEDRKKGKKFARYQLGDLLLHLEKKHGEDWGKVYDEAWERIDKKVEGLSKHIKLEEERRSEDAQSKAALTDWLRAKASFVIEGLKEADKDEFCRCELKLQKWYGDLRGKPFAIEAENSILDISGFSKQYNCAFIWQKDGVKKLNLYLIINYFKGGKLRFKKIKPEAFEANRFYTVINKKSGEIVPMEVNFNFDDPNLIILPLAFGKRQGREFIWNDLLSLETGSLKLANGRVIEKTLYNRRTRQDEPALFVALTFERREVLDSSNIKPMNLIGVDRGENIPAVIALTDPEGCPLSRFKDSLGNPTHILRIGESYKEKQRTIQAKKEVEQRRAGGYSRKYASKAKNLADDMVRNTARDLLYYAVTQDAMLIFENLSRGFGRQGKRTFMAERQYTRMEDWLTAKLAYEGLPSKTYLSKTLAQYTSKTCSNCGFTITSADYDRVLEKLKKTATGWMTTINGKELKVEGQITYYNRYKRQNVVKDLSVELDRLSEESVNNDISSWTKGRSGEALSLLKKRFSHRPVQEKFVCLNCGFETHADEQAALNIARSWLFLRSQEYKKYQTNKTTGNTDKRAFVETWQSFYRKKLKEVWKPAV

SEQ ID NO: 28628 - protein, 978 aa, synthetic construct
  REGION 1..978: note = engineered CasX variant
QEIKRINKIRRRLVKDSNTKKAGKTGPMKTLLVRVMTPDLRERLENLRKKPENIPQPISNTSRANLNKLLTDYTEMKKAILHVYWEEFQKDPVGLMSRVAQPASKKIDQNKLKPEMDEKGNLTTAGFACSQCGQPLFVYKLEQVSEKGKAYTNYFGRCNVAEHEKLILLAQLKPEKDSDEAVTYSLGKFGQRALDFYSIHVTKESTHPVKPLAQIAGNRYASGPVGKALSDACMGTIASFLSKYQDIIIEHQKVVKGNQKRLESLRELAGKENLEYPSVTLPPQPHTKEGLDAYNEVIARVRMWVNLNLWQKLKLSRDDAKPLLRLKGFPSFPLVERQANEVDWWDMVCNVKKLINEKKEDGKVFWQNLAGYKRQEALRPYLSSEEDRKKGKKFARYQLGDLLLHLEKKHGEDWGKVYDEAWERIDKKVEGLSKHIKLEEERRSEDAQSKAALTDWLRAKASFVIEGLKEADKDEFCRCELKLQKWYGDLRGKPFAIEAENSILDISGFSKQYNCAFIWQKDGVKKLNLYLIINYFKGGKLRFKKIKPEAFEANRFYTVINKKSGEIVPMEVNFNFDDPNLIILPLAFGKRQGREFIWNDLLSLETGSLKLANGRVIEKTLYNRRTRQDEPALFVALTFERREVLDSSNIKPMNLIGVDRGENIPAVIALTDPEGCPLSRFKDSLGNPTHILRIGERYKEKQRTIQAKKEVEQRRAGGYSRKYASKAKNLADDMVRNTARDLLYYAVTQDAMLIFENLSRGFGRQGKRTFMAERQYTRMEDWLTAKLAYEGLPSKTYLSKTLAQYTSKTCSNCGFTITSADYDRVLEKLKKTATGWMTTINGKELKVEGQITYYNRYKRQNVVKDLSVELDRLSEESVNNDISSWTKGRSGEALSLLKKRFSHRPVQEKFVCLNCGFETHADEQAALNIARSWLFLRSQEYKKYQTNKTTGNTDKRAFVETWQSFYRKKLKEVWKPAV

SEQ ID NO: 28629 - protein, 978 aa, synthetic construct
  REGION 1..978: note = engineered CasX variant
QEIKRINKIRRRLVKDSNTKKAGKTGPMKTLLVRVMTPDLRERLENLRKKPENIPQPISNTSRANLNKLLTDYTEMKKAILHVYWEEFQKDPVGLMSRVAQPASKKIDQNKLKPEMDEKGNLTTAGFACSQCGQPLFVYKLEQVSEKGKAYTNYFGRCNVAEHEKLILLAQLKPEKDSDEAVTYSLGKFGQRALDFYSIHVTKESTHPVKPLAQIAGNRYASGPVGKALSDACMGTIASFLSKYQDIIIEHQKVVKGNQKRLESLRELAGKENLEYPSVTLPPQPHTKEGLDAYNEVIARVRMWVNLNLWQKLKLSRDDAKPLLRLKGFPSFPLVERQANEVDWWDMVCNVKKLINEKKEDGKVFWQNLAGYKRQEALRPYLSSEEDRKKGKKFARYQLGDLLLHLEKKHGEDWGKVYDEAWERIDKKVEGLSKHIKLEEERRSEDAQSKAALTDWLRAKASFVIEGLKEADKDEFCRCELKLQKWYGDLRGKPFAIEAENSILDISGFSKQYNCAFIWQKDGVKKLNLYLIINYFKGGKLRFKKIKPEAFEANRFYTVINKKSGEIVPMEVNFNFDDPNLIILPLAFGKRQGREFIWNDLLSLETGSLQLANGRVIEKTLYNRRTRQDEPALFVALTFERREVLDSSNIKPMNLIGVDRGENIPAVIALTDPEGCPLSRFKDSLGNPTHILRIGESYKEKQRTIQAKKEVEQRRAGGYSRKYASKAKNLADDMVRNTARDLLYYAVTQDAMLIFENLSRGFGRQGKRTFMAERQYTRMEDWLTAKLAYEGLPSKTYLSKTLAQYTSKTCSNCGFTITSADYDRVLEKLKKTATGWMTTINGKELKVEGQITYYNRYKRQNVVKDLSVELDRLSEESVNNDISSWTKGRSGEALSLLKKRFSHRPVQEKFVCLNCGFETHADEQAALNIARSWLFLRSQEYKKYQTNKTTGNTDKRAFVETWQSFYRKKLKEVWKPAV

SEQ ID NO: 28630 - protein, 979 aa, synthetic construct
  REGION 1..979: note = engineered CasX variant
QEIKRINKIRRRLVKDSNTKKAGKTGPMKTLLVRVMTPDLRERLENLRKKPENIPQPISNTSRANLNKLLTDYTEMKKAILHVYWEEFQKDPVGLMSRVAQPASKKIDQNKLKPEMDEKGNLTTAGFACSQCGQPLFVYKLEQVSEKGKAYTNYFGRCNVAEHEKLILLAQLKPEKDSDEAVTYSLGKFGQRALDFYSIHVTKESTHPVKPLAQIAGNRYASGPVGKALSDACMGTIASFLSKYQDIIIEHQKVVKGNQKRLESLRELAGKENLEYPSVTLPPQPHTKEGVDAYNEVIARVRTWWVNLNLWQKLKLSRDDAKPLLRLKGFPSFPLVERQANEVDWWDMVCNVKKLINEKKEDGKVFWQNLAGYKRQEALRPYLSSEEDRKKGKKFARYQLGDLLLHLEKKHGEDWGKVYDEAWERIDKKVEGLSKHIKLEEERRSEDAQSKAALTDWLRAKASFVIEGLKEADKDEFCRCELKLQKWYGDLRGKPFAIEAENSILDISGFSKQYNCAFIWQKDGVKKLNLYLIINYFKGGKLRFKKIKPEAFEANRFYTVINKKSGEIVPMEVNFNFDDPNLIILPLAFGKRQGREFIWNDLLSLETGSLKLANGRVIEKTLYNRRTRQDEPALFVALTFERREVLDSSNIKPMNLIGVDRGENIPAVIALTDPEGCPLSRFKDSLGNPTHILRIGESYKEKQRTIQAKKEVEQRRAGGYSRKYASKAKNLADDMVRNTARDLLYYAVTQDAMLIFENLSRGFGRQGKRTFMAERQYTRMEDWLTAKLAYEGLPSKTYLSKTLAQYTSKTCSNCGFTITSADYDRVLEKLKKTATGWMTTINGKELKVEGQITYYNRYKRQNVVKDLSVELDRLSEESVNNDISSWTKGRSGEALSLLKKRFSHRPVQEKFVCLNCGFETHADEQAALNIARSWLFLRSQEYKKYQTNKTTGNTDKRAFVETWQSFYRKKLKEVWKPAV

SEQ ID NO: 28631 - protein, 979 aa, synthetic construct
  REGION 1..979: note = engineered CasX variant
QEIKRINKIRRRLVKDSNTKKAGKTGPMKTLLVRVMTPDLRERLENLRKKPENIPQPISNTSRANLNKLLTDYTEMKKAILHVYWEEFQKDPVGLMSRVAQPASKKIDQNKLKPEMDEKGNLTTAGFACSQCGQPLFVYKLEQVSEKGKAYTNYFGRCNVAEHEKLILLAQLKPEKDSDEAVTYSLGKFGQRALDFYSIHVTKESTHPVKPLAQIAGNRYASGPVGKALSDACMGTIASFLSKYQDIIIEHQKVVKGNQKRLESLRELAGKENLEYPSVTLPPQPHTKEGVDAYNEVIARVRTWVNLNLWQKLKLSRDDAKPLLRLKGFPSFPLVERQQANEVDWWDMVCNVKKLINEKKEDGKVFWQNLAGYKRQEALRPYLSSEEDRKKGKKFARYQLGDLLLHLEKKHGEDWGKVYDEAWERIDKKVEGLSKHIKLEEERRSEDAQSKAALTDWLRAKASFVIEGLKEADKDEFCRCELKLQKWYGDLRGKPFAIEAENSILDISGFSKQYNCAFIWQKDGVKKLNLYLIINYFKGGKLRFKKIKPEAFEANRFYTVINKKSGEIVPMEVNFNFDDPNLIILPLAFGKRQGREFIWNDLLSLETGSLKLANGRVIEKTLYNRRTRQDEPALFVALTFERREVLDSSNIKPMNLIGVDRGENIPAVIALTDPEGCPLSRFKDSLGNPTHILRIGESYKEKQRTIQAKKEVEQRRAGGYSRKYASKAKNLADDMVRNTARDLLYYAVTQDAMLIFENLSRGFGRQGKRTFMAERQYTRMEDWLTAKLAYEGLPSKTYLSKTLAQYTSKTCSNCGFTITSADYDRVLEKLKKTATGWMTTINGKELKVEGQITYYNRYKRQNVVKDLSVELDRLSEESVNNDISSWTKGRSGEALSLLKKRFSHRPVQEKFVCLNCGFETHADEQAALNIARSWLFLRSQEYKKYQTNKTTGNTDKRAFVETWQSFYRKKLKEVWKPAV

SEQ ID NO: 28632 - protein, 979 aa, synthetic construct
  REGION 1..979: note = engineered CasX variant
QEIKRINKIRRRLVKDSNTKKAGKTGPMKTLLVRVMTPDLRERLENLRKKPENIPQPISNTSRANLNKLLTDYTEMKKAILHVYWEEFQKDPVGLMSRVAQPASKKIDQNKLKPEMDEKGNLTTAGFACSQCGQPLFVYKLEQVSEKGKAYTNYFGRCNVAEHEKLILLAQLKPEKDSDEAVTYSLGKFGQRALDFYSIHVTKESTHPVKPLAQIAGNRYASGPVGKALSDACMGTIASFLSKYQDIIIEHQKVVKGNQKRLESLRELAGKENLEYPSVTLPPQPHTKEGVDAYNEVIARVRTWVNLNLWQKLKLSRDDAKPLLRLKGFPSFPLVERQANAEVDWWDMVCNVKKLINEKKEDGKVFWQNLAGYKRQEALRPYLSSEEDRKKGKKFARYQLGDLLLHLEKKHGEDWGKVYDEAWERIDKKVEGLSKHIKLEEERRSEDAQSKAALTDWLRAKASFVIEGLKEADKDEFCRCELKLQKWYGDLRGKPFAIEAENSILDISGFSKQYNCAFIWQKDGVKKLNLYLIINYFKGGKLRFKKIKPEAFEANRFYTVINKKSGEIVPMEVNFNFDDPNLIILPLAFGKRQGREFIWNDLLSLETGSLKLANGRVIEKTLYNRRTRQDEPALFVALTFERREVLDSSNIKPMNLIGVDRGENIPAVIALTDPEGCPLSRFKDSLGNPTHILRIGESYKEKQRTIQAKKEVEQRRAGGYSRKYASKAKNLADDMVRNTARDLLYYAVTQDAMLIFENLSRGFGRQGKRTFMAERQYTRMEDWLTAKLAYEGLPSKTYLSKTLAQYTSKTCSNCGFTITSADYDRVLEKLKKTATGWMTTINGKELKVEGQITYYNRYKRQNVVKDLSVELDRLSEESVNNDISSWTKGRSGEALSLLKKRFSHRPVQEKFVCLNCGFETHADEQAALNIARSWLFLRSQEYKKYQTNKTTGNTDKRAFVETWQSFYRKKLKEVWKPAV

SEQ ID NO: 28633 - protein, 978 aa, synthetic construct
  REGION 1..978: note = engineered CasX variant
QEIKRINKIRRRLVKDSNTKKAGKTGPMKTLLVRVMTPDLRERLENLRKKPENIPQPISNTSRANLNKLLTDYTEMKKAILHVYWEEFQKDPVGLMSRVAQPASKKIDQNKLKPEMDEKGNLTTAGFACSQCGQPLFVYKLEQVSEKGKAYTNYFGRCNVAEHEKLILLAQLKPEKDSDEAVTYSLGKFGQRALDFYSIHVTKESTHPVKPLAQIAGNRYASGPVGKALSDACMGTIASFLSKYQDIIIEHQKVVKGNQKRLESLRELAGKENLEYPSVTLPPQPHTKEGVDAYNEVIARVRTWVNLNLWQKLKLSRDDAKPLLRLKGFPSFPLVERQANEVDWWDMVCNVKKLINEKKEDGKVFWQNLAGYKRQEALRPYLSSEEDRKKGKKFARTQLGDLLLHLEKKHGEDWGKVYDEAWERIDKKVEGLSKHIKLEEERRSEDAQSKAALTDWLRAKASFVIEGLKEADKDEFCRCELKLQKWYGDLRGKPFAIEAENSILDISGFSKQYNCAFIWQKDGVKKLNLYLIINYFKGGKLRFKKIKPEAFEANRFYTVINKKSGEIVPMEVNFNFDDPNLIILPLAFGKRQGREFIWNDLLSLETGSLKLANGRVIEKTLYNRRTRQDEPALFVALTFERREVLDSSNIKPMNLIGVDRGENIPAVIALTDPEGCPLSRFKDSLGNPTHILRIGESYKEKQRTIQAKKEVEQRRAGGYSRKYASKAKNLADDMVRNTARDLLYYAVTQDAMLIFENLSRGFGRQGKRTFMAERQYTRMEDWLTAKLAYEGLPSKTYLSKTLAQYTSKTCSNCGFTITSADYDRVLEKLKKTATGWMTTINGKELKVEGQITYYNRYKRQNVVKDLSVELDRLSEESVNNDISSWTKGRSGEALSLLKKRFSHRPVQEKFVCLNCGFETHADEQAALNIARSWLFLRSQEYKKYQTNKTTGNTDKRAFVETWQSFYRKKLKEVWKPAV

SEQ ID NO: 28634 - protein, 979 aa, synthetic construct
  REGION 1..979: note = engineered CasX variant
QEIKRINKIRRRLVKDSNTKKAGKTGPMKTLLVRVMTPDLRERLENLRKKPENIPQPISNTSRANLNKLLTDYTEMKKAILHVYWEEFQKDPVGLMSRVAQPASKKIDQNKLKPEMDEKGNLTTAGFACSQCGQPLFVYKLEQVSEKGKAYTNYFGRCNVAEHEKLILLAQLKPEKDSDEAVTYSLGKFGQRALDFYSIHVTKESTHPVKPLAQIAGNRYASGPVGKALSDACMGTIASFLSKYQDIIIEHQKVVKGNQKRLESLRELAGKENLEYPSVTLPPQPHTKEGVDAYNEVIARVRTWVNLNLWQKLKLSRDDAKPLLRLKGFPSFPLVERQANEVDWWDMVCNVKKLINEKKEDGKVFWQNLAGYKRQEALRPYLSSEEDRKKGKKFARYQLGDLLLHLEKKHEGEDWGKVYDEAWERIDKKVEGLSKHIKLEEERRSEDAQSKAALTDWLRAKASFVIEGLKEADKDEFCRCELKLQKWYGDLRGKPFAIEAENSILDISGFSKQYNCAFIWQKDGVKKLNLYLIINYFKGGKLRFKKIKPEAFEANRFYTVINKKSGEIVPMEVNFNFDDPNLIILPLAFGKRQGREFIWNDLLSLETGSLKLANGRVIEKTLYNRRTRQDEPALFVALTFERREVLDSSNIKPMNLIGVDRGENIPAVIALTDPEGCPLSRFKDSLGNPTHILRIGESYKEKQRTIQAKKEVEQRRAGGYSRKYASKAKNLADDMVRNTARDLLYYAVTQDAMLIFENLSRGFGRQGKRTFMAERQYTRMEDWLTAKLAYEGLPSKTYLSKTLAQYTSKTCSNCGFTITSADYDRVLEKLKKTATGWMTTINGKELKVEGQITYYNRYKRQNVVKDLSVELDRLSEESVNNDISSWTKGRSGEALSLLKKRFSHRPVQEKFVCLNCGFETHADEQAALNIARSWLFLRSQEYKKYQTNKTTGNTDKRAFVETWQSFYRKKLKEVWKPAV

SEQ ID NO: 28635 - protein, 978 aa, synthetic construct
  REGION 1..978: note = engineered CasX variant
QEIKRINKIRRRLVKDSNTKKAGKTGPMKTLLVRVMTPDLRERLENLRKKPENIPQPISNTSRANLNKLLTDYTEMKKAILHVYWEEFQKDPVGLMSRVAQPASKKIDQNKLKPEMDEKGNLTTAGFACSQCGQPLFVYKLEQVSEKGKAYTNYFGRCNVAEHEKLILLAQLKPEKDSDEAVTYSLGKFGQRALDFYSIHVTKESTHPVKPLAQIAGNRYASGPVGKALSDACMGTIASFLSKYQDIIIEHQKVVKGNQKRLESLRELAGKENLEYPSVTLPPQPHTKEGVDAYNEVIARVRTWVNLNLWQKLKLSRDDAKPLLRLKGFPSFPLVERQANEVDWWDMVCNVKKLINEKKEDGKVFWQNLAGYKRQEALRPYLSSEEDRKKGKKFARYQLGDLLLHLEKKHGEDWGKVYDEAWERIDKKVEGLSKHIKLEEERRSEDAQSKAALTDWLRAKASFVIEGLKEADKDEFCRCDLKLQKWYGDLRGKPFAIEAENSILDISGFSKQYNCAFIWQKDGVKKLNLYLIINYFKGGKLRFKKIKPEAFEANRFYTVINKKSGEIVPMEVNFNFDDPNLIILPLAFGKRQGREFIWNDLLSLETGSLKLANGRVIEKTLYNRRTRQDEPALFVALTFERREVLDSSNIKPMNLIGVDRGENIPAVIALTDPEGCPLSRFKDSLGNPTHILRIGESYKEKQRTIQAKKEVEQRRAGGYSRKYASKAKNLADDMVRNTARDLLYYAVTQDAMLIFENLSRGFGRQGKRTFMAERQYTRMEDWLTAKLAYEGLPSKTYLSKTLAQYTSKTCSNCGFTITSADYDRVLEKLKKTATGWMTTINGKELKVEGQITYYNRYKRQNVVKDLSVELDRLSEESVNNDISSWTKGRSGEALSLLKKRFSHRPVQEKFVCLNCGFETHADEQAALNIARSWLFLRSQEYKKYQTNKTTGNTDKRAFVETWQSFYRKKLKEVWKPAV

SEQ ID NO: 28636 - protein, 978 aa, synthetic construct
  REGION 1..978: note = engineered CasX variant
QEIKRINKIRRRLVKDSNTKKAGKTGPMKTLLVRVMTPDLRERLENLRKKPENIPQPISNTSRANLNKLLTDYTEMKKAILHVYWEEFQKDPVGLMSRVAQPASKKIDQNKLKPEMDEKGNLTTAGFACSQCGQPLFVYKLEQVSEKGKAYTNYFGRCNVAEHEKLILLAQLKPEKDSDEAVTYSLGKFGQRALDFYSIHVTKESTHPVKPLAQIAGNRYASGPVGKALSDACMGTIASFLSKYQDIIIEHQKVVKGNQKRLESLRELAGKENLEYPSVTLPPQPHTKEGVDAYNEVIARVRTWVNLNLWQKLKLSRDDAKPLLRLKGFPSFPLVERQANEVDWWDMVCNVKKLINEKKEDGKVFWQNLAGYKRQEALRPYLSSEEDRKKGKKFARYQLGDLLLHLEKKHGEDWGKVYDEAWERIDKKVEGLSKHIKLEEERRSEDAQSKAALTDWLRAKASFVIEGLKEADKDEFCRCELKLQKWYGDLRGKPFAIEAENSILDISGFSKQYNCAFIWQKDGVKKLNLYLIINYFKGGKLRFKKIKPEAFEANRFYTVINKKSGEIVPMEVNFNFDDPNLIILPLAFGKRFGREFIWNDLLSLETGSLKLANGRVIEKTLYNRRTRQDEPALFVALTFERREVLDSSNIKPMNLIGVDRGENIPAVIALTDPEGCPLSRFKDSLGNPTHILRIGESYKEKQRTIQAKKEVEQRRAGGYSRKYASKAKNLADDMVRNTARDLLYYAVTQDAMLIFENLSRGFGRQGKRTFMAERQYTRMEDWLTAKLAYEGLPSKTYLSKTLAQYTSKTCSNCGFTITSADYDRVLEKLKKTATGWMTTINGKELKVEGQITYYNRYKRQNVVKDLSVELDRLSEESVNNDISSWTKGRSGEALSLLKKRFSHRPVQEKFVCLNCGFETHADEQAALNIARSWLFLRSQEYKKYQTNKTTGNTDKRAFVETWQSFYRKKLKEVWKPAV

SEQ ID NO: 28637 - protein, 978 aa, synthetic construct
  REGION 1..978: note = engineered CasX variant
QEIKRINKIRRRLVKDSNTKKAGKTGPMKTLLVRVMTPDLRERLENLRKKPENIPQPISNTSRANLNKLLTDYTEMKKAILHVYWEEFQKDPVGLMSRVAQPASKKIDQNKLKPEMDEKGNLTTAGFACSQCGQPLFVYKLEQVSEKGKAYTNYFGRCNVAEHEKLILLAQLKPEKDSDEAVTYSLGKFGQRALDFYSIHVTKESTHPVKPLAQIAGNRYASGPVGKALSDACMGTIASFLSKYQDIIIEHQKVVKGNQKRLESLRELAGKENLEYPSVTLPPQPHTKEGVDAYNEVIARVRTWVNLNLWQKLKLSRDDAKPLLRLKGFPSFPLVERQANEVDWWDMVCNVKKLINEKKEDGKVFWQNLAGYKRQEALRPYLSSEEDRKKGKKFARYQLGDLLLHLEKKHGEDWGKVYDEAWERIDKKVEGLSKHIKLEEERRSEDAQSKAALTDWLRAKASFVIEGLKEADKDEFCRCELKLQKWYGDLRGKPFAIEAENSILDISGFSKQYNCAFIWQKDGVKKLNLYLIINYFKGGKLRFKKIKPEAFEANRFYTVINKKSGEIVPMEVNFNFDDPNLIILPLAFGKRVGREFIWNDLLSLETGSLKLANGRVIEKTLYNRRTRQDEPALFVALTFERREVLDSSNIKPMNLIGVDRGENIPAVIALTDPEGCPLSRFKDSLGNPTHILRIGESYKEKQRTIQAKKEVEQRRAGGYSRKYASKAKNLADDMVRNTARDLLYYAVTQDAMLIFENLSRGFGRQGKRTFMAERQYTRMEDWLTAKLAYEGLPSKTYLSKTLAQYTSKTCSNCGFTITSADYDRVLEKLKKTATGWMTTINGKELKVEGQITYYNRYKRQNVVKDLSVELDRLSEESVNNDISSWTKGRSGEALSLLKKRFSHRPVQEKFVCLNCGFETHADEQAALNIARSWLFLRSQEYKKYQTNKTTGNTDKRAFVETWQSFYRKKLKEVWKPAV

SEQ ID NO: 28638 - protein, 979 aa, synthetic construct
  REGION 1..979: note = engineered CasX variant
QEIKRINKIRRRLVKDSNTKKAGKTGPMKTLLVRVMTPDLRERLENLRKKPENIPQPISNTSRANLNKLLTDYTEMKKAILHVYWEEFQKDPVGLMSRVAQPASKKIDQNKLKPEMDEKGNLTTAGFACSQCGQPLFVYKLEQVSEKGKAYTNYFGRCNVAEHEKLILLAQLKPEKDSDEAVTYSLGKFGQRALDFYSIHVTKESTHPVKPLAQIAGNRYASGPVGKALSDACMGTIASFLSKYQDIIIEHQKVVKGNQKRLESLRELAGKENLEYPSVTLPPQPHTKEGVDAYNEVIARVRTWVNLNLWQKLKLSRDDAKPLLRLKGFPSFPLVERQANEVDWWDMVCNVKKLINEKKEDGKVFWQNLAGYKRQEALRPYLSSEEDRKKGKKFARYQLGDLLLHLEKKHGEDWGKVYDEAWERIDKKVEGLSKHIKLEEERRSEDAQSKAALTDWLRAKASFVIEGLKEADKDEFCRCELKLQKWYGDLRGKPFAIEAENSILDISGFSKQYNCAFIWQKDGVKKLNLYLIINYFKGGKLRFKKIKPEAFEANRFYTVINKKSGEIVPMEVNFNFDDPNLIILPLAFGKRQGREFIWNDLLSLETGSLKLANGRVIEKTLYNRRTRQDEPALFVALTFERREVLDSSNIKTPMNLIGVDRGENIPAVIALTDPEGCPLSRFKDSLGNPTHILRIGESYKEKQRTIQAKKEVEQRRAGGYSRKYASKAKNLADDMVRNTARDLLYYAVTQDAMLIFENLSRGFGRQGKRTFMAERQYTRMEDWLTAKLAYEGLPSKTYLSKTLAQYTSKTCSNCGFTITSADYDRVLEKLKKTATGWMTTINGKELKVEGQITYYNRYKRQNVVKDLSVELDRLSEESVNNDISSWTKGRSGEALSLLKKRFSHRPVQEKFVCLNCGFETHADEQAALNIARSWLFLRSQEYKKYQTNKTTGNTDKRAFVETWQSFYRKKLKEVWKPAV

SEQ ID NO: 28639 - protein, 979 aa, synthetic construct
  REGION 1..979: note = engineered CasX variant
QEIKRINKIRRRLVKDSNTKKAGKTGPMKTLLVRVMTPDLRERLENLRKKPENIPQPISNTSRANLNKLLTDYTEMKKAILHVYWEEFQKDPVGLMSRVAQPASKKIDQNKLKPEMDEKGNLTTAGFACSQCGQPLFVYKLEQVSEKGKAYTNYFGRCNVAEHEKLILLAQLKPEKDSDEAVTYSLGKFGQRALDFYSIHVTKESTHPVKPLAQIAGNRYASGPVGKALSDACMGTIASFLSKYQDIIIEHQKVVKGNQKRLESLRELAGKENLEYPSVTLPPQPHTKEGVDAYNEVIARVRTWVNLNLWQKLKLSRDDAKPLLRLKGFPSFPLVERQANEVDWWDMVCNVKKLINEKKEDGKVFWQNLAGYKRQEALRPYLSSEEDRKKGKKFARYQLGDLLLHLEKKHGEDWGKVYDEAWERIDKKVEGLSKHIKLEEERRSEDAQSKAALTDWLRAKASFVIEGLKEADKDEFCRCELKLQKWYGDLRGKPFAIEAENSILDISGFSKQYNCAFIWQKDGVKKLNLYLIINYFKGGKLRFKKIKPEAFEANRFYTVINKKSGEIVPMEVNFNFDDPNLIILPLAFGKRQGREFIWNDLLSLETGSLKLANGRVIEKTLYNRRTRQDEPALFVALTFERREVLDSSNIKPMSNLIGVDRGENIPAVIALTDPEGCPLSRFKDSLGNPTHILRIGESYKEKQRTIQAKKEVEQRRAGGYSRKYASKAKNLADDMVRNTARDLLYYAVTQDAMLIFENLSRGFGRQGKRTFMAERQYTRMEDWLTAKLAYEGLPSKTYLSKTLAQYTSKTCSNCGFTITSADYDRVLEKLKKTATGWMTTINGKELKVEGQITYYNRYKRQNVVKDLSVELDRLSEESVNNDISSWTKGRSGEALSLLKKRFSHRPVQEKFVCLNCGFETHADEQAALNIARSWLFLRSQEYKKYQTNKTTGNTDKRAFVETWQSFYRKKLKEVWKPAV

SEQ ID NO: 28640 - protein, 978 aa, synthetic construct
  REGION 1..978: note = engineered CasX variant
QEIKRINKIRRRLVKDSNTKKAGKTGPMKTLLVRVMTPDLRERLENLRKKPENIPQPISNTSRANLNKLLTDYTEMKKAILHVYWEEFQKDPVGLMSRVAQPASKKIDQNKLKPEMDEKGNLTTAGFACSQCGQPLFVYKLEQVSEKGKAYTNYFGRCNVAEHEKLILLAQLKPEKDSDEAVTYSLGKFGQRALDFYSIHVTKESTHPVKPLAQIAGNRYASGPVGKALSDACMGTIASFLSKYQDIIIEHQKVVKGNQKRLESLRELAGKENLEYPSVTLPPQPHTKEGVDAYNEVIARVRTWVNLNLWQKLKLSRDDAKPLLRLKGFPSFPLVERQANEVDWWDMVCNVKKLINEKKEDGKVFWQNLAGYKRQEALRPYLSSEEDRKKGKKFARYQLGDLLLHLEKKHGEDWGKVYDEAWERIDKKVEGLSKHIKLEEERRSEDAQSKAALTDWLRAKASFVIEGLKEADKDEFCRCELKLQKWYGDLRGKPFAIEAENSILDISGFSKQYNCAFIWQKDGVKKLNLYLIINYFKGGKLRFKKIKPEAFEANRFYTVINKKSGEIVPMEVNFNFDDPNLIILPLAFGKRQGREFIWNDLLSLETGSLKLANGRVIEKTLYNRRTRQDEPALFVALTFERREVLDSSNIKPMNLIGVDRGENIPAVIALTDPEGCPLSRFKDSLGNPTHILRIRESYKEKQRTIQAKKEVEQRRAGGYSRKYASKAKNLADDMVRNTARDLLYYAVTQDAMLIFENLSRGFGRQGKRTFMAERQYTRMEDWLTAKLAYEGLPSKTYLSKTLAQYTSKTCSNCGFTITSADYDRVLEKLKKTATGWMTTINGKELKVEGQITYYNRYKRQNVVKDLSVELDRLSEESVNNDISSWTKGRSGEALSLLKKRFSHRPVQEKFVCLNCGFETHADEQAALNIARSWLFLRSQEYKKYQTNKTTGNTDKRAFVETWQSFYRKKLKEVWKPAV

SEQ ID NO: 28641 - protein, 978 aa, synthetic construct
  REGION 1..978: note = engineered CasX variant
QEIKRINKIRRRLVKDSNTKKAGKTGPMKTLLVRVMTPDLRERLENLRKKPENIPQPISNTSRANLNKLLTDYTEMKKAILHVYWEEFQKDPVGLMSRVAQPASKKIDQNKLKPEMDEKGNLTTAGFACSQCGQPLFVYKLEQVSEKGKAYTNYFGRCNVAEHEKLILLAQLKPEKDSDEAVTYSLGKFGQRALDFYSIHVTKESTHPVKPLAQIAGNRYASGPVGKALSDACMGTIASFLSKYQDIIIEHQKVVKGNQKRLESLRELAGKENLEYPSVTLPPQPHTKEGVDAYNEVIARVRTWVNLNLWQKLKLSRDDAKPLLRLKGFPSFPLVERQANEVDWWDMVCNVKKLINEKKEDGKVFWQNLAGYKRQEALRPYLSSEEDRKKGKKFARYQLGDLLLHLEKKHGEDWGKVYDEAWERIDKKVEGLSKHIKLEEERRSEDAQSKAALTDWLRAKASFVIEGLKEADKDEFCRCELKLQKWYGDLRGKPFAIEAENSILDISGFSKQYNCAFIWQKDGVKKLNLYLIINYFKGGKLRFKKIKPEAFEANRFYTVINKKSGEIVPMEVNFNFDDPNLIILPLAFGKRQGREFIWNDLLSLETGSLKLANGRVIEKTLYNRRTRQDEPALFVALTFERREVLDSSNIKPMNLIGVDRGENIPAVIALTDPEGCPLSRFKDSLGNPTHILRIGESYKEKQRTIQAKKEVEQRRAGGYSRKYASKAKNLADDMVRNTARDLLYYAVTQDAMLIFENLSRGFGRQGKRTFSAERQYTRMEDWLTAKLAYEGLPSKTYLSKTLAQYTSKTCSNCGFTITSADYDRVLEKLKKTATGWMTTINGKELKVEGQITYYNRYKRQNVVKDLSVELDRLSEESVNNDISSWTKGRSGEALSLLKKRFSHRPVQEKFVCLNCGFETHADEQAALNIARSWLFLRSQEYKKYQTNKTTGNTDKRAFVETWQSFYRKKLKEVWKPAV

SEQ ID NO: 28642 - protein, 978 aa, synthetic construct
  REGION 1..978: note = engineered CasX variant
QEIKRINKIRRRLVKDSNTKKAGKTGPMKTLLVRVMTPDLRERLENLRKKPENIPQPISNTSRANLNKLLTDYTEMKKAILHVYWEEFQKDPVGLMSRVAQPASKKIDQNKLKPEMDEKGNLTTAGFACSQCGQPLFVYKLEQVSEKGKAYTNYFGRCNVAEHEKLILLAQLKPEKDSDEAVTYSLGKFGQRALDFYSIHVTKESTHPVKPLAQIAGNRYASGPVGKALSDACMGTIASFLSKYQDIIIEHQKVVKGNQKRLESLRELAGKENLEYPSVTLPPQPHTKEGVDAYNEVIARVRTWVNLNLWQKLKLSRDDAKPLLRLKGFPSFPLVERQANEVDWWDMVCNVKKLINEKKEDGKVFWQNLAGYKRQEALRPYLSSEEDRKKGKKFARYQLGDLLLHLEKKHGEDWGKVYDEAWERIDKKVEGLSKHIKLEEERRSEDAQSKAALTDWLRAKASFVIEGLKEADKDEFCRCELKLQKWYGDLRGKPFAIEAENSILDISGFSKQYNCAFIWQKDGVKKLNLYLIINYFKGGKLRFKKIKPEAFEANRFYTVINKKSGEIVPMEVNFNFDDPNLIILPLAFGKRQGREFIWNDLLSLETGSLKLANGRVIEKTLYNRRTRQDEPALFVALTFERREVLDSSNIKPMNLIGVDRGENIPAVIALTDPEGCPLSRFKDSLGNPTHILRIGESYKEKQRTIQAKKEVEQRRAGGYSRKYASKAKNLADDMVRNTARDLLYYAVTQDAMLIFENLSRGFGRQGKRTFMAERQYTRMEDWLTAKLAYEGLPSKTYLSKTLAQYTSKTCSNCGFTITSADYDRVLEKLKKTATGWMTTINGKELKVEGQITYYNRYKRQNVVKDLSVELDRLSEESVNNDISSWDKGRSGEALSLLKKRFSHRPVQEKFVCLNCGFETHADEQAALNIARSWLFLRSQEYKKYQTNKTTGNTDKRAFVETWQSFYRKKLKEVWKPAV

SEQ ID NO: 28643 - protein, 978 aa, synthetic construct
  REGION 1..978: note = engineered CasX variant
QEIKRINKIRRRLVKDSNTKKAGKTGPMKTLLVRVMTPDLRERLENLRKKPENIPQPISNTSRANLNKLLTDYTEMKKAILHVYWEEFQVDPVGLMSRVAQPASKKIDQNKLKPEMDEKGNLTTAGFACSQCGQPLFVYKLEQVSEKGKAYTNYFGRCNVAEHEKLILLAQLKPEKDSDEAVTYSLGKFGQRALDFYSIHVTKESTHPVKPLAQIAGNRYASGPVGKALSDACMGTIASFLSKYQDIIIEHQKVVKGNQKRLESLRELAGKENLEYPSVTLPPQPHTKEGVDAYNEVIARVRTWVNLNLWQKLKLSRDDAKPLLRLKGFPSFPLVERQANEVDWWDMVCNVKKLINEKKEDGKVFWQNLAGYKRQEALRPYLSSEEDRKKGKKFARYQLGDLLLHLEKKHGEDWGKVYDEAWERIDKKVEGLSKHIKLEEERRSEDAQSKAALTDWLRAKASFVIEGLKEADKDEFCRCELKLQKWYGDLRGKPFAIEAENSILDISGFSKQYNCAFIWQKDGVKKLNLYLIINYFKGGKLRFKKIKPEAFEANRFYTVINKKSGEIVPMEVNFNFDDPNLIILPLAFGKRQGREFIWNDLLSLETGSLKLANGRVIEKTLYNRRTRQDEPALFVALTFERREVLDSSNIKPMNLIGVDRGENIPAVIALTDPEGCPLSRFKDSLGNPTHILRIGESYKEKQRTIQAKKEVEQRRAGGYSRKYASKAKNLADDMVRNTARDLLYYAVTQDAMLIFENLSRGFGRQGKRTFMAERQYTRMEDWLTAKLAYEGLPSKTYLSKTLAQYTSKTCSNCGFTITSADYDRVLEKLKKTATGWMTTINGKELKVEGQITYYNRYKRQNVVKDLSVELDRLSEESVNNDISSWTKGRSGEALSLLKKRFSHRPVQEKFVCLNCGFETHADEQAALNIARSWLFLRSQEYKKYQTNKTTGNTDKRAFVETWQSFYRKKLKEVWKPAV

SEQ ID NO: 28644 - protein, 978 aa, synthetic construct
  REGION 1..978: note = engineered CasX variant
QEIKRLNKIRRRLVKDSNTKKAGKTGPMKTLLVRVMTPDLRERLENLRKKPENIPQPISNTSRANLNKLLTDYTEMKKAILHVYWEEFQKDPVGLMSRVAQPASKKIDQNKLKPEMDEKGNLTTAGFACSQCGQPLFVYKLEQVSEKGKAYTNYFGRCNVAEHEKLILLAQLKPEKDSDEAVTYSLGKFGQRALDFYSIHVTKESTHPVKPLAQIAGNRYASGPVGKALSDACMGTIASFLSKYQDIIIEHQKVVKGNQKRLESLRELAGKENLEYPSVTLPPQPHTKEGVDAYNEVIARVRTWVNLNLWQKLKLSRDDAKPLLRLKGFPSFPLVERQANEVDWWDMVCNVKKLINEKKEDGKVFWQNLAGYKRQEALRPYLSSEEDRKKGKKFARYQLGDLLLHLEKKHGEDWGKVYDEAWERIDKKVEGLSKHIKLEEERRSEDAQSKAALTDWLRAKASFVIEGLKEADKDEFCRCELKLQKWYGDLRGKPFAIEAENSILDISGFSKQYNCAFIWQKDGVKKLNLYLIINYFKGGKLRFKKIKPEAFEANRFYTVINKKSGEIVPMEVNFNFDDPNLIILPLAFGKRQGREFIWNDLLSLETGSLKLANGRVIEKTLYNRRTRQDEPALFVALTFERREVLDSSNIKPMNLIGVDRGENIPAVIALTDPEGCPLSRFKDSLGNPTHILRIGESYKEKQRTIQAKKEVEQRRAGGYSRKYASKAKNLADDMVRNTARDLLYYAVTQDAMLIFENLSRGFGRQGKRTFMAERQYTRMEDWLTAKLAYEGLPSKTYLSKTLAQYTSKTCSNCGFTITSADYDRVLEKLKKTATGWMTTINGKELKVEGQITYYNRYKRQNVVKDLSVELDRLSEESVNNDISSWTKGRSGEALSLLKKRFSHRPVQEKFVCLNCGFETHADEQAALNIARSWLFLRSQEYKKYQTNKTTGNTDKRAFVETWQSFYRKKLKEVWKPAV

SEQ ID NO: 28645 - protein, 978 aa, synthetic construct
  REGION 1..978: note = engineered CasX variant
QEIKRINKIRRRLVKDSNTKKAGKTGPMKTLLVRVMTPDLRERLENLRKKPENIPQPISNTSRANLNKLLTDYTEMKKAILHVYWEEFQKDPVGLMSRVAQPASKKIDQNKLKPEMDEKGNLTTAGFACSQCGQPLFVYKLEQVSEKGKAYTNYVGRCNVAEHEKLILLAQLKPEKDSDEAVTYSLGKFGQRALDFYSIHVTKESTHPVKPLAQIAGNRYASGPVGKALSDACMGTIASFLSKYQDIIIEHQKVVKGNQKRLESLRELAGKENLEYPSVTLPPQPHTKEGVDAYNEVIARVRTWVNLNLWQKLKLSRDDAKPLLRLKGFPSFPLVERQANEVDWWDMVCNVKKLINEKKEDGKVFWQNLAGYKRQEALRPYLSSEEDRKKGKKFARYQLGDLLLHLEKKHGEDWGKVYDEAWERIDKKVEGLSKHIKLEEERRSEDAQSKAALTDWLRAKASFVIEGLKEADKDEFCRCELKLQKWYGDLRGKPFAIEAENSILDISGFSKQYNCAFIWQKDGVKKLNLYLIINYFKGGKLRFKKIKPEAFEANRFYTVINKKSGEIVPMEVNFNFDDPNLIILPLAFGKRQGREFIWNDLLSLETGSLKLANGRVIEKTLYNRRTRQDEPALFVALTFERREVLDSSNIKPMNLIGVDRGENIPAVIALTDPEGCPLSRFKDSLGNPTHILRIGESYKEKQRTIQAKKEVEQRRAGGYSRKYASKAKNLADDMVRNTARDLLYYAVTQDAMLIFENLSRGFGRQGKRTFMAERQYTRMEDWLTAKLAYEGLPSKTYLSKTLAQYTSKTCSNCGFTITSADYDRVLEKLKKTATGWMTTINGKELKVEGQITYYNRYKRQNVVKDLSVELDRLSEESVNNDISSWTKGRSGEALSLLKKRFSHRPVQEKFVCLNCGFETHADEQAALNIARSWLFLRSQEYKKYQTNKTTGNTDKRAFVETWQSFYRKKLKEVWKPAV

SEQ ID NO: 28646 - protein, 978 aa, synthetic construct
  REGION 1..978: note = engineered CasX variant
QEIKRINKIRRRLVKDSNTKKAGKTGPMKTLLVRVMTPDLRERLENLRKKPENIPQPISNTSRANLNKLLTDYTEMKKAILHVYWEEFQKDPVGLMSRVAQPASKKIDQNKLKPEMDEKGNLTTAGFACSQCGQPLFVYKLEQVSEKGKAYTNYFGRCNVAEHEKLILLAQLKPEKDSDEAVTYSLGKFGQRALDFYSIHVTKESTHPVKPLAQIAGNRYASGPVGKALSDACMGTIASFLSKYQDIIIEHQKVVKGNQKRLESLRELAGKENLEYPSVTLPPQPHTKEGVDAYNEVIARVRTWVNLNLWQKLKLSRDDAKPLLRLKGFPSFPLVERQANEVDWWDMVCNVKKLINEKKEDGKVFWQNLAGYKRQEALRPYLSSEEDRKKGKKFARYQLGDLLLHLEKKHGEDWGKVYDEAWERIDKKVEGLSKHIKLEEERRSEDAQSKAALTDWLRAKASFVIEGLKEADKDEFCRCELKLQKWYGDLRGKPFAIEAENSILDISGFSKQYNCAFIWQKDGVKKLNLYLIINYFKGGKLRFKKIKPEAFEANRFYTVINKKSGEIVPMEVNFNFDDPNLIILPLAFGKRQGREFIWNDLLSLETGSLKLANGRVIEKTLYNRRTRQDEPALFVALTFERREVLDSSNIKPMNLIGVDRGENIPAVIALTDPEGCPLSRFKDSLGNPTHILRIGESYKEKQRTIQAKKEVEQRRAGGYSRKYASKAKNLADDMVRNTARDLLYYAVTQDAMLIFENLSRGFGRQGKRTFMAERQYTRMEDWLTAKLAYEGLASKTYLSKTLAQYTSKTCSNCGFTITSADYDRVLEKLKKTATGWMTTINGKELKVEGQITYYNRYKRQNVVKDLSVELDRLSEESVNNDISSWTKGRSGEALSLLKKRFSHRPVQEKFVCLNCGFETHADEQAALNIARSWLFLRSQEYKKYQTNKTTGNTDKRAFVETWQSFYRKKLKEVWKPAV

SEQ ID NO: 28647 - protein, 978 aa, synthetic construct
  REGION 1..978: note = engineered CasX variant
QEIKRINKIRRRLVKDSNTKKAGKTGPMKTLLVRVMTPDLRERLENLRKKPENIPQPISNTSRANLNKLLTDYTEMKKAILHVYWEEFQKDPVGLMSRVAQPASKKIDQNKLKPEMDEKGNLTTAGFACSQCGQPLFVYKLEQVSEKGKAYTNYFGRCNVAEHEKLILLAQLKPEKDSDEAVTYSLGKFGQRALDFYSIHVTKESTHPVKPLAQIAGNRYASGPVGKALSDACMGTIASFLSKYQDIIIEHQKVVKGNQKRLESLRELAGKENLEYPSVTLPPQPHTKEGVDAYNEVIARVRTWVNLNLWQKLKLSRDDAKPLLRLKGFPSFPLVERQANEVDWWDMVCNVKKLINEKKEDGKVFWQNLAGYKRQEALRPYLSSEEDRKKGKKFARYQLGDLLLHLEKKHGEDWGKVYDEAWERIDKKVEGLSKHIKLEEERRSEDAQSKAALTDWLRAKASFVIEGLKEADKDEFCRCELKLQKWYGDLRGKPFAIEAENSILDISGFSKQYNCAFIWQKDGVKKLNLYLIINYFKGGKLRFKKIKPEAFEANRFYTVINKKSGEIVPMEVNFNFDDPNLIILPLAFGKRQGREFIWNDLLSLETGSLKLANGRVIEKTLYNRRTRQDEPALFVALTFERREVLDSSNIKPMNLIGVDRGENIPAVIALTDPEGCPLSRFKDSLGNPTHILRIGESYKEKQRTIQAKKEVEQRRAGGYSRKYASKAKNLADDMVRNTARDLLYYAVTQDAMLIFENLSRGFGRQGKRTFMAERQYTRMEDWLTAKLAYEGLPSKVYLSKTLAQYTSKTCSNCGFTITSADYDRVLEKLKKTATGWMTTINGKELKVEGQITYYNRYKRQNVVKDLSVELDRLSEESVNNDISSWTKGRSGEALSLLKKRFSHRPVQEKFVCLNCGFETHADEQAALNIARSWLFLRSQEYKKYQTNKTTGNTDKRAFVETWQSFYRKKLKEVWKPAV

SEQ ID NO: 28648 - protein, 979 aa, synthetic construct
  REGION 1..979: note = engineered CasX variant
QEIKRINKIRRRLVKDSNTKKAGKTGPMKTLLVRVMTPDLRERLENLRKKPENIPQPISNTSRANLNKLLTDYTEMKKAILHVYWEEFQKDPVGLMSRVAQPASKKIDQNKLKPEMDEKGNLTTAGFACSQCGQPLFVYKLEQVSEKGKAYTNYFGRCNVAEHEKLILLAQLKPEKDSDEAVTYSLGKFGQRALDFYSIHVTKESTHPVKPLAQIAGNRYASGPVGKALSDACMGTIASFLSKYQDIIIEHQKVVKGNQKRLESLRELAGKENLEYPSVTLPPQPHTKEGVDAYNEVIARVRTWVNLNLWQKLKLSRDDAKPLLRLKGFPSFPLVERQANEVDWWDMVCNVKKLINEKKEDGKVFWQNLAGYKRQEALRPYLSSEEDRKKGKKFARYQLGDLLLHLEKKHGEDWGKVYDEAWERIDKKVEGLSKHIKLEEERRSEDAQSKAALTDWLRAKASFVIEGLKEADKDEFCRCELKLQKWYGDLRGKPFAIEAENSILDISGFSKQYNCAFIWQKDGVKKLNLYLIINYFKGGKLRFKKIKPEAFEANRFYTVINKKSGEIVPMEVNFNFDDPNLIILPLAFGKRQGREFIWNDLLSLETGSLKLANGRVIEKTLYNRRTRQDEPALFVALTFERREVLDSSNIKPMNLIGVDRGENIPAVIALTDPEGCPLSRFKDSLGNPTHILRIGESYKEKQRTIQAKKEVEQRRAGGYSRKYASKAKNLADDMVRNTARDLLYYAVTQDAMLIFENLSRGFGRQGKRTFMAERQYTRMEDWLTAKLAYEGPLPSKTYLSKTLAQYTSKTCSNCGFTITSADYDRVLEKLKKTATGWMTTINGKELKVEGQITYYNRYKRQNVVKDLSVELDRLSEESVNNDISSWTKGRSGEALSLLKKRFSHRPVQEKFVCLNCGFETHADEQAALNIARSWLFLRSQEYKKYQTNKTTGNTDKRAFVETWQSFYRKKLKEVWKPAV

SEQ ID NO: 28649 - protein, 979 aa, synthetic construct
  REGION 1..979: note = engineered CasX variant
QEIKRINKIRRRLVKDSNTKKAGKTGPMKTLLVRVMTPDLRERLENLRKKPENIPQPISNTSRANLNKLLTDYTEMKKAILHVYWEEFQKDPVGLMSRVAQPASKKIDQNKLKPEMDEKGNLTTAGFACSQCGQPLFVYKLEQVSEKGKAYTNYFGRCNVAEHEKLILLAQLKPEKDSDEAVTYSLGKFGQRALDFYSIHVTKESTHPVKPLAQIAGNRYASGPVGKALSDACMGTIASFLSKYQDIIIEHQKVVKGNQKRLESLRELAGKENLEYPSVTLPPQPHTKEGVDAYNEVIARVRTWVNLNLWQKLKLSRDDAKPLLRLKGFPSFPLVERQANEVDWWDMVCNVKKLINEKKEDGKVFWQNLAGYKRQEALRPYLSSEEDVRKKGKKFARYQLGDLLLHLEKKHGEDWGKVYDEAWERIDKKVEGLSKHIKLEEERRSEDAQSKAALTDWLRAKASFVIEGLKEADKDEFCRCELKLQKWYGDLRGKPFAIEAENSILDISGFSKQYNCAFIWQKDGVKKLNLYLIINYFKGGKLRFKKIKPEAFEANRFYTVINKKSGEIVPMEVNFNFDDPNLIILPLAFGKRQGREFIWNDLLSLETGSLKLANGRVIEKTLYNRRTRQDEPALFVALTFERREVLDSSNIKPMNLIGVDRGENIPAVIALTDPEGCPLSRFKDSLGNPTHILRIGESYKEKQRTIQAKKEVEQRRAGGYSRKYASKAKNLADDMVRNTARDLLYYAVTQDAMLIFENLSRGFGRQGKRTFMAERQYTRMEDWLTAKLAYEGLPSKTYLSKTLAQYTSKTCSNCGFTITSADYDRVLEKLKKTATGWMTTINGKELKVEGQITYYNRYKRQNVVKDLSVELDRLSEESVNNDISSWTKGRSGEALSLLKKRFSHRPVQEKFVCLNCGFETHADEQAALNIARSWLFLRSQEYKKYQTNKTTGNTDKRAFVETWQSFYRKKLKEVWKPAV

SEQ ID NO: 28650 - protein, 978 aa, synthetic construct
  REGION 1..978: note = engineered CasX variant
QEIKRINKIRRRLVKDSNTKKAGKTGPMKTLLVRVMTPDLRERLENLRKKPENIPQPISNTSRANLNKLLTDYTEMKKAILHVYWEEFQKDPVGLMSRVAQPASKKIDQNKLKPEMDEKGNLTTAGFACSQCGQPLFVYKLEQVSEKGKAYTNYFGRCNVAEHEKLILLAQLKPEKDSDEAVTYSLGKFGQRALDFYSIHVTKESTHPVKPLAQIAGNRYASGPVGKALSDACMGTIASFLSKYQDIIIEHQKVVKGNQKRLESLRELAGKENLEYPSVTLPPQPHTKEGVDAYNEVIARVRTWVNLNLWQKLKLSRDDAKPLLRLKGFPSFPLVERQANEVDWWDMVCNVKKLINEKKEDGKVFWQNLAGYKRQEALRPYLSSEEDRKKGKKFARYQLGDLLLHLEKKHGEDWGKVYDEAWERIDKKVEGLSKHIKLEEERRSEDAQSKAALTDWLRAKASFVIEGLKEADKDEFCRCELKLQKWYGDLRGKPFAIEAENSILDISGFSKQYNCAFIWQKDGVKKLNLYLIINYFKGGKLRFKKIKPEAFEANRFYTVINKKSGEIVPMEVNFNFDDPNLIILPLAFGKRQGREFIWNDLLSLETGSLKLANGRVIEKTLYNRRTRQDEPALFVALTFERREVLDSSNIKPMNLIGVDRGENIPAVIALTDPEGCPLSRFKDSLGNPTHILRIGESYKEKQRTIQAKKEVEQRRAGGYSRKYASKAKNLADDMVRNTARDLLYYAVTQDAMLIFENLSRGFGRQGKRTFMAERQYTRMEDWLTAKLAYEGLPSKTYLSKTLAQYTSKTCSNCGFTITSADYDRMLEKLKKTATGWMTTINGKELKVEGQITYYNRYKRQNVVKDLSVELDRLSEESVNNDISSWTKGRSGEALSLLKKRFSHRPVQEKFVCLNCGFETHADEQAALNIARSWLFLRSQEYKKYQTNKTTGNTDKRAFVETWQSFYRKKLKEVWKPAV

SEQ ID NO: 28651 - protein, 978 aa, synthetic construct
  REGION 1..978: note = engineered CasX variant
QEIKRINKIRRRLVKDSNTKKAGKTGPMKTLLVRVMTPDLRERLENLRKKPENIPQPISNTSRANLNKLLTDYTEMKKAILHVYWEEFQKDPVGLMSRVAQPASKKIDQNKLKPEMDEKGNLTTAGFACSQCGQPLFVYKLEQVSEKGKAYTNYFGRCNVAEHEKLILLAQLKPEKDSDEAVTYSLGKFGQRALDFYSIHVTKESTHPVKPLAQIAGNRYASGPVGKALSDACMGTIASFLSKYQDIIIEHQKVVKGNQKRLESLRELAGKENLEYPSVTLPPQPHTKEGVDAYNEVIARVRTWVNLNLWQKLKLSRDDAKPLLRLKGFPSFPLVERQANEVDWWDMVCNVKKLINEKKEDGKVFWQNLAGYKRQEALRPYLSSEEDRKKGKKFARYQLGDLLLHLEKKHGEDWGKVYDEAWERIDKKVEGLSKHIKLEEERRSEDAQSKAALTDWLRAKASFVIEGLKEADKDEFCRCELKLQKWYGDLRGKPFAIEAENSILDISGFSKQYNCAFIWQKDGVKKLNLYLIINYFKGGKLRFKKIKPEAFEANRFYTVINKKSGEIVPMEVNFNFDDPNLIILPLAFGKRQGREFIWNDLLSLETGSLKLANGRVIEKTLYNRRTRQDEPALFVALTFERREVLDSSNIKPMNLIGVDRGENIPAVIALTDPEGCPLSRFKDSLGNPTHILRIGESYKEKQRTIQAKKEVEQRRAGGYSRKYASKAKNLADDMVRNTARDLLYYAVTQDAMLIFENLSRGFGRQGKRTFMAERQYTRMEDWLTAKLAYEGLPSKTYLSKTLAQYTSKTCSNCGFTITSADYDRVLEKLKKTATGWMTTINGKELKVEGQITYYNRYKRQNVVKDLSVELDRLSEESVNNDISSWTKGRQGEALSLLKKRFSHRPVQEKFVCLNCGFETHADEQAALNIARSWLFLRSQEYKKYQTNKTTGNTDKRAFVETWQSFYRKKLKEVWKPAV

SEQ ID NO: 28652 - protein, 978 aa, synthetic construct
  REGION 1..978: note = engineered CasX variant
QEIKRINKIRRRLVKDSNTKKAGKTGPMKTLLVRVMTPDLRERLENLRKKPENIPQPISNTSRANLNKLLTDYTEMKKAILHVYWEEFQKDPVGLMSRVAQPASKKIDQNKLKPEMDEKGNLTTAGFACSQCGQPLFVYKLEQVSEKGKAYTNYFGRCNVAEHEKLILLAQLKPEKDSDEAVTYSLGKFGQRALDFYSIHVTKESTHPVKPLAQIAGNRYASGPVGKALSDACMGTIASFLSKYQDIIIEHQKVVKGNQKRLESLRELAGKENLEYPSVTLPPQPHTKEGVDAYNEVIARVRTWVNLNLWQKLKLSRDDAKPLLRLKGFPSFPLVERQANEVDWWDMVCNVKKLINEKKEDGKVFWQNLAGYKRQEALRPYLSSEEDRKKGKKFARYQLGDLLLHLEKKHGEDWGKVYDEAWERIDKKVEGLSKHIKLEEERRSEDAQSKAALTDWLRAKASFVIEGLKEADKDEFCRCELKLQKWYGDLRGKPFAIEAENSILDISGFSKQYNCAFIWQKDGVKKLNLYLIINYFKGGKLRFKKIKPEAFEANRFYTVINKKSGEIVPMEVNFNFDDPNLIILPLAFGKRQGREFIWNDLLSLETGSLKLANGRVIEKTLYNRRTRQDEPALFVALTFERREVLDSSNIKPMNLIGVDRGENIPAVIALTDPEGCPLSRFKDSLGNPTHILRIGESYKEKQRTIQAKKEVEQRRAGGYSRKYASKAKNLADDMVRNTARDLLYYAVTQDAMLIFENLSRGFGRQGKRTFMAERQYTRMEDWLTAKLAYEGLPSKTYLSKTLAQYTSKTCSNCGFTITSADYDRVLEKLKKTATGWMTTINGKELKVEGQITYYNRYKRQNVVKDLSVELDRLSEESVNNDISSWTKGRSGEALSLLKKRFSHRPVQEKFVCLNCEFETHADEQAALNIARSWLFLRSQEYKKYQTNKTTGNTDKRAFVETWQSFYRKKLKEVWKPAV

SEQ ID NO: 28653 - protein, 979 aa, synthetic construct
  REGION 1..979: note = engineered CasX variant
QEIKRINKIRRRLVKDSNTKKAGKTGPMKTLLVRVMTPDLRERLENLRKKPENIPQPISNTSRANLNKLLTDYTEMKKAILHVYWEEFQKDPVGLMSRVAQPASKKIDQNKLKPEMDEKGNLTTAGFACSQCGQPLFVYKLEQVSEKGKAYTNYFGRCNVAEHEKLILLAQLKPEKDSDEAVTYSLGKFGQRALDFYSIHVTKESTHPVKPLAQIAGNRYASGPVGKALSDACMGTIASFLSKYQDIIIEHQKVVKGNQKRLESLRELAGKENLEYPSVTLPPQPHTKEGVDAYNEVIARVRTWVNLNLWQKLKLSRDDAKPLLRLKGFPSFPLVERQANEVDWWDMVCNVKKLINEKKEDGKVFWQNLAGYKRQEALRPYLSSEEDRKKGKKFARYQLGDLLLHLEKKHGEDWGKVYDEAWERIDKKVEGLSKHIKLEEERRSEDAQSKAALTDWLRAKASFVIEGLKEADKDEFCRCELKLQKWYGDLRGKPFAIEAENSILDISGFSKQYNCAFIWQKDGVKKLNLYLIINYFKGGKLRFKKIKPEAFEANRFYTVINKKSGEIVPMEVNFNFDDPNLIILPLAFGKRQGREFIWNDLLSLETGSLKLANGRVIEKTLYNRRTRQDEPALFVALTFERREVLDSSNIKPMNLIGVDRGENIPAVIALTDPEGCPLSRFKDSLGNPTHILRIGESYKEKQRTIQAKKEVEQRRAGGYSRKYASKAKNLADDMVRNTARDLLYYAVTQDAMLIFENLSRGFGRQGKRTFMAERQYTRMEDWLTAKLAYEGLPSKTYLSKTLAQYTSKTCSNCGFTITSADYDRVLEKLKKTATGWMTTINGKELKVEGQITYYNRYKRQNVVKDLSVELDRLSEESVNNDISSWTKGRSGEALSLLKKRFSHRPVQEKFVCLNCGFETHADEQAALNIARSWLFLRSQEYKKYQTNKTSTGNTDKRAFVETWQSFYRKKLKEVWKPAV

SEQ ID NO: 28654 - protein, 979 aa, synthetic construct
  REGION 1..979: note = engineered CasX variant
QEIKRINKIRRRLVKDSNTKKAGKTGPMKTLLVRVMTPDLRERLENLRKKPENIPQPISNTSRANLNKLLTDYTEMKKAILHVYWEEFQKDPVGLMSRVAQPASKKIDQNKLKPEMDEKGNLTTAGFACSQCGQPLFVYKLEQVSEKGKAYTNYFGRCNVAEHEKLILLAQLKPEKDSDEAVTYSLGKFGQRALDFYSIHVTKESTHPVKPLAQIAGNRYASGPVGKALSDACMGTIASFLSKYQDIIIEHQKVVKGNQKRLESLRELAGKENLEYPSVTLPPQPHTKEGVDAYNEVIARVRTWVNLNLWQKLKLSRDDAKPLLRLKGFPSFPLVERQANEVDWWDMVCNVKKLINEKKEDGKVFWQNLAGYKRQEALRPYLSSEEDRKKGKKFARYQLGDLLLHLEKKHGEDWGKVYDEAWERIDKKVEGLSKHIKLEEERRSEDAQSKAALTDWLRAKASFVIEGLKEADKDEFCRCELKLQKWYGDLRGKPFAIEAENSILDISGFSKQYNCAFIWQKDGVKKLNLYLIINYFKGGKLRFKKIKPEAFEANRFYTVINKKSGEIVPMEVNFNFDDPNLIILPLAFGKRQGREFIWNDLLSLETGSLKLANGRVIEKTLYNRRTRQDEPALFVALTFERREVLDSSNIKPMNLIGVDRGENIPAVIALTDPEGCPLSRFKDSLGNPTHILRIGESYKEKQRTIQAKKEVEQRRAGGYSRKYASKAKNLADDMVRNTARDLLYYAVTQDAMLIFENLSRGFGRQGKRTFMAERQYTRMEDWLTAKLAYEGLPSKTYLSKTLAQYTSKTCSNCGFTITSADYDRVLEKLKKTATGWMTTINGKELKVEGQITYYNRYKRQNVVKDLSVELDRLSEESVNNDISSWTKGRSGEALSLLKKRFSHRPVQEKFVCLNCGFETHADEQAALNIARSWLFLRSQEYKKYQTNKTTGKNTDKRAFVETWQSFYRKKLKEVWKPAV

SEQ ID NO: 28655 - protein, 978 aa, synthetic construct
  REGION 1..978: note = engineered CasX variant
QEIKRINKIRRRLVKDSNTKKAGKTGPMKTLLVRVMTPDLRERLENLRKKPENIPQPISNTSRANLNKLLTDYTEMKKAILHVYWEEFQKDPVGLMSRVAQPASKKIDQNKLKPEMDEKGNLTTAGFACSQCGQPLFVYKLEQVSEKGKAYTNYFGRCNVAEHEKLILLAQLKPEKDSDEAVTYSLGKFGQRALDFYSIHVTKESTHPVKPLAQIAGNRYASGPVGKALSDACMGTIASFLSKYQDIIIEHQKVVKGNQKRLESLRELAGKENLEYPSVTLPPQPHTKEGVDAYNEVIARVRTWVNLNLWQKLKLSRDDAKPLLRLKKFPSFPLVERQANEVDWWDMVCNVKKLINEKKEDGKVFWQNLAGYKRQEALRPYLSSEEDRKKGKKFARYQLGDLLLHLEKKHGEDWGKVYDEAWERIDKKVEGLSKHIKLEEERRSEDAQSKAALTDWLRAKASFVIEGLKEADKDEFCRCELKLQKWYGDLRGKPFAIEAENSILDISGFSKQYNCAFIWQKDGVKKLNLYLIINYFKGGKLRFKKIKPEAFEANRFYTVINKKSGEIVPMEVNFNFDDPNLIILPLAFGKRQGREFIWNDLLSLETGSLKLANGRVIEKTLYNRRTRQDEPALFVALTFERREVLDSSNIKPMNLIGVDRGENIPAVIALTDPEGCPLSRFKDSLGNPTHILRIGESYKEKQRTIQAKKEVEQRRAGGYSRKYASKAKNLADDMVRNTARDLLYYAVTQDAMLIFENLSRGFGRQGKRTFMAERQYTRMEDWLTAKLAYEGLPSKTYLSKTLAQYTSKTCSNCGFTITSADYDRVLEKLKKTATGWMTTINGKELKVEGQITYYNRYKRQNVVKDLSVELDRLSEESVNNDISSWTKGRSGEALSLLKKRFSHRPVQEKFVCLNCGFETHADEQAALNIARSWLFLRSQEYKKYQTNKTTGNTDKRAFVETWQSFYRKKLKEVWKPAV

SEQ ID NO: 28656 - protein, 978 aa, synthetic construct
  REGION 1..978: note = engineered CasX variant
QEIKRINKIRRRLVKDSNTKKAGKTGPMKTLLVRVMTPDLRERLENLRKKPENIPQPISNTSRANLNKLLTDYTEMKKAILHVYWEEFQKDPVGLMSRVAQPASKKIDQNKLKPEMDEKGNLTTAGFACSQCGQPLFVYKLEQVSEKGKAYTNYFGRCNVAEHEKLILLAQLKPEKDSDEAVTYSLGKFGQRALDFYSIHVTKESTHPVKPLAQIAGNRYASGPVGKALSDACMGTIASFLSKYQDIIIEHQKVVKGNQKRLESLRELAGKENLEYPSVTLPPQPHTKEGVDAYNEVIARVRTWVNLNLWQKLKLSRDDAKPLLRLKGFPSFPLVERQANEVDWWDMVCNVKKLINEKKEDGKVFWQNLAGYKRQEALRPYLSSEEDRKKGKKFARYQLGDLLLHLEKKHGEDWGKVYDEAWERIDKKVEGLSKHIKLEEERRSEDAQSKAALTDWLRAKASFVIEGLKEADKDEFCRCELKLQKWYGDLRGKPFAIEAENSILDISGFSKQYNCAFIWQKDGVKKLNLYLIINYFKGGKLRFKKIKPEAFEANRFYTVINKKSGEIVPMEVNFNFDDPNLIILPLAFGKRQGREFIWNDLLSLETGSLKLANGRVIEKTLYNRRTRQDEPALFVALTFERREVLDSSNIKPMNLIGVDRGENIPAVIALTDPEGCPLSRFKDSLGNPTHILRIGERYKEKQRTIQAKKEVEQRRAGGYSRKYASKAKNLADDMVRNTARDLLYYAVTQDAMLIFENLSRGFGRQGKRTFMAERQYTRMEDWLTAKLAYEGLPSKTYLSKTLAQYTSKTCSNCGFTITSADYDRVLEKLKKTATGWMTTINGKELKVEGQITYYNRYKRQNVVKDLSVELDRLSEESVNNDISSWTKGRSGEALSLLKKRFSHRPVQEKFVCLNCGFETHADEQAALNIARSWLFLRSQEYKKYQTNKTTGNTDKRAFVETWQSFYRKKLKEVWKPAV

SEQ ID NO: 28657 - protein, 978 aa, synthetic construct
  REGION 1..978: note = engineered CasX variant
QEIKRINKIRRRLVKDSNTKKAGKTGPMKTLLVRVMTPDLRERLENLRKKPENIPQPISNTSRANLNKLLTDYTEMKKAILHVYWEEFQKDPVGLMSRVAQPASKKIDQNKLKPEMDEKGNLTTAGFACSQCGQPLFVYKLEQVSEKGKAYTNYFGRCNVAEHEKLILLAQLKPEKDSDEAVTYSLGKFGQRALDFYSIHVTKESTHPVKPLAQIAGNRYASGPVGKALSDACMGTIASFLSKYQDIIIEHQKVVKGNQKRLESLRELAGKENLEYPSVTLPPQPHTKEGVDAYNEVIARVRTWVNLNLWQKLKLSRDDAKPLLRLKGFPSFPLVERQANEVDWWDMVCNVKKLINEKKEDGKVFWQNLAGYKRQEALRPYLSSEEDRKKGKKFARYQLGDLLLHLEKKHGEDWGKVYDEAWERIDKKVEGLSKHIKLEEERRSEDAQSKAALTDWLRAKASFVIEGLKEADKDEFCRCELKLQKWYGDLRGKPFAIEAENSILDISGFSKQYNCAFIWQKDGVKKLNLYLIINYFKGGKLRFKKIKPEAFEANRFYTVINKKSGEIVPMEVNFNFDDPNLIILPLAFGKRQGREFIWNDLLSLETGSLQLANGRVIEKTLYNRRTRQDEPALFVALTFERREVLDSSNIKPMNLIGVDRGENIPAVIALTDPEGCPLSRFKDSLGNPTHILRIGESYKEKQRTIQAKKEVEQRRAGGYSRKYASKAKNLADDMVRNTARDLLYYAVTQDAMLIFENLSRGFGRQGKRTFMAERQYTRMEDWLTAKLAYEGLPSKTYLSKTLAQYTSKTCSNCGFTITSADYDRVLEKLKKTATGWMTTINGKELKVEGQITYYNRYKRQNVVKDLSVELDRLSEESVNNDISSWTKGRSGEALSLLKKRFSHRPVQEKFVCLNCGFETHADEQAALNIARSWLFLRSQEYKKYQTNKTTGNTDKRAFVETWQSFYRKKLKEVWKPAV

SEQ ID NO: 28658 - protein, 979 aa, synthetic construct
  REGION 1..979: note = engineered CasX variant
QEIKRINKIRRRLVKDSNTKKAGKTGPMKTLLVRVMTPDLRERLENLRKKPENIPQPISNTSRANLNKLLTDYTEMKKAILHVYWEEFQKDPVGLMSRVAQPASKKIDQNKLKPEMDEKGNLTTAGFACSQCGQPLFVYKLEQVSEKGKAYTNYFGRCNVAEHEKLILLAQLKPEKDSDEAVTYSLGKFGQRALDFYSIHVTKESTHPVKPLAQIAGNRYASGPVGKALSDACMGTIASFLSKYQDIIIEHQKVVKGNQKRLESLRELAGKENLEYPSVTLPPQPHTKEGVDAYNEVIARVRWTWVNLNLWQKLKLSRDDAKPLLRLKGFPSFPLVERQANEVDWWDMVCNVKKLINEKKEDGKVFWQNLAGYKRQEALRPYLSSEEDRKKGKKFARYQLGDLLLHLEKKHGEDWGKVYDEAWERIDKKVEGLSKHIKLEEERRSEDAQSKAALTDWLRAKASFVIEGLKEADKDEFCRCELKLQKWYGDLRGKPFAIEAENSILDISGFSKQYNCAFIWQKDGVKKLNLYLIINYFKGGKLRFKKIKPEAFEANRFYTVINKKSGEIVPMEVNFNFDDPNLIILPLAFGKRQGREFIWNDLLSLETGSLKLANGRVIEKTLYNRRTRQDEPALFVALTFERREVLDSSNIKPMNLIGVDRGENIPAVIALTDPEGCPLSRFKDSLGNPTHILRIGESYKEKQRTIQAKKEVEQRRAGGYSRKYASKAKNLADDMVRNTARDLLYYAVTQDAMLIFENLSRGFGRQGKRTFMAERQYTRMEDWLTAKLAYEGLPSKTYLSKTLAQYTSKTCSNCGFTITSADYDRVLEKLKKTATGWMTTINGKELKVEGQITYYNRYKRQNVVKDLSVELDRLSEESVNNDISSWTKGRSGEALSLLKKRFSHRPVQEKFVCLNCGFETHADEQAALNIARSWLFLRSQEYKKYQTNKTTGNTDKRAFVETWQSFYRKKLKEVWKPAV

SEQ ID NO: 28659 - protein, 979 aa, synthetic construct
  REGION 1..979: note = engineered CasX variant
QEIKRINKIRRRLVKDSNTKKAGKTGPMKTLLVRVMTPDLRERLENLRKKPENIPQPISNTSRANLNKLLTDYTEMKKAILHVYWEEFQKDPVGLMSRVAQPASKKIDQNKLKPEMDEKGNLTTAGFACSQCGQPLFVYKLEQVSEKGKAYTNYFGRCNVAEHEKLILLAQLKPEKDSDEAVTYSLGKFGQRALDFYSIHVTKESTHPVKPLAQIAGNRYASGPVGKALSDACMGTIASFLSKYQDIIIEHQKVVKGNQKRLESLRELAGKENLEYPSVTLPPQPHTKEGVDAYNEVIARVRWWVNLNLWQKLKLSRDDAKPLLRLKGFPSFPLVERQQANEVDWWDMVCNVKKLINEKKEDGKVFWQNLAGYKRQEALRPYLSSEEDRKKGKKFARYQLGDLLLHLEKKHGEDWGKVYDEAWERIDKKVEGLSKHIKLEEERRSEDAQSKAALTDWLRAKASFVIEGLKEADKDEFCRCELKLQKWYGDLRGKPFAIEAENSILDISGFSKQYNCAFIWQKDGVKKLNLYLIINYFKGGKLRFKKIKPEAFEANRFYTVINKKSGEIVPMEVNFNFDDPNLIILPLAFGKRQGREFIWNDLLSLETGSLKLANGRVIEKTLYNRRTRQDEPALFVALTFERREVLDSSNIKPMNLIGVDRGENIPAVIALTDPEGCPLSRFKDSLGNPTHILRIGESYKEKQRTIQAKKEVEQRRAGGYSRKYASKAKNLADDMVRNTARDLLYYAVTQDAMLIFENLSRGFGRQGKRTFMAERQYTRMEDWLTAKLAYEGLPSKTYLSKTLAQYTSKTCSNCGFTITSADYDRVLEKLKKTATGWMTTINGKELKVEGQITYYNRYKRQNVVKDLSVELDRLSEESVNNDISSWTKGRSGEALSLLKKRFSHRPVQEKFVCLNCGFETHADEQAALNIARSWLFLRSQEYKKYQTNKTTGNTDKRAFVETWQSFYRKKLKEVWKPAV

SEQ ID NO: 28660 - protein, 979 aa, synthetic construct
  REGION 1..979: note = engineered CasX variant
QEIKRINKIRRRLVKDSNTKKAGKTGPMKTLLVRVMTPDLRERLENLRKKPENIPQPISNTSRANLNKLLTDYTEMKKAILHVYWEEFQKDPVGLMSRVAQPASKKIDQNKLKPEMDEKGNLTTAGFACSQCGQPLFVYKLEQVSEKGKAYTNYFGRCNVAEHEKLILLAQLKPEKDSDEAVTYSLGKFGQRALDFYSIHVTKESTHPVKPLAQIAGNRYASGPVGKALSDACMGTIASFLSKYQDIIIEHQKVVKGNQKRLESLRELAGKENLEYPSVTLPPQPHTKEGVDAYNEVIARVRWWVNLNLWQKLKLSRDDAKPLLRLKGFPSFPLVERQANAEVDWWDMVCNVKKLINEKKEDGKVFWQNLAGYKRQEALRPYLSSEEDRKKGKKFARYQLGDLLLHLEKKHGEDWGKVYDEAWERIDKKVEGLSKHIKLEEERRSEDAQSKAALTDWLRAKASFVIEGLKEADKDEFCRCELKLQKWYGDLRGKPFAIEAENSILDISGFSKQYNCAFIWQKDGVKKLNLYLIINYFKGGKLRFKKIKPEAFEANRFYTVINKKSGEIVPMEVNFNFDDPNLIILPLAFGKRQGREFIWNDLLSLETGSLKLANGRVIEKTLYNRRTRQDEPALFVALTFERREVLDSSNIKPMNLIGVDRGENIPAVIALTDPEGCPLSRFKDSLGNPTHILRIGESYKEKQRTIQAKKEVEQRRAGGYSRKYASKAKNLADDMVRNTARDLLYYAVTQDAMLIFENLSRGFGRQGKRTFMAERQYTRMEDWLTAKLAYEGLPSKTYLSKTLAQYTSKTCSNCGFTITSADYDRVLEKLKKTATGWMTTINGKELKVEGQITYYNRYKRQNVVKDLSVELDRLSEESVNNDISSWTKGRSGEALSLLKKRFSHRPVQEKFVCLNCGFETHADEQAALNIARSWLFLRSQEYKKYQTNKTTGNTDKRAFVETWQSFYRKKLKEVWKPAV

SEQ ID NO: 28661 - protein, 978 aa, synthetic construct
  REGION 1..978: note = engineered CasX variant
QEIKRINKIRRRLVKDSNTKKAGKTGPMKTLLVRVMTPDLRERLENLRKKPENIPQPISNTSRANLNKLLTDYTEMKKAILHVYWEEFQKDPVGLMSRVAQPASKKIDQNKLKPEMDEKGNLTTAGFACSQCGQPLFVYKLEQVSEKGKAYTNYFGRCNVAEHEKLILLAQLKPEKDSDEAVTYSLGKFGQRALDFYSIHVTKESTHPVKPLAQIAGNRYASGPVGKALSDACMGTIASFLSKYQDIIIEHQKVVKGNQKRLESLRELAGKENLEYPSVTLPPQPHTKEGVDAYNEVIARVRWWVNLNLWQKLKLSRDDAKPLLRLKGFPSFPLVERQANEVDWWDMVCNVKKLINEKKEDGKVFWQNLAGYKRQEALRPYLSSEEDRKKGKKFARTQLGDLLLHLEKKHGEDWGKVYDEAWERIDKKVEGLSKHIKLEEERRSEDAQSKAALTDWLRAKASFVIEGLKEADKDEFCRCELKLQKWYGDLRGKPFAIEAENSILDISGFSKQYNCAFIWQKDGVKKLNLYLIINYFKGGKLRFKKIKPEAFEANRFYTVINKKSGEIVPMEVNFNFDDPNLIILPLAFGKRQGREFIWNDLLSLETGSLKLANGRVIEKTLYNRRTRQDEPALFVALTFERREVLDSSNIKPMNLIGVDRGENIPAVIALTDPEGCPLSRFKDSLGNPTHILRIGESYKEKQRTIQAKKEVEQRRAGGYSRKYASKAKNLADDMVRNTARDLLYYAVTQDAMLIFENLSRGFGRQGKRTFMAERQYTRMEDWLTAKLAYEGLPSKTYLSKTLAQYTSKTCSNCGFTITSADYDRVLEKLKKTATGWMTTINGKELKVEGQITYYNRYKRQNVVKDLSVELDRLSEESVNNDISSWTKGRSGEALSLLKKRFSHRPVQEKFVCLNCGFETHADEQAALNIARSWLFLRSQEYKKYQTNKTTGNTDKRAFVETWQSFYRKKLKEVWKPAV

SEQ ID NO: 28662 - protein, 979 aa, synthetic construct
  REGION 1..979: note = engineered CasX variant
QEIKRINKIRRRLVKDSNTKKAGKTGPMKTLLVRVMTPDLRERLENLRKKPENIPQPISNTSRANLNKLLTDYTEMKKAILHVYWEEFQKDPVGLMSRVAQPASKKIDQNKLKPEMDEKGNLTTAGFACSQCGQPLFVYKLEQVSEKGKAYTNYFGRCNVAEHEKLILLAQLKPEKDSDEAVTYSLGKFGQRALDFYSIHVTKESTHPVKPLAQIAGNRYASGPVGKALSDACMGTIASFLSKYQDIIIEHQKVVKGNQKRLESLRELAGKENLEYPSVTLPPQPHTKEGVDAYNEVIARVRWWVNLNLWQKLKLSRDDAKPLLRLKGFPSFPLVERQANEVDWWDMVCNVKKLINEKKEDGKVFWQNLAGYKRQEALRPYLSSEEDRKKGKKFARYQLGDLLLHLEKKHEGEDWGKVYDEAWERIDKKVEGLSKHIKLEEERRSEDAQSKAALTDWLRAKASFVIEGLKEADKDEFCRCELKLQKWYGDLRGKPFAIEAENSILDISGFSKQYNCAFIWQKDGVKKLNLYLIINYFKGGKLRFKKIKPEAFEANRFYTVINKKSGEIVPMEVNFNFDDPNLIILPLAFGKRQGREFIWNDLLSLETGSLKLANGRVIEKTLYNRRTRQDEPALFVALTFERREVLDSSNIKPMNLIGVDRGENIPAVIALTDPEGCPLSRFKDSLGNPTHILRIGESYKEKQRTIQAKKEVEQRRAGGYSRKYASKAKNLADDMVRNTARDLLYYAVTQDAMLIFENLSRGFGRQGKRTFMAERQYTRMEDWLTAKLAYEGLPSKTYLSKTLAQYTSKTCSNCGFTITSADYDRVLEKLKKTATGWMTTINGKELKVEGQITYYNRYKRQNVVKDLSVELDRLSEESVNNDISSWTKGRSGEALSLLKKRFSHRPVQEKFVCLNCGFETHADEQAALNIARSWLFLRSQEYKKYQTNKTTGNTDKRAFVETWQSFYRKKLKEVWKPAV

SEQ ID NO: 28663 - protein, 978 aa, synthetic construct
  REGION 1..978: note = engineered CasX variant
QEIKRINKIRRRLVKDSNTKKAGKTGPMKTLLVRVMTPDLRERLENLRKKPENIPQPISNTSRANLNKLLTDYTEMKKAILHVYWEEFQKDPVGLMSRVAQPASKKIDQNKLKPEMDEKGNLTTAGFACSQCGQPLFVYKLEQVSEKGKAYTNYFGRCNVAEHEKLILLAQLKPEKDSDEAVTYSLGKFGQRALDFYSIHVTKESTHPVKPLAQIAGNRYASGPVGKALSDACMGTIASFLSKYQDIIIEHQKVVKGNQKRLESLRELAGKENLEYPSVTLPPQPHTKEGVDAYNEVIARVRWWVNLNLWQKLKLSRDDAKPLLRLKGFPSFPLVERQANEVDWWDMVCNVKKLINEKKEDGKVFWQNLAGYKRQEALRPYLSSEEDRKKGKKFARYQLGDLLLHLEKKHGEDWGKVYDEAWERIDKKVEGLSKHIKLEEERRSEDAQSKAALTDWLRAKASFVIEGLKEADKDEFCRCDLKLQKWYGDLRGKPFAIEAENSILDISGFSKQYNCAFIWQKDGVKKLNLYLIINYFKGGKLRFKKIKPEAFEANRFYTVINKKSGEIVPMEVNFNFDDPNLIILPLAFGKRQGREFIWNDLLSLETGSLKLANGRVIEKTLYNRRTRQDEPALFVALTFERREVLDSSNIKPMNLIGVDRGENIPAVIALTDPEGCPLSRFKDSLGNPTHILRIGESYKEKQRTIQAKKEVEQRRAGGYSRKYASKAKNLADDMVRNTARDLLYYAVTQDAMLIFENLSRGFGRQGKRTFMAERQYTRMEDWLTAKLAYEGLPSKTYLSKTLAQYTSKTCSNCGFTITSADYDRVLEKLKKTATGWMTTINGKELKVEGQITYYNRYKRQNVVKDLSVELDRLSEESVNNDISSWTKGRSGEALSLLKKRFSHRPVQEKFVCLNCGFETHADEQAALNIARSWLFLRSQEYKKYQTNKTTGNTDKRAFVETWQSFYRKKLKEVWKPAV

SEQ ID NO: 28664 - protein, 978 aa, synthetic construct
  REGION 1..978: note = engineered CasX variant
QEIKRINKIRRRLVKDSNTKKAGKTGPMKTLLVRVMTPDLRERLENLRKKPENIPQPISNTSRANLNKLLTDYTEMKKAILHVYWEEFQKDPVGLMSRVAQPASKKIDQNKLKPEMDEKGNLTTAGFACSQCGQPLFVYKLEQVSEKGKAYTNYFGRCNVAEHEKLILLAQLKPEKDSDEAVTYSLGKFGQRALDFYSIHVTKESTHPVKPLAQIAGNRYASGPVGKALSDACMGTIASFLSKYQDIIIEHQKVVKGNQKRLESLRELAGKENLEYPSVTLPPQPHTKEGVDAYNEVIARVRWWVNLNLWQKLKLSRDDAKPLLRLKGFPSFPLVERQANEVDWWDMVCNVKKLINEKKEDGKVFWQNLAGYKRQEALRPYLSSEEDRKKGKKFARYQLGDLLLHLEKKHGEDWGKVYDEAWERIDKKVEGLSKHIKLEEERRSEDAQSKAALTDWLRAKASFVIEGLKEADKDEFCRCELKLQKWYGDLRGKPFAIEAENSILDISGFSKQYNCAFIWQKDGVKKLNLYLIINYFKGGKLRFKKIKPEAFEANRFYTVINKKSGEIVPMEVNFNFDDPNLIILPLAFGKRFGREFIWNDLLSLETGSLKLANGRVIEKTLYNRRTRQDEPALFVALTFERREVLDSSNIKPMNLIGVDRGENIPAVIALTDPEGCPLSRFKDSLGNPTHILRIGESYKEKQRTIQAKKEVEQRRAGGYSRKYASKAKNLADDMVRNTARDLLYYAVTQDAMLIFENLSRGFGRQGKRTFMAERQYTRMEDWLTAKLAYEGLPSKTYLSKTLAQYTSKTCSNCGFTITSADYDRVLEKLKKTATGWMTTINGKELKVEGQITYYNRYKRQNVVKDLSVELDRLSEESVNNDISSWTKGRSGEALSLLKKRFSHRPVQEKFVCLNCGFETHADEQAALNIARSWLFLRSQEYKKYQTNKTTGNTDKRAFVETWQSFYRKKLKEVWKPAV

SEQ ID NO: 28665 - protein, 978 aa, synthetic construct
  REGION 1..978: note = engineered CasX variant
QEIKRINKIRRRLVKDSNTKKAGKTGPMKTLLVRVMTPDLRERLENLRKKPENIPQPISNTSRANLNKLLTDYTEMKKAILHVYWEEFQKDPVGLMSRVAQPASKKIDQNKLKPEMDEKGNLTTAGFACSQCGQPLFVYKLEQVSEKGKAYTNYFGRCNVAEHEKLILLAQLKPEKDSDEAVTYSLGKFGQRALDFYSIHVTKESTHPVKPLAQIAGNRYASGPVGKALSDACMGTIASFLSKYQDIIIEHQKVVKGNQKRLESLRELAGKENLEYPSVTLPPQPHTKEGVDAYNEVIARVRWWVNLNLWQKLKLSRDDAKPLLRLKGFPSFPLVERQANEVDWWDMVCNVKKLINEKKEDGKVFWQNLAGYKRQEALRPYLSSEEDRKKGKKFARYQLGDLLLHLEKKHGEDWGKVYDEAWERIDKKVEGLSKHIKLEEERRSEDAQSKAALTDWLRAKASFVIEGLKEADKDEFCRCELKLQKWYGDLRGKPFAIEAENSILDISGFSKQYNCAFIWQKDGVKKLNLYLIINYFKGGKLRFKKIKPEAFEANRFYTVINKKSGEIVPMEVNFNFDDPNLIILPLAFGKRVGREFIWNDLLSLETGSLKLANGRVIEKTLYNRRTRQDEPALFVALTFERREVLDSSNIKPMNLIGVDRGENIPAVIALTDPEGCPLSRFKDSLGNPTHILRIGESYKEKQRTIQAKKEVEQRRAGGYSRKYASKAKNLADDMVRNTARDLLYYAVTQDAMLIFENLSRGFGRQGKRTFMAERQYTRMEDWLTAKLAYEGLPSKTYLSKTLAQYTSKTCSNCGFTITSADYDRVLEKLKKTATGWMTTINGKELKVEGQITYYNRYKRQNVVKDLSVELDRLSEESVNNDISSWTKGRSGEALSLLKKRFSHRPVQEKFVCLNCGFETHADEQAALNIARSWLFLRSQEYKKYQTNKTTGNTDKRAFVETWQSFYRKKLKEVWKPAV

SEQ ID NO: 28666 - protein, 979 aa, synthetic construct
  REGION 1..979: note = engineered CasX variant
QEIKRINKIRRRLVKDSNTKKAGKTGPMKTLLVRVMTPDLRERLENLRKKPENIPQPISNTSRANLNKLLTDYTEMKKAILHVYWEEFQKDPVGLMSRVAQPASKKIDQNKLKPEMDEKGNLTTAGFACSQCGQPLFVYKLEQVSEKGKAYTNYFGRCNVAEHEKLILLAQLKPEKDSDEAVTYSLGKFGQRALDFYSIHVTKESTHPVKPLAQIAGNRYASGPVGKALSDACMGTIASFLSKYQDIIIEHQKVVKGNQKRLESLRELAGKENLEYPSVTLPPQPHTKEGVDAYNEVIARVRWWVNLNLWQKLKLSRDDAKPLLRLKGFPSFPLVERQANEVDWWDMVCNVKKLINEKKEDGKVFWQNLAGYKRQEALRPYLSSEEDRKKGKKFARYQLGDLLLHLEKKHGEDWGKVYDEAWERIDKKVEGLSKHIKLEEERRSEDAQSKAALTDWLRAKASFVIEGLKEADKDEFCRCELKLQKWYGDLRGKPFAIEAENSILDISGFSKQYNCAFIWQKDGVKKLNLYLIINYFKGGKLRFKKIKPEAFEANRFYTVINKKSGEIVPMEVNFNFDDPNLIILPLAFGKRQGREFIWNDLLSLETGSLKLANGRVIEKTLYNRRTRQDEPALFVALTFERREVLDSSNIKTPMNLIGVDRGENIPAVIALTDPEGCPLSRFKDSLGNPTHILRIGESYKEKQRTIQAKKEVEQRRAGGYSRKYASKAKNLADDMVRNTARDLLYYAVTQDAMLIFENLSRGFGRQGKRTFMAERQYTRMEDWLTAKLAYEGLPSKTYLSKTLAQYTSKTCSNCGFTITSADYDRVLEKLKKTATGWMTTINGKELKVEGQITYYNRYKRQNVVKDLSVELDRLSEESVNNDISSWTKGRSGEALSLLKKRFSHRPVQEKFVCLNCGFETHADEQAALNIARSWLFLRSQEYKKYQTNKTTGNTDKRAFVETWQSFYRKKLKEVWKPAV

SEQ ID NO: 28667 - protein, 979 aa, synthetic construct
  REGION 1..979: note = engineered CasX variant
QEIKRINKIRRRLVKDSNTKKAGKTGPMKTLLVRVMTPDLRERLENLRKKPENIPQPISNTSRANLNKLLTDYTEMKKAILHVYWEEFQKDPVGLMSRVAQPASKKIDQNKLKPEMDEKGNLTTAGFACSQCGQPLFVYKLEQVSEKGKAYTNYFGRCNVAEHEKLILLAQLKPEKDSDEAVTYSLGKFGQRALDFYSIHVTKESTHPVKPLAQIAGNRYASGPVGKALSDACMGTIASFLSKYQDIIIEHQKVVKGNQKRLESLRELAGKENLEYPSVTLPPQPHTKEGVDAYNEVIARVRWWVNLNLWQKLKLSRDDAKPLLRLKGFPSFPLVERQANEVDWWDMVCNVKKLINEKKEDGKVFWQNLAGYKRQEALRPYLSSEEDRKKGKKFARYQLGDLLLHLEKKHGEDWGKVYDEAWERIDKKVEGLSKHIKLEEERRSEDAQSKAALTDWLRAKASFVIEGLKEADKDEFCRCELKLQKWYGDLRGKPFAIEAENSILDISGFSKQYNCAFIWQKDGVKKLNLYLIINYFKGGKLRFKKIKPEAFEANRFYTVINKKSGEIVPMEVNFNFDDPNLIILPLAFGKRQGREFIWNDLLSLETGSLKLANGRVIEKTLYNRRTRQDEPALFVALTFERREVLDSSNIKPMSNLIGVDRGENIPAVIALTDPEGCPLSRFKDSLGNPTHILRIGESYKEKQRTIQAKKEVEQRRAGGYSRKYASKAKNLADDMVRNTARDLLYYAVTQDAMLIFENLSRGFGRQGKRTFMAERQYTRMEDWLTAKLAYEGLPSKTYLSKTLAQYTSKTCSNCGFTITSADYDRVLEKLKKTATGWMTTINGKELKVEGQITYYNRYKRQNVVKDLSVELDRLSEESVNNDISSWTKGRSGEALSLLKKRFSHRPVQEKFVCLNCGFETHADEQAALNIARSWLFLRSQEYKKYQTNKTTGNTDKRAFVETWQSFYRKKLKEVWKPAV

SEQ ID NO: 28668 - protein, 978 aa, synthetic construct
  REGION 1..978: note = engineered CasX variant
QEIKRINKIRRRLVKDSNTKKAGKTGPMKTLLVRVMTPDLRERLENLRKKPENIPQPISNTSRANLNKLLTDYTEMKKAILHVYWEEFQKDPVGLMSRVAQPASKKIDQNKLKPEMDEKGNLTTAGFACSQCGQPLFVYKLEQVSEKGKAYTNYFGRCNVAEHEKLILLAQLKPEKDSDEAVTYSLGKFGQRALDFYSIHVTKESTHPVKPLAQIAGNRYASGPVGKALSDACMGTIASFLSKYQDIIIEHQKVVKGNQKRLESLRELAGKENLEYPSVTLPPQPHTKEGVDAYNEVIARVRWWVNLNLWQKLKLSRDDAKPLLRLKGFPSFPLVERQANEVDWWDMVCNVKKLINEKKEDGKVFWQNLAGYKRQEALRPYLSSEEDRKKGKKFARYQLGDLLLHLEKKHGEDWGKVYDEAWERIDKKVEGLSKHIKLEEERRSEDAQSKAALTDWLRAKASFVIEGLKEADKDEFCRCELKLQKWYGDLRGKPFAIEAENSILDISGFSKQYNCAFIWQKDGVKKLNLYLIINYFKGGKLRFKKIKPEAFEANRFYTVINKKSGEIVPMEVNFNFDDPNLIILPLAFGKRQGREFIWNDLLSLETGSLKLANGRVIEKTLYNRRTRQDEPALFVALTFERREVLDSSNIKPMNLIGVDRGENIPAVIALTDPEGCPLSRFKDSLGNPTHILRIRESYKEKQRTIQAKKEVEQRRAGGYSRKYASKAKNLADDMVRNTARDLLYYAVTQDAMLIFENLSRGFGRQGKRTFMAERQYTRMEDWLTAKLAYEGLPSKTYLSKTLAQYTSKTCSNCGFTITSADYDRVLEKLKKTATGWMTTINGKELKVEGQITYYNRYKRQNVVKDLSVELDRLSEESVNNDISSWTKGRSGEALSLLKKRFSHRPVQEKFVCLNCGFETHADEQAALNIARSWLFLRSQEYKKYQTNKTTGNTDKRAFVETWQSFYRKKLKEVWKPAV

SEQ ID NO: 28669 - protein, 978 aa, synthetic construct
  REGION 1..978: note = engineered CasX variant
QEIKRINKIRRRLVKDSNTKKAGKTGPMKTLLVRVMTPDLRERLENLRKKPENIPQPISNTSRANLNKLLTDYTEMKKAILHVYWEEFQKDPVGLMSRVAQPASKKIDQNKLKPEMDEKGNLTTAGFACSQCGQPLFVYKLEQVSEKGKAYTNYFGRCNVAEHEKLILLAQLKPEKDSDEAVTYSLGKFGQRALDFYSIHVTKESTHPVKPLAQIAGNRYASGPVGKALSDACMGTIASFLSKYQDIIIEHQKVVKGNQKRLESLRELAGKENLEYPSVTLPPQPHTKEGVDAYNEVIARVRWWVNLNLWQKLKLSRDDAKPLLRLKGFPSFPLVERQANEVDWWDMVCNVKKLINEKKEDGKVFWQNLAGYKRQEALRPYLSSEEDRKKGKKFARYQLGDLLLHLEKKHGEDWGKVYDEAWERIDKKVEGLSKHIKLEEERRSEDAQSKAALTDWLRAKASFVIEGLKEADKDEFCRCELKLQKWYGDLRGKPFAIEAENSILDISGFSKQYNCAFIWQKDGVKKLNLYLIINYFKGGKLRFKKIKPEAFEANRFYTVINKKSGEIVPMEVNFNFDDPNLIILPLAFGKRQGREFIWNDLLSLETGSLKLANGRVIEKTLYNRRTRQDEPALFVALTFERREVLDSSNIKPMNLIGVDRGENIPAVIALTDPEGCPLSRFKDSLGNPTHILRIGESYKEKQRTIQAKKEVEQRRAGGYSRKYASKAKNLADDMVRNTARDLLYYAVTQDAMLIFENLSRGFGRQGKRTFSAERQYTRMEDWLTAKLAYEGLPSKTYLSKTLAQYTSKTCSNCGFTITSADYDRVLEKLKKTATGWMTTINGKELKVEGQITYYNRYKRQNVVKDLSVELDRLSEESVNNDISSWTKGRSGEALSLLKKRFSHRPVQEKFVCLNCGFETHADEQAALNIARSWLFLRSQEYKKYQTNKTTGNTDKRAFVETWQSFYRKKLKEVWKPAV

SEQ ID NO: 28670 - protein, 978 aa, synthetic construct
  REGION 1..978: note = engineered CasX variant
QEIKRINKIRRRLVKDSNTKKAGKTGPMKTLLVRVMTPDLRERLENLRKKPENIPQPISNTSRANLNKLLTDYTEMKKAILHVYWEEFQKDPVGLMSRVAQPASKKIDQNKLKPEMDEKGNLTTAGFACSQCGQPLFVYKLEQVSEKGKAYTNYFGRCNVAEHEKLILLAQLKPEKDSDEAVTYSLGKFGQRALDFYSIHVTKESTHPVKPLAQIAGNRYASGPVGKALSDACMGTIASFLSKYQDIIIEHQKVVKGNQKRLESLRELAGKENLEYPSVTLPPQPHTKEGVDAYNEVIARVRWWVNLNLWQKLKLSRDDAKPLLRLKGFPSFPLVERQANEVDWWDMVCNVKKLINEKKEDGKVFWQNLAGYKRQEALRPYLSSEEDRKKGKKFARYQLGDLLLHLEKKHGEDWGKVYDEAWERIDKKVEGLSKHIKLEEERRSEDAQSKAALTDWLRAKASFVIEGLKEADKDEFCRCELKLQKWYGDLRGKPFAIEAENSILDISGFSKQYNCAFIWQKDGVKKLNLYLIINYFKGGKLRFKKIKPEAFEANRFYTVINKKSGEIVPMEVNFNFDDPNLIILPLAFGKRQGREFIWNDLLSLETGSLKLANGRVIEKTLYNRRTRQDEPALFVALTFERREVLDSSNIKPMNLIGVDRGENIPAVIALTDPEGCPLSRFKDSLGNPTHILRIGESYKEKQRTIQAKKEVEQRRAGGYSRKYASKAKNLADDMVRNTARDLLYYAVTQDAMLIFENLSRGFGRQGKRTFMAERQYTRMEDWLTAKLAYEGLPSKTYLSKTLAQYTSKTCSNCGFTITSADYDRVLEKLKKTATGWMTTINGKELKVEGQITYYNRYKRQNVVKDLSVELDRLSEESVNNDISSWDKGRSGEALSLLKKRFSHRPVQEKFVCLNCGFETHADEQAALNIARSWLFLRSQEYKKYQTNKTTGNTDKRAFVETWQSFYRKKLKEVWKPAV

SEQ ID NO: 28671 - protein, 978 aa, synthetic construct
  REGION 1..978: note = engineered CasX variant
QEIKRINKIRRRLVKDSNTKKAGKTGPMKTLLVRVMTPDLRERLENLRKKPENIPQPISNTSRANLNKLLTDYTEMKKAILHVYWEEFQVDPVGLMSRVAQPASKKIDQNKLKPEMDEKGNLTTAGFACSQCGQPLFVYKLEQVSEKGKAYTNYFGRCNVAEHEKLILLAQLKPEKDSDEAVTYSLGKFGQRALDFYSIHVTKESTHPVKPLAQIAGNRYASGPVGKALSDACMGTIASFLSKYQDIIIEHQKVVKGNQKRLESLRELAGKENLEYPSVTLPPQPHTKEGVDAYNEVIARVRWWVNLNLWQKLKLSRDDAKPLLRLKGFPSFPLVERQANEVDWWDMVCNVKKLINEKKEDGKVFWQNLAGYKRQEALRPYLSSEEDRKKGKKFARYQLGDLLLHLEKKHGEDWGKVYDEAWERIDKKVEGLSKHIKLEEERRSEDAQSKAALTDWLRAKASFVIEGLKEADKDEFCRCELKLQKWYGDLRGKPFAIEAENSILDISGFSKQYNCAFIWQKDGVKKLNLYLIINYFKGGKLRFKKIKPEAFEANRFYTVINKKSGEIVPMEVNFNFDDPNLIILPLAFGKRQGREFIWNDLLSLETGSLKLANGRVIEKTLYNRRTRQDEPALFVALTFERREVLDSSNIKPMNLIGVDRGENIPAVIALTDPEGCPLSRFKDSLGNPTHILRIGESYKEKQRTIQAKKEVEQRRAGGYSRKYASKAKNLADDMVRNTARDLLYYAVTQDAMLIFENLSRGFGRQGKRTFMAERQYTRMEDWLTAKLAYEGLPSKTYLSKTLAQYTSKTCSNCGFTITSADYDRVLEKLKKTATGWMTTINGKELKVEGQITYYNRYKRQNVVKDLSVELDRLSEESVNNDISSWTKGRSGEALSLLKKRFSHRPVQEKFVCLNCGFETHADEQAALNIARSWLFLRSQEYKKYQTNKTTGNTDKRAFVETWQSFYRKKLKEVWKPAV

SEQ ID NO: 28672 - protein, 978 aa, synthetic construct
  REGION 1..978: note = engineered CasX variant
QEIKRLNKIRRRLVKDSNTKKAGKTGPMKTLLVRVMTPDLRERLENLRKKPENIPQPISNTSRANLNKLLTDYTEMKKAILHVYWEEFQKDPVGLMSRVAQPASKKIDQNKLKPEMDEKGNLTTAGFACSQCGQPLFVYKLEQVSEKGKAYTNYFGRCNVAEHEKLILLAQLKPEKDSDEAVTYSLGKFGQRALDFYSIHVTKESTHPVKPLAQIAGNRYASGPVGKALSDACMGTIASFLSKYQDIIIEHQKVVKGNQKRLESLRELAGKENLEYPSVTLPPQPHTKEGVDAYNEVIARVRWWVNLNLWQKLKLSRDDAKPLLRLKGFPSFPLVERQANEVDWWDMVCNVKKLINEKKEDGKVFWQNLAGYKRQEALRPYLSSEEDRKKGKKFARYQLGDLLLHLEKKHGEDWGKVYDEAWERIDKKVEGLSKHIKLEEERRSEDAQSKAALTDWLRAKASFVIEGLKEADKDEFCRCELKLQKWYGDLRGKPFAIEAENSILDISGFSKQYNCAFIWQKDGVKKLNLYLIINYFKGGKLRFKKIKPEAFEANRFYTVINKKSGEIVPMEVNFNFDDPNLIILPLAFGKRQGREFIWNDLLSLETGSLKLANGRVIEKTLYNRRTRQDEPALFVALTFERREVLDSSNIKPMNLIGVDRGENIPAVIALTDPEGCPLSRFKDSLGNPTHILRIGESYKEKQRTIQAKKEVEQRRAGGYSRKYASKAKNLADDMVRNTARDLLYYAVTQDAMLIFENLSRGFGRQGKRTFMAERQYTRMEDWLTAKLAYEGLPSKTYLSKTLAQYTSKTCSNCGFTITSADYDRVLEKLKKTATGWMTTINGKELKVEGQITYYNRYKRQNVVKDLSVELDRLSEESVNNDISSWTKGRSGEALSLLKKRFSHRPVQEKFVCLNCGFETHADEQAALNIARSWLFLRSQEYKKYQTNKTTGNTDKRAFVETWQSFYRKKLKEVWKPAV

SEQ ID NO: 28673 - protein, 978 aa, synthetic construct
  REGION 1..978: note = engineered CasX variant
QEIKRINKIRRRLVKDSNTKKAGKTGPMKTLLVRVMTPDLRERLENLRKKPENIPQPISNTSRANLNKLLTDYTEMKKAILHVYWEEFQKDPVGLMSRVAQPASKKIDQNKLKPEMDEKGNLTTAGFACSQCGQPLFVYKLEQVSEKGKAYTNYVGRCNVAEHEKLILLAQLKPEKDSDEAVTYSLGKFGQRALDFYSIHVTKESTHPVKPLAQIAGNRYASGPVGKALSDACMGTIASFLSKYQDIIIEHQKVVKGNQKRLESLRELAGKENLEYPSVTLPPQPHTKEGVDAYNEVIARVRWWVNLNLWQKLKLSRDDAKPLLRLKGFPSFPLVERQANEVDWWDMVCNVKKLINEKKEDGKVFWQNLAGYKRQEALRPYLSSEEDRKKGKKFARYQLGDLLLHLEKKHGEDWGKVYDEAWERIDKKVEGLSKHIKLEEERRSEDAQSKAALTDWLRAKASFVIEGLKEADKDEFCRCELKLQKWYGDLRGKPFAIEAENSILDISGFSKQYNCAFIWQKDGVKKLNLYLIINYFKGGKLRFKKIKPEAFEANRFYTVINKKSGEIVPMEVNFNFDDPNLIILPLAFGKRQGREFIWNDLLSLETGSLKLANGRVIEKTLYNRRTRQDEPALFVALTFERREVLDSSNIKPMNLIGVDRGENIPAVIALTDPEGCPLSRFKDSLGNPTHILRIGESYKEKQRTIQAKKEVEQRRAGGYSRKYASKAKNLADDMVRNTARDLLYYAVTQDAMLIFENLSRGFGRQGKRTFMAERQYTRMEDWLTAKLAYEGLPSKTYLSKTLAQYTSKTCSNCGFTITSADYDRVLEKLKKTATGWMTTINGKELKVEGQITYYNRYKRQNVVKDLSVELDRLSEESVNNDISSWTKGRSGEALSLLKKRFSHRPVQEKFVCLNCGFETHADEQAALNIARSWLFLRSQEYKKYQTNKTTGNTDKRAFVETWQSFYRKKLKEVWKPAV

SEQ ID NO: 28674 - protein, 978 aa, synthetic construct
  REGION 1..978: note = engineered CasX variant
QEIKRINKIRRRLVKDSNTKKAGKTGPMKTLLVRVMTPDLRERLENLRKKPENIPQPISNTSRANLNKLLTDYTEMKKAILHVYWEEFQKDPVGLMSRVAQPASKKIDQNKLKPEMDEKGNLTTAGFACSQCGQPLFVYKLEQVSEKGKAYTNYFGRCNVAEHEKLILLAQLKPEKDSDEAVTYSLGKFGQRALDFYSIHVTKESTHPVKPLAQIAGNRYASGPVGKALSDACMGTIASFLSKYQDIIIEHQKVVKGNQKRLESLRELAGKENLEYPSVTLPPQPHTKEGVDAYNEVIARVRWWVNLNLWQKLKLSRDDAKPLLRLKGFPSFPLVERQANEVDWWDMVCNVKKLINEKKEDGKVFWQNLAGYKRQEALRPYLSSEEDRKKGKKFARYQLGDLLLHLEKKHGEDWGKVYDEAWERIDKKVEGLSKHIKLEEERRSEDAQSKAALTDWLRAKASFVIEGLKEADKDEFCRCELKLQKWYGDLRGKPFAIEAENSILDISGFSKQYNCAFIWQKDGVKKLNLYLIINYFKGGKLRFKKIKPEAFEANRFYTVINKKSGEIVPMEVNFNFDDPNLIILPLAFGKRQGREFIWNDLLSLETGSLKLANGRVIEKTLYNRRTRQDEPALFVALTFERREVLDSSNIKPMNLIGVDRGENIPAVIALTDPEGCPLSRFKDSLGNPTHILRIGESYKEKQRTIQAKKEVEQRRAGGYSRKYASKAKNLADDMVRNTARDLLYYAVTQDAMLIFENLSRGFGRQGKRTFMAERQYTRMEDWLTAKLAYEGLASKTYLSKTLAQYTSKTCSNCGFTITSADYDRVLEKLKKTATGWMTTINGKELKVEGQITYYNRYKRQNVVKDLSVELDRLSEESVNNDISSWTKGRSGEALSLLKKRFSHRPVQEKFVCLNCGFETHADEQAALNIARSWLFLRSQEYKKYQTNKTTGNTDKRAFVETWQSFYRKKLKEVWKPAV

SEQ ID NO: 28675 - protein, 978 aa, synthetic construct
  REGION 1..978: note = engineered CasX variant
QEIKRINKIRRRLVKDSNTKKAGKTGPMKTLLVRVMTPDLRERLENLRKKPENIPQPISNTSRANLNKLLTDYTEMKKAILHVYWEEFQKDPVGLMSRVAQPASKKIDQNKLKPEMDEKGNLTTAGFACSQCGQPLFVYKLEQVSEKGKAYTNYFGRCNVAEHEKLILLAQLKPEKDSDEAVTYSLGKFGQRALDFYSIHVTKESTHPVKPLAQIAGNRYASGPVGKALSDACMGTIASFLSKYQDIIIEHQKVVKGNQKRLESLRELAGKENLEYPSVTLPPQPHTKEGVDAYNEVIARVRWWVNLNLWQKLKLSRDDAKPLLRLKGFPSFPLVERQANEVDWWDMVCNVKKLINEKKEDGKVFWQNLAGYKRQEALRPYLSSEEDRKKGKKFARYQLGDLLLHLEKKHGEDWGKVYDEAWERIDKKVEGLSKHIKLEEERRSEDAQSKAALTDWLRAKASFVIEGLKEADKDEFCRCELKLQKWYGDLRGKPFAIEAENSILDISGFSKQYNCAFIWQKDGVKKLNLYLIINYFKGGKLRFKKIKPEAFEANRFYTVINKKSGEIVPMEVNFNFDDPNLIILPLAFGKRQGREFIWNDLLSLETGSLKLANGRVIEKTLYNRRTRQDEPALFVALTFERREVLDSSNIKPMNLIGVDRGENIPAVIALTDPEGCPLSRFKDSLGNPTHILRIGESYKEKQRTIQAKKEVEQRRAGGYSRKYASKAKNLADDMVRNTARDLLYYAVTQDAMLIFENLSRGFGRQGKRTFMAERQYTRMEDWLTAKLAYEGLPSKVYLSKTLAQYTSKTCSNCGFTITSADYDRVLEKLKKTATGWMTTINGKELKVEGQITYYNRYKRQNVVKDLSVELDRLSEESVNNDISSWTKGRSGEALSLLKKRFSHRPVQEKFVCLNCGFETHADEQAALNIARSWLFLRSQEYKKYQTNKTTGNTDKRAFVETWQSFYRKKLKEVWKPAV

SEQ ID NO: 28676 - protein, 979 aa, synthetic construct
  REGION 1..979: note = engineered CasX variant
QEIKRINKIRRRLVKDSNTKKAGKTGPMKTLLVRVMTPDLRERLENLRKKPENIPQPISNTSRANLNKLLTDYTEMKKAILHVYWEEFQKDPVGLMSRVAQPASKKIDQNKLKPEMDEKGNLTTAGFACSQCGQPLFVYKLEQVSEKGKAYTNYFGRCNVAEHEKLILLAQLKPEKDSDEAVTYSLGKFGQRALDFYSIHVTKESTHPVKPLAQIAGNRYASGPVGKALSDACMGTIASFLSKYQDIIIEHQKVVKGNQKRLESLRELAGKENLEYPSVTLPPQPHTKEGVDAYNEVIARVRWWVNLNLWQKLKLSRDDAKPLLRLKGFPSFPLVERQANEVDWWDMVCNVKKLINEKKEDGKVFWQNLAGYKRQEALRPYLSSEEDRKKGKKFARYQLGDLLLHLEKKHGEDWGKVYDEAWERIDKKVEGLSKHIKLEEERRSEDAQSKAALTDWLRAKASFVIEGLKEADKDEFCRCELKLQKWYGDLRGKPFAIEAENSILDISGFSKQYNCAFIWQKDGVKKLNLYLIINYFKGGKLRFKKIKPEAFEANRFYTVINKKSGEIVPMEVNFNFDDPNLIILPLAFGKRQGREFIWNDLLSLETGSLKLANGRVIEKTLYNRRTRQDEPALFVALTFERREVLDSSNIKPMNLIGVDRGENIPAVIALTDPEGCPLSRFKDSLGNPTHILRIGESYKEKQRTIQAKKEVEQRRAGGYSRKYASKAKNLADDMVRNTARDLLYYAVTQDAMLIFENLSRGFGRQGKRTFMAERQYTRMEDWLTAKLAYEGPLPSKTYLSKTLAQYTSKTCSNCGFTITSADYDRVLEKLKKTATGWMTTINGKELKVEGQITYYNRYKRQNVVKDLSVELDRLSEESVNNDISSWTKGRSGEALSLLKKRFSHRPVQEKFVCLNCGFETHADEQAALNIARSWLFLRSQEYKKYQTNKTTGNTDKRAFVETWQSFYRKKLKEVWKPAV

SEQ ID NO: 28677 - protein, 979 aa, synthetic construct
  REGION 1..979: note = engineered CasX variant
QEIKRINKIRRRLVKDSNTKKAGKTGPMKTLLVRVMTPDLRERLENLRKKPENIPQPISNTSRANLNKLLTDYTEMKKAILHVYWEEFQKDPVGLMSRVAQPASKKIDQNKLKPEMDEKGNLTTAGFACSQCGQPLFVYKLEQVSEKGKAYTNYFGRCNVAEHEKLILLAQLKPEKDSDEAVTYSLGKFGQRALDFYSIHVTKESTHPVKPLAQIAGNRYASGPVGKALSDACMGTIASFLSKYQDIIIEHQKVVKGNQKRLESLRELAGKENLEYPSVTLPPQPHTKEGVDAYNEVIARVRWWVNLNLWQKLKLSRDDAKPLLRLKGFPSFPLVERQANEVDWWDMVCNVKKLINEKKEDGKVFWQNLAGYKRQEALRPYLSSEEDVRKKGKKFARYQLGDLLLHLEKKHGEDWGKVYDEAWERIDKKVEGLSKHIKLEEERRSEDAQSKAALTDWLRAKASFVIEGLKEADKDEFCRCELKLQKWYGDLRGKPFAIEAENSILDISGFSKQYNCAFIWQKDGVKKLNLYLIINYFKGGKLRFKKIKPEAFEANRFYTVINKKSGEIVPMEVNFNFDDPNLIILPLAFGKRQGREFIWNDLLSLETGSLKLANGRVIEKTLYNRRTRQDEPALFVALTFERREVLDSSNIKPMNLIGVDRGENIPAVIALTDPEGCPLSRFKDSLGNPTHILRIGESYKEKQRTIQAKKEVEQRRAGGYSRKYASKAKNLADDMVRNTARDLLYYAVTQDAMLIFENLSRGFGRQGKRTFMAERQYTRMEDWLTAKLAYEGLPSKTYLSKTLAQYTSKTCSNCGFTITSADYDRVLEKLKKTATGWMTTINGKELKVEGQITYYNRYKRQNVVKDLSVELDRLSEESVNNDISSWTKGRSGEALSLLKKRFSHRPVQEKFVCLNCGFETHADEQAALNIARSWLFLRSQEYKKYQTNKTTGNTDKRAFVETWQSFYRKKLKEVWKPAV

SEQ ID NO: 28678 - protein, 978 aa, synthetic construct
  REGION 1..978: note = engineered CasX variant
QEIKRINKIRRRLVKDSNTKKAGKTGPMKTLLVRVMTPDLRERLENLRKKPENIPQPISNTSRANLNKLLTDYTEMKKAILHVYWEEFQKDPVGLMSRVAQPASKKIDQNKLKPEMDEKGNLTTAGFACSQCGQPLFVYKLEQVSEKGKAYTNYFGRCNVAEHEKLILLAQLKPEKDSDEAVTYSLGKFGQRALDFYSIHVTKESTHPVKPLAQIAGNRYASGPVGKALSDACMGTIASFLSKYQDIIIEHQKVVKGNQKRLESLRELAGKENLEYPSVTLPPQPHTKEGVDAYNEVIARVRWWVNLNLWQKLKLSRDDAKPLLRLKGFPSFPLVERQANEVDWWDMVCNVKKLINEKKEDGKVFWQNLAGYKRQEALRPYLSSEEDRKKGKKFARYQLGDLLLHLEKKHGEDWGKVYDEAWERIDKKVEGLSKHIKLEEERRSEDAQSKAALTDWLRAKASFVIEGLKEADKDEFCRCELKLQKWYGDLRGKPFAIEAENSILDISGFSKQYNCAFIWQKDGVKKLNLYLIINYFKGGKLRFKKIKPEAFEANRFYTVINKKSGEIVPMEVNFNFDDPNLIILPLAFGKRQGREFIWNDLLSLETGSLKLANGRVIEKTLYNRRTRQDEPALFVALTFERREVLDSSNIKPMNLIGVDRGENIPAVIALTDPEGCPLSRFKDSLGNPTHILRIGESYKEKQRTIQAKKEVEQRRAGGYSRKYASKAKNLADDMVRNTARDLLYYAVTQDAMLIFENLSRGFGRQGKRTFMAERQYTRMEDWLTAKLAYEGLPSKTYLSKTLAQYTSKTCSNCGFTITSADYDRMLEKLKKTATGWMTTINGKELKVEGQITYYNRYKRQNVVKDLSVELDRLSEESVNNDISSWTKGRSGEALSLLKKRFSHRPVQEKFVCLNCGFETHADEQAALNIARSWLFLRSQEYKKYQTNKTTGNTDKRAFVETWQSFYRKKLKEVWKPAV

SEQ ID NO: 28679 - protein, 978 aa, synthetic construct
  REGION 1..978: note = engineered CasX variant
QEIKRINKIRRRLVKDSNTKKAGKTGPMKTLLVRVMTPDLRERLENLRKKPENIPQPISNTSRANLNKLLTDYTEMKKAILHVYWEEFQKDPVGLMSRVAQPASKKIDQNKLKPEMDEKGNLTTAGFACSQCGQPLFVYKLEQVSEKGKAYTNYFGRCNVAEHEKLILLAQLKPEKDSDEAVTYSLGKFGQRALDFYSIHVTKESTHPVKPLAQIAGNRYASGPVGKALSDACMGTIASFLSKYQDIIIEHQKVVKGNQKRLESLRELAGKENLEYPSVTLPPQPHTKEGVDAYNEVIARVRWWVNLNLWQKLKLSRDDAKPLLRLKGFPSFPLVERQANEVDWWDMVCNVKKLINEKKEDGKVFWQNLAGYKRQEALRPYLSSEEDRKKGKKFARYQLGDLLLHLEKKHGEDWGKVYDEAWERIDKKVEGLSKHIKLEEERRSEDAQSKAALTDWLRAKASFVIEGLKEADKDEFCRCELKLQKWYGDLRGKPFAIEAENSILDISGFSKQYNCAFIWQKDGVKKLNLYLIINYFKGGKLRFKKIKPEAFEANRFYTVINKKSGEIVPMEVNFNFDDPNLIILPLAFGKRQGREFIWNDLLSLETGSLKLANGRVIEKTLYNRRTRQDEPALFVALTFERREVLDSSNIKPMNLIGVDRGENIPAVIALTDPEGCPLSRFKDSLGNPTHILRIGESYKEKQRTIQAKKEVEQRRAGGYSRKYASKAKNLADDMVRNTARDLLYYAVTQDAMLIFENLSRGFGRQGKRTFMAERQYTRMEDWLTAKLAYEGLPSKTYLSKTLAQYTSKTCSNCGFTITSADYDRVLEKLKKTATGWMTTINGKELKVEGQITYYNRYKRQNVVKDLSVELDRLSEESVNNDISSWTKGRQGEALSLLKKRFSHRPVQEKFVCLNCGFETHADEQAALNIARSWLFLRSQEYKKYQTNKTTGNTDKRAFVETWQSFYRKKLKEVWKPAV

SEQ ID NO: 28680 - protein, 978 aa, synthetic construct
  REGION 1..978: note = engineered CasX variant
QEIKRINKIRRRLVKDSNTKKAGKTGPMKTLLVRVMTPDLRERLENLRKKPENIPQPISNTSRANLNKLLTDYTEMKKAILHVYWEEFQKDPVGLMSRVAQPASKKIDQNKLKPEMDEKGNLTTAGFACSQCGQPLFVYKLEQVSEKGKAYTNYFGRCNVAEHEKLILLAQLKPEKDSDEAVTYSLGKFGQRALDFYSIHVTKESTHPVKPLAQIAGNRYASGPVGKALSDACMGTIASFLSKYQDIIIEHQKVVKGNQKRLESLRELAGKENLEYPSVTLPPQPHTKEGVDAYNEVIARVRWWVNLNLWQKLKLSRDDAKPLLRLKGFPSFPLVERQANEVDWWDMVCNVKKLINEKKEDGKVFWQNLAGYKRQEALRPYLSSEEDRKKGKKFARYQLGDLLLHLEKKHGEDWGKVYDEAWERIDKKVEGLSKHIKLEEERRSEDAQSKAALTDWLRAKASFVIEGLKEADKDEFCRCELKLQKWYGDLRGKPFAIEAENSILDISGFSKQYNCAFIWQKDGVKKLNLYLIINYFKGGKLRFKKIKPEAFEANRFYTVINKKSGEIVPMEVNFNFDDPNLIILPLAFGKRQGREFIWNDLLSLETGSLKLANGRVIEKTLYNRRTRQDEPALFVALTFERREVLDSSNIKPMNLIGVDRGENIPAVIALTDPEGCPLSRFKDSLGNPTHILRIGESYKEKQRTIQAKKEVEQRRAGGYSRKYASKAKNLADDMVRNTARDLLYYAVTQDAMLIFENLSRGFGRQGKRTFMAERQYTRMEDWLTAKLAYEGLPSKTYLSKTLAQYTSKTCSNCGFTITSADYDRVLEKLKKTATGWMTTINGKELKVEGQITYYNRYKRQNVVKDLSVELDRLSEESVNNDISSWTKGRSGEALSLLKKRFSHRPVQEKFVCLNCEFETHADEQAALNIARSWLFLRSQEYKKYQTNKTTGNTDKRAFVETWQSFYRKKLKEVWKPAV

SEQ ID NO: 28681 - protein, 979 aa, synthetic construct
  REGION 1..979: note = engineered CasX variant
QEIKRINKIRRRLVKDSNTKKAGKTGPMKTLLVRVMTPDLRERLENLRKKPENIPQPISNTSRANLNKLLTDYTEMKKAILHVYWEEFQKDPVGLMSRVAQPASKKIDQNKLKPEMDEKGNLTTAGFACSQCGQPLFVYKLEQVSEKGKAYTNYFGRCNVAEHEKLILLAQLKPEKDSDEAVTYSLGKFGQRALDFYSIHVTKESTHPVKPLAQIAGNRYASGPVGKALSDACMGTIASFLSKYQDIIIEHQKVVKGNQKRLESLRELAGKENLEYPSVTLPPQPHTKEGVDAYNEVIARVRWWVNLNLWQKLKLSRDDAKPLLRLKGFPSFPLVERQANEVDWWDMVCNVKKLINEKKEDGKVFWQNLAGYKRQEALRPYLSSEEDRKKGKKFARYQLGDLLLHLEKKHGEDWGKVYDEAWERIDKKVEGLSKHIKLEEERRSEDAQSKAALTDWLRAKASFVIEGLKEADKDEFCRCELKLQKWYGDLRGKPFAIEAENSILDISGFSKQYNCAFIWQKDGVKKLNLYLIINYFKGGKLRFKKIKPEAFEANRFYTVINKKSGEIVPMEVNFNFDDPNLIILPLAFGKRQGREFIWNDLLSLETGSLKLANGRVIEKTLYNRRTRQDEPALFVALTFERREVLDSSNIKPMNLIGVDRGENIPAVIALTDPEGCPLSRFKDSLGNPTHILRIGESYKEKQRTIQAKKEVEQRRAGGYSRKYASKAKNLADDMVRNTARDLLYYAVTQDAMLIFENLSRGFGRQGKRTFMAERQYTRMEDWLTAKLAYEGLPSKTYLSKTLAQYTSKTCSNCGFTITSADYDRVLEKLKKTATGWMTTINGKELKVEGQITYYNRYKRQNVVKDLSVELDRLSEESVNNDISSWTKGRSGEALSLLKKRFSHRPVQEKFVCLNCGFETHADEQAALNIARSWLFLRSQEYKKYQTNKTSTGNTDKRAFVETWQSFYRKKLKEVWKPAV

SEQ ID NO: 28682 - protein, 979 aa, synthetic construct
  REGION 1..979: note = engineered CasX variant
QEIKRINKIRRRLVKDSNTKKAGKTGPMKTLLVRVMTPDLRERLENLRKKPENIPQPISNTSRANLNKLLTDYTEMKKAILHVYWEEFQKDPVGLMSRVAQPASKKIDQNKLKPEMDEKGNLTTAGFACSQCGQPLFVYKLEQVSEKGKAYTNYFGRCNVAEHEKLILLAQLKPEKDSDEAVTYSLGKFGQRALDFYSIHVTKESTHPVKPLAQIAGNRYASGPVGKALSDACMGTIASFLSKYQDIIIEHQKVVKGNQKRLESLRELAGKENLEYPSVTLPPQPHTKEGVDAYNEVIARVRWWVNLNLWQKLKLSRDDAKPLLRLKGFPSFPLVERQANEVDWWDMVCNVKKLINEKKEDGKVFWQNLAGYKRQEALRPYLSSEEDRKKGKKFARYQLGDLLLHLEKKHGEDWGKVYDEAWERIDKKVEGLSKHIKLEEERRSEDAQSKAALTDWLRAKASFVIEGLKEADKDEFCRCELKLQKWYGDLRGKPFAIEAENSILDISGFSKQYNCAFIWQKDGVKKLNLYLIINYFKGGKLRFKKIKPEAFEANRFYTVINKKSGEIVPMEVNFNFDDPNLIILPLAFGKRQGREFIWNDLLSLETGSLKLANGRVIEKTLYNRRTRQDEPALFVALTFERREVLDSSNIKPMNLIGVDRGENIPAVIALTDPEGCPLSRFKDSLGNPTHILRIGESYKEKQRTIQAKKEVEQRRAGGYSRKYASKAKNLADDMVRNTARDLLYYAVTQDAMLIFENLSRGFGRQGKRTFMAERQYTRMEDWLTAKLAYEGLPSKTYLSKTLAQYTSKTCSNCGFTITSADYDRVLEKLKKTATGWMTTINGKELKVEGQITYYNRYKRQNVVKDLSVELDRLSEESVNNDISSWTKGRSGEALSLLKKRFSHRPVQEKFVCLNCGFETHADEQAALNIARSWLFLRSQEYKKYQTNKTTGKNTDKRAFVETWQSFYRKKLKEVWKPAV

SEQ ID NO: 28683 - protein, 978 aa, synthetic construct
  REGION 1..978: note = engineered CasX variant
QEIKRINKIRRRLVKDSNTKKAGKTGPMKTLLVRVMTPDLRERLENLRKKPENIPQPISNTSRANLNKLLTDYTEMKKAILHVYWEEFQKDPVGLMSRVAQPASKKIDQNKLKPEMDEKGNLTTAGFACSQCGQPLFVYKLEQVSEKGKAYTNYFGRCNVAEHEKLILLAQLKPEKDSDEAVTYSLGKFGQRALDFYSIHVTKESTHPVKPLAQIAGNRYASGPVGKALSDACMGTIASFLSKYQDIIIEHQKVVKGNQKRLESLRELAGKENLEYPSVTLPPQPHTKEGVDAYNEVIARVRWWVNLNLWQKLKLSRDDAKPLLRLKKFPSFPLVERQANEVDWWDMVCNVKKLINEKKEDGKVFWQNLAGYKRQEALRPYLSSEEDRKKGKKFARYQLGDLLLHLEKKHGEDWGKVYDEAWERIDKKVEGLSKHIKLEEERRSEDAQSKAALTDWLRAKASFVIEGLKEADKDEFCRCELKLQKWYGDLRGKPFAIEAENSILDISGFSKQYNCAFIWQKDGVKKLNLYLIINYFKGGKLRFKKIKPEAFEANRFYTVINKKSGEIVPMEVNFNFDDPNLIILPLAFGKRQGREFIWNDLLSLETGSLKLANGRVIEKTLYNRRTRQDEPALFVALTFERREVLDSSNIKPMNLIGVDRGENIPAVIALTDPEGCPLSRFKDSLGNPTHILRIGESYKEKQRTIQAKKEVEQRRAGGYSRKYASKAKNLADDMVRNTARDLLYYAVTQDAMLIFENLSRGFGRQGKRTFMAERQYTRMEDWLTAKLAYEGLPSKTYLSKTLAQYTSKTCSNCGFTITSADYDRVLEKLKKTATGWMTTINGKELKVEGQITYYNRYKRQNVVKDLSVELDRLSEESVNNDISSWTKGRSGEALSLLKKRFSHRPVQEKFVCLNCGFETHADEQAALNIARSWLFLRSQEYKKYQTNKTTGNTDKRAFVETWQSFYRKKLKEVWKPAV

SEQ ID NO: 28684 - protein, 978 aa, synthetic construct
  REGION 1..978: note = engineered CasX variant
QEIKRINKIRRRLVKDSNTKKAGKTGPMKTLLVRVMTPDLRERLENLRKKPENIPQPISNTSRANLNKLLTDYTEMKKAILHVYWEEFQKDPVGLMSRVAQPASKKIDQNKLKPEMDEKGNLTTAGFACSQCGQPLFVYKLEQVSEKGKAYTNYFGRCNVAEHEKLILLAQLKPEKDSDEAVTYSLGKFGQRALDFYSIHVTKESTHPVKPLAQIAGNRYASGPVGKALSDACMGTIASFLSKYQDIIIEHQKVVKGNQKRLESLRELAGKENLEYPSVTLPPQPHTKEGVDAYNEVIARVRWWVNLNLWQKLKLSRDDAKPLLRLKGFPSFPLVERQANEVDWWDMVCNVKKLINEKKEDGKVFWQNLAGYKRQEALRPYLSSEEDRKKGKKFARYQLGDLLLHLEKKHGEDWGKVYDEAWERIDKKVEGLSKHIKLEEERRSEDAQSKAALTDWLRAKASFVIEGLKEADKDEFCRCELKLQKWYGDLRGKPFAIEAENSILDISGFSKQYNCAFIWQKDGVKKLNLYLIINYFKGGKLRFKKIKPEAFEANRFYTVINKKSGEIVPMEVNFNFDDPNLIILPLAFGKRQGREFIWNDLLSLETGSLKLANGRVIEKTLYNRRTRQDEPALFVALTFERREVLDSSNIKPMNLIGVDRGENIPAVIALTDPEGCPLSRFKDSLGNPTHILRIGERYKEKQRTIQAKKEVEQRRAGGYSRKYASKAKNLADDMVRNTARDLLYYAVTQDAMLIFENLSRGFGRQGKRTFMAERQYTRMEDWLTAKLAYEGLPSKTYLSKTLAQYTSKTCSNCGFTITSADYDRVLEKLKKTATGWMTTINGKELKVEGQITYYNRYKRQNVVKDLSVELDRLSEESVNNDISSWTKGRSGEALSLLKKRFSHRPVQEKFVCLNCGFETHADEQAALNIARSWLFLRSQEYKKYQTNKTTGNTDKRAFVETWQSFYRKKLKEVWKPAV

SEQ ID NO: 28685 - protein, 978 aa, synthetic construct
  REGION 1..978: note = engineered CasX variant
QEIKRINKIRRRLVKDSNTKKAGKTGPMKTLLVRVMTPDLRERLENLRKKPENIPQPISNTSRANLNKLLTDYTEMKKAILHVYWEEFQKDPVGLMSRVAQPASKKIDQNKLKPEMDEKGNLTTAGFACSQCGQPLFVYKLEQVSEKGKAYTNYFGRCNVAEHEKLILLAQLKPEKDSDEAVTYSLGKFGQRALDFYSIHVTKESTHPVKPLAQIAGNRYASGPVGKALSDACMGTIASFLSKYQDIIIEHQKVVKGNQKRLESLRELAGKENLEYPSVTLPPQPHTKEGVDAYNEVIARVRWWVNLNLWQKLKLSRDDAKPLLRLKGFPSFPLVERQANEVDWWDMVCNVKKLINEKKEDGKVFWQNLAGYKRQEALRPYLSSEEDRKKGKKFARYQLGDLLLHLEKKHGEDWGKVYDEAWERIDKKVEGLSKHIKLEEERRSEDAQSKAALTDWLRAKASFVIEGLKEADKDEFCRCELKLQKWYGDLRGKPFAIEAENSILDISGFSKQYNCAFIWQKDGVKKLNLYLIINYFKGGKLRFKKIKPEAFEANRFYTVINKKSGEIVPMEVNFNFDDPNLIILPLAFGKRQGREFIWNDLLSLETGSLQLANGRVIEKTLYNRRTRQDEPALFVALTFERREVLDSSNIKPMNLIGVDRGENIPAVIALTDPEGCPLSRFKDSLGNPTHILRIGESYKEKQRTIQAKKEVEQRRAGGYSRKYASKAKNLADDMVRNTARDLLYYAVTQDAMLIFENLSRGFGRQGKRTFMAERQYTRMEDWLTAKLAYEGLPSKTYLSKTLAQYTSKTCSNCGFTITSADYDRVLEKLKKTATGWMTTINGKELKVEGQITYYNRYKRQNVVKDLSVELDRLSEESVNNDISSWTKGRSGEALSLLKKRFSHRPVQEKFVCLNCGFETHADEQAALNIARSWLFLRSQEYKKYQTNKTTGNTDKRAFVETWQSFYRKKLKEVWKPAV

SEQ ID NO: 28686 - protein, 980 aa, synthetic construct
  REGION 1..980: note = engineered CasX variant
QEIKRINKIRRRLVKDSNTKKAGKTGPMKTLLVRVMTPDLRERLENLRKKPENIPQPISNTSRANLNKLLTDYTEMKKAILHVYWEEFQKDPVGLMSRVAQPASKKIDQNKLKPEMDEKGNLTTAGFACSQCGQPLFVYKLEQVSEKGKAYTNYFGRCNVAEHEKLILLAQLKPEKDSDEAVTYSLGKFGQRALDFYSIHVTKESTHPVKPLAQIAGNRYASGPVGKALSDACMGTIASFLSKYQDIIIEHQKVVKGNQKRLESLRELAGKENLEYPSVTLPPQPHTKEGVDAYNEVIARVRMWVNLNLWQKLKLSRDDAKPLLRLKGFPSFPLVERQQANAEVDWWDMVCNVKKLINEKKEDGKVFWQNLAGYKRQEALRPYLSSEEDRKKGKKFARYQLGDLLLHLEKKHGEDWGKVYDEAWERIDKKVEGLSKHIKLEEERRSEDAQSKAALTDWLRAKASFVIEGLKEADKDEFCRCELKLQKWYGDLRGKPFAIEAENSILDISGFSKQYNCAFIWQKDGVKKLNLYLIINYFKGGKLRFKKIKPEAFEANRFYTVINKKSGEIVPMEVNFNFDDPNLIILPLAFGKRQGREFIWNDLLSLETGSLKLANGRVIEKTLYNRRTRQDEPALFVALTFERREVLDSSNIKPMNLIGVDRGENIPAVIALTDPEGCPLSRFKDSLGNPTHILRIGESYKEKQRTIQAKKEVEQRRAGGYSRKYASKAKNLADDMVRNTARDLLYYAVTQDAMLIFENLSRGFGRQGKRTFMAERQYTRMEDWLTAKLAYEGLPSKTYLSKTLAQYTSKTCSNCGFTITSADYDRVLEKLKKTATGWMTTINGKELKVEGQITYYNRYKRQNVVKDLSVELDRLSEESVNNDISSWTKGRSGEALSLLKKRFSHRPVQEKFVCLNCGFETHADEQAALNIARSWLFLRSQEYKKYQTNKTTGNTDKRAFVETWQSFYRKKLKEVWKPAV

SEQ ID NO: 28687 - protein, 979 aa, synthetic construct
  REGION 1..979: note = engineered CasX variant
QEIKRINKIRRRLVKDSNTKKAGKTGPMKTLLVRVMTPDLRERLENLRKKPENIPQPISNTSRANLNKLLTDYTEMKKAILHVYWEEFQKDPVGLMSRVAQPASKKIDQNKLKPEMDEKGNLTTAGFACSQCGQPLFVYKLEQVSEKGKAYTNYFGRCNVAEHEKLILLAQLKPEKDSDEAVTYSLGKFGQRALDFYSIHVTKESTHPVKPLAQIAGNRYASGPVGKALSDACMGTIASFLSKYQDIIIEHQKVVKGNQKRLESLRELAGKENLEYPSVTLPPQPHTKEGVDAYNEVIARVRMWVNLNLWQKLKLSRDDAKPLLRLKGFPSFPLVERQQANEVDWWDMVCNVKKLINEKKEDGKVFWQNLAGYKRQEALRPYLSSEEDRKKGKKFARTQLGDLLLHLEKKHGEDWGKVYDEAWERIDKKVEGLSKHIKLEEERRSEDAQSKAALTDWLRAKASFVIEGLKEADKDEFCRCELKLQKWYGDLRGKPFAIEAENSILDISGFSKQYNCAFIWQKDGVKKLNLYLIINYFKGGKLRFKKIKPEAFEANRFYTVINKKSGEIVPMEVNFNFDDPNLIILPLAFGKRQGREFIWNDLLSLETGSLKLANGRVIEKTLYNRRTRQDEPALFVALTFERREVLDSSNIKPMNLIGVDRGENIPAVIALTDPEGCPLSRFKDSLGNPTHILRIGESYKEKQRTIQAKKEVEQRRAGGYSRKYASKAKNLADDMVRNTARDLLYYAVTQDAMLIFENLSRGFGRQGKRTFMAERQYTRMEDWLTAKLAYEGLPSKTYLSKTLAQYTSKTCSNCGFTITSADYDRVLEKLKKTATGWMTTINGKELKVEGQITYYNRYKRQNVVKDLSVELDRLSEESVNNDISSWTKGRSGEALSLLKKRFSHRPVQEKFVCLNCGFETHADEQAALNIARSWLFLRSQEYKKYQTNKTTGNTDKRAFVETWQSFYRKKLKEVWKPAV

SEQ ID NO: 28688 - protein, 980 aa, synthetic construct
  REGION 1..980: note = engineered CasX variant
QEIKRINKIRRRLVKDSNTKKAGKTGPMKTLLVRVMTPDLRERLENLRKKPENIPQPISNTSRANLNKLLTDYTEMKKAILHVYWEEFQKDPVGLMSRVAQPASKKIDQNKLKPEMDEKGNLTTAGFACSQCGQPLFVYKLEQVSEKGKAYTNYFGRCNVAEHEKLILLAQLKPEKDSDEAVTYSLGKFGQRALDFYSIHVTKESTHPVKPLAQIAGNRYASGPVGKALSDACMGTIASFLSKYQDIIIEHQKVVKGNQKRLESLRELAGKENLEYPSVTLPPQPHTKEGVDAYNEVIARVRMWVNLNLWQKLKLSRDDAKPLLRLKGFPSFPLVERQQANEVDWWDMVCNVKKLINEKKEDGKVFWQNLAGYKRQEALRPYLSSEEDRKKGKKFARYQLGDLLLHLEKKHEGEDWGKVYDEAWERIDKKVEGLSKHIKLEEERRSEDAQSKAALTDWLRAKASFVIEGLKEADKDEFCRCELKLQKWYGDLRGKPFAIEAENSILDISGFSKQYNCAFIWQKDGVKKLNLYLIINYFKGGKLRFKKIKPEAFEANRFYTVINKKSGEIVPMEVNFNFDDPNLIILPLAFGKRQGREFIWNDLLSLETGSLKLANGRVIEKTLYNRRTRQDEPALFVALTFERREVLDSSNIKPMNLIGVDRGENIPAVIALTDPEGCPLSRFKDSLGNPTHILRIGESYKEKQRTIQAKKEVEQRRAGGYSRKYASKAKNLADDMVRNTARDLLYYAVTQDAMLIFENLSRGFGRQGKRTFMAERQYTRMEDWLTAKLAYEGLPSKTYLSKTLAQYTSKTCSNCGFTITSADYDRVLEKLKKTATGWMTTINGKELKVEGQITYYNRYKRQNVVKDLSVELDRLSEESVNNDISSWTKGRSGEALSLLKKRFSHRPVQEKFVCLNCGFETHADEQAALNIARSWLFLRSQEYKKYQTNKTTGNTDKRAFVETWQSFYRKKLKEVWKPAV

SEQ ID NO: 28689 - protein, 979 aa, synthetic construct
  REGION 1..979: note = engineered CasX variant
QEIKRINKIRRRLVKDSNTKKAGKTGPMKTLLVRVMTPDLRERLENLRKKPENIPQPISNTSRANLNKLLTDYTEMKKAILHVYWEEFQKDPVGLMSRVAQPASKKIDQNKLKPEMDEKGNLTTAGFACSQCGQPLFVYKLEQVSEKGKAYTNYFGRCNVAEHEKLILLAQLKPEKDSDEAVTYSLGKFGQRALDFYSIHVTKESTHPVKPLAQIAGNRYASGPVGKALSDACMGTIASFLSKYQDIIIEHQKVVKGNQKRLESLRELAGKENLEYPSVTLPPQPHTKEGVDAYNEVIARVRMWVNLNLWQKLKLSRDDAKPLLRLKGFPSFPLVERQQANEVDWWDMVCNVKKLINEKKEDGKVFWQNLAGYKRQEALRPYLSSEEDRKKGKKFARYQLGDLLLHLEKKHGEDWGKVYDEAWERIDKKVEGLSKHIKLEEERRSEDAQSKAALTDWLRAKASFVIEGLKEADKDEFCRCDLKLQKWYGDLRGKPFAIEAENSILDISGFSKQYNCAFIWQKDGVKKLNLYLIINYFKGGKLRFKKIKPEAFEANRFYTVINKKSGEIVPMEVNFNFDDPNLIILPLAFGKRQGREFIWNDLLSLETGSLKLANGRVIEKTLYNRRTRQDEPALFVALTFERREVLDSSNIKPMNLIGVDRGENIPAVIALTDPEGCPLSRFKDSLGNPTHILRIGESYKEKQRTIQAKKEVEQRRAGGYSRKYASKAKNLADDMVRNTARDLLYYAVTQDAMLIFENLSRGFGRQGKRTFMAERQYTRMEDWLTAKLAYEGLPSKTYLSKTLAQYTSKTCSNCGFTITSADYDRVLEKLKKTATGWMTTINGKELKVEGQITYYNRYKRQNVVKDLSVELDRLSEESVNNDISSWTKGRSGEALSLLKKRFSHRPVQEKFVCLNCGFETHADEQAALNIARSWLFLRSQEYKKYQTNKTTGNTDKRAFVETWQSFYRKKLKEVWKPAV

SEQ ID NO: 28690 - protein, 979 aa, synthetic construct
  REGION 1..979: note = engineered CasX variant
QEIKRINKIRRRLVKDSNTKKAGKTGPMKTLLVRVMTPDLRERLENLRKKPENIPQPISNTSRANLNKLLTDYTEMKKAILHVYWEEFQKDPVGLMSRVAQPASKKIDQNKLKPEMDEKGNLTTAGFACSQCGQPLFVYKLEQVSEKGKAYTNYFGRCNVAEHEKLILLAQLKPEKDSDEAVTYSLGKFGQRALDFYSIHVTKESTHPVKPLAQIAGNRYASGPVGKALSDACMGTIASFLSKYQDIIIEHQKVVKGNQKRLESLRELAGKENLEYPSVTLPPQPHTKEGVDAYNEVIARVRMWVNLNLWQKLKLSRDDAKPLLRLKGFPSFPLVERQQANEVDWWDMVCNVKKLINEKKEDGKVFWQNLAGYKRQEALRPYLSSEEDRKKGKKFARYQLGDLLLHLEKKHGEDWGKVYDEAWERIDKKVEGLSKHIKLEEERRSEDAQSKAALTDWLRAKASFVIEGLKEADKDEFCRCELKLQKWYGDLRGKPFAIEAENSILDISGFSKQYNCAFIWQKDGVKKLNLYLIINYFKGGKLRFKKIKPEAFEANRFYTVINKKSGEIVPMEVNFNFDDPNLIILPLAFGKRFGREFIWNDLLSLETGSLKLANGRVIEKTLYNRRTRQDEPALFVALTFERREVLDSSNIKPMNLIGVDRGENIPAVIALTDPEGCPLSRFKDSLGNPTHILRIGESYKEKQRTIQAKKEVEQRRAGGYSRKYASKAKNLADDMVRNTARDLLYYAVTQDAMLIFENLSRGFGRQGKRTFMAERQYTRMEDWLTAKLAYEGLPSKTYLSKTLAQYTSKTCSNCGFTITSADYDRVLEKLKKTATGWMTTINGKELKVEGQITYYNRYKRQNVVKDLSVELDRLSEESVNNDISSWTKGRSGEALSLLKKRFSHRPVQEKFVCLNCGFETHADEQAALNIARSWLFLRSQEYKKYQTNKTTGNTDKRAFVETWQSFYRKKLKEVWKPAV

SEQ ID NO: 28691 - protein, 979 aa, synthetic construct
  REGION 1..979: note = engineered CasX variant
QEIKRINKIRRRLVKDSNTKKAGKTGPMKTLLVRVMTPDLRERLENLRKKPENIPQPISNTSRANLNKLLTDYTEMKKAILHVYWEEFQKDPVGLMSRVAQPASKKIDQNKLKPEMDEKGNLTTAGFACSQCGQPLFVYKLEQVSEKGKAYTNYFGRCNVAEHEKLILLAQLKPEKDSDEAVTYSLGKFGQRALDFYSIHVTKESTHPVKPLAQIAGNRYASGPVGKALSDACMGTIASFLSKYQDIIIEHQKVVKGNQKRLESLRELAGKENLEYPSVTLPPQPHTKEGVDAYNEVIARVRMWVNLNLWQKLKLSRDDAKPLLRLKGFPSFPLVERQQANEVDWWDMVCNVKKLINEKKEDGKVFWQNLAGYKRQEALRPYLSSEEDRKKGKKFARYQLGDLLLHLEKKHGEDWGKVYDEAWERIDKKVEGLSKHIKLEEERRSEDAQSKAALTDWLRAKASFVIEGLKEADKDEFCRCELKLQKWYGDLRGKPFAIEAENSILDISGFSKQYNCAFIWQKDGVKKLNLYLIINYFKGGKLRFKKIKPEAFEANRFYTVINKKSGEIVPMEVNFNFDDPNLIILPLAFGKRVGREFIWNDLLSLETGSLKLANGRVIEKTLYNRRTRQDEPALFVALTFERREVLDSSNIKPMNLIGVDRGENIPAVIALTDPEGCPLSRFKDSLGNPTHILRIGESYKEKQRTIQAKKEVEQRRAGGYSRKYASKAKNLADDMVRNTARDLLYYAVTQDAMLIFENLSRGFGRQGKRTFMAERQYTRMEDWLTAKLAYEGLPSKTYLSKTLAQYTSKTCSNCGFTITSADYDRVLEKLKKTATGWMTTINGKELKVEGQITYYNRYKRQNVVKDLSVELDRLSEESVNNDISSWTKGRSGEALSLLKKRFSHRPVQEKFVCLNCGFETHADEQAALNIARSWLFLRSQEYKKYQTNKTTGNTDKRAFVETWQSFYRKKLKEVWKPAV

SEQ ID NO: 28692 - protein, 980 aa, synthetic construct
  REGION 1..980: note = engineered CasX variant
QEIKRINKIRRRLVKDSNTKKAGKTGPMKTLLVRVMTPDLRERLENLRKKPENIPQPISNTSRANLNKLLTDYTEMKKAILHVYWEEFQKDPVGLMSRVAQPASKKIDQNKLKPEMDEKGNLTTAGFACSQCGQPLFVYKLEQVSEKGKAYTNYFGRCNVAEHEKLILLAQLKPEKDSDEAVTYSLGKFGQRALDFYSIHVTKESTHPVKPLAQIAGNRYASGPVGKALSDACMGTIASFLSKYQDIIIEHQKVVKGNQKRLESLRELAGKENLEYPSVTLPPQPHTKEGVDAYNEVIARVRMWVNLNLWQKLKLSRDDAKPLLRLKGFPSFPLVERQQANEVDWWDMVCNVKKLINEKKEDGKVFWQNLAGYKRQEALRPYLSSEEDRKKGKKFARYQLGDLLLHLEKKHGEDWGKVYDEAWERIDKKVEGLSKHIKLEEERRSEDAQSKAALTDWLRAKASFVIEGLKEADKDEFCRCELKLQKWYGDLRGKPFAIEAENSILDISGFSKQYNCAFIWQKDGVKKLNLYLIINYFKGGKLRFKKIKPEAFEANRFYTVINKKSGEIVPMEVNFNFDDPNLIILPLAFGKRQGREFIWNDLLSLETGSLKLANGRVIEKTLYNRRTRQDEPALFVALTFERREVLDSSNIKTPMNLIGVDRGENIPAVIALTDPEGCPLSRFKDSLGNPTHILRIGESYKEKQRTIQAKKEVEQRRAGGYSRKYASKAKNLADDMVRNTARDLLYYAVTQDAMLIFENLSRGFGRQGKRTFMAERQYTRMEDWLTAKLAYEGLPSKTYLSKTLAQYTSKTCSNCGFTITSADYDRVLEKLKKTATGWMTTINGKELKVEGQITYYNRYKRQNVVKDLSVELDRLSEESVNNDISSWTKGRSGEALSLLKKRFSHRPVQEKFVCLNCGFETHADEQAALNIARSWLFLRSQEYKKYQTNKTTGNTDKRAFVETWQSFYRKKLKEVWKPAV

SEQ ID NO: 28693 - protein, 980 aa, synthetic construct
  REGION 1..980: note = engineered CasX variant
QEIKRINKIRRRLVKDSNTKKAGKTGPMKTLLVRVMTPDLRERLENLRKKPENIPQPISNTSRANLNKLLTDYTEMKKAILHVYWEEFQKDPVGLMSRVAQPASKKIDQNKLKPEMDEKGNLTTAGFACSQCGQPLFVYKLEQVSEKGKAYTNYFGRCNVAEHEKLILLAQLKPEKDSDEAVTYSLGKFGQRALDFYSIHVTKESTHPVKPLAQIAGNRYASGPVGKALSDACMGTIASFLSKYQDIIIEHQKVVKGNQKRLESLRELAGKENLEYPSVTLPPQPHTKEGVDAYNEVIARVRMWVNLNLWQKLKLSRDDAKPLLRLKGFPSFPLVERQQANEVDWWDMVCNVKKLINEKKEDGKVFWQNLAGYKRQEALRPYLSSEEDRKKGKKFARYQLGDLLLHLEKKHGEDWGKVYDEAWERIDKKVEGLSKHIKLEEERRSEDAQSKAALTDWLRAKASFVIEGLKEADKDEFCRCELKLQKWYGDLRGKPFAIEAENSILDISGFSKQYNCAFIWQKDGVKKLNLYLIINYFKGGKLRFKKIKPEAFEANRFYTVINKKSGEIVPMEVNFNFDDPNLIILPLAFGKRQGREFIWNDLLSLETGSLKLANGRVIEKTLYNRRTRQDEPALFVALTFERREVLDSSNIKPMSNLIGVDRGENIPAVIALTDPEGCPLSRFKDSLGNPTHILRIGESYKEKQRTIQAKKEVEQRRAGGYSRKYASKAKNLADDMVRNTARDLLYYAVTQDAMLIFENLSRGFGRQGKRTFMAERQYTRMEDWLTAKLAYEGLPSKTYLSKTLAQYTSKTCSNCGFTITSADYDRVLEKLKKTATGWMTTINGKELKVEGQITYYNRYKRQNVVKDLSVELDRLSEESVNNDISSWTKGRSGEALSLLKKRFSHRPVQEKFVCLNCGFETHADEQAALNIARSWLFLRSQEYKKYQTNKTTGNTDKRAFVETWQSFYRKKLKEVWKPAV

SEQ ID NO: 28694 - protein, 979 aa, synthetic construct
  REGION 1..979: note = engineered CasX variant
QEIKRINKIRRRLVKDSNTKKAGKTGPMKTLLVRVMTPDLRERLENLRKKPENIPQPISNTSRANLNKLLTDYTEMKKAILHVYWEEFQKDPVGLMSRVAQPASKKIDQNKLKPEMDEKGNLTTAGFACSQCGQPLFVYKLEQVSEKGKAYTNYFGRCNVAEHEKLILLAQLKPEKDSDEAVTYSLGKFGQRALDFYSIHVTKESTHPVKPLAQIAGNRYASGPVGKALSDACMGTIASFLSKYQDIIIEHQKVVKGNQKRLESLRELAGKENLEYPSVTLPPQPHTKEGVDAYNEVIARVRMWVNLNLWQKLKLSRDDAKPLLRLKGFPSFPLVERQQANEVDWWDMVCNVKKLINEKKEDGKVFWQNLAGYKRQEALRPYLSSEEDRKKGKKFARYQLGDLLLHLEKKHGEDWGKVYDEAWERIDKKVEGLSKHIKLEEERRSEDAQSKAALTDWLRAKASFVIEGLKEADKDEFCRCELKLQKWYGDLRGKPFAIEAENSILDISGFSKQYNCAFIWQKDGVKKLNLYLIINYFKGGKLRFKKIKPEAFEANRFYTVINKKSGEIVPMEVNFNFDDPNLIILPLAFGKRQGREFIWNDLLSLETGSLKLANGRVIEKTLYNRRTRQDEPALFVALTFERREVLDSSNIKPMNLIGVDRGENIPAVIALTDPEGCPLSRFKDSLGNPTHILRIRESYKEKQRTIQAKKEVEQRRAGGYSRKYASKAKNLADDMVRNTARDLLYYAVTQDAMLIFENLSRGFGRQGKRTFMAERQYTRMEDWLTAKLAYEGLPSKTYLSKTLAQYTSKTCSNCGFTITSADYDRVLEKLKKTATGWMTTINGKELKVEGQITYYNRYKRQNVVKDLSVELDRLSEESVNNDISSWTKGRSGEALSLLKKRFSHRPVQEKFVCLNCGFETHADEQAALNIARSWLFLRSQEYKKYQTNKTTGNTDKRAFVETWQSFYRKKLKEVWKPAV

SEQ ID NO: 28695 - protein, 979 aa, synthetic construct
  REGION 1..979: note = engineered CasX variant
QEIKRINKIRRRLVKDSNTKKAGKTGPMKTLLVRVMTPDLRERLENLRKKPENIPQPISNTSRANLNKLLTDYTEMKKAILHVYWEEFQKDPVGLMSRVAQPASKKIDQNKLKPEMDEKGNLTTAGFACSQCGQPLFVYKLEQVSEKGKAYTNYFGRCNVAEHEKLILLAQLKPEKDSDEAVTYSLGKFGQRALDFYSIHVTKESTHPVKPLAQIAGNRYASGPVGKALSDACMGTIASFLSKYQDIIIEHQKVVKGNQKRLESLRELAGKENLEYPSVTLPPQPHTKEGVDAYNEVIARVRMWVNLNLWQKLKLSRDDAKPLLRLKGFPSFPLVERQQANEVDWWDMVCNVKKLINEKKEDGKVFWQNLAGYKRQEALRPYLSSEEDRKKGKKFARYQLGDLLLHLEKKHGEDWGKVYDEAWERIDKKVEGLSKHIKLEEERRSEDAQSKAALTDWLRAKASFVIEGLKEADKDEFCRCELKLQKWYGDLRGKPFAIEAENSILDISGFSKQYNCAFIWQKDGVKKLNLYLIINYFKGGKLRFKKIKPEAFEANRFYTVINKKSGEIVPMEVNFNFDDPNLIILPLAFGKRQGREFIWNDLLSLETGSLKLANGRVIEKTLYNRRTRQDEPALFVALTFERREVLDSSNIKPMNLIGVDRGENIPAVIALTDPEGCPLSRFKDSLGNPTHILRIGESYKEKQRTIQAKKEVEQRRAGGYSRKYASKAKNLADDMVRNTARDLLYYAVTQDAMLIFENLSRGFGRQGKRTFSAERQYTRMEDWLTAKLAYEGLPSKTYLSKTLAQYTSKTCSNCGFTITSADYDRVLEKLKKTATGWMTTINGKELKVEGQITYYNRYKRQNVVKDLSVELDRLSEESVNNDISSWTKGRSGEALSLLKKRFSHRPVQEKFVCLNCGFETHADEQAALNIARSWLFLRSQEYKKYQTNKTTGNTDKRAFVETWQSFYRKKLKEVWKPAV

SEQ ID NO: 28696 - protein, 979 aa, synthetic construct
  REGION 1..979: note = engineered CasX variant
QEIKRINKIRRRLVKDSNTKKAGKTGPMKTLLVRVMTPDLRERLENLRKKPENIPQPISNTSRANLNKLLTDYTEMKKAILHVYWEEFQKDPVGLMSRVAQPASKKIDQNKLKPEMDEKGNLTTAGFACSQCGQPLFVYKLEQVSEKGKAYTNYFGRCNVAEHEKLILLAQLKPEKDSDEAVTYSLGKFGQRALDFYSIHVTKESTHPVKPLAQIAGNRYASGPVGKALSDACMGTIASFLSKYQDIIIEHQKVVKGNQKRLESLRELAGKENLEYPSVTLPPQPHTKEGVDAYNEVIARVRMWVNLNLWQKLKLSRDDAKPLLRLKGFPSFPLVERQQANEVDWWDMVCNVKKLINEKKEDGKVFWQNLAGYKRQEALRPYLSSEEDRKKGKKFARYQLGDLLLHLEKKHGEDWGKVYDEAWERIDKKVEGLSKHIKLEEERRSEDAQSKAALTDWLRAKASFVIEGLKEADKDEFCRCELKLQKWYGDLRGKPFAIEAENSILDISGFSKQYNCAFIWQKDGVKKLNLYLIINYFKGGKLRFKKIKPEAFEANRFYTVINKKSGEIVPMEVNFNFDDPNLIILPLAFGKRQGREFIWNDLLSLETGSLKLANGRVIEKTLYNRRTRQDEPALFVALTFERREVLDSSNIKPMNLIGVDRGENIPAVIALTDPEGCPLSRFKDSLGNPTHILRIGESYKEKQRTIQAKKEVEQRRAGGYSRKYASKAKNLADDMVRNTARDLLYYAVTQDAMLIFENLSRGFGRQGKRTFMAERQYTRMEDWLTAKLAYEGLPSKTYLSKTLAQYTSKTCSNCGFTITSADYDRVLEKLKKTATGWMTTINGKELKVEGQITYYNRYKRQNVVKDLSVELDRLSEESVNNDISSWDKGRSGEALSLLKKRFSHRPVQEKFVCLNCGFETHADEQAALNIARSWLFLRSQEYKKYQTNKTTGNTDKRAFVETWQSFYRKKLKEVWKPAV

SEQ ID NO: 28697 - protein, 979 aa, synthetic construct
  REGION 1..979: note = engineered CasX variant
QEIKRINKIRRRLVKDSNTKKAGKTGPMKTLLVRVMTPDLRERLENLRKKPENIPQPISNTSRANLNKLLTDYTEMKKAILHVYWEEFQVDPVGLMSRVAQPASKKIDQNKLKPEMDEKGNLTTAGFACSQCGQPLFVYKLEQVSEKGKAYTNYFGRCNVAEHEKLILLAQLKPEKDSDEAVTYSLGKFGQRALDFYSIHVTKESTHPVKPLAQIAGNRYASGPVGKALSDACMGTIASFLSKYQDIIIEHQKVVKGNQKRLESLRELAGKENLEYPSVTLPPQPHTKEGVDAYNEVIARVRMWVNLNLWQKLKLSRDDAKPLLRLKGFPSFPLVERQQANEVDWWDMVCNVKKLINEKKEDGKVFWQNLAGYKRQEALRPYLSSEEDRKKGKKFARYQLGDLLLHLEKKHGEDWGKVYDEAWERIDKKVEGLSKHIKLEEERRSEDAQSKAALTDWLRAKASFVIEGLKEADKDEFCRCELKLQKWYGDLRGKPFAIEAENSILDISGFSKQYNCAFIWQKDGVKKLNLYLIINYFKGGKLRFKKIKPEAFEANRFYTVINKKSGEIVPMEVNFNFDDPNLIILPLAFGKRQGREFIWNDLLSLETGSLKLANGRVIEKTLYNRRTRQDEPALFVALTFERREVLDSSNIKPMNLIGVDRGENIPAVIALTDPEGCPLSRFKDSLGNPTHILRIGESYKEKQRTIQAKKEVEQRRAGGYSRKYASKAKNLADDMVRNTARDLLYYAVTQDAMLIFENLSRGFGRQGKRTFMAERQYTRMEDWLTAKLAYEGLPSKTYLSKTLAQYTSKTCSNCGFTITSADYDRVLEKLKKTATGWMTTINGKELKVEGQITYYNRYKRQNVVKDLSVELDRLSEESVNNDISSWTKGRSGEALSLLKKRFSHRPVQEKFVCLNCGFETHADEQAALNIARSWLFLRSQEYKKYQTNKTTGNTDKRAFVETWQSFYRKKLKEVWKPAV

SEQ ID NO: 28698 - protein, 979 aa, synthetic construct
  REGION 1..979: note = engineered CasX variant
QEIKRLNKIRRRLVKDSNTKKAGKTGPMKTLLVRVMTPDLRERLENLRKKPENIPQPISNTSRANLNKLLTDYTEMKKAILHVYWEEFQKDPVGLMSRVAQPASKKIDQNKLKPEMDEKGNLTTAGFACSQCGQPLFVYKLEQVSEKGKAYTNYFGRCNVAEHEKLILLAQLKPEKDSDEAVTYSLGKFGQRALDFYSIHVTKESTHPVKPLAQIAGNRYASGPVGKALSDACMGTIASFLSKYQDIIIEHQKVVKGNQKRLESLRELAGKENLEYPSVTLPPQPHTKEGVDAYNEVIARVRMWVNLNLWQKLKLSRDDAKPLLRLKGFPSFPLVERQQANEVDWWDMVCNVKKLINEKKEDGKVFWQNLAGYKRQEALRPYLSSEEDRKKGKKFARYQLGDLLLHLEKKHGEDWGKVYDEAWERIDKKVEGLSKHIKLEEERRSEDAQSKAALTDWLRAKASFVIEGLKEADKDEFCRCELKLQKWYGDLRGKPFAIEAENSILDISGFSKQYNCAFIWQKDGVKKLNLYLIINYFKGGKLRFKKIKPEAFEANRFYTVINKKSGEIVPMEVNFNFDDPNLIILPLAFGKRQGREFIWNDLLSLETGSLKLANGRVIEKTLYNRRTRQDEPALFVALTFERREVLDSSNIKPMNLIGVDRGENIPAVIALTDPEGCPLSRFKDSLGNPTHILRIGESYKEKQRTIQAKKEVEQRRAGGYSRKYASKAKNLADDMVRNTARDLLYYAVTQDAMLIFENLSRGFGRQGKRTFMAERQYTRMEDWLTAKLAYEGLPSKTYLSKTLAQYTSKTCSNCGFTITSADYDRVLEKLKKTATGWMTTINGKELKVEGQITYYNRYKRQNVVKDLSVELDRLSEESVNNDISSWTKGRSGEALSLLKKRFSHRPVQEKFVCLNCGFETHADEQAALNIARSWLFLRSQEYKKYQTNKTTGNTDKRAFVETWQSFYRKKLKEVWKPAV

SEQ ID NO: 28699 - protein, 979 aa, synthetic construct
  REGION 1..979: note = engineered CasX variant
QEIKRINKIRRRLVKDSNTKKAGKTGPMKTLLVRVMTPDLRERLENLRKKPENIPQPISNTSRANLNKLLTDYTEMKKAILHVYWEEFQKDPVGLMSRVAQPASKKIDQNKLKPEMDEKGNLTTAGFACSQCGQPLFVYKLEQVSEKGKAYTNYVGRCNVAEHEKLILLAQLKPEKDSDEAVTYSLGKFGQRALDFYSIHVTKESTHPVKPLAQIAGNRYASGPVGKALSDACMGTIASFLSKYQDIIIEHQKVVKGNQKRLESLRELAGKENLEYPSVTLPPQPHTKEGVDAYNEVIARVRMWVNLNLWQKLKLSRDDAKPLLRLKGFPSFPLVERQQANEVDWWDMVCNVKKLINEKKEDGKVFWQNLAGYKRQEALRPYLSSEEDRKKGKKFARYQLGDLLLHLEKKHGEDWGKVYDEAWERIDKKVEGLSKHIKLEEERRSEDAQSKAALTDWLRAKASFVIEGLKEADKDEFCRCELKLQKWYGDLRGKPFAIEAENSILDISGFSKQYNCAFIWQKDGVKKLNLYLIINYFKGGKLRFKKIKPEAFEANRFYTVINKKSGEIVPMEVNFNFDDPNLIILPLAFGKRQGREFIWNDLLSLETGSLKLANGRVIEKTLYNRRTRQDEPALFVALTFERREVLDSSNIKPMNLIGVDRGENIPAVIALTDPEGCPLSRFKDSLGNPTHILRIGESYKEKQRTIQAKKEVEQRRAGGYSRKYASKAKNLADDMVRNTARDLLYYAVTQDAMLIFENLSRGFGRQGKRTFMAERQYTRMEDWLTAKLAYEGLPSKTYLSKTLAQYTSKTCSNCGFTITSADYDRVLEKLKKTATGWMTTINGKELKVEGQITYYNRYKRQNVVKDLSVELDRLSEESVNNDISSWTKGRSGEALSLLKKRFSHRPVQEKFVCLNCGFETHADEQAALNIARSWLFLRSQEYKKYQTNKTTGNTDKRAFVETWQSFYRKKLKEVWKPAV

SEQ ID NO: 28700 - protein, 979 aa, synthetic construct
  REGION 1..979: note = engineered CasX variant
QEIKRINKIRRRLVKDSNTKKAGKTGPMKTLLVRVMTPDLRERLENLRKKPENIPQPISNTSRANLNKLLTDYTEMKKAILHVYWEEFQKDPVGLMSRVAQPASKKIDQNKLKPEMDEKGNLTTAGFACSQCGQPLFVYKLEQVSEKGKAYTNYFGRCNVAEHEKLILLAQLKPEKDSDEAVTYSLGKFGQRALDFYSIHVTKESTHPVKPLAQIAGNRYASGPVGKALSDACMGTIASFLSKYQDIIIEHQKVVKGNQKRLESLRELAGKENLEYPSVTLPPQPHTKEGVDAYNEVIARVRMWVNLNLWQKLKLSRDDAKPLLRLKGFPSFPLVERQQANEVDWWDMVCNVKKLINEKKEDGKVFWQNLAGYKRQEALRPYLSSEEDRKKGKKFARYQLGDLLLHLEKKHGEDWGKVYDEAWERIDKKVEGLSKHIKLEEERRSEDAQSKAALTDWLRAKASFVIEGLKEADKDEFCRCELKLQKWYGDLRGKPFAIEAENSILDISGFSKQYNCAFIWQKDGVKKLNLYLIINYFKGGKLRFKKIKPEAFEANRFYTVINKKSGEIVPMEVNFNFDDPNLIILPLAFGKRQGREFIWNDLLSLETGSLKLANGRVIEKTLYNRRTRQDEPALFVALTFERREVLDSSNIKPMNLIGVDRGENIPAVIALTDPEGCPLSRFKDSLGNPTHILRIGESYKEKQRTIQAKKEVEQRRAGGYSRKYASKAKNLADDMVRNTARDLLYYAVTQDAMLIFENLSRGFGRQGKRTFMAERQYTRMEDWLTAKLAYEGLASKTYLSKTLAQYTSKTCSNCGFTITSADYDRVLEKLKKTATGWMTTINGKELKVEGQITYYNRYKRQNVVKDLSVELDRLSEESVNNDISSWTKGRSGEALSLLKKRFSHRPVQEKFVCLNCGFETHADEQAALNIARSWLFLRSQEYKKYQTNKTTGNTDKRAFVETWQSFYRKKLKEVWKPAV

SEQ ID NO: 28701 - protein, 979 aa, synthetic construct
  REGION 1..979: note = engineered CasX variant
QEIKRINKIRRRLVKDSNTKKAGKTGPMKTLLVRVMTPDLRERLENLRKKPENIPQPISNTSRANLNKLLTDYTEMKKAILHVYWEEFQKDPVGLMSRVAQPASKKIDQNKLKPEMDEKGNLTTAGFACSQCGQPLFVYKLEQVSEKGKAYTNYFGRCNVAEHEKLILLAQLKPEKDSDEAVTYSLGKFGQRALDFYSIHVTKESTHPVKPLAQIAGNRYASGPVGKALSDACMGTIASFLSKYQDIIIEHQKVVKGNQKRLESLRELAGKENLEYPSVTLPPQPHTKEGVDAYNEVIARVRMWVNLNLWQKLKLSRDDAKPLLRLKGFPSFPLVERQQANEVDWWDMVCNVKKLINEKKEDGKVFWQNLAGYKRQEALRPYLSSEEDRKKGKKFARYQLGDLLLHLEKKHGEDWGKVYDEAWERIDKKVEGLSKHIKLEEERRSEDAQSKAALTDWLRAKASFVIEGLKEADKDEFCRCELKLQKWYGDLRGKPFAIEAENSILDISGFSKQYNCAFIWQKDGVKKLNLYLIINYFKGGKLRFKKIKPEAFEANRFYTVINKKSGEIVPMEVNFNFDDPNLIILPLAFGKRQGREFIWNDLLSLETGSLKLANGRVIEKTLYNRRTRQDEPALFVALTFERREVLDSSNIKPMNLIGVDRGENIPAVIALTDPEGCPLSRFKDSLGNPTHILRIGESYKEKQRTIQAKKEVEQRRAGGYSRKYASKAKNLADDMVRNTARDLLYYAVTQDAMLIFENLSRGFGRQGKRTFMAERQYTRMEDWLTAKLAYEGLPSKVYLSKTLAQYTSKTCSNCGFTITSADYDRVLEKLKKTATGWMTTINGKELKVEGQITYYNRYKRQNVVKDLSVELDRLSEESVNNDISSWTKGRSGEALSLLKKRFSHRPVQEKFVCLNCGFETHADEQAALNIARSWLFLRSQEYKKYQTNKTTGNTDKRAFVETWQSFYRKKLKEVWKPAV

SEQ ID NO: 28702 - protein, 980 aa, synthetic construct
  REGION 1..980: note = engineered CasX variant
QEIKRINKIRRRLVKDSNTKKAGKTGPMKTLLVRVMTPDLRERLENLRKKPENIPQPISNTSRANLNKLLTDYTEMKKAILHVYWEEFQKDPVGLMSRVAQPASKKIDQNKLKPEMDEKGNLTTAGFACSQCGQPLFVYKLEQVSEKGKAYTNYFGRCNVAEHEKLILLAQLKPEKDSDEAVTYSLGKFGQRALDFYSIHVTKESTHPVKPLAQIAGNRYASGPVGKALSDACMGTIASFLSKYQDIIIEHQKVVKGNQKRLESLRELAGKENLEYPSVTLPPQPHTKEGVDAYNEVIARVRMWVNLNLWQKLKLSRDDAKPLLRLKGFPSFPLVERQQANEVDWWDMVCNVKKLINEKKEDGKVFWQNLAGYKRQEALRPYLSSEEDRKKGKKFARYQLGDLLLHLEKKHGEDWGKVYDEAWERIDKKVEGLSKHIKLEEERRSEDAQSKAALTDWLRAKASFVIEGLKEADKDEFCRCELKLQKWYGDLRGKPFAIEAENSILDISGFSKQYNCAFIWQKDGVKKLNLYLIINYFKGGKLRFKKIKPEAFEANRFYTVINKKSGEIVPMEVNFNFDDPNLIILPLAFGKRQGREFIWNDLLSLETGSLKLANGRVIEKTLYNRRTRQDEPALFVALTFERREVLDSSNIKPMNLIGVDRGENIPAVIALTDPEGCPLSRFKDSLGNPTHILRIGESYKEKQRTIQAKKEVEQRRAGGYSRKYASKAKNLADDMVRNTARDLLYYAVTQDAMLIFENLSRGFGRQGKRTFMAERQYTRMEDWLTAKLAYEGPLPSKTYLSKTLAQYTSKTCSNCGFTITSADYDRVLEKLKKTATGWMTTINGKELKVEGQITYYNRYKRQNVVKDLSVELDRLSEESVNNDISSWTKGRSGEALSLLKKRFSHRPVQEKFVCLNCGFETHADEQAALNIARSWLFLRSQEYKKYQTNKTTGNTDKRAFVETWQSFYRKKLKEVWKPAV

SEQ ID NO: 28703 - protein, 980 aa, synthetic construct
  REGION 1..980: note = engineered CasX variant
QEIKRINKIRRRLVKDSNTKKAGKTGPMKTLLVRVMTPDLRERLENLRKKPENIPQPISNTSRANLNKLLTDYTEMKKAILHVYWEEFQKDPVGLMSRVAQPASKKIDQNKLKPEMDEKGNLTTAGFACSQCGQPLFVYKLEQVSEKGKAYTNYFGRCNVAEHEKLILLAQLKPEKDSDEAVTYSLGKFGQRALDFYSIHVTKESTHPVKPLAQIAGNRYASGPVGKALSDACMGTIASFLSKYQDIIIEHQKVVKGNQKRLESLRELAGKENLEYPSVTLPPQPHTKEGVDAYNEVIARVRMWVNLNLWQKLKLSRDDAKPLLRLKGFPSFPLVERQQANEVDWWDMVCNVKKLINEKKEDGKVFWQNLAGYKRQEALRPYLSSEEDVRKKGKKFARYQLGDLLLHLEKKHGEDWGKVYDEAWERIDKKVEGLSKHIKLEEERRSEDAQSKAALTDWLRAKASFVIEGLKEADKDEFCRCELKLQKWYGDLRGKPFAIEAENSILDISGFSKQYNCAFIWQKDGVKKLNLYLIINYFKGGKLRFKKIKPEAFEANRFYTVINKKSGEIVPMEVNFNFDDPNLIILPLAFGKRQGREFIWNDLLSLETGSLKLANGRVIEKTLYNRRTRQDEPALFVALTFERREVLDSSNIKPMNLIGVDRGENIPAVIALTDPEGCPLSRFKDSLGNPTHILRIGESYKEKQRTIQAKKEVEQRRAGGYSRKYASKAKNLADDMVRNTARDLLYYAVTQDAMLIFENLSRGFGRQGKRTFMAERQYTRMEDWLTAKLAYEGLPSKTYLSKTLAQYTSKTCSNCGFTITSADYDRVLEKLKKTATGWMTTINGKELKVEGQITYYNRYKRQNVVKDLSVELDRLSEESVNNDISSWTKGRSGEALSLLKKRFSHRPVQEKFVCLNCGFETHADEQAALNIARSWLFLRSQEYKKYQTNKTTGNTDKRAFVETWQSFYRKKLKEVWKPAV

SEQ ID NO: 28704 - protein, 979 aa, synthetic construct
  REGION 1..979: note = engineered CasX variant
QEIKRINKIRRRLVKDSNTKKAGKTGPMKTLLVRVMTPDLRERLENLRKKPENIPQPISNTSRANLNKLLTDYTEMKKAILHVYWEEFQKDPVGLMSRVAQPASKKIDQNKLKPEMDEKGNLTTAGFACSQCGQPLFVYKLEQVSEKGKAYTNYFGRCNVAEHEKLILLAQLKPEKDSDEAVTYSLGKFGQRALDFYSIHVTKESTHPVKPLAQIAGNRYASGPVGKALSDACMGTIASFLSKYQDIIIEHQKVVKGNQKRLESLRELAGKENLEYPSVTLPPQPHTKEGVDAYNEVIARVRMWVNLNLWQKLKLSRDDAKPLLRLKGFPSFPLVERQQANEVDWWDMVCNVKKLINEKKEDGKVFWQNLAGYKRQEALRPYLSSEEDRKKGKKFARYQLGDLLLHLEKKHGEDWGKVYDEAWERIDKKVEGLSKHIKLEEERRSEDAQSKAALTDWLRAKASFVIEGLKEADKDEFCRCELKLQKWYGDLRGKPFAIEAENSILDISGFSKQYNCAFIWQKDGVKKLNLYLIINYFKGGKLRFKKIKPEAFEANRFYTVINKKSGEIVPMEVNFNFDDPNLIILPLAFGKRQGREFIWNDLLSLETGSLKLANGRVIEKTLYNRRTRQDEPALFVALTFERREVLDSSNIKPMNLIGVDRGENIPAVIALTDPEGCPLSRFKDSLGNPTHILRIGESYKEKQRTIQAKKEVEQRRAGGYSRKYASKAKNLADDMVRNTARDLLYYAVTQDAMLIFENLSRGFGRQGKRTFMAERQYTRMEDWLTAKLAYEGLPSKTYLSKTLAQYTSKTCSNCGFTITSADYDRMLEKLKKTATGWMTTINGKELKVEGQITYYNRYKRQNVVKDLSVELDRLSEESVNNDISSWTKGRSGEALSLLKKRFSHRPVQEKFVCLNCGFETHADEQAALNIARSWLFLRSQEYKKYQTNKTTGNTDKRAFVETWQSFYRKKLKEVWKPAV

SEQ ID NO: 28705 - protein, 979 aa, synthetic construct
  REGION 1..979: note = engineered CasX variant
QEIKRINKIRRRLVKDSNTKKAGKTGPMKTLLVRVMTPDLRERLENLRKKPENIPQPISNTSRANLNKLLTDYTEMKKAILHVYWEEFQKDPVGLMSRVAQPASKKIDQNKLKPEMDEKGNLTTAGFACSQCGQPLFVYKLEQVSEKGKAYTNYFGRCNVAEHEKLILLAQLKPEKDSDEAVTYSLGKFGQRALDFYSIHVTKESTHPVKPLAQIAGNRYASGPVGKALSDACMGTIASFLSKYQDIIIEHQKVVKGNQKRLESLRELAGKENLEYPSVTLPPQPHTKEGVDAYNEVIARVRMWVNLNLWQKLKLSRDDAKPLLRLKGFPSFPLVERQQANEVDWWDMVCNVKKLINEKKEDGKVFWQNLAGYKRQEALRPYLSSEEDRKKGKKFARYQLGDLLLHLEKKHGEDWGKVYDEAWERIDKKVEGLSKHIKLEEERRSEDAQSKAALTDWLRAKASFVIEGLKEADKDEFCRCELKLQKWYGDLRGKPFAIEAENSILDISGFSKQYNCAFIWQKDGVKKLNLYLIINYFKGGKLRFKKIKPEAFEANRFYTVINKKSGEIVPMEVNFNFDDPNLIILPLAFGKRQGREFIWNDLLSLETGSLKLANGRVIEKTLYNRRTRQDEPALFVALTFERREVLDSSNIKPMNLIGVDRGENIPAVIALTDPEGCPLSRFKDSLGNPTHILRIGESYKEKQRTIQAKKEVEQRRAGGYSRKYASKAKNLADDMVRNTARDLLYYAVTQDAMLIFENLSRGFGRQGKRTFMAERQYTRMEDWLTAKLAYEGLPSKTYLSKTLAQYTSKTCSNCGFTITSADYDRVLEKLKKTATGWMTTINGKELKVEGQITYYNRYKRQNVVKDLSVELDRLSEESVNNDISSWTKGRQGEALSLLKKRFSHRPVQEKFVCLNCGFETHADEQAALNIARSWLFLRSQEYKKYQTNKTTGNTDKRAFVETWQSFYRKKLKEVWKPAV

SEQ ID NO: 28706 - protein, 979 aa, synthetic construct
  REGION 1..979: note = engineered CasX variant
QEIKRINKIRRRLVKDSNTKKAGKTGPMKTLLVRVMTPDLRERLENLRKKPENIPQPISNTSRANLNKLLTDYTEMKKAILHVYWEEFQKDPVGLMSRVAQPASKKIDQNKLKPEMDEKGNLTTAGFACSQCGQPLFVYKLEQVSEKGKAYTNYFGRCNVAEHEKLILLAQLKPEKDSDEAVTYSLGKFGQRALDFYSIHVTKESTHPVKPLAQIAGNRYASGPVGKALSDACMGTIASFLSKYQDIIIEHQKVVKGNQKRLESLRELAGKENLEYPSVTLPPQPHTKEGVDAYNEVIARVRMWVNLNLWQKLKLSRDDAKPLLRLKGFPSFPLVERQQANEVDWWDMVCNVKKLINEKKEDGKVFWQNLAGYKRQEALRPYLSSEEDRKKGKKFARYQLGDLLLHLEKKHGEDWGKVYDEAWERIDKKVEGLSKHIKLEEERRSEDAQSKAALTDWLRAKASFVIEGLKEADKDEFCRCELKLQKWYGDLRGKPFAIEAENSILDISGFSKQYNCAFIWQKDGVKKLNLYLIINYFKGGKLRFKKIKPEAFEANRFYTVINKKSGEIVPMEVNFNFDDPNLIILPLAFGKRQGREFIWNDLLSLETGSLKLANGRVIEKTLYNRRTRQDEPALFVALTFERREVLDSSNIKPMNLIGVDRGENIPAVIALTDPEGCPLSRFKDSLGNPTHILRIGESYKEKQRTIQAKKEVEQRRAGGYSRKYASKAKNLADDMVRNTARDLLYYAVTQDAMLIFENLSRGFGRQGKRTFMAERQYTRMEDWLTAKLAYEGLPSKTYLSKTLAQYTSKTCSNCGFTITSADYDRVLEKLKKTATGWMTTINGKELKVEGQITYYNRYKRQNVVKDLSVELDRLSEESVNNDISSWTKGRSGEALSLLKKRFSHRPVQEKFVCLNCEFETHADEQAALNIARSWLFLRSQEYKKYQTNKTTGNTDKRAFVETWQSFYRKKLKEVWKPAV

SEQ ID NO: 28707 - protein, 980 aa, synthetic construct
  REGION 1..980: note = engineered CasX variant
QEIKRINKIRRRLVKDSNTKKAGKTGPMKTLLVRVMTPDLRERLENLRKKPENIPQPISNTSRANLNKLLTDYTEMKKAILHVYWEEFQKDPVGLMSRVAQPASKKIDQNKLKPEMDEKGNLTTAGFACSQCGQPLFVYKLEQVSEKGKAYTNYFGRCNVAEHEKLILLAQLKPEKDSDEAVTYSLGKFGQRALDFYSIHVTKESTHPVKPLAQIAGNRYASGPVGKALSDACMGTIASFLSKYQDIIIEHQKVVKGNQKRLESLRELAGKENLEYPSVTLPPQPHTKEGVDAYNEVIARVRMWVNLNLWQKLKLSRDDAKPLLRLKGFPSFPLVERQQANEVDWWDMVCNVKKLINEKKEDGKVFWQNLAGYKRQEALRPYLSSEEDRKKGKKFARYQLGDLLLHLEKKHGEDWGKVYDEAWERIDKKVEGLSKHIKLEEERRSEDAQSKAALTDWLRAKASFVIEGLKEADKDEFCRCELKLQKWYGDLRGKPFAIEAENSILDISGFSKQYNCAFIWQKDGVKKLNLYLIINYFKGGKLRFKKIKPEAFEANRFYTVINKKSGEIVPMEVNFNFDDPNLIILPLAFGKRQGREFIWNDLLSLETGSLKLANGRVIEKTLYNRRTRQDEPALFVALTFERREVLDSSNIKPMNLIGVDRGENIPAVIALTDPEGCPLSRFKDSLGNPTHILRIGESYKEKQRTIQAKKEVEQRRAGGYSRKYASKAKNLADDMVRNTARDLLYYAVTQDAMLIFENLSRGFGRQGKRTFMAERQYTRMEDWLTAKLAYEGLPSKTYLSKTLAQYTSKTCSNCGFTITSADYDRVLEKLKKTATGWMTTINGKELKVEGQITYYNRYKRQNVVKDLSVELDRLSEESVNNDISSWTKGRSGEALSLLKKRFSHRPVQEKFVCLNCGFETHADEQAALNIARSWLFLRSQEYKKYQTNKTSTGNTDKRAFVETWQSFYRKKLKEVWKPAV

SEQ ID NO: 28708 - protein, 980 aa, synthetic construct
  REGION 1..980: note = engineered CasX variant
QEIKRINKIRRRLVKDSNTKKAGKTGPMKTLLVRVMTPDLRERLENLRKKPENIPQPISNTSRANLNKLLTDYTEMKKAILHVYWEEFQKDPVGLMSRVAQPASKKIDQNKLKPEMDEKGNLTTAGFACSQCGQPLFVYKLEQVSEKGKAYTNYFGRCNVAEHEKLILLAQLKPEKDSDEAVTYSLGKFGQRALDFYSIHVTKESTHPVKPLAQIAGNRYASGPVGKALSDACMGTIASFLSKYQDIIIEHQKVVKGNQKRLESLRELAGKENLEYPSVTLPPQPHTKEGVDAYNEVIARVRMWVNLNLWQKLKLSRDDAKPLLRLKGFPSFPLVERQQANEVDWWDMVCNVKKLINEKKEDGKVFWQNLAGYKRQEALRPYLSSEEDRKKGKKFARYQLGDLLLHLEKKHGEDWGKVYDEAWERIDKKVEGLSKHIKLEEERRSEDAQSKAALTDWLRAKASFVIEGLKEADKDEFCRCELKLQKWYGDLRGKPFAIEAENSILDISGFSKQYNCAFIWQKDGVKKLNLYLIINYFKGGKLRFKKIKPEAFEANRFYTVINKKSGEIVPMEVNFNFDDPNLIILPLAFGKRQGREFIWNDLLSLETGSLKLANGRVIEKTLYNRRTRQDEPALFVALTFERREVLDSSNIKPMNLIGVDRGENIPAVIALTDPEGCPLSRFKDSLGNPTHILRIGESYKEKQRTIQAKKEVEQRRAGGYSRKYASKAKNLADDMVRNTARDLLYYAVTQDAMLIFENLSRGFGRQGKRTFMAERQYTRMEDWLTAKLAYEGLPSKTYLSKTLAQYTSKTCSNCGFTITSADYDRVLEKLKKTATGWMTTINGKELKVEGQITYYNRYKRQNVVKDLSVELDRLSEESVNNDISSWTKGRSGEALSLLKKRFSHRPVQEKFVCLNCGFETHADEQAALNIARSWLFLRSQEYKKYQTNKTTGKNTDKRAFVETWQSFYRKKLKEVWKPAV

SEQ ID NO: 28709 - protein, 979 aa, synthetic construct
  REGION 1..979: note = engineered CasX variant
QEIKRINKIRRRLVKDSNTKKAGKTGPMKTLLVRVMTPDLRERLENLRKKPENIPQPISNTSRANLNKLLTDYTEMKKAILHVYWEEFQKDPVGLMSRVAQPASKKIDQNKLKPEMDEKGNLTTAGFACSQCGQPLFVYKLEQVSEKGKAYTNYFGRCNVAEHEKLILLAQLKPEKDSDEAVTYSLGKFGQRALDFYSIHVTKESTHPVKPLAQIAGNRYASGPVGKALSDACMGTIASFLSKYQDIIIEHQKVVKGNQKRLESLRELAGKENLEYPSVTLPPQPHTKEGVDAYNEVIARVRMWVNLNLWQKLKLSRDDAKPLLRLKKFPSFPLVERQQANEVDWWDMVCNVKKLINEKKEDGKVFWQNLAGYKRQEALRPYLSSEEDRKKGKKFARYQLGDLLLHLEKKHGEDWGKVYDEAWERIDKKVEGLSKHIKLEEERRSEDAQSKAALTDWLRAKASFVIEGLKEADKDEFCRCELKLQKWYGDLRGKPFAIEAENSILDISGFSKQYNCAFIWQKDGVKKLNLYLIINYFKGGKLRFKKIKPEAFEANRFYTVINKKSGEIVPMEVNFNFDDPNLIILPLAFGKRQGREFIWNDLLSLETGSLKLANGRVIEKTLYNRRTRQDEPALFVALTFERREVLDSSNIKPMNLIGVDRGENIPAVIALTDPEGCPLSRFKDSLGNPTHILRIGESYKEKQRTIQAKKEVEQRRAGGYSRKYASKAKNLADDMVRNTARDLLYYAVTQDAMLIFENLSRGFGRQGKRTFMAERQYTRMEDWLTAKLAYEGLPSKTYLSKTLAQYTSKTCSNCGFTITSADYDRVLEKLKKTATGWMTTINGKELKVEGQITYYNRYKRQNVVKDLSVELDRLSEESVNNDISSWTKGRSGEALSLLKKRFSHRPVQEKFVCLNCGFETHADEQAALNIARSWLFLRSQEYKKYQTNKTTGNTDKRAFVETWQSFYRKKLKEVWKPAV

SEQ ID NO: 28710 - protein, 979 aa, synthetic construct
  REGION 1..979: note = engineered CasX variant
QEIKRINKIRRRLVKDSNTKKAGKTGPMKTLLVRVMTPDLRERLENLRKKPENIPQPISNTSRANLNKLLTDYTEMKKAILHVYWEEFQKDPVGLMSRVAQPASKKIDQNKLKPEMDEKGNLTTAGFACSQCGQPLFVYKLEQVSEKGKAYTNYFGRCNVAEHEKLILLAQLKPEKDSDEAVTYSLGKFGQRALDFYSIHVTKESTHPVKPLAQIAGNRYASGPVGKALSDACMGTIASFLSKYQDIIIEHQKVVKGNQKRLESLRELAGKENLEYPSVTLPPQPHTKEGVDAYNEVIARVRMWVNLNLWQKLKLSRDDAKPLLRLKGFPSFPLVERQQANEVDWWDMVCNVKKLINEKKEDGKVFWQNLAGYKRQEALRPYLSSEEDRKKGKKFARYQLGDLLLHLEKKHGEDWGKVYDEAWERIDKKVEGLSKHIKLEEERRSEDAQSKAALTDWLRAKASFVIEGLKEADKDEFCRCELKLQKWYGDLRGKPFAIEAENSILDISGFSKQYNCAFIWQKDGVKKLNLYLIINYFKGGKLRFKKIKPEAFEANRFYTVINKKSGEIVPMEVNFNFDDPNLIILPLAFGKRQGREFIWNDLLSLETGSLKLANGRVIEKTLYNRRTRQDEPALFVALTFERREVLDSSNIKPMNLIGVDRGENIPAVIALTDPEGCPLSRFKDSLGNPTHILRIGERYKEKQRTIQAKKEVEQRRAGGYSRKYASKAKNLADDMVRNTARDLLYYAVTQDAMLIFENLSRGFGRQGKRTFMAERQYTRMEDWLTAKLAYEGLPSKTYLSKTLAQYTSKTCSNCGFTITSADYDRVLEKLKKTATGWMTTINGKELKVEGQITYYNRYKRQNVVKDLSVELDRLSEESVNNDISSWTKGRSGEALSLLKKRFSHRPVQEKFVCLNCGFETHADEQAALNIARSWLFLRSQEYKKYQTNKTTGNTDKRAFVETWQSFYRKKLKEVWKPAV

SEQ ID NO: 28711 - protein, 979 aa, synthetic construct
  REGION 1..979: note = engineered CasX variant
QEIKRINKIRRRLVKDSNTKKAGKTGPMKTLLVRVMTPDLRERLENLRKKPENIPQPISNTSRANLNKLLTDYTEMKKAILHVYWEEFQKDPVGLMSRVAQPASKKIDQNKLKPEMDEKGNLTTAGFACSQCGQPLFVYKLEQVSEKGKAYTNYFGRCNVAEHEKLILLAQLKPEKDSDEAVTYSLGKFGQRALDFYSIHVTKESTHPVKPLAQIAGNRYASGPVGKALSDACMGTIASFLSKYQDIIIEHQKVVKGNQKRLESLRELAGKENLEYPSVTLPPQPHTKEGVDAYNEVIARVRMWVNLNLWQKLKLSRDDAKPLLRLKGFPSFPLVERQQANEVDWWDMVCNVKKLINEKKEDGKVFWQNLAGYKRQEALRPYLSSEEDRKKGKKFARYQLGDLLLHLEKKHGEDWGKVYDEAWERIDKKVEGLSKHIKLEEERRSEDAQSKAALTDWLRAKASFVIEGLKEADKDEFCRCELKLQKWYGDLRGKPFAIEAENSILDISGFSKQYNCAFIWQKDGVKKLNLYLIINYFKGGKLRFKKIKPEAFEANRFYTVINKKSGEIVPMEVNFNFDDPNLIILPLAFGKRQGREFIWNDLLSLETGSLQLANGRVIEKTLYNRRTRQDEPALFVALTFERREVLDSSNIKPMNLIGVDRGENIPAVIALTDPEGCPLSRFKDSLGNPTHILRIGESYKEKQRTIQAKKEVEQRRAGGYSRKYASKAKNLADDMVRNTARDLLYYAVTQDAMLIFENLSRGFGRQGKRTFMAERQYTRMEDWLTAKLAYEGLPSKTYLSKTLAQYTSKTCSNCGFTITSADYDRVLEKLKKTATGWMTTINGKELKVEGQITYYNRYKRQNVVKDLSVELDRLSEESVNNDISSWTKGRSGEALSLLKKRFSHRPVQEKFVCLNCGFETHADEQAALNIARSWLFLRSQEYKKYQTNKTTGNTDKRAFVETWQSFYRKKLKEVWKPAV

SEQ ID NO: 28712 - protein, 979 aa, synthetic construct
  REGION 1..979: note = engineered CasX variant
QEIKRINKIRRRLVKDSNTKKAGKTGPMKTLLVRVMTPDLRERLENLRKKPENIPQPISNTSRANLNKLLTDYTEMKKAILHVYWEEFQKDPVGLMSRVAQPASKKIDQNKLKPEMDEKGNLTTAGFACSQCGQPLFVYKLEQVSEKGKAYTNYFGRCNVAEHEKLILLAQLKPEKDSDEAVTYSLGKFGQRALDFYSIHVTKESTHPVKPLAQIAGNRYASGPVGKALSDACMGTIASFLSKYQDIIIEHQKVVKGNQKRLESLRELAGKENLEYPSVTLPPQPHTKEGVDAYNEVIARVRMWVNLNLWQKLKLSRDDAKPLLRLKGFPSFPLVERQANAEVDWWDMVCNVKKLINEKKEDGKVFWQNLAGYKRQEALRPYLSSEEDRKKGKKFARTQLGDLLLHLEKKHGEDWGKVYDEAWERIDKKVEGLSKHIKLEEERRSEDAQSKAALTDWLRAKASFVIEGLKEADKDEFCRCELKLQKWYGDLRGKPFAIEAENSILDISGFSKQYNCAFIWQKDGVKKLNLYLIINYFKGGKLRFKKIKPEAFEANRFYTVINKKSGEIVPMEVNFNFDDPNLIILPLAFGKRQGREFIWNDLLSLETGSLKLANGRVIEKTLYNRRTRQDEPALFVALTFERREVLDSSNIKPMNLIGVDRGENIPAVIALTDPEGCPLSRFKDSLGNPTHILRIGESYKEKQRTIQAKKEVEQRRAGGYSRKYASKAKNLADDMVRNTARDLLYYAVTQDAMLIFENLSRGFGRQGKRTFMAERQYTRMEDWLTAKLAYEGLPSKTYLSKTLAQYTSKTCSNCGFTITSADYDRVLEKLKKTATGWMTTINGKELKVEGQITYYNRYKRQNVVKDLSVELDRLSEESVNNDISSWTKGRSGEALSLLKKRFSHRPVQEKFVCLNCGFETHADEQAALNIARSWLFLRSQEYKKYQTNKTTGNTDKRAFVETWQSFYRKKLKEVWKPAV

SEQ ID NO: 28713 - protein, 980 aa, synthetic construct
  REGION 1..980: note = engineered CasX variant
QEIKRINKIRRRLVKDSNTKKAGKTGPMKTLLVRVMTPDLRERLENLRKKPENIPQPISNTSRANLNKLLTDYTEMKKAILHVYWEEFQKDPVGLMSRVAQPASKKIDQNKLKPEMDEKGNLTTAGFACSQCGQPLFVYKLEQVSEKGKAYTNYFGRCNVAEHEKLILLAQLKPEKDSDEAVTYSLGKFGQRALDFYSIHVTKESTHPVKPLAQIAGNRYASGPVGKALSDACMGTIASFLSKYQDIIIEHQKVVKGNQKRLESLRELAGKENLEYPSVTLPPQPHTKEGVDAYNEVIARVRMWVNLNLWQKLKLSRDDAKPLLRLKGFPSFPLVERQANAEVDWWDMVCNVKKLINEKKEDGKVFWQNLAGYKRQEALRPYLSSEEDRKKGKKFARYQLGDLLLHLEKKHEGEDWGKVYDEAWERIDKKVEGLSKHIKLEEERRSEDAQSKAALTDWLRAKASFVIEGLKEADKDEFCRCELKLQKWYGDLRGKPFAIEAENSILDISGFSKQYNCAFIWQKDGVKKLNLYLIINYFKGGKLRFKKIKPEAFEANRFYTVINKKSGEIVPMEVNFNFDDPNLIILPLAFGKRQGREFIWNDLLSLETGSLKLANGRVIEKTLYNRRTRQDEPALFVALTFERREVLDSSNIKPMNLIGVDRGENIPAVIALTDPEGCPLSRFKDSLGNPTHILRIGESYKEKQRTIQAKKEVEQRRAGGYSRKYASKAKNLADDMVRNTARDLLYYAVTQDAMLIFENLSRGFGRQGKRTFMAERQYTRMEDWLTAKLAYEGLPSKTYLSKTLAQYTSKTCSNCGFTITSADYDRVLEKLKKTATGWMTTINGKELKVEGQITYYNRYKRQNVVKDLSVELDRLSEESVNNDISSWTKGRSGEALSLLKKRFSHRPVQEKFVCLNCGFETHADEQAALNIARSWLFLRSQEYKKYQTNKTTGNTDKRAFVETWQSFYRKKLKEVWKPAV

SEQ ID NO: 28714 - protein, 979 aa, synthetic construct
  REGION 1..979: note = engineered CasX variant
QEIKRINKIRRRLVKDSNTKKAGKTGPMKTLLVRVMTPDLRERLENLRKKPENIPQPISNTSRANLNKLLTDYTEMKKAILHVYWEEFQKDPVGLMSRVAQPASKKIDQNKLKPEMDEKGNLTTAGFACSQCGQPLFVYKLEQVSEKGKAYTNYFGRCNVAEHEKLILLAQLKPEKDSDEAVTYSLGKFGQRALDFYSIHVTKESTHPVKPLAQIAGNRYASGPVGKALSDACMGTIASFLSKYQDIIIEHQKVVKGNQKRLESLRELAGKENLEYPSVTLPPQPHTKEGVDAYNEVIARVRMWVNLNLWQKLKLSRDDAKPLLRLKGFPSFPLVERQANAEVDWWDMVCNVKKLINEKKEDGKVFWQNLAGYKRQEALRPYLSSEEDRKKGKKFARYQLGDLLLHLEKKHGEDWGKVYDEAWERIDKKVEGLSKHIKLEEERRSEDAQSKAALTDWLRAKASFVIEGLKEADKDEFCRCDLKLQKWYGDLRGKPFAIEAENSILDISGFSKQYNCAFIWQKDGVKKLNLYLIINYFKGGKLRFKKIKPEAFEANRFYTVINKKSGEIVPMEVNFNFDDPNLIILPLAFGKRQGREFIWNDLLSLETGSLKLANGRVIEKTLYNRRTRQDEPALFVALTFERREVLDSSNIKPMNLIGVDRGENIPAVIALTDPEGCPLSRFKDSLGNPTHILRIGESYKEKQRTIQAKKEVEQRRAGGYSRKYASKAKNLADDMVRNTARDLLYYAVTQDAMLIFENLSRGFGRQGKRTFMAERQYTRMEDWLTAKLAYEGLPSKTYLSKTLAQYTSKTCSNCGFTITSADYDRVLEKLKKTATGWMTTINGKELKVEGQITYYNRYKRQNVVKDLSVELDRLSEESVNNDISSWTKGRSGEALSLLKKRFSHRPVQEKFVCLNCGFETHADEQAALNIARSWLFLRSQEYKKYQTNKTTGNTDKRAFVETWQSFYRKKLKEVWKPAV

SEQ ID NO: 28715 - protein, 979 aa, synthetic construct
  REGION 1..979: note = engineered CasX variant
QEIKRINKIRRRLVKDSNTKKAGKTGPMKTLLVRVMTPDLRERLENLRKKPENIPQPISNTSRANLNKLLTDYTEMKKAILHVYWEEFQKDPVGLMSRVAQPASKKIDQNKLKPEMDEKGNLTTAGFACSQCGQPLFVYKLEQVSEKGKAYTNYFGRCNVAEHEKLILLAQLKPEKDSDEAVTYSLGKFGQRALDFYSIHVTKESTHPVKPLAQIAGNRYASGPVGKALSDACMGTIASFLSKYQDIIIEHQKVVKGNQKRLESLRELAGKENLEYPSVTLPPQPHTKEGVDAYNEVIARVRMWVNLNLWQKLKLSRDDAKPLLRLKGFPSFPLVERQANAEVDWWDMVCNVKKLINEKKEDGKVFWQNLAGYKRQEALRPYLSSEEDRKKGKKFARYQLGDLLLHLEKKHGEDWGKVYDEAWERIDKKVEGLSKHIKLEEERRSEDAQSKAALTDWLRAKASFVIEGLKEADKDEFCRCELKLQKWYGDLRGKPFAIEAENSILDISGFSKQYNCAFIWQKDGVKKLNLYLIINYFKGGKLRFKKIKPEAFEANRFYTVINKKSGEIVPMEVNFNFDDPNLIILPLAFGKRFGREFIWNDLLSLETGSLKLANGRVIEKTLYNRRTRQDEPALFVALTFERREVLDSSNIKPMNLIGVDRGENIPAVIALTDPEGCPLSRFKDSLGNPTHILRIGESYKEKQRTIQAKKEVEQRRAGGYSRKYASKAKNLADDMVRNTARDLLYYAVTQDAMLIFENLSRGFGRQGKRTFMAERQYTRMEDWLTAKLAYEGLPSKTYLSKTLAQYTSKTCSNCGFTITSADYDRVLEKLKKTATGWMTTINGKELKVEGQITYYNRYKRQNVVKDLSVELDRLSEESVNNDISSWTKGRSGEALSLLKKRFSHRPVQEKFVCLNCGFETHADEQAALNIARSWLFLRSQEYKKYQTNKTTGNTDKRAFVETWQSFYRKKLKEVWKPAV

SEQ ID NO: 28716 - protein, 979 aa, synthetic construct
  REGION 1..979: note = engineered CasX variant
QEIKRINKIRRRLVKDSNTKKAGKTGPMKTLLVRVMTPDLRERLENLRKKPENIPQPISNTSRANLNKLLTDYTEMKKAILHVYWEEFQKDPVGLMSRVAQPASKKIDQNKLKPEMDEKGNLTTAGFACSQCGQPLFVYKLEQVSEKGKAYTNYFGRCNVAEHEKLILLAQLKPEKDSDEAVTYSLGKFGQRALDFYSIHVTKESTHPVKPLAQIAGNRYASGPVGKALSDACMGTIASFLSKYQDIIIEHQKVVKGNQKRLESLRELAGKENLEYPSVTLPPQPHTKEGVDAYNEVIARVRMWVNLNLWQKLKLSRDDAKPLLRLKGFPSFPLVERQANAEVDWWDMVCNVKKLINEKKEDGKVFWQNLAGYKRQEALRPYLSSEEDRKKGKKFARYQLGDLLLHLEKKHGEDWGKVYDEAWERIDKKVEGLSKHIKLEEERRSEDAQSKAALTDWLRAKASFVIEGLKEADKDEFCRCELKLQKWYGDLRGKPFAIEAENSILDISGFSKQYNCAFIWQKDGVKKLNLYLIINYFKGGKLRFKKIKPEAFEANRFYTVINKKSGEIVPMEVNFNFDDPNLIILPLAFGKRVGREFIWNDLLSLETGSLKLANGRVIEKTLYNRRTRQDEPALFVALTFERREVLDSSNIKPMNLIGVDRGENIPAVIALTDPEGCPLSRFKDSLGNPTHILRIGESYKEKQRTIQAKKEVEQRRAGGYSRKYASKAKNLADDMVRNTARDLLYYAVTQDAMLIFENLSRGFGRQGKRTFMAERQYTRMEDWLTAKLAYEGLPSKTYLSKTLAQYTSKTCSNCGFTITSADYDRVLEKLKKTATGWMTTINGKELKVEGQITYYNRYKRQNVVKDLSVELDRLSEESVNNDISSWTKGRSGEALSLLKKRFSHRPVQEKFVCLNCGFETHADEQAALNIARSWLFLRSQEYKKYQTNKTTGNTDKRAFVETWQSFYRKKLKEVWKPAV

SEQ ID NO: 28717 - protein, 980 aa, synthetic construct
  REGION 1..980: note = engineered CasX variant
QEIKRINKIRRRLVKDSNTKKAGKTGPMKTLLVRVMTPDLRERLENLRKKPENIPQPISNTSRANLNKLLTDYTEMKKAILHVYWEEFQKDPVGLMSRVAQPASKKIDQNKLKPEMDEKGNLTTAGFACSQCGQPLFVYKLEQVSEKGKAYTNYFGRCNVAEHEKLILLAQLKPEKDSDEAVTYSLGKFGQRALDFYSIHVTKESTHPVKPLAQIAGNRYASGPVGKALSDACMGTIASFLSKYQDIIIEHQKVVKGNQKRLESLRELAGKENLEYPSVTLPPQPHTKEGVDAYNEVIARVRMWVNLNLWQKLKLSRDDAKPLLRLKGFPSFPLVERQANAEVDWWDMVCNVKKLINEKKEDGKVFWQNLAGYKRQEALRPYLSSEEDRKKGKKFARYQLGDLLLHLEKKHGEDWGKVYDEAWERIDKKVEGLSKHIKLEEERRSEDAQSKAALTDWLRAKASFVIEGLKEADKDEFCRCELKLQKWYGDLRGKPFAIEAENSILDISGFSKQYNCAFIWQKDGVKKLNLYLIINYFKGGKLRFKKIKPEAFEANRFYTVINKKSGEIVPMEVNFNFDDPNLIILPLAFGKRQGREFIWNDLLSLETGSLKLANGRVIEKTLYNRRTRQDEPALFVALTFERREVLDSSNIKTPMNLIGVDRGENIPAVIALTDPEGCPLSRFKDSLGNPTHILRIGESYKEKQRTIQAKKEVEQRRAGGYSRKYASKAKNLADDMVRNTARDLLYYAVTQDAMLIFENLSRGFGRQGKRTFMAERQYTRMEDWLTAKLAYEGLPSKTYLSKTLAQYTSKTCSNCGFTITSADYDRVLEKLKKTATGWMTTINGKELKVEGQITYYNRYKRQNVVKDLSVELDRLSEESVNNDISSWTKGRSGEALSLLKKRFSHRPVQEKFVCLNCGFETHADEQAALNIARSWLFLRSQEYKKYQTNKTTGNTDKRAFVETWQSFYRKKLKEVWKPAV

SEQ ID NO: 28718 - protein, 980 aa, synthetic construct
  REGION 1..980: note = engineered CasX variant
QEIKRINKIRRRLVKDSNTKKAGKTGPMKTLLVRVMTPDLRERLENLRKKPENIPQPISNTSRANLNKLLTDYTEMKKAILHVYWEEFQKDPVGLMSRVAQPASKKIDQNKLKPEMDEKGNLTTAGFACSQCGQPLFVYKLEQVSEKGKAYTNYFGRCNVAEHEKLILLAQLKPEKDSDEAVTYSLGKFGQRALDFYSIHVTKESTHPVKPLAQIAGNRYASGPVGKALSDACMGTIASFLSKYQDIIIEHQKVVKGNQKRLESLRELAGKENLEYPSVTLPPQPHTKEGVDAYNEVIARVRMWVNLNLWQKLKLSRDDAKPLLRLKGFPSFPLVERQANAEVDWWDMVCNVKKLINEKKEDGKVFWQNLAGYKRQEALRPYLSSEEDRKKGKKFARYQLGDLLLHLEKKHGEDWGKVYDEAWERIDKKVEGLSKHIKLEEERRSEDAQSKAALTDWLRAKASFVIEGLKEADKDEFCRCELKLQKWYGDLRGKPFAIEAENSILDISGFSKQYNCAFIWQKDGVKKLNLYLIINYFKGGKLRFKKIKPEAFEANRFYTVINKKSGEIVPMEVNFNFDDPNLIILPLAFGKRQGREFIWNDLLSLETGSLKLANGRVIEKTLYNRRTRQDEPALFVALTFERREVLDSSNIKPMSNLIGVDRGENIPAVIALTDPEGCPLSRFKDSLGNPTHILRIGESYKEKQRTIQAKKEVEQRRAGGYSRKYASKAKNLADDMVRNTARDLLYYAVTQDAMLIFENLSRGFGRQGKRTFMAERQYTRMEDWLTAKLAYEGLPSKTYLSKTLAQYTSKTCSNCGFTITSADYDRVLEKLKKTATGWMTTINGKELKVEGQITYYNRYKRQNVVKDLSVELDRLSEESVNNDISSWTKGRSGEALSLLKKRFSHRPVQEKFVCLNCGFETHADEQAALNIARSWLFLRSQEYKKYQTNKTTGNTDKRAFVETWQSFYRKKLKEVWKPAV

SEQ ID NO: 28719 - protein, 979 aa, synthetic construct
  REGION 1..979: note = engineered CasX variant
QEIKRINKIRRRLVKDSNTKKAGKTGPMKTLLVRVMTPDLRERLENLRKKPENIPQPISNTSRANLNKLLTDYTEMKKAILHVYWEEFQKDPVGLMSRVAQPASKKIDQNKLKPEMDEKGNLTTAGFACSQCGQPLFVYKLEQVSEKGKAYTNYFGRCNVAEHEKLILLAQLKPEKDSDEAVTYSLGKFGQRALDFYSIHVTKESTHPVKPLAQIAGNRYASGPVGKALSDACMGTIASFLSKYQDIIIEHQKVVKGNQKRLESLRELAGKENLEYPSVTLPPQPHTKEGVDAYNEVIARVRMWVNLNLWQKLKLSRDDAKPLLRLKGFPSFPLVERQANAEVDWWDMVCNVKKLINEKKEDGKVFWQNLAGYKRQEALRPYLSSEEDRKKGKKFARYQLGDLLLHLEKKHGEDWGKVYDEAWERIDKKVEGLSKHIKLEEERRSEDAQSKAALTDWLRAKASFVIEGLKEADKDEFCRCELKLQKWYGDLRGKPFAIEAENSILDISGFSKQYNCAFIWQKDGVKKLNLYLIINYFKGGKLRFKKIKPEAFEANRFYTVINKKSGEIVPMEVNFNFDDPNLIILPLAFGKRQGREFIWNDLLSLETGSLKLANGRVIEKTLYNRRTRQDEPALFVALTFERREVLDSSNIKPMNLIGVDRGENIPAVIALTDPEGCPLSRFKDSLGNPTHILRIRESYKEKQRTIQAKKEVEQRRAGGYSRKYASKAKNLADDMVRNTARDLLYYAVTQDAMLIFENLSRGFGRQGKRTFMAERQYTRMEDWLTAKLAYEGLPSKTYLSKTLAQYTSKTCSNCGFTITSADYDRVLEKLKKTATGWMTTINGKELKVEGQITYYNRYKRQNVVKDLSVELDRLSEESVNNDISSWTKGRSGEALSLLKKRFSHRPVQEKFVCLNCGFETHADEQAALNIARSWLFLRSQEYKKYQTNKTTGNTDKRAFVETWQSFYRKKLKEVWKPAV

SEQ ID NO: 28720 - protein, 979 aa, synthetic construct
  REGION 1..979: note = engineered CasX variant
QEIKRINKIRRRLVKDSNTKKAGKTGPMKTLLVRVMTPDLRERLENLRKKPENIPQPISNTSRANLNKLLTDYTEMKKAILHVYWEEFQKDPVGLMSRVAQPASKKIDQNKLKPEMDEKGNLTTAGFACSQCGQPLFVYKLEQVSEKGKAYTNYFGRCNVAEHEKLILLAQLKPEKDSDEAVTYSLGKFGQRALDFYSIHVTKESTHPVKPLAQIAGNRYASGPVGKALSDACMGTIASFLSKYQDIIIEHQKVVKGNQKRLESLRELAGKENLEYPSVTLPPQPHTKEGVDAYNEVIARVRMWVNLNLWQKLKLSRDDAKPLLRLKGFPSFPLVERQANAEVDWWDMVCNVKKLINEKKEDGKVFWQNLAGYKRQEALRPYLSSEEDRKKGKKFARYQLGDLLLHLEKKHGEDWGKVYDEAWERIDKKVEGLSKHIKLEEERRSEDAQSKAALTDWLRAKASFVIEGLKEADKDEFCRCELKLQKWYGDLRGKPFAIEAENSILDISGFSKQYNCAFIWQKDGVKKLNLYLIINYFKGGKLRFKKIKPEAFEANRFYTVINKKSGEIVPMEVNFNFDDPNLIILPLAFGKRQGREFIWNDLLSLETGSLKLANGRVIEKTLYNRRTRQDEPALFVALTFERREVLDSSNIKPMNLIGVDRGENIPAVIALTDPEGCPLSRFKDSLGNPTHILRIGESYKEKQRTIQAKKEVEQRRAGGYSRKYASKAKNLADDMVRNTARDLLYYAVTQDAMLIFENLSRGFGRQGKRTFSAERQYTRMEDWLTAKLAYEGLPSKTYLSKTLAQYTSKTCSNCGFTITSADYDRVLEKLKKTATGWMTTINGKELKVEGQITYYNRYKRQNVVKDLSVELDRLSEESVNNDISSWTKGRSGEALSLLKKRFSHRPVQEKFVCLNCGFETHADEQAALNIARSWLFLRSQEYKKYQTNKTTGNTDKRAFVETWQSFYRKKLKEVWKPAV

SEQ ID NO: 28721 - protein, 979 aa, synthetic construct
  REGION 1..979: note = engineered CasX variant
QEIKRINKIRRRLVKDSNTKKAGKTGPMKTLLVRVMTPDLRERLENLRKKPENIPQPISNTSRANLNKLLTDYTEMKKAILHVYWEEFQKDPVGLMSRVAQPASKKIDQNKLKPEMDEKGNLTTAGFACSQCGQPLFVYKLEQVSEKGKAYTNYFGRCNVAEHEKLILLAQLKPEKDSDEAVTYSLGKFGQRALDFYSIHVTKESTHPVKPLAQIAGNRYASGPVGKALSDACMGTIASFLSKYQDIIIEHQKVVKGNQKRLESLRELAGKENLEYPSVTLPPQPHTKEGVDAYNEVIARVRMWVNLNLWQKLKLSRDDAKPLLRLKGFPSFPLVERQANAEVDWWDMVCNVKKLINEKKEDGKVFWQNLAGYKRQEALRPYLSSEEDRKKGKKFARYQLGDLLLHLEKKHGEDWGKVYDEAWERIDKKVEGLSKHIKLEEERRSEDAQSKAALTDWLRAKASFVIEGLKEADKDEFCRCELKLQKWYGDLRGKPFAIEAENSILDISGFSKQYNCAFIWQKDGVKKLNLYLIINYFKGGKLRFKKIKPEAFEANRFYTVINKKSGEIVPMEVNFNFDDPNLIILPLAFGKRQGREFIWNDLLSLETGSLKLANGRVIEKTLYNRRTRQDEPALFVALTFERREVLDSSNIKPMNLIGVDRGENIPAVIALTDPEGCPLSRFKDSLGNPTHILRIGESYKEKQRTIQAKKEVEQRRAGGYSRKYASKAKNLADDMVRNTARDLLYYAVTQDAMLIFENLSRGFGRQGKRTFMAERQYTRMEDWLTAKLAYEGLPSKTYLSKTLAQYTSKTCSNCGFTITSADYDRVLEKLKKTATGWMTTINGKELKVEGQITYYNRYKRQNVVKDLSVELDRLSEESVNNDISSWDKGRSGEALSLLKKRFSHRPVQEKFVCLNCGFETHADEQAALNIARSWLFLRSQEYKKYQTNKTTGNTDKRAFVETWQSFYRKKLKEVWKPAV

SEQ ID NO: 28722 - protein, 979 aa, synthetic construct
  REGION 1..979: note = engineered CasX variant
QEIKRINKIRRRLVKDSNTKKAGKTGPMKTLLVRVMTPDLRERLENLRKKPENIPQPISNTSRANLNKLLTDYTEMKKAILHVYWEEFQVDPVGLMSRVAQPASKKIDQNKLKPEMDEKGNLTTAGFACSQCGQPLFVYKLEQVSEKGKAYTNYFGRCNVAEHEKLILLAQLKPEKDSDEAVTYSLGKFGQRALDFYSIHVTKESTHPVKPLAQIAGNRYASGPVGKALSDACMGTIASFLSKYQDIIIEHQKVVKGNQKRLESLRELAGKENLEYPSVTLPPQPHTKEGVDAYNEVIARVRMWVNLNLWQKLKLSRDDAKPLLRLKGFPSFPLVERQANAEVDWWDMVCNVKKLINEKKEDGKVFWQNLAGYKRQEALRPYLSSEEDRKKGKKFARYQLGDLLLHLEKKHGEDWGKVYDEAWERIDKKVEGLSKHIKLEEERRSEDAQSKAALTDWLRAKASFVIEGLKEADKDEFCRCELKLQKWYGDLRGKPFAIEAENSILDISGFSKQYNCAFIWQKDGVKKLNLYLIINYFKGGKLRFKKIKPEAFEANRFYTVINKKSGEIVPMEVNFNFDDPNLIILPLAFGKRQGREFIWNDLLSLETGSLKLANGRVIEKTLYNRRTRQDEPALFVALTFERREVLDSSNIKPMNLIGVDRGENIPAVIALTDPEGCPLSRFKDSLGNPTHILRIGESYKEKQRTIQAKKEVEQRRAGGYSRKYASKAKNLADDMVRNTARDLLYYAVTQDAMLIFENLSRGFGRQGKRTFMAERQYTRMEDWLTAKLAYEGLPSKTYLSKTLAQYTSKTCSNCGFTITSADYDRVLEKLKKTATGWMTTINGKELKVEGQITYYNRYKRQNVVKDLSVELDRLSEESVNNDISSWTKGRSGEALSLLKKRFSHRPVQEKFVCLNCGFETHADEQAALNIARSWLFLRSQEYKKYQTNKTTGNTDKRAFVETWQSFYRKKLKEVWKPAV

SEQ ID NO: 28723 - protein, 979 aa, synthetic construct
  REGION 1..979: note = engineered CasX variant
QEIKRLNKIRRRLVKDSNTKKAGKTGPMKTLLVRVMTPDLRERLENLRKKPENIPQPISNTSRANLNKLLTDYTEMKKAILHVYWEEFQKDPVGLMSRVAQPASKKIDQNKLKPEMDEKGNLTTAGFACSQCGQPLFVYKLEQVSEKGKAYTNYFGRCNVAEHEKLILLAQLKPEKDSDEAVTYSLGKFGQRALDFYSIHVTKESTHPVKPLAQIAGNRYASGPVGKALSDACMGTIASFLSKYQDIIIEHQKVVKGNQKRLESLRELAGKENLEYPSVTLPPQPHTKEGVDAYNEVIARVRMWVNLNLWQKLKLSRDDAKPLLRLKGFPSFPLVERQANAEVDWWDMVCNVKKLINEKKEDGKVFWQNLAGYKRQEALRPYLSSEEDRKKGKKFARYQLGDLLLHLEKKHGEDWGKVYDEAWERIDKKVEGLSKHIKLEEERRSEDAQSKAALTDWLRAKASFVIEGLKEADKDEFCRCELKLQKWYGDLRGKPFAIEAENSILDISGFSKQYNCAFIWQKDGVKKLNLYLIINYFKGGKLRFKKIKPEAFEANRFYTVINKKSGEIVPMEVNFNFDDPNLIILPLAFGKRQGREFIWNDLLSLETGSLKLANGRVIEKTLYNRRTRQDEPALFVALTFERREVLDSSNIKPMNLIGVDRGENIPAVIALTDPEGCPLSRFKDSLGNPTHILRIGESYKEKQRTIQAKKEVEQRRAGGYSRKYASKAKNLADDMVRNTARDLLYYAVTQDAMLIFENLSRGFGRQGKRTFMAERQYTRMEDWLTAKLAYEGLPSKTYLSKTLAQYTSKTCSNCGFTITSADYDRVLEKLKKTATGWMTTINGKELKVEGQITYYNRYKRQNVVKDLSVELDRLSEESVNNDISSWTKGRSGEALSLLKKRFSHRPVQEKFVCLNCGFETHADEQAALNIARSWLFLRSQEYKKYQTNKTTGNTDKRAFVETWQSFYRKKLKEVWKPAV

SEQ ID NO: 28724 - protein, 979 aa, synthetic construct
  REGION 1..979: note = engineered CasX variant
QEIKRINKIRRRLVKDSNTKKAGKTGPMKTLLVRVMTPDLRERLENLRKKPENIPQPISNTSRANLNKLLTDYTEMKKAILHVYWEEFQKDPVGLMSRVAQPASKKIDQNKLKPEMDEKGNLTTAGFACSQCGQPLFVYKLEQVSEKGKAYTNYVGRCNVAEHEKLILLAQLKPEKDSDEAVTYSLGKFGQRALDFYSIHVTKESTHPVKPLAQIAGNRYASGPVGKALSDACMGTIASFLSKYQDIIIEHQKVVKGNQKRLESLRELAGKENLEYPSVTLPPQPHTKEGVDAYNEVIARVRMWVNLNLWQKLKLSRDDAKPLLRLKGFPSFPLVERQANAEVDWWDMVCNVKKLINEKKEDGKVFWQNLAGYKRQEALRPYLSSEEDRKKGKKFARYQLGDLLLHLEKKHGEDWGKVYDEAWERIDKKVEGLSKHIKLEEERRSEDAQSKAALTDWLRAKASFVIEGLKEADKDEFCRCELKLQKWYGDLRGKPFAIEAENSILDISGFSKQYNCAFIWQKDGVKKLNLYLIINYFKGGKLRFKKIKPEAFEANRFYTVINKKSGEIVPMEVNFNFDDPNLIILPLAFGKRQGREFIWNDLLSLETGSLKLANGRVIEKTLYNRRTRQDEPALFVALTFERREVLDSSNIKPMNLIGVDRGENIPAVIALTDPEGCPLSRFKDSLGNPTHILRIGESYKEKQRTIQAKKEVEQRRAGGYSRKYASKAKNLADDMVRNTARDLLYYAVTQDAMLIFENLSRGFGRQGKRTFMAERQYTRMEDWLTAKLAYEGLPSKTYLSKTLAQYTSKTCSNCGFTITSADYDRVLEKLKKTATGWMTTINGKELKVEGQITYYNRYKRQNVVKDLSVELDRLSEESVNNDISSWTKGRSGEALSLLKKRFSHRPVQEKFVCLNCGFETHADEQAALNIARSWLFLRSQEYKKYQTNKTTGNTDKRAFVETWQSFYRKKLKEVWKPAV

SEQ ID NO: 28725 - protein, 979 aa, synthetic construct
  REGION 1..979: note = engineered CasX variant
QEIKRINKIRRRLVKDSNTKKAGKTGPMKTLLVRVMTPDLRERLENLRKKPENIPQPISNTSRANLNKLLTDYTEMKKAILHVYWEEFQKDPVGLMSRVAQPASKKIDQNKLKPEMDEKGNLTTAGFACSQCGQPLFVYKLEQVSEKGKAYTNYFGRCNVAEHEKLILLAQLKPEKDSDEAVTYSLGKFGQRALDFYSIHVTKESTHPVKPLAQIAGNRYASGPVGKALSDACMGTIASFLSKYQDIIIEHQKVVKGNQKRLESLRELAGKENLEYPSVTLPPQPHTKEGVDAYNEVIARVRMWVNLNLWQKLKLSRDDAKPLLRLKGFPSFPLVERQANAEVDWWDMVCNVKKLINEKKEDGKVFWQNLAGYKRQEALRPYLSSEEDRKKGKKFARYQLGDLLLHLEKKHGEDWGKVYDEAWERIDKKVEGLSKHIKLEEERRSEDAQSKAALTDWLRAKASFVIEGLKEADKDEFCRCELKLQKWYGDLRGKPFAIEAENSILDISGFSKQYNCAFIWQKDGVKKLNLYLIINYFKGGKLRFKKIKPEAFEANRFYTVINKKSGEIVPMEVNFNFDDPNLIILPLAFGKRQGREFIWNDLLSLETGSLKLANGRVIEKTLYNRRTRQDEPALFVALTFERREVLDSSNIKPMNLIGVDRGENIPAVIALTDPEGCPLSRFKDSLGNPTHILRIGESYKEKQRTIQAKKEVEQRRAGGYSRKYASKAKNLADDMVRNTARDLLYYAVTQDAMLIFENLSRGFGRQGKRTFMAERQYTRMEDWLTAKLAYEGLASKTYLSKTLAQYTSKTCSNCGFTITSADYDRVLEKLKKTATGWMTTINGKELKVEGQITYYNRYKRQNVVKDLSVELDRLSEESVNNDISSWTKGRSGEALSLLKKRFSHRPVQEKFVCLNCGFETHADEQAALNIARSWLFLRSQEYKKYQTNKTTGNTDKRAFVETWQSFYRKKLKEVWKPAV

SEQ ID NO: 28726 - protein, 979 aa, synthetic construct
  REGION 1..979: note = engineered CasX variant
QEIKRINKIRRRLVKDSNTKKAGKTGPMKTLLVRVMTPDLRERLENLRKKPENIPQPISNTSRANLNKLLTDYTEMKKAILHVYWEEFQKDPVGLMSRVAQPASKKIDQNKLKPEMDEKGNLTTAGFACSQCGQPLFVYKLEQVSEKGKAYTNYFGRCNVAEHEKLILLAQLKPEKDSDEAVTYSLGKFGQRALDFYSIHVTKESTHPVKPLAQIAGNRYASGPVGKALSDACMGTIASFLSKYQDIIIEHQKVVKGNQKRLESLRELAGKENLEYPSVTLPPQPHTKEGVDAYNEVIARVRMWVNLNLWQKLKLSRDDAKPLLRLKGFPSFPLVERQANAEVDWWDMVCNVKKLINEKKEDGKVFWQNLAGYKRQEALRPYLSSEEDRKKGKKFARYQLGDLLLHLEKKHGEDWGKVYDEAWERIDKKVEGLSKHIKLEEERRSEDAQSKAALTDWLRAKASFVIEGLKEADKDEFCRCELKLQKWYGDLRGKPFAIEAENSILDISGFSKQYNCAFIWQKDGVKKLNLYLIINYFKGGKLRFKKIKPEAFEANRFYTVINKKSGEIVPMEVNFNFDDPNLIILPLAFGKRQGREFIWNDLLSLETGSLKLANGRVIEKTLYNRRTRQDEPALFVALTFERREVLDSSNIKPMNLIGVDRGENIPAVIALTDPEGCPLSRFKDSLGNPTHILRIGESYKEKQRTIQAKKEVEQRRAGGYSRKYASKAKNLADDMVRNTARDLLYYAVTQDAMLIFENLSRGFGRQGKRTFMAERQYTRMEDWLTAKLAYEGLPSKVYLSKTLAQYTSKTCSNCGFTITSADYDRVLEKLKKTATGWMTTINGKELKVEGQITYYNRYKRQNVVKDLSVELDRLSEESVNNDISSWTKGRSGEALSLLKKRFSHRPVQEKFVCLNCGFETHADEQAALNIARSWLFLRSQEYKKYQTNKTTGNTDKRAFVETWQSFYRKKLKEVWKPAV

SEQ ID NO: 28727 - protein, 980 aa, synthetic construct
  REGION 1..980: note = engineered CasX variant
QEIKRINKIRRRLVKDSNTKKAGKTGPMKTLLVRVMTPDLRERLENLRKKPENIPQPISNTSRANLNKLLTDYTEMKKAILHVYWEEFQKDPVGLMSRVAQPASKKIDQNKLKPEMDEKGNLTTAGFACSQCGQPLFVYKLEQVSEKGKAYTNYFGRCNVAEHEKLILLAQLKPEKDSDEAVTYSLGKFGQRALDFYSIHVTKESTHPVKPLAQIAGNRYASGPVGKALSDACMGTIASFLSKYQDIIIEHQKVVKGNQKRLESLRELAGKENLEYPSVTLPPQPHTKEGVDAYNEVIARVRMWVNLNLWQKLKLSRDDAKPLLRLKGFPSFPLVERQANAEVDWWDMVCNVKKLINEKKEDGKVFWQNLAGYKRQEALRPYLSSEEDRKKGKKFARYQLGDLLLHLEKKHGEDWGKVYDEAWERIDKKVEGLSKHIKLEEERRSEDAQSKAALTDWLRAKASFVIEGLKEADKDEFCRCELKLQKWYGDLRGKPFAIEAENSILDISGFSKQYNCAFIWQKDGVKKLNLYLIINYFKGGKLRFKKIKPEAFEANRFYTVINKKSGEIVPMEVNFNFDDPNLIILPLAFGKRQGREFIWNDLLSLETGSLKLANGRVIEKTLYNRRTRQDEPALFVALTFERREVLDSSNIKPMNLIGVDRGENIPAVIALTDPEGCPLSRFKDSLGNPTHILRIGESYKEKQRTIQAKKEVEQRRAGGYSRKYASKAKNLADDMVRNTARDLLYYAVTQDAMLIFENLSRGFGRQGKRTFMAERQYTRMEDWLTAKLAYEGPLPSKTYLSKTLAQYTSKTCSNCGFTITSADYDRVLEKLKKTATGWMTTINGKELKVEGQITYYNRYKRQNVVKDLSVELDRLSEESVNNDISSWTKGRSGEALSLLKKRFSHRPVQEKFVCLNCGFETHADEQAALNIARSWLFLRSQEYKKYQTNKTTGNTDKRAFVETWQSFYRKKLKEVWKPAV

SEQ ID NO: 28728 - protein, 980 aa, synthetic construct
  REGION 1..980: note = engineered CasX variant
QEIKRINKIRRRLVKDSNTKKAGKTGPMKTLLVRVMTPDLRERLENLRKKPENIPQPISNTSRANLNKLLTDYTEMKKAILHVYWEEFQKDPVGLMSRVAQPASKKIDQNKLKPEMDEKGNLTTAGFACSQCGQPLFVYKLEQVSEKGKAYTNYFGRCNVAEHEKLILLAQLKPEKDSDEAVTYSLGKFGQRALDFYSIHVTKESTHPVKPLAQIAGNRYASGPVGKALSDACMGTIASFLSKYQDIIIEHQKVVKGNQKRLESLRELAGKENLEYPSVTLPPQPHTKEGVDAYNEVIARVRMWVNLNLWQKLKLSRDDAKPLLRLKGFPSFPLVERQANAEVDWWDMVCNVKKLINEKKEDGKVFWQNLAGYKRQEALRPYLSSEEDVRKKGKKFARYQLGDLLLHLEKKHGEDWGKVYDEAWERIDKKVEGLSKHIKLEEERRSEDAQSKAALTDWLRAKASFVIEGLKEADKDEFCRCELKLQKWYGDLRGKPFAIEAENSILDISGFSKQYNCAFIWQKDGVKKLNLYLIINYFKGGKLRFKKIKPEAFEANRFYTVINKKSGEIVPMEVNFNFDDPNLIILPLAFGKRQGREFIWNDLLSLETGSLKLANGRVIEKTLYNRRTRQDEPALFVALTFERREVLDSSNIKPMNLIGVDRGENIPAVIALTDPEGCPLSRFKDSLGNPTHILRIGESYKEKQRTIQAKKEVEQRRAGGYSRKYASKAKNLADDMVRNTARDLLYYAVTQDAMLIFENLSRGFGRQGKRTFMAERQYTRMEDWLTAKLAYEGLPSKTYLSKTLAQYTSKTCSNCGFTITSADYDRVLEKLKKTATGWMTTINGKELKVEGQITYYNRYKRQNVVKDLSVELDRLSEESVNNDISSWTKGRSGEALSLLKKRFSHRPVQEKFVCLNCGFETHADEQAALNIARSWLFLRSQEYKKYQTNKTTGNTDKRAFVETWQSFYRKKLKEVWKPAV

SEQ ID NO: 28729 - protein, 979 aa, synthetic construct
  REGION 1..979: note = engineered CasX variant
QEIKRINKIRRRLVKDSNTKKAGKTGPMKTLLVRVMTPDLRERLENLRKKPENIPQPISNTSRANLNKLLTDYTEMKKAILHVYWEEFQKDPVGLMSRVAQPASKKIDQNKLKPEMDEKGNLTTAGFACSQCGQPLFVYKLEQVSEKGKAYTNYFGRCNVAEHEKLILLAQLKPEKDSDEAVTYSLGKFGQRALDFYSIHVTKESTHPVKPLAQIAGNRYASGPVGKALSDACMGTIASFLSKYQDIIIEHQKVVKGNQKRLESLRELAGKENLEYPSVTLPPQPHTKEGVDAYNEVIARVRMWVNLNLWQKLKLSRDDAKPLLRLKGFPSFPLVERQANAEVDWWDMVCNVKKLINEKKEDGKVFWQNLAGYKRQEALRPYLSSEEDRKKGKKFARYQLGDLLLHLEKKHGEDWGKVYDEAWERIDKKVEGLSKHIKLEEERRSEDAQSKAALTDWLRAKASFVIEGLKEADKDEFCRCELKLQKWYGDLRGKPFAIEAENSILDISGFSKQYNCAFIWQKDGVKKLNLYLIINYFKGGKLRFKKIKPEAFEANRFYTVINKKSGEIVPMEVNFNFDDPNLIILPLAFGKRQGREFIWNDLLSLETGSLKLANGRVIEKTLYNRRTRQDEPALFVALTFERREVLDSSNIKPMNLIGVDRGENIPAVIALTDPEGCPLSRFKDSLGNPTHILRIGESYKEKQRTIQAKKEVEQRRAGGYSRKYASKAKNLADDMVRNTARDLLYYAVTQDAMLIFENLSRGFGRQGKRTFMAERQYTRMEDWLTAKLAYEGLPSKTYLSKTLAQYTSKTCSNCGFTITSADYDRMLEKLKKTATGWMTTINGKELKVEGQITYYNRYKRQNVVKDLSVELDRLSEESVNNDISSWTKGRSGEALSLLKKRFSHRPVQEKFVCLNCGFETHADEQAALNIARSWLFLRSQEYKKYQTNKTTGNTDKRAFVETWQSFYRKKLKEVWKPAV

SEQ ID NO: 28730 - protein, 979 aa, synthetic construct
  REGION 1..979: note = engineered CasX variant
QEIKRINKIRRRLVKDSNTKKAGKTGPMKTLLVRVMTPDLRERLENLRKKPENIPQPISNTSRANLNKLLTDYTEMKKAILHVYWEEFQKDPVGLMSRVAQPASKKIDQNKLKPEMDEKGNLTTAGFACSQCGQPLFVYKLEQVSEKGKAYTNYFGRCNVAEHEKLILLAQLKPEKDSDEAVTYSLGKFGQRALDFYSIHVTKESTHPVKPLAQIAGNRYASGPVGKALSDACMGTIASFLSKYQDIIIEHQKVVKGNQKRLESLRELAGKENLEYPSVTLPPQPHTKEGVDAYNEVIARVRMWVNLNLWQKLKLSRDDAKPLLRLKGFPSFPLVERQANAEVDWWDMVCNVKKLINEKKEDGKVFWQNLAGYKRQEALRPYLSSEEDRKKGKKFARYQLGDLLLHLEKKHGEDWGKVYDEAWERIDKKVEGLSKHIKLEEERRSEDAQSKAALTDWLRAKASFVIEGLKEADKDEFCRCELKLQKWYGDLRGKPFAIEAENSILDISGFSKQYNCAFIWQKDGVKKLNLYLIINYFKGGKLRFKKIKPEAFEANRFYTVINKKSGEIVPMEVNFNFDDPNLIILPLAFGKRQGREFIWNDLLSLETGSLKLANGRVIEKTLYNRRTRQDEPALFVALTFERREVLDSSNIKPMNLIGVDRGENIPAVIALTDPEGCPLSRFKDSLGNPTHILRIGESYKEKQRTIQAKKEVEQRRAGGYSRKYASKAKNLADDMVRNTARDLLYYAVTQDAMLIFENLSRGFGRQGKRTFMAERQYTRMEDWLTAKLAYEGLPSKTYLSKTLAQYTSKTCSNCGFTITSADYDRVLEKLKKTATGWMTTINGKELKVEGQITYYNRYKRQNVVKDLSVELDRLSEESVNNDISSWTKGRQGEALSLLKKRFSHRPVQEKFVCLNCGFETHADEQAALNIARSWLFLRSQEYKKYQTNKTTGNTDKRAFVETWQSFYRKKLKEVWKPAV

SEQ ID NO: 28731 - protein, 979 aa, synthetic construct
  REGION 1..979: note = engineered CasX variant
QEIKRINKIRRRLVKDSNTKKAGKTGPMKTLLVRVMTPDLRERLENLRKKPENIPQPISNTSRANLNKLLTDYTEMKKAILHVYWEEFQKDPVGLMSRVAQPASKKIDQNKLKPEMDEKGNLTTAGFACSQCGQPLFVYKLEQVSEKGKAYTNYFGRCNVAEHEKLILLAQLKPEKDSDEAVTYSLGKFGQRALDFYSIHVTKESTHPVKPLAQIAGNRYASGPVGKALSDACMGTIASFLSKYQDIIIEHQKVVKGNQKRLESLRELAGKENLEYPSVTLPPQPHTKEGVDAYNEVIARVRMWVNLNLWQKLKLSRDDAKPLLRLKGFPSFPLVERQANAEVDWWDMVCNVKKLINEKKEDGKVFWQNLAGYKRQEALRPYLSSEEDRKKGKKFARYQLGDLLLHLEKKHGEDWGKVYDEAWERIDKKVEGLSKHIKLEEERRSEDAQSKAALTDWLRAKASFVIEGLKEADKDEFCRCELKLQKWYGDLRGKPFAIEAENSILDISGFSKQYNCAFIWQKDGVKKLNLYLIINYFKGGKLRFKKIKPEAFEANRFYTVINKKSGEIVPMEVNFNFDDPNLIILPLAFGKRQGREFIWNDLLSLETGSLKLANGRVIEKTLYNRRTRQDEPALFVALTFERREVLDSSNIKPMNLIGVDRGENIPAVIALTDPEGCPLSRFKDSLGNPTHILRIGESYKEKQRTIQAKKEVEQRRAGGYSRKYASKAKNLADDMVRNTARDLLYYAVTQDAMLIFENLSRGFGRQGKRTFMAERQYTRMEDWLTAKLAYEGLPSKTYLSKTLAQYTSKTCSNCGFTITSADYDRVLEKLKKTATGWMTTINGKELKVEGQITYYNRYKRQNVVKDLSVELDRLSEESVNNDISSWTKGRSGEALSLLKKRFSHRPVQEKFVCLNCEFETHADEQAALNIARSWLFLRSQEYKKYQTNKTTGNTDKRAFVETWQSFYRKKLKEVWKPAV

SEQ ID NO: 28732 - protein, 980 aa, synthetic construct
  REGION 1..980: note = engineered CasX variant
QEIKRINKIRRRLVKDSNTKKAGKTGPMKTLLVRVMTPDLRERLENLRKKPENIPQPISNTSRANLNKLLTDYTEMKKAILHVYWEEFQKDPVGLMSRVAQPASKKIDQNKLKPEMDEKGNLTTAGFACSQCGQPLFVYKLEQVSEKGKAYTNYFGRCNVAEHEKLILLAQLKPEKDSDEAVTYSLGKFGQRALDFYSIHVTKESTHPVKPLAQIAGNRYASGPVGKALSDACMGTIASFLSKYQDIIIEHQKVVKGNQKRLESLRELAGKENLEYPSVTLPPQPHTKEGVDAYNEVIARVRMWVNLNLWQKLKLSRDDAKPLLRLKGFPSFPLVERQANAEVDWWDMVCNVKKLINEKKEDGKVFWQNLAGYKRQEALRPYLSSEEDRKKGKKFARYQLGDLLLHLEKKHGEDWGKVYDEAWERIDKKVEGLSKHIKLEEERRSEDAQSKAALTDWLRAKASFVIEGLKEADKDEFCRCELKLQKWYGDLRGKPFAIEAENSILDISGFSKQYNCAFIWQKDGVKKLNLYLIINYFKGGKLRFKKIKPEAFEANRFYTVINKKSGEIVPMEVNFNFDDPNLIILPLAFGKRQGREFIWNDLLSLETGSLKLANGRVIEKTLYNRRTRQDEPALFVALTFERREVLDSSNIKPMNLIGVDRGENIPAVIALTDPEGCPLSRFKDSLGNPTHILRIGESYKEKQRTIQAKKEVEQRRAGGYSRKYASKAKNLADDMVRNTARDLLYYAVTQDAMLIFENLSRGFGRQGKRTFMAERQYTRMEDWLTAKLAYEGLPSKTYLSKTLAQYTSKTCSNCGFTITSADYDRVLEKLKKTATGWMTTINGKELKVEGQITYYNRYKRQNVVKDLSVELDRLSEESVNNDISSWTKGRSGEALSLLKKRFSHRPVQEKFVCLNCGFETHADEQAALNIARSWLFLRSQEYKKYQTNKTSTGNTDKRAFVETWQSFYRKKLKEVWKPAV

SEQ ID NO: 28733 - protein, 980 aa, synthetic construct
  REGION 1..980: note = engineered CasX variant
QEIKRINKIRRRLVKDSNTKKAGKTGPMKTLLVRVMTPDLRERLENLRKKPENIPQPISNTSRANLNKLLTDYTEMKKAILHVYWEEFQKDPVGLMSRVAQPASKKIDQNKLKPEMDEKGNLTTAGFACSQCGQPLFVYKLEQVSEKGKAYTNYFGRCNVAEHEKLILLAQLKPEKDSDEAVTYSLGKFGQRALDFYSIHVTKESTHPVKPLAQIAGNRYASGPVGKALSDACMGTIASFLSKYQDIIIEHQKVVKGNQKRLESLRELAGKENLEYPSVTLPPQPHTKEGVDAYNEVIARVRMWVNLNLWQKLKLSRDDAKPLLRLKGFPSFPLVERQANAEVDWWDMVCNVKKLINEKKEDGKVFWQNLAGYKRQEALRPYLSSEEDRKKGKKFARYQLGDLLLHLEKKHGEDWGKVYDEAWERIDKKVEGLSKHIKLEEERRSEDAQSKAALTDWLRAKASFVIEGLKEADKDEFCRCELKLQKWYGDLRGKPFAIEAENSILDISGFSKQYNCAFIWQKDGVKKLNLYLIINYFKGGKLRFKKIKPEAFEANRFYTVINKKSGEIVPMEVNFNFDDPNLIILPLAFGKRQGREFIWNDLLSLETGSLKLANGRVIEKTLYNRRTRQDEPALFVALTFERREVLDSSNIKPMNLIGVDRGENIPAVIALTDPEGCPLSRFKDSLGNPTHILRIGESYKEKQRTIQAKKEVEQRRAGGYSRKYASKAKNLADDMVRNTARDLLYYAVTQDAMLIFENLSRGFGRQGKRTFMAERQYTRMEDWLTAKLAYEGLPSKTYLSKTLAQYTSKTCSNCGFTITSADYDRVLEKLKKTATGWMTTINGKELKVEGQITYYNRYKRQNVVKDLSVELDRLSEESVNNDISSWTKGRSGEALSLLKKRFSHRPVQEKFVCLNCGFETHADEQAALNIARSWLFLRSQEYKKYQTNKTTGKNTDKRAFVETWQSFYRKKLKEVWKPAV

SEQ ID NO: 28734 - protein, 979 aa, synthetic construct
  REGION 1..979: note = engineered CasX variant
QEIKRINKIRRRLVKDSNTKKAGKTGPMKTLLVRVMTPDLRERLENLRKKPENIPQPISNTSRANLNKLLTDYTEMKKAILHVYWEEFQKDPVGLMSRVAQPASKKIDQNKLKPEMDEKGNLTTAGFACSQCGQPLFVYKLEQVSEKGKAYTNYFGRCNVAEHEKLILLAQLKPEKDSDEAVTYSLGKFGQRALDFYSIHVTKESTHPVKPLAQIAGNRYASGPVGKALSDACMGTIASFLSKYQDIIIEHQKVVKGNQKRLESLRELAGKENLEYPSVTLPPQPHTKEGVDAYNEVIARVRMWVNLNLWQKLKLSRDDAKPLLRLKKFPSFPLVERQANAEVDWWDMVCNVKKLINEKKEDGKVFWQNLAGYKRQEALRPYLSSEEDRKKGKKFARYQLGDLLLHLEKKHGEDWGKVYDEAWERIDKKVEGLSKHIKLEEERRSEDAQSKAALTDWLRAKASFVIEGLKEADKDEFCRCELKLQKWYGDLRGKPFAIEAENSILDISGFSKQYNCAFIWQKDGVKKLNLYLIINYFKGGKLRFKKIKPEAFEANRFYTVINKKSGEIVPMEVNFNFDDPNLIILPLAFGKRQGREFIWNDLLSLETGSLKLANGRVIEKTLYNRRTRQDEPALFVALTFERREVLDSSNIKPMNLIGVDRGENIPAVIALTDPEGCPLSRFKDSLGNPTHILRIGESYKEKQRTIQAKKEVEQRRAGGYSRKYASKAKNLADDMVRNTARDLLYYAVTQDAMLIFENLSRGFGRQGKRTFMAERQYTRMEDWLTAKLAYEGLPSKTYLSKTLAQYTSKTCSNCGFTITSADYDRVLEKLKKTATGWMTTINGKELKVEGQITYYNRYKRQNVVKDLSVELDRLSEESVNNDISSWTKGRSGEALSLLKKRFSHRPVQEKFVCLNCGFETHADEQAALNIARSWLFLRSQEYKKYQTNKTTGNTDKRAFVETWQSFYRKKLKEVWKPAV

SEQ ID NO: 28735 - protein, 979 aa, synthetic construct
  REGION 1..979: note = engineered CasX variant
QEIKRINKIRRRLVKDSNTKKAGKTGPMKTLLVRVMTPDLRERLENLRKKPENIPQPISNTSRANLNKLLTDYTEMKKAILHVYWEEFQKDPVGLMSRVAQPASKKIDQNKLKPEMDEKGNLTTAGFACSQCGQPLFVYKLEQVSEKGKAYTNYFGRCNVAEHEKLILLAQLKPEKDSDEAVTYSLGKFGQRALDFYSIHVTKESTHPVKPLAQIAGNRYASGPVGKALSDACMGTIASFLSKYQDIIIEHQKVVKGNQKRLESLRELAGKENLEYPSVTLPPQPHTKEGVDAYNEVIARVRMWVNLNLWQKLKLSRDDAKPLLRLKGFPSFPLVERQANAEVDWWDMVCNVKKLINEKKEDGKVFWQNLAGYKRQEALRPYLSSEEDRKKGKKFARYQLGDLLLHLEKKHGEDWGKVYDEAWERIDKKVEGLSKHIKLEEERRSEDAQSKAALTDWLRAKASFVIEGLKEADKDEFCRCELKLQKWYGDLRGKPFAIEAENSILDISGFSKQYNCAFIWQKDGVKKLNLYLIINYFKGGKLRFKKIKPEAFEANRFYTVINKKSGEIVPMEVNFNFDDPNLIILPLAFGKRQGREFIWNDLLSLETGSLKLANGRVIEKTLYNRRTRQDEPALFVALTFERREVLDSSNIKPMNLIGVDRGENIPAVIALTDPEGCPLSRFKDSLGNPTHILRIGERYKEKQRTIQAKKEVEQRRAGGYSRKYASKAKNLADDMVRNTARDLLYYAVTQDAMLIFENLSRGFGRQGKRTFMAERQYTRMEDWLTAKLAYEGLPSKTYLSKTLAQYTSKTCSNCGFTITSADYDRVLEKLKKTATGWMTTINGKELKVEGQITYYNRYKRQNVVKDLSVELDRLSEESVNNDISSWTKGRSGEALSLLKKRFSHRPVQEKFVCLNCGFETHADEQAALNIARSWLFLRSQEYKKYQTNKTTGNTDKRAFVETWQSFYRKKLKEVWKPAV

SEQ ID NO: 28736 - protein, 979 aa, synthetic construct
  REGION 1..979: note = engineered CasX variant
QEIKRINKIRRRLVKDSNTKKAGKTGPMKTLLVRVMTPDLRERLENLRKKPENIPQPISNTSRANLNKLLTDYTEMKKAILHVYWEEFQKDPVGLMSRVAQPASKKIDQNKLKPEMDEKGNLTTAGFACSQCGQPLFVYKLEQVSEKGKAYTNYFGRCNVAEHEKLILLAQLKPEKDSDEAVTYSLGKFGQRALDFYSIHVTKESTHPVKPLAQIAGNRYASGPVGKALSDACMGTIASFLSKYQDIIIEHQKVVKGNQKRLESLRELAGKENLEYPSVTLPPQPHTKEGVDAYNEVIARVRMWVNLNLWQKLKLSRDDAKPLLRLKGFPSFPLVERQANAEVDWWDMVCNVKKLINEKKEDGKVFWQNLAGYKRQEALRPYLSSEEDRKKGKKFARYQLGDLLLHLEKKHGEDWGKVYDEAWERIDKKVEGLSKHIKLEEERRSEDAQSKAALTDWLRAKASFVIEGLKEADKDEFCRCELKLQKWYGDLRGKPFAIEAENSILDISGFSKQYNCAFIWQKDGVKKLNLYLIINYFKGGKLRFKKIKPEAFEANRFYTVINKKSGEIVPMEVNFNFDDPNLIILPLAFGKRQGREFIWNDLLSLETGSLQLANGRVIEKTLYNRRTRQDEPALFVALTFERREVLDSSNIKPMNLIGVDRGENIPAVIALTDPEGCPLSRFKDSLGNPTHILRIGESYKEKQRTIQAKKEVEQRRAGGYSRKYASKAKNLADDMVRNTARDLLYYAVTQDAMLIFENLSRGFGRQGKRTFMAERQYTRMEDWLTAKLAYEGLPSKTYLSKTLAQYTSKTCSNCGFTITSADYDRVLEKLKKTATGWMTTINGKELKVEGQITYYNRYKRQNVVKDLSVELDRLSEESVNNDISSWTKGRSGEALSLLKKRFSHRPVQEKFVCLNCGFETHADEQAALNIARSWLFLRSQEYKKYQTNKTTGNTDKRAFVETWQSFYRKKLKEVWKPAV

SEQ ID NO: 28737 - protein, 979 aa, synthetic construct
  REGION 1..979: note = engineered CasX variant
QEIKRINKIRRRLVKDSNTKKAGKTGPMKTLLVRVMTPDLRERLENLRKKPENIPQPISNTSRANLNKLLTDYTEMKKAILHVYWEEFQKDPVGLMSRVAQPASKKIDQNKLKPEMDEKGNLTTAGFACSQCGQPLFVYKLEQVSEKGKAYTNYFGRCNVAEHEKLILLAQLKPEKDSDEAVTYSLGKFGQRALDFYSIHVTKESTHPVKPLAQIAGNRYASGPVGKALSDACMGTIASFLSKYQDIIIEHQKVVKGNQKRLESLRELAGKENLEYPSVTLPPQPHTKEGVDAYNEVIARVRMWVNLNLWQKLKLSRDDAKPLLRLKGFPSFPLVERQANEVDWWDMVCNVKKLINEKKEDGKVFWQNLAGYKRQEALRPYLSSEEDRKKGKKFARTQLGDLLLHLEKKHEGEDWGKVYDEAWERIDKKVEGLSKHIKLEEERRSEDAQSKAALTDWLRAKASFVIEGLKEADKDEFCRCELKLQKWYGDLRGKPFAIEAENSILDISGFSKQYNCAFIWQKDGVKKLNLYLIINYFKGGKLRFKKIKPEAFEANRFYTVINKKSGEIVPMEVNFNFDDPNLIILPLAFGKRQGREFIWNDLLSLETGSLKLANGRVIEKTLYNRRTRQDEPALFVALTFERREVLDSSNIKPMNLIGVDRGENIPAVIALTDPEGCPLSRFKDSLGNPTHILRIGESYKEKQRTIQAKKEVEQRRAGGYSRKYASKAKNLADDMVRNTARDLLYYAVTQDAMLIFENLSRGFGRQGKRTFMAERQYTRMEDWLTAKLAYEGLPSKTYLSKTLAQYTSKTCSNCGFTITSADYDRVLEKLKKTATGWMTTINGKELKVEGQITYYNRYKRQNVVKDLSVELDRLSEESVNNDISSWTKGRSGEALSLLKKRFSHRPVQEKFVCLNCGFETHADEQAALNIARSWLFLRSQEYKKYQTNKTTGNTDKRAFVETWQSFYRKKLKEVWKPAV

SEQ ID NO: 28738 - protein, 978 aa, synthetic construct
  REGION 1..978: note = engineered CasX variant
QEIKRINKIRRRLVKDSNTKKAGKTGPMKTLLVRVMTPDLRERLENLRKKPENIPQPISNTSRANLNKLLTDYTEMKKAILHVYWEEFQKDPVGLMSRVAQPASKKIDQNKLKPEMDEKGNLTTAGFACSQCGQPLFVYKLEQVSEKGKAYTNYFGRCNVAEHEKLILLAQLKPEKDSDEAVTYSLGKFGQRALDFYSIHVTKESTHPVKPLAQIAGNRYASGPVGKALSDACMGTIASFLSKYQDIIIEHQKVVKGNQKRLESLRELAGKENLEYPSVTLPPQPHTKEGVDAYNEVIARVRMWVNLNLWQKLKLSRDDAKPLLRLKGFPSFPLVERQANEVDWWDMVCNVKKLINEKKEDGKVFWQNLAGYKRQEALRPYLSSEEDRKKGKKFARTQLGDLLLHLEKKHGEDWGKVYDEAWERIDKKVEGLSKHIKLEEERRSEDAQSKAALTDWLRAKASFVIEGLKEADKDEFCRCDLKLQKWYGDLRGKPFAIEAENSILDISGFSKQYNCAFIWQKDGVKKLNLYLIINYFKGGKLRFKKIKPEAFEANRFYTVINKKSGEIVPMEVNFNFDDPNLIILPLAFGKRQGREFIWNDLLSLETGSLKLANGRVIEKTLYNRRTRQDEPALFVALTFERREVLDSSNIKPMNLIGVDRGENIPAVIALTDPEGCPLSRFKDSLGNPTHILRIGESYKEKQRTIQAKKEVEQRRAGGYSRKYASKAKNLADDMVRNTARDLLYYAVTQDAMLIFENLSRGFGRQGKRTFMAERQYTRMEDWLTAKLAYEGLPSKTYLSKTLAQYTSKTCSNCGFTITSADYDRVLEKLKKTATGWMTTINGKELKVEGQITYYNRYKRQNVVKDLSVELDRLSEESVNNDISSWTKGRSGEALSLLKKRFSHRPVQEKFVCLNCGFETHADEQAALNIARSWLFLRSQEYKKYQTNKTTGNTDKRAFVETWQSFYRKKLKEVWKPAV

SEQ ID NO: 28739 - protein, 978 aa, synthetic construct
  REGION 1..978: note = engineered CasX variant
QEIKRINKIRRRLVKDSNTKKAGKTGPMKTLLVRVMTPDLRERLENLRKKPENIPQPISNTSRANLNKLLTDYTEMKKAILHVYWEEFQKDPVGLMSRVAQPASKKIDQNKLKPEMDEKGNLTTAGFACSQCGQPLFVYKLEQVSEKGKAYTNYFGRCNVAEHEKLILLAQLKPEKDSDEAVTYSLGKFGQRALDFYSIHVTKESTHPVKPLAQIAGNRYASGPVGKALSDACMGTIASFLSKYQDIIIEHQKVVKGNQKRLESLRELAGKENLEYPSVTLPPQPHTKEGVDAYNEVIARVRMWVNLNLWQKLKLSRDDAKPLLRLKGFPSFPLVERQANEVDWWDMVCNVKKLINEKKEDGKVFWQNLAGYKRQEALRPYLSSEEDRKKGKKFARTQLGDLLLHLEKKHGEDWGKVYDEAWERIDKKVEGLSKHIKLEEERRSEDAQSKAALTDWLRAKASFVIEGLKEADKDEFCRCELKLQKWYGDLRGKPFAIEAENSILDISGFSKQYNCAFIWQKDGVKKLNLYLIINYFKGGKLRFKKIKPEAFEANRFYTVINKKSGEIVPMEVNFNFDDPNLIILPLAFGKRFGREFIWNDLLSLETGSLKLANGRVIEKTLYNRRTRQDEPALFVALTFERREVLDSSNIKPMNLIGVDRGENIPAVIALTDPEGCPLSRFKDSLGNPTHILRIGESYKEKQRTIQAKKEVEQRRAGGYSRKYASKAKNLADDMVRNTARDLLYYAVTQDAMLIFENLSRGFGRQGKRTFMAERQYTRMEDWLTAKLAYEGLPSKTYLSKTLAQYTSKTCSNCGFTITSADYDRVLEKLKKTATGWMTTINGKELKVEGQITYYNRYKRQNVVKDLSVELDRLSEESVNNDISSWTKGRSGEALSLLKKRFSHRPVQEKFVCLNCGFETHADEQAALNIARSWLFLRSQEYKKYQTNKTTGNTDKRAFVETWQSFYRKKLKEVWKPAV

SEQ ID NO: 28740 - protein, 978 aa, synthetic construct
  REGION 1..978: note = engineered CasX variant
QEIKRINKIRRRLVKDSNTKKAGKTGPMKTLLVRVMTPDLRERLENLRKKPENIPQPISNTSRANLNKLLTDYTEMKKAILHVYWEEFQKDPVGLMSRVAQPASKKIDQNKLKPEMDEKGNLTTAGFACSQCGQPLFVYKLEQVSEKGKAYTNYFGRCNVAEHEKLILLAQLKPEKDSDEAVTYSLGKFGQRALDFYSIHVTKESTHPVKPLAQIAGNRYASGPVGKALSDACMGTIASFLSKYQDIIIEHQKVVKGNQKRLESLRELAGKENLEYPSVTLPPQPHTKEGVDAYNEVIARVRMWVNLNLWQKLKLSRDDAKPLLRLKGFPSFPLVERQANEVDWWDMVCNVKKLINEKKEDGKVFWQNLAGYKRQEALRPYLSSEEDRKKGKKFARTQLGDLLLHLEKKHGEDWGKVYDEAWERIDKKVEGLSKHIKLEEERRSEDAQSKAALTDWLRAKASFVIEGLKEADKDEFCRCELKLQKWYGDLRGKPFAIEAENSILDISGFSKQYNCAFIWQKDGVKKLNLYLIINYFKGGKLRFKKIKPEAFEANRFYTVINKKSGEIVPMEVNFNFDDPNLIILPLAFGKRVGREFIWNDLLSLETGSLKLANGRVIEKTLYNRRTRQDEPALFVALTFERREVLDSSNIKPMNLIGVDRGENIPAVIALTDPEGCPLSRFKDSLGNPTHILRIGESYKEKQRTIQAKKEVEQRRAGGYSRKYASKAKNLADDMVRNTARDLLYYAVTQDAMLIFENLSRGFGRQGKRTFMAERQYTRMEDWLTAKLAYEGLPSKTYLSKTLAQYTSKTCSNCGFTITSADYDRVLEKLKKTATGWMTTINGKELKVEGQITYYNRYKRQNVVKDLSVELDRLSEESVNNDISSWTKGRSGEALSLLKKRFSHRPVQEKFVCLNCGFETHADEQAALNIARSWLFLRSQEYKKYQTNKTTGNTDKRAFVETWQSFYRKKLKEVWKPAV

SEQ ID NO: 28741 - protein, 979 aa, synthetic construct
  REGION 1..979: note = engineered CasX variant
QEIKRINKIRRRLVKDSNTKKAGKTGPMKTLLVRVMTPDLRERLENLRKKPENIPQPISNTSRANLNKLLTDYTEMKKAILHVYWEEFQKDPVGLMSRVAQPASKKIDQNKLKPEMDEKGNLTTAGFACSQCGQPLFVYKLEQVSEKGKAYTNYFGRCNVAEHEKLILLAQLKPEKDSDEAVTYSLGKFGQRALDFYSIHVTKESTHPVKPLAQIAGNRYASGPVGKALSDACMGTIASFLSKYQDIIIEHQKVVKGNQKRLESLRELAGKENLEYPSVTLPPQPHTKEGVDAYNEVIARVRMWVNLNLWQKLKLSRDDAKPLLRLKGFPSFPLVERQANEVDWWDMVCNVKKLINEKKEDGKVFWQNLAGYKRQEALRPYLSSEEDRKKGKKFARTQLGDLLLHLEKKHGEDWGKVYDEAWERIDKKVEGLSKHIKLEEERRSEDAQSKAALTDWLRAKASFVIEGLKEADKDEFCRCELKLQKWYGDLRGKPFAIEAENSILDISGFSKQYNCAFIWQKDGVKKLNLYLIINYFKGGKLRFKKIKPEAFEANRFYTVINKKSGEIVPMEVNFNFDDPNLIILPLAFGKRQGREFIWNDLLSLETGSLKLANGRVIEKTLYNRRTRQDEPALFVALTFERREVLDSSNIKTPMNLIGVDRGENIPAVIALTDPEGCPLSRFKDSLGNPTHILRIGESYKEKQRTIQAKKEVEQRRAGGYSRKYASKAKNLADDMVRNTARDLLYYAVTQDAMLIFENLSRGFGRQGKRTFMAERQYTRMEDWLTAKLAYEGLPSKTYLSKTLAQYTSKTCSNCGFTITSADYDRVLEKLKKTATGWMTTINGKELKVEGQITYYNRYKRQNVVKDLSVELDRLSEESVNNDISSWTKGRSGEALSLLKKRFSHRPVQEKFVCLNCGFETHADEQAALNIARSWLFLRSQEYKKYQTNKTTGNTDKRAFVETWQSFYRKKLKEVWKPAV

SEQ ID NO: 28742 - protein, 979 aa, synthetic construct
  REGION 1..979: note = engineered CasX variant
QEIKRINKIRRRLVKDSNTKKAGKTGPMKTLLVRVMTPDLRERLENLRKKPENIPQPISNTSRANLNKLLTDYTEMKKAILHVYWEEFQKDPVGLMSRVAQPASKKIDQNKLKPEMDEKGNLTTAGFACSQCGQPLFVYKLEQVSEKGKAYTNYFGRCNVAEHEKLILLAQLKPEKDSDEAVTYSLGKFGQRALDFYSIHVTKESTHPVKPLAQIAGNRYASGPVGKALSDACMGTIASFLSKYQDIIIEHQKVVKGNQKRLESLRELAGKENLEYPSVTLPPQPHTKEGVDAYNEVIARVRMWVNLNLWQKLKLSRDDAKPLLRLKGFPSFPLVERQANEVDWWDMVCNVKKLINEKKEDGKVFWQNLAGYKRQEALRPYLSSEEDRKKGKKFARTQLGDLLLHLEKKHGEDWGKVYDEAWERIDKKVEGLSKHIKLEEERRSEDAQSKAALTDWLRAKASFVIEGLKEADKDEFCRCELKLQKWYGDLRGKPFAIEAENSILDISGFSKQYNCAFIWQKDGVKKLNLYLIINYFKGGKLRFKKIKPEAFEANRFYTVINKKSGEIVPMEVNFNFDDPNLIILPLAFGKRQGREFIWNDLLSLETGSLKLANGRVIEKTLYNRRTRQDEPALFVALTFERREVLDSSNIKPMSNLIGVDRGENIPAVIALTDPEGCPLSRFKDSLGNPTHILRIGESYKEKQRTIQAKKEVEQRRAGGYSRKYASKAKNLADDMVRNTARDLLYYAVTQDAMLIFENLSRGFGRQGKRTFMAERQYTRMEDWLTAKLAYEGLPSKTYLSKTLAQYTSKTCSNCGFTITSADYDRVLEKLKKTATGWMTTINGKELKVEGQITYYNRYKRQNVVKDLSVELDRLSEESVNNDISSWTKGRSGEALSLLKKRFSHRPVQEKFVCLNCGFETHADEQAALNIARSWLFLRSQEYKKYQTNKTTGNTDKRAFVETWQSFYRKKLKEVWKPAV

SEQ ID NO: 28743 - protein, 978 aa, synthetic construct
  REGION 1..978: note = engineered CasX variant
QEIKRINKIRRRLVKDSNTKKAGKTGPMKTLLVRVMTPDLRERLENLRKKPENIPQPISNTSRANLNKLLTDYTEMKKAILHVYWEEFQKDPVGLMSRVAQPASKKIDQNKLKPEMDEKGNLTTAGFACSQCGQPLFVYKLEQVSEKGKAYTNYFGRCNVAEHEKLILLAQLKPEKDSDEAVTYSLGKFGQRALDFYSIHVTKESTHPVKPLAQIAGNRYASGPVGKALSDACMGTIASFLSKYQDIIIEHQKVVKGNQKRLESLRELAGKENLEYPSVTLPPQPHTKEGVDAYNEVIARVRMWVNLNLWQKLKLSRDDAKPLLRLKGFPSFPLVERQANEVDWWDMVCNVKKLINEKKEDGKVFWQNLAGYKRQEALRPYLSSEEDRKKGKKFARTQLGDLLLHLEKKHGEDWGKVYDEAWERIDKKVEGLSKHIKLEEERRSEDAQSKAALTDWLRAKASFVIEGLKEADKDEFCRCELKLQKWYGDLRGKPFAIEAENSILDISGFSKQYNCAFIWQKDGVKKLNLYLIINYFKGGKLRFKKIKPEAFEANRFYTVINKKSGEIVPMEVNFNFDDPNLIILPLAFGKRQGREFIWNDLLSLETGSLKLANGRVIEKTLYNRRTRQDEPALFVALTFERREVLDSSNIKPMNLIGVDRGENIPAVIALTDPEGCPLSRFKDSLGNPTHILRIRESYKEKQRTIQAKKEVEQRRAGGYSRKYASKAKNLADDMVRNTARDLLYYAVTQDAMLIFENLSRGFGRQGKRTFMAERQYTRMEDWLTAKLAYEGLPSKTYLSKTLAQYTSKTCSNCGFTITSADYDRVLEKLKKTATGWMTTINGKELKVEGQITYYNRYKRQNVVKDLSVELDRLSEESVNNDISSWTKGRSGEALSLLKKRFSHRPVQEKFVCLNCGFETHADEQAALNIARSWLFLRSQEYKKYQTNKTTGNTDKRAFVETWQSFYRKKLKEVWKPAV

SEQ ID NO: 28744 - protein, 978 aa, synthetic construct
  REGION 1..978: note = engineered CasX variant
QEIKRINKIRRRLVKDSNTKKAGKTGPMKTLLVRVMTPDLRERLENLRKKPENIPQPISNTSRANLNKLLTDYTEMKKAILHVYWEEFQKDPVGLMSRVAQPASKKIDQNKLKPEMDEKGNLTTAGFACSQCGQPLFVYKLEQVSEKGKAYTNYFGRCNVAEHEKLILLAQLKPEKDSDEAVTYSLGKFGQRALDFYSIHVTKESTHPVKPLAQIAGNRYASGPVGKALSDACMGTIASFLSKYQDIIIEHQKVVKGNQKRLESLRELAGKENLEYPSVTLPPQPHTKEGVDAYNEVIARVRMWVNLNLWQKLKLSRDDAKPLLRLKGFPSFPLVERQANEVDWWDMVCNVKKLINEKKEDGKVFWQNLAGYKRQEALRPYLSSEEDRKKGKKFARTQLGDLLLHLEKKHGEDWGKVYDEAWERIDKKVEGLSKHIKLEEERRSEDAQSKAALTDWLRAKASFVIEGLKEADKDEFCRCELKLQKWYGDLRGKPFAIEAENSILDISGFSKQYNCAFIWQKDGVKKLNLYLIINYFKGGKLRFKKIKPEAFEANRFYTVINKKSGEIVPMEVNFNFDDPNLIILPLAFGKRQGREFIWNDLLSLETGSLKLANGRVIEKTLYNRRTRQDEPALFVALTFERREVLDSSNIKPMNLIGVDRGENIPAVIALTDPEGCPLSRFKDSLGNPTHILRIGESYKEKQRTIQAKKEVEQRRAGGYSRKYASKAKNLADDMVRNTARDLLYYAVTQDAMLIFENLSRGFGRQGKRTFSAERQYTRMEDWLTAKLAYEGLPSKTYLSKTLAQYTSKTCSNCGFTITSADYDRVLEKLKKTATGWMTTINGKELKVEGQITYYNRYKRQNVVKDLSVELDRLSEESVNNDISSWTKGRSGEALSLLKKRFSHRPVQEKFVCLNCGFETHADEQAALNIARSWLFLRSQEYKKYQTNKTTGNTDKRAFVETWQSFYRKKLKEVWKPAV

SEQ ID NO: 28745 - protein, 978 aa, synthetic construct
  REGION 1..978: note = engineered CasX variant
QEIKRINKIRRRLVKDSNTKKAGKTGPMKTLLVRVMTPDLRERLENLRKKPENIPQPISNTSRANLNKLLTDYTEMKKAILHVYWEEFQKDPVGLMSRVAQPASKKIDQNKLKPEMDEKGNLTTAGFACSQCGQPLFVYKLEQVSEKGKAYTNYFGRCNVAEHEKLILLAQLKPEKDSDEAVTYSLGKFGQRALDFYSIHVTKESTHPVKPLAQIAGNRYASGPVGKALSDACMGTIASFLSKYQDIIIEHQKVVKGNQKRLESLRELAGKENLEYPSVTLPPQPHTKEGVDAYNEVIARVRMWVNLNLWQKLKLSRDDAKPLLRLKGFPSFPLVERQANEVDWWDMVCNVKKLINEKKEDGKVFWQNLAGYKRQEALRPYLSSEEDRKKGKKFARTQLGDLLLHLEKKHGEDWGKVYDEAWERIDKKVEGLSKHIKLEEERRSEDAQSKAALTDWLRAKASFVIEGLKEADKDEFCRCELKLQKWYGDLRGKPFAIEAENSILDISGFSKQYNCAFIWQKDGVKKLNLYLIINYFKGGKLRFKKIKPEAFEANRFYTVINKKSGEIVPMEVNFNFDDPNLIILPLAFGKRQGREFIWNDLLSLETGSLKLANGRVIEKTLYNRRTRQDEPALFVALTFERREVLDSSNIKPMNLIGVDRGENIPAVIALTDPEGCPLSRFKDSLGNPTHILRIGESYKEKQRTIQAKKEVEQRRAGGYSRKYASKAKNLADDMVRNTARDLLYYAVTQDAMLIFENLSRGFGRQGKRTFMAERQYTRMEDWLTAKLAYEGLPSKTYLSKTLAQYTSKTCSNCGFTITSADYDRVLEKLKKTATGWMTTINGKELKVEGQITYYNRYKRQNVVKDLSVELDRLSEESVNNDISSWDKGRSGEALSLLKKRFSHRPVQEKFVCLNCGFETHADEQAALNIARSWLFLRSQEYKKYQTNKTTGNTDKRAFVETWQSFYRKKLKEVWKPAV

SEQ ID NO: 28746 - protein, 978 aa, synthetic construct
  REGION 1..978: note = engineered CasX variant
QEIKRINKIRRRLVKDSNTKKAGKTGPMKTLLVRVMTPDLRERLENLRKKPENIPQPISNTSRANLNKLLTDYTEMKKAILHVYWEEFQVDPVGLMSRVAQPASKKIDQNKLKPEMDEKGNLTTAGFACSQCGQPLFVYKLEQVSEKGKAYTNYFGRCNVAEHEKLILLAQLKPEKDSDEAVTYSLGKFGQRALDFYSIHVTKESTHPVKPLAQIAGNRYASGPVGKALSDACMGTIASFLSKYQDIIIEHQKVVKGNQKRLESLRELAGKENLEYPSVTLPPQPHTKEGVDAYNEVIARVRMWVNLNLWQKLKLSRDDAKPLLRLKGFPSFPLVERQANEVDWWDMVCNVKKLINEKKEDGKVFWQNLAGYKRQEALRPYLSSEEDRKKGKKFARTQLGDLLLHLEKKHGEDWGKVYDEAWERIDKKVEGLSKHIKLEEERRSEDAQSKAALTDWLRAKASFVIEGLKEADKDEFCRCELKLQKWYGDLRGKPFAIEAENSILDISGFSKQYNCAFIWQKDGVKKLNLYLIINYFKGGKLRFKKIKPEAFEANRFYTVINKKSGEIVPMEVNFNFDDPNLIILPLAFGKRQGREFIWNDLLSLETGSLKLANGRVIEKTLYNRRTRQDEPALFVALTFERREVLDSSNIKPMNLIGVDRGENIPAVIALTDPEGCPLSRFKDSLGNPTHILRIGESYKEKQRTIQAKKEVEQRRAGGYSRKYASKAKNLADDMVRNTARDLLYYAVTQDAMLIFENLSRGFGRQGKRTFMAERQYTRMEDWLTAKLAYEGLPSKTYLSKTLAQYTSKTCSNCGFTITSADYDRVLEKLKKTATGWMTTINGKELKVEGQITYYNRYKRQNVVKDLSVELDRLSEESVNNDISSWTKGRSGEALSLLKKRFSHRPVQEKFVCLNCGFETHADEQAALNIARSWLFLRSQEYKKYQTNKTTGNTDKRAFVETWQSFYRKKLKEVWKPAV

SEQ ID NO: 28747 - protein, 978 aa, synthetic construct
  REGION 1..978: note = engineered CasX variant
QEIKRLNKIRRRLVKDSNTKKAGKTGPMKTLLVRVMTPDLRERLENLRKKPENIPQPISNTSRANLNKLLTDYTEMKKAILHVYWEEFQKDPVGLMSRVAQPASKKIDQNKLKPEMDEKGNLTTAGFACSQCGQPLFVYKLEQVSEKGKAYTNYFGRCNVAEHEKLILLAQLKPEKDSDEAVTYSLGKFGQRALDFYSIHVTKESTHPVKPLAQIAGNRYASGPVGKALSDACMGTIASFLSKYQDIIIEHQKVVKGNQKRLESLRELAGKENLEYPSVTLPPQPHTKEGVDAYNEVIARVRMWVNLNLWQKLKLSRDDAKPLLRLKGFPSFPLVERQANEVDWWDMVCNVKKLINEKKEDGKVFWQNLAGYKRQEALRPYLSSEEDRKKGKKFARTQLGDLLLHLEKKHGEDWGKVYDEAWERIDKKVEGLSKHIKLEEERRSEDAQSKAALTDWLRAKASFVIEGLKEADKDEFCRCELKLQKWYGDLRGKPFAIEAENSILDISGFSKQYNCAFIWQKDGVKKLNLYLIINYFKGGKLRFKKIKPEAFEANRFYTVINKKSGEIVPMEVNFNFDDPNLIILPLAFGKRQGREFIWNDLLSLETGSLKLANGRVIEKTLYNRRTRQDEPALFVALTFERREVLDSSNIKPMNLIGVDRGENIPAVIALTDPEGCPLSRFKDSLGNPTHILRIGESYKEKQRTIQAKKEVEQRRAGGYSRKYASKAKNLADDMVRNTARDLLYYAVTQDAMLIFENLSRGFGRQGKRTFMAERQYTRMEDWLTAKLAYEGLPSKTYLSKTLAQYTSKTCSNCGFTITSADYDRVLEKLKKTATGWMTTINGKELKVEGQITYYNRYKRQNVVKDLSVELDRLSEESVNNDISSWTKGRSGEALSLLKKRFSHRPVQEKFVCLNCGFETHADEQAALNIARSWLFLRSQEYKKYQTNKTTGNTDKRAFVETWQSFYRKKLKEVWKPAV

SEQ ID NO: 28748 - protein, 978 aa, synthetic construct
  REGION 1..978: note = engineered CasX variant
QEIKRINKIRRRLVKDSNTKKAGKTGPMKTLLVRVMTPDLRERLENLRKKPENIPQPISNTSRANLNKLLTDYTEMKKAILHVYWEEFQKDPVGLMSRVAQPASKKIDQNKLKPEMDEKGNLTTAGFACSQCGQPLFVYKLEQVSEKGKAYTNYVGRCNVAEHEKLILLAQLKPEKDSDEAVTYSLGKFGQRALDFYSIHVTKESTHPVKPLAQIAGNRYASGPVGKALSDACMGTIASFLSKYQDIIIEHQKVVKGNQKRLESLRELAGKENLEYPSVTLPPQPHTKEGVDAYNEVIARVRMWVNLNLWQKLKLSRDDAKPLLRLKGFPSFPLVERQANEVDWWDMVCNVKKLINEKKEDGKVFWQNLAGYKRQEALRPYLSSEEDRKKGKKFARTQLGDLLLHLEKKHGEDWGKVYDEAWERIDKKVEGLSKHIKLEEERRSEDAQSKAALTDWLRAKASFVIEGLKEADKDEFCRCELKLQKWYGDLRGKPFAIEAENSILDISGFSKQYNCAFIWQKDGVKKLNLYLIINYFKGGKLRFKKIKPEAFEANRFYTVINKKSGEIVPMEVNFNFDDPNLIILPLAFGKRQGREFIWNDLLSLETGSLKLANGRVIEKTLYNRRTRQDEPALFVALTFERREVLDSSNIKPMNLIGVDRGENIPAVIALTDPEGCPLSRFKDSLGNPTHILRIGESYKEKQRTIQAKKEVEQRRAGGYSRKYASKAKNLADDMVRNTARDLLYYAVTQDAMLIFENLSRGFGRQGKRTFMAERQYTRMEDWLTAKLAYEGLPSKTYLSKTLAQYTSKTCSNCGFTITSADYDRVLEKLKKTATGWMTTINGKELKVEGQITYYNRYKRQNVVKDLSVELDRLSEESVNNDISSWTKGRSGEALSLLKKRFSHRPVQEKFVCLNCGFETHADEQAALNIARSWLFLRSQEYKKYQTNKTTGNTDKRAFVETWQSFYRKKLKEVWKPAV

SEQ ID NO: 28749 - protein, 978 aa, synthetic construct
  REGION 1..978: note = engineered CasX variant
QEIKRINKIRRRLVKDSNTKKAGKTGPMKTLLVRVMTPDLRERLENLRKKPENIPQPISNTSRANLNKLLTDYTEMKKAILHVYWEEFQKDPVGLMSRVAQPASKKIDQNKLKPEMDEKGNLTTAGFACSQCGQPLFVYKLEQVSEKGKAYTNYFGRCNVAEHEKLILLAQLKPEKDSDEAVTYSLGKFGQRALDFYSIHVTKESTHPVKPLAQIAGNRYASGPVGKALSDACMGTIASFLSKYQDIIIEHQKVVKGNQKRLESLRELAGKENLEYPSVTLPPQPHTKEGVDAYNEVIARVRMWVNLNLWQKLKLSRDDAKPLLRLKGFPSFPLVERQANEVDWWDMVCNVKKLINEKKEDGKVFWQNLAGYKRQEALRPYLSSEEDRKKGKKFARTQLGDLLLHLEKKHGEDWGKVYDEAWERIDKKVEGLSKHIKLEEERRSEDAQSKAALTDWLRAKASFVIEGLKEADKDEFCRCELKLQKWYGDLRGKPFAIEAENSILDISGFSKQYNCAFIWQKDGVKKLNLYLIINYFKGGKLRFKKIKPEAFEANRFYTVINKKSGEIVPMEVNFNFDDPNLIILPLAFGKRQGREFIWNDLLSLETGSLKLANGRVIEKTLYNRRTRQDEPALFVALTFERREVLDSSNIKPMNLIGVDRGENIPAVIALTDPEGCPLSRFKDSLGNPTHILRIGESYKEKQRTIQAKKEVEQRRAGGYSRKYASKAKNLADDMVRNTARDLLYYAVTQDAMLIFENLSRGFGRQGKRTFMAERQYTRMEDWLTAKLAYEGLASKTYLSKTLAQYTSKTCSNCGFTITSADYDRVLEKLKKTATGWMTTINGKELKVEGQITYYNRYKRQNVVKDLSVELDRLSEESVNNDISSWTKGRSGEALSLLKKRFSHRPVQEKFVCLNCGFETHADEQAALNIARSWLFLRSQEYKKYQTNKTTGNTDKRAFVETWQSFYRKKLKEVWKPAV

SEQ ID NO: 28750 - protein, 978 aa, synthetic construct
  REGION 1..978: note = engineered CasX variant
QEIKRINKIRRRLVKDSNTKKAGKTGPMKTLLVRVMTPDLRERLENLRKKPENIPQPISNTSRANLNKLLTDYTEMKKAILHVYWEEFQKDPVGLMSRVAQPASKKIDQNKLKPEMDEKGNLTTAGFACSQCGQPLFVYKLEQVSEKGKAYTNYFGRCNVAEHEKLILLAQLKPEKDSDEAVTYSLGKFGQRALDFYSIHVTKESTHPVKPLAQIAGNRYASGPVGKALSDACMGTIASFLSKYQDIIIEHQKVVKGNQKRLESLRELAGKENLEYPSVTLPPQPHTKEGVDAYNEVIARVRMWVNLNLWQKLKLSRDDAKPLLRLKGFPSFPLVERQANEVDWWDMVCNVKKLINEKKEDGKVFWQNLAGYKRQEALRPYLSSEEDRKKGKKFARTQLGDLLLHLEKKHGEDWGKVYDEAWERIDKKVEGLSKHIKLEEERRSEDAQSKAALTDWLRAKASFVIEGLKEADKDEFCRCELKLQKWYGDLRGKPFAIEAENSILDISGFSKQYNCAFIWQKDGVKKLNLYLIINYFKGGKLRFKKIKPEAFEANRFYTVINKKSGEIVPMEVNFNFDDPNLIILPLAFGKRQGREFIWNDLLSLETGSLKLANGRVIEKTLYNRRTRQDEPALFVALTFERREVLDSSNIKPMNLIGVDRGENIPAVIALTDPEGCPLSRFKDSLGNPTHILRIGESYKEKQRTIQAKKEVEQRRAGGYSRKYASKAKNLADDMVRNTARDLLYYAVTQDAMLIFENLSRGFGRQGKRTFMAERQYTRMEDWLTAKLAYEGLPSKVYLSKTLAQYTSKTCSNCGFTITSADYDRVLEKLKKTATGWMTTINGKELKVEGQITYYNRYKRQNVVKDLSVELDRLSEESVNNDISSWTKGRSGEALSLLKKRFSHRPVQEKFVCLNCGFETHADEQAALNIARSWLFLRSQEYKKYQTNKTTGNTDKRAFVETWQSFYRKKLKEVWKPAV

SEQ ID NO: 28751 - protein, 979 aa, synthetic construct
  REGION 1..979: note = engineered CasX variant
QEIKRINKIRRRLVKDSNTKKAGKTGPMKTLLVRVMTPDLRERLENLRKKPENIPQPISNTSRANLNKLLTDYTEMKKAILHVYWEEFQKDPVGLMSRVAQPASKKIDQNKLKPEMDEKGNLTTAGFACSQCGQPLFVYKLEQVSEKGKAYTNYFGRCNVAEHEKLILLAQLKPEKDSDEAVTYSLGKFGQRALDFYSIHVTKESTHPVKPLAQIAGNRYASGPVGKALSDACMGTIASFLSKYQDIIIEHQKVVKGNQKRLESLRELAGKENLEYPSVTLPPQPHTKEGVDAYNEVIARVRMWVNLNLWQKLKLSRDDAKPLLRLKGFPSFPLVERQANEVDWWDMVCNVKKLINEKKEDGKVFWQNLAGYKRQEALRPYLSSEEDRKKGKKFARTQLGDLLLHLEKKHGEDWGKVYDEAWERIDKKVEGLSKHIKLEEERRSEDAQSKAALTDWLRAKASFVIEGLKEADKDEFCRCELKLQKWYGDLRGKPFAIEAENSILDISGFSKQYNCAFIWQKDGVKKLNLYLIINYFKGGKLRFKKIKPEAFEANRFYTVINKKSGEIVPMEVNFNFDDPNLIILPLAFGKRQGREFIWNDLLSLETGSLKLANGRVIEKTLYNRRTRQDEPALFVALTFERREVLDSSNIKPMNLIGVDRGENIPAVIALTDPEGCPLSRFKDSLGNPTHILRIGESYKEKQRTIQAKKEVEQRRAGGYSRKYASKAKNLADDMVRNTARDLLYYAVTQDAMLIFENLSRGFGRQGKRTFMAERQYTRMEDWLTAKLAYEGPLPSKTYLSKTLAQYTSKTCSNCGFTITSADYDRVLEKLKKTATGWMTTINGKELKVEGQITYYNRYKRQNVVKDLSVELDRLSEESVNNDISSWTKGRSGEALSLLKKRFSHRPVQEKFVCLNCGFETHADEQAALNIARSWLFLRSQEYKKYQTNKTTGNTDKRAFVETWQSFYRKKLKEVWKPAV

SEQ ID NO: 28752 - protein, 979 aa, synthetic construct
  REGION 1..979: note = engineered CasX variant
QEIKRINKIRRRLVKDSNTKKAGKTGPMKTLLVRVMTPDLRERLENLRKKPENIPQPISNTSRANLNKLLTDYTEMKKAILHVYWEEFQKDPVGLMSRVAQPASKKIDQNKLKPEMDEKGNLTTAGFACSQCGQPLFVYKLEQVSEKGKAYTNYFGRCNVAEHEKLILLAQLKPEKDSDEAVTYSLGKFGQRALDFYSIHVTKESTHPVKPLAQIAGNRYASGPVGKALSDACMGTIASFLSKYQDIIIEHQKVVKGNQKRLESLRELAGKENLEYPSVTLPPQPHTKEGVDAYNEVIARVRMWVNLNLWQKLKLSRDDAKPLLRLKGFPSFPLVERQANEVDWWDMVCNVKKLINEKKEDGKVFWQNLAGYKRQEALRPYLSSEEDVRKKGKKFARTQLGDLLLHLEKKHGEDWGKVYDEAWERIDKKVEGLSKHIKLEEERRSEDAQSKAALTDWLRAKASFVIEGLKEADKDEFCRCELKLQKWYGDLRGKPFAIEAENSILDISGFSKQYNCAFIWQKDGVKKLNLYLIINYFKGGKLRFKKIKPEAFEANRFYTVINKKSGEIVPMEVNFNFDDPNLIILPLAFGKRQGREFIWNDLLSLETGSLKLANGRVIEKTLYNRRTRQDEPALFVALTFERREVLDSSNIKPMNLIGVDRGENIPAVIALTDPEGCPLSRFKDSLGNPTHILRIGESYKEKQRTIQAKKEVEQRRAGGYSRKYASKAKNLADDMVRNTARDLLYYAVTQDAMLIFENLSRGFGRQGKRTFMAERQYTRMEDWLTAKLAYEGLPSKTYLSKTLAQYTSKTCSNCGFTITSADYDRVLEKLKKTATGWMTTINGKELKVEGQITYYNRYKRQNVVKDLSVELDRLSEESVNNDISSWTKGRSGEALSLLKKRFSHRPVQEKFVCLNCGFETHADEQAALNIARSWLFLRSQEYKKYQTNKTTGNTDKRAFVETWQSFYRKKLKEVWKPAV

SEQ ID NO: 28753 - protein, 978 aa, synthetic construct
  REGION 1..978: note = engineered CasX variant
QEIKRINKIRRRLVKDSNTKKAGKTGPMKTLLVRVMTPDLRERLENLRKKPENIPQPISNTSRANLNKLLTDYTEMKKAILHVYWEEFQKDPVGLMSRVAQPASKKIDQNKLKPEMDEKGNLTTAGFACSQCGQPLFVYKLEQVSEKGKAYTNYFGRCNVAEHEKLILLAQLKPEKDSDEAVTYSLGKFGQRALDFYSIHVTKESTHPVKPLAQIAGNRYASGPVGKALSDACMGTIASFLSKYQDIIIEHQKVVKGNQKRLESLRELAGKENLEYPSVTLPPQPHTKEGVDAYNEVIARVRMWVNLNLWQKLKLSRDDAKPLLRLKGFPSFPLVERQANEVDWWDMVCNVKKLINEKKEDGKVFWQNLAGYKRQEALRPYLSSEEDRKKGKKFARTQLGDLLLHLEKKHGEDWGKVYDEAWERIDKKVEGLSKHIKLEEERRSEDAQSKAALTDWLRAKASFVIEGLKEADKDEFCRCELKLQKWYGDLRGKPFAIEAENSILDISGFSKQYNCAFIWQKDGVKKLNLYLIINYFKGGKLRFKKIKPEAFEANRFYTVINKKSGEIVPMEVNFNFDDPNLIILPLAFGKRQGREFIWNDLLSLETGSLKLANGRVIEKTLYNRRTRQDEPALFVALTFERREVLDSSNIKPMNLIGVDRGENIPAVIALTDPEGCPLSRFKDSLGNPTHILRIGESYKEKQRTIQAKKEVEQRRAGGYSRKYASKAKNLADDMVRNTARDLLYYAVTQDAMLIFENLSRGFGRQGKRTFMAERQYTRMEDWLTAKLAYEGLPSKTYLSKTLAQYTSKTCSNCGFTITSADYDRMLEKLKKTATGWMTTINGKELKVEGQITYYNRYKRQNVVKDLSVELDRLSEESVNNDISSWTKGRSGEALSLLKKRFSHRPVQEKFVCLNCGFETHADEQAALNIARSWLFLRSQEYKKYQTNKTTGNTDKRAFVETWQSFYRKKLKEVWKPAV

SEQ ID NO: 28754 - protein, 978 aa, synthetic construct
  REGION 1..978: note = engineered CasX variant
QEIKRINKIRRRLVKDSNTKKAGKTGPMKTLLVRVMTPDLRERLENLRKKPENIPQPISNTSRANLNKLLTDYTEMKKAILHVYWEEFQKDPVGLMSRVAQPASKKIDQNKLKPEMDEKGNLTTAGFACSQCGQPLFVYKLEQVSEKGKAYTNYFGRCNVAEHEKLILLAQLKPEKDSDEAVTYSLGKFGQRALDFYSIHVTKESTHPVKPLAQIAGNRYASGPVGKALSDACMGTIASFLSKYQDIIIEHQKVVKGNQKRLESLRELAGKENLEYPSVTLPPQPHTKEGVDAYNEVIARVRMWVNLNLWQKLKLSRDDAKPLLRLKGFPSFPLVERQANEVDWWDMVCNVKKLINEKKEDGKVFWQNLAGYKRQEALRPYLSSEEDRKKGKKFARTQLGDLLLHLEKKHGEDWGKVYDEAWERIDKKVEGLSKHIKLEEERRSEDAQSKAALTDWLRAKASFVIEGLKEADKDEFCRCELKLQKWYGDLRGKPFAIEAENSILDISGFSKQYNCAFIWQKDGVKKLNLYLIINYFKGGKLRFKKIKPEAFEANRFYTVINKKSGEIVPMEVNFNFDDPNLIILPLAFGKRQGREFIWNDLLSLETGSLKLANGRVIEKTLYNRRTRQDEPALFVALTFERREVLDSSNIKPMNLIGVDRGENIPAVIALTDPEGCPLSRFKDSLGNPTHILRIGESYKEKQRTIQAKKEVEQRRAGGYSRKYASKAKNLADDMVRNTARDLLYYAVTQDAMLIFENLSRGFGRQGKRTFMAERQYTRMEDWLTAKLAYEGLPSKTYLSKTLAQYTSKTCSNCGFTITSADYDRVLEKLKKTATGWMTTINGKELKVEGQITYYNRYKRQNVVKDLSVELDRLSEESVNNDISSWTKGRQGEALSLLKKRFSHRPVQEKFVCLNCGFETHADEQAALNIARSWLFLRSQEYKKYQTNKTTGNTDKRAFVETWQSFYRKKLKEVWKPAV

SEQ ID NO: 28755 - protein, 978 aa, synthetic construct
  REGION 1..978: note = engineered CasX variant
QEIKRINKIRRRLVKDSNTKKAGKTGPMKTLLVRVMTPDLRERLENLRKKPENIPQPISNTSRANLNKLLTDYTEMKKAILHVYWEEFQKDPVGLMSRVAQPASKKIDQNKLKPEMDEKGNLTTAGFACSQCGQPLFVYKLEQVSEKGKAYTNYFGRCNVAEHEKLILLAQLKPEKDSDEAVTYSLGKFGQRALDFYSIHVTKESTHPVKPLAQIAGNRYASGPVGKALSDACMGTIASFLSKYQDIIIEHQKVVKGNQKRLESLRELAGKENLEYPSVTLPPQPHTKEGVDAYNEVIARVRMWVNLNLWQKLKLSRDDAKPLLRLKGFPSFPLVERQANEVDWWDMVCNVKKLINEKKEDGKVFWQNLAGYKRQEALRPYLSSEEDRKKGKKFARTQLGDLLLHLEKKHGEDWGKVYDEAWERIDKKVEGLSKHIKLEEERRSEDAQSKAALTDWLRAKASFVIEGLKEADKDEFCRCELKLQKWYGDLRGKPFAIEAENSILDISGFSKQYNCAFIWQKDGVKKLNLYLIINYFKGGKLRFKKIKPEAFEANRFYTVINKKSGEIVPMEVNFNFDDPNLIILPLAFGKRQGREFIWNDLLSLETGSLKLANGRVIEKTLYNRRTRQDEPALFVALTFERREVLDSSNIKPMNLIGVDRGENIPAVIALTDPEGCPLSRFKDSLGNPTHILRIGESYKEKQRTIQAKKEVEQRRAGGYSRKYASKAKNLADDMVRNTARDLLYYAVTQDAMLIFENLSRGFGRQGKRTFMAERQYTRMEDWLTAKLAYEGLPSKTYLSKTLAQYTSKTCSNCGFTITSADYDRVLEKLKKTATGWMTTINGKELKVEGQITYYNRYKRQNVVKDLSVELDRLSEESVNNDISSWTKGRSGEALSLLKKRFSHRPVQEKFVCLNCEFETHADEQAALNIARSWLFLRSQEYKKYQTNKTTGNTDKRAFVETWQSFYRKKLKEVWKPAV

SEQ ID NO: 28756 - protein, 979 aa, synthetic construct
  REGION 1..979: note = engineered CasX variant
QEIKRINKIRRRLVKDSNTKKAGKTGPMKTLLVRVMTPDLRERLENLRKKPENIPQPISNTSRANLNKLLTDYTEMKKAILHVYWEEFQKDPVGLMSRVAQPASKKIDQNKLKPEMDEKGNLTTAGFACSQCGQPLFVYKLEQVSEKGKAYTNYFGRCNVAEHEKLILLAQLKPEKDSDEAVTYSLGKFGQRALDFYSIHVTKESTHPVKPLAQIAGNRYASGPVGKALSDACMGTIASFLSKYQDIIIEHQKVVKGNQKRLESLRELAGKENLEYPSVTLPPQPHTKEGVDAYNEVIARVRMWVNLNLWQKLKLSRDDAKPLLRLKGFPSFPLVERQANEVDWWDMVCNVKKLINEKKEDGKVFWQNLAGYKRQEALRPYLSSEEDRKKGKKFARTQLGDLLLHLEKKHGEDWGKVYDEAWERIDKKVEGLSKHIKLEEERRSEDAQSKAALTDWLRAKASFVIEGLKEADKDEFCRCELKLQKWYGDLRGKPFAIEAENSILDISGFSKQYNCAFIWQKDGVKKLNLYLIINYFKGGKLRFKKIKPEAFEANRFYTVINKKSGEIVPMEVNFNFDDPNLIILPLAFGKRQGREFIWNDLLSLETGSLKLANGRVIEKTLYNRRTRQDEPALFVALTFERREVLDSSNIKPMNLIGVDRGENIPAVIALTDPEGCPLSRFKDSLGNPTHILRIGESYKEKQRTIQAKKEVEQRRAGGYSRKYASKAKNLADDMVRNTARDLLYYAVTQDAMLIFENLSRGFGRQGKRTFMAERQYTRMEDWLTAKLAYEGLPSKTYLSKTLAQYTSKTCSNCGFTITSADYDRVLEKLKKTATGWMTTINGKELKVEGQITYYNRYKRQNVVKDLSVELDRLSEESVNNDISSWTKGRSGEALSLLKKRFSHRPVQEKFVCLNCGFETHADEQAALNIARSWLFLRSQEYKKYQTNKTSTGNTDKRAFVETWQSFYRKKLKEVWKPAV

SEQ ID NO: 28757 - protein, 979 aa, synthetic construct
  REGION 1..979: note = engineered CasX variant
QEIKRINKIRRRLVKDSNTKKAGKTGPMKTLLVRVMTPDLRERLENLRKKPENIPQPISNTSRANLNKLLTDYTEMKKAILHVYWEEFQKDPVGLMSRVAQPASKKIDQNKLKPEMDEKGNLTTAGFACSQCGQPLFVYKLEQVSEKGKAYTNYFGRCNVAEHEKLILLAQLKPEKDSDEAVTYSLGKFGQRALDFYSIHVTKESTHPVKPLAQIAGNRYASGPVGKALSDACMGTIASFLSKYQDIIIEHQKVVKGNQKRLESLRELAGKENLEYPSVTLPPQPHTKEGVDAYNEVIARVRMWVNLNLWQKLKLSRDDAKPLLRLKGFPSFPLVERQANEVDWWDMVCNVKKLINEKKEDGKVFWQNLAGYKRQEALRPYLSSEEDRKKGKKFARTQLGDLLLHLEKKHGEDWGKVYDEAWERIDKKVEGLSKHIKLEEERRSEDAQSKAALTDWLRAKASFVIEGLKEADKDEFCRCELKLQKWYGDLRGKPFAIEAENSILDISGFSKQYNCAFIWQKDGVKKLNLYLIINYFKGGKLRFKKIKPEAFEANRFYTVINKKSGEIVPMEVNFNFDDPNLIILPLAFGKRQGREFIWNDLLSLETGSLKLANGRVIEKTLYNRRTRQDEPALFVALTFERREVLDSSNIKPMNLIGVDRGENIPAVIALTDPEGCPLSRFKDSLGNPTHILRIGESYKEKQRTIQAKKEVEQRRAGGYSRKYASKAKNLADDMVRNTARDLLYYAVTQDAMLIFENLSRGFGRQGKRTFMAERQYTRMEDWLTAKLAYEGLPSKTYLSKTLAQYTSKTCSNCGFTITSADYDRVLEKLKKTATGWMTTINGKELKVEGQITYYNRYKRQNVVKDLSVELDRLSEESVNNDISSWTKGRSGEALSLLKKRFSHRPVQEKFVCLNCGFETHADEQAALNIARSWLFLRSQEYKKYQTNKTTGKNTDKRAFVETWQSFYRKKLKEVWKPAV

SEQ ID NO: 28758 - protein, 978 aa, synthetic construct
  REGION 1..978: note = engineered CasX variant
QEIKRINKIRRRLVKDSNTKKAGKTGPMKTLLVRVMTPDLRERLENLRKKPENIPQPISNTSRANLNKLLTDYTEMKKAILHVYWEEFQKDPVGLMSRVAQPASKKIDQNKLKPEMDEKGNLTTAGFACSQCGQPLFVYKLEQVSEKGKAYTNYFGRCNVAEHEKLILLAQLKPEKDSDEAVTYSLGKFGQRALDFYSIHVTKESTHPVKPLAQIAGNRYASGPVGKALSDACMGTIASFLSKYQDIIIEHQKVVKGNQKRLESLRELAGKENLEYPSVTLPPQPHTKEGVDAYNEVIARVRMWVNLNLWQKLKLSRDDAKPLLRLKKFPSFPLVERQANEVDWWDMVCNVKKLINEKKEDGKVFWQNLAGYKRQEALRPYLSSEEDRKKGKKFARTQLGDLLLHLEKKHGEDWGKVYDEAWERIDKKVEGLSKHIKLEEERRSEDAQSKAALTDWLRAKASFVIEGLKEADKDEFCRCELKLQKWYGDLRGKPFAIEAENSILDISGFSKQYNCAFIWQKDGVKKLNLYLIINYFKGGKLRFKKIKPEAFEANRFYTVINKKSGEIVPMEVNFNFDDPNLIILPLAFGKRQGREFIWNDLLSLETGSLKLANGRVIEKTLYNRRTRQDEPALFVALTFERREVLDSSNIKPMNLIGVDRGENIPAVIALTDPEGCPLSRFKDSLGNPTHILRIGESYKEKQRTIQAKKEVEQRRAGGYSRKYASKAKNLADDMVRNTARDLLYYAVTQDAMLIFENLSRGFGRQGKRTFMAERQYTRMEDWLTAKLAYEGLPSKTYLSKTLAQYTSKTCSNCGFTITSADYDRVLEKLKKTATGWMTTINGKELKVEGQITYYNRYKRQNVVKDLSVELDRLSEESVNNDISSWTKGRSGEALSLLKKRFSHRPVQEKFVCLNCGFETHADEQAALNIARSWLFLRSQEYKKYQTNKTTGNTDKRAFVETWQSFYRKKLKEVWKPAV

SEQ ID NO: 28759 - protein, 978 aa, synthetic construct
  REGION 1..978: note = engineered CasX variant
QEIKRINKIRRRLVKDSNTKKAGKTGPMKTLLVRVMTPDLRERLENLRKKPENIPQPISNTSRANLNKLLTDYTEMKKAILHVYWEEFQKDPVGLMSRVAQPASKKIDQNKLKPEMDEKGNLTTAGFACSQCGQPLFVYKLEQVSEKGKAYTNYFGRCNVAEHEKLILLAQLKPEKDSDEAVTYSLGKFGQRALDFYSIHVTKESTHPVKPLAQIAGNRYASGPVGKALSDACMGTIASFLSKYQDIIIEHQKVVKGNQKRLESLRELAGKENLEYPSVTLPPQPHTKEGVDAYNEVIARVRMWVNLNLWQKLKLSRDDAKPLLRLKGFPSFPLVERQANEVDWWDMVCNVKKLINEKKEDGKVFWQNLAGYKRQEALRPYLSSEEDRKKGKKFARTQLGDLLLHLEKKHGEDWGKVYDEAWERIDKKVEGLSKHIKLEEERRSEDAQSKAALTDWLRAKASFVIEGLKEADKDEFCRCELKLQKWYGDLRGKPFAIEAENSILDISGFSKQYNCAFIWQKDGVKKLNLYLIINYFKGGKLRFKKIKPEAFEANRFYTVINKKSGEIVPMEVNFNFDDPNLIILPLAFGKRQGREFIWNDLLSLETGSLKLANGRVIEKTLYNRRTRQDEPALFVALTFERREVLDSSNIKPMNLIGVDRGENIPAVIALTDPEGCPLSRFKDSLGNPTHILRIGERYKEKQRTIQAKKEVEQRRAGGYSRKYASKAKNLADDMVRNTARDLLYYAVTQDAMLIFENLSRGFGRQGKRTFMAERQYTRMEDWLTAKLAYEGLPSKTYLSKTLAQYTSKTCSNCGFTITSADYDRVLEKLKKTATGWMTTINGKELKVEGQITYYNRYKRQNVVKDLSVELDRLSEESVNNDISSWTKGRSGEALSLLKKRFSHRPVQEKFVCLNCGFETHADEQAALNIARSWLFLRSQEYKKYQTNKTTGNTDKRAFVETWQSFYRKKLKEVWKPAV

SEQ ID NO: 28760 - protein, 978 aa, synthetic construct
  REGION 1..978: note = engineered CasX variant
QEIKRINKIRRRLVKDSNTKKAGKTGPMKTLLVRVMTPDLRERLENLRKKPENIPQPISNTSRANLNKLLTDYTEMKKAILHVYWEEFQKDPVGLMSRVAQPASKKIDQNKLKPEMDEKGNLTTAGFACSQCGQPLFVYKLEQVSEKGKAYTNYFGRCNVAEHEKLILLAQLKPEKDSDEAVTYSLGKFGQRALDFYSIHVTKESTHPVKPLAQIAGNRYASGPVGKALSDACMGTIASFLSKYQDIIIEHQKVVKGNQKRLESLRELAGKENLEYPSVTLPPQPHTKEGVDAYNEVIARVRMWVNLNLWQKLKLSRDDAKPLLRLKGFPSFPLVERQANEVDWWDMVCNVKKLINEKKEDGKVFWQNLAGYKRQEALRPYLSSEEDRKKGKKFARTQLGDLLLHLEKKHGEDWGKVYDEAWERIDKKVEGLSKHIKLEEERRSEDAQSKAALTDWLRAKASFVIEGLKEADKDEFCRCELKLQKWYGDLRGKPFAIEAENSILDISGFSKQYNCAFIWQKDGVKKLNLYLIINYFKGGKLRFKKIKPEAFEANRFYTVINKKSGEIVPMEVNFNFDDPNLIILPLAFGKRQGREFIWNDLLSLETGSLQLANGRVIEKTLYNRRTRQDEPALFVALTFERREVLDSSNIKPMNLIGVDRGENIPAVIALTDPEGCPLSRFKDSLGNPTHILRIGESYKEKQRTIQAKKEVEQRRAGGYSRKYASKAKNLADDMVRNTARDLLYYAVTQDAMLIFENLSRGFGRQGKRTFMAERQYTRMEDWLTAKLAYEGLPSKTYLSKTLAQYTSKTCSNCGFTITSADYDRVLEKLKKTATGWMTTINGKELKVEGQITYYNRYKRQNVVKDLSVELDRLSEESVNNDISSWTKGRSGEALSLLKKRFSHRPVQEKFVCLNCGFETHADEQAALNIARSWLFLRSQEYKKYQTNKTTGNTDKRAFVETWQSFYRKKLKEVWKPAV

SEQ ID NO: 28761 - protein, 979 aa, synthetic construct
  REGION 1..979: note = engineered CasX variant
QEIKRINKIRRRLVKDSNTKKAGKTGPMKTLLVRVMTPDLRERLENLRKKPENIPQPISNTSRANLNKLLTDYTEMKKAILHVYWEEFQKDPVGLMSRVAQPASKKIDQNKLKPEMDEKGNLTTAGFACSQCGQPLFVYKLEQVSEKGKAYTNYFGRCNVAEHEKLILLAQLKPEKDSDEAVTYSLGKFGQRALDFYSIHVTKESTHPVKPLAQIAGNRYASGPVGKALSDACMGTIASFLSKYQDIIIEHQKVVKGNQKRLESLRELAGKENLEYPSVTLPPQPHTKEGVDAYNEVIARVRMWVNLNLWQKLKLSRDDAKPLLRLKGFPSFPLVERQANEVDWWDMVCNVKKLINEKKEDGKVFWQNLAGYKRQEALRPYLSSEEDRKKGKKFARYQLGDLLLHLEKKHEGEDWGKVYDEAWERIDKKVEGLSKHIKLEEERRSEDAQSKAALTDWLRAKASFVIEGLKEADKDEFCRCDLKLQKWYGDLRGKPFAIEAENSILDISGFSKQYNCAFIWQKDGVKKLNLYLIINYFKGGKLRFKKIKPEAFEANRFYTVINKKSGEIVPMEVNFNFDDPNLIILPLAFGKRQGREFIWNDLLSLETGSLKLANGRVIEKTLYNRRTRQDEPALFVALTFERREVLDSSNIKPMNLIGVDRGENIPAVIALTDPEGCPLSRFKDSLGNPTHILRIGESYKEKQRTIQAKKEVEQRRAGGYSRKYASKAKNLADDMVRNTARDLLYYAVTQDAMLIFENLSRGFGRQGKRTFMAERQYTRMEDWLTAKLAYEGLPSKTYLSKTLAQYTSKTCSNCGFTITSADYDRVLEKLKKTATGWMTTINGKELKVEGQITYYNRYKRQNVVKDLSVELDRLSEESVNNDISSWTKGRSGEALSLLKKRFSHRPVQEKFVCLNCGFETHADEQAALNIARSWLFLRSQEYKKYQTNKTTGNTDKRAFVETWQSFYRKKLKEVWKPAV

SEQ ID NO: 28762 - protein, 979 aa, synthetic construct
  REGION 1..979: note = engineered CasX variant
QEIKRINKIRRRLVKDSNTKKAGKTGPMKTLLVRVMTPDLRERLENLRKKPENIPQPISNTSRANLNKLLTDYTEMKKAILHVYWEEFQKDPVGLMSRVAQPASKKIDQNKLKPEMDEKGNLTTAGFACSQCGQPLFVYKLEQVSEKGKAYTNYFGRCNVAEHEKLILLAQLKPEKDSDEAVTYSLGKFGQRALDFYSIHVTKESTHPVKPLAQIAGNRYASGPVGKALSDACMGTIASFLSKYQDIIIEHQKVVKGNQKRLESLRELAGKENLEYPSVTLPPQPHTKEGVDAYNEVIARVRMWVNLNLWQKLKLSRDDAKPLLRLKGFPSFPLVERQANEVDWWDMVCNVKKLINEKKEDGKVFWQNLAGYKRQEALRPYLSSEEDRKKGKKFARYQLGDLLLHLEKKHEGEDWGKVYDEAWERIDKKVEGLSKHIKLEEERRSEDAQSKAALTDWLRAKASFVIEGLKEADKDEFCRCELKLQKWYGDLRGKPFAIEAENSILDISGFSKQYNCAFIWQKDGVKKLNLYLIINYFKGGKLRFKKIKPEAFEANRFYTVINKKSGEIVPMEVNFNFDDPNLIILPLAFGKRFGREFIWNDLLSLETGSLKLANGRVIEKTLYNRRTRQDEPALFVALTFERREVLDSSNIKPMNLIGVDRGENIPAVIALTDPEGCPLSRFKDSLGNPTHILRIGESYKEKQRTIQAKKEVEQRRAGGYSRKYASKAKNLADDMVRNTARDLLYYAVTQDAMLIFENLSRGFGRQGKRTFMAERQYTRMEDWLTAKLAYEGLPSKTYLSKTLAQYTSKTCSNCGFTITSADYDRVLEKLKKTATGWMTTINGKELKVEGQITYYNRYKRQNVVKDLSVELDRLSEESVNNDISSWTKGRSGEALSLLKKRFSHRPVQEKFVCLNCGFETHADEQAALNIARSWLFLRSQEYKKYQTNKTTGNTDKRAFVETWQSFYRKKLKEVWKPAV

SEQ ID NO: 28763 - protein, 979 aa, synthetic construct
  REGION 1..979: note = engineered CasX variant
QEIKRINKIRRRLVKDSNTKKAGKTGPMKTLLVRVMTPDLRERLENLRKKPENIPQPISNTSRANLNKLLTDYTEMKKAILHVYWEEFQKDPVGLMSRVAQPASKKIDQNKLKPEMDEKGNLTTAGFACSQCGQPLFVYKLEQVSEKGKAYTNYFGRCNVAEHEKLILLAQLKPEKDSDEAVTYSLGKFGQRALDFYSIHVTKESTHPVKPLAQIAGNRYASGPVGKALSDACMGTIASFLSKYQDIIIEHQKVVKGNQKRLESLRELAGKENLEYPSVTLPPQPHTKEGVDAYNEVIARVRMWVNLNLWQKLKLSRDDAKPLLRLKGFPSFPLVERQANEVDWWDMVCNVKKLINEKKEDGKVFWQNLAGYKRQEALRPYLSSEEDRKKGKKFARYQLGDLLLHLEKKHEGEDWGKVYDEAWERIDKKVEGLSKHIKLEEERRSEDAQSKAALTDWLRAKASFVIEGLKEADKDEFCRCELKLQKWYGDLRGKPFAIEAENSILDISGFSKQYNCAFIWQKDGVKKLNLYLIINYFKGGKLRFKKIKPEAFEANRFYTVINKKSGEIVPMEVNFNFDDPNLIILPLAFGKRVGREFIWNDLLSLETGSLKLANGRVIEKTLYNRRTRQDEPALFVALTFERREVLDSSNIKPMNLIGVDRGENIPAVIALTDPEGCPLSRFKDSLGNPTHILRIGESYKEKQRTIQAKKEVEQRRAGGYSRKYASKAKNLADDMVRNTARDLLYYAVTQDAMLIFENLSRGFGRQGKRTFMAERQYTRMEDWLTAKLAYEGLPSKTYLSKTLAQYTSKTCSNCGFTITSADYDRVLEKLKKTATGWMTTINGKELKVEGQITYYNRYKRQNVVKDLSVELDRLSEESVNNDISSWTKGRSGEALSLLKKRFSHRPVQEKFVCLNCGFETHADEQAALNIARSWLFLRSQEYKKYQTNKTTGNTDKRAFVETWQSFYRKKLKEVWKPAV

SEQ ID NO: 28764 - protein, 980 aa, synthetic construct
  REGION 1..980: note = engineered CasX variant
QEIKRINKIRRRLVKDSNTKKAGKTGPMKTLLVRVMTPDLRERLENLRKKPENIPQPISNTSRANLNKLLTDYTEMKKAILHVYWEEFQKDPVGLMSRVAQPASKKIDQNKLKPEMDEKGNLTTAGFACSQCGQPLFVYKLEQVSEKGKAYTNYFGRCNVAEHEKLILLAQLKPEKDSDEAVTYSLGKFGQRALDFYSIHVTKESTHPVKPLAQIAGNRYASGPVGKALSDACMGTIASFLSKYQDIIIEHQKVVKGNQKRLESLRELAGKENLEYPSVTLPPQPHTKEGVDAYNEVIARVRMWVNLNLWQKLKLSRDDAKPLLRLKGFPSFPLVERQANEVDWWDMVCNVKKLINEKKEDGKVFWQNLAGYKRQEALRPYLSSEEDRKKGKKFARYQLGDLLLHLEKKHEGEDWGKVYDEAWERIDKKVEGLSKHIKLEEERRSEDAQSKAALTDWLRAKASFVIEGLKEADKDEFCRCELKLQKWYGDLRGKPFAIEAENSILDISGFSKQYNCAFIWQKDGVKKLNLYLIINYFKGGKLRFKKIKPEAFEANRFYTVINKKSGEIVPMEVNFNFDDPNLIILPLAFGKRQGREFIWNDLLSLETGSLKLANGRVIEKTLYNRRTRQDEPALFVALTFERREVLDSSNIKTPMNLIGVDRGENIPAVIALTDPEGCPLSRFKDSLGNPTHILRIGESYKEKQRTIQAKKEVEQRRAGGYSRKYASKAKNLADDMVRNTARDLLYYAVTQDAMLIFENLSRGFGRQGKRTFMAERQYTRMEDWLTAKLAYEGLPSKTYLSKTLAQYTSKTCSNCGFTITSADYDRVLEKLKKTATGWMTTINGKELKVEGQITYYNRYKRQNVVKDLSVELDRLSEESVNNDISSWTKGRSGEALSLLKKRFSHRPVQEKFVCLNCGFETHADEQAALNIARSWLFLRSQEYKKYQTNKTTGNTDKRAFVETWQSFYRKKLKEVWKPAV

SEQ ID NO: 28765 - protein, 980 aa, synthetic construct
  REGION 1..980: note = engineered CasX variant
QEIKRINKIRRRLVKDSNTKKAGKTGPMKTLLVRVMTPDLRERLENLRKKPENIPQPISNTSRANLNKLLTDYTEMKKAILHVYWEEFQKDPVGLMSRVAQPASKKIDQNKLKPEMDEKGNLTTAGFACSQCGQPLFVYKLEQVSEKGKAYTNYFGRCNVAEHEKLILLAQLKPEKDSDEAVTYSLGKFGQRALDFYSIHVTKESTHPVKPLAQIAGNRYASGPVGKALSDACMGTIASFLSKYQDIIIEHQKVVKGNQKRLESLRELAGKENLEYPSVTLPPQPHTKEGVDAYNEVIARVRMWVNLNLWQKLKLSRDDAKPLLRLKGFPSFPLVERQANEVDWWDMVCNVKKLINEKKEDGKVFWQNLAGYKRQEALRPYLSSEEDRKKGKKFARYQLGDLLLHLEKKHEGEDWGKVYDEAWERIDKKVEGLSKHIKLEEERRSEDAQSKAALTDWLRAKASFVIEGLKEADKDEFCRCELKLQKWYGDLRGKPFAIEAENSILDISGFSKQYNCAFIWQKDGVKKLNLYLIINYFKGGKLRFKKIKPEAFEANRFYTVINKKSGEIVPMEVNFNFDDPNLIILPLAFGKRQGREFIWNDLLSLETGSLKLANGRVIEKTLYNRRTRQDEPALFVALTFERREVLDSSNIKPMSNLIGVDRGENIPAVIALTDPEGCPLSRFKDSLGNPTHILRIGESYKEKQRTIQAKKEVEQRRAGGYSRKYASKAKNLADDMVRNTARDLLYYAVTQDAMLIFENLSRGFGRQGKRTFMAERQYTRMEDWLTAKLAYEGLPSKTYLSKTLAQYTSKTCSNCGFTITSADYDRVLEKLKKTATGWMTTINGKELKVEGQITYYNRYKRQNVVKDLSVELDRLSEESVNNDISSWTKGRSGEALSLLKKRFSHRPVQEKFVCLNCGFETHADEQAALNIARSWLFLRSQEYKKYQTNKTTGNTDKRAFVETWQSFYRKKLKEVWKPAV

SEQ ID NO: 28766 - protein, 979 aa, synthetic construct
  REGION 1..979: note = engineered CasX variant
QEIKRINKIRRRLVKDSNTKKAGKTGPMKTLLVRVMTPDLRERLENLRKKPENIPQPISNTSRANLNKLLTDYTEMKKAILHVYWEEFQKDPVGLMSRVAQPASKKIDQNKLKPEMDEKGNLTTAGFACSQCGQPLFVYKLEQVSEKGKAYTNYFGRCNVAEHEKLILLAQLKPEKDSDEAVTYSLGKFGQRALDFYSIHVTKESTHPVKPLAQIAGNRYASGPVGKALSDACMGTIASFLSKYQDIIIEHQKVVKGNQKRLESLRELAGKENLEYPSVTLPPQPHTKEGVDAYNEVIARVRMWVNLNLWQKLKLSRDDAKPLLRLKGFPSFPLVERQANEVDWWDMVCNVKKLINEKKEDGKVFWQNLAGYKRQEALRPYLSSEEDRKKGKKFARYQLGDLLLHLEKKHEGEDWGKVYDEAWERIDKKVEGLSKHIKLEEERRSEDAQSKAALTDWLRAKASFVIEGLKEADKDEFCRCELKLQKWYGDLRGKPFAIEAENSILDISGFSKQYNCAFIWQKDGVKKLNLYLIINYFKGGKLRFKKIKPEAFEANRFYTVINKKSGEIVPMEVNFNFDDPNLIILPLAFGKRQGREFIWNDLLSLETGSLKLANGRVIEKTLYNRRTRQDEPALFVALTFERREVLDSSNIKPMNLIGVDRGENIPAVIALTDPEGCPLSRFKDSLGNPTHILRIRESYKEKQRTIQAKKEVEQRRAGGYSRKYASKAKNLADDMVRNTARDLLYYAVTQDAMLIFENLSRGFGRQGKRTFMAERQYTRMEDWLTAKLAYEGLPSKTYLSKTLAQYTSKTCSNCGFTITSADYDRVLEKLKKTATGWMTTINGKELKVEGQITYYNRYKRQNVVKDLSVELDRLSEESVNNDISSWTKGRSGEALSLLKKRFSHRPVQEKFVCLNCGFETHADEQAALNIARSWLFLRSQEYKKYQTNKTTGNTDKRAFVETWQSFYRKKLKEVWKPAV

SEQ ID NO: 28767 - protein, 979 aa, synthetic construct
  REGION 1..979: note = engineered CasX variant
QEIKRINKIRRRLVKDSNTKKAGKTGPMKTLLVRVMTPDLRERLENLRKKPENIPQPISNTSRANLNKLLTDYTEMKKAILHVYWEEFQKDPVGLMSRVAQPASKKIDQNKLKPEMDEKGNLTTAGFACSQCGQPLFVYKLEQVSEKGKAYTNYFGRCNVAEHEKLILLAQLKPEKDSDEAVTYSLGKFGQRALDFYSIHVTKESTHPVKPLAQIAGNRYASGPVGKALSDACMGTIASFLSKYQDIIIEHQKVVKGNQKRLESLRELAGKENLEYPSVTLPPQPHTKEGVDAYNEVIARVRMWVNLNLWQKLKLSRDDAKPLLRLKGFPSFPLVERQANEVDWWDMVCNVKKLINEKKEDGKVFWQNLAGYKRQEALRPYLSSEEDRKKGKKFARYQLGDLLLHLEKKHEGEDWGKVYDEAWERIDKKVEGLSKHIKLEEERRSEDAQSKAALTDWLRAKASFVIEGLKEADKDEFCRCELKLQKWYGDLRGKPFAIEAENSILDISGFSKQYNCAFIWQKDGVKKLNLYLIINYFKGGKLRFKKIKPEAFEANRFYTVINKKSGEIVPMEVNFNFDDPNLIILPLAFGKRQGREFIWNDLLSLETGSLKLANGRVIEKTLYNRRTRQDEPALFVALTFERREVLDSSNIKPMNLIGVDRGENIPAVIALTDPEGCPLSRFKDSLGNPTHILRIGESYKEKQRTIQAKKEVEQRRAGGYSRKYASKAKNLADDMVRNTARDLLYYAVTQDAMLIFENLSRGFGRQGKRTFSAERQYTRMEDWLTAKLAYEGLPSKTYLSKTLAQYTSKTCSNCGFTITSADYDRVLEKLKKTATGWMTTINGKELKVEGQITYYNRYKRQNVVKDLSVELDRLSEESVNNDISSWTKGRSGEALSLLKKRFSHRPVQEKFVCLNCGFETHADEQAALNIARSWLFLRSQEYKKYQTNKTTGNTDKRAFVETWQSFYRKKLKEVWKPAV

SEQ ID NO: 28768 - protein, 979 aa, synthetic construct
  REGION 1..979: note = engineered CasX variant
QEIKRINKIRRRLVKDSNTKKAGKTGPMKTLLVRVMTPDLRERLENLRKKPENIPQPISNTSRANLNKLLTDYTEMKKAILHVYWEEFQKDPVGLMSRVAQPASKKIDQNKLKPEMDEKGNLTTAGFACSQCGQPLFVYKLEQVSEKGKAYTNYFGRCNVAEHEKLILLAQLKPEKDSDEAVTYSLGKFGQRALDFYSIHVTKESTHPVKPLAQIAGNRYASGPVGKALSDACMGTIASFLSKYQDIIIEHQKVVKGNQKRLESLRELAGKENLEYPSVTLPPQPHTKEGVDAYNEVIARVRMWVNLNLWQKLKLSRDDAKPLLRLKGFPSFPLVERQANEVDWWDMVCNVKKLINEKKEDGKVFWQNLAGYKRQEALRPYLSSEEDRKKGKKFARYQLGDLLLHLEKKHEGEDWGKVYDEAWERIDKKVEGLSKHIKLEEERRSEDAQSKAALTDWLRAKASFVIEGLKEADKDEFCRCELKLQKWYGDLRGKPFAIEAENSILDISGFSKQYNCAFIWQKDGVKKLNLYLIINYFKGGKLRFKKIKPEAFEANRFYTVINKKSGEIVPMEVNFNFDDPNLIILPLAFGKRQGREFIWNDLLSLETGSLKLANGRVIEKTLYNRRTRQDEPALFVALTFERREVLDSSNIKPMNLIGVDRGENIPAVIALTDPEGCPLSRFKDSLGNPTHILRIGESYKEKQRTIQAKKEVEQRRAGGYSRKYASKAKNLADDMVRNTARDLLYYAVTQDAMLIFENLSRGFGRQGKRTFMAERQYTRMEDWLTAKLAYEGLPSKTYLSKTLAQYTSKTCSNCGFTITSADYDRVLEKLKKTATGWMTTINGKELKVEGQITYYNRYKRQNVVKDLSVELDRLSEESVNNDISSWDKGRSGEALSLLKKRFSHRPVQEKFVCLNCGFETHADEQAALNIARSWLFLRSQEYKKYQTNKTTGNTDKRAFVETWQSFYRKKLKEVWKPAV

SEQ ID NO: 28769 - protein, 979 aa, synthetic construct
  REGION 1..979: note = engineered CasX variant
QEIKRINKIRRRLVKDSNTKKAGKTGPMKTLLVRVMTPDLRERLENLRKKPENIPQPISNTSRANLNKLLTDYTEMKKAILHVYWEEFQVDPVGLMSRVAQPASKKIDQNKLKPEMDEKGNLTTAGFACSQCGQPLFVYKLEQVSEKGKAYTNYFGRCNVAEHEKLILLAQLKPEKDSDEAVTYSLGKFGQRALDFYSIHVTKESTHPVKPLAQIAGNRYASGPVGKALSDACMGTIASFLSKYQDIIIEHQKVVKGNQKRLESLRELAGKENLEYPSVTLPPQPHTKEGVDAYNEVIARVRMWVNLNLWQKLKLSRDDAKPLLRLKGFPSFPLVERQANEVDWWDMVCNVKKLINEKKEDGKVFWQNLAGYKRQEALRPYLSSEEDRKKGKKFARYQLGDLLLHLEKKHEGEDWGKVYDEAWERIDKKVEGLSKHIKLEEERRSEDAQSKAALTDWLRAKASFVIEGLKEADKDEFCRCELKLQKWYGDLRGKPFAIEAENSILDISGFSKQYNCAFIWQKDGVKKLNLYLIINYFKGGKLRFKKIKPEAFEANRFYTVINKKSGEIVPMEVNFNFDDPNLIILPLAFGKRQGREFIWNDLLSLETGSLKLANGRVIEKTLYNRRTRQDEPALFVALTFERREVLDSSNIKPMNLIGVDRGENIPAVIALTDPEGCPLSRFKDSLGNPTHILRIGESYKEKQRTIQAKKEVEQRRAGGYSRKYASKAKNLADDMVRNTARDLLYYAVTQDAMLIFENLSRGFGRQGKRTFMAERQYTRMEDWLTAKLAYEGLPSKTYLSKTLAQYTSKTCSNCGFTITSADYDRVLEKLKKTATGWMTTINGKELKVEGQITYYNRYKRQNVVKDLSVELDRLSEESVNNDISSWTKGRSGEALSLLKKRFSHRPVQEKFVCLNCGFETHADEQAALNIARSWLFLRSQEYKKYQTNKTTGNTDKRAFVETWQSFYRKKLKEVWKPAV

SEQ ID NO: 28770 - protein, 979 aa, synthetic construct
  REGION 1..979: note = engineered CasX variant
QEIKRLNKIRRRLVKDSNTKKAGKTGPMKTLLVRVMTPDLRERLENLRKKPENIPQPISNTSRANLNKLLTDYTEMKKAILHVYWEEFQKDPVGLMSRVAQPASKKIDQNKLKPEMDEKGNLTTAGFACSQCGQPLFVYKLEQVSEKGKAYTNYFGRCNVAEHEKLILLAQLKPEKDSDEAVTYSLGKFGQRALDFYSIHVTKESTHPVKPLAQIAGNRYASGPVGKALSDACMGTIASFLSKYQDIIIEHQKVVKGNQKRLESLRELAGKENLEYPSVTLPPQPHTKEGVDAYNEVIARVRMWVNLNLWQKLKLSRDDAKPLLRLKGFPSFPLVERQANEVDWWDMVCNVKKLINEKKEDGKVFWQNLAGYKRQEALRPYLSSEEDRKKGKKFARYQLGDLLLHLEKKHEGEDWGKVYDEAWERIDKKVEGLSKHIKLEEERRSEDAQSKAALTDWLRAKASFVIEGLKEADKDEFCRCELKLQKWYGDLRGKPFAIEAENSILDISGFSKQYNCAFIWQKDGVKKLNLYLIINYFKGGKLRFKKIKPEAFEANRFYTVINKKSGEIVPMEVNFNFDDPNLIILPLAFGKRQGREFIWNDLLSLETGSLKLANGRVIEKTLYNRRTRQDEPALFVALTFERREVLDSSNIKPMNLIGVDRGENIPAVIALTDPEGCPLSRFKDSLGNPTHILRIGESYKEKQRTIQAKKEVEQRRAGGYSRKYASKAKNLADDMVRNTARDLLYYAVTQDAMLIFENLSRGFGRQGKRTFMAERQYTRMEDWLTAKLAYEGLPSKTYLSKTLAQYTSKTCSNCGFTITSADYDRVLEKLKKTATGWMTTINGKELKVEGQITYYNRYKRQNVVKDLSVELDRLSEESVNNDISSWTKGRSGEALSLLKKRFSHRPVQEKFVCLNCGFETHADEQAALNIARSWLFLRSQEYKKYQTNKTTGNTDKRAFVETWQSFYRKKLKEVWKPAV

SEQ ID NO: 28771 - protein, 979 aa, synthetic construct
  REGION 1..979: note = engineered CasX variant
QEIKRINKIRRRLVKDSNTKKAGKTGPMKTLLVRVMTPDLRERLENLRKKPENIPQPISNTSRANLNKLLTDYTEMKKAILHVYWEEFQKDPVGLMSRVAQPASKKIDQNKLKPEMDEKGNLTTAGFACSQCGQPLFVYKLEQVSEKGKAYTNYVGRCNVAEHEKLILLAQLKPEKDSDEAVTYSLGKFGQRALDFYSIHVTKESTHPVKPLAQIAGNRYASGPVGKALSDACMGTIASFLSKYQDIIIEHQKVVKGNQKRLESLRELAGKENLEYPSVTLPPQPHTKEGVDAYNEVIARVRMWVNLNLWQKLKLSRDDAKPLLRLKGFPSFPLVERQANEVDWWDMVCNVKKLINEKKEDGKVFWQNLAGYKRQEALRPYLSSEEDRKKGKKFARYQLGDLLLHLEKKHEGEDWGKVYDEAWERIDKKVEGLSKHIKLEEERRSEDAQSKAALTDWLRAKASFVIEGLKEADKDEFCRCELKLQKWYGDLRGKPFAIEAENSILDISGFSKQYNCAFIWQKDGVKKLNLYLIINYFKGGKLRFKKIKPEAFEANRFYTVINKKSGEIVPMEVNFNFDDPNLIILPLAFGKRQGREFIWNDLLSLETGSLKLANGRVIEKTLYNRRTRQDEPALFVALTFERREVLDSSNIKPMNLIGVDRGENIPAVIALTDPEGCPLSRFKDSLGNPTHILRIGESYKEKQRTIQAKKEVEQRRAGGYSRKYASKAKNLADDMVRNTARDLLYYAVTQDAMLIFENLSRGFGRQGKRTFMAERQYTRMEDWLTAKLAYEGLPSKTYLSKTLAQYTSKTCSNCGFTITSADYDRVLEKLKKTATGWMTTINGKELKVEGQITYYNRYKRQNVVKDLSVELDRLSEESVNNDISSWTKGRSGEALSLLKKRFSHRPVQEKFVCLNCGFETHADEQAALNIARSWLFLRSQEYKKYQTNKTTGNTDKRAFVETWQSFYRKKLKEVWKPAV

SEQ ID NO: 28772 - protein, 979 aa, synthetic construct
  REGION 1..979: note = engineered CasX variant
QEIKRINKIRRRLVKDSNTKKAGKTGPMKTLLVRVMTPDLRERLENLRKKPENIPQPISNTSRANLNKLLTDYTEMKKAILHVYWEEFQKDPVGLMSRVAQPASKKIDQNKLKPEMDEKGNLTTAGFACSQCGQPLFVYKLEQVSEKGKAYTNYFGRCNVAEHEKLILLAQLKPEKDSDEAVTYSLGKFGQRALDFYSIHVTKESTHPVKPLAQIAGNRYASGPVGKALSDACMGTIASFLSKYQDIIIEHQKVVKGNQKRLESLRELAGKENLEYPSVTLPPQPHTKEGVDAYNEVIARVRMWVNLNLWQKLKLSRDDAKPLLRLKGFPSFPLVERQANEVDWWDMVCNVKKLINEKKEDGKVFWQNLAGYKRQEALRPYLSSEEDRKKGKKFARYQLGDLLLHLEKKHEGEDWGKVYDEAWERIDKKVEGLSKHIKLEEERRSEDAQSKAALTDWLRAKASFVIEGLKEADKDEFCRCELKLQKWYGDLRGKPFAIEAENSILDISGFSKQYNCAFIWQKDGVKKLNLYLIINYFKGGKLRFKKIKPEAFEANRFYTVINKKSGEIVPMEVNFNFDDPNLIILPLAFGKRQGREFIWNDLLSLETGSLKLANGRVIEKTLYNRRTRQDEPALFVALTFERREVLDSSNIKPMNLIGVDRGENIPAVIALTDPEGCPLSRFKDSLGNPTHILRIGESYKEKQRTIQAKKEVEQRRAGGYSRKYASKAKNLADDMVRNTARDLLYYAVTQDAMLIFENLSRGFGRQGKRTFMAERQYTRMEDWLTAKLAYEGLASKTYLSKTLAQYTSKTCSNCGFTITSADYDRVLEKLKKTATGWMTTINGKELKVEGQITYYNRYKRQNVVKDLSVELDRLSEESVNNDISSWTKGRSGEALSLLKKRFSHRPVQEKFVCLNCGFETHADEQAALNIARSWLFLRSQEYKKYQTNKTTGNTDKRAFVETWQSFYRKKLKEVWKPAV

SEQ ID NO: 28773 - protein, 979 aa, synthetic construct
  REGION 1..979: note = engineered CasX variant
QEIKRINKIRRRLVKDSNTKKAGKTGPMKTLLVRVMTPDLRERLENLRKKPENIPQPISNTSRANLNKLLTDYTEMKKAILHVYWEEFQKDPVGLMSRVAQPASKKIDQNKLKPEMDEKGNLTTAGFACSQCGQPLFVYKLEQVSEKGKAYTNYFGRCNVAEHEKLILLAQLKPEKDSDEAVTYSLGKFGQRALDFYSIHVTKESTHPVKPLAQIAGNRYASGPVGKALSDACMGTIASFLSKYQDIIIEHQKVVKGNQKRLESLRELAGKENLEYPSVTLPPQPHTKEGVDAYNEVIARVRMWVNLNLWQKLKLSRDDAKPLLRLKGFPSFPLVERQANEVDWWDMVCNVKKLINEKKEDGKVFWQNLAGYKRQEALRPYLSSEEDRKKGKKFARYQLGDLLLHLEKKHEGEDWGKVYDEAWERIDKKVEGLSKHIKLEEERRSEDAQSKAALTDWLRAKASFVIEGLKEADKDEFCRCELKLQKWYGDLRGKPFAIEAENSILDISGFSKQYNCAFIWQKDGVKKLNLYLIINYFKGGKLRFKKIKPEAFEANRFYTVINKKSGEIVPMEVNFNFDDPNLIILPLAFGKRQGREFIWNDLLSLETGSLKLANGRVIEKTLYNRRTRQDEPALFVALTFERREVLDSSNIKPMNLIGVDRGENIPAVIALTDPEGCPLSRFKDSLGNPTHILRIGESYKEKQRTIQAKKEVEQRRAGGYSRKYASKAKNLADDMVRNTARDLLYYAVTQDAMLIFENLSRGFGRQGKRTFMAERQYTRMEDWLTAKLAYEGLPSKVYLSKTLAQYTSKTCSNCGFTITSADYDRVLEKLKKTATGWMTTINGKELKVEGQITYYNRYKRQNVVKDLSVELDRLSEESVNNDISSWTKGRSGEALSLLKKRFSHRPVQEKFVCLNCGFETHADEQAALNIARSWLFLRSQEYKKYQTNKTTGNTDKRAFVETWQSFYRKKLKEVWKPAV

SEQ ID NO: 28774 - protein, 980 aa, synthetic construct
  REGION 1..980: note = engineered CasX variant
QEIKRINKIRRRLVKDSNTKKAGKTGPMKTLLVRVMTPDLRERLENLRKKPENIPQPISNTSRANLNKLLTDYTEMKKAILHVYWEEFQKDPVGLMSRVAQPASKKIDQNKLKPEMDEKGNLTTAGFACSQCGQPLFVYKLEQVSEKGKAYTNYFGRCNVAEHEKLILLAQLKPEKDSDEAVTYSLGKFGQRALDFYSIHVTKESTHPVKPLAQIAGNRYASGPVGKALSDACMGTIASFLSKYQDIIIEHQKVVKGNQKRLESLRELAGKENLEYPSVTLPPQPHTKEGVDAYNEVIARVRMWVNLNLWQKLKLSRDDAKPLLRLKGFPSFPLVERQANEVDWWDMVCNVKKLINEKKEDGKVFWQNLAGYKRQEALRPYLSSEEDRKKGKKFARYQLGDLLLHLEKKHEGEDWGKVYDEAWERIDKKVEGLSKHIKLEEERRSEDAQSKAALTDWLRAKASFVIEGLKEADKDEFCRCELKLQKWYGDLRGKPFAIEAENSILDISGFSKQYNCAFIWQKDGVKKLNLYLIINYFKGGKLRFKKIKPEAFEANRFYTVINKKSGEIVPMEVNFNFDDPNLIILPLAFGKRQGREFIWNDLLSLETGSLKLANGRVIEKTLYNRRTRQDEPALFVALTFERREVLDSSNIKPMNLIGVDRGENIPAVIALTDPEGCPLSRFKDSLGNPTHILRIGESYKEKQRTIQAKKEVEQRRAGGYSRKYASKAKNLADDMVRNTARDLLYYAVTQDAMLIFENLSRGFGRQGKRTFMAERQYTRMEDWLTAKLAYEGPLPSKTYLSKTLAQYTSKTCSNCGFTITSADYDRVLEKLKKTATGWMTTINGKELKVEGQITYYNRYKRQNVVKDLSVELDRLSEESVNNDISSWTKGRSGEALSLLKKRFSHRPVQEKFVCLNCGFETHADEQAALNIARSWLFLRSQEYKKYQTNKTTGNTDKRAFVETWQSFYRKKLKEVWKPAV

SEQ ID NO: 28775 - protein, 980 aa, synthetic construct
  REGION 1..980: note = engineered CasX variant
QEIKRINKIRRRLVKDSNTKKAGKTGPMKTLLVRVMTPDLRERLENLRKKPENIPQPISNTSRANLNKLLTDYTEMKKAILHVYWEEFQKDPVGLMSRVAQPASKKIDQNKLKPEMDEKGNLTTAGFACSQCGQPLFVYKLEQVSEKGKAYTNYFGRCNVAEHEKLILLAQLKPEKDSDEAVTYSLGKFGQRALDFYSIHVTKESTHPVKPLAQIAGNRYASGPVGKALSDACMGTIASFLSKYQDIIIEHQKVVKGNQKRLESLRELAGKENLEYPSVTLPPQPHTKEGVDAYNEVIARVRMWVNLNLWQKLKLSRDDAKPLLRLKGFPSFPLVERQANEVDWWDMVCNVKKLINEKKEDGKVFWQNLAGYKRQEALRPYLSSEEDVRKKGKKFARYQLGDLLLHLEKKHEGEDWGKVYDEAWERIDKKVEGLSKHIKLEEERRSEDAQSKAALTDWLRAKASFVIEGLKEADKDEFCRCELKLQKWYGDLRGKPFAIEAENSILDISGFSKQYNCAFIWQKDGVKKLNLYLIINYFKGGKLRFKKIKPEAFEANRFYTVINKKSGEIVPMEVNFNFDDPNLIILPLAFGKRQGREFIWNDLLSLETGSLKLANGRVIEKTLYNRRTRQDEPALFVALTFERREVLDSSNIKPMNLIGVDRGENIPAVIALTDPEGCPLSRFKDSLGNPTHILRIGESYKEKQRTIQAKKEVEQRRAGGYSRKYASKAKNLADDMVRNTARDLLYYAVTQDAMLIFENLSRGFGRQGKRTFMAERQYTRMEDWLTAKLAYEGLPSKTYLSKTLAQYTSKTCSNCGFTITSADYDRVLEKLKKTATGWMTTINGKELKVEGQITYYNRYKRQNVVKDLSVELDRLSEESVNNDISSWTKGRSGEALSLLKKRFSHRPVQEKFVCLNCGFETHADEQAALNIARSWLFLRSQEYKKYQTNKTTGNTDKRAFVETWQSFYRKKLKEVWKPAV

SEQ ID NO: 28776 - protein, 979 aa, synthetic construct
  REGION 1..979: note = engineered CasX variant
QEIKRINKIRRRLVKDSNTKKAGKTGPMKTLLVRVMTPDLRERLENLRKKPENIPQPISNTSRANLNKLLTDYTEMKKAILHVYWEEFQKDPVGLMSRVAQPASKKIDQNKLKPEMDEKGNLTTAGFACSQCGQPLFVYKLEQVSEKGKAYTNYFGRCNVAEHEKLILLAQLKPEKDSDEAVTYSLGKFGQRALDFYSIHVTKESTHPVKPLAQIAGNRYASGPVGKALSDACMGTIASFLSKYQDIIIEHQKVVKGNQKRLESLRELAGKENLEYPSVTLPPQPHTKEGVDAYNEVIARVRMWVNLNLWQKLKLSRDDAKPLLRLKGFPSFPLVERQANEVDWWDMVCNVKKLINEKKEDGKVFWQNLAGYKRQEALRPYLSSEEDRKKGKKFARYQLGDLLLHLEKKHEGEDWGKVYDEAWERIDKKVEGLSKHIKLEEERRSEDAQSKAALTDWLRAKASFVIEGLKEADKDEFCRCELKLQKWYGDLRGKPFAIEAENSILDISGFSKQYNCAFIWQKDGVKKLNLYLIINYFKGGKLRFKKIKPEAFEANRFYTVINKKSGEIVPMEVNFNFDDPNLIILPLAFGKRQGREFIWNDLLSLETGSLKLANGRVIEKTLYNRRTRQDEPALFVALTFERREVLDSSNIKPMNLIGVDRGENIPAVIALTDPEGCPLSRFKDSLGNPTHILRIGESYKEKQRTIQAKKEVEQRRAGGYSRKYASKAKNLADDMVRNTARDLLYYAVTQDAMLIFENLSRGFGRQGKRTFMAERQYTRMEDWLTAKLAYEGLPSKTYLSKTLAQYTSKTCSNCGFTITSADYDRMLEKLKKTATGWMTTINGKELKVEGQITYYNRYKRQNVVKDLSVELDRLSEESVNNDISSWTKGRSGEALSLLKKRFSHRPVQEKFVCLNCGFETHADEQAALNIARSWLFLRSQEYKKYQTNKTTGNTDKRAFVETWQSFYRKKLKEVWKPAV

SEQ ID NO: 28777 - protein, 979 aa, synthetic construct
  REGION 1..979: note = engineered CasX variant
QEIKRINKIRRRLVKDSNTKKAGKTGPMKTLLVRVMTPDLRERLENLRKKPENIPQPISNTSRANLNKLLTDYTEMKKAILHVYWEEFQKDPVGLMSRVAQPASKKIDQNKLKPEMDEKGNLTTAGFACSQCGQPLFVYKLEQVSEKGKAYTNYFGRCNVAEHEKLILLAQLKPEKDSDEAVTYSLGKFGQRALDFYSIHVTKESTHPVKPLAQIAGNRYASGPVGKALSDACMGTIASFLSKYQDIIIEHQKVVKGNQKRLESLRELAGKENLEYPSVTLPPQPHTKEGVDAYNEVIARVRMWVNLNLWQKLKLSRDDAKPLLRLKGFPSFPLVERQANEVDWWDMVCNVKKLINEKKEDGKVFWQNLAGYKRQEALRPYLSSEEDRKKGKKFARYQLGDLLLHLEKKHEGEDWGKVYDEAWERIDKKVEGLSKHIKLEEERRSEDAQSKAALTDWLRAKASFVIEGLKEADKDEFCRCELKLQKWYGDLRGKPFAIEAENSILDISGFSKQYNCAFIWQKDGVKKLNLYLIINYFKGGKLRFKKIKPEAFEANRFYTVINKKSGEIVPMEVNFNFDDPNLIILPLAFGKRQGREFIWNDLLSLETGSLKLANGRVIEKTLYNRRTRQDEPALFVALTFERREVLDSSNIKPMNLIGVDRGENIPAVIALTDPEGCPLSRFKDSLGNPTHILRIGESYKEKQRTIQAKKEVEQRRAGGYSRKYASKAKNLADDMVRNTARDLLYYAVTQDAMLIFENLSRGFGRQGKRTFMAERQYTRMEDWLTAKLAYEGLPSKTYLSKTLAQYTSKTCSNCGFTITSADYDRVLEKLKKTATGWMTTINGKELKVEGQITYYNRYKRQNVVKDLSVELDRLSEESVNNDISSWTKGRQGEALSLLKKRFSHRPVQEKFVCLNCGFETHADEQAALNIARSWLFLRSQEYKKYQTNKTTGNTDKRAFVETWQSFYRKKLKEVWKPAV

SEQ ID NO: 28778 - protein, 979 aa, synthetic construct
  REGION 1..979: note = engineered CasX variant
QEIKRINKIRRRLVKDSNTKKAGKTGPMKTLLVRVMTPDLRERLENLRKKPENIPQPISNTSRANLNKLLTDYTEMKKAILHVYWEEFQKDPVGLMSRVAQPASKKIDQNKLKPEMDEKGNLTTAGFACSQCGQPLFVYKLEQVSEKGKAYTNYFGRCNVAEHEKLILLAQLKPEKDSDEAVTYSLGKFGQRALDFYSIHVTKESTHPVKPLAQIAGNRYASGPVGKALSDACMGTIASFLSKYQDIIIEHQKVVKGNQKRLESLRELAGKENLEYPSVTLPPQPHTKEGVDAYNEVIARVRMWVNLNLWQKLKLSRDDAKPLLRLKGFPSFPLVERQANEVDWWDMVCNVKKLINEKKEDGKVFWQNLAGYKRQEALRPYLSSEEDRKKGKKFARYQLGDLLLHLEKKHEGEDWGKVYDEAWERIDKKVEGLSKHIKLEEERRSEDAQSKAALTDWLRAKASFVIEGLKEADKDEFCRCELKLQKWYGDLRGKPFAIEAENSILDISGFSKQYNCAFIWQKDGVKKLNLYLIINYFKGGKLRFKKIKPEAFEANRFYTVINKKSGEIVPMEVNFNFDDPNLIILPLAFGKRQGREFIWNDLLSLETGSLKLANGRVIEKTLYNRRTRQDEPALFVALTFERREVLDSSNIKPMNLIGVDRGENIPAVIALTDPEGCPLSRFKDSLGNPTHILRIGESYKEKQRTIQAKKEVEQRRAGGYSRKYASKAKNLADDMVRNTARDLLYYAVTQDAMLIFENLSRGFGRQGKRTFMAERQYTRMEDWLTAKLAYEGLPSKTYLSKTLAQYTSKTCSNCGFTITSADYDRVLEKLKKTATGWMTTINGKELKVEGQITYYNRYKRQNVVKDLSVELDRLSEESVNNDISSWTKGRSGEALSLLKKRFSHRPVQEKFVCLNCEFETHADEQAALNIARSWLFLRSQEYKKYQTNKTTGNTDKRAFVETWQSFYRKKLKEVWKPAV

SEQ ID NO: 28779 - protein, 980 aa, synthetic construct
  REGION 1..980: note = engineered CasX variant
QEIKRINKIRRRLVKDSNTKKAGKTGPMKTLLVRVMTPDLRERLENLRKKPENIPQPISNTSRANLNKLLTDYTEMKKAILHVYWEEFQKDPVGLMSRVAQPASKKIDQNKLKPEMDEKGNLTTAGFACSQCGQPLFVYKLEQVSEKGKAYTNYFGRCNVAEHEKLILLAQLKPEKDSDEAVTYSLGKFGQRALDFYSIHVTKESTHPVKPLAQIAGNRYASGPVGKALSDACMGTIASFLSKYQDIIIEHQKVVKGNQKRLESLRELAGKENLEYPSVTLPPQPHTKEGVDAYNEVIARVRMWVNLNLWQKLKLSRDDAKPLLRLKGFPSFPLVERQANEVDWWDMVCNVKKLINEKKEDGKVFWQNLAGYKRQEALRPYLSSEEDRKKGKKFARYQLGDLLLHLEKKHEGEDWGKVYDEAWERIDKKVEGLSKHIKLEEERRSEDAQSKAALTDWLRAKASFVIEGLKEADKDEFCRCELKLQKWYGDLRGKPFAIEAENSILDISGFSKQYNCAFIWQKDGVKKLNLYLIINYFKGGKLRFKKIKPEAFEANRFYTVINKKSGEIVPMEVNFNFDDPNLIILPLAFGKRQGREFIWNDLLSLETGSLKLANGRVIEKTLYNRRTRQDEPALFVALTFERREVLDSSNIKPMNLIGVDRGENIPAVIALTDPEGCPLSRFKDSLGNPTHILRIGESYKEKQRTIQAKKEVEQRRAGGYSRKYASKAKNLADDMVRNTARDLLYYAVTQDAMLIFENLSRGFGRQGKRTFMAERQYTRMEDWLTAKLAYEGLPSKTYLSKTLAQYTSKTCSNCGFTITSADYDRVLEKLKKTATGWMTTINGKELKVEGQITYYNRYKRQNVVKDLSVELDRLSEESVNNDISSWTKGRSGEALSLLKKRFSHRPVQEKFVCLNCGFETHADEQAALNIARSWLFLRSQEYKKYQTNKTSTGNTDKRAFVETWQSFYRKKLKEVWKPAV

SEQ ID NO: 28780 - protein, 980 aa, synthetic construct
  REGION 1..980: note = engineered CasX variant
QEIKRINKIRRRLVKDSNTKKAGKTGPMKTLLVRVMTPDLRERLENLRKKPENIPQPISNTSRANLNKLLTDYTEMKKAILHVYWEEFQKDPVGLMSRVAQPASKKIDQNKLKPEMDEKGNLTTAGFACSQCGQPLFVYKLEQVSEKGKAYTNYFGRCNVAEHEKLILLAQLKPEKDSDEAVTYSLGKFGQRALDFYSIHVTKESTHPVKPLAQIAGNRYASGPVGKALSDACMGTIASFLSKYQDIIIEHQKVVKGNQKRLESLRELAGKENLEYPSVTLPPQPHTKEGVDAYNEVIARVRMWVNLNLWQKLKLSRDDAKPLLRLKGFPSFPLVERQANEVDWWDMVCNVKKLINEKKEDGKVFWQNLAGYKRQEALRPYLSSEEDRKKGKKFARYQLGDLLLHLEKKHEGEDWGKVYDEAWERIDKKVEGLSKHIKLEEERRSEDAQSKAALTDWLRAKASFVIEGLKEADKDEFCRCELKLQKWYGDLRGKPFAIEAENSILDISGFSKQYNCAFIWQKDGVKKLNLYLIINYFKGGKLRFKKIKPEAFEANRFYTVINKKSGEIVPMEVNFNFDDPNLIILPLAFGKRQGREFIWNDLLSLETGSLKLANGRVIEKTLYNRRTRQDEPALFVALTFERREVLDSSNIKPMNLIGVDRGENIPAVIALTDPEGCPLSRFKDSLGNPTHILRIGESYKEKQRTIQAKKEVEQRRAGGYSRKYASKAKNLADDMVRNTARDLLYYAVTQDAMLIFENLSRGFGRQGKRTFMAERQYTRMEDWLTAKLAYEGLPSKTYLSKTLAQYTSKTCSNCGFTITSADYDRVLEKLKKTATGWMTTINGKELKVEGQITYYNRYKRQNVVKDLSVELDRLSEESVNNDISSWTKGRSGEALSLLKKRFSHRPVQEKFVCLNCGFETHADEQAALNIARSWLFLRSQEYKKYQTNKTTGKNTDKRAFVETWQSFYRKKLKEVWKPAV

SEQ ID NO: 28781 - protein, 979 aa, synthetic construct
  REGION 1..979: note = engineered CasX variant
QEIKRINKIRRRLVKDSNTKKAGKTGPMKTLLVRVMTPDLRERLENLRKKPENIPQPISNTSRANLNKLLTDYTEMKKAILHVYWEEFQKDPVGLMSRVAQPASKKIDQNKLKPEMDEKGNLTTAGFACSQCGQPLFVYKLEQVSEKGKAYTNYFGRCNVAEHEKLILLAQLKPEKDSDEAVTYSLGKFGQRALDFYSIHVTKESTHPVKPLAQIAGNRYASGPVGKALSDACMGTIASFLSKYQDIIIEHQKVVKGNQKRLESLRELAGKENLEYPSVTLPPQPHTKEGVDAYNEVIARVRMWVNLNLWQKLKLSRDDAKPLLRLKKFPSFPLVERQANEVDWWDMVCNVKKLINEKKEDGKVFWQNLAGYKRQEALRPYLSSEEDRKKGKKFARYQLGDLLLHLEKKHEGEDWGKVYDEAWERIDKKVEGLSKHIKLEEERRSEDAQSKAALTDWLRAKASFVIEGLKEADKDEFCRCELKLQKWYGDLRGKPFAIEAENSILDISGFSKQYNCAFIWQKDGVKKLNLYLIINYFKGGKLRFKKIKPEAFEANRFYTVINKKSGEIVPMEVNFNFDDPNLIILPLAFGKRQGREFIWNDLLSLETGSLKLANGRVIEKTLYNRRTRQDEPALFVALTFERREVLDSSNIKPMNLIGVDRGENIPAVIALTDPEGCPLSRFKDSLGNPTHILRIGESYKEKQRTIQAKKEVEQRRAGGYSRKYASKAKNLADDMVRNTARDLLYYAVTQDAMLIFENLSRGFGRQGKRTFMAERQYTRMEDWLTAKLAYEGLPSKTYLSKTLAQYTSKTCSNCGFTITSADYDRVLEKLKKTATGWMTTINGKELKVEGQITYYNRYKRQNVVKDLSVELDRLSEESVNNDISSWTKGRSGEALSLLKKRFSHRPVQEKFVCLNCGFETHADEQAALNIARSWLFLRSQEYKKYQTNKTTGNTDKRAFVETWQSFYRKKLKEVWKPAV

SEQ ID NO: 28782 - protein, 979 aa, synthetic construct
  REGION 1..979: note = engineered CasX variant
QEIKRINKIRRRLVKDSNTKKAGKTGPMKTLLVRVMTPDLRERLENLRKKPENIPQPISNTSRANLNKLLTDYTEMKKAILHVYWEEFQKDPVGLMSRVAQPASKKIDQNKLKPEMDEKGNLTTAGFACSQCGQPLFVYKLEQVSEKGKAYTNYFGRCNVAEHEKLILLAQLKPEKDSDEAVTYSLGKFGQRALDFYSIHVTKESTHPVKPLAQIAGNRYASGPVGKALSDACMGTIASFLSKYQDIIIEHQKVVKGNQKRLESLRELAGKENLEYPSVTLPPQPHTKEGVDAYNEVIARVRMWVNLNLWQKLKLSRDDAKPLLRLKGFPSFPLVERQANEVDWWDMVCNVKKLINEKKEDGKVFWQNLAGYKRQEALRPYLSSEEDRKKGKKFARYQLGDLLLHLEKKHEGEDWGKVYDEAWERIDKKVEGLSKHIKLEEERRSEDAQSKAALTDWLRAKASFVIEGLKEADKDEFCRCELKLQKWYGDLRGKPFAIEAENSILDISGFSKQYNCAFIWQKDGVKKLNLYLIINYFKGGKLRFKKIKPEAFEANRFYTVINKKSGEIVPMEVNFNFDDPNLIILPLAFGKRQGREFIWNDLLSLETGSLKLANGRVIEKTLYNRRTRQDEPALFVALTFERREVLDSSNIKPMNLIGVDRGENIPAVIALTDPEGCPLSRFKDSLGNPTHILRIGERYKEKQRTIQAKKEVEQRRAGGYSRKYASKAKNLADDMVRNTARDLLYYAVTQDAMLIFENLSRGFGRQGKRTFMAERQYTRMEDWLTAKLAYEGLPSKTYLSKTLAQYTSKTCSNCGFTITSADYDRVLEKLKKTATGWMTTINGKELKVEGQITYYNRYKRQNVVKDLSVELDRLSEESVNNDISSWTKGRSGEALSLLKKRFSHRPVQEKFVCLNCGFETHADEQAALNIARSWLFLRSQEYKKYQTNKTTGNTDKRAFVETWQSFYRKKLKEVWKPAV

SEQ ID NO: 28783 - protein, 979 aa, synthetic construct
  REGION 1..979: note = engineered CasX variant
QEIKRINKIRRRLVKDSNTKKAGKTGPMKTLLVRVMTPDLRERLENLRKKPENIPQPISNTSRANLNKLLTDYTEMKKAILHVYWEEFQKDPVGLMSRVAQPASKKIDQNKLKPEMDEKGNLTTAGFACSQCGQPLFVYKLEQVSEKGKAYTNYFGRCNVAEHEKLILLAQLKPEKDSDEAVTYSLGKFGQRALDFYSIHVTKESTHPVKPLAQIAGNRYASGPVGKALSDACMGTIASFLSKYQDIIIEHQKVVKGNQKRLESLRELAGKENLEYPSVTLPPQPHTKEGVDAYNEVIARVRMWVNLNLWQKLKLSRDDAKPLLRLKGFPSFPLVERQANEVDWWDMVCNVKKLINEKKEDGKVFWQNLAGYKRQEALRPYLSSEEDRKKGKKFARYQLGDLLLHLEKKHEGEDWGKVYDEAWERIDKKVEGLSKHIKLEEERRSEDAQSKAALTDWLRAKASFVIEGLKEADKDEFCRCELKLQKWYGDLRGKPFAIEAENSILDISGFSKQYNCAFIWQKDGVKKLNLYLIINYFKGGKLRFKKIKPEAFEANRFYTVINKKSGEIVPMEVNFNFDDPNLIILPLAFGKRQGREFIWNDLLSLETGSLQLANGRVIEKTLYNRRTRQDEPALFVALTFERREVLDSSNIKPMNLIGVDRGENIPAVIALTDPEGCPLSRFKDSLGNPTHILRIGESYKEKQRTIQAKKEVEQRRAGGYSRKYASKAKNLADDMVRNTARDLLYYAVTQDAMLIFENLSRGFGRQGKRTFMAERQYTRMEDWLTAKLAYEGLPSKTYLSKTLAQYTSKTCSNCGFTITSADYDRVLEKLKKTATGWMTTINGKELKVEGQITYYNRYKRQNVVKDLSVELDRLSEESVNNDISSWTKGRSGEALSLLKKRFSHRPVQEKFVCLNCGFETHADEQAALNIARSWLFLRSQEYKKYQTNKTTGNTDKRAFVETWQSFYRKKLKEVWKPAV

SEQ ID NO: 28784 - protein, 978 aa, synthetic construct
  REGION 1..978: note = engineered CasX variant
QEIKRINKIRRRLVKDSNTKKAGKTGPMKTLLVRVMTPDLRERLENLRKKPENIPQPISNTSRANLNKLLTDYTEMKKAILHVYWEEFQKDPVGLMSRVAQPASKKIDQNKLKPEMDEKGNLTTAGFACSQCGQPLFVYKLEQVSEKGKAYTNYFGRCNVAEHEKLILLAQLKPEKDSDEAVTYSLGKFGQRALDFYSIHVTKESTHPVKPLAQIAGNRYASGPVGKALSDACMGTIASFLSKYQDIIIEHQKVVKGNQKRLESLRELAGKENLEYPSVTLPPQPHTKEGVDAYNEVIARVRMWVNLNLWQKLKLSRDDAKPLLRLKGFPSFPLVERQANEVDWWDMVCNVKKLINEKKEDGKVFWQNLAGYKRQEALRPYLSSEEDRKKGKKFARYQLGDLLLHLEKKHGEDWGKVYDEAWERIDKKVEGLSKHIKLEEERRSEDAQSKAALTDWLRAKASFVIEGLKEADKDEFCRCDLKLQKWYGDLRGKPFAIEAENSILDISGFSKQYNCAFIWQKDGVKKLNLYLIINYFKGGKLRFKKIKPEAFEANRFYTVINKKSGEIVPMEVNFNFDDPNLIILPLAFGKRFGREFIWNDLLSLETGSLKLANGRVIEKTLYNRRTRQDEPALFVALTFERREVLDSSNIKPMNLIGVDRGENIPAVIALTDPEGCPLSRFKDSLGNPTHILRIGESYKEKQRTIQAKKEVEQRRAGGYSRKYASKAKNLADDMVRNTARDLLYYAVTQDAMLIFENLSRGFGRQGKRTFMAERQYTRMEDWLTAKLAYEGLPSKTYLSKTLAQYTSKTCSNCGFTITSADYDRVLEKLKKTATGWMTTINGKELKVEGQITYYNRYKRQNVVKDLSVELDRLSEESVNNDISSWTKGRSGEALSLLKKRFSHRPVQEKFVCLNCGFETHADEQAALNIARSWLFLRSQEYKKYQTNKTTGNTDKRAFVETWQSFYRKKLKEVWKPAV

SEQ ID NO: 28785 - protein, 978 aa, synthetic construct
  REGION 1..978: note = engineered CasX variant
QEIKRINKIRRRLVKDSNTKKAGKTGPMKTLLVRVMTPDLRERLENLRKKPENIPQPISNTSRANLNKLLTDYTEMKKAILHVYWEEFQKDPVGLMSRVAQPASKKIDQNKLKPEMDEKGNLTTAGFACSQCGQPLFVYKLEQVSEKGKAYTNYFGRCNVAEHEKLILLAQLKPEKDSDEAVTYSLGKFGQRALDFYSIHVTKESTHPVKPLAQIAGNRYASGPVGKALSDACMGTIASFLSKYQDIIIEHQKVVKGNQKRLESLRELAGKENLEYPSVTLPPQPHTKEGVDAYNEVIARVRMWVNLNLWQKLKLSRDDAKPLLRLKGFPSFPLVERQANEVDWWDMVCNVKKLINEKKEDGKVFWQNLAGYKRQEALRPYLSSEEDRKKGKKFARYQLGDLLLHLEKKHGEDWGKVYDEAWERIDKKVEGLSKHIKLEEERRSEDAQSKAALTDWLRAKASFVIEGLKEADKDEFCRCDLKLQKWYGDLRGKPFAIEAENSILDISGFSKQYNCAFIWQKDGVKKLNLYLIINYFKGGKLRFKKIKPEAFEANRFYTVINKKSGEIVPMEVNFNFDDPNLIILPLAFGKRVGREFIWNDLLSLETGSLKLANGRVIEKTLYNRRTRQDEPALFVALTFERREVLDSSNIKPMNLIGVDRGENIPAVIALTDPEGCPLSRFKDSLGNPTHILRIGESYKEKQRTIQAKKEVEQRRAGGYSRKYASKAKNLADDMVRNTARDLLYYAVTQDAMLIFENLSRGFGRQGKRTFMAERQYTRMEDWLTAKLAYEGLPSKTYLSKTLAQYTSKTCSNCGFTITSADYDRVLEKLKKTATGWMTTINGKELKVEGQITYYNRYKRQNVVKDLSVELDRLSEESVNNDISSWTKGRSGEALSLLKKRFSHRPVQEKFVCLNCGFETHADEQAALNIARSWLFLRSQEYKKYQTNKTTGNTDKRAFVETWQSFYRKKLKEVWKPAV

SEQ ID NO: 28786 - protein, 979 aa, synthetic construct
  REGION 1..979: note = engineered CasX variant
QEIKRINKIRRRLVKDSNTKKAGKTGPMKTLLVRVMTPDLRERLENLRKKPENIPQPISNTSRANLNKLLTDYTEMKKAILHVYWEEFQKDPVGLMSRVAQPASKKIDQNKLKPEMDEKGNLTTAGFACSQCGQPLFVYKLEQVSEKGKAYTNYFGRCNVAEHEKLILLAQLKPEKDSDEAVTYSLGKFGQRALDFYSIHVTKESTHPVKPLAQIAGNRYASGPVGKALSDACMGTIASFLSKYQDIIIEHQKVVKGNQKRLESLRELAGKENLEYPSVTLPPQPHTKEGVDAYNEVIARVRMWVNLNLWQKLKLSRDDAKPLLRLKGFPSFPLVERQANEVDWWDMVCNVKKLINEKKEDGKVFWQNLAGYKRQEALRPYLSSEEDRKKGKKFARYQLGDLLLHLEKKHGEDWGKVYDEAWERIDKKVEGLSKHIKLEEERRSEDAQSKAALTDWLRAKASFVIEGLKEADKDEFCRCDLKLQKWYGDLRGKPFAIEAENSILDISGFSKQYNCAFIWQKDGVKKLNLYLIINYFKGGKLRFKKIKPEAFEANRFYTVINKKSGEIVPMEVNFNFDDPNLIILPLAFGKRQGREFIWNDLLSLETGSLKLANGRVIEKTLYNRRTRQDEPALFVALTFERREVLDSSNIKTPMNLIGVDRGENIPAVIALTDPEGCPLSRFKDSLGNPTHILRIGESYKEKQRTIQAKKEVEQRRAGGYSRKYASKAKNLADDMVRNTARDLLYYAVTQDAMLIFENLSRGFGRQGKRTFMAERQYTRMEDWLTAKLAYEGLPSKTYLSKTLAQYTSKTCSNCGFTITSADYDRVLEKLKKTATGWMTTINGKELKVEGQITYYNRYKRQNVVKDLSVELDRLSEESVNNDISSWTKGRSGEALSLLKKRFSHRPVQEKFVCLNCGFETHADEQAALNIARSWLFLRSQEYKKYQTNKTTGNTDKRAFVETWQSFYRKKLKEVWKPAV

SEQ ID NO: 28787 - protein, 979 aa, synthetic construct
  REGION 1..979: note = engineered CasX variant
QEIKRINKIRRRLVKDSNTKKAGKTGPMKTLLVRVMTPDLRERLENLRKKPENIPQPISNTSRANLNKLLTDYTEMKKAILHVYWEEFQKDPVGLMSRVAQPASKKIDQNKLKPEMDEKGNLTTAGFACSQCGQPLFVYKLEQVSEKGKAYTNYFGRCNVAEHEKLILLAQLKPEKDSDEAVTYSLGKFGQRALDFYSIHVTKESTHPVKPLAQIAGNRYASGPVGKALSDACMGTIASFLSKYQDIIIEHQKVVKGNQKRLESLRELAGKENLEYPSVTLPPQPHTKEGVDAYNEVIARVRMWVNLNLWQKLKLSRDDAKPLLRLKGFPSFPLVERQANEVDWWDMVCNVKKLINEKKEDGKVFWQNLAGYKRQEALRPYLSSEEDRKKGKKFARYQLGDLLLHLEKKHGEDWGKVYDEAWERIDKKVEGLSKHIKLEEERRSEDAQSKAALTDWLRAKASFVIEGLKEADKDEFCRCDLKLQKWYGDLRGKPFAIEAENSILDISGFSKQYNCAFIWQKDGVKKLNLYLIINYFKGGKLRFKKIKPEAFEANRFYTVINKKSGEIVPMEVNFNFDDPNLIILPLAFGKRQGREFIWNDLLSLETGSLKLANGRVIEKTLYNRRTRQDEPALFVALTFERREVLDSSNIKPMSNLIGVDRGENIPAVIALTDPEGCPLSRFKDSLGNPTHILRIGESYKEKQRTIQAKKEVEQRRAGGYSRKYASKAKNLADDMVRNTARDLLYYAVTQDAMLIFENLSRGFGRQGKRTFMAERQYTRMEDWLTAKLAYEGLPSKTYLSKTLAQYTSKTCSNCGFTITSADYDRVLEKLKKTATGWMTTINGKELKVEGQITYYNRYKRQNVVKDLSVELDRLSEESVNNDISSWTKGRSGEALSLLKKRFSHRPVQEKFVCLNCGFETHADEQAALNIARSWLFLRSQEYKKYQTNKTTGNTDKRAFVETWQSFYRKKLKEVWKPAV

SEQ ID NO: 28788 - protein, 978 aa, synthetic construct
  REGION 1..978: note = engineered CasX variant
QEIKRINKIRRRLVKDSNTKKAGKTGPMKTLLVRVMTPDLRERLENLRKKPENIPQPISNTSRANLNKLLTDYTEMKKAILHVYWEEFQKDPVGLMSRVAQPASKKIDQNKLKPEMDEKGNLTTAGFACSQCGQPLFVYKLEQVSEKGKAYTNYFGRCNVAEHEKLILLAQLKPEKDSDEAVTYSLGKFGQRALDFYSIHVTKESTHPVKPLAQIAGNRYASGPVGKALSDACMGTIASFLSKYQDIIIEHQKVVKGNQKRLESLRELAGKENLEYPSVTLPPQPHTKEGVDAYNEVIARVRMWVNLNLWQKLKLSRDDAKPLLRLKGFPSFPLVERQANEVDWWDMVCNVKKLINEKKEDGKVFWQNLAGYKRQEALRPYLSSEEDRKKGKKFARYQLGDLLLHLEKKHGEDWGKVYDEAWERIDKKVEGLSKHIKLEEERRSEDAQSKAALTDWLRAKASFVIEGLKEADKDEFCRCDLKLQKWYGDLRGKPFAIEAENSILDISGFSKQYNCAFIWQKDGVKKLNLYLIINYFKGGKLRFKKIKPEAFEANRFYTVINKKSGEIVPMEVNFNFDDPNLIILPLAFGKRQGREFIWNDLLSLETGSLKLANGRVIEKTLYNRRTRQDEPALFVALTFERREVLDSSNIKPMNLIGVDRGENIPAVIALTDPEGCPLSRFKDSLGNPTHILRIRESYKEKQRTIQAKKEVEQRRAGGYSRKYASKAKNLADDMVRNTARDLLYYAVTQDAMLIFENLSRGFGRQGKRTFMAERQYTRMEDWLTAKLAYEGLPSKTYLSKTLAQYTSKTCSNCGFTITSADYDRVLEKLKKTATGWMTTINGKELKVEGQITYYNRYKRQNVVKDLSVELDRLSEESVNNDISSWTKGRSGEALSLLKKRFSHRPVQEKFVCLNCGFETHADEQAALNIARSWLFLRSQEYKKYQTNKTTGNTDKRAFVETWQSFYRKKLKEVWKPAV

SEQ ID NO: 28789 - protein, 978 aa, synthetic construct
  REGION 1..978: note = engineered CasX variant
QEIKRINKIRRRLVKDSNTKKAGKTGPMKTLLVRVMTPDLRERLENLRKKPENIPQPISNTSRANLNKLLTDYTEMKKAILHVYWEEFQKDPVGLMSRVAQPASKKIDQNKLKPEMDEKGNLTTAGFACSQCGQPLFVYKLEQVSEKGKAYTNYFGRCNVAEHEKLILLAQLKPEKDSDEAVTYSLGKFGQRALDFYSIHVTKESTHPVKPLAQIAGNRYASGPVGKALSDACMGTIASFLSKYQDIIIEHQKVVKGNQKRLESLRELAGKENLEYPSVTLPPQPHTKEGVDAYNEVIARVRMWVNLNLWQKLKLSRDDAKPLLRLKGFPSFPLVERQANEVDWWDMVCNVKKLINEKKEDGKVFWQNLAGYKRQEALRPYLSSEEDRKKGKKFARYQLGDLLLHLEKKHGEDWGKVYDEAWERIDKKVEGLSKHIKLEEERRSEDAQSKAALTDWLRAKASFVIEGLKEADKDEFCRCDLKLQKWYGDLRGKPFAIEAENSILDISGFSKQYNCAFIWQKDGVKKLNLYLIINYFKGGKLRFKKIKPEAFEANRFYTVINKKSGEIVPMEVNFNFDDPNLIILPLAFGKRQGREFIWNDLLSLETGSLKLANGRVIEKTLYNRRTRQDEPALFVALTFERREVLDSSNIKPMNLIGVDRGENIPAVIALTDPEGCPLSRFKDSLGNPTHILRIGESYKEKQRTIQAKKEVEQRRAGGYSRKYASKAKNLADDMVRNTARDLLYYAVTQDAMLIFENLSRGFGRQGKRTFSAERQYTRMEDWLTAKLAYEGLPSKTYLSKTLAQYTSKTCSNCGFTITSADYDRVLEKLKKTATGWMTTINGKELKVEGQITYYNRYKRQNVVKDLSVELDRLSEESVNNDISSWTKGRSGEALSLLKKRFSHRPVQEKFVCLNCGFETHADEQAALNIARSWLFLRSQEYKKYQTNKTTGNTDKRAFVETWQSFYRKKLKEVWKPAV

SEQ ID NO: 28790 - protein, 978 aa, synthetic construct
  REGION 1..978: note = engineered CasX variant
QEIKRINKIRRRLVKDSNTKKAGKTGPMKTLLVRVMTPDLRERLENLRKKPENIPQPISNTSRANLNKLLTDYTEMKKAILHVYWEEFQKDPVGLMSRVAQPASKKIDQNKLKPEMDEKGNLTTAGFACSQCGQPLFVYKLEQVSEKGKAYTNYFGRCNVAEHEKLILLAQLKPEKDSDEAVTYSLGKFGQRALDFYSIHVTKESTHPVKPLAQIAGNRYASGPVGKALSDACMGTIASFLSKYQDIIIEHQKVVKGNQKRLESLRELAGKENLEYPSVTLPPQPHTKEGVDAYNEVIARVRMWVNLNLWQKLKLSRDDAKPLLRLKGFPSFPLVERQANEVDWWDMVCNVKKLINEKKEDGKVFWQNLAGYKRQEALRPYLSSEEDRKKGKKFARYQLGDLLLHLEKKHGEDWGKVYDEAWERIDKKVEGLSKHIKLEEERRSEDAQSKAALTDWLRAKASFVIEGLKEADKDEFCRCDLKLQKWYGDLRGKPFAIEAENSILDISGFSKQYNCAFIWQKDGVKKLNLYLIINYFKGGKLRFKKIKPEAFEANRFYTVINKKSGEIVPMEVNFNFDDPNLIILPLAFGKRQGREFIWNDLLSLETGSLKLANGRVIEKTLYNRRTRQDEPALFVALTFERREVLDSSNIKPMNLIGVDRGENIPAVIALTDPEGCPLSRFKDSLGNPTHILRIGESYKEKQRTIQAKKEVEQRRAGGYSRKYASKAKNLADDMVRNTARDLLYYAVTQDAMLIFENLSRGFGRQGKRTFMAERQYTRMEDWLTAKLAYEGLPSKTYLSKTLAQYTSKTCSNCGFTITSADYDRVLEKLKKTATGWMTTINGKELKVEGQITYYNRYKRQNVVKDLSVELDRLSEESVNNDISSWDKGRSGEALSLLKKRFSHRPVQEKFVCLNCGFETHADEQAALNIARSWLFLRSQEYKKYQTNKTTGNTDKRAFVETWQSFYRKKLKEVWKPAV

SEQ ID NO: 28791 - protein, 978 aa, synthetic construct
  REGION 1..978: note = engineered CasX variant
QEIKRINKIRRRLVKDSNTKKAGKTGPMKTLLVRVMTPDLRERLENLRKKPENIPQPISNTSRANLNKLLTDYTEMKKAILHVYWEEFQVDPVGLMSRVAQPASKKIDQNKLKPEMDEKGNLTTAGFACSQCGQPLFVYKLEQVSEKGKAYTNYFGRCNVAEHEKLILLAQLKPEKDSDEAVTYSLGKFGQRALDFYSIHVTKESTHPVKPLAQIAGNRYASGPVGKALSDACMGTIASFLSKYQDIIIEHQKVVKGNQKRLESLRELAGKENLEYPSVTLPPQPHTKEGVDAYNEVIARVRMWVNLNLWQKLKLSRDDAKPLLRLKGFPSFPLVERQANEVDWWDMVCNVKKLINEKKEDGKVFWQNLAGYKRQEALRPYLSSEEDRKKGKKFARYQLGDLLLHLEKKHGEDWGKVYDEAWERIDKKVEGLSKHIKLEEERRSEDAQSKAALTDWLRAKASFVIEGLKEADKDEFCRCDLKLQKWYGDLRGKPFAIEAENSILDISGFSKQYNCAFIWQKDGVKKLNLYLIINYFKGGKLRFKKIKPEAFEANRFYTVINKKSGEIVPMEVNFNFDDPNLIILPLAFGKRQGREFIWNDLLSLETGSLKLANGRVIEKTLYNRRTRQDEPALFVALTFERREVLDSSNIKPMNLIGVDRGENIPAVIALTDPEGCPLSRFKDSLGNPTHILRIGESYKEKQRTIQAKKEVEQRRAGGYSRKYASKAKNLADDMVRNTARDLLYYAVTQDAMLIFENLSRGFGRQGKRTFMAERQYTRMEDWLTAKLAYEGLPSKTYLSKTLAQYTSKTCSNCGFTITSADYDRVLEKLKKTATGWMTTINGKELKVEGQITYYNRYKRQNVVKDLSVELDRLSEESVNNDISSWTKGRSGEALSLLKKRFSHRPVQEKFVCLNCGFETHADEQAALNIARSWLFLRSQEYKKYQTNKTTGNTDKRAFVETWQSFYRKKLKEVWKPAV

SEQ ID NO: 28792 - protein, 978 aa, synthetic construct
  REGION 1..978: note = engineered CasX variant
QEIKRLNKIRRRLVKDSNTKKAGKTGPMKTLLVRVMTPDLRERLENLRKKPENIPQPISNTSRANLNKLLTDYTEMKKAILHVYWEEFQKDPVGLMSRVAQPASKKIDQNKLKPEMDEKGNLTTAGFACSQCGQPLFVYKLEQVSEKGKAYTNYFGRCNVAEHEKLILLAQLKPEKDSDEAVTYSLGKFGQRALDFYSIHVTKESTHPVKPLAQIAGNRYASGPVGKALSDACMGTIASFLSKYQDIIIEHQKVVKGNQKRLESLRELAGKENLEYPSVTLPPQPHTKEGVDAYNEVIARVRMWVNLNLWQKLKLSRDDAKPLLRLKGFPSFPLVERQANEVDWWDMVCNVKKLINEKKEDGKVFWQNLAGYKRQEALRPYLSSEEDRKKGKKFARYQLGDLLLHLEKKHGEDWGKVYDEAWERIDKKVEGLSKHIKLEEERRSEDAQSKAALTDWLRAKASFVIEGLKEADKDEFCRCDLKLQKWYGDLRGKPFAIEAENSILDISGFSKQYNCAFIWQKDGVKKLNLYLIINYFKGGKLRFKKIKPEAFEANRFYTVINKKSGEIVPMEVNFNFDDPNLIILPLAFGKRQGREFIWNDLLSLETGSLKLANGRVIEKTLYNRRTRQDEPALFVALTFERREVLDSSNIKPMNLIGVDRGENIPAVIALTDPEGCPLSRFKDSLGNPTHILRIGESYKEKQRTIQAKKEVEQRRAGGYSRKYASKAKNLADDMVRNTARDLLYYAVTQDAMLIFENLSRGFGRQGKRTFMAERQYTRMEDWLTAKLAYEGLPSKTYLSKTLAQYTSKTCSNCGFTITSADYDRVLEKLKKTATGWMTTINGKELKVEGQITYYNRYKRQNVVKDLSVELDRLSEESVNNDISSWTKGRSGEALSLLKKRFSHRPVQEKFVCLNCGFETHADEQAALNIARSWLFLRSQEYKKYQTNKTTGNTDKRAFVETWQSFYRKKLKEVWKPAV

SEQ ID NO: 28793 - protein, 978 aa, synthetic construct
  REGION 1..978: note = engineered CasX variant
QEIKRINKIRRRLVKDSNTKKAGKTGPMKTLLVRVMTPDLRERLENLRKKPENIPQPISNTSRANLNKLLTDYTEMKKAILHVYWEEFQKDPVGLMSRVAQPASKKIDQNKLKPEMDEKGNLTTAGFACSQCGQPLFVYKLEQVSEKGKAYTNYVGRCNVAEHEKLILLAQLKPEKDSDEAVTYSLGKFGQRALDFYSIHVTKESTHPVKPLAQIAGNRYASGPVGKALSDACMGTIASFLSKYQDIIIEHQKVVKGNQKRLESLRELAGKENLEYPSVTLPPQPHTKEGVDAYNEVIARVRMWVNLNLWQKLKLSRDDAKPLLRLKGFPSFPLVERQANEVDWWDMVCNVKKLINEKKEDGKVFWQNLAGYKRQEALRPYLSSEEDRKKGKKFARYQLGDLLLHLEKKHGEDWGKVYDEAWERIDKKVEGLSKHIKLEEERRSEDAQSKAALTDWLRAKASFVIEGLKEADKDEFCRCDLKLQKWYGDLRGKPFAIEAENSILDISGFSKQYNCAFIWQKDGVKKLNLYLIINYFKGGKLRFKKIKPEAFEANRFYTVINKKSGEIVPMEVNFNFDDPNLIILPLAFGKRQGREFIWNDLLSLETGSLKLANGRVIEKTLYNRRTRQDEPALFVALTFERREVLDSSNIKPMNLIGVDRGENIPAVIALTDPEGCPLSRFKDSLGNPTHILRIGESYKEKQRTIQAKKEVEQRRAGGYSRKYASKAKNLADDMVRNTARDLLYYAVTQDAMLIFENLSRGFGRQGKRTFMAERQYTRMEDWLTAKLAYEGLPSKTYLSKTLAQYTSKTCSNCGFTITSADYDRVLEKLKKTATGWMTTINGKELKVEGQITYYNRYKRQNVVKDLSVELDRLSEESVNNDISSWTKGRSGEALSLLKKRFSHRPVQEKFVCLNCGFETHADEQAALNIARSWLFLRSQEYKKYQTNKTTGNTDKRAFVETWQSFYRKKLKEVWKPAV

SEQ ID NO: 28794 - protein, 978 aa, synthetic construct
  REGION 1..978: note = engineered CasX variant
QEIKRINKIRRRLVKDSNTKKAGKTGPMKTLLVRVMTPDLRERLENLRKKPENIPQPISNTSRANLNKLLTDYTEMKKAILHVYWEEFQKDPVGLMSRVAQPASKKIDQNKLKPEMDEKGNLTTAGFACSQCGQPLFVYKLEQVSEKGKAYTNYFGRCNVAEHEKLILLAQLKPEKDSDEAVTYSLGKFGQRALDFYSIHVTKESTHPVKPLAQIAGNRYASGPVGKALSDACMGTIASFLSKYQDIIIEHQKVVKGNQKRLESLRELAGKENLEYPSVTLPPQPHTKEGVDAYNEVIARVRMWVNLNLWQKLKLSRDDAKPLLRLKGFPSFPLVERQANEVDWWDMVCNVKKLINEKKEDGKVFWQNLAGYKRQEALRPYLSSEEDRKKGKKFARYQLGDLLLHLEKKHGEDWGKVYDEAWERIDKKVEGLSKHIKLEEERRSEDAQSKAALTDWLRAKASFVIEGLKEADKDEFCRCDLKLQKWYGDLRGKPFAIEAENSILDISGFSKQYNCAFIWQKDGVKKLNLYLIINYFKGGKLRFKKIKPEAFEANRFYTVINKKSGEIVPMEVNFNFDDPNLIILPLAFGKRQGREFIWNDLLSLETGSLKLANGRVIEKTLYNRRTRQDEPALFVALTFERREVLDSSNIKPMNLIGVDRGENIPAVIALTDPEGCPLSRFKDSLGNPTHILRIGESYKEKQRTIQAKKEVEQRRAGGYSRKYASKAKNLADDMVRNTARDLLYYAVTQDAMLIFENLSRGFGRQGKRTFMAERQYTRMEDWLTAKLAYEGLASKTYLSKTLAQYTSKTCSNCGFTITSADYDRVLEKLKKTATGWMTTINGKELKVEGQITYYNRYKRQNVVKDLSVELDRLSEESVNNDISSWTKGRSGEALSLLKKRFSHRPVQEKFVCLNCGFETHADEQAALNIARSWLFLRSQEYKKYQTNKTTGNTDKRAFVETWQSFYRKKLKEVWKPAV

SEQ ID NO: 28795 - protein, 978 aa, synthetic construct
  REGION 1..978: note = engineered CasX variant
QEIKRINKIRRRLVKDSNTKKAGKTGPMKTLLVRVMTPDLRERLENLRKKPENIPQPISNTSRANLNKLLTDYTEMKKAILHVYWEEFQKDPVGLMSRVAQPASKKIDQNKLKPEMDEKGNLTTAGFACSQCGQPLFVYKLEQVSEKGKAYTNYFGRCNVAEHEKLILLAQLKPEKDSDEAVTYSLGKFGQRALDFYSIHVTKESTHPVKPLAQIAGNRYASGPVGKALSDACMGTIASFLSKYQDIIIEHQKVVKGNQKRLESLRELAGKENLEYPSVTLPPQPHTKEGVDAYNEVIARVRMWVNLNLWQKLKLSRDDAKPLLRLKGFPSFPLVERQANEVDWWDMVCNVKKLINEKKEDGKVFWQNLAGYKRQEALRPYLSSEEDRKKGKKFARYQLGDLLLHLEKKHGEDWGKVYDEAWERIDKKVEGLSKHIKLEEERRSEDAQSKAALTDWLRAKASFVIEGLKEADKDEFCRCDLKLQKWYGDLRGKPFAIEAENSILDISGFSKQYNCAFIWQKDGVKKLNLYLIINYFKGGKLRFKKIKPEAFEANRFYTVINKKSGEIVPMEVNFNFDDPNLIILPLAFGKRQGREFIWNDLLSLETGSLKLANGRVIEKTLYNRRTRQDEPALFVALTFERREVLDSSNIKPMNLIGVDRGENIPAVIALTDPEGCPLSRFKDSLGNPTHILRIGESYKEKQRTIQAKKEVEQRRAGGYSRKYASKAKNLADDMVRNTARDLLYYAVTQDAMLIFENLSRGFGRQGKRTFMAERQYTRMEDWLTAKLAYEGLPSKVYLSKTLAQYTSKTCSNCGFTITSADYDRVLEKLKKTATGWMTTINGKELKVEGQITYYNRYKRQNVVKDLSVELDRLSEESVNNDISSWTKGRSGEALSLLKKRFSHRPVQEKFVCLNCGFETHADEQAALNIARSWLFLRSQEYKKYQTNKTTGNTDKRAFVETWQSFYRKKLKEVWKPAV

SEQ ID NO: 28796 - protein, 979 aa, synthetic construct
  REGION 1..979: note = engineered CasX variant
QEIKRINKIRRRLVKDSNTKKAGKTGPMKTLLVRVMTPDLRERLENLRKKPENIPQPISNTSRANLNKLLTDYTEMKKAILHVYWEEFQKDPVGLMSRVAQPASKKIDQNKLKPEMDEKGNLTTAGFACSQCGQPLFVYKLEQVSEKGKAYTNYFGRCNVAEHEKLILLAQLKPEKDSDEAVTYSLGKFGQRALDFYSIHVTKESTHPVKPLAQIAGNRYASGPVGKALSDACMGTIASFLSKYQDIIIEHQKVVKGNQKRLESLRELAGKENLEYPSVTLPPQPHTKEGVDAYNEVIARVRMWVNLNLWQKLKLSRDDAKPLLRLKGFPSFPLVERQANEVDWWDMVCNVKKLINEKKEDGKVFWQNLAGYKRQEALRPYLSSEEDRKKGKKFARYQLGDLLLHLEKKHGEDWGKVYDEAWERIDKKVEGLSKHIKLEEERRSEDAQSKAALTDWLRAKASFVIEGLKEADKDEFCRCDLKLQKWYGDLRGKPFAIEAENSILDISGFSKQYNCAFIWQKDGVKKLNLYLIINYFKGGKLRFKKIKPEAFEANRFYTVINKKSGEIVPMEVNFNFDDPNLIILPLAFGKRQGREFIWNDLLSLETGSLKLANGRVIEKTLYNRRTRQDEPALFVALTFERREVLDSSNIKPMNLIGVDRGENIPAVIALTDPEGCPLSRFKDSLGNPTHILRIGESYKEKQRTIQAKKEVEQRRAGGYSRKYASKAKNLADDMVRNTARDLLYYAVTQDAMLIFENLSRGFGRQGKRTFMAERQYTRMEDWLTAKLAYEGPLPSKTYLSKTLAQYTSKTCSNCGFTITSADYDRVLEKLKKTATGWMTTINGKELKVEGQITYYNRYKRQNVVKDLSVELDRLSEESVNNDISSWTKGRSGEALSLLKKRFSHRPVQEKFVCLNCGFETHADEQAALNIARSWLFLRSQEYKKYQTNKTTGNTDKRAFVETWQSFYRKKLKEVWKPAV

SEQ ID NO: 28797 - protein, 979 aa, synthetic construct
  REGION 1..979: note = engineered CasX variant
QEIKRINKIRRRLVKDSNTKKAGKTGPMKTLLVRVMTPDLRERLENLRKKPENIPQPISNTSRANLNKLLTDYTEMKKAILHVYWEEFQKDPVGLMSRVAQPASKKIDQNKLKPEMDEKGNLTTAGFACSQCGQPLFVYKLEQVSEKGKAYTNYFGRCNVAEHEKLILLAQLKPEKDSDEAVTYSLGKFGQRALDFYSIHVTKESTHPVKPLAQIAGNRYASGPVGKALSDACMGTIASFLSKYQDIIIEHQKVVKGNQKRLESLRELAGKENLEYPSVTLPPQPHTKEGVDAYNEVIARVRMWVNLNLWQKLKLSRDDAKPLLRLKGFPSFPLVERQANEVDWWDMVCNVKKLINEKKEDGKVFWQNLAGYKRQEALRPYLSSEEDVRKKGKKFARYQLGDLLLHLEKKHGEDWGKVYDEAWERIDKKVEGLSKHIKLEEERRSEDAQSKAALTDWLRAKASFVIEGLKEADKDEFCRCDLKLQKWYGDLRGKPFAIEAENSILDISGFSKQYNCAFIWQKDGVKKLNLYLIINYFKGGKLRFKKIKPEAFEANRFYTVINKKSGEIVPMEVNFNFDDPNLIILPLAFGKRQGREFIWNDLLSLETGSLKLANGRVIEKTLYNRRTRQDEPALFVALTFERREVLDSSNIKPMNLIGVDRGENIPAVIALTDPEGCPLSRFKDSLGNPTHILRIGESYKEKQRTIQAKKEVEQRRAGGYSRKYASKAKNLADDMVRNTARDLLYYAVTQDAMLIFENLSRGFGRQGKRTFMAERQYTRMEDWLTAKLAYEGLPSKTYLSKTLAQYTSKTCSNCGFTITSADYDRVLEKLKKTATGWMTTINGKELKVEGQITYYNRYKRQNVVKDLSVELDRLSEESVNNDISSWTKGRSGEALSLLKKRFSHRPVQEKFVCLNCGFETHADEQAALNIARSWLFLRSQEYKKYQTNKTTGNTDKRAFVETWQSFYRKKLKEVWKPAV

SEQ ID NO: 28798 - protein, 978 aa, synthetic construct
  REGION 1..978: note = engineered CasX variant
QEIKRINKIRRRLVKDSNTKKAGKTGPMKTLLVRVMTPDLRERLENLRKKPENIPQPISNTSRANLNKLLTDYTEMKKAILHVYWEEFQKDPVGLMSRVAQPASKKIDQNKLKPEMDEKGNLTTAGFACSQCGQPLFVYKLEQVSEKGKAYTNYFGRCNVAEHEKLILLAQLKPEKDSDEAVTYSLGKFGQRALDFYSIHVTKESTHPVKPLAQIAGNRYASGPVGKALSDACMGTIASFLSKYQDIIIEHQKVVKGNQKRLESLRELAGKENLEYPSVTLPPQPHTKEGVDAYNEVIARVRMWVNLNLWQKLKLSRDDAKPLLRLKGFPSFPLVERQANEVDWWDMVCNVKKLINEKKEDGKVFWQNLAGYKRQEALRPYLSSEEDRKKGKKFARYQLGDLLLHLEKKHGEDWGKVYDEAWERIDKKVEGLSKHIKLEEERRSEDAQSKAALTDWLRAKASFVIEGLKEADKDEFCRCDLKLQKWYGDLRGKPFAIEAENSILDISGFSKQYNCAFIWQKDGVKKLNLYLIINYFKGGKLRFKKIKPEAFEANRFYTVINKKSGEIVPMEVNFNFDDPNLIILPLAFGKRQGREFIWNDLLSLETGSLKLANGRVIEKTLYNRRTRQDEPALFVALTFERREVLDSSNIKPMNLIGVDRGENIPAVIALTDPEGCPLSRFKDSLGNPTHILRIGESYKEKQRTIQAKKEVEQRRAGGYSRKYASKAKNLADDMVRNTARDLLYYAVTQDAMLIFENLSRGFGRQGKRTFMAERQYTRMEDWLTAKLAYEGLPSKTYLSKTLAQYTSKTCSNCGFTITSADYDRMLEKLKKTATGWMTTINGKELKVEGQITYYNRYKRQNVVKDLSVELDRLSEESVNNDISSWTKGRSGEALSLLKKRFSHRPVQEKFVCLNCGFETHADEQAALNIARSWLFLRSQEYKKYQTNKTTGNTDKRAFVETWQSFYRKKLKEVWKPAV

SEQ ID NO: 28799 - protein, 978 aa, synthetic construct
  REGION 1..978: note = engineered CasX variant
QEIKRINKIRRRLVKDSNTKKAGKTGPMKTLLVRVMTPDLRERLENLRKKPENIPQPISNTSRANLNKLLTDYTEMKKAILHVYWEEFQKDPVGLMSRVAQPASKKIDQNKLKPEMDEKGNLTTAGFACSQCGQPLFVYKLEQVSEKGKAYTNYFGRCNVAEHEKLILLAQLKPEKDSDEAVTYSLGKFGQRALDFYSIHVTKESTHPVKPLAQIAGNRYASGPVGKALSDACMGTIASFLSKYQDIIIEHQKVVKGNQKRLESLRELAGKENLEYPSVTLPPQPHTKEGVDAYNEVIARVRMWVNLNLWQKLKLSRDDAKPLLRLKGFPSFPLVERQANEVDWWDMVCNVKKLINEKKEDGKVFWQNLAGYKRQEALRPYLSSEEDRKKGKKFARYQLGDLLLHLEKKHGEDWGKVYDEAWERIDKKVEGLSKHIKLEEERRSEDAQSKAALTDWLRAKASFVIEGLKEADKDEFCRCDLKLQKWYGDLRGKPFAIEAENSILDISGFSKQYNCAFIWQKDGVKKLNLYLIINYFKGGKLRFKKIKPEAFEANRFYTVINKKSGEIVPMEVNFNFDDPNLIILPLAFGKRQGREFIWNDLLSLETGSLKLANGRVIEKTLYNRRTRQDEPALFVALTFERREVLDSSNIKPMNLIGVDRGENIPAVIALTDPEGCPLSRFKDSLGNPTHILRIGESYKEKQRTIQAKKEVEQRRAGGYSRKYASKAKNLADDMVRNTARDLLYYAVTQDAMLIFENLSRGFGRQGKRTFMAERQYTRMEDWLTAKLAYEGLPSKTYLSKTLAQYTSKTCSNCGFTITSADYDRVLEKLKKTATGWMTTINGKELKVEGQITYYNRYKRQNVVKDLSVELDRLSEESVNNDISSWTKGRQGEALSLLKKRFSHRPVQEKFVCLNCGFETHADEQAALNIARSWLFLRSQEYKKYQTNKTTGNTDKRAFVETWQSFYRKKLKEVWKPAV

SEQ ID NO: 28800 - protein, 978 aa, synthetic construct
  REGION 1..978: note = engineered CasX variant
QEIKRINKIRRRLVKDSNTKKAGKTGPMKTLLVRVMTPDLRERLENLRKKPENIPQPISNTSRANLNKLLTDYTEMKKAILHVYWEEFQKDPVGLMSRVAQPASKKIDQNKLKPEMDEKGNLTTAGFACSQCGQPLFVYKLEQVSEKGKAYTNYFGRCNVAEHEKLILLAQLKPEKDSDEAVTYSLGKFGQRALDFYSIHVTKESTHPVKPLAQIAGNRYASGPVGKALSDACMGTIASFLSKYQDIIIEHQKVVKGNQKRLESLRELAGKENLEYPSVTLPPQPHTKEGVDAYNEVIARVRMWVNLNLWQKLKLSRDDAKPLLRLKGFPSFPLVERQANEVDWWDMVCNVKKLINEKKEDGKVFWQNLAGYKRQEALRPYLSSEEDRKKGKKFARYQLGDLLLHLEKKHGEDWGKVYDEAWERIDKKVEGLSKHIKLEEERRSEDAQSKAALTDWLRAKASFVIEGLKEADKDEFCRCDLKLQKWYGDLRGKPFAIEAENSILDISGFSKQYNCAFIWQKDGVKKLNLYLIINYFKGGKLRFKKIKPEAFEANRFYTVINKKSGEIVPMEVNFNFDDPNLIILPLAFGKRQGREFIWNDLLSLETGSLKLANGRVIEKTLYNRRTRQDEPALFVALTFERREVLDSSNIKPMNLIGVDRGENIPAVIALTDPEGCPLSRFKDSLGNPTHILRIGESYKEKQRTIQAKKEVEQRRAGGYSRKYASKAKNLADDMVRNTARDLLYYAVTQDAMLIFENLSRGFGRQGKRTFMAERQYTRMEDWLTAKLAYEGLPSKTYLSKTLAQYTSKTCSNCGFTITSADYDRVLEKLKKTATGWMTTINGKELKVEGQITYYNRYKRQNVVKDLSVELDRLSEESVNNDISSWTKGRSGEALSLLKKRFSHRPVQEKFVCLNCEFETHADEQAALNIARSWLFLRSQEYKKYQTNKTTGNTDKRAFVETWQSFYRKKLKEVWKPAV

SEQ ID NO: 28801 - protein, 979 aa, synthetic construct
  REGION 1..979: note = engineered CasX variant
QEIKRINKIRRRLVKDSNTKKAGKTGPMKTLLVRVMTPDLRERLENLRKKPENIPQPISNTSRANLNKLLTDYTEMKKAILHVYWEEFQKDPVGLMSRVAQPASKKIDQNKLKPEMDEKGNLTTAGFACSQCGQPLFVYKLEQVSEKGKAYTNYFGRCNVAEHEKLILLAQLKPEKDSDEAVTYSLGKFGQRALDFYSIHVTKESTHPVKPLAQIAGNRYASGPVGKALSDACMGTIASFLSKYQDIIIEHQKVVKGNQKRLESLRELAGKENLEYPSVTLPPQPHTKEGVDAYNEVIARVRMWVNLNLWQKLKLSRDDAKPLLRLKGFPSFPLVERQANEVDWWDMVCNVKKLINEKKEDGKVFWQNLAGYKRQEALRPYLSSEEDRKKGKKFARYQLGDLLLHLEKKHGEDWGKVYDEAWERIDKKVEGLSKHIKLEEERRSEDAQSKAALTDWLRAKASFVIEGLKEADKDEFCRCDLKLQKWYGDLRGKPFAIEAENSILDISGFSKQYNCAFIWQKDGVKKLNLYLIINYFKGGKLRFKKIKPEAFEANRFYTVINKKSGEIVPMEVNFNFDDPNLIILPLAFGKRQGREFIWNDLLSLETGSLKLANGRVIEKTLYNRRTRQDEPALFVALTFERREVLDSSNIKPMNLIGVDRGENIPAVIALTDPEGCPLSRFKDSLGNPTHILRIGESYKEKQRTIQAKKEVEQRRAGGYSRKYASKAKNLADDMVRNTARDLLYYAVTQDAMLIFENLSRGFGRQGKRTFMAERQYTRMEDWLTAKLAYEGLPSKTYLSKTLAQYTSKTCSNCGFTITSADYDRVLEKLKKTATGWMTTINGKELKVEGQITYYNRYKRQNVVKDLSVELDRLSEESVNNDISSWTKGRSGEALSLLKKRFSHRPVQEKFVCLNCGFETHADEQAALNIARSWLFLRSQEYKKYQTNKTSTGNTDKRAFVETWQSFYRKKLKEVWKPAV

SEQ ID NO: 28802 - protein, 979 aa, synthetic construct
  REGION 1..979: note = engineered CasX variant
QEIKRINKIRRRLVKDSNTKKAGKTGPMKTLLVRVMTPDLRERLENLRKKPENIPQPISNTSRANLNKLLTDYTEMKKAILHVYWEEFQKDPVGLMSRVAQPASKKIDQNKLKPEMDEKGNLTTAGFACSQCGQPLFVYKLEQVSEKGKAYTNYFGRCNVAEHEKLILLAQLKPEKDSDEAVTYSLGKFGQRALDFYSIHVTKESTHPVKPLAQIAGNRYASGPVGKALSDACMGTIASFLSKYQDIIIEHQKVVKGNQKRLESLRELAGKENLEYPSVTLPPQPHTKEGVDAYNEVIARVRMWVNLNLWQKLKLSRDDAKPLLRLKGFPSFPLVERQANEVDWWDMVCNVKKLINEKKEDGKVFWQNLAGYKRQEALRPYLSSEEDRKKGKKFARYQLGDLLLHLEKKHGEDWGKVYDEAWERIDKKVEGLSKHIKLEEERRSEDAQSKAALTDWLRAKASFVIEGLKEADKDEFCRCDLKLQKWYGDLRGKPFAIEAENSILDISGFSKQYNCAFIWQKDGVKKLNLYLIINYFKGGKLRFKKIKPEAFEANRFYTVINKKSGEIVPMEVNFNFDDPNLIILPLAFGKRQGREFIWNDLLSLETGSLKLANGRVIEKTLYNRRTRQDEPALFVALTFERREVLDSSNIKPMNLIGVDRGENIPAVIALTDPEGCPLSRFKDSLGNPTHILRIGESYKEKQRTIQAKKEVEQRRAGGYSRKYASKAKNLADDMVRNTARDLLYYAVTQDAMLIFENLSRGFGRQGKRTFMAERQYTRMEDWLTAKLAYEGLPSKTYLSKTLAQYTSKTCSNCGFTITSADYDRVLEKLKKTATGWMTTINGKELKVEGQITYYNRYKRQNVVKDLSVELDRLSEESVNNDISSWTKGRSGEALSLLKKRFSHRPVQEKFVCLNCGFETHADEQAALNIARSWLFLRSQEYKKYQTNKTTGKNTDKRAFVETWQSFYRKKLKEVWKPAV

SEQ ID NO: 28803 - protein, 978 aa, synthetic construct
  REGION 1..978: note = engineered CasX variant
QEIKRINKIRRRLVKDSNTKKAGKTGPMKTLLVRVMTPDLRERLENLRKKPENIPQPISNTSRANLNKLLTDYTEMKKAILHVYWEEFQKDPVGLMSRVAQPASKKIDQNKLKPEMDEKGNLTTAGFACSQCGQPLFVYKLEQVSEKGKAYTNYFGRCNVAEHEKLILLAQLKPEKDSDEAVTYSLGKFGQRALDFYSIHVTKESTHPVKPLAQIAGNRYASGPVGKALSDACMGTIASFLSKYQDIIIEHQKVVKGNQKRLESLRELAGKENLEYPSVTLPPQPHTKEGVDAYNEVIARVRMWVNLNLWQKLKLSRDDAKPLLRLKKFPSFPLVERQANEVDWWDMVCNVKKLINEKKEDGKVFWQNLAGYKRQEALRPYLSSEEDRKKGKKFARYQLGDLLLHLEKKHGEDWGKVYDEAWERIDKKVEGLSKHIKLEEERRSEDAQSKAALTDWLRAKASFVIEGLKEADKDEFCRCDLKLQKWYGDLRGKPFAIEAENSILDISGFSKQYNCAFIWQKDGVKKLNLYLIINYFKGGKLRFKKIKPEAFEANRFYTVINKKSGEIVPMEVNFNFDDPNLIILPLAFGKRQGREFIWNDLLSLETGSLKLANGRVIEKTLYNRRTRQDEPALFVALTFERREVLDSSNIKPMNLIGVDRGENIPAVIALTDPEGCPLSRFKDSLGNPTHILRIGESYKEKQRTIQAKKEVEQRRAGGYSRKYASKAKNLADDMVRNTARDLLYYAVTQDAMLIFENLSRGFGRQGKRTFMAERQYTRMEDWLTAKLAYEGLPSKTYLSKTLAQYTSKTCSNCGFTITSADYDRVLEKLKKTATGWMTTINGKELKVEGQITYYNRYKRQNVVKDLSVELDRLSEESVNNDISSWTKGRSGEALSLLKKRFSHRPVQEKFVCLNCGFETHADEQAALNIARSWLFLRSQEYKKYQTNKTTGNTDKRAFVETWQSFYRKKLKEVWKPAV

SEQ ID NO: 28804 - protein, 978 aa, synthetic construct
  REGION 1..978: note = engineered CasX variant
QEIKRINKIRRRLVKDSNTKKAGKTGPMKTLLVRVMTPDLRERLENLRKKPENIPQPISNTSRANLNKLLTDYTEMKKAILHVYWEEFQKDPVGLMSRVAQPASKKIDQNKLKPEMDEKGNLTTAGFACSQCGQPLFVYKLEQVSEKGKAYTNYFGRCNVAEHEKLILLAQLKPEKDSDEAVTYSLGKFGQRALDFYSIHVTKESTHPVKPLAQIAGNRYASGPVGKALSDACMGTIASFLSKYQDIIIEHQKVVKGNQKRLESLRELAGKENLEYPSVTLPPQPHTKEGVDAYNEVIARVRMWVNLNLWQKLKLSRDDAKPLLRLKGFPSFPLVERQANEVDWWDMVCNVKKLINEKKEDGKVFWQNLAGYKRQEALRPYLSSEEDRKKGKKFARYQLGDLLLHLEKKHGEDWGKVYDEAWERIDKKVEGLSKHIKLEEERRSEDAQSKAALTDWLRAKASFVIEGLKEADKDEFCRCDLKLQKWYGDLRGKPFAIEAENSILDISGFSKQYNCAFIWQKDGVKKLNLYLIINYFKGGKLRFKKIKPEAFEANRFYTVINKKSGEIVPMEVNFNFDDPNLIILPLAFGKRQGREFIWNDLLSLETGSLKLANGRVIEKTLYNRRTRQDEPALFVALTFERREVLDSSNIKPMNLIGVDRGENIPAVIALTDPEGCPLSRFKDSLGNPTHILRIGERYKEKQRTIQAKKEVEQRRAGGYSRKYASKAKNLADDMVRNTARDLLYYAVTQDAMLIFENLSRGFGRQGKRTFMAERQYTRMEDWLTAKLAYEGLPSKTYLSKTLAQYTSKTCSNCGFTITSADYDRVLEKLKKTATGWMTTINGKELKVEGQITYYNRYKRQNVVKDLSVELDRLSEESVNNDISSWTKGRSGEALSLLKKRFSHRPVQEKFVCLNCGFETHADEQAALNIARSWLFLRSQEYKKYQTNKTTGNTDKRAFVETWQSFYRKKLKEVWKPAV

SEQ ID NO: 28805 - protein, 978 aa, synthetic construct
  REGION 1..978: note = engineered CasX variant
QEIKRINKIRRRLVKDSNTKKAGKTGPMKTLLVRVMTPDLRERLENLRKKPENIPQPISNTSRANLNKLLTDYTEMKKAILHVYWEEFQKDPVGLMSRVAQPASKKIDQNKLKPEMDEKGNLTTAGFACSQCGQPLFVYKLEQVSEKGKAYTNYFGRCNVAEHEKLILLAQLKPEKDSDEAVTYSLGKFGQRALDFYSIHVTKESTHPVKPLAQIAGNRYASGPVGKALSDACMGTIASFLSKYQDIIIEHQKVVKGNQKRLESLRELAGKENLEYPSVTLPPQPHTKEGVDAYNEVIARVRMWVNLNLWQKLKLSRDDAKPLLRLKGFPSFPLVERQANEVDWWDMVCNVKKLINEKKEDGKVFWQNLAGYKRQEALRPYLSSEEDRKKGKKFARYQLGDLLLHLEKKHGEDWGKVYDEAWERIDKKVEGLSKHIKLEEERRSEDAQSKAALTDWLRAKASFVIEGLKEADKDEFCRCDLKLQKWYGDLRGKPFAIEAENSILDISGFSKQYNCAFIWQKDGVKKLNLYLIINYFKGGKLRFKKIKPEAFEANRFYTVINKKSGEIVPMEVNFNFDDPNLIILPLAFGKRQGREFIWNDLLSLETGSLQLANGRVIEKTLYNRRTRQDEPALFVALTFERREVLDSSNIKPMNLIGVDRGENIPAVIALTDPEGCPLSRFKDSLGNPTHILRIGESYKEKQRTIQAKKEVEQRRAGGYSRKYASKAKNLADDMVRNTARDLLYYAVTQDAMLIFENLSRGFGRQGKRTFMAERQYTRMEDWLTAKLAYEGLPSKTYLSKTLAQYTSKTCSNCGFTITSADYDRVLEKLKKTATGWMTTINGKELKVEGQITYYNRYKRQNVVKDLSVELDRLSEESVNNDISSWTKGRSGEALSLLKKRFSHRPVQEKFVCLNCGFETHADEQAALNIARSWLFLRSQEYKKYQTNKTTGNTDKRAFVETWQSFYRKKLKEVWKPAV

SEQ ID NO: 28806 - protein, 979 aa, synthetic construct
  REGION 1..979: note = engineered CasX variant
QEIKRINKIRRRLVKDSNTKKAGKTGPMKTLLVRVMTPDLRERLENLRKKPENIPQPISNTSRANLNKLLTDYTEMKKAILHVYWEEFQKDPVGLMSRVAQPASKKIDQNKLKPEMDEKGNLTTAGFACSQCGQPLFVYKLEQVSEKGKAYTNYFGRCNVAEHEKLILLAQLKPEKDSDEAVTYSLGKFGQRALDFYSIHVTKESTHPVKPLAQIAGNRYASGPVGKALSDACMGTIASFLSKYQDIIIEHQKVVKGNQKRLESLRELAGKENLEYPSVTLPPQPHTKEGVDAYNEVIARVRMWVNLNLWQKLKLSRDDAKPLLRLKGFPSFPLVERQANEVDWWDMVCNVKKLINEKKEDGKVFWQNLAGYKRQEALRPYLSSEEDRKKGKKFARYQLGDLLLHLEKKHGEDWGKVYDEAWERIDKKVEGLSKHIKLEEERRSEDAQSKAALTDWLRAKASFVIEGLKEADKDEFCRCELKLQKWYGDLRGKPFAIEAENSILDISGFSKQYNCAFIWQKDGVKKLNLYLIINYFKGGKLRFKKIKPEAFEANRFYTVINKKSGEIVPMEVNFNFDDPNLIILPLAFGKRFVGREFIWNDLLSLETGSLKLANGRVIEKTLYNRRTRQDEPALFVALTFERREVLDSSNIKPMNLIGVDRGENIPAVIALTDPEGCPLSRFKDSLGNPTHILRIGESYKEKQRTIQAKKEVEQRRAGGYSRKYASKAKNLADDMVRNTARDLLYYAVTQDAMLIFENLSRGFGRQGKRTFMAERQYTRMEDWLTAKLAYEGLPSKTYLSKTLAQYTSKTCSNCGFTITSADYDRVLEKLKKTATGWMTTINGKELKVEGQITYYNRYKRQNVVKDLSVELDRLSEESVNNDISSWTKGRSGEALSLLKKRFSHRPVQEKFVCLNCGFETHADEQAALNIARSWLFLRSQEYKKYQTNKTTGNTDKRAFVETWQSFYRKKLKEVWKPAV

SEQ ID NO: 28807 - protein, 979 aa, synthetic construct
  REGION 1..979: note = engineered CasX variant
QEIKRINKIRRRLVKDSNTKKAGKTGPMKTLLVRVMTPDLRERLENLRKKPENIPQPISNTSRANLNKLLTDYTEMKKAILHVYWEEFQKDPVGLMSRVAQPASKKIDQNKLKPEMDEKGNLTTAGFACSQCGQPLFVYKLEQVSEKGKAYTNYFGRCNVAEHEKLILLAQLKPEKDSDEAVTYSLGKFGQRALDFYSIHVTKESTHPVKPLAQIAGNRYASGPVGKALSDACMGTIASFLSKYQDIIIEHQKVVKGNQKRLESLRELAGKENLEYPSVTLPPQPHTKEGVDAYNEVIARVRMWVNLNLWQKLKLSRDDAKPLLRLKGFPSFPLVERQANEVDWWDMVCNVKKLINEKKEDGKVFWQNLAGYKRQEALRPYLSSEEDRKKGKKFARYQLGDLLLHLEKKHGEDWGKVYDEAWERIDKKVEGLSKHIKLEEERRSEDAQSKAALTDWLRAKASFVIEGLKEADKDEFCRCELKLQKWYGDLRGKPFAIEAENSILDISGFSKQYNCAFIWQKDGVKKLNLYLIINYFKGGKLRFKKIKPEAFEANRFYTVINKKSGEIVPMEVNFNFDDPNLIILPLAFGKRFGREFIWNDLLSLETGSLKLANGRVIEKTLYNRRTRQDEPALFVALTFERREVLDSSNIKTPMNLIGVDRGENIPAVIALTDPEGCPLSRFKDSLGNPTHILRIGESYKEKQRTIQAKKEVEQRRAGGYSRKYASKAKNLADDMVRNTARDLLYYAVTQDAMLIFENLSRGFGRQGKRTFMAERQYTRMEDWLTAKLAYEGLPSKTYLSKTLAQYTSKTCSNCGFTITSADYDRVLEKLKKTATGWMTTINGKELKVEGQITYYNRYKRQNVVKDLSVELDRLSEESVNNDISSWTKGRSGEALSLLKKRFSHRPVQEKFVCLNCGFETHADEQAALNIARSWLFLRSQEYKKYQTNKTTGNTDKRAFVETWQSFYRKKLKEVWKPAV

SEQ ID NO: 28808 - protein, 979 aa, synthetic construct
  REGION 1..979: note = engineered CasX variant
QEIKRINKIRRRLVKDSNTKKAGKTGPMKTLLVRVMTPDLRERLENLRKKPENIPQPISNTSRANLNKLLTDYTEMKKAILHVYWEEFQKDPVGLMSRVAQPASKKIDQNKLKPEMDEKGNLTTAGFACSQCGQPLFVYKLEQVSEKGKAYTNYFGRCNVAEHEKLILLAQLKPEKDSDEAVTYSLGKFGQRALDFYSIHVTKESTHPVKPLAQIAGNRYASGPVGKALSDACMGTIASFLSKYQDIIIEHQKVVKGNQKRLESLRELAGKENLEYPSVTLPPQPHTKEGVDAYNEVIARVRMWVNLNLWQKLKLSRDDAKPLLRLKGFPSFPLVERQANEVDWWDMVCNVKKLINEKKEDGKVFWQNLAGYKRQEALRPYLSSEEDRKKGKKFARYQLGDLLLHLEKKHGEDWGKVYDEAWERIDKKVEGLSKHIKLEEERRSEDAQSKAALTDWLRAKASFVIEGLKEADKDEFCRCELKLQKWYGDLRGKPFAIEAENSILDISGFSKQYNCAFIWQKDGVKKLNLYLIINYFKGGKLRFKKIKPEAFEANRFYTVINKKSGEIVPMEVNFNFDDPNLIILPLAFGKRFGREFIWNDLLSLETGSLKLANGRVIEKTLYNRRTRQDEPALFVALTFERREVLDSSNIKPMSNLIGVDRGENIPAVIALTDPEGCPLSRFKDSLGNPTHILRIGESYKEKQRTIQAKKEVEQRRAGGYSRKYASKAKNLADDMVRNTARDLLYYAVTQDAMLIFENLSRGFGRQGKRTFMAERQYTRMEDWLTAKLAYEGLPSKTYLSKTLAQYTSKTCSNCGFTITSADYDRVLEKLKKTATGWMTTINGKELKVEGQITYYNRYKRQNVVKDLSVELDRLSEESVNNDISSWTKGRSGEALSLLKKRFSHRPVQEKFVCLNCGFETHADEQAALNIARSWLFLRSQEYKKYQTNKTTGNTDKRAFVETWQSFYRKKLKEVWKPAV

SEQ ID NO: 28809 - protein, 978 aa, synthetic construct
  REGION 1..978: note = engineered CasX variant
QEIKRINKIRRRLVKDSNTKKAGKTGPMKTLLVRVMTPDLRERLENLRKKPENIPQPISNTSRANLNKLLTDYTEMKKAILHVYWEEFQKDPVGLMSRVAQPASKKIDQNKLKPEMDEKGNLTTAGFACSQCGQPLFVYKLEQVSEKGKAYTNYFGRCNVAEHEKLILLAQLKPEKDSDEAVTYSLGKFGQRALDFYSIHVTKESTHPVKPLAQIAGNRYASGPVGKALSDACMGTIASFLSKYQDIIIEHQKVVKGNQKRLESLRELAGKENLEYPSVTLPPQPHTKEGVDAYNEVIARVRMWVNLNLWQKLKLSRDDAKPLLRLKGFPSFPLVERQANEVDWWDMVCNVKKLINEKKEDGKVFWQNLAGYKRQEALRPYLSSEEDRKKGKKFARYQLGDLLLHLEKKHGEDWGKVYDEAWERIDKKVEGLSKHIKLEEERRSEDAQSKAALTDWLRAKASFVIEGLKEADKDEFCRCELKLQKWYGDLRGKPFAIEAENSILDISGFSKQYNCAFIWQKDGVKKLNLYLIINYFKGGKLRFKKIKPEAFEANRFYTVINKKSGEIVPMEVNFNFDDPNLIILPLAFGKRFGREFIWNDLLSLETGSLKLANGRVIEKTLYNRRTRQDEPALFVALTFERREVLDSSNIKPMNLIGVDRGENIPAVIALTDPEGCPLSRFKDSLGNPTHILRIRESYKEKQRTIQAKKEVEQRRAGGYSRKYASKAKNLADDMVRNTARDLLYYAVTQDAMLIFENLSRGFGRQGKRTFMAERQYTRMEDWLTAKLAYEGLPSKTYLSKTLAQYTSKTCSNCGFTITSADYDRVLEKLKKTATGWMTTINGKELKVEGQITYYNRYKRQNVVKDLSVELDRLSEESVNNDISSWTKGRSGEALSLLKKRFSHRPVQEKFVCLNCGFETHADEQAALNIARSWLFLRSQEYKKYQTNKTTGNTDKRAFVETWQSFYRKKLKEVWKPAV

SEQ ID NO: 28810 - protein, 978 aa, synthetic construct
  REGION 1..978: note = engineered CasX variant
QEIKRINKIRRRLVKDSNTKKAGKTGPMKTLLVRVMTPDLRERLENLRKKPENIPQPISNTSRANLNKLLTDYTEMKKAILHVYWEEFQKDPVGLMSRVAQPASKKIDQNKLKPEMDEKGNLTTAGFACSQCGQPLFVYKLEQVSEKGKAYTNYFGRCNVAEHEKLILLAQLKPEKDSDEAVTYSLGKFGQRALDFYSIHVTKESTHPVKPLAQIAGNRYASGPVGKALSDACMGTIASFLSKYQDIIIEHQKVVKGNQKRLESLRELAGKENLEYPSVTLPPQPHTKEGVDAYNEVIARVRMWVNLNLWQKLKLSRDDAKPLLRLKGFPSFPLVERQANEVDWWDMVCNVKKLINEKKEDGKVFWQNLAGYKRQEALRPYLSSEEDRKKGKKFARYQLGDLLLHLEKKHGEDWGKVYDEAWERIDKKVEGLSKHIKLEEERRSEDAQSKAALTDWLRAKASFVIEGLKEADKDEFCRCELKLQKWYGDLRGKPFAIEAENSILDISGFSKQYNCAFIWQKDGVKKLNLYLIINYFKGGKLRFKKIKPEAFEANRFYTVINKKSGEIVPMEVNFNFDDPNLIILPLAFGKRFGREFIWNDLLSLETGSLKLANGRVIEKTLYNRRTRQDEPALFVALTFERREVLDSSNIKPMNLIGVDRGENIPAVIALTDPEGCPLSRFKDSLGNPTHILRIGESYKEKQRTIQAKKEVEQRRAGGYSRKYASKAKNLADDMVRNTARDLLYYAVTQDAMLIFENLSRGFGRQGKRTFSAERQYTRMEDWLTAKLAYEGLPSKTYLSKTLAQYTSKTCSNCGFTITSADYDRVLEKLKKTATGWMTTINGKELKVEGQITYYNRYKRQNVVKDLSVELDRLSEESVNNDISSWTKGRSGEALSLLKKRFSHRPVQEKFVCLNCGFETHADEQAALNIARSWLFLRSQEYKKYQTNKTTGNTDKRAFVETWQSFYRKKLKEVWKPAV

SEQ ID NO: 28811 - protein, 978 aa, synthetic construct
  REGION 1..978: note = engineered CasX variant
QEIKRINKIRRRLVKDSNTKKAGKTGPMKTLLVRVMTPDLRERLENLRKKPENIPQPISNTSRANLNKLLTDYTEMKKAILHVYWEEFQKDPVGLMSRVAQPASKKIDQNKLKPEMDEKGNLTTAGFACSQCGQPLFVYKLEQVSEKGKAYTNYFGRCNVAEHEKLILLAQLKPEKDSDEAVTYSLGKFGQRALDFYSIHVTKESTHPVKPLAQIAGNRYASGPVGKALSDACMGTIASFLSKYQDIIIEHQKVVKGNQKRLESLRELAGKENLEYPSVTLPPQPHTKEGVDAYNEVIARVRMWVNLNLWQKLKLSRDDAKPLLRLKGFPSFPLVERQANEVDWWDMVCNVKKLINEKKEDGKVFWQNLAGYKRQEALRPYLSSEEDRKKGKKFARYQLGDLLLHLEKKHGEDWGKVYDEAWERIDKKVEGLSKHIKLEEERRSEDAQSKAALTDWLRAKASFVIEGLKEADKDEFCRCELKLQKWYGDLRGKPFAIEAENSILDISGFSKQYNCAFIWQKDGVKKLNLYLIINYFKGGKLRFKKIKPEAFEANRFYTVINKKSGEIVPMEVNFNFDDPNLIILPLAFGKRFGREFIWNDLLSLETGSLKLANGRVIEKTLYNRRTRQDEPALFVALTFERREVLDSSNIKPMNLIGVDRGENIPAVIALTDPEGCPLSRFKDSLGNPTHILRIGESYKEKQRTIQAKKEVEQRRAGGYSRKYASKAKNLADDMVRNTARDLLYYAVTQDAMLIFENLSRGFGRQGKRTFMAERQYTRMEDWLTAKLAYEGLPSKTYLSKTLAQYTSKTCSNCGFTITSADYDRVLEKLKKTATGWMTTINGKELKVEGQITYYNRYKRQNVVKDLSVELDRLSEESVNNDISSWDKGRSGEALSLLKKRFSHRPVQEKFVCLNCGFETHADEQAALNIARSWLFLRSQEYKKYQTNKTTGNTDKRAFVETWQSFYRKKLKEVWKPAV

SEQ ID NO: 28812 - protein, 978 aa, synthetic construct
  REGION 1..978: note = engineered CasX variant
QEIKRINKIRRRLVKDSNTKKAGKTGPMKTLLVRVMTPDLRERLENLRKKPENIPQPISNTSRANLNKLLTDYTEMKKAILHVYWEEFQVDPVGLMSRVAQPASKKIDQNKLKPEMDEKGNLTTAGFACSQCGQPLFVYKLEQVSEKGKAYTNYFGRCNVAEHEKLILLAQLKPEKDSDEAVTYSLGKFGQRALDFYSIHVTKESTHPVKPLAQIAGNRYASGPVGKALSDACMGTIASFLSKYQDIIIEHQKVVKGNQKRLESLRELAGKENLEYPSVTLPPQPHTKEGVDAYNEVIARVRMWVNLNLWQKLKLSRDDAKPLLRLKGFPSFPLVERQANEVDWWDMVCNVKKLINEKKEDGKVFWQNLAGYKRQEALRPYLSSEEDRKKGKKFARYQLGDLLLHLEKKHGEDWGKVYDEAWERIDKKVEGLSKHIKLEEERRSEDAQSKAALTDWLRAKASFVIEGLKEADKDEFCRCELKLQKWYGDLRGKPFAIEAENSILDISGFSKQYNCAFIWQKDGVKKLNLYLIINYFKGGKLRFKKIKPEAFEANRFYTVINKKSGEIVPMEVNFNFDDPNLIILPLAFGKRFGREFIWNDLLSLETGSLKLANGRVIEKTLYNRRTRQDEPALFVALTFERREVLDSSNIKPMNLIGVDRGENIPAVIALTDPEGCPLSRFKDSLGNPTHILRIGESYKEKQRTIQAKKEVEQRRAGGYSRKYASKAKNLADDMVRNTARDLLYYAVTQDAMLIFENLSRGFGRQGKRTFMAERQYTRMEDWLTAKLAYEGLPSKTYLSKTLAQYTSKTCSNCGFTITSADYDRVLEKLKKTATGWMTTINGKELKVEGQITYYNRYKRQNVVKDLSVELDRLSEESVNNDISSWTKGRSGEALSLLKKRFSHRPVQEKFVCLNCGFETHADEQAALNIARSWLFLRSQEYKKYQTNKTTGNTDKRAFVETWQSFYRKKLKEVWKPAV

SEQ ID NO: 28813 - protein, 978 aa, synthetic construct
  REGION 1..978: note = engineered CasX variant
QEIKRLNKIRRRLVKDSNTKKAGKTGPMKTLLVRVMTPDLRERLENLRKKPENIPQPISNTSRANLNKLLTDYTEMKKAILHVYWEEFQKDPVGLMSRVAQPASKKIDQNKLKPEMDEKGNLTTAGFACSQCGQPLFVYKLEQVSEKGKAYTNYFGRCNVAEHEKLILLAQLKPEKDSDEAVTYSLGKFGQRALDFYSIHVTKESTHPVKPLAQIAGNRYASGPVGKALSDACMGTIASFLSKYQDIIIEHQKVVKGNQKRLESLRELAGKENLEYPSVTLPPQPHTKEGVDAYNEVIARVRMWVNLNLWQKLKLSRDDAKPLLRLKGFPSFPLVERQANEVDWWDMVCNVKKLINEKKEDGKVFWQNLAGYKRQEALRPYLSSEEDRKKGKKFARYQLGDLLLHLEKKHGEDWGKVYDEAWERIDKKVEGLSKHIKLEEERRSEDAQSKAALTDWLRAKASFVIEGLKEADKDEFCRCELKLQKWYGDLRGKPFAIEAENSILDISGFSKQYNCAFIWQKDGVKKLNLYLIINYFKGGKLRFKKIKPEAFEANRFYTVINKKSGEIVPMEVNFNFDDPNLIILPLAFGKRFGREFIWNDLLSLETGSLKLANGRVIEKTLYNRRTRQDEPALFVALTFERREVLDSSNIKPMNLIGVDRGENIPAVIALTDPEGCPLSRFKDSLGNPTHILRIGESYKEKQRTIQAKKEVEQRRAGGYSRKYASKAKNLADDMVRNTARDLLYYAVTQDAMLIFENLSRGFGRQGKRTFMAERQYTRMEDWLTAKLAYEGLPSKTYLSKTLAQYTSKTCSNCGFTITSADYDRVLEKLKKTATGWMTTINGKELKVEGQITYYNRYKRQNVVKDLSVELDRLSEESVNNDISSWTKGRSGEALSLLKKRFSHRPVQEKFVCLNCGFETHADEQAALNIARSWLFLRSQEYKKYQTNKTTGNTDKRAFVETWQSFYRKKLKEVWKPAV

SEQ ID NO: 28814 - protein, 978 aa, synthetic construct
  REGION 1..978: note = engineered CasX variant
QEIKRINKIRRRLVKDSNTKKAGKTGPMKTLLVRVMTPDLRERLENLRKKPENIPQPISNTSRANLNKLLTDYTEMKKAILHVYWEEFQKDPVGLMSRVAQPASKKIDQNKLKPEMDEKGNLTTAGFACSQCGQPLFVYKLEQVSEKGKAYTNYVGRCNVAEHEKLILLAQLKPEKDSDEAVTYSLGKFGQRALDFYSIHVTKESTHPVKPLAQIAGNRYASGPVGKALSDACMGTIASFLSKYQDIIIEHQKVVKGNQKRLESLRELAGKENLEYPSVTLPPQPHTKEGVDAYNEVIARVRMWVNLNLWQKLKLSRDDAKPLLRLKGFPSFPLVERQANEVDWWDMVCNVKKLINEKKEDGKVFWQNLAGYKRQEALRPYLSSEEDRKKGKKFARYQLGDLLLHLEKKHGEDWGKVYDEAWERIDKKVEGLSKHIKLEEERRSEDAQSKAALTDWLRAKASFVIEGLKEADKDEFCRCELKLQKWYGDLRGKPFAIEAENSILDISGFSKQYNCAFIWQKDGVKKLNLYLIINYFKGGKLRFKKIKPEAFEANRFYTVINKKSGEIVPMEVNFNFDDPNLIILPLAFGKRFGREFIWNDLLSLETGSLKLANGRVIEKTLYNRRTRQDEPALFVALTFERREVLDSSNIKPMNLIGVDRGENIPAVIALTDPEGCPLSRFKDSLGNPTHILRIGESYKEKQRTIQAKKEVEQRRAGGYSRKYASKAKNLADDMVRNTARDLLYYAVTQDAMLIFENLSRGFGRQGKRTFMAERQYTRMEDWLTAKLAYEGLPSKTYLSKTLAQYTSKTCSNCGFTITSADYDRVLEKLKKTATGWMTTINGKELKVEGQITYYNRYKRQNVVKDLSVELDRLSEESVNNDISSWTKGRSGEALSLLKKRFSHRPVQEKFVCLNCGFETHADEQAALNIARSWLFLRSQEYKKYQTNKTTGNTDKRAFVETWQSFYRKKLKEVWKPAV

SEQ ID NO: 28815 - protein, 978 aa, synthetic construct
  REGION 1..978: note = engineered CasX variant
QEIKRINKIRRRLVKDSNTKKAGKTGPMKTLLVRVMTPDLRERLENLRKKPENIPQPISNTSRANLNKLLTDYTEMKKAILHVYWEEFQKDPVGLMSRVAQPASKKIDQNKLKPEMDEKGNLTTAGFACSQCGQPLFVYKLEQVSEKGKAYTNYFGRCNVAEHEKLILLAQLKPEKDSDEAVTYSLGKFGQRALDFYSIHVTKESTHPVKPLAQIAGNRYASGPVGKALSDACMGTIASFLSKYQDIIIEHQKVVKGNQKRLESLRELAGKENLEYPSVTLPPQPHTKEGVDAYNEVIARVRMWVNLNLWQKLKLSRDDAKPLLRLKGFPSFPLVERQANEVDWWDMVCNVKKLINEKKEDGKVFWQNLAGYKRQEALRPYLSSEEDRKKGKKFARYQLGDLLLHLEKKHGEDWGKVYDEAWERIDKKVEGLSKHIKLEEERRSEDAQSKAALTDWLRAKASFVIEGLKEADKDEFCRCELKLQKWYGDLRGKPFAIEAENSILDISGFSKQYNCAFIWQKDGVKKLNLYLIINYFKGGKLRFKKIKPEAFEANRFYTVINKKSGEIVPMEVNFNFDDPNLIILPLAFGKRFGREFIWNDLLSLETGSLKLANGRVIEKTLYNRRTRQDEPALFVALTFERREVLDSSNIKPMNLIGVDRGENIPAVIALTDPEGCPLSRFKDSLGNPTHILRIGESYKEKQRTIQAKKEVEQRRAGGYSRKYASKAKNLADDMVRNTARDLLYYAVTQDAMLIFENLSRGFGRQGKRTFMAERQYTRMEDWLTAKLAYEGLASKTYLSKTLAQYTSKTCSNCGFTITSADYDRVLEKLKKTATGWMTTINGKELKVEGQITYYNRYKRQNVVKDLSVELDRLSEESVNNDISSWTKGRSGEALSLLKKRFSHRPVQEKFVCLNCGFETHADEQAALNIARSWLFLRSQEYKKYQTNKTTGNTDKRAFVETWQSFYRKKLKEVWKPAV

SEQ ID NO: 28816 - protein, 978 aa, synthetic construct
  REGION 1..978: note = engineered CasX variant
QEIKRINKIRRRLVKDSNTKKAGKTGPMKTLLVRVMTPDLRERLENLRKKPENIPQPISNTSRANLNKLLTDYTEMKKAILHVYWEEFQKDPVGLMSRVAQPASKKIDQNKLKPEMDEKGNLTTAGFACSQCGQPLFVYKLEQVSEKGKAYTNYFGRCNVAEHEKLILLAQLKPEKDSDEAVTYSLGKFGQRALDFYSIHVTKESTHPVKPLAQIAGNRYASGPVGKALSDACMGTIASFLSKYQDIIIEHQKVVKGNQKRLESLRELAGKENLEYPSVTLPPQPHTKEGVDAYNEVIARVRMWVNLNLWQKLKLSRDDAKPLLRLKGFPSFPLVERQANEVDWWDMVCNVKKLINEKKEDGKVFWQNLAGYKRQEALRPYLSSEEDRKKGKKFARYQLGDLLLHLEKKHGEDWGKVYDEAWERIDKKVEGLSKHIKLEEERRSEDAQSKAALTDWLRAKASFVIEGLKEADKDEFCRCELKLQKWYGDLRGKPFAIEAENSILDISGFSKQYNCAFIWQKDGVKKLNLYLIINYFKGGKLRFKKIKPEAFEANRFYTVINKKSGEIVPMEVNFNFDDPNLIILPLAFGKRFGREFIWNDLLSLETGSLKLANGRVIEKTLYNRRTRQDEPALFVALTFERREVLDSSNIKPMNLIGVDRGENIPAVIALTDPEGCPLSRFKDSLGNPTHILRIGESYKEKQRTIQAKKEVEQRRAGGYSRKYASKAKNLADDMVRNTARDLLYYAVTQDAMLIFENLSRGFGRQGKRTFMAERQYTRMEDWLTAKLAYEGLPSKVYLSKTLAQYTSKTCSNCGFTITSADYDRVLEKLKKTATGWMTTINGKELKVEGQITYYNRYKRQNVVKDLSVELDRLSEESVNNDISSWTKGRSGEALSLLKKRFSHRPVQEKFVCLNCGFETHADEQAALNIARSWLFLRSQEYKKYQTNKTTGNTDKRAFVETWQSFYRKKLKEVWKPAV

SEQ ID NO: 28817 - protein, 979 aa, synthetic construct
  REGION 1..979: note = engineered CasX variant
QEIKRINKIRRRLVKDSNTKKAGKTGPMKTLLVRVMTPDLRERLENLRKKPENIPQPISNTSRANLNKLLTDYTEMKKAILHVYWEEFQKDPVGLMSRVAQPASKKIDQNKLKPEMDEKGNLTTAGFACSQCGQPLFVYKLEQVSEKGKAYTNYFGRCNVAEHEKLILLAQLKPEKDSDEAVTYSLGKFGQRALDFYSIHVTKESTHPVKPLAQIAGNRYASGPVGKALSDACMGTIASFLSKYQDIIIEHQKVVKGNQKRLESLRELAGKENLEYPSVTLPPQPHTKEGVDAYNEVIARVRMWVNLNLWQKLKLSRDDAKPLLRLKGFPSFPLVERQANEVDWWDMVCNVKKLINEKKEDGKVFWQNLAGYKRQEALRPYLSSEEDRKKGKKFARYQLGDLLLHLEKKHGEDWGKVYDEAWERIDKKVEGLSKHIKLEEERRSEDAQSKAALTDWLRAKASFVIEGLKEADKDEFCRCELKLQKWYGDLRGKPFAIEAENSILDISGFSKQYNCAFIWQKDGVKKLNLYLIINYFKGGKLRFKKIKPEAFEANRFYTVINKKSGEIVPMEVNFNFDDPNLIILPLAFGKRFGREFIWNDLLSLETGSLKLANGRVIEKTLYNRRTRQDEPALFVALTFERREVLDSSNIKPMNLIGVDRGENIPAVIALTDPEGCPLSRFKDSLGNPTHILRIGESYKEKQRTIQAKKEVEQRRAGGYSRKYASKAKNLADDMVRNTARDLLYYAVTQDAMLIFENLSRGFGRQGKRTFMAERQYTRMEDWLTAKLAYEGPLPSKTYLSKTLAQYTSKTCSNCGFTITSADYDRVLEKLKKTATGWMTTINGKELKVEGQITYYNRYKRQNVVKDLSVELDRLSEESVNNDISSWTKGRSGEALSLLKKRFSHRPVQEKFVCLNCGFETHADEQAALNIARSWLFLRSQEYKKYQTNKTTGNTDKRAFVETWQSFYRKKLKEVWKPAV

SEQ ID NO: 28818 - protein, 979 aa, synthetic construct
  REGION 1..979: note = engineered CasX variant
QEIKRINKIRRRLVKDSNTKKAGKTGPMKTLLVRVMTPDLRERLENLRKKPENIPQPISNTSRANLNKLLTDYTEMKKAILHVYWEEFQKDPVGLMSRVAQPASKKIDQNKLKPEMDEKGNLTTAGFACSQCGQPLFVYKLEQVSEKGKAYTNYFGRCNVAEHEKLILLAQLKPEKDSDEAVTYSLGKFGQRALDFYSIHVTKESTHPVKPLAQIAGNRYASGPVGKALSDACMGTIASFLSKYQDIIIEHQKVVKGNQKRLESLRELAGKENLEYPSVTLPPQPHTKEGVDAYNEVIARVRMWVNLNLWQKLKLSRDDAKPLLRLKGFPSFPLVERQANEVDWWDMVCNVKKLINEKKEDGKVFWQNLAGYKRQEALRPYLSSEEDVRKKGKKFARYQLGDLLLHLEKKHGEDWGKVYDEAWERIDKKVEGLSKHIKLEEERRSEDAQSKAALTDWLRAKASFVIEGLKEADKDEFCRCELKLQKWYGDLRGKPFAIEAENSILDISGFSKQYNCAFIWQKDGVKKLNLYLIINYFKGGKLRFKKIKPEAFEANRFYTVINKKSGEIVPMEVNFNFDDPNLIILPLAFGKRFGREFIWNDLLSLETGSLKLANGRVIEKTLYNRRTRQDEPALFVALTFERREVLDSSNIKPMNLIGVDRGENIPAVIALTDPEGCPLSRFKDSLGNPTHILRIGESYKEKQRTIQAKKEVEQRRAGGYSRKYASKAKNLADDMVRNTARDLLYYAVTQDAMLIFENLSRGFGRQGKRTFMAERQYTRMEDWLTAKLAYEGLPSKTYLSKTLAQYTSKTCSNCGFTITSADYDRVLEKLKKTATGWMTTINGKELKVEGQITYYNRYKRQNVVKDLSVELDRLSEESVNNDISSWTKGRSGEALSLLKKRFSHRPVQEKFVCLNCGFETHADEQAALNIARSWLFLRSQEYKKYQTNKTTGNTDKRAFVETWQSFYRKKLKEVWKPAV

SEQ ID NO: 28819 - protein, 978 aa, synthetic construct
  REGION 1..978: note = engineered CasX variant
QEIKRINKIRRRLVKDSNTKKAGKTGPMKTLLVRVMTPDLRERLENLRKKPENIPQPISNTSRANLNKLLTDYTEMKKAILHVYWEEFQKDPVGLMSRVAQPASKKIDQNKLKPEMDEKGNLTTAGFACSQCGQPLFVYKLEQVSEKGKAYTNYFGRCNVAEHEKLILLAQLKPEKDSDEAVTYSLGKFGQRALDFYSIHVTKESTHPVKPLAQIAGNRYASGPVGKALSDACMGTIASFLSKYQDIIIEHQKVVKGNQKRLESLRELAGKENLEYPSVTLPPQPHTKEGVDAYNEVIARVRMWVNLNLWQKLKLSRDDAKPLLRLKGFPSFPLVERQANEVDWWDMVCNVKKLINEKKEDGKVFWQNLAGYKRQEALRPYLSSEEDRKKGKKFARYQLGDLLLHLEKKHGEDWGKVYDEAWERIDKKVEGLSKHIKLEEERRSEDAQSKAALTDWLRAKASFVIEGLKEADKDEFCRCELKLQKWYGDLRGKPFAIEAENSILDISGFSKQYNCAFIWQKDGVKKLNLYLIINYFKGGKLRFKKIKPEAFEANRFYTVINKKSGEIVPMEVNFNFDDPNLIILPLAFGKRFGREFIWNDLLSLETGSLKLANGRVIEKTLYNRRTRQDEPALFVALTFERREVLDSSNIKPMNLIGVDRGENIPAVIALTDPEGCPLSRFKDSLGNPTHILRIGESYKEKQRTIQAKKEVEQRRAGGYSRKYASKAKNLADDMVRNTARDLLYYAVTQDAMLIFENLSRGFGRQGKRTFMAERQYTRMEDWLTAKLAYEGLPSKTYLSKTLAQYTSKTCSNCGFTITSADYDRMLEKLKKTATGWMTTINGKELKVEGQITYYNRYKRQNVVKDLSVELDRLSEESVNNDISSWTKGRSGEALSLLKKRFSHRPVQEKFVCLNCGFETHADEQAALNIARSWLFLRSQEYKKYQTNKTTGNTDKRAFVETWQSFYRKKLKEVWKPAV

SEQ ID NO: 28820 - protein, 978 aa, synthetic construct
  REGION 1..978: note = engineered CasX variant
QEIKRINKIRRRLVKDSNTKKAGKTGPMKTLLVRVMTPDLRERLENLRKKPENIPQPISNTSRANLNKLLTDYTEMKKAILHVYWEEFQKDPVGLMSRVAQPASKKIDQNKLKPEMDEKGNLTTAGFACSQCGQPLFVYKLEQVSEKGKAYTNYFGRCNVAEHEKLILLAQLKPEKDSDEAVTYSLGKFGQRALDFYSIHVTKESTHPVKPLAQIAGNRYASGPVGKALSDACMGTIASFLSKYQDIIIEHQKVVKGNQKRLESLRELAGKENLEYPSVTLPPQPHTKEGVDAYNEVIARVRMWVNLNLWQKLKLSRDDAKPLLRLKGFPSFPLVERQANEVDWWDMVCNVKKLINEKKEDGKVFWQNLAGYKRQEALRPYLSSEEDRKKGKKFARYQLGDLLLHLEKKHGEDWGKVYDEAWERIDKKVEGLSKHIKLEEERRSEDAQSKAALTDWLRAKASFVIEGLKEADKDEFCRCELKLQKWYGDLRGKPFAIEAENSILDISGFSKQYNCAFIWQKDGVKKLNLYLIINYFKGGKLRFKKIKPEAFEANRFYTVINKKSGEIVPMEVNFNFDDPNLIILPLAFGKRFGREFIWNDLLSLETGSLKLANGRVIEKTLYNRRTRQDEPALFVALTFERREVLDSSNIKPMNLIGVDRGENIPAVIALTDPEGCPLSRFKDSLGNPTHILRIGESYKEKQRTIQAKKEVEQRRAGGYSRKYASKAKNLADDMVRNTARDLLYYAVTQDAMLIFENLSRGFGRQGKRTFMAERQYTRMEDWLTAKLAYEGLPSKTYLSKTLAQYTSKTCSNCGFTITSADYDRVLEKLKKTATGWMTTINGKELKVEGQITYYNRYKRQNVVKDLSVELDRLSEESVNNDISSWTKGRQGEALSLLKKRFSHRPVQEKFVCLNCGFETHADEQAALNIARSWLFLRSQEYKKYQTNKTTGNTDKRAFVETWQSFYRKKLKEVWKPAV

SEQ ID NO: 28821 - protein, 978 aa, synthetic construct
  REGION 1..978: note = engineered CasX variant
QEIKRINKIRRRLVKDSNTKKAGKTGPMKTLLVRVMTPDLRERLENLRKKPENIPQPISNTSRANLNKLLTDYTEMKKAILHVYWEEFQKDPVGLMSRVAQPASKKIDQNKLKPEMDEKGNLTTAGFACSQCGQPLFVYKLEQVSEKGKAYTNYFGRCNVAEHEKLILLAQLKPEKDSDEAVTYSLGKFGQRALDFYSIHVTKESTHPVKPLAQIAGNRYASGPVGKALSDACMGTIASFLSKYQDIIIEHQKVVKGNQKRLESLRELAGKENLEYPSVTLPPQPHTKEGVDAYNEVIARVRMWVNLNLWQKLKLSRDDAKPLLRLKGFPSFPLVERQANEVDWWDMVCNVKKLINEKKEDGKVFWQNLAGYKRQEALRPYLSSEEDRKKGKKFARYQLGDLLLHLEKKHGEDWGKVYDEAWERIDKKVEGLSKHIKLEEERRSEDAQSKAALTDWLRAKASFVIEGLKEADKDEFCRCELKLQKWYGDLRGKPFAIEAENSILDISGFSKQYNCAFIWQKDGVKKLNLYLIINYFKGGKLRFKKIKPEAFEANRFYTVINKKSGEIVPMEVNFNFDDPNLIILPLAFGKRFGREFIWNDLLSLETGSLKLANGRVIEKTLYNRRTRQDEPALFVALTFERREVLDSSNIKPMNLIGVDRGENIPAVIALTDPEGCPLSRFKDSLGNPTHILRIGESYKEKQRTIQAKKEVEQRRAGGYSRKYASKAKNLADDMVRNTARDLLYYAVTQDAMLIFENLSRGFGRQGKRTFMAERQYTRMEDWLTAKLAYEGLPSKTYLSKTLAQYTSKTCSNCGFTITSADYDRVLEKLKKTATGWMTTINGKELKVEGQITYYNRYKRQNVVKDLSVELDRLSEESVNNDISSWTKGRSGEALSLLKKRFSHRPVQEKFVCLNCEFETHADEQAALNIARSWLFLRSQEYKKYQTNKTTGNTDKRAFVETWQSFYRKKLKEVWKPAV

SEQ ID NO: 28822 - protein, 979 aa, synthetic construct
  REGION 1..979: note = engineered CasX variant
QEIKRINKIRRRLVKDSNTKKAGKTGPMKTLLVRVMTPDLRERLENLRKKPENIPQPISNTSRANLNKLLTDYTEMKKAILHVYWEEFQKDPVGLMSRVAQPASKKIDQNKLKPEMDEKGNLTTAGFACSQCGQPLFVYKLEQVSEKGKAYTNYFGRCNVAEHEKLILLAQLKPEKDSDEAVTYSLGKFGQRALDFYSIHVTKESTHPVKPLAQIAGNRYASGPVGKALSDACMGTIASFLSKYQDIIIEHQKVVKGNQKRLESLRELAGKENLEYPSVTLPPQPHTKEGVDAYNEVIARVRMWVNLNLWQKLKLSRDDAKPLLRLKGFPSFPLVERQANEVDWWDMVCNVKKLINEKKEDGKVFWQNLAGYKRQEALRPYLSSEEDRKKGKKFARYQLGDLLLHLEKKHGEDWGKVYDEAWERIDKKVEGLSKHIKLEEERRSEDAQSKAALTDWLRAKASFVIEGLKEADKDEFCRCELKLQKWYGDLRGKPFAIEAENSILDISGFSKQYNCAFIWQKDGVKKLNLYLIINYFKGGKLRFKKIKPEAFEANRFYTVINKKSGEIVPMEVNFNFDDPNLIILPLAFGKRFGREFIWNDLLSLETGSLKLANGRVIEKTLYNRRTRQDEPALFVALTFERREVLDSSNIKPMNLIGVDRGENIPAVIALTDPEGCPLSRFKDSLGNPTHILRIGESYKEKQRTIQAKKEVEQRRAGGYSRKYASKAKNLADDMVRNTARDLLYYAVTQDAMLIFENLSRGFGRQGKRTFMAERQYTRMEDWLTAKLAYEGLPSKTYLSKTLAQYTSKTCSNCGFTITSADYDRVLEKLKKTATGWMTTINGKELKVEGQITYYNRYKRQNVVKDLSVELDRLSEESVNNDISSWTKGRSGEALSLLKKRFSHRPVQEKFVCLNCGFETHADEQAALNIARSWLFLRSQEYKKYQTNKTSTGNTDKRAFVETWQSFYRKKLKEVWKPAV

SEQ ID NO: 28823 - protein, 979 aa, synthetic construct
  REGION 1..979: note = engineered CasX variant
QEIKRINKIRRRLVKDSNTKKAGKTGPMKTLLVRVMTPDLRERLENLRKKPENIPQPISNTSRANLNKLLTDYTEMKKAILHVYWEEFQKDPVGLMSRVAQPASKKIDQNKLKPEMDEKGNLTTAGFACSQCGQPLFVYKLEQVSEKGKAYTNYFGRCNVAEHEKLILLAQLKPEKDSDEAVTYSLGKFGQRALDFYSIHVTKESTHPVKPLAQIAGNRYASGPVGKALSDACMGTIASFLSKYQDIIIEHQKVVKGNQKRLESLRELAGKENLEYPSVTLPPQPHTKEGVDAYNEVIARVRMWVNLNLWQKLKLSRDDAKPLLRLKGFPSFPLVERQANEVDWWDMVCNVKKLINEKKEDGKVFWQNLAGYKRQEALRPYLSSEEDRKKGKKFARYQLGDLLLHLEKKHGEDWGKVYDEAWERIDKKVEGLSKHIKLEEERRSEDAQSKAALTDWLRAKASFVIEGLKEADKDEFCRCELKLQKWYGDLRGKPFAIEAENSILDISGFSKQYNCAFIWQKDGVKKLNLYLIINYFKGGKLRFKKIKPEAFEANRFYTVINKKSGEIVPMEVNFNFDDPNLIILPLAFGKRFGREFIWNDLLSLETGSLKLANGRVIEKTLYNRRTRQDEPALFVALTFERREVLDSSNIKPMNLIGVDRGENIPAVIALTDPEGCPLSRFKDSLGNPTHILRIGESYKEKQRTIQAKKEVEQRRAGGYSRKYASKAKNLADDMVRNTARDLLYYAVTQDAMLIFENLSRGFGRQGKRTFMAERQYTRMEDWLTAKLAYEGLPSKTYLSKTLAQYTSKTCSNCGFTITSADYDRVLEKLKKTATGWMTTINGKELKVEGQITYYNRYKRQNVVKDLSVELDRLSEESVNNDISSWTKGRSGEALSLLKKRFSHRPVQEKFVCLNCGFETHADEQAALNIARSWLFLRSQEYKKYQTNKTTGKNTDKRAFVETWQSFYRKKLKEVWKPAV

SEQ ID NO: 28824 - protein, 978 aa, synthetic construct
  REGION 1..978: note = engineered CasX variant
QEIKRINKIRRRLVKDSNTKKAGKTGPMKTLLVRVMTPDLRERLENLRKKPENIPQPISNTSRANLNKLLTDYTEMKKAILHVYWEEFQKDPVGLMSRVAQPASKKIDQNKLKPEMDEKGNLTTAGFACSQCGQPLFVYKLEQVSEKGKAYTNYFGRCNVAEHEKLILLAQLKPEKDSDEAVTYSLGKFGQRALDFYSIHVTKESTHPVKPLAQIAGNRYASGPVGKALSDACMGTIASFLSKYQDIIIEHQKVVKGNQKRLESLRELAGKENLEYPSVTLPPQPHTKEGVDAYNEVIARVRMWVNLNLWQKLKLSRDDAKPLLRLKKFPSFPLVERQANEVDWWDMVCNVKKLINEKKEDGKVFWQNLAGYKRQEALRPYLSSEEDRKKGKKFARYQLGDLLLHLEKKHGEDWGKVYDEAWERIDKKVEGLSKHIKLEEERRSEDAQSKAALTDWLRAKASFVIEGLKEADKDEFCRCELKLQKWYGDLRGKPFAIEAENSILDISGFSKQYNCAFIWQKDGVKKLNLYLIINYFKGGKLRFKKIKPEAFEANRFYTVINKKSGEIVPMEVNFNFDDPNLIILPLAFGKRFGREFIWNDLLSLETGSLKLANGRVIEKTLYNRRTRQDEPALFVALTFERREVLDSSNIKPMNLIGVDRGENIPAVIALTDPEGCPLSRFKDSLGNPTHILRIGESYKEKQRTIQAKKEVEQRRAGGYSRKYASKAKNLADDMVRNTARDLLYYAVTQDAMLIFENLSRGFGRQGKRTFMAERQYTRMEDWLTAKLAYEGLPSKTYLSKTLAQYTSKTCSNCGFTITSADYDRVLEKLKKTATGWMTTINGKELKVEGQITYYNRYKRQNVVKDLSVELDRLSEESVNNDISSWTKGRSGEALSLLKKRFSHRPVQEKFVCLNCGFETHADEQAALNIARSWLFLRSQEYKKYQTNKTTGNTDKRAFVETWQSFYRKKLKEVWKPAV

SEQ ID NO: 28825 - protein, 978 aa, synthetic construct
  REGION 1..978: note = engineered CasX variant
QEIKRINKIRRRLVKDSNTKKAGKTGPMKTLLVRVMTPDLRERLENLRKKPENIPQPISNTSRANLNKLLTDYTEMKKAILHVYWEEFQKDPVGLMSRVAQPASKKIDQNKLKPEMDEKGNLTTAGFACSQCGQPLFVYKLEQVSEKGKAYTNYFGRCNVAEHEKLILLAQLKPEKDSDEAVTYSLGKFGQRALDFYSIHVTKESTHPVKPLAQIAGNRYASGPVGKALSDACMGTIASFLSKYQDIIIEHQKVVKGNQKRLESLRELAGKENLEYPSVTLPPQPHTKEGVDAYNEVIARVRMWVNLNLWQKLKLSRDDAKPLLRLKGFPSFPLVERQANEVDWWDMVCNVKKLINEKKEDGKVFWQNLAGYKRQEALRPYLSSEEDRKKGKKFARYQLGDLLLHLEKKHGEDWGKVYDEAWERIDKKVEGLSKHIKLEEERRSEDAQSKAALTDWLRAKASFVIEGLKEADKDEFCRCELKLQKWYGDLRGKPFAIEAENSILDISGFSKQYNCAFIWQKDGVKKLNLYLIINYFKGGKLRFKKIKPEAFEANRFYTVINKKSGEIVPMEVNFNFDDPNLIILPLAFGKRFGREFIWNDLLSLETGSLKLANGRVIEKTLYNRRTRQDEPALFVALTFERREVLDSSNIKPMNLIGVDRGENIPAVIALTDPEGCPLSRFKDSLGNPTHILRIGERYKEKQRTIQAKKEVEQRRAGGYSRKYASKAKNLADDMVRNTARDLLYYAVTQDAMLIFENLSRGFGRQGKRTFMAERQYTRMEDWLTAKLAYEGLPSKTYLSKTLAQYTSKTCSNCGFTITSADYDRVLEKLKKTATGWMTTINGKELKVEGQITYYNRYKRQNVVKDLSVELDRLSEESVNNDISSWTKGRSGEALSLLKKRFSHRPVQEKFVCLNCGFETHADEQAALNIARSWLFLRSQEYKKYQTNKTTGNTDKRAFVETWQSFYRKKLKEVWKPAV

SEQ ID NO: 28826 - protein, 978 aa, synthetic construct
  REGION 1..978: note = engineered CasX variant
QEIKRINKIRRRLVKDSNTKKAGKTGPMKTLLVRVMTPDLRERLENLRKKPENIPQPISNTSRANLNKLLTDYTEMKKAILHVYWEEFQKDPVGLMSRVAQPASKKIDQNKLKPEMDEKGNLTTAGFACSQCGQPLFVYKLEQVSEKGKAYTNYFGRCNVAEHEKLILLAQLKPEKDSDEAVTYSLGKFGQRALDFYSIHVTKESTHPVKPLAQIAGNRYASGPVGKALSDACMGTIASFLSKYQDIIIEHQKVVKGNQKRLESLRELAGKENLEYPSVTLPPQPHTKEGVDAYNEVIARVRMWVNLNLWQKLKLSRDDAKPLLRLKGFPSFPLVERQANEVDWWDMVCNVKKLINEKKEDGKVFWQNLAGYKRQEALRPYLSSEEDRKKGKKFARYQLGDLLLHLEKKHGEDWGKVYDEAWERIDKKVEGLSKHIKLEEERRSEDAQSKAALTDWLRAKASFVIEGLKEADKDEFCRCELKLQKWYGDLRGKPFAIEAENSILDISGFSKQYNCAFIWQKDGVKKLNLYLIINYFKGGKLRFKKIKPEAFEANRFYTVINKKSGEIVPMEVNFNFDDPNLIILPLAFGKRFGREFIWNDLLSLETGSLQLANGRVIEKTLYNRRTRQDEPALFVALTFERREVLDSSNIKPMNLIGVDRGENIPAVIALTDPEGCPLSRFKDSLGNPTHILRIGESYKEKQRTIQAKKEVEQRRAGGYSRKYASKAKNLADDMVRNTARDLLYYAVTQDAMLIFENLSRGFGRQGKRTFMAERQYTRMEDWLTAKLAYEGLPSKTYLSKTLAQYTSKTCSNCGFTITSADYDRVLEKLKKTATGWMTTINGKELKVEGQITYYNRYKRQNVVKDLSVELDRLSEESVNNDISSWTKGRSGEALSLLKKRFSHRPVQEKFVCLNCGFETHADEQAALNIARSWLFLRSQEYKKYQTNKTTGNTDKRAFVETWQSFYRKKLKEVWKPAV

SEQ ID NO: 28827 - protein, 979 aa, synthetic construct
  REGION 1..979: note = engineered CasX variant
QEIKRINKIRRRLVKDSNTKKAGKTGPMKTLLVRVMTPDLRERLENLRKKPENIPQPISNTSRANLNKLLTDYTEMKKAILHVYWEEFQKDPVGLMSRVAQPASKKIDQNKLKPEMDEKGNLTTAGFACSQCGQPLFVYKLEQVSEKGKAYTNYFGRCNVAEHEKLILLAQLKPEKDSDEAVTYSLGKFGQRALDFYSIHVTKESTHPVKPLAQIAGNRYASGPVGKALSDACMGTIASFLSKYQDIIIEHQKVVKGNQKRLESLRELAGKENLEYPSVTLPPQPHTKEGVDAYNEVIARVRMWVNLNLWQKLKLSRDDAKPLLRLKGFPSFPLVERQANEVDWWDMVCNVKKLINEKKEDGKVFWQNLAGYKRQEALRPYLSSEEDRKKGKKFARYQLGDLLLHLEKKHGEDWGKVYDEAWERIDKKVEGLSKHIKLEEERRSEDAQSKAALTDWLRAKASFVIEGLKEADKDEFCRCELKLQKWYGDLRGKPFAIEAENSILDISGFSKQYNCAFIWQKDGVKKLNLYLIINYFKGGKLRFKKIKPEAFEANRFYTVINKKSGEIVPMEVNFNFDDPNLIILPLAFGKRVFGREFIWNDLLSLETGSLKLANGRVIEKTLYNRRTRQDEPALFVALTFERREVLDSSNIKPMNLIGVDRGENIPAVIALTDPEGCPLSRFKDSLGNPTHILRIGESYKEKQRTIQAKKEVEQRRAGGYSRKYASKAKNLADDMVRNTARDLLYYAVTQDAMLIFENLSRGFGRQGKRTFMAERQYTRMEDWLTAKLAYEGLPSKTYLSKTLAQYTSKTCSNCGFTITSADYDRVLEKLKKTATGWMTTINGKELKVEGQITYYNRYKRQNVVKDLSVELDRLSEESVNNDISSWTKGRSGEALSLLKKRFSHRPVQEKFVCLNCGFETHADEQAALNIARSWLFLRSQEYKKYQTNKTTGNTDKRAFVETWQSFYRKKLKEVWKPAV

SEQ ID NO: 28828 - protein, 979 aa, synthetic construct
  REGION 1..979: note = engineered CasX variant
QEIKRINKIRRRLVKDSNTKKAGKTGPMKTLLVRVMTPDLRERLENLRKKPENIPQPISNTSRANLNKLLTDYTEMKKAILHVYWEEFQKDPVGLMSRVAQPASKKIDQNKLKPEMDEKGNLTTAGFACSQCGQPLFVYKLEQVSEKGKAYTNYFGRCNVAEHEKLILLAQLKPEKDSDEAVTYSLGKFGQRALDFYSIHVTKESTHPVKPLAQIAGNRYASGPVGKALSDACMGTIASFLSKYQDIIIEHQKVVKGNQKRLESLRELAGKENLEYPSVTLPPQPHTKEGVDAYNEVIARVRMWVNLNLWQKLKLSRDDAKPLLRLKGFPSFPLVERQANEVDWWDMVCNVKKLINEKKEDGKVFWQNLAGYKRQEALRPYLSSEEDRKKGKKFARYQLGDLLLHLEKKHGEDWGKVYDEAWERIDKKVEGLSKHIKLEEERRSEDAQSKAALTDWLRAKASFVIEGLKEADKDEFCRCELKLQKWYGDLRGKPFAIEAENSILDISGFSKQYNCAFIWQKDGVKKLNLYLIINYFKGGKLRFKKIKPEAFEANRFYTVINKKSGEIVPMEVNFNFDDPNLIILPLAFGKRVGREFIWNDLLSLETGSLKLANGRVIEKTLYNRRTRQDEPALFVALTFERREVLDSSNIKTPMNLIGVDRGENIPAVIALTDPEGCPLSRFKDSLGNPTHILRIGESYKEKQRTIQAKKEVEQRRAGGYSRKYASKAKNLADDMVRNTARDLLYYAVTQDAMLIFENLSRGFGRQGKRTFMAERQYTRMEDWLTAKLAYEGLPSKTYLSKTLAQYTSKTCSNCGFTITSADYDRVLEKLKKTATGWMTTINGKELKVEGQITYYNRYKRQNVVKDLSVELDRLSEESVNNDISSWTKGRSGEALSLLKKRFSHRPVQEKFVCLNCGFETHADEQAALNIARSWLFLRSQEYKKYQTNKTTGNTDKRAFVETWQSFYRKKLKEVWKPAV

SEQ ID NO: 28829 - protein, 979 aa, synthetic construct
  REGION 1..979: note = engineered CasX variant
QEIKRINKIRRRLVKDSNTKKAGKTGPMKTLLVRVMTPDLRERLENLRKKPENIPQPISNTSRANLNKLLTDYTEMKKAILHVYWEEFQKDPVGLMSRVAQPASKKIDQNKLKPEMDEKGNLTTAGFACSQCGQPLFVYKLEQVSEKGKAYTNYFGRCNVAEHEKLILLAQLKPEKDSDEAVTYSLGKFGQRALDFYSIHVTKESTHPVKPLAQIAGNRYASGPVGKALSDACMGTIASFLSKYQDIIIEHQKVVKGNQKRLESLRELAGKENLEYPSVTLPPQPHTKEGVDAYNEVIARVRMWVNLNLWQKLKLSRDDAKPLLRLKGFPSFPLVERQANEVDWWDMVCNVKKLINEKKEDGKVFWQNLAGYKRQEALRPYLSSEEDRKKGKKFARYQLGDLLLHLEKKHGEDWGKVYDEAWERIDKKVEGLSKHIKLEEERRSEDAQSKAALTDWLRAKASFVIEGLKEADKDEFCRCELKLQKWYGDLRGKPFAIEAENSILDISGFSKQYNCAFIWQKDGVKKLNLYLIINYFKGGKLRFKKIKPEAFEANRFYTVINKKSGEIVPMEVNFNFDDPNLIILPLAFGKRVGREFIWNDLLSLETGSLKLANGRVIEKTLYNRRTRQDEPALFVALTFERREVLDSSNIKPMSNLIGVDRGENIPAVIALTDPEGCPLSRFKDSLGNPTHILRIGESYKEKQRTIQAKKEVEQRRAGGYSRKYASKAKNLADDMVRNTARDLLYYAVTQDAMLIFENLSRGFGRQGKRTFMAERQYTRMEDWLTAKLAYEGLPSKTYLSKTLAQYTSKTCSNCGFTITSADYDRVLEKLKKTATGWMTTINGKELKVEGQITYYNRYKRQNVVKDLSVELDRLSEESVNNDISSWTKGRSGEALSLLKKRFSHRPVQEKFVCLNCGFETHADEQAALNIARSWLFLRSQEYKKYQTNKTTGNTDKRAFVETWQSFYRKKLKEVWKPAV

SEQ ID NO: 28830 - protein, 978 aa, synthetic construct
  REGION 1..978: note = engineered CasX variant
QEIKRINKIRRRLVKDSNTKKAGKTGPMKTLLVRVMTPDLRERLENLRKKPENIPQPISNTSRANLNKLLTDYTEMKKAILHVYWEEFQKDPVGLMSRVAQPASKKIDQNKLKPEMDEKGNLTTAGFACSQCGQPLFVYKLEQVSEKGKAYTNYFGRCNVAEHEKLILLAQLKPEKDSDEAVTYSLGKFGQRALDFYSIHVTKESTHPVKPLAQIAGNRYASGPVGKALSDACMGTIASFLSKYQDIIIEHQKVVKGNQKRLESLRELAGKENLEYPSVTLPPQPHTKEGVDAYNEVIARVRMWVNLNLWQKLKLSRDDAKPLLRLKGFPSFPLVERQANEVDWWDMVCNVKKLINEKKEDGKVFWQNLAGYKRQEALRPYLSSEEDRKKGKKFARYQLGDLLLHLEKKHGEDWGKVYDEAWERIDKKVEGLSKHIKLEEERRSEDAQSKAALTDWLRAKASFVIEGLKEADKDEFCRCELKLQKWYGDLRGKPFAIEAENSILDISGFSKQYNCAFIWQKDGVKKLNLYLIINYFKGGKLRFKKIKPEAFEANRFYTVINKKSGEIVPMEVNFNFDDPNLIILPLAFGKRVGREFIWNDLLSLETGSLKLANGRVIEKTLYNRRTRQDEPALFVALTFERREVLDSSNIKPMNLIGVDRGENIPAVIALTDPEGCPLSRFKDSLGNPTHILRIRESYKEKQRTIQAKKEVEQRRAGGYSRKYASKAKNLADDMVRNTARDLLYYAVTQDAMLIFENLSRGFGRQGKRTFMAERQYTRMEDWLTAKLAYEGLPSKTYLSKTLAQYTSKTCSNCGFTITSADYDRVLEKLKKTATGWMTTINGKELKVEGQITYYNRYKRQNVVKDLSVELDRLSEESVNNDISSWTKGRSGEALSLLKKRFSHRPVQEKFVCLNCGFETHADEQAALNIARSWLFLRSQEYKKYQTNKTTGNTDKRAFVETWQSFYRKKLKEVWKPAV

SEQ ID NO: 28831 - protein, 978 aa, synthetic construct
  REGION 1..978: note = engineered CasX variant
QEIKRINKIRRRLVKDSNTKKAGKTGPMKTLLVRVMTPDLRERLENLRKKPENIPQPISNTSRANLNKLLTDYTEMKKAILHVYWEEFQKDPVGLMSRVAQPASKKIDQNKLKPEMDEKGNLTTAGFACSQCGQPLFVYKLEQVSEKGKAYTNYFGRCNVAEHEKLILLAQLKPEKDSDEAVTYSLGKFGQRALDFYSIHVTKESTHPVKPLAQIAGNRYASGPVGKALSDACMGTIASFLSKYQDIIIEHQKVVKGNQKRLESLRELAGKENLEYPSVTLPPQPHTKEGVDAYNEVIARVRMWVNLNLWQKLKLSRDDAKPLLRLKGFPSFPLVERQANEVDWWDMVCNVKKLINEKKEDGKVFWQNLAGYKRQEALRPYLSSEEDRKKGKKFARYQLGDLLLHLEKKHGEDWGKVYDEAWERIDKKVEGLSKHIKLEEERRSEDAQSKAALTDWLRAKASFVIEGLKEADKDEFCRCELKLQKWYGDLRGKPFAIEAENSILDISGFSKQYNCAFIWQKDGVKKLNLYLIINYFKGGKLRFKKIKPEAFEANRFYTVINKKSGEIVPMEVNFNFDDPNLIILPLAFGKRVGREFIWNDLLSLETGSLKLANGRVIEKTLYNRRTRQDEPALFVALTFERREVLDSSNIKPMNLIGVDRGENIPAVIALTDPEGCPLSRFKDSLGNPTHILRIGESYKEKQRTIQAKKEVEQRRAGGYSRKYASKAKNLADDMVRNTARDLLYYAVTQDAMLIFENLSRGFGRQGKRTFSAERQYTRMEDWLTAKLAYEGLPSKTYLSKTLAQYTSKTCSNCGFTITSADYDRVLEKLKKTATGWMTTINGKELKVEGQITYYNRYKRQNVVKDLSVELDRLSEESVNNDISSWTKGRSGEALSLLKKRFSHRPVQEKFVCLNCGFETHADEQAALNIARSWLFLRSQEYKKYQTNKTTGNTDKRAFVETWQSFYRKKLKEVWKPAV

SEQ ID NO: 28832 - protein, 978 aa, synthetic construct
  REGION 1..978: note = engineered CasX variant
QEIKRINKIRRRLVKDSNTKKAGKTGPMKTLLVRVMTPDLRERLENLRKKPENIPQPISNTSRANLNKLLTDYTEMKKAILHVYWEEFQKDPVGLMSRVAQPASKKIDQNKLKPEMDEKGNLTTAGFACSQCGQPLFVYKLEQVSEKGKAYTNYFGRCNVAEHEKLILLAQLKPEKDSDEAVTYSLGKFGQRALDFYSIHVTKESTHPVKPLAQIAGNRYASGPVGKALSDACMGTIASFLSKYQDIIIEHQKVVKGNQKRLESLRELAGKENLEYPSVTLPPQPHTKEGVDAYNEVIARVRMWVNLNLWQKLKLSRDDAKPLLRLKGFPSFPLVERQANEVDWWDMVCNVKKLINEKKEDGKVFWQNLAGYKRQEALRPYLSSEEDRKKGKKFARYQLGDLLLHLEKKHGEDWGKVYDEAWERIDKKVEGLSKHIKLEEERRSEDAQSKAALTDWLRAKASFVIEGLKEADKDEFCRCELKLQKWYGDLRGKPFAIEAENSILDISGFSKQYNCAFIWQKDGVKKLNLYLIINYFKGGKLRFKKIKPEAFEANRFYTVINKKSGEIVPMEVNFNFDDPNLIILPLAFGKRVGREFIWNDLLSLETGSLKLANGRVIEKTLYNRRTRQDEPALFVALTFERREVLDSSNIKPMNLIGVDRGENIPAVIALTDPEGCPLSRFKDSLGNPTHILRIGESYKEKQRTIQAKKEVEQRRAGGYSRKYASKAKNLADDMVRNTARDLLYYAVTQDAMLIFENLSRGFGRQGKRTFMAERQYTRMEDWLTAKLAYEGLPSKTYLSKTLAQYTSKTCSNCGFTITSADYDRVLEKLKKTATGWMTTINGKELKVEGQITYYNRYKRQNVVKDLSVELDRLSEESVNNDISSWDKGRSGEALSLLKKRFSHRPVQEKFVCLNCGFETHADEQAALNIARSWLFLRSQEYKKYQTNKTTGNTDKRAFVETWQSFYRKKLKEVWKPAV

SEQ ID NO: 28833 - protein, 978 aa, synthetic construct
  REGION 1..978: note = engineered CasX variant
QEIKRINKIRRRLVKDSNTKKAGKTGPMKTLLVRVMTPDLRERLENLRKKPENIPQPISNTSRANLNKLLTDYTEMKKAILHVYWEEFQVDPVGLMSRVAQPASKKIDQNKLKPEMDEKGNLTTAGFACSQCGQPLFVYKLEQVSEKGKAYTNYFGRCNVAEHEKLILLAQLKPEKDSDEAVTYSLGKFGQRALDFYSIHVTKESTHPVKPLAQIAGNRYASGPVGKALSDACMGTIASFLSKYQDIIIEHQKVVKGNQKRLESLRELAGKENLEYPSVTLPPQPHTKEGVDAYNEVIARVRMWVNLNLWQKLKLSRDDAKPLLRLKGFPSFPLVERQANEVDWWDMVCNVKKLINEKKEDGKVFWQNLAGYKRQEALRPYLSSEEDRKKGKKFARYQLGDLLLHLEKKHGEDWGKVYDEAWERIDKKVEGLSKHIKLEEERRSEDAQSKAALTDWLRAKASFVIEGLKEADKDEFCRCELKLQKWYGDLRGKPFAIEAENSILDISGFSKQYNCAFIWQKDGVKKLNLYLIINYFKGGKLRFKKIKPEAFEANRFYTVINKKSGEIVPMEVNFNFDDPNLIILPLAFGKRVGREFIWNDLLSLETGSLKLANGRVIEKTLYNRRTRQDEPALFVALTFERREVLDSSNIKPMNLIGVDRGENIPAVIALTDPEGCPLSRFKDSLGNPTHILRIGESYKEKQRTIQAKKEVEQRRAGGYSRKYASKAKNLADDMVRNTARDLLYYAVTQDAMLIFENLSRGFGRQGKRTFMAERQYTRMEDWLTAKLAYEGLPSKTYLSKTLAQYTSKTCSNCGFTITSADYDRVLEKLKKTATGWMTTINGKELKVEGQITYYNRYKRQNVVKDLSVELDRLSEESVNNDISSWTKGRSGEALSLLKKRFSHRPVQEKFVCLNCGFETHADEQAALNIARSWLFLRSQEYKKYQTNKTTGNTDKRAFVETWQSFYRKKLKEVWKPAV

SEQ ID NO: 28834 - protein, 978 aa, synthetic construct
  REGION 1..978: note = engineered CasX variant
QEIKRLNKIRRRLVKDSNTKKAGKTGPMKTLLVRVMTPDLRERLENLRKKPENIPQPISNTSRANLNKLLTDYTEMKKAILHVYWEEFQKDPVGLMSRVAQPASKKIDQNKLKPEMDEKGNLTTAGFACSQCGQPLFVYKLEQVSEKGKAYTNYFGRCNVAEHEKLILLAQLKPEKDSDEAVTYSLGKFGQRALDFYSIHVTKESTHPVKPLAQIAGNRYASGPVGKALSDACMGTIASFLSKYQDIIIEHQKVVKGNQKRLESLRELAGKENLEYPSVTLPPQPHTKEGVDAYNEVIARVRMWVNLNLWQKLKLSRDDAKPLLRLKGFPSFPLVERQANEVDWWDMVCNVKKLINEKKEDGKVFWQNLAGYKRQEALRPYLSSEEDRKKGKKFARYQLGDLLLHLEKKHGEDWGKVYDEAWERIDKKVEGLSKHIKLEEERRSEDAQSKAALTDWLRAKASFVIEGLKEADKDEFCRCELKLQKWYGDLRGKPFAIEAENSILDISGFSKQYNCAFIWQKDGVKKLNLYLIINYFKGGKLRFKKIKPEAFEANRFYTVINKKSGEIVPMEVNFNFDDPNLIILPLAFGKRVGREFIWNDLLSLETGSLKLANGRVIEKTLYNRRTRQDEPALFVALTFERREVLDSSNIKPMNLIGVDRGENIPAVIALTDPEGCPLSRFKDSLGNPTHILRIGESYKEKQRTIQAKKEVEQRRAGGYSRKYASKAKNLADDMVRNTARDLLYYAVTQDAMLIFENLSRGFGRQGKRTFMAERQYTRMEDWLTAKLAYEGLPSKTYLSKTLAQYTSKTCSNCGFTITSADYDRVLEKLKKTATGWMTTINGKELKVEGQITYYNRYKRQNVVKDLSVELDRLSEESVNNDISSWTKGRSGEALSLLKKRFSHRPVQEKFVCLNCGFETHADEQAALNIARSWLFLRSQEYKKYQTNKTTGNTDKRAFVETWQSFYRKKLKEVWKPAV

SEQ ID NO: 28835 - protein, 978 aa, synthetic construct
  REGION 1..978: note = engineered CasX variant
QEIKRINKIRRRLVKDSNTKKAGKTGPMKTLLVRVMTPDLRERLENLRKKPENIPQPISNTSRANLNKLLTDYTEMKKAILHVYWEEFQKDPVGLMSRVAQPASKKIDQNKLKPEMDEKGNLTTAGFACSQCGQPLFVYKLEQVSEKGKAYTNYVGRCNVAEHEKLILLAQLKPEKDSDEAVTYSLGKFGQRALDFYSIHVTKESTHPVKPLAQIAGNRYASGPVGKALSDACMGTIASFLSKYQDIIIEHQKVVKGNQKRLESLRELAGKENLEYPSVTLPPQPHTKEGVDAYNEVIARVRMWVNLNLWQKLKLSRDDAKPLLRLKGFPSFPLVERQANEVDWWDMVCNVKKLINEKKEDGKVFWQNLAGYKRQEALRPYLSSEEDRKKGKKFARYQLGDLLLHLEKKHGEDWGKVYDEAWERIDKKVEGLSKHIKLEEERRSEDAQSKAALTDWLRAKASFVIEGLKEADKDEFCRCELKLQKWYGDLRGKPFAIEAENSILDISGFSKQYNCAFIWQKDGVKKLNLYLIINYFKGGKLRFKKIKPEAFEANRFYTVINKKSGEIVPMEVNFNFDDPNLIILPLAFGKRVGREFIWNDLLSLETGSLKLANGRVIEKTLYNRRTRQDEPALFVALTFERREVLDSSNIKPMNLIGVDRGENIPAVIALTDPEGCPLSRFKDSLGNPTHILRIGESYKEKQRTIQAKKEVEQRRAGGYSRKYASKAKNLADDMVRNTARDLLYYAVTQDAMLIFENLSRGFGRQGKRTFMAERQYTRMEDWLTAKLAYEGLPSKTYLSKTLAQYTSKTCSNCGFTITSADYDRVLEKLKKTATGWMTTINGKELKVEGQITYYNRYKRQNVVKDLSVELDRLSEESVNNDISSWTKGRSGEALSLLKKRFSHRPVQEKFVCLNCGFETHADEQAALNIARSWLFLRSQEYKKYQTNKTTGNTDKRAFVETWQSFYRKKLKEVWKPAV

SEQ ID NO: 28836 - protein, 978 aa, synthetic construct
  REGION 1..978: note = engineered CasX variant
QEIKRINKIRRRLVKDSNTKKAGKTGPMKTLLVRVMTPDLRERLENLRKKPENIPQPISNTSRANLNKLLTDYTEMKKAILHVYWEEFQKDPVGLMSRVAQPASKKIDQNKLKPEMDEKGNLTTAGFACSQCGQPLFVYKLEQVSEKGKAYTNYFGRCNVAEHEKLILLAQLKPEKDSDEAVTYSLGKFGQRALDFYSIHVTKESTHPVKPLAQIAGNRYASGPVGKALSDACMGTIASFLSKYQDIIIEHQKVVKGNQKRLESLRELAGKENLEYPSVTLPPQPHTKEGVDAYNEVIARVRMWVNLNLWQKLKLSRDDAKPLLRLKGFPSFPLVERQANEVDWWDMVCNVKKLINEKKEDGKVFWQNLAGYKRQEALRPYLSSEEDRKKGKKFARYQLGDLLLHLEKKHGEDWGKVYDEAWERIDKKVEGLSKHIKLEEERRSEDAQSKAALTDWLRAKASFVIEGLKEADKDEFCRCELKLQKWYGDLRGKPFAIEAENSILDISGFSKQYNCAFIWQKDGVKKLNLYLIINYFKGGKLRFKKIKPEAFEANRFYTVINKKSGEIVPMEVNFNFDDPNLIILPLAFGKRVGREFIWNDLLSLETGSLKLANGRVIEKTLYNRRTRQDEPALFVALTFERREVLDSSNIKPMNLIGVDRGENIPAVIALTDPEGCPLSRFKDSLGNPTHILRIGESYKEKQRTIQAKKEVEQRRAGGYSRKYASKAKNLADDMVRNTARDLLYYAVTQDAMLIFENLSRGFGRQGKRTFMAERQYTRMEDWLTAKLAYEGLASKTYLSKTLAQYTSKTCSNCGFTITSADYDRVLEKLKKTATGWMTTINGKELKVEGQITYYNRYKRQNVVKDLSVELDRLSEESVNNDISSWTKGRSGEALSLLKKRFSHRPVQEKFVCLNCGFETHADEQAALNIARSWLFLRSQEYKKYQTNKTTGNTDKRAFVETWQSFYRKKLKEVWKPAV

SEQ ID NO: 28837 - protein, 978 aa, synthetic construct
  REGION 1..978: note = engineered CasX variant
QEIKRINKIRRRLVKDSNTKKAGKTGPMKTLLVRVMTPDLRERLENLRKKPENIPQPISNTSRANLNKLLTDYTEMKKAILHVYWEEFQKDPVGLMSRVAQPASKKIDQNKLKPEMDEKGNLTTAGFACSQCGQPLFVYKLEQVSEKGKAYTNYFGRCNVAEHEKLILLAQLKPEKDSDEAVTYSLGKFGQRALDFYSIHVTKESTHPVKPLAQIAGNRYASGPVGKALSDACMGTIASFLSKYQDIIIEHQKVVKGNQKRLESLRELAGKENLEYPSVTLPPQPHTKEGVDAYNEVIARVRMWVNLNLWQKLKLSRDDAKPLLRLKGFPSFPLVERQANEVDWWDMVCNVKKLINEKKEDGKVFWQNLAGYKRQEALRPYLSSEEDRKKGKKFARYQLGDLLLHLEKKHGEDWGKVYDEAWERIDKKVEGLSKHIKLEEERRSEDAQSKAALTDWLRAKASFVIEGLKEADKDEFCRCELKLQKWYGDLRGKPFAIEAENSILDISGFSKQYNCAFIWQKDGVKKLNLYLIINYFKGGKLRFKKIKPEAFEANRFYTVINKKSGEIVPMEVNFNFDDPNLIILPLAFGKRVGREFIWNDLLSLETGSLKLANGRVIEKTLYNRRTRQDEPALFVALTFERREVLDSSNIKPMNLIGVDRGENIPAVIALTDPEGCPLSRFKDSLGNPTHILRIGESYKEKQRTIQAKKEVEQRRAGGYSRKYASKAKNLADDMVRNTARDLLYYAVTQDAMLIFENLSRGFGRQGKRTFMAERQYTRMEDWLTAKLAYEGLPSKVYLSKTLAQYTSKTCSNCGFTITSADYDRVLEKLKKTATGWMTTINGKELKVEGQITYYNRYKRQNVVKDLSVELDRLSEESVNNDISSWTKGRSGEALSLLKKRFSHRPVQEKFVCLNCGFETHADEQAALNIARSWLFLRSQEYKKYQTNKTTGNTDKRAFVETWQSFYRKKLKEVWKPAV

SEQ ID NO: 28838 - protein, 979 aa, synthetic construct
  REGION 1..979: note = engineered CasX variant
QEIKRINKIRRRLVKDSNTKKAGKTGPMKTLLVRVMTPDLRERLENLRKKPENIPQPISNTSRANLNKLLTDYTEMKKAILHVYWEEFQKDPVGLMSRVAQPASKKIDQNKLKPEMDEKGNLTTAGFACSQCGQPLFVYKLEQVSEKGKAYTNYFGRCNVAEHEKLILLAQLKPEKDSDEAVTYSLGKFGQRALDFYSIHVTKESTHPVKPLAQIAGNRYASGPVGKALSDACMGTIASFLSKYQDIIIEHQKVVKGNQKRLESLRELAGKENLEYPSVTLPPQPHTKEGVDAYNEVIARVRMWVNLNLWQKLKLSRDDAKPLLRLKGFPSFPLVERQANEVDWWDMVCNVKKLINEKKEDGKVFWQNLAGYKRQEALRPYLSSEEDRKKGKKFARYQLGDLLLHLEKKHGEDWGKVYDEAWERIDKKVEGLSKHIKLEEERRSEDAQSKAALTDWLRAKASFVIEGLKEADKDEFCRCELKLQKWYGDLRGKPFAIEAENSILDISGFSKQYNCAFIWQKDGVKKLNLYLIINYFKGGKLRFKKIKPEAFEANRFYTVINKKSGEIVPMEVNFNFDDPNLIILPLAFGKRVGREFIWNDLLSLETGSLKLANGRVIEKTLYNRRTRQDEPALFVALTFERREVLDSSNIKPMNLIGVDRGENIPAVIALTDPEGCPLSRFKDSLGNPTHILRIGESYKEKQRTIQAKKEVEQRRAGGYSRKYASKAKNLADDMVRNTARDLLYYAVTQDAMLIFENLSRGFGRQGKRTFMAERQYTRMEDWLTAKLAYEGPLPSKTYLSKTLAQYTSKTCSNCGFTITSADYDRVLEKLKKTATGWMTTINGKELKVEGQITYYNRYKRQNVVKDLSVELDRLSEESVNNDISSWTKGRSGEALSLLKKRFSHRPVQEKFVCLNCGFETHADEQAALNIARSWLFLRSQEYKKYQTNKTTGNTDKRAFVETWQSFYRKKLKEVWKPAV

SEQ ID NO: 28839 - protein, 979 aa, synthetic construct
  REGION 1..979: note = engineered CasX variant
QEIKRINKIRRRLVKDSNTKKAGKTGPMKTLLVRVMTPDLRERLENLRKKPENIPQPISNTSRANLNKLLTDYTEMKKAILHVYWEEFQKDPVGLMSRVAQPASKKIDQNKLKPEMDEKGNLTTAGFACSQCGQPLFVYKLEQVSEKGKAYTNYFGRCNVAEHEKLILLAQLKPEKDSDEAVTYSLGKFGQRALDFYSIHVTKESTHPVKPLAQIAGNRYASGPVGKALSDACMGTIASFLSKYQDIIIEHQKVVKGNQKRLESLRELAGKENLEYPSVTLPPQPHTKEGVDAYNEVIARVRMWVNLNLWQKLKLSRDDAKPLLRLKGFPSFPLVERQANEVDWWDMVCNVKKLINEKKEDGKVFWQNLAGYKRQEALRPYLSSEEDVRKKGKKFARYQLGDLLLHLEKKHGEDWGKVYDEAWERIDKKVEGLSKHIKLEEERRSEDAQSKAALTDWLRAKASFVIEGLKEADKDEFCRCELKLQKWYGDLRGKPFAIEAENSILDISGFSKQYNCAFIWQKDGVKKLNLYLIINYFKGGKLRFKKIKPEAFEANRFYTVINKKSGEIVPMEVNFNFDDPNLIILPLAFGKRVGREFIWNDLLSLETGSLKLANGRVIEKTLYNRRTRQDEPALFVALTFERREVLDSSNIKPMNLIGVDRGENIPAVIALTDPEGCPLSRFKDSLGNPTHILRIGESYKEKQRTIQAKKEVEQRRAGGYSRKYASKAKNLADDMVRNTARDLLYYAVTQDAMLIFENLSRGFGRQGKRTFMAERQYTRMEDWLTAKLAYEGLPSKTYLSKTLAQYTSKTCSNCGFTITSADYDRVLEKLKKTATGWMTTINGKELKVEGQITYYNRYKRQNVVKDLSVELDRLSEESVNNDISSWTKGRSGEALSLLKKRFSHRPVQEKFVCLNCGFETHADEQAALNIARSWLFLRSQEYKKYQTNKTTGNTDKRAFVETWQSFYRKKLKEVWKPAV

SEQ ID NO: 28840 - protein, 978 aa, synthetic construct
  REGION 1..978: note = engineered CasX variant
QEIKRINKIRRRLVKDSNTKKAGKTGPMKTLLVRVMTPDLRERLENLRKKPENIPQPISNTSRANLNKLLTDYTEMKKAILHVYWEEFQKDPVGLMSRVAQPASKKIDQNKLKPEMDEKGNLTTAGFACSQCGQPLFVYKLEQVSEKGKAYTNYFGRCNVAEHEKLILLAQLKPEKDSDEAVTYSLGKFGQRALDFYSIHVTKESTHPVKPLAQIAGNRYASGPVGKALSDACMGTIASFLSKYQDIIIEHQKVVKGNQKRLESLRELAGKENLEYPSVTLPPQPHTKEGVDAYNEVIARVRMWVNLNLWQKLKLSRDDAKPLLRLKGFPSFPLVERQANEVDWWDMVCNVKKLINEKKEDGKVFWQNLAGYKRQEALRPYLSSEEDRKKGKKFARYQLGDLLLHLEKKHGEDWGKVYDEAWERIDKKVEGLSKHIKLEEERRSEDAQSKAALTDWLRAKASFVIEGLKEADKDEFCRCELKLQKWYGDLRGKPFAIEAENSILDISGFSKQYNCAFIWQKDGVKKLNLYLIINYFKGGKLRFKKIKPEAFEANRFYTVINKKSGEIVPMEVNFNFDDPNLIILPLAFGKRVGREFIWNDLLSLETGSLKLANGRVIEKTLYNRRTRQDEPALFVALTFERREVLDSSNIKPMNLIGVDRGENIPAVIALTDPEGCPLSRFKDSLGNPTHILRIGESYKEKQRTIQAKKEVEQRRAGGYSRKYASKAKNLADDMVRNTARDLLYYAVTQDAMLIFENLSRGFGRQGKRTFMAERQYTRMEDWLTAKLAYEGLPSKTYLSKTLAQYTSKTCSNCGFTITSADYDRMLEKLKKTATGWMTTINGKELKVEGQITYYNRYKRQNVVKDLSVELDRLSEESVNNDISSWTKGRSGEALSLLKKRFSHRPVQEKFVCLNCGFETHADEQAALNIARSWLFLRSQEYKKYQTNKTTGNTDKRAFVETWQSFYRKKLKEVWKPAV

SEQ ID NO: 28841 - protein, 978 aa, synthetic construct
  REGION 1..978: note = engineered CasX variant
QEIKRINKIRRRLVKDSNTKKAGKTGPMKTLLVRVMTPDLRERLENLRKKPENIPQPISNTSRANLNKLLTDYTEMKKAILHVYWEEFQKDPVGLMSRVAQPASKKIDQNKLKPEMDEKGNLTTAGFACSQCGQPLFVYKLEQVSEKGKAYTNYFGRCNVAEHEKLILLAQLKPEKDSDEAVTYSLGKFGQRALDFYSIHVTKESTHPVKPLAQIAGNRYASGPVGKALSDACMGTIASFLSKYQDIIIEHQKVVKGNQKRLESLRELAGKENLEYPSVTLPPQPHTKEGVDAYNEVIARVRMWVNLNLWQKLKLSRDDAKPLLRLKGFPSFPLVERQANEVDWWDMVCNVKKLINEKKEDGKVFWQNLAGYKRQEALRPYLSSEEDRKKGKKFARYQLGDLLLHLEKKHGEDWGKVYDEAWERIDKKVEGLSKHIKLEEERRSEDAQSKAALTDWLRAKASFVIEGLKEADKDEFCRCELKLQKWYGDLRGKPFAIEAENSILDISGFSKQYNCAFIWQKDGVKKLNLYLIINYFKGGKLRFKKIKPEAFEANRFYTVINKKSGEIVPMEVNFNFDDPNLIILPLAFGKRVGREFIWNDLLSLETGSLKLANGRVIEKTLYNRRTRQDEPALFVALTFERREVLDSSNIKPMNLIGVDRGENIPAVIALTDPEGCPLSRFKDSLGNPTHILRIGESYKEKQRTIQAKKEVEQRRAGGYSRKYASKAKNLADDMVRNTARDLLYYAVTQDAMLIFENLSRGFGRQGKRTFMAERQYTRMEDWLTAKLAYEGLPSKTYLSKTLAQYTSKTCSNCGFTITSADYDRVLEKLKKTATGWMTTINGKELKVEGQITYYNRYKRQNVVKDLSVELDRLSEESVNNDISSWTKGRQGEALSLLKKRFSHRPVQEKFVCLNCGFETHADEQAALNIARSWLFLRSQEYKKYQTNKTTGNTDKRAFVETWQSFYRKKLKEVWKPAV

SEQ ID NO: 28842 - protein, 978 aa, synthetic construct
  REGION 1..978: note = engineered CasX variant
QEIKRINKIRRRLVKDSNTKKAGKTGPMKTLLVRVMTPDLRERLENLRKKPENIPQPISNTSRANLNKLLTDYTEMKKAILHVYWEEFQKDPVGLMSRVAQPASKKIDQNKLKPEMDEKGNLTTAGFACSQCGQPLFVYKLEQVSEKGKAYTNYFGRCNVAEHEKLILLAQLKPEKDSDEAVTYSLGKFGQRALDFYSIHVTKESTHPVKPLAQIAGNRYASGPVGKALSDACMGTIASFLSKYQDIIIEHQKVVKGNQKRLESLRELAGKENLEYPSVTLPPQPHTKEGVDAYNEVIARVRMWVNLNLWQKLKLSRDDAKPLLRLKGFPSFPLVERQANEVDWWDMVCNVKKLINEKKEDGKVFWQNLAGYKRQEALRPYLSSEEDRKKGKKFARYQLGDLLLHLEKKHGEDWGKVYDEAWERIDKKVEGLSKHIKLEEERRSEDAQSKAALTDWLRAKASFVIEGLKEADKDEFCRCELKLQKWYGDLRGKPFAIEAENSILDISGFSKQYNCAFIWQKDGVKKLNLYLIINYFKGGKLRFKKIKPEAFEANRFYTVINKKSGEIVPMEVNFNFDDPNLIILPLAFGKRVGREFIWNDLLSLETGSLKLANGRVIEKTLYNRRTRQDEPALFVALTFERREVLDSSNIKPMNLIGVDRGENIPAVIALTDPEGCPLSRFKDSLGNPTHILRIGESYKEKQRTIQAKKEVEQRRAGGYSRKYASKAKNLADDMVRNTARDLLYYAVTQDAMLIFENLSRGFGRQGKRTFMAERQYTRMEDWLTAKLAYEGLPSKTYLSKTLAQYTSKTCSNCGFTITSADYDRVLEKLKKTATGWMTTINGKELKVEGQITYYNRYKRQNVVKDLSVELDRLSEESVNNDISSWTKGRSGEALSLLKKRFSHRPVQEKFVCLNCEFETHADEQAALNIARSWLFLRSQEYKKYQTNKTTGNTDKRAFVETWQSFYRKKLKEVWKPAV

SEQ ID NO: 28843 - protein, 979 aa, synthetic construct
  REGION 1..979: note = engineered CasX variant
QEIKRINKIRRRLVKDSNTKKAGKTGPMKTLLVRVMTPDLRERLENLRKKPENIPQPISNTSRANLNKLLTDYTEMKKAILHVYWEEFQKDPVGLMSRVAQPASKKIDQNKLKPEMDEKGNLTTAGFACSQCGQPLFVYKLEQVSEKGKAYTNYFGRCNVAEHEKLILLAQLKPEKDSDEAVTYSLGKFGQRALDFYSIHVTKESTHPVKPLAQIAGNRYASGPVGKALSDACMGTIASFLSKYQDIIIEHQKVVKGNQKRLESLRELAGKENLEYPSVTLPPQPHTKEGVDAYNEVIARVRMWVNLNLWQKLKLSRDDAKPLLRLKGFPSFPLVERQANEVDWWDMVCNVKKLINEKKEDGKVFWQNLAGYKRQEALRPYLSSEEDRKKGKKFARYQLGDLLLHLEKKHGEDWGKVYDEAWERIDKKVEGLSKHIKLEEERRSEDAQSKAALTDWLRAKASFVIEGLKEADKDEFCRCELKLQKWYGDLRGKPFAIEAENSILDISGFSKQYNCAFIWQKDGVKKLNLYLIINYFKGGKLRFKKIKPEAFEANRFYTVINKKSGEIVPMEVNFNFDDPNLIILPLAFGKRVGREFIWNDLLSLETGSLKLANGRVIEKTLYNRRTRQDEPALFVALTFERREVLDSSNIKPMNLIGVDRGENIPAVIALTDPEGCPLSRFKDSLGNPTHILRIGESYKEKQRTIQAKKEVEQRRAGGYSRKYASKAKNLADDMVRNTARDLLYYAVTQDAMLIFENLSRGFGRQGKRTFMAERQYTRMEDWLTAKLAYEGLPSKTYLSKTLAQYTSKTCSNCGFTITSADYDRVLEKLKKTATGWMTTINGKELKVEGQITYYNRYKRQNVVKDLSVELDRLSEESVNNDISSWTKGRSGEALSLLKKRFSHRPVQEKFVCLNCGFETHADEQAALNIARSWLFLRSQEYKKYQTNKTSTGNTDKRAFVETWQSFYRKKLKEVWKPAV

SEQ ID NO: 28844 - protein, 979 aa, synthetic construct
  REGION 1..979: note = engineered CasX variant
QEIKRINKIRRRLVKDSNTKKAGKTGPMKTLLVRVMTPDLRERLENLRKKPENIPQPISNTSRANLNKLLTDYTEMKKAILHVYWEEFQKDPVGLMSRVAQPASKKIDQNKLKPEMDEKGNLTTAGFACSQCGQPLFVYKLEQVSEKGKAYTNYFGRCNVAEHEKLILLAQLKPEKDSDEAVTYSLGKFGQRALDFYSIHVTKESTHPVKPLAQIAGNRYASGPVGKALSDACMGTIASFLSKYQDIIIEHQKVVKGNQKRLESLRELAGKENLEYPSVTLPPQPHTKEGVDAYNEVIARVRMWVNLNLWQKLKLSRDDAKPLLRLKGFPSFPLVERQANEVDWWDMVCNVKKLINEKKEDGKVFWQNLAGYKRQEALRPYLSSEEDRKKGKKFARYQLGDLLLHLEKKHGEDWGKVYDEAWERIDKKVEGLSKHIKLEEERRSEDAQSKAALTDWLRAKASFVIEGLKEADKDEFCRCELKLQKWYGDLRGKPFAIEAENSILDISGFSKQYNCAFIWQKDGVKKLNLYLIINYFKGGKLRFKKIKPEAFEANRFYTVINKKSGEIVPMEVNFNFDDPNLIILPLAFGKRVGREFIWNDLLSLETGSLKLANGRVIEKTLYNRRTRQDEPALFVALTFERREVLDSSNIKPMNLIGVDRGENIPAVIALTDPEGCPLSRFKDSLGNPTHILRIGESYKEKQRTIQAKKEVEQRRAGGYSRKYASKAKNLADDMVRNTARDLLYYAVTQDAMLIFENLSRGFGRQGKRTFMAERQYTRMEDWLTAKLAYEGLPSKTYLSKTLAQYTSKTCSNCGFTITSADYDRVLEKLKKTATGWMTTINGKELKVEGQITYYNRYKRQNVVKDLSVELDRLSEESVNNDISSWTKGRSGEALSLLKKRFSHRPVQEKFVCLNCGFETHADEQAALNIARSWLFLRSQEYKKYQTNKTTGKNTDKRAFVETWQSFYRKKLKEVWKPAV

SEQ ID NO: 28845 - protein, 978 aa, synthetic construct
  REGION 1..978: note = engineered CasX variant
QEIKRINKIRRRLVKDSNTKKAGKTGPMKTLLVRVMTPDLRERLENLRKKPENIPQPISNTSRANLNKLLTDYTEMKKAILHVYWEEFQKDPVGLMSRVAQPASKKIDQNKLKPEMDEKGNLTTAGFACSQCGQPLFVYKLEQVSEKGKAYTNYFGRCNVAEHEKLILLAQLKPEKDSDEAVTYSLGKFGQRALDFYSIHVTKESTHPVKPLAQIAGNRYASGPVGKALSDACMGTIASFLSKYQDIIIEHQKVVKGNQKRLESLRELAGKENLEYPSVTLPPQPHTKEGVDAYNEVIARVRMWVNLNLWQKLKLSRDDAKPLLRLKKFPSFPLVERQANEVDWWDMVCNVKKLINEKKEDGKVFWQNLAGYKRQEALRPYLSSEEDRKKGKKFARYQLGDLLLHLEKKHGEDWGKVYDEAWERIDKKVEGLSKHIKLEEERRSEDAQSKAALTDWLRAKASFVIEGLKEADKDEFCRCELKLQKWYGDLRGKPFAIEAENSILDISGFSKQYNCAFIWQKDGVKKLNLYLIINYFKGGKLRFKKIKPEAFEANRFYTVINKKSGEIVPMEVNFNFDDPNLIILPLAFGKRVGREFIWNDLLSLETGSLKLANGRVIEKTLYNRRTRQDEPALFVALTFERREVLDSSNIKPMNLIGVDRGENIPAVIALTDPEGCPLSRFKDSLGNPTHILRIGESYKEKQRTIQAKKEVEQRRAGGYSRKYASKAKNLADDMVRNTARDLLYYAVTQDAMLIFENLSRGFGRQGKRTFMAERQYTRMEDWLTAKLAYEGLPSKTYLSKTLAQYTSKTCSNCGFTITSADYDRVLEKLKKTATGWMTTINGKELKVEGQITYYNRYKRQNVVKDLSVELDRLSEESVNNDISSWTKGRSGEALSLLKKRFSHRPVQEKFVCLNCGFETHADEQAALNIARSWLFLRSQEYKKYQTNKTTGNTDKRAFVETWQSFYRKKLKEVWKPAV

SEQ ID NO: 28846 - protein, 978 aa, synthetic construct
  REGION 1..978: note = engineered CasX variant
QEIKRINKIRRRLVKDSNTKKAGKTGPMKTLLVRVMTPDLRERLENLRKKPENIPQPISNTSRANLNKLLTDYTEMKKAILHVYWEEFQKDPVGLMSRVAQPASKKIDQNKLKPEMDEKGNLTTAGFACSQCGQPLFVYKLEQVSEKGKAYTNYFGRCNVAEHEKLILLAQLKPEKDSDEAVTYSLGKFGQRALDFYSIHVTKESTHPVKPLAQIAGNRYASGPVGKALSDACMGTIASFLSKYQDIIIEHQKVVKGNQKRLESLRELAGKENLEYPSVTLPPQPHTKEGVDAYNEVIARVRMWVNLNLWQKLKLSRDDAKPLLRLKGFPSFPLVERQANEVDWWDMVCNVKKLINEKKEDGKVFWQNLAGYKRQEALRPYLSSEEDRKKGKKFARYQLGDLLLHLEKKHGEDWGKVYDEAWERIDKKVEGLSKHIKLEEERRSEDAQSKAALTDWLRAKASFVIEGLKEADKDEFCRCELKLQKWYGDLRGKPFAIEAENSILDISGFSKQYNCAFIWQKDGVKKLNLYLIINYFKGGKLRFKKIKPEAFEANRFYTVINKKSGEIVPMEVNFNFDDPNLIILPLAFGKRVGREFIWNDLLSLETGSLKLANGRVIEKTLYNRRTRQDEPALFVALTFERREVLDSSNIKPMNLIGVDRGENIPAVIALTDPEGCPLSRFKDSLGNPTHILRIGERYKEKQRTIQAKKEVEQRRAGGYSRKYASKAKNLADDMVRNTARDLLYYAVTQDAMLIFENLSRGFGRQGKRTFMAERQYTRMEDWLTAKLAYEGLPSKTYLSKTLAQYTSKTCSNCGFTITSADYDRVLEKLKKTATGWMTTINGKELKVEGQITYYNRYKRQNVVKDLSVELDRLSEESVNNDISSWTKGRSGEALSLLKKRFSHRPVQEKFVCLNCGFETHADEQAALNIARSWLFLRSQEYKKYQTNKTTGNTDKRAFVETWQSFYRKKLKEVWKPAV

SEQ ID NO: 28847 - protein, 978 aa, synthetic construct
  REGION 1..978: note = engineered CasX variant
QEIKRINKIRRRLVKDSNTKKAGKTGPMKTLLVRVMTPDLRERLENLRKKPENIPQPISNTSRANLNKLLTDYTEMKKAILHVYWEEFQKDPVGLMSRVAQPASKKIDQNKLKPEMDEKGNLTTAGFACSQCGQPLFVYKLEQVSEKGKAYTNYFGRCNVAEHEKLILLAQLKPEKDSDEAVTYSLGKFGQRALDFYSIHVTKESTHPVKPLAQIAGNRYASGPVGKALSDACMGTIASFLSKYQDIIIEHQKVVKGNQKRLESLRELAGKENLEYPSVTLPPQPHTKEGVDAYNEVIARVRMWVNLNLWQKLKLSRDDAKPLLRLKGFPSFPLVERQANEVDWWDMVCNVKKLINEKKEDGKVFWQNLAGYKRQEALRPYLSSEEDRKKGKKFARYQLGDLLLHLEKKHGEDWGKVYDEAWERIDKKVEGLSKHIKLEEERRSEDAQSKAALTDWLRAKASFVIEGLKEADKDEFCRCELKLQKWYGDLRGKPFAIEAENSILDISGFSKQYNCAFIWQKDGVKKLNLYLIINYFKGGKLRFKKIKPEAFEANRFYTVINKKSGEIVPMEVNFNFDDPNLIILPLAFGKRVGREFIWNDLLSLETGSLQLANGRVIEKTLYNRRTRQDEPALFVALTFERREVLDSSNIKPMNLIGVDRGENIPAVIALTDPEGCPLSRFKDSLGNPTHILRIGESYKEKQRTIQAKKEVEQRRAGGYSRKYASKAKNLADDMVRNTARDLLYYAVTQDAMLIFENLSRGFGRQGKRTFMAERQYTRMEDWLTAKLAYEGLPSKTYLSKTLAQYTSKTCSNCGFTITSADYDRVLEKLKKTATGWMTTINGKELKVEGQITYYNRYKRQNVVKDLSVELDRLSEESVNNDISSWTKGRSGEALSLLKKRFSHRPVQEKFVCLNCGFETHADEQAALNIARSWLFLRSQEYKKYQTNKTTGNTDKRAFVETWQSFYRKKLKEVWKPAV

SEQ ID NO: 28848 - protein, 980 aa, synthetic construct
  REGION 1..980: note = engineered CasX variant
QEIKRINKIRRRLVKDSNTKKAGKTGPMKTLLVRVMTPDLRERLENLRKKPENIPQPISNTSRANLNKLLTDYTEMKKAILHVYWEEFQKDPVGLMSRVAQPASKKIDQNKLKPEMDEKGNLTTAGFACSQCGQPLFVYKLEQVSEKGKAYTNYFGRCNVAEHEKLILLAQLKPEKDSDEAVTYSLGKFGQRALDFYSIHVTKESTHPVKPLAQIAGNRYASGPVGKALSDACMGTIASFLSKYQDIIIEHQKVVKGNQKRLESLRELAGKENLEYPSVTLPPQPHTKEGVDAYNEVIARVRMWVNLNLWQKLKLSRDDAKPLLRLKGFPSFPLVERQANEVDWWDMVCNVKKLINEKKEDGKVFWQNLAGYKRQEALRPYLSSEEDRKKGKKFARYQLGDLLLHLEKKHGEDWGKVYDEAWERIDKKVEGLSKHIKLEEERRSEDAQSKAALTDWLRAKASFVIEGLKEADKDEFCRCELKLQKWYGDLRGKPFAIEAENSILDISGFSKQYNCAFIWQKDGVKKLNLYLIINYFKGGKLRFKKIKPEAFEANRFYTVINKKSGEIVPMEVNFNFDDPNLIILPLAFGKRQGREFIWNDLLSLETGSLKLANGRVIEKTLYNRRTRQDEPALFVALTFERREVLDSSNIKTPMSNLIGVDRGENIPAVIALTDPEGCPLSRFKDSLGNPTHILRIGESYKEKQRTIQAKKEVEQRRAGGYSRKYASKAKNLADDMVRNTARDLLYYAVTQDAMLIFENLSRGFGRQGKRTFMAERQYTRMEDWLTAKLAYEGLPSKTYLSKTLAQYTSKTCSNCGFTITSADYDRVLEKLKKTATGWMTTINGKELKVEGQITYYNRYKRQNVVKDLSVELDRLSEESVNNDISSWTKGRSGEALSLLKKRFSHRPVQEKFVCLNCGFETHADEQAALNIARSWLFLRSQEYKKYQTNKTTGNTDKRAFVETWQSFYRKKLKEVWKPAV

SEQ ID NO: 28849 - protein, 979 aa, synthetic construct
  REGION 1..979: note = engineered CasX variant
QEIKRINKIRRRLVKDSNTKKAGKTGPMKTLLVRVMTPDLRERLENLRKKPENIPQPISNTSRANLNKLLTDYTEMKKAILHVYWEEFQKDPVGLMSRVAQPASKKIDQNKLKPEMDEKGNLTTAGFACSQCGQPLFVYKLEQVSEKGKAYTNYFGRCNVAEHEKLILLAQLKPEKDSDEAVTYSLGKFGQRALDFYSIHVTKESTHPVKPLAQIAGNRYASGPVGKALSDACMGTIASFLSKYQDIIIEHQKVVKGNQKRLESLRELAGKENLEYPSVTLPPQPHTKEGVDAYNEVIARVRMWVNLNLWQKLKLSRDDAKPLLRLKGFPSFPLVERQANEVDWWDMVCNVKKLINEKKEDGKVFWQNLAGYKRQEALRPYLSSEEDRKKGKKFARYQLGDLLLHLEKKHGEDWGKVYDEAWERIDKKVEGLSKHIKLEEERRSEDAQSKAALTDWLRAKASFVIEGLKEADKDEFCRCELKLQKWYGDLRGKPFAIEAENSILDISGFSKQYNCAFIWQKDGVKKLNLYLIINYFKGGKLRFKKIKPEAFEANRFYTVINKKSGEIVPMEVNFNFDDPNLIILPLAFGKRQGREFIWNDLLSLETGSLKLANGRVIEKTLYNRRTRQDEPALFVALTFERREVLDSSNIKTPMNLIGVDRGENIPAVIALTDPEGCPLSRFKDSLGNPTHILRIRESYKEKQRTIQAKKEVEQRRAGGYSRKYASKAKNLADDMVRNTARDLLYYAVTQDAMLIFENLSRGFGRQGKRTFMAERQYTRMEDWLTAKLAYEGLPSKTYLSKTLAQYTSKTCSNCGFTITSADYDRVLEKLKKTATGWMTTINGKELKVEGQITYYNRYKRQNVVKDLSVELDRLSEESVNNDISSWTKGRSGEALSLLKKRFSHRPVQEKFVCLNCGFETHADEQAALNIARSWLFLRSQEYKKYQTNKTTGNTDKRAFVETWQSFYRKKLKEVWKPAV

SEQ ID NO: 28850 - protein, 979 aa, synthetic construct
  REGION 1..979: note = engineered CasX variant
QEIKRINKIRRRLVKDSNTKKAGKTGPMKTLLVRVMTPDLRERLENLRKKPENIPQPISNTSRANLNKLLTDYTEMKKAILHVYWEEFQKDPVGLMSRVAQPASKKIDQNKLKPEMDEKGNLTTAGFACSQCGQPLFVYKLEQVSEKGKAYTNYFGRCNVAEHEKLILLAQLKPEKDSDEAVTYSLGKFGQRALDFYSIHVTKESTHPVKPLAQIAGNRYASGPVGKALSDACMGTIASFLSKYQDIIIEHQKVVKGNQKRLESLRELAGKENLEYPSVTLPPQPHTKEGVDAYNEVIARVRMWVNLNLWQKLKLSRDDAKPLLRLKGFPSFPLVERQANEVDWWDMVCNVKKLINEKKEDGKVFWQNLAGYKRQEALRPYLSSEEDRKKGKKFARYQLGDLLLHLEKKHGEDWGKVYDEAWERIDKKVEGLSKHIKLEEERRSEDAQSKAALTDWLRAKASFVIEGLKEADKDEFCRCELKLQKWYGDLRGKPFAIEAENSILDISGFSKQYNCAFIWQKDGVKKLNLYLIINYFKGGKLRFKKIKPEAFEANRFYTVINKKSGEIVPMEVNFNFDDPNLIILPLAFGKRQGREFIWNDLLSLETGSLKLANGRVIEKTLYNRRTRQDEPALFVALTFERREVLDSSNIKTPMNLIGVDRGENIPAVIALTDPEGCPLSRFKDSLGNPTHILRIGESYKEKQRTIQAKKEVEQRRAGGYSRKYASKAKNLADDMVRNTARDLLYYAVTQDAMLIFENLSRGFGRQGKRTFSAERQYTRMEDWLTAKLAYEGLPSKTYLSKTLAQYTSKTCSNCGFTITSADYDRVLEKLKKTATGWMTTINGKELKVEGQITYYNRYKRQNVVKDLSVELDRLSEESVNNDISSWTKGRSGEALSLLKKRFSHRPVQEKFVCLNCGFETHADEQAALNIARSWLFLRSQEYKKYQTNKTTGNTDKRAFVETWQSFYRKKLKEVWKPAV

SEQ ID NO: 28851 - protein, 979 aa, synthetic construct
  REGION 1..979: note = engineered CasX variant
QEIKRINKIRRRLVKDSNTKKAGKTGPMKTLLVRVMTPDLRERLENLRKKPENIPQPISNTSRANLNKLLTDYTEMKKAILHVYWEEFQKDPVGLMSRVAQPASKKIDQNKLKPEMDEKGNLTTAGFACSQCGQPLFVYKLEQVSEKGKAYTNYFGRCNVAEHEKLILLAQLKPEKDSDEAVTYSLGKFGQRALDFYSIHVTKESTHPVKPLAQIAGNRYASGPVGKALSDACMGTIASFLSKYQDIIIEHQKVVKGNQKRLESLRELAGKENLEYPSVTLPPQPHTKEGVDAYNEVIARVRMWVNLNLWQKLKLSRDDAKPLLRLKGFPSFPLVERQANEVDWWDMVCNVKKLINEKKEDGKVFWQNLAGYKRQEALRPYLSSEEDRKKGKKFARYQLGDLLLHLEKKHGEDWGKVYDEAWERIDKKVEGLSKHIKLEEERRSEDAQSKAALTDWLRAKASFVIEGLKEADKDEFCRCELKLQKWYGDLRGKPFAIEAENSILDISGFSKQYNCAFIWQKDGVKKLNLYLIINYFKGGKLRFKKIKPEAFEANRFYTVINKKSGEIVPMEVNFNFDDPNLIILPLAFGKRQGREFIWNDLLSLETGSLKLANGRVIEKTLYNRRTRQDEPALFVALTFERREVLDSSNIKTPMNLIGVDRGENIPAVIALTDPEGCPLSRFKDSLGNPTHILRIGESYKEKQRTIQAKKEVEQRRAGGYSRKYASKAKNLADDMVRNTARDLLYYAVTQDAMLIFENLSRGFGRQGKRTFMAERQYTRMEDWLTAKLAYEGLPSKTYLSKTLAQYTSKTCSNCGFTITSADYDRVLEKLKKTATGWMTTINGKELKVEGQITYYNRYKRQNVVKDLSVELDRLSEESVNNDISSWDKGRSGEALSLLKKRFSHRPVQEKFVCLNCGFETHADEQAALNIARSWLFLRSQEYKKYQTNKTTGNTDKRAFVETWQSFYRKKLKEVWKPAV

SEQ ID NO: 28852 - protein, 979 aa, synthetic construct
  REGION 1..979: note = engineered CasX variant
QEIKRINKIRRRLVKDSNTKKAGKTGPMKTLLVRVMTPDLRERLENLRKKPENIPQPISNTSRANLNKLLTDYTEMKKAILHVYWEEFQVDPVGLMSRVAQPASKKIDQNKLKPEMDEKGNLTTAGFACSQCGQPLFVYKLEQVSEKGKAYTNYFGRCNVAEHEKLILLAQLKPEKDSDEAVTYSLGKFGQRALDFYSIHVTKESTHPVKPLAQIAGNRYASGPVGKALSDACMGTIASFLSKYQDIIIEHQKVVKGNQKRLESLRELAGKENLEYPSVTLPPQPHTKEGVDAYNEVIARVRMWVNLNLWQKLKLSRDDAKPLLRLKGFPSFPLVERQANEVDWWDMVCNVKKLINEKKEDGKVFWQNLAGYKRQEALRPYLSSEEDRKKGKKFARYQLGDLLLHLEKKHGEDWGKVYDEAWERIDKKVEGLSKHIKLEEERRSEDAQSKAALTDWLRAKASFVIEGLKEADKDEFCRCELKLQKWYGDLRGKPFAIEAENSILDISGFSKQYNCAFIWQKDGVKKLNLYLIINYFKGGKLRFKKIKPEAFEANRFYTVINKKSGEIVPMEVNFNFDDPNLIILPLAFGKRQGREFIWNDLLSLETGSLKLANGRVIEKTLYNRRTRQDEPALFVALTFERREVLDSSNIKTPMNLIGVDRGENIPAVIALTDPEGCPLSRFKDSLGNPTHILRIGESYKEKQRTIQAKKEVEQRRAGGYSRKYASKAKNLADDMVRNTARDLLYYAVTQDAMLIFENLSRGFGRQGKRTFMAERQYTRMEDWLTAKLAYEGLPSKTYLSKTLAQYTSKTCSNCGFTITSADYDRVLEKLKKTATGWMTTINGKELKVEGQITYYNRYKRQNVVKDLSVELDRLSEESVNNDISSWTKGRSGEALSLLKKRFSHRPVQEKFVCLNCGFETHADEQAALNIARSWLFLRSQEYKKYQTNKTTGNTDKRAFVETWQSFYRKKLKEVWKPAV

SEQ ID NO: 28853 - protein, 979 aa, synthetic construct
  REGION 1..979: note = engineered CasX variant
QEIKRLNKIRRRLVKDSNTKKAGKTGPMKTLLVRVMTPDLRERLENLRKKPENIPQPISNTSRANLNKLLTDYTEMKKAILHVYWEEFQKDPVGLMSRVAQPASKKIDQNKLKPEMDEKGNLTTAGFACSQCGQPLFVYKLEQVSEKGKAYTNYFGRCNVAEHEKLILLAQLKPEKDSDEAVTYSLGKFGQRALDFYSIHVTKESTHPVKPLAQIAGNRYASGPVGKALSDACMGTIASFLSKYQDIIIEHQKVVKGNQKRLESLRELAGKENLEYPSVTLPPQPHTKEGVDAYNEVIARVRMWVNLNLWQKLKLSRDDAKPLLRLKGFPSFPLVERQANEVDWWDMVCNVKKLINEKKEDGKVFWQNLAGYKRQEALRPYLSSEEDRKKGKKFARYQLGDLLLHLEKKHGEDWGKVYDEAWERIDKKVEGLSKHIKLEEERRSEDAQSKAALTDWLRAKASFVIEGLKEADKDEFCRCELKLQKWYGDLRGKPFAIEAENSILDISGFSKQYNCAFIWQKDGVKKLNLYLIINYFKGGKLRFKKIKPEAFEANRFYTVINKKSGEIVPMEVNFNFDDPNLIILPLAFGKRQGREFIWNDLLSLETGSLKLANGRVIEKTLYNRRTRQDEPALFVALTFERREVLDSSNIKTPMNLIGVDRGENIPAVIALTDPEGCPLSRFKDSLGNPTHILRIGESYKEKQRTIQAKKEVEQRRAGGYSRKYASKAKNLADDMVRNTARDLLYYAVTQDAMLIFENLSRGFGRQGKRTFMAERQYTRMEDWLTAKLAYEGLPSKTYLSKTLAQYTSKTCSNCGFTITSADYDRVLEKLKKTATGWMTTINGKELKVEGQITYYNRYKRQNVVKDLSVELDRLSEESVNNDISSWTKGRSGEALSLLKKRFSHRPVQEKFVCLNCGFETHADEQAALNIARSWLFLRSQEYKKYQTNKTTGNTDKRAFVETWQSFYRKKLKEVWKPAV

SEQ ID NO: 28854 - protein, 979 aa, synthetic construct
  REGION 1..979: note = engineered CasX variant
QEIKRINKIRRRLVKDSNTKKAGKTGPMKTLLVRVMTPDLRERLENLRKKPENIPQPISNTSRANLNKLLTDYTEMKKAILHVYWEEFQKDPVGLMSRVAQPASKKIDQNKLKPEMDEKGNLTTAGFACSQCGQPLFVYKLEQVSEKGKAYTNYVGRCNVAEHEKLILLAQLKPEKDSDEAVTYSLGKFGQRALDFYSIHVTKESTHPVKPLAQIAGNRYASGPVGKALSDACMGTIASFLSKYQDIIIEHQKVVKGNQKRLESLRELAGKENLEYPSVTLPPQPHTKEGVDAYNEVIARVRMWVNLNLWQKLKLSRDDAKPLLRLKGFPSFPLVERQANEVDWWDMVCNVKKLINEKKEDGKVFWQNLAGYKRQEALRPYLSSEEDRKKGKKFARYQLGDLLLHLEKKHGEDWGKVYDEAWERIDKKVEGLSKHIKLEEERRSEDAQSKAALTDWLRAKASFVIEGLKEADKDEFCRCELKLQKWYGDLRGKPFAIEAENSILDISGFSKQYNCAFIWQKDGVKKLNLYLIINYFKGGKLRFKKIKPEAFEANRFYTVINKKSGEIVPMEVNFNFDDPNLIILPLAFGKRQGREFIWNDLLSLETGSLKLANGRVIEKTLYNRRTRQDEPALFVALTFERREVLDSSNIKTPMNLIGVDRGENIPAVIALTDPEGCPLSRFKDSLGNPTHILRIGESYKEKQRTIQAKKEVEQRRAGGYSRKYASKAKNLADDMVRNTARDLLYYAVTQDAMLIFENLSRGFGRQGKRTFMAERQYTRMEDWLTAKLAYEGLPSKTYLSKTLAQYTSKTCSNCGFTITSADYDRVLEKLKKTATGWMTTINGKELKVEGQITYYNRYKRQNVVKDLSVELDRLSEESVNNDISSWTKGRSGEALSLLKKRFSHRPVQEKFVCLNCGFETHADEQAALNIARSWLFLRSQEYKKYQTNKTTGNTDKRAFVETWQSFYRKKLKEVWKPAV

SEQ ID NO: 28855 - protein, 979 aa, synthetic construct
  REGION 1..979: note = engineered CasX variant
QEIKRINKIRRRLVKDSNTKKAGKTGPMKTLLVRVMTPDLRERLENLRKKPENIPQPISNTSRANLNKLLTDYTEMKKAILHVYWEEFQKDPVGLMSRVAQPASKKIDQNKLKPEMDEKGNLTTAGFACSQCGQPLFVYKLEQVSEKGKAYTNYFGRCNVAEHEKLILLAQLKPEKDSDEAVTYSLGKFGQRALDFYSIHVTKESTHPVKPLAQIAGNRYASGPVGKALSDACMGTIASFLSKYQDIIIEHQKVVKGNQKRLESLRELAGKENLEYPSVTLPPQPHTKEGVDAYNEVIARVRMWVNLNLWQKLKLSRDDAKPLLRLKGFPSFPLVERQANEVDWWDMVCNVKKLINEKKEDGKVFWQNLAGYKRQEALRPYLSSEEDRKKGKKFARYQLGDLLLHLEKKHGEDWGKVYDEAWERIDKKVEGLSKHIKLEEERRSEDAQSKAALTDWLRAKASFVIEGLKEADKDEFCRCELKLQKWYGDLRGKPFAIEAENSILDISGFSKQYNCAFIWQKDGVKKLNLYLIINYFKGGKLRFKKIKPEAFEANRFYTVINKKSGEIVPMEVNFNFDDPNLIILPLAFGKRQGREFIWNDLLSLETGSLKLANGRVIEKTLYNRRTRQDEPALFVALTFERREVLDSSNIKTPMNLIGVDRGENIPAVIALTDPEGCPLSRFKDSLGNPTHILRIGESYKEKQRTIQAKKEVEQRRAGGYSRKYASKAKNLADDMVRNTARDLLYYAVTQDAMLIFENLSRGFGRQGKRTFMAERQYTRMEDWLTAKLAYEGLASKTYLSKTLAQYTSKTCSNCGFTITSADYDRVLEKLKKTATGWMTTINGKELKVEGQITYYNRYKRQNVVKDLSVELDRLSEESVNNDISSWTKGRSGEALSLLKKRFSHRPVQEKFVCLNCGFETHADEQAALNIARSWLFLRSQEYKKYQTNKTTGNTDKRAFVETWQSFYRKKLKEVWKPAV

SEQ ID NO: 28856 - protein, 979 aa, synthetic construct
  REGION 1..979: note = engineered CasX variant
QEIKRINKIRRRLVKDSNTKKAGKTGPMKTLLVRVMTPDLRERLENLRKKPENIPQPISNTSRANLNKLLTDYTEMKKAILHVYWEEFQKDPVGLMSRVAQPASKKIDQNKLKPEMDEKGNLTTAGFACSQCGQPLFVYKLEQVSEKGKAYTNYFGRCNVAEHEKLILLAQLKPEKDSDEAVTYSLGKFGQRALDFYSIHVTKESTHPVKPLAQIAGNRYASGPVGKALSDACMGTIASFLSKYQDIIIEHQKVVKGNQKRLESLRELAGKENLEYPSVTLPPQPHTKEGVDAYNEVIARVRMWVNLNLWQKLKLSRDDAKPLLRLKGFPSFPLVERQANEVDWWDMVCNVKKLINEKKEDGKVFWQNLAGYKRQEALRPYLSSEEDRKKGKKFARYQLGDLLLHLEKKHGEDWGKVYDEAWERIDKKVEGLSKHIKLEEERRSEDAQSKAALTDWLRAKASFVIEGLKEADKDEFCRCELKLQKWYGDLRGKPFAIEAENSILDISGFSKQYNCAFIWQKDGVKKLNLYLIINYFKGGKLRFKKIKPEAFEANRFYTVINKKSGEIVPMEVNFNFDDPNLIILPLAFGKRQGREFIWNDLLSLETGSLKLANGRVIEKTLYNRRTRQDEPALFVALTFERREVLDSSNIKTPMNLIGVDRGENIPAVIALTDPEGCPLSRFKDSLGNPTHILRIGESYKEKQRTIQAKKEVEQRRAGGYSRKYASKAKNLADDMVRNTARDLLYYAVTQDAMLIFENLSRGFGRQGKRTFMAERQYTRMEDWLTAKLAYEGLPSKVYLSKTLAQYTSKTCSNCGFTITSADYDRVLEKLKKTATGWMTTINGKELKVEGQITYYNRYKRQNVVKDLSVELDRLSEESVNNDISSWTKGRSGEALSLLKKRFSHRPVQEKFVCLNCGFETHADEQAALNIARSWLFLRSQEYKKYQTNKTTGNTDKRAFVETWQSFYRKKLKEVWKPAV

SEQ ID NO: 28857 - protein, 980 aa, synthetic construct
  REGION 1..980: note = engineered CasX variant
QEIKRINKIRRRLVKDSNTKKAGKTGPMKTLLVRVMTPDLRERLENLRKKPENIPQPISNTSRANLNKLLTDYTEMKKAILHVYWEEFQKDPVGLMSRVAQPASKKIDQNKLKPEMDEKGNLTTAGFACSQCGQPLFVYKLEQVSEKGKAYTNYFGRCNVAEHEKLILLAQLKPEKDSDEAVTYSLGKFGQRALDFYSIHVTKESTHPVKPLAQIAGNRYASGPVGKALSDACMGTIASFLSKYQDIIIEHQKVVKGNQKRLESLRELAGKENLEYPSVTLPPQPHTKEGVDAYNEVIARVRMWVNLNLWQKLKLSRDDAKPLLRLKGFPSFPLVERQANEVDWWDMVCNVKKLINEKKEDGKVFWQNLAGYKRQEALRPYLSSEEDRKKGKKFARYQLGDLLLHLEKKHGEDWGKVYDEAWERIDKKVEGLSKHIKLEEERRSEDAQSKAALTDWLRAKASFVIEGLKEADKDEFCRCELKLQKWYGDLRGKPFAIEAENSILDISGFSKQYNCAFIWQKDGVKKLNLYLIINYFKGGKLRFKKIKPEAFEANRFYTVINKKSGEIVPMEVNFNFDDPNLIILPLAFGKRQGREFIWNDLLSLETGSLKLANGRVIEKTLYNRRTRQDEPALFVALTFERREVLDSSNIKTPMNLIGVDRGENIPAVIALTDPEGCPLSRFKDSLGNPTHILRIGESYKEKQRTIQAKKEVEQRRAGGYSRKYASKAKNLADDMVRNTARDLLYYAVTQDAMLIFENLSRGFGRQGKRTFMAERQYTRMEDWLTAKLAYEGPLPSKTYLSKTLAQYTSKTCSNCGFTITSADYDRVLEKLKKTATGWMTTINGKELKVEGQITYYNRYKRQNVVKDLSVELDRLSEESVNNDISSWTKGRSGEALSLLKKRFSHRPVQEKFVCLNCGFETHADEQAALNIARSWLFLRSQEYKKYQTNKTTGNTDKRAFVETWQSFYRKKLKEVWKPAV

SEQ ID NO: 28858 - protein, 980 aa, synthetic construct
  REGION 1..980: note = engineered CasX variant
QEIKRINKIRRRLVKDSNTKKAGKTGPMKTLLVRVMTPDLRERLENLRKKPENIPQPISNTSRANLNKLLTDYTEMKKAILHVYWEEFQKDPVGLMSRVAQPASKKIDQNKLKPEMDEKGNLTTAGFACSQCGQPLFVYKLEQVSEKGKAYTNYFGRCNVAEHEKLILLAQLKPEKDSDEAVTYSLGKFGQRALDFYSIHVTKESTHPVKPLAQIAGNRYASGPVGKALSDACMGTIASFLSKYQDIIIEHQKVVKGNQKRLESLRELAGKENLEYPSVTLPPQPHTKEGVDAYNEVIARVRMWVNLNLWQKLKLSRDDAKPLLRLKGFPSFPLVERQANEVDWWDMVCNVKKLINEKKEDGKVFWQNLAGYKRQEALRPYLSSEEDVRKKGKKFARYQLGDLLLHLEKKHGEDWGKVYDEAWERIDKKVEGLSKHIKLEEERRSEDAQSKAALTDWLRAKASFVIEGLKEADKDEFCRCELKLQKWYGDLRGKPFAIEAENSILDISGFSKQYNCAFIWQKDGVKKLNLYLIINYFKGGKLRFKKIKPEAFEANRFYTVINKKSGEIVPMEVNFNFDDPNLIILPLAFGKRQGREFIWNDLLSLETGSLKLANGRVIEKTLYNRRTRQDEPALFVALTFERREVLDSSNIKTPMNLIGVDRGENIPAVIALTDPEGCPLSRFKDSLGNPTHILRIGESYKEKQRTIQAKKEVEQRRAGGYSRKYASKAKNLADDMVRNTARDLLYYAVTQDAMLIFENLSRGFGRQGKRTFMAERQYTRMEDWLTAKLAYEGLPSKTYLSKTLAQYTSKTCSNCGFTITSADYDRVLEKLKKTATGWMTTINGKELKVEGQITYYNRYKRQNVVKDLSVELDRLSEESVNNDISSWTKGRSGEALSLLKKRFSHRPVQEKFVCLNCGFETHADEQAALNIARSWLFLRSQEYKKYQTNKTTGNTDKRAFVETWQSFYRKKLKEVWKPAV

SEQ ID NO: 28859 - protein, 979 aa, synthetic construct
  REGION 1..979: note = engineered CasX variant
QEIKRINKIRRRLVKDSNTKKAGKTGPMKTLLVRVMTPDLRERLENLRKKPENIPQPISNTSRANLNKLLTDYTEMKKAILHVYWEEFQKDPVGLMSRVAQPASKKIDQNKLKPEMDEKGNLTTAGFACSQCGQPLFVYKLEQVSEKGKAYTNYFGRCNVAEHEKLILLAQLKPEKDSDEAVTYSLGKFGQRALDFYSIHVTKESTHPVKPLAQIAGNRYASGPVGKALSDACMGTIASFLSKYQDIIIEHQKVVKGNQKRLESLRELAGKENLEYPSVTLPPQPHTKEGVDAYNEVIARVRMWVNLNLWQKLKLSRDDAKPLLRLKGFPSFPLVERQANEVDWWDMVCNVKKLINEKKEDGKVFWQNLAGYKRQEALRPYLSSEEDRKKGKKFARYQLGDLLLHLEKKHGEDWGKVYDEAWERIDKKVEGLSKHIKLEEERRSEDAQSKAALTDWLRAKASFVIEGLKEADKDEFCRCELKLQKWYGDLRGKPFAIEAENSILDISGFSKQYNCAFIWQKDGVKKLNLYLIINYFKGGKLRFKKIKPEAFEANRFYTVINKKSGEIVPMEVNFNFDDPNLIILPLAFGKRQGREFIWNDLLSLETGSLKLANGRVIEKTLYNRRTRQDEPALFVALTFERREVLDSSNIKTPMNLIGVDRGENIPAVIALTDPEGCPLSRFKDSLGNPTHILRIGESYKEKQRTIQAKKEVEQRRAGGYSRKYASKAKNLADDMVRNTARDLLYYAVTQDAMLIFENLSRGFGRQGKRTFMAERQYTRMEDWLTAKLAYEGLPSKTYLSKTLAQYTSKTCSNCGFTITSADYDRMLEKLKKTATGWMTTINGKELKVEGQITYYNRYKRQNVVKDLSVELDRLSEESVNNDISSWTKGRSGEALSLLKKRFSHRPVQEKFVCLNCGFETHADEQAALNIARSWLFLRSQEYKKYQTNKTTGNTDKRAFVETWQSFYRKKLKEVWKPAV

SEQ ID NO: 28860 - protein, 979 aa, synthetic construct
  REGION 1..979: note = engineered CasX variant
QEIKRINKIRRRLVKDSNTKKAGKTGPMKTLLVRVMTPDLRERLENLRKKPENIPQPISNTSRANLNKLLTDYTEMKKAILHVYWEEFQKDPVGLMSRVAQPASKKIDQNKLKPEMDEKGNLTTAGFACSQCGQPLFVYKLEQVSEKGKAYTNYFGRCNVAEHEKLILLAQLKPEKDSDEAVTYSLGKFGQRALDFYSIHVTKESTHPVKPLAQIAGNRYASGPVGKALSDACMGTIASFLSKYQDIIIEHQKVVKGNQKRLESLRELAGKENLEYPSVTLPPQPHTKEGVDAYNEVIARVRMWVNLNLWQKLKLSRDDAKPLLRLKGFPSFPLVERQANEVDWWDMVCNVKKLINEKKEDGKVFWQNLAGYKRQEALRPYLSSEEDRKKGKKFARYQLGDLLLHLEKKHGEDWGKVYDEAWERIDKKVEGLSKHIKLEEERRSEDAQSKAALTDWLRAKASFVIEGLKEADKDEFCRCELKLQKWYGDLRGKPFAIEAENSILDISGFSKQYNCAFIWQKDGVKKLNLYLIINYFKGGKLRFKKIKPEAFEANRFYTVINKKSGEIVPMEVNFNFDDPNLIILPLAFGKRQGREFIWNDLLSLETGSLKLANGRVIEKTLYNRRTRQDEPALFVALTFERREVLDSSNIKTPMNLIGVDRGENIPAVIALTDPEGCPLSRFKDSLGNPTHILRIGESYKEKQRTIQAKKEVEQRRAGGYSRKYASKAKNLADDMVRNTARDLLYYAVTQDAMLIFENLSRGFGRQGKRTFMAERQYTRMEDWLTAKLAYEGLPSKTYLSKTLAQYTSKTCSNCGFTITSADYDRVLEKLKKTATGWMTTINGKELKVEGQITYYNRYKRQNVVKDLSVELDRLSEESVNNDISSWTKGRQGEALSLLKKRFSHRPVQEKFVCLNCGFETHADEQAALNIARSWLFLRSQEYKKYQTNKTTGNTDKRAFVETWQSFYRKKLKEVWKPAV

SEQ ID NO: 28861 - protein, 979 aa, synthetic construct
  REGION 1..979: note = engineered CasX variant
QEIKRINKIRRRLVKDSNTKKAGKTGPMKTLLVRVMTPDLRERLENLRKKPENIPQPISNTSRANLNKLLTDYTEMKKAILHVYWEEFQKDPVGLMSRVAQPASKKIDQNKLKPEMDEKGNLTTAGFACSQCGQPLFVYKLEQVSEKGKAYTNYFGRCNVAEHEKLILLAQLKPEKDSDEAVTYSLGKFGQRALDFYSIHVTKESTHPVKPLAQIAGNRYASGPVGKALSDACMGTIASFLSKYQDIIIEHQKVVKGNQKRLESLRELAGKENLEYPSVTLPPQPHTKEGVDAYNEVIARVRMWVNLNLWQKLKLSRDDAKPLLRLKGFPSFPLVERQANEVDWWDMVCNVKKLINEKKEDGKVFWQNLAGYKRQEALRPYLSSEEDRKKGKKFARYQLGDLLLHLEKKHGEDWGKVYDEAWERIDKKVEGLSKHIKLEEERRSEDAQSKAALTDWLRAKASFVIEGLKEADKDEFCRCELKLQKWYGDLRGKPFAIEAENSILDISGFSKQYNCAFIWQKDGVKKLNLYLIINYFKGGKLRFKKIKPEAFEANRFYTVINKKSGEIVPMEVNFNFDDPNLIILPLAFGKRQGREFIWNDLLSLETGSLKLANGRVIEKTLYNRRTRQDEPALFVALTFERREVLDSSNIKTPMNLIGVDRGENIPAVIALTDPEGCPLSRFKDSLGNPTHILRIGESYKEKQRTIQAKKEVEQRRAGGYSRKYASKAKNLADDMVRNTARDLLYYAVTQDAMLIFENLSRGFGRQGKRTFMAERQYTRMEDWLTAKLAYEGLPSKTYLSKTLAQYTSKTCSNCGFTITSADYDRVLEKLKKTATGWMTTINGKELKVEGQITYYNRYKRQNVVKDLSVELDRLSEESVNNDISSWTKGRSGEALSLLKKRFSHRPVQEKFVCLNCEFETHADEQAALNIARSWLFLRSQEYKKYQTNKTTGNTDKRAFVETWQSFYRKKLKEVWKPAV

SEQ ID NO: 28862 - protein, 980 aa, synthetic construct
  REGION 1..980: note = engineered CasX variant
QEIKRINKIRRRLVKDSNTKKAGKTGPMKTLLVRVMTPDLRERLENLRKKPENIPQPISNTSRANLNKLLTDYTEMKKAILHVYWEEFQKDPVGLMSRVAQPASKKIDQNKLKPEMDEKGNLTTAGFACSQCGQPLFVYKLEQVSEKGKAYTNYFGRCNVAEHEKLILLAQLKPEKDSDEAVTYSLGKFGQRALDFYSIHVTKESTHPVKPLAQIAGNRYASGPVGKALSDACMGTIASFLSKYQDIIIEHQKVVKGNQKRLESLRELAGKENLEYPSVTLPPQPHTKEGVDAYNEVIARVRMWVNLNLWQKLKLSRDDAKPLLRLKGFPSFPLVERQANEVDWWDMVCNVKKLINEKKEDGKVFWQNLAGYKRQEALRPYLSSEEDRKKGKKFARYQLGDLLLHLEKKHGEDWGKVYDEAWERIDKKVEGLSKHIKLEEERRSEDAQSKAALTDWLRAKASFVIEGLKEADKDEFCRCELKLQKWYGDLRGKPFAIEAENSILDISGFSKQYNCAFIWQKDGVKKLNLYLIINYFKGGKLRFKKIKPEAFEANRFYTVINKKSGEIVPMEVNFNFDDPNLIILPLAFGKRQGREFIWNDLLSLETGSLKLANGRVIEKTLYNRRTRQDEPALFVALTFERREVLDSSNIKTPMNLIGVDRGENIPAVIALTDPEGCPLSRFKDSLGNPTHILRIGESYKEKQRTIQAKKEVEQRRAGGYSRKYASKAKNLADDMVRNTARDLLYYAVTQDAMLIFENLSRGFGRQGKRTFMAERQYTRMEDWLTAKLAYEGLPSKTYLSKTLAQYTSKTCSNCGFTITSADYDRVLEKLKKTATGWMTTINGKELKVEGQITYYNRYKRQNVVKDLSVELDRLSEESVNNDISSWTKGRSGEALSLLKKRFSHRPVQEKFVCLNCGFETHADEQAALNIARSWLFLRSQEYKKYQTNKTSTGNTDKRAFVETWQSFYRKKLKEVWKPAV

SEQ ID NO: 28863 - protein, 980 aa, synthetic construct
  REGION 1..980: note = engineered CasX variant
QEIKRINKIRRRLVKDSNTKKAGKTGPMKTLLVRVMTPDLRERLENLRKKPENIPQPISNTSRANLNKLLTDYTEMKKAILHVYWEEFQKDPVGLMSRVAQPASKKIDQNKLKPEMDEKGNLTTAGFACSQCGQPLFVYKLEQVSEKGKAYTNYFGRCNVAEHEKLILLAQLKPEKDSDEAVTYSLGKFGQRALDFYSIHVTKESTHPVKPLAQIAGNRYASGPVGKALSDACMGTIASFLSKYQDIIIEHQKVVKGNQKRLESLRELAGKENLEYPSVTLPPQPHTKEGVDAYNEVIARVRMWVNLNLWQKLKLSRDDAKPLLRLKGFPSFPLVERQANEVDWWDMVCNVKKLINEKKEDGKVFWQNLAGYKRQEALRPYLSSEEDRKKGKKFARYQLGDLLLHLEKKHGEDWGKVYDEAWERIDKKVEGLSKHIKLEEERRSEDAQSKAALTDWLRAKASFVIEGLKEADKDEFCRCELKLQKWYGDLRGKPFAIEAENSILDISGFSKQYNCAFIWQKDGVKKLNLYLIINYFKGGKLRFKKIKPEAFEANRFYTVINKKSGEIVPMEVNFNFDDPNLIILPLAFGKRQGREFIWNDLLSLETGSLKLANGRVIEKTLYNRRTRQDEPALFVALTFERREVLDSSNIKTPMNLIGVDRGENIPAVIALTDPEGCPLSRFKDSLGNPTHILRIGESYKEKQRTIQAKKEVEQRRAGGYSRKYASKAKNLADDMVRNTARDLLYYAVTQDAMLIFENLSRGFGRQGKRTFMAERQYTRMEDWLTAKLAYEGLPSKTYLSKTLAQYTSKTCSNCGFTITSADYDRVLEKLKKTATGWMTTINGKELKVEGQITYYNRYKRQNVVKDLSVELDRLSEESVNNDISSWTKGRSGEALSLLKKRFSHRPVQEKFVCLNCGFETHADEQAALNIARSWLFLRSQEYKKYQTNKTTGKNTDKRAFVETWQSFYRKKLKEVWKPAV

SEQ ID NO: 28864 - protein, 979 aa, synthetic construct
  REGION 1..979: note = engineered CasX variant
QEIKRINKIRRRLVKDSNTKKAGKTGPMKTLLVRVMTPDLRERLENLRKKPENIPQPISNTSRANLNKLLTDYTEMKKAILHVYWEEFQKDPVGLMSRVAQPASKKIDQNKLKPEMDEKGNLTTAGFACSQCGQPLFVYKLEQVSEKGKAYTNYFGRCNVAEHEKLILLAQLKPEKDSDEAVTYSLGKFGQRALDFYSIHVTKESTHPVKPLAQIAGNRYASGPVGKALSDACMGTIASFLSKYQDIIIEHQKVVKGNQKRLESLRELAGKENLEYPSVTLPPQPHTKEGVDAYNEVIARVRMWVNLNLWQKLKLSRDDAKPLLRLKKFPSFPLVERQANEVDWWDMVCNVKKLINEKKEDGKVFWQNLAGYKRQEALRPYLSSEEDRKKGKKFARYQLGDLLLHLEKKHGEDWGKVYDEAWERIDKKVEGLSKHIKLEEERRSEDAQSKAALTDWLRAKASFVIEGLKEADKDEFCRCELKLQKWYGDLRGKPFAIEAENSILDISGFSKQYNCAFIWQKDGVKKLNLYLIINYFKGGKLRFKKIKPEAFEANRFYTVINKKSGEIVPMEVNFNFDDPNLIILPLAFGKRQGREFIWNDLLSLETGSLKLANGRVIEKTLYNRRTRQDEPALFVALTFERREVLDSSNIKTPMNLIGVDRGENIPAVIALTDPEGCPLSRFKDSLGNPTHILRIGESYKEKQRTIQAKKEVEQRRAGGYSRKYASKAKNLADDMVRNTARDLLYYAVTQDAMLIFENLSRGFGRQGKRTFMAERQYTRMEDWLTAKLAYEGLPSKTYLSKTLAQYTSKTCSNCGFTITSADYDRVLEKLKKTATGWMTTINGKELKVEGQITYYNRYKRQNVVKDLSVELDRLSEESVNNDISSWTKGRSGEALSLLKKRFSHRPVQEKFVCLNCGFETHADEQAALNIARSWLFLRSQEYKKYQTNKTTGNTDKRAFVETWQSFYRKKLKEVWKPAV

SEQ ID NO: 28865 - protein, 979 aa, synthetic construct
  REGION 1..979: note = engineered CasX variant
QEIKRINKIRRRLVKDSNTKKAGKTGPMKTLLVRVMTPDLRERLENLRKKPENIPQPISNTSRANLNKLLTDYTEMKKAILHVYWEEFQKDPVGLMSRVAQPASKKIDQNKLKPEMDEKGNLTTAGFACSQCGQPLFVYKLEQVSEKGKAYTNYFGRCNVAEHEKLILLAQLKPEKDSDEAVTYSLGKFGQRALDFYSIHVTKESTHPVKPLAQIAGNRYASGPVGKALSDACMGTIASFLSKYQDIIIEHQKVVKGNQKRLESLRELAGKENLEYPSVTLPPQPHTKEGVDAYNEVIARVRMWVNLNLWQKLKLSRDDAKPLLRLKGFPSFPLVERQANEVDWWDMVCNVKKLINEKKEDGKVFWQNLAGYKRQEALRPYLSSEEDRKKGKKFARYQLGDLLLHLEKKHGEDWGKVYDEAWERIDKKVEGLSKHIKLEEERRSEDAQSKAALTDWLRAKASFVIEGLKEADKDEFCRCELKLQKWYGDLRGKPFAIEAENSILDISGFSKQYNCAFIWQKDGVKKLNLYLIINYFKGGKLRFKKIKPEAFEANRFYTVINKKSGEIVPMEVNFNFDDPNLIILPLAFGKRQGREFIWNDLLSLETGSLKLANGRVIEKTLYNRRTRQDEPALFVALTFERREVLDSSNIKTPMNLIGVDRGENIPAVIALTDPEGCPLSRFKDSLGNPTHILRIGERYKEKQRTIQAKKEVEQRRAGGYSRKYASKAKNLADDMVRNTARDLLYYAVTQDAMLIFENLSRGFGRQGKRTFMAERQYTRMEDWLTAKLAYEGLPSKTYLSKTLAQYTSKTCSNCGFTITSADYDRVLEKLKKTATGWMTTINGKELKVEGQITYYNRYKRQNVVKDLSVELDRLSEESVNNDISSWTKGRSGEALSLLKKRFSHRPVQEKFVCLNCGFETHADEQAALNIARSWLFLRSQEYKKYQTNKTTGNTDKRAFVETWQSFYRKKLKEVWKPAV

SEQ ID NO: 28866 - protein, 979 aa, synthetic construct
  REGION 1..979: note = engineered CasX variant
QEIKRINKIRRRLVKDSNTKKAGKTGPMKTLLVRVMTPDLRERLENLRKKPENIPQPISNTSRANLNKLLTDYTEMKKAILHVYWEEFQKDPVGLMSRVAQPASKKIDQNKLKPEMDEKGNLTTAGFACSQCGQPLFVYKLEQVSEKGKAYTNYFGRCNVAEHEKLILLAQLKPEKDSDEAVTYSLGKFGQRALDFYSIHVTKESTHPVKPLAQIAGNRYASGPVGKALSDACMGTIASFLSKYQDIIIEHQKVVKGNQKRLESLRELAGKENLEYPSVTLPPQPHTKEGVDAYNEVIARVRMWVNLNLWQKLKLSRDDAKPLLRLKGFPSFPLVERQANEVDWWDMVCNVKKLINEKKEDGKVFWQNLAGYKRQEALRPYLSSEEDRKKGKKFARYQLGDLLLHLEKKHGEDWGKVYDEAWERIDKKVEGLSKHIKLEEERRSEDAQSKAALTDWLRAKASFVIEGLKEADKDEFCRCELKLQKWYGDLRGKPFAIEAENSILDISGFSKQYNCAFIWQKDGVKKLNLYLIINYFKGGKLRFKKIKPEAFEANRFYTVINKKSGEIVPMEVNFNFDDPNLIILPLAFGKRQGREFIWNDLLSLETGSLQLANGRVIEKTLYNRRTRQDEPALFVALTFERREVLDSSNIKTPMNLIGVDRGENIPAVIALTDPEGCPLSRFKDSLGNPTHILRIGESYKEKQRTIQAKKEVEQRRAGGYSRKYASKAKNLADDMVRNTARDLLYYAVTQDAMLIFENLSRGFGRQGKRTFMAERQYTRMEDWLTAKLAYEGLPSKTYLSKTLAQYTSKTCSNCGFTITSADYDRVLEKLKKTATGWMTTINGKELKVEGQITYYNRYKRQNVVKDLSVELDRLSEESVNNDISSWTKGRSGEALSLLKKRFSHRPVQEKFVCLNCGFETHADEQAALNIARSWLFLRSQEYKKYQTNKTTGNTDKRAFVETWQSFYRKKLKEVWKPAV

SEQ ID NO: 28867 - protein, 979 aa, synthetic construct
  REGION 1..979: note = engineered CasX variant
QEIKRINKIRRRLVKDSNTKKAGKTGPMKTLLVRVMTPDLRERLENLRKKPENIPQPISNTSRANLNKLLTDYTEMKKAILHVYWEEFQKDPVGLMSRVAQPASKKIDQNKLKPEMDEKGNLTTAGFACSQCGQPLFVYKLEQVSEKGKAYTNYFGRCNVAEHEKLILLAQLKPEKDSDEAVTYSLGKFGQRALDFYSIHVTKESTHPVKPLAQIAGNRYASGPVGKALSDACMGTIASFLSKYQDIIIEHQKVVKGNQKRLESLRELAGKENLEYPSVTLPPQPHTKEGVDAYNEVIARVRMWVNLNLWQKLKLSRDDAKPLLRLKGFPSFPLVERQANEVDWWDMVCNVKKLINEKKEDGKVFWQNLAGYKRQEALRPYLSSEEDRKKGKKFARYQLGDLLLHLEKKHGEDWGKVYDEAWERIDKKVEGLSKHIKLEEERRSEDAQSKAALTDWLRAKASFVIEGLKEADKDEFCRCELKLQKWYGDLRGKPFAIEAENSILDISGFSKQYNCAFIWQKDGVKKLNLYLIINYFKGGKLRFKKIKPEAFEANRFYTVINKKSGEIVPMEVNFNFDDPNLIILPLAFGKRQGREFIWNDLLSLETGSLKLANGRVIEKTLYNRRTRQDEPALFVALTFERREVLDSSNIKPMSNLIGVDRGENIPAVIALTDPEGCPLSRFKDSLGNPTHILRIRESYKEKQRTIQAKKEVEQRRAGGYSRKYASKAKNLADDMVRNTARDLLYYAVTQDAMLIFENLSRGFGRQGKRTFMAERQYTRMEDWLTAKLAYEGLPSKTYLSKTLAQYTSKTCSNCGFTITSADYDRVLEKLKKTATGWMTTINGKELKVEGQITYYNRYKRQNVVKDLSVELDRLSEESVNNDISSWTKGRSGEALSLLKKRFSHRPVQEKFVCLNCGFETHADEQAALNIARSWLFLRSQEYKKYQTNKTTGNTDKRAFVETWQSFYRKKLKEVWKPAV

SEQ ID NO: 28868 - protein, 979 aa, synthetic construct
  REGION 1..979: note = engineered CasX variant
QEIKRINKIRRRLVKDSNTKKAGKTGPMKTLLVRVMTPDLRERLENLRKKPENIPQPISNTSRANLNKLLTDYTEMKKAILHVYWEEFQKDPVGLMSRVAQPASKKIDQNKLKPEMDEKGNLTTAGFACSQCGQPLFVYKLEQVSEKGKAYTNYFGRCNVAEHEKLILLAQLKPEKDSDEAVTYSLGKFGQRALDFYSIHVTKESTHPVKPLAQIAGNRYASGPVGKALSDACMGTIASFLSKYQDIIIEHQKVVKGNQKRLESLRELAGKENLEYPSVTLPPQPHTKEGVDAYNEVIARVRMWVNLNLWQKLKLSRDDAKPLLRLKGFPSFPLVERQANEVDWWDMVCNVKKLINEKKEDGKVFWQNLAGYKRQEALRPYLSSEEDRKKGKKFARYQLGDLLLHLEKKHGEDWGKVYDEAWERIDKKVEGLSKHIKLEEERRSEDAQSKAALTDWLRAKASFVIEGLKEADKDEFCRCELKLQKWYGDLRGKPFAIEAENSILDISGFSKQYNCAFIWQKDGVKKLNLYLIINYFKGGKLRFKKIKPEAFEANRFYTVINKKSGEIVPMEVNFNFDDPNLIILPLAFGKRQGREFIWNDLLSLETGSLKLANGRVIEKTLYNRRTRQDEPALFVALTFERREVLDSSNIKPMSNLIGVDRGENIPAVIALTDPEGCPLSRFKDSLGNPTHILRIGESYKEKQRTIQAKKEVEQRRAGGYSRKYASKAKNLADDMVRNTARDLLYYAVTQDAMLIFENLSRGFGRQGKRTFSAERQYTRMEDWLTAKLAYEGLPSKTYLSKTLAQYTSKTCSNCGFTITSADYDRVLEKLKKTATGWMTTINGKELKVEGQITYYNRYKRQNVVKDLSVELDRLSEESVNNDISSWTKGRSGEALSLLKKRFSHRPVQEKFVCLNCGFETHADEQAALNIARSWLFLRSQEYKKYQTNKTTGNTDKRAFVETWQSFYRKKLKEVWKPAV

SEQ ID NO: 28869 - protein, 979 aa, synthetic construct
  REGION 1..979: note = engineered CasX variant
QEIKRINKIRRRLVKDSNTKKAGKTGPMKTLLVRVMTPDLRERLENLRKKPENIPQPISNTSRANLNKLLTDYTEMKKAILHVYWEEFQKDPVGLMSRVAQPASKKIDQNKLKPEMDEKGNLTTAGFACSQCGQPLFVYKLEQVSEKGKAYTNYFGRCNVAEHEKLILLAQLKPEKDSDEAVTYSLGKFGQRALDFYSIHVTKESTHPVKPLAQIAGNRYASGPVGKALSDACMGTIASFLSKYQDIIIEHQKVVKGNQKRLESLRELAGKENLEYPSVTLPPQPHTKEGVDAYNEVIARVRMWVNLNLWQKLKLSRDDAKPLLRLKGFPSFPLVERQANEVDWWDMVCNVKKLINEKKEDGKVFWQNLAGYKRQEALRPYLSSEEDRKKGKKFARYQLGDLLLHLEKKHGEDWGKVYDEAWERIDKKVEGLSKHIKLEEERRSEDAQSKAALTDWLRAKASFVIEGLKEADKDEFCRCELKLQKWYGDLRGKPFAIEAENSILDISGFSKQYNCAFIWQKDGVKKLNLYLIINYFKGGKLRFKKIKPEAFEANRFYTVINKKSGEIVPMEVNFNFDDPNLIILPLAFGKRQGREFIWNDLLSLETGSLKLANGRVIEKTLYNRRTRQDEPALFVALTFERREVLDSSNIKPMSNLIGVDRGENIPAVIALTDPEGCPLSRFKDSLGNPTHILRIGESYKEKQRTIQAKKEVEQRRAGGYSRKYASKAKNLADDMVRNTARDLLYYAVTQDAMLIFENLSRGFGRQGKRTFMAERQYTRMEDWLTAKLAYEGLPSKTYLSKTLAQYTSKTCSNCGFTITSADYDRVLEKLKKTATGWMTTINGKELKVEGQITYYNRYKRQNVVKDLSVELDRLSEESVNNDISSWDKGRSGEALSLLKKRFSHRPVQEKFVCLNCGFETHADEQAALNIARSWLFLRSQEYKKYQTNKTTGNTDKRAFVETWQSFYRKKLKEVWKPAV

SEQ ID NO: 28870 - protein, 979 aa, synthetic construct
  REGION 1..979: note = engineered CasX variant
QEIKRINKIRRRLVKDSNTKKAGKTGPMKTLLVRVMTPDLRERLENLRKKPENIPQPISNTSRANLNKLLTDYTEMKKAILHVYWEEFQVDPVGLMSRVAQPASKKIDQNKLKPEMDEKGNLTTAGFACSQCGQPLFVYKLEQVSEKGKAYTNYFGRCNVAEHEKLILLAQLKPEKDSDEAVTYSLGKFGQRALDFYSIHVTKESTHPVKPLAQIAGNRYASGPVGKALSDACMGTIASFLSKYQDIIIEHQKVVKGNQKRLESLRELAGKENLEYPSVTLPPQPHTKEGVDAYNEVIARVRMWVNLNLWQKLKLSRDDAKPLLRLKGFPSFPLVERQANEVDWWDMVCNVKKLINEKKEDGKVFWQNLAGYKRQEALRPYLSSEEDRKKGKKFARYQLGDLLLHLEKKHGEDWGKVYDEAWERIDKKVEGLSKHIKLEEERRSEDAQSKAALTDWLRAKASFVIEGLKEADKDEFCRCELKLQKWYGDLRGKPFAIEAENSILDISGFSKQYNCAFIWQKDGVKKLNLYLIINYFKGGKLRFKKIKPEAFEANRFYTVINKKSGEIVPMEVNFNFDDPNLIILPLAFGKRQGREFIWNDLLSLETGSLKLANGRVIEKTLYNRRTRQDEPALFVALTFERREVLDSSNIKPMSNLIGVDRGENIPAVIALTDPEGCPLSRFKDSLGNPTHILRIGESYKEKQRTIQAKKEVEQRRAGGYSRKYASKAKNLADDMVRNTARDLLYYAVTQDAMLIFENLSRGFGRQGKRTFMAERQYTRMEDWLTAKLAYEGLPSKTYLSKTLAQYTSKTCSNCGFTITSADYDRVLEKLKKTATGWMTTINGKELKVEGQITYYNRYKRQNVVKDLSVELDRLSEESVNNDISSWTKGRSGEALSLLKKRFSHRPVQEKFVCLNCGFETHADEQAALNIARSWLFLRSQEYKKYQTNKTTGNTDKRAFVETWQSFYRKKLKEVWKPAV

SEQ ID NO: 28871 - protein, 979 aa, synthetic construct
  REGION 1..979: note = engineered CasX variant
QEIKRLNKIRRRLVKDSNTKKAGKTGPMKTLLVRVMTPDLRERLENLRKKPENIPQPISNTSRANLNKLLTDYTEMKKAILHVYWEEFQKDPVGLMSRVAQPASKKIDQNKLKPEMDEKGNLTTAGFACSQCGQPLFVYKLEQVSEKGKAYTNYFGRCNVAEHEKLILLAQLKPEKDSDEAVTYSLGKFGQRALDFYSIHVTKESTHPVKPLAQIAGNRYASGPVGKALSDACMGTIASFLSKYQDIIIEHQKVVKGNQKRLESLRELAGKENLEYPSVTLPPQPHTKEGVDAYNEVIARVRMWVNLNLWQKLKLSRDDAKPLLRLKGFPSFPLVERQANEVDWWDMVCNVKKLINEKKEDGKVFWQNLAGYKRQEALRPYLSSEEDRKKGKKFARYQLGDLLLHLEKKHGEDWGKVYDEAWERIDKKVEGLSKHIKLEEERRSEDAQSKAALTDWLRAKASFVIEGLKEADKDEFCRCELKLQKWYGDLRGKPFAIEAENSILDISGFSKQYNCAFIWQKDGVKKLNLYLIINYFKGGKLRFKKIKPEAFEANRFYTVINKKSGEIVPMEVNFNFDDPNLIILPLAFGKRQGREFIWNDLLSLETGSLKLANGRVIEKTLYNRRTRQDEPALFVALTFERREVLDSSNIKPMSNLIGVDRGENIPAVIALTDPEGCPLSRFKDSLGNPTHILRIGESYKEKQRTIQAKKEVEQRRAGGYSRKYASKAKNLADDMVRNTARDLLYYAVTQDAMLIFENLSRGFGRQGKRTFMAERQYTRMEDWLTAKLAYEGLPSKTYLSKTLAQYTSKTCSNCGFTITSADYDRVLEKLKKTATGWMTTINGKELKVEGQITYYNRYKRQNVVKDLSVELDRLSEESVNNDISSWTKGRSGEALSLLKKRFSHRPVQEKFVCLNCGFETHADEQAALNIARSWLFLRSQEYKKYQTNKTTGNTDKRAFVETWQSFYRKKLKEVWKPAV

SEQ ID NO: 28872 - protein, 979 aa, synthetic construct
  REGION 1..979: note = engineered CasX variant
QEIKRINKIRRRLVKDSNTKKAGKTGPMKTLLVRVMTPDLRERLENLRKKPENIPQPISNTSRANLNKLLTDYTEMKKAILHVYWEEFQKDPVGLMSRVAQPASKKIDQNKLKPEMDEKGNLTTAGFACSQCGQPLFVYKLEQVSEKGKAYTNYVGRCNVAEHEKLILLAQLKPEKDSDEAVTYSLGKFGQRALDFYSIHVTKESTHPVKPLAQIAGNRYASGPVGKALSDACMGTIASFLSKYQDIIIEHQKVVKGNQKRLESLRELAGKENLEYPSVTLPPQPHTKEGVDAYNEVIARVRMWVNLNLWQKLKLSRDDAKPLLRLKGFPSFPLVERQANEVDWWDMVCNVKKLINEKKEDGKVFWQNLAGYKRQEALRPYLSSEEDRKKGKKFARYQLGDLLLHLEKKHGEDWGKVYDEAWERIDKKVEGLSKHIKLEEERRSEDAQSKAALTDWLRAKASFVIEGLKEADKDEFCRCELKLQKWYGDLRGKPFAIEAENSILDISGFSKQYNCAFIWQKDGVKKLNLYLIINYFKGGKLRFKKIKPEAFEANRFYTVINKKSGEIVPMEVNFNFDDPNLIILPLAFGKRQGREFIWNDLLSLETGSLKLANGRVIEKTLYNRRTRQDEPALFVALTFERREVLDSSNIKPMSNLIGVDRGENIPAVIALTDPEGCPLSRFKDSLGNPTHILRIGESYKEKQRTIQAKKEVEQRRAGGYSRKYASKAKNLADDMVRNTARDLLYYAVTQDAMLIFENLSRGFGRQGKRTFMAERQYTRMEDWLTAKLAYEGLPSKTYLSKTLAQYTSKTCSNCGFTITSADYDRVLEKLKKTATGWMTTINGKELKVEGQITYYNRYKRQNVVKDLSVELDRLSEESVNNDISSWTKGRSGEALSLLKKRFSHRPVQEKFVCLNCGFETHADEQAALNIARSWLFLRSQEYKKYQTNKTTGNTDKRAFVETWQSFYRKKLKEVWKPAV

SEQ ID NO: 28873 - protein, 979 aa, synthetic construct
  REGION 1..979: note = engineered CasX variant
QEIKRINKIRRRLVKDSNTKKAGKTGPMKTLLVRVMTPDLRERLENLRKKPENIPQPISNTSRANLNKLLTDYTEMKKAILHVYWEEFQKDPVGLMSRVAQPASKKIDQNKLKPEMDEKGNLTTAGFACSQCGQPLFVYKLEQVSEKGKAYTNYFGRCNVAEHEKLILLAQLKPEKDSDEAVTYSLGKFGQRALDFYSIHVTKESTHPVKPLAQIAGNRYASGPVGKALSDACMGTIASFLSKYQDIIIEHQKVVKGNQKRLESLRELAGKENLEYPSVTLPPQPHTKEGVDAYNEVIARVRMWVNLNLWQKLKLSRDDAKPLLRLKGFPSFPLVERQANEVDWWDMVCNVKKLINEKKEDGKVFWQNLAGYKRQEALRPYLSSEEDRKKGKKFARYQLGDLLLHLEKKHGEDWGKVYDEAWERIDKKVEGLSKHIKLEEERRSEDAQSKAALTDWLRAKASFVIEGLKEADKDEFCRCELKLQKWYGDLRGKPFAIEAENSILDISGFSKQYNCAFIWQKDGVKKLNLYLIINYFKGGKLRFKKIKPEAFEANRFYTVINKKSGEIVPMEVNFNFDDPNLIILPLAFGKRQGREFIWNDLLSLETGSLKLANGRVIEKTLYNRRTRQDEPALFVALTFERREVLDSSNIKPMSNLIGVDRGENIPAVIALTDPEGCPLSRFKDSLGNPTHILRIGESYKEKQRTIQAKKEVEQRRAGGYSRKYASKAKNLADDMVRNTARDLLYYAVTQDAMLIFENLSRGFGRQGKRTFMAERQYTRMEDWLTAKLAYEGLASKTYLSKTLAQYTSKTCSNCGFTITSADYDRVLEKLKKTATGWMTTINGKELKVEGQITYYNRYKRQNVVKDLSVELDRLSEESVNNDISSWTKGRSGEALSLLKKRFSHRPVQEKFVCLNCGFETHADEQAALNIARSWLFLRSQEYKKYQTNKTTGNTDKRAFVETWQSFYRKKLKEVWKPAV

SEQ ID NO: 28874 - protein, 979 aa, synthetic construct
  REGION 1..979: note = engineered CasX variant
QEIKRINKIRRRLVKDSNTKKAGKTGPMKTLLVRVMTPDLRERLENLRKKPENIPQPISNTSRANLNKLLTDYTEMKKAILHVYWEEFQKDPVGLMSRVAQPASKKIDQNKLKPEMDEKGNLTTAGFACSQCGQPLFVYKLEQVSEKGKAYTNYFGRCNVAEHEKLILLAQLKPEKDSDEAVTYSLGKFGQRALDFYSIHVTKESTHPVKPLAQIAGNRYASGPVGKALSDACMGTIASFLSKYQDIIIEHQKVVKGNQKRLESLRELAGKENLEYPSVTLPPQPHTKEGVDAYNEVIARVRMWVNLNLWQKLKLSRDDAKPLLRLKGFPSFPLVERQANEVDWWDMVCNVKKLINEKKEDGKVFWQNLAGYKRQEALRPYLSSEEDRKKGKKFARYQLGDLLLHLEKKHGEDWGKVYDEAWERIDKKVEGLSKHIKLEEERRSEDAQSKAALTDWLRAKASFVIEGLKEADKDEFCRCELKLQKWYGDLRGKPFAIEAENSILDISGFSKQYNCAFIWQKDGVKKLNLYLIINYFKGGKLRFKKIKPEAFEANRFYTVINKKSGEIVPMEVNFNFDDPNLIILPLAFGKRQGREFIWNDLLSLETGSLKLANGRVIEKTLYNRRTRQDEPALFVALTFERREVLDSSNIKPMSNLIGVDRGENIPAVIALTDPEGCPLSRFKDSLGNPTHILRIGESYKEKQRTIQAKKEVEQRRAGGYSRKYASKAKNLADDMVRNTARDLLYYAVTQDAMLIFENLSRGFGRQGKRTFMAERQYTRMEDWLTAKLAYEGLPSKVYLSKTLAQYTSKTCSNCGFTITSADYDRVLEKLKKTATGWMTTINGKELKVEGQITYYNRYKRQNVVKDLSVELDRLSEESVNNDISSWTKGRSGEALSLLKKRFSHRPVQEKFVCLNCGFETHADEQAALNIARSWLFLRSQEYKKYQTNKTTGNTDKRAFVETWQSFYRKKLKEVWKPAV

SEQ ID NO: 28875 - protein, 980 aa, synthetic construct
  REGION 1..980: note = engineered CasX variant
QEIKRINKIRRRLVKDSNTKKAGKTGPMKTLLVRVMTPDLRERLENLRKKPENIPQPISNTSRANLNKLLTDYTEMKKAILHVYWEEFQKDPVGLMSRVAQPASKKIDQNKLKPEMDEKGNLTTAGFACSQCGQPLFVYKLEQVSEKGKAYTNYFGRCNVAEHEKLILLAQLKPEKDSDEAVTYSLGKFGQRALDFYSIHVTKESTHPVKPLAQIAGNRYASGPVGKALSDACMGTIASFLSKYQDIIIEHQKVVKGNQKRLESLRELAGKENLEYPSVTLPPQPHTKEGVDAYNEVIARVRMWVNLNLWQKLKLSRDDAKPLLRLKGFPSFPLVERQANEVDWWDMVCNVKKLINEKKEDGKVFWQNLAGYKRQEALRPYLSSEEDRKKGKKFARYQLGDLLLHLEKKHGEDWGKVYDEAWERIDKKVEGLSKHIKLEEERRSEDAQSKAALTDWLRAKASFVIEGLKEADKDEFCRCELKLQKWYGDLRGKPFAIEAENSILDISGFSKQYNCAFIWQKDGVKKLNLYLIINYFKGGKLRFKKIKPEAFEANRFYTVINKKSGEIVPMEVNFNFDDPNLIILPLAFGKRQGREFIWNDLLSLETGSLKLANGRVIEKTLYNRRTRQDEPALFVALTFERREVLDSSNIKPMSNLIGVDRGENIPAVIALTDPEGCPLSRFKDSLGNPTHILRIGESYKEKQRTIQAKKEVEQRRAGGYSRKYASKAKNLADDMVRNTARDLLYYAVTQDAMLIFENLSRGFGRQGKRTFMAERQYTRMEDWLTAKLAYEGPLPSKTYLSKTLAQYTSKTCSNCGFTITSADYDRVLEKLKKTATGWMTTINGKELKVEGQITYYNRYKRQNVVKDLSVELDRLSEESVNNDISSWTKGRSGEALSLLKKRFSHRPVQEKFVCLNCGFETHADEQAALNIARSWLFLRSQEYKKYQTNKTTGNTDKRAFVETWQSFYRKKLKEVWKPAV

SEQ ID NO: 28876 - protein, 980 aa, synthetic construct
  REGION 1..980: note = engineered CasX variant
QEIKRINKIRRRLVKDSNTKKAGKTGPMKTLLVRVMTPDLRERLENLRKKPENIPQPISNTSRANLNKLLTDYTEMKKAILHVYWEEFQKDPVGLMSRVAQPASKKIDQNKLKPEMDEKGNLTTAGFACSQCGQPLFVYKLEQVSEKGKAYTNYFGRCNVAEHEKLILLAQLKPEKDSDEAVTYSLGKFGQRALDFYSIHVTKESTHPVKPLAQIAGNRYASGPVGKALSDACMGTIASFLSKYQDIIIEHQKVVKGNQKRLESLRELAGKENLEYPSVTLPPQPHTKEGVDAYNEVIARVRMWVNLNLWQKLKLSRDDAKPLLRLKGFPSFPLVERQANEVDWWDMVCNVKKLINEKKEDGKVFWQNLAGYKRQEALRPYLSSEEDVRKKGKKFARYQLGDLLLHLEKKHGEDWGKVYDEAWERIDKKVEGLSKHIKLEEERRSEDAQSKAALTDWLRAKASFVIEGLKEADKDEFCRCELKLQKWYGDLRGKPFAIEAENSILDISGFSKQYNCAFIWQKDGVKKLNLYLIINYFKGGKLRFKKIKPEAFEANRFYTVINKKSGEIVPMEVNFNFDDPNLIILPLAFGKRQGREFIWNDLLSLETGSLKLANGRVIEKTLYNRRTRQDEPALFVALTFERREVLDSSNIKPMSNLIGVDRGENIPAVIALTDPEGCPLSRFKDSLGNPTHILRIGESYKEKQRTIQAKKEVEQRRAGGYSRKYASKAKNLADDMVRNTARDLLYYAVTQDAMLIFENLSRGFGRQGKRTFMAERQYTRMEDWLTAKLAYEGLPSKTYLSKTLAQYTSKTCSNCGFTITSADYDRVLEKLKKTATGWMTTINGKELKVEGQITYYNRYKRQNVVKDLSVELDRLSEESVNNDISSWTKGRSGEALSLLKKRFSHRPVQEKFVCLNCGFETHADEQAALNIARSWLFLRSQEYKKYQTNKTTGNTDKRAFVETWQSFYRKKLKEVWKPAV

SEQ ID NO: 28877 - protein, 979 aa, synthetic construct
  REGION 1..979: note = engineered CasX variant
QEIKRINKIRRRLVKDSNTKKAGKTGPMKTLLVRVMTPDLRERLENLRKKPENIPQPISNTSRANLNKLLTDYTEMKKAILHVYWEEFQKDPVGLMSRVAQPASKKIDQNKLKPEMDEKGNLTTAGFACSQCGQPLFVYKLEQVSEKGKAYTNYFGRCNVAEHEKLILLAQLKPEKDSDEAVTYSLGKFGQRALDFYSIHVTKESTHPVKPLAQIAGNRYASGPVGKALSDACMGTIASFLSKYQDIIIEHQKVVKGNQKRLESLRELAGKENLEYPSVTLPPQPHTKEGVDAYNEVIARVRMWVNLNLWQKLKLSRDDAKPLLRLKGFPSFPLVERQANEVDWWDMVCNVKKLINEKKEDGKVFWQNLAGYKRQEALRPYLSSEEDRKKGKKFARYQLGDLLLHLEKKHGEDWGKVYDEAWERIDKKVEGLSKHIKLEEERRSEDAQSKAALTDWLRAKASFVIEGLKEADKDEFCRCELKLQKWYGDLRGKPFAIEAENSILDISGFSKQYNCAFIWQKDGVKKLNLYLIINYFKGGKLRFKKIKPEAFEANRFYTVINKKSGEIVPMEVNFNFDDPNLIILPLAFGKRQGREFIWNDLLSLETGSLKLANGRVIEKTLYNRRTRQDEPALFVALTFERREVLDSSNIKPMSNLIGVDRGENIPAVIALTDPEGCPLSRFKDSLGNPTHILRIGESYKEKQRTIQAKKEVEQRRAGGYSRKYASKAKNLADDMVRNTARDLLYYAVTQDAMLIFENLSRGFGRQGKRTFMAERQYTRMEDWLTAKLAYEGLPSKTYLSKTLAQYTSKTCSNCGFTITSADYDRMLEKLKKTATGWMTTINGKELKVEGQITYYNRYKRQNVVKDLSVELDRLSEESVNNDISSWTKGRSGEALSLLKKRFSHRPVQEKFVCLNCGFETHADEQAALNIARSWLFLRSQEYKKYQTNKTTGNTDKRAFVETWQSFYRKKLKEVWKPAV

SEQ ID NO: 28878 - protein, 979 aa, synthetic construct
  REGION 1..979: note = engineered CasX variant
QEIKRINKIRRRLVKDSNTKKAGKTGPMKTLLVRVMTPDLRERLENLRKKPENIPQPISNTSRANLNKLLTDYTEMKKAILHVYWEEFQKDPVGLMSRVAQPASKKIDQNKLKPEMDEKGNLTTAGFACSQCGQPLFVYKLEQVSEKGKAYTNYFGRCNVAEHEKLILLAQLKPEKDSDEAVTYSLGKFGQRALDFYSIHVTKESTHPVKPLAQIAGNRYASGPVGKALSDACMGTIASFLSKYQDIIIEHQKVVKGNQKRLESLRELAGKENLEYPSVTLPPQPHTKEGVDAYNEVIARVRMWVNLNLWQKLKLSRDDAKPLLRLKGFPSFPLVERQANEVDWWDMVCNVKKLINEKKEDGKVFWQNLAGYKRQEALRPYLSSEEDRKKGKKFARYQLGDLLLHLEKKHGEDWGKVYDEAWERIDKKVEGLSKHIKLEEERRSEDAQSKAALTDWLRAKASFVIEGLKEADKDEFCRCELKLQKWYGDLRGKPFAIEAENSILDISGFSKQYNCAFIWQKDGVKKLNLYLIINYFKGGKLRFKKIKPEAFEANRFYTVINKKSGEIVPMEVNFNFDDPNLIILPLAFGKRQGREFIWNDLLSLETGSLKLANGRVIEKTLYNRRTRQDEPALFVALTFERREVLDSSNIKPMSNLIGVDRGENIPAVIALTDPEGCPLSRFKDSLGNPTHILRIGESYKEKQRTIQAKKEVEQRRAGGYSRKYASKAKNLADDMVRNTARDLLYYAVTQDAMLIFENLSRGFGRQGKRTFMAERQYTRMEDWLTAKLAYEGLPSKTYLSKTLAQYTSKTCSNCGFTITSADYDRVLEKLKKTATGWMTTINGKELKVEGQITYYNRYKRQNVVKDLSVELDRLSEESVNNDISSWTKGRQGEALSLLKKRFSHRPVQEKFVCLNCGFETHADEQAALNIARSWLFLRSQEYKKYQTNKTTGNTDKRAFVETWQSFYRKKLKEVWKPAV

SEQ ID NO: 28879 - protein, 979 aa, synthetic construct
  REGION 1..979: note = engineered CasX variant
QEIKRINKIRRRLVKDSNTKKAGKTGPMKTLLVRVMTPDLRERLENLRKKPENIPQPISNTSRANLNKLLTDYTEMKKAILHVYWEEFQKDPVGLMSRVAQPASKKIDQNKLKPEMDEKGNLTTAGFACSQCGQPLFVYKLEQVSEKGKAYTNYFGRCNVAEHEKLILLAQLKPEKDSDEAVTYSLGKFGQRALDFYSIHVTKESTHPVKPLAQIAGNRYASGPVGKALSDACMGTIASFLSKYQDIIIEHQKVVKGNQKRLESLRELAGKENLEYPSVTLPPQPHTKEGVDAYNEVIARVRMWVNLNLWQKLKLSRDDAKPLLRLKGFPSFPLVERQANEVDWWDMVCNVKKLINEKKEDGKVFWQNLAGYKRQEALRPYLSSEEDRKKGKKFARYQLGDLLLHLEKKHGEDWGKVYDEAWERIDKKVEGLSKHIKLEEERRSEDAQSKAALTDWLRAKASFVIEGLKEADKDEFCRCELKLQKWYGDLRGKPFAIEAENSILDISGFSKQYNCAFIWQKDGVKKLNLYLIINYFKGGKLRFKKIKPEAFEANRFYTVINKKSGEIVPMEVNFNFDDPNLIILPLAFGKRQGREFIWNDLLSLETGSLKLANGRVIEKTLYNRRTRQDEPALFVALTFERREVLDSSNIKPMSNLIGVDRGENIPAVIALTDPEGCPLSRFKDSLGNPTHILRIGESYKEKQRTIQAKKEVEQRRAGGYSRKYASKAKNLADDMVRNTARDLLYYAVTQDAMLIFENLSRGFGRQGKRTFMAERQYTRMEDWLTAKLAYEGLPSKTYLSKTLAQYTSKTCSNCGFTITSADYDRVLEKLKKTATGWMTTINGKELKVEGQITYYNRYKRQNVVKDLSVELDRLSEESVNNDISSWTKGRSGEALSLLKKRFSHRPVQEKFVCLNCEFETHADEQAALNIARSWLFLRSQEYKKYQTNKTTGNTDKRAFVETWQSFYRKKLKEVWKPAV

SEQ ID NO: 28880 - protein, 980 aa, synthetic construct
  REGION 1..980: note = engineered CasX variant
QEIKRINKIRRRLVKDSNTKKAGKTGPMKTLLVRVMTPDLRERLENLRKKPENIPQPISNTSRANLNKLLTDYTEMKKAILHVYWEEFQKDPVGLMSRVAQPASKKIDQNKLKPEMDEKGNLTTAGFACSQCGQPLFVYKLEQVSEKGKAYTNYFGRCNVAEHEKLILLAQLKPEKDSDEAVTYSLGKFGQRALDFYSIHVTKESTHPVKPLAQIAGNRYASGPVGKALSDACMGTIASFLSKYQDIIIEHQKVVKGNQKRLESLRELAGKENLEYPSVTLPPQPHTKEGVDAYNEVIARVRMWVNLNLWQKLKLSRDDAKPLLRLKGFPSFPLVERQANEVDWWDMVCNVKKLINEKKEDGKVFWQNLAGYKRQEALRPYLSSEEDRKKGKKFARYQLGDLLLHLEKKHGEDWGKVYDEAWERIDKKVEGLSKHIKLEEERRSEDAQSKAALTDWLRAKASFVIEGLKEADKDEFCRCELKLQKWYGDLRGKPFAIEAENSILDISGFSKQYNCAFIWQKDGVKKLNLYLIINYFKGGKLRFKKIKPEAFEANRFYTVINKKSGEIVPMEVNFNFDDPNLIILPLAFGKRQGREFIWNDLLSLETGSLKLANGRVIEKTLYNRRTRQDEPALFVALTFERREVLDSSNIKPMSNLIGVDRGENIPAVIALTDPEGCPLSRFKDSLGNPTHILRIGESYKEKQRTIQAKKEVEQRRAGGYSRKYASKAKNLADDMVRNTARDLLYYAVTQDAMLIFENLSRGFGRQGKRTFMAERQYTRMEDWLTAKLAYEGLPSKTYLSKTLAQYTSKTCSNCGFTITSADYDRVLEKLKKTATGWMTTINGKELKVEGQITYYNRYKRQNVVKDLSVELDRLSEESVNNDISSWTKGRSGEALSLLKKRFSHRPVQEKFVCLNCGFETHADEQAALNIARSWLFLRSQEYKKYQTNKTSTGNTDKRAFVETWQSFYRKKLKEVWKPAV

SEQ ID NO: 28881 - protein, 980 aa, synthetic construct
  REGION 1..980: note = engineered CasX variant
QEIKRINKIRRRLVKDSNTKKAGKTGPMKTLLVRVMTPDLRERLENLRKKPENIPQPISNTSRANLNKLLTDYTEMKKAILHVYWEEFQKDPVGLMSRVAQPASKKIDQNKLKPEMDEKGNLTTAGFACSQCGQPLFVYKLEQVSEKGKAYTNYFGRCNVAEHEKLILLAQLKPEKDSDEAVTYSLGKFGQRALDFYSIHVTKESTHPVKPLAQIAGNRYASGPVGKALSDACMGTIASFLSKYQDIIIEHQKVVKGNQKRLESLRELAGKENLEYPSVTLPPQPHTKEGVDAYNEVIARVRMWVNLNLWQKLKLSRDDAKPLLRLKGFPSFPLVERQANEVDWWDMVCNVKKLINEKKEDGKVFWQNLAGYKRQEALRPYLSSEEDRKKGKKFARYQLGDLLLHLEKKHGEDWGKVYDEAWERIDKKVEGLSKHIKLEEERRSEDAQSKAALTDWLRAKASFVIEGLKEADKDEFCRCELKLQKWYGDLRGKPFAIEAENSILDISGFSKQYNCAFIWQKDGVKKLNLYLIINYFKGGKLRFKKIKPEAFEANRFYTVINKKSGEIVPMEVNFNFDDPNLIILPLAFGKRQGREFIWNDLLSLETGSLKLANGRVIEKTLYNRRTRQDEPALFVALTFERREVLDSSNIKPMSNLIGVDRGENIPAVIALTDPEGCPLSRFKDSLGNPTHILRIGESYKEKQRTIQAKKEVEQRRAGGYSRKYASKAKNLADDMVRNTARDLLYYAVTQDAMLIFENLSRGFGRQGKRTFMAERQYTRMEDWLTAKLAYEGLPSKTYLSKTLAQYTSKTCSNCGFTITSADYDRVLEKLKKTATGWMTTINGKELKVEGQITYYNRYKRQNVVKDLSVELDRLSEESVNNDISSWTKGRSGEALSLLKKRFSHRPVQEKFVCLNCGFETHADEQAALNIARSWLFLRSQEYKKYQTNKTTGKNTDKRAFVETWQSFYRKKLKEVWKPAV

SEQ ID NO: 28882 - protein, 979 aa, synthetic construct
  REGION 1..979: note = engineered CasX variant
QEIKRINKIRRRLVKDSNTKKAGKTGPMKTLLVRVMTPDLRERLENLRKKPENIPQPISNTSRANLNKLLTDYTEMKKAILHVYWEEFQKDPVGLMSRVAQPASKKIDQNKLKPEMDEKGNLTTAGFACSQCGQPLFVYKLEQVSEKGKAYTNYFGRCNVAEHEKLILLAQLKPEKDSDEAVTYSLGKFGQRALDFYSIHVTKESTHPVKPLAQIAGNRYASGPVGKALSDACMGTIASFLSKYQDIIIEHQKVVKGNQKRLESLRELAGKENLEYPSVTLPPQPHTKEGVDAYNEVIARVRMWVNLNLWQKLKLSRDDAKPLLRLKKFPSFPLVERQANEVDWWDMVCNVKKLINEKKEDGKVFWQNLAGYKRQEALRPYLSSEEDRKKGKKFARYQLGDLLLHLEKKHGEDWGKVYDEAWERIDKKVEGLSKHIKLEEERRSEDAQSKAALTDWLRAKASFVIEGLKEADKDEFCRCELKLQKWYGDLRGKPFAIEAENSILDISGFSKQYNCAFIWQKDGVKKLNLYLIINYFKGGKLRFKKIKPEAFEANRFYTVINKKSGEIVPMEVNFNFDDPNLIILPLAFGKRQGREFIWNDLLSLETGSLKLANGRVIEKTLYNRRTRQDEPALFVALTFERREVLDSSNIKPMSNLIGVDRGENIPAVIALTDPEGCPLSRFKDSLGNPTHILRIGESYKEKQRTIQAKKEVEQRRAGGYSRKYASKAKNLADDMVRNTARDLLYYAVTQDAMLIFENLSRGFGRQGKRTFMAERQYTRMEDWLTAKLAYEGLPSKTYLSKTLAQYTSKTCSNCGFTITSADYDRVLEKLKKTATGWMTTINGKELKVEGQITYYNRYKRQNVVKDLSVELDRLSEESVNNDISSWTKGRSGEALSLLKKRFSHRPVQEKFVCLNCGFETHADEQAALNIARSWLFLRSQEYKKYQTNKTTGNTDKRAFVETWQSFYRKKLKEVWKPAV

SEQ ID NO: 28883 - protein, 979 aa, synthetic construct
  REGION 1..979: note = engineered CasX variant
QEIKRINKIRRRLVKDSNTKKAGKTGPMKTLLVRVMTPDLRERLENLRKKPENIPQPISNTSRANLNKLLTDYTEMKKAILHVYWEEFQKDPVGLMSRVAQPASKKIDQNKLKPEMDEKGNLTTAGFACSQCGQPLFVYKLEQVSEKGKAYTNYFGRCNVAEHEKLILLAQLKPEKDSDEAVTYSLGKFGQRALDFYSIHVTKESTHPVKPLAQIAGNRYASGPVGKALSDACMGTIASFLSKYQDIIIEHQKVVKGNQKRLESLRELAGKENLEYPSVTLPPQPHTKEGVDAYNEVIARVRMWVNLNLWQKLKLSRDDAKPLLRLKGFPSFPLVERQANEVDWWDMVCNVKKLINEKKEDGKVFWQNLAGYKRQEALRPYLSSEEDRKKGKKFARYQLGDLLLHLEKKHGEDWGKVYDEAWERIDKKVEGLSKHIKLEEERRSEDAQSKAALTDWLRAKASFVIEGLKEADKDEFCRCELKLQKWYGDLRGKPFAIEAENSILDISGFSKQYNCAFIWQKDGVKKLNLYLIINYFKGGKLRFKKIKPEAFEANRFYTVINKKSGEIVPMEVNFNFDDPNLIILPLAFGKRQGREFIWNDLLSLETGSLKLANGRVIEKTLYNRRTRQDEPALFVALTFERREVLDSSNIKPMSNLIGVDRGENIPAVIALTDPEGCPLSRFKDSLGNPTHILRIGERYKEKQRTIQAKKEVEQRRAGGYSRKYASKAKNLADDMVRNTARDLLYYAVTQDAMLIFENLSRGFGRQGKRTFMAERQYTRMEDWLTAKLAYEGLPSKTYLSKTLAQYTSKTCSNCGFTITSADYDRVLEKLKKTATGWMTTINGKELKVEGQITYYNRYKRQNVVKDLSVELDRLSEESVNNDISSWTKGRSGEALSLLKKRFSHRPVQEKFVCLNCGFETHADEQAALNIARSWLFLRSQEYKKYQTNKTTGNTDKRAFVETWQSFYRKKLKEVWKPAV

SEQ ID NO: 28884 - protein, 979 aa, synthetic construct
  REGION 1..979: note = engineered CasX variant
QEIKRINKIRRRLVKDSNTKKAGKTGPMKTLLVRVMTPDLRERLENLRKKPENIPQPISNTSRANLNKLLTDYTEMKKAILHVYWEEFQKDPVGLMSRVAQPASKKIDQNKLKPEMDEKGNLTTAGFACSQCGQPLFVYKLEQVSEKGKAYTNYFGRCNVAEHEKLILLAQLKPEKDSDEAVTYSLGKFGQRALDFYSIHVTKESTHPVKPLAQIAGNRYASGPVGKALSDACMGTIASFLSKYQDIIIEHQKVVKGNQKRLESLRELAGKENLEYPSVTLPPQPHTKEGVDAYNEVIARVRMWVNLNLWQKLKLSRDDAKPLLRLKGFPSFPLVERQANEVDWWDMVCNVKKLINEKKEDGKVFWQNLAGYKRQEALRPYLSSEEDRKKGKKFARYQLGDLLLHLEKKHGEDWGKVYDEAWERIDKKVEGLSKHIKLEEERRSEDAQSKAALTDWLRAKASFVIEGLKEADKDEFCRCELKLQKWYGDLRGKPFAIEAENSILDISGFSKQYNCAFIWQKDGVKKLNLYLIINYFKGGKLRFKKIKPEAFEANRFYTVINKKSGEIVPMEVNFNFDDPNLIILPLAFGKRQGREFIWNDLLSLETGSLQLANGRVIEKTLYNRRTRQDEPALFVALTFERREVLDSSNIKPMSNLIGVDRGENIPAVIALTDPEGCPLSRFKDSLGNPTHILRIGESYKEKQRTIQAKKEVEQRRAGGYSRKYASKAKNLADDMVRNTARDLLYYAVTQDAMLIFENLSRGFGRQGKRTFMAERQYTRMEDWLTAKLAYEGLPSKTYLSKTLAQYTSKTCSNCGFTITSADYDRVLEKLKKTATGWMTTINGKELKVEGQITYYNRYKRQNVVKDLSVELDRLSEESVNNDISSWTKGRSGEALSLLKKRFSHRPVQEKFVCLNCGFETHADEQAALNIARSWLFLRSQEYKKYQTNKTTGNTDKRAFVETWQSFYRKKLKEVWKPAV

SEQ ID NO: 28885 - protein, 978 aa, synthetic construct
  REGION 1..978: note = engineered CasX variant
QEIKRINKIRRRLVKDSNTKKAGKTGPMKTLLVRVMTPDLRERLENLRKKPENIPQPISNTSRANLNKLLTDYTEMKKAILHVYWEEFQKDPVGLMSRVAQPASKKIDQNKLKPEMDEKGNLTTAGFACSQCGQPLFVYKLEQVSEKGKAYTNYFGRCNVAEHEKLILLAQLKPEKDSDEAVTYSLGKFGQRALDFYSIHVTKESTHPVKPLAQIAGNRYASGPVGKALSDACMGTIASFLSKYQDIIIEHQKVVKGNQKRLESLRELAGKENLEYPSVTLPPQPHTKEGVDAYNEVIARVRMWVNLNLWQKLKLSRDDAKPLLRLKGFPSFPLVERQANEVDWWDMVCNVKKLINEKKEDGKVFWQNLAGYKRQEALRPYLSSEEDRKKGKKFARYQLGDLLLHLEKKHGEDWGKVYDEAWERIDKKVEGLSKHIKLEEERRSEDAQSKAALTDWLRAKASFVIEGLKEADKDEFCRCELKLQKWYGDLRGKPFAIEAENSILDISGFSKQYNCAFIWQKDGVKKLNLYLIINYFKGGKLRFKKIKPEAFEANRFYTVINKKSGEIVPMEVNFNFDDPNLIILPLAFGKRQGREFIWNDLLSLETGSLKLANGRVIEKTLYNRRTRQDEPALFVALTFERREVLDSSNIKPMNLIGVDRGENIPAVIALTDPEGCPLSRFKDSLGNPTHILRIRESYKEKQRTIQAKKEVEQRRAGGYSRKYASKAKNLADDMVRNTARDLLYYAVTQDAMLIFENLSRGFGRQGKRTFSAERQYTRMEDWLTAKLAYEGLPSKTYLSKTLAQYTSKTCSNCGFTITSADYDRVLEKLKKTATGWMTTINGKELKVEGQITYYNRYKRQNVVKDLSVELDRLSEESVNNDISSWTKGRSGEALSLLKKRFSHRPVQEKFVCLNCGFETHADEQAALNIARSWLFLRSQEYKKYQTNKTTGNTDKRAFVETWQSFYRKKLKEVWKPAV

SEQ ID NO: 28886 - protein, 978 aa, synthetic construct
  REGION 1..978: note = engineered CasX variant
QEIKRINKIRRRLVKDSNTKKAGKTGPMKTLLVRVMTPDLRERLENLRKKPENIPQPISNTSRANLNKLLTDYTEMKKAILHVYWEEFQKDPVGLMSRVAQPASKKIDQNKLKPEMDEKGNLTTAGFACSQCGQPLFVYKLEQVSEKGKAYTNYFGRCNVAEHEKLILLAQLKPEKDSDEAVTYSLGKFGQRALDFYSIHVTKESTHPVKPLAQIAGNRYASGPVGKALSDACMGTIASFLSKYQDIIIEHQKVVKGNQKRLESLRELAGKENLEYPSVTLPPQPHTKEGVDAYNEVIARVRMWVNLNLWQKLKLSRDDAKPLLRLKGFPSFPLVERQANEVDWWDMVCNVKKLINEKKEDGKVFWQNLAGYKRQEALRPYLSSEEDRKKGKKFARYQLGDLLLHLEKKHGEDWGKVYDEAWERIDKKVEGLSKHIKLEEERRSEDAQSKAALTDWLRAKASFVIEGLKEADKDEFCRCELKLQKWYGDLRGKPFAIEAENSILDISGFSKQYNCAFIWQKDGVKKLNLYLIINYFKGGKLRFKKIKPEAFEANRFYTVINKKSGEIVPMEVNFNFDDPNLIILPLAFGKRQGREFIWNDLLSLETGSLKLANGRVIEKTLYNRRTRQDEPALFVALTFERREVLDSSNIKPMNLIGVDRGENIPAVIALTDPEGCPLSRFKDSLGNPTHILRIRESYKEKQRTIQAKKEVEQRRAGGYSRKYASKAKNLADDMVRNTARDLLYYAVTQDAMLIFENLSRGFGRQGKRTFMAERQYTRMEDWLTAKLAYEGLPSKTYLSKTLAQYTSKTCSNCGFTITSADYDRVLEKLKKTATGWMTTINGKELKVEGQITYYNRYKRQNVVKDLSVELDRLSEESVNNDISSWDKGRSGEALSLLKKRFSHRPVQEKFVCLNCGFETHADEQAALNIARSWLFLRSQEYKKYQTNKTTGNTDKRAFVETWQSFYRKKLKEVWKPAV

SEQ ID NO: 28887 - protein, 978 aa, synthetic construct
  REGION 1..978: note = engineered CasX variant
QEIKRINKIRRRLVKDSNTKKAGKTGPMKTLLVRVMTPDLRERLENLRKKPENIPQPISNTSRANLNKLLTDYTEMKKAILHVYWEEFQVDPVGLMSRVAQPASKKIDQNKLKPEMDEKGNLTTAGFACSQCGQPLFVYKLEQVSEKGKAYTNYFGRCNVAEHEKLILLAQLKPEKDSDEAVTYSLGKFGQRALDFYSIHVTKESTHPVKPLAQIAGNRYASGPVGKALSDACMGTIASFLSKYQDIIIEHQKVVKGNQKRLESLRELAGKENLEYPSVTLPPQPHTKEGVDAYNEVIARVRMWVNLNLWQKLKLSRDDAKPLLRLKGFPSFPLVERQANEVDWWDMVCNVKKLINEKKEDGKVFWQNLAGYKRQEALRPYLSSEEDRKKGKKFARYQLGDLLLHLEKKHGEDWGKVYDEAWERIDKKVEGLSKHIKLEEERRSEDAQSKAALTDWLRAKASFVIEGLKEADKDEFCRCELKLQKWYGDLRGKPFAIEAENSILDISGFSKQYNCAFIWQKDGVKKLNLYLIINYFKGGKLRFKKIKPEAFEANRFYTVINKKSGEIVPMEVNFNFDDPNLIILPLAFGKRQGREFIWNDLLSLETGSLKLANGRVIEKTLYNRRTRQDEPALFVALTFERREVLDSSNIKPMNLIGVDRGENIPAVIALTDPEGCPLSRFKDSLGNPTHILRIRESYKEKQRTIQAKKEVEQRRAGGYSRKYASKAKNLADDMVRNTARDLLYYAVTQDAMLIFENLSRGFGRQGKRTFMAERQYTRMEDWLTAKLAYEGLPSKTYLSKTLAQYTSKTCSNCGFTITSADYDRVLEKLKKTATGWMTTINGKELKVEGQITYYNRYKRQNVVKDLSVELDRLSEESVNNDISSWTKGRSGEALSLLKKRFSHRPVQEKFVCLNCGFETHADEQAALNIARSWLFLRSQEYKKYQTNKTTGNTDKRAFVETWQSFYRKKLKEVWKPAV

SEQ ID NO: 28888 - protein, 978 aa, synthetic construct
  REGION 1..978: note = engineered CasX variant
QEIKRLNKIRRRLVKDSNTKKAGKTGPMKTLLVRVMTPDLRERLENLRKKPENIPQPISNTSRANLNKLLTDYTEMKKAILHVYWEEFQKDPVGLMSRVAQPASKKIDQNKLKPEMDEKGNLTTAGFACSQCGQPLFVYKLEQVSEKGKAYTNYFGRCNVAEHEKLILLAQLKPEKDSDEAVTYSLGKFGQRALDFYSIHVTKESTHPVKPLAQIAGNRYASGPVGKALSDACMGTIASFLSKYQDIIIEHQKVVKGNQKRLESLRELAGKENLEYPSVTLPPQPHTKEGVDAYNEVIARVRMWVNLNLWQKLKLSRDDAKPLLRLKGFPSFPLVERQANEVDWWDMVCNVKKLINEKKEDGKVFWQNLAGYKRQEALRPYLSSEEDRKKGKKFARYQLGDLLLHLEKKHGEDWGKVYDEAWERIDKKVEGLSKHIKLEEERRSEDAQSKAALTDWLRAKASFVIEGLKEADKDEFCRCELKLQKWYGDLRGKPFAIEAENSILDISGFSKQYNCAFIWQKDGVKKLNLYLIINYFKGGKLRFKKIKPEAFEANRFYTVINKKSGEIVPMEVNFNFDDPNLIILPLAFGKRQGREFIWNDLLSLETGSLKLANGRVIEKTLYNRRTRQDEPALFVALTFERREVLDSSNIKPMNLIGVDRGENIPAVIALTDPEGCPLSRFKDSLGNPTHILRIRESYKEKQRTIQAKKEVEQRRAGGYSRKYASKAKNLADDMVRNTARDLLYYAVTQDAMLIFENLSRGFGRQGKRTFMAERQYTRMEDWLTAKLAYEGLPSKTYLSKTLAQYTSKTCSNCGFTITSADYDRVLEKLKKTATGWMTTINGKELKVEGQITYYNRYKRQNVVKDLSVELDRLSEESVNNDISSWTKGRSGEALSLLKKRFSHRPVQEKFVCLNCGFETHADEQAALNIARSWLFLRSQEYKKYQTNKTTGNTDKRAFVETWQSFYRKKLKEVWKPAV

SEQ ID NO: 28889 - protein, 978 aa, synthetic construct
  REGION 1..978: note = engineered CasX variant
QEIKRINKIRRRLVKDSNTKKAGKTGPMKTLLVRVMTPDLRERLENLRKKPENIPQPISNTSRANLNKLLTDYTEMKKAILHVYWEEFQKDPVGLMSRVAQPASKKIDQNKLKPEMDEKGNLTTAGFACSQCGQPLFVYKLEQVSEKGKAYTNYVGRCNVAEHEKLILLAQLKPEKDSDEAVTYSLGKFGQRALDFYSIHVTKESTHPVKPLAQIAGNRYASGPVGKALSDACMGTIASFLSKYQDIIIEHQKVVKGNQKRLESLRELAGKENLEYPSVTLPPQPHTKEGVDAYNEVIARVRMWVNLNLWQKLKLSRDDAKPLLRLKGFPSFPLVERQANEVDWWDMVCNVKKLINEKKEDGKVFWQNLAGYKRQEALRPYLSSEEDRKKGKKFARYQLGDLLLHLEKKHGEDWGKVYDEAWERIDKKVEGLSKHIKLEEERRSEDAQSKAALTDWLRAKASFVIEGLKEADKDEFCRCELKLQKWYGDLRGKPFAIEAENSILDISGFSKQYNCAFIWQKDGVKKLNLYLIINYFKGGKLRFKKIKPEAFEANRFYTVINKKSGEIVPMEVNFNFDDPNLIILPLAFGKRQGREFIWNDLLSLETGSLKLANGRVIEKTLYNRRTRQDEPALFVALTFERREVLDSSNIKPMNLIGVDRGENIPAVIALTDPEGCPLSRFKDSLGNPTHILRIRESYKEKQRTIQAKKEVEQRRAGGYSRKYASKAKNLADDMVRNTARDLLYYAVTQDAMLIFENLSRGFGRQGKRTFMAERQYTRMEDWLTAKLAYEGLPSKTYLSKTLAQYTSKTCSNCGFTITSADYDRVLEKLKKTATGWMTTINGKELKVEGQITYYNRYKRQNVVKDLSVELDRLSEESVNNDISSWTKGRSGEALSLLKKRFSHRPVQEKFVCLNCGFETHADEQAALNIARSWLFLRSQEYKKYQTNKTTGNTDKRAFVETWQSFYRKKLKEVWKPAV

SEQ ID NO: 28890 - protein, 978 aa, synthetic construct
  REGION 1..978: note = engineered CasX variant
QEIKRINKIRRRLVKDSNTKKAGKTGPMKTLLVRVMTPDLRERLENLRKKPENIPQPISNTSRANLNKLLTDYTEMKKAILHVYWEEFQKDPVGLMSRVAQPASKKIDQNKLKPEMDEKGNLTTAGFACSQCGQPLFVYKLEQVSEKGKAYTNYFGRCNVAEHEKLILLAQLKPEKDSDEAVTYSLGKFGQRALDFYSIHVTKESTHPVKPLAQIAGNRYASGPVGKALSDACMGTIASFLSKYQDIIIEHQKVVKGNQKRLESLRELAGKENLEYPSVTLPPQPHTKEGVDAYNEVIARVRMWVNLNLWQKLKLSRDDAKPLLRLKGFPSFPLVERQANEVDWWDMVCNVKKLINEKKEDGKVFWQNLAGYKRQEALRPYLSSEEDRKKGKKFARYQLGDLLLHLEKKHGEDWGKVYDEAWERIDKKVEGLSKHIKLEEERRSEDAQSKAALTDWLRAKASFVIEGLKEADKDEFCRCELKLQKWYGDLRGKPFAIEAENSILDISGFSKQYNCAFIWQKDGVKKLNLYLIINYFKGGKLRFKKIKPEAFEANRFYTVINKKSGEIVPMEVNFNFDDPNLIILPLAFGKRQGREFIWNDLLSLETGSLKLANGRVIEKTLYNRRTRQDEPALFVALTFERREVLDSSNIKPMNLIGVDRGENIPAVIALTDPEGCPLSRFKDSLGNPTHILRIRESYKEKQRTIQAKKEVEQRRAGGYSRKYASKAKNLADDMVRNTARDLLYYAVTQDAMLIFENLSRGFGRQGKRTFMAERQYTRMEDWLTAKLAYEGLASKTYLSKTLAQYTSKTCSNCGFTITSADYDRVLEKLKKTATGWMTTINGKELKVEGQITYYNRYKRQNVVKDLSVELDRLSEESVNNDISSWTKGRSGEALSLLKKRFSHRPVQEKFVCLNCGFETHADEQAALNIARSWLFLRSQEYKKYQTNKTTGNTDKRAFVETWQSFYRKKLKEVWKPAV

SEQ ID NO: 28891 - protein, 978 aa, synthetic construct
  REGION 1..978: note = engineered CasX variant
QEIKRINKIRRRLVKDSNTKKAGKTGPMKTLLVRVMTPDLRERLENLRKKPENIPQPISNTSRANLNKLLTDYTEMKKAILHVYWEEFQKDPVGLMSRVAQPASKKIDQNKLKPEMDEKGNLTTAGFACSQCGQPLFVYKLEQVSEKGKAYTNYFGRCNVAEHEKLILLAQLKPEKDSDEAVTYSLGKFGQRALDFYSIHVTKESTHPVKPLAQIAGNRYASGPVGKALSDACMGTIASFLSKYQDIIIEHQKVVKGNQKRLESLRELAGKENLEYPSVTLPPQPHTKEGVDAYNEVIARVRMWVNLNLWQKLKLSRDDAKPLLRLKGFPSFPLVERQANEVDWWDMVCNVKKLINEKKEDGKVFWQNLAGYKRQEALRPYLSSEEDRKKGKKFARYQLGDLLLHLEKKHGEDWGKVYDEAWERIDKKVEGLSKHIKLEEERRSEDAQSKAALTDWLRAKASFVIEGLKEADKDEFCRCELKLQKWYGDLRGKPFAIEAENSILDISGFSKQYNCAFIWQKDGVKKLNLYLIINYFKGGKLRFKKIKPEAFEANRFYTVINKKSGEIVPMEVNFNFDDPNLIILPLAFGKRQGREFIWNDLLSLETGSLKLANGRVIEKTLYNRRTRQDEPALFVALTFERREVLDSSNIKPMNLIGVDRGENIPAVIALTDPEGCPLSRFKDSLGNPTHILRIRESYKEKQRTIQAKKEVEQRRAGGYSRKYASKAKNLADDMVRNTARDLLYYAVTQDAMLIFENLSRGFGRQGKRTFMAERQYTRMEDWLTAKLAYEGLPSKVYLSKTLAQYTSKTCSNCGFTITSADYDRVLEKLKKTATGWMTTINGKELKVEGQITYYNRYKRQNVVKDLSVELDRLSEESVNNDISSWTKGRSGEALSLLKKRFSHRPVQEKFVCLNCGFETHADEQAALNIARSWLFLRSQEYKKYQTNKTTGNTDKRAFVETWQSFYRKKLKEVWKPAV

SEQ ID NO: 28892 - protein, 979 aa, synthetic construct
  REGION 1..979: note = engineered CasX variant
QEIKRINKIRRRLVKDSNTKKAGKTGPMKTLLVRVMTPDLRERLENLRKKPENIPQPISNTSRANLNKLLTDYTEMKKAILHVYWEEFQKDPVGLMSRVAQPASKKIDQNKLKPEMDEKGNLTTAGFACSQCGQPLFVYKLEQVSEKGKAYTNYFGRCNVAEHEKLILLAQLKPEKDSDEAVTYSLGKFGQRALDFYSIHVTKESTHPVKPLAQIAGNRYASGPVGKALSDACMGTIASFLSKYQDIIIEHQKVVKGNQKRLESLRELAGKENLEYPSVTLPPQPHTKEGVDAYNEVIARVRMWVNLNLWQKLKLSRDDAKPLLRLKGFPSFPLVERQANEVDWWDMVCNVKKLINEKKEDGKVFWQNLAGYKRQEALRPYLSSEEDRKKGKKFARYQLGDLLLHLEKKHGEDWGKVYDEAWERIDKKVEGLSKHIKLEEERRSEDAQSKAALTDWLRAKASFVIEGLKEADKDEFCRCELKLQKWYGDLRGKPFAIEAENSILDISGFSKQYNCAFIWQKDGVKKLNLYLIINYFKGGKLRFKKIKPEAFEANRFYTVINKKSGEIVPMEVNFNFDDPNLIILPLAFGKRQGREFIWNDLLSLETGSLKLANGRVIEKTLYNRRTRQDEPALFVALTFERREVLDSSNIKPMNLIGVDRGENIPAVIALTDPEGCPLSRFKDSLGNPTHILRIRESYKEKQRTIQAKKEVEQRRAGGYSRKYASKAKNLADDMVRNTARDLLYYAVTQDAMLIFENLSRGFGRQGKRTFMAERQYTRMEDWLTAKLAYEGPLPSKTYLSKTLAQYTSKTCSNCGFTITSADYDRVLEKLKKTATGWMTTINGKELKVEGQITYYNRYKRQNVVKDLSVELDRLSEESVNNDISSWTKGRSGEALSLLKKRFSHRPVQEKFVCLNCGFETHADEQAALNIARSWLFLRSQEYKKYQTNKTTGNTDKRAFVETWQSFYRKKLKEVWKPAV
